United States Patent Application Publication US 2014/0004565 A1 - sequence listing, part 34

SEQ ID NO: 753322 - RNA, 19 nt, Artificial Sequence
  Description of Artificial Sequence: Synthetic oligonucleotide
guaaagcugagccgcacgg

SEQ ID NO: 753323 - RNA, 19 nt, Artificial Sequence
  Description of Artificial Sequence: Synthetic oligonucleotide
uaggccagucguaaugagg

SEQ ID NO: 753324 - RNA, 19 nt, Artificial Sequence
  Description of Artificial Sequence: Synthetic oligonucleotide
augcaucgaagcugaaacc

SEQ ID NO: 753325 - RNA, 19 nt, Artificial Sequence
  Description of Artificial Sequence: Synthetic oligonucleotide
agaaacaccccguagguua

SEQ ID NO: 753326 - RNA, 19 nt, Artificial Sequence
  Description of Artificial Sequence: Synthetic oligonucleotide
cagccaaaugacuuuauug

SEQ ID NO: 753327 - RNA, 19 nt, Artificial Sequence
  Description of Artificial Sequence: Synthetic oligonucleotide
aaaucaggagugugcaggu

SEQ ID NO: 753328 - RNA, 19 nt, Artificial Sequence
  Description of Artificial Sequence: Synthetic oligonucleotide
auauuaaggaaaccaccca

SEQ ID NO: 753329 - RNA, 19 nt, Artificial Sequence
  Description of Artificial Sequence: Synthetic oligonucleotide
agaucgcacaccuugcuug

SEQ ID NO: 753330 - RNA, 19 nt, Artificial Sequence
  Description of Artificial Sequence: Synthetic oligonucleotide
accggugcgauccugagca

SEQ ID NO: 753331 - RNA, 19 nt, Artificial Sequence
  Description of Artificial Sequence: Synthetic oligonucleotide
agcuagagaaggaauugcc

SEQ ID NO: 753332 - RNA, 19 nt, Artificial Sequence
  Description of Artificial Sequence: Synthetic oligonucleotide
aagugaacaccaagugacc

SEQ ID NO: 753333 - RNA, 19 nt, Artificial Sequence
  Description of Artificial Sequence: Synthetic oligonucleotide
aacagaucgcacaccuugc

SEQ ID NO: 753334 - RNA, 19 nt, Artificial Sequence
  Description of Artificial Sequence: Synthetic oligonucleotide
ucgaguucccuccaacuug

SEQ ID NO: 753335 - RNA, 19 nt, Artificial Sequence
  Description of Artificial Sequence: Synthetic oligonucleotide
acaauggacuccuccuucg

SEQ ID NO: 753336 - RNA, 19 nt, Artificial Sequence
  Description of Artificial Sequence: Synthetic oligonucleotide
acgucaugacuccauuggc

SEQ ID NO: 753337 - RNA, 19 nt, Artificial Sequence
  Description of Artificial Sequence: Synthetic oligonucleotide
caacagaucgcacaccuug

SEQ ID NO: 753338 - RNA, 19 nt, Artificial Sequence
  Description of Artificial Sequence: Synthetic oligonucleotide
aaguaugacuccucugggu

SEQ ID NO: 753339 - RNA, 19 nt, Artificial Sequence
  Description of Artificial Sequence: Synthetic oligonucleotide
agugaacaccaagugaccg

SEQ ID NO: 753340 - RNA, 19 nt, Artificial Sequence
  Description of Artificial Sequence: Synthetic oligonucleotide
ugcaucgaagcugaaacca

SEQ ID NO: 753341 - RNA, 19 nt, Artificial Sequence
  Description of Artificial Sequence: Synthetic oligonucleotide
uacagagaaauggggaugc

SEQ ID NO: 753342 - RNA, 19 nt, Artificial Sequence
  Description of Artificial Sequence: Synthetic oligonucleotide
aacaccccguagguuaugc

SEQ ID NO: 753343 - RNA, 19 nt, Artificial Sequence
  Description of Artificial Sequence: Synthetic oligonucleotide
uuguuaguaggcaccgagc

SEQ ID NO: 753344 - RNA, 19 nt, Artificial Sequence
  Description of Artificial Sequence: Synthetic oligonucleotide
gaagcauucgaguucccuc

SEQ ID NO: 753345 - RNA, 19 nt, Artificial Sequence
  Description of Artificial Sequence: Synthetic oligonucleotide
cucguaacuccauaggguc

SEQ ID NO: 753346 - RNA, 19 nt, Artificial Sequence
  Description of Artificial Sequence: Synthetic oligonucleotide
ugccucguaacuccauagg

SEQ ID NO: 753347 - RNA, 19 nt, Artificial Sequence
  Description of Artificial Sequence: Synthetic oligonucleotide
ggugacuccugcucgaugg

SEQ ID NO: 753348 - RNA, 19 nt, Artificial Sequence
  Description of Artificial Sequence: Synthetic oligonucleotide
auaaucgccauuuccccga

SEQ ID NO: 753349 - RNA, 19 nt, Artificial Sequence
  Description of Artificial Sequence: Synthetic oligonucleotide
agcaacagaucgcacaccu

SEQ ID NO: 753350 - RNA, 19 nt, Artificial Sequence
  Description of Artificial Sequence: Synthetic oligonucleotide
uugccaguagacuugacuu

SEQ ID NO: 753351 - RNA, 19 nt, Artificial Sequence
  Description of Artificial Sequence: Synthetic oligonucleotide
auuuccccgaaucugaguu

SEQ ID NO: 753352 - RNA, 19 nt, Artificial Sequence
  Description of Artificial Sequence: Synthetic oligonucleotide
uuccuuuuauccacggccu

SEQ ID NO: 753353 - RNA, 19 nt, Artificial Sequence
  Description of Artificial Sequence: Synthetic oligonucleotide
ugacuuuauugauuuacau

SEQ ID NO: 753354 - RNA, 19 nt, Artificial Sequence
  Description of Artificial Sequence: Synthetic oligonucleotide
caagugaccggugcgaucc

SEQ ID NO: 753355 - RNA, 19 nt, Artificial Sequence
  Description of Artificial Sequence: Synthetic oligonucleotide
uugcaugcaucgaagcuga

SEQ ID NO: 753356 - RNA, 19 nt, Artificial Sequence
  Description of Artificial Sequence: Synthetic oligonucleotide
cauucgucaguuucugggc

SEQ ID NO: 753357 - RNA, 19 nt, Artificial Sequence
  Description of Artificial Sequence: Synthetic oligonucleotide
ugaagccgacacaaggagc

SEQ ID NO: 753358 - RNA, 19 nt, Artificial Sequence
  Description of Artificial Sequence: Synthetic oligonucleotide
ucgaagcugaaaccaagac

SEQ ID NO: 753359 - RNA, 19 nt, Artificial Sequence
  Description of Artificial Sequence: Synthetic oligonucleotide
uguguccugaagccgacac

SEQ ID NO: 753360 - RNA, 19 nt, Artificial Sequence
  Description of Artificial Sequence: Synthetic oligonucleotide
uuacaucuauccuguaacu

SEQ ID NO: 753361 - RNA, 19 nt, Artificial Sequence
  Description of Artificial Sequence: Synthetic oligonucleotide
accacccacuuauaaucgc

SEQ ID NO: 753362 - RNA, 19 nt, Artificial Sequence
  Description of Artificial Sequence: Synthetic oligonucleotide
aggaauugccucguaacuc

SEQ ID NO: 753363 - RNA, 19 nt, Artificial Sequence
  Description of Artificial Sequence: Synthetic oligonucleotide
acauucgagagguuguagu

SEQ ID NO: 753364 - RNA, 19 nt, Artificial Sequence
  Description of Artificial Sequence: Synthetic oligonucleotide
cugucuaaaacacagccaa

SEQ ID NO: 753365 - RNA, 19 nt, Artificial Sequence
  Description of Artificial Sequence: Synthetic oligonucleotide
acggcauuaagggagcggg

SEQ ID NO: 753366 - RNA, 19 nt, Artificial Sequence
  Description of Artificial Sequence: Synthetic oligonucleotide
cucaaaaucugccugagcu

SEQ ID NO: 753367 - RNA, 19 nt, Artificial Sequence
  Description of Artificial Sequence: Synthetic oligonucleotide
gaauggacgucaugacucc

SEQ ID NO: 753368 - RNA, 19 nt, Artificial Sequence
  Description of Artificial Sequence: Synthetic oligonucleotide
gaagucacggaaugggaga

SEQ ID NO: 753369 - RNA, 19 nt, Artificial Sequence
  Description of Artificial Sequence: Synthetic oligonucleotide
uucgagagguuguaguuuc

SEQ ID NO: 753370 - RNA, 19 nt, Artificial Sequence
  Description of Artificial Sequence: Synthetic oligonucleotide
ggaauugccucguaacucc

SEQ ID NO: 753371 - RNA, 19 nt, Artificial Sequence
  Description of Artificial Sequence: Synthetic oligonucleotide
uucggugcgccucuggcca

SEQ ID NO: 753372 - RNA, 19 nt, Artificial Sequence
  Description of Artificial Sequence: Synthetic oligonucleotide
ugcucaucgaaaagaucug

SEQ ID NO: 753373 - RNA, 19 nt, Artificial Sequence
  Description of Artificial Sequence: Synthetic oligonucleotide
accgcagucaaaacauacc

SEQ ID NO: 753374 - RNA, 19 nt, Artificial Sequence
  Description of Artificial Sequence: Synthetic oligonucleotide
cguaaugaggaaacaaugg

SEQ ID NO: 753375 - RNA, 19 nt, Artificial Sequence
  Description of Artificial Sequence: Synthetic oligonucleotide
gagcaaucgaugcacagaa

SEQ ID NO: 753376 - RNA, 19 nt, Artificial Sequence
  Description of Artificial Sequence: Synthetic oligonucleotide
cugaagccgacacaaggag

SEQ ID NO: 753377 - RNA, 19 nt, Artificial Sequence
  Description of Artificial Sequence: Synthetic oligonucleotide
acauaccuuguuaguaggc

SEQ ID NO: 753378 - RNA, 19 nt, Artificial Sequence
  Description of Artificial Sequence: Synthetic oligonucleotide
cugcucaucgaaaagaucu

SEQ ID NO: 753379 - RNA, 19 nt, Artificial Sequence
  Description of Artificial Sequence: Synthetic oligonucleotide
caacuugcaugcaucgaag

SEQ ID NO: 753380 - RNA, 19 nt, Artificial Sequence
  Description of Artificial Sequence: Synthetic oligonucleotide
ugagcaaucgaugcacaga

SEQ ID NO: 753381 - RNA, 19 nt, Artificial Sequence
  Description of Artificial Sequence: Synthetic oligonucleotide
guagguuaugcuugcccag

SEQ ID NO: 753382 - RNA, 19 nt, Artificial Sequence
  Description of Artificial Sequence: Synthetic oligonucleotide
cuugaccugucugaggagc

SEQ ID NO: 753383 - RNA, 19 nt, Artificial Sequence
  Description of Artificial Sequence: Synthetic oligonucleotide
auucgaguucccuccaacu

SEQ ID NO: 753384 - RNA, 19 nt, Artificial Sequence
  Description of Artificial Sequence: Synthetic oligonucleotide
uggcaccgcagucaaaaca

SEQ ID NO: 753385 - RNA, 19 nt, Artificial Sequence
  Description of Artificial Sequence: Synthetic oligonucleotide
uuggaucuuuuaagaaaga

SEQ ID NO: 753386 - RNA, 19 nt, Artificial Sequence
  Description of Artificial Sequence: Synthetic oligonucleotide
acucaagugaacaccaagu

SEQ ID NO: 753387 - RNA, 19 nt, Artificial Sequence
  Description of Artificial Sequence: Synthetic oligonucleotide
uggaucgaauaaaacucaa

SEQ ID NO: 753388 - RNA, 19 nt, Artificial Sequence
  Description of Artificial Sequence: Synthetic oligonucleotide
caucgaaaagaucugcaga

SEQ ID NO: 753389 - RNA, 19 nt, Artificial Sequence
  Description of Artificial Sequence: Synthetic oligonucleotide
uaguucgaauccagcuccg

SEQ ID NO: 753390 - RNA, 19 nt, Artificial Sequence
  Description of Artificial Sequence: Synthetic oligonucleotide
gggucaucaaaguaccugc

SEQ ID NO: 753391 - RNA, 19 nt, Artificial Sequence
  Description of Artificial Sequence: Synthetic oligonucleotide
ucgaauccagcuccgugga

SEQ ID NO: 753392 - RNA, 19 nt, Artificial Sequence
  Description of Artificial Sequence: Synthetic oligonucleotide
gucggacacagccugacac

SEQ ID NO: 753393 - RNA, 19 nt, Artificial Sequence
  Description of Artificial Sequence: Synthetic oligonucleotide
ucguaacuccauaggguca

SEQ ID NO: 753394 - RNA, 19 nt, Artificial Sequence
  Description of Artificial Sequence: Synthetic oligonucleotide
ugcauucgucaguuucugg

SEQ ID NO: 753395 - RNA, 19 nt, Artificial Sequence
  Description of Artificial Sequence: Synthetic oligonucleotide
cuuggcguuggugucauug

SEQ ID NO: 753396 - RNA, 19 nt, Artificial Sequence
  Description of Artificial Sequence: Synthetic oligonucleotide
auuaagagccguagcgauc

SEQ ID NO: 753397 - RNA, 19 nt, Artificial Sequence
  Description of Artificial Sequence: Synthetic oligonucleotide
uccguggaucgaauaaaac

SEQ ID NO: 753398 - RNA, 19 nt, Artificial Sequence
  Description of Artificial Sequence: Synthetic oligonucleotide
agacuaguucgaauccagc

SEQ ID NO: 753399 - RNA, 19 nt, Artificial Sequence
  Description of Artificial Sequence: Synthetic oligonucleotide
caaucgaugcacagaaaca

SEQ ID NO: 753400 - RNA, 19 nt, Artificial Sequence
  Description of Artificial Sequence: Synthetic oligonucleotide
uuaagggagcggguucugg

SEQ ID NO: 753401 - RNA, 19 nt, Artificial Sequence
  Description of Artificial Sequence: Synthetic oligonucleotide
guaugacuccucugggucc

SEQ ID NO: 753402 - RNA, 19 nt, Artificial Sequence
  Description of Artificial Sequence: Synthetic oligonucleotide
gacuaguucgaauccagcu

SEQ ID NO: 753403 - RNA, 19 nt, Artificial Sequence
  Description of Artificial Sequence: Synthetic oligonucleotide
cacaccuugcuugaacugc

SEQ ID NO: 753404 - RNA, 19 nt, Artificial Sequence
  Description of Artificial Sequence: Synthetic oligonucleotide
ccaaaguacaugucugagg

SEQ ID NO: 753405 - RNA, 19 nt, Artificial Sequence
  Description of Artificial Sequence: Synthetic oligonucleotide
uucgaguucccuccaacuu

SEQ ID NO: 753406 - RNA, 19 nt, Artificial Sequence
  Description of Artificial Sequence: Synthetic oligonucleotide
ucggacacagccugacacc

SEQ ID NO: 753407 - RNA, 19 nt, Artificial Sequence
  Description of Artificial Sequence: Synthetic oligonucleotide
caggauuaagagccguagc

SEQ ID NO: 753408 - RNA, 19 nt, Artificial Sequence
  Description of Artificial Sequence: Synthetic oligonucleotide
gucacggaaugggagaugc

SEQ ID NO: 753409 - RNA, 19 nt, Artificial Sequence
  Description of Artificial Sequence: Synthetic oligonucleotide
cauccguauugccaacagg

SEQ ID NO: 753410 - RNA, 19 nt, Artificial Sequence
  Description of Artificial Sequence: Synthetic oligonucleotide
cguggaucgaauaaaacuc

SEQ ID NO: 753411 - RNA, 19 nt, Artificial Sequence
  Description of Artificial Sequence: Synthetic oligonucleotide
ugucuaaaacacagccaaa

SEQ ID NO: 753412 - RNA, 19 nt, Artificial Sequence
  Description of Artificial Sequence: Synthetic oligonucleotide
guucgaauccagcuccgug

SEQ ID NO: 753413 - RNA, 19 nt, Artificial Sequence
  Description of Artificial Sequence: Synthetic oligonucleotide
gccucguaacuccauaggg

SEQ ID NO: 753414 - RNA, 19 nt, Artificial Sequence
  Description of Artificial Sequence: Synthetic oligonucleotide
cucaucgaaaagaucugca

SEQ ID NO: 753415 - RNA, 19 nt, Artificial Sequence
  Description of Artificial Sequence: Synthetic oligonucleotide
gauuaagagccguagcgau

SEQ ID NO: 753416 - RNA, 19 nt, Artificial Sequence
  Description of Artificial Sequence: Synthetic oligonucleotide
cagaccuuccacacuuggc

SEQ ID NO: 753417 - RNA, 19 nt, Artificial Sequence
  Description of Artificial Sequence: Synthetic oligonucleotide
cuacagagaaauggggaug

SEQ ID NO: 753418 - RNA, 19 nt, Artificial Sequence
  Description of Artificial Sequence: Synthetic oligonucleotide
agucguaaugaggaaacaa

SEQ ID NO: 753419 - RNA, 19 nt, Artificial Sequence
  Description of Artificial Sequence: Synthetic oligonucleotide
uuauccacggccugugcuu

SEQ ID NO: 753420 - RNA, 19 nt, Artificial Sequence
  Description of Artificial Sequence: Synthetic oligonucleotide
uuuccccgaaucugaguug

SEQ ID NO: 753421 - RNA, 19 nt, Artificial Sequence
  Description of Artificial Sequence: Synthetic oligonucleotide
ucgccauuuccccgaaucu

SEQ ID NO: 753422 - RNA, 19 nt, Artificial Sequence
  Description of Artificial Sequence: Synthetic oligonucleotide
aggccagucguaaugagga

SEQ ID NO: 753423 - RNA, 19 nt, Artificial Sequence
  Description of Artificial Sequence: Synthetic oligonucleotide
gaaaccacccacuuauaau

SEQ ID NO: 753424 - RNA, 19 nt, Artificial Sequence
  Description of Artificial Sequence: Synthetic oligonucleotide
acguugccaaacuucuucu

SEQ ID NO: 753425 - RNA, 19 nt, Artificial Sequence
  Description of Artificial Sequence: Synthetic oligonucleotide
cuuuucgaucucagugaag

SEQ ID NO: 753426 - RNA, 19 nt, Artificial Sequence
  Description of Artificial Sequence: Synthetic oligonucleotide
ggcacacccguguuggugg

SEQ ID NO: 753427 - RNA, 19 nt, Artificial Sequence
  Description of Artificial Sequence: Synthetic oligonucleotide
guaggcaccgagcgcaggc

SEQ ID NO: 753428 - RNA, 19 nt, Artificial Sequence
  Description of Artificial Sequence: Synthetic oligonucleotide
aguuguguccugaagccga

SEQ ID NO: 753429 - RNA, 19 nt, Artificial Sequence
  Description of Artificial Sequence: Synthetic oligonucleotide
cauucgaguucccuccaac

SEQ ID NO: 753430 - RNA, 19 nt, Artificial Sequence
  Description of Artificial Sequence: Synthetic oligonucleotide
acggaaugggagaugccac

SEQ ID NO: 753431 - RNA, 19 nt, Artificial Sequence
  Description of Artificial Sequence: Synthetic oligonucleotide
agcgauccugaauggacgu

SEQ ID NO: 753432 - RNA, 19 nt, Artificial Sequence
  Description of Artificial Sequence: Synthetic oligonucleotide
aggaaucagcacugucauc

SEQ ID NO: 753433 - RNA, 19 nt, Artificial Sequence
  Description of Artificial Sequence: Synthetic oligonucleotide
uacaucuauccuguaacuu

SEQ ID NO: 753434 - RNA, 19 nt, Artificial Sequence
  Description of Artificial Sequence: Synthetic oligonucleotide
cuucggugcgccucuggcc

SEQ ID NO: 753435 - RNA, 19 nt, Artificial Sequence
  Description of Artificial Sequence: Synthetic oligonucleotide
gcuaaccuaaaccagaaau

SEQ ID NO: 753436 - RNA, 19 nt, Artificial Sequence
  Description of Artificial Sequence: Synthetic oligonucleotide
agcuccguggaucgaauaa

SEQ ID NO: 753437 - RNA, 19 nt, Artificial Sequence
  Description of Artificial Sequence: Synthetic oligonucleotide
cagcuagagaaggaauugc

SEQ ID NO: 753438 - RNA, 19 nt, Artificial Sequence
  Description of Artificial Sequence: Synthetic oligonucleotide
uguuguacuuggcguuggu

SEQ ID NO: 753439 - RNA, 19 nt, Artificial Sequence
  Description of Artificial Sequence: Synthetic oligonucleotide
gguggcacacccguguugg

SEQ ID NO: 753440 - RNA, 19 nt, Artificial Sequence
  Description of Artificial Sequence: Synthetic oligonucleotide
aagucacggaaugggagau

SEQ ID NO: 753441 - RNA, 19 nt, Artificial Sequence
  Description of Artificial Sequence: Synthetic oligonucleotide
ucgagagguuguaguuucc

SEQ ID NO: 753442 - RNA, 19 nt, Artificial Sequence
  Description of Artificial Sequence: Synthetic oligonucleotide
ugcgauccugagcaaucga

SEQ ID NO: 753443 - RNA, 19 nt, Artificial Sequence
  Description of Artificial Sequence: Synthetic oligonucleotide
ggaugaagcauucgaguuc

SEQ ID NO: 753444 - RNA, 19 nt, Artificial Sequence
  Description of Artificial Sequence: Synthetic oligonucleotide
caggugccuugcuaaacag

SEQ ID NO: 753445 - RNA, 19 nt, Artificial Sequence
  Description of Artificial Sequence: Synthetic oligonucleotide
cauaccuuguuaguaggca

SEQ ID NO: 753446 - RNA, 19 nt, Artificial Sequence
  Description of Artificial Sequence: Synthetic oligonucleotide
uucauccguauugccaaca

SEQ ID NO: 753447 - RNA, 19 nt, Artificial Sequence
  Description of Artificial Sequence: Synthetic oligonucleotide
ccagucguaaugaggaaac

SEQ ID NO: 753448 - RNA, 19 nt, Artificial Sequence
  Description of Artificial Sequence: Synthetic oligonucleotide
acuugaccugucugaggag

SEQ ID NO: 753449 - RNA, 19 nt, Artificial Sequence
  Description of Artificial Sequence: Synthetic oligonucleotide
ggaucgaauaaaacucaag

SEQ ID NO: 753450 - RNA, 19 nt, Artificial Sequence
  Description of Artificial Sequence: Synthetic oligonucleotide
ccguguugguggaagaagg

SEQ ID NO: 753451 - RNA, 19 nt, Artificial Sequence
  Description of Artificial Sequence: Synthetic oligonucleotide
gaucgcacaccuugcuuga

SEQ ID NO: 753452 - RNA, 19 nt, Artificial Sequence
  Description of Artificial Sequence: Synthetic oligonucleotide
cagcacauucgagagguug

SEQ ID NO: 753453 - RNA, 19 nt, Artificial Sequence
  Description of Artificial Sequence: Synthetic oligonucleotide
guggaucgaauaaaacuca

SEQ ID NO: 753454 - RNA, 19 nt, Artificial Sequence
  Description of Artificial Sequence: Synthetic oligonucleotide
ccgaaucugaguugugucc

SEQ ID NO: 753455 - RNA, 19 nt, Artificial Sequence
  Description of Artificial Sequence: Synthetic oligonucleotide
guuguacuuggcguuggug

SEQ ID NO: 753456 - RNA, 19 nt, Artificial Sequence
  Description of Artificial Sequence: Synthetic oligonucleotide
aauggacgucaugacucca

SEQ ID NO: 753457 - RNA, 19 nt, Artificial Sequence
  Description of Artificial Sequence: Synthetic oligonucleotide
ucacggaaugggagaugcc

SEQ ID NO: 753458 - RNA, 19 nt, Artificial Sequence
  Description of Artificial Sequence: Synthetic oligonucleotide
agcacauucgagagguugu

SEQ ID NO: 753459 - RNA, 19 nt, Artificial Sequence
  Description of Artificial Sequence: Synthetic oligonucleotide
ucgucaguuucugggcucc

SEQ ID NO: 753460 - RNA, 19 nt, Artificial Sequence
  Description of Artificial Sequence: Synthetic oligonucleotide
uccuucggugcgccucugg

SEQ ID NO: 753461 - RNA, 19 nt, Artificial Sequence
  Description of Artificial Sequence: Synthetic oligonucleotide
cugguagagagccucucca

SEQ ID NO: 753462 - RNA, 19 nt, Artificial Sequence
  Description of Artificial Sequence: Synthetic oligonucleotide
ucucccuguaaagcugagc

SEQ ID NO: 753463 - RNA, 19 nt, Artificial Sequence
  Description of Artificial Sequence: Synthetic oligonucleotide
aucgaagcugaaaccaaga

SEQ ID NO: 753464 - RNA, 19 nt, Artificial Sequence
  Description of Artificial Sequence: Synthetic oligonucleotide
ugccaguagacuugacuuu

SEQ ID NO: 753465 - RNA, 19 nt, Artificial Sequence
  Description of Artificial Sequence: Synthetic oligonucleotide
uagggucaucaaaguaccu

SEQ ID NO: 753466 - RNA, 19 nt, Artificial Sequence
  Description of Artificial Sequence: Synthetic oligonucleotide
gaacugcgccauaucuggg

SEQ ID NO: 753467 - RNA, 19 nt, Artificial Sequence
  Description of Artificial Sequence: Synthetic oligonucleotide
guaacuuuuggaacaccaa

SEQ ID NO: 753468 - RNA, 19 nt, Artificial Sequence
  Description of Artificial Sequence: Synthetic oligonucleotide
aggucggacacagccugac

SEQ ID NO: 753469 - RNA, 19 nt, Artificial Sequence
  Description of Artificial Sequence: Synthetic oligonucleotide
ggagcuaaccuaaaccaga

SEQ ID NO: 753470 - RNA, 19 nt, Artificial Sequence
  Description of Artificial Sequence: Synthetic oligonucleotide
gugcgauccugagcaaucg

SEQ ID NO: 753471 - RNA, 19 nt, Artificial Sequence
  Description of Artificial Sequence: Synthetic oligonucleotide
cacggaaugggagaugcca

SEQ ID NO: 753472 - RNA, 19 nt, Artificial Sequence
  Description of Artificial Sequence: Synthetic oligonucleotide
gcggguucuggcuucgccg

SEQ ID NO: 753473 - RNA, 19 nt, Artificial Sequence
  Description of Artificial Sequence: Synthetic oligonucleotide
accccguagguuaugcuug

SEQ ID NO: 753474 - RNA, 19 nt, Artificial Sequence
  Description of Artificial Sequence: Synthetic oligonucleotide
uggcuucgccgauaccugc

SEQ ID NO: 753475 - RNA, 19 nt, Artificial Sequence
  Description of Artificial Sequence: Synthetic oligonucleotide
cacauucgagagguuguag

SEQ ID NO: 753476 - RNA, 19 nt, Artificial Sequence
  Description of Artificial Sequence: Synthetic oligonucleotide
uggacgucaugacuccauu

SEQ ID NO: 753477 - RNA, 19 nt, Artificial Sequence
  Description of Artificial Sequence: Synthetic oligonucleotide
agaggcaugagcagcgaaa

SEQ ID NO: 753478 - RNA, 19 nt, Artificial Sequence
  Description of Artificial Sequence: Synthetic oligonucleotide
gaggcaugagcagcgaaaa

SEQ ID NO: 753479 - RNA, 19 nt, Artificial Sequence
  Description of Artificial Sequence: Synthetic oligonucleotide
caguagacuugacuuucuc

SEQ ID NO: 753480 - RNA, 19 nt, Artificial Sequence
  Description of Artificial Sequence: Synthetic oligonucleotide
ggaaaccacccacuuauaa

SEQ ID NO: 753481 - RNA, 19 nt, Artificial Sequence
  Description of Artificial Sequence: Synthetic oligonucleotide
agagcuuauggaggagcug

SEQ ID NO: 753482 - RNA, 19 nt, Artificial Sequence
  Description of Artificial Sequence: Synthetic oligonucleotide
aguacaugucugaggaaau

SEQ ID NO: 753483 - RNA, 19 nt, Artificial Sequence
  Description of Artificial Sequence: Synthetic oligonucleotide
cuucauccguauugccaac

SEQ ID NO: 753484 - RNA, 19 nt, Artificial Sequence
  Description of Artificial Sequence: Synthetic oligonucleotide
ugcccacggcauuaaggga

SEQ ID NO: 753485 - RNA, 19 nt, Artificial Sequence
  Description of Artificial Sequence: Synthetic oligonucleotide
cacggcauuaagggagcgg

SEQ ID NO: 753486 - RNA, 19 nt, Artificial Sequence
  Description of Artificial Sequence: Synthetic oligonucleotide
agcauucgaguucccucca

SEQ ID NO: 753487 - RNA, 19 nt, Artificial Sequence
  Description of Artificial Sequence: Synthetic oligonucleotide
ggauuaagagccguagcga

SEQ ID NO: 753488 - RNA, 19 nt, Artificial Sequence
  Description of Artificial Sequence: Synthetic oligonucleotide
cuugacuuucucccuguaa

SEQ ID NO: 753489 - RNA, 19 nt, Artificial Sequence
  Description of Artificial Sequence: Synthetic oligonucleotide
agcagccggggcuuuggug

SEQ ID NO: 753490 - RNA, 19 nt, Artificial Sequence
  Description of Artificial Sequence: Synthetic oligonucleotide
gaccggugcgauccugagc

SEQ ID NO: 753491 - RNA, 19 nt, Artificial Sequence
  Description of Artificial Sequence: Synthetic oligonucleotide
caauauauucuggugcugu

SEQ ID NO: 753492 - RNA, 19 nt, Artificial Sequence
  Description of Artificial Sequence: Synthetic oligonucleotide
uuggcaccgcagucaaaac

SEQ ID NO: 753493 - RNA, 19 nt, Artificial Sequence
  Description of Artificial Sequence: Synthetic oligonucleotide
ugcaggugccuugcuaaac

SEQ ID NO: 753494 - RNA, 19 nt, Artificial Sequence
  Description of Artificial Sequence: Synthetic oligonucleotide
auccugaauggacgucaug

SEQ ID NO: 753495 - RNA, 19 nt, Artificial Sequence
  Description of Artificial Sequence: Synthetic oligonucleotide
gcccacggcauuaagggag

SEQ ID NO: 753496 - RNA, 19 nt, Artificial Sequence
  Description of Artificial Sequence: Synthetic oligonucleotide
ggacgucaugacuccauug

SEQ ID NO: 753497 - RNA, 19 nt, Artificial Sequence
  Description of Artificial Sequence: Synthetic oligonucleotide
cauugguggcacacccgug

SEQ ID NO: 753498 - RNA, 19 nt, Artificial Sequence
  Description of Artificial Sequence: Synthetic oligonucleotide
aauugccucguaacuccau

SEQ ID NO: 753499 - RNA, 19 nt, Artificial Sequence
  Description of Artificial Sequence: Synthetic oligonucleotide
agccguagcgauccugaau

SEQ ID NO: 753500 - RNA, 19 nt, Artificial Sequence
  Description of Artificial Sequence: Synthetic oligonucleotide
uaaucgccauuuccccgaa

SEQ ID NO: 753501 - RNA, 19 nt, Artificial Sequence
  Description of Artificial Sequence: Synthetic oligonucleotide
ugcgccauaucuggggcau

SEQ ID NO: 753502 - RNA, 19 nt, Artificial Sequence
  Description of Artificial Sequence: Synthetic oligonucleotide
uucuggccgcucagguuca

SEQ ID NO: 753503 - RNA, 19 nt, Artificial Sequence
  Description of Artificial Sequence: Synthetic oligonucleotide
ccaggauuaagagccguag

SEQ ID NO: 753504 - RNA, 19 nt, Artificial Sequence
  Description of Artificial Sequence: Synthetic oligonucleotide
cuccguggaucgaauaaaa

SEQ ID NO: 753505 - RNA, 19 nt, Artificial Sequence
  Description of Artificial Sequence: Synthetic oligonucleotide
ggugccuugcuaaacagua

SEQ ID NO: 753506 - RNA, 19 nt, Artificial Sequence
  Description of Artificial Sequence: Synthetic oligonucleotide
gaauugccucguaacucca

SEQ ID NO: 753507 - RNA, 19 nt, Artificial Sequence
  Description of Artificial Sequence: Synthetic oligonucleotide
cguauugccaacaggcuca

SEQ ID NO: 753508 - RNA, 19 nt, Artificial Sequence
  Description of Artificial Sequence: Synthetic oligonucleotide
ggugaaguaugacuccucu

SEQ ID NO: 753509 - RNA, 19 nt, Artificial Sequence
  Description of Artificial Sequence: Synthetic oligonucleotide
aaacaccccguagguuaug

SEQ ID NO: 753510 - RNA, 19 nt, Artificial Sequence
  Description of Artificial Sequence: Synthetic oligonucleotide
ccguagguuaugcuugccc

SEQ ID NO: 753511 - RNA, 19 nt, Artificial Sequence
  Description of Artificial Sequence: Synthetic oligonucleotide
aguaggcaccgagcgcagg

SEQ ID NO: 753512 - RNA, 19 nt, Artificial Sequence
  Description of Artificial Sequence: Synthetic oligonucleotide
gcaggugccuugcuaaaca

SEQ ID NO: 753513 - RNA, 19 nt, Artificial Sequence
  Description of Artificial Sequence: Synthetic oligonucleotide
gacuugacuuucucccugu

SEQ ID NO: 753514 - RNA, 19 nt, Artificial Sequence
  Description of Artificial Sequence: Synthetic oligonucleotide
ccgauaccugcacagcacc

SEQ ID NO: 753515 - RNA, 19 nt, Artificial Sequence
  Description of Artificial Sequence: Synthetic oligonucleotide
ccagcgagcacuugaccug

SEQ ID NO: 753516 - RNA, 19 nt, Artificial Sequence
  Description of Artificial Sequence: Synthetic oligonucleotide
gccuugcuaaacaguagag

SEQ ID NO: 753517 - RNA, 19 nt, Artificial Sequence
  Description of Artificial Sequence: Synthetic oligonucleotide
aguucgaauccagcuccgu

SEQ ID NO: 753518 - RNA, 19 nt, Artificial Sequence
  Description of Artificial Sequence: Synthetic oligonucleotide
acaccccguagguuaugcu

SEQ ID NO: 753519 - RNA, 19 nt, Artificial Sequence
  Description of Artificial Sequence: Synthetic oligonucleotide
caucuauccuguaacuuuu

SEQ ID NO: 753520 - RNA, 19 nt, Artificial Sequence
  Description of Artificial Sequence: Synthetic oligonucleotide
ccguauugccaacaggcuc

SEQ ID NO: 753521 - RNA, 19 nt, Artificial Sequence
  Description of Artificial Sequence: Synthetic oligonucleotide
ccaggucggacacagccug

SEQ ID NO: 753522 - RNA, 19 nt, Artificial Sequence
  Description of Artificial Sequence: Synthetic oligonucleotide
gaacaccaagugaccggug

SEQ ID NO: 753523 - RNA, 19 nt, Artificial Sequence
  Description of Artificial Sequence: Synthetic oligonucleotide
cauucgagagguuguaguu

SEQ ID NO: 753524 - RNA, 19 nt, Artificial Sequence
  Description of Artificial Sequence: Synthetic oligonucleotide
gacuccuccuucggugcgc

SEQ ID NO: 753525 - RNA, 19 nt, Artificial Sequence
  Description of Artificial Sequence: Synthetic oligonucleotide
ccguggaucgaauaaaacu

SEQ ID NO: 753526 - RNA, 19 nt, Artificial Sequence
  Description of Artificial Sequence: Synthetic oligonucleotide
cccgaaucugaguuguguc

SEQ ID NO: 753527 - RNA, 19 nt, Artificial Sequence
  Description of Artificial Sequence: Synthetic oligonucleotide
agucacggaaugggagaug

SEQ ID NO: 753528 - RNA, 19 nt, Artificial Sequence
  Description of Artificial Sequence: Synthetic oligonucleotide
guacuuggcguugguguca

SEQ ID NO: 753529 - RNA, 19 nt, Artificial Sequence
  Description of Artificial Sequence: Synthetic oligonucleotide
uacuuggcguuggugucau

SEQ ID NO: 753530 - RNA, 19 nt, Artificial Sequence
  Description of Artificial Sequence: Synthetic oligonucleotide
ggagugguuuccacugccc

SEQ ID NO: 753531 - RNA, 19 nt, Artificial Sequence
  Description of Artificial Sequence: Synthetic oligonucleotide
cguagguuaugcuugccca

SEQ ID NO: 753532 - RNA, 19 nt, Artificial Sequence
  Description of Artificial Sequence: Synthetic oligonucleotide
aggugccuugcuaaacagu

SEQ ID NO: 753533 - RNA, 19 nt, Artificial Sequence
  Description of Artificial Sequence: Synthetic oligonucleotide
accaggucggacacagccu

SEQ ID NO: 753534 - RNA, 19 nt, Artificial Sequence
  Description of Artificial Sequence: Synthetic oligonucleotide
ggaaugggagaugccacuc

SEQ ID NO: 753535 - RNA, 19 nt, Artificial Sequence
  Description of Artificial Sequence: Synthetic oligonucleotide
agugaccggugcgauccug

SEQ ID NO: 753536 - RNA, 19 nt, Artificial Sequence
  Description of Artificial Sequence: Synthetic oligonucleotide
auggacgucaugacuccau

SEQ ID NO: 753537 - RNA, 19 nt, Artificial Sequence
  Description of Artificial Sequence: Synthetic oligonucleotide
ggugcgauccugagcaauc

SEQ ID NO: 753538 - RNA, 19 nt, Artificial Sequence
  Description of Artificial Sequence: Synthetic oligonucleotide
agccgacacaaggagcuaa

SEQ ID NO: 753539 - RNA, 19 nt, Artificial Sequence
  Description of Artificial Sequence: Synthetic oligonucleotide
cauuaagggagcggguucu

SEQ ID NO: 753540 - RNA, 19 nt, Artificial Sequence
  Description of Artificial Sequence: Synthetic oligonucleotide
aggagugugcaggugccuu

SEQ ID NO: 753541 - RNA, 19 nt, Artificial Sequence
  Description of Artificial Sequence: Synthetic oligonucleotide
ccguagcgauccugaaugg

SEQ ID NO: 753542 - RNA, 19 nt, Artificial Sequence
  Description of Artificial Sequence: Synthetic oligonucleotide
ggggaugccucagaggaaa

SEQ ID NO: 753543 - RNA, 19 nt, Artificial Sequence
  Description of Artificial Sequence: Synthetic oligonucleotide
acggccugugcuugcuuuu

SEQ ID NO: 753544 - RNA, 19 nt, Artificial Sequence
  Description of Artificial Sequence: Synthetic oligonucleotide
cuucgccgauaccugcaca

SEQ ID NO: 753545 - RNA, 19 nt, Artificial Sequence
  Description of Artificial Sequence: Synthetic oligonucleotide
gaaacaccccguagguuau

SEQ ID NO: 753546 - RNA, 19 nt, Artificial Sequence
  Description of Artificial Sequence: Synthetic oligonucleotide
gcuucgccgauaccugcac

SEQ ID NO: 753547 - RNA, 19 nt, Artificial Sequence
  Description of Artificial Sequence: Synthetic oligonucleotide
cauuuccccgaaucugagu

SEQ ID NO: 753548 - RNA, 19 nt, Artificial Sequence
  Description of Artificial Sequence: Synthetic oligonucleotide
ugggugacuccugcucgau

SEQ ID NO: 753549 - RNA, 19 nt, Artificial Sequence
  Description of Artificial Sequence: Synthetic oligonucleotide
gccgauaccugcacagcac

SEQ ID NO: 753550 - RNA, 19 nt, Artificial Sequence
  Description of Artificial Sequence: Synthetic oligonucleotide
cugcgccauaucuggggca

SEQ ID NO: 753551 - RNA, 19 nt, Artificial Sequence
  Description of Artificial Sequence: Synthetic oligonucleotide
uaccugcuguggagcugga

SEQ ID NO: 753552 - RNA, 19 nt, Artificial Sequence
  Description of Artificial Sequence: Synthetic oligonucleotide
gggugacuccugcucgaug

SEQ ID NO: 753553 - RNA, 19 nt, Artificial Sequence
  Description of Artificial Sequence: Synthetic oligonucleotide
agcaaucgaugcacagaaa

SEQ ID NO: 753554 - RNA, 19 nt, Artificial Sequence
  Description of Artificial Sequence: Synthetic oligonucleotide
gccagucguaaugaggaaa

SEQ ID NO: 753555 - RNA, 19 nt, Artificial Sequence
  Description of Artificial Sequence: Synthetic oligonucleotide
ccucguaacuccauagggu

SEQ ID NO: 753556 - RNA, 19 nt, Artificial Sequence
  Description of Artificial Sequence: Synthetic oligonucleotide
ccgcagucaaaacauaccu

SEQ ID NO: 753557 - RNA, 19 nt, Artificial Sequence
  Description of Artificial Sequence: Synthetic oligonucleotide
gugcaggugccuugcuaaa

SEQ ID NO: 753558 - RNA, 19 nt, Artificial Sequence
  Description of Artificial Sequence: Synthetic oligonucleotide
ccccguagguuaugcuugc

SEQ ID NO: 753559 - RNA, 19 nt, Artificial Sequence
  Description of Artificial Sequence: Synthetic oligonucleotide
cacagaucugugccgugcu

SEQ ID NO: 753560 - RNA, 19 nt, Artificial Sequence
  Description of Artificial Sequence: Synthetic oligonucleotide
ggagcggguucuggcuucg

SEQ ID NO: 753561 - RNA, 19 nt, Artificial Sequence
  Description of Artificial Sequence: Synthetic oligonucleotide
caccccguagguuaugcuu

SEQ ID NO: 753562 - RNA, 19 nt, Artificial Sequence
  Description of Artificial Sequence: Synthetic oligonucleotide
accgagcgcaggcgcuuga

SEQ ID NO: 753563 - RNA, 19 nt, Artificial Sequence
  Description of Artificial Sequence: Synthetic oligonucleotide
ccgacacaaggagcuaacc

SEQ ID NO: 753564 - RNA, 19 nt, Artificial Sequence
  Description of Artificial Sequence: Synthetic oligonucleotide
cacccguguugguggaaga

SEQ ID NO: 753565 - RNA, 19 nt, Artificial Sequence
  Description of Artificial Sequence: Synthetic oligonucleotide
gcgcuugaagauggcuagg

SEQ ID NO: 753566 - RNA, 19 nt, Artificial Sequence
  Description of Artificial Sequence: Synthetic oligonucleotide
gcuuuucauggcaggcuca

SEQ ID NO: 753567 - RNA, 19 nt, Artificial Sequence
  Description of Artificial Sequence: Synthetic oligonucleotide
cuggagcguucagaccuuc

SEQ ID NO: 753568 - RNA, 19 nt, Artificial Sequence
  Description of Artificial Sequence: Synthetic oligonucleotide
ccaagugaccggugcgauc

SEQ ID NO: 753569 - RNA, 19 nt, Artificial Sequence
  Description of Artificial Sequence: Synthetic oligonucleotide
ccacuuauaaucgccauuu

SEQ ID NO: 753570 - RNA, 19 nt, Artificial Sequence
  Description of Artificial Sequence: Synthetic oligonucleotide
ggucggacacagccugaca

SEQ ID NO: 753571 - RNA, 19 nt, Artificial Sequence
  Description of Artificial Sequence: Synthetic oligonucleotide
caucuuucuuugugugaau

SEQ ID NO: 753572 - RNA, 19 nt, Artificial Sequence
  Description of Artificial Sequence: Synthetic oligonucleotide
aggaaaccacccacuuaua

SEQ ID NO: 753573 - RNA, 19 nt, Artificial Sequence
  Description of Artificial Sequence: Synthetic oligonucleotide
gaguucccuccaacuugca

SEQ ID NO: 753574 - RNA, 19 nt, Artificial Sequence
  Description of Artificial Sequence: Synthetic oligonucleotide
aucgcacaccuugcuugaa

SEQ ID NO: 753575 - RNA, 19 nt, Artificial Sequence
  Description of Artificial Sequence: Synthetic oligonucleotide
cgccauuuccccgaaucug

SEQ ID NO: 753576 - RNA, 19 nt, Artificial Sequence
  Description of Artificial Sequence: Synthetic oligonucleotide
ggcauuaagggagcggguu

SEQ ID NO: 753577 - RNA, 19 nt, Artificial Sequence
  Description of Artificial Sequence: Synthetic oligonucleotide
ggcuucgccgauaccugca

SEQ ID NO: 753578 - RNA, 19 nt, Artificial Sequence
  Description of Artificial Sequence: Synthetic oligonucleotide
cagaucgcacaccuugcuu

SEQ ID NO: 753579 - RNA, 19 nt, Artificial Sequence
  Description of Artificial Sequence: Synthetic oligonucleotide
gagcggguucuggcuucgc

SEQ ID NO: 753580 - RNA, 19 nt, Artificial Sequence
  Description of Artificial Sequence: Synthetic oligonucleotide
gcgcaggcgcuugaagaug

SEQ ID NO: 753581 - RNA, 19 nt, Artificial Sequence
  Description of Artificial Sequence: Synthetic oligonucleotide
gcauucgaguucccuccaa

SEQ ID NO: 753582 - RNA, 19 nt, Artificial Sequence
  Description of Artificial Sequence: Synthetic oligonucleotide
gccugacaccaggauuaag

SEQ ID NO: 753583 - RNA, 19 nt, Artificial Sequence
  Description of Artificial Sequence: Synthetic oligonucleotide
gccgcucagguucaguuuu

SEQ ID NO: 753584 - RNA, 19 nt, Artificial Sequence
  Description of Artificial Sequence: Synthetic oligonucleotide
ggccagucguaaugaggaa

SEQ ID NO: 753585 - RNA, 19 nt, Artificial Sequence
  Description of Artificial Sequence: Synthetic oligonucleotide
cccagcuagagaaggaauu

SEQ ID NO: 753586 - RNA, 19 nt, Artificial Sequence
  Description of Artificial Sequence: Synthetic oligonucleotide
gcacauucgagagguugua

SEQ ID NO: 753587 - RNA, 19 nt, Artificial Sequence
  Description of Artificial Sequence: Synthetic oligonucleotide
ccacggcauuaagggagcg

SEQ ID NO: 753588 - RNA, 19 nt, Artificial Sequence
  Description of Artificial Sequence: Synthetic oligonucleotide
gagccgcacggcuguugua

SEQ ID NO: 753589 - RNA, 19 nt, Artificial Sequence
  Description of Artificial Sequence: Synthetic oligonucleotide
cgauaccugcacagcacca

SEQ ID NO: 753590 - RNA, 19 nt, Artificial Sequence
  Description of Artificial Sequence: Synthetic oligonucleotide
gcgauccugaauggacguc

SEQ ID NO: 753591 - RNA, 19 nt, Artificial Sequence
  Description of Artificial Sequence: Synthetic oligonucleotide
gcgauccugagcaaucgau

SEQ ID NO: 753592 - RNA, 19 nt, Artificial Sequence
  Description of Artificial Sequence: Synthetic oligonucleotide
guauugccaacaggcucau

SEQ ID NO: 753593 - RNA, 19 nt, Artificial Sequence
  Description of Artificial Sequence: Synthetic oligonucleotide
ccuuuuauccacggccugu

SEQ ID NO: 753594 - RNA, 19 nt, Artificial Sequence
  Description of Artificial Sequence: Synthetic oligonucleotide
gcacacccguguuggugga

SEQ ID NO: 753595 - RNA, 19 nt, Artificial Sequence
  Description of Artificial Sequence: Synthetic oligonucleotide
cagcgagcacuugaccugu

SEQ ID NO: 753596 - RNA, 19 nt, Artificial Sequence
  Description of Artificial Sequence: Synthetic oligonucleotide
cccguagguuaugcuugcc

SEQ ID NO: 753597 - RNA, 19 nt, Artificial Sequence
  Description of Artificial Sequence: Synthetic oligonucleotide
cuccuucggugcgccucug

SEQ ID NO: 753598 - RNA, 19 nt, Artificial Sequence
  Description of Artificial Sequence: Synthetic oligonucleotide
gcccuugcucugguccacc

SEQ ID NO: 753599 - RNA, 19 nt, Artificial Sequence
  Description of Artificial Sequence: Synthetic oligonucleotide
ccuuguuaguaggcaccga

SEQ ID NO: 753600 - RNA, 19 nt, Artificial Sequence
  Description of Artificial Sequence: Synthetic oligonucleotide
cccacuuauaaucgccauu

SEQ ID NO: 753601 - RNA, 19 nt, Artificial Sequence
  Description of Artificial Sequence: Synthetic oligonucleotide
cggaaugggagaugccacu

SEQ ID NO: 753602 - RNA, 19 nt, Artificial Sequence
  Description of Artificial Sequence: Synthetic oligonucleotide
cacacccguguugguggaa

SEQ ID NO: 753603 - RNA, 19 nt, Artificial Sequence
  Description of Artificial Sequence: Synthetic oligonucleotide
cccuccaacuugcaugcau

SEQ ID NO: 753604 - RNA, 19 nt, Artificial Sequence
  Description of Artificial Sequence: Synthetic oligonucleotide
cguaacuccauagggucau

SEQ ID NO: 753605 - RNA, 19 nt, Artificial Sequence
  Description of Artificial Sequence: Synthetic oligonucleotide
ccccgaaucugaguugugu

SEQ ID NO: 753606 - RNA, 19 nt, Artificial Sequence
  Description of Artificial Sequence: Synthetic oligonucleotide
gccgugcccgggucucaaa

SEQ ID NO: 753607 - RNA, 19 nt, Artificial Sequence
  Description of Artificial Sequence: Synthetic oligonucleotide
ccuggagcguucagaccuu

SEQ ID NO: 753608 - RNA, 19 nt, Artificial Sequence
  Description of Artificial Sequence: Synthetic oligonucleotide
cggcauuaagggagcgggu

SEQ ID NO: 753609 - RNA, 19 nt, Artificial Sequence
  Description of Artificial Sequence: Synthetic oligonucleotide
ccacugcccacggcauuaa

SEQ ID NO: 753610 - RNA, 19 nt, Artificial Sequence
  Description of Artificial Sequence: Synthetic oligonucleotide
ccggugcgauccugagcaa

SEQ ID NO: 753611 - RNA, 19 nt, Artificial Sequence
  Description of Artificial Sequence: Synthetic oligonucleotide
ccgagcgcaggcgcuugaa

SEQ ID NO: 753612 - RNA, 19 nt, Artificial Sequence
  Description of Artificial Sequence: Synthetic oligonucleotide
cggugcgauccugagcaau

SEQ ID NO: 753613 - RNA, 19 nt, Artificial Sequence
  Description of Artificial Sequence: Synthetic oligonucleotide
aauacaguagccaaacucc

SEQ ID NO: 753614 - RNA, 19 nt, Artificial Sequence
  Description of Artificial Sequence: Synthetic oligonucleotide
uuauuauagaaaacuacag

SEQ ID NO: 753615 - RNA, 19 nt, Artificial Sequence
  Description of Artificial Sequence: Synthetic oligonucleotide
agauaauugagcuuagcgg

SEQ ID NO: 753616 - RNA, 19 nt, Artificial Sequence
  Description of Artificial Sequence: Synthetic oligonucleotide
ucuauuggcacuccgaacc

SEQ ID NO: 753617 - RNA, 19 nt, Artificial Sequence
  Description of Artificial Sequence: Synthetic oligonucleotide
cacgaaacaagccaggugg

SEQ ID NO: 753618 - RNA, 19 nt, Artificial Sequence
  Description of Artificial Sequence: Synthetic oligonucleotide
uauuguuucacagugagaa

SEQ ID NO: 753619 - RNA, 19 nt, Artificial Sequence
  Description of Artificial Sequence: Synthetic oligonucleotide
aguauuguuucacagugag

SEQ ID NO: 753620 - RNA, 19 nt, Artificial Sequence
  Description of Artificial Sequence: Synthetic oligonucleotide
ugacuguauuaucugagcg

SEQ ID NO: 753621 - RNA, 19 nt, Artificial Sequence
  Description of Artificial Sequence: Synthetic oligonucleotide
gaaguauggacccuugugc

SEQ ID NO: 753622 - RNA, 19 nt, Artificial Sequence
  Description of Artificial Sequence: Synthetic oligonucleotide
agccauaacagccgcaugc

SEQ ID NO: 753623 - RNA, 19 nt, Artificial Sequence
  Description of Artificial Sequence: Synthetic oligonucleotide
  modified_base (4)..(4): a, c, u, g, unknown or other
aucnccuuccgccaguccc

SEQ ID NO: 753624 - RNA, 19 nt, Artificial Sequence
  Description of Artificial Sequence: Synthetic oligonucleotide
cagauaauugagcuuagcg

SEQ ID NO: 753625 - RNA, 19 nt, Artificial Sequence
  Description of Artificial Sequence: Synthetic oligonucleotide
gaaguguacaccaucaggc

SEQ ID NO: 753626 - RNA, 19 nt, Artificial Sequence
  Description of Artificial Sequence: Synthetic oligonucleotide
agaaguguacaccaucagg

SEQ ID NO: 753627 - RNA, 19 nt, Artificial Sequence
  Description of Artificial Sequence: Synthetic oligonucleotide
aaaacgccggcuuaggacu

SEQ ID NO: 753628 - RNA, 19 nt, Artificial Sequence
  Description of Artificial Sequence: Synthetic oligonucleotide
gaauacaguagccaaacuc

SEQ ID NO: 753629 - RNA, 19 nt, Artificial Sequence
  Description of Artificial Sequence: Synthetic oligonucleotide
ucuggcaugacucuccucu

SEQ ID NO: 753630 - RNA, 19 nt, Artificial Sequence
  Description of Artificial Sequence: Synthetic oligonucleotide
uguuuagaauucaaagucu

SEQ ID NO: 753631 - RNA, 19 nt, Artificial Sequence
  Description of Artificial Sequence: Synthetic oligonucleotide
augacuguauuaucugagc

SEQ ID NO: 753632 - RNA, 19 nt, Artificial Sequence
  Description of Artificial Sequence: Synthetic oligonucleotide
aaagucgcauuugucaagg

SEQ ID NO: 753633 - RNA, 19 nt, Artificial Sequence
  Description of Artificial Sequence: Synthetic oligonucleotide
aacuacaguauuguuucac

SEQ ID NO: 753634 - RNA, 19 nt, Artificial Sequence
  Description of Artificial Sequence: Synthetic oligonucleotide
guagauuuucucuauuggc

SEQ ID NO: 753635 - RNA, 19 nt, Artificial Sequence
  Description of Artificial Sequence: Synthetic oligonucleotide
auaaaauagagggccacgg

SEQ ID NO: 753636 - RNA, 19 nt, Artificial Sequence
  Description of Artificial Sequence: Synthetic oligonucleotide
ugcaucgacuucucgaagg

SEQ ID NO: 753637 - RNA, 19 nt, Artificial Sequence
  Description of Artificial Sequence: Synthetic oligonucleotide
auuguagcggauggaaucc

SEQ ID NO: 753638 - RNA, 19 nt, Artificial Sequence
  Description of Artificial Sequence: Synthetic oligonucleotide
aauugagcuuagcggugcc

SEQ ID NO: 753639 - RNA, 19 nt, Artificial Sequence
  Description of Artificial Sequence: Synthetic oligonucleotide
uguaagcuaagacuuugga

SEQ ID NO: 753640 - RNA, 19 nt, Artificial Sequence
  Description of Artificial Sequence: Synthetic oligonucleotide
ucuuaggucagccuucaac

SEQ ID NO: 753641 - RNA, 19 nt, Artificial Sequence
  Description of Artificial Sequence: Synthetic oligonucleotide
aaguauggacccuugugcu

SEQ ID NO: 753642 - RNA, 19 nt, Artificial Sequence
  Description of Artificial Sequence: Synthetic oligonucleotide
uggauauucuccauccaug

SEQ ID NO: 753643 - RNA, 19 nt, Artificial Sequence
  Description of Artificial Sequence: Synthetic oligonucleotide
ugcuuuguuggccuucgcg

SEQ ID NO: 753644 - RNA, 19 nt, Artificial Sequence
  Description of Artificial Sequence: Synthetic oligonucleotide
ugucacgcgguuauuguag

SEQ ID NO: 753645 - RNA, 19 nt, Artificial Sequence
  Description of Artificial Sequence: Synthetic oligonucleotide
uuguaagcuaagacuuugg

SEQ ID NO: 753646 - RNA, 19 nt, Artificial Sequence
  Description of Artificial Sequence: Synthetic oligonucleotide
uguauuaucugagcgcacc

SEQ ID NO: 753647 - RNA, 19 nt, Artificial Sequence
  Description of Artificial Sequence: Synthetic oligonucleotide
gaaaacgccggcuuaggac

SEQ ID NO: 753648 - RNA, 19 nt, Artificial Sequence
  Description of Artificial Sequence: Synthetic oligonucleotide
guagaagaaguguacacca

SEQ ID NO: 753649 - RNA, 19 nt, Artificial Sequence
  Description of Artificial Sequence: Synthetic oligonucleotide
agcggauggaauccuuucc

SEQ ID NO: 753650 - RNA, 19 nt, Artificial Sequence
  Description of Artificial Sequence: Synthetic oligonucleotide
acuccgagccauaacagcc

SEQ ID NO: 753651 - RNA, 19 nt, Artificial Sequence
  Description of Artificial Sequence: Synthetic oligonucleotide
ucggccacgaaacaagcca

SEQ ID NO: 753652 - RNA, 19 nt, Artificial Sequence
  Description of Artificial Sequence: Synthetic oligonucleotide
uuuucguccgacauuuuau

SEQ ID NO: 753653 - RNA, 19 nt, Artificial Sequence
  Description of Artificial Sequence: Synthetic oligonucleotide
ggggauugcucucugaugg

SEQ ID NO: 753654 - RNA, 19 nt, Artificial Sequence
  Description of Artificial Sequence: Synthetic oligonucleotide
gguuaggcuaucuucagcc

SEQ ID NO: 753655 - RNA, 19 nt, Artificial Sequence
  Description of Artificial Sequence: Synthetic oligonucleotide
cagcauuucccguacaaag

SEQ ID NO: 753656 - RNA, 19 nt, Artificial Sequence
  Description of Artificial Sequence: Synthetic oligonucleotide
aguguacaccaucaggcag

SEQ ID NO: 753657 - RNA, 19 nt, Artificial Sequence
  Description of Artificial Sequence: Synthetic oligonucleotide
cuacaguauuguuucacag

SEQ ID NO: 753658 - RNA, 19 nt, Artificial Sequence
  Description of Artificial Sequence: Synthetic oligonucleotide
acuggcaguagucagugca

SEQ ID NO: 753659 - RNA, 19 nt, Artificial Sequence
  Description of Artificial Sequence: Synthetic oligonucleotide
auuucccguacaaaguggc

SEQ ID NO: 753660 - RNA, 19 nt, Artificial Sequence
  Description of Artificial Sequence: Synthetic oligonucleotide
agccgucucacccucuucc

SEQ ID NO: 753661 - RNA, 19 nt, Artificial Sequence
  Description of Artificial Sequence: Synthetic oligonucleotide
aaguguacaccaucaggca

SEQ ID NO: 753662 - RNA, 19 nt, Artificial Sequence
  Description of Artificial Sequence: Synthetic oligonucleotide
ugagcacggaucuuguuga

SEQ ID NO: 753663 - RNA, 19 nt, Artificial Sequence
  Description of Artificial Sequence: Synthetic oligonucleotide
ucaaggugugugauaagcu

SEQ ID NO: 753664 - RNA, 19 nt, Artificial Sequence
  Description of Artificial Sequence: Synthetic oligonucleotide
cauaacagccgcaugcgug

SEQ ID NO: 753665 - RNA, 19 nt, Artificial Sequence
  Description of Artificial Sequence: Synthetic oligonucleotide
ucgagaauacaguagccaa

SEQ ID NO: 753666 - RNA, 19 nt, Artificial Sequence
  Description of Artificial Sequence: Synthetic oligonucleotide
aggacuccgagccauaaca

SEQ ID NO: 753667 - RNA, 19 nt, Artificial Sequence
  Description of Artificial Sequence: Synthetic oligonucleotide
cacaaagucgcauuuguca

SEQ ID NO: 753668 - RNA, 19 nt, Artificial Sequence
  Description of Artificial Sequence: Synthetic oligonucleotide
augacucuccucuucaaca

SEQ ID NO: 753669 - RNA, 19 nt, Artificial Sequence
  Description of Artificial Sequence: Synthetic oligonucleotide
cuuagcggugcccagggcc

SEQ ID NO: 753670 - RNA, 19 nt, Artificial Sequence
  Description of Artificial Sequence: Synthetic oligonucleotide
acuguauuaucugagcgca

SEQ ID NO: 753671 - RNA, 19 nt, Artificial Sequence
  Description of Artificial Sequence: Synthetic oligonucleotide
aucuuguugacaacucccc

SEQ ID NO: 753672 - RNA, 19 nt, Artificial Sequence
  Description of Artificial Sequence: Synthetic oligonucleotide
cuugggauggucaccucgg

SEQ ID NO: 753673 - RNA, 19 nt, Artificial Sequence
  Description of Artificial Sequence: Synthetic oligonucleotide
agguuaggcuaucuucagc

SEQ ID NO: 753674 - RNA, 19 nt, Artificial Sequence
  Description of Artificial Sequence: Synthetic oligonucleotide
cauuucccguacaaagugg

SEQ ID NO: 753675 - RNA, 19 nt, Artificial Sequence
  Description of Artificial Sequence: Synthetic oligonucleotide
cacucuggcagucagcccc

SEQ ID NO: 753676 - RNA, 19 nt, Artificial Sequence
  Description of Artificial Sequence: Synthetic oligonucleotide
ucgaggugcagcauuuccc

SEQ ID NO: 753677 - RNA, 19 nt, Artificial Sequence
  Description of Artificial Sequence: Synthetic oligonucleotide
ucucuauuggcacuccgaa

SEQ ID NO: 753678 - RNA, 19 nt, Artificial Sequence
  Description of Artificial Sequence: Synthetic oligonucleotide
uguucagacuggcaguagu

SEQ ID NO: 753679 - RNA, 19 nt, Artificial Sequence
  Description of Artificial Sequence: Synthetic oligonucleotide
uucucuauuggcacuccga

SEQ ID NO: 753680 - RNA, 19 nt, Artificial Sequence
  Description of Artificial Sequence: Synthetic oligonucleotide
acaaagucgcauuugucaa

SEQ ID NO: 753681 - RNA, 19 nt, Artificial Sequence
  Description of Artificial Sequence: Synthetic oligonucleotide
uccgucuugaaauugccua

SEQ ID NO: 753682 - RNA, 19 nt, Artificial Sequence
  Description of Artificial Sequence: Synthetic oligonucleotide
cuuuguuggccuucgcgcc

SEQ ID NO: 753683 - RNA, 19 nt, Artificial Sequence
  Description of Artificial Sequence: Synthetic oligonucleotide
uuuagaauucaaagucuuu

SEQ ID NO: 753684 - RNA, 19 nt, Artificial Sequence
  Description of Artificial Sequence: Synthetic oligonucleotide
guggccaucgagaauacag

SEQ ID NO: 753685 - RNA, 19 nt, Artificial Sequence
  Description of Artificial Sequence: Synthetic oligonucleotide
uccgacauuuuauuauaga

SEQ ID NO: 753686 - RNA, 19 nt, Artificial Sequence
  Description of Artificial Sequence: Synthetic oligonucleotide
aguauggacccuugugcuc

SEQ ID NO: 753687 - RNA, 19 nt, Artificial Sequence
  Description of Artificial Sequence: Synthetic oligonucleotide
cacagugagaaaguggcag

SEQ ID NO: 753688 - RNA, 19 nt, Artificial Sequence
  Description of Artificial Sequence: Synthetic oligonucleotide
cauccaugcagccagccac

SEQ ID NO: 753689 - RNA, 19 nt, Artificial Sequence
  Description of Artificial Sequence: Synthetic oligonucleotide
cuucucgaaggucuugggg

SEQ ID NO: 753690 - RNA, 19 nt, Artificial Sequence
  Description of Artificial Sequence: Synthetic oligonucleotide
uuauuguagcggauggaau

SEQ ID NO: 753691 - RNA, 19 nt, Artificial Sequence
  Description of Artificial Sequence: Synthetic oligonucleotide
cauuucuggggauuuccag

SEQ ID NO: 753692 - RNA, 19 nt, Artificial Sequence
  Description of Artificial Sequence: Synthetic oligonucleotide
cacaugacuguauuaucug

SEQ ID NO: 753693 - RNA, 19 nt, Artificial Sequence
  Description of Artificial Sequence: Synthetic oligonucleotide
acaugacuguauuaucuga

SEQ ID NO: 753694 - RNA, 19 nt, Artificial Sequence
  Description of Artificial Sequence: Synthetic oligonucleotide
aggucuuggggauugcucu

SEQ ID NO: 753695 - RNA, 19 nt, Artificial Sequence
  Description of Artificial Sequence: Synthetic oligonucleotide
ugggucuugugguagauuu

SEQ ID NO: 753696 - RNA, 19 nt, Artificial Sequence
  Description of Artificial Sequence: Synthetic oligonucleotide
ugaaaacgccggcuuagga

SEQ ID NO: 753697 - RNA, 19 nt, Artificial Sequence
  Description of Artificial Sequence: Synthetic oligonucleotide
ucgugcaaccucauacuug

SEQ ID NO: 753698 - RNA, 19 nt, Artificial Sequence
  Description of Artificial Sequence: Synthetic oligonucleotide
ggauauucuccauccaugc

SEQ ID NO: 753699 - RNA, 19 nt, Artificial Sequence
  Description of Artificial Sequence: Synthetic oligonucleotide
uccaucguagaagaagugu

SEQ ID NO: 753700 - RNA, 19 nt, Artificial Sequence
  Description of Artificial Sequence: Synthetic oligonucleotide
uguagguccggaacacucu

SEQ ID NO: 753701 - RNA, 19 nt, Artificial Sequence
  Description of Artificial Sequence: Synthetic oligonucleotide
uaauugagcuuagcggugc

SEQ ID NO: 753702 - RNA, 19 nt, Artificial Sequence
  Description of Artificial Sequence: Synthetic oligonucleotide
caucgagaauacaguagcc

SEQ ID NO: 753703 - RNA, 19 nt, Artificial Sequence
  Description of Artificial Sequence: Synthetic oligonucleotide
gaauccuuucccaagaagu

SEQ ID NO: 753704 - RNA, 19 nt, Artificial Sequence
  Description of Artificial Sequence: Synthetic oligonucleotide
ucaaagucuuugucugccc

SEQ ID NO: 753705 - RNA, 19 nt, Artificial Sequence
  Description of Artificial Sequence: Synthetic oligonucleotide
ucguccgacauuuuauuau

SEQ ID NO: 753706 - RNA, 19 nt, Artificial Sequence
  Description of Artificial Sequence: Synthetic oligonucleotide
cacuccgaaccuuuuacac

SEQ ID NO: 753707 - RNA, 19 nt, Artificial Sequence
  Description of Artificial Sequence: Synthetic oligonucleotide
ucaagcgucgugcaaccuc

SEQ ID NO: 753708 - RNA, 19 nt, Artificial Sequence
  Description of Artificial Sequence: Synthetic oligonucleotide
ucugagcgcaccucuuucc

SEQ ID NO: 753709 - RNA, 19 nt, Artificial Sequence
  Description of Artificial Sequence: Synthetic oligonucleotide
uaagacuuuggagguuagg

SEQ ID NO: 753710 - RNA, 19 nt, Artificial Sequence
  Description of Artificial Sequence: Synthetic oligonucleotide
gagguuaggcuaucuucag

SEQ ID NO: 753711 - RNA, 19 nt, Artificial Sequence
  Description of Artificial Sequence: Synthetic oligonucleotide
gacuuuggagguuaggcua

SEQ ID NO: 753712 - RNA, 19 nt, Artificial Sequence
  Description of Artificial Sequence: Synthetic oligonucleotide
ucgcauuugucaaggugug

SEQ ID NO: 753713 - RNA, 19 nt, Artificial Sequence
  Description of Artificial Sequence: Synthetic oligonucleotide
aaacuacaguauuguuuca

SEQ ID NO: 753714 - RNA, 19 nt, Artificial Sequence
  Description of Artificial Sequence: Synthetic oligonucleotide
cuuaggucagccuucaacu

SEQ ID NO: 753715 - RNA, 19 nt, Artificial Sequence
  Description of Artificial Sequence: Synthetic oligonucleotide
caaagucgcauuugucaag

SEQ ID NO: 753716 - RNA, 19 nt, Artificial Sequence
  Description of Artificial Sequence: Synthetic oligonucleotide
ccaucgagaauacaguagc

SEQ ID NO: 753717 - RNA, 19 nt, Artificial Sequence
  Description of Artificial Sequence: Synthetic oligonucleotide
aucgagaauacaguagcca

SEQ ID NO: 753718 - RNA, 19 nt, Artificial Sequence
  Description of Artificial Sequence: Synthetic oligonucleotide
ucauaggcaggggugaagu

SEQ ID NO: 753719 - RNA, 19 nt, Artificial Sequence
  Description of Artificial Sequence: Synthetic oligonucleotide
uggccaucgagaauacagu

SEQ ID NO: 753720 - RNA, 19 nt, Artificial Sequence
  Description of Artificial Sequence: Synthetic oligonucleotide
auacugagcacggaucuug

SEQ ID NO: 753721 - RNA, 19 nt, Artificial Sequence
  Description of Artificial Sequence: Synthetic oligonucleotide
guauggacccuugugcucc

SEQ ID NO: 753722 - RNA, 19 nt, Artificial Sequence
  Description of Artificial Sequence: Synthetic oligonucleotide
auugagcuuagcggugccc

SEQ ID NO: 753723 - RNA, 19 nt, Artificial Sequence
  Description of Artificial Sequence: Synthetic oligonucleotide
guggcaaagggcuguuuag

SEQ ID NO: 753724 - RNA, 19 nt, Artificial Sequence
  Description of Artificial Sequence: Synthetic oligonucleotide
ucccguacaaaguggcuac

SEQ ID NO: 753725 - RNA, 19 nt, Artificial Sequence
  Description of Artificial Sequence: Synthetic oligonucleotide
ucgaguucuuaggucagcc

SEQ ID NO: 753726 - RNA, 19 nt, Artificial Sequence
  Description of Artificial Sequence: Synthetic oligonucleotide
guuauuguagcggauggaa

SEQ ID NO: 753727 - RNA, 19 nt, Artificial Sequence
  Description of Artificial Sequence: Synthetic oligonucleotide
gcuuuguuggccuucgcgc

SEQ ID NO: 753728 - RNA, 19 nt, Artificial Sequence
  Description of Artificial Sequence: Synthetic oligonucleotide
agaaaacuacaguauuguu

SEQ ID NO: 753729 - RNA, 19 nt, Artificial Sequence
  Description of Artificial Sequence: Synthetic oligonucleotide
guuaggcuaucuucagccc

SEQ ID NO: 753730 - RNA, 19 nt, Artificial Sequence
  Description of Artificial Sequence: Synthetic oligonucleotide
acugucacgcgguuauugu

SEQ ID NO: 753731 - RNA, 19 nt, Artificial Sequence
  Description of Artificial Sequence: Synthetic oligonucleotide
ugacugaggcauuguaggu

SEQ ID NO: 753732 - RNA, 19 nt, Artificial Sequence
  Description of Artificial Sequence: Synthetic oligonucleotide
uugagcuuagcggugccca

SEQ ID NO: 753733 - RNA, 19 nt, Artificial Sequence
  Description of Artificial Sequence: Synthetic oligonucleotide
cuccgagccauaacagccg

SEQ ID NO: 753734 - RNA, 19 nt, Artificial Sequence
  Description of Artificial Sequence: Synthetic oligonucleotide
acuuuuggacuugcucccc

SEQ ID NO: 753735 - RNA, 19 nt, Artificial Sequence
  Description of Artificial Sequence: Synthetic oligonucleotide
uuugucaaggugugugaua

SEQ ID NO: 753736 - RNA, 19 nt, Artificial Sequence
  Description of Artificial Sequence: Synthetic oligonucleotide
cucgaggugcagcauuucc

SEQ ID NO: 753737 - RNA, 19 nt, Artificial Sequence
  Description of Artificial Sequence: Synthetic oligonucleotide
cacgcgguuauuguagcgg

SEQ ID NO: 753738 - RNA, 19 nt, Artificial Sequence
  Description of Artificial Sequence: Synthetic oligonucleotide
ucacagugagaaaguggca

SEQ ID NO: 753739 - RNA, 19 nt, Artificial Sequence
  Description of Artificial Sequence: Synthetic oligonucleotide
caugacucuccucuucaac

SEQ ID NO: 753740 - RNA, 19 nt, Artificial Sequence
  Description of Artificial Sequence: Synthetic oligonucleotide
uuucguccgacauuuuauu

SEQ ID NO: 753741 - RNA, 19 nt, Artificial Sequence
  Description of Artificial Sequence: Synthetic oligonucleotide
uggggauugcucucugaug

SEQ ID NO: 753742 - RNA, 19 nt, Artificial Sequence
  Description of Artificial Sequence: Synthetic oligonucleotide
  modified_base (3)..(3): a, c, u, g, unknown or other
ucnccuuccgccagucccu

SEQ ID NO: 753743 - RNA, 19 nt, Artificial Sequence
  Description of Artificial Sequence: Synthetic oligonucleotide
acgaaacaagccagguggc

SEQ ID NO: 753744 - RNA, 19 nt, Artificial Sequence
  Description of Artificial Sequence: Synthetic oligonucleotide
ucgcagugccagcuuauca

SEQ ID NO: 753745 - RNA, 19 nt, Artificial Sequence
  Description of Artificial Sequence: Synthetic oligonucleotide
cugggguccagauaauuga

SEQ ID NO: 753746 - RNA, 19 nt, Artificial Sequence
  Description of Artificial Sequence: Synthetic oligonucleotide
aaggugugugauaagcuuu

SEQ ID NO: 753747 - RNA, 19 nt, Artificial Sequence
  Description of Artificial Sequence: Synthetic oligonucleotide
uccacacggagcgagcagc

SEQ ID NO: 753748 - RNA, 19 nt, Artificial Sequence
  Description of Artificial Sequence: Synthetic oligonucleotide
agugcaucaaagagguugu

SEQ ID NO: 753749 - RNA, 19 nt, Artificial Sequence
  Description of Artificial Sequence: Synthetic oligonucleotide
ugauguacuugaagguauu

SEQ ID NO: 753750 - RNA, 19 nt, Artificial Sequence
  Description of Artificial Sequence: Synthetic oligonucleotide
cucuauuggcacuccgaac

SEQ ID NO: 753751 - RNA, 19 nt, Artificial Sequence
  Description of Artificial Sequence: Synthetic oligonucleotide
ugagcuuagcggugcccag

SEQ ID NO: 753752 - RNA, 19 nt, Artificial Sequence
  Description of Artificial Sequence: Synthetic oligonucleotide
agcuugauacugagcacgg

SEQ ID NO: 753753 - RNA, 19 nt, Artificial Sequence
  Description of Artificial Sequence: Synthetic oligonucleotide
gcuguuuagaauucaaagu

SEQ ID NO: 753754 - RNA, 19 nt, Artificial Sequence
  Description of Artificial Sequence: Synthetic oligonucleotide
gauguacuugaagguauuc

SEQ ID NO: 753755 - RNA, 19 nt, Artificial Sequence
  Description of Artificial Sequence: Synthetic oligonucleotide
ugucugcccgguugaaggc

SEQ ID NO: 753756 - RNA, 19 nt, Artificial Sequence
  Description of Artificial Sequence: Synthetic oligonucleotide
cauuugucaagguguguga

SEQ ID NO: 753757 - RNA, 19 nt, Artificial Sequence
  Description of Artificial Sequence: Synthetic oligonucleotide
uucguccgacauuuuauua

SEQ ID NO: 753758 - RNA, 19 nt, Artificial Sequence
  Description of Artificial Sequence: Synthetic oligonucleotide
agcauuucccguacaaagu

SEQ ID NO: 753759 - RNA, 19 nt, Artificial Sequence
  Description of Artificial Sequence: Synthetic oligonucleotide
uuuucucuauuggcacucc

SEQ ID NO: 753760 - RNA, 19 nt, Artificial Sequence
  Description of Artificial Sequence: Synthetic oligonucleotide
aggcgaaccucucucucug

SEQ ID NO: 753761 - RNA, 19 nt, Artificial Sequence
  Description of Artificial Sequence: Synthetic oligonucleotide
uggcaaagggcuguuuaga

SEQ ID NO: 753762 - RNA, 19 nt, Artificial Sequence
  Description of Artificial Sequence: Synthetic oligonucleotide
aacgccggcuuaggacucc

SEQ ID NO: 753763 - RNA, 19 nt, Artificial Sequence
  Description of Artificial Sequence: Synthetic oligonucleotide
agccgcaugcgugugagug

SEQ ID NO: 753764 - RNA, 19 nt, Artificial Sequence
  Description of Artificial Sequence: Synthetic oligonucleotide
uaucugagcgcaccucuuu

SEQ ID NO: 753765 - RNA, 19 nt, Artificial Sequence
  Description of Artificial Sequence: Synthetic oligonucleotide
caagcgucgugcaaccuca

SEQ ID NO: 753766 - RNA, 19 nt, Artificial Sequence
  Description of Artificial Sequence: Synthetic oligonucleotide
uucccguacaaaguggcua

SEQ ID NO: 753767 - RNA, 19 nt, Artificial Sequence
  Description of Artificial Sequence: Synthetic oligonucleotide
ccgcagaaaacuuuuggac

SEQ ID NO: 753768 - RNA, 19 nt, Artificial Sequence
  Description of Artificial Sequence: Synthetic oligonucleotide
gucgcauuugucaaggugu

SEQ ID NO: 753769 - RNA, 19 nt, Artificial Sequence
  Description of Artificial Sequence: Synthetic oligonucleotide
uccaugcagccggacaugc

SEQ ID NO: 753770 - RNA, 19 nt, Artificial Sequence
  Description of Artificial Sequence: Synthetic oligonucleotide
cucggccacgaaacaagcc

SEQ ID NO: 753771 - RNA, 19 nt, Artificial Sequence
  Description of Artificial Sequence: Synthetic oligonucleotide
cuuccgcagaaaacuuuug

SEQ ID NO: 753772 - RNA, 19 nt, Artificial Sequence
  Description of Artificial Sequence: Synthetic oligonucleotide
uggggaucuuggaaucccu

SEQ ID NO: 753773 - RNA, 19 nt, Artificial Sequence
  Description of Artificial Sequence: Synthetic oligonucleotide
auuugucaaggugugugau

SEQ ID NO: 753774 - RNA, 19 nt, Artificial Sequence
  Description of Artificial Sequence: Synthetic oligonucleotide
ugcugaaaacgccggcuua

SEQ ID NO: 753775 - RNA, 19 nt, Artificial Sequence
  Description of Artificial Sequence: Synthetic oligonucleotide
cugaaaacgccggcuuagg

SEQ ID NO: 753776 - RNA, 19 nt, Artificial Sequence
  Description of Artificial Sequence: Synthetic oligonucleotide
gucacgcgguuauuguagc

SEQ ID NO: 753777 - RNA, 19 nt, Artificial Sequence
  Description of Artificial Sequence: Synthetic oligonucleotide
acgcgguuauuguagcgga

SEQ ID NO: 753778 - RNA, 19 nt, Artificial Sequence
  Description of Artificial Sequence: Synthetic oligonucleotide
gcgucgugcaaccucauac

SEQ ID NO: 753779 - RNA, 19 nt, Artificial Sequence
  Description of Artificial Sequence: Synthetic oligonucleotide
gagcuuagcggugcccagg

SEQ ID NO: 753780 - RNA, 19 nt, Artificial Sequence
  Description of Artificial Sequence: Synthetic oligonucleotide
uuuggagguuaggcuaucu

SEQ ID NO: 753781 - RNA, 19 nt, Artificial Sequence
  Description of Artificial Sequence: Synthetic oligonucleotide
uaggacuccgagccauaac

SEQ ID NO: 753782 - RNA, 19 nt, Artificial Sequence
  Description of Artificial Sequence: Synthetic oligonucleotide
gcggauggaauccuuuccc

SEQ ID NO: 753783 - RNA, 19 nt, Artificial Sequence
  Description of Artificial Sequence: Synthetic oligonucleotide
ggagguuaggcuaucuuca

SEQ ID NO: 753784 - RNA, 19 nt, Artificial Sequence
  Description of Artificial Sequence: Synthetic oligonucleotide
ggcacuccgaaccuuuuac

SEQ ID NO: 753785 - RNA, 19 nt, Artificial Sequence
  Description of Artificial Sequence: Synthetic oligonucleotide
gaguucuuaggucagccuu

SEQ ID NO: 753786 - RNA, 19 nt, Artificial Sequence
  Description of Artificial Sequence: Synthetic oligonucleotide
accucggccacgaaacaag

SEQ ID NO: 753787 - RNA, 19 nt, Artificial Sequence
  Description of Artificial Sequence: Synthetic oligonucleotide
guccgacauuuuauuauag

SEQ ID NO: 753788 - RNA, 19 nt, Artificial Sequence
  Description of Artificial Sequence: Synthetic oligonucleotide
aaacgccggcuuaggacuc

SEQ ID NO: 753789 - RNA, 19 nt, Artificial Sequence
  Description of Artificial Sequence: Synthetic oligonucleotide
uuaggacuccgagccauaa

SEQ ID NO: 753790 - RNA, 19 nt, Artificial Sequence
  Description of Artificial Sequence: Synthetic oligonucleotide
ugcuccacacggagcgagc

SEQ ID NO: 753791 - RNA, 19 nt, Artificial Sequence
  Description of Artificial Sequence: Synthetic oligonucleotide
gcugaaaacgccggcuuag

SEQ ID NO: 753792 - RNA, 19 nt, Artificial Sequence
  Description of Artificial Sequence: Synthetic oligonucleotide
gccauaacagccgcaugcg

SEQ ID NO: 753793 - RNA, 19 nt, Artificial Sequence
  Description of Artificial Sequence: Synthetic oligonucleotide
gaacacucuggcagucagc

SEQ ID NO: 753794 - RNA, 19 nt, Artificial Sequence
  Description of Artificial Sequence: Synthetic oligonucleotide
ucgcccgguuguaagcuaa

SEQ ID NO: 753795 - RNA, 19 nt, Artificial Sequence
  Description of Artificial Sequence: Synthetic oligonucleotide
aggugcagcauuucccgua

SEQ ID NO: 753796 - RNA, 19 nt, Artificial Sequence
  Description of Artificial Sequence: Synthetic oligonucleotide
agcgcaccucuuuccacug

SEQ ID NO: 753797 - RNA, 19 nt, Artificial Sequence
  Description of Artificial Sequence: Synthetic oligonucleotide
acacucgaggugcagcauu

SEQ ID NO: 753798 - RNA, 19 nt, Artificial Sequence
  Description of Artificial Sequence: Synthetic oligonucleotide
cggcuuaggacuccgagcc

SEQ ID NO: 753799 - RNA, 19 nt, Artificial Sequence
  Description of Artificial Sequence: Synthetic oligonucleotide
uccuguucgcagugccagc

SEQ ID NO: 753800 - RNA, 19 nt, Artificial Sequence
  Description of Artificial Sequence: Synthetic oligonucleotide
cugaggcauuguagguccg

SEQ ID NO: 753801 - RNA, 19 nt, Artificial Sequence
  Description of Artificial Sequence: Synthetic oligonucleotide
guuuagaauucaaagucuu

SEQ ID NO: 753802 - RNA, 19 nt, Artificial Sequence
  Description of Artificial Sequence: Synthetic oligonucleotide
ggucaacacccgcagcugc

SEQ ID NO: 753803 - RNA, 19 nt, Artificial Sequence
  Description of Artificial Sequence: Synthetic oligonucleotide
caccucuuuccacugguga

SEQ ID NO: 753804 - RNA, 19 nt, Artificial Sequence
  Description of Artificial Sequence: Synthetic oligonucleotide
gcgaaccucucucucuggg

SEQ ID NO: 753805 - RNA, 19 nt, Artificial Sequence
  Description of Artificial Sequence: Synthetic oligonucleotide
gugcaaucgggccagcugu

SEQ ID NO: 753806 - RNA, 19 nt, Artificial Sequence
  Description of Artificial Sequence: Synthetic oligonucleotide
guauuaucugagcgcaccu

SEQ ID NO: 753807 - RNA, 19 nt, Artificial Sequence
  Description of Artificial Sequence: Synthetic oligonucleotide
cucauuuccuguucgcagu

SEQ ID NO: 753808 - RNA, 19 nt, Artificial Sequence
  Description of Artificial Sequence: Synthetic oligonucleotide
cuggucaacacccgcagcu

SEQ ID NO: 753809 - RNA, 19 nt, Artificial Sequence
  Description of Artificial Sequence: Synthetic oligonucleotide
uuccaugcagccggacaug

SEQ ID NO: 753810 - RNA, 19 nt, Artificial Sequence
  Description of Artificial Sequence: Synthetic oligonucleotide
gguucgcccgguuguaagc

SEQ ID NO: 753811 - RNA, 19 nt, Artificial Sequence
  Description of Artificial Sequence: Synthetic oligonucleotide
uauggacccuugugcucca

SEQ ID NO: 753812 - RNA, 19 nt, Artificial Sequence
  Description of Artificial Sequence: Synthetic oligonucleotide
uccccucaagcgucgugca

SEQ ID NO: 753813 - RNA, 19 nt, Artificial Sequence
  Description of Artificial Sequence: Synthetic oligonucleotide
uggcacuccgaaccuuuua

SEQ ID NO: 753814 - RNA, 19 nt, Artificial Sequence
  Description of Artificial Sequence: Synthetic oligonucleotide
cucgaguucuuaggucagc

SEQ ID NO: 753815 - RNA, 19 nt, Artificial Sequence
  Description of Artificial Sequence: Synthetic oligonucleotide
cccgguuguaagcuaagac

SEQ ID NO: 753816 - RNA, 19 nt, Artificial Sequence
  Description of Artificial Sequence: Synthetic oligonucleotide
cuucagcccuggucaacac

SEQ ID NO: 753817 - RNA, 19 nt, Artificial Sequence
  Description of Artificial Sequence: Synthetic oligonucleotide
cgguuauuguagcggaugg

SEQ ID NO: 753818 - RNA, 19 nt, Artificial Sequence
  Description of Artificial Sequence: Synthetic oligonucleotide
  modified_base (5)..(5): a, c, u, g, unknown or other
caucnccuuccgccagucc

SEQ ID NO: 753819 - RNA, 19 nt, Artificial Sequence
  Description of Artificial Sequence: Synthetic oligonucleotide
guucuuaggucagccuuca

SEQ ID NO: 753820 - RNA, 19 nt, Artificial Sequence
  Description of Artificial Sequence: Synthetic oligonucleotide
uuuccacugucacgcgguu

SEQ ID NO: 753821 - RNA, 19 nt, Artificial Sequence
  Description of Artificial Sequence: Synthetic oligonucleotide
uggcaguagucagugcauc

SEQ ID NO: 753822 - RNA, 19 nt, Artificial Sequence
  Description of Artificial Sequence: Synthetic oligonucleotide
ggcaguagucagugcauca

SEQ ID NO: 753823 - RNA, 19 nt, Artificial Sequence
  Description of Artificial Sequence: Synthetic oligonucleotide
gagcacggaucuuguugac

SEQ ID NO: 753824 - RNA, 19 nt, Artificial Sequence
  Description of Artificial Sequence: Synthetic oligonucleotide
  modified_base (6)..(6): a, c, u, g, unknown or other
ucaucnccuuccgccaguc

SEQ ID NO: 753825 - RNA, 19 nt, Artificial Sequence
  Description of Artificial Sequence: Synthetic oligonucleotide
caagccagguggcuccguc

SEQ ID NO: 753826 - RNA, 19 nt, Artificial Sequence
  Description of Artificial Sequence: Synthetic oligonucleotide
auuggcacuccgaaccuuu

SEQ ID NO: 753827 - RNA, 19 nt, Artificial Sequence
  Description of Artificial Sequence: Synthetic oligonucleotide
caaggugugugauaagcuu

SEQ ID NO: 753828 - RNA, 19 nt, Artificial Sequence
  Description of Artificial Sequence: Synthetic oligonucleotide
gcgguuauuguagcggaug

SEQ ID NO: 753829 - RNA, 19 nt, Artificial Sequence
  Description of Artificial Sequence: Synthetic oligonucleotide
acuccccucaagcgucgug

SEQ ID NO: 753830 - RNA, 19 nt, Artificial Sequence
  Description of Artificial Sequence: Synthetic oligonucleotide
ugcaaucgggccagcuguu

SEQ ID NO: 753831 - RNA, 19 nt, Artificial Sequence
  Description of Artificial Sequence: Synthetic oligonucleotide
ggacuccgagccauaacag

SEQ ID NO: 753832 - RNA, 19 nt, Artificial Sequence
  Description of Artificial Sequence: Synthetic oligonucleotide
cugagcgcaccucuuucca

SEQ ID NO: 753833 - RNA, 19 nt, Artificial Sequence
  Description of Artificial Sequence: Synthetic oligonucleotide
caguagucagugcaucaaa

SEQ ID NO: 753834 - RNA, 19 nt, Artificial Sequence
  Description of Artificial Sequence: Synthetic oligonucleotide
uucuuaggucagccuucaa

SEQ ID NO: 753835 - RNA, 19 nt, Artificial Sequence
  Description of Artificial Sequence: Synthetic oligonucleotide
cccucgaguucuuagguca

SEQ ID NO: 753836 - RNA, 19 nt, Artificial Sequence
  Description of Artificial Sequence: Synthetic oligonucleotide
ccggcuuaggacuccgagc

SEQ ID NO: 753837 - RNA, 19 nt, Artificial Sequence
  Description of Artificial Sequence: Synthetic oligonucleotide
uucgcagugccagcuuauc

SEQ ID NO: 753838 - RNA, 19 nt, Artificial Sequence
  Description of Artificial Sequence: Synthetic oligonucleotide
gucugcccgguugaaggcc

SEQ ID NO: 753839 - RNA, 19 nt, Artificial Sequence
  Description of Artificial Sequence: Synthetic oligonucleotide
ccucaagcgucgugcaacc

SEQ ID NO: 753840 - RNA, 19 nt, Artificial Sequence
  Description of Artificial Sequence: Synthetic oligonucleotide
gccacaugacuguauuauc

SEQ ID NO: 753841 - RNA, 19 nt, Artificial Sequence
  Description of Artificial Sequence: Synthetic oligonucleotide
uaacagccgcaugcgugug

SEQ ID NO: 753842 - RNA, 19 nt, Artificial Sequence
  Description of Artificial Sequence: Synthetic oligonucleotide
accucauacuugugccaau

SEQ ID NO: 753843 - RNA, 19 nt, Artificial Sequence
  Description of Artificial Sequence: Synthetic oligonucleotide
ccgguuguaagcuaagacu

SEQ ID NO: 753844 - RNA, 19 nt, Artificial Sequence
  Description of Artificial Sequence: Synthetic oligonucleotide
caucuugggauggucaccu

SEQ ID NO: 753845 - RNA, 19 nt, Artificial Sequence
  Description of Artificial Sequence: Synthetic oligonucleotide
gugccagcuuaucaauaaa

SEQ ID NO: 753846 - RNA, 19 nt, Artificial Sequence
  Description of Artificial Sequence: Synthetic oligonucleotide
cuccauccaugcagccagc

SEQ ID NO: 753847 - RNA, 19 nt, Artificial Sequence
  Description of Artificial Sequence: Synthetic oligonucleotide
gcuaagacuuuggagguua

SEQ ID NO: 753848 - RNA, 19 nt, Artificial Sequence
  Description of Artificial Sequence: Synthetic oligonucleotide
ggcgaaccucucucucugg

SEQ ID NO: 753849 - RNA, 19 nt, Artificial Sequence
  Description of Artificial Sequence: Synthetic oligonucleotide
agguggcuccgucuugaaa

SEQ ID NO: 753850 - RNA, 19 nt, Artificial Sequence
  Description of Artificial Sequence: Synthetic oligonucleotide
ccgguugaaggcccaggcg

SEQ ID NO: 753851 - RNA, 19 nt, Artificial Sequence
  Description of Artificial Sequence: Synthetic oligonucleotide
ccacaaagucgcauuuguc

SEQ ID NO: 753852 - RNA, 19 nt, Artificial Sequence
  Description of Artificial Sequence: Synthetic oligonucleotide
gugaaguauggacccuugu

SEQ ID NO: 753853 - RNA, 19 nt, Artificial Sequence
  Description of Artificial Sequence: Synthetic oligonucleotide
ggccaucgagaauacagua

SEQ ID NO: 753854 - RNA, 19 nt, Artificial Sequence
  Description of Artificial Sequence: Synthetic oligonucleotide
cugucacgcgguuauugua

SEQ ID NO: 753855 - RNA, 19 nt, Artificial Sequence
  Description of Artificial Sequence: Synthetic oligonucleotide
ccaggcaaugcugauccug

SEQ ID NO: 753856 - RNA, 19 nt, Artificial Sequence
  Description of Artificial Sequence: Synthetic oligonucleotide
cacagcccgguucgcccgg

SEQ ID NO: 753857 - RNA, 19 nt, Artificial Sequence
  Description of Artificial Sequence: Synthetic oligonucleotide
ccucggccacgaaacaagc

SEQ ID NO: 753858 - RNA, 19 nt, Artificial Sequence
  Description of Artificial Sequence: Synthetic oligonucleotide
gucuugaaauugccuauuu

SEQ ID NO: 753859 - RNA, 19 nt, Artificial Sequence
  Description of Artificial Sequence: Synthetic oligonucleotide
ccucgaguucuuaggucag

SEQ ID NO: 753860 - RNA, 19 nt, Artificial Sequence
  Description of Artificial Sequence: Synthetic oligonucleotide
agucuuugucugcccgguu

SEQ ID NO: 753861 - RNA, 19 nt, Artificial Sequence
  Description of Artificial Sequence: Synthetic oligonucleotide
gcuuguucagacuggcagu

SEQ ID NO: 753862 - RNA, 19 nt, Artificial Sequence
  Description of Artificial Sequence: Synthetic oligonucleotide
uccccaucuugggaugguc

SEQ ID NO: 753863 - RNA, 19 nt, Artificial Sequence
  Description of Artificial Sequence: Synthetic oligonucleotide
cguacaaaguggcuaccuc

SEQ ID NO: 753864 - RNA, 19 nt, Artificial Sequence
  Description of Artificial Sequence: Synthetic oligonucleotide
ggcuuggggaucuuggaau

SEQ ID NO: 753865 - RNA, 19 nt, Artificial Sequence
  Description of Artificial Sequence: Synthetic oligonucleotide
  modified_base (7)..(7): a, c, u, g, unknown or other
gucaucnccuuccgccagu

SEQ ID NO: 753866 - RNA, 19 nt, Artificial Sequence
  Description of Artificial Sequence: Synthetic oligonucleotide
cccucaagcgucgugcaac

SEQ ID NO: 753867 - RNA, 19 nt, Artificial Sequence
  Description of Artificial Sequence: Synthetic oligonucleotide
gccgcaugcgugugagugc

SEQ ID NO: 753868 - RNA, 19 nt, Artificial Sequence
  Description of Artificial Sequence: Synthetic oligonucleotide
agcgucgugcaaccucaua

SEQ ID NO: 753869 - RNA, 19 nt, Artificial Sequence
  Description of Artificial Sequence: Synthetic oligonucleotide
ggggaucuuggaaucccug

SEQ ID NO: 753870 - RNA, 19 nt, Artificial Sequence
  Description of Artificial Sequence: Synthetic oligonucleotide
acgccuggcggcagguguc

SEQ ID NO: 753871 - RNA, 19 nt, Artificial Sequence
  Description of Artificial Sequence: Synthetic oligonucleotide
cagccggacaugcuccaca

SEQ ID NO: 753872 - RNA, 19 nt, Artificial Sequence
  Description of Artificial Sequence: Synthetic oligonucleotide
cauaggcaggggugaagua

SEQ ID NO: 753873 - RNA, 19 nt, Artificial Sequence
  Description of Artificial Sequence: Synthetic oligonucleotide
ccuuggucgcacacucgag

SEQ ID NO: 753874 - RNA, 19 nt, Artificial Sequence
  Description of Artificial Sequence: Synthetic oligonucleotide
gccuucgcgccccgggacg

SEQ ID NO: 753875 - RNA, 19 nt, Artificial Sequence
  Description of Artificial Sequence: Synthetic oligonucleotide
cccuggucaacacccgcag

SEQ ID NO: 753876 - RNA, 19 nt, Artificial Sequence
  Description of Artificial Sequence: Synthetic oligonucleotide
cuuaggacuccgagccaua

SEQ ID NO: 753877 - RNA, 19 nt, Artificial Sequence
  Description of Artificial Sequence: Synthetic oligonucleotide
aacuccccucaagcgucgu

SEQ ID NO: 753878 - RNA, 19 nt, Artificial Sequence
  Description of Artificial Sequence: Synthetic oligonucleotide
agcuaagacuuuggagguu

SEQ ID NO: 753879 - RNA, 19 nt, Artificial Sequence
  Description of Artificial Sequence: Synthetic oligonucleotide
ugcccgguugaaggcccag

SEQ ID NO: 753880 - RNA, 19 nt, Artificial Sequence
  Description of Artificial Sequence: Synthetic oligonucleotide
gaggugcagcauuucccgu

SEQ ID NO: 753881 - RNA, 19 nt, Artificial Sequence
  Description of Artificial Sequence: Synthetic oligonucleotide
ccagucagcuugauacuga

SEQ ID NO: 753882 - RNA, 19 nt, Artificial Sequence
  Description of Artificial Sequence: Synthetic oligonucleotide
gucgugcaaccucauacuu

SEQ ID NO: 753883 - RNA, 19 nt, Artificial Sequence
  Description of Artificial Sequence: Synthetic oligonucleotide
acgccggcuuaggacuccg

SEQ ID NO: 753884 - RNA, 19 nt, Artificial Sequence
  Description of Artificial Sequence: Synthetic oligonucleotide
cuccgucuugaaauugccu

SEQ ID NO: 753885 - RNA, 19 nt, Artificial Sequence
  Description of Artificial Sequence: Synthetic oligonucleotide
cgcagaaaacuuuuggacu

SEQ ID NO: 753886 - RNA, 19 nt, Artificial Sequence
  Description of Artificial Sequence: Synthetic oligonucleotide
cgguugaaggcccaggcga

SEQ ID NO: 753887 - RNA, 19 nt, Artificial Sequence
  Description of Artificial Sequence: Synthetic oligonucleotide
caggcgaaccucucucucu

SEQ ID NO: 753888 - RNA, 19 nt, Artificial Sequence
  Description of Artificial Sequence: Synthetic oligonucleotide
cggccacgaaacaagccag

SEQ ID NO: 753889 - RNA, 19 nt, Artificial Sequence
  Description of Artificial Sequence: Synthetic oligonucleotide
auccccaucuugggauggu

SEQ ID NO: 753890 - RNA, 19 nt, Artificial Sequence
  Description of Artificial Sequence: Synthetic oligonucleotide
gugguagauuuucucuauu

SEQ ID NO: 753891 - RNA, 19 nt, Artificial Sequence
  Description of Artificial Sequence: Synthetic oligonucleotide
gcccaggcgaaccucucuc

SEQ ID NO: 753892 - RNA, 19 nt, Artificial Sequence
  Description of Artificial Sequence: Synthetic oligonucleotide
cagccacaugacuguauua

SEQ ID NO: 753893 - RNA, 19 nt, Artificial Sequence
  Description of Artificial Sequence: Synthetic oligonucleotide
guucgcccgguuguaagcu

SEQ ID NO: 753894 - RNA, 19 nt, Artificial Sequence
  Description of Artificial Sequence: Synthetic oligonucleotide
ccacccugcuuuguuggcc

SEQ ID NO: 753895 - RNA, 19 nt, Artificial Sequence
  Description of Artificial Sequence: Synthetic oligonucleotide
gcgcaccucuuuccacugg

SEQ ID NO: 753896 - RNA, 19 nt, Artificial Sequence
  Description of Artificial Sequence: Synthetic oligonucleotide
gccccgggacgccuggcgg

SEQ ID NO: 753897 - RNA, 19 nt, Artificial Sequence
  Description of Artificial Sequence: Synthetic oligonucleotide
caccaucaggcaggggcuc

SEQ ID NO: 753898 - RNA, 19 nt, Artificial Sequence
  Description of Artificial Sequence: Synthetic oligonucleotide
cagccgucucacccucuuc

SEQ ID NO: 753899 - RNA, 19 nt, Artificial Sequence
  Description of Artificial Sequence: Synthetic oligonucleotide
ccccaucuugggaugguca

SEQ ID NO: 753900 - RNA, 19 nt, Artificial Sequence
  Description of Artificial Sequence: Synthetic oligonucleotide
cccacccugcuuuguuggc

SEQ ID NO: 753901 - RNA, 19 nt, Artificial Sequence
  Description of Artificial Sequence: Synthetic oligonucleotide
cgguuguaagcuaagacuu

SEQ ID NO: 753902 - RNA, 19 nt, Artificial Sequence
  Description of Artificial Sequence: Synthetic oligonucleotide
ggcuuaggacuccgagcca

SEQ ID NO: 753903 - RNA, 19 nt, Artificial Sequence
  Description of Artificial Sequence: Synthetic oligonucleotide
acaagccagguggcuccgu

SEQ ID NO: 753904 - RNA, 19 nt, Artificial Sequence
  Description of Artificial Sequence: Synthetic oligonucleotide
aagcgucgugcaaccucau

SEQ ID NO: 753905 - RNA, 19 nt, Artificial Sequence
  Description of Artificial Sequence: Synthetic oligonucleotide
ccaagaaguccagcuccac

SEQ ID NO: 753906 - RNA, 19 nt, Artificial Sequence
  Description of Artificial Sequence: Synthetic oligonucleotide
cacucgaggugcagcauuu

SEQ ID NO: 753907 - RNA, 19 nt, Artificial Sequence
  Description of Artificial Sequence: Synthetic oligonucleotide
guggcuccgucuugaaauu

SEQ ID NO: 753908 - RNA, 19 nt, Artificial Sequence
  Description of Artificial Sequence: Synthetic oligonucleotide
cguccgacauuuuauuaua

SEQ ID NO: 753909 - RNA, 19 nt, Artificial Sequence
  Description of Artificial Sequence: Synthetic oligonucleotide
gaguccugcgggccucagu

SEQ ID NO: 753910 - RNA, 19 nt, Artificial Sequence
  Description of Artificial Sequence: Synthetic oligonucleotide
cgguucgcccgguuguaag

SEQ ID NO: 753911 - RNA, 19 nt, Artificial Sequence
  Description of Artificial Sequence: Synthetic oligonucleotide
gucgcacacucgaggugca

SEQ ID NO: 753912 - RNA, 19 nt, Artificial Sequence
  Description of Artificial Sequence: Synthetic oligonucleotide
cuucgcgccccgggacgcc

SEQ ID NO: 753913 - RNA, 19 nt, Artificial Sequence
  Description of Artificial Sequence: Synthetic oligonucleotide
cugcuuccgcagaaaacuu

SEQ ID NO: 753914 - RNA, 19 nt, Artificial Sequence
  Description of Artificial Sequence: Synthetic oligonucleotide
acccugcuuuguuggccuu

SEQ ID NO: 753915 - RNA, 19 nt, Artificial Sequence
  Description of Artificial Sequence: Synthetic oligonucleotide
gggauugcucucugauggu

SEQ ID NO: 753916 - RNA, 19 nt, Artificial Sequence
  Description of Artificial Sequence: Synthetic oligonucleotide
gcgccucagucaccugugc

SEQ ID NO: 753917 - RNA, 19 nt, Artificial Sequence
  Description of Artificial Sequence: Synthetic oligonucleotide
gcuuaggacuccgagccau

SEQ ID NO: 753918 - RNA, 19 nt, Artificial Sequence
  Description of Artificial Sequence: Synthetic oligonucleotide
cccguacaaaguggcuacc

SEQ ID NO: 753919 - RNA, 19 nt, Artificial Sequence
  Description of Artificial Sequence: Synthetic oligonucleotide
gguuguaagcuaagacuuu

SEQ ID NO: 753920 - RNA, 19 nt, Artificial Sequence
  Description of Artificial Sequence: Synthetic oligonucleotide
gccacgaaacaagccaggu

SEQ ID NO: 753921 - RNA, 19 nt, Artificial Sequence
  Description of Artificial Sequence: Synthetic oligonucleotide
cugcccgguugaaggccca

SEQ ID NO: 753922 - RNA, 19 nt, Artificial Sequence
  Description of Artificial Sequence: Synthetic oligonucleotide
ggauugcucucugaugguu

SEQ ID NO: 753923 - RNA, 19 nt, Artificial Sequence
  Description of Artificial Sequence: Synthetic oligonucleotide
gcuuuucggccucuucuuu

SEQ ID NO: 753924 - RNA, 19 nt, Artificial Sequence
  Description of Artificial Sequence: Synthetic oligonucleotide
gcccgguuguaagcuaaga

SEQ ID NO: 753925 - RNA, 19 nt, Artificial Sequence
  Description of Artificial Sequence: Synthetic oligonucleotide
acagcccgguucgcccggu

SEQ ID NO: 753926 - RNA, 19 nt, Artificial Sequence
  Description of Artificial Sequence: Synthetic oligonucleotide
cgucgugcaaccucauacu

SEQ ID NO: 753927 - RNA, 19 nt, Artificial Sequence
  Description of Artificial Sequence: Synthetic oligonucleotide
ccagccacaugacuguauu

SEQ ID NO: 753928 - RNA, 19 nt, Artificial Sequence
  Description of Artificial Sequence: Synthetic oligonucleotide
cucuggcagucagccccuc

SEQ ID NO: 753929 - RNA, 19 nt, Artificial Sequence
  Description of Artificial Sequence: Synthetic oligonucleotide
cgcccgguuguaagcuaag

SEQ ID NO: 753930 - RNA, 19 nt, Artificial Sequence
  Description of Artificial Sequence: Synthetic oligonucleotide
ccauaacagccgcaugcgu

SEQ ID NO: 753931 - RNA, 19 nt, Artificial Sequence
  Description of Artificial Sequence: Synthetic oligonucleotide
ccuguucgcagugccagcu

SEQ ID NO: 753932 - RNA, 19 nt, Artificial Sequence
  Description of Artificial Sequence: Synthetic oligonucleotide
gcccgguucgcccgguugu

SEQ ID NO: 753933 - RNA, 19 nt, Artificial Sequence
  Description of Artificial Sequence: Synthetic oligonucleotide
cucaagcgucgugcaaccu

SEQ ID NO: 753934 - RNA, 19 nt, Artificial Sequence
  Description of Artificial Sequence: Synthetic oligonucleotide
ggcccaggcgaaccucucu

SEQ ID NO: 753935 - RNA, 19 nt, Artificial Sequence
  Description of Artificial Sequence: Synthetic oligonucleotide
cuguucgcagugccagcuu

SEQ ID NO: 753936 - RNA, 19 nt, Artificial Sequence
  Description of Artificial Sequence: Synthetic oligonucleotide
cgccccgggacgccuggcg

SEQ ID NO: 753937 - RNA, 19 nt, Artificial Sequence
  Description of Artificial Sequence: Synthetic oligonucleotide
ccguacaaaguggcuaccu

SEQ ID NO: 753938 - RNA, 19 nt, Artificial Sequence
  Description of Artificial Sequence: Synthetic oligonucleotide
ggggugaaguauggacccu

SEQ ID NO: 753939 - RNA, 19 nt, Artificial Sequence
  Description of Artificial Sequence: Synthetic oligonucleotide
cucgaaggucuuggggauu

SEQ ID NO: 753940 - RNA, 19 nt, Artificial Sequence
  Description of Artificial Sequence: Synthetic oligonucleotide
gccuuuccaugcagccgga

SEQ ID NO: 753941 - RNA, 19 nt, Artificial Sequence
  Description of Artificial Sequence: Synthetic oligonucleotide
cgaaacaagccagguggcu

SEQ ID NO: 753942 - RNA, 19 nt, Artificial Sequence
  Description of Artificial Sequence: Synthetic oligonucleotide
ccccucaagcgucgugcaa

SEQ ID NO: 753943 - RNA, 19 nt, Artificial Sequence
  Description of Artificial Sequence: Synthetic oligonucleotide
ccacauccucuggcaugac

SEQ ID NO: 753944 - RNA, 19 nt, Artificial Sequence
  Description of Artificial Sequence: Synthetic oligonucleotide
ccgggacgccuggcggcag

SEQ ID NO: 753945 - RNA, 19 nt, Artificial Sequence
  Description of Artificial Sequence: Synthetic oligonucleotide
ccgguucgcccgguuguaa

SEQ ID NO: 753946 - RNA, 19 nt, Artificial Sequence
  Description of Artificial Sequence: Synthetic oligonucleotide
ccgucucacccucuuccuu

SEQ ID NO: 753947 - RNA, 19 nt, Artificial Sequence
  Description of Artificial Sequence: Synthetic oligonucleotide
cgcgguuauuguagcggau

SEQ ID NO: 753948 - RNA, 19 nt, Artificial Sequence
  Description of Artificial Sequence: Synthetic oligonucleotide
cccgguucgcccgguugua

SEQ ID NO: 753949 - RNA, 19 nt, Artificial Sequence
  Description of Artificial Sequence: Synthetic oligonucleotide
cgccggcuuaggacuccga

SEQ ID NO: 753950 - RNA, 19 nt, Artificial Sequence
  Description of Artificial Sequence: Synthetic oligonucleotide
cagcccgguucgcccgguu

SEQ ID NO: 753951 - RNA, 19 nt, Artificial Sequence
  Description of Artificial Sequence: Synthetic oligonucleotide
ccacugucacgcgguuauu

SEQ ID NO: 753952 - RNA, 19 nt, Artificial Sequence
  Description of Artificial Sequence: Synthetic oligonucleotide
ccgcugccacgcucagcuu

SEQ ID NO: 753953 - RNA, 19 nt, Artificial Sequence
  Description of Artificial Sequence: Synthetic oligonucleotide
ucaaagguaauuuuaauag

SEQ ID NO: 753954 - RNA, 19 nt, Artificial Sequence
  Description of Artificial Sequence: Synthetic oligonucleotide
ucaacugacaucccaaagg

SEQ ID NO: 753955 - RNA, 19 nt, Artificial Sequence
  Description of Artificial Sequence: Synthetic oligonucleotide
gauaacaucgguugggccg

SEQ ID NO: 753956 - RNA, 19 nt, Artificial Sequence
  Description of Artificial Sequence: Synthetic oligonucleotide
aucuauaacacauucaccu

SEQ ID NO: 753957 - RNA, 19 nt, Artificial Sequence
  Description of Artificial Sequence: Synthetic oligonucleotide
auuaguuccaaauauauua

SEQ ID NO: 753958 - RNA, 19 nt, Artificial Sequence
  Description of Artificial Sequence: Synthetic oligonucleotide
acuugcauaagacaauuac

SEQ ID NO: 753959 - RNA, 19 nt, Artificial Sequence
  Description of Artificial Sequence: Synthetic oligonucleotide
auuaacucaacaguaaaac

SEQ ID NO: 753960 - RNA, 19 nt, Artificial Sequence
  Description of Artificial Sequence: Synthetic oligonucleotide
uuaacucuaccucagacca

SEQ ID NO: 753961 - RNA, 19 nt, Artificial Sequence
  Description of Artificial Sequence: Synthetic oligonucleotide
uauauuauaguguauggaa

SEQ ID NO: 753962 - RNA, 19 nt, Artificial Sequence
  Description of Artificial Sequence: Synthetic oligonucleotide
agaucuaugacucauagua

SEQ ID NO: 753963 - RNA, 19 nt, Artificial Sequence
  Description of Artificial Sequence: Synthetic oligonucleotide
uuugccucuaaccaaagca

SEQ ID NO: 753964 - RNA, 19 nt, Artificial Sequence
  Description of Artificial Sequence: Synthetic oligonucleotide
aaguuauucucuucgacug

SEQ ID NO: 753965 - RNA, 19 nt, Artificial Sequence
  Description of Artificial Sequence: Synthetic oligonucleotide
uuuguaacccacaaaauau

SEQ ID NO: 753966 - RNA, 19 nt, Artificial Sequence
  Description of Artificial Sequence: Synthetic oligonucleotide
uuugauauaucugauguca

SEQ ID NO: 753967 - RNA, 19 nt, Artificial Sequence
  Description of Artificial Sequence: Synthetic oligonucleotide
ugcucuaauaaauacacac

SEQ ID NO: 753968 - RNA, 19 nt, Artificial Sequence
  Description of Artificial Sequence: Synthetic oligonucleotide
gauucaaccagcuagguaa

SEQ ID NO: 753969 - RNA, 19 nt, Artificial Sequence
  Description of Artificial Sequence: Synthetic oligonucleotide
gauguauuaggucacaaca

SEQ ID NO: 753970 - RNA, 19 nt, Artificial Sequence
  Description of Artificial Sequence: Synthetic oligonucleotide
aaaacuaagauuaacucaa

SEQ ID NO: 753971 - RNA, 19 nt, Artificial Sequence
  Description of Artificial Sequence: Synthetic oligonucleotide
uuaguuccaaauauauuag

SEQ ID NO: 753972 - RNA, 19 nt, Artificial Sequence
  Description of Artificial Sequence: Synthetic oligonucleotide
ugaaacaucucccuucaag

SEQ ID NO: 753973 - RNA, 19 nt, Artificial Sequence
  Description of Artificial Sequence: Synthetic oligonucleotide
gaugauuucggcaucgacg

SEQ ID NO: 753974 - RNA, 19 nt, Artificial Sequence
  Description of Artificial Sequence: Synthetic oligonucleotide
augguugcagccuugacgg

SEQ ID NO: 753975 - RNA, 19 nt, Artificial Sequence
  Description of Artificial Sequence: Synthetic oligonucleotide
guuuauuacucucugcagg

SEQ ID NO: 753976 - RNA, 19 nt, Artificial Sequence
  Description of Artificial Sequence: Synthetic oligonucleotide
aaaccaagaucuaugacuc

SEQ ID NO: 753977 - RNA, 19 nt, Artificial Sequence
  Description of Artificial Sequence: Synthetic oligonucleotide
aacacugccagaccagugg

SEQ ID NO: 753978 - RNA, 19 nt, Artificial Sequence
  Description of Artificial Sequence: Synthetic oligonucleotide
uaacucaacaguaaaacau

SEQ ID NO: 753979 - RNA, 19 nt, Artificial Sequence
  Description of Artificial Sequence: Synthetic oligonucleotide
aauaguucuugcucuauga

SEQ ID NO: 753980 - RNA, 19 nt, Artificial Sequence
  Description of Artificial Sequence: Synthetic oligonucleotide
auauaucugaugucagacc

SEQ ID NO: 753981 - RNA, 19 nt, Artificial Sequence
  Description of Artificial Sequence: Synthetic oligonucleotide
acgucacucacuuuuaaac

SEQ ID NO: 753982 - RNA, 19 nt, Artificial Sequence
  Description of Artificial Sequence: Synthetic oligonucleotide
ugcuuugagaauuuccccg

SEQ ID NO: 753983 - RNA, 19 nt, Artificial Sequence
  Description of Artificial Sequence: Synthetic oligonucleotide
aagacaauuacaugaaaua

SEQ ID NO: 753984 - RNA, 19 nt, Artificial Sequence
  Description of Artificial Sequence: Synthetic oligonucleotide
ucacaguucaagcaucggg

SEQ ID NO: 753985 - RNA, 19 nt, Artificial Sequence
  Description of Artificial Sequence: Synthetic oligonucleotide
aguuaacucuaccucagac

SEQ ID NO: 753986 - RNA, 19 nt, Artificial Sequence
  Description of Artificial Sequence: Synthetic oligonucleotide
uugcauaagacaauuacau

SEQ ID NO: 753987 - RNA, 19 nt, Artificial Sequence
  Description of Artificial Sequence: Synthetic oligonucleotide
aauaaaagguaccaauauu

SEQ ID NO: 753988 - RNA, 19 nt, Artificial Sequence
  Description of Artificial Sequence: Synthetic oligonucleotide
caugccuaaguucugagcc

SEQ ID NO: 753989 - RNA, 19 nt, Artificial Sequence
  Description of Artificial Sequence: Synthetic oligonucleotide
uucaaaugcucuaauaaau

SEQ ID NO: 753990 - RNA, 19 nt, Artificial Sequence
  Description of Artificial Sequence: Synthetic oligonucleotide
uaaguuauucucuucgacu

SEQ ID NO: 753991 - RNA, 19 nt, Artificial Sequence
  Description of Artificial Sequence: Synthetic oligonucleotide
aaaaguccaguuuucgccu

SEQ ID NO: 753992 - RNA, 19 nt, Artificial Sequence
  Description of Artificial Sequence: Synthetic oligonucleotide
ucacauuaugccaagaguu

SEQ ID NO: 753993 - RNA, 19 nt, Artificial Sequence
  Description of Artificial Sequence: Synthetic oligonucleotide
ggaaguuuaacacugccag

SEQ ID NO: 753994 - RNA, 19 nt, Artificial Sequence
  Description of Artificial Sequence: Synthetic oligonucleotide
uuuauuacucucugcaggu

SEQ ID NO: 753995 - RNA, 19 nt, Artificial Sequence
  Description of Artificial Sequence: Synthetic oligonucleotide
uccgcaauaguguuuagca

SEQ ID NO: 753996 - RNA, 19 nt, Artificial Sequence
  Description of Artificial Sequence: Synthetic oligonucleotide
cuauaacacauucaccucc

SEQ ID NO: 753997 - RNA, 19 nt, Artificial Sequence
  Description of Artificial Sequence: Synthetic oligonucleotide
ugcagguucguucauguug

SEQ ID NO: 753998 - RNA, 19 nt, Artificial Sequence
  Description of Artificial Sequence: Synthetic oligonucleotide
ugaauuagucccacgcucc

SEQ ID NO: 753999 - RNA, 19 nt, Artificial Sequence
  Description of Artificial Sequence: Synthetic oligonucleotide
uuuucgccuagauaaagug

SEQ ID NO: 754000 - RNA, 19 nt, Artificial Sequence
  Description of Artificial Sequence: Synthetic oligonucleotide
auuaggucacaacauaaca

SEQ ID NO: 754001 - RNA, 19 nt, Artificial Sequence
  Description of Artificial Sequence: Synthetic oligonucleotide
uaaacauuugcgcuugcac

SEQ ID NO: 754002 - RNA, 19 nt, Artificial Sequence
  Description of Artificial Sequence: Synthetic oligonucleotide
auagaauucuucaauagcu

SEQ ID NO: 754003 - RNA, 19 nt, Artificial Sequence
  Description of Artificial Sequence: Synthetic oligonucleotide
uucucuacaauugucguca

SEQ ID NO: 754004 - RNA, 19 nt, Artificial Sequence
  Description of Artificial Sequence: Synthetic oligonucleotide
uauuuguaaggaaaacuaa

SEQ ID NO: 754005 - RNA, 19 nt, Artificial Sequence
  Description of Artificial Sequence: Synthetic oligonucleotide
uauuaggucacaacauaac

SEQ ID NO: 754006 - RNA, 19 nt, Artificial Sequence
  Description of Artificial Sequence: Synthetic oligonucleotide
aagagugaaacaucucccu

SEQ ID NO: 754007 - RNA, 19 nt, Artificial Sequence
  Description of Artificial Sequence: Synthetic oligonucleotide
uauuagaaaccaguaacca

SEQ ID NO: 754008 - RNA, 19 nt, Artificial Sequence
  Description of Artificial Sequence: Synthetic oligonucleotide
aacauuugcgcuugcacaa

SEQ ID NO: 754009 - RNA, 19 nt, Artificial Sequence
  Description of Artificial Sequence: Synthetic oligonucleotide
uucucuucgacugauagaa

SEQ ID NO: 754010 - RNA, 19 nt, Artificial Sequence
  Description of Artificial Sequence: Synthetic oligonucleotide
ugggauucaaccagcuagg

SEQ ID NO: 754011 - RNA, 19 nt, Artificial Sequence
  Description of Artificial Sequence: Synthetic oligonucleotide
augauuucggcaucgacgu

SEQ ID NO: 754012 - RNA, 19 nt, Artificial Sequence
  Description of Artificial Sequence: Synthetic oligonucleotide
gaacaaaugaagugucggc

SEQ ID NO: 754013 - RNA, 19 nt, Artificial Sequence
  Description of Artificial Sequence: Synthetic oligonucleotide
uugauauaucugaugucag

SEQ ID NO: 754014 - RNA, 19 nt, Artificial Sequence
  Description of Artificial Sequence: Synthetic oligonucleotide
uaaagcuaugguugcagcc

SEQ ID NO: 754015 - RNA, 19 nt, Artificial Sequence
  Description of Artificial Sequence: Synthetic oligonucleotide
uugaauuagucccacgcuc

SEQ ID NO: 754016 - RNA, 19 nt, Artificial Sequence
  Description of Artificial Sequence: Synthetic oligonucleotide
ucgacugauagaauaaaau

SEQ ID NO: 754017 - RNA, 19 nt, Artificial Sequence
  Description of Artificial Sequence: Synthetic oligonucleotide
ucugaugucagaccauaga

SEQ ID NO: 754018 - RNA, 19 nt, Artificial Sequence
  Description of Artificial Sequence: Synthetic oligonucleotide
uguauuaggucacaacaua

SEQ ID NO: 754019 - RNA, 19 nt, Artificial Sequence
  Description of Artificial Sequence: Synthetic oligonucleotide
uugagaauuuccccgcuug

SEQ ID NO: 754020 - RNA, 19 nt, Artificial Sequence
  Description of Artificial Sequence: Synthetic oligonucleotide
uuucgccuagauaaagugc

SEQ ID NO: 754021 - RNA, 19 nt, Artificial Sequence
  Description of Artificial Sequence: Synthetic oligonucleotide
aacucaacaguaaaacaug

SEQ ID NO: 754022 - RNA, 19 nt, Artificial Sequence
  Description of Artificial Sequence: Synthetic oligonucleotide
ugacucauaguauuuguaa

SEQ ID NO: 754023 - RNA, 19 nt, Artificial Sequence
  Description of Artificial Sequence: Synthetic oligonucleotide
aguguauggaagucaacug

SEQ ID NO: 754024 - RNA, 19 nt, Artificial Sequence
  Description of Artificial Sequence: Synthetic oligonucleotide
agugauaacaucgguuggg

SEQ ID NO: 754025 - RNA, 19 nt, Artificial Sequence
  Description of Artificial Sequence: Synthetic oligonucleotide
auuauaguguauggaaguc

SEQ ID NO: 754026 - RNA, 19 nt, Artificial Sequence
  Description of Artificial Sequence: Synthetic oligonucleotide
ugcgcuugcacaaauuuaa

SEQ ID NO: 754027 - RNA, 19 nt, Artificial Sequence
  Description of Artificial Sequence: Synthetic oligonucleotide
auauuauaguguauggaag

SEQ ID NO: 754028 - RNA, 19 nt, Artificial Sequence
  Description of Artificial Sequence: Synthetic oligonucleotide
uucaccucgaagguaaaag

SEQ ID NO: 754029 - RNA, 19 nt, Artificial Sequence
  Description of Artificial Sequence: Synthetic oligonucleotide
aaagcuaugguugcagccu

SEQ ID NO: 754030 - RNA, 19 nt, Artificial Sequence
  Description of Artificial Sequence: Synthetic oligonucleotide
caagaucuaugacucauag

SEQ ID NO: 754031 - RNA, 19 nt, Artificial Sequence
  Description of Artificial Sequence: Synthetic oligonucleotide
ucgccgauguauuagguca

SEQ ID NO: 754032 - RNA, 19 nt, Artificial Sequence
  Description of Artificial Sequence: Synthetic oligonucleotide
uaguguauggaagucaacu

SEQ ID NO: 754033 - RNA, 19 nt, Artificial Sequence
  Description of Artificial Sequence: Synthetic oligonucleotide
gaagagugaaacaucuccc

SEQ ID NO: 754034 - RNA, 19 nt, Artificial Sequence
  Description of Artificial Sequence: Synthetic oligonucleotide
cuauccucuucauugcugc

SEQ ID NO: 754035 - RNA, 19 nt, Artificial Sequence
  Description of Artificial Sequence: Synthetic oligonucleotide
ugcauaagacaauuacaug

SEQ ID NO: 754036 - RNA, 19 nt, Artificial Sequence
  Description of Artificial Sequence: Synthetic oligonucleotide
aguguuucuguguugcuga

SEQ ID NO: 754037 - RNA, 19 nt, Artificial Sequence
  Description of Artificial Sequence: Synthetic oligonucleotide
auucacaguauauuauagu

SEQ ID NO: 754038 - RNA, 19 nt, Artificial Sequence
  Description of Artificial Sequence: Synthetic oligonucleotide
auaacaucgguugggccgc

SEQ ID NO: 754039 - RNA, 19 nt, Artificial Sequence
  Description of Artificial Sequence: Synthetic oligonucleotide
uuaaagcuaugguugcagc

SEQ ID NO: 754040 - RNA, 19 nt, Artificial Sequence
  Description of Artificial Sequence: Synthetic oligonucleotide
ucuucgacugauagaauaa

SEQ ID NO: 754041 - RNA, 19 nt, Artificial Sequence
  Description of Artificial Sequence: Synthetic oligonucleotide
uauuacucucugcagguuc

SEQ ID NO: 754042 - RNA, 19 nt, Artificial Sequence
  Description of Artificial Sequence: Synthetic oligonucleotide
gcuacucacaguuucacag

SEQ ID NO: 754043 - RNA, 19 nt, Artificial Sequence
  Description of Artificial Sequence: Synthetic oligonucleotide
gaaauaacccuguuccguc

SEQ ID NO: 754044 - RNA, 19 nt, Artificial Sequence
  Description of Artificial Sequence: Synthetic oligonucleotide
caagcaucggguuucguug

SEQ ID NO: 754045 - RNA, 19 nt, Artificial Sequence
  Description of Artificial Sequence: Synthetic oligonucleotide
uuuaaccuuuguaacccac

SEQ ID NO: 754046 - RNA, 19 nt, Artificial Sequence
  Description of Artificial Sequence: Synthetic oligonucleotide
gaaacaaggcuauagugcu

SEQ ID NO: 754047 - RNA, 19 nt, Artificial Sequence
  Description of Artificial Sequence: Synthetic oligonucleotide
ugucagaccauagaauucu

SEQ ID NO: 754048 - RNA, 19 nt, Artificial Sequence
  Description of Artificial Sequence: Synthetic oligonucleotide
cuugcauaagacaauuaca

SEQ ID NO: 754049 - RNA, 19 nt, Artificial Sequence
  Description of Artificial Sequence: Synthetic oligonucleotide
aagcaucggguuucguugg

SEQ ID NO: 754050 - RNA, 19 nt, Artificial Sequence
  Description of Artificial Sequence: Synthetic oligonucleotide
uguuccgucuucuccagug

SEQ ID NO: 754051 - RNA, 19 nt, Artificial Sequence
  Description of Artificial Sequence: Synthetic oligonucleotide
aguucaagcaucggguuuc

SEQ ID NO: 754052 - RNA, 19 nt, Artificial Sequence
  Description of Artificial Sequence: Synthetic oligonucleotide
gaguuugcauguuccuucg

SEQ ID NO: 754053 - RNA, 19 nt, Artificial Sequence
  Description of Artificial Sequence: Synthetic oligonucleotide
aaauaacccuguuccgucu

SEQ ID NO: 754054 - RNA, 19 nt, Artificial Sequence
  Description of Artificial Sequence: Synthetic oligonucleotide
ucuauaacacauucaccuc

SEQ ID NO: 754055 - RNA, 19 nt, Artificial Sequence
  Description of Artificial Sequence: Synthetic oligonucleotide
aaacuaagauuaacucaac

SEQ ID NO: 754056 - RNA, 19 nt, Artificial Sequence
  Description of Artificial Sequence: Synthetic oligonucleotide
aaucucguggacccaggug

SEQ ID NO: 754057 - RNA, 19 nt, Artificial Sequence
  Description of Artificial Sequence: Synthetic oligonucleotide
uuugcgcuugcacaaauuu

SEQ ID NO: 754058 - RNA, 19 nt, Artificial Sequence
  Description of Artificial Sequence: Synthetic oligonucleotide
cuagguaagcacuguuggg

SEQ ID NO: 754059 - RNA, 19 nt, Artificial Sequence
  Description of Artificial Sequence: Synthetic oligonucleotide
agugaaacaucucccuuca

SEQ ID NO: 754060 - RNA, 19 nt, Artificial Sequence
  Description of Artificial Sequence: Synthetic oligonucleotide
aagaucuaugacucauagu

SEQ ID NO: 754061 - RNA, 19 nt, Artificial Sequence
  Description of Artificial Sequence: Synthetic oligonucleotide
ugccucuaaccaaagcaag

SEQ ID NO: 754062 - RNA, 19 nt, Artificial Sequence
  Description of Artificial Sequence: Synthetic oligonucleotide
ucuugcucuaugauuaguu

SEQ ID NO: 754063 - RNA, 19 nt, Artificial Sequence
  Description of Artificial Sequence: Synthetic oligonucleotide
ucuaugacucauaguauuu

SEQ ID NO: 754064 - RNA, 19 nt, Artificial Sequence
  Description of Artificial Sequence: Synthetic oligonucleotide
accaauauucaaaugcucu

SEQ ID NO: 754065 - RNA, 19 nt, Artificial Sequence
  Description of Artificial Sequence: Synthetic oligonucleotide
uucgacugauagaauaaaa

SEQ ID NO: 754066 - RNA, 19 nt, Artificial Sequence
  Description of Artificial Sequence: Synthetic oligonucleotide
cuuugcuacucacaguuuc

SEQ ID NO: 754067 - RNA, 19 nt, Artificial Sequence
  Description of Artificial Sequence: Synthetic oligonucleotide
agacaauuacaugaaauaa

SEQ ID NO: 754068 - RNA, 19 nt, Artificial Sequence
  Description of Artificial Sequence: Synthetic oligonucleotide
uugccucuaaccaaagcaa

SEQ ID NO: 754069 - RNA, 19 nt, Artificial Sequence
  Description of Artificial Sequence: Synthetic oligonucleotide
aauuagucccacgcuccac

SEQ ID NO: 754070 - RNA, 19 nt, Artificial Sequence
  Description of Artificial Sequence: Synthetic oligonucleotide
agaaacccaggaguagugc

SEQ ID NO: 754071 - RNA, 19 nt, Artificial Sequence
  Description of Artificial Sequence: Synthetic oligonucleotide
aucuaugacucauaguauu

SEQ ID NO: 754072 - RNA, 19 nt, Artificial Sequence
  Description of Artificial Sequence: Synthetic oligonucleotide
gaagucaacugacauccca

SEQ ID NO: 754073 - RNA, 19 nt, Artificial Sequence
  Description of Artificial Sequence: Synthetic oligonucleotide
aauuuccccgcuugaauua

SEQ ID NO: 754074 - RNA, 19 nt, Artificial Sequence
  Description of Artificial Sequence: Synthetic oligonucleotide
guauuuguaaggaaaacua

SEQ ID NO: 754075 - RNA, 19 nt, Artificial Sequence
  Description of Artificial Sequence: Synthetic oligonucleotide
ucaccucgaagguaaaagu

SEQ ID NO: 754076 - RNA, 19 nt, Artificial Sequence
  Description of Artificial Sequence: Synthetic oligonucleotide
gcuugaauuagucccacgc

SEQ ID NO: 754077 - RNA, 19 nt, Artificial Sequence
  Description of Artificial Sequence: Synthetic oligonucleotide
cauugcugcaaaauggcca

SEQ ID NO: 754078 - RNA, 19 nt, Artificial Sequence
  Description of Artificial Sequence: Synthetic oligonucleotide
ugagaauuuccccgcuuga

SEQ ID NO: 754079 - RNA, 19 nt, Artificial Sequence
  Description of Artificial Sequence: Synthetic oligonucleotide
aaucuggcugcaguuaacu

SEQ ID NO: 754080 - RNA, 19 nt, Artificial Sequence
  Description of Artificial Sequence: Synthetic oligonucleotide
gugaguucugguuuauuac

SEQ ID NO: 754081 - RNA, 19 nt, Artificial Sequence
  Description of Artificial Sequence: Synthetic oligonucleotide
auuagucccacgcuccacu

SEQ ID NO: 754082 - RNA, 19 nt, Artificial Sequence
  Description of Artificial Sequence: Synthetic oligonucleotide
uaccaauauucaaaugcuc

SEQ ID NO: 754083 - RNA, 19 nt, Artificial Sequence
  Description of Artificial Sequence: Synthetic oligonucleotide
ugauaacaucgguugggcc

SEQ ID NO: 754084 - RNA, 19 nt, Artificial Sequence
  Description of Artificial Sequence: Synthetic oligonucleotide
acgggugaacaucuauaac

SEQ ID NO: 754085 - RNA, 19 nt, Artificial Sequence
  Description of Artificial Sequence: Synthetic oligonucleotide
gauuucggcaucgacguca

SEQ ID NO: 754086 - RNA, 19 nt, Artificial Sequence
  Description of Artificial Sequence: Synthetic oligonucleotide
augguacaaacauuucccu

SEQ ID NO: 754087 - RNA, 19 nt, Artificial Sequence
  Description of Artificial Sequence: Synthetic oligonucleotide
aaaucucguggacccaggu

SEQ ID NO: 754088 - RNA, 19 nt, Artificial Sequence
  Description of Artificial Sequence: Synthetic oligonucleotide
gauuaacucaacaguaaaa

SEQ ID NO: 754089 - RNA, 19 nt, Artificial Sequence
  Description of Artificial Sequence: Synthetic oligonucleotide
acauuaugccaagaguuug

SEQ ID NO: 754090 - RNA, 19 nt, Artificial Sequence
  Description of Artificial Sequence: Synthetic oligonucleotide
agaauuuccccgcuugaau

SEQ ID NO: 754091 - RNA, 19 nt, Artificial Sequence
  Description of Artificial Sequence: Synthetic oligonucleotide
agucccacgcuccacuaag

SEQ ID NO: 754092 - RNA, 19 nt, Artificial Sequence
  Description of Artificial Sequence: Synthetic oligonucleotide
uuucguuggugaguguucc

SEQ ID NO: 754093 - RNA, 19 nt, Artificial Sequence
  Description of Artificial Sequence: Synthetic oligonucleotide
augccaagaguuugcaugu

SEQ ID NO: 754094 - RNA, 19 nt, Artificial Sequence
  Description of Artificial Sequence: Synthetic oligonucleotide
ggcuguauaugguacaaac

SEQ ID NO: 754095 - RNA, 19 nt, Artificial Sequence
  Description of Artificial Sequence: Synthetic oligonucleotide
uuuaagugcagggccaaaa

SEQ ID NO: 754096 - RNA, 19 nt, Artificial Sequence
  Description of Artificial Sequence: Synthetic oligonucleotide
gguuuauuacucucugcag

SEQ ID NO: 754097 - RNA, 19 nt, Artificial Sequence
  Description of Artificial Sequence: Synthetic oligonucleotide
aguuugcauguuccuucgc

SEQ ID NO: 754098 - RNA, 19 nt, Artificial Sequence
  Description of Artificial Sequence: Synthetic oligonucleotide
ucaagcaucggguuucguu

SEQ ID NO: 754099 - RNA, 19 nt, Artificial Sequence
  Description of Artificial Sequence: Synthetic oligonucleotide
aaaaucucguggacccagg

SEQ ID NO: 754100 - RNA, 19 nt, Artificial Sequence
  Description of Artificial Sequence: Synthetic oligonucleotide
aguuuucgccuagauaaag

SEQ ID NO: 754101 - RNA, 19 nt, Artificial Sequence
  Description of Artificial Sequence: Synthetic oligonucleotide
agguaagcacuguugggug

SEQ ID NO: 754102 - RNA, 19 nt, Artificial Sequence
  Description of Artificial Sequence: Synthetic oligonucleotide
aaguccaguuuucgccuag

SEQ ID NO: 754103 - RNA, 19 nt, Artificial Sequence
  Description of Artificial Sequence: Synthetic oligonucleotide
cugacguuuucaguuacag

SEQ ID NO: 754104 - RNA, 19 nt, Artificial Sequence
  Description of Artificial Sequence: Synthetic oligonucleotide
uucggcaucgacgucacuc

SEQ ID NO: 754105 - RNA, 19 nt, Artificial Sequence
  Description of Artificial Sequence: Synthetic oligonucleotide
auauccagauucugaauuu

SEQ ID NO: 754106 - RNA, 19 nt, Artificial Sequence
  Description of Artificial Sequence: Synthetic oligonucleotide
guucacuacacaguguuuc

SEQ ID NO: 754107 - RNA, 19 nt, Artificial Sequence
  Description of Artificial Sequence: Synthetic oligonucleotide
caacaguaaaacaugaaau

SEQ ID NO: 754108 - RNA, 19 nt, Artificial Sequence
  Description of Artificial Sequence: Synthetic oligonucleotide
aagaaacccaggaguagug

SEQ ID NO: 754109 - RNA, 19 nt, Artificial Sequence
  Description of Artificial Sequence: Synthetic oligonucleotide
agaccacccgguaagacag

SEQ ID NO: 754110 - RNA, 19 nt, Artificial Sequence
  Description of Artificial Sequence: Synthetic oligonucleotide
caaaugaagugucggcaug

SEQ ID NO: 754111 - RNA, 19 nt, Artificial Sequence
  Description of Artificial Sequence: Synthetic oligonucleotide
cacccgguaagacagcuug

SEQ ID NO: 754112 - RNA, 19 nt, Artificial Sequence
  Description of Artificial Sequence: Synthetic oligonucleotide
caaaggaaggaaguuuaac

SEQ ID NO: 754113 - RNA, 19 nt, Artificial Sequence
  Description of Artificial Sequence: Synthetic oligonucleotide
ugacgggugaacaucuaua

SEQ ID NO: 754114 - RNA, 19 nt, Artificial Sequence
  Description of Artificial Sequence: Synthetic oligonucleotide
acagucuuagccccuggga

SEQ ID NO: 754115 - RNA, 19 nt, Artificial Sequence
  Description of Artificial Sequence: Synthetic oligonucleotide
auucucuucgacugauaga

SEQ ID NO: 754116 - RNA, 19 nt, Artificial Sequence
  Description of Artificial Sequence: Synthetic oligonucleotide
gacgggugaacaucuauaa

SEQ ID NO: 754117 - RNA, 19 nt, Artificial Sequence
  Description of Artificial Sequence: Synthetic oligonucleotide
aguuauucucuucgacuga

SEQ ID NO: 754118 - RNA, 19 nt, Artificial Sequence
  Description of Artificial Sequence: Synthetic oligonucleotide
auaacacauucacaguaua

SEQ ID NO: 754119 - RNA, 19 nt, Artificial Sequence
  Description of Artificial Sequence: Synthetic oligonucleotide
auaacccuguuccgucuuc

SEQ ID NO: 754120 - RNA, 19 nt, Artificial Sequence
  Description of Artificial Sequence: Synthetic oligonucleotide
uugacgggugaacaucuau

SEQ ID NO: 754121 - RNA, 19 nt, Artificial Sequence
  Description of Artificial Sequence: Synthetic oligonucleotide
ucacucacuuuuaaacauu

SEQ ID NO: 754122 - RNA, 19 nt, Artificial Sequence
  Description of Artificial Sequence: Synthetic oligonucleotide
caauugucgucaucaaaca

SEQ ID NO: 754123 - RNA, 19 nt, Artificial Sequence
  Description of Artificial Sequence: Synthetic oligonucleotide
uugggcuguauaugguaca

SEQ ID NO: 754124 - RNA, 19 nt, Artificial Sequence
  Description of Artificial Sequence: Synthetic oligonucleotide
uccuucgccgauguauuag

SEQ ID NO: 754125 - RNA, 19 nt, Artificial Sequence
  Description of Artificial Sequence: Synthetic oligonucleotide
gugauaacaucgguugggc

SEQ ID NO: 754126 - RNA, 19 nt, Artificial Sequence
  Description of Artificial Sequence: Synthetic oligonucleotide
uucgccgauguauuagguc

SEQ ID NO: 754127 - RNA, 19 nt, Artificial Sequence
  Description of Artificial Sequence: Synthetic oligonucleotide
ccucuuuaagugcagggcc

SEQ ID NO: 754128 - RNA, 19 nt, Artificial Sequence
  Description of Artificial Sequence: Synthetic oligonucleotide
accucgaagguaaaaguga

SEQ ID NO: 754129 - RNA, 19 nt, Artificial Sequence
  Description of Artificial Sequence: Synthetic oligonucleotide
aguuacaguuuuaguucac

SEQ ID NO: 754130 - RNA, 19 nt, Artificial Sequence
  Description of Artificial Sequence: Synthetic oligonucleotide
uuaauaguucuugcucuau

SEQ ID NO: 754131 - RNA, 19 nt, Artificial Sequence
  Description of Artificial Sequence: Synthetic oligonucleotide
guauuaggucacaacauaa

SEQ ID NO: 754132 - RNA, 19 nt, Artificial Sequence
  Description of Artificial Sequence: Synthetic oligonucleotide
gugaacaucuauaacacau

SEQ ID NO: 754133 - RNA, 19 nt, Artificial Sequence
  Description of Artificial Sequence: Synthetic oligonucleotide
acaucgguugggccgcggg

SEQ ID NO: 754134 - RNA, 19 nt, Artificial Sequence
  Description of Artificial Sequence: Synthetic oligonucleotide
auuuaaagcuaugguugca

SEQ ID NO: 754135 - RNA, 19 nt, Artificial Sequence
  Description of Artificial Sequence: Synthetic oligonucleotide
uugcgcuugcacaaauuua

SEQ ID NO: 754136 - RNA, 19 nt, Artificial Sequence
  Description of Artificial Sequence: Synthetic oligonucleotide
aucggguuucguuggugag

SEQ ID NO: 754137 - RNA, 19 nt, Artificial Sequence
  Description of Artificial Sequence: Synthetic oligonucleotide
auguauuaggucacaacau

SEQ ID NO: 754138 - RNA, 19 nt, Artificial Sequence
  Description of Artificial Sequence: Synthetic oligonucleotide
auaguguauggaagucaac

SEQ ID NO: 754139 - RNA, 19 nt, Artificial Sequence
  Description of Artificial Sequence: Synthetic oligonucleotide
uucuagggaucugagccac

SEQ ID NO: 754140 - RNA, 19 nt, Artificial Sequence
  Description of Artificial Sequence: Synthetic oligonucleotide
ccccgcuugaauuaguccc

SEQ ID NO: 754141 - RNA, 19 nt, Artificial Sequence
  Description of Artificial Sequence: Synthetic oligonucleotide
uccccgcuugaauuagucc

SEQ ID NO: 754142 - RNA, 19 nt, Artificial Sequence
  Description of Artificial Sequence: Synthetic oligonucleotide
gaaacccaggaguagugcu

SEQ ID NO: 754143 - RNA, 19 nt, Artificial Sequence
  Description of Artificial Sequence: Synthetic oligonucleotide
aaaguccaguuuucgccua

SEQ ID NO: 754144 - RNA, 19 nt, Artificial Sequence
  Description of Artificial Sequence: Synthetic oligonucleotide
ucguuggugaguguucccu

SEQ ID NO: 754145 - RNA, 19 nt, Artificial Sequence
  Description of Artificial Sequence: Synthetic oligonucleotide
agcuugagcaauucuuauu

SEQ ID NO: 754146 - RNA, 19 nt, Artificial Sequence
  Description of Artificial Sequence: Synthetic oligonucleotide
augccuaaguucugagcca

SEQ ID NO: 754147 - RNA, 19 nt, Artificial Sequence
  Description of Artificial Sequence: Synthetic oligonucleotide
cugagccauaaacaguuca

SEQ ID NO: 754148 - RNA, 19 nt, Artificial Sequence
  Description of Artificial Sequence: Synthetic oligonucleotide
auuuccccgcuugaauuag

SEQ ID NO: 754149 - RNA, 19 nt, Artificial Sequence
  Description of Artificial Sequence: Synthetic oligonucleotide
cacaguucaagcaucgggu

SEQ ID NO: 754150 - RNA, 19 nt, Artificial Sequence
  Description of Artificial Sequence: Synthetic oligonucleotide
gaagaaacccaggaguagu

SEQ ID NO: 754151 - RNA, 19 nt, Artificial Sequence
  Description of Artificial Sequence: Synthetic oligonucleotide
uuccccgcuugaauuaguc

SEQ ID NO: 754152 - RNA, 19 nt, Artificial Sequence
  Description of Artificial Sequence: Synthetic oligonucleotide
auuucggcaucgacgucac

SEQ ID NO: 754153 - RNA, 19 nt, Artificial Sequence
  Description of Artificial Sequence: Synthetic oligonucleotide
aaaugcuggccaccaucaa

SEQ ID NO: 754154 - RNA, 19 nt, Artificial Sequence
  Description of Artificial Sequence: Synthetic oligonucleotide
augaagugucggcaugccu

SEQ ID NO: 754155 - RNA, 19 nt, Artificial Sequence
  Description of Artificial Sequence: Synthetic oligonucleotide
gacgucacucacuuuuaaa

SEQ ID NO: 754156 - RNA, 19 nt, Artificial Sequence
  Description of Artificial Sequence: Synthetic oligonucleotide
cuuuuaaacauuugcgcuu

SEQ ID NO: 754157 - RNA, 19 nt, Artificial Sequence
  Description of Artificial Sequence: Synthetic oligonucleotide
ucaagcagugggugaugga

SEQ ID NO: 754158 - RNA, 19 nt, Artificial Sequence
  Description of Artificial Sequence: Synthetic oligonucleotide
uucguuggugaguguuccc

SEQ ID NO: 754159 - RNA, 19 nt, Artificial Sequence
  Description of Artificial Sequence: Synthetic oligonucleotide
guaccaauauucaaaugcu

SEQ ID NO: 754160 - RNA, 19 nt, Artificial Sequence
  Description of Artificial Sequence: Synthetic oligonucleotide
uguucacuacacaguguuu

SEQ ID NO: 754161 - RNA, 19 nt, Artificial Sequence
  Description of Artificial Sequence: Synthetic oligonucleotide
agcauucuagggaucugag

SEQ ID NO: 754162 - RNA, 19 nt, Artificial Sequence
  Description of Artificial Sequence: Synthetic oligonucleotide
ggaaaccaagaucuaugac

SEQ ID NO: 754163 - RNA, 19 nt, Artificial Sequence
  Description of Artificial Sequence: Synthetic oligonucleotide
gguaagcacuguugggugc

SEQ ID NO: 754164 - RNA, 19 nt, Artificial Sequence
  Description of Artificial Sequence: Synthetic oligonucleotide
uuggugaguguucccugaa

SEQ ID NO: 754165 - RNA, 19 nt, Artificial Sequence
  Description of Artificial Sequence: Synthetic oligonucleotide
gcagguucguucauguugc

SEQ ID NO: 754166 - RNA, 19 nt, Artificial Sequence
  Description of Artificial Sequence: Synthetic oligonucleotide
gauaaagugcuauccucuu

SEQ ID NO: 754167 - RNA, 19 nt, Artificial Sequence
  Description of Artificial Sequence: Synthetic oligonucleotide
uguaccugugcagcuguuc

SEQ ID NO: 754168 - RNA, 19 nt, Artificial Sequence
  Description of Artificial Sequence: Synthetic oligonucleotide
cuugaauuagucccacgcu

SEQ ID NO: 754169 - RNA, 19 nt, Artificial Sequence
  Description of Artificial Sequence: Synthetic oligonucleotide
gccucuaaccaaagcaagg

SEQ ID NO: 754170 - RNA, 19 nt, Artificial Sequence
  Description of Artificial Sequence: Synthetic oligonucleotide
guccgcaauaguguuuagc

SEQ ID NO: 754171 - RNA, 19 nt, Artificial Sequence
  Description of Artificial Sequence: Synthetic oligonucleotide
cgggugaacaucuauaaca

SEQ ID NO: 754172 - RNA, 19 nt, Artificial Sequence
  Description of Artificial Sequence: Synthetic oligonucleotide
ugggcuguauaugguacaa

SEQ ID NO: 754173 - RNA, 19 nt, Artificial Sequence
  Description of Artificial Sequence: Synthetic oligonucleotide
caucggguuucguugguga

SEQ ID NO: 754174 - RNA, 19 nt, Artificial Sequence
  Description of Artificial Sequence: Synthetic oligonucleotide
gcaguuaacucuaccucag

SEQ ID NO: 754175 - RNA, 19 nt, Artificial Sequence
  Description of Artificial Sequence: Synthetic oligonucleotide
ucgacgucacucacuuuua

SEQ ID NO: 754176 - RNA, 19 nt, Artificial Sequence
  Description of Artificial Sequence: Synthetic oligonucleotide
ucggguuucguuggugagu

SEQ ID NO: 754177 - RNA, 19 nt, Artificial Sequence
  Description of Artificial Sequence: Synthetic oligonucleotide
uuuccccgcuugaauuagu

SEQ ID NO: 754178 - RNA, 19 nt, Artificial Sequence
  Description of Artificial Sequence: Synthetic oligonucleotide
acaaggcuauagugcuuug

SEQ ID NO: 754179 - RNA, 19 nt, Artificial Sequence
  Description of Artificial Sequence: Synthetic oligonucleotide
ccuucgccgauguauuagg

SEQ ID NO: 754180 - RNA, 19 nt, Artificial Sequence
  Description of Artificial Sequence: Synthetic oligonucleotide
gggccaaaaucaugggcag

SEQ ID NO: 754181 - RNA, 19 nt, Artificial Sequence
  Description of Artificial Sequence: Synthetic oligonucleotide
ugccuaaguucugagccau

SEQ ID NO: 754182 - RNA, 19 nt, Artificial Sequence
  Description of Artificial Sequence: Synthetic oligonucleotide
guucaagcaucggguuucg

SEQ ID NO: 754183 - RNA, 19 nt, Artificial Sequence
  Description of Artificial Sequence: Synthetic oligonucleotide
guauggaagucaacugaca

SEQ ID NO: 754184 - RNA, 19 nt, Artificial Sequence
  Description of Artificial Sequence: Synthetic oligonucleotide
guaagcacuguugggugca

SEQ ID NO: 754185 - RNA, 19 nt, Artificial Sequence
  Description of Artificial Sequence: Synthetic oligonucleotide
ggaugauuucggcaucgac

SEQ ID NO: 754186 - RNA, 19 nt, Artificial Sequence
  Description of Artificial Sequence: Synthetic oligonucleotide
ucucuucgacugauagaau

SEQ ID NO: 754187 - RNA, 19 nt, Artificial Sequence
  Description of Artificial Sequence: Synthetic oligonucleotide
gacuagaaucuggcugcag

SEQ ID NO: 754188 - RNA, 19 nt, Artificial Sequence
  Description of Artificial Sequence: Synthetic oligonucleotide
ggaguagugcugcauguaa

SEQ ID NO: 754189 - RNA, 19 nt, Artificial Sequence
  Description of Artificial Sequence: Synthetic oligonucleotide
aucgguugggccgcgggug

SEQ ID NO: 754190 - RNA, 19 nt, Artificial Sequence
  Description of Artificial Sequence: Synthetic oligonucleotide
aacaucgguugggccgcgg

SEQ ID NO: 754191 - RNA, 19 nt, Artificial Sequence
  Description of Artificial Sequence: Synthetic oligonucleotide
gguucguucauguugccau

SEQ ID NO: 754192 - RNA, 19 nt, Artificial Sequence
  Description of Artificial Sequence: Synthetic oligonucleotide
augacucauaguauuugua

SEQ ID NO: 754193 - RNA, 19 nt, Artificial Sequence
  Description of Artificial Sequence: Synthetic oligonucleotide
uguccgcaauaguguuuag

SEQ ID NO: 754194 - RNA, 19 nt, Artificial Sequence
  Description of Artificial Sequence: Synthetic oligonucleotide
cgcuugcacaaauuuaaag

SEQ ID NO: 754195 - RNA, 19 nt, Artificial Sequence
  Description of Artificial Sequence: Synthetic oligonucleotide
acgcuccacuaaguuauuc

SEQ ID NO: 754196 - RNA, 19 nt, Artificial Sequence
  Description of Artificial Sequence: Synthetic oligonucleotide
uagggaucugagccacaaa

SEQ ID NO: 754197 - RNA, 19 nt, Artificial Sequence
  Description of Artificial Sequence: Synthetic oligonucleotide
uagucccacgcuccacuaa

SEQ ID NO: 754198 - RNA, 19 nt, Artificial Sequence
  Description of Artificial Sequence: Synthetic oligonucleotide
gaucuaugacucauaguau

SEQ ID NO: 754199 - RNA, 19 nt, Artificial Sequence
  Description of Artificial Sequence: Synthetic oligonucleotide
agccuugacgggugaacau

SEQ ID NO: 754200 - RNA, 19 nt, Artificial Sequence
  Description of Artificial Sequence: Synthetic oligonucleotide
ugauuucggcaucgacguc

SEQ ID NO: 754201 - RNA, 19 nt, Artificial Sequence
  Description of Artificial Sequence: Synthetic oligonucleotide
uucguucauguugccauuu

SEQ ID NO: 754202 - RNA, 19 nt, Artificial Sequence
  Description of Artificial Sequence: Synthetic oligonucleotide
aaacaaggcuauagugcuu

SEQ ID NO: 754203 - RNA, 19 nt, Artificial Sequence
  Description of Artificial Sequence: Synthetic oligonucleotide
ucguggacccaggugaguu

SEQ ID NO: 754204 - RNA, 19 nt, Artificial Sequence
  Description of Artificial Sequence: Synthetic oligonucleotide
augcucuaauaaauacaca

SEQ ID NO: 754205 - RNA, 19 nt, Artificial Sequence
  Description of Artificial Sequence: Synthetic oligonucleotide
agguucguucauguugcca

SEQ ID NO: 754206 - RNA, 19 nt, Artificial Sequence
  Description of Artificial Sequence: Synthetic oligonucleotide
ggugcaaaugcuggccacc

SEQ ID NO: 754207 - RNA, 19 nt, Artificial Sequence
  Description of Artificial Sequence: Synthetic oligonucleotide
acguuuucaguuacaguuu

SEQ ID NO: 754208 - RNA, 19 nt, Artificial Sequence
  Description of Artificial Sequence: Synthetic oligonucleotide
cgauguauuaggucacaac

SEQ ID NO: 754209 - RNA, 19 nt, Artificial Sequence
  Description of Artificial Sequence: Synthetic oligonucleotide
guuuucgccuagauaaagu

SEQ ID NO: 754210 - RNA, 19 nt, Artificial Sequence
  Description of Artificial Sequence: Synthetic oligonucleotide
cuucgacugauagaauaaa

SEQ ID NO: 754211 - RNA, 19 nt, Artificial Sequence
  Description of Artificial Sequence: Synthetic oligonucleotide
ccaauauucaaaugcucua

SEQ ID NO: 754212 - RNA, 19 nt, Artificial Sequence
  Description of Artificial Sequence: Synthetic oligonucleotide
cacauuaugccaagaguuu

SEQ ID NO: 754213 - RNA, 19 nt, Artificial Sequence
  Description of Artificial Sequence: Synthetic oligonucleotide
aagugucggcaugccuaag

SEQ ID NO: 754214 - RNA, 19 nt, Artificial Sequence
  Description of Artificial Sequence: Synthetic oligonucleotide
cagguucguucauguugcc

SEQ ID NO: 754215 - RNA, 19 nt, Artificial Sequence
  Description of Artificial Sequence: Synthetic oligonucleotide
cuagggaucugagccacaa

SEQ ID NO: 754216 - RNA, 19 nt, Artificial Sequence
  Description of Artificial Sequence: Synthetic oligonucleotide
uaacaucgguugggccgcg

SEQ ID NO: 754217 - RNA, 19 nt, Artificial Sequence
  Description of Artificial Sequence: Synthetic oligonucleotide
caguuuucgccuagauaaa

SEQ ID NO: 754218 - RNA, 19 nt, Artificial Sequence
  Description of Artificial Sequence: Synthetic oligonucleotide
aggaugauuucggcaucga

SEQ ID NO: 754219 - RNA, 19 nt, Artificial Sequence
  Description of Artificial Sequence: Synthetic oligonucleotide
caguuaacucuaccucaga

SEQ ID NO: 754220 - RNA, 19 nt, Artificial Sequence
  Description of Artificial Sequence: Synthetic oligonucleotide
gcacaaauuuaaagcuaug

SEQ ID NO: 754221 - RNA, 19 nt, Artificial Sequence
  Description of Artificial Sequence: Synthetic oligonucleotide
cagucuuagccccugggau

SEQ ID NO: 754222 - RNA, 19 nt, Artificial Sequence
  Description of Artificial Sequence: Synthetic oligonucleotide
aggaguagugcugcaugua

SEQ ID NO: 754223 - RNA, 19 nt, Artificial Sequence
  Description of Artificial Sequence: Synthetic oligonucleotide
cacuugcauaagacaauua

SEQ ID NO: 754224 - RNA, 19 nt, Artificial Sequence
  Description of Artificial Sequence: Synthetic oligonucleotide
cuuugagaauuuccccgcu

SEQ ID NO: 754225 - RNA, 19 nt, Artificial Sequence
  Description of Artificial Sequence: Synthetic oligonucleotide
gggugcaaaugcuggccac

SEQ ID NO: 754226 - RNA, 19 nt, Artificial Sequence
  Description of Artificial Sequence: Synthetic oligonucleotide
cauguuccuucgccgaugu

SEQ ID NO: 754227 - RNA, 19 nt, Artificial Sequence
  Description of Artificial Sequence: Synthetic oligonucleotide
cagccuugacgggugaaca

SEQ ID NO: 754228 - RNA, 19 nt, Artificial Sequence
  Description of Artificial Sequence: Synthetic oligonucleotide
guguuucuguguugcugaa

SEQ ID NO: 754229 - RNA, 19 nt, Artificial Sequence
  Description of Artificial Sequence: Synthetic oligonucleotide
guucaccucgaagguaaaa

SEQ ID NO: 754230 - RNA, 19 nt, Artificial Sequence
  Description of Artificial Sequence: Synthetic oligonucleotide
ucuuagccccugggauuca

SEQ ID NO: 754231 - RNA, 19 nt, Artificial Sequence
  Description of Artificial Sequence: Synthetic oligonucleotide
ccgggaaacugucuuguca

SEQ ID NO: 754232 - RNA, 19 nt, Artificial Sequence
  Description of Artificial Sequence: Synthetic oligonucleotide
gcauguuccuucgccgaug

SEQ ID NO: 754233 - RNA, 19 nt, Artificial Sequence
  Description of Artificial Sequence: Synthetic oligonucleotide
ccgguaagacagcuuggug

SEQ ID NO: 754234 - RNA, 19 nt, Artificial Sequence
  Description of Artificial Sequence: Synthetic oligonucleotide
ugcagccuugacgggugaa

SEQ ID NO: 754235 - RNA, 19 nt, Artificial Sequence
  Description of Artificial Sequence: Synthetic oligonucleotide
cuucgccgauguauuaggu

SEQ ID NO: 754236 - RNA, 19 nt, Artificial Sequence
  Description of Artificial Sequence: Synthetic oligonucleotide
ggaagucaacugacauccc

SEQ ID NO: 754237 - RNA, 19 nt, Artificial Sequence
  Description of Artificial Sequence: Synthetic oligonucleotide
ccacgcuccacuaaguuau

SEQ ID NO: 754238 - RNA, 19 nt, Artificial Sequence
  Description of Artificial Sequence: Synthetic oligonucleotide
cuugacgggugaacaucua

SEQ ID NO: 754239 - RNA, 19 nt, Artificial Sequence
  Description of Artificial Sequence: Synthetic oligonucleotide
gaccacccgguaagacagc

SEQ ID NO: 754240 - RNA, 19 nt, Artificial Sequence
  Description of Artificial Sequence: Synthetic oligonucleotide
gccuugacgggugaacauc

SEQ ID NO: 754241 - RNA, 19 nt, Artificial Sequence
  Description of Artificial Sequence: Synthetic oligonucleotide
gcagccuugacgggugaac

SEQ ID NO: 754242 - RNA, 19 nt, Artificial Sequence
  Description of Artificial Sequence: Synthetic oligonucleotide
gcaucgacgucacucacuu

SEQ ID NO: 754243 - RNA, 19 nt, Artificial Sequence
  Description of Artificial Sequence: Synthetic oligonucleotide
agccuugcuucacccuguu

SEQ ID NO: 754244 - RNA, 19 nt, Artificial Sequence
  Description of Artificial Sequence: Synthetic oligonucleotide
cagaccagugggcaucagu

SEQ ID NO: 754245 - RNA, 19 nt, Artificial Sequence
  Description of Artificial Sequence: Synthetic oligonucleotide
cauuugcgcuugcacaaau

SEQ ID NO: 754246 - RNA, 19 nt, Artificial Sequence
  Description of Artificial Sequence: Synthetic oligonucleotide
ccucuaaccaaagcaaggu

SEQ ID NO: 754247 - RNA, 19 nt, Artificial Sequence
  Description of Artificial Sequence: Synthetic oligonucleotide
ccuugacgggugaacaucu

SEQ ID NO: 754248 - RNA, 19 nt, Artificial Sequence
  Description of Artificial Sequence: Synthetic oligonucleotide
agccggagcuccagaggga

SEQ ID NO: 754249 - RNA, 19 nt, Artificial Sequence
  Description of Artificial Sequence: Synthetic oligonucleotide
caucgguugggccgcgggu

SEQ ID NO: 754250 - RNA, 19 nt, Artificial Sequence
  Description of Artificial Sequence: Synthetic oligonucleotide
ccacugacguuuucaguua

SEQ ID NO: 754251 - RNA, 19 nt, Artificial Sequence
  Description of Artificial Sequence: Synthetic oligonucleotide
gagcauccugcugcaugua

SEQ ID NO: 754252 - RNA, 19 nt, Artificial Sequence
  Description of Artificial Sequence: Synthetic oligonucleotide
ccgcuugaauuagucccac

SEQ ID NO: 754253 - RNA, 19 nt, Artificial Sequence
  Description of Artificial Sequence: Synthetic oligonucleotide
gcgcuugcacaaauuuaaa

SEQ ID NO: 754254 - RNA, 19 nt, Artificial Sequence
  Description of Artificial Sequence: Synthetic oligonucleotide
ccgauguauuaggucacaa

SEQ ID NO: 754255 - RNA, 19 nt, Artificial Sequence
  Description of Artificial Sequence: Synthetic oligonucleotide
gucccacgcuccacuaagu

SEQ ID NO: 754256 - RNA, 19 nt, Artificial Sequence
  Description of Artificial Sequence: Synthetic oligonucleotide
caccaucaacagccuugcu

SEQ ID NO: 754257 - RNA, 19 nt, Artificial Sequence
  Description of Artificial Sequence: Synthetic oligonucleotide
caggugaguucugguuuau

SEQ ID NO: 754258 - RNA, 19 nt, Artificial Sequence
  Description of Artificial Sequence: Synthetic oligonucleotide
cgacgucacucacuuuuaa

SEQ ID NO: 754259 - RNA, 19 nt, Artificial Sequence
  Description of Artificial Sequence: Synthetic oligonucleotide
caucgacgucacucacuuu

SEQ ID NO: 754260 - RNA, 19 nt, Artificial Sequence
  Description of Artificial Sequence: Synthetic oligonucleotide
gccuaaguucugagccaua

SEQ ID NO: 754261 - RNA, 19 nt, Artificial Sequence
  Description of Artificial Sequence: Synthetic oligonucleotide
ccguuuuguuuuccuuguu

SEQ ID NO: 754262 - RNA, 19 nt, Artificial Sequence
  Description of Artificial Sequence: Synthetic oligonucleotide
uuuaucgucaucuacaccc

SEQ ID NO: 754263 - RNA, 19 nt, Artificial Sequence
  Description of Artificial Sequence: Synthetic oligonucleotide
auaucagaaacuuuagacc

SEQ ID NO: 754264 - RNA, 19 nt, Artificial Sequence
  Description of Artificial Sequence: Synthetic oligonucleotide
aaaauaguucuuuucgauc

SEQ ID NO: 754265 - RNA, 19 nt, Artificial Sequence
  Description of Artificial Sequence: Synthetic oligonucleotide
uugacaaugagcucgauca

SEQ ID NO: 754266 - RNA, 19 nt, Artificial Sequence
  Description of Artificial Sequence: Synthetic oligonucleotide
uucuauagcuuucagagug

SEQ ID NO: 754267 - RNA, 19 nt, Artificial Sequence
  Description of Artificial Sequence: Synthetic oligonucleotide
aaugaaguguccucaaaag

SEQ ID NO: 754268 - RNA, 19 nt, Artificial Sequence
  Description of Artificial Sequence: Synthetic oligonucleotide
uucagaucaacaaaaggag

SEQ ID NO: 754269 - RNA, 19 nt, Artificial Sequence
  Description of Artificial Sequence: Synthetic oligonucleotide
augaauauauuccuugggg

SEQ ID NO: 754270 - RNA, 19 nt, Artificial Sequence
  Description of Artificial Sequence: Synthetic oligonucleotide
aacccaacauccaagauac

SEQ ID NO: 754271 - RNA, 19 nt, Artificial Sequence
  Description of Artificial Sequence: Synthetic oligonucleotide
ucaauaaccagacacugga

SEQ ID NO: 754272 - RNA, 19 nt, Artificial Sequence
  Description of Artificial Sequence: Synthetic oligonucleotide
uuuauguuggaucucaguc

SEQ ID NO: 754273 - RNA, 19 nt, Artificial Sequence
  Description of Artificial Sequence: Synthetic oligonucleotide
uuauggagaaaauaguucu

SEQ ID NO: 754274 - RNA, 19 nt, Artificial Sequence
  Description of Artificial Sequence: Synthetic oligonucleotide
aaugagcucgaucacgggg

SEQ ID NO: 754275 - RNA, 19 nt, Artificial Sequence
  Description of Artificial Sequence: Synthetic oligonucleotide
aguucaguagcucauagug

SEQ ID NO: 754276 - RNA, 19 nt, Artificial Sequence
  Description of Artificial Sequence: Synthetic oligonucleotide
auagugguacuucacagac

SEQ ID NO: 754277 - RNA, 19 nt, Artificial Sequence
  Description of Artificial Sequence: Synthetic oligonucleotide
aguggcaaccucuuuaucg

SEQ ID NO: 754278 - RNA, 19 nt, Artificial Sequence
  Description of Artificial Sequence: Synthetic oligonucleotide
cacacgaugaauauauucc

SEQ ID NO: 754279 - RNA, 19 nt, Artificial Sequence
  Description of Artificial Sequence: Synthetic oligonucleotide
uguguggcagaaaagagca

SEQ ID NO: 754280 - RNA, 19 nt, Artificial Sequence
  Description of Artificial Sequence: Synthetic oligonucleotide
aaucaguccagguggaaag

SEQ ID NO: 754281 - RNA, 19 nt, Artificial Sequence
  Description of Artificial Sequence: Synthetic oligonucleotide
aacgaaggaaacccaacuc

SEQ ID NO: 754282 - RNA, 19 nt, Artificial Sequence
  Description of Artificial Sequence: Synthetic oligonucleotide
uucacagacauacacgaug

SEQ ID NO: 754283 - RNA, 19 nt, Artificial Sequence
  Description of Artificial Sequence: Synthetic oligonucleotide
guauguaggacuuguaugc

SEQ ID NO: 754284 - RNA, 19 nt, Artificial Sequence
  Description of Artificial Sequence: Synthetic oligonucleotide
cuuuagaccaggaaaaguc

SEQ ID NO: 754285 - RNA, 19 nt, Artificial Sequence
  Description of Artificial Sequence: Synthetic oligonucleotide
agggacacacgacauagcc

SEQ ID NO: 754286 - RNA, 19 nt, Artificial Sequence
  Description of Artificial Sequence: Synthetic oligonucleotide
uuaagaacgccgaaagucu

SEQ ID NO: 754287 - RNA, 19 nt, Artificial Sequence
  Description of Artificial Sequence: Synthetic oligonucleotide
uccuuaagaacgccgaaag

SEQ ID NO: 754288 - RNA, 19 nt, Artificial Sequence
  Description of Artificial Sequence: Synthetic oligonucleotide
uugguucugaaucaggaga

SEQ ID NO: 754289 - RNA, 19 nt, Artificial Sequence
  Description of Artificial Sequence: Synthetic oligonucleotide
aguauucugcauguggucc

SEQ ID NO: 754290 - RNA, 19 nt, Artificial Sequence
  Description of Artificial Sequence: Synthetic oligonucleotide
uguuuuaugggaauauuua

SEQ ID NO: 754291 - RNA, 19 nt, Artificial Sequence
  Description of Artificial Sequence: Synthetic oligonucleotide
ucaaauugauucaauggaa

SEQ ID NO: 754292 - RNA, 19 nt, Artificial Sequence
  Description of Artificial Sequence: Synthetic oligonucleotide
auugcuucaaguaacgaag

SEQ ID NO: 754293 - RNA, 19 nt, Artificial Sequence
  Description of Artificial Sequence: Synthetic oligonucleotide
caaguaacgaaggaaaccc

SEQ ID NO: 754294 - RNA, 19 nt, Artificial Sequence
  Description of Artificial Sequence: Synthetic oligonucleotide
cuuauggagaaaauaguuc

SEQ ID NO: 754295 - RNA, 19 nt, Artificial Sequence
  Description of Artificial Sequence: Synthetic oligonucleotide
uuuagaccaggaaaaguca

SEQ ID NO: 754296 - RNA, 19 nt, Artificial Sequence
  Description of Artificial Sequence: Synthetic oligonucleotide
uuauguuggaucucaguca

SEQ ID NO: 754297 - RNA, 19 nt, Artificial Sequence
  Description of Artificial Sequence: Synthetic oligonucleotide
aauauauuccuugggguca

SEQ ID NO: 754298 - RNA, 19 nt, Artificial Sequence
  Description of Artificial Sequence: Synthetic oligonucleotide
ucaauggaaccuuggauug

SEQ ID NO: 754299 - RNA, 19 nt, Artificial Sequence
  Description of Artificial Sequence: Synthetic oligonucleotide
aaacccaacauccaagaua

SEQ ID NO: 754300 - RNA, 19 nt, Artificial Sequence
  Description of Artificial Sequence: Synthetic oligonucleotide
ucugguaggagagagaauc

SEQ ID NO: 754301 - RNA, 19 nt, Artificial Sequence
  Description of Artificial Sequence: Synthetic oligonucleotide
gucaaauugauucaaugga

SEQ ID NO: 754302 - RNA, 19 nt, Artificial Sequence
  Description of Artificial Sequence: Synthetic oligonucleotide
aauaguucuuuucgaucag

SEQ ID NO: 754303 - RNA, 19 nt, Artificial Sequence
  Description of Artificial Sequence: Synthetic oligonucleotide
cuuaagaacgccgaaaguc

SEQ ID NO: 754304 - RNA, 19 nt, Artificial Sequence
  Description of Artificial Sequence: Synthetic oligonucleotide
ucuuguacaugaacccugg

SEQ ID NO: 754305 - RNA, 19 nt, Artificial Sequence
  Description of Artificial Sequence: Synthetic oligonucleotide
ugguacuucacagacauac

SEQ ID NO: 754306 - RNA, 19 nt, Artificial Sequence
  Description of Artificial Sequence: Synthetic oligonucleotide
caaauugauucaauggaac

SEQ ID NO: 754307 - RNA, 19 nt, Artificial Sequence
  Description of Artificial Sequence: Synthetic oligonucleotide
aaaagcgccugucaguccu

SEQ ID NO: 754308 - RNA, 19 nt, Artificial Sequence
  Description of Artificial Sequence: Synthetic oligonucleotide
aacgccgaaagucugcaug

SEQ ID NO: 754309 - RNA, 19 nt, Artificial Sequence
  Description of Artificial Sequence: Synthetic oligonucleotide
ugauucaauggaaccuugg

SEQ ID NO: 754310 - RNA, 19 nt, Artificial Sequence
  Description of Artificial Sequence: Synthetic oligonucleotide
uuucgcagcugccagaaga

SEQ ID NO: 754311 - RNA, 19 nt, Artificial Sequence
  Description of Artificial Sequence: Synthetic oligonucleotide
uguuggaucucagucaugc

SEQ ID NO: 754312 - RNA, 19 nt, Artificial Sequence
  Description of Artificial Sequence: Synthetic oligonucleotide
uuccugugcggacuuaugg

SEQ ID NO: 754313 - RNA, 19 nt, Artificial Sequence
  Description of Artificial Sequence: Synthetic oligonucleotide
agaaaauaguucuuuucga

SEQ ID NO: 754314 - RNA, 19 nt, Artificial Sequence
  Description of Artificial Sequence: Synthetic oligonucleotide
uggauugcuucaaguaacg

SEQ ID NO: 754315 - RNA, 19 nt, Artificial Sequence
  Description of Artificial Sequence: Synthetic oligonucleotide
ucaaguaacgaaggaaacc

SEQ ID NO: 754316 - RNA, 19 nt, Artificial Sequence
  Description of Artificial Sequence: Synthetic oligonucleotide
ucgaucacggggaugagga

SEQ ID NO: 754317 - RNA, 19 nt, Artificial Sequence
  Description of Artificial Sequence: Synthetic oligonucleotide
ugugucaucaguuccuuaa

SEQ ID NO: 754318 - RNA, 19 nt, Artificial Sequence
  Description of Artificial Sequence: Synthetic oligonucleotide
uaacgaaggaaacccaacu

SEQ ID NO: 754319 - RNA, 19 nt, Artificial Sequence
  Description of Artificial Sequence: Synthetic oligonucleotide
uucuuguacaugaacccug

SEQ ID NO: 754320 - RNA, 19 nt, Artificial Sequence
  Description of Artificial Sequence: Synthetic oligonucleotide
cugaauaucagaaacuuua

SEQ ID NO: 754321 - RNA, 19 nt, Artificial Sequence
  Description of Artificial Sequence: Synthetic oligonucleotide
acacgaugaaaagaagacc

SEQ ID NO: 754322 - RNA, 19 nt, Artificial Sequence
  Description of Artificial Sequence: Synthetic oligonucleotide
uugcuucaaguaacgaagg

SEQ ID NO: 754323 - RNA, 19 nt, Artificial Sequence
  Description of Artificial Sequence: Synthetic oligonucleotide
aaagagcaugguuugccug

SEQ ID NO: 754324 - RNA, 19 nt, Artificial Sequence
  Description of Artificial Sequence: Synthetic oligonucleotide
uuuaaguuguugacauuga

SEQ ID NO: 754325 - RNA, 19 nt, Artificial Sequence
  Description of Artificial Sequence: Synthetic oligonucleotide
guuagggcaaaaucagucc

SEQ ID NO: 754326 - RNA, 19 nt, Artificial Sequence
  Description of Artificial Sequence: Synthetic oligonucleotide
auaaccagacacuggaggu

SEQ ID NO: 754327 - RNA, 19 nt, Artificial Sequence
  Description of Artificial Sequence: Synthetic oligonucleotide
ucaaacccaacauccaaga

SEQ ID NO: 754328 - RNA, 19 nt, Artificial Sequence
  Description of Artificial Sequence: Synthetic oligonucleotide
ucuacccacacgaugaaua

SEQ ID NO: 754329 - RNA, 19 nt, Artificial Sequence
  Description of Artificial Sequence: Synthetic oligonucleotide
uaugcucguauguaggacu

SEQ ID NO: 754330 - RNA, 19 nt, Artificial Sequence
  Description of Artificial Sequence: Synthetic oligonucleotide
ugaucaguccauacgugug

SEQ ID NO: 754331 - RNA, 19 nt, Artificial Sequence
  Description of Artificial Sequence: Synthetic oligonucleotide
ugaacauggugugucauca

SEQ ID NO: 754332 - RNA, 19 nt, Artificial Sequence
  Description of Artificial Sequence: Synthetic oligonucleotide
ggaagaacgugguuguucg

SEQ ID NO: 754333 - RNA, 19 nt, Artificial Sequence
  Description of Artificial Sequence: Synthetic oligonucleotide
acgaaggaaacccaacucu

SEQ ID NO: 754334 - RNA, 19 nt, Artificial Sequence
  Description of Artificial Sequence: Synthetic oligonucleotide
caggagauggcguugcugc

SEQ ID NO: 754335 - RNA, 19 nt, Artificial Sequence
  Description of Artificial Sequence: Synthetic oligonucleotide
gauugcuucaaguaacgaa

SEQ ID NO: 754336 - RNA, 19 nt, Artificial Sequence
  Description of Artificial Sequence: Synthetic oligonucleotide
gacaaugagcucgaucacg

SEQ ID NO: 754337 - RNA, 19 nt, Artificial Sequence
  Description of Artificial Sequence: Synthetic oligonucleotide
ugagagaacugccugcggu

SEQ ID NO: 754338 - RNA, 19 nt, Artificial Sequence
  Description of Artificial Sequence: Synthetic oligonucleotide
gaaagcaagcguuuugcca

SEQ ID NO: 754339 - RNA, 19 nt, Artificial Sequence
  Description of Artificial Sequence: Synthetic oligonucleotide
uuacugccacccaugauca

SEQ ID NO: 754340 - RNA, 19 nt, Artificial Sequence
  Description of Artificial Sequence: Synthetic oligonucleotide
uuuuauguuggaucucagu

SEQ ID NO: 754341 - RNA, 19 nt, Artificial Sequence
  Description of Artificial Sequence: Synthetic oligonucleotide
uuaagcuugccaucauggc

SEQ ID NO: 754342 - RNA, 19 nt, Artificial Sequence
  Description of Artificial Sequence: Synthetic oligonucleotide
auacgugugaacauggugu

SEQ ID NO: 754343 - RNA, 19 nt, Artificial Sequence
  Description of Artificial Sequence: Synthetic oligonucleotide
gauucaauggaaccuugga

SEQ ID NO: 754344 - RNA, 19 nt, Artificial Sequence
  Description of Artificial Sequence: Synthetic oligonucleotide
aacuuuagaccaggaaaag

SEQ ID NO: 754345 - RNA, 19 nt, Artificial Sequence
  Description of Artificial Sequence: Synthetic oligonucleotide
gauccuaaaggugauaaaa

SEQ ID NO: 754346 - RNA, 19 nt, Artificial Sequence
  Description of Artificial Sequence: Synthetic oligonucleotide
aagaacgccgaaagucugc

SEQ ID NO: 754347 - RNA, 19 nt, Artificial Sequence
  Description of Artificial Sequence: Synthetic oligonucleotide
guacuucacagacauacac

SEQ ID NO: 754348 - RNA, 19 nt, Artificial Sequence
  Description of Artificial Sequence: Synthetic oligonucleotide
acacgaugaauauauuccu

SEQ ID NO: 754349 - RNA, 19 nt, Artificial Sequence
  Description of Artificial Sequence: Synthetic oligonucleotide
ucuucaggacgcaggauga

SEQ ID NO: 754350 - RNA, 19 nt, Artificial Sequence
  Description of Artificial Sequence: Synthetic oligonucleotide
aaccagacacuggagguuc

SEQ ID NO: 754351 - RNA, 19 nt, Artificial Sequence
  Description of Artificial Sequence: Synthetic oligonucleotide
ucguauguaggacuuguau

SEQ ID NO: 754352 - RNA, 19 nt, Artificial Sequence
  Description of Artificial Sequence: Synthetic oligonucleotide
aaguguccucaaaagcgcc

SEQ ID NO: 754353 - RNA, 19 nt, Artificial Sequence
  Description of Artificial Sequence: Synthetic oligonucleotide
agagaaucaggacuccugu

SEQ ID NO: 754354 - RNA, 19 nt, Artificial Sequence
  Description of Artificial Sequence: Synthetic oligonucleotide
cuuaaggaaugugaagagc

SEQ ID NO: 754355 - RNA, 19 nt, Artificial Sequence
  Description of Artificial Sequence: Synthetic oligonucleotide
acuuuucgaguuugugugg

SEQ ID NO: 754356 - RNA, 19 nt, Artificial Sequence
  Description of Artificial Sequence: Synthetic oligonucleotide
uaagaacgccgaaagucug

SEQ ID NO: 754357 - RNA, 19 nt, Artificial Sequence
  Description of Artificial Sequence: Synthetic oligonucleotide
uuccgguucuucuuaagga

SEQ ID NO: 754358 - RNA, 19 nt, Artificial Sequence
  Description of Artificial Sequence: Synthetic oligonucleotide
acauacacgaugaaaagaa

SEQ ID NO: 754359 - RNA, 19 nt, Artificial Sequence
  Description of Artificial Sequence: Synthetic oligonucleotide
gaaguguccucaaaagcgc

SEQ ID NO: 754360 - RNA, 19 nt, Artificial Sequence
  Description of Artificial Sequence: Synthetic oligonucleotide
aauggaaccuuggauugcu

SEQ ID NO: 754361 - RNA, 19 nt, Artificial Sequence
  Description of Artificial Sequence: Synthetic oligonucleotide
acauccaagauacgaucag

SEQ ID NO: 754362 - RNA, 19 nt, Artificial Sequence
  Description of Artificial Sequence: Synthetic oligonucleotide
augaucaguccauacgugu

SEQ ID NO: 754363 - RNA, 19 nt, Artificial Sequence
  Description of Artificial Sequence: Synthetic oligonucleotide
cugguagccgaauccaccg

SEQ ID NO: 754364 - RNA, 19 nt, Artificial Sequence
  Description of Artificial Sequence: Synthetic oligonucleotide
ggaccuuaaaccaaaagac

SEQ ID NO: 754365 - RNA, 19 nt, Artificial Sequence
  Description of Artificial Sequence: Synthetic oligonucleotide
agugagagaacugccugcg

SEQ ID NO: 754366 - RNA, 19 nt, Artificial Sequence
  Description of Artificial Sequence: Synthetic oligonucleotide
agaaacuuuagaccaggaa

SEQ ID NO: 754367 - RNA, 19 nt, Artificial Sequence
  Description of Artificial Sequence: Synthetic oligonucleotide
uuugccugcggacuggcaa

SEQ ID NO: 754368 - RNA, 19 nt, Artificial Sequence
  Description of Artificial Sequence: Synthetic oligonucleotide
uugauucaauggaaccuug

SEQ ID NO: 754369 - RNA, 19 nt, Artificial Sequence
  Description of Artificial Sequence: Synthetic oligonucleotide
ucgcuuauuuugcuuuugc

SEQ ID NO: 754370 - RNA, 19 nt, Artificial Sequence
  Description of Artificial Sequence: Synthetic oligonucleotide
aagaacgugguuguucgcu

SEQ ID NO: 754371 - RNA, 19 nt, Artificial Sequence
  Description of Artificial Sequence: Synthetic oligonucleotide
cauacacgaugaaaagaag

SEQ ID NO: 754372 - RNA, 19 nt, Artificial Sequence
  Description of Artificial Sequence: Synthetic oligonucleotide
uguucgcuuauuuugcuuu

SEQ ID NO: 754373 - RNA, 19 nt, Artificial Sequence
  Description of Artificial Sequence: Synthetic oligonucleotide
gaguuuguguggcagaaaa

SEQ ID NO: 754374 - RNA, 19 nt, Artificial Sequence
  Description of Artificial Sequence: Synthetic oligonucleotide
caagauacgaucagccuca

SEQ ID NO: 754375 - RNA, 19 nt, Artificial Sequence
  Description of Artificial Sequence: Synthetic oligonucleotide
auacacgaugaaaagaaga

SEQ ID NO: 754376 - RNA, 19 nt, Artificial Sequence
  Description of Artificial Sequence: Synthetic oligonucleotide
ggaaguuagggcaaaauca

SEQ ID NO: 754377 - RNA, 19 nt, Artificial Sequence
  Description of Artificial Sequence: Synthetic oligonucleotide
uacgugugaacauggugug

SEQ ID NO: 754378 - RNA, 19 nt, Artificial Sequence
  Description of Artificial Sequence: Synthetic oligonucleotide
auaugcucguauguaggac

SEQ ID NO: 754379 - RNA, 19 nt, Artificial Sequence
  Description of Artificial Sequence: Synthetic oligonucleotide
guucaguagcucauagugg

SEQ ID NO: 754380 - RNA, 19 nt, Artificial Sequence
  Description of Artificial Sequence: Synthetic oligonucleotide
uccucaaaagcgccuguca

SEQ ID NO: 754381 - RNA, 19 nt, Artificial Sequence
  Description of Artificial Sequence: Synthetic oligonucleotide
caacauccaagauacgauc

SEQ ID NO: 754382 - RNA, 19 nt, Artificial Sequence
  Description of Artificial Sequence: Synthetic oligonucleotide
aucaauaaccagacacugg

SEQ ID NO: 754383 - RNA, 19 nt, Artificial Sequence
  Description of Artificial Sequence: Synthetic oligonucleotide
auggcguugcugcuguuuc

SEQ ID NO: 754384 - RNA, 19 nt, Artificial Sequence
  Description of Artificial Sequence: Synthetic oligonucleotide
agugggagucauaugcucg

SEQ ID NO: 754385 - RNA, 19 nt, Artificial Sequence
  Description of Artificial Sequence: Synthetic oligonucleotide
ugcuucaaguaacgaagga

SEQ ID NO: 754386 - RNA, 19 nt, Artificial Sequence
  Description of Artificial Sequence: Synthetic oligonucleotide
uccaagauacgaucagccu

SEQ ID NO: 754387 - RNA, 19 nt, Artificial Sequence
  Description of Artificial Sequence: Synthetic oligonucleotide
gcgagugggagucauaugc

SEQ ID NO: 754388 - RNA, 19 nt, Artificial Sequence
  Description of Artificial Sequence: Synthetic oligonucleotide
caagcguuuugccacugcc

SEQ ID NO: 754389 - RNA, 19 nt, Artificial Sequence
  Description of Artificial Sequence: Synthetic oligonucleotide
guaggagagagaaucagga

SEQ ID NO: 754390 - RNA, 19 nt, Artificial Sequence
  Description of Artificial Sequence: Synthetic oligonucleotide
accaaaagacagggcaacc

SEQ ID NO: 754391 - RNA, 19 nt, Artificial Sequence
  Description of Artificial Sequence: Synthetic oligonucleotide
agcaguauccccgaaucug

SEQ ID NO: 754392 - RNA, 19 nt, Artificial Sequence
  Description of Artificial Sequence: Synthetic oligonucleotide
aaccuuggauugcuucaag

SEQ ID NO: 754393 - RNA, 19 nt, Artificial Sequence
  Description of Artificial Sequence: Synthetic oligonucleotide
uccgguucuucuuaaggaa

SEQ ID NO: 754394 - RNA, 19 nt, Artificial Sequence
  Description of Artificial Sequence: Synthetic oligonucleotide
cacgacauagcccugcuca

SEQ ID NO: 754395 - RNA, 19 nt, Artificial Sequence
  Description of Artificial Sequence: Synthetic oligonucleotide
ucgucaucuacacccacau

SEQ ID NO: 754396 - RNA, 19 nt, Artificial Sequence
  Description of Artificial Sequence: Synthetic oligonucleotide
uauccccgaaucugcauug

SEQ ID NO: 754397 - RNA, 19 nt, Artificial Sequence
  Description of Artificial Sequence: Synthetic oligonucleotide
ugugcggacuuauggagaa

SEQ ID NO: 754398 - RNA, 19 nt, Artificial Sequence
  Description of Artificial Sequence: Synthetic oligonucleotide
cuuuuauguuggaucucag

SEQ ID NO: 754399 - RNA, 19 nt, Artificial Sequence
  Description of Artificial Sequence: Synthetic oligonucleotide
cuugacaaugagcucgauc

SEQ ID NO: 754400 - RNA, 19 nt, Artificial Sequence
  Description of Artificial Sequence: Synthetic oligonucleotide
gaccuuaaaccaaaagaca

SEQ ID NO: 754401 - RNA, 19 nt, Artificial Sequence
  Description of Artificial Sequence: Synthetic oligonucleotide
cuuuucgaguuuguguggc

SEQ ID NO: 754402 - RNA, 19 nt, Artificial Sequence
  Description of Artificial Sequence: Synthetic oligonucleotide
acccaugaucaguccauac

SEQ ID NO: 754403 - RNA, 19 nt, Artificial Sequence
  Description of Artificial Sequence: Synthetic oligonucleotide
aagguuagacaaggaagca

SEQ ID NO: 754404 - RNA, 19 nt, Artificial Sequence
  Description of Artificial Sequence: Synthetic oligonucleotide
aucugccgaguccacacuc

SEQ ID NO: 754405 - RNA, 19 nt, Artificial Sequence
  Description of Artificial Sequence: Synthetic oligonucleotide
caugaucaguccauacgug

SEQ ID NO: 754406 - RNA, 19 nt, Artificial Sequence
  Description of Artificial Sequence: Synthetic oligonucleotide
caauaaccagacacuggag

SEQ ID NO: 754407 - RNA, 19 nt, Artificial Sequence
  Description of Artificial Sequence: Synthetic oligonucleotide
uagaccaggaaaagucaaa

SEQ ID NO: 754408 - RNA, 19 nt, Artificial Sequence
  Description of Artificial Sequence: Synthetic oligonucleotide
uaggagagagaaucaggac

SEQ ID NO: 754409 - RNA, 19 nt, Artificial Sequence
  Description of Artificial Sequence: Synthetic oligonucleotide
gauuucugguagccgaauc

SEQ ID NO: 754410 - RNA, 19 nt, Artificial Sequence
  Description of Artificial Sequence: Synthetic oligonucleotide
auugauucaauggaaccuu

SEQ ID NO: 754411 - RNA, 19 nt, Artificial Sequence
  Description of Artificial Sequence: Synthetic oligonucleotide
caucgggagggucauacug

SEQ ID NO: 754412 - RNA, 19 nt, Artificial Sequence
  Description of Artificial Sequence: Synthetic oligonucleotide
agcucauagugguacuuca

SEQ ID NO: 754413 - RNA, 19 nt, Artificial Sequence
  Description of Artificial Sequence: Synthetic oligonucleotide
ccauuuguuaaagugguag

SEQ ID NO: 754414 - RNA, 19 nt, Artificial Sequence
  Description of Artificial Sequence: Synthetic oligonucleotide
cuuuaucgucaucuacacc

SEQ ID NO: 754415 - RNA, 19 nt, Artificial Sequence
  Description of Artificial Sequence: Synthetic oligonucleotide
acuuuagaccaggaaaagu

SEQ ID NO: 754416 - RNA, 19 nt, Artificial Sequence
  Description of Artificial Sequence: Synthetic oligonucleotide
acacacgacauagcccugc

SEQ ID NO: 754417 - RNA, 19 nt, Artificial Sequence
  Description of Artificial Sequence: Synthetic oligonucleotide
uuuguuuuaugggaauauu

SEQ ID NO: 754418 - RNA, 19 nt, Artificial Sequence
  Description of Artificial Sequence: Synthetic oligonucleotide
guuggaucucagucaugcg

SEQ ID NO: 754419 - RNA, 19 nt, Artificial Sequence
  Description of Artificial Sequence: Synthetic oligonucleotide
ugacaaugagcucgaucac

SEQ ID NO: 754420 - RNA, 19 nt, Artificial Sequence
  Description of Artificial Sequence: Synthetic oligonucleotide
gguaggagagagaaucagg

SEQ ID NO: 754421 - RNA, 19 nt, Artificial Sequence
  Description of Artificial Sequence: Synthetic oligonucleotide
cauagugguacuucacaga

SEQ ID NO: 754422 - RNA, 19 nt, Artificial Sequence
  Description of Artificial Sequence: Synthetic oligonucleotide
ugucguucggcuucuccac

SEQ ID NO: 754423 - RNA, 19 nt, Artificial Sequence
  Description of Artificial Sequence: Synthetic oligonucleotide
aguuccuuaagaacgccga

SEQ ID NO: 754424 - RNA, 19 nt, Artificial Sequence
  Description of Artificial Sequence: Synthetic oligonucleotide
gaaucugcauugcagaauu

SEQ ID NO: 754425 - RNA, 19 nt, Artificial Sequence
  Description of Artificial Sequence: Synthetic oligonucleotide
uuuucgaguuuguguggca

SEQ ID NO: 754426 - RNA, 19 nt, Artificial Sequence
  Description of Artificial Sequence: Synthetic oligonucleotide
cucagagggacacacgaca

SEQ ID NO: 754427 - RNA, 19 nt, Artificial Sequence
  Description of Artificial Sequence: Synthetic oligonucleotide
cuguuuucgcagcugccag

SEQ ID NO: 754428 - RNA, 19 nt, Artificial Sequence
  Description of Artificial Sequence: Synthetic oligonucleotide
ugacaagguuagacaagga

SEQ ID NO: 754429 - RNA, 19 nt, Artificial Sequence
  Description of Artificial Sequence: Synthetic oligonucleotide
uguuuucgcagcugccaga

SEQ ID NO: 754430 - RNA, 19 nt, Artificial Sequence
  Description of Artificial Sequence: Synthetic oligonucleotide
aguagcucauagugguacu

SEQ ID NO: 754431 - RNA, 19 nt, Artificial Sequence
  Description of Artificial Sequence: Synthetic oligonucleotide
ugcggacuuauggagaaaa

SEQ ID NO: 754432 - RNA, 19 nt, Artificial Sequence
  Description of Artificial Sequence: Synthetic oligonucleotide
agcaugguuugccugcgga

SEQ ID NO: 754433 - RNA, 19 nt, Artificial Sequence
  Description of Artificial Sequence: Synthetic oligonucleotide
uuccuuaagaacgccgaaa

SEQ ID NO: 754434 - RNA, 19 nt, Artificial Sequence
  Description of Artificial Sequence: Synthetic oligonucleotide
caguagcucauagugguac

SEQ ID NO: 754435 - RNA, 19 nt, Artificial Sequence
  Description of Artificial Sequence: Synthetic oligonucleotide
cagaagaucccugccuucc

SEQ ID NO: 754436 - RNA, 19 nt, Artificial Sequence
  Description of Artificial Sequence: Synthetic oligonucleotide
uuccccacugucucuucag

SEQ ID NO: 754437 - RNA, 19 nt, Artificial Sequence
  Description of Artificial Sequence: Synthetic oligonucleotide
uguaugcuuccugugcgga

SEQ ID NO: 754438 - RNA, 19 nt, Artificial Sequence
  Description of Artificial Sequence: Synthetic oligonucleotide
ggucauacugaacaaucca

SEQ ID NO: 754439 - RNA, 19 nt, Artificial Sequence
  Description of Artificial Sequence: Synthetic oligonucleotide
ugcggacuggcaaaaguuu

SEQ ID NO: 754440 - RNA, 19 nt, Artificial Sequence
  Description of Artificial Sequence: Synthetic oligonucleotide
aacgugguuguucgcuuau

SEQ ID NO: 754441 - RNA, 19 nt, Artificial Sequence
  Description of Artificial Sequence: Synthetic oligonucleotide
aaguaacgaaggaaaccca

SEQ ID NO: 754442 - RNA, 19 nt, Artificial Sequence
  Description of Artificial Sequence: Synthetic oligonucleotide
aucacggggaugaggaaag

SEQ ID NO: 754443 - RNA, 19 nt, Artificial Sequence
  Description of Artificial Sequence: Synthetic oligonucleotide
caaccugaggcaaauuuaa

SEQ ID NO: 754444 - RNA, 19 nt, Artificial Sequence
  Description of Artificial Sequence: Synthetic oligonucleotide
aguccauacgugugaacau

SEQ ID NO: 754445 - RNA, 19 nt, Artificial Sequence
  Description of Artificial Sequence: Synthetic oligonucleotide
guaacgaaggaaacccaac

SEQ ID NO: 754446 - RNA, 19 nt, Artificial Sequence
  Description of Artificial Sequence: Synthetic oligonucleotide
ccaagauacgaucagccuc

SEQ ID NO: 754447 - RNA, 19 nt, Artificial Sequence
  Description of Artificial Sequence: Synthetic oligonucleotide
aguaacgaaggaaacccaa

SEQ ID NO: 754448 - RNA, 19 nt, Artificial Sequence
  Description of Artificial Sequence: Synthetic oligonucleotide
gguuguucgcuuauuuugc

SEQ ID NO: 754449 - RNA, 19 nt, Artificial Sequence
  Description of Artificial Sequence: Synthetic oligonucleotide
agaucugcuugagcgagug

SEQ ID NO: 754450 - RNA, 19 nt, Artificial Sequence
  Description of Artificial Sequence: Synthetic oligonucleotide
guaggacuuguaugcuucc

SEQ ID NO: 754451 - RNA, 19 nt, Artificial Sequence
  Description of Artificial Sequence: Synthetic oligonucleotide
gaagaacgugguuguucgc

SEQ ID NO: 754452 - RNA, 19 nt, Artificial Sequence
  Description of Artificial Sequence: Synthetic oligonucleotide
uucgcuuauuuugcuuuug

SEQ ID NO: 754453 - RNA, 19 nt, Artificial Sequence
  Description of Artificial Sequence: Synthetic oligonucleotide
ccuucagugagagaacugc

SEQ ID NO: 754454 - RNA, 19 nt, Artificial Sequence
  Description of Artificial Sequence: Synthetic oligonucleotide
gcgccugucaguccuaggg

SEQ ID NO: 754455 - RNA, 19 nt, Artificial Sequence
  Description of Artificial Sequence: Synthetic oligonucleotide
guacaugaacccuggagua

SEQ ID NO: 754456 - RNA, 19 nt, Artificial Sequence
  Description of Artificial Sequence: Synthetic oligonucleotide
caacuuuucgaguuugugu

SEQ ID NO: 754457 - RNA, 19 nt, Artificial Sequence
  Description of Artificial Sequence: Synthetic oligonucleotide
ggaaagcaagcguuuugcc

SEQ ID NO: 754458 - RNA, 19 nt, Artificial Sequence
  Description of Artificial Sequence: Synthetic oligonucleotide
agauccuaaaggugauaaa

SEQ ID NO: 754459 - RNA, 19 nt, Artificial Sequence
  Description of Artificial Sequence: Synthetic oligonucleotide
auacgaucagccucaucaa

SEQ ID NO: 754460 - RNA, 19 nt, Artificial Sequence
  Description of Artificial Sequence: Synthetic oligonucleotide
uucccuucagugagagaac

SEQ ID NO: 754461 - RNA, 19 nt, Artificial Sequence
  Description of Artificial Sequence: Synthetic oligonucleotide
uuuucgcagcugccagaag

SEQ ID NO: 754462 - RNA, 19 nt, Artificial Sequence
  Description of Artificial Sequence: Synthetic oligonucleotide
ucgaguuuguguggcagaa

SEQ ID NO: 754463 - RNA, 19 nt, Artificial Sequence
  Description of Artificial Sequence: Synthetic oligonucleotide
uguaguucaguagcucaua

SEQ ID NO: 754464 - RNA, 19 nt, Artificial Sequence
  Description of Artificial Sequence: Synthetic oligonucleotide
gucaucgggagggucauac

SEQ ID NO: 754465 - RNA, 19 nt, Artificial Sequence
  Description of Artificial Sequence: Synthetic oligonucleotide
guggccacgaugauguuga

SEQ ID NO: 754466 - RNA, 19 nt, Artificial Sequence
  Description of Artificial Sequence: Synthetic oligonucleotide
gguuagacaaggaagcaaa

SEQ ID NO: 754467 - RNA, 19 nt, Artificial Sequence
  Description of Artificial Sequence: Synthetic oligonucleotide
agauacgaucagccucauc

SEQ ID NO: 754468 - RNA, 19 nt, Artificial Sequence
  Description of Artificial Sequence: Synthetic oligonucleotide
ccacacgaugaauauauuc

SEQ ID NO: 754469 - RNA, 19 nt, Artificial Sequence
  Description of Artificial Sequence: Synthetic oligonucleotide
gacugaauaucagaaacuu

SEQ ID NO: 754470 - RNA, 19 nt, Artificial Sequence
  Description of Artificial Sequence: Synthetic oligonucleotide
gaucacggggaugaggaaa

SEQ ID NO: 754471 - RNA, 19 nt, Artificial Sequence
  Description of Artificial Sequence: Synthetic oligonucleotide
caaaagcgccugucagucc

SEQ ID NO: 754472 - RNA, 19 nt, Artificial Sequence
  Description of Artificial Sequence: Synthetic oligonucleotide
acuggagguucuuguacau

SEQ ID NO: 754473 - RNA, 19 nt, Artificial Sequence
  Description of Artificial Sequence: Synthetic oligonucleotide
accuguuacugccacccau

SEQ ID NO: 754474 - RNA, 19 nt, Artificial Sequence
  Description of Artificial Sequence: Synthetic oligonucleotide
uuguucgcuuauuuugcuu

SEQ ID NO: 754475 - RNA, 19 nt, Artificial Sequence
  Description of Artificial Sequence: Synthetic oligonucleotide
agacaggcaggucaaugua

SEQ ID NO: 754476 - RNA, 19 nt, Artificial Sequence
  Description of Artificial Sequence: Synthetic oligonucleotide
cucgaucacggggaugagg

SEQ ID NO: 754477 - RNA, 19 nt, Artificial Sequence
  Description of Artificial Sequence: Synthetic oligonucleotide
ucaguagcucauaguggua

SEQ ID NO: 754478 - RNA, 19 nt, Artificial Sequence
  Description of Artificial Sequence: Synthetic oligonucleotide
cacucugugcaucugccga

SEQ ID NO: 754479 - RNA, 19 nt, Artificial Sequence
  Description of Artificial Sequence: Synthetic oligonucleotide
ucguucggcuucuccacac

SEQ ID NO: 754480 - RNA, 19 nt, Artificial Sequence
  Description of Artificial Sequence: Synthetic oligonucleotide
caauggaaccuuggauugc

SEQ ID NO: 754481 - RNA, 19 nt, Artificial Sequence
  Description of Artificial Sequence: Synthetic oligonucleotide
agguuagacaaggaagcaa

SEQ ID NO: 754482 - RNA, 19 nt, Artificial Sequence
  Description of Artificial Sequence: Synthetic oligonucleotide
ccugugcggacuuauggag

SEQ ID NO: 754483 - RNA, 19 nt, Artificial Sequence
  Description of Artificial Sequence: Synthetic oligonucleotide
ucaguccauacgugugaac

SEQ ID NO: 754484 - RNA, 19 nt, Artificial Sequence
  Description of Artificial Sequence: Synthetic oligonucleotide
caugaacccuggaguauuc

SEQ ID NO: 754485 - RNA, 19 nt, Artificial Sequence
  Description of Artificial Sequence: Synthetic oligonucleotide
agagagaaucaggacuccu

SEQ ID NO: 754486 - RNA, 19 nt, Artificial Sequence
  Description of Artificial Sequence: Synthetic oligonucleotide
agaacgccgaaagucugca

SEQ ID NO: 754487 - RNA, 19 nt, Artificial Sequence
  Description of Artificial Sequence: Synthetic oligonucleotide
agagaacugccugcggucu

SEQ ID NO: 754488 - RNA, 19 nt, Artificial Sequence
  Description of Artificial Sequence: Synthetic oligonucleotide
ggaaugugaagagcagaag

SEQ ID NO: 754489 - RNA, 19 nt, Artificial Sequence
  Description of Artificial Sequence: Synthetic oligonucleotide
acgcaggaugagcagggca

SEQ ID NO: 754490 - RNA, 19 nt, Artificial Sequence
  Description of Artificial Sequence: Synthetic oligonucleotide
augcgcuugaagcccauuu

SEQ ID NO: 754491 - RNA, 19 nt, Artificial Sequence
  Description of Artificial Sequence: Synthetic oligonucleotide
ccucaaaagcgccugucag

SEQ ID NO: 754492 - RNA, 19 nt, Artificial Sequence
  Description of Artificial Sequence: Synthetic oligonucleotide
agcccauccacaguggcaa

SEQ ID NO: 754493 - RNA, 19 nt, Artificial Sequence
  Description of Artificial Sequence: Synthetic oligonucleotide
uucuccgcuuucuuugauu

SEQ ID NO: 754494 - RNA, 19 nt, Artificial Sequence
  Description of Artificial Sequence: Synthetic oligonucleotide
uugccugcggacuggcaaa

SEQ ID NO: 754495 - RNA, 19 nt, Artificial Sequence
  Description of Artificial Sequence: Synthetic oligonucleotide
gagcaugguuugccugcgg

SEQ ID NO: 754496 - RNA, 19 nt, Artificial Sequence
  Description of Artificial Sequence: Synthetic oligonucleotide
gggucauacugaacaaucc

SEQ ID NO: 754497 - RNA, 19 nt, Artificial Sequence
  Description of Artificial Sequence: Synthetic oligonucleotide
aagcccauccacaguggca

SEQ ID NO: 754498 - RNA, 19 nt, Artificial Sequence
  Description of Artificial Sequence: Synthetic oligonucleotide
cacaguggcaaccucuuua

SEQ ID NO: 754499 - RNA, 19 nt, Artificial Sequence
  Description of Artificial Sequence: Synthetic oligonucleotide
gucuucaacuuuucgaguu

SEQ ID NO: 754500 - RNA, 19 nt, Artificial Sequence
  Description of Artificial Sequence: Synthetic oligonucleotide
ucaucgggagggucauacu

SEQ ID NO: 754501 - RNA, 19 nt, Artificial Sequence
  Description of Artificial Sequence: Synthetic oligonucleotide
agcgagugggagucauaug

SEQ ID NO: 754502 - RNA, 19 nt, Artificial Sequence
  Description of Artificial Sequence: Synthetic oligonucleotide
ugauuucugguagccgaau

SEQ ID NO: 754503 - RNA, 19 nt, Artificial Sequence
  Description of Artificial Sequence: Synthetic oligonucleotide
gcaguauccccgaaucugc

SEQ ID NO: 754504 - RNA, 19 nt, Artificial Sequence
  Description of Artificial Sequence: Synthetic oligonucleotide
ugcaucugccgaguccaca

SEQ ID NO: 754505 - RNA, 19 nt, Artificial Sequence
  Description of Artificial Sequence: Synthetic oligonucleotide
acgacauagcccugcucaa

SEQ ID NO: 754506 - RNA, 19 nt, Artificial Sequence
  Description of Artificial Sequence: Synthetic oligonucleotide
guuuucgcagcugccagaa

SEQ ID NO: 754507 - RNA, 19 nt, Artificial Sequence
  Description of Artificial Sequence: Synthetic oligonucleotide
ccucuuuaucgucaucuac

SEQ ID NO: 754508 - RNA, 19 nt, Artificial Sequence
  Description of Artificial Sequence: Synthetic oligonucleotide
cagaaacuuuagaccagga

SEQ ID NO: 754509 - RNA, 19 nt, Artificial Sequence
  Description of Artificial Sequence: Synthetic oligonucleotide
cugugcggacuuauggaga

SEQ ID NO: 754510 - RNA, 19 nt, Artificial Sequence
  Description of Artificial Sequence: Synthetic oligonucleotide
guuccuuaagaacgccgaa

SEQ ID NO: 754511 - RNA, 19 nt, Artificial Sequence
  Description of Artificial Sequence: Synthetic oligonucleotide
uggcguugcugcuguuuca

SEQ ID NO: 754512 - RNA, 19 nt, Artificial Sequence
  Description of Artificial Sequence: Synthetic oligonucleotide
gaugagcuucugugcuuca

SEQ ID NO: 754513 - RNA, 19 nt, Artificial Sequence
  Description of Artificial Sequence: Synthetic oligonucleotide
gccgaaagucugcauggcc

SEQ ID NO: 754514 - RNA, 19 nt, Artificial Sequence
  Description of Artificial Sequence: Synthetic oligonucleotide
aagaucugcuugagcgagu

SEQ ID NO: 754515 - RNA, 19 nt, Artificial Sequence
  Description of Artificial Sequence: Synthetic oligonucleotide
cucaaaagcgccugucagu

SEQ ID NO: 754516 - RNA, 19 nt, Artificial Sequence
  Description of Artificial Sequence: Synthetic oligonucleotide
aguucucugguaggagaga

SEQ ID NO: 754517 - RNA, 19 nt, Artificial Sequence
  Description of Artificial Sequence: Synthetic oligonucleotide
gagggacacacgacauagc

SEQ ID NO: 754518 - RNA, 19 nt, Artificial Sequence
  Description of Artificial Sequence: Synthetic oligonucleotide
agcgccugucaguccuagg

SEQ ID NO: 754519 - RNA, 19 nt, Artificial Sequence
  Description of Artificial Sequence: Synthetic oligonucleotide
ugcucguauguaggacuug

SEQ ID NO: 754520 - RNA, 19 nt, Artificial Sequence
  Description of Artificial Sequence: Synthetic oligonucleotide
gaacgugguuguucgcuua

SEQ ID NO: 754521 - RNA, 19 nt, Artificial Sequence
  Description of Artificial Sequence: Synthetic oligonucleotide
ugcucacauucagaucaac

SEQ ID NO: 754522 - RNA, 19 nt, Artificial Sequence
  Description of Artificial Sequence: Synthetic oligonucleotide
gggacacacgacauagccc

SEQ ID NO: 754523 - RNA, 19 nt, Artificial Sequence
  Description of Artificial Sequence: Synthetic oligonucleotide
uucuacccacacgaugaau

SEQ ID NO: 754524 - RNA, 19 nt, Artificial Sequence
  Description of Artificial Sequence: Synthetic oligonucleotide
ucuuuucgaucagcuuuuc

SEQ ID NO: 754525 - RNA, 19 nt, Artificial Sequence
  Description of Artificial Sequence: Synthetic oligonucleotide
cugccugcggucugcugac

SEQ ID NO: 754526 - RNA, 19 nt, Artificial Sequence
  Description of Artificial Sequence: Synthetic oligonucleotide
ugagcgagugggagucaua

SEQ ID NO: 754527 - RNA, 19 nt, Artificial Sequence
  Description of Artificial Sequence: Synthetic oligonucleotide
cccaacauccaagauacga

SEQ ID NO: 754528 - RNA, 19 nt, Artificial Sequence
  Description of Artificial Sequence: Synthetic oligonucleotide
gcaugguuugccugcggac

SEQ ID NO: 754529 - RNA, 19 nt, Artificial Sequence
  Description of Artificial Sequence: Synthetic oligonucleotide
ggacuuguaugcuuccugu

SEQ ID NO: 754530 - RNA, 19 nt, Artificial Sequence
  Description of Artificial Sequence: Synthetic oligonucleotide
uacccacacgaugaauaua

SEQ ID NO: 754531 - RNA, 19 nt, Artificial Sequence
  Description of Artificial Sequence: Synthetic oligonucleotide
cauuccuaggcaugaacuu

SEQ ID NO: 754532 - RNA, 19 nt, Artificial Sequence
  Description of Artificial Sequence: Synthetic oligonucleotide
gugggagucauaugcucgu

SEQ ID NO: 754533 - RNA, 19 nt, Artificial Sequence
  Description of Artificial Sequence: Synthetic oligonucleotide
gguucugaaucaggagaug

SEQ ID NO: 754534 - RNA, 19 nt, Artificial Sequence
  Description of Artificial Sequence: Synthetic oligonucleotide
ucacggggaugaggaaagc

SEQ ID NO: 754535 - RNA, 19 nt, Artificial Sequence
  Description of Artificial Sequence: Synthetic oligonucleotide
guucuacccacacgaugaa

SEQ ID NO: 754536 - RNA, 19 nt, Artificial Sequence
  Description of Artificial Sequence: Synthetic oligonucleotide
guauccccgaaucugcauu

SEQ ID NO: 754537 - RNA, 19 nt, Artificial Sequence
  Description of Artificial Sequence: Synthetic oligonucleotide
cuggaguauucugcaugug

SEQ ID NO: 754538 - RNA, 19 nt, Artificial Sequence
  Description of Artificial Sequence: Synthetic oligonucleotide
ccaugaucaguccauacgu

SEQ ID NO: 754539 - RNA, 19 nt, Artificial Sequence
  Description of Artificial Sequence: Synthetic oligonucleotide
gguacuucacagacauaca

SEQ ID NO: 754540 - RNA, 19 nt, Artificial Sequence
  Description of Artificial Sequence: Synthetic oligonucleotide
aagauacgaucagccucau

SEQ ID NO: 754541 - RNA, 19 nt, Artificial Sequence
  Description of Artificial Sequence: Synthetic oligonucleotide
ccugaggcaaauuuaaguu

SEQ ID NO: 754542 - RNA, 19 nt, Artificial Sequence
  Description of Artificial Sequence: Synthetic oligonucleotide
uuccauuccuaggcaugaa

SEQ ID NO: 754543 - RNA, 19 nt, Artificial Sequence
  Description of Artificial Sequence: Synthetic oligonucleotide
gacacacgacauagcccug

SEQ ID NO: 754544 - RNA, 19 nt, Artificial Sequence
  Description of Artificial Sequence: Synthetic oligonucleotide
gucguucggcuucuccaca

SEQ ID NO: 754545 - RNA, 19 nt, Artificial Sequence
  Description of Artificial Sequence: Synthetic oligonucleotide
acgugugaacauggugugu

SEQ ID NO: 754546 - RNA, 19 nt, Artificial Sequence
  Description of Artificial Sequence: Synthetic oligonucleotide
guccucaaaagcgccuguc

SEQ ID NO: 754547 - RNA, 19 nt, Artificial Sequence
  Description of Artificial Sequence: Synthetic oligonucleotide
ccugucguucggcuucucc

SEQ ID NO: 754548 - RNA, 19 nt, Artificial Sequence
  Description of Artificial Sequence: Synthetic oligonucleotide
gcaagcguuuugccacugc

SEQ ID NO: 754549 - RNA, 19 nt, Artificial Sequence
  Description of Artificial Sequence: Synthetic oligonucleotide
agcaagcguuuugccacug

SEQ ID NO: 754550 - RNA, 19 nt, Artificial Sequence
  Description of Artificial Sequence: Synthetic oligonucleotide
cacgaugaauauauuccuu

SEQ ID NO: 754551 - RNA, 19 nt, Artificial Sequence
  Description of Artificial Sequence: Synthetic oligonucleotide
augcucguauguaggacuu

SEQ ID NO: 754552 - RNA, 19 nt, Artificial Sequence
  Description of Artificial Sequence: Synthetic oligonucleotide
gcaaccugaggcaaauuua

SEQ ID NO: 754553 - RNA, 19 nt, Artificial Sequence
  Description of Artificial Sequence: Synthetic oligonucleotide
cucguauguaggacuugua

SEQ ID NO: 754554 - RNA, 19 nt, Artificial Sequence
  Description of Artificial Sequence: Synthetic oligonucleotide
guuagacaaggaagcaaau

SEQ ID NO: 754555 - RNA, 19 nt, Artificial Sequence
  Description of Artificial Sequence: Synthetic oligonucleotide
ggauugcuucaaguaacga

SEQ ID NO: 754556 - RNA, 19 nt, Artificial Sequence
  Description of Artificial Sequence: Synthetic oligonucleotide
gucaugcgcuugaagccca

SEQ ID NO: 754557 - RNA, 19 nt, Artificial Sequence
  Description of Artificial Sequence: Synthetic oligonucleotide
ugggagucauaugcucgua

SEQ ID NO: 754558 - RNA, 19 nt, Artificial Sequence
  Description of Artificial Sequence: Synthetic oligonucleotide
cugcggacuggcaaaaguu

SEQ ID NO: 754559 - RNA, 19 nt, Artificial Sequence
  Description of Artificial Sequence: Synthetic oligonucleotide
accauuuguuaaaguggua

SEQ ID NO: 754560 - RNA, 19 nt, Artificial Sequence
  Description of Artificial Sequence: Synthetic oligonucleotide
gcggucugcugacuucuug

SEQ ID NO: 754561 - RNA, 19 nt, Artificial Sequence
  Description of Artificial Sequence: Synthetic oligonucleotide
auguuggaucucagucaug

SEQ ID NO: 754562 - RNA, 19 nt, Artificial Sequence
  Description of Artificial Sequence: Synthetic oligonucleotide
ccaacauccaagauacgau

SEQ ID NO: 754563 - RNA, 19 nt, Artificial Sequence
  Description of Artificial Sequence: Synthetic oligonucleotide
cugaacaauccaguccacu

SEQ ID NO: 754564 - RNA, 19 nt, Artificial Sequence
  Description of Artificial Sequence: Synthetic oligonucleotide
acccaacauccaagauacg

SEQ ID NO: 754565 - RNA, 19 nt, Artificial Sequence
  Description of Artificial Sequence: Synthetic oligonucleotide
ggggucaucgggaggguca

SEQ ID NO: 754566 - RNA, 19 nt, Artificial Sequence
  Description of Artificial Sequence: Synthetic oligonucleotide
ugccugcggacuggcaaaa

SEQ ID NO: 754567 - RNA, 19 nt, Artificial Sequence
  Description of Artificial Sequence: Synthetic oligonucleotide
gcgcuugaagcccauuucu

SEQ ID NO: 754568 - RNA, 19 nt, Artificial Sequence
  Description of Artificial Sequence: Synthetic oligonucleotide
cagagggacacacgacaua

SEQ ID NO: 754569 - RNA, 19 nt, Artificial Sequence
  Description of Artificial Sequence: Synthetic oligonucleotide
augccuccacucugugcau

SEQ ID NO: 754570 - RNA, 19 nt, Artificial Sequence
  Description of Artificial Sequence: Synthetic oligonucleotide
gauggcguugcugcuguuu

SEQ ID NO: 754571 - RNA, 19 nt, Artificial Sequence
  Description of Artificial Sequence: Synthetic oligonucleotide
cugcucacauucagaucaa

SEQ ID NO: 754572 - RNA, 19 nt, Artificial Sequence
  Description of Artificial Sequence: Synthetic oligonucleotide
ggcaugccuccacucugug

SEQ ID NO: 754573 - RNA, 19 nt, Artificial Sequence
  Description of Artificial Sequence: Synthetic oligonucleotide
ugcggucugcugacuucuu

SEQ ID NO: 754574 - RNA, 19 nt, Artificial Sequence
  Description of Artificial Sequence: Synthetic oligonucleotide
aaagcgccugucaguccua

SEQ ID NO: 754575 - RNA, 19 nt, Artificial Sequence
  Description of Artificial Sequence: Synthetic oligonucleotide
ucccugucguucggcuucu

SEQ ID NO: 754576 - RNA, 19 nt, Artificial Sequence
  Description of Artificial Sequence: Synthetic oligonucleotide
cacagcaguauccccgaau

SEQ ID NO: 754577 - RNA, 19 nt, Artificial Sequence
  Description of Artificial Sequence: Synthetic oligonucleotide
cucgugagccccagcauuu

SEQ ID NO: 754578 - RNA, 19 nt, Artificial Sequence
  Description of Artificial Sequence: Synthetic oligonucleotide
ucgugagccccagcauuuu

SEQ ID NO: 754579 - RNA, 19 nt, Artificial Sequence
  Description of Artificial Sequence: Synthetic oligonucleotide
caccucccugucguucggc

SEQ ID NO: 754580 - RNA, 19 nt, Artificial Sequence
  Description of Artificial Sequence: Synthetic oligonucleotide
gcucguauguaggacuugu

SEQ ID NO: 754581 - RNA, 19 nt, Artificial Sequence
  Description of Artificial Sequence: Synthetic oligonucleotide
cuauagcuuucagaguguu

SEQ ID NO: 754582 - RNA, 19 nt, Artificial Sequence
  Description of Artificial Sequence: Synthetic oligonucleotide
gggagucauaugcucguau

SEQ ID NO: 754583 - RNA, 19 nt, Artificial Sequence
  Description of Artificial Sequence: Synthetic oligonucleotide
gaacgccgaaagucugcau

SEQ ID NO: 754584 - RNA, 19 nt, Artificial Sequence
  Description of Artificial Sequence: Synthetic oligonucleotide
acgugguuguucgcuuauu

SEQ ID NO: 754585 - RNA, 19 nt, Artificial Sequence
  Description of Artificial Sequence: Synthetic oligonucleotide
gcggacuggcaaaaguuua

SEQ ID NO: 754586 - RNA, 19 nt, Artificial Sequence
  Description of Artificial Sequence: Synthetic oligonucleotide
ccuuaagaacgccgaaagu

SEQ ID NO: 754587 - RNA, 19 nt, Artificial Sequence
  Description of Artificial Sequence: Synthetic oligonucleotide
cggacuuauggagaaaaua

SEQ ID NO: 754588 - RNA, 19 nt, Artificial Sequence
  Description of Artificial Sequence: Synthetic oligonucleotide
caucugccgaguccacacu

SEQ ID NO: 754589 - RNA, 19 nt, Artificial Sequence
  Description of Artificial Sequence: Synthetic oligonucleotide
cugcggucugcugacuucu

SEQ ID NO: 754590 - RNA, 19 nt, Artificial Sequence
  Description of Artificial Sequence: Synthetic oligonucleotide
ccugcggacuggcaaaagu

SEQ ID NO: 754591 - RNA, 19 nt, Artificial Sequence
  Description of Artificial Sequence: Synthetic oligonucleotide
ugccugcggucugcugacu

SEQ ID NO: 754592 - RNA, 19 nt, Artificial Sequence
  Description of Artificial Sequence: Synthetic oligonucleotide
cuucuccgcuuucuuugau

SEQ ID NO: 754593 - RNA, 19 nt, Artificial Sequence
  Description of Artificial Sequence: Synthetic oligonucleotide
cgcuuauuuugcuuuugcu

SEQ ID NO: 754594 - RNA, 19 nt, Artificial Sequence
  Description of Artificial Sequence: Synthetic oligonucleotide
caggcaggucaauguaguu

SEQ ID NO: 754595 - RNA, 19 nt, Artificial Sequence
  Description of Artificial Sequence: Synthetic oligonucleotide
cgugagccccagcauuuuc

SEQ ID NO: 754596 - RNA, 19 nt, Artificial Sequence
  Description of Artificial Sequence: Synthetic oligonucleotide
gggcaccucccugucguuc

SEQ ID NO: 754597 - RNA, 19 nt, Artificial Sequence
  Description of Artificial Sequence: Synthetic oligonucleotide
gugcggacuuauggagaaa

SEQ ID NO: 754598 - RNA, 19 nt, Artificial Sequence
  Description of Artificial Sequence: Synthetic oligonucleotide
gccugcggacuggcaaaag

SEQ ID NO: 754599 - RNA, 19 nt, Artificial Sequence
  Description of Artificial Sequence: Synthetic oligonucleotide
ccauacgugugaacauggu

SEQ ID NO: 754600 - RNA, 19 nt, Artificial Sequence
  Description of Artificial Sequence: Synthetic oligonucleotide
gugguacuucacagacaua

SEQ ID NO: 754601 - RNA, 19 nt, Artificial Sequence
  Description of Artificial Sequence: Synthetic oligonucleotide
ggaucucagucaugcgcuu

SEQ ID NO: 754602 - RNA, 19 nt, Artificial Sequence
  Description of Artificial Sequence: Synthetic oligonucleotide
cgccgaaagucugcauggc

SEQ ID NO: 754603 - RNA, 19 nt, Artificial Sequence
  Description of Artificial Sequence: Synthetic oligonucleotide
cgggagggucauacugaac

SEQ ID NO: 754604 - RNA, 19 nt, Artificial Sequence
  Description of Artificial Sequence: Synthetic oligonucleotide
gcuuccugugcggacuuau

SEQ ID NO: 754605 - RNA, 19 nt, Artificial Sequence
  Description of Artificial Sequence: Synthetic oligonucleotide
gcuguucuacccacacgau

SEQ ID NO: 754606 - RNA, 19 nt, Artificial Sequence
  Description of Artificial Sequence: Synthetic oligonucleotide
gcggacuuauggagaaaau

SEQ ID NO: 754607 - RNA, 19 nt, Artificial Sequence
  Description of Artificial Sequence: Synthetic oligonucleotide
cugcaucauuucccauuuu

SEQ ID NO: 754608 - RNA, 19 nt, Artificial Sequence
  Description of Artificial Sequence: Synthetic oligonucleotide
cgaucacggggaugaggaa

SEQ ID NO: 754609 - RNA, 19 nt, Artificial Sequence
  Description of Artificial Sequence: Synthetic oligonucleotide
cgucaucuacacccacaua

SEQ ID NO: 754610 - RNA, 19 nt, Artificial Sequence
  Description of Artificial Sequence: Synthetic oligonucleotide
cccacacgaugaauauauu

SEQ ID NO: 754611 - RNA, 19 nt, Artificial Sequence
  Description of Artificial Sequence: Synthetic oligonucleotide
ggucaucgggagggucaua

SEQ ID NO: 754612 - RNA, 19 nt, Artificial Sequence
  Description of Artificial Sequence: Synthetic oligonucleotide
acuagauccacccugacac

SEQ ID NO: 754613 - RNA, 19 nt, Artificial Sequence
  Description of Artificial Sequence: Synthetic oligonucleotide
ucaauuguaaauuggauca

SEQ ID NO: 754614 - RNA, 19 nt, Artificial Sequence
  Description of Artificial Sequence: Synthetic oligonucleotide
uuauuaaucauuauuguuc

SEQ ID NO: 754615 - RNA, 19 nt, Artificial Sequence
  Description of Artificial Sequence: Synthetic oligonucleotide
ugucguaugaauauuacgc

SEQ ID NO: 754616 - RNA, 19 nt, Artificial Sequence
  Description of Artificial Sequence: Synthetic oligonucleotide
aaugcucugagauagacgu

SEQ ID NO: 754617 - RNA, 19 nt, Artificial Sequence
  Description of Artificial Sequence: Synthetic oligonucleotide
uuuauuaguagguaguacc

SEQ ID NO: 754618 - RNA, 19 nt, Artificial Sequence
  Description of Artificial Sequence: Synthetic oligonucleotide
uuaaguuggauuaauaauc

SEQ ID NO: 754619 - RNA, 19 nt, Artificial Sequence
  Description of Artificial Sequence: Synthetic oligonucleotide
gauuaauaauccuaaggag

SEQ ID NO: 754620 - RNA, 19 nt, Artificial Sequence
  Description of Artificial Sequence: Synthetic oligonucleotide
acaacuaugaacaagcauc

SEQ ID NO: 754621 - RNA, 19 nt, Artificial Sequence
  Description of Artificial Sequence: Synthetic oligonucleotide
uguuaguuaaaguaaacac

SEQ ID NO: 754622 - RNA, 19 nt, Artificial Sequence
  Description of Artificial Sequence: Synthetic oligonucleotide
ugaauauuacgccaaacca

SEQ ID NO: 754623 - RNA, 19 nt, Artificial Sequence
  Description of Artificial Sequence: Synthetic oligonucleotide
gguggaaucaacuagcggg

SEQ ID NO: 754624 - RNA, 19 nt, Artificial Sequence
  Description of Artificial Sequence: Synthetic oligonucleotide
uaaguuggauuaauaaucc

SEQ ID NO: 754625 - RNA, 19 nt, Artificial Sequence
  Description of Artificial Sequence: Synthetic oligonucleotide
uguugugucgaucuuguag

SEQ ID NO: 754626 - RNA, 19 nt, Artificial Sequence
  Description of Artificial Sequence: Synthetic oligonucleotide
uaacgcauuacuuaaugag

SEQ ID NO: 754627 - RNA, 19 nt, Artificial Sequence
  Description of Artificial Sequence: Synthetic oligonucleotide
aagcuaauugcauaggggu

SEQ ID NO: 754628 - RNA, 19 nt, Artificial Sequence
  Description of Artificial Sequence: Synthetic oligonucleotide
uuuuaaguuggauuaauaa

SEQ ID NO: 754629 - RNA, 19 nt, Artificial Sequence
  Description of Artificial Sequence: Synthetic oligonucleotide
uuuaacacugucaaccacu

SEQ ID NO: 754630 - RNA, 19 nt, Artificial Sequence
  Description of Artificial Sequence: Synthetic oligonucleotide
ggaguacugaacuagaucc

SEQ ID NO: 754631 - RNA, 19 nt, Artificial Sequence
  Description of Artificial Sequence: Synthetic oligonucleotide
auuaagaccugccauauau

SEQ ID NO: 754632 - RNA, 19 nt, Artificial Sequence
  Description of Artificial Sequence: Synthetic oligonucleotide
aaagcuaauugcauagggg

SEQ ID NO: 754633 - RNA, 19 nt, Artificial Sequence
  Description of Artificial Sequence: Synthetic oligonucleotide
uuauuaguagguaguacca

SEQ ID NO: 754634 - RNA, 19 nt, Artificial Sequence
  Description of Artificial Sequence: Synthetic oligonucleotide
augauuaugguuccgccuc

SEQ ID NO: 754635 - RNA, 19 nt, Artificial Sequence
  Description of Artificial Sequence: Synthetic oligonucleotide
uccguaagaagcaugggug

SEQ ID NO: 754636 - RNA, 19 nt, Artificial Sequence
  Description of Artificial Sequence: Synthetic oligonucleotide
cugagauagacguuuacag

SEQ ID NO: 754637 - RNA, 19 nt, Artificial Sequence
  Description of Artificial Sequence: Synthetic oligonucleotide
uuacuagguaacuucauac

SEQ ID NO: 754638 - RNA, 19 nt, Artificial Sequence
  Description of Artificial Sequence: Synthetic oligonucleotide
aaacuugaacacgccaucc

SEQ ID NO: 754639 - RNA, 19 nt, Artificial Sequence
  Description of Artificial Sequence: Synthetic oligonucleotide
agcacuuauaaauuagucu

SEQ ID NO: 754640 - RNA, 19 nt, Artificial Sequence
  Description of Artificial Sequence: Synthetic oligonucleotide
guauauagacgccugguag

SEQ ID NO: 754641 - RNA, 19 nt, Artificial Sequence
  Description of Artificial Sequence: Synthetic oligonucleotide
gacguuuacagcaagucag

SEQ ID NO: 754642 - RNA, 19 nt, Artificial Sequence
  Description of Artificial Sequence: Synthetic oligonucleotide
uauauagacgccugguagc

SEQ ID NO: 754643 - RNA, 19 nt, Artificial Sequence
  Description of Artificial Sequence: Synthetic oligonucleotide
aauaccugacuucauuaga

SEQ ID NO: 754644 - RNA, 19 nt, Artificial Sequence
  Description of Artificial Sequence: Synthetic oligonucleotide
augagaggucuccacaacc

SEQ ID NO: 754645 - RNA, 19 nt, Artificial Sequence
  Description of Artificial Sequence: Synthetic oligonucleotide
ugcguggugcaccagaucc

SEQ ID NO: 754646 - RNA, 19 nt, Artificial Sequence
  Description of Artificial Sequence: Synthetic oligonucleotide
uuuucgguuggucaaacaa

SEQ ID NO: 754647 - RNA, 19 nt, Artificial Sequence
  Description of Artificial Sequence: Synthetic oligonucleotide
auaaauuagucucuguuua

SEQ ID NO: 754648 - RNA, 19 nt, Artificial Sequence
  Description of Artificial Sequence: Synthetic oligonucleotide
acagucgccaucuggauag

SEQ ID NO: 754649 - RNA, 19 nt, Artificial Sequence
  Description of Artificial Sequence: Synthetic oligonucleotide
agaaccuacgcauacacaa

SEQ ID NO: 754650 - RNA, 19 nt, Artificial Sequence
  Description of Artificial Sequence: Synthetic oligonucleotide
uaagaccugccauauauga

SEQ ID NO: 754651 - RNA, 19 nt, Artificial Sequence
  Description of Artificial Sequence: Synthetic oligonucleotide
ugagauagacguuuacagc

SEQ ID NO: 754652 - RNA, 19 nt, Artificial Sequence
  Description of Artificial Sequence: Synthetic oligonucleotide
uuacucuucaggcaguccu

SEQ ID NO: 754653 - RNA, 19 nt, Artificial Sequence
  Description of Artificial Sequence: Synthetic oligonucleotide
uauaugauuaugguuccgc

SEQ ID NO: 754654 - RNA, 19 nt, Artificial Sequence
  Description of Artificial Sequence: Synthetic oligonucleotide
uacugaacuagauccaccc

SEQ ID NO: 754655 - RNA, 19 nt, Artificial Sequence
  Description of Artificial Sequence: Synthetic oligonucleotide
auuacuuaaugagaggucu

SEQ ID NO: 754656 - RNA, 19 nt, Artificial Sequence
  Description of Artificial Sequence: Synthetic oligonucleotide
gaauauuacgccaaaccac

SEQ ID NO: 754657 - RNA, 19 nt, Artificial Sequence
  Description of Artificial Sequence: Synthetic oligonucleotide
caacuaugaacaagcaucc

SEQ ID NO: 754658 - RNA, 19 nt, Artificial Sequence
  Description of Artificial Sequence: Synthetic oligonucleotide
ugcucuaaagcaagaguag

SEQ ID NO: 754659 - RNA, 19 nt, Artificial Sequence
  Description of Artificial Sequence: Synthetic oligonucleotide
aacuacuacacagugcuca

SEQ ID NO: 754660 - RNA, 19 nt, Artificial Sequence
  Description of Artificial Sequence: Synthetic oligonucleotide
ucuauuuucgguuggucaa

SEQ ID NO: 754661 - RNA, 19 nt, Artificial Sequence
  Description of Artificial Sequence: Synthetic oligonucleotide
aacaacuaugaacaagcau

SEQ ID NO: 754662 - RNA, 19 nt, Artificial Sequence
  Description of Artificial Sequence: Synthetic oligonucleotide
acgagguuuacucuucagg

SEQ ID NO: 754663 - RNA, 19 nt, Artificial Sequence
  Description of Artificial Sequence: Synthetic oligonucleotide
agguuuacucuucaggcag

SEQ ID NO: 754664 - RNA, 19 nt, Artificial Sequence
  Description of Artificial Sequence: Synthetic oligonucleotide
agaaguaacgcauuacuua

SEQ ID NO: 754665 - RNA, 19 nt, Artificial Sequence
  Description of Artificial Sequence: Synthetic oligonucleotide
gagaccaccaacuuccaac

SEQ ID NO: 754666 - RNA, 19 nt, Artificial Sequence
  Description of Artificial Sequence: Synthetic oligonucleotide
uucgguuggucaaacaaac

SEQ ID NO: 754667 - RNA, 19 nt, Artificial Sequence
  Description of Artificial Sequence: Synthetic oligonucleotide
uauuacgccaaaccacacc

SEQ ID NO: 754668 - RNA, 19 nt, Artificial Sequence
  Description of Artificial Sequence: Synthetic oligonucleotide
ugcuguuagaaccuacgca

SEQ ID NO: 754669 - RNA, 19 nt, Artificial Sequence
  Description of Artificial Sequence: Synthetic oligonucleotide
uggauaguuaucaggaaua

SEQ ID NO: 754670 - RNA, 19 nt, Artificial Sequence
  Description of Artificial Sequence: Synthetic oligonucleotide
aaccuacgcauacacaaca

SEQ ID NO: 754671 - RNA, 19 nt, Artificial Sequence
  Description of Artificial Sequence: Synthetic oligonucleotide
gaaguaacgcauuacuuaa

SEQ ID NO: 754672 - RNA, 19 nt, Artificial Sequence
  Description of Artificial Sequence: Synthetic oligonucleotide
ucguaugaauauuacgcca

SEQ ID NO: 754673 - RNA, 19 nt, Artificial Sequence
  Description of Artificial Sequence: Synthetic oligonucleotide
uccugcauaaaugacaauc

SEQ ID NO: 754674 - RNA, 19 nt, Artificial Sequence
  Description of Artificial Sequence: Synthetic oligonucleotide
aauuagucucuguuuaguu

SEQ ID NO: 754675 - RNA, 19 nt, Artificial Sequence
  Description of Artificial Sequence: Synthetic oligonucleotide
cauaacguguacuccaaac

SEQ ID NO: 754676 - RNA, 19 nt, Artificial Sequence
  Description of Artificial Sequence: Synthetic oligonucleotide
uugauuaucuacacauauc

SEQ ID NO: 754677 - RNA, 19 nt, Artificial Sequence
  Description of Artificial Sequence: Synthetic oligonucleotide
cuaccuaccguauguacag

SEQ ID NO: 754678 - RNA, 19 nt, Artificial Sequence
  Description of Artificial Sequence: Synthetic oligonucleotide
ucaacuagcgggugaaaga

SEQ ID NO: 754679 - RNA, 19 nt, Artificial Sequence
  Description of Artificial Sequence: Synthetic oligonucleotide
uaugauuaugguuccgccu

SEQ ID NO: 754680 - RNA, 19 nt, Artificial Sequence
  Description of Artificial Sequence: Synthetic oligonucleotide
aacauuaguuuccugcaua

SEQ ID NO: 754681 - RNA, 19 nt, Artificial Sequence
  Description of Artificial Sequence: Synthetic oligonucleotide
aaauuagucucuguuuagu

SEQ ID NO: 754682 - RNA, 19 nt, Artificial Sequence
  Description of Artificial Sequence: Synthetic oligonucleotide
uguagaagacucuccuugc

SEQ ID NO: 754683 - RNA, 19 nt, Artificial Sequence
  Description of Artificial Sequence: Synthetic oligonucleotide
gucguaugaauauuacgcc

SEQ ID NO: 754684 - RNA, 19 nt, Artificial Sequence
  Description of Artificial Sequence: Synthetic oligonucleotide
uaaucauuauuguuccagu

SEQ ID NO: 754685 - RNA, 19 nt, Artificial Sequence
  Description of Artificial Sequence: Synthetic oligonucleotide
uuaacagcuauugauuauc

SEQ ID NO: 754686 - RNA, 19 nt, Artificial Sequence
  Description of Artificial Sequence: Synthetic oligonucleotide
ucugagauagacguuuaca

SEQ ID NO: 754687 - RNA, 19 nt, Artificial Sequence
  Description of Artificial Sequence: Synthetic oligonucleotide
guugugucgaucuuguaga

SEQ ID NO: 754688 - RNA, 19 nt, Artificial Sequence
  Description of Artificial Sequence: Synthetic oligonucleotide
aacuagauccacccugaca

SEQ ID NO: 754689 - RNA, 19 nt, Artificial Sequence
  Description of Artificial Sequence: Synthetic oligonucleotide
aacgcauuacuuaaugaga

SEQ ID NO: 754690 - RNA, 19 nt, Artificial Sequence
  Description of Artificial Sequence: Synthetic oligonucleotide
auacuuuaacacugucaac

SEQ ID NO: 754691 - RNA, 19 nt, Artificial Sequence
  Description of Artificial Sequence: Synthetic oligonucleotide
cuuaaugagaggucuccac

SEQ ID NO: 754692 - RNA, 19 nt, Artificial Sequence
  Description of Artificial Sequence: Synthetic oligonucleotide
uuaguagguaguaccauuu

SEQ ID NO: 754693 - RNA, 19 nt, Artificial Sequence
  Description of Artificial Sequence: Synthetic oligonucleotide
uacuagguaacuucauacu

SEQ ID NO: 754694 - RNA, 19 nt, Artificial Sequence
  Description of Artificial Sequence: Synthetic oligonucleotide
uguauauagacgccuggua

SEQ ID NO: 754695 - RNA, 19 nt, Artificial Sequence
  Description of Artificial Sequence: Synthetic oligonucleotide
agcucguuugcgcacagag

SEQ ID NO: 754696 - RNA, 19 nt, Artificial Sequence
  Description of Artificial Sequence: Synthetic oligonucleotide
uucacuaccaagguaaauu

SEQ ID NO: 754697 - RNA, 19 nt, Artificial Sequence
  Description of Artificial Sequence: Synthetic oligonucleotide
cucuacuaacacaacaguc

SEQ ID NO: 754698 - RNA, 19 nt, Artificial Sequence
  Description of Artificial Sequence: Synthetic oligonucleotide
aguagugcugugcagagua

SEQ ID NO: 754699 - RNA, 19 nt, Artificial Sequence
  Description of Artificial Sequence: Synthetic oligonucleotide
uacauuaagaccugccaua

SEQ ID NO: 754700 - RNA, 19 nt, Artificial Sequence
  Description of Artificial Sequence: Synthetic oligonucleotide
uuucgguuggucaaacaaa

SEQ ID NO: 754701 - RNA, 19 nt, Artificial Sequence
  Description of Artificial Sequence: Synthetic oligonucleotide
aaguuggauuaauaauccu

SEQ ID NO: 754702 - RNA, 19 nt, Artificial Sequence
  Description of Artificial Sequence: Synthetic oligonucleotide
ucacuaccaagguaaauuc

SEQ ID NO: 754703 - RNA, 19 nt, Artificial Sequence
  Description of Artificial Sequence: Synthetic oligonucleotide
ugaccuaccuaccguaugu

SEQ ID NO: 754704 - RNA, 19 nt, Artificial Sequence
  Description of Artificial Sequence: Synthetic oligonucleotide
agcaagaguagugcugugc

SEQ ID NO: 754705 - RNA, 19 nt, Artificial Sequence
  Description of Artificial Sequence: Synthetic oligonucleotide
uacuuaaugagaggucucc

SEQ ID NO: 754706 - RNA, 19 nt, Artificial Sequence
  Description of Artificial Sequence: Synthetic oligonucleotide
acuagcgggugaaagacgg

SEQ ID NO: 754707 - RNA, 19 nt, Artificial Sequence
  Description of Artificial Sequence: Synthetic oligonucleotide
uuuaacagcuauugauuau

SEQ ID NO: 754708 - RNA, 19 nt, Artificial Sequence
  Description of Artificial Sequence: Synthetic oligonucleotide
auaagcaaaguuacuaggu

SEQ ID NO: 754709 - RNA, 19 nt, Artificial Sequence
  Description of Artificial Sequence: Synthetic oligonucleotide
ucgguuggucaaacaaacg

SEQ ID NO: 754710 - RNA, 19 nt, Artificial Sequence
  Description of Artificial Sequence: Synthetic oligonucleotide
acaacuuaccucuaacaua

SEQ ID NO: 754711 - RNA, 19 nt, Artificial Sequence
  Description of Artificial Sequence: Synthetic oligonucleotide
auuagucucuguuuaguua

SEQ ID NO: 754712 - RNA, 19 nt, Artificial Sequence
  Description of Artificial Sequence: Synthetic oligonucleotide
cauuacuuaaugagagguc

SEQ ID NO: 754713 - RNA, 19 nt, Artificial Sequence
  Description of Artificial Sequence: Synthetic oligonucleotide
auuaguagguaguaccauu

SEQ ID NO: 754714 - RNA, 19 nt, Artificial Sequence
  Description of Artificial Sequence: Synthetic oligonucleotide
uuaugguuccgccuccacu

SEQ ID NO: 754715 - RNA, 19 nt, Artificial Sequence
  Description of Artificial Sequence: Synthetic oligonucleotide
acgcauuacuuaaugagag

SEQ ID NO: 754716 - RNA, 19 nt, Artificial Sequence
  Description of Artificial Sequence: Synthetic oligonucleotide
caacuuccaacuacuacac

SEQ ID NO: 754717 - RNA, 19 nt, Artificial Sequence
  Description of Artificial Sequence: Synthetic oligonucleotide
cauuagucagcuuuaacua

SEQ ID NO: 754718 - RNA, 19 nt, Artificial Sequence
  Description of Artificial Sequence: Synthetic oligonucleotide
uaugaauauuacgccaaac

SEQ ID NO: 754719 - RNA, 19 nt, Artificial Sequence
  Description of Artificial Sequence: Synthetic oligonucleotide
uaggcuucguuaugggcag

SEQ ID NO: 754720 - RNA, 19 nt, Artificial Sequence
  Description of Artificial Sequence: Synthetic oligonucleotide
auuaugguuccgccuccac

SEQ ID NO: 754721 - RNA, 19 nt, Artificial Sequence
  Description of Artificial Sequence: Synthetic oligonucleotide
uagaaggguccguaagaag

SEQ ID NO: 754722 - RNA, 19 nt, Artificial Sequence
  Description of Artificial Sequence: Synthetic oligonucleotide
ccugauauagcccgugucg

SEQ ID NO: 754723 - RNA, 19 nt, Artificial Sequence
  Description of Artificial Sequence: Synthetic oligonucleotide
gaacacgccauccugauau

SEQ ID NO: 754724 - RNA, 19 nt, Artificial Sequence
  Description of Artificial Sequence: Synthetic oligonucleotide
aucaacuagcgggugaaag

SEQ ID NO: 754725 - RNA, 19 nt, Artificial Sequence
  Description of Artificial Sequence: Synthetic oligonucleotide
acguguacuccaaacaaag

SEQ ID NO: 754726 - RNA, 19 nt, Artificial Sequence
  Description of Artificial Sequence: Synthetic oligonucleotide
uuacuuaaugagaggucuc

SEQ ID NO: 754727 - RNA, 19 nt, Artificial Sequence
  Description of Artificial Sequence: Synthetic oligonucleotide
uucauaacguguacuccaa

SEQ ID NO: 754728 - RNA, 19 nt, Artificial Sequence
  Description of Artificial Sequence: Synthetic oligonucleotide
uguucacgagguuuacucu

SEQ ID NO: 754729 - RNA, 19 nt, Artificial Sequence
  Description of Artificial Sequence: Synthetic oligonucleotide
gaaagguuguacugagcca

SEQ ID NO: 754730 - RNA, 19 nt, Artificial Sequence
  Description of Artificial Sequence: Synthetic oligonucleotide
acguuuacagcaagucagc

SEQ ID NO: 754731 - RNA, 19 nt, Artificial Sequence
  Description of Artificial Sequence: Synthetic oligonucleotide
guaacgcauuacuuaauga

SEQ ID NO: 754732 - RNA, 19 nt, Artificial Sequence
  Description of Artificial Sequence: Synthetic oligonucleotide
aagugcguggugcaccaga

SEQ ID NO: 754733 - RNA, 19 nt, Artificial Sequence
  Description of Artificial Sequence: Synthetic oligonucleotide
guaggcuucguuaugggca

SEQ ID NO: 754734 - RNA, 19 nt, Artificial Sequence
  Description of Artificial Sequence: Synthetic oligonucleotide
gagguuuacucuucaggca

SEQ ID NO: 754735 - RNA, 19 nt, Artificial Sequence
  Description of Artificial Sequence: Synthetic oligonucleotide
gacgggaaugucaaacagc

SEQ ID NO: 754736 - RNA, 19 nt, Artificial Sequence
  Description of Artificial Sequence: Synthetic oligonucleotide
gaagugaauauuccaggua

SEQ ID NO: 754737 - RNA, 19 nt, Artificial Sequence
  Description of Artificial Sequence: Synthetic oligonucleotide
auauaugauuaugguuccg

SEQ ID NO: 754738 - RNA, 19 nt, Artificial Sequence
  Description of Artificial Sequence: Synthetic oligonucleotide
uagaaccuacgcauacaca

SEQ ID NO: 754739 - RNA, 19 nt, Artificial Sequence
  Description of Artificial Sequence: Synthetic oligonucleotide
cagucauucaccauuuaaa

SEQ ID NO: 754740 - RNA, 19 nt, Artificial Sequence
  Description of Artificial Sequence: Synthetic oligonucleotide
uauagcccgugucguauga

SEQ ID NO: 754741 - RNA, 19 nt, Artificial Sequence
  Description of Artificial Sequence: Synthetic oligonucleotide
cuguaaacuugaacacgcc

SEQ ID NO: 754742 - RNA, 19 nt, Artificial Sequence
  Description of Artificial Sequence: Synthetic oligonucleotide
caacuagcgggugaaagac

SEQ ID NO: 754743 - RNA, 19 nt, Artificial Sequence
  Description of Artificial Sequence: Synthetic oligonucleotide
agcuaauugcauagggguc

SEQ ID NO: 754744 - RNA, 19 nt, Artificial Sequence
  Description of Artificial Sequence: Synthetic oligonucleotide
uuacccaugacaggccagc

SEQ ID NO: 754745 - RNA, 19 nt, Artificial Sequence
  Description of Artificial Sequence: Synthetic oligonucleotide
aacuagcgggugaaagacg

SEQ ID NO: 754746 - RNA, 19 nt, Artificial Sequence
  Description of Artificial Sequence: Synthetic oligonucleotide
cugcuguuagaaccuacgc

SEQ ID NO: 754747 - RNA, 19 nt, Artificial Sequence
  Description of Artificial Sequence: Synthetic oligonucleotide
agcaggcguggacagucgc

SEQ ID NO: 754748 - RNA, 19 nt, Artificial Sequence
  Description of Artificial Sequence: Synthetic oligonucleotide
uaccacuacuguaauuuua

SEQ ID NO: 754749 - RNA, 19 nt, Artificial Sequence
  Description of Artificial Sequence: Synthetic oligonucleotide
uuagguugcuacuguuuuc

SEQ ID NO: 754750 - RNA, 19 nt, Artificial Sequence
  Description of Artificial Sequence: Synthetic oligonucleotide
auucaauuguaaauuggau

SEQ ID NO: 754751 - RNA, 19 nt, Artificial Sequence
  Description of Artificial Sequence: Synthetic oligonucleotide
uauuaguagguaguaccau

SEQ ID NO: 754752 - RNA, 19 nt, Artificial Sequence
  Description of Artificial Sequence: Synthetic oligonucleotide
ggcuuuacccaugacaggc

SEQ ID NO: 754753 - RNA, 19 nt, Artificial Sequence
  Description of Artificial Sequence: Synthetic oligonucleotide
auauagacgccugguagcu

SEQ ID NO: 754754 - RNA, 19 nt, Artificial Sequence
  Description of Artificial Sequence: Synthetic oligonucleotide
guuacuagguaacuucaua

SEQ ID NO: 754755 - RNA, 19 nt, Artificial Sequence
  Description of Artificial Sequence: Synthetic oligonucleotide
agauguaggcuucguuaug

SEQ ID NO: 754756 - RNA, 19 nt, Artificial Sequence
  Description of Artificial Sequence: Synthetic oligonucleotide
cuugaacacgccauccuga

SEQ ID NO: 754757 - RNA, 19 nt, Artificial Sequence
  Description of Artificial Sequence: Synthetic oligonucleotide
cgagguuuacucuucaggc

SEQ ID NO: 754758 - RNA, 19 nt, Artificial Sequence
  Description of Artificial Sequence: Synthetic oligonucleotide
augaccuaccuaccguaug

SEQ ID NO: 754759 - RNA, 19 nt, Artificial Sequence
  Description of Artificial Sequence: Synthetic oligonucleotide
cucguuugcgcacagagcu

SEQ ID NO: 754760 - RNA, 19 nt, Artificial Sequence
  Description of Artificial Sequence: Synthetic oligonucleotide
cucuguuaguuaaaguaaa

SEQ ID NO: 754761 - RNA, 19 nt, Artificial Sequence
  Description of Artificial Sequence: Synthetic oligonucleotide
aacguguacuccaaacaaa

SEQ ID NO: 754762 - RNA, 19 nt, Artificial Sequence
  Description of Artificial Sequence: Synthetic oligonucleotide
gcuguauauagacgccugg

SEQ ID NO: 754763 - RNA, 19 nt, Artificial Sequence
  Description of Artificial Sequence: Synthetic oligonucleotide
auaccugacuucauuagaa

SEQ ID NO: 754764 - RNA, 19 nt, Artificial Sequence
  Description of Artificial Sequence: Synthetic oligonucleotide
gugaaagacgggaauguca

SEQ ID NO: 754765 - RNA, 19 nt, Artificial Sequence
  Description of Artificial Sequence: Synthetic oligonucleotide
agagcgguaugauggcugu

SEQ ID NO: 754766 - RNA, 19 nt, Artificial Sequence
  Description of Artificial Sequence: Synthetic oligonucleotide
aguacuuagaaaaccucuu

SEQ ID NO: 754767 - RNA, 19 nt, Artificial Sequence
  Description of Artificial Sequence: Synthetic oligonucleotide
ccugcuguuagaaccuacg

SEQ ID NO: 754768 - RNA, 19 nt, Artificial Sequence
  Description of Artificial Sequence: Synthetic oligonucleotide
acuacuacacagugcucau

SEQ ID NO: 754769 - RNA, 19 nt, Artificial Sequence
  Description of Artificial Sequence: Synthetic oligonucleotide
ugauagccagucacuguuc

SEQ ID NO: 754770 - RNA, 19 nt, Artificial Sequence
  Description of Artificial Sequence: Synthetic oligonucleotide
auauagcccgugucguaug

SEQ ID NO: 754771 - RNA, 19 nt, Artificial Sequence
  Description of Artificial Sequence: Synthetic oligonucleotide
aacuaugaacaagcauccu

SEQ ID NO: 754772 - RNA, 19 nt, Artificial Sequence
  Description of Artificial Sequence: Synthetic oligonucleotide
acgcauacacaacacugau

SEQ ID NO: 754773 - RNA, 19 nt, Artificial Sequence
  Description of Artificial Sequence: Synthetic oligonucleotide
ggagauguaggcuucguua

SEQ ID NO: 754774 - RNA, 19 nt, Artificial Sequence
  Description of Artificial Sequence: Synthetic oligonucleotide
gaaucaacuagcgggugaa

SEQ ID NO: 754775 - RNA, 19 nt, Artificial Sequence
  Description of Artificial Sequence: Synthetic oligonucleotide
uagcgggugaaagacggga

SEQ ID NO: 754776 - RNA, 19 nt, Artificial Sequence
  Description of Artificial Sequence: Synthetic oligonucleotide
cuguuuaguuauauugaaa

SEQ ID NO: 754777 - RNA, 19 nt, Artificial Sequence
  Description of Artificial Sequence: Synthetic oligonucleotide
accuacgcauacacaacac

SEQ ID NO: 754778 - RNA, 19 nt, Artificial Sequence
  Description of Artificial Sequence: Synthetic oligonucleotide
uugccauuagucagcuuua

SEQ ID NO: 754779 - RNA, 19 nt, Artificial Sequence
  Description of Artificial Sequence: Synthetic oligonucleotide
acuacacagugcucauugu

SEQ ID NO: 754780 - RNA, 19 nt, Artificial Sequence
  Description of Artificial Sequence: Synthetic oligonucleotide
uaaacacaacuuaccucua

SEQ ID NO: 754781 - RNA, 19 nt, Artificial Sequence
  Description of Artificial Sequence: Synthetic oligonucleotide
acucuccuugcguacauua

SEQ ID NO: 754782 - RNA, 19 nt, Artificial Sequence
  Description of Artificial Sequence: Synthetic oligonucleotide
gguagaaggguccguaaga

SEQ ID NO: 754783 - RNA, 19 nt, Artificial Sequence
  Description of Artificial Sequence: Synthetic oligonucleotide
uuccuaaugcucugagaua

SEQ ID NO: 754784 - RNA, 19 nt, Artificial Sequence
  Description of Artificial Sequence: Synthetic oligonucleotide
uagaaaccguuugaacacu

SEQ ID NO: 754785 - RNA, 19 nt, Artificial Sequence
  Description of Artificial Sequence: Synthetic oligonucleotide
ggguccguaagaagcaugg

SEQ ID NO: 754786 - RNA, 19 nt, Artificial Sequence
  Description of Artificial Sequence: Synthetic oligonucleotide
acuuaaugagaggucucca

SEQ ID NO: 754787 - RNA, 19 nt, Artificial Sequence
  Description of Artificial Sequence: Synthetic oligonucleotide
uggcuguauauagacgccu

SEQ ID NO: 754788 - RNA, 19 nt, Artificial Sequence
  Description of Artificial Sequence: Synthetic oligonucleotide
auagacguuuacagcaagu

SEQ ID NO: 754789 - RNA, 19 nt, Artificial Sequence
  Description of Artificial Sequence: Synthetic oligonucleotide
cuagcgggugaaagacggg

SEQ ID NO: 754790 - RNA, 19 nt, Artificial Sequence
  Description of Artificial Sequence: Synthetic oligonucleotide
gcuguuagaaccuacgcau

SEQ ID NO: 754791 - RNA, 19 nt, Artificial Sequence
  Description of Artificial Sequence: Synthetic oligonucleotide
gacgccugguagcuucugc

SEQ ID NO: 754792 - RNA, 19 nt, Artificial Sequence
  Description of Artificial Sequence: Synthetic oligonucleotide
uacuaacacaacagucauu

SEQ ID NO: 754793 - RNA, 19 nt, Artificial Sequence
  Description of Artificial Sequence: Synthetic oligonucleotide
cuaaagcaagaguagugcu

SEQ ID NO: 754794 - RNA, 19 nt, Artificial Sequence
  Description of Artificial Sequence: Synthetic oligonucleotide
ccauuagucagcuuuaacu

SEQ ID NO: 754795 - RNA, 19 nt, Artificial Sequence
  Description of Artificial Sequence: Synthetic oligonucleotide
guaugaauauuacgccaaa

SEQ ID NO: 754796 - RNA, 19 nt, Artificial Sequence
  Description of Artificial Sequence: Synthetic oligonucleotide
gugccauuuguugacugug

SEQ ID NO: 754797 - RNA, 19 nt, Artificial Sequence
  Description of Artificial Sequence: Synthetic oligonucleotide
uaagaagcaugggugccau

SEQ ID NO: 754798 - RNA, 19 nt, Artificial Sequence
  Description of Artificial Sequence: Synthetic oligonucleotide
cuuguugugucgaucuugu

SEQ ID NO: 754799 - RNA, 19 nt, Artificial Sequence
  Description of Artificial Sequence: Synthetic oligonucleotide
uggaaucaacuagcgggug

SEQ ID NO: 754800 - RNA, 19 nt, Artificial Sequence
  Description of Artificial Sequence: Synthetic oligonucleotide
uuacgccaaaccacaccaa

SEQ ID NO: 754801 - RNA, 19 nt, Artificial Sequence
  Description of Artificial Sequence: Synthetic oligonucleotide
guagguaguaccauuuuau

SEQ ID NO: 754802 - RNA, 19 nt, Artificial Sequence
  Description of Artificial Sequence: Synthetic oligonucleotide
guccguaagaagcaugggu

SEQ ID NO: 754803 - RNA, 19 nt, Artificial Sequence
  Description of Artificial Sequence: Synthetic oligonucleotide
guagaaggguccguaagaa

SEQ ID NO: 754804 - RNA, 19 nt, Artificial Sequence
  Description of Artificial Sequence: Synthetic oligonucleotide
cucaagguccccaauaauu

SEQ ID NO: 754805 - RNA, 19 nt, Artificial Sequence
  Description of Artificial Sequence: Synthetic oligonucleotide
ucguuaugggcagagcguu

SEQ ID NO: 754806 - RNA, 19 nt, Artificial Sequence
  Description of Artificial Sequence: Synthetic oligonucleotide
aacaaacgagcaguacaua

SEQ ID NO: 754807 - RNA, 19 nt, Artificial Sequence
  Description of Artificial Sequence: Synthetic oligonucleotide
guaagaagcaugggugcca

SEQ ID NO: 754808 - RNA, 19 nt, Artificial Sequence
  Description of Artificial Sequence: Synthetic oligonucleotide
cacaacuuaccucuaacau

SEQ ID NO: 754809 - RNA, 19 nt, Artificial Sequence
  Description of Artificial Sequence: Synthetic oligonucleotide
agcgguaugauggcuguau

SEQ ID NO: 754810 - RNA, 19 nt, Artificial Sequence
  Description of Artificial Sequence: Synthetic oligonucleotide
agauccacccugacacuuc

SEQ ID NO: 754811 - RNA, 19 nt, Artificial Sequence
  Description of Artificial Sequence: Synthetic oligonucleotide
ccguaagaagcaugggugc

SEQ ID NO: 754812 - RNA, 19 nt, Artificial Sequence
  Description of Artificial Sequence: Synthetic oligonucleotide
ugcguacauuaagaccugc

SEQ ID NO: 754813 - RNA, 19 nt, Artificial Sequence
  Description of Artificial Sequence: Synthetic oligonucleotide
acauccccugcuaaugucu

SEQ ID NO: 754814 - RNA, 19 nt, Artificial Sequence
  Description of Artificial Sequence: Synthetic oligonucleotide
ggaaucaacuagcggguga

SEQ ID NO: 754815 - RNA, 19 nt, Artificial Sequence
  Description of Artificial Sequence: Synthetic oligonucleotide
cgccaaaccacaccaaugc

SEQ ID NO: 754816 - RNA, 19 nt, Artificial Sequence
  Description of Artificial Sequence: Synthetic oligonucleotide
ugaacacgccauccugaua

SEQ ID NO: 754817 - RNA, 19 nt, Artificial Sequence
  Description of Artificial Sequence: Synthetic oligonucleotide
uagauccacccugacacuu

SEQ ID NO: 754818 - RNA, 19 nt, Artificial Sequence
  Description of Artificial Sequence: Synthetic oligonucleotide
gguaugauggcuguauaua

SEQ ID NO: 754819 - RNA, 19 nt, Artificial Sequence
  Description of Artificial Sequence: Synthetic oligonucleotide
gcauuacuuaaugagaggu

SEQ ID NO: 754820 - RNA, 19 nt, Artificial Sequence
  Description of Artificial Sequence: Synthetic oligonucleotide
cuggauaguuaucaggaau

SEQ ID NO: 754821 - RNA, 19 nt, Artificial Sequence
  Description of Artificial Sequence: Synthetic oligonucleotide
acgccaaaccacaccaaug

SEQ ID NO: 754822 - RNA, 19 nt, Artificial Sequence
  Description of Artificial Sequence: Synthetic oligonucleotide
cauccugauauagcccgug

SEQ ID NO: 754823 - RNA, 19 nt, Artificial Sequence
  Description of Artificial Sequence: Synthetic oligonucleotide
aaucaacuagcgggugaaa

SEQ ID NO: 754824 - RNA, 19 nt, Artificial Sequence
  Description of Artificial Sequence: Synthetic oligonucleotide
ccugccauauaugauuaug

SEQ ID NO: 754825 - RNA, 19 nt, Artificial Sequence
  Description of Artificial Sequence: Synthetic oligonucleotide
acuguucacgagguuuacu

SEQ ID NO: 754826 - RNA, 19 nt, Artificial Sequence
  Description of Artificial Sequence: Synthetic oligonucleotide
auguacagaaggguuccau

SEQ ID NO: 754827 - RNA, 19 nt, Artificial Sequence
  Description of Artificial Sequence: Synthetic oligonucleotide
gaaagacgggaaugucaaa

SEQ ID NO: 754828 - RNA, 19 nt, Artificial Sequence
  Description of Artificial Sequence: Synthetic oligonucleotide
gauuaugguuccgccucca

SEQ ID NO: 754829 - RNA, 19 nt, Artificial Sequence
  Description of Artificial Sequence: Synthetic oligonucleotide
gaagccggaaagccagucu

SEQ ID NO: 754830 - RNA, 19 nt, Artificial Sequence
  Description of Artificial Sequence: Synthetic oligonucleotide
aacacgccauccugauaua

SEQ ID NO: 754831 - RNA, 19 nt, Artificial Sequence
  Description of Artificial Sequence: Synthetic oligonucleotide
gcucuguuaguuaaaguaa

SEQ ID NO: 754832 - RNA, 19 nt, Artificial Sequence
  Description of Artificial Sequence: Synthetic oligonucleotide
cgcauuacuuaaugagagg

SEQ ID NO: 754833 - RNA, 19 nt, Artificial Sequence
  Description of Artificial Sequence: Synthetic oligonucleotide
caacuacuacacagugcuc

SEQ ID NO: 754834 - RNA, 19 nt, Artificial Sequence
  Description of Artificial Sequence: Synthetic oligonucleotide
uccccugugguggaaucaa

SEQ ID NO: 754835 - RNA, 19 nt, Artificial Sequence
  Description of Artificial Sequence: Synthetic oligonucleotide
uaccuaccguauguacagc

SEQ ID NO: 754836 - RNA, 19 nt, Artificial Sequence
  Description of Artificial Sequence: Synthetic oligonucleotide
ucguuugcgcacagagcuu

SEQ ID NO: 754837 - RNA, 19 nt, Artificial Sequence
  Description of Artificial Sequence: Synthetic oligonucleotide
gauccacccugacacuucu

SEQ ID NO: 754838 - RNA, 19 nt, Artificial Sequence
  Description of Artificial Sequence: Synthetic oligonucleotide
cagcaggcguggacagucg

SEQ ID NO: 754839 - RNA, 19 nt, Artificial Sequence
  Description of Artificial Sequence: Synthetic oligonucleotide
cagaaguaacgcauuacuu

SEQ ID NO: 754840 - RNA, 19 nt, Artificial Sequence
  Description of Artificial Sequence: Synthetic oligonucleotide
gcuaauugcauaggggucu

SEQ ID NO: 754841 - RNA, 19 nt, Artificial Sequence
  Description of Artificial Sequence: Synthetic oligonucleotide
ggcuguauauagacgccug

SEQ ID NO: 754842 - RNA, 19 nt, Artificial Sequence
  Description of Artificial Sequence: Synthetic oligonucleotide
cgugucguaugaauauuac

SEQ ID NO: 754843 - RNA, 19 nt, Artificial Sequence
  Description of Artificial Sequence: Synthetic oligonucleotide
gccauuagucagcuuuaac

SEQ ID NO: 754844 - RNA, 19 nt, Artificial Sequence
  Description of Artificial Sequence: Synthetic oligonucleotide
gcguacauuaagaccugcc

SEQ ID NO: 754845 - RNA, 19 nt, Artificial Sequence
  Description of Artificial Sequence: Synthetic oligonucleotide
cguaugaauauuacgccaa

SEQ ID NO: 754846 - RNA, 19 nt, Artificial Sequence
  Description of Artificial Sequence: Synthetic oligonucleotide
agaaaccguuugaacacuu

SEQ ID NO: 754847 - RNA, 19 nt, Artificial Sequence
  Description of Artificial Sequence: Synthetic oligonucleotide
uuguugugucgaucuugua

SEQ ID NO: 754848 - RNA, 19 nt, Artificial Sequence
  Description of Artificial Sequence: Synthetic oligonucleotide
cacaccaaugcagagcggu

SEQ ID NO: 754849 - RNA, 19 nt, Artificial Sequence
  Description of Artificial Sequence: Synthetic oligonucleotide
ggugaaagacgggaauguc

SEQ ID NO: 754850 - RNA, 19 nt, Artificial Sequence
  Description of Artificial Sequence: Synthetic oligonucleotide
caucucuuagguugcuacu

SEQ ID NO: 754851 - RNA, 19 nt, Artificial Sequence
  Description of Artificial Sequence: Synthetic oligonucleotide
uauagacgccugguagcuu

SEQ ID NO: 754852 - RNA, 19 nt, Artificial Sequence
  Description of Artificial Sequence: Synthetic oligonucleotide
caacacugauagccaguca

SEQ ID NO: 754853 - RNA, 19 nt, Artificial Sequence
  Description of Artificial Sequence: Synthetic oligonucleotide
agcgggugaaagacgggaa

SEQ ID NO: 754854 - RNA, 19 nt, Artificial Sequence
  Description of Artificial Sequence: Synthetic oligonucleotide
gcucguuugcgcacagagc

SEQ ID NO: 754855 - RNA, 19 nt, Artificial Sequence
  Description of Artificial Sequence: Synthetic oligonucleotide
agcccgugucguaugaaua

SEQ ID NO: 754856 - RNA, 19 nt, Artificial Sequence
  Description of Artificial Sequence: Synthetic oligonucleotide
ccucuaacauauucagaaa

SEQ ID NO: 754857 - RNA, 19 nt, Artificial Sequence
  Description of Artificial Sequence: Synthetic oligonucleotide
auagcccgugucguaugaa

SEQ ID NO: 754858 - RNA, 19 nt, Artificial Sequence
  Description of Artificial Sequence: Synthetic oligonucleotide
caugaccuaccuaccguau

SEQ ID NO: 754859 - RNA, 19 nt, Artificial Sequence
  Description of Artificial Sequence: Synthetic oligonucleotide
gugcguggugcaccagauc

SEQ ID NO: 754860 - RNA, 19 nt, Artificial Sequence
  Description of Artificial Sequence: Synthetic oligonucleotide
gggugaaagacgggaaugu

SEQ ID NO: 754861 - RNA, 19 nt, Artificial Sequence
  Description of Artificial Sequence: Synthetic oligonucleotide
ccgugucguaugaauauua

SEQ ID NO: 754862 - RNA, 19 nt, Artificial Sequence
  Description of Artificial Sequence: Synthetic oligonucleotide
ccaaugcagagcgguauga

SEQ ID NO: 754863 - RNA, 19 nt, Artificial Sequence
  Description of Artificial Sequence: Synthetic oligonucleotide
caccaaugcagagcgguau

SEQ ID NO: 754864 - RNA, 19 nt, Artificial Sequence
  Description of Artificial Sequence: Synthetic oligonucleotide
gcccgugucguaugaauau

SEQ ID NO: 754865 - RNA, 19 nt, Artificial Sequence
  Description of Artificial Sequence: Synthetic oligonucleotide
cauccccugcuaaugucuu

SEQ ID NO: 754866 - RNA, 19 nt, Artificial Sequence
  Description of Artificial Sequence: Synthetic oligonucleotide
gcgguaugauggcuguaua

SEQ ID NO: 754867 - RNA, 19 nt, Artificial Sequence
  Description of Artificial Sequence: Synthetic oligonucleotide
gccaggcuuuacccaugac

SEQ ID NO: 754868 - RNA, 19 nt, Artificial Sequence
  Description of Artificial Sequence: Synthetic oligonucleotide
aggcuucguuaugggcaga

SEQ ID NO: 754869 - RNA, 19 nt, Artificial Sequence
  Description of Artificial Sequence: Synthetic oligonucleotide
gagcgguaugauggcugua

SEQ ID NO: 754870 - RNA, 19 nt, Artificial Sequence
  Description of Artificial Sequence: Synthetic oligonucleotide
gcguggugcaccagaucca

SEQ ID NO: 754871 - RNA, 19 nt, Artificial Sequence
  Description of Artificial Sequence: Synthetic oligonucleotide
cuacuacacagugcucauu

SEQ ID NO: 754872 - RNA, 19 nt, Artificial Sequence
  Description of Artificial Sequence: Synthetic oligonucleotide
cagcucguuugcgcacaga

SEQ ID NO: 754873 - RNA, 19 nt, Artificial Sequence
  Description of Artificial Sequence: Synthetic oligonucleotide
cgguaugauggcuguauau

SEQ ID NO: 754874 - RNA, 19 nt, Artificial Sequence
  Description of Artificial Sequence: Synthetic oligonucleotide
gcaguucguggagggcugu

SEQ ID NO: 754875 - RNA, 19 nt, Artificial Sequence
  Description of Artificial Sequence: Synthetic oligonucleotide
caguucguggagggcuguu

SEQ ID NO: 754876 - RNA, 19 nt, Artificial Sequence
  Description of Artificial Sequence: Synthetic oligonucleotide
cagucgccaucuggauagu

SEQ ID NO: 754877 - RNA, 19 nt, Artificial Sequence
  Description of Artificial Sequence: Synthetic oligonucleotide
cccgugucguaugaauauu

SEQ ID NO: 754878 - RNA, 19 nt, Artificial Sequence
  Description of Artificial Sequence: Synthetic oligonucleotide
cguuaugggcagagcguuu

SEQ ID NO: 754879 - RNA, 19 nt, Artificial Sequence
  Description of Artificial Sequence: Synthetic oligonucleotide
aaaauugccguuuuaaucc

SEQ ID NO: 754880 - RNA, 19 nt, Artificial Sequence
  Description of Artificial Sequence: Synthetic oligonucleotide
uuaacuagcucccagagcc

SEQ ID NO: 754881 - RNA, 19 nt, Artificial Sequence
  Description of Artificial Sequence: Synthetic oligonucleotide
aauaagcuuguccucaacc

SEQ ID NO: 754882 - RNA, 19 nt, Artificial Sequence
  Description of Artificial Sequence: Synthetic oligonucleotide
aaagccaagaguuuucccg

SEQ ID NO: 754883 - RNA, 19 nt, Artificial Sequence
  Description of Artificial Sequence: Synthetic oligonucleotide
uuuaggaauauccaggccc

SEQ ID NO: 754884 - RNA, 19 nt, Artificial Sequence
  Description of Artificial Sequence: Synthetic oligonucleotide
augacuuuuggcuugcccc

SEQ ID NO: 754885 - RNA, 19 nt, Artificial Sequence
  Description of Artificial Sequence: Synthetic oligonucleotide
ucuguagauagcaaugcgg

SEQ ID NO: 754886 - RNA, 19 nt, Artificial Sequence
  Description of Artificial Sequence: Synthetic oligonucleotide
uuguaaaucuucuugaagu

SEQ ID NO: 754887 - RNA, 19 nt, Artificial Sequence
  Description of Artificial Sequence: Synthetic oligonucleotide
ucaucuauaaccaggcacc

SEQ ID NO: 754888 - RNA, 19 nt, Artificial Sequence
  Description of Artificial Sequence: Synthetic oligonucleotide
cugaacuuuaggaauaucc

SEQ ID NO: 754889 - RNA, 19 nt, Artificial Sequence
  Description of Artificial Sequence: Synthetic oligonucleotide
aaauugccguuuuaauccc

SEQ ID NO: 754890 - RNA, 19 nt, Artificial Sequence
  Description of Artificial Sequence: Synthetic oligonucleotide
aaauaguagagguaccagu

SEQ ID NO: 754891 - RNA, 19 nt, Artificial Sequence
  Description of Artificial Sequence: Synthetic oligonucleotide
uggauauagaucucugagg

SEQ ID NO: 754892 - RNA, 19 nt, Artificial Sequence
  Description of Artificial Sequence: Synthetic oligonucleotide
aaggucagagcuuggauug

SEQ ID NO: 754893 - RNA, 19 nt, Artificial Sequence
  Description of Artificial Sequence: Synthetic oligonucleotide
uugggaauaagcuuguccu

SEQ ID NO: 754894 - RNA, 19 nt, Artificial Sequence
  Description of Artificial Sequence: Synthetic oligonucleotide
uuuaaucccuguaaacuug

SEQ ID NO: 754895 - RNA, 19 nt, Artificial Sequence
  Description of Artificial Sequence: Synthetic oligonucleotide
ucauuuagcaucucuaaaa

SEQ ID NO: 754896 - RNA, 19 nt, Artificial Sequence
  Description of Artificial Sequence: Synthetic oligonucleotide
uuauccauuuucuucacgu

SEQ ID NO: 754897 - RNA, 19 nt, Artificial Sequence
  Description of Artificial Sequence: Synthetic oligonucleotide
ucuuaugaaggauucgagc

SEQ ID NO: 754898 - RNA, 19 nt, Artificial Sequence
  Description of Artificial Sequence: Synthetic oligonucleotide
uuaaucccuguaaacuugg

SEQ ID NO: 754899 - RNA, 19 nt, Artificial Sequence
  Description of Artificial Sequence: Synthetic oligonucleotide
uuucucaaccauccgauca

SEQ ID NO: 754900 - RNA, 19 nt, Artificial Sequence
  Description of Artificial Sequence: Synthetic oligonucleotide
uuaggaauauccaggcccc

SEQ ID NO: 754901 - RNA, 19 nt, Artificial Sequence
  Description of Artificial Sequence: Synthetic oligonucleotide
cuuaugaaggauucgagca

SEQ ID NO: 754902 - RNA, 19 nt, Artificial Sequence
  Description of Artificial Sequence: Synthetic oligonucleotide
ugaaucaucgggauggcaa

SEQ ID NO: 754903 - RNA, 19 nt, Artificial Sequence
  Description of Artificial Sequence: Synthetic oligonucleotide
gauucgagcaggaacuugg

SEQ ID NO: 754904 - RNA, 19 nt, Artificial Sequence
  Description of Artificial Sequence: Synthetic oligonucleotide
gaggaaauaguagagguac

SEQ ID NO: 754905 - RNA, 19 nt, Artificial Sequence
  Description of Artificial Sequence: Synthetic oligonucleotide
gaaggauucgagcaggaac

SEQ ID NO: 754906 - RNA, 19 nt, Artificial Sequence
  Description of Artificial Sequence: Synthetic oligonucleotide
guggauauagaucucugag

SEQ ID NO: 754907 - RNA, 19 nt, Artificial Sequence
  Description of Artificial Sequence: Synthetic oligonucleotide
uucuuaugaaggauucgag

SEQ ID NO: 754908 - RNA, 19 nt, Artificial Sequence
  Description of Artificial Sequence: Synthetic oligonucleotide
uaaaagcugagagaguuca

SEQ ID NO: 754909 - RNA, 19 nt, Artificial Sequence
  Description of Artificial Sequence: Synthetic oligonucleotide
aggucgaugacuuuuggcu

SEQ ID NO: 754910 - RNA, 19 nt, Artificial Sequence
  Description of Artificial Sequence: Synthetic oligonucleotide
cacggcaugaaucaucggg

SEQ ID NO: 754911 - RNA, 19 nt, Artificial Sequence
  Description of Artificial Sequence: Synthetic oligonucleotide
uucaucuuaugccacugca

SEQ ID NO: 754912 - RNA, 19 nt, Artificial Sequence
  Description of Artificial Sequence: Synthetic oligonucleotide
ucaucuuaugccacugcag

SEQ ID NO: 754913 - RNA, 19 nt, Artificial Sequence
  Description of Artificial Sequence: Synthetic oligonucleotide
uugaccacauccauguacu

SEQ ID NO: 754914 - RNA, 19 nt, Artificial Sequence
  Description of Artificial Sequence: Synthetic oligonucleotide
uuuaacuagcucccagagc

SEQ ID NO: 754915 - RNA, 19 nt, Artificial Sequence
  Description of Artificial Sequence: Synthetic oligonucleotide
uuccuugugaggucgauga

SEQ ID NO: 754916 - RNA, 19 nt, Artificial Sequence
  Description of Artificial Sequence: Synthetic oligonucleotide
ugacuuuuggcuugccccg

SEQ ID NO: 754917 - RNA, 19 nt, Artificial Sequence
  Description of Artificial Sequence: Synthetic oligonucleotide
ugccauuugggaugggugg

SEQ ID NO: 754918 - RNA, 19 nt, Artificial Sequence
  Description of Artificial Sequence: Synthetic oligonucleotide
uucucaaccauccgaucag

SEQ ID NO: 754919 - RNA, 19 nt, Artificial Sequence
  Description of Artificial Sequence: Synthetic oligonucleotide
uguacuuugccugcacugg

SEQ ID NO: 754920 - RNA, 19 nt, Artificial Sequence
  Description of Artificial Sequence: Synthetic oligonucleotide
ucuaaaagcugagagaguu

SEQ ID NO: 754921 - RNA, 19 nt, Artificial Sequence
  Description of Artificial Sequence: Synthetic oligonucleotide
aagggcaguuagcucgugc

SEQ ID NO: 754922 - RNA, 19 nt, Artificial Sequence
  Description of Artificial Sequence: Synthetic oligonucleotide
auaagcuuguccucaacca

SEQ ID NO: 754923 - RNA, 19 nt, Artificial Sequence
  Description of Artificial Sequence: Synthetic oligonucleotide
aaggauucgagcaggaacu

SEQ ID NO: 754924 - RNA, 19 nt, Artificial Sequence
  Description of Artificial Sequence: Synthetic oligonucleotide
uguguugucugacuuggac

SEQ ID NO: 754925 - RNA, 19 nt, Artificial Sequence
  Description of Artificial Sequence: Synthetic oligonucleotide
acucuguagauagcaaugc

SEQ ID NO: 754926 - RNA, 19 nt, Artificial Sequence
  Description of Artificial Sequence: Synthetic oligonucleotide
agugcagacucaccauucc

SEQ ID NO: 754927 - RNA, 19 nt, Artificial Sequence
  Description of Artificial Sequence: Synthetic oligonucleotide
uguuuuaacuucccagccu

SEQ ID NO: 754928 - RNA, 19 nt, Artificial Sequence
  Description of Artificial Sequence: Synthetic oligonucleotide
agacucaccauuccugggg

SEQ ID NO: 754929 - RNA, 19 nt, Artificial Sequence
  Description of Artificial Sequence: Synthetic oligonucleotide
ucuuuaacuagcucccaga

SEQ ID NO: 754930 - RNA, 19 nt, Artificial Sequence
  Description of Artificial Sequence: Synthetic oligonucleotide
cuuuaacuagcucccagag

SEQ ID NO: 754931 - RNA, 19 nt, Artificial Sequence
  Description of Artificial Sequence: Synthetic oligonucleotide
ucgugcuugcacuugacug

SEQ ID NO: 754932 - RNA, 19 nt, Artificial Sequence
  Description of Artificial Sequence: Synthetic oligonucleotide
uucccugucgucaucuugc

SEQ ID NO: 754933 - RNA, 19 nt, Artificial Sequence
  Description of Artificial Sequence: Synthetic oligonucleotide
aaccugccgcgcuagacgg

SEQ ID NO: 754934 - RNA, 19 nt, Artificial Sequence
  Description of Artificial Sequence: Synthetic oligonucleotide
ucugucagcgucuccacug

SEQ ID NO: 754935 - RNA, 19 nt, Artificial Sequence
  Description of Artificial Sequence: Synthetic oligonucleotide
ugaucacaucuucaggccc

SEQ ID NO: 754936 - RNA, 19 nt, Artificial Sequence
  Description of Artificial Sequence: Synthetic oligonucleotide
cauccauguacuuugccug

SEQ ID NO: 754937 - RNA, 19 nt, Artificial Sequence
  Description of Artificial Sequence: Synthetic oligonucleotide
guagcgaucacaaucucug

SEQ ID NO: 754938 - RNA, 19 nt, Artificial Sequence
  Description of Artificial Sequence: Synthetic oligonucleotide
ugagugcucggaagaaccg

SEQ ID NO: 754939 - RNA, 19 nt, Artificial Sequence
  Description of Artificial Sequence: Synthetic oligonucleotide
cucaauucuggccgcaucc

SEQ ID NO: 754940 - RNA, 19 nt, Artificial Sequence
  Description of Artificial Sequence: Synthetic oligonucleotide
cauaccaaucuucugcaug

SEQ ID NO: 754941 - RNA, 19 nt, Artificial Sequence
  Description of Artificial Sequence: Synthetic oligonucleotide
gaugacuuuuggcuugccc

SEQ ID NO: 754942 - RNA, 19 nt, Artificial Sequence
  Description of Artificial Sequence: Synthetic oligonucleotide
gauauagaucucugaggug

SEQ ID NO: 754943 - RNA, 19 nt, Artificial Sequence
  Description of Artificial Sequence: Synthetic oligonucleotide
agaugcuguuggcaaacac

SEQ ID NO: 754944 - RNA, 19 nt, Artificial Sequence
  Description of Artificial Sequence: Synthetic oligonucleotide
gagaacacagucuuccaga

SEQ ID NO: 754945 - RNA, 19 nt, Artificial Sequence
  Description of Artificial Sequence: Synthetic oligonucleotide
uagcaucucuaaaagcuga

SEQ ID NO: 754946 - RNA, 19 nt, Artificial Sequence
  Description of Artificial Sequence: Synthetic oligonucleotide
ugggagucaggacuagucc

SEQ ID NO: 754947 - RNA, 19 nt, Artificial Sequence
  Description of Artificial Sequence: Synthetic oligonucleotide
ucaauguguugucugacuu

SEQ ID NO: 754948 - RNA, 19 nt, Artificial Sequence
  Description of Artificial Sequence: Synthetic oligonucleotide
uggaaguuccgguacucag

SEQ ID NO: 754949 - RNA, 19 nt, Artificial Sequence
  Description of Artificial Sequence: Synthetic oligonucleotide
ugguguaccaggguuagug

SEQ ID NO: 754950 - RNA, 19 nt, Artificial Sequence
  Description of Artificial Sequence: Synthetic oligonucleotide
aagguugcuuaagugagga

SEQ ID NO: 754951 - RNA, 19 nt, Artificial Sequence
  Description of Artificial Sequence: Synthetic oligonucleotide
ucaucgggauggcaaaagc

SEQ ID NO: 754952 - RNA, 19 nt, Artificial Sequence
  Description of Artificial Sequence: Synthetic oligonucleotide
uggcgauucagcauccucu

SEQ ID NO: 754953 - RNA, 19 nt, Artificial Sequence
  Description of Artificial Sequence: Synthetic oligonucleotide
ugucgauugggguuguacu

SEQ ID NO: 754954 - RNA, 19 nt, Artificial Sequence
  Description of Artificial Sequence: Synthetic oligonucleotide
uggacugccagcucucgag

SEQ ID NO: 754955 - RNA, 19 nt, Artificial Sequence
  Description of Artificial Sequence: Synthetic oligonucleotide
ucaaccaaggaagaagguc

SEQ ID NO: 754956 - RNA, 19 nt, Artificial Sequence
  Description of Artificial Sequence: Synthetic oligonucleotide
ucgauugggguuguacugg

SEQ ID NO: 754957 - RNA, 19 nt, Artificial Sequence
  Description of Artificial Sequence: Synthetic oligonucleotide
ugcuucuuaugaaggauuc

SEQ ID NO: 754958 - RNA, 19 nt, Artificial Sequence
  Description of Artificial Sequence: Synthetic oligonucleotide
cucuguagauagcaaugcg

SEQ ID NO: 754959 - RNA, 19 nt, Artificial Sequence
  Description of Artificial Sequence: Synthetic oligonucleotide
aacaagcguuugucgauug

SEQ ID NO: 754960 - RNA, 19 nt, Artificial Sequence
  Description of Artificial Sequence: Synthetic oligonucleotide
uuugucacggauggcuggg

SEQ ID NO: 754961 - RNA, 19 nt, Artificial Sequence
  Description of Artificial Sequence: Synthetic oligonucleotide
acccaagaugggcagcagc

SEQ ID NO: 754962 - RNA, 19 nt, Artificial Sequence
  Description of Artificial Sequence: Synthetic oligonucleotide
aucaagcugaggccuuccc

SEQ ID NO: 754963 - RNA, 19 nt, Artificial Sequence
  Description of Artificial Sequence: Synthetic oligonucleotide
aagcguuugucgauugggg

SEQ ID NO: 754964 - RNA, 19 nt, Artificial Sequence
  Description of Artificial Sequence: Synthetic oligonucleotide
cuuuaggaauauccaggcc

SEQ ID NO: 754965 - RNA, 19 nt, Artificial Sequence
  Description of Artificial Sequence: Synthetic oligonucleotide
agugcucggaagaaccgcc

SEQ ID NO: 754966 - RNA, 19 nt, Artificial Sequence
  Description of Artificial Sequence: Synthetic oligonucleotide
caagcguuugucgauuggg

SEQ ID NO: 754967 - RNA, 19 nt, Artificial Sequence
  Description of Artificial Sequence: Synthetic oligonucleotide
uaacuagcucccagagccg

SEQ ID NO: 754968 - RNA, 19 nt, Artificial Sequence
  Description of Artificial Sequence: Synthetic oligonucleotide
uuaugccacugcagcacgg

SEQ ID NO: 754969 - RNA, 19 nt, Artificial Sequence
  Description of Artificial Sequence: Synthetic oligonucleotide
agcacggcaugaaucaucg

SEQ ID NO: 754970 - RNA, 19 nt, Artificial Sequence
  Description of Artificial Sequence: Synthetic oligonucleotide
agcggcaugauguccagga

SEQ ID NO: 754971 - RNA, 19 nt, Artificial Sequence
  Description of Artificial Sequence: Synthetic oligonucleotide
aucccaccaacuaaaauug

SEQ ID NO: 754972 - RNA, 19 nt, Artificial Sequence
  Description of Artificial Sequence: Synthetic oligonucleotide
guuuuaaucccuguaaacu

SEQ ID NO: 754973 - RNA, 19 nt, Artificial Sequence
  Description of Artificial Sequence: Synthetic oligonucleotide
guacuuugccugcacuggg

SEQ ID NO: 754974 - RNA, 19 nt, Artificial Sequence
  Description of Artificial Sequence: Synthetic oligonucleotide
ucaaguuuggugguuuuau

SEQ ID NO: 754975 - RNA, 19 nt, Artificial Sequence
  Description of Artificial Sequence: Synthetic oligonucleotide
aggaaauaguagagguacc

SEQ ID NO: 754976 - RNA, 19 nt, Artificial Sequence
  Description of Artificial Sequence: Synthetic oligonucleotide
gucgauugggguuguacug

SEQ ID NO: 754977 - RNA, 19 nt, Artificial Sequence
  Description of Artificial Sequence: Synthetic oligonucleotide
gaagguugcuuaagugagg

SEQ ID NO: 754978 - RNA, 19 nt, Artificial Sequence
  Description of Artificial Sequence: Synthetic oligonucleotide
acaagcguuugucgauugg

SEQ ID NO: 754979 - RNA, 19 nt, Artificial Sequence
  Description of Artificial Sequence: Synthetic oligonucleotide
gaugcaugagaugcuguug

SEQ ID NO: 754980 - RNA, 19 nt, Artificial Sequence
  Description of Artificial Sequence: Synthetic oligonucleotide
uguccaguuugucacggau

SEQ ID NO: 754981 - RNA, 19 nt, Artificial Sequence
  Description of Artificial Sequence: Synthetic oligonucleotide
cuucuuaugaaggauucga

SEQ ID NO: 754982 - RNA, 19 nt, Artificial Sequence
  Description of Artificial Sequence: Synthetic oligonucleotide
ggauauagaucucugaggu

SEQ ID NO: 754983 - RNA, 19 nt, Artificial Sequence
  Description of Artificial Sequence: Synthetic oligonucleotide
uuuaacuucccagccugcu

SEQ ID NO: 754984 - RNA, 19 nt, Artificial Sequence
  Description of Artificial Sequence: Synthetic oligonucleotide
uguagauagcaaugcgguc

SEQ ID NO: 754985 - RNA, 19 nt, Artificial Sequence
  Description of Artificial Sequence: Synthetic oligonucleotide
ggcccaaucagcaucaagc

SEQ ID NO: 754986 - RNA, 19 nt, Artificial Sequence
  Description of Artificial Sequence: Synthetic oligonucleotide
cuugagaguuuuguaaauc

SEQ ID NO: 754987 - RNA, 19 nt, Artificial Sequence
  Description of Artificial Sequence: Synthetic oligonucleotide
cagagcuuggauuggggug

SEQ ID NO: 754988 - RNA, 19 nt, Artificial Sequence
  Description of Artificial Sequence: Synthetic oligonucleotide
caaccugccgcgcuagacg

SEQ ID NO: 754989 - RNA, 19 nt, Artificial Sequence
  Description of Artificial Sequence: Synthetic oligonucleotide
auagcaaugcggucacaca

SEQ ID NO: 754990 - RNA, 19 nt, Artificial Sequence
  Description of Artificial Sequence: Synthetic oligonucleotide
ugcaugagaaggucaaguu

SEQ ID NO: 754991 - RNA, 19 nt, Artificial Sequence
  Description of Artificial Sequence: Synthetic oligonucleotide
accaggguuaguguggcag

SEQ ID NO: 754992 - RNA, 19 nt, Artificial Sequence
  Description of Artificial Sequence: Synthetic oligonucleotide
gucgaugacuuuuggcuug

SEQ ID NO: 754993 - RNA, 19 nt, Artificial Sequence
  Description of Artificial Sequence: Synthetic oligonucleotide
ugguaauggaugacaugcu

SEQ ID NO: 754994 - RNA, 19 nt, Artificial Sequence
  Description of Artificial Sequence: Synthetic oligonucleotide
uggcuugccccgcauacca

SEQ ID NO: 754995 - RNA, 19 nt, Artificial Sequence
  Description of Artificial Sequence: Synthetic oligonucleotide
agucaggacuagucccagc

SEQ ID NO: 754996 - RNA, 19 nt, Artificial Sequence
  Description of Artificial Sequence: Synthetic oligonucleotide
caugaguugugcagacaag

SEQ ID NO: 754997 - RNA, 19 nt, Artificial Sequence
  Description of Artificial Sequence: Synthetic oligonucleotide
cauccugcaacacugcaga

SEQ ID NO: 754998 - RNA, 19 nt, Artificial Sequence
  Description of Artificial Sequence: Synthetic oligonucleotide
uaaucccuguaaacuuggc

SEQ ID NO: 754999 - RNA, 19 nt, Artificial Sequence
  Description of Artificial Sequence: Synthetic oligonucleotide
uuuucaaccugccgcgcua

SEQ ID NO: 755000 - RNA, 19 nt, Artificial Sequence
  Description of Artificial Sequence: Synthetic oligonucleotide
acuccgguggauauagauc

SEQ ID NO: 755001 - RNA, 19 nt, Artificial Sequence
  Description of Artificial Sequence: Synthetic oligonucleotide
ugccgcgcuagacggaucc

SEQ ID NO: 755002 - RNA, 19 nt, Artificial Sequence
  Description of Artificial Sequence: Synthetic oligonucleotide
cauucucaauucuggccgc

SEQ ID NO: 755003 - RNA, 19 nt, Artificial Sequence
  Description of Artificial Sequence: Synthetic oligonucleotide
ugagcucccgaagugguac

SEQ ID NO: 755004 - RNA, 19 nt, Artificial Sequence
  Description of Artificial Sequence: Synthetic oligonucleotide
gugaacucuguagauagca

SEQ ID NO: 755005 - RNA, 19 nt, Artificial Sequence
  Description of Artificial Sequence: Synthetic oligonucleotide
aggacuagucccagcaggg

SEQ ID NO: 755006 - RNA, 19 nt, Artificial Sequence
  Description of Artificial Sequence: Synthetic oligonucleotide
gaauaagcuuguccucaac

SEQ ID NO: 755007 - RNA, 19 nt, Artificial Sequence
  Description of Artificial Sequence: Synthetic oligonucleotide
gaaucaucgggauggcaaa

SEQ ID NO: 755008 - RNA, 19 nt, Artificial Sequence
  Description of Artificial Sequence: Synthetic oligonucleotide
ugccgaagguugcuuaagu

SEQ ID NO: 755009 - RNA, 19 nt, Artificial Sequence
  Description of Artificial Sequence: Synthetic oligonucleotide
gaugacaugcugaacuuua

SEQ ID NO: 755010 - RNA, 19 nt, Artificial Sequence
  Description of Artificial Sequence: Synthetic oligonucleotide
agacucaguuccuucccug

SEQ ID NO: 755011 - RNA, 19 nt, Artificial Sequence
  Description of Artificial Sequence: Synthetic oligonucleotide
cuauaaccaggcaccugag

SEQ ID NO: 755012 - RNA, 19 nt, Artificial Sequence
  Description of Artificial Sequence: Synthetic oligonucleotide
ucgggauggcaaaagccaa

SEQ ID NO: 755013 - RNA, 19 nt, Artificial Sequence
  Description of Artificial Sequence: Synthetic oligonucleotide
ucucaauucuggccgcauc

SEQ ID NO: 755014 - RNA, 19 nt, Artificial Sequence
  Description of Artificial Sequence: Synthetic oligonucleotide
guacuccagugccauuugg

SEQ ID NO: 755015 - RNA, 19 nt, Artificial Sequence
  Description of Artificial Sequence: Synthetic oligonucleotide
uguggacaucccaccaacu

SEQ ID NO: 755016 - RNA, 19 nt, Artificial Sequence
  Description of Artificial Sequence: Synthetic oligonucleotide
agcucccacccugagcucc

SEQ ID NO: 755017 - RNA, 19 nt, Artificial Sequence
  Description of Artificial Sequence: Synthetic oligonucleotide
gaguucagcaaaauggccu

SEQ ID NO: 755018 - RNA, 19 nt, Artificial Sequence
  Description of Artificial Sequence: Synthetic oligonucleotide
accaacuaaaauugccguu

SEQ ID NO: 755019 - RNA, 19 nt, Artificial Sequence
  Description of Artificial Sequence: Synthetic oligonucleotide
agaugggcaaacugcucca

SEQ ID NO: 755020 - RNA, 19 nt, Artificial Sequence
  Description of Artificial Sequence: Synthetic oligonucleotide
cuugguguaccaggguuag

SEQ ID NO: 755021 - RNA, 19 nt, Artificial Sequence
  Description of Artificial Sequence: Synthetic oligonucleotide
aggcgcuugaugcaugaga

SEQ ID NO: 755022 - RNA, 19 nt, Artificial Sequence
  Description of Artificial Sequence: Synthetic oligonucleotide
aagccuggaaguuccggua

SEQ ID NO: 755023 - RNA, 19 nt, Artificial Sequence
  Description of Artificial Sequence: Synthetic oligonucleotide
gucauuuagcaucucuaaa

SEQ ID NO: 755024 - RNA, 19 nt, Artificial Sequence
  Description of Artificial Sequence: Synthetic oligonucleotide
ucccaccaacuaaaauugc

SEQ ID NO: 755025 - RNA, 19 nt, Artificial Sequence
  Description of Artificial Sequence: Synthetic oligonucleotide
uugucgauugggguuguac

SEQ ID NO: 755026 - RNA, 19 nt, Artificial Sequence
  Description of Artificial Sequence: Synthetic oligonucleotide
ggaauauccaggccccgag

SEQ ID NO: 755027 - RNA, 19 nt, Artificial Sequence
  Description of Artificial Sequence: Synthetic oligonucleotide
gggagucaggacuaguccc

SEQ ID NO: 755028 - RNA, 19 nt, Artificial Sequence
  Description of Artificial Sequence: Synthetic oligonucleotide
cuccgguggauauagaucu

SEQ ID NO: 755029 - RNA, 19 nt, Artificial Sequence
  Description of Artificial Sequence: Synthetic oligonucleotide
cagccugccagacugugug

SEQ ID NO: 755030 - RNA, 19 nt, Artificial Sequence
  Description of Artificial Sequence: Synthetic oligonucleotide
aucaucgggauggcaaaag

SEQ ID NO: 755031 - RNA, 19 nt, Artificial Sequence
  Description of Artificial Sequence: Synthetic oligonucleotide
ccgcauaccaaucuucugc

SEQ ID NO: 755032 - RNA, 19 nt, Artificial Sequence
  Description of Artificial Sequence: Synthetic oligonucleotide
aacuagcucccagagccga

SEQ ID NO: 755033 - RNA, 19 nt, Artificial Sequence
  Description of Artificial Sequence: Synthetic oligonucleotide
uccugcaacacugcagacu

SEQ ID NO: 755034 - RNA, 19 nt, Artificial Sequence
  Description of Artificial Sequence: Synthetic oligonucleotide
ugcccgguguucuuuuggc

SEQ ID NO: 755035 - RNA, 19 nt, Artificial Sequence
  Description of Artificial Sequence: Synthetic oligonucleotide
agccccuguuuuaacuucc

SEQ ID NO: 755036 - RNA, 19 nt, Artificial Sequence
  Description of Artificial Sequence: Synthetic oligonucleotide
cagacucaccauuccuggg

SEQ ID NO: 755037 - RNA, 19 nt, Artificial Sequence
  Description of Artificial Sequence: Synthetic oligonucleotide
ugccguuuuaaucccugua

SEQ ID NO: 755038 - RNA, 19 nt, Artificial Sequence
  Description of Artificial Sequence: Synthetic oligonucleotide
ggaaauaguagagguacca

SEQ ID NO: 755039 - RNA, 19 nt, Artificial Sequence
  Description of Artificial Sequence: Synthetic oligonucleotide
gaguugugcagacaagccu

SEQ ID NO: 755040 - RNA, 19 nt, Artificial Sequence
  Description of Artificial Sequence: Synthetic oligonucleotide
uuucaaccugccgcgcuag

SEQ ID NO: 755041 - RNA, 19 nt, Artificial Sequence
  Description of Artificial Sequence: Synthetic oligonucleotide
caggcgugcagggucagcg

SEQ ID NO: 755042 - RNA, 19 nt, Artificial Sequence
  Description of Artificial Sequence: Synthetic oligonucleotide
ucccgaagugguacuccag

SEQ ID NO: 755043 - RNA, 19 nt, Artificial Sequence
  Description of Artificial Sequence: Synthetic oligonucleotide
aggcacuagucuugggaug

SEQ ID NO: 755044 - RNA, 19 nt, Artificial Sequence
  Description of Artificial Sequence: Synthetic oligonucleotide
ucucaaccauccgaucagc

SEQ ID NO: 755045 - RNA, 19 nt, Artificial Sequence
  Description of Artificial Sequence: Synthetic oligonucleotide
cuucccugguagcacgggc

SEQ ID NO: 755046 - RNA, 19 nt, Artificial Sequence
  Description of Artificial Sequence: Synthetic oligonucleotide
gaucucugaggugcggggc

SEQ ID NO: 755047 - RNA, 19 nt, Artificial Sequence
  Description of Artificial Sequence: Synthetic oligonucleotide
gugcuugcacuugacugcg

SEQ ID NO: 755048 - RNA, 19 nt, Artificial Sequence
  Description of Artificial Sequence: Synthetic oligonucleotide
guuagcucgugcuugcacu

SEQ ID NO: 755049 - RNA, 19 nt, Artificial Sequence
  Description of Artificial Sequence: Synthetic oligonucleotide
caucaauguguugucugac

SEQ ID NO: 755050 - RNA, 19 nt, Artificial Sequence
  Description of Artificial Sequence: Synthetic oligonucleotide
gagugcucggaagaaccgc

SEQ ID NO: 755051 - RNA, 19 nt, Artificial Sequence
  Description of Artificial Sequence: Synthetic oligonucleotide
agacggauccgcuccuuga

SEQ ID NO: 755052 - RNA, 19 nt, Artificial Sequence
  Description of Artificial Sequence: Synthetic oligonucleotide
agcaucucuaaaagcugag

SEQ ID NO: 755053 - RNA, 19 nt, Artificial Sequence
  Description of Artificial Sequence: Synthetic oligonucleotide
ugucugacuuggacugcca

SEQ ID NO: 755054 - RNA, 19 nt, Artificial Sequence
  Description of Artificial Sequence: Synthetic oligonucleotide
cagcaaaauggccuuucuc

SEQ ID NO: 755055 - RNA, 19 nt, Artificial Sequence
  Description of Artificial Sequence: Synthetic oligonucleotide
uuagcucgugcuugcacuu

SEQ ID NO: 755056 - RNA, 19 nt, Artificial Sequence
  Description of Artificial Sequence: Synthetic oligonucleotide
gaugggcaaacugcuccag

SEQ ID NO: 755057 - RNA, 19 nt, Artificial Sequence
  Description of Artificial Sequence: Synthetic oligonucleotide
acuagucuugggaugugcu

SEQ ID NO: 755058 - RNA, 19 nt, Artificial Sequence
  Description of Artificial Sequence: Synthetic oligonucleotide
aaucaucgggauggcaaaa

SEQ ID NO: 755059 - RNA, 19 nt, Artificial Sequence
  Description of Artificial Sequence: Synthetic oligonucleotide
ucaaccugccgcgcuagac

SEQ ID NO: 755060 - RNA, 19 nt, Artificial Sequence
  Description of Artificial Sequence: Synthetic oligonucleotide
ucaucuugcuugggaauaa

SEQ ID NO: 755061 - RNA, 19 nt, Artificial Sequence
  Description of Artificial Sequence: Synthetic oligonucleotide
gguggauauagaucucuga

SEQ ID NO: 755062 - RNA, 19 nt, Artificial Sequence
  Description of Artificial Sequence: Synthetic oligonucleotide
cacagucuuccagaugggc

SEQ ID NO: 755063 - RNA, 19 nt, Artificial Sequence
  Description of Artificial Sequence: Synthetic oligonucleotide
gugcccgguguucuuuugg

SEQ ID NO: 755064 - RNA, 19 nt, Artificial Sequence
  Description of Artificial Sequence: Synthetic oligonucleotide
uuuuggcuugccccgcaua

SEQ ID NO: 755065 - RNA, 19 nt, Artificial Sequence
  Description of Artificial Sequence: Synthetic oligonucleotide
auuccuugugaggucgaug

SEQ ID NO: 755066 - RNA, 19 nt, Artificial Sequence
  Description of Artificial Sequence: Synthetic oligonucleotide
ugcuuaagugaggauguuu

SEQ ID NO: 755067 - RNA, 19 nt, Artificial Sequence
  Description of Artificial Sequence: Synthetic oligonucleotide
ugcuugcacuugacugcgg

SEQ ID NO: 755068 - RNA, 19 nt, Artificial Sequence
  Description of Artificial Sequence: Synthetic oligonucleotide
guagagguaccagucuuuc

SEQ ID NO: 755069 - RNA, 19 nt, Artificial Sequence
  Description of Artificial Sequence: Synthetic oligonucleotide
cguuuuaaucccuguaaac

SEQ ID NO: 755070 - RNA, 19 nt, Artificial Sequence
  Description of Artificial Sequence: Synthetic oligonucleotide
uccuugugaggucgaugac

SEQ ID NO: 755071 - RNA, 19 nt, Artificial Sequence
  Description of Artificial Sequence: Synthetic oligonucleotide
aaguuccgguacucagccu

SEQ ID NO: 755072 - RNA, 19 nt, Artificial Sequence
  Description of Artificial Sequence: Synthetic oligonucleotide
uugccguuuuaaucccugu

SEQ ID NO: 755073 - RNA, 19 nt, Artificial Sequence
  Description of Artificial Sequence: Synthetic oligonucleotide
ggaaguuccgguacucagc

SEQ ID NO: 755074 - RNA, 19 nt, Artificial Sequence
  Description of Artificial Sequence: Synthetic oligonucleotide
gaggcacuagucuugggau

SEQ ID NO: 755075 - RNA, 19 nt, Artificial Sequence
  Description of Artificial Sequence: Synthetic oligonucleotide
gcuucuuaugaaggauucg

SEQ ID NO: 755076 - RNA, 19 nt, Artificial Sequence
  Description of Artificial Sequence: Synthetic oligonucleotide
cacuagucuugggaugugc

SEQ ID NO: 755077 - RNA, 19 nt, Artificial Sequence
  Description of Artificial Sequence: Synthetic oligonucleotide
acccugagcucccgaagug

SEQ ID NO: 755078 - RNA, 19 nt, Artificial Sequence
  Description of Artificial Sequence: Synthetic oligonucleotide
cugcucaauccaugaguug

SEQ ID NO: 755079 - RNA, 19 nt, Artificial Sequence
  Description of Artificial Sequence: Synthetic oligonucleotide
cagcacggcaugaaucauc

SEQ ID NO: 755080 - RNA, 19 nt, Artificial Sequence
  Description of Artificial Sequence: Synthetic oligonucleotide
acuugacugcggaggugcc

SEQ ID NO: 755081 - RNA, 19 nt, Artificial Sequence
  Description of Artificial Sequence: Synthetic oligonucleotide
cuuggacugccagcucucg

SEQ ID NO: 755082 - RNA, 19 nt, Artificial Sequence
  Description of Artificial Sequence: Synthetic oligonucleotide
ggcaugaaucaucgggaug

SEQ ID NO: 755083 - RNA, 19 nt, Artificial Sequence
  Description of Artificial Sequence: Synthetic oligonucleotide
gagucaggacuagucccag

SEQ ID NO: 755084 - RNA, 19 nt, Artificial Sequence
  Description of Artificial Sequence: Synthetic oligonucleotide
cuugacugcggaggugccc

SEQ ID NO: 755085 - RNA, 19 nt, Artificial Sequence
  Description of Artificial Sequence: Synthetic oligonucleotide
gcaccugagcugccgaagg

SEQ ID NO: 755086 - RNA, 19 nt, Artificial Sequence
  Description of Artificial Sequence: Synthetic oligonucleotide
acuuuuggcuugccccgca

SEQ ID NO: 755087 - RNA, 19 nt, Artificial Sequence
  Description of Artificial Sequence: Synthetic oligonucleotide
gcaucaauguguugucuga

SEQ ID NO: 755088 - RNA, 19 nt, Artificial Sequence
  Description of Artificial Sequence: Synthetic oligonucleotide
aggcgugcagggucagcgg

SEQ ID NO: 755089 - RNA, 19 nt, Artificial Sequence
  Description of Artificial Sequence: Synthetic oligonucleotide
agagccgaccagggguagc

SEQ ID NO: 755090 - RNA, 19 nt, Artificial Sequence
  Description of Artificial Sequence: Synthetic oligonucleotide
ggcaguuagcucgugcuug

SEQ ID NO: 755091 - RNA, 19 nt, Artificial Sequence
  Description of Artificial Sequence: Synthetic oligonucleotide
uuggcuugccccgcauacc

SEQ ID NO: 755092 - RNA, 19 nt, Artificial Sequence
  Description of Artificial Sequence: Synthetic oligonucleotide
uccgguacucagccuuuuc

SEQ ID NO: 755093 - RNA, 19 nt, Artificial Sequence
  Description of Artificial Sequence: Synthetic oligonucleotide
gccguuuuaaucccuguaa

SEQ ID NO: 755094 - RNA, 19 nt, Artificial Sequence
  Description of Artificial Sequence: Synthetic oligonucleotide
gggcaguccggccacuccg

SEQ ID NO: 755095 - RNA, 19 nt, Artificial Sequence
  Description of Artificial Sequence: Synthetic oligonucleotide
gacuuuuggcuugccccgc

SEQ ID NO: 755096 - RNA, 19 nt, Artificial Sequence
  Description of Artificial Sequence: Synthetic oligonucleotide
guggcgauucagcauccuc

SEQ ID NO: 755097 - RNA, 19 nt, Artificial Sequence
  Description of Artificial Sequence: Synthetic oligonucleotide
agagaggcgcuugaugcau

SEQ ID NO: 755098 - RNA, 19 nt, Artificial Sequence
  Description of Artificial Sequence: Synthetic oligonucleotide
gcaguuagcucgugcuugc

SEQ ID NO: 755099 - RNA, 19 nt, Artificial Sequence
  Description of Artificial Sequence: Synthetic oligonucleotide
cagucuuucucaucugucu

SEQ ID NO: 755100 - RNA, 19 nt, Artificial Sequence
  Description of Artificial Sequence: Synthetic oligonucleotide
gccuuucucaaccauccga

SEQ ID NO: 755101 - RNA, 19 nt, Artificial Sequence
  Description of Artificial Sequence: Synthetic oligonucleotide
acuagcucccagagccgac

SEQ ID NO: 755102 - RNA, 19 nt, Artificial Sequence
  Description of Artificial Sequence: Synthetic oligonucleotide
uucaaccugccgcgcuaga

SEQ ID NO: 755103 - RNA, 19 nt, Artificial Sequence
  Description of Artificial Sequence: Synthetic oligonucleotide
cagccccuguuuuaacuuc

SEQ ID NO: 755104 - RNA, 19 nt, Artificial Sequence
  Description of Artificial Sequence: Synthetic oligonucleotide
ugucgucaucuugcuuggg

SEQ ID NO: 755105 - RNA, 19 nt, Artificial Sequence
  Description of Artificial Sequence: Synthetic oligonucleotide
uccgguggauauagaucuc

SEQ ID NO: 755106 - RNA, 19 nt, Artificial Sequence
  Description of Artificial Sequence: Synthetic oligonucleotide
ucccugucgucaucuugcu

SEQ ID NO: 755107 - RNA, 19 nt, Artificial Sequence
  Description of Artificial Sequence: Synthetic oligonucleotide
aguagagguaccagucuuu

SEQ ID NO: 755108 - RNA, 19 nt, Artificial Sequence
  Description of Artificial Sequence: Synthetic oligonucleotide
caucaagcugaggccuucc

SEQ ID NO: 755109 - RNA, 19 nt, Artificial Sequence
  Description of Artificial Sequence: Synthetic oligonucleotide
cuccagguuucugagccuc

SEQ ID NO: 755110 - RNA, 19 nt, Artificial Sequence
  Description of Artificial Sequence: Synthetic oligonucleotide
gccacuccgguggauauag

SEQ ID NO: 755111 - RNA, 19 nt, Artificial Sequence
  Description of Artificial Sequence: Synthetic oligonucleotide
cagcucucgagugggaguc

SEQ ID NO: 755112 - RNA, 19 nt, Artificial Sequence
  Description of Artificial Sequence: Synthetic oligonucleotide
gguaccagucuuucucauc

SEQ ID NO: 755113 - RNA, 19 nt, Artificial Sequence
  Description of Artificial Sequence: Synthetic oligonucleotide
gcuuggauuggggugggug

SEQ ID NO: 755114 - RNA, 19 nt, Artificial Sequence
  Description of Artificial Sequence: Synthetic oligonucleotide
auccgaucagccucaucua

SEQ ID NO: 755115 - RNA, 19 nt, Artificial Sequence
  Description of Artificial Sequence: Synthetic oligonucleotide
auguccaguuugucacgga

SEQ ID NO: 755116 - RNA, 19 nt, Artificial Sequence
  Description of Artificial Sequence: Synthetic oligonucleotide
ccugguaauggaugacaug

SEQ ID NO: 755117 - RNA, 19 nt, Artificial Sequence
  Description of Artificial Sequence: Synthetic oligonucleotide
ccaugaguugugcagacaa

SEQ ID NO: 755118 - RNA, 19 nt, Artificial Sequence
  Description of Artificial Sequence: Synthetic oligonucleotide
caagccuggaaguuccggu

SEQ ID NO: 755119 - RNA, 19 nt, Artificial Sequence
  Description of Artificial Sequence: Synthetic oligonucleotide
gauccgcuccuugaccaca

SEQ ID NO: 755120 - RNA, 19 nt, Artificial Sequence
  Description of Artificial Sequence: Synthetic oligonucleotide
ugccccgcauaccaaucuu

SEQ ID NO: 755121 - RNA, 19 nt, Artificial Sequence
  Description of Artificial Sequence: Synthetic oligonucleotide
guagcacgggcaguccggc

SEQ ID NO: 755122 - RNA, 19 nt, Artificial Sequence
  Description of Artificial Sequence: Synthetic oligonucleotide
cugccgaagguugcuuaag

SEQ ID NO: 755123 - RNA, 19 nt, Artificial Sequence
  Description of Artificial Sequence: Synthetic oligonucleotide
auucgagcaggaacuuggu

SEQ ID NO: 755124 - RNA, 19 nt, Artificial Sequence
  Description of Artificial Sequence: Synthetic oligonucleotide
agugggagucaggacuagu

SEQ ID NO: 755125 - RNA, 19 nt, Artificial Sequence
  Description of Artificial Sequence: Synthetic oligonucleotide
ugcggggcaccugguaaug

SEQ ID NO: 755126 - RNA, 19 nt, Artificial Sequence
  Description of Artificial Sequence: Synthetic oligonucleotide
ugcggucacacagccccug

SEQ ID NO: 755127 - RNA, 19 nt, Artificial Sequence
  Description of Artificial Sequence: Synthetic oligonucleotide
uagcucgugcuugcacuug

SEQ ID NO: 755128 - RNA, 19 nt, Artificial Sequence
  Description of Artificial Sequence: Synthetic oligonucleotide
agguugcuuaagugaggau

SEQ ID NO: 755129 - RNA, 19 nt, Artificial Sequence
  Description of Artificial Sequence: Synthetic oligonucleotide
cggcaugauguccaggacc

SEQ ID NO: 755130 - RNA, 19 nt, Artificial Sequence
  Description of Artificial Sequence: Synthetic oligonucleotide
ggaccuuuaucugcuucug

SEQ ID NO: 755131 - RNA, 19 nt, Artificial Sequence
  Description of Artificial Sequence: Synthetic oligonucleotide
gccaagagaacacagucuu

SEQ ID NO: 755132 - RNA, 19 nt, Artificial Sequence
  Description of Artificial Sequence: Synthetic oligonucleotide
gagaggcgcuugaugcaug

SEQ ID NO: 755133 - RNA, 19 nt, Artificial Sequence
  Description of Artificial Sequence: Synthetic oligonucleotide
ggagucaggacuaguccca

SEQ ID NO: 755134 - RNA, 19 nt, Artificial Sequence
  Description of Artificial Sequence: Synthetic oligonucleotide
gagagcagauggcguagcu

SEQ ID NO: 755135 - RNA, 19 nt, Artificial Sequence
  Description of Artificial Sequence: Synthetic oligonucleotide
gagaugcuguuggcaaaca

SEQ ID NO: 755136 - RNA, 19 nt, Artificial Sequence
  Description of Artificial Sequence: Synthetic oligonucleotide
gaggcgcuugaugcaugag

SEQ ID NO: 755137 - RNA, 19 nt, Artificial Sequence
  Description of Artificial Sequence: Synthetic oligonucleotide
ggauucgagcaggaacuug

SEQ ID NO: 755138 - RNA, 19 nt, Artificial Sequence
  Description of Artificial Sequence: Synthetic oligonucleotide
cuuuucaaccugccgcgcu

SEQ ID NO: 755139 - RNA, 19 nt, Artificial Sequence
  Description of Artificial Sequence: Synthetic oligonucleotide
cgcuagacggauccgcucc

SEQ ID NO: 755140 - RNA, 19 nt, Artificial Sequence
  Description of Artificial Sequence: Synthetic oligonucleotide
uaccaggguuaguguggca

SEQ ID NO: 755141 - RNA, 19 nt, Artificial Sequence
  Description of Artificial Sequence: Synthetic oligonucleotide
ccaagagaacacagucuuc

SEQ ID NO: 755142 - RNA, 19 nt, Artificial Sequence
  Description of Artificial Sequence: Synthetic oligonucleotide
ugcggaggugcccgguguu

SEQ ID NO: 755143 - RNA, 19 nt, Artificial Sequence
  Description of Artificial Sequence: Synthetic oligonucleotide
cucgucuuucuugagaguu

SEQ ID NO: 755144 - RNA, 19 nt, Artificial Sequence
  Description of Artificial Sequence: Synthetic oligonucleotide
gcaugagaugcuguuggca

SEQ ID NO: 755145 - RNA, 19 nt, Artificial Sequence
  Description of Artificial Sequence: Synthetic oligonucleotide
cacuccgguggauauagau

SEQ ID NO: 755146 - RNA, 19 nt, Artificial Sequence
  Description of Artificial Sequence: Synthetic oligonucleotide
gugggaccuucaucuuaug

SEQ ID NO: 755147 - RNA, 19 nt, Artificial Sequence
  Description of Artificial Sequence: Synthetic oligonucleotide
cagcuccuaggauguccag

SEQ ID NO: 755148 - RNA, 19 nt, Artificial Sequence
  Description of Artificial Sequence: Synthetic oligonucleotide
gcggccuggguacugcaug

SEQ ID NO: 755149 - RNA, 19 nt, Artificial Sequence
  Description of Artificial Sequence: Synthetic oligonucleotide
ccgucgcucuuccugcugg

SEQ ID NO: 755150 - RNA, 19 nt, Artificial Sequence
  Description of Artificial Sequence: Synthetic oligonucleotide
uugcuuaagugaggauguu

SEQ ID NO: 755151 - RNA, 19 nt, Artificial Sequence
  Description of Artificial Sequence: Synthetic oligonucleotide
agacugugugggguaccug

SEQ ID NO: 755152 - RNA, 19 nt, Artificial Sequence
  Description of Artificial Sequence: Synthetic oligonucleotide
cguuugucgauugggguug

SEQ ID NO: 755153 - RNA, 19 nt, Artificial Sequence
  Description of Artificial Sequence: Synthetic oligonucleotide
ggcaccugagcugccgaag

SEQ ID NO: 755154 - RNA, 19 nt, Artificial Sequence
  Description of Artificial Sequence: Synthetic oligonucleotide
ccgguguucuuuuggcuuc

SEQ ID NO: 755155 - RNA, 19 nt, Artificial Sequence
  Description of Artificial Sequence: Synthetic oligonucleotide
gaccacauccauguacuuu

SEQ ID NO: 755156 - RNA, 19 nt, Artificial Sequence
  Description of Artificial Sequence: Synthetic oligonucleotide
cuagucuugggaugugcuu

SEQ ID NO: 755157 - RNA, 19 nt, Artificial Sequence
  Description of Artificial Sequence: Synthetic oligonucleotide
aggguuaguguggcagaaa

SEQ ID NO: 755158 - RNA, 19 nt, Artificial Sequence
  Description of Artificial Sequence: Synthetic oligonucleotide
ccguuuuaaucccuguaaa

SEQ ID NO: 755159 - RNA, 19 nt, Artificial Sequence
  Description of Artificial Sequence: Synthetic oligonucleotide
gguguaccaggguuagugu

SEQ ID NO: 755160 - RNA, 19 nt, Artificial Sequence
  Description of Artificial Sequence: Synthetic oligonucleotide
ggagagcagauggcguagc

SEQ ID NO: 755161 - RNA, 19 nt, Artificial Sequence
  Description of Artificial Sequence: Synthetic oligonucleotide
gcgcuugaugcaugagaug

SEQ ID NO: 755162 - RNA, 19 nt, Artificial Sequence
  Description of Artificial Sequence: Synthetic oligonucleotide
acgggcaguccggccacuc

SEQ ID NO: 755163 - RNA, 19 nt, Artificial Sequence
  Description of Artificial Sequence: Synthetic oligonucleotide
ccuuucucaaccauccgau

SEQ ID NO: 755164 - RNA, 19 nt, Artificial Sequence
  Description of Artificial Sequence: Synthetic oligonucleotide
cgcauaccaaucuucugca

SEQ ID NO: 755165 - RNA, 19 nt, Artificial Sequence
  Description of Artificial Sequence: Synthetic oligonucleotide
ggugcccgguguucuuuug

SEQ ID NO: 755166 - RNA, 19 nt, Artificial Sequence
  Description of Artificial Sequence: Synthetic oligonucleotide
ccgguacucagccuuuuca

SEQ ID NO: 755167 - RNA, 19 nt, Artificial Sequence
  Description of Artificial Sequence: Synthetic oligonucleotide
cccgcauaccaaucuucug

SEQ ID NO: 755168 - RNA, 19 nt, Artificial Sequence
  Description of Artificial Sequence: Synthetic oligonucleotide
ugccgccgccugcucaauc

SEQ ID NO: 755169 - RNA, 19 nt, Artificial Sequence
  Description of Artificial Sequence: Synthetic oligonucleotide
ggcgcuugaugcaugagau

SEQ ID NO: 755170 - RNA, 19 nt, Artificial Sequence
  Description of Artificial Sequence: Synthetic oligonucleotide
cagcggcaugauguccagg

SEQ ID NO: 755171 - RNA, 19 nt, Artificial Sequence
  Description of Artificial Sequence: Synthetic oligonucleotide
uuugucgauugggguugua

SEQ ID NO: 755172 - RNA, 19 nt, Artificial Sequence
  Description of Artificial Sequence: Synthetic oligonucleotide
cuggugcaugcaggcgugc

SEQ ID NO: 755173 - RNA, 19 nt, Artificial Sequence
  Description of Artificial Sequence: Synthetic oligonucleotide
ggucgaugacuuuuggcuu

SEQ ID NO: 755174 - RNA, 19 nt, Artificial Sequence
  Description of Artificial Sequence: Synthetic oligonucleotide
auguguugucugacuugga

SEQ ID NO: 755175 - RNA, 19 nt, Artificial Sequence
  Description of Artificial Sequence: Synthetic oligonucleotide
cucgugcuugcacuugacu

SEQ ID NO: 755176 - RNA, 19 nt, Artificial Sequence
  Description of Artificial Sequence: Synthetic oligonucleotide
cacccugagcucccgaagu

SEQ ID NO: 755177 - RNA, 19 nt, Artificial Sequence
  Description of Artificial Sequence: Synthetic oligonucleotide
gcacggcaugaaucaucgg

SEQ ID NO: 755178 - RNA, 19 nt, Artificial Sequence
  Description of Artificial Sequence: Synthetic oligonucleotide
gcugccgaagguugcuuaa

SEQ ID NO: 755179 - RNA, 19 nt, Artificial Sequence
  Description of Artificial Sequence: Synthetic oligonucleotide
cgguggauauagaucucug

SEQ ID NO: 755180 - RNA, 19 nt, Artificial Sequence
  Description of Artificial Sequence: Synthetic oligonucleotide
caggcaccugagcugccga

SEQ ID NO: 755181 - RNA, 19 nt, Artificial Sequence
  Description of Artificial Sequence: Synthetic oligonucleotide
uuccgguacucagccuuuu

SEQ ID NO: 755182 - RNA, 19 nt, Artificial Sequence
  Description of Artificial Sequence: Synthetic oligonucleotide
gcggcaugauguccaggac

SEQ ID NO: 755183 - RNA, 19 nt, Artificial Sequence
  Description of Artificial Sequence: Synthetic oligonucleotide
ccaacuaaaauugccguuu

SEQ ID NO: 755184 - RNA, 19 nt, Artificial Sequence
  Description of Artificial Sequence: Synthetic oligonucleotide
ccuuuucaaccugccgcgc

SEQ ID NO: 755185 - RNA, 19 nt, Artificial Sequence
  Description of Artificial Sequence: Synthetic oligonucleotide
ccaggguuaguguggcaga

SEQ ID NO: 755186 - RNA, 19 nt, Artificial Sequence
  Description of Artificial Sequence: Synthetic oligonucleotide
gggugggaccuucaucuua

SEQ ID NO: 755187 - RNA, 19 nt, Artificial Sequence
  Description of Artificial Sequence: Synthetic oligonucleotide
ccgaccagggguagcgauc

SEQ ID NO: 755188 - RNA, 19 nt, Artificial Sequence
  Description of Artificial Sequence: Synthetic oligonucleotide
ggugggaccuucaucuuau

SEQ ID NO: 755189 - RNA, 19 nt, Artificial Sequence
  Description of Artificial Sequence: Synthetic oligonucleotide
cuggguggcgauucagcau

SEQ ID NO: 755190 - RNA, 19 nt, Artificial Sequence
  Description of Artificial Sequence: Synthetic oligonucleotide
gcguuugucgauugggguu

SEQ ID NO: 755191 - RNA, 19 nt, Artificial Sequence
  Description of Artificial Sequence: Synthetic oligonucleotide
gcgccuugggugaacucug

SEQ ID NO: 755192 - RNA, 19 nt, Artificial Sequence
  Description of Artificial Sequence: Synthetic oligonucleotide
ggcgccuugggugaacucu

SEQ ID NO: 755193 - RNA, 19 nt, Artificial Sequence
  Description of Artificial Sequence: Synthetic oligonucleotide
auccgcuccuugaccacau

SEQ ID NO: 755194 - RNA, 19 nt, Artificial Sequence
  Description of Artificial Sequence: Synthetic oligonucleotide
cuucaggcccaaucagcau

SEQ ID NO: 755195 - RNA, 19 nt, Artificial Sequence
  Description of Artificial Sequence: Synthetic oligonucleotide
ggcguagcuccugcuucag

SEQ ID NO: 755196 - RNA, 19 nt, Artificial Sequence
  Description of Artificial Sequence: Synthetic oligonucleotide
gccgccugcucaauccaug

SEQ ID NO: 755197 - RNA, 19 nt, Artificial Sequence
  Description of Artificial Sequence: Synthetic oligonucleotide
gccccuguuuuaacuuccc

SEQ ID NO: 755198 - RNA, 19 nt, Artificial Sequence
  Description of Artificial Sequence: Synthetic oligonucleotide
ccgcauccugcaacacugc

SEQ ID NO: 755199 - RNA, 19 nt, Artificial Sequence
  Description of Artificial Sequence: Synthetic oligonucleotide
gcugcggccuggguacugc

SEQ ID NO: 755200 - RNA, 19 nt, Artificial Sequence
  Description of Artificial Sequence: Synthetic oligonucleotide
ccuucccugguagcacggg

SEQ ID NO: 755201 - RNA, 19 nt, Artificial Sequence
  Description of Artificial Sequence: Synthetic oligonucleotide
cugccagacuguguggggu

SEQ ID NO: 755202 - RNA, 19 nt, Artificial Sequence
  Description of Artificial Sequence: Synthetic oligonucleotide
ggguacugcaugaggaaau

SEQ ID NO: 755203 - RNA, 19 nt, Artificial Sequence
  Description of Artificial Sequence: Synthetic oligonucleotide
gcgcuagacggauccgcuc

SEQ ID NO: 755204 - RNA, 19 nt, Artificial Sequence
  Description of Artificial Sequence: Synthetic oligonucleotide
ccuugugaggucgaugacu

SEQ ID NO: 755205 - RNA, 19 nt, Artificial Sequence
  Description of Artificial Sequence: Synthetic oligonucleotide
caguuagcucgugcuugca

SEQ ID NO: 755206 - RNA, 19 nt, Artificial Sequence
  Description of Artificial Sequence: Synthetic oligonucleotide
ggguggcgauucagcaucc

SEQ ID NO: 755207 - RNA, 19 nt, Artificial Sequence
  Description of Artificial Sequence: Synthetic oligonucleotide
ccgcgcuagacggauccgc

SEQ ID NO: 755208 - RNA, 19 nt, Artificial Sequence
  Description of Artificial Sequence: Synthetic oligonucleotide
gggguuguacugggaguca

SEQ ID NO: 755209 - RNA, 19 nt, Artificial Sequence
  Description of Artificial Sequence: Synthetic oligonucleotide
cugcggccuggguacugca

SEQ ID NO: 755210 - RNA, 19 nt, Artificial Sequence
  Description of Artificial Sequence: Synthetic oligonucleotide
cugccgcgcuagacggauc

SEQ ID NO: 755211 - RNA, 19 nt, Artificial Sequence
  Description of Artificial Sequence: Synthetic oligonucleotide
gccccgcauaccaaucuuc

SEQ ID NO: 755212 - RNA, 19 nt, Artificial Sequence
  Description of Artificial Sequence: Synthetic oligonucleotide
agccgaccagggguagcga

SEQ ID NO: 755213 - RNA, 19 nt, Artificial Sequence
  Description of Artificial Sequence: Synthetic oligonucleotide
ggccgcauccugcaacacu

SEQ ID NO: 755214 - RNA, 19 nt, Artificial Sequence
  Description of Artificial Sequence: Synthetic oligonucleotide
gcacuagucuugggaugug

SEQ ID NO: 755215 - RNA, 19 nt, Artificial Sequence
  Description of Artificial Sequence: Synthetic oligonucleotide
cuuuuggcuugccccgcau

SEQ ID NO: 755216 - RNA, 19 nt, Artificial Sequence
  Description of Artificial Sequence: Synthetic oligonucleotide
ccgccugcucaauccauga

SEQ ID NO: 755217 - RNA, 19 nt, Artificial Sequence
  Description of Artificial Sequence: Synthetic oligonucleotide
gcuugccccgcauaccaau

SEQ ID NO: 755218 - RNA, 19 nt, Artificial Sequence
  Description of Artificial Sequence: Synthetic oligonucleotide
gcuagacggauccgcuccu

SEQ ID NO: 755219 - RNA, 19 nt, Artificial Sequence
  Description of Artificial Sequence: Synthetic oligonucleotide
cccgaagugguacuccagu

SEQ ID NO: 755220 - RNA, 19 nt, Artificial Sequence
  Description of Artificial Sequence: Synthetic oligonucleotide
ccacuguacccucauuccu

SEQ ID NO: 755221 - RNA, 19 nt, Artificial Sequence
  Description of Artificial Sequence: Synthetic oligonucleotide
gcucgugcuugcacuugac

SEQ ID NO: 755222 - RNA, 19 nt, Artificial Sequence
  Description of Artificial Sequence: Synthetic oligonucleotide
gccgcgcuagacggauccg

SEQ ID NO: 755223 - RNA, 19 nt, Artificial Sequence
  Description of Artificial Sequence: Synthetic oligonucleotide
cgccugcucaauccaugag

SEQ ID NO: 755224 - RNA, 19 nt, Artificial Sequence
  Description of Artificial Sequence: Synthetic oligonucleotide
gugcucggaagaaccgccu

SEQ ID NO: 755225 - RNA, 19 nt, Artificial Sequence
  Description of Artificial Sequence: Synthetic oligonucleotide
guuugucgauugggguugu

SEQ ID NO: 755226 - RNA, 19 nt, Artificial Sequence
  Description of Artificial Sequence: Synthetic oligonucleotide
ccauuugggauggguggga

SEQ ID NO: 755227 - RNA, 19 nt, Artificial Sequence
  Description of Artificial Sequence: Synthetic oligonucleotide
ccccgcauaccaaucuucu

SEQ ID NO: 755228 - RNA, 19 nt, Artificial Sequence
  Description of Artificial Sequence: Synthetic oligonucleotide
gccuugggugaacucugua

SEQ ID NO: 755229 - RNA, 19 nt, Artificial Sequence
  Description of Artificial Sequence: Synthetic oligonucleotide
accauccgaucagccucau

SEQ ID NO: 755230 - RNA, 19 nt, Artificial Sequence
  Description of Artificial Sequence: Synthetic oligonucleotide
cauuccuugugaggucgau

SEQ ID NO: 755231 - RNA, 19 nt, Artificial Sequence
  Description of Artificial Sequence: Synthetic oligonucleotide
cgggcaguccggccacucc

SEQ ID NO: 755232 - RNA, 19 nt, Artificial Sequence
  Description of Artificial Sequence: Synthetic oligonucleotide
cuccuaggauguccaguuu

SEQ ID NO: 755233 - RNA, 19 nt, Artificial Sequence
  Description of Artificial Sequence: Synthetic oligonucleotide
gggcaguuagcucgugcuu

SEQ ID NO: 755234 - RNA, 19 nt, Artificial Sequence
  Description of Artificial Sequence: Synthetic oligonucleotide
gcggaggugcccgguguuc

SEQ ID NO: 755235 - RNA, 19 nt, Artificial Sequence
  Description of Artificial Sequence: Synthetic oligonucleotide
gccgaccagggguagcgau

SEQ ID NO: 755236 - RNA, 19 nt, Artificial Sequence
  Description of Artificial Sequence: Synthetic oligonucleotide
cuagacggauccgcuccuu

SEQ ID NO: 755237 - RNA, 19 nt, Artificial Sequence
  Description of Artificial Sequence: Synthetic oligonucleotide
gguggcgauucagcauccu

SEQ ID NO: 755238 - RNA, 19 nt, Artificial Sequence
  Description of Artificial Sequence: Synthetic oligonucleotide
cccgagcugccacaucugu

SEQ ID NO: 755239 - RNA, 19 nt, Artificial Sequence
  Description of Artificial Sequence: Synthetic oligonucleotide
ccacuccgguggauauaga

SEQ ID NO: 755240 - RNA, 19 nt, Artificial Sequence
  Description of Artificial Sequence: Synthetic oligonucleotide
gcagcacggcaugaaucau

SEQ ID NO: 755241 - RNA, 19 nt, Artificial Sequence
  Description of Artificial Sequence: Synthetic oligonucleotide
ggccacuccgguggauaua

SEQ ID NO: 755242 - RNA, 19 nt, Artificial Sequence
  Description of Artificial Sequence: Synthetic oligonucleotide
cggcaugaaucaucgggau

SEQ ID NO: 755243 - RNA, 19 nt, Artificial Sequence
  Description of Artificial Sequence: Synthetic oligonucleotide
cgcgcuagacggauccgcu

SEQ ID NO: 755244 - RNA, 19 nt, Artificial Sequence
  Description of Artificial Sequence: Synthetic oligonucleotide
ccugccgcgcuagacggau

SEQ ID NO: 755245 - RNA, 19 nt, Artificial Sequence
  Description of Artificial Sequence: Synthetic oligonucleotide
cacgggcaguccggccacu

SEQ ID NO: 755246 - RNA, 19 nt, Artificial Sequence
  Description of Artificial Sequence: Synthetic oligonucleotide
cgccuugggugaacucugu

SEQ ID NO: 755247 - RNA, 19 nt, Artificial Sequence
  Description of Artificial Sequence: Synthetic oligonucleotide
cgguguucuuuuggcuucu

SEQ ID NO: 755248 - RNA, 19 nt, Artificial Sequence
  Description of Artificial Sequence: Synthetic oligonucleotide
aauuuauagccacacagcc

SEQ ID NO: 755249 - RNA, 19 nt, Artificial Sequence
  Description of Artificial Sequence: Synthetic oligonucleotide
aaauauuuguccucuaaag

SEQ ID NO: 755250 - RNA, 19 nt, Artificial Sequence
  Description of Artificial Sequence: Synthetic oligonucleotide
auuauaauggcauaggaga

SEQ ID NO: 755251 - RNA, 19 nt, Artificial Sequence
  Description of Artificial Sequence: Synthetic oligonucleotide
aacuguuacagcuugucac

SEQ ID NO: 755252 - RNA, 19 nt, Artificial Sequence
  Description of Artificial Sequence: Synthetic oligonucleotide
cuaauuuauagccacacag

SEQ ID NO: 755253 - RNA, 19 nt, Artificial Sequence
  Description of Artificial Sequence: Synthetic oligonucleotide
aguaaguuucccuacaguc

SEQ ID NO: 755254 - RNA, 19 nt, Artificial Sequence
  Description of Artificial Sequence: Synthetic oligonucleotide
aaggauacacaaaaguacc

SEQ ID NO: 755255 - RNA, 19 nt, Artificial Sequence
  Description of Artificial Sequence: Synthetic oligonucleotide
agaacugauacguaaggcg

SEQ ID NO: 755256 - RNA, 19 nt, Artificial Sequence
  Description of Artificial Sequence: Synthetic oligonucleotide
aaauggaaccuauuguguc

SEQ ID NO: 755257 - RNA, 19 nt, Artificial Sequence
  Description of Artificial Sequence: Synthetic oligonucleotide
uuuuauccuaauaauauuc

SEQ ID NO: 755258 - RNA, 19 nt, Artificial Sequence
  Description of Artificial Sequence: Synthetic oligonucleotide
aacucgaaguccucaaagc

SEQ ID NO: 755259 - RNA, 19 nt, Artificial Sequence
  Description of Artificial Sequence: Synthetic oligonucleotide
aacuguuccaaugaggccg

SEQ ID NO: 755260 - RNA, 19 nt, Artificial Sequence
  Description of Artificial Sequence: Synthetic oligonucleotide
ugaacaagcauguuuaaga

SEQ ID NO: 755261 - RNA, 19 nt, Artificial Sequence
  Description of Artificial Sequence: Synthetic oligonucleotide
cagcuaauaguuuagagag

SEQ ID NO: 755262 - RNA, 19 nt, Artificial Sequence
  Description of Artificial Sequence: Synthetic oligonucleotide
uuaacuaauuuauagccac

SEQ ID NO: 755263 - RNA, 19 nt, Artificial Sequence
  Description of Artificial Sequence: Synthetic oligonucleotide
aagaucaugaaacuucaca

SEQ ID NO: 755264 - RNA, 19 nt, Artificial Sequence
  Description of Artificial Sequence: Synthetic oligonucleotide
aaccuauugugucucuucc

SEQ ID NO: 755265 - RNA, 19 nt, Artificial Sequence
  Description of Artificial Sequence: Synthetic oligonucleotide
agaacuguuccaaugaggc

SEQ ID NO: 755266 - RNA, 19 nt, Artificial Sequence
  Description of Artificial Sequence: Synthetic oligonucleotide
ugauaugacaaauuugcca

SEQ ID NO: 755267 - RNA, 19 nt, Artificial Sequence
  Description of Artificial Sequence: Synthetic oligonucleotide
aacuaauuuauagccacac

SEQ ID NO: 755268 - RNA, 19 nt, Artificial Sequence
  Description of Artificial Sequence: Synthetic oligonucleotide
aaauagaaucugcacccac

SEQ ID NO: 755269 - RNA, 19 nt, Artificial Sequence
  Description of Artificial Sequence: Synthetic oligonucleotide
acaagcauguuuaagaguc

SEQ ID NO: 755270 - RNA, 19 nt, Artificial Sequence
  Description of Artificial Sequence: Synthetic oligonucleotide
uuauaauggcauaggagag

SEQ ID NO: 755271 - RNA, 19 nt, Artificial Sequence
  Description of Artificial Sequence: Synthetic oligonucleotide
uaggauaagacauucggga

SEQ ID NO: 755272 - RNA, 19 nt, Artificial Sequence
  Description of Artificial Sequence: Synthetic oligonucleotide
uuuauucggaaacucgaag

SEQ ID NO: 755273 - RNA, 19 nt, Artificial Sequence
  Description of Artificial Sequence: Synthetic oligonucleotide
ucggcuaugauggagagag

SEQ ID NO: 755274 - RNA, 19 nt, Artificial Sequence
  Description of Artificial Sequence: Synthetic oligonucleotide
uuauuauaauggcauagga

SEQ ID NO: 755275 - RNA, 19 nt, Artificial Sequence
  Description of Artificial Sequence: Synthetic oligonucleotide
auaggaaugaggcucucac

SEQ ID NO: 755276 - RNA, 19 nt, Artificial Sequence
  Description of Artificial Sequence: Synthetic oligonucleotide
uuuagagaggguaaaucug

SEQ ID NO: 755277 - RNA, 19 nt, Artificial Sequence
  Description of Artificial Sequence: Synthetic oligonucleotide
uuuauccuaauaauauucu

SEQ ID NO: 755278 - RNA, 19 nt, Artificial Sequence
  Description of Artificial Sequence: Synthetic oligonucleotide
uccauuaugaaaauuuaau

SEQ ID NO: 755279 - RNA, 19 nt, Artificial Sequence
  Description of Artificial Sequence: Synthetic oligonucleotide
aauauucacuauggcaacc

SEQ ID NO: 755280 - RNA, 19 nt, Artificial Sequence
  Description of Artificial Sequence: Synthetic oligonucleotide
uauuuguccucuaaagccc

SEQ ID NO: 755281 - RNA, 19 nt, Artificial Sequence
  Description of Artificial Sequence: Synthetic oligonucleotide
uuuauagccacacagccuu

SEQ ID NO: 755282 - RNA, 19 nt, Artificial Sequence
  Description of Artificial Sequence: Synthetic oligonucleotide
acguaaggcgguuuggucc

SEQ ID NO: 755283 - RNA, 19 nt, Artificial Sequence
  Description of Artificial Sequence: Synthetic oligonucleotide
gaacaagcauguuuaagag

SEQ ID NO: 755284 - RNA, 19 nt, Artificial Sequence
  Description of Artificial Sequence: Synthetic oligonucleotide
acugguauuguucagacua

SEQ ID NO: 755285 - RNA, 19 nt, Artificial Sequence
  Description of Artificial Sequence: Synthetic oligonucleotide
ucaacgaugagguaagaaa

SEQ ID NO: 755286 - RNA, 19 nt, Artificial Sequence
  Description of Artificial Sequence: Synthetic oligonucleotide
cuaaguagcuccauccucc

SEQ ID NO: 755287 - RNA, 19 nt, Artificial Sequence
  Description of Artificial Sequence: Synthetic oligonucleotide
gaacugauacguaaggcgg

SEQ ID NO: 755288 - RNA, 19 nt, Artificial Sequence
  Description of Artificial Sequence: Synthetic oligonucleotide
aauggaaccuauugugucu

SEQ ID NO: 755289 - RNA, 19 nt, Artificial Sequence
  Description of Artificial Sequence: Synthetic oligonucleotide
uuagagaggguaaaucugu

SEQ ID NO: 755290 - RNA, 19 nt, Artificial Sequence
  Description of Artificial Sequence: Synthetic oligonucleotide
caacgaugagguaagaaag

SEQ ID NO: 755291 - RNA, 19 nt, Artificial Sequence
  Description of Artificial Sequence: Synthetic oligonucleotide
uuauucggaaacucgaagu

SEQ ID NO: 755292 - RNA, 19 nt, Artificial Sequence
  Description of Artificial Sequence: Synthetic oligonucleotide
gaauguuccauuacacugg

SEQ ID NO: 755293 - RNA, 19 nt, Artificial Sequence
  Description of Artificial Sequence: Synthetic oligonucleotide
ucacaguaggauaagacau

SEQ ID NO: 755294 - RNA, 19 nt, Artificial Sequence
  Description of Artificial Sequence: Synthetic oligonucleotide
uuaaaccauuccauuauga

SEQ ID NO: 755295 - RNA, 19 nt, Artificial Sequence
  Description of Artificial Sequence: Synthetic oligonucleotide
gacaacuuggccucuaaug

SEQ ID NO: 755296 - RNA, 19 nt, Artificial Sequence
  Description of Artificial Sequence: Synthetic oligonucleotide
uggcgaaucuccaugaugu

SEQ ID NO: 755297 - RNA, 19 nt, Artificial Sequence
  Description of Artificial Sequence: Synthetic oligonucleotide
uauccuaauaauauucuuu

SEQ ID NO: 755298 - RNA, 19 nt, Artificial Sequence
  Description of Artificial Sequence: Synthetic oligonucleotide
agagcauugcuccagcaag

SEQ ID NO: 755299 - RNA, 19 nt, Artificial Sequence
  Description of Artificial Sequence: Synthetic oligonucleotide
ugauuuuccaguuuauaau

SEQ ID NO: 755300 - RNA, 19 nt, Artificial Sequence
  Description of Artificial Sequence: Synthetic oligonucleotide
aggauaagacauucgggac

SEQ ID NO: 755301 - RNA, 19 nt, Artificial Sequence
  Description of Artificial Sequence: Synthetic oligonucleotide
aaauuaaacagagcuuucu

SEQ ID NO: 755302 - RNA, 19 nt, Artificial Sequence
  Description of Artificial Sequence: Synthetic oligonucleotide
agaacauuggaauauccaa

SEQ ID NO: 755303 - RNA, 19 nt, Artificial Sequence
  Description of Artificial Sequence: Synthetic oligonucleotide
aagcccaaaagguacagaa

SEQ ID NO: 755304 - RNA, 19 nt, Artificial Sequence
  Description of Artificial Sequence: Synthetic oligonucleotide
ugccuaucaacgaugaggu

SEQ ID NO: 755305 - RNA, 19 nt, Artificial Sequence
  Description of Artificial Sequence: Synthetic oligonucleotide
uguuccauuaacuaacauu

SEQ ID NO: 755306 - RNA, 19 nt, Artificial Sequence
  Description of Artificial Sequence: Synthetic oligonucleotide
augauuuuccaguuuauaa

SEQ ID NO: 755307 - RNA, 19 nt, Artificial Sequence
  Description of Artificial Sequence: Synthetic oligonucleotide
ucaguauggauucuugauc

SEQ ID NO: 755308 - RNA, 19 nt, Artificial Sequence
  Description of Artificial Sequence: Synthetic oligonucleotide
caaggcaccaaacaccagg

SEQ ID NO: 755309 - RNA, 19 nt, Artificial Sequence
  Description of Artificial Sequence: Synthetic oligonucleotide
uugauaugacaaauuugcc

SEQ ID NO: 755310 - RNA, 19 nt, Artificial Sequence
  Description of Artificial Sequence: Synthetic oligonucleotide
guauuguaaggcuuagugc

SEQ ID NO: 755311 - RNA, 19 nt, Artificial Sequence
  Description of Artificial Sequence: Synthetic oligonucleotide
aacuacucauacugguauc

SEQ ID NO: 755312 - RNA, 19 nt, Artificial Sequence
  Description of Artificial Sequence: Synthetic oligonucleotide
uggagagagguauuguaag

SEQ ID NO: 755313 - RNA, 19 nt, Artificial Sequence
  Description of Artificial Sequence: Synthetic oligonucleotide
ugugugguuauuuugcaau

SEQ ID NO: 755314 - RNA, 19 nt, Artificial Sequence
  Description of Artificial Sequence: Synthetic oligonucleotide
caucucugcaugaacauac

SEQ ID NO: 755315 - RNA, 19 nt, Artificial Sequence
  Description of Artificial Sequence: Synthetic oligonucleotide
cuaaugcauggcucgaugg

SEQ ID NO: 755316 - RNA, 19 nt, Artificial Sequence
  Description of Artificial Sequence: Synthetic oligonucleotide
uauucggaaacucgaaguc

SEQ ID NO: 755317 - RNA, 19 nt, Artificial Sequence
  Description of Artificial Sequence: Synthetic oligonucleotide
auucggaaacucgaagucc

SEQ ID NO: 755318 - RNA, 19 nt, Artificial Sequence
  Description of Artificial Sequence: Synthetic oligonucleotide
gugccuaucaacgaugagg

SEQ ID NO: 755319 - RNA, 19 nt, Artificial Sequence
  Description of Artificial Sequence: Synthetic oligonucleotide
cuaucaacgaugagguaag

SEQ ID NO: 755320 - RNA, 19 nt, Artificial Sequence
  Description of Artificial Sequence: Synthetic oligonucleotide
ucuaaugcauggcucgaug

SEQ ID NO: 755321 - RNA, 19 nt, Artificial Sequence
  Description of Artificial Sequence: Synthetic oligonucleotide
agauacaaggcaccaaaca

SEQ ID NO: 755322 - RNA, 19 nt, Artificial Sequence
  Description of Artificial Sequence: Synthetic oligonucleotide
acuucaauuuaaaccauuc

SEQ ID NO: 755323 - RNA, 19 nt, Artificial Sequence
  Description of Artificial Sequence: Synthetic oligonucleotide
ucucgagcuucucacuugg

SEQ ID NO: 755324 - RNA, 19 nt, Artificial Sequence
  Description of Artificial Sequence: Synthetic oligonucleotide
uccaaugcuuaaaauuaca

SEQ ID NO: 755325 - RNA, 19 nt, Artificial Sequence
  Description of Artificial Sequence: Synthetic oligonucleotide
auguuuguacucucgagcu

SEQ ID NO: 755326 - RNA, 19 nt, Artificial Sequence
  Description of Artificial Sequence: Synthetic oligonucleotide
cuuacacgggacuucuugg

SEQ ID NO: 755327 - RNA, 19 nt, Artificial Sequence
  Description of Artificial Sequence: Synthetic oligonucleotide
acaaacucuauguggcauc

SEQ ID NO: 755328 - RNA, 19 nt, Artificial Sequence
  Description of Artificial Sequence: Synthetic oligonucleotide
uguacucucgagcuucuca

SEQ ID NO: 755329 - RNA, 19 nt, Artificial Sequence
  Description of Artificial Sequence: Synthetic oligonucleotide
accaaauggaaccuauugu

SEQ ID NO: 755330 - RNA, 19 nt, Artificial Sequence
  Description of Artificial Sequence: Synthetic oligonucleotide
uucggaaacucgaaguccu

SEQ ID NO: 755331 - RNA, 19 nt, Artificial Sequence
  Description of Artificial Sequence: Synthetic oligonucleotide
ugauacguaaggcgguuug

SEQ ID NO: 755332 - RNA, 19 nt, Artificial Sequence
  Description of Artificial Sequence: Synthetic oligonucleotide
auccuaauaauauucuuua

SEQ ID NO: 755333 - RNA, 19 nt, Artificial Sequence
  Description of Artificial Sequence: Synthetic oligonucleotide
cuguuacucggaaacacag

SEQ ID NO: 755334 - RNA, 19 nt, Artificial Sequence
  Description of Artificial Sequence: Synthetic oligonucleotide
agacauucgggacaacuug

SEQ ID NO: 755335 - RNA, 19 nt, Artificial Sequence
  Description of Artificial Sequence: Synthetic oligonucleotide
guauuguucagacuaggca

SEQ ID NO: 755336 - RNA, 19 nt, Artificial Sequence
  Description of Artificial Sequence: Synthetic oligonucleotide
cuuaacuaauuuauagcca

SEQ ID NO: 755337 - RNA, 19 nt, Artificial Sequence
  Description of Artificial Sequence: Synthetic oligonucleotide
cucacuuggaagaucauga

SEQ ID NO: 755338 - RNA, 19 nt, Artificial Sequence
  Description of Artificial Sequence: Synthetic oligonucleotide
aagaacauuggaauaucca

SEQ ID NO: 755339 - RNA, 19 nt, Artificial Sequence
  Description of Artificial Sequence: Synthetic oligonucleotide
uauguggcauccuucuuca

SEQ ID NO: 755340 - RNA, 19 nt, Artificial Sequence
  Description of Artificial Sequence: Synthetic oligonucleotide
guaggauaagacauucggg

SEQ ID NO: 755341 - RNA, 19 nt, Artificial Sequence
  Description of Artificial Sequence: Synthetic oligonucleotide
aauagaaucugcacccaca

SEQ ID NO: 755342 - RNA, 19 nt, Artificial Sequence
  Description of Artificial Sequence: Synthetic oligonucleotide
acucgaaaauagaaucugc

SEQ ID NO: 755343 - RNA, 19 nt, Artificial Sequence
  Description of Artificial Sequence: Synthetic oligonucleotide
ugcgaaacacugugcauag

SEQ ID NO: 755344 - RNA, 19 nt, Artificial Sequence
  Description of Artificial Sequence: Synthetic oligonucleotide
aagaacugaaacugguauu

SEQ ID NO: 755345 - RNA, 19 nt, Artificial Sequence
  Description of Artificial Sequence: Synthetic oligonucleotide
ucgaaauccucuuguacac

SEQ ID NO: 755346 - RNA, 19 nt, Artificial Sequence
  Description of Artificial Sequence: Synthetic oligonucleotide
uccugcgaaacacugugca

SEQ ID NO: 755347 - RNA, 19 nt, Artificial Sequence
  Description of Artificial Sequence: Synthetic oligonucleotide
ugcugaaccuuacacggga

SEQ ID NO: 755348 - RNA, 19 nt, Artificial Sequence
  Description of Artificial Sequence: Synthetic oligonucleotide
uguuacucggaaacacagc

SEQ ID NO: 755349 - RNA, 19 nt, Artificial Sequence
  Description of Artificial Sequence: Synthetic oligonucleotide
uguuuaagagucccagaaa

SEQ ID NO: 755350 - RNA, 19 nt, Artificial Sequence
  Description of Artificial Sequence: Synthetic oligonucleotide
auaaggauacacaaaagua

SEQ ID NO: 755351 - RNA, 19 nt, Artificial Sequence
  Description of Artificial Sequence: Synthetic oligonucleotide
gacauucgggacaacuugg

SEQ ID NO: 755352 - RNA, 19 nt, Artificial Sequence
  Description of Artificial Sequence: Synthetic oligonucleotide
ucuacauauaaaggcaaaa

SEQ ID NO: 755353 - RNA, 19 nt, Artificial Sequence
  Description of Artificial Sequence: Synthetic oligonucleotide
uguacaacuguuacagcuu

SEQ ID NO: 755354 - RNA, 19 nt, Artificial Sequence
  Description of Artificial Sequence: Synthetic oligonucleotide
gcaagugugccuaucaacg

SEQ ID NO: 755355 - RNA, 19 nt, Artificial Sequence
  Description of Artificial Sequence: Synthetic oligonucleotide
aaaguaaccuucagcgucu

SEQ ID NO: 755356 - RNA, 19 nt, Artificial Sequence
  Description of Artificial Sequence: Synthetic oligonucleotide
guaaaaguccagaaguuga

SEQ ID NO: 755357 - RNA, 19 nt, Artificial Sequence
  Description of Artificial Sequence: Synthetic oligonucleotide
uggaagcuggcgaaucucc

SEQ ID NO: 755358 - RNA, 19 nt, Artificial Sequence
  Description of Artificial Sequence: Synthetic oligonucleotide
aacugaaacugguauuguu

SEQ ID NO: 755359 - RNA, 19 nt, Artificial Sequence
  Description of Artificial Sequence: Synthetic oligonucleotide
ugcaagugugccuaucaac

SEQ ID NO: 755360 - RNA, 19 nt, Artificial Sequence
  Description of Artificial Sequence: Synthetic oligonucleotide
ccaaauggaaccuauugug

SEQ ID NO: 755361 - RNA, 19 nt, Artificial Sequence
  Description of Artificial Sequence: Synthetic oligonucleotide
uucuacauauaaaggcaaa

SEQ ID NO: 755362 - RNA, 19 nt, Artificial Sequence
  Description of Artificial Sequence: Synthetic oligonucleotide
cagaaacucagaaagaacu

SEQ ID NO: 755363 - RNA, 19 nt, Artificial Sequence
  Description of Artificial Sequence: Synthetic oligonucleotide
ugcaguaaguuucccuaca

SEQ ID NO: 755364 - RNA, 19 nt, Artificial Sequence
  Description of Artificial Sequence: Synthetic oligonucleotide
uauaauggcauaggagagu

SEQ ID NO: 755365 - RNA, 19 nt, Artificial Sequence
  Description of Artificial Sequence: Synthetic oligonucleotide
uauucacuauggcaaccug

SEQ ID NO: 755366 - RNA, 19 nt, Artificial Sequence
  Description of Artificial Sequence: Synthetic oligonucleotide
gacuccuaccaucacagga

SEQ ID NO: 755367 - RNA, 19 nt, Artificial Sequence
  Description of Artificial Sequence: Synthetic oligonucleotide
cucgaaaauagaaucugca

SEQ ID NO: 755368 - RNA, 19 nt, Artificial Sequence
  Description of Artificial Sequence: Synthetic oligonucleotide
gauacguaaggcgguuugg

SEQ ID NO: 755369 - RNA, 19 nt, Artificial Sequence
  Description of Artificial Sequence: Synthetic oligonucleotide
uuauccuaauaauauucuu

SEQ ID NO: 755370 - RNA, 19 nt, Artificial Sequence
  Description of Artificial Sequence: Synthetic oligonucleotide
aggccguugauaaggauac

SEQ ID NO: 755371 - RNA, 19 nt, Artificial Sequence
  Description of Artificial Sequence: Synthetic oligonucleotide
uuacucggaaacacagcug

SEQ ID NO: 755372 - RNA, 19 nt, Artificial Sequence
  Description of Artificial Sequence: Synthetic oligonucleotide
gaacucucuggauucgaug

SEQ ID NO: 755373 - RNA, 19 nt, Artificial Sequence
  Description of Artificial Sequence: Synthetic oligonucleotide
aaaagaaccccggccauaa

SEQ ID NO: 755374 - RNA, 19 nt, Artificial Sequence
  Description of Artificial Sequence: Synthetic oligonucleotide
ugcauaggaaugaggcucu

SEQ ID NO: 755375 - RNA, 19 nt, Artificial Sequence
  Description of Artificial Sequence: Synthetic oligonucleotide
ucucacuuggaagaucaug

SEQ ID NO: 755376 - RNA, 19 nt, Artificial Sequence
  Description of Artificial Sequence: Synthetic oligonucleotide
ugguauuguucagacuagg

SEQ ID NO: 755377 - RNA, 19 nt, Artificial Sequence
  Description of Artificial Sequence: Synthetic oligonucleotide
gauacacaaaaguaccacu

SEQ ID NO: 755378 - RNA, 19 nt, Artificial Sequence
  Description of Artificial Sequence: Synthetic oligonucleotide
guuacucggaaacacagcu

SEQ ID NO: 755379 - RNA, 19 nt, Artificial Sequence
  Description of Artificial Sequence: Synthetic oligonucleotide
gaaccuauugugucucuuc

SEQ ID NO: 755380 - RNA, 19 nt, Artificial Sequence
  Description of Artificial Sequence: Synthetic oligonucleotide
ugcucaaauauuuguccuc

SEQ ID NO: 755381 - RNA, 19 nt, Artificial Sequence
  Description of Artificial Sequence: Synthetic oligonucleotide
cuccaaugcuuaaaauuac

SEQ ID NO: 755382 - RNA, 19 nt, Artificial Sequence
  Description of Artificial Sequence: Synthetic oligonucleotide
gauaagacauucgggacaa

SEQ ID NO: 755383 - RNA, 19 nt, Artificial Sequence
  Description of Artificial Sequence: Synthetic oligonucleotide
uggcauaggagaguaacaa

SEQ ID NO: 755384 - RNA, 19 nt, Artificial Sequence
  Description of Artificial Sequence: Synthetic oligonucleotide
uaagagucccagaaagauu

SEQ ID NO: 755385 - RNA, 19 nt, Artificial Sequence
  Description of Artificial Sequence: Synthetic oligonucleotide
ugaacauacuuguuccauu

SEQ ID NO: 755386 - RNA, 19 nt, Artificial Sequence
  Description of Artificial Sequence: Synthetic oligonucleotide
cauaggagaguaacaauaa

SEQ ID NO: 755387 - RNA, 19 nt, Artificial Sequence
  Description of Artificial Sequence: Synthetic oligonucleotide
caguaggauaagacauucg

SEQ ID NO: 755388 - RNA, 19 nt, Artificial Sequence
  Description of Artificial Sequence: Synthetic oligonucleotide
gauucgauguuuucuacau

SEQ ID NO: 755389 - RNA, 19 nt, Artificial Sequence
  Description of Artificial Sequence: Synthetic oligonucleotide
guacucucgagcuucucac

SEQ ID NO: 755390 - RNA, 19 nt, Artificial Sequence
  Description of Artificial Sequence: Synthetic oligonucleotide
aguaaccuucagcgucugc

SEQ ID NO: 755391 - RNA, 19 nt, Artificial Sequence
  Description of Artificial Sequence: Synthetic oligonucleotide
agggauagcgccugcaaaa

SEQ ID NO: 755392 - RNA, 19 nt, Artificial Sequence
  Description of Artificial Sequence: Synthetic oligonucleotide
caaacucuauguggcaucc

SEQ ID NO: 755393 - RNA, 19 nt, Artificial Sequence
  Description of Artificial Sequence: Synthetic oligonucleotide
guaaccuucagcgucugca

SEQ ID NO: 755394 - RNA, 19 nt, Artificial Sequence
  Description of Artificial Sequence: Synthetic oligonucleotide
uggccucuaaugcauggcu

SEQ ID NO: 755395 - RNA, 19 nt, Artificial Sequence
  Description of Artificial Sequence: Synthetic oligonucleotide
cugguauuguucagacuag

SEQ ID NO: 755396 - RNA, 19 nt, Artificial Sequence
  Description of Artificial Sequence: Synthetic oligonucleotide
agaaccccggccauaagag

SEQ ID NO: 755397 - RNA, 19 nt, Artificial Sequence
  Description of Artificial Sequence: Synthetic oligonucleotide
gugcauaggaaugaggcuc

SEQ ID NO: 755398 - RNA, 19 nt, Artificial Sequence
  Description of Artificial Sequence: Synthetic oligonucleotide
aagccaguauaaugaagua

SEQ ID NO: 755399 - RNA, 19 nt, Artificial Sequence
  Description of Artificial Sequence: Synthetic oligonucleotide
agcuaaguagcuccauccu

SEQ ID NO: 755400 - RNA, 19 nt, Artificial Sequence
  Description of Artificial Sequence: Synthetic oligonucleotide
aaccccggccauaagagca

SEQ ID NO: 755401 - RNA, 19 nt, Artificial Sequence
  Description of Artificial Sequence: Synthetic oligonucleotide
cacuucuacaaggagcuug

SEQ ID NO: 755402 - RNA, 19 nt, Artificial Sequence
  Description of Artificial Sequence: Synthetic oligonucleotide
auggaaccuauugugucuc

SEQ ID NO: 755403 - RNA, 19 nt, Artificial Sequence
  Description of Artificial Sequence: Synthetic oligonucleotide
uauggcaaccugugugucu

SEQ ID NO: 755404 - RNA, 19 nt, Artificial Sequence
  Description of Artificial Sequence: Synthetic oligonucleotide
auauaugauuuuccaguuu

SEQ ID NO: 755405 - RNA, 19 nt, Artificial Sequence
  Description of Artificial Sequence: Synthetic oligonucleotide
cauaagagcagcagauuaa

SEQ ID NO: 755406 - RNA, 19 nt, Artificial Sequence
  Description of Artificial Sequence: Synthetic oligonucleotide
auaauggcauaggagagua

SEQ ID NO: 755407 - RNA, 19 nt, Artificial Sequence
  Description of Artificial Sequence: Synthetic oligonucleotide
ugugccuaucaacgaugag

SEQ ID NO: 755408 - RNA, 19 nt, Artificial Sequence
  Description of Artificial Sequence: Synthetic oligonucleotide
gccucuaaugcauggcucg

SEQ ID NO: 755409 - RNA, 19 nt, Artificial Sequence
  Description of Artificial Sequence: Synthetic oligonucleotide
uggauucgauguuuucuac

SEQ ID NO: 755410 - RNA, 19 nt, Artificial Sequence
  Description of Artificial Sequence: Synthetic oligonucleotide
aaagaaccccggccauaag

SEQ ID NO: 755411 - RNA, 19 nt, Artificial Sequence
  Description of Artificial Sequence: Synthetic oligonucleotide
uacugguaucuguugugca

SEQ ID NO: 755412 - RNA, 19 nt, Artificial Sequence
  Description of Artificial Sequence: Synthetic oligonucleotide
aguccagaaguugaagaca

SEQ ID NO: 755413 - RNA, 19 nt, Artificial Sequence
  Description of Artificial Sequence: Synthetic oligonucleotide
ggauaagacauucgggaca

SEQ ID NO: 755414 - RNA, 19 nt, Artificial Sequence
  Description of Artificial Sequence: Synthetic oligonucleotide
caacagaacugauacguaa

SEQ ID NO: 755415 - RNA, 19 nt, Artificial Sequence
  Description of Artificial Sequence: Synthetic oligonucleotide
agcuaauaguuuagagagg

SEQ ID NO: 755416 - RNA, 19 nt, Artificial Sequence
  Description of Artificial Sequence: Synthetic oligonucleotide
gaccccgacagguucacca

SEQ ID NO: 755417 - RNA, 19 nt, Artificial Sequence
  Description of Artificial Sequence: Synthetic oligonucleotide
uaaccuucagcgucugcaa

SEQ ID NO: 755418 - RNA, 19 nt, Artificial Sequence
  Description of Artificial Sequence: Synthetic oligonucleotide
auaguuuagagaggguaaa

SEQ ID NO: 755419 - RNA, 19 nt, Artificial Sequence
  Description of Artificial Sequence: Synthetic oligonucleotide
aggagcuugccagauuguc

SEQ ID NO: 755420 - RNA, 19 nt, Artificial Sequence
  Description of Artificial Sequence: Synthetic oligonucleotide
uucagacuaggcacugaaa

SEQ ID NO: 755421 - RNA, 19 nt, Artificial Sequence
  Description of Artificial Sequence: Synthetic oligonucleotide
gguuauuuugcaaucuaca

SEQ ID NO: 755422 - RNA, 19 nt, Artificial Sequence
  Description of Artificial Sequence: Synthetic oligonucleotide
cuuuauucggaaacucgaa

SEQ ID NO: 755423 - RNA, 19 nt, Artificial Sequence
  Description of Artificial Sequence: Synthetic oligonucleotide
gugcacucagaccagaucu

SEQ ID NO: 755424 - RNA, 19 nt, Artificial Sequence
  Description of Artificial Sequence: Synthetic oligonucleotide
acaauguagacagcauaga

SEQ ID NO: 755425 - RNA, 19 nt, Artificial Sequence
  Description of Artificial Sequence: Synthetic oligonucleotide
uacguaaggcgguuugguc

SEQ ID NO: 755426 - RNA, 19 nt, Artificial Sequence
  Description of Artificial Sequence: Synthetic oligonucleotide
aggaucccaauuauuauaa

SEQ ID NO: 755427 - RNA, 19 nt, Artificial Sequence
  Description of Artificial Sequence: Synthetic oligonucleotide
cuggcgaaucuccaugaug

SEQ ID NO: 755428 - RNA, 19 nt, Artificial Sequence
  Description of Artificial Sequence: Synthetic oligonucleotide
ugacuccuaccaucacagg

SEQ ID NO: 755429 - RNA, 19 nt, Artificial Sequence
  Description of Artificial Sequence: Synthetic oligonucleotide
ugaaccuuacacgggacuu

SEQ ID NO: 755430 - RNA, 19 nt, Artificial Sequence
  Description of Artificial Sequence: Synthetic oligonucleotide
cacuggacuacagacaaca

SEQ ID NO: 755431 - RNA, 19 nt, Artificial Sequence
  Description of Artificial Sequence: Synthetic oligonucleotide
ugccagauugucucuucac

SEQ ID NO: 755432 - RNA, 19 nt, Artificial Sequence
  Description of Artificial Sequence: Synthetic oligonucleotide
caugucggcuaugauggag

SEQ ID NO: 755433 - RNA, 19 nt, Artificial Sequence
  Description of Artificial Sequence: Synthetic oligonucleotide
guaaggcuuagugcaagug

SEQ ID NO: 755434 - RNA, 19 nt, Artificial Sequence
  Description of Artificial Sequence: Synthetic oligonucleotide
accagaucuuugcucaaau

SEQ ID NO: 755435 - RNA, 19 nt, Artificial Sequence
  Description of Artificial Sequence: Synthetic oligonucleotide
accuauugugucucuucca

SEQ ID NO: 755436 - RNA, 19 nt, Artificial Sequence
  Description of Artificial Sequence: Synthetic oligonucleotide
uguuccaaugaggccguug

SEQ ID NO: 755437 - RNA, 19 nt, Artificial Sequence
  Description of Artificial Sequence: Synthetic oligonucleotide
ggauacacaaaaguaccac

SEQ ID NO: 755438 - RNA, 19 nt, Artificial Sequence
  Description of Artificial Sequence: Synthetic oligonucleotide
cauggcucgauggaagcug

SEQ ID NO: 755439 - RNA, 19 nt, Artificial Sequence
  Description of Artificial Sequence: Synthetic oligonucleotide
ucuccacuguuacucggaa

SEQ ID NO: 755440 - RNA, 19 nt, Artificial Sequence
  Description of Artificial Sequence: Synthetic oligonucleotide
gagguauuguaaggcuuag

SEQ ID NO: 755441 - RNA, 19 nt, Artificial Sequence
  Description of Artificial Sequence: Synthetic oligonucleotide
guuacagcuugucacauuu

SEQ ID NO: 755442 - RNA, 19 nt, Artificial Sequence
  Description of Artificial Sequence: Synthetic oligonucleotide
aaggcgguuugguccuuug

SEQ ID NO: 755443 - RNA, 19 nt, Artificial Sequence
  Description of Artificial Sequence: Synthetic oligonucleotide
ugauggagagagguauugu

SEQ ID NO: 755444 - RNA, 19 nt, Artificial Sequence
  Description of Artificial Sequence: Synthetic oligonucleotide
uuguuccauuaacuaacau

SEQ ID NO: 755445 - RNA, 19 nt, Artificial Sequence
  Description of Artificial Sequence: Synthetic oligonucleotide
uguuuguacucucgagcuu

SEQ ID NO: 755446 - RNA, 19 nt, Artificial Sequence
  Description of Artificial Sequence: Synthetic oligonucleotide
agauugucucuucacugua

SEQ ID NO: 755447 - RNA, 19 nt, Artificial Sequence
  Description of Artificial Sequence: Synthetic oligonucleotide
gaaccccggccauaagagc

SEQ ID NO: 755448 - RNA, 19 nt, Artificial Sequence
  Description of Artificial Sequence: Synthetic oligonucleotide
ccagauugucucuucacug

SEQ ID NO: 755449 - RNA, 19 nt, Artificial Sequence
  Description of Artificial Sequence: Synthetic oligonucleotide
cuuagugcaagugugccua

SEQ ID NO: 755450 - RNA, 19 nt, Artificial Sequence
  Description of Artificial Sequence: Synthetic oligonucleotide
gcaguaaguuucccuacag

SEQ ID NO: 755451 - RNA, 19 nt, Artificial Sequence
  Description of Artificial Sequence: Synthetic oligonucleotide
auacguaaggcgguuuggu

SEQ ID NO: 755452 - RNA, 19 nt, Artificial Sequence
  Description of Artificial Sequence: Synthetic oligonucleotide
caaauggaaccuauugugu

SEQ ID NO: 755453 - RNA, 19 nt, Artificial Sequence
  Description of Artificial Sequence: Synthetic oligonucleotide
aggauacacaaaaguacca

SEQ ID NO: 755454 - RNA, 19 nt, Artificial Sequence
  Description of Artificial Sequence: Synthetic oligonucleotide
gcaacuggacugcacaaac

SEQ ID NO: 755455 - RNA, 19 nt, Artificial Sequence
  Description of Artificial Sequence: Synthetic oligonucleotide
caucacaggaucccaauua

SEQ ID NO: 755456 - RNA, 19 nt, Artificial Sequence
  Description of Artificial Sequence: Synthetic oligonucleotide
cauuggaauauccaauuau

SEQ ID NO: 755457 - RNA, 19 nt, Artificial Sequence
  Description of Artificial Sequence: Synthetic oligonucleotide
aggcgguuugguccuuugg

SEQ ID NO: 755458 - RNA, 19 nt, Artificial Sequence
  Description of Artificial Sequence: Synthetic oligonucleotide
caaagaacugaaacuggua

SEQ ID NO: 755459 - RNA, 19 nt, Artificial Sequence
  Description of Artificial Sequence: Synthetic oligonucleotide
gaacauuggaauauccaau

SEQ ID NO: 755460 - RNA, 19 nt, Artificial Sequence
  Description of Artificial Sequence: Synthetic oligonucleotide
ugaccaaauggaaccuauu

SEQ ID NO: 755461 - RNA, 19 nt, Artificial Sequence
  Description of Artificial Sequence: Synthetic oligonucleotide
acacgggacuucuugggaa

SEQ ID NO: 755462 - RNA, 19 nt, Artificial Sequence
  Description of Artificial Sequence: Synthetic oligonucleotide
cuggauucgauguuuucua

SEQ ID NO: 755463 - RNA, 19 nt, Artificial Sequence
  Description of Artificial Sequence: Synthetic oligonucleotide
gaagaucaugaaacuucac

SEQ ID NO: 755464 - RNA, 19 nt, Artificial Sequence
  Description of Artificial Sequence: Synthetic oligonucleotide
cccaauguuuguacucucg

SEQ ID NO: 755465 - RNA, 19 nt, Artificial Sequence
  Description of Artificial Sequence: Synthetic oligonucleotide
caaugaggccguugauaag

SEQ ID NO: 755466 - RNA, 19 nt, Artificial Sequence
  Description of Artificial Sequence: Synthetic oligonucleotide
agcagacaugaggaaaaug

SEQ ID NO: 755467 - RNA, 19 nt, Artificial Sequence
  Description of Artificial Sequence: Synthetic oligonucleotide
aucaacgaugagguaagaa

SEQ ID NO: 755468 - RNA, 19 nt, Artificial Sequence
  Description of Artificial Sequence: Synthetic oligonucleotide
uugcaugcacaugucggcu

SEQ ID NO: 755469 - RNA, 19 nt, Artificial Sequence
  Description of Artificial Sequence: Synthetic oligonucleotide
acucucgagcuucucacuu

SEQ ID NO: 755470 - RNA, 19 nt, Artificial Sequence
  Description of Artificial Sequence: Synthetic oligonucleotide
uacuuggguugcaguaagu

SEQ ID NO: 755471 - RNA, 19 nt, Artificial Sequence
  Description of Artificial Sequence: Synthetic oligonucleotide
agagguauuguaaggcuua

SEQ ID NO: 755472 - RNA, 19 nt, Artificial Sequence
  Description of Artificial Sequence: Synthetic oligonucleotide
uacucucgagcuucucacu

SEQ ID NO: 755473 - RNA, 19 nt, Artificial Sequence
  Description of Artificial Sequence: Synthetic oligonucleotide
ggaagaucaugaaacuuca

SEQ ID NO: 755474 - RNA, 19 nt, Artificial Sequence
  Description of Artificial Sequence: Synthetic oligonucleotide
cagauuaaacagaccuaca

SEQ ID NO: 755475 - RNA, 19 nt, Artificial Sequence
  Description of Artificial Sequence: Synthetic oligonucleotide
gaggccguugauaaggaua

SEQ ID NO: 755476 - RNA, 19 nt, Artificial Sequence
  Description of Artificial Sequence: Synthetic oligonucleotide
agcauugcuccagcaagug

SEQ ID NO: 755477 - RNA, 19 nt, Artificial Sequence
  Description of Artificial Sequence: Synthetic oligonucleotide
augcuuaaaauuacagcua

SEQ ID NO: 755478 - RNA, 19 nt, Artificial Sequence
  Description of Artificial Sequence: Synthetic oligonucleotide
acuuggguugcaguaaguu

SEQ ID NO: 755479 - RNA, 19 nt, Artificial Sequence
  Description of Artificial Sequence: Synthetic oligonucleotide
ggauucgauguuuucuaca

SEQ ID NO: 755480 - RNA, 19 nt, Artificial Sequence
  Description of Artificial Sequence: Synthetic oligonucleotide
ugcacucagaccagaucuu

SEQ ID NO: 755481 - RNA, 19 nt, Artificial Sequence
  Description of Artificial Sequence: Synthetic oligonucleotide
ccuccaaugcuuaaaauua

SEQ ID NO: 755482 - RNA, 19 nt, Artificial Sequence
  Description of Artificial Sequence: Synthetic oligonucleotide
uccucgaaauccucuugua

SEQ ID NO: 755483 - RNA, 19 nt, Artificial Sequence
  Description of Artificial Sequence: Synthetic oligonucleotide
gaaccuuacacgggacuuc

SEQ ID NO: 755484 - RNA, 19 nt, Artificial Sequence
  Description of Artificial Sequence: Synthetic oligonucleotide
caacuguuacagcuuguca

SEQ ID NO: 755485 - RNA, 19 nt, Artificial Sequence
  Description of Artificial Sequence: Synthetic oligonucleotide
agaacuacucauacuggua

SEQ ID NO: 755486 - RNA, 19 nt, Artificial Sequence
  Description of Artificial Sequence: Synthetic oligonucleotide
uguuacagcuugucacauu

SEQ ID NO: 755487 - RNA, 19 nt, Artificial Sequence
  Description of Artificial Sequence: Synthetic oligonucleotide
uccagaaguugaagacaaa

SEQ ID NO: 755488 - RNA, 19 nt, Artificial Sequence
  Description of Artificial Sequence: Synthetic oligonucleotide
uacaaggagcuugccagau

SEQ ID NO: 755489 - RNA, 19 nt, Artificial Sequence
  Description of Artificial Sequence: Synthetic oligonucleotide
gcuaaguagcuccauccuc

SEQ ID NO: 755490 - RNA, 19 nt, Artificial Sequence
  Description of Artificial Sequence: Synthetic oligonucleotide
ccuuacacgggacuucuug

SEQ ID NO: 755491 - RNA, 19 nt, Artificial Sequence
  Description of Artificial Sequence: Synthetic oligonucleotide
ugcaugcacaugucggcua

SEQ ID NO: 755492 - RNA, 19 nt, Artificial Sequence
  Description of Artificial Sequence: Synthetic oligonucleotide
cuccugcgaaacacugugc

SEQ ID NO: 755493 - RNA, 19 nt, Artificial Sequence
  Description of Artificial Sequence: Synthetic oligonucleotide
agcaagugaccaaauggaa

SEQ ID NO: 755494 - RNA, 19 nt, Artificial Sequence
  Description of Artificial Sequence: Synthetic oligonucleotide
uucugacuccuaccaucac

SEQ ID NO: 755495 - RNA, 19 nt, Artificial Sequence
  Description of Artificial Sequence: Synthetic oligonucleotide
ccuaucaacgaugagguaa

SEQ ID NO: 755496 - RNA, 19 nt, Artificial Sequence
  Description of Artificial Sequence: Synthetic oligonucleotide
aaguaaccuucagcgucug

SEQ ID NO: 755497 - RNA, 19 nt, Artificial Sequence
  Description of Artificial Sequence: Synthetic oligonucleotide
ugagugcacucagaccaga

SEQ ID NO: 755498 - RNA, 19 nt, Artificial Sequence
  Description of Artificial Sequence: Synthetic oligonucleotide
aucugucuccacuguuacu

SEQ ID NO: 755499 - RNA, 19 nt, Artificial Sequence
  Description of Artificial Sequence: Synthetic oligonucleotide
cugcaaggauuaaaguaaa

SEQ ID NO: 755500 - RNA, 19 nt, Artificial Sequence
  Description of Artificial Sequence: Synthetic oligonucleotide
gagcaacuggacugcacaa

SEQ ID NO: 755501 - RNA, 19 nt, Artificial Sequence
  Description of Artificial Sequence: Synthetic oligonucleotide
uggaaccuauugugucucu

SEQ ID NO: 755502 - RNA, 19 nt, Artificial Sequence
  Description of Artificial Sequence: Synthetic oligonucleotide
ggcuuagugcaagugugcc

SEQ ID NO: 755503 - RNA, 19 nt, Artificial Sequence
  Description of Artificial Sequence: Synthetic oligonucleotide
uaguuccagugauuucauc

SEQ ID NO: 755504 - RNA, 19 nt, Artificial Sequence
  Description of Artificial Sequence: Synthetic oligonucleotide
gccguugauaaggauacac

SEQ ID NO: 755505 - RNA, 19 nt, Artificial Sequence
  Description of Artificial Sequence: Synthetic oligonucleotide
ggcucgauggaagcuggcg

SEQ ID NO: 755506 - RNA, 19 nt, Artificial Sequence
  Description of Artificial Sequence: Synthetic oligonucleotide
cagauugucucuucacugu

SEQ ID NO: 755507 - RNA, 19 nt, Artificial Sequence
  Description of Artificial Sequence: Synthetic oligonucleotide
cuacaaggagcuugccaga

SEQ ID NO: 755508 - RNA, 19 nt, Artificial Sequence
  Description of Artificial Sequence: Synthetic oligonucleotide
uaucaacgaugagguaaga

SEQ ID NO: 755509 - RNA, 19 nt, Artificial Sequence
  Description of Artificial Sequence: Synthetic oligonucleotide
uuagugcaagugugccuau

SEQ ID NO: 755510 - RNA, 19 nt, Artificial Sequence
  Description of Artificial Sequence: Synthetic oligonucleotide
gcgaaucuccaugauguug

SEQ ID NO: 755511 - RNA, 19 nt, Artificial Sequence
  Description of Artificial Sequence: Synthetic oligonucleotide
auaagacauucgggacaac

SEQ ID NO: 755512 - RNA, 19 nt, Artificial Sequence
  Description of Artificial Sequence: Synthetic oligonucleotide
uuauagccacacagccuuu

SEQ ID NO: 755513 - RNA, 19 nt, Artificial Sequence
  Description of Artificial Sequence: Synthetic oligonucleotide
cguugauaaggauacacaa

SEQ ID NO: 755514 - RNA, 19 nt, Artificial Sequence
  Description of Artificial Sequence: Synthetic oligonucleotide
cugcgaaacacugugcaua

SEQ ID NO: 755515 - RNA, 19 nt, Artificial Sequence
  Description of Artificial Sequence: Synthetic oligonucleotide
acugauacguaaggcgguu

SEQ ID NO: 755516 - RNA, 19 nt, Artificial Sequence
  Description of Artificial Sequence: Synthetic oligonucleotide
uggcucgauggaagcuggc

SEQ ID NO: 755517 - RNA, 19 nt, Artificial Sequence
  Description of Artificial Sequence: Synthetic oligonucleotide
gcucgauggaagcuggcga

SEQ ID NO: 755518 - RNA, 19 nt, Artificial Sequence
  Description of Artificial Sequence: Synthetic oligonucleotide
gugugccuaucaacgauga

SEQ ID NO: 755519 - RNA, 19 nt, Artificial Sequence
  Description of Artificial Sequence: Synthetic oligonucleotide
cucggaaacacagcugcaa

SEQ ID NO: 755520 - RNA, 19 nt, Artificial Sequence
  Description of Artificial Sequence: Synthetic oligonucleotide
agaccagaucuuugcucaa

SEQ ID NO: 755521 - RNA, 19 nt, Artificial Sequence
  Description of Artificial Sequence: Synthetic oligonucleotide
ccguugauaaggauacaca

SEQ ID NO: 755522 - RNA, 19 nt, Artificial Sequence
  Description of Artificial Sequence: Synthetic oligonucleotide
cagacaacagcagcuaagu

SEQ ID NO: 755523 - RNA, 19 nt, Artificial Sequence
  Description of Artificial Sequence: Synthetic oligonucleotide
cgguuugguccuuuggagc

SEQ ID NO: 755524 - RNA, 19 nt, Artificial Sequence
  Description of Artificial Sequence: Synthetic oligonucleotide
uagugcaagugugccuauc

SEQ ID NO: 755525 - RNA, 19 nt, Artificial Sequence
  Description of Artificial Sequence: Synthetic oligonucleotide
cagagcuuucuuaacuaau

SEQ ID NO: 755526 - RNA, 19 nt, Artificial Sequence
  Description of Artificial Sequence: Synthetic oligonucleotide
cuaccaucacaggauccca

SEQ ID NO: 755527 - RNA, 19 nt, Artificial Sequence
  Description of Artificial Sequence: Synthetic oligonucleotide
cagggauagcgccugcaaa

SEQ ID NO: 755528 - RNA, 19 nt, Artificial Sequence
  Description of Artificial Sequence: Synthetic oligonucleotide
agaccccgacagguucacc

SEQ ID NO: 755529 - RNA, 19 nt, Artificial Sequence
  Description of Artificial Sequence: Synthetic oligonucleotide
gaccagaucuuugcucaaa

SEQ ID NO: 755530 - RNA, 19 nt, Artificial Sequence
  Description of Artificial Sequence: Synthetic oligonucleotide
caguaaguuucccuacagu

SEQ ID NO: 755531 - RNA, 19 nt, Artificial Sequence
  Description of Artificial Sequence: Synthetic oligonucleotide
guauggauucuugaucuuu

SEQ ID NO: 755532 - RNA, 19 nt, Artificial Sequence
  Description of Artificial Sequence: Synthetic oligonucleotide
gccagauugucucuucacu

SEQ ID NO: 755533 - RNA, 19 nt, Artificial Sequence
  Description of Artificial Sequence: Synthetic oligonucleotide
guuugguccuuuggagcaa

SEQ ID NO: 755534 - RNA, 19 nt, Artificial Sequence
  Description of Artificial Sequence: Synthetic oligonucleotide
ggccucuaaugcauggcuc

SEQ ID NO: 755535 - RNA, 19 nt, Artificial Sequence
  Description of Artificial Sequence: Synthetic oligonucleotide
gcuuagugcaagugugccu

SEQ ID NO: 755536 - RNA, 19 nt, Artificial Sequence
  Description of Artificial Sequence: Synthetic oligonucleotide
cucgagcuucucacuugga

SEQ ID NO: 755537 - RNA, 19 nt, Artificial Sequence
  Description of Artificial Sequence: Synthetic oligonucleotide
gcugaaccuuacacgggac

SEQ ID NO: 755538 - RNA, 19 nt, Artificial Sequence
  Description of Artificial Sequence: Synthetic oligonucleotide
gcaaccugugugucugaaa

SEQ ID NO: 755539 - RNA, 19 nt, Artificial Sequence
  Description of Artificial Sequence: Synthetic oligonucleotide
gggacaacuuggccucuaa

SEQ ID NO: 755540 - RNA, 19 nt, Artificial Sequence
  Description of Artificial Sequence: Synthetic oligonucleotide
cacgggacuucuugggaau

SEQ ID NO: 755541 - RNA, 19 nt, Artificial Sequence
  Description of Artificial Sequence: Synthetic oligonucleotide
acgggacuucuugggaauu

SEQ ID NO: 755542 - RNA, 19 nt, Artificial Sequence
  Description of Artificial Sequence: Synthetic oligonucleotide
ggaucccaauuauuauaau

SEQ ID NO: 755543 - RNA, 19 nt, Artificial Sequence
  Description of Artificial Sequence: Synthetic oligonucleotide
ggacaacuuggccucuaau

SEQ ID NO: 755544 - RNA, 19 nt, Artificial Sequence
  Description of Artificial Sequence: Synthetic oligonucleotide
cucuaaugcauggcucgau

SEQ ID NO: 755545 - RNA, 19 nt, Artificial Sequence
  Description of Artificial Sequence: Synthetic oligonucleotide
cguaaggcgguuugguccu

SEQ ID NO: 755546 - RNA, 19 nt, Artificial Sequence
  Description of Artificial Sequence: Synthetic oligonucleotide
ggaaccuauugugucucuu

SEQ ID NO: 755547 - RNA, 19 nt, Artificial Sequence
  Description of Artificial Sequence: Synthetic oligonucleotide
gccuaucaacgaugaggua

SEQ ID NO: 755548 - RNA, 19 nt, Artificial Sequence
  Description of Artificial Sequence: Synthetic oligonucleotide
cugauacguaaggcgguuu

SEQ ID NO: 755549 - RNA, 19 nt, Artificial Sequence
  Description of Artificial Sequence: Synthetic oligonucleotide
gcauggcucgauggaagcu

SEQ ID NO: 755550 - RNA, 19 nt, Artificial Sequence
  Description of Artificial Sequence: Synthetic oligonucleotide
ggcgaaucuccaugauguu

SEQ ID NO: 755551 - RNA, 19 nt, Artificial Sequence
  Description of Artificial Sequence: Synthetic oligonucleotide
gcuggcgaaucuccaugau

SEQ ID NO: 755552 - RNA, 19 nt, Artificial Sequence
  Description of Artificial Sequence: Synthetic oligonucleotide
ggccguugauaaggauaca

SEQ ID NO: 755553 - RNA, 19 nt, Artificial Sequence
  Description of Artificial Sequence: Synthetic oligonucleotide
gcacucagaccagaucuuu

SEQ ID NO: 755554 - RNA, 19 nt, Artificial Sequence
  Description of Artificial Sequence: Synthetic oligonucleotide
gcuugccagauugucucuu

SEQ ID NO: 755555 - RNA, 19 nt, Artificial Sequence
  Description of Artificial Sequence: Synthetic oligonucleotide
guaaggcgguuugguccuu

SEQ ID NO: 755556 - RNA, 19 nt, Artificial Sequence
  Description of Artificial Sequence: Synthetic oligonucleotide
cgggacuucuugggaauuu

SEQ ID NO: 755557 - RNA, 19 nt, Artificial Sequence
  Description of Artificial Sequence: Synthetic oligonucleotide
uuaccaaugacuaacacug

SEQ ID NO: 755558 - RNA, 19 nt, Artificial Sequence
  Description of Artificial Sequence: Synthetic oligonucleotide
aaauuaagaagcgaaggcc

SEQ ID NO: 755559 - RNA, 19 nt, Artificial Sequence
  Description of Artificial Sequence: Synthetic oligonucleotide
aaauauacguaguauggag

SEQ ID NO: 755560 - RNA, 19 nt, Artificial Sequence
  Description of Artificial Sequence: Synthetic oligonucleotide
agucauaucucucagauca

SEQ ID NO: 755561 - RNA, 19 nt, Artificial Sequence
  Description of Artificial Sequence: Synthetic oligonucleotide
caaacuuucaaucugggag

SEQ ID NO: 755562 - RNA, 19 nt, Artificial Sequence
  Description of Artificial Sequence: Synthetic oligonucleotide
uaaauuaagaagcgaaggc

SEQ ID NO: 755563 - RNA, 19 nt, Artificial Sequence
  Description of Artificial Sequence: Synthetic oligonucleotide
aauagcacaucuaagaaug

SEQ ID NO: 755564 - RNA, 19 nt, Artificial Sequence
  Description of Artificial Sequence: Synthetic oligonucleotide
aaugaaaguagucaauggu

SEQ ID NO: 755565 - RNA, 19 nt, Artificial Sequence
  Description of Artificial Sequence: Synthetic oligonucleotide
aaagaagcugccgagggcc

SEQ ID NO: 755566 - RNA, 19 nt, Artificial Sequence
  Description of Artificial Sequence: Synthetic oligonucleotide
uuuugagccaccuuuagca

SEQ ID NO: 755567 - RNA, 19 nt, Artificial Sequence
  Description of Artificial Sequence: Synthetic oligonucleotide
agaucagugggcuuuaaac

SEQ ID NO: 755568 - RNA, 19 nt, Artificial Sequence
  Description of Artificial Sequence: Synthetic oligonucleotide
uacgacuucacuacgaggc

SEQ ID NO: 755569 - RNA, 19 nt, Artificial Sequence
  Description of Artificial Sequence: Synthetic oligonucleotide
acagcggucaucucgauac

SEQ ID NO: 755570 - RNA, 19 nt, Artificial Sequence
  Description of Artificial Sequence: Synthetic oligonucleotide
uugacgaucacuuggagcu

SEQ ID NO: 755571 - RNA, 19 nt, Artificial Sequence
  Description of Artificial Sequence: Synthetic oligonucleotide
agagcuacgacuucacuac

SEQ ID NO: 755572 - RNA, 19 nt, Artificial Sequence
  Description of Artificial Sequence: Synthetic oligonucleotide
ucucuaucagaauaggaag

SEQ ID NO: 755573 - RNA, 19 nt, Artificial Sequence
  Description of Artificial Sequence: Synthetic oligonucleotide
uauuuugacuuguauagca

SEQ ID NO: 755574 - RNA, 19 nt, Artificial Sequence
  Description of Artificial Sequence: Synthetic oligonucleotide
aucucgauacccucgaucg

SEQ ID NO: 755575 - RNA, 19 nt, Artificial Sequence
  Description of Artificial Sequence: Synthetic oligonucleotide
auugacgaucacuuggagc

SEQ ID NO: 755576 - RNA, 19 nt, Artificial Sequence
  Description of Artificial Sequence: Synthetic oligonucleotide
ucaaagaagcugccgaggg

SEQ ID NO: 755577 - RNA, 19 nt, Artificial Sequence
  Description of Artificial Sequence: Synthetic oligonucleotide
ucacgggacaguaagcucg

SEQ ID NO: 755578 - RNA, 19 nt, Artificial Sequence
  Description of Artificial Sequence: Synthetic oligonucleotide
auauacguaguauggagag

SEQ ID NO: 755579 - RNA, 19 nt, Artificial Sequence
  Description of Artificial Sequence: Synthetic oligonucleotide
aaaguuaaaacuacccucu

SEQ ID NO: 755580 - RNA, 19 nt, Artificial Sequence
  Description of Artificial Sequence: Synthetic oligonucleotide
uguuaauagcacaucuaag

SEQ ID NO: 755581 - RNA, 19 nt, Artificial Sequence
  Description of Artificial Sequence: Synthetic oligonucleotide
uauagcaccgucauuuaca

SEQ ID NO: 755582 - RNA, 19 nt, Artificial Sequence
  Description of Artificial Sequence: Synthetic oligonucleotide
caaacauucgcuuauguga

SEQ ID NO: 755583 - RNA, 19 nt, Artificial Sequence
  Description of Artificial Sequence: Synthetic oligonucleotide
aauuaagaagcgaaggcca

SEQ ID NO: 755584 - RNA, 19 nt, Artificial Sequence
  Description of Artificial Sequence: Synthetic oligonucleotide
augacuaacacugaugucu

SEQ ID NO: 755585 - RNA, 19 nt, Artificial Sequence
  Description of Artificial Sequence: Synthetic oligonucleotide
uaaaaggccugauauuaag

SEQ ID NO: 755586 - RNA, 19 nt, Artificial Sequence
  Description of Artificial Sequence: Synthetic oligonucleotide
gauccuggcgcucaggucc

SEQ ID NO: 755587 - RNA, 19 nt, Artificial Sequence
  Description of Artificial Sequence: Synthetic oligonucleotide
ucaaacauucgcuuaugug

SEQ ID NO: 755588 - RNA, 19 nt, Artificial Sequence
  Description of Artificial Sequence: Synthetic oligonucleotide
aaaauauacguaguaugga

SEQ ID NO: 755589 - RNA, 19 nt, Artificial Sequence
  Description of Artificial Sequence: Synthetic oligonucleotide
aagaucagcgacgggagac

SEQ ID NO: 755590 - RNA, 19 nt, Artificial Sequence
  Description of Artificial Sequence: Synthetic oligonucleotide
auaucuggagguucauccc

SEQ ID NO: 755591 - RNA, 19 nt, Artificial Sequence
  Description of Artificial Sequence: Synthetic oligonucleotide
aacuacccucugcuuaucc

SEQ ID NO: 755592 - RNA, 19 nt, Artificial Sequence
  Description of Artificial Sequence: Synthetic oligonucleotide
aggauuugcacucggagca

SEQ ID NO: 755593 - RNA, 19 nt, Artificial Sequence
  Description of Artificial Sequence: Synthetic oligonucleotide
acgaugaggauuugcacuc

SEQ ID NO: 755594 - RNA, 19 nt, Artificial Sequence
  Description of Artificial Sequence: Synthetic oligonucleotide
aaccacguugccauugugc

SEQ ID NO: 755595 - RNA, 19 nt, Artificial Sequence
  Description of Artificial Sequence: Synthetic oligonucleotide
agcaccgucauuuacaguu

SEQ ID NO: 755596 - RNA, 19 nt, Artificial Sequence
  Description of Artificial Sequence: Synthetic oligonucleotide
aauauacguaguauggaga

SEQ ID NO: 755597 - RNA, 19 nt, Artificial Sequence
  Description of Artificial Sequence: Synthetic oligonucleotide
ugguagaccggaaagggcu

SEQ ID NO: 755598 - RNA, 19 nt, Artificial Sequence
  Description of Artificial Sequence: Synthetic oligonucleotide
uguacauuccuuguaacaa

SEQ ID NO: 755599 - RNA, 19 nt, Artificial Sequence
  Description of Artificial Sequence: Synthetic oligonucleotide
gauuaaaauauacguagua

SEQ ID NO: 755600 - RNA, 19 nt, Artificial Sequence
  Description of Artificial Sequence: Synthetic oligonucleotide
cauucaaacuuucaaucug

SEQ ID NO: 755601 - RNA, 19 nt, Artificial Sequence
  Description of Artificial Sequence: Synthetic oligonucleotide
acauucgcuuaugugaggc

SEQ ID NO: 755602 - RNA, 19 nt, Artificial Sequence
  Description of Artificial Sequence: Synthetic oligonucleotide
auuaaaaggccugauauua

SEQ ID NO: 755603 - RNA, 19 nt, Artificial Sequence
  Description of Artificial Sequence: Synthetic oligonucleotide
ucggacguuaccaaugacu

SEQ ID NO: 755604 - RNA, 19 nt, Artificial Sequence
  Description of Artificial Sequence: Synthetic oligonucleotide
ucgucaaagaagcugccga

SEQ ID NO: 755605 - RNA, 19 nt, Artificial Sequence
  Description of Artificial Sequence: Synthetic oligonucleotide
ucuuccgggacgcacgucc

SEQ ID NO: 755606 - RNA, 19 nt, Artificial Sequence
  Description of Artificial Sequence: Synthetic oligonucleotide
ucauuuacaguuccucuuc

SEQ ID NO: 755607 - RNA, 19 nt, Artificial Sequence
  Description of Artificial Sequence: Synthetic oligonucleotide
ucagucgugucucuaucag

SEQ ID NO: 755608 - RNA, 19 nt, Artificial Sequence
  Description of Artificial Sequence: Synthetic oligonucleotide
gacguuaccaaugacuaac

SEQ ID NO: 755609 - RNA, 19 nt, Artificial Sequence
  Description of Artificial Sequence: Synthetic oligonucleotide
uauuaaguggcacgaguaa

SEQ ID NO: 755610 - RNA, 19 nt, Artificial Sequence
  Description of Artificial Sequence: Synthetic oligonucleotide
uugccguuaggcaucgggg

SEQ ID NO: 755611 - RNA, 19 nt, Artificial Sequence
  Description of Artificial Sequence: Synthetic oligonucleotide
uaauagcacaucuaagaau

SEQ ID NO: 755612 - RNA, 19 nt, Artificial Sequence
  Description of Artificial Sequence: Synthetic oligonucleotide
ggcgucacugccuagaucc

SEQ ID NO: 755613 - RNA, 19 nt, Artificial Sequence
  Description of Artificial Sequence: Synthetic oligonucleotide
ucugauagacucucucuca

SEQ ID NO: 755614 - RNA, 19 nt, Artificial Sequence
  Description of Artificial Sequence: Synthetic oligonucleotide
ugacuaacacugaugucug

SEQ ID NO: 755615 - RNA, 19 nt, Artificial Sequence
  Description of Artificial Sequence: Synthetic oligonucleotide
uggcagaagaucagcgacg

SEQ ID NO: 755616 - RNA, 19 nt, Artificial Sequence
  Description of Artificial Sequence: Synthetic oligonucleotide
aucagaauaggaagaacuc

SEQ ID NO: 755617 - RNA, 19 nt, Artificial Sequence
  Description of Artificial Sequence: Synthetic oligonucleotide
auacccucgaucguccucc

SEQ ID NO: 755618 - RNA, 19 nt, Artificial Sequence
  Description of Artificial Sequence: Synthetic oligonucleotide
aacauucgcuuaugugagg

SEQ ID NO: 755619 - RNA, 19 nt, Artificial Sequence
  Description of Artificial Sequence: Synthetic oligonucleotide
ucagaauaggaagaacucu

SEQ ID NO: 755620 - RNA, 19 nt, Artificial Sequence
  Description of Artificial Sequence: Synthetic oligonucleotide
ugcucaugggagacaaggg

SEQ ID NO: 755621 - RNA, 19 nt, Artificial Sequence
  Description of Artificial Sequence: Synthetic oligonucleotide
aaguuaaaacuacccucug

SEQ ID NO: 755622 - RNA, 19 nt, Artificial Sequence
  Description of Artificial Sequence: Synthetic oligonucleotide
guugccguuaggcaucggg

SEQ ID NO: 755623 - RNA, 19 nt, Artificial Sequence
  Description of Artificial Sequence: Synthetic oligonucleotide
agaauguuaauagcacauc

SEQ ID NO: 755624 - RNA, 19 nt, Artificial Sequence
  Description of Artificial Sequence: Synthetic oligonucleotide
ugcacucggagcaaggggu

SEQ ID NO: 755625 - RNA, 19 nt, Artificial Sequence
  Description of Artificial Sequence: Synthetic oligonucleotide
uaucuggagguucauccca

SEQ ID NO: 755626 - RNA, 19 nt, Artificial Sequence
  Description of Artificial Sequence: Synthetic oligonucleotide
gggacaguaagcucggacg

SEQ ID NO: 755627 - RNA, 19 nt, Artificial Sequence
  Description of Artificial Sequence: Synthetic oligonucleotide
cauaucucucagaucagug

SEQ ID NO: 755628 - RNA, 19 nt, Artificial Sequence
  Description of Artificial Sequence: Synthetic oligonucleotide
ugucugauagacucucucu

SEQ ID NO: 755629 - RNA, 19 nt, Artificial Sequence
  Description of Artificial Sequence: Synthetic oligonucleotide
guguaaguacuguacauuc

SEQ ID NO: 755630 - RNA, 19 nt, Artificial Sequence
  Description of Artificial Sequence: Synthetic oligonucleotide
uuugcacucggagcaaggg

SEQ ID NO: 755631 - RNA, 19 nt, Artificial Sequence
  Description of Artificial Sequence: Synthetic oligonucleotide
ccugauauuaaguggcacg

SEQ ID NO: 755632 - RNA, 19 nt, Artificial Sequence
  Description of Artificial Sequence: Synthetic oligonucleotide
gauauuaaguggcacgagu

SEQ ID NO: 755633 - RNA, 19 nt, Artificial Sequence
  Description of Artificial Sequence: Synthetic oligonucleotide
cuucugguagaccggaaag

SEQ ID NO: 755634 - RNA, 19 nt, Artificial Sequence
  Description of Artificial Sequence: Synthetic oligonucleotide
uauccacgguuguuggugg

SEQ ID NO: 755635 - RNA, 19 nt, Artificial Sequence
  Description of Artificial Sequence: Synthetic oligonucleotide
uagucaacauucacaaaau

SEQ ID NO: 755636 - RNA, 19 nt, Artificial Sequence
  Description of Artificial Sequence: Synthetic oligonucleotide
ucgugucucuaucagaaua

SEQ ID NO: 755637 - RNA, 19 nt, Artificial Sequence
  Description of Artificial Sequence: Synthetic oligonucleotide
aaaaggccugauauuaagu

SEQ ID NO: 755638 - RNA, 19 nt, Artificial Sequence
  Description of Artificial Sequence: Synthetic oligonucleotide
ucuggucaagucuucuaug

SEQ ID NO: 755639 - RNA, 19 nt, Artificial Sequence
  Description of Artificial Sequence: Synthetic oligonucleotide
ugcaucgcuguccuuguca

SEQ ID NO: 755640 - RNA, 19 nt, Artificial Sequence
  Description of Artificial Sequence: Synthetic oligonucleotide
aauguuaauagcacaucua

SEQ ID NO: 755641 - RNA, 19 nt, Artificial Sequence
  Description of Artificial Sequence: Synthetic oligonucleotide
auugguuuggccauggcaa

SEQ ID NO: 755642 - RNA, 19 nt, Artificial Sequence
  Description of Artificial Sequence: Synthetic oligonucleotide
ugcuuauccacgguuguug

SEQ ID NO: 755643 - RNA, 19 nt, Artificial Sequence
  Description of Artificial Sequence: Synthetic oligonucleotide
uucgcgggcauuuucucug

SEQ ID NO: 755644 - RNA, 19 nt, Artificial Sequence
  Description of Artificial Sequence: Synthetic oligonucleotide
cauccagggauuccgauuc

SEQ ID NO: 755645 - RNA, 19 nt, Artificial Sequence
  Description of Artificial Sequence: Synthetic oligonucleotide
gaguuggacugugagcugg

SEQ ID NO: 755646 - RNA, 19 nt, Artificial Sequence
  Description of Artificial Sequence: Synthetic oligonucleotide
uuuugugcagagguggagu

SEQ ID NO: 755647 - RNA, 19 nt, Artificial Sequence
  Description of Artificial Sequence: Synthetic oligonucleotide
uuaggcaucggggacggca

SEQ ID NO: 755648 - RNA, 19 nt, Artificial Sequence
  Description of Artificial Sequence: Synthetic oligonucleotide
guuaccaaugacuaacacu

SEQ ID NO: 755649 - RNA, 19 nt, Artificial Sequence
  Description of Artificial Sequence: Synthetic oligonucleotide
acguaguauggagagcuac

SEQ ID NO: 755650 - RNA, 19 nt, Artificial Sequence
  Description of Artificial Sequence: Synthetic oligonucleotide
cuacgacuucacuacgagg

SEQ ID NO: 755651 - RNA, 19 nt, Artificial Sequence
  Description of Artificial Sequence: Synthetic oligonucleotide
uggcaucuuguucugugug

SEQ ID NO: 755652 - RNA, 19 nt, Artificial Sequence
  Description of Artificial Sequence: Synthetic oligonucleotide
ugaaccucagguagucaac

SEQ ID NO: 755653 - RNA, 19 nt, Artificial Sequence
  Description of Artificial Sequence: Synthetic oligonucleotide
ugauauuaaguggcacgag

SEQ ID NO: 755654 - RNA, 19 nt, Artificial Sequence
  Description of Artificial Sequence: Synthetic oligonucleotide
cucuaucagaauaggaaga

SEQ ID NO: 755655 - RNA, 19 nt, Artificial Sequence
  Description of Artificial Sequence: Synthetic oligonucleotide
gagagcuacgacuucacua

SEQ ID NO: 755656 - RNA, 19 nt, Artificial Sequence
  Description of Artificial Sequence: Synthetic oligonucleotide
aguagucaaugguaaaaua

SEQ ID NO: 755657 - RNA, 19 nt, Artificial Sequence
  Description of Artificial Sequence: Synthetic oligonucleotide
gacgaugaggauuugcacu

SEQ ID NO: 755658 - RNA, 19 nt, Artificial Sequence
  Description of Artificial Sequence: Synthetic oligonucleotide
caaugacuaacacugaugu

SEQ ID NO: 755659 - RNA, 19 nt, Artificial Sequence
  Description of Artificial Sequence: Synthetic oligonucleotide
gcucaugggagacaagggg

SEQ ID NO: 755660 - RNA, 19 nt, Artificial Sequence
  Description of Artificial Sequence: Synthetic oligonucleotide
cuugcauuuuggccauugg

SEQ ID NO: 755661 - RNA, 19 nt, Artificial Sequence
  Description of Artificial Sequence: Synthetic oligonucleotide
accaaugacuaacacugau

SEQ ID NO: 755662 - RNA, 19 nt, Artificial Sequence
  Description of Artificial Sequence: Synthetic oligonucleotide
uucgcuuaugugaggcaug

SEQ ID NO: 755663 - RNA, 19 nt, Artificial Sequence
  Description of Artificial Sequence: Synthetic oligonucleotide
agacaccaaguccaggcug

SEQ ID NO: 755664 - RNA, 19 nt, Artificial Sequence
  Description of Artificial Sequence: Synthetic oligonucleotide
ugacucucagcgugucugg

SEQ ID NO: 755665 - RNA, 19 nt, Artificial Sequence
  Description of Artificial Sequence: Synthetic oligonucleotide
gucugauagacucucucuc

SEQ ID NO: 755666 - RNA, 19 nt, Artificial Sequence
  Description of Artificial Sequence: Synthetic oligonucleotide
ucgauacccucgaucgucc

SEQ ID NO: 755667 - RNA, 19 nt, Artificial Sequence
  Description of Artificial Sequence: Synthetic oligonucleotide
gucaaagaagcugccgagg

SEQ ID NO: 755668 - RNA, 19 nt, Artificial Sequence
  Description of Artificial Sequence: Synthetic oligonucleotide
augaaaguagucaauggua

SEQ ID NO: 755669 - RNA, 19 nt, Artificial Sequence
  Description of Artificial Sequence: Synthetic oligonucleotide
agcgugucuggucaagucu

SEQ ID NO: 755670 - RNA, 19 nt, Artificial Sequence
  Description of Artificial Sequence: Synthetic oligonucleotide
uggagguugccguuaggca

SEQ ID NO: 755671 - RNA, 19 nt, Artificial Sequence
  Description of Artificial Sequence: Synthetic oligonucleotide
ugguguaaguacuguacau

SEQ ID NO: 755672 - RNA, 19 nt, Artificial Sequence
  Description of Artificial Sequence: Synthetic oligonucleotide
ggagcaaggggucacuuug

SEQ ID NO: 755673 - RNA, 19 nt, Artificial Sequence
  Description of Artificial Sequence: Synthetic oligonucleotide
gaucccuggaccaucguca

SEQ ID NO: 755674 - RNA, 19 nt, Artificial Sequence
  Description of Artificial Sequence: Synthetic oligonucleotide
ucauaucucucagaucagu

SEQ ID NO: 755675 - RNA, 19 nt, Artificial Sequence
  Description of Artificial Sequence: Synthetic oligonucleotide
ucggcuuguaacuucuuuu

SEQ ID NO: 755676 - RNA, 19 nt, Artificial Sequence
  Description of Artificial Sequence: Synthetic oligonucleotide
caaagaagcugccgagggc

SEQ ID NO: 755677 - RNA, 19 nt, Artificial Sequence
  Description of Artificial Sequence: Synthetic oligonucleotide
aucgucaaagaagcugccg

SEQ ID NO: 755678 - RNA, 19 nt, Artificial Sequence
  Description of Artificial Sequence: Synthetic oligonucleotide
uggaguugguccucgccug

SEQ ID NO: 755679 - RNA, 19 nt, Artificial Sequence
  Description of Artificial Sequence: Synthetic oligonucleotide
auuaaguggcacgaguaaa

SEQ ID NO: 755680 - RNA, 19 nt, Artificial Sequence
  Description of Artificial Sequence: Synthetic oligonucleotide
cugguagaccggaaagggc

SEQ ID NO: 755681 - RNA, 19 nt, Artificial Sequence
  Description of Artificial Sequence: Synthetic oligonucleotide
agucacgggacaguaagcu

SEQ ID NO: 755682 - RNA, 19 nt, Artificial Sequence
  Description of Artificial Sequence: Synthetic oligonucleotide
aucggggacggcauggugg

SEQ ID NO: 755683 - RNA, 19 nt, Artificial Sequence
  Description of Artificial Sequence: Synthetic oligonucleotide
ugccguuaggcaucgggga

SEQ ID NO: 755684 - RNA, 19 nt, Artificial Sequence
  Description of Artificial Sequence: Synthetic oligonucleotide
gauagacucucucucauuu

SEQ ID NO: 755685 - RNA, 19 nt, Artificial Sequence
  Description of Artificial Sequence: Synthetic oligonucleotide
acuucgcgggcauuuucuc

SEQ ID NO: 755686 - RNA, 19 nt, Artificial Sequence
  Description of Artificial Sequence: Synthetic oligonucleotide
auagaucccuggaccaucg

SEQ ID NO: 755687 - RNA, 19 nt, Artificial Sequence
  Description of Artificial Sequence: Synthetic oligonucleotide
acuucacuacgaggcaggc

SEQ ID NO: 755688 - RNA, 19 nt, Artificial Sequence
  Description of Artificial Sequence: Synthetic oligonucleotide
cauugguuuggccauggca

SEQ ID NO: 755689 - RNA, 19 nt, Artificial Sequence
  Description of Artificial Sequence: Synthetic oligonucleotide
auauuaaguggcacgagua

SEQ ID NO: 755690 - RNA, 19 nt, Artificial Sequence
  Description of Artificial Sequence: Synthetic oligonucleotide
aacuuucaaggaaccaagu

SEQ ID NO: 755691 - RNA, 19 nt, Artificial Sequence
  Description of Artificial Sequence: Synthetic oligonucleotide
cugauauuaaguggcacga

SEQ ID NO: 755692 - RNA, 19 nt, Artificial Sequence
  Description of Artificial Sequence: Synthetic oligonucleotide
cugacccugguuucgcacc

SEQ ID NO: 755693 - RNA, 19 nt, Artificial Sequence
  Description of Artificial Sequence: Synthetic oligonucleotide
caucucgauacccucgauc

SEQ ID NO: 755694 - RNA, 19 nt, Artificial Sequence
  Description of Artificial Sequence: Synthetic oligonucleotide
ccucagguagucaacauuc

SEQ ID NO: 755695 - RNA, 19 nt, Artificial Sequence
  Description of Artificial Sequence: Synthetic oligonucleotide
gagcuacgacuucacuacg

SEQ ID NO: 755696 - RNA, 19 nt, Artificial Sequence
  Description of Artificial Sequence: Synthetic oligonucleotide
guccaagcugguuucaguc

SEQ ID NO: 755697 - RNA, 19 nt, Artificial Sequence
  Description of Artificial Sequence: Synthetic oligonucleotide
ugguuucagucuuacuguc

SEQ ID NO: 755698 - RNA, 19 nt, Artificial Sequence
  Description of Artificial Sequence: Synthetic oligonucleotide
uacgaggcaggcauguauu

SEQ ID NO: 755699 - RNA, 19 nt, Artificial Sequence
  Description of Artificial Sequence: Synthetic oligonucleotide
aggcauguauuuugacuug

SEQ ID NO: 755700 - RNA, 19 nt, Artificial Sequence
  Description of Artificial Sequence: Synthetic oligonucleotide
uauagaucccuggaccauc

SEQ ID NO: 755701 - RNA, 19 nt, Artificial Sequence
  Description of Artificial Sequence: Synthetic oligonucleotide
gguauagaucccuggacca

SEQ ID NO: 755702 - RNA, 19 nt, Artificial Sequence
  Description of Artificial Sequence: Synthetic oligonucleotide
uguauagcaccgucauuua

SEQ ID NO: 755703 - RNA, 19 nt, Artificial Sequence
  Description of Artificial Sequence: Synthetic oligonucleotide
ugccucccaguccaucggg

SEQ ID NO: 755704 - RNA, 19 nt, Artificial Sequence
  Description of Artificial Sequence: Synthetic oligonucleotide
guauagcaccgucauuuac

SEQ ID NO: 755705 - RNA, 19 nt, Artificial Sequence
  Description of Artificial Sequence: Synthetic oligonucleotide
ugguuuggccauggcaagg

SEQ ID NO: 755706 - RNA, 19 nt, Artificial Sequence
  Description of Artificial Sequence: Synthetic oligonucleotide
gugucucuaucagaauagg

SEQ ID NO: 755707 - RNA, 19 nt, Artificial Sequence
  Description of Artificial Sequence: Synthetic oligonucleotide
aaccucagguagucaacau

SEQ ID NO: 755708 - RNA, 19 nt, Artificial Sequence
  Description of Artificial Sequence: Synthetic oligonucleotide
ggaguggaggucauugacg

SEQ ID NO: 755709 - RNA, 19 nt, Artificial Sequence
  Description of Artificial Sequence: Synthetic oligonucleotide
aggucauugacgaucacuu

SEQ ID NO: 755710 - RNA, 19 nt, Artificial Sequence
  Description of Artificial Sequence: Synthetic oligonucleotide
gcuuauccacgguuguugg

SEQ ID NO: 755711 - RNA, 19 nt, Artificial Sequence
  Description of Artificial Sequence: Synthetic oligonucleotide
gccuagauccaucccaucc

SEQ ID NO: 755712 - RNA, 19 nt, Artificial Sequence
  Description of Artificial Sequence: Synthetic oligonucleotide
cauugacgaucacuuggag

SEQ ID NO: 755713 - RNA, 19 nt, Artificial Sequence
  Description of Artificial Sequence: Synthetic oligonucleotide
caucgucaaagaagcugcc

SEQ ID NO: 755714 - RNA, 19 nt, Artificial Sequence
  Description of Artificial Sequence: Synthetic oligonucleotide
gacgaucacuuggagcugc

SEQ ID NO: 755715 - RNA, 19 nt, Artificial Sequence
  Description of Artificial Sequence: Synthetic oligonucleotide
uuugccuugugaggaaguc

SEQ ID NO: 755716 - RNA, 19 nt, Artificial Sequence
  Description of Artificial Sequence: Synthetic oligonucleotide
gcuacgacuucacuacgag

SEQ ID NO: 755717 - RNA, 19 nt, Artificial Sequence
  Description of Artificial Sequence: Synthetic oligonucleotide
guaguauggagagcuacga

SEQ ID NO: 755718 - RNA, 19 nt, Artificial Sequence
  Description of Artificial Sequence: Synthetic oligonucleotide
auuugcacucggagcaagg

SEQ ID NO: 755719 - RNA, 19 nt, Artificial Sequence
  Description of Artificial Sequence: Synthetic oligonucleotide
ggauccaacagaauguuaa

SEQ ID NO: 755720 - RNA, 19 nt, Artificial Sequence
  Description of Artificial Sequence: Synthetic oligonucleotide
auucgcuuaugugaggcau

SEQ ID NO: 755721 - RNA, 19 nt, Artificial Sequence
  Description of Artificial Sequence: Synthetic oligonucleotide
uagucauaucucucagauc

SEQ ID NO: 755722 - RNA, 19 nt, Artificial Sequence
  Description of Artificial Sequence: Synthetic oligonucleotide
aaacuacccucugcuuauc

SEQ ID NO: 755723 - RNA, 19 nt, Artificial Sequence
  Description of Artificial Sequence: Synthetic oligonucleotide
cucgauacccucgaucguc

SEQ ID NO: 755724 - RNA, 19 nt, Artificial Sequence
  Description of Artificial Sequence: Synthetic oligonucleotide
cacgggacaguaagcucgg

SEQ ID NO: 755725 - RNA, 19 nt, Artificial Sequence
  Description of Artificial Sequence: Synthetic oligonucleotide
gagcccacucaucaaucac

SEQ ID NO: 755726 - RNA, 19 nt, Artificial Sequence
  Description of Artificial Sequence: Synthetic oligonucleotide
ccagucacgggacaguaag

SEQ ID NO: 755727 - RNA, 19 nt, Artificial Sequence
  Description of Artificial Sequence: Synthetic oligonucleotide
cuuuugccuugugaggaag

SEQ ID NO: 755728 - RNA, 19 nt, Artificial Sequence
  Description of Artificial Sequence: Synthetic oligonucleotide
ugacccugguuucgcaccu

SEQ ID NO: 755729 - RNA, 19 nt, Artificial Sequence
  Description of Artificial Sequence: Synthetic oligonucleotide
aagcucggacguuaccaau

SEQ ID NO: 755730 - RNA, 19 nt, Artificial Sequence
  Description of Artificial Sequence: Synthetic oligonucleotide
ucgcuuaugugaggcaugu

SEQ ID NO: 755731 - RNA, 19 nt, Artificial Sequence
  Description of Artificial Sequence: Synthetic oligonucleotide
caccgucauuuacaguucc

SEQ ID NO: 755732 - RNA, 19 nt, Artificial Sequence
  Description of Artificial Sequence: Synthetic oligonucleotide
ucucgauacccucgaucgu

SEQ ID NO: 755733 - RNA, 19 nt, Artificial Sequence
  Description of Artificial Sequence: Synthetic oligonucleotide
gauacccucgaucguccuc

SEQ ID NO: 755734 - RNA, 19 nt, Artificial Sequence
  Description of Artificial Sequence: Synthetic oligonucleotide
ugucuggucaagucuucua

SEQ ID NO: 755735 - RNA, 19 nt, Artificial Sequence
  Description of Artificial Sequence: Synthetic oligonucleotide
acgacuucacuacgaggca

SEQ ID NO: 755736 - RNA, 19 nt, Artificial Sequence
  Description of Artificial Sequence: Synthetic oligonucleotide
guucaucccacucugcagu

SEQ ID NO: 755737 - RNA, 19 nt, Artificial Sequence
  Description of Artificial Sequence: Synthetic oligonucleotide
cucucagcgugucugguca

SEQ ID NO: 755738 - RNA, 19 nt, Artificial Sequence
  Description of Artificial Sequence: Synthetic oligonucleotide
ugauagacucucucucauu

SEQ ID NO: 755739 - RNA, 19 nt, Artificial Sequence
  Description of Artificial Sequence: Synthetic oligonucleotide
augugaggcauguguggca

SEQ ID NO: 755740 - RNA, 19 nt, Artificial Sequence
  Description of Artificial Sequence: Synthetic oligonucleotide
gcuuaugugaggcaugugu

SEQ ID NO: 755741 - RNA, 19 nt, Artificial Sequence
  Description of Artificial Sequence: Synthetic oligonucleotide
ucagcgacgggagacuuuu

SEQ ID NO: 755742 - RNA, 19 nt, Artificial Sequence
  Description of Artificial Sequence: Synthetic oligonucleotide
uuccgggacgcacgucccg

SEQ ID NO: 755743 - RNA, 19 nt, Artificial Sequence
  Description of Artificial Sequence: Synthetic oligonucleotide
cguaguauggagagcuacg

SEQ ID NO: 755744 - RNA, 19 nt, Artificial Sequence
  Description of Artificial Sequence: Synthetic oligonucleotide
gucaucucgauacccucga

SEQ ID NO: 755745 - RNA, 19 nt, Artificial Sequence
  Description of Artificial Sequence: Synthetic oligonucleotide
ucacuucgcgggcauuuuc

SEQ ID NO: 755746 - RNA, 19 nt, Artificial Sequence
  Description of Artificial Sequence: Synthetic oligonucleotide
cagucacgggacaguaagc

SEQ ID NO: 755747 - RNA, 19 nt, Artificial Sequence
  Description of Artificial Sequence: Synthetic oligonucleotide
ucggggacggcaugguggu

SEQ ID NO: 755748 - RNA, 19 nt, Artificial Sequence
  Description of Artificial Sequence: Synthetic oligonucleotide
uaggcaucggggacggcau

SEQ ID NO: 755749 - RNA, 19 nt, Artificial Sequence
  Description of Artificial Sequence: Synthetic oligonucleotide
caggcauguauuuugacuu

SEQ ID NO: 755750 - RNA, 19 nt, Artificial Sequence
  Description of Artificial Sequence: Synthetic oligonucleotide
gcuuuugagccaccuuuag

SEQ ID NO: 755751 - RNA, 19 nt, Artificial Sequence
  Description of Artificial Sequence: Synthetic oligonucleotide
aacauaucuggagguucau

SEQ ID NO: 755752 - RNA, 19 nt, Artificial Sequence
  Description of Artificial Sequence: Synthetic oligonucleotide
ccggccacaaccacguugc

SEQ ID NO: 755753 - RNA, 19 nt, Artificial Sequence
  Description of Artificial Sequence: Synthetic oligonucleotide
ccugaggucuugagggucg

SEQ ID NO: 755754 - RNA, 19 nt, Artificial Sequence
  Description of Artificial Sequence: Synthetic oligonucleotide
ccggacagcggucaucucg

SEQ ID NO: 755755 - RNA, 19 nt, Artificial Sequence
  Description of Artificial Sequence: Synthetic oligonucleotide
gaggcugaaugcagagccc

SEQ ID NO: 755756 - RNA, 19 nt, Artificial Sequence
  Description of Artificial Sequence: Synthetic oligonucleotide
gggaguggaggucauugac

SEQ ID NO: 755757 - RNA, 19 nt, Artificial Sequence
  Description of Artificial Sequence: Synthetic oligonucleotide
gagguugccguuaggcauc

SEQ ID NO: 755758 - RNA, 19 nt, Artificial Sequence
  Description of Artificial Sequence: Synthetic oligonucleotide
cuggagguucaucccacuc

SEQ ID NO: 755759 - RNA, 19 nt, Artificial Sequence
  Description of Artificial Sequence: Synthetic oligonucleotide
uccacgguuguugguggug

SEQ ID NO: 755760 - RNA, 19 nt, Artificial Sequence
  Description of Artificial Sequence: Synthetic oligonucleotide
gaccggaaagggcuccuca

SEQ ID NO: 755761 - RNA, 19 nt, Artificial Sequence
  Description of Artificial Sequence: Synthetic oligonucleotide
ucccgggccggacagcggu

SEQ ID NO: 755762 - RNA, 19 nt, Artificial Sequence
  Description of Artificial Sequence: Synthetic oligonucleotide
ucagcgugucuggucaagu

SEQ ID NO: 755763 - RNA, 19 nt, Artificial Sequence
  Description of Artificial Sequence: Synthetic oligonucleotide
cuuccgggacgcacguccc

SEQ ID NO: 755764 - RNA, 19 nt, Artificial Sequence
  Description of Artificial Sequence: Synthetic oligonucleotide
uacguaguauggagagcua

SEQ ID NO: 755765 - RNA, 19 nt, Artificial Sequence
  Description of Artificial Sequence: Synthetic oligonucleotide
gucacgggacaguaagcuc

SEQ ID NO: 755766 - RNA, 19 nt, Artificial Sequence
  Description of Artificial Sequence: Synthetic oligonucleotide
cugcccgauagucauaucu

SEQ ID NO: 755767 - RNA, 19 nt, Artificial Sequence
  Description of Artificial Sequence: Synthetic oligonucleotide
agaucagcgacgggagacu

SEQ ID NO: 755768 - RNA, 19 nt, Artificial Sequence
  Description of Artificial Sequence: Synthetic oligonucleotide
ccaaguggauccaacagaa

SEQ ID NO: 755769 - RNA, 19 nt, Artificial Sequence
  Description of Artificial Sequence: Synthetic oligonucleotide
cccuggaccaucgucaaag

SEQ ID NO: 755770 - RNA, 19 nt, Artificial Sequence
  Description of Artificial Sequence: Synthetic oligonucleotide
guagaccggaaagggcucc

SEQ ID NO: 755771 - RNA, 19 nt, Artificial Sequence
  Description of Artificial Sequence: Synthetic oligonucleotide
guacauuccuuguaacaau

SEQ ID NO: 755772 - RNA, 19 nt, Artificial Sequence
  Description of Artificial Sequence: Synthetic oligonucleotide
acgcacgucccgccguccg

SEQ ID NO: 755773 - RNA, 19 nt, Artificial Sequence
  Description of Artificial Sequence: Synthetic oligonucleotide
cuccggagcccacucauca

SEQ ID NO: 755774 - RNA, 19 nt, Artificial Sequence
  Description of Artificial Sequence: Synthetic oligonucleotide
guggaguugguccucgccu

SEQ ID NO: 755775 - RNA, 19 nt, Artificial Sequence
  Description of Artificial Sequence: Synthetic oligonucleotide
ugacgaucacuuggagcug

SEQ ID NO: 755776 - RNA, 19 nt, Artificial Sequence
  Description of Artificial Sequence: Synthetic oligonucleotide
aucccauccucucgguaau

SEQ ID NO: 755777 - RNA, 19 nt, Artificial Sequence
  Description of Artificial Sequence: Synthetic oligonucleotide
ucaucucgauacccucgau

SEQ ID NO: 755778 - RNA, 19 nt, Artificial Sequence
  Description of Artificial Sequence: Synthetic oligonucleotide
agcuacgacuucacuacga

SEQ ID NO: 755779 - RNA, 19 nt, Artificial Sequence
  Description of Artificial Sequence: Synthetic oligonucleotide
cucgccugacccugguuuc

SEQ ID NO: 755780 - RNA, 19 nt, Artificial Sequence
  Description of Artificial Sequence: Synthetic oligonucleotide
cagcgugucuggucaaguc

SEQ ID NO: 755781 - RNA, 19 nt, Artificial Sequence
  Description of Artificial Sequence: Synthetic oligonucleotide
acguuaccaaugacuaaca

SEQ ID NO: 755782 - RNA, 19 nt, Artificial Sequence
  Description of Artificial Sequence: Synthetic oligonucleotide
cauucgcuuaugugaggca

SEQ ID NO: 755783 - RNA, 19 nt, Artificial Sequence
  Description of Artificial Sequence: Synthetic oligonucleotide
ccgauagucauaucucuca

SEQ ID NO: 755784 - RNA, 19 nt, Artificial Sequence
  Description of Artificial Sequence: Synthetic oligonucleotide
ucgcgggcauuuucucugc

SEQ ID NO: 755785 - RNA, 19 nt, Artificial Sequence
  Description of Artificial Sequence: Synthetic oligonucleotide
gagguucaucccacucugc

SEQ ID NO: 755786 - RNA, 19 nt, Artificial Sequence
  Description of Artificial Sequence: Synthetic oligonucleotide
ggaaccaaguggauccaac

SEQ ID NO: 755787 - RNA, 19 nt, Artificial Sequence
  Description of Artificial Sequence: Synthetic oligonucleotide
aguggaggucauugacgau

SEQ ID NO: 755788 - RNA, 19 nt, Artificial Sequence
  Description of Artificial Sequence: Synthetic oligonucleotide
acgaggcaggcauguauuu

SEQ ID NO: 755789 - RNA, 19 nt, Artificial Sequence
  Description of Artificial Sequence: Synthetic oligonucleotide
agguugccguuaggcaucg

SEQ ID NO: 755790 - RNA, 19 nt, Artificial Sequence
  Description of Artificial Sequence: Synthetic oligonucleotide
cucggacguuaccaaugac

SEQ ID NO: 755791 - RNA, 19 nt, Artificial Sequence
  Description of Artificial Sequence: Synthetic oligonucleotide
cauugugccugaggucuug

SEQ ID NO: 755792 - RNA, 19 nt, Artificial Sequence
  Description of Artificial Sequence: Synthetic oligonucleotide
ccugguuucgcaccuccug

SEQ ID NO: 755793 - RNA, 19 nt, Artificial Sequence
  Description of Artificial Sequence: Synthetic oligonucleotide
gcgacgaugaggauuugca

SEQ ID NO: 755794 - RNA, 19 nt, Artificial Sequence
  Description of Artificial Sequence: Synthetic oligonucleotide
ggagcccacucaucaauca

SEQ ID NO: 755795 - RNA, 19 nt, Artificial Sequence
  Description of Artificial Sequence: Synthetic oligonucleotide
cucagcgugucuggucaag

SEQ ID NO: 755796 - RNA, 19 nt, Artificial Sequence
  Description of Artificial Sequence: Synthetic oligonucleotide
agaccggaaagggcuccuc

SEQ ID NO: 755797 - RNA, 19 nt, Artificial Sequence
  Description of Artificial Sequence: Synthetic oligonucleotide
gcugcugcugcugcugccg

SEQ ID NO: 755798 - RNA, 19 nt, Artificial Sequence
  Description of Artificial Sequence: Synthetic oligonucleotide
ugccgagggccaacuucug

SEQ ID NO: 755799 - RNA, 19 nt, Artificial Sequence
  Description of Artificial Sequence: Synthetic oligonucleotide
cucggaugagaagcagcug

SEQ ID NO: 755800 - RNA, 19 nt, Artificial Sequence
  Description of Artificial Sequence: Synthetic oligonucleotide
ggagguugccguuaggcau

SEQ ID NO: 755801 - RNA, 19 nt, Artificial Sequence
  Description of Artificial Sequence: Synthetic oligonucleotide
ugccuagauccaucccauc

SEQ ID NO: 755802 - RNA, 19 nt, Artificial Sequence
  Description of Artificial Sequence: Synthetic oligonucleotide
gugugcagcucaucucgga

SEQ ID NO: 755803 - RNA, 19 nt, Artificial Sequence
  Description of Artificial Sequence: Synthetic oligonucleotide
ggacaguaagcucggacgu

SEQ ID NO: 755804 - RNA, 19 nt, Artificial Sequence
  Description of Artificial Sequence: Synthetic oligonucleotide
auugugccugaggucuuga

SEQ ID NO: 755805 - RNA, 19 nt, Artificial Sequence
  Description of Artificial Sequence: Synthetic oligonucleotide
acgucccgccguccggagg

SEQ ID NO: 755806 - RNA, 19 nt, Artificial Sequence
  Description of Artificial Sequence: Synthetic oligonucleotide
uagaccggaaagggcuccu

SEQ ID NO: 755807 - RNA, 19 nt, Artificial Sequence
  Description of Artificial Sequence: Synthetic oligonucleotide
ucucagcgugucuggucaa

SEQ ID NO: 755808 - RNA, 19 nt, Artificial Sequence
  Description of Artificial Sequence: Synthetic oligonucleotide
ggccauuuuggcuucggcu

SEQ ID NO: 755809 - RNA, 19 nt, Artificial Sequence
  Description of Artificial Sequence: Synthetic oligonucleotide
accgucauuuacaguuccu

SEQ ID NO: 755810 - RNA, 19 nt, Artificial Sequence
  Description of Artificial Sequence: Synthetic oligonucleotide
gguggagguugccguuagg

SEQ ID NO: 755811 - RNA, 19 nt, Artificial Sequence
  Description of Artificial Sequence: Synthetic oligonucleotide
cagcggucaucucgauacc

SEQ ID NO: 755812 - RNA, 19 nt, Artificial Sequence
  Description of Artificial Sequence: Synthetic oligonucleotide
cuccgcgccggcucccggg

SEQ ID NO: 755813 - RNA, 19 nt, Artificial Sequence
  Description of Artificial Sequence: Synthetic oligonucleotide
gaguugguccucgccugac

SEQ ID NO: 755814 - RNA, 19 nt, Artificial Sequence
  Description of Artificial Sequence: Synthetic oligonucleotide
cugccgagggccaacuucu

SEQ ID NO: 755815 - RNA, 19 nt, Artificial Sequence
  Description of Artificial Sequence: Synthetic oligonucleotide
gcucggacguuaccaauga

SEQ ID NO: 755816 - RNA, 19 nt, Artificial Sequence
  Description of Artificial Sequence: Synthetic oligonucleotide
gcagucuugaggaaaggcu

SEQ ID NO: 755817 - RNA, 19 nt, Artificial Sequence
  Description of Artificial Sequence: Synthetic oligonucleotide
gucgugcggguggagguug

SEQ ID NO: 755818 - RNA, 19 nt, Artificial Sequence
  Description of Artificial Sequence: Synthetic oligonucleotide
gccguccggaggcugaaug

SEQ ID NO: 755819 - RNA, 19 nt, Artificial Sequence
  Description of Artificial Sequence: Synthetic oligonucleotide
gggauuccgauuccuccuc

SEQ ID NO: 755820 - RNA, 19 nt, Artificial Sequence
  Description of Artificial Sequence: Synthetic oligonucleotide
gccauuuuggcuucggcuu

SEQ ID NO: 755821 - RNA, 19 nt, Artificial Sequence
  Description of Artificial Sequence: Synthetic oligonucleotide
accggcggcucuuccggga

SEQ ID NO: 755822 - RNA, 19 nt, Artificial Sequence
  Description of Artificial Sequence: Synthetic oligonucleotide
ggcgacgaugaggauuugc

SEQ ID NO: 755823 - RNA, 19 nt, Artificial Sequence
  Description of Artificial Sequence: Synthetic oligonucleotide
ggagcugcccgauagucau

SEQ ID NO: 755824 - RNA, 19 nt, Artificial Sequence
  Description of Artificial Sequence: Synthetic oligonucleotide
ggaaaggcuuggcuuccca

SEQ ID NO: 755825 - RNA, 19 nt, Artificial Sequence
  Description of Artificial Sequence: Synthetic oligonucleotide
ucccuggaccaucgucaaa

SEQ ID NO: 755826 - RNA, 19 nt, Artificial Sequence
  Description of Artificial Sequence: Synthetic oligonucleotide
cccgggaagcgcucggccg

SEQ ID NO: 755827 - RNA, 19 nt, Artificial Sequence
  Description of Artificial Sequence: Synthetic oligonucleotide
ggguggagguugccguuag

SEQ ID NO: 755828 - RNA, 19 nt, Artificial Sequence
  Description of Artificial Sequence: Synthetic oligonucleotide
ugcugacucucagcguguc

SEQ ID NO: 755829 - RNA, 19 nt, Artificial Sequence
  Description of Artificial Sequence: Synthetic oligonucleotide
ccguuaggcaucggggacg

SEQ ID NO: 755830 - RNA, 19 nt, Artificial Sequence
  Description of Artificial Sequence: Synthetic oligonucleotide
ccugacccugguuucgcac

SEQ ID NO: 755831 - RNA, 19 nt, Artificial Sequence
  Description of Artificial Sequence: Synthetic oligonucleotide
cguuaccaaugacuaacac

SEQ ID NO: 755832 - RNA, 19 nt, Artificial Sequence
  Description of Artificial Sequence: Synthetic oligonucleotide
ccguccggaggcugaaugc

SEQ ID NO: 755833 - RNA, 19 nt, Artificial Sequence
  Description of Artificial Sequence: Synthetic oligonucleotide
gccugauauuaaguggcac

SEQ ID NO: 755834 - RNA, 19 nt, Artificial Sequence
  Description of Artificial Sequence: Synthetic oligonucleotide
cgacgaugaggauuugcac

SEQ ID NO: 755835 - RNA, 19 nt, Artificial Sequence
  Description of Artificial Sequence: Synthetic oligonucleotide
ccgccgcuguugcagaucc

SEQ ID NO: 755836 - RNA, 19 nt, Artificial Sequence
  Description of Artificial Sequence: Synthetic oligonucleotide
cuucgcgggcauuuucucu

SEQ ID NO: 755837 - RNA, 19 nt, Artificial Sequence
  Description of Artificial Sequence: Synthetic oligonucleotide
aggggucacuuugguggag

SEQ ID NO: 755838 - RNA, 19 nt, Artificial Sequence
  Description of Artificial Sequence: Synthetic oligonucleotide
ggacguuaccaaugacuaa

SEQ ID NO: 755839 - RNA, 19 nt, Artificial Sequence
  Description of Artificial Sequence: Synthetic oligonucleotide
caccggcggcucuuccggg

SEQ ID NO: 755840 - RNA, 19 nt, Artificial Sequence
  Description of Artificial Sequence: Synthetic oligonucleotide
uacccucgaucguccuccu

SEQ ID NO: 755841 - RNA, 19 nt, Artificial Sequence
  Description of Artificial Sequence: Synthetic oligonucleotide
cggacguuaccaaugacua

SEQ ID NO: 755842 - RNA, 19 nt, Artificial Sequence
  Description of Artificial Sequence: Synthetic oligonucleotide
gguagaccggaaagggcuc

SEQ ID NO: 755843 - RNA, 19 nt, Artificial Sequence
  Description of Artificial Sequence: Synthetic oligonucleotide
aggccagucacgggacagu

SEQ ID NO: 755844 - RNA, 19 nt, Artificial Sequence
  Description of Artificial Sequence: Synthetic oligonucleotide
ucggagcaaggggucacuu

SEQ ID NO: 755845 - RNA, 19 nt, Artificial Sequence
  Description of Artificial Sequence: Synthetic oligonucleotide
caccuuuagcaacagcguu

SEQ ID NO: 755846 - RNA, 19 nt, Artificial Sequence
  Description of Artificial Sequence: Synthetic oligonucleotide
guauagaucccuggaccau

SEQ ID NO: 755847 - RNA, 19 nt, Artificial Sequence
  Description of Artificial Sequence: Synthetic oligonucleotide
cugccuagauccaucccau

SEQ ID NO: 755848 - RNA, 19 nt, Artificial Sequence
  Description of Artificial Sequence: Synthetic oligonucleotide
ggaguugguccucgccuga

SEQ ID NO: 755849 - RNA, 19 nt, Artificial Sequence
  Description of Artificial Sequence: Synthetic oligonucleotide
gacgcacgucccgccgucc

SEQ ID NO: 755850 - RNA, 19 nt, Artificial Sequence
  Description of Artificial Sequence: Synthetic oligonucleotide
cacgucccgccguccggag

SEQ ID NO: 755851 - RNA, 19 nt, Artificial Sequence
  Description of Artificial Sequence: Synthetic oligonucleotide
ggaaagggcuccucauagu

SEQ ID NO: 755852 - RNA, 19 nt, Artificial Sequence
  Description of Artificial Sequence: Synthetic oligonucleotide
gcgggcauuuucucugcca

SEQ ID NO: 755853 - RNA, 19 nt, Artificial Sequence
  Description of Artificial Sequence: Synthetic oligonucleotide
gggguguccaagcugguuu

SEQ ID NO: 755854 - RNA, 19 nt, Artificial Sequence
  Description of Artificial Sequence: Synthetic oligonucleotide
ucccauccucucgguaauc

SEQ ID NO: 755855 - RNA, 19 nt, Artificial Sequence
  Description of Artificial Sequence: Synthetic oligonucleotide
cuuggagcugcccgauagu

SEQ ID NO: 755856 - RNA, 19 nt, Artificial Sequence
  Description of Artificial Sequence: Synthetic oligonucleotide
cguuaggcaucggggacgg

SEQ ID NO: 755857 - RNA, 19 nt, Artificial Sequence
  Description of Artificial Sequence: Synthetic oligonucleotide
ggcugcugcugcugcugcc

SEQ ID NO: 755858 - RNA, 19 nt, Artificial Sequence
  Description of Artificial Sequence: Synthetic oligonucleotide
cgacuucacuacgaggcag

SEQ ID NO: 755859 - RNA, 19 nt, Artificial Sequence
  Description of Artificial Sequence: Synthetic oligonucleotide
ccccuuucacuucgcgggc

SEQ ID NO: 755860 - RNA, 19 nt, Artificial Sequence
  Description of Artificial Sequence: Synthetic oligonucleotide
gacaguaagcucggacguu

SEQ ID NO: 755861 - RNA, 19 nt, Artificial Sequence
  Description of Artificial Sequence: Synthetic oligonucleotide
ugccggcgucacugccuag

SEQ ID NO: 755862 - RNA, 19 nt, Artificial Sequence
  Description of Artificial Sequence: Synthetic oligonucleotide
ucggccggccggccacaac

SEQ ID NO: 755863 - RNA, 19 nt, Artificial Sequence
  Description of Artificial Sequence: Synthetic oligonucleotide
cggccggccggccacaacc

SEQ ID NO: 755864 - RNA, 19 nt, Artificial Sequence
  Description of Artificial Sequence: Synthetic oligonucleotide
ggagagcuacgacuucacu

SEQ ID NO: 755865 - RNA, 19 nt, Artificial Sequence
  Description of Artificial Sequence: Synthetic oligonucleotide
gcaccgucauuuacaguuc

SEQ ID NO: 755866 - RNA, 19 nt, Artificial Sequence
  Description of Artificial Sequence: Synthetic oligonucleotide
ccaccuuuagcaacagcgu

SEQ ID NO: 755867 - RNA, 19 nt, Artificial Sequence
  Description of Artificial Sequence: Synthetic oligonucleotide
aucagcgacgggagacuuu

SEQ ID NO: 755868 - RNA, 19 nt, Artificial Sequence
  Description of Artificial Sequence: Synthetic oligonucleotide
gguguccaagcugguuuca

SEQ ID NO: 755869 - RNA, 19 nt, Artificial Sequence
  Description of Artificial Sequence: Synthetic oligonucleotide
cgucauuuacaguuccucu

SEQ ID NO: 755870 - RNA, 19 nt, Artificial Sequence
  Description of Artificial Sequence: Synthetic oligonucleotide
gaucagcgacgggagacuu

SEQ ID NO: 755871 - RNA, 19 nt, Artificial Sequence
  Description of Artificial Sequence: Synthetic oligonucleotide
gcuucggcuuguaacuucu

SEQ ID NO: 755872 - RNA, 19 nt, Artificial Sequence
  Description of Artificial Sequence: Synthetic oligonucleotide
gacccugguuucgcaccuc

SEQ ID NO: 755873 - RNA, 19 nt, Artificial Sequence
  Description of Artificial Sequence: Synthetic oligonucleotide
gguccucgccugacccugg

SEQ ID NO: 755874 - RNA, 19 nt, Artificial Sequence
  Description of Artificial Sequence: Synthetic oligonucleotide
guuaggcaucggggacggc

SEQ ID NO: 755875 - RNA, 19 nt, Artificial Sequence
  Description of Artificial Sequence: Synthetic oligonucleotide
ccggccagaugcuucucca

SEQ ID NO: 755876 - RNA, 19 nt, Artificial Sequence
  Description of Artificial Sequence: Synthetic oligonucleotide
cggagcccacucaucaauc

SEQ ID NO: 755877 - RNA, 19 nt, Artificial Sequence
  Description of Artificial Sequence: Synthetic oligonucleotide
gcccacucaucaaucaccu

SEQ ID NO: 755878 - RNA, 19 nt, Artificial Sequence
  Description of Artificial Sequence: Synthetic oligonucleotide
caccagcauggcaucuugu

SEQ ID NO: 755879 - RNA, 19 nt, Artificial Sequence
  Description of Artificial Sequence: Synthetic oligonucleotide
uccuggcgcucaggucccc

SEQ ID NO: 755880 - RNA, 19 nt, Artificial Sequence
  Description of Artificial Sequence: Synthetic oligonucleotide
ggccggacagcggucaucu

SEQ ID NO: 755881 - RNA, 19 nt, Artificial Sequence
  Description of Artificial Sequence: Synthetic oligonucleotide
cucuuccgggacgcacguc

SEQ ID NO: 755882 - RNA, 19 nt, Artificial Sequence
  Description of Artificial Sequence: Synthetic oligonucleotide
gccggcgucacugccuaga

SEQ ID NO: 755883 - RNA, 19 nt, Artificial Sequence
  Description of Artificial Sequence: Synthetic oligonucleotide
cucggcggggagcccggga

SEQ ID NO: 755884 - RNA, 19 nt, Artificial Sequence
  Description of Artificial Sequence: Synthetic oligonucleotide
cucucagaucagugggcuu

SEQ ID NO: 755885 - RNA, 19 nt, Artificial Sequence
  Description of Artificial Sequence: Synthetic oligonucleotide
cacuuggagcugcccgaua

SEQ ID NO: 755886 - RNA, 19 nt, Artificial Sequence
  Description of Artificial Sequence: Synthetic oligonucleotide
ccggcgacgaugaggauuu

SEQ ID NO: 755887 - RNA, 19 nt, Artificial Sequence
  Description of Artificial Sequence: Synthetic oligonucleotide
cgggacgcacgucccgccg

SEQ ID NO: 755888 - RNA, 19 nt, Artificial Sequence
  Description of Artificial Sequence: Synthetic oligonucleotide
gguugccguuaggcaucgg

SEQ ID NO: 755889 - RNA, 19 nt, Artificial Sequence
  Description of Artificial Sequence: Synthetic oligonucleotide
gagcugcccgauagucaua

SEQ ID NO: 755890 - RNA, 19 nt, Artificial Sequence
  Description of Artificial Sequence: Synthetic oligonucleotide
gccgagggccaacuucugu

SEQ ID NO: 755891 - RNA, 19 nt, Artificial Sequence
  Description of Artificial Sequence: Synthetic oligonucleotide
gcucuuccgggacgcacgu

SEQ ID NO: 755892 - RNA, 19 nt, Artificial Sequence
  Description of Artificial Sequence: Synthetic oligonucleotide
cugcuuauccacgguuguu

SEQ ID NO: 755893 - RNA, 19 nt, Artificial Sequence
  Description of Artificial Sequence: Synthetic oligonucleotide
gcgugucuggucaagucuu

SEQ ID NO: 755894 - RNA, 19 nt, Artificial Sequence
  Description of Artificial Sequence: Synthetic oligonucleotide
cuucggcuuguaacuucuu

SEQ ID NO: 755895 - RNA, 19 nt, Artificial Sequence
  Description of Artificial Sequence: Synthetic oligonucleotide
guccucgccugacccuggu

SEQ ID NO: 755896 - RNA, 19 nt, Artificial Sequence
  Description of Artificial Sequence: Synthetic oligonucleotide
cgcgggcauuuucucugcc

SEQ ID NO: 755897 - RNA, 19 nt, Artificial Sequence
  Description of Artificial Sequence: Synthetic oligonucleotide
ccucgccugacccugguuu

SEQ ID NO: 755898 - RNA, 19 nt, Artificial Sequence
  Description of Artificial Sequence: Synthetic oligonucleotide
cugaggucuugagggucgu

SEQ ID NO: 755899 - RNA, 19 nt, Artificial Sequence
  Description of Artificial Sequence: Synthetic oligonucleotide
gggacgcacgucccgccgu

SEQ ID NO: 755900 - RNA, 19 nt, Artificial Sequence
  Description of Artificial Sequence: Synthetic oligonucleotide
cggcugcugcugcugcugc

SEQ ID NO: 755901 - RNA, 19 nt, Artificial Sequence
  Description of Artificial Sequence: Synthetic oligonucleotide
cgagggccaacuucugucu

SEQ ID NO: 755902 - RNA, 19 nt, Artificial Sequence
  Description of Artificial Sequence: Synthetic oligonucleotide
gggccaacuucugucugau

SEQ ID NO: 755903 - RNA, 19 nt, Artificial Sequence
  Description of Artificial Sequence: Synthetic oligonucleotide
cccuuucacuucgcgggca

SEQ ID NO: 755904 - RNA, 19 nt, Artificial Sequence
  Description of Artificial Sequence: Synthetic oligonucleotide
ccaucccauccucucggua

SEQ ID NO: 755905 - RNA, 19 nt, Artificial Sequence
  Description of Artificial Sequence: Synthetic oligonucleotide
gggccggacagcggucauc

SEQ ID NO: 755906 - RNA, 19 nt, Artificial Sequence
  Description of Artificial Sequence: Synthetic oligonucleotide
cuuucacuucgcgggcauu

SEQ ID NO: 755907 - RNA, 19 nt, Artificial Sequence
  Description of Artificial Sequence: Synthetic oligonucleotide
cgccugacccugguuucgc

SEQ ID NO: 755908 - RNA, 19 nt, Artificial Sequence
  Description of Artificial Sequence: Synthetic oligonucleotide
cggcggcucuuccgggacg

SEQ ID NO: 755909 - RNA, 19 nt, Artificial Sequence
  Description of Artificial Sequence: Synthetic oligonucleotide
ccacgguuguugguggugu

SEQ ID NO: 755910 - RNA, 19 nt, Artificial Sequence
  Description of Artificial Sequence: Synthetic oligonucleotide
cgcuuaugugaggcaugug

SEQ ID NO: 755911 - RNA, 19 nt, Artificial Sequence
  Description of Artificial Sequence: Synthetic oligonucleotide
cgugcggguggagguugcc

SEQ ID NO: 755912 - RNA, 19 nt, Artificial Sequence
  Description of Artificial Sequence: Synthetic oligonucleotide
cggcgucacugccuagauc

SEQ ID NO: 755913 - RNA, 19 nt, Artificial Sequence
  Description of Artificial Sequence: Synthetic oligonucleotide
gccggacagcggucaucuc

SEQ ID NO: 755914 - RNA, 19 nt, Artificial Sequence
  Description of Artificial Sequence: Synthetic oligonucleotide
ggggcaccggcggcucuuc

SEQ ID NO: 755915 - RNA, 19 nt, Artificial Sequence
  Description of Artificial Sequence: Synthetic oligonucleotide
ggacagcggucaucucgau

SEQ ID NO: 755916 - RNA, 19 nt, Artificial Sequence
  Description of Artificial Sequence: Synthetic oligonucleotide
cgggaagcgcucggccggc

SEQ ID NO: 755917 - RNA, 19 nt, Artificial Sequence
  Description of Artificial Sequence: Synthetic oligonucleotide
cccggcgacgaugaggauu

SEQ ID NO: 755918 - RNA, 19 nt, Artificial Sequence
  Description of Artificial Sequence: Synthetic oligonucleotide
ggucgugcggguggagguu

SEQ ID NO: 755919 - RNA, 19 nt, Artificial Sequence
  Description of Artificial Sequence: Synthetic oligonucleotide
cccugguuucgcaccuccu

SEQ ID NO: 755920 - RNA, 19 nt, Artificial Sequence
  Description of Artificial Sequence: Synthetic oligonucleotide
ccgggccggacagcgguca

SEQ ID NO: 755921 - RNA, 19 nt, Artificial Sequence
  Description of Artificial Sequence: Synthetic oligonucleotide
gcggguggagguugccguu

SEQ ID NO: 755922 - RNA, 19 nt, Artificial Sequence
  Description of Artificial Sequence: Synthetic oligonucleotide
cucggccggccggccacaa

SEQ ID NO: 755923 - RNA, 19 nt, Artificial Sequence
  Description of Artificial Sequence: Synthetic oligonucleotide
ccgcgccggcucccgggag

SEQ ID NO: 755924 - RNA, 19 nt, Artificial Sequence
  Description of Artificial Sequence: Synthetic oligonucleotide
cgauacccucgaucguccu

SEQ ID NO: 755925 - RNA, 19 nt, Artificial Sequence
  Description of Artificial Sequence: Synthetic oligonucleotide
cccgggaggcugggucuuc

SEQ ID NO: 755926 - RNA, 19 nt, Artificial Sequence
  Description of Artificial Sequence: Synthetic oligonucleotide
ccggcgucacugccuagau

SEQ ID NO: 755927 - RNA, 19 nt, Artificial Sequence
  Description of Artificial Sequence: Synthetic oligonucleotide
gcggcucuuccgggacgca

SEQ ID NO: 755928 - RNA, 19 nt, Artificial Sequence
  Description of Artificial Sequence: Synthetic oligonucleotide
cggagcaaggggucacuuu

SEQ ID NO: 755929 - RNA, 19 nt, Artificial Sequence
  Description of Artificial Sequence: Synthetic oligonucleotide
gucccgccguccggaggcu

SEQ ID NO: 755930 - RNA, 19 nt, Artificial Sequence
  Description of Artificial Sequence: Synthetic oligonucleotide
cccacucaucaaucaccuu

SEQ ID NO: 755931 - RNA, 19 nt, Artificial Sequence
  Description of Artificial Sequence: Synthetic oligonucleotide
cggcgacgaugaggauuug

SEQ ID NO: 755932 - RNA, 19 nt, Artificial Sequence
  Description of Artificial Sequence: Synthetic oligonucleotide
cgggccggacagcggucau

SEQ ID NO: 755933 - RNA, 19 nt, Artificial Sequence
  Description of Artificial Sequence: Synthetic oligonucleotide
cgccguccggaggcugaau

SEQ ID NO: 755934 - RNA, 19 nt, Artificial Sequence
  Description of Artificial Sequence: Synthetic oligonucleotide
aauuucaacacacacacac

SEQ ID NO: 755935 - RNA, 19 nt, Artificial Sequence
  Description of Artificial Sequence: Synthetic oligonucleotide
aauacaaaacaucacuggc

SEQ ID NO: 755936 - RNA, 19 nt, Artificial Sequence
  Description of Artificial Sequence: Synthetic oligonucleotide
uuuauaaucucacaaauca

SEQ ID NO: 755937 - RNA, 19 nt, Artificial Sequence
  Description of Artificial Sequence: Synthetic oligonucleotide
uaaaaugccaugaauggcg

SEQ ID NO: 755938 - RNA, 19 nt, Artificial Sequence
  Description of Artificial Sequence: Synthetic oligonucleotide
uuuaagaggaaauugagac

SEQ ID NO: 755939 - RNA, 19 nt, Artificial Sequence
  Description of Artificial Sequence: Synthetic oligonucleotide
aaguagguaacauaaagug

SEQ ID NO: 755940 - RNA, 19 nt, Artificial Sequence
  Description of Artificial Sequence: Synthetic oligonucleotide
uguaaaaugccaugaaugg

SEQ ID NO: 755941 - RNA, 19 nt, Artificial Sequence
  Description of Artificial Sequence: Synthetic oligonucleotide
uucguaacgauuauaaaag

SEQ ID NO: 755942 - RNA, 19 nt, Artificial Sequence
  Description of Artificial Sequence: Synthetic oligonucleotide
acuagacagaguuuuaugc

SEQ ID NO: 755943 - RNA, 19 nt, Artificial Sequence
  Description of Artificial Sequence: Synthetic oligonucleotide
auaccuauaaaauuucaac

SEQ ID NO: 755944 - RNA, 19 nt, Artificial Sequence
  Description of Artificial Sequence: Synthetic oligonucleotide
ucuuauguuaaucaacugc

SEQ ID NO: 755945 - RNA, 19 nt, Artificial Sequence
  Description of Artificial Sequence: Synthetic oligonucleotide
uaucuaaauaaacaaaaga

SEQ ID NO: 755946 - RNA, 19 nt, Artificial Sequence
  Description of Artificial Sequence: Synthetic oligonucleotide
uguaauauaguaauucaga

SEQ ID NO: 755947 - RNA, 19 nt, Artificial Sequence
  Description of Artificial Sequence: Synthetic oligonucleotide
uucaguaaggcaaaggcag

SEQ ID NO: 755948 - RNA, 19 nt, Artificial Sequence
  Description of Artificial Sequence: Synthetic oligonucleotide
ucuaauguguauuugguug

SEQ ID NO: 755949 - RNA, 19 nt, Artificial Sequence
  Description of Artificial Sequence: Synthetic oligonucleotide
cuuauguuaaucaacugcc

SEQ ID NO: 755950 - RNA, 19 nt, Artificial Sequence
  Description of Artificial Sequence: Synthetic oligonucleotide
ugauuuuauagucaauuag

SEQ ID NO: 755951 - RNA, 19 nt, Artificial Sequence
  Description of Artificial Sequence: Synthetic oligonucleotide
uguauuacauauaagccac

SEQ ID NO: 755952 - RNA, 19 nt, Artificial Sequence
  Description of Artificial Sequence: Synthetic oligonucleotide
aauagaguguacuauacau

SEQ ID NO: 755953 - RNA, 19 nt, Artificial Sequence
  Description of Artificial Sequence: Synthetic oligonucleotide
caugcauuauguaaaaugc

SEQ ID NO: 755954 - RNA, 19 nt, Artificial Sequence
  Description of Artificial Sequence: Synthetic oligonucleotide
uaaguuauguaauacaauc

SEQ ID NO: 755955 - RNA, 19 nt, Artificial Sequence
  Description of Artificial Sequence: Synthetic oligonucleotide
agaguuauaguuuagugga

SEQ ID NO: 755956 - RNA, 19 nt, Artificial Sequence
  Description of Artificial Sequence: Synthetic oligonucleotide
uuuaauauugcaagccugc

SEQ ID NO: 755957 - RNA, 19 nt, Artificial Sequence
  Description of Artificial Sequence: Synthetic oligonucleotide
uuagaagauaacuaagucu

SEQ ID NO: 755958 - RNA, 19 nt, Artificial Sequence
  Description of Artificial Sequence: Synthetic oligonucleotide
ugauacaugggacagcugc

SEQ ID NO: 755959 - RNA, 19 nt, Artificial Sequence
  Description of Artificial Sequence: Synthetic oligonucleotide
aguuugaaaguucaggaag

SEQ ID NO: 755960 - RNA, 19 nt, Artificial Sequence
  Description of Artificial Sequence: Synthetic oligonucleotide
uaaucaacugccaauaaaa

SEQ ID NO: 755961 - RNA, 19 nt, Artificial Sequence
  Description of Artificial Sequence: Synthetic oligonucleotide
uauguaauauaguaauuca

SEQ ID NO: 755962 - RNA, 19 nt, Artificial Sequence
  Description of Artificial Sequence: Synthetic oligonucleotide
guuggaugcacacaguugg

SEQ ID NO: 755963 - RNA, 19 nt, Artificial Sequence
  Description of Artificial Sequence: Synthetic oligonucleotide
auuuacuucucaaugauuc

SEQ ID NO: 755964 - RNA, 19 nt, Artificial Sequence
  Description of Artificial Sequence: Synthetic oligonucleotide
uuauggaaacaacuaauug

SEQ ID NO: 755965 - RNA, 19 nt, Artificial Sequence
  Description of Artificial Sequence: Synthetic oligonucleotide
uacacuuaaugauaaacca

SEQ ID NO: 755966 - RNA, 19 nt, Artificial Sequence
  Description of Artificial Sequence: Synthetic oligonucleotide
ucuuagaagauaacuaagu

SEQ ID NO: 755967 - RNA, 19 nt, Artificial Sequence
  Description of Artificial Sequence: Synthetic oligonucleotide
auguauuacauauaagcca

SEQ ID NO: 755968 - RNA, 19 nt, Artificial Sequence
  Description of Artificial Sequence: Synthetic oligonucleotide
cagaguuauaguuuagugg

SEQ ID NO: 755969 - RNA, 19 nt, Artificial Sequence
  Description of Artificial Sequence: Synthetic oligonucleotide
uuauaaucucacaaaucag

SEQ ID NO: 755970 - RNA, 19 nt, Artificial Sequence
  Description of Artificial Sequence: Synthetic oligonucleotide
ucaacacacacacacacac

SEQ ID NO: 755971 - RNA, 19 nt, Artificial Sequence
  Description of Artificial Sequence: Synthetic oligonucleotide
uucuuaacaagcaucacau

SEQ ID NO: 755972 - RNA, 19 nt, Artificial Sequence
  Description of Artificial Sequence: Synthetic oligonucleotide
ucaaauacacuuaaugaua

SEQ ID NO: 755973 - RNA, 19 nt, Artificial Sequence
  Description of Artificial Sequence: Synthetic oligonucleotide
uguagaaagcuauugggac

SEQ ID NO: 755974 - RNA, 19 nt, Artificial Sequence
  Description of Artificial Sequence: Synthetic oligonucleotide
gaaacaacuaauuggucac

SEQ ID NO: 755975 - RNA, 19 nt, Artificial Sequence
  Description of Artificial Sequence: Synthetic oligonucleotide
agaguuuuaugcuugguca

SEQ ID NO: 755976 - RNA, 19 nt, Artificial Sequence
  Description of Artificial Sequence: Synthetic oligonucleotide
uuucaacacacacacacac

SEQ ID NO: 755977 - RNA, 19 nt, Artificial Sequence
  Description of Artificial Sequence: Synthetic oligonucleotide
uaauguugauuuuauaguc

SEQ ID NO: 755978 - RNA, 19 nt, Artificial Sequence
  Description of Artificial Sequence: Synthetic oligonucleotide
ugcuccaucaaucuucuug

SEQ ID NO: 755979 - RNA, 19 nt, Artificial Sequence
  Description of Artificial Sequence: Synthetic oligonucleotide
uuucaaagcgccuucaaaa

SEQ ID NO: 755980 - RNA, 19 nt, Artificial Sequence
  Description of Artificial Sequence: Synthetic oligonucleotide
auugagacaauguacaaua

SEQ ID NO: 755981 - RNA, 19 nt, Artificial Sequence
  Description of Artificial Sequence: Synthetic oligonucleotide
uucuaagugucuuucuuag

SEQ ID NO: 755982 - RNA, 19 nt, Artificial Sequence
  Description of Artificial Sequence: Synthetic oligonucleotide
aacacacacacacacacaa

SEQ ID NO: 755983 - RNA, 19 nt, Artificial Sequence
  Description of Artificial Sequence: Synthetic oligonucleotide
aagcuauugggacauguug

SEQ ID NO: 755984 - RNA, 19 nt, Artificial Sequence
  Description of Artificial Sequence: Synthetic oligonucleotide
aguagguaacauaaagugc

SEQ ID NO: 755985 - RNA, 19 nt, Artificial Sequence
  Description of Artificial Sequence: Synthetic oligonucleotide
aauugcacuuucuuaacaa

SEQ ID NO: 755986 - RNA, 19 nt, Artificial Sequence
  Description of Artificial Sequence: Synthetic oligonucleotide
aucaucuuacccuuuacug

SEQ ID NO: 755987 - RNA, 19 nt, Artificial Sequence
  Description of Artificial Sequence: Synthetic oligonucleotide
uccuauaugcaucuacuug

SEQ ID NO: 755988 - RNA, 19 nt, Artificial Sequence
  Description of Artificial Sequence: Synthetic oligonucleotide
aguuauguaauacaaucau

SEQ ID NO: 755989 - RNA, 19 nt, Artificial Sequence
  Description of Artificial Sequence: Synthetic oligonucleotide
ucagaguuauaguuuagug

SEQ ID NO: 755990 - RNA, 19 nt, Artificial Sequence
  Description of Artificial Sequence: Synthetic oligonucleotide
uauaaagaauaaguuaugu

SEQ ID NO: 755991 - RNA, 19 nt, Artificial Sequence
  Description of Artificial Sequence: Synthetic oligonucleotide
ucaucuuacccuuuacugc

SEQ ID NO: 755992 - RNA, 19 nt, Artificial Sequence
  Description of Artificial Sequence: Synthetic oligonucleotide
cuuaaauccuauaugcauc

SEQ ID NO: 755993 - RNA, 19 nt, Artificial Sequence
  Description of Artificial Sequence: Synthetic oligonucleotide
uuuuauagucaauuagcac

SEQ ID NO: 755994 - RNA, 19 nt, Artificial Sequence
  Description of Artificial Sequence: Synthetic oligonucleotide
auaccaaucugauucaagu

SEQ ID NO: 755995 - RNA, 19 nt, Artificial Sequence
  Description of Artificial Sequence: Synthetic oligonucleotide
uuauucuugggcuuucaug

SEQ ID NO: 755996 - RNA, 19 nt, Artificial Sequence
  Description of Artificial Sequence: Synthetic oligonucleotide
auaaaccagagaugagggc

SEQ ID NO: 755997 - RNA, 19 nt, Artificial Sequence
  Description of Artificial Sequence: Synthetic oligonucleotide
acuuaaauccuauaugcau

SEQ ID NO: 755998 - RNA, 19 nt, Artificial Sequence
  Description of Artificial Sequence: Synthetic oligonucleotide
uuaugcuuggucauggaaa

SEQ ID NO: 755999 - RNA, 19 nt, Artificial Sequence
  Description of Artificial Sequence: Synthetic oligonucleotide
uguuuacagaggaagagau

SEQ ID NO: 756000 - RNA, 19 nt, Artificial Sequence
  Description of Artificial Sequence: Synthetic oligonucleotide
acagacaaccaucuuagug

SEQ ID NO: 756001 - RNA, 19 nt, Artificial Sequence
  Description of Artificial Sequence: Synthetic oligonucleotide
uucuaaccuauuuucacug

SEQ ID NO: 756002 - RNA, 19 nt, Artificial Sequence
  Description of Artificial Sequence: Synthetic oligonucleotide
ugaauggcgaaaccaaugu

SEQ ID NO: 756003 - RNA, 19 nt, Artificial Sequence
  Description of Artificial Sequence: Synthetic oligonucleotide
uuaaucaacugccaauaaa

SEQ ID NO: 756004 - RNA, 19 nt, Artificial Sequence
  Description of Artificial Sequence: Synthetic oligonucleotide
uacuuaacugagaacauau

SEQ ID NO: 756005 - RNA, 19 nt, Artificial Sequence
  Description of Artificial Sequence: Synthetic oligonucleotide
guagaugcuggguaaaacc

SEQ ID NO: 756006 - RNA, 19 nt, Artificial Sequence
  Description of Artificial Sequence: Synthetic oligonucleotide
cuaauguguauuugguugc

SEQ ID NO: 756007 - RNA, 19 nt, Artificial Sequence
  Description of Artificial Sequence: Synthetic oligonucleotide
aguaauucagaguuauagu

SEQ ID NO: 756008 - RNA, 19 nt, Artificial Sequence
  Description of Artificial Sequence: Synthetic oligonucleotide
ugacauuagucuuuugaug

SEQ ID NO: 756009 - RNA, 19 nt, Artificial Sequence
  Description of Artificial Sequence: Synthetic oligonucleotide
gauucucucgcauugccug

SEQ ID NO: 756010 - RNA, 19 nt, Artificial Sequence
  Description of Artificial Sequence: Synthetic oligonucleotide
aggaagaaugcucagugug

SEQ ID NO: 756011 - RNA, 19 nt, Artificial Sequence
  Description of Artificial Sequence: Synthetic oligonucleotide
uacauuaauagaguguacu

SEQ ID NO: 756012 - RNA, 19 nt, Artificial Sequence
  Description of Artificial Sequence: Synthetic oligonucleotide
cuuuaauauugcaagccug

SEQ ID NO: 756013 - RNA, 19 nt, Artificial Sequence
  Description of Artificial Sequence: Synthetic oligonucleotide
cuuagaagauaacuaaguc

SEQ ID NO: 756014 - RNA, 19 nt, Artificial Sequence
  Description of Artificial Sequence: Synthetic oligonucleotide
uguacuaccucuucaguaa

SEQ ID NO: 756015 - RNA, 19 nt, Artificial Sequence
  Description of Artificial Sequence: Synthetic oligonucleotide
aguuuugaucacuaugucu

SEQ ID NO: 756016 - RNA, 19 nt, Artificial Sequence
  Description of Artificial Sequence: Synthetic oligonucleotide
guucguaacgauuauaaaa

SEQ ID NO: 756017 - RNA, 19 nt, Artificial Sequence
  Description of Artificial Sequence: Synthetic oligonucleotide
ggaaguagguaacauaaag

SEQ ID NO: 756018 - RNA, 19 nt, Artificial Sequence
  Description of Artificial Sequence: Synthetic oligonucleotide
agucaauuagcacucccag

SEQ ID NO: 756019 - RNA, 19 nt, Artificial Sequence
  Description of Artificial Sequence: Synthetic oligonucleotide
aguguacuauacauaauac

SEQ ID NO: 756020 - RNA, 19 nt, Artificial Sequence
  Description of Artificial Sequence: Synthetic oligonucleotide
uuuaaagcuccuuccuugc

SEQ ID NO: 756021 - RNA, 19 nt, Artificial Sequence
  Description of Artificial Sequence: Synthetic oligonucleotide
cuuguuacuuucuugguca

SEQ ID NO: 756022 - RNA, 19 nt, Artificial Sequence
  Description of Artificial Sequence: Synthetic oligonucleotide
acacaucuacacgagauac

SEQ ID NO: 756023 - RNA, 19 nt, Artificial Sequence
  Description of Artificial Sequence: Synthetic oligonucleotide
aauguugauuuuauaguca

SEQ ID NO: 756024 - RNA, 19 nt, Artificial Sequence
  Description of Artificial Sequence: Synthetic oligonucleotide
aucggcuucaauucccugg

SEQ ID NO: 756025 - RNA, 19 nt, Artificial Sequence
  Description of Artificial Sequence: Synthetic oligonucleotide
uguuuauacucacuuguau

SEQ ID NO: 756026 - RNA, 19 nt, Artificial Sequence
  Description of Artificial Sequence: Synthetic oligonucleotide
cuuagcugcuucuuaagug

SEQ ID NO: 756027 - RNA, 19 nt, Artificial Sequence
  Description of Artificial Sequence: Synthetic oligonucleotide
uguuuuauuggagguaagc

SEQ ID NO: 756028 - RNA, 19 nt, Artificial Sequence
  Description of Artificial Sequence: Synthetic oligonucleotide
aagagauugauggcuaaug

SEQ ID NO: 756029 - RNA, 19 nt, Artificial Sequence
  Description of Artificial Sequence: Synthetic oligonucleotide
agucacuuaaauccuauau

SEQ ID NO: 756030 - RNA, 19 nt, Artificial Sequence
  Description of Artificial Sequence: Synthetic oligonucleotide
guaucuaaauaaacaaaag

SEQ ID NO: 756031 - RNA, 19 nt, Artificial Sequence
  Description of Artificial Sequence: Synthetic oligonucleotide
uaauucagaguuauaguuu

SEQ ID NO: 756032 - RNA, 19 nt, Artificial Sequence
  Description of Artificial Sequence: Synthetic oligonucleotide
uuuaguuugugcccaguuc

SEQ ID NO: 756033 - RNA, 19 nt, Artificial Sequence
  Description of Artificial Sequence: Synthetic oligonucleotide
ugguacuuuaauauugcaa

SEQ ID NO: 756034 - RNA, 19 nt, Artificial Sequence
  Description of Artificial Sequence: Synthetic oligonucleotide
aaguuauguaauacaauca

SEQ ID NO: 756035 - RNA, 19 nt, Artificial Sequence
  Description of Artificial Sequence: Synthetic oligonucleotide
uggagguaagcucaagcug

SEQ ID NO: 756036 - RNA, 19 nt, Artificial Sequence
  Description of Artificial Sequence: Synthetic oligonucleotide
uuggagguaagcucaagcu

SEQ ID NO: 756037 - RNA, 19 nt, Artificial Sequence
  Description of Artificial Sequence: Synthetic oligonucleotide
accaucuuaguguuggaug

SEQ ID NO: 756038 - RNA, 19 nt, Artificial Sequence
  Description of Artificial Sequence: Synthetic oligonucleotide
gaguguacuauacauaaua

SEQ ID NO: 756039 - RNA, 19 nt, Artificial Sequence
  Description of Artificial Sequence: Synthetic oligonucleotide
cacuuaaugauaaaccaga

SEQ ID NO: 756040 - RNA, 19 nt, Artificial Sequence
  Description of Artificial Sequence: Synthetic oligonucleotide
uagucaauuagcacuccca

SEQ ID NO: 756041 - RNA, 19 nt, Artificial Sequence
  Description of Artificial Sequence: Synthetic oligonucleotide
ucuacuuacggcugcuggc

SEQ ID NO: 756042 - RNA, 19 nt, Artificial Sequence
  Description of Artificial Sequence: Synthetic oligonucleotide
uacacgagauaccaaucug

SEQ ID NO: 756043 - RNA, 19 nt, Artificial Sequence
  Description of Artificial Sequence: Synthetic oligonucleotide
aaggcguccuaaaauacag

SEQ ID NO: 756044 - RNA, 19 nt, Artificial Sequence
  Description of Artificial Sequence: Synthetic oligonucleotide
uuuaugcuuggucauggaa

SEQ ID NO: 756045 - RNA, 19 nt, Artificial Sequence
  Description of Artificial Sequence: Synthetic oligonucleotide
ugcauguauuacauauaag

SEQ ID NO: 756046 - RNA, 19 nt, Artificial Sequence
  Description of Artificial Sequence: Synthetic oligonucleotide
aaguucguaacgauuauaa

SEQ ID NO: 756047 - RNA, 19 nt, Artificial Sequence
  Description of Artificial Sequence: Synthetic oligonucleotide
ucuuaagugaguccuucuc

SEQ ID NO: 756048 - RNA, 19 nt, Artificial Sequence
  Description of Artificial Sequence: Synthetic oligonucleotide
uaaaggcguccuaaaauac

SEQ ID NO: 756049 - RNA, 19 nt, Artificial Sequence
  Description of Artificial Sequence: Synthetic oligonucleotide
acauauaagccaccauaag

SEQ ID NO: 756050 - RNA, 19 nt, Artificial Sequence
  Description of Artificial Sequence: Synthetic oligonucleotide
agagauugauggcuaaugu

SEQ ID NO: 756051 - RNA, 19 nt, Artificial Sequence
  Description of Artificial Sequence: Synthetic oligonucleotide
uauugggacauguuguauc

SEQ ID NO: 756052 - RNA, 19 nt, Artificial Sequence
  Description of Artificial Sequence: Synthetic oligonucleotide
ugguccucucuacuuacgg

SEQ ID NO: 756053 - RNA, 19 nt, Artificial Sequence
  Description of Artificial Sequence: Synthetic oligonucleotide
ggaaacaacuaauugguca

SEQ ID NO: 756054 - RNA, 19 nt, Artificial Sequence
  Description of Artificial Sequence: Synthetic oligonucleotide
ugauucaaguucguaacga

SEQ ID NO: 756055 - RNA, 19 nt, Artificial Sequence
  Description of Artificial Sequence: Synthetic oligonucleotide
gacuagacagaguuuuaug

SEQ ID NO: 756056 - RNA, 19 nt, Artificial Sequence
  Description of Artificial Sequence: Synthetic oligonucleotide
uaauauugcaagccugcuc

SEQ ID NO: 756057 - RNA, 19 nt, Artificial Sequence
  Description of Artificial Sequence: Synthetic oligonucleotide
aucuacacgagauaccaau

SEQ ID NO: 756058 - RNA, 19 nt, Artificial Sequence
  Description of Artificial Sequence: Synthetic oligonucleotide
acuaauuggucacuguuua

SEQ ID NO: 756059 - RNA, 19 nt, Artificial Sequence
  Description of Artificial Sequence: Synthetic oligonucleotide
uguuaaucaacugccaaua

SEQ ID NO: 756060 - RNA, 19 nt, Artificial Sequence
  Description of Artificial Sequence: Synthetic oligonucleotide
uuaagugaguccuucucau

SEQ ID NO: 756061 - RNA, 19 nt, Artificial Sequence
  Description of Artificial Sequence: Synthetic oligonucleotide
aagaauccaugcauuaugu

SEQ ID NO: 756062 - RNA, 19 nt, Artificial Sequence
  Description of Artificial Sequence: Synthetic oligonucleotide
gagacugauacaugggaca

SEQ ID NO: 756063 - RNA, 19 nt, Artificial Sequence
  Description of Artificial Sequence: Synthetic oligonucleotide
uuuaguggagucuuauguu

SEQ ID NO: 756064 - RNA, 19 nt, Artificial Sequence
  Description of Artificial Sequence: Synthetic oligonucleotide
acacacacacacaauagag

SEQ ID NO: 756065 - RNA, 19 nt, Artificial Sequence
  Description of Artificial Sequence: Synthetic oligonucleotide
guuauaguuuaguggaguc

SEQ ID NO: 756066 - RNA, 19 nt, Artificial Sequence
  Description of Artificial Sequence: Synthetic oligonucleotide
caaagcgccuucaaaauca

SEQ ID NO: 756067 - RNA, 19 nt, Artificial Sequence
  Description of Artificial Sequence: Synthetic oligonucleotide
acacuuaaugauaaaccag

SEQ ID NO: 756068 - RNA, 19 nt, Artificial Sequence
  Description of Artificial Sequence: Synthetic oligonucleotide
agacuaaucaacuccuuua

SEQ ID NO: 756069 - RNA, 19 nt, Artificial Sequence
  Description of Artificial Sequence: Synthetic oligonucleotide
gcgaaaccaauguagaaag

SEQ ID NO: 756070 - RNA, 19 nt, Artificial Sequence
  Description of Artificial Sequence: Synthetic oligonucleotide
uuauaguuuaguggagucu

SEQ ID NO: 756071 - RNA, 19 nt, Artificial Sequence
  Description of Artificial Sequence: Synthetic oligonucleotide
agugccuugcauguauuac

SEQ ID NO: 756072 - RNA, 19 nt, Artificial Sequence
  Description of Artificial Sequence: Synthetic oligonucleotide
uucaacacacacacacaca

SEQ ID NO: 756073 - RNA, 19 nt, Artificial Sequence
  Description of Artificial Sequence: Synthetic oligonucleotide
cauaucuguuuauacucac

SEQ ID NO: 756074 - RNA, 19 nt, Artificial Sequence
  Description of Artificial Sequence: Synthetic oligonucleotide
ucaaagcgccuucaaaauc

SEQ ID NO: 756075 - RNA, 19 nt, Artificial Sequence
  Description of Artificial Sequence: Synthetic oligonucleotide
auguuaaucaacugccaau

SEQ ID NO: 756076 - RNA, 19 nt, Artificial Sequence
  Description of Artificial Sequence: Synthetic oligonucleotide
gauaccaaucugauucaag

SEQ ID NO: 756077 - RNA, 19 nt, Artificial Sequence
  Description of Artificial Sequence: Synthetic oligonucleotide
acauuaauagaguguacua

SEQ ID NO: 756078 - RNA, 19 nt, Artificial Sequence
  Description of Artificial Sequence: Synthetic oligonucleotide
cuuaacugagaacauaucu

SEQ ID NO: 756079 - RNA, 19 nt, Artificial Sequence
  Description of Artificial Sequence: Synthetic oligonucleotide
aggaggucuuccuuugagg

SEQ ID NO: 756080 - RNA, 19 nt, Artificial Sequence
  Description of Artificial Sequence: Synthetic oligonucleotide
uaugcaucuacuugucuua

SEQ ID NO: 756081 - RNA, 19 nt, Artificial Sequence
  Description of Artificial Sequence: Synthetic oligonucleotide
guguacuauacauaauaca

SEQ ID NO: 756082 - RNA, 19 nt, Artificial Sequence
  Description of Artificial Sequence: Synthetic oligonucleotide
caggaaguagguaacauaa

SEQ ID NO: 756083 - RNA, 19 nt, Artificial Sequence
  Description of Artificial Sequence: Synthetic oligonucleotide
uuauugagacaauguacaa

SEQ ID NO: 756084 - RNA, 19 nt, Artificial Sequence
  Description of Artificial Sequence: Synthetic oligonucleotide
uuacauuaauagaguguac

SEQ ID NO: 756085 - RNA, 19 nt, Artificial Sequence
  Description of Artificial Sequence: Synthetic oligonucleotide
ugugacccucagcauaaag

SEQ ID NO: 756086 - RNA, 19 nt, Artificial Sequence
  Description of Artificial Sequence: Synthetic oligonucleotide
uacauggcauuauggaaac

SEQ ID NO: 756087 - RNA, 19 nt, Artificial Sequence
  Description of Artificial Sequence: Synthetic oligonucleotide
caccuguugagguauaguc

SEQ ID NO: 756088 - RNA, 19 nt, Artificial Sequence
  Description of Artificial Sequence: Synthetic oligonucleotide
ugcuagucacuuaaauccu

SEQ ID NO: 756089 - RNA, 19 nt, Artificial Sequence
  Description of Artificial Sequence: Synthetic oligonucleotide
guuuaguggagucuuaugu

SEQ ID NO: 756090 - RNA, 19 nt, Artificial Sequence
  Description of Artificial Sequence: Synthetic oligonucleotide
uuguacuaccucuucagua

SEQ ID NO: 756091 - RNA, 19 nt, Artificial Sequence
  Description of Artificial Sequence: Synthetic oligonucleotide
acauuuauugagacaaugu

SEQ ID NO: 756092 - RNA, 19 nt, Artificial Sequence
  Description of Artificial Sequence: Synthetic oligonucleotide
cuuaaugauaaaccagaga

SEQ ID NO: 756093 - RNA, 19 nt, Artificial Sequence
  Description of Artificial Sequence: Synthetic oligonucleotide
cauguuguauccugggauc

SEQ ID NO: 756094 - RNA, 19 nt, Artificial Sequence
  Description of Artificial Sequence: Synthetic oligonucleotide
ucuacacgagauaccaauc

SEQ ID NO: 756095 - RNA, 19 nt, Artificial Sequence
  Description of Artificial Sequence: Synthetic oligonucleotide
uucuauauuucuucagcuu

SEQ ID NO: 756096 - RNA, 19 nt, Artificial Sequence
  Description of Artificial Sequence: Synthetic oligonucleotide
gaaaaugucacugcagugu

SEQ ID NO: 756097 - RNA, 19 nt, Artificial Sequence
  Description of Artificial Sequence: Synthetic oligonucleotide
uauugagacaauguacaau

SEQ ID NO: 756098 - RNA, 19 nt, Artificial Sequence
  Description of Artificial Sequence: Synthetic oligonucleotide
aguuauaguuuaguggagu

SEQ ID NO: 756099 - RNA, 19 nt, Artificial Sequence
  Description of Artificial Sequence: Synthetic oligonucleotide
ucccuaauuugaaccaaga

SEQ ID NO: 756100 - RNA, 19 nt, Artificial Sequence
  Description of Artificial Sequence: Synthetic oligonucleotide
aaaggcguccuaaaauaca

SEQ ID NO: 756101 - RNA, 19 nt, Artificial Sequence
  Description of Artificial Sequence: Synthetic oligonucleotide
ucguaacgauuauaaaagu

SEQ ID NO: 756102 - RNA, 19 nt, Artificial Sequence
  Description of Artificial Sequence: Synthetic oligonucleotide
aaauugagacugauacaug

SEQ ID NO: 756103 - RNA, 19 nt, Artificial Sequence
  Description of Artificial Sequence: Synthetic oligonucleotide
cuagcuuuauucuugggcu

SEQ ID NO: 756104 - RNA, 19 nt, Artificial Sequence
  Description of Artificial Sequence: Synthetic oligonucleotide
uauagcagguggcauguuu

SEQ ID NO: 756105 - RNA, 19 nt, Artificial Sequence
  Description of Artificial Sequence: Synthetic oligonucleotide
auacauggcauuauggaaa

SEQ ID NO: 756106 - RNA, 19 nt, Artificial Sequence
  Description of Artificial Sequence: Synthetic oligonucleotide
uuaauauugcaagccugcu

SEQ ID NO: 756107 - RNA, 19 nt, Artificial Sequence
  Description of Artificial Sequence: Synthetic oligonucleotide
aggauaccuauaaaauuuc

SEQ ID NO: 756108 - RNA, 19 nt, Artificial Sequence
  Description of Artificial Sequence: Synthetic oligonucleotide
cuucaguaaggcaaaggca

SEQ ID NO: 756109 - RNA, 19 nt, Artificial Sequence
  Description of Artificial Sequence: Synthetic oligonucleotide
aagguuucauucacacauc

SEQ ID NO: 756110 - RNA, 19 nt, Artificial Sequence
  Description of Artificial Sequence: Synthetic oligonucleotide
cacaucuacacgagauacc

SEQ ID NO: 756111 - RNA, 19 nt, Artificial Sequence
  Description of Artificial Sequence: Synthetic oligonucleotide
ucggcuucaauucccuggu

SEQ ID NO: 756112 - RNA, 19 nt, Artificial Sequence
  Description of Artificial Sequence: Synthetic oligonucleotide
acuccuuuauucuaaccua

SEQ ID NO: 756113 - RNA, 19 nt, Artificial Sequence
  Description of Artificial Sequence: Synthetic oligonucleotide
cuauaugcaucuacuuguc

SEQ ID NO: 756114 - RNA, 19 nt, Artificial Sequence
  Description of Artificial Sequence: Synthetic oligonucleotide
uacucacuuguaucugucc

SEQ ID NO: 756115 - RNA, 19 nt, Artificial Sequence
  Description of Artificial Sequence: Synthetic oligonucleotide
uuaaagcuccuuccuugcu

SEQ ID NO: 756116 - RNA, 19 nt, Artificial Sequence
  Description of Artificial Sequence: Synthetic oligonucleotide
uguagaugcuggguaaaac

SEQ ID NO: 756117 - RNA, 19 nt, Artificial Sequence
  Description of Artificial Sequence: Synthetic oligonucleotide
uaguggagucuuauguuaa

SEQ ID NO: 756118 - RNA, 19 nt, Artificial Sequence
  Description of Artificial Sequence: Synthetic oligonucleotide
ccaucuuaguguuggaugc

SEQ ID NO: 756119 - RNA, 19 nt, Artificial Sequence
  Description of Artificial Sequence: Synthetic oligonucleotide
aacuaauuggucacuguuu

SEQ ID NO: 756120 - RNA, 19 nt, Artificial Sequence
  Description of Artificial Sequence: Synthetic oligonucleotide
caugccaucaucuuacccu

SEQ ID NO: 756121 - RNA, 19 nt, Artificial Sequence
  Description of Artificial Sequence: Synthetic oligonucleotide
uuuuaugcuuggucaugga

SEQ ID NO: 756122 - RNA, 19 nt, Artificial Sequence
  Description of Artificial Sequence: Synthetic oligonucleotide
aucucuagcuuuauucuug

SEQ ID NO: 756123 - RNA, 19 nt, Artificial Sequence
  Description of Artificial Sequence: Synthetic oligonucleotide
aguuuuaguuugugcccag

SEQ ID NO: 756124 - RNA, 19 nt, Artificial Sequence
  Description of Artificial Sequence: Synthetic oligonucleotide
ucgcauugccugauuauuc

SEQ ID NO: 756125 - RNA, 19 nt, Artificial Sequence
  Description of Artificial Sequence: Synthetic oligonucleotide
uuaguguuggaugcacaca

SEQ ID NO: 756126 - RNA, 19 nt, Artificial Sequence
  Description of Artificial Sequence: Synthetic oligonucleotide
aaacaacuaauuggucacu

SEQ ID NO: 756127 - RNA, 19 nt, Artificial Sequence
  Description of Artificial Sequence: Synthetic oligonucleotide
acaaaucaguuucuuugau

SEQ ID NO: 756128 - RNA, 19 nt, Artificial Sequence
  Description of Artificial Sequence: Synthetic oligonucleotide
augcauuuauaaucucaca

SEQ ID NO: 756129 - RNA, 19 nt, Artificial Sequence
  Description of Artificial Sequence: Synthetic oligonucleotide
ggcguccuaaaauacagac

SEQ ID NO: 756130 - RNA, 19 nt, Artificial Sequence
  Description of Artificial Sequence: Synthetic oligonucleotide
gcuuucaugacauuagucu

SEQ ID NO: 756131 - RNA, 19 nt, Artificial Sequence
  Description of Artificial Sequence: Synthetic oligonucleotide
augggaaugacagaagcuu

SEQ ID NO: 756132 - RNA, 19 nt, Artificial Sequence
  Description of Artificial Sequence: Synthetic oligonucleotide
agcuauugggacauguugu

SEQ ID NO: 756133 - RNA, 19 nt, Artificial Sequence
  Description of Artificial Sequence: Synthetic oligonucleotide
guuugugcccaguuccagc

SEQ ID NO: 756134 - RNA, 19 nt, Artificial Sequence
  Description of Artificial Sequence: Synthetic oligonucleotide
caucaucggcuucaauucc

SEQ ID NO: 756135 - RNA, 19 nt, Artificial Sequence
  Description of Artificial Sequence: Synthetic oligonucleotide
acacacacacacacaauag

SEQ ID NO: 756136 - RNA, 19 nt, Artificial Sequence
  Description of Artificial Sequence: Synthetic oligonucleotide
gaguuauaguuuaguggag

SEQ ID NO: 756137 - RNA, 19 nt, Artificial Sequence
  Description of Artificial Sequence: Synthetic oligonucleotide
aguucguaacgauuauaaa

SEQ ID NO: 756138 - RNA, 19 nt, Artificial Sequence
  Description of Artificial Sequence: Synthetic oligonucleotide
ucaucggcuucaauucccu

SEQ ID NO: 756139 - RNA, 19 nt, Artificial Sequence
  Description of Artificial Sequence: Synthetic oligonucleotide
cacauuuguuuauucacaa

SEQ ID NO: 756140 - RNA, 19 nt, Artificial Sequence
  Description of Artificial Sequence: Synthetic oligonucleotide
ugggaaugacagaagcuuu

SEQ ID NO: 756141 - RNA, 19 nt, Artificial Sequence
  Description of Artificial Sequence: Synthetic oligonucleotide
cauguuuuauuggagguaa

SEQ ID NO: 756142 - RNA, 19 nt, Artificial Sequence
  Description of Artificial Sequence: Synthetic oligonucleotide
aaagcgccuucaaaaucag

SEQ ID NO: 756143 - RNA, 19 nt, Artificial Sequence
  Description of Artificial Sequence: Synthetic oligonucleotide
uaauguguauuugguugca

SEQ ID NO: 756144 - RNA, 19 nt, Artificial Sequence
  Description of Artificial Sequence: Synthetic oligonucleotide
guaagcucaagcuguaggu

SEQ ID NO: 756145 - RNA, 19 nt, Artificial Sequence
  Description of Artificial Sequence: Synthetic oligonucleotide
uugcagaguuugaaaguuc

SEQ ID NO: 756146 - RNA, 19 nt, Artificial Sequence
  Description of Artificial Sequence: Synthetic oligonucleotide
acauaucuguuuauacuca

SEQ ID NO: 756147 - RNA, 19 nt, Artificial Sequence
  Description of Artificial Sequence: Synthetic oligonucleotide
agacagaguuuuaugcuug

SEQ ID NO: 756148 - RNA, 19 nt, Artificial Sequence
  Description of Artificial Sequence: Synthetic oligonucleotide
uggaugcacacaguuggug

SEQ ID NO: 756149 - RNA, 19 nt, Artificial Sequence
  Description of Artificial Sequence: Synthetic oligonucleotide
acuaaucaacuccuuuauu

SEQ ID NO: 756150 - RNA, 19 nt, Artificial Sequence
  Description of Artificial Sequence: Synthetic oligonucleotide
cuagacagaguuuuaugcu

SEQ ID NO: 756151 - RNA, 19 nt, Artificial Sequence
  Description of Artificial Sequence: Synthetic oligonucleotide
aaagcuauugggacauguu

SEQ ID NO: 756152 - RNA, 19 nt, Artificial Sequence
  Description of Artificial Sequence: Synthetic oligonucleotide
auuucaacacacacacaca

SEQ ID NO: 756153 - RNA, 19 nt, Artificial Sequence
  Description of Artificial Sequence: Synthetic oligonucleotide
aaucugauucaaguucgua

SEQ ID NO: 756154 - RNA, 19 nt, Artificial Sequence
  Description of Artificial Sequence: Synthetic oligonucleotide
cacacacacacacacaaua

SEQ ID NO: 756155 - RNA, 19 nt, Artificial Sequence
  Description of Artificial Sequence: Synthetic oligonucleotide
aauguguauuugguugcau

SEQ ID NO: 756156 - RNA, 19 nt, Artificial Sequence
  Description of Artificial Sequence: Synthetic oligonucleotide
gacuaaucaacuccuuuau

SEQ ID NO: 756157 - RNA, 19 nt, Artificial Sequence
  Description of Artificial Sequence: Synthetic oligonucleotide
auggcuaauguugauuuua

SEQ ID NO: 756158 - RNA, 19 nt, Artificial Sequence
  Description of Artificial Sequence: Synthetic oligonucleotide
gucaauuagcacucccaga

SEQ ID NO: 756159 - RNA, 19 nt, Artificial Sequence
  Description of Artificial Sequence: Synthetic oligonucleotide
cacacacacacacaauaga

SEQ ID NO: 756160 - RNA, 19 nt, Artificial Sequence
  Description of Artificial Sequence: Synthetic oligonucleotide
aagugccuugcauguauua

SEQ ID NO: 756161 - RNA, 19 nt, Artificial Sequence
  Description of Artificial Sequence: Synthetic oligonucleotide
auccuauaugcaucuacuu

SEQ ID NO: 756162 - RNA, 19 nt, Artificial Sequence
  Description of Artificial Sequence: Synthetic oligonucleotide
uccacuagcugcaguuuua

SEQ ID NO: 756163 - RNA, 19 nt, Artificial Sequence
  Description of Artificial Sequence: Synthetic oligonucleotide
cucuagcuuuauucuuggg

SEQ ID NO: 756164 - RNA, 19 nt, Artificial Sequence
  Description of Artificial Sequence: Synthetic oligonucleotide
uccacuuaaaggcguccua

SEQ ID NO: 756165 - RNA, 19 nt, Artificial Sequence
  Description of Artificial Sequence: Synthetic oligonucleotide
guuaaucaacugccaauaa

SEQ ID NO: 756166 - RNA, 19 nt, Artificial Sequence
  Description of Artificial Sequence: Synthetic oligonucleotide
aaacagccaccuuguuacu

SEQ ID NO: 756167 - RNA, 19 nt, Artificial Sequence
  Description of Artificial Sequence: Synthetic oligonucleotide
gauucaaguucguaacgau

SEQ ID NO: 756168 - RNA, 19 nt, Artificial Sequence
  Description of Artificial Sequence: Synthetic oligonucleotide
uaguuuaguggagucuuau

SEQ ID NO: 756169 - RNA, 19 nt, Artificial Sequence
  Description of Artificial Sequence: Synthetic oligonucleotide
aaccaagaauccaugcauu

SEQ ID NO: 756170 - RNA, 19 nt, Artificial Sequence
  Description of Artificial Sequence: Synthetic oligonucleotide
aguggagucuuauguuaau

SEQ ID NO: 756171 - RNA, 19 nt, Artificial Sequence
  Description of Artificial Sequence: Synthetic oligonucleotide
augauaaaccagagaugag

SEQ ID NO: 756172 - RNA, 19 nt, Artificial Sequence
  Description of Artificial Sequence: Synthetic oligonucleotide
auggcgaaaccaauguaga

SEQ ID NO: 756173 - RNA, 19 nt, Artificial Sequence
  Description of Artificial Sequence: Synthetic oligonucleotide
auucucucgcauugccuga

SEQ ID NO: 756174 - RNA, 19 nt, Artificial Sequence
  Description of Artificial Sequence: Synthetic oligonucleotide
acuaugucuugaaaucuaa

SEQ ID NO: 756175 - RNA, 19 nt, Artificial Sequence
  Description of Artificial Sequence: Synthetic oligonucleotide
uaagcucaagcuguagguu

SEQ ID NO: 756176 - RNA, 19 nt, Artificial Sequence
  Description of Artificial Sequence: Synthetic oligonucleotide
cugcccgguaucucuuugg

SEQ ID NO: 756177 - RNA, 19 nt, Artificial Sequence
  Description of Artificial Sequence: Synthetic oligonucleotide
agcaaaguuccugaauuuu

SEQ ID NO: 756178 - RNA, 19 nt, Artificial Sequence
  Description of Artificial Sequence: Synthetic oligonucleotide
uuagcacucccagacuaau

SEQ ID NO: 756179 - RNA, 19 nt, Artificial Sequence
  Description of Artificial Sequence: Synthetic oligonucleotide
gacugauacaugggacagc

SEQ ID NO: 756180 - RNA, 19 nt, Artificial Sequence
  Description of Artificial Sequence: Synthetic oligonucleotide
ccauauguaauauaguaau

SEQ ID NO: 756181 - RNA, 19 nt, Artificial Sequence
  Description of Artificial Sequence: Synthetic oligonucleotide
uacagacaaccaucuuagu

SEQ ID NO: 756182 - RNA, 19 nt, Artificial Sequence
  Description of Artificial Sequence: Synthetic oligonucleotide
auucaaguucguaacgauu

SEQ ID NO: 756183 - RNA, 19 nt, Artificial Sequence
  Description of Artificial Sequence: Synthetic oligonucleotide
agaggaaauugagacugau

SEQ ID NO: 756184 - RNA, 19 nt, Artificial Sequence
  Description of Artificial Sequence: Synthetic oligonucleotide
ucaccuguugagguauagu

SEQ ID NO: 756185 - RNA, 19 nt, Artificial Sequence
  Description of Artificial Sequence: Synthetic oligonucleotide
ggggauauauugauggaga

SEQ ID NO: 756186 - RNA, 19 nt, Artificial Sequence
  Description of Artificial Sequence: Synthetic oligonucleotide
agugugacccucagcauaa

SEQ ID NO: 756187 - RNA, 19 nt, Artificial Sequence
  Description of Artificial Sequence: Synthetic oligonucleotide
aucaccuguugagguauag

SEQ ID NO: 756188 - RNA, 19 nt, Artificial Sequence
  Description of Artificial Sequence: Synthetic oligonucleotide
guaaggcaaaggcaggagu

SEQ ID NO: 756189 - RNA, 19 nt, Artificial Sequence
  Description of Artificial Sequence: Synthetic oligonucleotide
guaucucuuuggaagcuga

SEQ ID NO: 756190 - RNA, 19 nt, Artificial Sequence
  Description of Artificial Sequence: Synthetic oligonucleotide
uagcacucccagacuaauc

SEQ ID NO: 756191 - RNA, 19 nt, Artificial Sequence
  Description of Artificial Sequence: Synthetic oligonucleotide
agccugguacuuaacugag

SEQ ID NO: 756192 - RNA, 19 nt, Artificial Sequence
  Description of Artificial Sequence: Synthetic oligonucleotide
gcuuggucauggaaaacag

SEQ ID NO: 756193 - RNA, 19 nt, Artificial Sequence
  Description of Artificial Sequence: Synthetic oligonucleotide
gaguuuuaugcuuggucau

SEQ ID NO: 756194 - RNA, 19 nt, Artificial Sequence
  Description of Artificial Sequence: Synthetic oligonucleotide
cauuaauagaguguacuau

SEQ ID NO: 756195 - RNA, 19 nt, Artificial Sequence
  Description of Artificial Sequence: Synthetic oligonucleotide
cacuaugucuugaaaucua

SEQ ID NO: 756196 - RNA, 19 nt, Artificial Sequence
  Description of Artificial Sequence: Synthetic oligonucleotide
acgagauaccaaucugauu

SEQ ID NO: 756197 - RNA, 19 nt, Artificial Sequence
  Description of Artificial Sequence: Synthetic oligonucleotide
cacacacacacaauagagu

SEQ ID NO: 756198 - RNA, 19 nt, Artificial Sequence
  Description of Artificial Sequence: Synthetic oligonucleotide
guuguauccugggaucauc

SEQ ID NO: 756199 - RNA, 19 nt, Artificial Sequence
  Description of Artificial Sequence: Synthetic oligonucleotide
ugguugcaugguaucuaaa

SEQ ID NO: 756200 - RNA, 19 nt, Artificial Sequence
  Description of Artificial Sequence: Synthetic oligonucleotide
auguuuuauuggagguaag

SEQ ID NO: 756201 - RNA, 19 nt, Artificial Sequence
  Description of Artificial Sequence: Synthetic oligonucleotide
aagacuagacagaguuuua

SEQ ID NO: 756202 - RNA, 19 nt, Artificial Sequence
  Description of Artificial Sequence: Synthetic oligonucleotide
ggcgaaaccaauguagaaa

SEQ ID NO: 756203 - RNA, 19 nt, Artificial Sequence
  Description of Artificial Sequence: Synthetic oligonucleotide
ggaagaaugcucaguguga

SEQ ID NO: 756204 - RNA, 19 nt, Artificial Sequence
  Description of Artificial Sequence: Synthetic oligonucleotide
cauuagcaaaguuccugaa

SEQ ID NO: 756205 - RNA, 19 nt, Artificial Sequence
  Description of Artificial Sequence: Synthetic oligonucleotide
cuguccacuuaaaggcguc

SEQ ID NO: 756206 - RNA, 19 nt, Artificial Sequence
  Description of Artificial Sequence: Synthetic oligonucleotide
uauugcaagccugcuccau

SEQ ID NO: 756207 - RNA, 19 nt, Artificial Sequence
  Description of Artificial Sequence: Synthetic oligonucleotide
uguuguauccugggaucau

SEQ ID NO: 756208 - RNA, 19 nt, Artificial Sequence
  Description of Artificial Sequence: Synthetic oligonucleotide
auauaguaauucagaguua

SEQ ID NO: 756209 - RNA, 19 nt, Artificial Sequence
  Description of Artificial Sequence: Synthetic oligonucleotide
caacacacacacacacaca

SEQ ID NO: 756210 - RNA, 19 nt, Artificial Sequence
  Description of Artificial Sequence: Synthetic oligonucleotide
auuagucuuuugaugcauu

SEQ ID NO: 756211 - RNA, 19 nt, Artificial Sequence
  Description of Artificial Sequence: Synthetic oligonucleotide
aucucacaaaucaguuucu

SEQ ID NO: 756212 - RNA, 19 nt, Artificial Sequence
  Description of Artificial Sequence: Synthetic oligonucleotide
gguugcaugguaucuaaau

SEQ ID NO: 756213 - RNA, 19 nt, Artificial Sequence
  Description of Artificial Sequence: Synthetic oligonucleotide
gguaucucuuuggaagcug

SEQ ID NO: 756214 - RNA, 19 nt, Artificial Sequence
  Description of Artificial Sequence: Synthetic oligonucleotide
guuauguaauacaaucauu

SEQ ID NO: 756215 - RNA, 19 nt, Artificial Sequence
  Description of Artificial Sequence: Synthetic oligonucleotide
ccuugcauguauuacauau

SEQ ID NO: 756216 - RNA, 19 nt, Artificial Sequence
  Description of Artificial Sequence: Synthetic oligonucleotide
aaagugccuugcauguauu

SEQ ID NO: 756217 - RNA, 19 nt, Artificial Sequence
  Description of Artificial Sequence: Synthetic oligonucleotide
auuagcacucccagacuaa

SEQ ID NO: 756218 - RNA, 19 nt, Artificial Sequence
  Description of Artificial Sequence: Synthetic oligonucleotide
uaaauccuauaugcaucua

SEQ ID NO: 756219 - RNA, 19 nt, Artificial Sequence
  Description of Artificial Sequence: Synthetic oligonucleotide
cuagucacuuaaauccuau

SEQ ID NO: 756220 - RNA, 19 nt, Artificial Sequence
  Description of Artificial Sequence: Synthetic oligonucleotide
gcaugccaucaucuuaccc

SEQ ID NO: 756221 - RNA, 19 nt, Artificial Sequence
  Description of Artificial Sequence: Synthetic oligonucleotide
cagugugacccucagcaua

SEQ ID NO: 756222 - RNA, 19 nt, Artificial Sequence
  Description of Artificial Sequence: Synthetic oligonucleotide
cacacaucuacacgagaua

SEQ ID NO: 756223 - RNA, 19 nt, Artificial Sequence
  Description of Artificial Sequence: Synthetic oligonucleotide
uacuuacggcugcuggcuu

SEQ ID NO: 756224 - RNA, 19 nt, Artificial Sequence
  Description of Artificial Sequence: Synthetic oligonucleotide
caugaauggcgaaaccaau

SEQ ID NO: 756225 - RNA, 19 nt, Artificial Sequence
  Description of Artificial Sequence: Synthetic oligonucleotide
guauuugguugcaugguau

SEQ ID NO: 756226 - RNA, 19 nt, Artificial Sequence
  Description of Artificial Sequence: Synthetic oligonucleotide
aggaaguagguaacauaaa

SEQ ID NO: 756227 - RNA, 19 nt, Artificial Sequence
  Description of Artificial Sequence: Synthetic oligonucleotide
gcuauugggacauguugua

SEQ ID NO: 756228 - RNA, 19 nt, Artificial Sequence
  Description of Artificial Sequence: Synthetic oligonucleotide
guugagguauagucuguau

SEQ ID NO: 756229 - RNA, 19 nt, Artificial Sequence
  Description of Artificial Sequence: Synthetic oligonucleotide
cacgagauaccaaucugau

SEQ ID NO: 756230 - RNA, 19 nt, Artificial Sequence
  Description of Artificial Sequence: Synthetic oligonucleotide
gaagagauugauggcuaau

SEQ ID NO: 756231 - RNA, 19 nt, Artificial Sequence
  Description of Artificial Sequence: Synthetic oligonucleotide
cuaugucuugaaaucuaau

SEQ ID NO: 756232 - RNA, 19 nt, Artificial Sequence
  Description of Artificial Sequence: Synthetic oligonucleotide
cguaacgauuauaaaagua

SEQ ID NO: 756233 - RNA, 19 nt, Artificial Sequence
  Description of Artificial Sequence: Synthetic oligonucleotide
gauggcuaauguugauuuu

SEQ ID NO: 756234 - RNA, 19 nt, Artificial Sequence
  Description of Artificial Sequence: Synthetic oligonucleotide
gcuucaauucccugguccu

SEQ ID NO: 756235 - RNA, 19 nt, Artificial Sequence
  Description of Artificial Sequence: Synthetic oligonucleotide
guuugcaugccaucaucuu

SEQ ID NO: 756236 - RNA, 19 nt, Artificial Sequence
  Description of Artificial Sequence: Synthetic oligonucleotide
cuacuuacggcugcuggcu

SEQ ID NO: 756237 - RNA, 19 nt, Artificial Sequence
  Description of Artificial Sequence: Synthetic oligonucleotide
acacacacacacacacaau

SEQ ID NO: 756238 - RNA, 19 nt, Artificial Sequence
  Description of Artificial Sequence: Synthetic oligonucleotide
caucuacuugucuuauaau

SEQ ID NO: 756239 - RNA, 19 nt, Artificial Sequence
  Description of Artificial Sequence: Synthetic oligonucleotide
aggcguccuaaaauacaga

SEQ ID NO: 756240 - RNA, 19 nt, Artificial Sequence
  Description of Artificial Sequence: Synthetic oligonucleotide
gcguccuaaaauacagaca

SEQ ID NO: 756241 - RNA, 19 nt, Artificial Sequence
  Description of Artificial Sequence: Synthetic oligonucleotide
cauuagucuuuugaugcau

SEQ ID NO: 756242 - RNA, 19 nt, Artificial Sequence
  Description of Artificial Sequence: Synthetic oligonucleotide
cccuaauuugaaccaagaa

SEQ ID NO: 756243 - RNA, 19 nt, Artificial Sequence
  Description of Artificial Sequence: Synthetic oligonucleotide
cuguagaugcuggguaaaa

SEQ ID NO: 756244 - RNA, 19 nt, Artificial Sequence
  Description of Artificial Sequence: Synthetic oligonucleotide
auuuugcacuuggcuucca

SEQ ID NO: 756245 - RNA, 19 nt, Artificial Sequence
  Description of Artificial Sequence: Synthetic oligonucleotide
guuuuaguuugugcccagu

SEQ ID NO: 756246 - RNA, 19 nt, Artificial Sequence
  Description of Artificial Sequence: Synthetic oligonucleotide
cccagacuaaucaacuccu

SEQ ID NO: 756247 - RNA, 19 nt, Artificial Sequence
  Description of Artificial Sequence: Synthetic oligonucleotide
gguuucauucacacaucua

SEQ ID NO: 756248 - RNA, 19 nt, Artificial Sequence
  Description of Artificial Sequence: Synthetic oligonucleotide
cuuacggcugcuggcuuua

SEQ ID NO: 756249 - RNA, 19 nt, Artificial Sequence
  Description of Artificial Sequence: Synthetic oligonucleotide
gcuagucacuuaaauccua

SEQ ID NO: 756250 - RNA, 19 nt, Artificial Sequence
  Description of Artificial Sequence: Synthetic oligonucleotide
cucgcauugccugauuauu

SEQ ID NO: 756251 - RNA, 19 nt, Artificial Sequence
  Description of Artificial Sequence: Synthetic oligonucleotide
gcacucccagacuaaucaa

SEQ ID NO: 756252 - RNA, 19 nt, Artificial Sequence
  Description of Artificial Sequence: Synthetic oligonucleotide
uuacggcugcuggcuuuaa

SEQ ID NO: 756253 - RNA, 19 nt, Artificial Sequence
  Description of Artificial Sequence: Synthetic oligonucleotide
caucaccuguugagguaua

SEQ ID NO: 756254 - RNA, 19 nt, Artificial Sequence
  Description of Artificial Sequence: Synthetic oligonucleotide
ggguaaaaccaugucucau

SEQ ID NO: 756255 - RNA, 19 nt, Artificial Sequence
  Description of Artificial Sequence: Synthetic oligonucleotide
gcauugccugauuauucuu

SEQ ID NO: 756256 - RNA, 19 nt, Artificial Sequence
  Description of Artificial Sequence: Synthetic oligonucleotide
gccugguacuuaacugaga

SEQ ID NO: 756257 - RNA, 19 nt, Artificial Sequence
  Description of Artificial Sequence: Synthetic oligonucleotide
gccuugcauguauuacaua

SEQ ID NO: 756258 - RNA, 19 nt, Artificial Sequence
  Description of Artificial Sequence: Synthetic oligonucleotide
ccaagaauccaugcauuau

SEQ ID NO: 756259 - RNA, 19 nt, Artificial Sequence
  Description of Artificial Sequence: Synthetic oligonucleotide
gcugaacucugaagaauuu

SEQ ID NO: 756260 - RNA, 19 nt, Artificial Sequence
  Description of Artificial Sequence: Synthetic oligonucleotide
acuuaauucaaauaggguc

SEQ ID NO: 756261 - RNA, 19 nt, Artificial Sequence
  Description of Artificial Sequence: Synthetic oligonucleotide
uuuauuacuauaaucacaa

SEQ ID NO: 756262 - RNA, 19 nt, Artificial Sequence
  Description of Artificial Sequence: Synthetic oligonucleotide
uuugauucgauucuaggag

SEQ ID NO: 756263 - RNA, 19 nt, Artificial Sequence
  Description of Artificial Sequence: Synthetic oligonucleotide
ucuagcaugacuucuacag

SEQ ID NO: 756264 - RNA, 19 nt, Artificial Sequence
  Description of Artificial Sequence: Synthetic oligonucleotide
uuauuuaagacacaauagu

SEQ ID NO: 756265 - RNA, 19 nt, Artificial Sequence
  Description of Artificial Sequence: Synthetic oligonucleotide
acaaggauaacguuaucgc

SEQ ID NO: 756266 - RNA, 19 nt, Artificial Sequence
  Description of Artificial Sequence: Synthetic oligonucleotide
aauaguguucaauucagca

SEQ ID NO: 756267 - RNA, 19 nt, Artificial Sequence
  Description of Artificial Sequence: Synthetic oligonucleotide
aacaaggauaacguuaucg

SEQ ID NO: 756268 - RNA, 19 nt, Artificial Sequence
  Description of Artificial Sequence: Synthetic oligonucleotide
ucagaauuaccuagcaugg

SEQ ID NO: 756269 - RNA, 19 nt, Artificial Sequence
  Description of Artificial Sequence: Synthetic oligonucleotide
uuuguuguuacucuauaug

SEQ ID NO: 756270 - RNA, 19 nt, Artificial Sequence
  Description of Artificial Sequence: Synthetic oligonucleotide
uuuuauuacuauaaucaca

SEQ ID NO: 756271 - RNA, 19 nt, Artificial Sequence
  Description of Artificial Sequence: Synthetic oligonucleotide
uguaauaaaaugucagcgc

SEQ ID NO: 756272 - RNA, 19 nt, Artificial Sequence
  Description of Artificial Sequence: Synthetic oligonucleotide
aaucauaauuucuguacag

SEQ ID NO: 756273 - RNA, 19 nt, Artificial Sequence
  Description of Artificial Sequence: Synthetic oligonucleotide
uucaaauagggucaggaca

SEQ ID NO: 756274 - RNA, 19 nt, Artificial Sequence
  Description of Artificial Sequence: Synthetic oligonucleotide
uuuucgaauuguuuuagag

SEQ ID NO: 756275 - RNA, 19 nt, Artificial Sequence
  Description of Artificial Sequence: Synthetic oligonucleotide
auaaugaggguaaacauac

SEQ ID NO: 756276 - RNA, 19 nt, Artificial Sequence
  Description of Artificial Sequence: Synthetic oligonucleotide
uguaaaagucagcaaaagc

SEQ ID NO: 756277 - RNA, 19 nt, Artificial Sequence
  Description of Artificial Sequence: Synthetic oligonucleotide
aauuaccuagcauggcagc

SEQ ID NO: 756278 - RNA, 19 nt, Artificial Sequence
  Description of Artificial Sequence: Synthetic oligonucleotide
cucagaauuaccuagcaug

SEQ ID NO: 756279 - RNA, 19 nt, Artificial Sequence
  Description of Artificial Sequence: Synthetic oligonucleotide
aaaucauaauuucuguaca

SEQ ID NO: 756280 - RNA, 19 nt, Artificial Sequence
  Description of Artificial Sequence: Synthetic oligonucleotide
ucuuacugaacauggaaag

SEQ ID NO: 756281 - RNA, 19 nt, Artificial Sequence
  Description of Artificial Sequence: Synthetic oligonucleotide
auguaauuggucuaucuuc

SEQ ID NO: 756282 - RNA, 19 nt, Artificial Sequence
  Description of Artificial Sequence: Synthetic oligonucleotide
aaccucugcaagcugagac

SEQ ID NO: 756283 - RNA, 19 nt, Artificial Sequence
  Description of Artificial Sequence: Synthetic oligonucleotide
aauucacucuuacugaaca

SEQ ID NO: 756284 - RNA, 19 nt, Artificial Sequence
  Description of Artificial Sequence: Synthetic oligonucleotide
uccacuuaauucaaauagg

SEQ ID NO: 756285 - RNA, 19 nt, Artificial Sequence
  Description of Artificial Sequence: Synthetic oligonucleotide
uguacaggaauguauaagu

SEQ ID NO: 756286 - RNA, 19 nt, Artificial Sequence
  Description of Artificial Sequence: Synthetic oligonucleotide
uuguuguuacucuauaugc

SEQ ID NO: 756287 - RNA, 19 nt, Artificial Sequence
  Description of Artificial Sequence: Synthetic oligonucleotide
uucgaauuguuuuagagau

SEQ ID NO: 756288 - RNA, 19 nt, Artificial Sequence
  Description of Artificial Sequence: Synthetic oligonucleotide
uucaccauccucaauauuc

SEQ ID NO: 756289 - RNA, 19 nt, Artificial Sequence
  Description of Artificial Sequence: Synthetic oligonucleotide
ugaacauggaaagagaagu

SEQ ID NO: 756290 - RNA, 19 nt, Artificial Sequence
  Description of Artificial Sequence: Synthetic oligonucleotide
uucaacacuggcaugaagu

SEQ ID NO: 756291 - RNA, 19 nt, Artificial Sequence
  Description of Artificial Sequence: Synthetic oligonucleotide
uuugcuaugcaaaccaaga

SEQ ID NO: 756292 - RNA, 19 nt, Artificial Sequence
  Description of Artificial Sequence: Synthetic oligonucleotide
uaaucaaugcauuugcuaa

SEQ ID NO: 756293 - RNA, 19 nt, Artificial Sequence
  Description of Artificial Sequence: Synthetic oligonucleotide
cagaaauacucuuugauuc

SEQ ID NO: 756294 - RNA, 19 nt, Artificial Sequence
  Description of Artificial Sequence: Synthetic oligonucleotide
auuauuuaagacacaauag

SEQ ID NO: 756295 - RNA, 19 nt, Artificial Sequence
  Description of Artificial Sequence: Synthetic oligonucleotide
agaaugucaugccacaguc

SEQ ID NO: 756296 - RNA, 19 nt, Artificial Sequence
  Description of Artificial Sequence: Synthetic oligonucleotide
aauguaaccaacauguaaa

SEQ ID NO: 756297 - RNA, 19 nt, Artificial Sequence
  Description of Artificial Sequence: Synthetic oligonucleotide
uguguauuaacugcucucg

SEQ ID NO: 756298 - RNA, 19 nt, Artificial Sequence
  Description of Artificial Sequence: Synthetic oligonucleotide
uuaacaaggauaacguuau

SEQ ID NO: 756299 - RNA, 19 nt, Artificial Sequence
  Description of Artificial Sequence: Synthetic oligonucleotide
ugaaagcucuuuucuaugg

SEQ ID NO: 756300 - RNA, 19 nt, Artificial Sequence
  Description of Artificial Sequence: Synthetic oligonucleotide
aaguacuugaugauaacag

SEQ ID NO: 756301 - RNA, 19 nt, Artificial Sequence
  Description of Artificial Sequence: Synthetic oligonucleotide
uccucaauauuccugcucc

SEQ ID NO: 756302 - RNA, 19 nt, Artificial Sequence
  Description of Artificial Sequence: Synthetic oligonucleotide
cuuaauucaaauaggguca

SEQ ID NO: 756303 - RNA, 19 nt, Artificial Sequence
  Description of Artificial Sequence: Synthetic oligonucleotide
uguuguuacucuauaugcc

SEQ ID NO: 756304 - RNA, 19 nt, Artificial Sequence
  Description of Artificial Sequence: Synthetic oligonucleotide
aauucaaauagggucagga

SEQ ID NO: 756305 - RNA, 19 nt, Artificial Sequence
  Description of Artificial Sequence: Synthetic oligonucleotide
ucuagaugaucucacugag

SEQ ID NO: 756306 - RNA, 19 nt, Artificial Sequence
  Description of Artificial Sequence: Synthetic oligonucleotide
aaugucagcgcauauguuu

SEQ ID NO: 756307 - RNA, 19 nt, Artificial Sequence
  Description of Artificial Sequence: Synthetic oligonucleotide
auauugcagaaugucaugc

SEQ ID NO: 756308 - RNA, 19 nt, Artificial Sequence
  Description of Artificial Sequence: Synthetic oligonucleotide
uuugcuaauauucuucaua

SEQ ID NO: 756309 - RNA, 19 nt, Artificial Sequence
  Description of Artificial Sequence: Synthetic oligonucleotide
uuucgaauuguuuuagaga

SEQ ID NO: 756310 - RNA, 19 nt, Artificial Sequence
  Description of Artificial Sequence: Synthetic oligonucleotide
uuucuagaugaucucacug

SEQ ID NO: 756311 - RNA, 19 nt, Artificial Sequence
  Description of Artificial Sequence: Synthetic oligonucleotide
aaugaggguaaacauacua

SEQ ID NO: 756312 - RNA, 19 nt, Artificial Sequence
  Description of Artificial Sequence: Synthetic oligonucleotide
ugcgaaaagaucuucucug

SEQ ID NO: 756313 - RNA, 19 nt, Artificial Sequence
  Description of Artificial Sequence: Synthetic oligonucleotide
ugcagcuuguaauaaaaug

SEQ ID NO: 756314 - RNA, 19 nt, Artificial Sequence
  Description of Artificial Sequence: Synthetic oligonucleotide
aaaauucacucuuacugaa

SEQ ID NO: 756315 - RNA, 19 nt, Artificial Sequence
  Description of Artificial Sequence: Synthetic oligonucleotide
agugaacauuaaucaaugc

SEQ ID NO: 756316 - RNA, 19 nt, Artificial Sequence
  Description of Artificial Sequence: Synthetic oligonucleotide
gagaacauguaaaagucag

SEQ ID NO: 756317 - RNA, 19 nt, Artificial Sequence
  Description of Artificial Sequence: Synthetic oligonucleotide
uucacaaguaauauuuuau

SEQ ID NO: 756318 - RNA, 19 nt, Artificial Sequence
  Description of Artificial Sequence: Synthetic oligonucleotide
gaaaauucacucuuacuga

SEQ ID NO: 756319 - RNA, 19 nt, Artificial Sequence
  Description of Artificial Sequence: Synthetic oligonucleotide
auuaacugcucucggcagc

SEQ ID NO: 756320 - RNA, 19 nt, Artificial Sequence
  Description of Artificial Sequence: Synthetic oligonucleotide
ucuuuucuauggcagacca

SEQ ID NO: 756321 - RNA, 19 nt, Artificial Sequence
  Description of Artificial Sequence: Synthetic oligonucleotide
guaauaaaaugucagcgca

SEQ ID NO: 756322 - RNA, 19 nt, Artificial Sequence
  Description of Artificial Sequence: Synthetic oligonucleotide
acuaagaaguucugagaac

SEQ ID NO: 756323 - RNA, 19 nt, Artificial Sequence
  Description of Artificial Sequence: Synthetic oligonucleotide
aaugagccgaauauaauca

SEQ ID NO: 756324 - RNA, 19 nt, Artificial Sequence
  Description of Artificial Sequence: Synthetic oligonucleotide
cuacuauacucuuuucugg

SEQ ID NO: 756325 - RNA, 19 nt, Artificial Sequence
  Description of Artificial Sequence: Synthetic oligonucleotide
uguauuaacugcucucggc

SEQ ID NO: 756326 - RNA, 19 nt, Artificial Sequence
  Description of Artificial Sequence: Synthetic oligonucleotide
uugcuaauauucuucauaa

SEQ ID NO: 756327 - RNA, 19 nt, Artificial Sequence
  Description of Artificial Sequence: Synthetic oligonucleotide
uuguuagcaaccaucauuu

SEQ ID NO: 756328 - RNA, 19 nt, Artificial Sequence
  Description of Artificial Sequence: Synthetic oligonucleotide
guauaagugaacauuaauc

SEQ ID NO: 756329 - RNA, 19 nt, Artificial Sequence
  Description of Artificial Sequence: Synthetic oligonucleotide
cuccuuaacaaggauaacg

SEQ ID NO: 756330 - RNA, 19 nt, Artificial Sequence
  Description of Artificial Sequence: Synthetic oligonucleotide
uuuugccucaguuucacgu

SEQ ID NO: 756331 - RNA, 19 nt, Artificial Sequence
  Description of Artificial Sequence: Synthetic oligonucleotide
agaauuaccuagcauggca

SEQ ID NO: 756332 - RNA, 19 nt, Artificial Sequence
  Description of Artificial Sequence: Synthetic oligonucleotide
gauaacguuaucgcuaggc

SEQ ID NO: 756333 - RNA, 19 nt, Artificial Sequence
  Description of Artificial Sequence: Synthetic oligonucleotide
uucuagaugaucucacuga

SEQ ID NO: 756334 - RNA, 19 nt, Artificial Sequence
  Description of Artificial Sequence: Synthetic oligonucleotide
aaauauugcagaaugucau

SEQ ID NO: 756335 - RNA, 19 nt, Artificial Sequence
  Description of Artificial Sequence: Synthetic oligonucleotide
aagaacugccuuaagucgg

SEQ ID NO: 756336 - RNA, 19 nt, Artificial Sequence
  Description of Artificial Sequence: Synthetic oligonucleotide
uucuauggcagaccaaggc

SEQ ID NO: 756337 - RNA, 19 nt, Artificial Sequence
  Description of Artificial Sequence: Synthetic oligonucleotide
uguucaauucagcaaaaua

SEQ ID NO: 756338 - RNA, 19 nt, Artificial Sequence
  Description of Artificial Sequence: Synthetic oligonucleotide
gaucuaucaaagaucacug

SEQ ID NO: 756339 - RNA, 19 nt, Artificial Sequence
  Description of Artificial Sequence: Synthetic oligonucleotide
ugcuaugcaaaccaagaaa

SEQ ID NO: 756340 - RNA, 19 nt, Artificial Sequence
  Description of Artificial Sequence: Synthetic oligonucleotide
acacaauaguguucaauuc

SEQ ID NO: 756341 - RNA, 19 nt, Artificial Sequence
  Description of Artificial Sequence: Synthetic oligonucleotide
uuggucauaccuacuauac

SEQ ID NO: 756342 - RNA, 19 nt, Artificial Sequence
  Description of Artificial Sequence: Synthetic oligonucleotide
agugcaguaggugugacag

SEQ ID NO: 756343 - RNA, 19 nt, Artificial Sequence
  Description of Artificial Sequence: Synthetic oligonucleotide
uugagcaaagugauuugag

SEQ ID NO: 756344 - RNA, 19 nt, Artificial Sequence
  Description of Artificial Sequence: Synthetic oligonucleotide
acugccuuaagucgggguc

SEQ ID NO: 756345 - RNA, 19 nt, Artificial Sequence
  Description of Artificial Sequence: Synthetic oligonucleotide
aaaccaagaaagucacuga

SEQ ID NO: 756346 - RNA, 19 nt, Artificial Sequence
  Description of Artificial Sequence: Synthetic oligonucleotide
caaugagccgaauauaauc

SEQ ID NO: 756347 - RNA, 19 nt, Artificial Sequence
  Description of Artificial Sequence: Synthetic oligonucleotide
uauuuagaugguuucuaga

SEQ ID NO: 756348 - RNA, 19 nt, Artificial Sequence
  Description of Artificial Sequence: Synthetic oligonucleotide
augaaguuuccgaaguugc

SEQ ID NO: 756349 - RNA, 19 nt, Artificial Sequence
  Description of Artificial Sequence: Synthetic oligonucleotide
aagucggugggcuucacgu

SEQ ID NO: 756350 - RNA, 19 nt, Artificial Sequence
  Description of Artificial Sequence: Synthetic oligonucleotide
uauacucuuuucuggagcu

SEQ ID NO: 756351 - RNA, 19 nt, Artificial Sequence
  Description of Artificial Sequence: Synthetic oligonucleotide
uuggaguuugcacuaauau

SEQ ID NO: 756352 - RNA, 19 nt, Artificial Sequence
  Description of Artificial Sequence: Synthetic oligonucleotide
augagucuucuuuaccuac

SEQ ID NO: 756353 - RNA, 19 nt, Artificial Sequence
  Description of Artificial Sequence: Synthetic oligonucleotide
ugccauguaagcauucaug

SEQ ID NO: 756354 - RNA, 19 nt, Artificial Sequence
  Description of Artificial Sequence: Synthetic oligonucleotide
gauaacagauuuaaaaucu

SEQ ID NO: 756355 - RNA, 19 nt, Artificial Sequence
  Description of Artificial Sequence: Synthetic oligonucleotide
uuuaucugguuuguuagca

SEQ ID NO: 756356 - RNA, 19 nt, Artificial Sequence
  Description of Artificial Sequence: Synthetic oligonucleotide
uugauucgauucuaggagc

SEQ ID NO: 756357 - RNA, 19 nt, Artificial Sequence
  Description of Artificial Sequence: Synthetic oligonucleotide
ucacugaggaauccaaugu

SEQ ID NO: 756358 - RNA, 19 nt, Artificial Sequence
  Description of Artificial Sequence: Synthetic oligonucleotide
aguacuugaugauaacaga

SEQ ID NO: 756359 - RNA, 19 nt, Artificial Sequence
  Description of Artificial Sequence: Synthetic oligonucleotide
uuuaccuacuuugaccuug

SEQ ID NO: 756360 - RNA, 19 nt, Artificial Sequence
  Description of Artificial Sequence: Synthetic oligonucleotide
cauguaagcauucaugcca

SEQ ID NO: 756361 - RNA, 19 nt, Artificial Sequence
  Description of Artificial Sequence: Synthetic oligonucleotide
ugauggacuugacucgagg

SEQ ID NO: 756362 - RNA, 19 nt, Artificial Sequence
  Description of Artificial Sequence: Synthetic oligonucleotide
cuuaacaaggauaacguua

SEQ ID NO: 756363 - RNA, 19 nt, Artificial Sequence
  Description of Artificial Sequence: Synthetic oligonucleotide
guaaccaacauguaaauau

SEQ ID NO: 756364 - RNA, 19 nt, Artificial Sequence
  Description of Artificial Sequence: Synthetic oligonucleotide
aauauuccugcuccacuca

SEQ ID NO: 756365 - RNA, 19 nt, Artificial Sequence
  Description of Artificial Sequence: Synthetic oligonucleotide
uuuuaucugguuuguuagc

SEQ ID NO: 756366 - RNA, 19 nt, Artificial Sequence
  Description of Artificial Sequence: Synthetic oligonucleotide
uauuaacugcucucggcag

SEQ ID NO: 756367 - RNA, 19 nt, Artificial Sequence
  Description of Artificial Sequence: Synthetic oligonucleotide
cuauacucuuuucuggagc

SEQ ID NO: 756368 - RNA, 19 nt, Artificial Sequence
  Description of Artificial Sequence: Synthetic oligonucleotide
uucgauucuaggagcaaug

SEQ ID NO: 756369 - RNA, 19 nt, Artificial Sequence
  Description of Artificial Sequence: Synthetic oligonucleotide
auagugguuuauuuagaug

SEQ ID NO: 756370 - RNA, 19 nt, Artificial Sequence
  Description of Artificial Sequence: Synthetic oligonucleotide
acuugaugauaacagauuu

SEQ ID NO: 756371 - RNA, 19 nt, Artificial Sequence
  Description of Artificial Sequence: Synthetic oligonucleotide
acgaugagucuucuuuacc

SEQ ID NO: 756372 - RNA, 19 nt, Artificial Sequence
  Description of Artificial Sequence: Synthetic oligonucleotide
aauaaaaugucagcgcaua

SEQ ID NO: 756373 - RNA, 19 nt, Artificial Sequence
  Description of Artificial Sequence: Synthetic oligonucleotide
aaggucggaugcuuuacug

SEQ ID NO: 756374 - RNA, 19 nt, Artificial Sequence
  Description of Artificial Sequence: Synthetic oligonucleotide
aggaauguauaagugaaca

SEQ ID NO: 756375 - RNA, 19 nt, Artificial Sequence
  Description of Artificial Sequence: Synthetic oligonucleotide
aaaccaugcauccgauuca

SEQ ID NO: 756376 - RNA, 19 nt, Artificial Sequence
  Description of Artificial Sequence: Synthetic oligonucleotide
ugauucgauucuaggagca

SEQ ID NO: 756377 - RNA, 19 nt, Artificial Sequence
  Description of Artificial Sequence: Synthetic oligonucleotide
guuguuacucuauaugcca

SEQ ID NO: 756378 - RNA, 19 nt, Artificial Sequence
  Description of Artificial Sequence: Synthetic oligonucleotide
acuaaugacuccaaguacu

SEQ ID NO: 756379 - RNA, 19 nt, Artificial Sequence
  Description of Artificial Sequence: Synthetic oligonucleotide
uuaccuacuuugaccuugg

SEQ ID NO: 756380 - RNA, 19 nt, Artificial Sequence
  Description of Artificial Sequence: Synthetic oligonucleotide
gaauuaccuagcauggcag

SEQ ID NO: 756381 - RNA, 19 nt, Artificial Sequence
  Description of Artificial Sequence: Synthetic oligonucleotide
uuuugagcaaagugauuug

SEQ ID NO: 756382 - RNA, 19 nt, Artificial Sequence
  Description of Artificial Sequence: Synthetic oligonucleotide
uuaucgcuaggcaauggcu

SEQ ID NO: 756383 - RNA, 19 nt, Artificial Sequence
  Description of Artificial Sequence: Synthetic oligonucleotide
ugauguaauuggucuaucu

SEQ ID NO: 756384 - RNA, 19 nt, Artificial Sequence
  Description of Artificial Sequence: Synthetic oligonucleotide
auaacguuaucgcuaggca

SEQ ID NO: 756385 - RNA, 19 nt, Artificial Sequence
  Description of Artificial Sequence: Synthetic oligonucleotide
ucuuuucgaauuguuuuag

SEQ ID NO: 756386 - RNA, 19 nt, Artificial Sequence
  Description of Artificial Sequence: Synthetic oligonucleotide
cuaauuugcuaugcaaacc

SEQ ID NO: 756387 - RNA, 19 nt, Artificial Sequence
  Description of Artificial Sequence: Synthetic oligonucleotide
aguuugcacuaauaucuuc

SEQ ID NO: 756388 - RNA, 19 nt, Artificial Sequence
  Description of Artificial Sequence: Synthetic oligonucleotide
accuacuuugaccuugguc

SEQ ID NO: 756389 - RNA, 19 nt, Artificial Sequence
  Description of Artificial Sequence: Synthetic oligonucleotide
uggacgaugagucuucuuu

SEQ ID NO: 756390 - RNA, 19 nt, Artificial Sequence
  Description of Artificial Sequence: Synthetic oligonucleotide
acuauacucuuuucuggag

SEQ ID NO: 756391 - RNA, 19 nt, Artificial Sequence
  Description of Artificial Sequence: Synthetic oligonucleotide
ucuagacagggcagugugg

SEQ ID NO: 756392 - RNA, 19 nt, Artificial Sequence
  Description of Artificial Sequence: Synthetic oligonucleotide
guauuaacugcucucggca

SEQ ID NO: 756393 - RNA, 19 nt, Artificial Sequence
  Description of Artificial Sequence: Synthetic oligonucleotide
uggaguuugcacuaauauc

SEQ ID NO: 756394 - RNA, 19 nt, Artificial Sequence
  Description of Artificial Sequence: Synthetic oligonucleotide
auucuaggagcaaugagug

SEQ ID NO: 756395 - RNA, 19 nt, Artificial Sequence
  Description of Artificial Sequence: Synthetic oligonucleotide
accuacuauacucuuuucu

SEQ ID NO: 756396 - RNA, 19 nt, Artificial Sequence
  Description of Artificial Sequence: Synthetic oligonucleotide
ccaacauguaaauauuugc

SEQ ID NO: 756397 - RNA, 19 nt, Artificial Sequence
  Description of Artificial Sequence: Synthetic oligonucleotide
gaaguuuccgaaguugcug

SEQ ID NO: 756398 - RNA, 19 nt, Artificial Sequence
  Description of Artificial Sequence: Synthetic oligonucleotide
uugcuugcuaauuugcuau

SEQ ID NO: 756399 - RNA, 19 nt, Artificial Sequence
  Description of Artificial Sequence: Synthetic oligonucleotide
ugagccgaauauaaucacu

SEQ ID NO: 756400 - RNA, 19 nt, Artificial Sequence
  Description of Artificial Sequence: Synthetic oligonucleotide
agccauuggaguuugcacu

SEQ ID NO: 756401 - RNA, 19 nt, Artificial Sequence
  Description of Artificial Sequence: Synthetic oligonucleotide
cagaccaaggcuucaacac

SEQ ID NO: 756402 - RNA, 19 nt, Artificial Sequence
  Description of Artificial Sequence: Synthetic oligonucleotide
uccuuguuguacuuucgcc

SEQ ID NO: 756403 - RNA, 19 nt, Artificial Sequence
  Description of Artificial Sequence: Synthetic oligonucleotide
cuagaugaucucacugagg

SEQ ID NO: 756404 - RNA, 19 nt, Artificial Sequence
  Description of Artificial Sequence: Synthetic oligonucleotide
guuaucgcuaggcaauggc

SEQ ID NO: 756405 - RNA, 19 nt, Artificial Sequence
  Description of Artificial Sequence: Synthetic oligonucleotide
cuagcaugacuucuacagg

SEQ ID NO: 756406 - RNA, 19 nt, Artificial Sequence
  Description of Artificial Sequence: Synthetic oligonucleotide
uugcacuaauaucuucugc

SEQ ID NO: 756407 - RNA, 19 nt, Artificial Sequence
  Description of Artificial Sequence: Synthetic oligonucleotide
ggucauaccuacuauacuc

SEQ ID NO: 756408 - RNA, 19 nt, Artificial Sequence
  Description of Artificial Sequence: Synthetic oligonucleotide
aggacaugcagcuuguaau

SEQ ID NO: 756409 - RNA, 19 nt, Artificial Sequence
  Description of Artificial Sequence: Synthetic oligonucleotide
cagcuuguaauaaaauguc

SEQ ID NO: 756410 - RNA, 19 nt, Artificial Sequence
  Description of Artificial Sequence: Synthetic oligonucleotide
uauaaucacuaagaaguuc

SEQ ID NO: 756411 - RNA, 19 nt, Artificial Sequence
  Description of Artificial Sequence: Synthetic oligonucleotide
uaacguuaucgcuaggcaa

SEQ ID NO: 756412 - RNA, 19 nt, Artificial Sequence
  Description of Artificial Sequence: Synthetic oligonucleotide
guacuaaugacuccaagua

SEQ ID NO: 756413 - RNA, 19 nt, Artificial Sequence
  Description of Artificial Sequence: Synthetic oligonucleotide
acucuuacugaacauggaa

SEQ ID NO: 756414 - RNA, 19 nt, Artificial Sequence
  Description of Artificial Sequence: Synthetic oligonucleotide
uucugcgaaaagaucuucu

SEQ ID NO: 756415 - RNA, 19 nt, Artificial Sequence
  Description of Artificial Sequence: Synthetic oligonucleotide
caauauuccugcuccacuc

SEQ ID NO: 756416 - RNA, 19 nt, Artificial Sequence
  Description of Artificial Sequence: Synthetic oligonucleotide
gauucuaggagcaaugagu

SEQ ID NO: 756417 - RNA, 19 nt, Artificial Sequence
  Description of Artificial Sequence: Synthetic oligonucleotide
aaggauaacguuaucgcua

SEQ ID NO: 756418 - RNA, 19 nt, Artificial Sequence
  Description of Artificial Sequence: Synthetic oligonucleotide
uaaccaacauguaaauauu

SEQ ID NO: 756419 - RNA, 19 nt, Artificial Sequence
  Description of Artificial Sequence: Synthetic oligonucleotide
aaugccucccaguacuuua

SEQ ID NO: 756420 - RNA, 19 nt, Artificial Sequence
  Description of Artificial Sequence: Synthetic oligonucleotide
auuggucuaucuucuccuc

SEQ ID NO: 756421 - RNA, 19 nt, Artificial Sequence
  Description of Artificial Sequence: Synthetic oligonucleotide
aaugucuccuuaacaagga

SEQ ID NO: 756422 - RNA, 19 nt, Artificial Sequence
  Description of Artificial Sequence: Synthetic oligonucleotide
agcauggcagcacucuuag

SEQ ID NO: 756423 - RNA, 19 nt, Artificial Sequence
  Description of Artificial Sequence: Synthetic oligonucleotide
ucugcgaaaagaucuucuc

SEQ ID NO: 756424 - RNA, 19 nt, Artificial Sequence
  Description of Artificial Sequence: Synthetic oligonucleotide
auaggcucucuuucuggac

SEQ ID NO: 756425 - RNA, 19 nt, Artificial Sequence
  Description of Artificial Sequence: Synthetic oligonucleotide
aacguuaucgcuaggcaau

SEQ ID NO: 756426 - RNA, 19 nt, Artificial Sequence
  Description of Artificial Sequence: Synthetic oligonucleotide
uuaagucgggguccugaag

SEQ ID NO: 756427 - RNA, 19 nt, Artificial Sequence
  Description of Artificial Sequence: Synthetic oligonucleotide
ucggaugcuuuacuguucu

SEQ ID NO: 756428 - RNA, 19 nt, Artificial Sequence
  Description of Artificial Sequence: Synthetic oligonucleotide
ucugacacaccaauuucua

SEQ ID NO: 756429 - RNA, 19 nt, Artificial Sequence
  Description of Artificial Sequence: Synthetic oligonucleotide
agcgucggcagccuuguuc

SEQ ID NO: 756430 - RNA, 19 nt, Artificial Sequence
  Description of Artificial Sequence: Synthetic oligonucleotide
aaacucaguggacgaugag

SEQ ID NO: 756431 - RNA, 19 nt, Artificial Sequence
  Description of Artificial Sequence: Synthetic oligonucleotide
cauuugcuaauauucuuca

SEQ ID NO: 756432 - RNA, 19 nt, Artificial Sequence
  Description of Artificial Sequence: Synthetic oligonucleotide
gucuaucuucuccucaacc

SEQ ID NO: 756433 - RNA, 19 nt, Artificial Sequence
  Description of Artificial Sequence: Synthetic oligonucleotide
auuugcuaugcaaaccaag

SEQ ID NO: 756434 - RNA, 19 nt, Artificial Sequence
  Description of Artificial Sequence: Synthetic oligonucleotide
uggacuugacucgagggug

SEQ ID NO: 756435 - RNA, 19 nt, Artificial Sequence
  Description of Artificial Sequence: Synthetic oligonucleotide
aaguugcuggucaagauuu

SEQ ID NO: 756436 - RNA, 19 nt, Artificial Sequence
  Description of Artificial Sequence: Synthetic oligonucleotide
acucuauaugccauguaag

SEQ ID NO: 756437 - RNA, 19 nt, Artificial Sequence
  Description of Artificial Sequence: Synthetic oligonucleotide
cauaaugaggguaaacaua

SEQ ID NO: 756438 - RNA, 19 nt, Artificial Sequence
  Description of Artificial Sequence: Synthetic oligonucleotide
gaacagguccucuccgucc

SEQ ID NO: 756439 - RNA, 19 nt, Artificial Sequence
  Description of Artificial Sequence: Synthetic oligonucleotide
uggcacaauguaaccaaca

SEQ ID NO: 756440 - RNA, 19 nt, Artificial Sequence
  Description of Artificial Sequence: Synthetic oligonucleotide
gguccucagaauuaccuag

SEQ ID NO: 756441 - RNA, 19 nt, Artificial Sequence
  Description of Artificial Sequence: Synthetic oligonucleotide
ccuacuauacucuuuucug

SEQ ID NO: 756442 - RNA, 19 nt, Artificial Sequence
  Description of Artificial Sequence: Synthetic oligonucleotide
cuucuuuaccuacuuugac

SEQ ID NO: 756443 - RNA, 19 nt, Artificial Sequence
  Description of Artificial Sequence: Synthetic oligonucleotide
gacgaugagucuucuuuac

SEQ ID NO: 756444 - RNA, 19 nt, Artificial Sequence
  Description of Artificial Sequence: Synthetic oligonucleotide
aauagggucaggacaugca

SEQ ID NO: 756445 - RNA, 19 nt, Artificial Sequence
  Description of Artificial Sequence: Synthetic oligonucleotide
cuuagcaaaggcagcugug

SEQ ID NO: 756446 - RNA, 19 nt, Artificial Sequence
  Description of Artificial Sequence: Synthetic oligonucleotide
gcuaauuugcuaugcaaac

SEQ ID NO: 756447 - RNA, 19 nt, Artificial Sequence
  Description of Artificial Sequence: Synthetic oligonucleotide
guguuuguacuaaugacuc

SEQ ID NO: 756448 - RNA, 19 nt, Artificial Sequence
  Description of Artificial Sequence: Synthetic oligonucleotide
uaucgcuaggcaauggcuu

SEQ ID NO: 756449 - RNA, 19 nt, Artificial Sequence
  Description of Artificial Sequence: Synthetic oligonucleotide
uuguuacucuauaugccau

SEQ ID NO: 756450 - RNA, 19 nt, Artificial Sequence
  Description of Artificial Sequence: Synthetic oligonucleotide
ccaagaacugccuuaaguc

SEQ ID NO: 756451 - RNA, 19 nt, Artificial Sequence
  Description of Artificial Sequence: Synthetic oligonucleotide
cauccgauggucaaacaca

SEQ ID NO: 756452 - RNA, 19 nt, Artificial Sequence
  Description of Artificial Sequence: Synthetic oligonucleotide
auccgauggucaaacacac

SEQ ID NO: 756453 - RNA, 19 nt, Artificial Sequence
  Description of Artificial Sequence: Synthetic oligonucleotide
gaugaucucacugaggaau

SEQ ID NO: 756454 - RNA, 19 nt, Artificial Sequence
  Description of Artificial Sequence: Synthetic oligonucleotide
ccgaauauaaucacuaaga

SEQ ID NO: 756455 - RNA, 19 nt, Artificial Sequence
  Description of Artificial Sequence: Synthetic oligonucleotide
ugguuucuagaugaucuca

SEQ ID NO: 756456 - RNA, 19 nt, Artificial Sequence
  Description of Artificial Sequence: Synthetic oligonucleotide
ggaguuugcacuaauaucu

SEQ ID NO: 756457 - RNA, 19 nt, Artificial Sequence
  Description of Artificial Sequence: Synthetic oligonucleotide
auccaaugucuccuuaaca

SEQ ID NO: 756458 - RNA, 19 nt, Artificial Sequence
  Description of Artificial Sequence: Synthetic oligonucleotide
ucaacacuggcaugaaguu

SEQ ID NO: 756459 - RNA, 19 nt, Artificial Sequence
  Description of Artificial Sequence: Synthetic oligonucleotide
cucagaggagaggauaggc

SEQ ID NO: 756460 - RNA, 19 nt, Artificial Sequence
  Description of Artificial Sequence: Synthetic oligonucleotide
auguaaccaacauguaaau

SEQ ID NO: 756461 - RNA, 19 nt, Artificial Sequence
  Description of Artificial Sequence: Synthetic oligonucleotide
guacaggaauguauaagug

SEQ ID NO: 756462 - RNA, 19 nt, Artificial Sequence
  Description of Artificial Sequence: Synthetic oligonucleotide
acucuuagcaaaggcagcu

SEQ ID NO: 756463 - RNA, 19 nt, Artificial Sequence
  Description of Artificial Sequence: Synthetic oligonucleotide
aggauaggcucucuuucug

SEQ ID NO: 756464 - RNA, 19 nt, Artificial Sequence
  Description of Artificial Sequence: Synthetic oligonucleotide
ugugguccucagaauuacc

SEQ ID NO: 756465 - RNA, 19 nt, Artificial Sequence
  Description of Artificial Sequence: Synthetic oligonucleotide
caaggcucuagacagggca

SEQ ID NO: 756466 - RNA, 19 nt, Artificial Sequence
  Description of Artificial Sequence: Synthetic oligonucleotide
ugauugucauuuuguugac

SEQ ID NO: 756467 - RNA, 19 nt, Artificial Sequence
  Description of Artificial Sequence: Synthetic oligonucleotide
uuguacuuucgccucccac

SEQ ID NO: 756468 - RNA, 19 nt, Artificial Sequence
  Description of Artificial Sequence: Synthetic oligonucleotide
ugaacagguccucuccguc

SEQ ID NO: 756469 - RNA, 19 nt, Artificial Sequence
  Description of Artificial Sequence: Synthetic oligonucleotide
auuaaucaaugcauuugcu

SEQ ID NO: 756470 - RNA, 19 nt, Artificial Sequence
  Description of Artificial Sequence: Synthetic oligonucleotide
cucuuacugaacauggaaa

SEQ ID NO: 756471 - RNA, 19 nt, Artificial Sequence
  Description of Artificial Sequence: Synthetic oligonucleotide
ugcagcaaugagccgaaua

SEQ ID NO: 756472 - RNA, 19 nt, Artificial Sequence
  Description of Artificial Sequence: Synthetic oligonucleotide
agcaaugagccgaauauaa

SEQ ID NO: 756473 - RNA, 19 nt, Artificial Sequence
  Description of Artificial Sequence: Synthetic oligonucleotide
aaggcucuagacagggcag

SEQ ID NO: 756474 - RNA, 19 nt, Artificial Sequence
  Description of Artificial Sequence: Synthetic oligonucleotide
uggucaagauuuucaaauu

SEQ ID NO: 756475 - RNA, 19 nt, Artificial Sequence
  Description of Artificial Sequence: Synthetic oligonucleotide
ucgaggguggagacagugc

SEQ ID NO: 756476 - RNA, 19 nt, Artificial Sequence
  Description of Artificial Sequence: Synthetic oligonucleotide
uaggaaugccucccaguac

SEQ ID NO: 756477 - RNA, 19 nt, Artificial Sequence
  Description of Artificial Sequence: Synthetic oligonucleotide
gauguaauuggucuaucuu

SEQ ID NO: 756478 - RNA, 19 nt, Artificial Sequence
  Description of Artificial Sequence: Synthetic oligonucleotide
caggaauguauaagugaac

SEQ ID NO: 756479 - RNA, 19 nt, Artificial Sequence
  Description of Artificial Sequence: Synthetic oligonucleotide
caaauuguuguugcuuuuc

SEQ ID NO: 756480 - RNA, 19 nt, Artificial Sequence
  Description of Artificial Sequence: Synthetic oligonucleotide
ucgaauuguuuuagagauc

SEQ ID NO: 756481 - RNA, 19 nt, Artificial Sequence
  Description of Artificial Sequence: Synthetic oligonucleotide
auuaccuagcauggcagca

SEQ ID NO: 756482 - RNA, 19 nt, Artificial Sequence
  Description of Artificial Sequence: Synthetic oligonucleotide
gaugagucuucuuuaccua

SEQ ID NO: 756483 - RNA, 19 nt, Artificial Sequence
  Description of Artificial Sequence: Synthetic oligonucleotide
uguaaccaacauguaaaua

SEQ ID NO: 756484 - RNA, 19 nt, Artificial Sequence
  Description of Artificial Sequence: Synthetic oligonucleotide
cuugcuaauuugcuaugca

SEQ ID NO: 756485 - RNA, 19 nt, Artificial Sequence
  Description of Artificial Sequence: Synthetic oligonucleotide
uuugccucaguuucacguu

SEQ ID NO: 756486 - RNA, 19 nt, Artificial Sequence
  Description of Artificial Sequence: Synthetic oligonucleotide
agcuuguaauaaaauguca

SEQ ID NO: 756487 - RNA, 19 nt, Artificial Sequence
  Description of Artificial Sequence: Synthetic oligonucleotide
agaacugccuuaagucggg

SEQ ID NO: 756488 - RNA, 19 nt, Artificial Sequence
  Description of Artificial Sequence: Synthetic oligonucleotide
uaccuagcauggcagcacu

SEQ ID NO: 756489 - RNA, 19 nt, Artificial Sequence
  Description of Artificial Sequence: Synthetic oligonucleotide
aauuugcuaugcaaaccaa

SEQ ID NO: 756490 - RNA, 19 nt, Artificial Sequence
  Description of Artificial Sequence: Synthetic oligonucleotide
aagagaagucuuuguuguu

SEQ ID NO: 756491 - RNA, 19 nt, Artificial Sequence
  Description of Artificial Sequence: Synthetic oligonucleotide
guuuuagagaucugcucaa

SEQ ID NO: 756492 - RNA, 19 nt, Artificial Sequence
  Description of Artificial Sequence: Synthetic oligonucleotide
aggucggaugcuuuacugu

SEQ ID NO: 756493 - RNA, 19 nt, Artificial Sequence
  Description of Artificial Sequence: Synthetic oligonucleotide
gacacaccaauuucuauau

SEQ ID NO: 756494 - RNA, 19 nt, Artificial Sequence
  Description of Artificial Sequence: Synthetic oligonucleotide
uguuguacuuucgccuccc

SEQ ID NO: 756495 - RNA, 19 nt, Artificial Sequence
  Description of Artificial Sequence: Synthetic oligonucleotide
gaagacuggcugguucagg

SEQ ID NO: 756496 - RNA, 19 nt, Artificial Sequence
  Description of Artificial Sequence: Synthetic oligonucleotide
uuaccuagcauggcagcac

SEQ ID NO: 756497 - RNA, 19 nt, Artificial Sequence
  Description of Artificial Sequence: Synthetic oligonucleotide
ugaucucacugaggaaucc

SEQ ID NO: 756498 - RNA, 19 nt, Artificial Sequence
  Description of Artificial Sequence: Synthetic oligonucleotide
auucacucuuacugaacau

SEQ ID NO: 756499 - RNA, 19 nt, Artificial Sequence
  Description of Artificial Sequence: Synthetic oligonucleotide
augcauccgauucauucau

SEQ ID NO: 756500 - RNA, 19 nt, Artificial Sequence
  Description of Artificial Sequence: Synthetic oligonucleotide
ucauaccuacuauacucuu

SEQ ID NO: 756501 - RNA, 19 nt, Artificial Sequence
  Description of Artificial Sequence: Synthetic oligonucleotide
ucagagccuguguauuaac

SEQ ID NO: 756502 - RNA, 19 nt, Artificial Sequence
  Description of Artificial Sequence: Synthetic oligonucleotide
guuugcacuaauaucuucu

SEQ ID NO: 756503 - RNA, 19 nt, Artificial Sequence
  Description of Artificial Sequence: Synthetic oligonucleotide
agguaggaaugccucccag

SEQ ID NO: 756504 - RNA, 19 nt, Artificial Sequence
  Description of Artificial Sequence: Synthetic oligonucleotide
agucuuuguuguuacucua

SEQ ID NO: 756505 - RNA, 19 nt, Artificial Sequence
  Description of Artificial Sequence: Synthetic oligonucleotide
guacuuucgccucccacuc

SEQ ID NO: 756506 - RNA, 19 nt, Artificial Sequence
  Description of Artificial Sequence: Synthetic oligonucleotide
gucaaacacaccuuucacu

SEQ ID NO: 756507 - RNA, 19 nt, Artificial Sequence
  Description of Artificial Sequence: Synthetic oligonucleotide
caucaucuagcaugacuuc

SEQ ID NO: 756508 - RNA, 19 nt, Artificial Sequence
  Description of Artificial Sequence: Synthetic oligonucleotide
gugugacaggaguaacugc

SEQ ID NO: 756509 - RNA, 19 nt, Artificial Sequence
  Description of Artificial Sequence: Synthetic oligonucleotide
aucuagcaugacuucuaca

SEQ ID NO: 756510 - RNA, 19 nt, Artificial Sequence
  Description of Artificial Sequence: Synthetic oligonucleotide
uccgauggucaaacacacc

SEQ ID NO: 756511 - RNA, 19 nt, Artificial Sequence
  Description of Artificial Sequence: Synthetic oligonucleotide
ggaucuaucaaagaucacu

SEQ ID NO: 756512 - RNA, 19 nt, Artificial Sequence
  Description of Artificial Sequence: Synthetic oligonucleotide
ugaagcaaggucggaugcu

SEQ ID NO: 756513 - RNA, 19 nt, Artificial Sequence
  Description of Artificial Sequence: Synthetic oligonucleotide
uuuggagccauuggaguuu

SEQ ID NO: 756514 - RNA, 19 nt, Artificial Sequence
  Description of Artificial Sequence: Synthetic oligonucleotide
agacacaauaguguucaau

SEQ ID NO: 756515 - RNA, 19 nt, Artificial Sequence
  Description of Artificial Sequence: Synthetic oligonucleotide
uagaugguuucuagaugau

SEQ ID NO: 756516 - RNA, 19 nt, Artificial Sequence
  Description of Artificial Sequence: Synthetic oligonucleotide
gagccgaauauaaucacua

SEQ ID NO: 756517 - RNA, 19 nt, Artificial Sequence
  Description of Artificial Sequence: Synthetic oligonucleotide
cagaauuaccuagcauggc

SEQ ID NO: 756518 - RNA, 19 nt, Artificial Sequence
  Description of Artificial Sequence: Synthetic oligonucleotide
ugccacaguccacuuaauu

SEQ ID NO: 756519 - RNA, 19 nt, Artificial Sequence
  Description of Artificial Sequence: Synthetic oligonucleotide
auucgauucuaggagcaau

SEQ ID NO: 756520 - RNA, 19 nt, Artificial Sequence
  Description of Artificial Sequence: Synthetic oligonucleotide
auaugccauguaagcauuc

SEQ ID NO: 756521 - RNA, 19 nt, Artificial Sequence
  Description of Artificial Sequence: Synthetic oligonucleotide
uggaucuaucaaagaucac

SEQ ID NO: 756522 - RNA, 19 nt, Artificial Sequence
  Description of Artificial Sequence: Synthetic oligonucleotide
agccgaauauaaucacuaa

SEQ ID NO: 756523 - RNA, 19 nt, Artificial Sequence
  Description of Artificial Sequence: Synthetic oligonucleotide
ccucccaguacuuuaucag

SEQ ID NO: 756524 - RNA, 19 nt, Artificial Sequence
  Description of Artificial Sequence: Synthetic oligonucleotide
cugccuuaagucggggucc

SEQ ID NO: 756525 - RNA, 19 nt, Artificial Sequence
  Description of Artificial Sequence: Synthetic oligonucleotide
uggcuucugcgaaaagauc

SEQ ID NO: 756526 - RNA, 19 nt, Artificial Sequence
  Description of Artificial Sequence: Synthetic oligonucleotide
caucuucccauuucugcca

SEQ ID NO: 756527 - RNA, 19 nt, Artificial Sequence
  Description of Artificial Sequence: Synthetic oligonucleotide
cauuucauccgauggucaa

SEQ ID NO: 756528 - RNA, 19 nt, Artificial Sequence
  Description of Artificial Sequence: Synthetic oligonucleotide
uaacaaggauaacguuauc

SEQ ID NO: 756529 - RNA, 19 nt, Artificial Sequence
  Description of Artificial Sequence: Synthetic oligonucleotide
uccugaagcaaggucggau

SEQ ID NO: 756530 - RNA, 19 nt, Artificial Sequence
  Description of Artificial Sequence: Synthetic oligonucleotide
cacuuaauucaaauagggu

SEQ ID NO: 756531 - RNA, 19 nt, Artificial Sequence
  Description of Artificial Sequence: Synthetic oligonucleotide
caaggauaacguuaucgcu

SEQ ID NO: 756532 - RNA, 19 nt, Artificial Sequence
  Description of Artificial Sequence: Synthetic oligonucleotide
aucgcuaggcaauggcuuu

SEQ ID NO: 756533 - RNA, 19 nt, Artificial Sequence
  Description of Artificial Sequence: Synthetic oligonucleotide
guacuugaugauaacagau

SEQ ID NO: 756534 - RNA, 19 nt, Artificial Sequence
  Description of Artificial Sequence: Synthetic oligonucleotide
guaacugcaggagaaggcu

SEQ ID NO: 756535 - RNA, 19 nt, Artificial Sequence
  Description of Artificial Sequence: Synthetic oligonucleotide
gguuucuagaugaucucac

SEQ ID NO: 756536 - RNA, 19 nt, Artificial Sequence
  Description of Artificial Sequence: Synthetic oligonucleotide
uccagcgccgcucuucguu

SEQ ID NO: 756537 - RNA, 19 nt, Artificial Sequence
  Description of Artificial Sequence: Synthetic oligonucleotide
gaggauaggcucucuuucu

SEQ ID NO: 756538 - RNA, 19 nt, Artificial Sequence
  Description of Artificial Sequence: Synthetic oligonucleotide
ucaugccacaguccacuua

SEQ ID NO: 756539 - RNA, 19 nt, Artificial Sequence
  Description of Artificial Sequence: Synthetic oligonucleotide
ucaaaccaugcauccgauu

SEQ ID NO: 756540 - RNA, 19 nt, Artificial Sequence
  Description of Artificial Sequence: Synthetic oligonucleotide
aagacacaauaguguucaa

SEQ ID NO: 756541 - RNA, 19 nt, Artificial Sequence
  Description of Artificial Sequence: Synthetic oligonucleotide
ccugaagcaaggucggaug

SEQ ID NO: 756542 - RNA, 19 nt, Artificial Sequence
  Description of Artificial Sequence: Synthetic oligonucleotide
auguaagcauucaugccau

SEQ ID NO: 756543 - RNA, 19 nt, Artificial Sequence
  Description of Artificial Sequence: Synthetic oligonucleotide
augucuccuuaacaaggau

SEQ ID NO: 756544 - RNA, 19 nt, Artificial Sequence
  Description of Artificial Sequence: Synthetic oligonucleotide
auguauaagugaacauuaa

SEQ ID NO: 756545 - RNA, 19 nt, Artificial Sequence
  Description of Artificial Sequence: Synthetic oligonucleotide
agauaccucuccagcgccg

SEQ ID NO: 756546 - RNA, 19 nt, Artificial Sequence
  Description of Artificial Sequence: Synthetic oligonucleotide
guuucuagaugaucucacu

SEQ ID NO: 756547 - RNA, 19 nt, Artificial Sequence
  Description of Artificial Sequence: Synthetic oligonucleotide
agcaaggucggaugcuuua

SEQ ID NO: 756548 - RNA, 19 nt, Artificial Sequence
  Description of Artificial Sequence: Synthetic oligonucleotide
gaacauuaaucaaugcauu

SEQ ID NO: 756549 - RNA, 19 nt, Artificial Sequence
  Description of Artificial Sequence: Synthetic oligonucleotide
uaggugugacaggaguaac

SEQ ID NO: 756550 - RNA, 19 nt, Artificial Sequence
  Description of Artificial Sequence: Synthetic oligonucleotide
uguaagcauucaugccauc

SEQ ID NO: 756551 - RNA, 19 nt, Artificial Sequence
  Description of Artificial Sequence: Synthetic oligonucleotide
uaccuacuauacucuuuuc

SEQ ID NO: 756552 - RNA, 19 nt, Artificial Sequence
  Description of Artificial Sequence: Synthetic oligonucleotide
gacagcgucggcagccuug

SEQ ID NO: 756553 - RNA, 19 nt, Artificial Sequence
  Description of Artificial Sequence: Synthetic oligonucleotide
guugcuggucaagauuuuc

SEQ ID NO: 756554 - RNA, 19 nt, Artificial Sequence
  Description of Artificial Sequence: Synthetic oligonucleotide
ugcucucggcagcucugag

SEQ ID NO: 756555 - RNA, 19 nt, Artificial Sequence
  Description of Artificial Sequence: Synthetic oligonucleotide
aaaugucagcgcauauguu

SEQ ID NO: 756556 - RNA, 19 nt, Artificial Sequence
  Description of Artificial Sequence: Synthetic oligonucleotide
gacaugcagcuuguaauaa

SEQ ID NO: 756557 - RNA, 19 nt, Artificial Sequence
  Description of Artificial Sequence: Synthetic oligonucleotide
guuacucuauaugccaugu

SEQ ID NO: 756558 - RNA, 19 nt, Artificial Sequence
  Description of Artificial Sequence: Synthetic oligonucleotide
cuucccauuucugccagca

SEQ ID NO: 756559 - RNA, 19 nt, Artificial Sequence
  Description of Artificial Sequence: Synthetic oligonucleotide
cuuaagucgggguccugaa

SEQ ID NO: 756560 - RNA, 19 nt, Artificial Sequence
  Description of Artificial Sequence: Synthetic oligonucleotide
gcagaccaaggcuucaaca

SEQ ID NO: 756561 - RNA, 19 nt, Artificial Sequence
  Description of Artificial Sequence: Synthetic oligonucleotide
gcuugcuaauuugcuaugc

SEQ ID NO: 756562 - RNA, 19 nt, Artificial Sequence
  Description of Artificial Sequence: Synthetic oligonucleotide
gcagcaaugagccgaauau

SEQ ID NO: 756563 - RNA, 19 nt, Artificial Sequence
  Description of Artificial Sequence: Synthetic oligonucleotide
augucagcgcauauguuuu

SEQ ID NO: 756564 - RNA, 19 nt, Artificial Sequence
  Description of Artificial Sequence: Synthetic oligonucleotide
acguuaucgcuaggcaaug

SEQ ID NO: 756565 - RNA, 19 nt, Artificial Sequence
  Description of Artificial Sequence: Synthetic oligonucleotide
gugugguccucagaauuac

SEQ ID NO: 756566 - RNA, 19 nt, Artificial Sequence
  Description of Artificial Sequence: Synthetic oligonucleotide
ucgcuaggcaauggcuuug

SEQ ID NO: 756567 - RNA, 19 nt, Artificial Sequence
  Description of Artificial Sequence: Synthetic oligonucleotide
ggaucugacacaccaauuu

SEQ ID NO: 756568 - RNA, 19 nt, Artificial Sequence
  Description of Artificial Sequence: Synthetic oligonucleotide
gucauaccuacuauacucu

SEQ ID NO: 756569 - RNA, 19 nt, Artificial Sequence
  Description of Artificial Sequence: Synthetic oligonucleotide
gauucgauucuaggagcaa

SEQ ID NO: 756570 - RNA, 19 nt, Artificial Sequence
  Description of Artificial Sequence: Synthetic oligonucleotide
gccagcauuucauccgaug

SEQ ID NO: 756571 - RNA, 19 nt, Artificial Sequence
  Description of Artificial Sequence: Synthetic oligonucleotide
cugcgaaaagaucuucucu

SEQ ID NO: 756572 - RNA, 19 nt, Artificial Sequence
  Description of Artificial Sequence: Synthetic oligonucleotide
ccaaguacuugaugauaac

SEQ ID NO: 756573 - RNA, 19 nt, Artificial Sequence
  Description of Artificial Sequence: Synthetic oligonucleotide
uuucgccucccacucucuu

SEQ ID NO: 756574 - RNA, 19 nt, Artificial Sequence
  Description of Artificial Sequence: Synthetic oligonucleotide
cuauggcagaccaaggcuu

SEQ ID NO: 756575 - RNA, 19 nt, Artificial Sequence
  Description of Artificial Sequence: Synthetic oligonucleotide
cuuuucuauggcagaccaa

SEQ ID NO: 756576 - RNA, 19 nt, Artificial Sequence
  Description of Artificial Sequence: Synthetic oligonucleotide
aggcuucaacacuggcaug

SEQ ID NO: 756577 - RNA, 19 nt, Artificial Sequence
  Description of Artificial Sequence: Synthetic oligonucleotide
ggaauguauaagugaacau

SEQ ID NO: 756578 - RNA, 19 nt, Artificial Sequence
  Description of Artificial Sequence: Synthetic oligonucleotide
cuaaugacuccaaguacuu

SEQ ID NO: 756579 - RNA, 19 nt, Artificial Sequence
  Description of Artificial Sequence: Synthetic oligonucleotide
caguccacuuaauucaaau

SEQ ID NO: 756580 - RNA, 19 nt, Artificial Sequence
  Description of Artificial Sequence: Synthetic oligonucleotide
ggauaacguuaucgcuagg

SEQ ID NO: 756581 - RNA, 19 nt, Artificial Sequence
  Description of Artificial Sequence: Synthetic oligonucleotide
uaccuacuuugaccuuggu

SEQ ID NO: 756582 - RNA, 19 nt, Artificial Sequence
  Description of Artificial Sequence: Synthetic oligonucleotide
uguuggcugaaagcucuuu

SEQ ID NO: 756583 - RNA, 19 nt, Artificial Sequence
  Description of Artificial Sequence: Synthetic oligonucleotide
uugacagcgucggcagccu

SEQ ID NO: 756584 - RNA, 19 nt, Artificial Sequence
  Description of Artificial Sequence: Synthetic oligonucleotide
cgauucuaggagcaaugag

SEQ ID NO: 756585 - RNA, 19 nt, Artificial Sequence
  Description of Artificial Sequence: Synthetic oligonucleotide
ggaugcuuuacuguucucu

SEQ ID NO: 756586 - RNA, 19 nt, Artificial Sequence
  Description of Artificial Sequence: Synthetic oligonucleotide
acagcgucggcagccuugu

SEQ ID NO: 756587 - RNA, 19 nt, Artificial Sequence
  Description of Artificial Sequence: Synthetic oligonucleotide
cacuggcaugaaguuuccg

SEQ ID NO: 756588 - RNA, 19 nt, Artificial Sequence
  Description of Artificial Sequence: Synthetic oligonucleotide
ggucuaucuucuccucaac

SEQ ID NO: 756589 - RNA, 19 nt, Artificial Sequence
  Description of Artificial Sequence: Synthetic oligonucleotide
ccgauggucaaacacaccu

SEQ ID NO: 756590 - RNA, 19 nt, Artificial Sequence
  Description of Artificial Sequence: Synthetic oligonucleotide
gucggaugcuuuacuguuc

SEQ ID NO: 756591 - RNA, 19 nt, Artificial Sequence
  Description of Artificial Sequence: Synthetic oligonucleotide
ggacgaugagucuucuuua

SEQ ID NO: 756592 - RNA, 19 nt, Artificial Sequence
  Description of Artificial Sequence: Synthetic oligonucleotide
aguggacgaugagucuucu

SEQ ID NO: 756593 - RNA, 19 nt, Artificial Sequence
  Description of Artificial Sequence: Synthetic oligonucleotide
ccuuguuguacuuucgccu

SEQ ID NO: 756594 - RNA, 19 nt, Artificial Sequence
  Description of Artificial Sequence: Synthetic oligonucleotide
guuguacuuucgccuccca

SEQ ID NO: 756595 - RNA, 19 nt, Artificial Sequence
  Description of Artificial Sequence: Synthetic oligonucleotide
uggcagaccaaggcuucaa

SEQ ID NO: 756596 - RNA, 19 nt, Artificial Sequence
  Description of Artificial Sequence: Synthetic oligonucleotide
ggcagaccaaggcuucaac

SEQ ID NO: 756597 - RNA, 19 nt, Artificial Sequence
  Description of Artificial Sequence: Synthetic oligonucleotide
gugaacagguccucuccgu

SEQ ID NO: 756598 - RNA, 19 nt, Artificial Sequence
  Description of Artificial Sequence: Synthetic oligonucleotide
cucuccagcgccgcucuuc

SEQ ID NO: 756599 - RNA, 19 nt, Artificial Sequence
  Description of Artificial Sequence: Synthetic oligonucleotide
gccauuggaguuugcacua

SEQ ID NO: 756600 - RNA, 19 nt, Artificial Sequence
  Description of Artificial Sequence: Synthetic oligonucleotide
gcgaaaagaucuucucugu

SEQ ID NO: 756601 - RNA, 19 nt, Artificial Sequence
  Description of Artificial Sequence: Synthetic oligonucleotide
acaguccacuuaauucaaa

SEQ ID NO: 756602 - RNA, 19 nt, Artificial Sequence
  Description of Artificial Sequence: Synthetic oligonucleotide
gcaaggucggaugcuuuac

SEQ ID NO: 756603 - RNA, 19 nt, Artificial Sequence
  Description of Artificial Sequence: Synthetic oligonucleotide
ggacuguccaaagaaacuu

SEQ ID NO: 756604 - RNA, 19 nt, Artificial Sequence
  Description of Artificial Sequence: Synthetic oligonucleotide
caaggucggaugcuuuacu

SEQ ID NO: 756605 - RNA, 19 nt, Artificial Sequence
  Description of Artificial Sequence: Synthetic oligonucleotide
cucaguggacgaugagucu

SEQ ID NO: 756606 - RNA, 19 nt, Artificial Sequence
  Description of Artificial Sequence: Synthetic oligonucleotide
cgaugagucuucuuuaccu

SEQ ID NO: 756607 - RNA, 19 nt, Artificial Sequence
  Description of Artificial Sequence: Synthetic oligonucleotide
ugacagcgucggcagccuu

SEQ ID NO: 756608 - RNA, 19 nt, Artificial Sequence
  Description of Artificial Sequence: Synthetic oligonucleotide
cagcaaugagccgaauaua

SEQ ID NO: 756609 - RNA, 19 nt, Artificial Sequence
  Description of Artificial Sequence: Synthetic oligonucleotide
aggagaggauaggcucucu

SEQ ID NO: 756610 - RNA, 19 nt, Artificial Sequence
  Description of Artificial Sequence: Synthetic oligonucleotide
caguacuuuaucagcuguu

SEQ ID NO: 756611 - RNA, 19 nt, Artificial Sequence
  Description of Artificial Sequence: Synthetic oligonucleotide
cauuggaguuugcacuaau

SEQ ID NO: 756612 - RNA, 19 nt, Artificial Sequence
  Description of Artificial Sequence: Synthetic oligonucleotide
ccuuaagucgggguccuga

SEQ ID NO: 756613 - RNA, 19 nt, Artificial Sequence
  Description of Artificial Sequence: Synthetic oligonucleotide
caccauccucaauauuccu

SEQ ID NO: 756614 - RNA, 19 nt, Artificial Sequence
  Description of Artificial Sequence: Synthetic oligonucleotide
cguuaucgcuaggcaaugg

SEQ ID NO: 756615 - RNA, 19 nt, Artificial Sequence
  Description of Artificial Sequence: Synthetic oligonucleotide
ccaguacuuuaucagcugu

SEQ ID NO: 756616 - RNA, 19 nt, Artificial Sequence
  Description of Artificial Sequence: Synthetic oligonucleotide
ccucaauauuccugcucca

SEQ ID NO: 756617 - RNA, 19 nt, Artificial Sequence
  Description of Artificial Sequence: Synthetic oligonucleotide
caaccucugcaagcugaga

SEQ ID NO: 756618 - RNA, 19 nt, Artificial Sequence
  Description of Artificial Sequence: Synthetic oligonucleotide
ggccuugcgaugcacuuuu

SEQ ID NO: 756619 - RNA, 19 nt, Artificial Sequence
  Description of Artificial Sequence: Synthetic oligonucleotide
cuuucgccucccacucucu

SEQ ID NO: 756620 - RNA, 19 nt, Artificial Sequence
  Description of Artificial Sequence: Synthetic oligonucleotide
cugcucucggcagcucuga

SEQ ID NO: 756621 - RNA, 19 nt, Artificial Sequence
  Description of Artificial Sequence: Synthetic oligonucleotide
guccugaagcaaggucgga

SEQ ID NO: 756622 - RNA, 19 nt, Artificial Sequence
  Description of Artificial Sequence: Synthetic oligonucleotide
ggagaggauaggcucucuu

SEQ ID NO: 756623 - RNA, 19 nt, Artificial Sequence
  Description of Artificial Sequence: Synthetic oligonucleotide
cgcuaggcaauggcuuugg

SEQ ID NO: 756624 - RNA, 19 nt, Artificial Sequence
  Description of Artificial Sequence: Synthetic oligonucleotide
guggacgaugagucuucuu

SEQ ID NO: 756625 - RNA, 19 nt, Artificial Sequence
  Description of Artificial Sequence: Synthetic oligonucleotide
ccucagaauuaccuagcau

SEQ ID NO: 756626 - RNA, 19 nt, Artificial Sequence
  Description of Artificial Sequence: Synthetic oligonucleotide
ccacucagagccuguguau

SEQ ID NO: 756627 - RNA, 19 nt, Artificial Sequence
  Description of Artificial Sequence: Synthetic oligonucleotide
cccacucucuuauuucauu

SEQ ID NO: 756628 - RNA, 19 nt, Artificial Sequence
  Description of Artificial Sequence: Synthetic oligonucleotide
ccauuggaguuugcacuaa

SEQ ID NO: 756629 - RNA, 19 nt, Artificial Sequence
  Description of Artificial Sequence: Synthetic oligonucleotide
ggaaugccucccaguacuu

SEQ ID NO: 756630 - RNA, 19 nt, Artificial Sequence
  Description of Artificial Sequence: Synthetic oligonucleotide
cuccagcgccgcucuucgu

SEQ ID NO: 756631 - RNA, 19 nt, Artificial Sequence
  Description of Artificial Sequence: Synthetic oligonucleotide
cagcgccgcucuucguuuu

SEQ ID NO: 756632 - RNA, 19 nt, Artificial Sequence
  Description of Artificial Sequence: Synthetic oligonucleotide
ccagcgccgcucuucguuu

SEQ ID NO: 756633 - RNA, 19 nt, Artificial Sequence
  Description of Artificial Sequence: Synthetic oligonucleotide
cauaauuucauacagguac

SEQ ID NO: 756634 - RNA, 19 nt, Artificial Sequence
  Description of Artificial Sequence: Synthetic oligonucleotide
aacauaauaucugaguuac

SEQ ID NO: 756635 - RNA, 19 nt, Artificial Sequence
  Description of Artificial Sequence: Synthetic oligonucleotide
caguuaaugacaaacaugc

SEQ ID NO: 756636 - RNA, 19 nt, Artificial Sequence
  Description of Artificial Sequence: Synthetic oligonucleotide
uuuagcaugaaaacucucg

SEQ ID NO: 756637 - RNA, 19 nt, Artificial Sequence
  Description of Artificial Sequence: Synthetic oligonucleotide
uguucauucagauagagaa

SEQ ID NO: 756638 - RNA, 19 nt, Artificial Sequence
  Description of Artificial Sequence: Synthetic oligonucleotide
uauagauauagcuuuaucu

SEQ ID NO: 756639 - RNA, 19 nt, Artificial Sequence
  Description of Artificial Sequence: Synthetic oligonucleotide
augucguauagcuacaucc

SEQ ID NO: 756640 - RNA, 19 nt, Artificial Sequence
  Description of Artificial Sequence: Synthetic oligonucleotide
uuuaauucacucaagggga

SEQ ID NO: 756641 - RNA, 19 nt, Artificial Sequence
  Description of Artificial Sequence: Synthetic oligonucleotide
uuaagauauguauagauuc

SEQ ID NO: 756642 - RNA, 19 nt, Artificial Sequence
  Description of Artificial Sequence: Synthetic oligonucleotide
uauauauccaucuuuacuc

SEQ ID NO: 756643 - RNA, 19 nt, Artificial Sequence
  Description of Artificial Sequence: Synthetic oligonucleotide
aggagugcgagauaaaagc

SEQ ID NO: 756644 - RNA, 19 nt, Artificial Sequence
  Description of Artificial Sequence: Synthetic oligonucleotide
aacgauuccaaugagcugg

SEQ ID NO: 756645 - RNA, 19 nt, Artificial Sequence
  Description of Artificial Sequence: Synthetic oligonucleotide
cuuaaauuaaccacucagg

SEQ ID NO: 756646 - RNA, 19 nt, Artificial Sequence
  Description of Artificial Sequence: Synthetic oligonucleotide
uuuugcuuagguaaaguag

SEQ ID NO: 756647 - RNA, 19 nt, Artificial Sequence
  Description of Artificial Sequence: Synthetic oligonucleotide
augagucagacauacauac

SEQ ID NO: 756648 - RNA, 19 nt, Artificial Sequence
  Description of Artificial Sequence: Synthetic oligonucleotide
gauacaauucuuguggucg

SEQ ID NO: 756649 - RNA, 19 nt, Artificial Sequence
  Description of Artificial Sequence: Synthetic oligonucleotide
aagcuuaacccacaaagag

SEQ ID NO: 756650 - RNA, 19 nt, Artificial Sequence
  Description of Artificial Sequence: Synthetic oligonucleotide
ucgauugcaauuuucauga

SEQ ID NO: 756651 - RNA, 19 nt, Artificial Sequence
  Description of Artificial Sequence: Synthetic oligonucleotide
aaacuaaugguauaagaaa

SEQ ID NO: 756652 - RNA, 19 nt, Artificial Sequence
  Description of Artificial Sequence: Synthetic oligonucleotide
aauugugucgauacaauuc

SEQ ID NO: 756653 - RNA, 19 nt, Artificial Sequence
  Description of Artificial Sequence: Synthetic oligonucleotide
uccauaauuucauacaggu

SEQ ID NO: 756654 - RNA, 19 nt, Artificial Sequence
  Description of Artificial Sequence: Synthetic oligonucleotide
agagauauguauuuaagau

SEQ ID NO: 756655 - RNA, 19 nt, Artificial Sequence
  Description of Artificial Sequence: Synthetic oligonucleotide
uuaacagcaaauuauuuua

SEQ ID NO: 756656 - RNA, 19 nt, Artificial Sequence
  Description of Artificial Sequence: Synthetic oligonucleotide
auuaucacuauuuaccuaa

SEQ ID NO: 756657 - RNA, 19 nt, Artificial Sequence
  Description of Artificial Sequence: Synthetic oligonucleotide
uguaaacucaaguuaugag

SEQ ID NO: 756658 - RNA, 19 nt, Artificial Sequence
  Description of Artificial Sequence: Synthetic oligonucleotide
uacguggaaaauuagaaaa

SEQ ID NO: 756659 - RNA, 19 nt, Artificial Sequence
  Description of Artificial Sequence: Synthetic oligonucleotide
uaucucuauagauauagcu

SEQ ID NO: 756660 - RNA, 19 nt, Artificial Sequence
  Description of Artificial Sequence: Synthetic oligonucleotide
auuuaagauauguauagau

SEQ ID NO: 756661 - RNA, 19 nt, Artificial Sequence
  Description of Artificial Sequence: Synthetic oligonucleotide
acacuaaucacacaugaca

SEQ ID NO: 756662 - RNA, 19 nt, Artificial Sequence
  Description of Artificial Sequence: Synthetic oligonucleotide
auauauauccaucuuuacu

SEQ ID NO: 756663 - RNA, 19 nt, Artificial Sequence
  Description of Artificial Sequence: Synthetic oligonucleotide
uuuagaucccuacuguuga

SEQ ID NO: 756664 - RNA, 19 nt, Artificial Sequence
  Description of Artificial Sequence: Synthetic oligonucleotide
auugcuuccauuaauaaga

SEQ ID NO: 756665 - RNA, 19 nt, Artificial Sequence
  Description of Artificial Sequence: Synthetic oligonucleotide
guuaaugacaaacaugcca

SEQ ID NO: 756666 - RNA, 19 nt, Artificial Sequence
  Description of Artificial Sequence: Synthetic oligonucleotide
uguuuguaaguacauagaa

SEQ ID NO: 756667 - RNA, 19 nt, Artificial Sequence
  Description of Artificial Sequence: Synthetic oligonucleotide
agacauagggauuauauau

SEQ ID NO: 756668 - RNA, 19 nt, Artificial Sequence
  Description of Artificial Sequence: Synthetic oligonucleotide
uguauagcaucugugaccc

SEQ ID NO: 756669 - RNA, 19 nt, Artificial Sequence
  Description of Artificial Sequence: Synthetic oligonucleotide
ucaaaucacaucucgugag

SEQ ID NO: 756670 - RNA, 19 nt, Artificial Sequence
  Description of Artificial Sequence: Synthetic oligonucleotide
auaacauaauaucugaguu

SEQ ID NO: 756671 - RNA, 19 nt, Artificial Sequence
  Description of Artificial Sequence: Synthetic oligonucleotide
aaauccucuagagauaugu

SEQ ID NO: 756672 - RNA, 19 nt, Artificial Sequence
  Description of Artificial Sequence: Synthetic oligonucleotide
agagggguaaagcaacagc

SEQ ID NO: 756673 - RNA, 19 nt, Artificial Sequence
  Description of Artificial Sequence: Synthetic oligonucleotide
auagauauagcuuuaucua

SEQ ID NO: 756674 - RNA, 19 nt, Artificial Sequence
  Description of Artificial Sequence: Synthetic oligonucleotide
ucauaacauaauaucugag

SEQ ID NO: 756675 - RNA, 19 nt, Artificial Sequence
  Description of Artificial Sequence: Synthetic oligonucleotide
auaagaaagauugaccucu

SEQ ID NO: 756676 - RNA, 19 nt, Artificial Sequence
  Description of Artificial Sequence: Synthetic oligonucleotide
aauucuuguggucgggaag

SEQ ID NO: 756677 - RNA, 19 nt, Artificial Sequence
  Description of Artificial Sequence: Synthetic oligonucleotide
uucaaaucacaucucguga

SEQ ID NO: 756678 - RNA, 19 nt, Artificial Sequence
  Description of Artificial Sequence: Synthetic oligonucleotide
accuaaauagccuagguuu

SEQ ID NO: 756679 - RNA, 19 nt, Artificial Sequence
  Description of Artificial Sequence: Synthetic oligonucleotide
cacuauuuaccuaaauagc

SEQ ID NO: 756680 - RNA, 19 nt, Artificial Sequence
  Description of Artificial Sequence: Synthetic oligonucleotide
aauccauagggauuucuga

SEQ ID NO: 756681 - RNA, 19 nt, Artificial Sequence
  Description of Artificial Sequence: Synthetic oligonucleotide
auugugucgauacaauucu

SEQ ID NO: 756682 - RNA, 19 nt, Artificial Sequence
  Description of Artificial Sequence: Synthetic oligonucleotide
uggagcuuaacacuaauua

SEQ ID NO: 756683 - RNA, 19 nt, Artificial Sequence
  Description of Artificial Sequence: Synthetic oligonucleotide
aaaaucgugagaccggcaa

SEQ ID NO: 756684 - RNA, 19 nt, Artificial Sequence
  Description of Artificial Sequence: Synthetic oligonucleotide
agaaacuaaugguauaaga

SEQ ID NO: 756685 - RNA, 19 nt, Artificial Sequence
  Description of Artificial Sequence: Synthetic oligonucleotide
guacaugucguauagcuac

SEQ ID NO: 756686 - RNA, 19 nt, Artificial Sequence
  Description of Artificial Sequence: Synthetic oligonucleotide
uucauacagguacacaugu

SEQ ID NO: 756687 - RNA, 19 nt, Artificial Sequence
  Description of Artificial Sequence: Synthetic oligonucleotide
ugugucgauacaauucuug

SEQ ID NO: 756688 - RNA, 19 nt, Artificial Sequence
  Description of Artificial Sequence: Synthetic oligonucleotide
gaccccucaauucucauag

SEQ ID NO: 756689 - RNA, 19 nt, Artificial Sequence
  Description of Artificial Sequence: Synthetic oligonucleotide
aauagccuagguuuuaauu

SEQ ID NO: 756690 - RNA, 19 nt, Artificial Sequence
  Description of Artificial Sequence: Synthetic oligonucleotide
ugagaauggacccauuauc

SEQ ID NO: 756691 - RNA, 19 nt, Artificial Sequence
  Description of Artificial Sequence: Synthetic oligonucleotide
cuucaaaucacaucucgug

SEQ ID NO: 756692 - RNA, 19 nt, Artificial Sequence
  Description of Artificial Sequence: Synthetic oligonucleotide
uuaguucagguauacagaa

SEQ ID NO: 756693 - RNA, 19 nt, Artificial Sequence
  Description of Artificial Sequence: Synthetic oligonucleotide
ucucuauagauauagcuuu

SEQ ID NO: 756694 - RNA, 19 nt, Artificial Sequence
  Description of Artificial Sequence: Synthetic oligonucleotide
ucucgugaguuucuuauug

SEQ ID NO: 756695 - RNA, 19 nt, Artificial Sequence
  Description of Artificial Sequence: Synthetic oligonucleotide
ucuuauugcacagcaaagc

SEQ ID NO: 756696 - RNA, 19 nt, Artificial Sequence
  Description of Artificial Sequence: Synthetic oligonucleotide
ugauucauuaacuugccuu

SEQ ID NO: 756697 - RNA, 19 nt, Artificial Sequence
  Description of Artificial Sequence: Synthetic oligonucleotide
ugaaacucacuucugcaga

SEQ ID NO: 756698 - RNA, 19 nt, Artificial Sequence
  Description of Artificial Sequence: Synthetic oligonucleotide
gaaacuaaugguauaagaa

SEQ ID NO: 756699 - RNA, 19 nt, Artificial Sequence
  Description of Artificial Sequence: Synthetic oligonucleotide
uaagguaaucgcuguaugc

SEQ ID NO: 756700 - RNA, 19 nt, Artificial Sequence
  Description of Artificial Sequence: Synthetic oligonucleotide
ugccuauaaaagcaaacac

SEQ ID NO: 756701 - RNA, 19 nt, Artificial Sequence
  Description of Artificial Sequence: Synthetic oligonucleotide
uuuaccuaaauagccuagg

SEQ ID NO: 756702 - RNA, 19 nt, Artificial Sequence
  Description of Artificial Sequence: Synthetic oligonucleotide
gauuccaaugagcuggagc

SEQ ID NO: 756703 - RNA, 19 nt, Artificial Sequence
  Description of Artificial Sequence: Synthetic oligonucleotide
gauugcaauuuucaugaug

SEQ ID NO: 756704 - RNA, 19 nt, Artificial Sequence
  Description of Artificial Sequence: Synthetic oligonucleotide
uuauguaucuaacuuucau

SEQ ID NO: 756705 - RNA, 19 nt, Artificial Sequence
  Description of Artificial Sequence: Synthetic oligonucleotide
acauggucuguacaugucg

SEQ ID NO: 756706 - RNA, 19 nt, Artificial Sequence
  Description of Artificial Sequence: Synthetic oligonucleotide
guauaaauccucuagagau

SEQ ID NO: 756707 - RNA, 19 nt, Artificial Sequence
  Description of Artificial Sequence: Synthetic oligonucleotide
uuaagguaaucgcuguaug

SEQ ID NO: 756708 - RNA, 19 nt, Artificial Sequence
  Description of Artificial Sequence: Synthetic oligonucleotide
agaccggcaauuccaauac

SEQ ID NO: 756709 - RNA, 19 nt, Artificial Sequence
  Description of Artificial Sequence: Synthetic oligonucleotide
agagguacacuaaucacac

SEQ ID NO: 756710 - RNA, 19 nt, Artificial Sequence
  Description of Artificial Sequence: Synthetic oligonucleotide
cacuaaucacacaugacac

SEQ ID NO: 756711 - RNA, 19 nt, Artificial Sequence
  Description of Artificial Sequence: Synthetic oligonucleotide
ugcauuugucaacuccugg

SEQ ID NO: 756712 - RNA, 19 nt, Artificial Sequence
  Description of Artificial Sequence: Synthetic oligonucleotide
uuucaaauuaguucaggua

SEQ ID NO: 756713 - RNA, 19 nt, Artificial Sequence
  Description of Artificial Sequence: Synthetic oligonucleotide
uuguuuguaaguacauaga

SEQ ID NO: 756714 - RNA, 19 nt, Artificial Sequence
  Description of Artificial Sequence: Synthetic oligonucleotide
agaucccuacuguugauuc

SEQ ID NO: 756715 - RNA, 19 nt, Artificial Sequence
  Description of Artificial Sequence: Synthetic oligonucleotide
aauuccaauaccaacgauu

SEQ ID NO: 756716 - RNA, 19 nt, Artificial Sequence
  Description of Artificial Sequence: Synthetic oligonucleotide
uagacuuauuccucugcgg

SEQ ID NO: 756717 - RNA, 19 nt, Artificial Sequence
  Description of Artificial Sequence: Synthetic oligonucleotide
ucuuuauguaucuaacuuu

SEQ ID NO: 756718 - RNA, 19 nt, Artificial Sequence
  Description of Artificial Sequence: Synthetic oligonucleotide
cauuugucaacuccugggg

SEQ ID NO: 756719 - RNA, 19 nt, Artificial Sequence
  Description of Artificial Sequence: Synthetic oligonucleotide
gauuucuagacuuauuccu

SEQ ID NO: 756720 - RNA, 19 nt, Artificial Sequence
  Description of Artificial Sequence: Synthetic oligonucleotide
uucucuacguggaaaauua

SEQ ID NO: 756721 - RNA, 19 nt, Artificial Sequence
  Description of Artificial Sequence: Synthetic oligonucleotide
agguacacuaaucacacau

SEQ ID NO: 756722 - RNA, 19 nt, Artificial Sequence
  Description of Artificial Sequence: Synthetic oligonucleotide
aauuuagaucccuacuguu

SEQ ID NO: 756723 - RNA, 19 nt, Artificial Sequence
  Description of Artificial Sequence: Synthetic oligonucleotide
ucccacuuaaauuaaccac

SEQ ID NO: 756724 - RNA, 19 nt, Artificial Sequence
  Description of Artificial Sequence: Synthetic oligonucleotide
ucguauagcuacauccuug

SEQ ID NO: 756725 - RNA, 19 nt, Artificial Sequence
  Description of Artificial Sequence: Synthetic oligonucleotide
uucagguauacagaaauaa

SEQ ID NO: 756726 - RNA, 19 nt, Artificial Sequence
  Description of Artificial Sequence: Synthetic oligonucleotide
uauaagaaagauugaccuc

SEQ ID NO: 756727 - RNA, 19 nt, Artificial Sequence
  Description of Artificial Sequence: Synthetic oligonucleotide
gaaacucacuucugcagag

SEQ ID NO: 756728 - RNA, 19 nt, Artificial Sequence
  Description of Artificial Sequence: Synthetic oligonucleotide
ccuauaaaagcaaacacuc

SEQ ID NO: 756729 - RNA, 19 nt, Artificial Sequence
  Description of Artificial Sequence: Synthetic oligonucleotide
aagauauguauagauucca

SEQ ID NO: 756730 - RNA, 19 nt, Artificial Sequence
  Description of Artificial Sequence: Synthetic oligonucleotide
aacucacuucugcagagca

SEQ ID NO: 756731 - RNA, 19 nt, Artificial Sequence
  Description of Artificial Sequence: Synthetic oligonucleotide
uguauacacaugugcaugu

SEQ ID NO: 756732 - RNA, 19 nt, Artificial Sequence
  Description of Artificial Sequence: Synthetic oligonucleotide
gguaaaguagucaacacac

SEQ ID NO: 756733 - RNA, 19 nt, Artificial Sequence
  Description of Artificial Sequence: Synthetic oligonucleotide
ugucguauagcuacauccu

SEQ ID NO: 756734 - RNA, 19 nt, Artificial Sequence
  Description of Artificial Sequence: Synthetic oligonucleotide
ugucgauacaauucuugug

SEQ ID NO: 756735 - RNA, 19 nt, Artificial Sequence
  Description of Artificial Sequence: Synthetic oligonucleotide
uggguuugauuucaaauua

SEQ ID NO: 756736 - RNA, 19 nt, Artificial Sequence
  Description of Artificial Sequence: Synthetic oligonucleotide
uauuuaccuaaauagccua

SEQ ID NO: 756737 - RNA, 19 nt, Artificial Sequence
  Description of Artificial Sequence: Synthetic oligonucleotide
uggguuuucccacuuaaau

SEQ ID NO: 756738 - RNA, 19 nt, Artificial Sequence
  Description of Artificial Sequence: Synthetic oligonucleotide
agacuuauuccucugcggu

SEQ ID NO: 756739 - RNA, 19 nt, Artificial Sequence
  Description of Artificial Sequence: Synthetic oligonucleotide
uucaauugugucgauacaa

SEQ ID NO: 756740 - RNA, 19 nt, Artificial Sequence
  Description of Artificial Sequence: Synthetic oligonucleotide
uuaccuaaauagccuaggu

SEQ ID NO: 756741 - RNA, 19 nt, Artificial Sequence
  Description of Artificial Sequence: Synthetic oligonucleotide
uuacaggggauuuauuuau

SEQ ID NO: 756742 - RNA, 19 nt, Artificial Sequence
  Description of Artificial Sequence: Synthetic oligonucleotide
uaucuaacuuucauggcua

SEQ ID NO: 756743 - RNA, 19 nt, Artificial Sequence
  Description of Artificial Sequence: Synthetic oligonucleotide
gagauauguauuuaagaua

SEQ ID NO: 756744 - RNA, 19 nt, Artificial Sequence
  Description of Artificial Sequence: Synthetic oligonucleotide
uauucacauaaagauauau

SEQ ID NO: 756745 - RNA, 19 nt, Artificial Sequence
  Description of Artificial Sequence: Synthetic oligonucleotide
uuaacuugccuuuguugug

SEQ ID NO: 756746 - RNA, 19 nt, Artificial Sequence
  Description of Artificial Sequence: Synthetic oligonucleotide
uauaaauccucuagagaua

SEQ ID NO: 756747 - RNA, 19 nt, Artificial Sequence
  Description of Artificial Sequence: Synthetic oligonucleotide
uuuuacuccgcacauucuu

SEQ ID NO: 756748 - RNA, 19 nt, Artificial Sequence
  Description of Artificial Sequence: Synthetic oligonucleotide
uccccugucuuuaagguaa

SEQ ID NO: 756749 - RNA, 19 nt, Artificial Sequence
  Description of Artificial Sequence: Synthetic oligonucleotide
uuaugguuucaauuguguc

SEQ ID NO: 756750 - RNA, 19 nt, Artificial Sequence
  Description of Artificial Sequence: Synthetic oligonucleotide
gguauaagaaagauugacc

SEQ ID NO: 756751 - RNA, 19 nt, Artificial Sequence
  Description of Artificial Sequence: Synthetic oligonucleotide
uuaaaagguugcauuuguc

SEQ ID NO: 756752 - RNA, 19 nt, Artificial Sequence
  Description of Artificial Sequence: Synthetic oligonucleotide
agcaugaaaacucucgauu

SEQ ID NO: 756753 - RNA, 19 nt, Artificial Sequence
  Description of Artificial Sequence: Synthetic oligonucleotide
uuuaagguaaucgcuguau

SEQ ID NO: 756754 - RNA, 19 nt, Artificial Sequence
  Description of Artificial Sequence: Synthetic oligonucleotide
ucaauugugucgauacaau

SEQ ID NO: 756755 - RNA, 19 nt, Artificial Sequence
  Description of Artificial Sequence: Synthetic oligonucleotide
guggaagguaaugagagug

SEQ ID NO: 756756 - RNA, 19 nt, Artificial Sequence
  Description of Artificial Sequence: Synthetic oligonucleotide
ugcuuauaguuacuguagu

SEQ ID NO: 756757 - RNA, 19 nt, Artificial Sequence
  Description of Artificial Sequence: Synthetic oligonucleotide
uaaugguauaagaaagauu

SEQ ID NO: 756758 - RNA, 19 nt, Artificial Sequence
  Description of Artificial Sequence: Synthetic oligonucleotide
aagguugcauuugucaacu

SEQ ID NO: 756759 - RNA, 19 nt, Artificial Sequence
  Description of Artificial Sequence: Synthetic oligonucleotide
acaguuaaugacaaacaug

SEQ ID NO: 756760 - RNA, 19 nt, Artificial Sequence
  Description of Artificial Sequence: Synthetic oligonucleotide
cuagguuuuaauucacuca

SEQ ID NO: 756761 - RNA, 19 nt, Artificial Sequence
  Description of Artificial Sequence: Synthetic oligonucleotide
auacauggucuguacaugu

SEQ ID NO: 756762 - RNA, 19 nt, Artificial Sequence
  Description of Artificial Sequence: Synthetic oligonucleotide
uaaaagcccuuuugggaag

SEQ ID NO: 756763 - RNA, 19 nt, Artificial Sequence
  Description of Artificial Sequence: Synthetic oligonucleotide
aacucaaguuaugagguau

SEQ ID NO: 756764 - RNA, 19 nt, Artificial Sequence
  Description of Artificial Sequence: Synthetic oligonucleotide
guacacuaaucacacauga

SEQ ID NO: 756765 - RNA, 19 nt, Artificial Sequence
  Description of Artificial Sequence: Synthetic oligonucleotide
acuaaucacacaugacaca

SEQ ID NO: 756766 - RNA, 19 nt, Artificial Sequence
  Description of Artificial Sequence: Synthetic oligonucleotide
augcauaaaagcauucuug

SEQ ID NO: 756767 - RNA, 19 nt, Artificial Sequence
  Description of Artificial Sequence: Synthetic oligonucleotide
uuucaauugugucgauaca

SEQ ID NO: 756768 - RNA, 19 nt, Artificial Sequence
  Description of Artificial Sequence: Synthetic oligonucleotide
gaauucucuacguggaaaa

SEQ ID NO: 756769 - RNA, 19 nt, Artificial Sequence
  Description of Artificial Sequence: Synthetic oligonucleotide
uagaaacuaaugguauaag

SEQ ID NO: 756770 - RNA, 19 nt, Artificial Sequence
  Description of Artificial Sequence: Synthetic oligonucleotide
uuaauucacucaaggggaa

SEQ ID NO: 756771 - RNA, 19 nt, Artificial Sequence
  Description of Artificial Sequence: Synthetic oligonucleotide
aguuaaugacaaacaugcc

SEQ ID NO: 756772 - RNA, 19 nt, Artificial Sequence
  Description of Artificial Sequence: Synthetic oligonucleotide
ucgugaguuucuuauugca

SEQ ID NO: 756773 - RNA, 19 nt, Artificial Sequence
  Description of Artificial Sequence: Synthetic oligonucleotide
cauaacauaauaucugagu

SEQ ID NO: 756774 - RNA, 19 nt, Artificial Sequence
  Description of Artificial Sequence: Synthetic oligonucleotide
aauggacccauuaucacua

SEQ ID NO: 756775 - RNA, 19 nt, Artificial Sequence
  Description of Artificial Sequence: Synthetic oligonucleotide
uuuucccacuuaaauuaac

SEQ ID NO: 756776 - RNA, 19 nt, Artificial Sequence
  Description of Artificial Sequence: Synthetic oligonucleotide
ucgcucuugugacauuuag

SEQ ID NO: 756777 - RNA, 19 nt, Artificial Sequence
  Description of Artificial Sequence: Synthetic oligonucleotide
auaaauccucuagagauau

SEQ ID NO: 756778 - RNA, 19 nt, Artificial Sequence
  Description of Artificial Sequence: Synthetic oligonucleotide
aguuacuguaguuuucuuu

SEQ ID NO: 756779 - RNA, 19 nt, Artificial Sequence
  Description of Artificial Sequence: Synthetic oligonucleotide
gagugcgagauaaaagccc

SEQ ID NO: 756780 - RNA, 19 nt, Artificial Sequence
  Description of Artificial Sequence: Synthetic oligonucleotide
uguaugccuccucauacau

SEQ ID NO: 756781 - RNA, 19 nt, Artificial Sequence
  Description of Artificial Sequence: Synthetic oligonucleotide
guaucuaacuuucauggcu

SEQ ID NO: 756782 - RNA, 19 nt, Artificial Sequence
  Description of Artificial Sequence: Synthetic oligonucleotide
ucuuuacucagagauggaa

SEQ ID NO: 756783 - RNA, 19 nt, Artificial Sequence
  Description of Artificial Sequence: Synthetic oligonucleotide
accucuuugcuuaaaaggu

SEQ ID NO: 756784 - RNA, 19 nt, Artificial Sequence
  Description of Artificial Sequence: Synthetic oligonucleotide
cuuaacacuaauuaugguu

SEQ ID NO: 756785 - RNA, 19 nt, Artificial Sequence
  Description of Artificial Sequence: Synthetic oligonucleotide
aaucacaucucgugaguuu

SEQ ID NO: 756786 - RNA, 19 nt, Artificial Sequence
  Description of Artificial Sequence: Synthetic oligonucleotide
uaccuaaauagccuagguu

SEQ ID NO: 756787 - RNA, 19 nt, Artificial Sequence
  Description of Artificial Sequence: Synthetic oligonucleotide
uaucuuguuuuggccaagg

SEQ ID NO: 756788 - RNA, 19 nt, Artificial Sequence
  Description of Artificial Sequence: Synthetic oligonucleotide
aaaucaguaaugagucaga

SEQ ID NO: 756789 - RNA, 19 nt, Artificial Sequence
  Description of Artificial Sequence: Synthetic oligonucleotide
aacacuaauuaugguuuca

SEQ ID NO: 756790 - RNA, 19 nt, Artificial Sequence
  Description of Artificial Sequence: Synthetic oligonucleotide
auguaaacucaaguuauga

SEQ ID NO: 756791 - RNA, 19 nt, Artificial Sequence
  Description of Artificial Sequence: Synthetic oligonucleotide
gaggagugcgagauaaaag

SEQ ID NO: 756792 - RNA, 19 nt, Artificial Sequence
  Description of Artificial Sequence: Synthetic oligonucleotide
cucgugaguuucuuauugc

SEQ ID NO: 756793 - RNA, 19 nt, Artificial Sequence
  Description of Artificial Sequence: Synthetic oligonucleotide
uacuccgcacauucuuugg

SEQ ID NO: 756794 - RNA, 19 nt, Artificial Sequence
  Description of Artificial Sequence: Synthetic oligonucleotide
uugauucauuaacuugccu

SEQ ID NO: 756795 - RNA, 19 nt, Artificial Sequence
  Description of Artificial Sequence: Synthetic oligonucleotide
agguguuuaucuuguuuug

SEQ ID NO: 756796 - RNA, 19 nt, Artificial Sequence
  Description of Artificial Sequence: Synthetic oligonucleotide
ugccaauuuagaucccuac

SEQ ID NO: 756797 - RNA, 19 nt, Artificial Sequence
  Description of Artificial Sequence: Synthetic oligonucleotide
ucgauacaauucuuguggu

SEQ ID NO: 756798 - RNA, 19 nt, Artificial Sequence
  Description of Artificial Sequence: Synthetic oligonucleotide
aaaucgugagaccggcaau

SEQ ID NO: 756799 - RNA, 19 nt, Artificial Sequence
  Description of Artificial Sequence: Synthetic oligonucleotide
ccaauuuagaucccuacug

SEQ ID NO: 756800 - RNA, 19 nt, Artificial Sequence
  Description of Artificial Sequence: Synthetic oligonucleotide
uucugcuuauaguuacugu

SEQ ID NO: 756801 - RNA, 19 nt, Artificial Sequence
  Description of Artificial Sequence: Synthetic oligonucleotide
uagggauuauauaucucua

SEQ ID NO: 756802 - RNA, 19 nt, Artificial Sequence
  Description of Artificial Sequence: Synthetic oligonucleotide
ugugaccccucaauucuca

SEQ ID NO: 756803 - RNA, 19 nt, Artificial Sequence
  Description of Artificial Sequence: Synthetic oligonucleotide
auaauuucauacagguaca

SEQ ID NO: 756804 - RNA, 19 nt, Artificial Sequence
  Description of Artificial Sequence: Synthetic oligonucleotide
agggauuauauaucucuau

SEQ ID NO: 756805 - RNA, 19 nt, Artificial Sequence
  Description of Artificial Sequence: Synthetic oligonucleotide
auuuaccuaaauagccuag

SEQ ID NO: 756806 - RNA, 19 nt, Artificial Sequence
  Description of Artificial Sequence: Synthetic oligonucleotide
aacccacaaagagguacac

SEQ ID NO: 756807 - RNA, 19 nt, Artificial Sequence
  Description of Artificial Sequence: Synthetic oligonucleotide
aucgcuguaugccuccuca

SEQ ID NO: 756808 - RNA, 19 nt, Artificial Sequence
  Description of Artificial Sequence: Synthetic oligonucleotide
cucucgauugcaauuuuca

SEQ ID NO: 756809 - RNA, 19 nt, Artificial Sequence
  Description of Artificial Sequence: Synthetic oligonucleotide
agguaaucgcuguaugccu

SEQ ID NO: 756810 - RNA, 19 nt, Artificial Sequence
  Description of Artificial Sequence: Synthetic oligonucleotide
guuacaggggauuuauuua

SEQ ID NO: 756811 - RNA, 19 nt, Artificial Sequence
  Description of Artificial Sequence: Synthetic oligonucleotide
aaacucaaguuaugaggua

SEQ ID NO: 756812 - RNA, 19 nt, Artificial Sequence
  Description of Artificial Sequence: Synthetic oligonucleotide
uacaugucguauagcuaca

SEQ ID NO: 756813 - RNA, 19 nt, Artificial Sequence
  Description of Artificial Sequence: Synthetic oligonucleotide
ucucgauugcaauuuucau

SEQ ID NO: 756814 - RNA, 19 nt, Artificial Sequence
  Description of Artificial Sequence: Synthetic oligonucleotide
guaaucgcuguaugccucc

SEQ ID NO: 756815 - RNA, 19 nt, Artificial Sequence
  Description of Artificial Sequence: Synthetic oligonucleotide
cuauuuaccuaaauagccu

SEQ ID NO: 756816 - RNA, 19 nt, Artificial Sequence
  Description of Artificial Sequence: Synthetic oligonucleotide
uuaucacuauuuaccuaaa

SEQ ID NO: 756817 - RNA, 19 nt, Artificial Sequence
  Description of Artificial Sequence: Synthetic oligonucleotide
cauagggauuauauaucuc

SEQ ID NO: 756818 - RNA, 19 nt, Artificial Sequence
  Description of Artificial Sequence: Synthetic oligonucleotide
uggaguaaccugaguacau

SEQ ID NO: 756819 - RNA, 19 nt, Artificial Sequence
  Description of Artificial Sequence: Synthetic oligonucleotide
aaaucacaucucgugaguu

SEQ ID NO: 756820 - RNA, 19 nt, Artificial Sequence
  Description of Artificial Sequence: Synthetic oligonucleotide
gguguuuaucuuguuuugg

SEQ ID NO: 756821 - RNA, 19 nt, Artificial Sequence
  Description of Artificial Sequence: Synthetic oligonucleotide
aacuugccuuuguugugug

SEQ ID NO: 756822 - RNA, 19 nt, Artificial Sequence
  Description of Artificial Sequence: Synthetic oligonucleotide
ugaggcuuccagcauucaa

SEQ ID NO: 756823 - RNA, 19 nt, Artificial Sequence
  Description of Artificial Sequence: Synthetic oligonucleotide
uaccaacgauuccaaugag

SEQ ID NO: 756824 - RNA, 19 nt, Artificial Sequence
  Description of Artificial Sequence: Synthetic oligonucleotide
uggauaagguguuuaucuu

SEQ ID NO: 756825 - RNA, 19 nt, Artificial Sequence
  Description of Artificial Sequence: Synthetic oligonucleotide
cucuacguggaaaauuaga

SEQ ID NO: 756826 - RNA, 19 nt, Artificial Sequence
  Description of Artificial Sequence: Synthetic oligonucleotide
aaucgugagaccggcaauu

SEQ ID NO: 756827 - RNA, 19 nt, Artificial Sequence
  Description of Artificial Sequence: Synthetic oligonucleotide
cauacauggucuguacaug

SEQ ID NO: 756828 - RNA, 19 nt, Artificial Sequence
  Description of Artificial Sequence: Synthetic oligonucleotide
uuacucagagauggaauuc

SEQ ID NO: 756829 - RNA, 19 nt, Artificial Sequence
  Description of Artificial Sequence: Synthetic oligonucleotide
auucacauaaagauauaua

SEQ ID NO: 756830 - RNA, 19 nt, Artificial Sequence
  Description of Artificial Sequence: Synthetic oligonucleotide
uaaauccucuagagauaug

SEQ ID NO: 756831 - RNA, 19 nt, Artificial Sequence
  Description of Artificial Sequence: Synthetic oligonucleotide
ugaguacaugcuucagccu

SEQ ID NO: 756832 - RNA, 19 nt, Artificial Sequence
  Description of Artificial Sequence: Synthetic oligonucleotide
agaauucucuacguggaaa

SEQ ID NO: 756833 - RNA, 19 nt, Artificial Sequence
  Description of Artificial Sequence: Synthetic oligonucleotide
aauucucuacguggaaaau

SEQ ID NO: 756834 - RNA, 19 nt, Artificial Sequence
  Description of Artificial Sequence: Synthetic oligonucleotide
gagaccggcaauuccaaua

SEQ ID NO: 756835 - RNA, 19 nt, Artificial Sequence
  Description of Artificial Sequence: Synthetic oligonucleotide
acuuauuccucugcgguaa

SEQ ID NO: 756836 - RNA, 19 nt, Artificial Sequence
  Description of Artificial Sequence: Synthetic oligonucleotide
auuccagacauagggauua

SEQ ID NO: 756837 - RNA, 19 nt, Artificial Sequence
  Description of Artificial Sequence: Synthetic oligonucleotide
gcuuagguaaaguagucaa

SEQ ID NO: 756838 - RNA, 19 nt, Artificial Sequence
  Description of Artificial Sequence: Synthetic oligonucleotide
gagggguaaagcaacagcu

SEQ ID NO: 756839 - RNA, 19 nt, Artificial Sequence
  Description of Artificial Sequence: Synthetic oligonucleotide
ugagaucgcucuugugaca

SEQ ID NO: 756840 - RNA, 19 nt, Artificial Sequence
  Description of Artificial Sequence: Synthetic oligonucleotide
agucagacauacauacaug

SEQ ID NO: 756841 - RNA, 19 nt, Artificial Sequence
  Description of Artificial Sequence: Synthetic oligonucleotide
aaccugcacauuucagaaa

SEQ ID NO: 756842 - RNA, 19 nt, Artificial Sequence
  Description of Artificial Sequence: Synthetic oligonucleotide
guaaugagagugccauuuc

SEQ ID NO: 756843 - RNA, 19 nt, Artificial Sequence
  Description of Artificial Sequence: Synthetic oligonucleotide
ccuagguuuuaauucacuc

SEQ ID NO: 756844 - RNA, 19 nt, Artificial Sequence
  Description of Artificial Sequence: Synthetic oligonucleotide
aauauacaguuaacagcaa

SEQ ID NO: 756845 - RNA, 19 nt, Artificial Sequence
  Description of Artificial Sequence: Synthetic oligonucleotide
uguugugugcacacaucuu

SEQ ID NO: 756846 - RNA, 19 nt, Artificial Sequence
  Description of Artificial Sequence: Synthetic oligonucleotide
uccgcacauucuuuggaaa

SEQ ID NO: 756847 - RNA, 19 nt, Artificial Sequence
  Description of Artificial Sequence: Synthetic oligonucleotide
uagcuucuaauauccugaa

SEQ ID NO: 756848 - RNA, 19 nt, Artificial Sequence
  Description of Artificial Sequence: Synthetic oligonucleotide
ggccaagguacucauaaca

SEQ ID NO: 756849 - RNA, 19 nt, Artificial Sequence
  Description of Artificial Sequence: Synthetic oligonucleotide
agcuuauugcuuccauuaa

SEQ ID NO: 756850 - RNA, 19 nt, Artificial Sequence
  Description of Artificial Sequence: Synthetic oligonucleotide
guauagcuacauccuugcc

SEQ ID NO: 756851 - RNA, 19 nt, Artificial Sequence
  Description of Artificial Sequence: Synthetic oligonucleotide
ugagaaguggcuggguuuu

SEQ ID NO: 756852 - RNA, 19 nt, Artificial Sequence
  Description of Artificial Sequence: Synthetic oligonucleotide
acuccgcacauucuuugga

SEQ ID NO: 756853 - RNA, 19 nt, Artificial Sequence
  Description of Artificial Sequence: Synthetic oligonucleotide
cucaaguuaugagguauuc

SEQ ID NO: 756854 - RNA, 19 nt, Artificial Sequence
  Description of Artificial Sequence: Synthetic oligonucleotide
accccucaauucucauagc

SEQ ID NO: 756855 - RNA, 19 nt, Artificial Sequence
  Description of Artificial Sequence: Synthetic oligonucleotide
acucucgauugcaauuuuc

SEQ ID NO: 756856 - RNA, 19 nt, Artificial Sequence
  Description of Artificial Sequence: Synthetic oligonucleotide
ucauagcuuauugcuucca

SEQ ID NO: 756857 - RNA, 19 nt, Artificial Sequence
  Description of Artificial Sequence: Synthetic oligonucleotide
caugucguauagcuacauc

SEQ ID NO: 756858 - RNA, 19 nt, Artificial Sequence
  Description of Artificial Sequence: Synthetic oligonucleotide
auucucuacguggaaaauu

SEQ ID NO: 756859 - RNA, 19 nt, Artificial Sequence
  Description of Artificial Sequence: Synthetic oligonucleotide
guugcauuugucaacuccu

SEQ ID NO: 756860 - RNA, 19 nt, Artificial Sequence
  Description of Artificial Sequence: Synthetic oligonucleotide
aacucucgauugcaauuuu

SEQ ID NO: 756861 - RNA, 19 nt, Artificial Sequence
  Description of Artificial Sequence: Synthetic oligonucleotide
cucuuuauguaucuaacuu

SEQ ID NO: 756862 - RNA, 19 nt, Artificial Sequence
  Description of Artificial Sequence: Synthetic oligonucleotide
ggagugcgagauaaaagcc

SEQ ID NO: 756863 - RNA, 19 nt, Artificial Sequence
  Description of Artificial Sequence: Synthetic oligonucleotide
uacaggggauuuauuuauu

SEQ ID NO: 756864 - RNA, 19 nt, Artificial Sequence
  Description of Artificial Sequence: Synthetic oligonucleotide
uuagaucccuacuguugau

SEQ ID NO: 756865 - RNA, 19 nt, Artificial Sequence
  Description of Artificial Sequence: Synthetic oligonucleotide
ugcgagauaaaagcccuuu

SEQ ID NO: 756866 - RNA, 19 nt, Artificial Sequence
  Description of Artificial Sequence: Synthetic oligonucleotide
cguauagcuacauccuugc

SEQ ID NO: 756867 - RNA, 19 nt, Artificial Sequence
  Description of Artificial Sequence: Synthetic oligonucleotide
agguuuuaauucacucaag

SEQ ID NO: 756868 - RNA, 19 nt, Artificial Sequence
  Description of Artificial Sequence: Synthetic oligonucleotide
gggauuauauaucucuaua

SEQ ID NO: 756869 - RNA, 19 nt, Artificial Sequence
  Description of Artificial Sequence: Synthetic oligonucleotide
uugccuuuguugugugcac

SEQ ID NO: 756870 - RNA, 19 nt, Artificial Sequence
  Description of Artificial Sequence: Synthetic oligonucleotide
gguacacuaaucacacaug

SEQ ID NO: 756871 - RNA, 19 nt, Artificial Sequence
  Description of Artificial Sequence: Synthetic oligonucleotide
agccuagguuuuaauucac

SEQ ID NO: 756872 - RNA, 19 nt, Artificial Sequence
  Description of Artificial Sequence: Synthetic oligonucleotide
agcgucuguggggaggcac

SEQ ID NO: 756873 - RNA, 19 nt, Artificial Sequence
  Description of Artificial Sequence: Synthetic oligonucleotide
guaaaguagucaacacaca

SEQ ID NO: 756874 - RNA, 19 nt, Artificial Sequence
  Description of Artificial Sequence: Synthetic oligonucleotide
acaauucuuguggucggga

SEQ ID NO: 756875 - RNA, 19 nt, Artificial Sequence
  Description of Artificial Sequence: Synthetic oligonucleotide
gacuuauuccucugcggua

SEQ ID NO: 756876 - RNA, 19 nt, Artificial Sequence
  Description of Artificial Sequence: Synthetic oligonucleotide
gugucgauacaauucuugu

SEQ ID NO: 756877 - RNA, 19 nt, Artificial Sequence
  Description of Artificial Sequence: Synthetic oligonucleotide
cuaaugguauaagaaagau

SEQ ID NO: 756878 - RNA, 19 nt, Artificial Sequence
  Description of Artificial Sequence: Synthetic oligonucleotide
caaaggugcagugccagga

SEQ ID NO: 756879 - RNA, 19 nt, Artificial Sequence
  Description of Artificial Sequence: Synthetic oligonucleotide
uuccccugucuuuaaggua

SEQ ID NO: 756880 - RNA, 19 nt, Artificial Sequence
  Description of Artificial Sequence: Synthetic oligonucleotide
uugugucgauacaauucuu

SEQ ID NO: 756881 - RNA, 19 nt, Artificial Sequence
  Description of Artificial Sequence: Synthetic oligonucleotide
ugaccccucaauucucaua

SEQ ID NO: 756882 - RNA, 19 nt, Artificial Sequence
  Description of Artificial Sequence: Synthetic oligonucleotide
aguacaugcuucagccugu

SEQ ID NO: 756883 - RNA, 19 nt, Artificial Sequence
  Description of Artificial Sequence: Synthetic oligonucleotide
ugcagccaaaagguugaga

SEQ ID NO: 756884 - RNA, 19 nt, Artificial Sequence
  Description of Artificial Sequence: Synthetic oligonucleotide
auucacucaaggggaaaau

SEQ ID NO: 756885 - RNA, 19 nt, Artificial Sequence
  Description of Artificial Sequence: Synthetic oligonucleotide
ucccuacuguugauuccca

SEQ ID NO: 756886 - RNA, 19 nt, Artificial Sequence
  Description of Artificial Sequence: Synthetic oligonucleotide
ccaacgauuccaaugagcu

SEQ ID NO: 756887 - RNA, 19 nt, Artificial Sequence
  Description of Artificial Sequence: Synthetic oligonucleotide
ggucgggaagcuccuuugg

SEQ ID NO: 756888 - RNA, 19 nt, Artificial Sequence
  Description of Artificial Sequence: Synthetic oligonucleotide
cuguaugccuccucauaca

SEQ ID NO: 756889 - RNA, 19 nt, Artificial Sequence
  Description of Artificial Sequence: Synthetic oligonucleotide
caucucgugaguuucuuau

SEQ ID NO: 756890 - RNA, 19 nt, Artificial Sequence
  Description of Artificial Sequence: Synthetic oligonucleotide
gagauggaauucucuauuu

SEQ ID NO: 756891 - RNA, 19 nt, Artificial Sequence
  Description of Artificial Sequence: Synthetic oligonucleotide
ggaguaaccugaguacaug

SEQ ID NO: 756892 - RNA, 19 nt, Artificial Sequence
  Description of Artificial Sequence: Synthetic oligonucleotide
caauucuuguggucgggaa

SEQ ID NO: 756893 - RNA, 19 nt, Artificial Sequence
  Description of Artificial Sequence: Synthetic oligonucleotide
cucuauagauauagcuuua

SEQ ID NO: 756894 - RNA, 19 nt, Artificial Sequence
  Description of Artificial Sequence: Synthetic oligonucleotide
ggagcuuaacacuaauuau

SEQ ID NO: 756895 - RNA, 19 nt, Artificial Sequence
  Description of Artificial Sequence: Synthetic oligonucleotide
gguagauuuagaaacuaau

SEQ ID NO: 756896 - RNA, 19 nt, Artificial Sequence
  Description of Artificial Sequence: Synthetic oligonucleotide
aucucgugaguuucuuauu

SEQ ID NO: 756897 - RNA, 19 nt, Artificial Sequence
  Description of Artificial Sequence: Synthetic oligonucleotide
uagaucccuacuguugauu

SEQ ID NO: 756898 - RNA, 19 nt, Artificial Sequence
  Description of Artificial Sequence: Synthetic oligonucleotide
ccgcacauucuuuggaaag

SEQ ID NO: 756899 - RNA, 19 nt, Artificial Sequence
  Description of Artificial Sequence: Synthetic oligonucleotide
ggaggguucucccaccguc

SEQ ID NO: 756900 - RNA, 19 nt, Artificial Sequence
  Description of Artificial Sequence: Synthetic oligonucleotide
guaugccuccucauacaug

SEQ ID NO: 756901 - RNA, 19 nt, Artificial Sequence
  Description of Artificial Sequence: Synthetic oligonucleotide
ggggauuuauuuauuuuaa

SEQ ID NO: 756902 - RNA, 19 nt, Artificial Sequence
  Description of Artificial Sequence: Synthetic oligonucleotide
uggacccauuaucacuauu

SEQ ID NO: 756903 - RNA, 19 nt, Artificial Sequence
  Description of Artificial Sequence: Synthetic oligonucleotide
ugagaccggcaauuccaau

SEQ ID NO: 756904 - RNA, 19 nt, Artificial Sequence
  Description of Artificial Sequence: Synthetic oligonucleotide
acaucucgugaguuucuua

SEQ ID NO: 756905 - RNA, 19 nt, Artificial Sequence
  Description of Artificial Sequence: Synthetic oligonucleotide
cccacuuaaauuaaccacu

SEQ ID NO: 756906 - RNA, 19 nt, Artificial Sequence
  Description of Artificial Sequence: Synthetic oligonucleotide
cauggucuguacaugucgu

SEQ ID NO: 756907 - RNA, 19 nt, Artificial Sequence
  Description of Artificial Sequence: Synthetic oligonucleotide
caaaucacaucucgugagu

SEQ ID NO: 756908 - RNA, 19 nt, Artificial Sequence
  Description of Artificial Sequence: Synthetic oligonucleotide
acagauuucuagacuuauu

SEQ ID NO: 756909 - RNA, 19 nt, Artificial Sequence
  Description of Artificial Sequence: Synthetic oligonucleotide
gguaaucgcuguaugccuc

SEQ ID NO: 756910 - RNA, 19 nt, Artificial Sequence
  Description of Artificial Sequence: Synthetic oligonucleotide
gaggguucucccaccguca

SEQ ID NO: 756911 - RNA, 19 nt, Artificial Sequence
  Description of Artificial Sequence: Synthetic oligonucleotide
acaugucguauagcuacau

SEQ ID NO: 756912 - RNA, 19 nt, Artificial Sequence
  Description of Artificial Sequence: Synthetic oligonucleotide
acucaaguuaugagguauu

SEQ ID NO: 756913 - RNA, 19 nt, Artificial Sequence
  Description of Artificial Sequence: Synthetic oligonucleotide
gguaaugagagugccauuu

SEQ ID NO: 756914 - RNA, 19 nt, Artificial Sequence
  Description of Artificial Sequence: Synthetic oligonucleotide
uuccccuuccccugucuuu

SEQ ID NO: 756915 - RNA, 19 nt, Artificial Sequence
  Description of Artificial Sequence: Synthetic oligonucleotide
caauugugucgauacaauu

SEQ ID NO: 756916 - RNA, 19 nt, Artificial Sequence
  Description of Artificial Sequence: Synthetic oligonucleotide
gagaucgcucuugugacau

SEQ ID NO: 756917 - RNA, 19 nt, Artificial Sequence
  Description of Artificial Sequence: Synthetic oligonucleotide
uccccuuccccugucuuua

SEQ ID NO: 756918 - RNA, 19 nt, Artificial Sequence
  Description of Artificial Sequence: Synthetic oligonucleotide
gccaaaagguugagaagug

SEQ ID NO: 756919 - RNA, 19 nt, Artificial Sequence
  Description of Artificial Sequence: Synthetic oligonucleotide
cuggguuuucccacuuaaa

SEQ ID NO: 756920 - RNA, 19 nt, Artificial Sequence
  Description of Artificial Sequence: Synthetic oligonucleotide
ccagacauagggauuauau

SEQ ID NO: 756921 - RNA, 19 nt, Artificial Sequence
  Description of Artificial Sequence: Synthetic oligonucleotide
aggaggguucucccaccgu

SEQ ID NO: 756922 - RNA, 19 nt, Artificial Sequence
  Description of Artificial Sequence: Synthetic oligonucleotide
ucgcuguaugccuccucau

SEQ ID NO: 756923 - RNA, 19 nt, Artificial Sequence
  Description of Artificial Sequence: Synthetic oligonucleotide
cacuaauuaugguuucaau

SEQ ID NO: 756924 - RNA, 19 nt, Artificial Sequence
  Description of Artificial Sequence: Synthetic oligonucleotide
uacaugcuucagccuguuu

SEQ ID NO: 756925 - RNA, 19 nt, Artificial Sequence
  Description of Artificial Sequence: Synthetic oligonucleotide
gaagcuccuuuggacaggu

SEQ ID NO: 756926 - RNA, 19 nt, Artificial Sequence
  Description of Artificial Sequence: Synthetic oligonucleotide
auggacccauuaucacuau

SEQ ID NO: 756927 - RNA, 19 nt, Artificial Sequence
  Description of Artificial Sequence: Synthetic oligonucleotide
cgugagaccggcaauucca

SEQ ID NO: 756928 - RNA, 19 nt, Artificial Sequence
  Description of Artificial Sequence: Synthetic oligonucleotide
ggucuguacaugucguaua

SEQ ID NO: 756929 - RNA, 19 nt, Artificial Sequence
  Description of Artificial Sequence: Synthetic oligonucleotide
gaucgcucuugugacauuu

SEQ ID NO: 756930 - RNA, 19 nt, Artificial Sequence
  Description of Artificial Sequence: Synthetic oligonucleotide
cggcaauuccaauaccaac

SEQ ID NO: 756931 - RNA, 19 nt, Artificial Sequence
  Description of Artificial Sequence: Synthetic oligonucleotide
aagcuccuuuggacagguc

SEQ ID NO: 756932 - RNA, 19 nt, Artificial Sequence
  Description of Artificial Sequence: Synthetic oligonucleotide
caguaaugagucagacaua

SEQ ID NO: 756933 - RNA, 19 nt, Artificial Sequence
  Description of Artificial Sequence: Synthetic oligonucleotide
ugguuucaauugugucgau

SEQ ID NO: 756934 - RNA, 19 nt, Artificial Sequence
  Description of Artificial Sequence: Synthetic oligonucleotide
cuuaacccacaaagaggua

SEQ ID NO: 756935 - RNA, 19 nt, Artificial Sequence
  Description of Artificial Sequence: Synthetic oligonucleotide
acgauuccaaugagcugga

SEQ ID NO: 756936 - RNA, 19 nt, Artificial Sequence
  Description of Artificial Sequence: Synthetic oligonucleotide
gucguauagcuacauccuu

SEQ ID NO: 756937 - RNA, 19 nt, Artificial Sequence
  Description of Artificial Sequence: Synthetic oligonucleotide
acaggucggcugaacuugu

SEQ ID NO: 756938 - RNA, 19 nt, Artificial Sequence
  Description of Artificial Sequence: Synthetic oligonucleotide
cgauacaauucuugugguc

SEQ ID NO: 756939 - RNA, 19 nt, Artificial Sequence
  Description of Artificial Sequence: Synthetic oligonucleotide
ccaagguacucauaacaua

SEQ ID NO: 756940 - RNA, 19 nt, Artificial Sequence
  Description of Artificial Sequence: Synthetic oligonucleotide
cuacauccuugccuauaaa

SEQ ID NO: 756941 - RNA, 19 nt, Artificial Sequence
  Description of Artificial Sequence: Synthetic oligonucleotide
gguuucaauugugucgaua

SEQ ID NO: 756942 - RNA, 19 nt, Artificial Sequence
  Description of Artificial Sequence: Synthetic oligonucleotide
ugucaacuccuggggucaa

SEQ ID NO: 756943 - RNA, 19 nt, Artificial Sequence
  Description of Artificial Sequence: Synthetic oligonucleotide
gugagaccggcaauuccaa

SEQ ID NO: 756944 - RNA, 19 nt, Artificial Sequence
  Description of Artificial Sequence: Synthetic oligonucleotide
cuggagcuuaacacuaauu

SEQ ID NO: 756945 - RNA, 19 nt, Artificial Sequence
  Description of Artificial Sequence: Synthetic oligonucleotide
agaucgcucuugugacauu

SEQ ID NO: 756946 - RNA, 19 nt, Artificial Sequence
  Description of Artificial Sequence: Synthetic oligonucleotide
gagaggagugcgagauaaa

SEQ ID NO: 756947 - RNA, 19 nt, Artificial Sequence
  Description of Artificial Sequence: Synthetic oligonucleotide
ccuugccuauaaaagcaaa

SEQ ID NO: 756948 - RNA, 19 nt, Artificial Sequence
  Description of Artificial Sequence: Synthetic oligonucleotide
agcuggagcuuaacacuaa

SEQ ID NO: 756949 - RNA, 19 nt, Artificial Sequence
  Description of Artificial Sequence: Synthetic oligonucleotide
gccaagguacucauaacau

SEQ ID NO: 756950 - RNA, 19 nt, Artificial Sequence
  Description of Artificial Sequence: Synthetic oligonucleotide
aucgcucuugugacauuua

SEQ ID NO: 756951 - RNA, 19 nt, Artificial Sequence
  Description of Artificial Sequence: Synthetic oligonucleotide
ccucuagagauauguauuu

SEQ ID NO: 756952 - RNA, 19 nt, Artificial Sequence
  Description of Artificial Sequence: Synthetic oligonucleotide
ccccucaauucucauagcu

SEQ ID NO: 756953 - RNA, 19 nt, Artificial Sequence
  Description of Artificial Sequence: Synthetic oligonucleotide
guggucgggaagcuccuuu

SEQ ID NO: 756954 - RNA, 19 nt, Artificial Sequence
  Description of Artificial Sequence: Synthetic oligonucleotide
gugaggcuuccagcauuca

SEQ ID NO: 756955 - RNA, 19 nt, Artificial Sequence
  Description of Artificial Sequence: Synthetic oligonucleotide
gugaccccucaauucucau

SEQ ID NO: 756956 - RNA, 19 nt, Artificial Sequence
  Description of Artificial Sequence: Synthetic oligonucleotide
gucaacuccuggggucaaa

SEQ ID NO: 756957 - RNA, 19 nt, Artificial Sequence
  Description of Artificial Sequence: Synthetic oligonucleotide
gcgagauaaaagcccuuuu

SEQ ID NO: 756958 - RNA, 19 nt, Artificial Sequence
  Description of Artificial Sequence: Synthetic oligonucleotide
gccuagguuuuaauucacu

SEQ ID NO: 756959 - RNA, 19 nt, Artificial Sequence
  Description of Artificial Sequence: Synthetic oligonucleotide
cagcgucuguggggaggca

SEQ ID NO: 756960 - RNA, 19 nt, Artificial Sequence
  Description of Artificial Sequence: Synthetic oligonucleotide
ucuaaagacaccauuuggg

SEQ ID NO: 756961 - RNA, 19 nt, Artificial Sequence
  Description of Artificial Sequence: Synthetic oligonucleotide
caacuuuccauuuugaucc

SEQ ID NO: 756962 - RNA, 19 nt, Artificial Sequence
  Description of Artificial Sequence: Synthetic oligonucleotide
uucuccuuaacuaacuggg

SEQ ID NO: 756963 - RNA, 19 nt, Artificial Sequence
  Description of Artificial Sequence: Synthetic oligonucleotide
aacugauccaguucuuucc

SEQ ID NO: 756964 - RNA, 19 nt, Artificial Sequence
  Description of Artificial Sequence: Synthetic oligonucleotide
aacaaucuaaucugcuccc

SEQ ID NO: 756965 - RNA, 19 nt, Artificial Sequence
  Description of Artificial Sequence: Synthetic oligonucleotide
ugaaaugucggaaaguaga

SEQ ID NO: 756966 - RNA, 19 nt, Artificial Sequence
  Description of Artificial Sequence: Synthetic oligonucleotide
acuaaaguggcguuuacuc

SEQ ID NO: 756967 - RNA, 19 nt, Artificial Sequence
  Description of Artificial Sequence: Synthetic oligonucleotide
aagucuucggaguugggcg

SEQ ID NO: 756968 - RNA, 19 nt, Artificial Sequence
  Description of Artificial Sequence: Synthetic oligonucleotide
uccauuuugauccuuugcc

SEQ ID NO: 756969 - RNA, 19 nt, Artificial Sequence
  Description of Artificial Sequence: Synthetic oligonucleotide
aauugugccauagaaaugu

SEQ ID NO: 756970 - RNA, 19 nt, Artificial Sequence
  Description of Artificial Sequence: Synthetic oligonucleotide
aaugucggaaaguagauuu

SEQ ID NO: 756971 - RNA, 19 nt, Artificial Sequence
  Description of Artificial Sequence: Synthetic oligonucleotide
acuaacugggaacuugugc

SEQ ID NO: 756972 - RNA, 19 nt, Artificial Sequence
  Description of Artificial Sequence: Synthetic oligonucleotide
uuugccucaacauacaguc

SEQ ID NO: 756973 - RNA, 19 nt, Artificial Sequence
  Description of Artificial Sequence: Synthetic oligonucleotide
agcuauuauaguaacaugg

SEQ ID NO: 756974 - RNA, 19 nt, Artificial Sequence
  Description of Artificial Sequence: Synthetic oligonucleotide
aaacccuucugguagaaug

SEQ ID NO: 756975 - RNA, 19 nt, Artificial Sequence
  Description of Artificial Sequence: Synthetic oligonucleotide
auaacacacuuguugagac

SEQ ID NO: 756976 - RNA, 19 nt, Artificial Sequence
  Description of Artificial Sequence: Synthetic oligonucleotide
uccuccaacaaucuaaucu

SEQ ID NO: 756977 - RNA, 19 nt, Artificial Sequence
  Description of Artificial Sequence: Synthetic oligonucleotide
uauguaucgauccaacuuc

SEQ ID NO: 756978 - RNA, 19 nt, Artificial Sequence
  Description of Artificial Sequence: Synthetic oligonucleotide
ugugccauagaaaugucca

SEQ ID NO: 756979 - RNA, 19 nt, Artificial Sequence
  Description of Artificial Sequence: Synthetic oligonucleotide
ucugaauugugccauagaa

SEQ ID NO: 756980 - RNA, 19 nt, Artificial Sequence
  Description of Artificial Sequence: Synthetic oligonucleotide
ugaaucagcugucugaagu

SEQ ID NO: 756981 - RNA, 19 nt, Artificial Sequence
  Description of Artificial Sequence: Synthetic oligonucleotide
uuagaagcuauuauaguaa

SEQ ID NO: 756982 - RNA, 19 nt, Artificial Sequence
  Description of Artificial Sequence: Synthetic oligonucleotide
aauaaccauaagcuguucu

SEQ ID NO: 756983 - RNA, 19 nt, Artificial Sequence
  Description of Artificial Sequence: Synthetic oligonucleotide
guaaguaccacugaaucag

SEQ ID NO: 756984 - RNA, 19 nt, Artificial Sequence
  Description of Artificial Sequence: Synthetic oligonucleotide
ucaaagguuaacuucugcu

SEQ ID NO: 756985 - RNA, 19 nt, Artificial Sequence
  Description of Artificial Sequence: Synthetic oligonucleotide
aauggaagggcgaaaaugu

SEQ ID NO: 756986 - RNA, 19 nt, Artificial Sequence
  Description of Artificial Sequence: Synthetic oligonucleotide
agauauucuugguaguauc

SEQ ID NO: 756987 - RNA, 19 nt, Artificial Sequence
  Description of Artificial Sequence: Synthetic oligonucleotide
uuaaagucuucggaguugg

SEQ ID NO: 756988 - RNA, 19 nt, Artificial Sequence
  Description of Artificial Sequence: Synthetic oligonucleotide
aaagacggauucuggcugg

SEQ ID NO: 756989 - RNA, 19 nt, Artificial Sequence
  Description of Artificial Sequence: Synthetic oligonucleotide
aacuugugccuuuauccuc

SEQ ID NO: 756990 - RNA, 19 nt, Artificial Sequence
  Description of Artificial Sequence: Synthetic oligonucleotide
caggauaacacacuuguug

SEQ ID NO: 756991 - RNA, 19 nt, Artificial Sequence
  Description of Artificial Sequence: Synthetic oligonucleotide
uuauguaaaccgaccuggg

SEQ ID NO: 756992 - RNA, 19 nt, Artificial Sequence
  Description of Artificial Sequence: Synthetic oligonucleotide
gacagaaacagucuucuuc

SEQ ID NO: 756993 - RNA, 19 nt, Artificial Sequence
  Description of Artificial Sequence: Synthetic oligonucleotide
ggaacuugugccuuuaucc

SEQ ID NO: 756994 - RNA, 19 nt, Artificial Sequence
  Description of Artificial Sequence: Synthetic oligonucleotide
gucuaaagacaccauuugg

SEQ ID NO: 756995 - RNA, 19 nt, Artificial Sequence
  Description of Artificial Sequence: Synthetic oligonucleotide
uaucgauccaacuucucca

SEQ ID NO: 756996 - RNA, 19 nt, Artificial Sequence
  Description of Artificial Sequence: Synthetic oligonucleotide
uuaacuaacugggaacuug

SEQ ID NO: 756997 - RNA, 19 nt, Artificial Sequence
  Description of Artificial Sequence: Synthetic oligonucleotide
acuguuagaagcuauuaua

SEQ ID NO: 756998 - RNA, 19 nt, Artificial Sequence
  Description of Artificial Sequence: Synthetic oligonucleotide
guucuccuuaacuaacugg

SEQ ID NO: 756999 - RNA, 19 nt, Artificial Sequence
  Description of Artificial Sequence: Synthetic oligonucleotide
ugcauuaacagagcuacca

SEQ ID NO: 757000 - RNA, 19 nt, Artificial Sequence
  Description of Artificial Sequence: Synthetic oligonucleotide
ugauacuccuuuaugcccu

SEQ ID NO: 757001 - RNA, 19 nt, Artificial Sequence
  Description of Artificial Sequence: Synthetic oligonucleotide
auauguaucgauccaacuu

SEQ ID NO: 757002 - RNA, 19 nt, Artificial Sequence
  Description of Artificial Sequence: Synthetic oligonucleotide
cucugcaucgguaacaguc

SEQ ID NO: 757003 - RNA, 19 nt, Artificial Sequence
  Description of Artificial Sequence: Synthetic oligonucleotide
ugagaacuucuucagauuu

SEQ ID NO: 757004 - RNA, 19 nt, Artificial Sequence
  Description of Artificial Sequence: Synthetic oligonucleotide
aaccuuucacggcaucgac

SEQ ID NO: 757005 - RNA, 19 nt, Artificial Sequence
  Description of Artificial Sequence: Synthetic oligonucleotide
aguuucaaaggugaccuuc

SEQ ID NO: 757006 - RNA, 19 nt, Artificial Sequence
  Description of Artificial Sequence: Synthetic oligonucleotide
uguuagaagcuauuauagu

SEQ ID NO: 757007 - RNA, 19 nt, Artificial Sequence
  Description of Artificial Sequence: Synthetic oligonucleotide
ucauucaguaaguaccacu

SEQ ID NO: 757008 - RNA, 19 nt, Artificial Sequence
  Description of Artificial Sequence: Synthetic oligonucleotide
uguaacagcacgacuuccu

SEQ ID NO: 757009 - RNA, 19 nt, Artificial Sequence
  Description of Artificial Sequence: Synthetic oligonucleotide
guaucgauccaacuucucc

SEQ ID NO: 757010 - RNA, 19 nt, Artificial Sequence
  Description of Artificial Sequence: Synthetic oligonucleotide
ugagaccaccacuaaagug

SEQ ID NO: 757011 - RNA, 19 nt, Artificial Sequence
  Description of Artificial Sequence: Synthetic oligonucleotide
ugagagauaguccuucaua

SEQ ID NO: 757012 - RNA, 19 nt, Artificial Sequence
  Description of Artificial Sequence: Synthetic oligonucleotide
uauauguaucgauccaacu

SEQ ID NO: 757013 - RNA, 19 nt, Artificial Sequence
  Description of Artificial Sequence: Synthetic oligonucleotide
ucuuuugaaggcccaaauc

SEQ ID NO: 757014 - RNA, 19 nt, Artificial Sequence
  Description of Artificial Sequence: Synthetic oligonucleotide
auauauguaucgauccaac

SEQ ID NO: 757015 - RNA, 19 nt, Artificial Sequence
  Description of Artificial Sequence: Synthetic oligonucleotide
uccuuaacuaacugggaac

SEQ ID NO: 757016 - RNA, 19 nt, Artificial Sequence
  Description of Artificial Sequence: Synthetic oligonucleotide
agagauaguccuucauauc

SEQ ID NO: 757017 - RNA, 19 nt, Artificial Sequence
  Description of Artificial Sequence: Synthetic oligonucleotide
ugguuuuauguaaaccgac

SEQ ID NO: 757018 - RNA, 19 nt, Artificial Sequence
  Description of Artificial Sequence: Synthetic oligonucleotide
ucauuuauccugacaggac

SEQ ID NO: 757019 - RNA, 19 nt, Artificial Sequence
  Description of Artificial Sequence: Synthetic oligonucleotide
guuuacucggcuccuuugg

SEQ ID NO: 757020 - RNA, 19 nt, Artificial Sequence
  Description of Artificial Sequence: Synthetic oligonucleotide
agaguaugaagaauaacca

SEQ ID NO: 757021 - RNA, 19 nt, Artificial Sequence
  Description of Artificial Sequence: Synthetic oligonucleotide
uucauagcaucaaauguuu

SEQ ID NO: 757022 - RNA, 19 nt, Artificial Sequence
  Description of Artificial Sequence: Synthetic oligonucleotide
aguccaacaccucucuaag

SEQ ID NO: 757023 - RNA, 19 nt, Artificial Sequence
  Description of Artificial Sequence: Synthetic oligonucleotide
auguuaaagucuucggagu

SEQ ID NO: 757024 - RNA, 19 nt, Artificial Sequence
  Description of Artificial Sequence: Synthetic oligonucleotide
gugacuuggaaucuaagaa

SEQ ID NO: 757025 - RNA, 19 nt, Artificial Sequence
  Description of Artificial Sequence: Synthetic oligonucleotide
uugugccauagaaaugucc

SEQ ID NO: 757026 - RNA, 19 nt, Artificial Sequence
  Description of Artificial Sequence: Synthetic oligonucleotide
ugugcguaucugaauuugc

SEQ ID NO: 757027 - RNA, 19 nt, Artificial Sequence
  Description of Artificial Sequence: Synthetic oligonucleotide
uauguaaaccgaccugggu

SEQ ID NO: 757028 - RNA, 19 nt, Artificial Sequence
  Description of Artificial Sequence: Synthetic oligonucleotide
ugucuauauauguaucgau

SEQ ID NO: 757029 - RNA, 19 nt, Artificial Sequence
  Description of Artificial Sequence: Synthetic oligonucleotide
uugcucuuagcccuggggu

SEQ ID NO: 757030 - RNA, 19 nt, Artificial Sequence
  Description of Artificial Sequence: Synthetic oligonucleotide
uguuaaagucuucggaguu

SEQ ID NO: 757031 - RNA, 19 nt, Artificial Sequence
  Description of Artificial Sequence: Synthetic oligonucleotide
gaccuaacugcucaaguuc

SEQ ID NO: 757032 - RNA, 19 nt, Artificial Sequence
  Description of Artificial Sequence: Synthetic oligonucleotide
uaaccauaagcuguucuug

SEQ ID NO: 757033 - RNA, 19 nt, Artificial Sequence
  Description of Artificial Sequence: Synthetic oligonucleotide
guaucuuugaaaugucgga

SEQ ID NO: 757034 - RNA, 19 nt, Artificial Sequence
  Description of Artificial Sequence: Synthetic oligonucleotide
aaaucccaugcugacagcu

SEQ ID NO: 757035 - RNA, 19 nt, Artificial Sequence
  Description of Artificial Sequence: Synthetic oligonucleotide
aguaugaagaauaaccaua

SEQ ID NO: 757036 - RNA, 19 nt, Artificial Sequence
  Description of Artificial Sequence: Synthetic oligonucleotide
aucgcuacuggauuccuca

SEQ ID NO: 757037 - RNA, 19 nt, Artificial Sequence
  Description of Artificial Sequence: Synthetic oligonucleotide
cacauugggagaaucugug

SEQ ID NO: 757038 - RNA, 19 nt, Artificial Sequence
  Description of Artificial Sequence: Synthetic oligonucleotide
gacggauucuggcuggcag

SEQ ID NO: 757039 - RNA, 19 nt, Artificial Sequence
  Description of Artificial Sequence: Synthetic oligonucleotide
ugcacauugggagaaucug

SEQ ID NO: 757040 - RNA, 19 nt, Artificial Sequence
  Description of Artificial Sequence: Synthetic oligonucleotide
agaaaagacucuuguuccu

SEQ ID NO: 757041 - RNA, 19 nt, Artificial Sequence
  Description of Artificial Sequence: Synthetic oligonucleotide
uuauaauaacuuccugguu

SEQ ID NO: 757042 - RNA, 19 nt, Artificial Sequence
  Description of Artificial Sequence: Synthetic oligonucleotide
guaaccuuucacggcaucg

SEQ ID NO: 757043 - RNA, 19 nt, Artificial Sequence
  Description of Artificial Sequence: Synthetic oligonucleotide
acggcaucgacaaagucag

SEQ ID NO: 757044 - RNA, 19 nt, Artificial Sequence
  Description of Artificial Sequence: Synthetic oligonucleotide
uguugagaccaccacuaaa

SEQ ID NO: 757045 - RNA, 19 nt, Artificial Sequence
  Description of Artificial Sequence: Synthetic oligonucleotide
gaaaagacucuuguuccug

SEQ ID NO: 757046 - RNA, 19 nt, Artificial Sequence
  Description of Artificial Sequence: Synthetic oligonucleotide
uaaguaccacugaaucagc

SEQ ID NO: 757047 - RNA, 19 nt, Artificial Sequence
  Description of Artificial Sequence: Synthetic oligonucleotide
uuuauccuccaacaaucua

SEQ ID NO: 757048 - RNA, 19 nt, Artificial Sequence
  Description of Artificial Sequence: Synthetic oligonucleotide
uauccuccaacaaucuaau

SEQ ID NO: 757049 - RNA, 19 nt, Artificial Sequence
  Description of Artificial Sequence: Synthetic oligonucleotide
ugucggaaaguagauuuca

SEQ ID NO: 757050 - RNA, 19 nt, Artificial Sequence
  Description of Artificial Sequence: Synthetic oligonucleotide
caucacuaggcugagauga

SEQ ID NO: 757051 - RNA, 19 nt, Artificial Sequence
  Description of Artificial Sequence: Synthetic oligonucleotide
agcuuaggagguucaagug

SEQ ID NO: 757052 - RNA, 19 nt, Artificial Sequence
  Description of Artificial Sequence: Synthetic oligonucleotide
aagggcgaaaaugugccca

SEQ ID NO: 757053 - RNA, 19 nt, Artificial Sequence
  Description of Artificial Sequence: Synthetic oligonucleotide
guguacuggcuacuggagg

SEQ ID NO: 757054 - RNA, 19 nt, Artificial Sequence
  Description of Artificial Sequence: Synthetic oligonucleotide
aucaucacuaguaguuccg

SEQ ID NO: 757055 - RNA, 19 nt, Artificial Sequence
  Description of Artificial Sequence: Synthetic oligonucleotide
cacggcaucgacaaaguca

SEQ ID NO: 757056 - RNA, 19 nt, Artificial Sequence
  Description of Artificial Sequence: Synthetic oligonucleotide
uauccugacaggacuugcu

SEQ ID NO: 757057 - RNA, 19 nt, Artificial Sequence
  Description of Artificial Sequence: Synthetic oligonucleotide
guuuuauguaaaccgaccu

SEQ ID NO: 757058 - RNA, 19 nt, Artificial Sequence
  Description of Artificial Sequence: Synthetic oligonucleotide
gagucucccucucauuaag

SEQ ID NO: 757059 - RNA, 19 nt, Artificial Sequence
  Description of Artificial Sequence: Synthetic oligonucleotide
guaugaagaauaaccauaa

SEQ ID NO: 757060 - RNA, 19 nt, Artificial Sequence
  Description of Artificial Sequence: Synthetic oligonucleotide
cagcuaucaccaaagccag

SEQ ID NO: 757061 - RNA, 19 nt, Artificial Sequence
  Description of Artificial Sequence: Synthetic oligonucleotide
acugauccaguucuuucca

SEQ ID NO: 757062 - RNA, 19 nt, Artificial Sequence
  Description of Artificial Sequence: Synthetic oligonucleotide
uuuuagugacuuggaaucu

SEQ ID NO: 757063 - RNA, 19 nt, Artificial Sequence
  Description of Artificial Sequence: Synthetic oligonucleotide
cuggauuccucaucacuag

SEQ ID NO: 757064 - RNA, 19 nt, Artificial Sequence
  Description of Artificial Sequence: Synthetic oligonucleotide
uaacaguccaacaccucuc

SEQ ID NO: 757065 - RNA, 19 nt, Artificial Sequence
  Description of Artificial Sequence: Synthetic oligonucleotide
cauugugagagauaguccu

SEQ ID NO: 757066 - RNA, 19 nt, Artificial Sequence
  Description of Artificial Sequence: Synthetic oligonucleotide
uuuauccugacaggacuug

SEQ ID NO: 757067 - RNA, 19 nt, Artificial Sequence
  Description of Artificial Sequence: Synthetic oligonucleotide
uggaucuuucugacuaacu

SEQ ID NO: 757068 - RNA, 19 nt, Artificial Sequence
  Description of Artificial Sequence: Synthetic oligonucleotide
uaaagucuucggaguuggg

SEQ ID NO: 757069 - RNA, 19 nt, Artificial Sequence
  Description of Artificial Sequence: Synthetic oligonucleotide
uugggcgcuucuuuuauaa

SEQ ID NO: 757070 - RNA, 19 nt, Artificial Sequence
  Description of Artificial Sequence: Synthetic oligonucleotide
acuccuuuaugcccuuaag

SEQ ID NO: 757071 - RNA, 19 nt, Artificial Sequence
  Description of Artificial Sequence: Synthetic oligonucleotide
gagagauaguccuucauau

SEQ ID NO: 757072 - RNA, 19 nt, Artificial Sequence
  Description of Artificial Sequence: Synthetic oligonucleotide
gucauuuauccugacagga

SEQ ID NO: 757073 - RNA, 19 nt, Artificial Sequence
  Description of Artificial Sequence: Synthetic oligonucleotide
uuccaguggugaaaagugu

SEQ ID NO: 757074 - RNA, 19 nt, Artificial Sequence
  Description of Artificial Sequence: Synthetic oligonucleotide
guuaaagucuucggaguug

SEQ ID NO: 757075 - RNA, 19 nt, Artificial Sequence
  Description of Artificial Sequence: Synthetic oligonucleotide
uugugcguaucugaauuug

SEQ ID NO: 757076 - RNA, 19 nt, Artificial Sequence
  Description of Artificial Sequence: Synthetic oligonucleotide
ugcguaucugaauuugcau

SEQ ID NO: 757077 - RNA, 19 nt, Artificial Sequence
  Description of Artificial Sequence: Synthetic oligonucleotide
uccaacucggcaagucucu

SEQ ID NO: 757078 - RNA, 19 nt, Artificial Sequence
  Description of Artificial Sequence: Synthetic oligonucleotide
uccuuaacugugcccagaa

SEQ ID NO: 757079 - RNA, 19 nt, Artificial Sequence
  Description of Artificial Sequence: Synthetic oligonucleotide
uuuaugcccuuaagguaac

SEQ ID NO: 757080 - RNA, 19 nt, Artificial Sequence
  Description of Artificial Sequence: Synthetic oligonucleotide
ugcccuuaagguaaccuuu

SEQ ID NO: 757081 - RNA, 19 nt, Artificial Sequence
  Description of Artificial Sequence: Synthetic oligonucleotide
aggguucaucuucuggcuc

SEQ ID NO: 757082 - RNA, 19 nt, Artificial Sequence
  Description of Artificial Sequence: Synthetic oligonucleotide
aagacggauucuggcuggc

SEQ ID NO: 757083 - RNA, 19 nt, Artificial Sequence
  Description of Artificial Sequence: Synthetic oligonucleotide
aaggaccuaacugcucaag

SEQ ID NO: 757084 - RNA, 19 nt, Artificial Sequence
  Description of Artificial Sequence: Synthetic oligonucleotide
gguuuuauguaaaccgacc

SEQ ID NO: 757085 - RNA, 19 nt, Artificial Sequence
  Description of Artificial Sequence: Synthetic oligonucleotide
aaaugugcccaaagugucu

SEQ ID NO: 757086 - RNA, 19 nt, Artificial Sequence
  Description of Artificial Sequence: Synthetic oligonucleotide
uuauccugacaggacuugc

SEQ ID NO: 757087 - RNA, 19 nt, Artificial Sequence
  Description of Artificial Sequence: Synthetic oligonucleotide
gggagaaucuguguggucc

SEQ ID NO: 757088 - RNA, 19 nt, Artificial Sequence
  Description of Artificial Sequence: Synthetic oligonucleotide
ugucaucgcuacuggauuc

SEQ ID NO: 757089 - RNA, 19 nt, Artificial Sequence
  Description of Artificial Sequence: Synthetic oligonucleotide
uaaccuuucacggcaucga

SEQ ID NO: 757090 - RNA, 19 nt, Artificial Sequence
  Description of Artificial Sequence: Synthetic oligonucleotide
aagucagugaagagcuucu

SEQ ID NO: 757091 - RNA, 19 nt, Artificial Sequence
  Description of Artificial Sequence: Synthetic oligonucleotide
uguugcggcggcgucuugg

SEQ ID NO: 757092 - RNA, 19 nt, Artificial Sequence
  Description of Artificial Sequence: Synthetic oligonucleotide
ucccucucauuaaggaaac

SEQ ID NO: 757093 - RNA, 19 nt, Artificial Sequence
  Description of Artificial Sequence: Synthetic oligonucleotide
cugaauugugccauagaaa

SEQ ID NO: 757094 - RNA, 19 nt, Artificial Sequence
  Description of Artificial Sequence: Synthetic oligonucleotide
acauugggagaaucugugu

SEQ ID NO: 757095 - RNA, 19 nt, Artificial Sequence
  Description of Artificial Sequence: Synthetic oligonucleotide
gaagggcgaaaaugugccc

SEQ ID NO: 757096 - RNA, 19 nt, Artificial Sequence
  Description of Artificial Sequence: Synthetic oligonucleotide
uuuagugacuuggaaucua

SEQ ID NO: 757097 - RNA, 19 nt, Artificial Sequence
  Description of Artificial Sequence: Synthetic oligonucleotide
uugugagagauaguccuuc

SEQ ID NO: 757098 - RNA, 19 nt, Artificial Sequence
  Description of Artificial Sequence: Synthetic oligonucleotide
uggugaaaaguguccaguu

SEQ ID NO: 757099 - RNA, 19 nt, Artificial Sequence
  Description of Artificial Sequence: Synthetic oligonucleotide
agaauucuucauagcauca

SEQ ID NO: 757100 - RNA, 19 nt, Artificial Sequence
  Description of Artificial Sequence: Synthetic oligonucleotide
aaaugucggaaaguagauu

SEQ ID NO: 757101 - RNA, 19 nt, Artificial Sequence
  Description of Artificial Sequence: Synthetic oligonucleotide
guccaacaccucucuaagg

SEQ ID NO: 757102 - RNA, 19 nt, Artificial Sequence
  Description of Artificial Sequence: Synthetic oligonucleotide
agaacccauguuaaagucu

SEQ ID NO: 757103 - RNA, 19 nt, Artificial Sequence
  Description of Artificial Sequence: Synthetic oligonucleotide
ucaugucuaaagacaccau

SEQ ID NO: 757104 - RNA, 19 nt, Artificial Sequence
  Description of Artificial Sequence: Synthetic oligonucleotide
agaauaaccauaagcuguu

SEQ ID NO: 757105 - RNA, 19 nt, Artificial Sequence
  Description of Artificial Sequence: Synthetic oligonucleotide
agauucuuaaauacugguu

SEQ ID NO: 757106 - RNA, 19 nt, Artificial Sequence
  Description of Artificial Sequence: Synthetic oligonucleotide
ucaucacuaguaguuccga

SEQ ID NO: 757107 - RNA, 19 nt, Artificial Sequence
  Description of Artificial Sequence: Synthetic oligonucleotide
caaucuaaucugcucccuc

SEQ ID NO: 757108 - RNA, 19 nt, Artificial Sequence
  Description of Artificial Sequence: Synthetic oligonucleotide
ucgccguaacucuuccugc

SEQ ID NO: 757109 - RNA, 19 nt, Artificial Sequence
  Description of Artificial Sequence: Synthetic oligonucleotide
cuaggcugagaugaaaaga

SEQ ID NO: 757110 - RNA, 19 nt, Artificial Sequence
  Description of Artificial Sequence: Synthetic oligonucleotide
uuaggagguucaaguguaa

SEQ ID NO: 757111 - RNA, 19 nt, Artificial Sequence
  Description of Artificial Sequence: Synthetic oligonucleotide
cauuuauccugacaggacu

SEQ ID NO: 757112 - RNA, 19 nt, Artificial Sequence
  Description of Artificial Sequence: Synthetic oligonucleotide
accgaccuggguccgaaug

SEQ ID NO: 757113 - RNA, 19 nt, Artificial Sequence
  Description of Artificial Sequence: Synthetic oligonucleotide
ggcaucgacaaagucagug

SEQ ID NO: 757114 - RNA, 19 nt, Artificial Sequence
  Description of Artificial Sequence: Synthetic oligonucleotide
auacagucuuucccacaag

SEQ ID NO: 757115 - RNA, 19 nt, Artificial Sequence
  Description of Artificial Sequence: Synthetic oligonucleotide
uguggaucuuucugacuaa

SEQ ID NO: 757116 - RNA, 19 nt, Artificial Sequence
  Description of Artificial Sequence: Synthetic oligonucleotide
agaagcuauuauaguaaca

SEQ ID NO: 757117 - RNA, 19 nt, Artificial Sequence
  Description of Artificial Sequence: Synthetic oligonucleotide
guugcggcggcgucuuggg

SEQ ID NO: 757118 - RNA, 19 nt, Artificial Sequence
  Description of Artificial Sequence: Synthetic oligonucleotide
ggcgaaaaugugcccaaag

SEQ ID NO: 757119 - RNA, 19 nt, Artificial Sequence
  Description of Artificial Sequence: Synthetic oligonucleotide
ccuggguccgaauggaagg

SEQ ID NO: 757120 - RNA, 19 nt, Artificial Sequence
  Description of Artificial Sequence: Synthetic oligonucleotide
cauccucuacuugauacuc

SEQ ID NO: 757121 - RNA, 19 nt, Artificial Sequence
  Description of Artificial Sequence: Synthetic oligonucleotide
caacucggcaagucucugc

SEQ ID NO: 757122 - RNA, 19 nt, Artificial Sequence
  Description of Artificial Sequence: Synthetic oligonucleotide
auccuccaacaaucuaauc

SEQ ID NO: 757123 - RNA, 19 nt, Artificial Sequence
  Description of Artificial Sequence: Synthetic oligonucleotide
augucggaaaguagauuuc

SEQ ID NO: 757124 - RNA, 19 nt, Artificial Sequence
  Description of Artificial Sequence: Synthetic oligonucleotide
gcuaccagauucuugucca

SEQ ID NO: 757125 - RNA, 19 nt, Artificial Sequence
  Description of Artificial Sequence: Synthetic oligonucleotide
ucuucuggcucggcaagug

SEQ ID NO: 757126 - RNA, 19 nt, Artificial Sequence
  Description of Artificial Sequence: Synthetic oligonucleotide
cuccuuaacuaacugggaa

SEQ ID NO: 757127 - RNA, 19 nt, Artificial Sequence
  Description of Artificial Sequence: Synthetic oligonucleotide
guaacaauaucagaaucau

SEQ ID NO: 757128 - RNA, 19 nt, Artificial Sequence
  Description of Artificial Sequence: Synthetic oligonucleotide
aagacaccauuugggaaaa

SEQ ID NO: 757129 - RNA, 19 nt, Artificial Sequence
  Description of Artificial Sequence: Synthetic oligonucleotide
gguucuccuuaacuaacug

SEQ ID NO: 757130 - RNA, 19 nt, Artificial Sequence
  Description of Artificial Sequence: Synthetic oligonucleotide
cuaccagauucuuguccag

SEQ ID NO: 757131 - RNA, 19 nt, Artificial Sequence
  Description of Artificial Sequence: Synthetic oligonucleotide
accuaacugcucaaguucu

SEQ ID NO: 757132 - RNA, 19 nt, Artificial Sequence
  Description of Artificial Sequence: Synthetic oligonucleotide
aguugggcgcuucuuuuau

SEQ ID NO: 757133 - RNA, 19 nt, Artificial Sequence
  Description of Artificial Sequence: Synthetic oligonucleotide
acggauucuggcuggcaga

SEQ ID NO: 757134 - RNA, 19 nt, Artificial Sequence
  Description of Artificial Sequence: Synthetic oligonucleotide
uaggagguucaaguguaac

SEQ ID NO: 757135 - RNA, 19 nt, Artificial Sequence
  Description of Artificial Sequence: Synthetic oligonucleotide
uucauucaguaaguaccac

SEQ ID NO: 757136 - RNA, 19 nt, Artificial Sequence
  Description of Artificial Sequence: Synthetic oligonucleotide
guagaaugggugucccuga

SEQ ID NO: 757137 - RNA, 19 nt, Artificial Sequence
  Description of Artificial Sequence: Synthetic oligonucleotide
auugugccauagaaauguc

SEQ ID NO: 757138 - RNA, 19 nt, Artificial Sequence
  Description of Artificial Sequence: Synthetic oligonucleotide
agucucccucucauuaagg

SEQ ID NO: 757139 - RNA, 19 nt, Artificial Sequence
  Description of Artificial Sequence: Synthetic oligonucleotide
cuggguccgaauggaaggg

SEQ ID NO: 757140 - RNA, 19 nt, Artificial Sequence
  Description of Artificial Sequence: Synthetic oligonucleotide
gagccaucgcugugagccg

SEQ ID NO: 757141 - RNA, 19 nt, Artificial Sequence
  Description of Artificial Sequence: Synthetic oligonucleotide
ugcaucgguaacaguccaa

SEQ ID NO: 757142 - RNA, 19 nt, Artificial Sequence
  Description of Artificial Sequence: Synthetic oligonucleotide
uacuggcuacuggaggaag

SEQ ID NO: 757143 - RNA, 19 nt, Artificial Sequence
  Description of Artificial Sequence: Synthetic oligonucleotide
caucgacaaagucagugaa

SEQ ID NO: 757144 - RNA, 19 nt, Artificial Sequence
  Description of Artificial Sequence: Synthetic oligonucleotide
aacgggcuaaugaacugau

SEQ ID NO: 757145 - RNA, 19 nt, Artificial Sequence
  Description of Artificial Sequence: Synthetic oligonucleotide
gcuaucaccaaagccagga

SEQ ID NO: 757146 - RNA, 19 nt, Artificial Sequence
  Description of Artificial Sequence: Synthetic oligonucleotide
ggcccaaaucucuuacugc

SEQ ID NO: 757147 - RNA, 19 nt, Artificial Sequence
  Description of Artificial Sequence: Synthetic oligonucleotide
acaaucuaaucugcucccu

SEQ ID NO: 757148 - RNA, 19 nt, Artificial Sequence
  Description of Artificial Sequence: Synthetic oligonucleotide
gaaaugucggaaaguagau

SEQ ID NO: 757149 - RNA, 19 nt, Artificial Sequence
  Description of Artificial Sequence: Synthetic oligonucleotide
auuuauccugacaggacuu

SEQ ID NO: 757150 - RNA, 19 nt, Artificial Sequence
  Description of Artificial Sequence: Synthetic oligonucleotide
aaaacccuucugguagaau

SEQ ID NO: 757151 - RNA, 19 nt, Artificial Sequence
  Description of Artificial Sequence: Synthetic oligonucleotide
gucagagcgcugcugcuca

SEQ ID NO: 757152 - RNA, 19 nt, Artificial Sequence
  Description of Artificial Sequence: Synthetic oligonucleotide
acagcacgacuuccuucuc

SEQ ID NO: 757153 - RNA, 19 nt, Artificial Sequence
  Description of Artificial Sequence: Synthetic oligonucleotide
ucacugaaucugagaacuu

SEQ ID NO: 757154 - RNA, 19 nt, Artificial Sequence
  Description of Artificial Sequence: Synthetic oligonucleotide
gucggaaaguagauuucac

SEQ ID NO: 757155 - RNA, 19 nt, Artificial Sequence
  Description of Artificial Sequence: Synthetic oligonucleotide
gaauaaccauaagcuguuc

SEQ ID NO: 757156 - RNA, 19 nt, Artificial Sequence
  Description of Artificial Sequence: Synthetic oligonucleotide
gugcguaucugaauuugca

SEQ ID NO: 757157 - RNA, 19 nt, Artificial Sequence
  Description of Artificial Sequence: Synthetic oligonucleotide
cuauuauaguaacaugguu

SEQ ID NO: 757158 - RNA, 19 nt, Artificial Sequence
  Description of Artificial Sequence: Synthetic oligonucleotide
gcauugugagagauagucc

SEQ ID NO: 757159 - RNA, 19 nt, Artificial Sequence
  Description of Artificial Sequence: Synthetic oligonucleotide
ucaccgcuucuuucgccug

SEQ ID NO: 757160 - RNA, 19 nt, Artificial Sequence
  Description of Artificial Sequence: Synthetic oligonucleotide
agggcgaaaaugugcccaa

SEQ ID NO: 757161 - RNA, 19 nt, Artificial Sequence
  Description of Artificial Sequence: Synthetic oligonucleotide
ucccucagucgccguaacu

SEQ ID NO: 757162 - RNA, 19 nt, Artificial Sequence
  Description of Artificial Sequence: Synthetic oligonucleotide
uggguccgaauggaagggc

SEQ ID NO: 757163 - RNA, 19 nt, Artificial Sequence
  Description of Artificial Sequence: Synthetic oligonucleotide
guggaucuuucugacuaac

SEQ ID NO: 757164 - RNA, 19 nt, Artificial Sequence
  Description of Artificial Sequence: Synthetic oligonucleotide
gggaacuugugccuuuauc

SEQ ID NO: 757165 - RNA, 19 nt, Artificial Sequence
  Description of Artificial Sequence: Synthetic oligonucleotide
ugccucaugcagagaguau

SEQ ID NO: 757166 - RNA, 19 nt, Artificial Sequence
  Description of Artificial Sequence: Synthetic oligonucleotide
aaaccgaccuggguccgaa

SEQ ID NO: 757167 - RNA, 19 nt, Artificial Sequence
  Description of Artificial Sequence: Synthetic oligonucleotide
ggguccgaauggaagggcg

SEQ ID NO: 757168 - RNA, 19 nt, Artificial Sequence
  Description of Artificial Sequence: Synthetic oligonucleotide
caucgguaacaguccaaca

SEQ ID NO: 757169 - RNA, 19 nt, Artificial Sequence
  Description of Artificial Sequence: Synthetic oligonucleotide
ccuuucacggcaucgacaa

SEQ ID NO: 757170 - RNA, 19 nt, Artificial Sequence
  Description of Artificial Sequence: Synthetic oligonucleotide
ugggagaaucugugugguc

SEQ ID NO: 757171 - RNA, 19 nt, Artificial Sequence
  Description of Artificial Sequence: Synthetic oligonucleotide
gcuauuauaguaacauggu

SEQ ID NO: 757172 - RNA, 19 nt, Artificial Sequence
  Description of Artificial Sequence: Synthetic oligonucleotide
gcaucgguaacaguccaac

SEQ ID NO: 757173 - RNA, 19 nt, Artificial Sequence
  Description of Artificial Sequence: Synthetic oligonucleotide
ggucaugucuaaagacacc

SEQ ID NO: 757174 - RNA, 19 nt, Artificial Sequence
  Description of Artificial Sequence: Synthetic oligonucleotide
agauuuuccuucaccgcuu

SEQ ID NO: 757175 - RNA, 19 nt, Artificial Sequence
  Description of Artificial Sequence: Synthetic oligonucleotide
ggcgcuucuuuuauaauaa

SEQ ID NO: 757176 - RNA, 19 nt, Artificial Sequence
  Description of Artificial Sequence: Synthetic oligonucleotide
ugacuaacugauggugcuu

SEQ ID NO: 757177 - RNA, 19 nt, Artificial Sequence
  Description of Artificial Sequence: Synthetic oligonucleotide
caguggugaaaagugucca

SEQ ID NO: 757178 - RNA, 19 nt, Artificial Sequence
  Description of Artificial Sequence: Synthetic oligonucleotide
uggcuacuggaggaagaac

SEQ ID NO: 757179 - RNA, 19 nt, Artificial Sequence
  Description of Artificial Sequence: Synthetic oligonucleotide
ugggcgcuucuuuuauaau

SEQ ID NO: 757180 - RNA, 19 nt, Artificial Sequence
  Description of Artificial Sequence: Synthetic oligonucleotide
gggcgcuucuuuuauaaua

SEQ ID NO: 757181 - RNA, 19 nt, Artificial Sequence
  Description of Artificial Sequence: Synthetic oligonucleotide
uccgaauggaagggcgaaa

SEQ ID NO: 757182 - RNA, 19 nt, Artificial Sequence
  Description of Artificial Sequence: Synthetic oligonucleotide
ccgaccuggguccgaaugg

SEQ ID NO: 757183 - RNA, 19 nt, Artificial Sequence
  Description of Artificial Sequence: Synthetic oligonucleotide
agcuaucaccaaagccagg

SEQ ID NO: 757184 - RNA, 19 nt, Artificial Sequence
  Description of Artificial Sequence: Synthetic oligonucleotide
cugugugguccugugccug

SEQ ID NO: 757185 - RNA, 19 nt, Artificial Sequence
  Description of Artificial Sequence: Synthetic oligonucleotide
gcgaaaaugugcccaaagu

SEQ ID NO: 757186 - RNA, 19 nt, Artificial Sequence
  Description of Artificial Sequence: Synthetic oligonucleotide
cucccuucggucuccaacu

SEQ ID NO: 757187 - RNA, 19 nt, Artificial Sequence
  Description of Artificial Sequence: Synthetic oligonucleotide
gguuaacuucugcuccaac

SEQ ID NO: 757188 - RNA, 19 nt, Artificial Sequence
  Description of Artificial Sequence: Synthetic oligonucleotide
ucgcuacuggauuccucau

SEQ ID NO: 757189 - RNA, 19 nt, Artificial Sequence
  Description of Artificial Sequence: Synthetic oligonucleotide
acgggcuaaugaacugauc

SEQ ID NO: 757190 - RNA, 19 nt, Artificial Sequence
  Description of Artificial Sequence: Synthetic oligonucleotide
uuccuguugcggcggcguc

SEQ ID NO: 757191 - RNA, 19 nt, Artificial Sequence
  Description of Artificial Sequence: Synthetic oligonucleotide
ucggcaagucucugcugua

SEQ ID NO: 757192 - RNA, 19 nt, Artificial Sequence
  Description of Artificial Sequence: Synthetic oligonucleotide
cugcaucgguaacagucca

SEQ ID NO: 757193 - RNA, 19 nt, Artificial Sequence
  Description of Artificial Sequence: Synthetic oligonucleotide
ucccuucggucuccaacuu

SEQ ID NO: 757194 - RNA, 19 nt, Artificial Sequence
  Description of Artificial Sequence: Synthetic oligonucleotide
guaacagcacgacuuccuu

SEQ ID NO: 757195 - RNA, 19 nt, Artificial Sequence
  Description of Artificial Sequence: Synthetic oligonucleotide
ucggcaagugguggcuccu

SEQ ID NO: 757196 - RNA, 19 nt, Artificial Sequence
  Description of Artificial Sequence: Synthetic oligonucleotide
cccucagucgccguaacuc

SEQ ID NO: 757197 - RNA, 19 nt, Artificial Sequence
  Description of Artificial Sequence: Synthetic oligonucleotide
gugucaucgcuacuggauu

SEQ ID NO: 757198 - RNA, 19 nt, Artificial Sequence
  Description of Artificial Sequence: Synthetic oligonucleotide
ucuuagcccugggguuucc

SEQ ID NO: 757199 - RNA, 19 nt, Artificial Sequence
  Description of Artificial Sequence: Synthetic oligonucleotide
aucacuaggcugagaugaa

SEQ ID NO: 757200 - RNA, 19 nt, Artificial Sequence
  Description of Artificial Sequence: Synthetic oligonucleotide
cuggcuacuggaggaagaa

SEQ ID NO: 757201 - RNA, 19 nt, Artificial Sequence
  Description of Artificial Sequence: Synthetic oligonucleotide
caaggaccuaacugcucaa

SEQ ID NO: 757202 - RNA, 19 nt, Artificial Sequence
  Description of Artificial Sequence: Synthetic oligonucleotide
gcgcuucuuuuauaauaac

SEQ ID NO: 757203 - RNA, 19 nt, Artificial Sequence
  Description of Artificial Sequence: Synthetic oligonucleotide
gcguaucugaauuugcauu

SEQ ID NO: 757204 - RNA, 19 nt, Artificial Sequence
  Description of Artificial Sequence: Synthetic oligonucleotide
agccaucgcugugagccgu

SEQ ID NO: 757205 - RNA, 19 nt, Artificial Sequence
  Description of Artificial Sequence: Synthetic oligonucleotide
agacggauucuggcuggca

SEQ ID NO: 757206 - RNA, 19 nt, Artificial Sequence
  Description of Artificial Sequence: Synthetic oligonucleotide
cuugugcguaucugaauuu

SEQ ID NO: 757207 - RNA, 19 nt, Artificial Sequence
  Description of Artificial Sequence: Synthetic oligonucleotide
ccacugaaucagcugucug

SEQ ID NO: 757208 - RNA, 19 nt, Artificial Sequence
  Description of Artificial Sequence: Synthetic oligonucleotide
ggagaaucugugugguccu

SEQ ID NO: 757209 - RNA, 19 nt, Artificial Sequence
  Description of Artificial Sequence: Synthetic oligonucleotide
guugggcgcuucuuuuaua

SEQ ID NO: 757210 - RNA, 19 nt, Artificial Sequence
  Description of Artificial Sequence: Synthetic oligonucleotide
gugccuggcaaggaccuaa

SEQ ID NO: 757211 - RNA, 19 nt, Artificial Sequence
  Description of Artificial Sequence: Synthetic oligonucleotide
ucggaguugggcgcuucuu

SEQ ID NO: 757212 - RNA, 19 nt, Artificial Sequence
  Description of Artificial Sequence: Synthetic oligonucleotide
ggcaagugguggcuccuca

SEQ ID NO: 757213 - RNA, 19 nt, Artificial Sequence
  Description of Artificial Sequence: Synthetic oligonucleotide
guccgaauggaagggcgaa

SEQ ID NO: 757214 - RNA, 19 nt, Artificial Sequence
  Description of Artificial Sequence: Synthetic oligonucleotide
gcggcgucuugggacaggg

SEQ ID NO: 757215 - RNA, 19 nt, Artificial Sequence
  Description of Artificial Sequence: Synthetic oligonucleotide
cacuaaaguggcguuuacu

SEQ ID NO: 757216 - RNA, 19 nt, Artificial Sequence
  Description of Artificial Sequence: Synthetic oligonucleotide
cucccucagucgccguaac

SEQ ID NO: 757217 - RNA, 19 nt, Artificial Sequence
  Description of Artificial Sequence: Synthetic oligonucleotide
ccuuaacuaacugggaacu

SEQ ID NO: 757218 - RNA, 19 nt, Artificial Sequence
  Description of Artificial Sequence: Synthetic oligonucleotide
gcgucuugggacagggcug

SEQ ID NO: 757219 - RNA, 19 nt, Artificial Sequence
  Description of Artificial Sequence: Synthetic oligonucleotide
ccuucauaucagugagcuc

SEQ ID NO: 757220 - RNA, 19 nt, Artificial Sequence
  Description of Artificial Sequence: Synthetic oligonucleotide
gguccgaauggaagggcga

SEQ ID NO: 757221 - RNA, 19 nt, Artificial Sequence
  Description of Artificial Sequence: Synthetic oligonucleotide
gaugucucacaaacuccuu

SEQ ID NO: 757222 - RNA, 19 nt, Artificial Sequence
  Description of Artificial Sequence: Synthetic oligonucleotide
gaguuucaaaggugaccuu

SEQ ID NO: 757223 - RNA, 19 nt, Artificial Sequence
  Description of Artificial Sequence: Synthetic oligonucleotide
cuucggaguugggcgcuuc

SEQ ID NO: 757224 - RNA, 19 nt, Artificial Sequence
  Description of Artificial Sequence: Synthetic oligonucleotide
gaccuggguccgaauggaa

SEQ ID NO: 757225 - RNA, 19 nt, Artificial Sequence
  Description of Artificial Sequence: Synthetic oligonucleotide
cuuaacuaacugggaacuu

SEQ ID NO: 757226 - RNA, 19 nt, Artificial Sequence
  Description of Artificial Sequence: Synthetic oligonucleotide
gcccgcagagccaucgcug

SEQ ID NO: 757227 - RNA, 19 nt, Artificial Sequence
  Description of Artificial Sequence: Synthetic oligonucleotide
gaagagccugguucuccuu

SEQ ID NO: 757228 - RNA, 19 nt, Artificial Sequence
  Description of Artificial Sequence: Synthetic oligonucleotide
ucuucggaguugggcgcuu

SEQ ID NO: 757229 - RNA, 19 nt, Artificial Sequence
  Description of Artificial Sequence: Synthetic oligonucleotide
cccacaagucagagcgcug

SEQ ID NO: 757230 - RNA, 19 nt, Artificial Sequence
  Description of Artificial Sequence: Synthetic oligonucleotide
ccgaauggaagggcgaaaa

SEQ ID NO: 757231 - RNA, 19 nt, Artificial Sequence
  Description of Artificial Sequence: Synthetic oligonucleotide
caccucucuaagguuuucu

SEQ ID NO: 757232 - RNA, 19 nt, Artificial Sequence
  Description of Artificial Sequence: Synthetic oligonucleotide
cucaucucuguggaucuuu

SEQ ID NO: 757233 - RNA, 19 nt, Artificial Sequence
  Description of Artificial Sequence: Synthetic oligonucleotide
caucgcugugagccguucu

SEQ ID NO: 757234 - RNA, 19 nt, Artificial Sequence
  Description of Artificial Sequence: Synthetic oligonucleotide
ccaacucggcaagucucug

SEQ ID NO: 757235 - RNA, 19 nt, Artificial Sequence
  Description of Artificial Sequence: Synthetic oligonucleotide
guucugcccgcagagccau

SEQ ID NO: 757236 - RNA, 19 nt, Artificial Sequence
  Description of Artificial Sequence: Synthetic oligonucleotide
ccaaaucucuuacugccuu

SEQ ID NO: 757237 - RNA, 19 nt, Artificial Sequence
  Description of Artificial Sequence: Synthetic oligonucleotide
cccaaaucucuuacugccu

SEQ ID NO: 757238 - RNA, 19 nt, Artificial Sequence
  Description of Artificial Sequence: Synthetic oligonucleotide
ccucuaacagagucucccu

SEQ ID NO: 757239 - RNA, 19 nt, Artificial Sequence
  Description of Artificial Sequence: Synthetic oligonucleotide
cagagcgcugcugcucaaa

SEQ ID NO: 757240 - RNA, 19 nt, Artificial Sequence
  Description of Artificial Sequence: Synthetic oligonucleotide
ccaguucauucaguaagua

SEQ ID NO: 757241 - RNA, 19 nt, Artificial Sequence
  Description of Artificial Sequence: Synthetic oligonucleotide
cuguugcggcggcgucuug

SEQ ID NO: 757242 - RNA, 19 nt, Artificial Sequence
  Description of Artificial Sequence: Synthetic oligonucleotide
cgccguaacucuuccugca

SEQ ID NO: 757243 - RNA, 19 nt, Artificial Sequence
  Description of Artificial Sequence: Synthetic oligonucleotide
gcucccucagucgccguaa

SEQ ID NO: 757244 - RNA, 19 nt, Artificial Sequence
  Description of Artificial Sequence: Synthetic oligonucleotide
cuuagcccugggguuuccu

SEQ ID NO: 757245 - RNA, 19 nt, Artificial Sequence
  Description of Artificial Sequence: Synthetic oligonucleotide
gcucggcaagugguggcuc

SEQ ID NO: 757246 - RNA, 19 nt, Artificial Sequence
  Description of Artificial Sequence: Synthetic oligonucleotide
gcucuuagcccugggguuu

SEQ ID NO: 757247 - RNA, 19 nt, Artificial Sequence
  Description of Artificial Sequence: Synthetic oligonucleotide
gggcgaaaaugugcccaaa

SEQ ID NO: 757248 - RNA, 19 nt, Artificial Sequence
  Description of Artificial Sequence: Synthetic oligonucleotide
cggaguugggcgcuucuuu

SEQ ID NO: 757249 - RNA, 19 nt, Artificial Sequence
  Description of Artificial Sequence: Synthetic oligonucleotide
cccuucggucuccaacuuu

SEQ ID NO: 757250 - RNA, 19 nt, Artificial Sequence
  Description of Artificial Sequence: Synthetic oligonucleotide
ccuguugcggcggcgucuu

SEQ ID NO: 757251 - RNA, 19 nt, Artificial Sequence
  Description of Artificial Sequence: Synthetic oligonucleotide
cggcggcgucuugggacag

SEQ ID NO: 757252 - RNA, 19 nt, Artificial Sequence
  Description of Artificial Sequence: Synthetic oligonucleotide
cggcaucgacaaagucagu

SEQ ID NO: 757253 - RNA, 19 nt, Artificial Sequence
  Description of Artificial Sequence: Synthetic oligonucleotide
ccgcuucuuucgccugcuu

SEQ ID NO: 757254 - RNA, 19 nt, Artificial Sequence
  Description of Artificial Sequence: Synthetic oligonucleotide
aaugaguucacagagaaca

SEQ ID NO: 757255 - RNA, 19 nt, Artificial Sequence
  Description of Artificial Sequence: Synthetic oligonucleotide
cauauacuccguaagagcg

SEQ ID NO: 757256 - RNA, 19 nt, Artificial Sequence
  Description of Artificial Sequence: Synthetic oligonucleotide
aaaggcgaagacgucagcc

SEQ ID NO: 757257 - RNA, 19 nt, Artificial Sequence
  Description of Artificial Sequence: Synthetic oligonucleotide
guugacucguguuagauug

SEQ ID NO: 757258 - RNA, 19 nt, Artificial Sequence
  Description of Artificial Sequence: Synthetic oligonucleotide
uucccuucggaccagacag

SEQ ID NO: 757259 - RNA, 19 nt, Artificial Sequence
  Description of Artificial Sequence: Synthetic oligonucleotide
caucauacagcucuccucg

SEQ ID NO: 757260 - RNA, 19 nt, Artificial Sequence
  Description of Artificial Sequence: Synthetic oligonucleotide
agucuugugugucagcaac

SEQ ID NO: 757261 - RNA, 19 nt, Artificial Sequence
  Description of Artificial Sequence: Synthetic oligonucleotide
ucccuuaacguguugcucg

SEQ ID NO: 757262 - RNA, 19 nt, Artificial Sequence
  Description of Artificial Sequence: Synthetic oligonucleotide
gaggucuucccguagagag

SEQ ID NO: 757263 - RNA, 19 nt, Artificial Sequence
  Description of Artificial Sequence: Synthetic oligonucleotide
aaacccaggggucggauag

SEQ ID NO: 757264 - RNA, 19 nt, Artificial Sequence
  Description of Artificial Sequence: Synthetic oligonucleotide
cucaguacgggguagguag

SEQ ID NO: 757265 - RNA, 19 nt, Artificial Sequence
  Description of Artificial Sequence: Synthetic oligonucleotide
uauuauugaggggaggucc

SEQ ID NO: 757266 - RNA, 19 nt, Artificial Sequence
  Description of Artificial Sequence: Synthetic oligonucleotide
aagagcgugccccaggcag

SEQ ID NO: 757267 - RNA, 19 nt, Artificial Sequence
  Description of Artificial Sequence: Synthetic oligonucleotide
cuagacggggagaagagcc

SEQ ID NO: 757268 - RNA, 19 nt, Artificial Sequence
  Description of Artificial Sequence: Synthetic oligonucleotide
gaaccugaggauguuaggg

SEQ ID NO: 757269 - RNA, 19 nt, Artificial Sequence
  Description of Artificial Sequence: Synthetic oligonucleotide
cuugcuaagagcgugcccc

SEQ ID NO: 757270 - RNA, 19 nt, Artificial Sequence
  Description of Artificial Sequence: Synthetic oligonucleotide
ugucuuugagaccacgcug

SEQ ID NO: 757271 - RNA, 19 nt, Artificial Sequence
  Description of Artificial Sequence: Synthetic oligonucleotide
cauucauauacuccguaag

SEQ ID NO: 757272 - RNA, 19 nt, Artificial Sequence
  Description of Artificial Sequence: Synthetic oligonucleotide
uucccguagagagaaaggg

SEQ ID NO: 757273 - RNA, 19 nt, Artificial Sequence
  Description of Artificial Sequence: Synthetic oligonucleotide
acaaguacugaugaaguug

SEQ ID NO: 757274 - RNA, 19 nt, Artificial Sequence
  Description of Artificial Sequence: Synthetic oligonucleotide
ucagguugcgguaucgggc

SEQ ID NO: 757275 - RNA, 19 nt, Artificial Sequence
  Description of Artificial Sequence: Synthetic oligonucleotide
aaggcuaugcugugcucgg

SEQ ID NO: 757276 - RNA, 19 nt, Artificial Sequence
  Description of Artificial Sequence: Synthetic oligonucleotide
aagguagagagcggcagcg

SEQ ID NO: 757277 - RNA, 19 nt, Artificial Sequence
  Description of Artificial Sequence: Synthetic oligonucleotide
gaugaagguagagagcggc

SEQ ID NO: 757278 - RNA, 19 nt, Artificial Sequence
  Description of Artificial Sequence: Synthetic oligonucleotide
caugggaaggcaaacccag

SEQ ID NO: 757279 - RNA, 19 nt, Artificial Sequence
  Description of Artificial Sequence: Synthetic oligonucleotide
ucacaguucagguugcggu

SEQ ID NO: 757280 - RNA, 19 nt, Artificial Sequence
  Description of Artificial Sequence: Synthetic oligonucleotide
ugcgguaucgggcaacagc

SEQ ID NO: 757281 - RNA, 19 nt, Artificial Sequence
  Description of Artificial Sequence: Synthetic oligonucleotide
uucagcaccaugacuugcc

SEQ ID NO: 757282 - RNA, 19 nt, Artificial Sequence
  Description of Artificial Sequence: Synthetic oligonucleotide
auagccagaagcaggaaag

SEQ ID NO: 757283 - RNA, 19 nt, Artificial Sequence
  Description of Artificial Sequence: Synthetic oligonucleotide
aggguugagaggcugagga

SEQ ID NO: 757284 - RNA, 19 nt, Artificial Sequence
  Description of Artificial Sequence: Synthetic oligonucleotide
cuggguagaggucaguggc

SEQ ID NO: 757285 - RNA, 19 nt, Artificial Sequence
  Description of Artificial Sequence: Synthetic oligonucleotide
cucgcaacaccucuggagc

SEQ ID NO: 757286 - RNA, 19 nt, Artificial Sequence
  Description of Artificial Sequence: Synthetic oligonucleotide
acaggccuugcuaagagcg

SEQ ID NO: 757287 - RNA, 19 nt, Artificial Sequence
  Description of Artificial Sequence: Synthetic oligonucleotide
gaaucuuuucagccagucc

SEQ ID NO: 757288 - RNA, 19 nt, Artificial Sequence
  Description of Artificial Sequence: Synthetic oligonucleotide
ugaaccugaggauguuagg

SEQ ID NO: 757289 - RNA, 19 nt, Artificial Sequence
  Description of Artificial Sequence: Synthetic oligonucleotide
cacguguuagucuugugug

SEQ ID NO: 757290 - RNA, 19 nt, Artificial Sequence
  Description of Artificial Sequence: Synthetic oligonucleotide
uggcauguagguaccguag

SEQ ID NO: 757291 - RNA, 19 nt, Artificial Sequence
  Description of Artificial Sequence: Synthetic oligonucleotide
gacacauggauaggaagcc

SEQ ID NO: 757292 - RNA, 19 nt, Artificial Sequence
  Description of Artificial Sequence: Synthetic oligonucleotide
aaggguugacucguguuag

SEQ ID NO: 757293 - RNA, 19 nt, Artificial Sequence
  Description of Artificial Sequence: Synthetic oligonucleotide
acugggagcuuguucaucu

SEQ ID NO: 757294 - RNA, 19 nt, Artificial Sequence
  Description of Artificial Sequence: Synthetic oligonucleotide
gaacugaccaccacagcag

SEQ ID NO: 757295 - RNA, 19 nt, Artificial Sequence
  Description of Artificial Sequence: Synthetic oligonucleotide
uauacuccguaagagcgug

SEQ ID NO: 757296 - RNA, 19 nt, Artificial Sequence
  Description of Artificial Sequence: Synthetic oligonucleotide
ucaucauacagcucuccuc

SEQ ID NO: 757297 - RNA, 19 nt, Artificial Sequence
  Description of Artificial Sequence: Synthetic oligonucleotide
uaacguguugcucgguuac

SEQ ID NO: 757298 - RNA, 19 nt, Artificial Sequence
  Description of Artificial Sequence: Synthetic oligonucleotide
auguagguaccguaggccu

SEQ ID NO: 757299 - RNA, 19 nt, Artificial Sequence
  Description of Artificial Sequence: Synthetic oligonucleotide
gacgucagccuucucauca

SEQ ID NO: 757300 - RNA, 19 nt, Artificial Sequence
  Description of Artificial Sequence: Synthetic oligonucleotide
uacucgggcaaugaguuca

SEQ ID NO: 757301 - RNA, 19 nt, Artificial Sequence
  Description of Artificial Sequence: Synthetic oligonucleotide
ugcgcucuguccuuacagg

SEQ ID NO: 757302 - RNA, 19 nt, Artificial Sequence
  Description of Artificial Sequence: Synthetic oligonucleotide
agcaagugcgcucuguccu

SEQ ID NO: 757303 - RNA, 19 nt, Artificial Sequence
  Description of Artificial Sequence: Synthetic oligonucleotide
agcaccaugacuugcccga

SEQ ID NO: 757304 - RNA, 19 nt, Artificial Sequence
  Description of Artificial Sequence: Synthetic oligonucleotide
ugaguggauggauggcccg

SEQ ID NO: 757305 - RNA, 19 nt, Artificial Sequence
  Description of Artificial Sequence: Synthetic oligonucleotide
agucaggguccgcagguac

SEQ ID NO: 757306 - RNA, 19 nt, Artificial Sequence
  Description of Artificial Sequence: Synthetic oligonucleotide
ugcuuggugauuucaguaa

SEQ ID NO: 757307 - RNA, 19 nt, Artificial Sequence
  Description of Artificial Sequence: Synthetic oligonucleotide
ucggucuucccuucggacc

SEQ ID NO: 757308 - RNA, 19 nt, Artificial Sequence
  Description of Artificial Sequence: Synthetic oligonucleotide
uguugcucgguuacuggga

SEQ ID NO: 757309 - RNA, 19 nt, Artificial Sequence
  Description of Artificial Sequence: Synthetic oligonucleotide
gaguucacagagaacaauc

SEQ ID NO: 757310 - RNA, 19 nt, Artificial Sequence
  Description of Artificial Sequence: Synthetic oligonucleotide
cauguagguaccguaggcc

SEQ ID NO: 757311 - RNA, 19 nt, Artificial Sequence
  Description of Artificial Sequence: Synthetic oligonucleotide
gguaucgggcaacagcugg

SEQ ID NO: 757312 - RNA, 19 nt, Artificial Sequence
  Description of Artificial Sequence: Synthetic oligonucleotide
cuagguggagccugacugg

SEQ ID NO: 757313 - RNA, 19 nt, Artificial Sequence
  Description of Artificial Sequence: Synthetic oligonucleotide
auacagcucuccucgcaac

SEQ ID NO: 757314 - RNA, 19 nt, Artificial Sequence
  Description of Artificial Sequence: Synthetic oligonucleotide
gcuagguggagccugacug

SEQ ID NO: 757315 - RNA, 19 nt, Artificial Sequence
  Description of Artificial Sequence: Synthetic oligonucleotide
guguugcucgguuacuggg

SEQ ID NO: 757316 - RNA, 19 nt, Artificial Sequence
  Description of Artificial Sequence: Synthetic oligonucleotide
accucccuuaacguguugc

SEQ ID NO: 757317 - RNA, 19 nt, Artificial Sequence
  Description of Artificial Sequence: Synthetic oligonucleotide
ggugaaacacaccuuuggc

SEQ ID NO: 757318 - RNA, 19 nt, Artificial Sequence
  Description of Artificial Sequence: Synthetic oligonucleotide
accaugacuugcccgaugu

SEQ ID NO: 757319 - RNA, 19 nt, Artificial Sequence
  Description of Artificial Sequence: Synthetic oligonucleotide
ucagcaacgcugugucuag

SEQ ID NO: 757320 - RNA, 19 nt, Artificial Sequence
  Description of Artificial Sequence: Synthetic oligonucleotide
agagaaaggguugacucgu

SEQ ID NO: 757321 - RNA, 19 nt, Artificial Sequence
  Description of Artificial Sequence: Synthetic oligonucleotide
cucguguuagauugucccc

SEQ ID NO: 757322 - RNA, 19 nt, Artificial Sequence
  Description of Artificial Sequence: Synthetic oligonucleotide
ucccguagagagaaagggu

SEQ ID NO: 757323 - RNA, 19 nt, Artificial Sequence
  Description of Artificial Sequence: Synthetic oligonucleotide
uguauggcaagggagccuc

SEQ ID NO: 757324 - RNA, 19 nt, Artificial Sequence
  Description of Artificial Sequence: Synthetic oligonucleotide
augaaccugaggauguuag

SEQ ID NO: 757325 - RNA, 19 nt, Artificial Sequence
  Description of Artificial Sequence: Synthetic oligonucleotide
cuccguaagagcgugcagc

SEQ ID NO: 757326 - RNA, 19 nt, Artificial Sequence
  Description of Artificial Sequence: Synthetic oligonucleotide
uccguaagagcgugcagcu

SEQ ID NO: 757327 - RNA, 19 nt, Artificial Sequence
  Description of Artificial Sequence: Synthetic oligonucleotide
uacaggcuauccugaaggc

SEQ ID NO: 757328 - RNA, 19 nt, Artificial Sequence
  Description of Artificial Sequence: Synthetic oligonucleotide
ggaagcuugaggucacagg

SEQ ID NO: 757329 - RNA, 19 nt, Artificial Sequence
  Description of Artificial Sequence: Synthetic oligonucleotide
guaccguaggccuugggca

SEQ ID NO: 757330 - RNA, 19 nt, Artificial Sequence
  Description of Artificial Sequence: Synthetic oligonucleotide
guugcucgguuacugggag

SEQ ID NO: 757331 - RNA, 19 nt, Artificial Sequence
  Description of Artificial Sequence: Synthetic oligonucleotide
agggguagcggaguggccg

SEQ ID NO: 757332 - RNA, 19 nt, Artificial Sequence
  Description of Artificial Sequence: Synthetic oligonucleotide
uuauuauugaggggagguc

SEQ ID NO: 757333 - RNA, 19 nt, Artificial Sequence
  Description of Artificial Sequence: Synthetic oligonucleotide
gguaccguaggccuugggc

SEQ ID NO: 757334 - RNA, 19 nt, Artificial Sequence
  Description of Artificial Sequence: Synthetic oligonucleotide
ucccuauacacaggaaucu

SEQ ID NO: 757335 - RNA, 19 nt, Artificial Sequence
  Description of Artificial Sequence: Synthetic oligonucleotide
uuaacguguugcucgguua

SEQ ID NO: 757336 - RNA, 19 nt, Artificial Sequence
  Description of Artificial Sequence: Synthetic oligonucleotide
gggguuauuauugagggga

SEQ ID NO: 757337 - RNA, 19 nt, Artificial Sequence
  Description of Artificial Sequence: Synthetic oligonucleotide
guuagggugccggagccgg

SEQ ID NO: 757338 - RNA, 19 nt, Artificial Sequence
  Description of Artificial Sequence: Synthetic oligonucleotide
aacgcugugucuaguucag

SEQ ID NO: 757339 - RNA, 19 nt, Artificial Sequence
  Description of Artificial Sequence: Synthetic oligonucleotide
uaucgggcaacagcugggg

SEQ ID NO: 757340 - RNA, 19 nt, Artificial Sequence
  Description of Artificial Sequence: Synthetic oligonucleotide
ggaaguguggcagagggac

SEQ ID NO: 757341 - RNA, 19 nt, Artificial Sequence
  Description of Artificial Sequence: Synthetic oligonucleotide
ggaguggccggcuugcagg

SEQ ID NO: 757342 - RNA, 19 nt, Artificial Sequence
  Description of Artificial Sequence: Synthetic oligonucleotide
ugcucgguuacugggagcu

SEQ ID NO: 757343 - RNA, 19 nt, Artificial Sequence
  Description of Artificial Sequence: Synthetic oligonucleotide
aagugcgcucuguccuuac

SEQ ID NO: 757344 - RNA, 19 nt, Artificial Sequence
  Description of Artificial Sequence: Synthetic oligonucleotide
guacgggguagguagucag

SEQ ID NO: 757345 - RNA, 19 nt, Artificial Sequence
  Description of Artificial Sequence: Synthetic oligonucleotide
auccuuguggggaacugac

SEQ ID NO: 757346 - RNA, 19 nt, Artificial Sequence
  Description of Artificial Sequence: Synthetic oligonucleotide
uuugcacguguuagucuug

SEQ ID NO: 757347 - RNA, 19 nt, Artificial Sequence
  Description of Artificial Sequence: Synthetic oligonucleotide
gauaggaagugcucugucu

SEQ ID NO: 757348 - RNA, 19 nt, Artificial Sequence
  Description of Artificial Sequence: Synthetic oligonucleotide
cuuggaugugaggucuucg

SEQ ID NO: 757349 - RNA, 19 nt, Artificial Sequence
  Description of Artificial Sequence: Synthetic oligonucleotide
uccaguauggggagcccac

SEQ ID NO: 757350 - RNA, 19 nt, Artificial Sequence
  Description of Artificial Sequence: Synthetic oligonucleotide
guuauuauugaggggaggu

SEQ ID NO: 757351 - RNA, 19 nt, Artificial Sequence
  Description of Artificial Sequence: Synthetic oligonucleotide
uuggcauguagguaccgua

SEQ ID NO: 757352 - RNA, 19 nt, Artificial Sequence
  Description of Artificial Sequence: Synthetic oligonucleotide
gaguggccggcuugcaggg

SEQ ID NO: 757353 - RNA, 19 nt, Artificial Sequence
  Description of Artificial Sequence: Synthetic oligonucleotide
uggaagcuugaggucacag

SEQ ID NO: 757354 - RNA, 19 nt, Artificial Sequence
  Description of Artificial Sequence: Synthetic oligonucleotide
cagagggaccuccucuugg

SEQ ID NO: 757355 - RNA, 19 nt, Artificial Sequence
  Description of Artificial Sequence: Synthetic oligonucleotide
uacuccguaagagcgugca

SEQ ID NO: 757356 - RNA, 19 nt, Artificial Sequence
  Description of Artificial Sequence: Synthetic oligonucleotide
caguggauagccagaagca

SEQ ID NO: 757357 - RNA, 19 nt, Artificial Sequence
  Description of Artificial Sequence: Synthetic oligonucleotide
acagcucuccucgcaacac

SEQ ID NO: 757358 - RNA, 19 nt, Artificial Sequence
  Description of Artificial Sequence: Synthetic oligonucleotide
acguguuagucuugugugu

SEQ ID NO: 757359 - RNA, 19 nt, Artificial Sequence
  Description of Artificial Sequence: Synthetic oligonucleotide
ggcauguagguaccguagg

SEQ ID NO: 757360 - RNA, 19 nt, Artificial Sequence
  Description of Artificial Sequence: Synthetic oligonucleotide
gugcgcucuguccuuacag

SEQ ID NO: 757361 - RNA, 19 nt, Artificial Sequence
  Description of Artificial Sequence: Synthetic oligonucleotide
ugagaccacgcugaggcuc

SEQ ID NO: 757362 - RNA, 19 nt, Artificial Sequence
  Description of Artificial Sequence: Synthetic oligonucleotide
auggcccggagccagccag

SEQ ID NO: 757363 - RNA, 19 nt, Artificial Sequence
  Description of Artificial Sequence: Synthetic oligonucleotide
ucgcaacaccucuggagcc

SEQ ID NO: 757364 - RNA, 19 nt, Artificial Sequence
  Description of Artificial Sequence: Synthetic oligonucleotide
uggcuuagcauggugcccu

SEQ ID NO: 757365 - RNA, 19 nt, Artificial Sequence
  Description of Artificial Sequence: Synthetic oligonucleotide
caacgcugugucuaguuca

SEQ ID NO: 757366 - RNA, 19 nt, Artificial Sequence
  Description of Artificial Sequence: Synthetic oligonucleotide
cuucggaccagacaguucu

SEQ ID NO: 757367 - RNA, 19 nt, Artificial Sequence
  Description of Artificial Sequence: Synthetic oligonucleotide
cagcaagugcgcucugucc

SEQ ID NO: 757368 - RNA, 19 nt, Artificial Sequence
  Description of Artificial Sequence: Synthetic oligonucleotide
ccaggggucggauaggaag

SEQ ID NO: 757369 - RNA, 19 nt, Artificial Sequence
  Description of Artificial Sequence: Synthetic oligonucleotide
cuccucgcaacaccucugg

SEQ ID NO: 757370 - RNA, 19 nt, Artificial Sequence
  Description of Artificial Sequence: Synthetic oligonucleotide
agcagcuguucaagggugc

SEQ ID NO: 757371 - RNA, 19 nt, Artificial Sequence
  Description of Artificial Sequence: Synthetic oligonucleotide
guaucgggcaacagcuggg

SEQ ID NO: 757372 - RNA, 19 nt, Artificial Sequence
  Description of Artificial Sequence: Synthetic oligonucleotide
acccacgacagcugugaag

SEQ ID NO: 757373 - RNA, 19 nt, Artificial Sequence
  Description of Artificial Sequence: Synthetic oligonucleotide
uguuagggugccggagccg

SEQ ID NO: 757374 - RNA, 19 nt, Artificial Sequence
  Description of Artificial Sequence: Synthetic oligonucleotide
gguugagaggcugaggaac

SEQ ID NO: 757375 - RNA, 19 nt, Artificial Sequence
  Description of Artificial Sequence: Synthetic oligonucleotide
gaguggauggauggcccgg

SEQ ID NO: 757376 - RNA, 19 nt, Artificial Sequence
  Description of Artificial Sequence: Synthetic oligonucleotide
aaguacugaugaaguuguc

SEQ ID NO: 757377 - RNA, 19 nt, Artificial Sequence
  Description of Artificial Sequence: Synthetic oligonucleotide
uggguggcuuagcauggug

SEQ ID NO: 757378 - RNA, 19 nt, Artificial Sequence
  Description of Artificial Sequence: Synthetic oligonucleotide
gguuauuauugaggggagg

SEQ ID NO: 757379 - RNA, 19 nt, Artificial Sequence
  Description of Artificial Sequence: Synthetic oligonucleotide
uugacucguguuagauugu

SEQ ID NO: 757380 - RNA, 19 nt, Artificial Sequence
  Description of Artificial Sequence: Synthetic oligonucleotide
cagcaccaugacuugcccg

SEQ ID NO: 757381 - RNA, 19 nt, Artificial Sequence
  Description of Artificial Sequence: Synthetic oligonucleotide
cugaggucuucccguagag

SEQ ID NO: 757382 - RNA, 19 nt, Artificial Sequence
  Description of Artificial Sequence: Synthetic oligonucleotide
uguagguaccguaggccuu

SEQ ID NO: 757383 - RNA, 19 nt, Artificial Sequence
  Description of Artificial Sequence: Synthetic oligonucleotide
ggagguccugaucugggag

SEQ ID NO: 757384 - RNA, 19 nt, Artificial Sequence
  Description of Artificial Sequence: Synthetic oligonucleotide
gaaggcaaacccagggguc

SEQ ID NO: 757385 - RNA, 19 nt, Artificial Sequence
  Description of Artificial Sequence: Synthetic oligonucleotide
ucgguuacugggagcuugu

SEQ ID NO: 757386 - RNA, 19 nt, Artificial Sequence
  Description of Artificial Sequence: Synthetic oligonucleotide
caauguccagagcuaggug

SEQ ID NO: 757387 - RNA, 19 nt, Artificial Sequence
  Description of Artificial Sequence: Synthetic oligonucleotide
caggaguuugaucuugcca

SEQ ID NO: 757388 - RNA, 19 nt, Artificial Sequence
  Description of Artificial Sequence: Synthetic oligonucleotide
ucaguacgggguagguagu

SEQ ID NO: 757389 - RNA, 19 nt, Artificial Sequence
  Description of Artificial Sequence: Synthetic oligonucleotide
gacucguguuagauugucc

SEQ ID NO: 757390 - RNA, 19 nt, Artificial Sequence
  Description of Artificial Sequence: Synthetic oligonucleotide
acggggagaagagccaguc

SEQ ID NO: 757391 - RNA, 19 nt, Artificial Sequence
  Description of Artificial Sequence: Synthetic oligonucleotide
agcggaguggccggcuugc

SEQ ID NO: 757392 - RNA, 19 nt, Artificial Sequence
  Description of Artificial Sequence: Synthetic oligonucleotide
cgauuguauggcaagggag

SEQ ID NO: 757393 - RNA, 19 nt, Artificial Sequence
  Description of Artificial Sequence: Synthetic oligonucleotide
gcucccggggagcugaugg

SEQ ID NO: 757394 - RNA, 19 nt, Artificial Sequence
  Description of Artificial Sequence: Synthetic oligonucleotide
cacauggauaggaagccaa

SEQ ID NO: 757395 - RNA, 19 nt, Artificial Sequence
  Description of Artificial Sequence: Synthetic oligonucleotide
uaagagcgugccccaggca

SEQ ID NO: 757396 - RNA, 19 nt, Artificial Sequence
  Description of Artificial Sequence: Synthetic oligonucleotide
guagguaccguaggccuug

SEQ ID NO: 757397 - RNA, 19 nt, Artificial Sequence
  Description of Artificial Sequence: Synthetic oligonucleotide
ucggaccagacaguucuug

SEQ ID NO: 757398 - RNA, 19 nt, Artificial Sequence
  Description of Artificial Sequence: Synthetic oligonucleotide
cucggucuucccuucggac

SEQ ID NO: 757399 - RNA, 19 nt, Artificial Sequence
  Description of Artificial Sequence: Synthetic oligonucleotide
agacgucagccuucucauc

SEQ ID NO: 757400 - RNA, 19 nt, Artificial Sequence
  Description of Artificial Sequence: Synthetic oligonucleotide
uaccguaggccuugggcaa

SEQ ID NO: 757401 - RNA, 19 nt, Artificial Sequence
  Description of Artificial Sequence: Synthetic oligonucleotide
cagguacucgggcaaugag

SEQ ID NO: 757402 - RNA, 19 nt, Artificial Sequence
  Description of Artificial Sequence: Synthetic oligonucleotide
auauacuccguaagagcgu

SEQ ID NO: 757403 - RNA, 19 nt, Artificial Sequence
  Description of Artificial Sequence: Synthetic oligonucleotide
gugcagucuccauccuucg

SEQ ID NO: 757404 - RNA, 19 nt, Artificial Sequence
  Description of Artificial Sequence: Synthetic oligonucleotide
cucgguuacugggagcuug

SEQ ID NO: 757405 - RNA, 19 nt, Artificial Sequence
  Description of Artificial Sequence: Synthetic oligonucleotide
uugcuaagagcgugcccca

SEQ ID NO: 757406 - RNA, 19 nt, Artificial Sequence
  Description of Artificial Sequence: Synthetic oligonucleotide
ggucaccaagggcagcugg

SEQ ID NO: 757407 - RNA, 19 nt, Artificial Sequence
  Description of Artificial Sequence: Synthetic oligonucleotide
accccugaggucuucccgu

SEQ ID NO: 757408 - RNA, 19 nt, Artificial Sequence
  Description of Artificial Sequence: Synthetic oligonucleotide
acuccguaagagcgugcag

SEQ ID NO: 757409 - RNA, 19 nt, Artificial Sequence
  Description of Artificial Sequence: Synthetic oligonucleotide
agguacucgggcaaugagu

SEQ ID NO: 757410 - RNA, 19 nt, Artificial Sequence
  Description of Artificial Sequence: Synthetic oligonucleotide
cccaugggaaggcaaaccc

SEQ ID NO: 757411 - RNA, 19 nt, Artificial Sequence
  Description of Artificial Sequence: Synthetic oligonucleotide
uccugaucugggagaccag

SEQ ID NO: 757412 - RNA, 19 nt, Artificial Sequence
  Description of Artificial Sequence: Synthetic oligonucleotide
ucuucccuucggaccagac

SEQ ID NO: 757413 - RNA, 19 nt, Artificial Sequence
  Description of Artificial Sequence: Synthetic oligonucleotide
ugacucguguuagauuguc

SEQ ID NO: 757414 - RNA, 19 nt, Artificial Sequence
  Description of Artificial Sequence: Synthetic oligonucleotide
cagguugcgguaucgggca

SEQ ID NO: 757415 - RNA, 19 nt, Artificial Sequence
  Description of Artificial Sequence: Synthetic oligonucleotide
ccaaaggcgaagacgucag

SEQ ID NO: 757416 - RNA, 19 nt, Artificial Sequence
  Description of Artificial Sequence: Synthetic oligonucleotide
ucaguggcgacggcaguac

SEQ ID NO: 757417 - RNA, 19 nt, Artificial Sequence
  Description of Artificial Sequence: Synthetic oligonucleotide
ccaggauagggguucuggg

SEQ ID NO: 757418 - RNA, 19 nt, Artificial Sequence
  Description of Artificial Sequence: Synthetic oligonucleotide
uuguauggcaagggagccu

SEQ ID NO: 757419 - RNA, 19 nt, Artificial Sequence
  Description of Artificial Sequence: Synthetic oligonucleotide
cuuuggcauguagguaccg

SEQ ID NO: 757420 - RNA, 19 nt, Artificial Sequence
  Description of Artificial Sequence: Synthetic oligonucleotide
cucugucuuugagaccacg

SEQ ID NO: 757421 - RNA, 19 nt, Artificial Sequence
  Description of Artificial Sequence: Synthetic oligonucleotide
ccucgcaacaccucuggag

SEQ ID NO: 757422 - RNA, 19 nt, Artificial Sequence
  Description of Artificial Sequence: Synthetic oligonucleotide
agcuagguggagccugacu

SEQ ID NO: 757423 - RNA, 19 nt, Artificial Sequence
  Description of Artificial Sequence: Synthetic oligonucleotide
aacguguugcucgguuacu

SEQ ID NO: 757424 - RNA, 19 nt, Artificial Sequence
  Description of Artificial Sequence: Synthetic oligonucleotide
gugcuuggugauuucagua

SEQ ID NO: 757425 - RNA, 19 nt, Artificial Sequence
  Description of Artificial Sequence: Synthetic oligonucleotide
agcaacgcugugucuaguu

SEQ ID NO: 757426 - RNA, 19 nt, Artificial Sequence
  Description of Artificial Sequence: Synthetic oligonucleotide
acguguugcucgguuacug

SEQ ID NO: 757427 - RNA, 19 nt, Artificial Sequence
  Description of Artificial Sequence: Synthetic oligonucleotide
guggcagagaagacugccc

SEQ ID NO: 757428 - RNA, 19 nt, Artificial Sequence
  Description of Artificial Sequence: Synthetic oligonucleotide
aggucaguggcgacggcag

SEQ ID NO: 757429 - RNA, 19 nt, Artificial Sequence
  Description of Artificial Sequence: Synthetic oligonucleotide
ggcgacggcaguaccaggg

SEQ ID NO: 757430 - RNA, 19 nt, Artificial Sequence
  Description of Artificial Sequence: Synthetic oligonucleotide
ugcacguguuagucuugug

SEQ ID NO: 757431 - RNA, 19 nt, Artificial Sequence
  Description of Artificial Sequence: Synthetic oligonucleotide
uugcacguguuagucuugu

SEQ ID NO: 757432 - RNA, 19 nt, Artificial Sequence
  Description of Artificial Sequence: Synthetic oligonucleotide
caaaggcgaagacgucagc

SEQ ID NO: 757433 - RNA, 19 nt, Artificial Sequence
  Description of Artificial Sequence: Synthetic oligonucleotide
aguacgggguagguaguca

SEQ ID NO: 757434 - RNA, 19 nt, Artificial Sequence
  Description of Artificial Sequence: Synthetic oligonucleotide
caggcaguuuuauugaaau

SEQ ID NO: 757435 - RNA, 19 nt, Artificial Sequence
  Description of Artificial Sequence: Synthetic oligonucleotide
uugcucgguuacugggagc

SEQ ID NO: 757436 - RNA, 19 nt, Artificial Sequence
  Description of Artificial Sequence: Synthetic oligonucleotide
guaagagcgugcagcugcc

SEQ ID NO: 757437 - RNA, 19 nt, Artificial Sequence
  Description of Artificial Sequence: Synthetic oligonucleotide
uagcggaguggccggcuug

SEQ ID NO: 757438 - RNA, 19 nt, Artificial Sequence
  Description of Artificial Sequence: Synthetic oligonucleotide
acggcaguaccagggguag

SEQ ID NO: 757439 - RNA, 19 nt, Artificial Sequence
  Description of Artificial Sequence: Synthetic oligonucleotide
ucuuggaugugaggucuuc

SEQ ID NO: 757440 - RNA, 19 nt, Artificial Sequence
  Description of Artificial Sequence: Synthetic oligonucleotide
auacuccguaagagcgugc

SEQ ID NO: 757441 - RNA, 19 nt, Artificial Sequence
  Description of Artificial Sequence: Synthetic oligonucleotide
acgggugcuggguuccaug

SEQ ID NO: 757442 - RNA, 19 nt, Artificial Sequence
  Description of Artificial Sequence: Synthetic oligonucleotide
uccucgcaacaccucugga

SEQ ID NO: 757443 - RNA, 19 nt, Artificial Sequence
  Description of Artificial Sequence: Synthetic oligonucleotide
agguagagagcggcagcgg

SEQ ID NO: 757444 - RNA, 19 nt, Artificial Sequence
  Description of Artificial Sequence: Synthetic oligonucleotide
gcagagaagacugcccgcc

SEQ ID NO: 757445 - RNA, 19 nt, Artificial Sequence
  Description of Artificial Sequence: Synthetic oligonucleotide
augucggugccgaaccuug

SEQ ID NO: 757446 - RNA, 19 nt, Artificial Sequence
  Description of Artificial Sequence: Synthetic oligonucleotide
gacuugcccgaugucggug

SEQ ID NO: 757447 - RNA, 19 nt, Artificial Sequence
  Description of Artificial Sequence: Synthetic oligonucleotide
uugagaccacgcugaggcu

SEQ ID NO: 757448 - RNA, 19 nt, Artificial Sequence
  Description of Artificial Sequence: Synthetic oligonucleotide
gagaaaggguugacucgug

SEQ ID NO: 757449 - RNA, 19 nt, Artificial Sequence
  Description of Artificial Sequence: Synthetic oligonucleotide
gucagcaacgcugugucua

SEQ ID NO: 757450 - RNA, 19 nt, Artificial Sequence
  Description of Artificial Sequence: Synthetic oligonucleotide
ugcuaagagcgugccccag

SEQ ID NO: 757451 - RNA, 19 nt, Artificial Sequence
  Description of Artificial Sequence: Synthetic oligonucleotide
acaguucagguugcgguau

SEQ ID NO: 757452 - RNA, 19 nt, Artificial Sequence
  Description of Artificial Sequence: Synthetic oligonucleotide
agugcgcucuguccuuaca

SEQ ID NO: 757453 - RNA, 19 nt, Artificial Sequence
  Description of Artificial Sequence: Synthetic oligonucleotide
aggguugacucguguuaga

SEQ ID NO: 757454 - RNA, 19 nt, Artificial Sequence
  Description of Artificial Sequence: Synthetic oligonucleotide
ugucggugccgaaccuugu

SEQ ID NO: 757455 - RNA, 19 nt, Artificial Sequence
  Description of Artificial Sequence: Synthetic oligonucleotide
gaagacugcccgccucaca

SEQ ID NO: 757456 - RNA, 19 nt, Artificial Sequence
  Description of Artificial Sequence: Synthetic oligonucleotide
gguggagccugacuggcca

SEQ ID NO: 757457 - RNA, 19 nt, Artificial Sequence
  Description of Artificial Sequence: Synthetic oligonucleotide
aguccucaguacgggguag

SEQ ID NO: 757458 - RNA, 19 nt, Artificial Sequence
  Description of Artificial Sequence: Synthetic oligonucleotide
ggaaucuuuucagccaguc

SEQ ID NO: 757459 - RNA, 19 nt, Artificial Sequence
  Description of Artificial Sequence: Synthetic oligonucleotide
ggguuauuauugaggggag

SEQ ID NO: 757460 - RNA, 19 nt, Artificial Sequence
  Description of Artificial Sequence: Synthetic oligonucleotide
gaagccucggucuucccuu

SEQ ID NO: 757461 - RNA, 19 nt, Artificial Sequence
  Description of Artificial Sequence: Synthetic oligonucleotide
gaggguucuguccgcucca

SEQ ID NO: 757462 - RNA, 19 nt, Artificial Sequence
  Description of Artificial Sequence: Synthetic oligonucleotide
cagcgggcaguccuuuccc

SEQ ID NO: 757463 - RNA, 19 nt, Artificial Sequence
  Description of Artificial Sequence: Synthetic oligonucleotide
gcgcucuguccuuacaggc

SEQ ID NO: 757464 - RNA, 19 nt, Artificial Sequence
  Description of Artificial Sequence: Synthetic oligonucleotide
ucccuucggaccagacagu

SEQ ID NO: 757465 - RNA, 19 nt, Artificial Sequence
  Description of Artificial Sequence: Synthetic oligonucleotide
acucgggcaaugaguucac

SEQ ID NO: 757466 - RNA, 19 nt, Artificial Sequence
  Description of Artificial Sequence: Synthetic oligonucleotide
guccucaguacgggguagg

SEQ ID NO: 757467 - RNA, 19 nt, Artificial Sequence
  Description of Artificial Sequence: Synthetic oligonucleotide
ugcccggggaaggcuaugc

SEQ ID NO: 757468 - RNA, 19 nt, Artificial Sequence
  Description of Artificial Sequence: Synthetic oligonucleotide
cuugcccgaugucggugcc

SEQ ID NO: 757469 - RNA, 19 nt, Artificial Sequence
  Description of Artificial Sequence: Synthetic oligonucleotide
uaagagcgugcagcugccc

SEQ ID NO: 757470 - RNA, 19 nt, Artificial Sequence
  Description of Artificial Sequence: Synthetic oligonucleotide
augaguucacagagaacaa

SEQ ID NO: 757471 - RNA, 19 nt, Artificial Sequence
  Description of Artificial Sequence: Synthetic oligonucleotide
agguaccguaggccuuggg

SEQ ID NO: 757472 - RNA, 19 nt, Artificial Sequence
  Description of Artificial Sequence: Synthetic oligonucleotide
ccgaugucggugccgaacc

SEQ ID NO: 757473 - RNA, 19 nt, Artificial Sequence
  Description of Artificial Sequence: Synthetic oligonucleotide
auccaguauggggagccca

SEQ ID NO: 757474 - RNA, 19 nt, Artificial Sequence
  Description of Artificial Sequence: Synthetic oligonucleotide
cucccuuaacguguugcuc

SEQ ID NO: 757475 - RNA, 19 nt, Artificial Sequence
  Description of Artificial Sequence: Synthetic oligonucleotide
ggaugaagguagagagcgg

SEQ ID NO: 757476 - RNA, 19 nt, Artificial Sequence
  Description of Artificial Sequence: Synthetic oligonucleotide
cuuccuugccccuucccua

SEQ ID NO: 757477 - RNA, 19 nt, Artificial Sequence
  Description of Artificial Sequence: Synthetic oligonucleotide
cacaguucagguugcggua

SEQ ID NO: 757478 - RNA, 19 nt, Artificial Sequence
  Description of Artificial Sequence: Synthetic oligonucleotide
uugcccgaugucggugccg

SEQ ID NO: 757479 - RNA, 19 nt, Artificial Sequence
  Description of Artificial Sequence: Synthetic oligonucleotide
gaccggcugcgggagagcc

SEQ ID NO: 757480 - RNA, 19 nt, Artificial Sequence
  Description of Artificial Sequence: Synthetic oligonucleotide
ccguagagagaaaggguug

SEQ ID NO: 757481 - RNA, 19 nt, Artificial Sequence
  Description of Artificial Sequence: Synthetic oligonucleotide
uccucaguacgggguaggu

SEQ ID NO: 757482 - RNA, 19 nt, Artificial Sequence
  Description of Artificial Sequence: Synthetic oligonucleotide
aggcaaacccaggggucgg

SEQ ID NO: 757483 - RNA, 19 nt, Artificial Sequence
  Description of Artificial Sequence: Synthetic oligonucleotide
gcagcgggcaguccuuucc

SEQ ID NO: 757484 - RNA, 19 nt, Artificial Sequence
  Description of Artificial Sequence: Synthetic oligonucleotide
cugcccgccucacaguuca

SEQ ID NO: 757485 - RNA, 19 nt, Artificial Sequence
  Description of Artificial Sequence: Synthetic oligonucleotide
acauggauaggaagccaaa

SEQ ID NO: 757486 - RNA, 19 nt, Artificial Sequence
  Description of Artificial Sequence: Synthetic oligonucleotide
cccuuaacguguugcucgg

SEQ ID NO: 757487 - RNA, 19 nt, Artificial Sequence
  Description of Artificial Sequence: Synthetic oligonucleotide
caguauggggagcccacca

SEQ ID NO: 757488 - RNA, 19 nt, Artificial Sequence
  Description of Artificial Sequence: Synthetic oligonucleotide
ucugaccggcugcgggaga

SEQ ID NO: 757489 - RNA, 19 nt, Artificial Sequence
  Description of Artificial Sequence: Synthetic oligonucleotide
gggguagcggaguggccgg

SEQ ID NO: 757490 - RNA, 19 nt, Artificial Sequence
  Description of Artificial Sequence: Synthetic oligonucleotide
gcuaugcugugcucgguuc

SEQ ID NO: 757491 - RNA, 19 nt, Artificial Sequence
  Description of Artificial Sequence: Synthetic oligonucleotide
uagguaccguaggccuugg

SEQ ID NO: 757492 - RNA, 19 nt, Artificial Sequence
  Description of Artificial Sequence: Synthetic oligonucleotide
gucggauaggaagugcucu

SEQ ID NO: 757493 - RNA, 19 nt, Artificial Sequence
  Description of Artificial Sequence: Synthetic oligonucleotide
ccaggaguuugaucuugcc

SEQ ID NO: 757494 - RNA, 19 nt, Artificial Sequence
  Description of Artificial Sequence: Synthetic oligonucleotide
gcaacgcugugucuaguuc

SEQ ID NO: 757495 - RNA, 19 nt, Artificial Sequence
  Description of Artificial Sequence: Synthetic oligonucleotide
gaggucugaccggcugcgg

SEQ ID NO: 757496 - RNA, 19 nt, Artificial Sequence
  Description of Artificial Sequence: Synthetic oligonucleotide
gcgacggcaguaccagggg

SEQ ID NO: 757497 - RNA, 19 nt, Artificial Sequence
  Description of Artificial Sequence: Synthetic oligonucleotide
auaggaagccaaagcugaa

SEQ ID NO: 757498 - RNA, 19 nt, Artificial Sequence
  Description of Artificial Sequence: Synthetic oligonucleotide
gacggcaguaccaggggua

SEQ ID NO: 757499 - RNA, 19 nt, Artificial Sequence
  Description of Artificial Sequence: Synthetic oligonucleotide
gcacguguuagucuugugu

SEQ ID NO: 757500 - RNA, 19 nt, Artificial Sequence
  Description of Artificial Sequence: Synthetic oligonucleotide
guugcgguaucgggcaaca

SEQ ID NO: 757501 - RNA, 19 nt, Artificial Sequence
  Description of Artificial Sequence: Synthetic oligonucleotide
cugugucuaguucagugau

SEQ ID NO: 757502 - RNA, 19 nt, Artificial Sequence
  Description of Artificial Sequence: Synthetic oligonucleotide
cccuagacggggagaagag

SEQ ID NO: 757503 - RNA, 19 nt, Artificial Sequence
  Description of Artificial Sequence: Synthetic oligonucleotide
cagacaguucuuggaugug

SEQ ID NO: 757504 - RNA, 19 nt, Artificial Sequence
  Description of Artificial Sequence: Synthetic oligonucleotide
caccaugacuugcccgaug

SEQ ID NO: 757505 - RNA, 19 nt, Artificial Sequence
  Description of Artificial Sequence: Synthetic oligonucleotide
gucugaccggcugcgggag

SEQ ID NO: 757506 - RNA, 19 nt, Artificial Sequence
  Description of Artificial Sequence: Synthetic oligonucleotide
ccauucauauacuccguaa

SEQ ID NO: 757507 - RNA, 19 nt, Artificial Sequence
  Description of Artificial Sequence: Synthetic oligonucleotide
gcgggcaggcgucucaggc

SEQ ID NO: 757508 - RNA, 19 nt, Artificial Sequence
  Description of Artificial Sequence: Synthetic oligonucleotide
agagcuagguggagccuga

SEQ ID NO: 757509 - RNA, 19 nt, Artificial Sequence
  Description of Artificial Sequence: Synthetic oligonucleotide
uggccggcuugcagggugu

SEQ ID NO: 757510 - RNA, 19 nt, Artificial Sequence
  Description of Artificial Sequence: Synthetic oligonucleotide
ggggagguccugaucuggg

SEQ ID NO: 757511 - RNA, 19 nt, Artificial Sequence
  Description of Artificial Sequence: Synthetic oligonucleotide
uucggaccagacaguucuu

SEQ ID NO: 757512 - RNA, 19 nt, Artificial Sequence
  Description of Artificial Sequence: Synthetic oligonucleotide
cauccuuguggggaacuga

SEQ ID NO: 757513 - RNA, 19 nt, Artificial Sequence
  Description of Artificial Sequence: Synthetic oligonucleotide
cuuaacguguugcucgguu

SEQ ID NO: 757514 - RNA, 19 nt, Artificial Sequence
  Description of Artificial Sequence: Synthetic oligonucleotide
cuugccccuucccuauaca

SEQ ID NO: 757515 - RNA, 19 nt, Artificial Sequence
  Description of Artificial Sequence: Synthetic oligonucleotide
uugcgguaucgggcaacag

SEQ ID NO: 757516 - RNA, 19 nt, Artificial Sequence
  Description of Artificial Sequence: Synthetic oligonucleotide
gauccccaugggaaggcaa

SEQ ID NO: 757517 - RNA, 19 nt, Artificial Sequence
  Description of Artificial Sequence: Synthetic oligonucleotide
caguucagguugcgguauc

SEQ ID NO: 757518 - RNA, 19 nt, Artificial Sequence
  Description of Artificial Sequence: Synthetic oligonucleotide
caguggcgacggcaguacc

SEQ ID NO: 757519 - RNA, 19 nt, Artificial Sequence
  Description of Artificial Sequence: Synthetic oligonucleotide
cagucagcccaucuggggu

SEQ ID NO: 757520 - RNA, 19 nt, Artificial Sequence
  Description of Artificial Sequence: Synthetic oligonucleotide
uccccuagacggggagaag

SEQ ID NO: 757521 - RNA, 19 nt, Artificial Sequence
  Description of Artificial Sequence: Synthetic oligonucleotide
auccccaugggaaggcaaa

SEQ ID NO: 757522 - RNA, 19 nt, Artificial Sequence
  Description of Artificial Sequence: Synthetic oligonucleotide
ccuccucuuggaacagacc

SEQ ID NO: 757523 - RNA, 19 nt, Artificial Sequence
  Description of Artificial Sequence: Synthetic oligonucleotide
caguacgggguagguaguc

SEQ ID NO: 757524 - RNA, 19 nt, Artificial Sequence
  Description of Artificial Sequence: Synthetic oligonucleotide
cucuccucgcaacaccucu

SEQ ID NO: 757525 - RNA, 19 nt, Artificial Sequence
  Description of Artificial Sequence: Synthetic oligonucleotide
cgaggguucuguccgcucc

SEQ ID NO: 757526 - RNA, 19 nt, Artificial Sequence
  Description of Artificial Sequence: Synthetic oligonucleotide
gccggagccgguucaucag

SEQ ID NO: 757527 - RNA, 19 nt, Artificial Sequence
  Description of Artificial Sequence: Synthetic oligonucleotide
ccuugcuaagagcgugccc

SEQ ID NO: 757528 - RNA, 19 nt, Artificial Sequence
  Description of Artificial Sequence: Synthetic oligonucleotide
ggguguggguggcuuagca

SEQ ID NO: 757529 - RNA, 19 nt, Artificial Sequence
  Description of Artificial Sequence: Synthetic oligonucleotide
ccaugggaaggcaaaccca

SEQ ID NO: 757530 - RNA, 19 nt, Artificial Sequence
  Description of Artificial Sequence: Synthetic oligonucleotide
gguacucgggcaaugaguu

SEQ ID NO: 757531 - RNA, 19 nt, Artificial Sequence
  Description of Artificial Sequence: Synthetic oligonucleotide
ccuagacggggagaagagc

SEQ ID NO: 757532 - RNA, 19 nt, Artificial Sequence
  Description of Artificial Sequence: Synthetic oligonucleotide
gcaguaccagggguagcgg

SEQ ID NO: 757533 - RNA, 19 nt, Artificial Sequence
  Description of Artificial Sequence: Synthetic oligonucleotide
cuugugugucagcaacgcu

SEQ ID NO: 757534 - RNA, 19 nt, Artificial Sequence
  Description of Artificial Sequence: Synthetic oligonucleotide
gucacccacgacagcugug

SEQ ID NO: 757535 - RNA, 19 nt, Artificial Sequence
  Description of Artificial Sequence: Synthetic oligonucleotide
caaacccaggggucggaua

SEQ ID NO: 757536 - RNA, 19 nt, Artificial Sequence
  Description of Artificial Sequence: Synthetic oligonucleotide
cuguccgcuccagggcugc

SEQ ID NO: 757537 - RNA, 19 nt, Artificial Sequence
  Description of Artificial Sequence: Synthetic oligonucleotide
gcgguaucgggcaacagcu

SEQ ID NO: 757538 - RNA, 19 nt, Artificial Sequence
  Description of Artificial Sequence: Synthetic oligonucleotide
gucggugccgaaccuugua

SEQ ID NO: 757539 - RNA, 19 nt, Artificial Sequence
  Description of Artificial Sequence: Synthetic oligonucleotide
ggcuccccuagacggggag

SEQ ID NO: 757540 - RNA, 19 nt, Artificial Sequence
  Description of Artificial Sequence: Synthetic oligonucleotide
ggguccgcagguacucggg

SEQ ID NO: 757541 - RNA, 19 nt, Artificial Sequence
  Description of Artificial Sequence: Synthetic oligonucleotide
cguguuagucuuguguguc

SEQ ID NO: 757542 - RNA, 19 nt, Artificial Sequence
  Description of Artificial Sequence: Synthetic oligonucleotide
ggucggauaggaagugcuc

SEQ ID NO: 757543 - RNA, 19 nt, Artificial Sequence
  Description of Artificial Sequence: Synthetic oligonucleotide
gcuuagcauggugcccucg

SEQ ID NO: 757544 - RNA, 19 nt, Artificial Sequence
  Description of Artificial Sequence: Synthetic oligonucleotide
ggccuugcuaagagcgugc

SEQ ID NO: 757545 - RNA, 19 nt, Artificial Sequence
  Description of Artificial Sequence: Synthetic oligonucleotide
cccaaaggcgaagacguca

SEQ ID NO: 757546 - RNA, 19 nt, Artificial Sequence
  Description of Artificial Sequence: Synthetic oligonucleotide
ccccgauuguauggcaagg

SEQ ID NO: 757547 - RNA, 19 nt, Artificial Sequence
  Description of Artificial Sequence: Synthetic oligonucleotide
gggagguccugaucuggga

SEQ ID NO: 757548 - RNA, 19 nt, Artificial Sequence
  Description of Artificial Sequence: Synthetic oligonucleotide
ggggucggauaggaagugc

SEQ ID NO: 757549 - RNA, 19 nt, Artificial Sequence
  Description of Artificial Sequence: Synthetic oligonucleotide
gaugucggugccgaaccuu

SEQ ID NO: 757550 - RNA, 19 nt, Artificial Sequence
  Description of Artificial Sequence: Synthetic oligonucleotide
ccggagccgguucaucagc

SEQ ID NO: 757551 - RNA, 19 nt, Artificial Sequence
  Description of Artificial Sequence: Synthetic oligonucleotide
gccuugcuaagagcgugcc

SEQ ID NO: 757552 - RNA, 19 nt, Artificial Sequence
  Description of Artificial Sequence: Synthetic oligonucleotide
ccuugccccuucccuauac

SEQ ID NO: 757553 - RNA, 19 nt, Artificial Sequence
  Description of Artificial Sequence: Synthetic oligonucleotide
ggcacgggugcuggguucc

SEQ ID NO: 757554 - RNA, 19 nt, Artificial Sequence
  Description of Artificial Sequence: Synthetic oligonucleotide
aacacaccuuuggcaugua

SEQ ID NO: 757555 - RNA, 19 nt, Artificial Sequence
  Description of Artificial Sequence: Synthetic oligonucleotide
ccugaggucuucccguaga

SEQ ID NO: 757556 - RNA, 19 nt, Artificial Sequence
  Description of Artificial Sequence: Synthetic oligonucleotide
gcccgccucacaguucagg

SEQ ID NO: 757557 - RNA, 19 nt, Artificial Sequence
  Description of Artificial Sequence: Synthetic oligonucleotide
ccuucggaccagacaguuc

SEQ ID NO: 757558 - RNA, 19 nt, Artificial Sequence
  Description of Artificial Sequence: Synthetic oligonucleotide
ccaguauggggagcccacc

SEQ ID NO: 757559 - RNA, 19 nt, Artificial Sequence
  Description of Artificial Sequence: Synthetic oligonucleotide
cugcagcaguggauagcca

SEQ ID NO: 757560 - RNA, 19 nt, Artificial Sequence
  Description of Artificial Sequence: Synthetic oligonucleotide
cccgaugucggugccgaac

SEQ ID NO: 757561 - RNA, 19 nt, Artificial Sequence
  Description of Artificial Sequence: Synthetic oligonucleotide
ccuauacacaggaaucuuu

SEQ ID NO: 757562 - RNA, 19 nt, Artificial Sequence
  Description of Artificial Sequence: Synthetic oligonucleotide
ccccuucccuauacacagg

SEQ ID NO: 757563 - RNA, 19 nt, Artificial Sequence
  Description of Artificial Sequence: Synthetic oligonucleotide
accguaggccuugggcaau

SEQ ID NO: 757564 - RNA, 19 nt, Artificial Sequence
  Description of Artificial Sequence: Synthetic oligonucleotide
ccggcuugcaggguguguc

SEQ ID NO: 757565 - RNA, 19 nt, Artificial Sequence
  Description of Artificial Sequence: Synthetic oligonucleotide
gggucggauaggaagugcu

SEQ ID NO: 757566 - RNA, 19 nt, Artificial Sequence
  Description of Artificial Sequence: Synthetic oligonucleotide
caccucccuuaacguguug

SEQ ID NO: 757567 - RNA, 19 nt, Artificial Sequence
  Description of Artificial Sequence: Synthetic oligonucleotide
guaccagggguagcggagu

SEQ ID NO: 757568 - RNA, 19 nt, Artificial Sequence
  Description of Artificial Sequence: Synthetic oligonucleotide
ccuuacaggcuauccugaa

SEQ ID NO: 757569 - RNA, 19 nt, Artificial Sequence
  Description of Artificial Sequence: Synthetic oligonucleotide
gcggggacacauggauagg

SEQ ID NO: 757570 - RNA, 19 nt, Artificial Sequence
  Description of Artificial Sequence: Synthetic oligonucleotide
caggccuugcuaagagcgu

SEQ ID NO: 757571 - RNA, 19 nt, Artificial Sequence
  Description of Artificial Sequence: Synthetic oligonucleotide
ccauccuuguggggaacug

SEQ ID NO: 757572 - RNA, 19 nt, Artificial Sequence
  Description of Artificial Sequence: Synthetic oligonucleotide
ccccuagacggggagaaga

SEQ ID NO: 757573 - RNA, 19 nt, Artificial Sequence
  Description of Artificial Sequence: Synthetic oligonucleotide
cccauucauauacuccgua

SEQ ID NO: 757574 - RNA, 19 nt, Artificial Sequence
  Description of Artificial Sequence: Synthetic oligonucleotide
ggcuuagcauggugcccuc

SEQ ID NO: 757575 - RNA, 19 nt, Artificial Sequence
  Description of Artificial Sequence: Synthetic oligonucleotide
uguccgcuccagggcugcu

SEQ ID NO: 757576 - RNA, 19 nt, Artificial Sequence
  Description of Artificial Sequence: Synthetic oligonucleotide
gagcgugccccaggcagcu

SEQ ID NO: 757577 - RNA, 19 nt, Artificial Sequence
  Description of Artificial Sequence: Synthetic oligonucleotide
gguggggcggggacacaug

SEQ ID NO: 757578 - RNA, 19 nt, Artificial Sequence
  Description of Artificial Sequence: Synthetic oligonucleotide
caagugcgcucuguccuua

SEQ ID NO: 757579 - RNA, 19 nt, Artificial Sequence
  Description of Artificial Sequence: Synthetic oligonucleotide
cucgggcaaugaguucaca

SEQ ID NO: 757580 - RNA, 19 nt, Artificial Sequence
  Description of Artificial Sequence: Synthetic oligonucleotide
ggcuaugcugugcucgguu

SEQ ID NO: 757581 - RNA, 19 nt, Artificial Sequence
  Description of Artificial Sequence: Synthetic oligonucleotide
gugcucgguuccagggcuc

SEQ ID NO: 757582 - RNA, 19 nt, Artificial Sequence
  Description of Artificial Sequence: Synthetic oligonucleotide
ccucccuuaacguguugcu

SEQ ID NO: 757583 - RNA, 19 nt, Artificial Sequence
  Description of Artificial Sequence: Synthetic oligonucleotide
aggguguguccaggaguuu

SEQ ID NO: 757584 - RNA, 19 nt, Artificial Sequence
  Description of Artificial Sequence: Synthetic oligonucleotide
cucuguccuuacaggcuau

SEQ ID NO: 757585 - RNA, 19 nt, Artificial Sequence
  Description of Artificial Sequence: Synthetic oligonucleotide
guagcggaguggccggcuu

SEQ ID NO: 757586 - RNA, 19 nt, Artificial Sequence
  Description of Artificial Sequence: Synthetic oligonucleotide
gcgaggguucuguccgcuc

SEQ ID NO: 757587 - RNA, 19 nt, Artificial Sequence
  Description of Artificial Sequence: Synthetic oligonucleotide
cgguaucgggcaacagcug

SEQ ID NO: 757588 - RNA, 19 nt, Artificial Sequence
  Description of Artificial Sequence: Synthetic oligonucleotide
gugcccucgguggcagaga

SEQ ID NO: 757589 - RNA, 19 nt, Artificial Sequence
  Description of Artificial Sequence: Synthetic oligonucleotide
ccucggucuucccuucgga

SEQ ID NO: 757590 - RNA, 19 nt, Artificial Sequence
  Description of Artificial Sequence: Synthetic oligonucleotide
ggcaaacccaggggucgga

SEQ ID NO: 757591 - RNA, 19 nt, Artificial Sequence
  Description of Artificial Sequence: Synthetic oligonucleotide
cuucagcugaggggcccaa

SEQ ID NO: 757592 - RNA, 19 nt, Artificial Sequence
  Description of Artificial Sequence: Synthetic oligonucleotide
cccgccucacaguucaggu

SEQ ID NO: 757593 - RNA, 19 nt, Artificial Sequence
  Description of Artificial Sequence: Synthetic oligonucleotide
ggguagcggaguggccggc

SEQ ID NO: 757594 - RNA, 19 nt, Artificial Sequence
  Description of Artificial Sequence: Synthetic oligonucleotide
cggggacacauggauagga

SEQ ID NO: 757595 - RNA, 19 nt, Artificial Sequence
  Description of Artificial Sequence: Synthetic oligonucleotide
ggccaggauagggguucug

SEQ ID NO: 757596 - RNA, 19 nt, Artificial Sequence
  Description of Artificial Sequence: Synthetic oligonucleotide
ggucaguggcgacggcagu

SEQ ID NO: 757597 - RNA, 19 nt, Artificial Sequence
  Description of Artificial Sequence: Synthetic oligonucleotide
gcaagugcgcucuguccuu

SEQ ID NO: 757598 - RNA, 19 nt, Artificial Sequence
  Description of Artificial Sequence: Synthetic oligonucleotide
guggguggcuuagcauggu

SEQ ID NO: 757599 - RNA, 19 nt, Artificial Sequence
  Description of Artificial Sequence: Synthetic oligonucleotide
gucuucccguagagagaaa

SEQ ID NO: 757600 - RNA, 19 nt, Artificial Sequence
  Description of Artificial Sequence: Synthetic oligonucleotide
gggguggcgaggguucugu

SEQ ID NO: 757601 - RNA, 19 nt, Artificial Sequence
  Description of Artificial Sequence: Synthetic oligonucleotide
ccguaggccuugggcaaug

SEQ ID NO: 757602 - RNA, 19 nt, Artificial Sequence
  Description of Artificial Sequence: Synthetic oligonucleotide
gcccucgguggcagagaag

SEQ ID NO: 757603 - RNA, 19 nt, Artificial Sequence
  Description of Artificial Sequence: Synthetic oligonucleotide
cgcagguacucgggcaaug

SEQ ID NO: 757604 - RNA, 19 nt, Artificial Sequence
  Description of Artificial Sequence: Synthetic oligonucleotide
cgcaacaccucuggagcca

SEQ ID NO: 757605 - RNA, 19 nt, Artificial Sequence
  Description of Artificial Sequence: Synthetic oligonucleotide
gguagcggaguggccggcu

SEQ ID NO: 757606 - RNA, 19 nt, Artificial Sequence
  Description of Artificial Sequence: Synthetic oligonucleotide
gggcggggacacauggaua

SEQ ID NO: 757607 - RNA, 19 nt, Artificial Sequence
  Description of Artificial Sequence: Synthetic oligonucleotide
ccucaguacgggguaggua

SEQ ID NO: 757608 - RNA, 19 nt, Artificial Sequence
  Description of Artificial Sequence: Synthetic oligonucleotide
cucgggcucccggggagcu

SEQ ID NO: 757609 - RNA, 19 nt, Artificial Sequence
  Description of Artificial Sequence: Synthetic oligonucleotide
gcccggagccagccaggca

SEQ ID NO: 757610 - RNA, 19 nt, Artificial Sequence
  Description of Artificial Sequence: Synthetic oligonucleotide
gcccggggaaggcuaugcu

SEQ ID NO: 757611 - RNA, 19 nt, Artificial Sequence
  Description of Artificial Sequence: Synthetic oligonucleotide
cccaggggucggauaggaa

SEQ ID NO: 757612 - RNA, 19 nt, Artificial Sequence
  Description of Artificial Sequence: Synthetic oligonucleotide
cccuauacacaggaaucuu

SEQ ID NO: 757613 - RNA, 19 nt, Artificial Sequence
  Description of Artificial Sequence: Synthetic oligonucleotide
gcggaguggccggcuugca

SEQ ID NO: 757614 - RNA, 19 nt, Artificial Sequence
  Description of Artificial Sequence: Synthetic oligonucleotide
gcacgggugcuggguucca

SEQ ID NO: 757615 - RNA, 19 nt, Artificial Sequence
  Description of Artificial Sequence: Synthetic oligonucleotide
cccuucggaccagacaguu

SEQ ID NO: 757616 - RNA, 19 nt, Artificial Sequence
  Description of Artificial Sequence: Synthetic oligonucleotide
gcaccaugacuugcccgau

SEQ ID NO: 757617 - RNA, 19 nt, Artificial Sequence
  Description of Artificial Sequence: Synthetic oligonucleotide
ccgccucacaguucagguu

SEQ ID NO: 757618 - RNA, 19 nt, Artificial Sequence
  Description of Artificial Sequence: Synthetic oligonucleotide
ccagagcuagguggagccu

SEQ ID NO: 757619 - RNA, 19 nt, Artificial Sequence
  Description of Artificial Sequence: Synthetic oligonucleotide
ccuuaacguguugcucggu

SEQ ID NO: 757620 - RNA, 19 nt, Artificial Sequence
  Description of Artificial Sequence: Synthetic oligonucleotide
gcccgaugucggugccgaa

SEQ ID NO: 757621 - RNA, 19 nt, Artificial Sequence
  Description of Artificial Sequence: Synthetic oligonucleotide
gccggcuugcagggugugu

SEQ ID NO: 757622 - RNA, 19 nt, Artificial Sequence
  Description of Artificial Sequence: Synthetic oligonucleotide
cgaugucggugccgaaccu

SEQ ID NO: 757623 - RNA, 19 nt, Artificial Sequence
  Description of Artificial Sequence: Synthetic oligonucleotide
gcucgguuacugggagcuu

SEQ ID NO: 757624 - RNA, 19 nt, Artificial Sequence
  Description of Artificial Sequence: Synthetic oligonucleotide
cagcggcgggcaggcgucu

SEQ ID NO: 757625 - RNA, 19 nt, Artificial Sequence
  Description of Artificial Sequence: Synthetic oligonucleotide
uucagugcaaauuugaucu

SEQ ID NO: 757626 - RNA, 19 nt, Artificial Sequence
  Description of Artificial Sequence: Synthetic oligonucleotide
ugcaacuuaaucauagggg

SEQ ID NO: 757627 - RNA, 19 nt, Artificial Sequence
  Description of Artificial Sequence: Synthetic oligonucleotide
aauacaaacagugcagcac

SEQ ID NO: 757628 - RNA, 19 nt, Artificial Sequence
  Description of Artificial Sequence: Synthetic oligonucleotide
agagccucaaccuuuggcc

SEQ ID NO: 757629 - RNA, 19 nt, Artificial Sequence
  Description of Artificial Sequence: Synthetic oligonucleotide
uugcaacuuaaucauaggg

SEQ ID NO: 757630 - RNA, 19 nt, Artificial Sequence
  Description of Artificial Sequence: Synthetic oligonucleotide
aacuuaaucauaggggaac

SEQ ID NO: 757631 - RNA, 19 nt, Artificial Sequence
  Description of Artificial Sequence: Synthetic oligonucleotide
acagucaugacccuccggg

SEQ ID NO: 757632 - RNA, 19 nt, Artificial Sequence
  Description of Artificial Sequence: Synthetic oligonucleotide
ugcaaauuugaucucgcug

SEQ ID NO: 757633 - RNA, 19 nt, Artificial Sequence
  Description of Artificial Sequence: Synthetic oligonucleotide
uuugacagacacaucugag

SEQ ID NO: 757634 - RNA, 19 nt, Artificial Sequence
  Description of Artificial Sequence: Synthetic oligonucleotide
uuccuauccagugaaaugc

SEQ ID NO: 757635 - RNA, 19 nt, Artificial Sequence
  Description of Artificial Sequence: Synthetic oligonucleotide
ucugagucagcuuuggagu

SEQ ID NO: 757636 - RNA, 19 nt, Artificial Sequence
  Description of Artificial Sequence: Synthetic oligonucleotide
uggagucugaauccgaggc

SEQ ID NO: 757637 - RNA, 19 nt, Artificial Sequence
  Description of Artificial Sequence: Synthetic oligonucleotide
cugagucggaggaagaugg

SEQ ID NO: 757638 - RNA, 19 nt, Artificial Sequence
  Description of Artificial Sequence: Synthetic oligonucleotide
aaauuugaucucgcugugc

SEQ ID NO: 757639 - RNA, 19 nt, Artificial Sequence
  Description of Artificial Sequence: Synthetic oligonucleotide
uuuauagccauuucauguc

SEQ ID NO: 757640 - RNA, 19 nt, Artificial Sequence
  Description of Artificial Sequence: Synthetic oligonucleotide
cugaauccgaggcugaagg

SEQ ID NO: 757641 - RNA, 19 nt, Artificial Sequence
  Description of Artificial Sequence: Synthetic oligonucleotide
gcuacaaauacaaacagug

SEQ ID NO: 757642 - RNA, 19 nt, Artificial Sequence
  Description of Artificial Sequence: Synthetic oligonucleotide
uuuccgagcucguuuagag

SEQ ID NO: 757643 - RNA, 19 nt, Artificial Sequence
  Description of Artificial Sequence: Synthetic oligonucleotide
ugucaauugaaaucacaga

SEQ ID NO: 757644 - RNA, 19 nt, Artificial Sequence
  Description of Artificial Sequence: Synthetic oligonucleotide
uuuccuauccagugaaaug

SEQ ID NO: 757645 - RNA, 19 nt, Artificial Sequence
  Description of Artificial Sequence: Synthetic oligonucleotide
ugucagaggagcucacugg

SEQ ID NO: 757646 - RNA, 19 nt, Artificial Sequence
  Description of Artificial Sequence: Synthetic oligonucleotide
uccgagcucguuuagagac

SEQ ID NO: 757647 - RNA, 19 nt, Artificial Sequence
  Description of Artificial Sequence: Synthetic oligonucleotide
aucaacccgauccuucucg

SEQ ID NO: 757648 - RNA, 19 nt, Artificial Sequence
  Description of Artificial Sequence: Synthetic oligonucleotide
uccgcuuuaggccacugug

SEQ ID NO: 757649 - RNA, 19 nt, Artificial Sequence
  Description of Artificial Sequence: Synthetic oligonucleotide
uuauagccauuucauguca

SEQ ID NO: 757650 - RNA, 19 nt, Artificial Sequence
  Description of Artificial Sequence: Synthetic oligonucleotide
ucuucaucgcgccucuucc

SEQ ID NO: 757651 - RNA, 19 nt, Artificial Sequence
  Description of Artificial Sequence: Synthetic oligonucleotide
aaucauaggggaacagguc

SEQ ID NO: 757652 - RNA, 19 nt, Artificial Sequence
  Description of Artificial Sequence: Synthetic oligonucleotide
aauccgaggcugaaggcac

SEQ ID NO: 757653 - RNA, 19 nt, Artificial Sequence
  Description of Artificial Sequence: Synthetic oligonucleotide
uuagccaacuucuuccccu

SEQ ID NO: 757654 - RNA, 19 nt, Artificial Sequence
  Description of Artificial Sequence: Synthetic oligonucleotide
ucggaaucacucuccaucc

SEQ ID NO: 757655 - RNA, 19 nt, Artificial Sequence
  Description of Artificial Sequence: Synthetic oligonucleotide
agagacugacaucuucagg

SEQ ID NO: 757656 - RNA, 19 nt, Artificial Sequence
  Description of Artificial Sequence: Synthetic oligonucleotide
ucuggcuuuggucuccgcc

SEQ ID NO: 757657 - RNA, 19 nt, Artificial Sequence
  Description of Artificial Sequence: Synthetic oligonucleotide
ucggaauccucuuccgacg

SEQ ID NO: 757658 - RNA, 19 nt, Artificial Sequence
  Description of Artificial Sequence: Synthetic oligonucleotide
guaaaguccuggucgcugg

SEQ ID NO: 757659 - RNA, 19 nt, Artificial Sequence
  Description of Artificial Sequence: Synthetic oligonucleotide
aaauccuuuauagccauuu

SEQ ID NO: 757660 - RNA, 19 nt, Artificial Sequence
  Description of Artificial Sequence: Synthetic oligonucleotide
uucacaggcgcugagagau

SEQ ID NO: 757661 - RNA, 19 nt, Artificial Sequence
  Description of Artificial Sequence: Synthetic oligonucleotide
agcucuuccgaggagcacc

SEQ ID NO: 757662 - RNA, 19 nt, Artificial Sequence
  Description of Artificial Sequence: Synthetic oligonucleotide
aacccgauccuucucggcu

SEQ ID NO: 757663 - RNA, 19 nt, Artificial Sequence
  Description of Artificial Sequence: Synthetic oligonucleotide
acuugagccggguguagac

SEQ ID NO: 757664 - RNA, 19 nt, Artificial Sequence
  Description of Artificial Sequence: Synthetic oligonucleotide
agugcaaauuugaucucgc

SEQ ID NO: 757665 - RNA, 19 nt, Artificial Sequence
  Description of Artificial Sequence: Synthetic oligonucleotide
agucaugacccuccggguc

SEQ ID NO: 757666 - RNA, 19 nt, Artificial Sequence
  Description of Artificial Sequence: Synthetic oligonucleotide
uccauccugucacugguug

SEQ ID NO: 757667 - RNA, 19 nt, Artificial Sequence
  Description of Artificial Sequence: Synthetic oligonucleotide
gucggaaucacucuccauc

SEQ ID NO: 757668 - RNA, 19 nt, Artificial Sequence
  Description of Artificial Sequence: Synthetic oligonucleotide
uuggagucugaauccgagg

SEQ ID NO: 757669 - RNA, 19 nt, Artificial Sequence
  Description of Artificial Sequence: Synthetic oligonucleotide
uggguugucgacuuucagu

SEQ ID NO: 757670 - RNA, 19 nt, Artificial Sequence
  Description of Artificial Sequence: Synthetic oligonucleotide
ugucuuccgcuuuaggcca

SEQ ID NO: 757671 - RNA, 19 nt, Artificial Sequence
  Description of Artificial Sequence: Synthetic oligonucleotide
gcaacuuaaucauagggga

SEQ ID NO: 757672 - RNA, 19 nt, Artificial Sequence
  Description of Artificial Sequence: Synthetic oligonucleotide
uccuauccagugaaaugcc

SEQ ID NO: 757673 - RNA, 19 nt, Artificial Sequence
  Description of Artificial Sequence: Synthetic oligonucleotide
uucuggagagccucaaccu

SEQ ID NO: 757674 - RNA, 19 nt, Artificial Sequence
  Description of Artificial Sequence: Synthetic oligonucleotide
caauugaaaucacagaacu

SEQ ID NO: 757675 - RNA, 19 nt, Artificial Sequence
  Description of Artificial Sequence: Synthetic oligonucleotide
uggagcucagcuguccucg

SEQ ID NO: 757676 - RNA, 19 nt, Artificial Sequence
  Description of Artificial Sequence: Synthetic oligonucleotide
agccucaaccuuuggcccc

SEQ ID NO: 757677 - RNA, 19 nt, Artificial Sequence
  Description of Artificial Sequence: Synthetic oligonucleotide
cagaggagcucacuggcgg

SEQ ID NO: 757678 - RNA, 19 nt, Artificial Sequence
  Description of Artificial Sequence: Synthetic oligonucleotide
guugucgacuuucagugca

SEQ ID NO: 757679 - RNA, 19 nt, Artificial Sequence
  Description of Artificial Sequence: Synthetic oligonucleotide
uuuggucuccgcccucggg

SEQ ID NO: 757680 - RNA, 19 nt, Artificial Sequence
  Description of Artificial Sequence: Synthetic oligonucleotide
cugggauguggccucaccg

SEQ ID NO: 757681 - RNA, 19 nt, Artificial Sequence
  Description of Artificial Sequence: Synthetic oligonucleotide
gagucugaauccgaggcug

SEQ ID NO: 757682 - RNA, 19 nt, Artificial Sequence
  Description of Artificial Sequence: Synthetic oligonucleotide
ucgacuuucagugcaaauu

SEQ ID NO: 757683 - RNA, 19 nt, Artificial Sequence
  Description of Artificial Sequence: Synthetic oligonucleotide
augcuccugaugcucacuc

SEQ ID NO: 757684 - RNA, 19 nt, Artificial Sequence
  Description of Artificial Sequence: Synthetic oligonucleotide
agaggucaccugcaguguc

SEQ ID NO: 757685 - RNA, 19 nt, Artificial Sequence
  Description of Artificial Sequence: Synthetic oligonucleotide
cagugcaaauuugaucucg

SEQ ID NO: 757686 - RNA, 19 nt, Artificial Sequence
  Description of Artificial Sequence: Synthetic oligonucleotide
aggagccucacugucagag

SEQ ID NO: 757687 - RNA, 19 nt, Artificial Sequence
  Description of Artificial Sequence: Synthetic oligonucleotide
ucggaggccagccguaccc

SEQ ID NO: 757688 - RNA, 19 nt, Artificial Sequence
  Description of Artificial Sequence: Synthetic oligonucleotide
uauccagugaaaugcccuc

SEQ ID NO: 757689 - RNA, 19 nt, Artificial Sequence
  Description of Artificial Sequence: Synthetic oligonucleotide
gucggagcugucccgaggg

SEQ ID NO: 757690 - RNA, 19 nt, Artificial Sequence
  Description of Artificial Sequence: Synthetic oligonucleotide
cacugcucuuaucagaguc

SEQ ID NO: 757691 - RNA, 19 nt, Artificial Sequence
  Description of Artificial Sequence: Synthetic oligonucleotide
acaucaacccgauccuucu

SEQ ID NO: 757692 - RNA, 19 nt, Artificial Sequence
  Description of Artificial Sequence: Synthetic oligonucleotide
gagccucaaccuuuggccc

SEQ ID NO: 757693 - RNA, 19 nt, Artificial Sequence
  Description of Artificial Sequence: Synthetic oligonucleotide
acgccuccgcucuucaucg

SEQ ID NO: 757694 - RNA, 19 nt, Artificial Sequence
  Description of Artificial Sequence: Synthetic oligonucleotide
uucaucgcgccucuuccac

SEQ ID NO: 757695 - RNA, 19 nt, Artificial Sequence
  Description of Artificial Sequence: Synthetic oligonucleotide
ucaggacuggugucuuccg

SEQ ID NO: 757696 - RNA, 19 nt, Artificial Sequence
  Description of Artificial Sequence: Synthetic oligonucleotide
caaauuugaucucgcugug

SEQ ID NO: 757697 - RNA, 19 nt, Artificial Sequence
  Description of Artificial Sequence: Synthetic oligonucleotide
guugggacuucuuagccaa

SEQ ID NO: 757698 - RNA, 19 nt, Artificial Sequence
  Description of Artificial Sequence: Synthetic oligonucleotide
cauaggcuccuccuuggcc

SEQ ID NO: 757699 - RNA, 19 nt, Artificial Sequence
  Description of Artificial Sequence: Synthetic oligonucleotide
cuuaaucauaggggaacag

SEQ ID NO: 757700 - RNA, 19 nt, Artificial Sequence
  Description of Artificial Sequence: Synthetic oligonucleotide
cuucucgacaucaacccga

SEQ ID NO: 757701 - RNA, 19 nt, Artificial Sequence
  Description of Artificial Sequence: Synthetic oligonucleotide
acaaacagugcagcacuuc

SEQ ID NO: 757702 - RNA, 19 nt, Artificial Sequence
  Description of Artificial Sequence: Synthetic oligonucleotide
gaauccgaggcugaaggca

SEQ ID NO: 757703 - RNA, 19 nt, Artificial Sequence
  Description of Artificial Sequence: Synthetic oligonucleotide
gcaaauuugaucucgcugu

SEQ ID NO: 757704 - RNA, 19 nt, Artificial Sequence
  Description of Artificial Sequence: Synthetic oligonucleotide
uggaggcuuuccgagcucg

SEQ ID NO: 757705 - RNA, 19 nt, Artificial Sequence
  Description of Artificial Sequence: Synthetic oligonucleotide
cagccguacccucucaugc

SEQ ID NO: 757706 - RNA, 19 nt, Artificial Sequence
  Description of Artificial Sequence: Synthetic oligonucleotide
acucagaugggcucucgga

SEQ ID NO: 757707 - RNA, 19 nt, Artificial Sequence
  Description of Artificial Sequence: Synthetic oligonucleotide
cuuguaccggcgaaucuuc

SEQ ID NO: 757708 - RNA, 19 nt, Artificial Sequence
  Description of Artificial Sequence: Synthetic oligonucleotide
uggagagccucaaccuuug

SEQ ID NO: 757709 - RNA, 19 nt, Artificial Sequence
  Description of Artificial Sequence: Synthetic oligonucleotide
cugcucuuaucagagucgg

SEQ ID NO: 757710 - RNA, 19 nt, Artificial Sequence
  Description of Artificial Sequence: Synthetic oligonucleotide
ugggcucucggaauccucu

SEQ ID NO: 757711 - RNA, 19 nt, Artificial Sequence
  Description of Artificial Sequence: Synthetic oligonucleotide
ucgaagucgccggagcucc

SEQ ID NO: 757712 - RNA, 19 nt, Artificial Sequence
  Description of Artificial Sequence: Synthetic oligonucleotide
ugggauguggccucaccgu

SEQ ID NO: 757713 - RNA, 19 nt, Artificial Sequence
  Description of Artificial Sequence: Synthetic oligonucleotide
acuuaaucauaggggaaca

SEQ ID NO: 757714 - RNA, 19 nt, Artificial Sequence
  Description of Artificial Sequence: Synthetic oligonucleotide
ucagaugggcucucggaau

SEQ ID NO: 757715 - RNA, 19 nt, Artificial Sequence
  Description of Artificial Sequence: Synthetic oligonucleotide
uccgcguucgcucugccuu

SEQ ID NO: 757716 - RNA, 19 nt, Artificial Sequence
  Description of Artificial Sequence: Synthetic oligonucleotide
ucgcugugcagcuucugca

SEQ ID NO: 757717 - RNA, 19 nt, Artificial Sequence
  Description of Artificial Sequence: Synthetic oligonucleotide
agagaucggugcugggcuc

SEQ ID NO: 757718 - RNA, 19 nt, Artificial Sequence
  Description of Artificial Sequence: Synthetic oligonucleotide
ucguuuagagacugacauc

SEQ ID NO: 757719 - RNA, 19 nt, Artificial Sequence
  Description of Artificial Sequence: Synthetic oligonucleotide
cucguuuagagacugacau

SEQ ID NO: 757720 - RNA, 19 nt, Artificial Sequence
  Description of Artificial Sequence: Synthetic oligonucleotide
agucggaggaagauggugu

SEQ ID NO: 757721 - RNA, 19 nt, Artificial Sequence
  Description of Artificial Sequence: Synthetic oligonucleotide
guaccggcgaaucuucuuc

SEQ ID NO: 757722 - RNA, 19 nt, Artificial Sequence
  Description of Artificial Sequence: Synthetic oligonucleotide
cucucggaauccucuuccg

SEQ ID NO: 757723 - RNA, 19 nt, Artificial Sequence
  Description of Artificial Sequence: Synthetic oligonucleotide
ggguguagaccucugcugc

SEQ ID NO: 757724 - RNA, 19 nt, Artificial Sequence
  Description of Artificial Sequence: Synthetic oligonucleotide
gaagauggugugccccggc

SEQ ID NO: 757725 - RNA, 19 nt, Artificial Sequence
  Description of Artificial Sequence: Synthetic oligonucleotide
gacaucaacccgauccuuc

SEQ ID NO: 757726 - RNA, 19 nt, Artificial Sequence
  Description of Artificial Sequence: Synthetic oligonucleotide
ucucuccucuacagaaggu

SEQ ID NO: 757727 - RNA, 19 nt, Artificial Sequence
  Description of Artificial Sequence: Synthetic oligonucleotide
caggucggcuucaggagcc

SEQ ID NO: 757728 - RNA, 19 nt, Artificial Sequence
  Description of Artificial Sequence: Synthetic oligonucleotide
agacucggaggccagccgu

SEQ ID NO: 757729 - RNA, 19 nt, Artificial Sequence
  Description of Artificial Sequence: Synthetic oligonucleotide
ggacccgagacuugagccg

SEQ ID NO: 757730 - RNA, 19 nt, Artificial Sequence
  Description of Artificial Sequence: Synthetic oligonucleotide
cuuccccucuuucccaagc

SEQ ID NO: 757731 - RNA, 19 nt, Artificial Sequence
  Description of Artificial Sequence: Synthetic oligonucleotide
uggcaguugggacuucuua

SEQ ID NO: 757732 - RNA, 19 nt, Artificial Sequence
  Description of Artificial Sequence: Synthetic oligonucleotide
uucucgacaucaacccgau

SEQ ID NO: 757733 - RNA, 19 nt, Artificial Sequence
  Description of Artificial Sequence: Synthetic oligonucleotide
uaccggcgaaucuucuuca

SEQ ID NO: 757734 - RNA, 19 nt, Artificial Sequence
  Description of Artificial Sequence: Synthetic oligonucleotide
cuucaguguggcuaccaca

SEQ ID NO: 757735 - RNA, 19 nt, Artificial Sequence
  Description of Artificial Sequence: Synthetic oligonucleotide
ccuuuauagccauuucaug

SEQ ID NO: 757736 - RNA, 19 nt, Artificial Sequence
  Description of Artificial Sequence: Synthetic oligonucleotide
uuggccuuguaccggcgaa

SEQ ID NO: 757737 - RNA, 19 nt, Artificial Sequence
  Description of Artificial Sequence: Synthetic oligonucleotide
caggacccgagacuugagc

SEQ ID NO: 757738 - RNA, 19 nt, Artificial Sequence
  Description of Artificial Sequence: Synthetic oligonucleotide
cuugagccggguguagacc

SEQ ID NO: 757739 - RNA, 19 nt, Artificial Sequence
  Description of Artificial Sequence: Synthetic oligonucleotide
caacuuaaucauaggggaa

SEQ ID NO: 757740 - RNA, 19 nt, Artificial Sequence
  Description of Artificial Sequence: Synthetic oligonucleotide
uugucgacuuucagugcaa

SEQ ID NO: 757741 - RNA, 19 nt, Artificial Sequence
  Description of Artificial Sequence: Synthetic oligonucleotide
gcgaaucuucuucagugug

SEQ ID NO: 757742 - RNA, 19 nt, Artificial Sequence
  Description of Artificial Sequence: Synthetic oligonucleotide
cuauccagugaaaugcccu

SEQ ID NO: 757743 - RNA, 19 nt, Artificial Sequence
  Description of Artificial Sequence: Synthetic oligonucleotide
gagucggaaucacucucca

SEQ ID NO: 757744 - RNA, 19 nt, Artificial Sequence
  Description of Artificial Sequence: Synthetic oligonucleotide
uguaccggcgaaucuucuu

SEQ ID NO: 757745 - RNA, 19 nt, Artificial Sequence
  Description of Artificial Sequence: Synthetic oligonucleotide
cagaugggcucucggaauc

SEQ ID NO: 757746 - RNA, 19 nt, Artificial Sequence
  Description of Artificial Sequence: Synthetic oligonucleotide
guccuugcaacuuaaucau

SEQ ID NO: 757747 - RNA, 19 nt, Artificial Sequence
  Description of Artificial Sequence: Synthetic oligonucleotide
gggguaaaguccuggucgc

SEQ ID NO: 757748 - RNA, 19 nt, Artificial Sequence
  Description of Artificial Sequence: Synthetic oligonucleotide
ucugaucgcuuccgcguuc

SEQ ID NO: 757749 - RNA, 19 nt, Artificial Sequence
  Description of Artificial Sequence: Synthetic oligonucleotide
cugaucgcuuccgcguucg

SEQ ID NO: 757750 - RNA, 19 nt, Artificial Sequence
  Description of Artificial Sequence: Synthetic oligonucleotide
ucuggccgcccucucuucu

SEQ ID NO: 757751 - RNA, 19 nt, Artificial Sequence
  Description of Artificial Sequence: Synthetic oligonucleotide
cagcacuucccugggaggc

SEQ ID NO: 757752 - RNA, 19 nt, Artificial Sequence
  Description of Artificial Sequence: Synthetic oligonucleotide
uuguaccggcgaaucuucu

SEQ ID NO: 757753 - RNA, 19 nt, Artificial Sequence
  Description of Artificial Sequence: Synthetic oligonucleotide
accggcgaaucuucuucag

SEQ ID NO: 757754 - RNA, 19 nt, Artificial Sequence
  Description of Artificial Sequence: Synthetic oligonucleotide
aguguggcuaccacaucug

SEQ ID NO: 757755 - RNA, 19 nt, Artificial Sequence
  Description of Artificial Sequence: Synthetic oligonucleotide
ugacucagaugggcucucg

SEQ ID NO: 757756 - RNA, 19 nt, Artificial Sequence
  Description of Artificial Sequence: Synthetic oligonucleotide
ucaugcuccugaugcucac

SEQ ID NO: 757757 - RNA, 19 nt, Artificial Sequence
  Description of Artificial Sequence: Synthetic oligonucleotide
ccgugcugcagccauaggc

SEQ ID NO: 757758 - RNA, 19 nt, Artificial Sequence
  Description of Artificial Sequence: Synthetic oligonucleotide
cucagaugggcucucggaa

SEQ ID NO: 757759 - RNA, 19 nt, Artificial Sequence
  Description of Artificial Sequence: Synthetic oligonucleotide
caucgcgccucuuccacuc

SEQ ID NO: 757760 - RNA, 19 nt, Artificial Sequence
  Description of Artificial Sequence: Synthetic oligonucleotide
uccuugcaacuuaaucaua

SEQ ID NO: 757761 - RNA, 19 nt, Artificial Sequence
  Description of Artificial Sequence: Synthetic oligonucleotide
gcugcgcuucuucacaggc

SEQ ID NO: 757762 - RNA, 19 nt, Artificial Sequence
  Description of Artificial Sequence: Synthetic oligonucleotide
cacgccuccgcucuucauc

SEQ ID NO: 757763 - RNA, 19 nt, Artificial Sequence
  Description of Artificial Sequence: Synthetic oligonucleotide
ccuauccagugaaaugccc

SEQ ID NO: 757764 - RNA, 19 nt, Artificial Sequence
  Description of Artificial Sequence: Synthetic oligonucleotide
gguguagaccucugcugcc

SEQ ID NO: 757765 - RNA, 19 nt, Artificial Sequence
  Description of Artificial Sequence: Synthetic oligonucleotide
ucaucgcgccucuuccacu

SEQ ID NO: 757766 - RNA, 19 nt, Artificial Sequence
  Description of Artificial Sequence: Synthetic oligonucleotide
caacccgauccuucucggc

SEQ ID NO: 757767 - RNA, 19 nt, Artificial Sequence
  Description of Artificial Sequence: Synthetic oligonucleotide
ucgcuggucuucucugacu

SEQ ID NO: 757768 - RNA, 19 nt, Artificial Sequence
  Description of Artificial Sequence: Synthetic oligonucleotide
ucguccugugcucuaucuu

SEQ ID NO: 757769 - RNA, 19 nt, Artificial Sequence
  Description of Artificial Sequence: Synthetic oligonucleotide
cucguggcuucucgucugg

SEQ ID NO: 757770 - RNA, 19 nt, Artificial Sequence
  Description of Artificial Sequence: Synthetic oligonucleotide
accguucacaggcgcugag

SEQ ID NO: 757771 - RNA, 19 nt, Artificial Sequence
  Description of Artificial Sequence: Synthetic oligonucleotide
gaggcgcacuguaacuggc

SEQ ID NO: 757772 - RNA, 19 nt, Artificial Sequence
  Description of Artificial Sequence: Synthetic oligonucleotide
ucgucuggccgcccucucu

SEQ ID NO: 757773 - RNA, 19 nt, Artificial Sequence
  Description of Artificial Sequence: Synthetic oligonucleotide
ccgcuuuaggccacugugg

SEQ ID NO: 757774 - RNA, 19 nt, Artificial Sequence
  Description of Artificial Sequence: Synthetic oligonucleotide
acucggaggccagccguac

SEQ ID NO: 757775 - RNA, 19 nt, Artificial Sequence
  Description of Artificial Sequence: Synthetic oligonucleotide
ggugcugggcucauccucc

SEQ ID NO: 757776 - RNA, 19 nt, Artificial Sequence
  Description of Artificial Sequence: Synthetic oligonucleotide
cuucgccaucacauccuug

SEQ ID NO: 757777 - RNA, 19 nt, Artificial Sequence
  Description of Artificial Sequence: Synthetic oligonucleotide
ucuccgggguaaaguccug

SEQ ID NO: 757778 - RNA, 19 nt, Artificial Sequence
  Description of Artificial Sequence: Synthetic oligonucleotide
ugucgacuuucagugcaaa

SEQ ID NO: 757779 - RNA, 19 nt, Artificial Sequence
  Description of Artificial Sequence: Synthetic oligonucleotide
cuucucggcuccagccuug

SEQ ID NO: 757780 - RNA, 19 nt, Artificial Sequence
  Description of Artificial Sequence: Synthetic oligonucleotide
ugacccuccgggucucuuc

SEQ ID NO: 757781 - RNA, 19 nt, Artificial Sequence
  Description of Artificial Sequence: Synthetic oligonucleotide
ccuccgggucucuucaucc

SEQ ID NO: 757782 - RNA, 19 nt, Artificial Sequence
  Description of Artificial Sequence: Synthetic oligonucleotide
cuggagcucagcuguccuc

SEQ ID NO: 757783 - RNA, 19 nt, Artificial Sequence
  Description of Artificial Sequence: Synthetic oligonucleotide
uccgcucuucaucgcgccu

SEQ ID NO: 757784 - RNA, 19 nt, Artificial Sequence
  Description of Artificial Sequence: Synthetic oligonucleotide
cggcgaaucuucuucagug

SEQ ID NO: 757785 - RNA, 19 nt, Artificial Sequence
  Description of Artificial Sequence: Synthetic oligonucleotide
caucaacccgauccuucuc

SEQ ID NO: 757786 - RNA, 19 nt, Artificial Sequence
  Description of Artificial Sequence: Synthetic oligonucleotide
ugaucgcuuccgcguucgc

SEQ ID NO: 757787 - RNA, 19 nt, Artificial Sequence
  Description of Artificial Sequence: Synthetic oligonucleotide
cuucaucgcgccucuucca

SEQ ID NO: 757788 - RNA, 19 nt, Artificial Sequence
  Description of Artificial Sequence: Synthetic oligonucleotide
agaaaggcccaggcuacaa

SEQ ID NO: 757789 - RNA, 19 nt, Artificial Sequence
  Description of Artificial Sequence: Synthetic oligonucleotide
gaaaugcccucugaucgcu

SEQ ID NO: 757790 - RNA, 19 nt, Artificial Sequence
  Description of Artificial Sequence: Synthetic oligonucleotide
ucgcgccucuuccacucac

SEQ ID NO: 757791 - RNA, 19 nt, Artificial Sequence
  Description of Artificial Sequence: Synthetic oligonucleotide
ccgacggggacacacuggc

SEQ ID NO: 757792 - RNA, 19 nt, Artificial Sequence
  Description of Artificial Sequence: Synthetic oligonucleotide
gccuccgcucuucaucgcg

SEQ ID NO: 757793 - RNA, 19 nt, Artificial Sequence
  Description of Artificial Sequence: Synthetic oligonucleotide
ucgcuuccgcguucgcucu

SEQ ID NO: 757794 - RNA, 19 nt, Artificial Sequence
  Description of Artificial Sequence: Synthetic oligonucleotide
uucucgucuggccgcccuc

SEQ ID NO: 757795 - RNA, 19 nt, Artificial Sequence
  Description of Artificial Sequence: Synthetic oligonucleotide
acggccgugcugcagccau

SEQ ID NO: 757796 - RNA, 19 nt, Artificial Sequence
  Description of Artificial Sequence: Synthetic oligonucleotide
uccucuacagaagguucuu

SEQ ID NO: 757797 - RNA, 19 nt, Artificial Sequence
  Description of Artificial Sequence: Synthetic oligonucleotide
gggacggccgugcugcagc

SEQ ID NO: 757798 - RNA, 19 nt, Artificial Sequence
  Description of Artificial Sequence: Synthetic oligonucleotide
cuuuccuauccagugaaau

SEQ ID NO: 757799 - RNA, 19 nt, Artificial Sequence
  Description of Artificial Sequence: Synthetic oligonucleotide
ggcggaggcgcacuguaac

SEQ ID NO: 757800 - RNA, 19 nt, Artificial Sequence
  Description of Artificial Sequence: Synthetic oligonucleotide
gcucccgucgccuccuugc

SEQ ID NO: 757801 - RNA, 19 nt, Artificial Sequence
  Description of Artificial Sequence: Synthetic oligonucleotide
uuccgcguucgcucugccu

SEQ ID NO: 757802 - RNA, 19 nt, Artificial Sequence
  Description of Artificial Sequence: Synthetic oligonucleotide
ucucgucuggccgcccucu

SEQ ID NO: 757803 - RNA, 19 nt, Artificial Sequence
  Description of Artificial Sequence: Synthetic oligonucleotide
augggcucucggaauccuc

SEQ ID NO: 757804 - RNA, 19 nt, Artificial Sequence
  Description of Artificial Sequence: Synthetic oligonucleotide
ccaggucggcuucaggagc

SEQ ID NO: 757805 - RNA, 19 nt, Artificial Sequence
  Description of Artificial Sequence: Synthetic oligonucleotide
cucccgucgccuccuugcc

SEQ ID NO: 757806 - RNA, 19 nt, Artificial Sequence
  Description of Artificial Sequence: Synthetic oligonucleotide
gcuaccacaucuguguucu

SEQ ID NO: 757807 - RNA, 19 nt, Artificial Sequence
  Description of Artificial Sequence: Synthetic oligonucleotide
ugcucccgucgccuccuug

SEQ ID NO: 757808 - RNA, 19 nt, Artificial Sequence
  Description of Artificial Sequence: Synthetic oligonucleotide
ggacggacauggcaccaug

SEQ ID NO: 757809 - RNA, 19 nt, Artificial Sequence
  Description of Artificial Sequence: Synthetic oligonucleotide
ucccgucgccuccuugccu

SEQ ID NO: 757810 - RNA, 19 nt, Artificial Sequence
  Description of Artificial Sequence: Synthetic oligonucleotide
ucgccaucacauccuuguu

SEQ ID NO: 757811 - RNA, 19 nt, Artificial Sequence
  Description of Artificial Sequence: Synthetic oligonucleotide
agucugaauccgaggcuga

SEQ ID NO: 757812 - RNA, 19 nt, Artificial Sequence
  Description of Artificial Sequence: Synthetic oligonucleotide
gugcaaauuugaucucgcu

SEQ ID NO: 757813 - RNA, 19 nt, Artificial Sequence
  Description of Artificial Sequence: Synthetic oligonucleotide
ucucgacaucaacccgauc

SEQ ID NO: 757814 - RNA, 19 nt, Artificial Sequence
  Description of Artificial Sequence: Synthetic oligonucleotide
ugcgguccaccuccccgcu

SEQ ID NO: 757815 - RNA, 19 nt, Artificial Sequence
  Description of Artificial Sequence: Synthetic oligonucleotide
ggagagccucaaccuuugg

SEQ ID NO: 757816 - RNA, 19 nt, Artificial Sequence
  Description of Artificial Sequence: Synthetic oligonucleotide
uucuggcuuuggucuccgc

SEQ ID NO: 757817 - RNA, 19 nt, Artificial Sequence
  Description of Artificial Sequence: Synthetic oligonucleotide
uggcggaggcgcacuguaa

SEQ ID NO: 757818 - RNA, 19 nt, Artificial Sequence
  Description of Artificial Sequence: Synthetic oligonucleotide
ccauccugucacugguugc

SEQ ID NO: 757819 - RNA, 19 nt, Artificial Sequence
  Description of Artificial Sequence: Synthetic oligonucleotide
guucugagucggaggaaga

SEQ ID NO: 757820 - RNA, 19 nt, Artificial Sequence
  Description of Artificial Sequence: Synthetic oligonucleotide
ggcuaccacaucuguguuc

SEQ ID NO: 757821 - RNA, 19 nt, Artificial Sequence
  Description of Artificial Sequence: Synthetic oligonucleotide
ccuggcucguggcuucucg

SEQ ID NO: 757822 - RNA, 19 nt, Artificial Sequence
  Description of Artificial Sequence: Synthetic oligonucleotide
cacucacugaugcggucca

SEQ ID NO: 757823 - RNA, 19 nt, Artificial Sequence
  Description of Artificial Sequence: Synthetic oligonucleotide
ggagcugucccgagggcug

SEQ ID NO: 757824 - RNA, 19 nt, Artificial Sequence
  Description of Artificial Sequence: Synthetic oligonucleotide
gucguccugugcucuaucu

SEQ ID NO: 757825 - RNA, 19 nt, Artificial Sequence
  Description of Artificial Sequence: Synthetic oligonucleotide
ugcccgucguccugugcuc

SEQ ID NO: 757826 - RNA, 19 nt, Artificial Sequence
  Description of Artificial Sequence: Synthetic oligonucleotide
ccuugccuccagcucacgc

SEQ ID NO: 757827 - RNA, 19 nt, Artificial Sequence
  Description of Artificial Sequence: Synthetic oligonucleotide
cuuccgcguucgcucugcc

SEQ ID NO: 757828 - RNA, 19 nt, Artificial Sequence
  Description of Artificial Sequence: Synthetic oligonucleotide
auggugugccccggccccg

SEQ ID NO: 757829 - RNA, 19 nt, Artificial Sequence
  Description of Artificial Sequence: Synthetic oligonucleotide
uggugcccgggccacuguu

SEQ ID NO: 757830 - RNA, 19 nt, Artificial Sequence
  Description of Artificial Sequence: Synthetic oligonucleotide
gcgcacuguaacuggcaug

SEQ ID NO: 757831 - RNA, 19 nt, Artificial Sequence
  Description of Artificial Sequence: Synthetic oligonucleotide
gaucgcuuccgcguucgcu

SEQ ID NO: 757832 - RNA, 19 nt, Artificial Sequence
  Description of Artificial Sequence: Synthetic oligonucleotide
ccauuucaugucaauugaa

SEQ ID NO: 757833 - RNA, 19 nt, Artificial Sequence
  Description of Artificial Sequence: Synthetic oligonucleotide
ccuccgcucuucaucgcgc

SEQ ID NO: 757834 - RNA, 19 nt, Artificial Sequence
  Description of Artificial Sequence: Synthetic oligonucleotide
ccgugggccauccuccaag

SEQ ID NO: 757835 - RNA, 19 nt, Artificial Sequence
  Description of Artificial Sequence: Synthetic oligonucleotide
gcccaggcuacaaauacaa

SEQ ID NO: 757836 - RNA, 19 nt, Artificial Sequence
  Description of Artificial Sequence: Synthetic oligonucleotide
ggcuuuccgagcucguuua

SEQ ID NO: 757837 - RNA, 19 nt, Artificial Sequence
  Description of Artificial Sequence: Synthetic oligonucleotide
cccagacuuccuugcagac

SEQ ID NO: 757838 - RNA, 19 nt, Artificial Sequence
  Description of Artificial Sequence: Synthetic oligonucleotide
uccuugcggcgcuccuucu

SEQ ID NO: 757839 - RNA, 19 nt, Artificial Sequence
  Description of Artificial Sequence: Synthetic oligonucleotide
gcggggucggagcuguccc

SEQ ID NO: 757840 - RNA, 19 nt, Artificial Sequence
  Description of Artificial Sequence: Synthetic oligonucleotide
ccguacccucucaugcucc

SEQ ID NO: 757841 - RNA, 19 nt, Artificial Sequence
  Description of Artificial Sequence: Synthetic oligonucleotide
ccagccguacccucucaug

SEQ ID NO: 757842 - RNA, 19 nt, Artificial Sequence
  Description of Artificial Sequence: Synthetic oligonucleotide
ggcgaaucuucuucagugu

SEQ ID NO: 757843 - RNA, 19 nt, Artificial Sequence
  Description of Artificial Sequence: Synthetic oligonucleotide
ggcucucggaauccucuuc

SEQ ID NO: 757844 - RNA, 19 nt, Artificial Sequence
  Description of Artificial Sequence: Synthetic oligonucleotide
gucgacuuucagugcaaau

SEQ ID NO: 757845 - RNA, 19 nt, Artificial Sequence
  Description of Artificial Sequence: Synthetic oligonucleotide
ccucaccguucacaggcgc

SEQ ID NO: 757846 - RNA, 19 nt, Artificial Sequence
  Description of Artificial Sequence: Synthetic oligonucleotide
aggcgcacuguaacuggca

SEQ ID NO: 757847 - RNA, 19 nt, Artificial Sequence
  Description of Artificial Sequence: Synthetic oligonucleotide
ucacgccuccgcucuucau

SEQ ID NO: 757848 - RNA, 19 nt, Artificial Sequence
  Description of Artificial Sequence: Synthetic oligonucleotide
cucaccguucacaggcgcu

SEQ ID NO: 757849 - RNA, 19 nt, Artificial Sequence
  Description of Artificial Sequence: Synthetic oligonucleotide
cugcaguguccccagcucu

SEQ ID NO: 757850 - RNA, 19 nt, Artificial Sequence
  Description of Artificial Sequence: Synthetic oligonucleotide
ggucgcuggucuucucuga

SEQ ID NO: 757851 - RNA, 19 nt, Artificial Sequence
  Description of Artificial Sequence: Synthetic oligonucleotide
cuuccgcuuuaggccacug

SEQ ID NO: 757852 - RNA, 19 nt, Artificial Sequence
  Description of Artificial Sequence: Synthetic oligonucleotide
ugcccgggccacuguuuuc

SEQ ID NO: 757853 - RNA, 19 nt, Artificial Sequence
  Description of Artificial Sequence: Synthetic oligonucleotide
gccggguguagaccucugc

SEQ ID NO: 757854 - RNA, 19 nt, Artificial Sequence
  Description of Artificial Sequence: Synthetic oligonucleotide
ggauguggccucaccguuc

SEQ ID NO: 757855 - RNA, 19 nt, Artificial Sequence
  Description of Artificial Sequence: Synthetic oligonucleotide
cuuguccuugcaacuuaau

SEQ ID NO: 757856 - RNA, 19 nt, Artificial Sequence
  Description of Artificial Sequence: Synthetic oligonucleotide
gcucucgaagucgccggag

SEQ ID NO: 757857 - RNA, 19 nt, Artificial Sequence
  Description of Artificial Sequence: Synthetic oligonucleotide
cuuccgacggggacacacu

SEQ ID NO: 757858 - RNA, 19 nt, Artificial Sequence
  Description of Artificial Sequence: Synthetic oligonucleotide
cucacgccuccgcucuuca

SEQ ID NO: 757859 - RNA, 19 nt, Artificial Sequence
  Description of Artificial Sequence: Synthetic oligonucleotide
cgagcucguuuagagacug

SEQ ID NO: 757860 - RNA, 19 nt, Artificial Sequence
  Description of Artificial Sequence: Synthetic oligonucleotide
ggacggccgugcugcagcc

SEQ ID NO: 757861 - RNA, 19 nt, Artificial Sequence
  Description of Artificial Sequence: Synthetic oligonucleotide
gagcucguuuagagacuga

SEQ ID NO: 757862 - RNA, 19 nt, Artificial Sequence
  Description of Artificial Sequence: Synthetic oligonucleotide
cucuuccgaggagcacccc

SEQ ID NO: 757863 - RNA, 19 nt, Artificial Sequence
  Description of Artificial Sequence: Synthetic oligonucleotide
ccucuuccgacggggacac

SEQ ID NO: 757864 - RNA, 19 nt, Artificial Sequence
  Description of Artificial Sequence: Synthetic oligonucleotide
cucgucuggccgcccucuc

SEQ ID NO: 757865 - RNA, 19 nt, Artificial Sequence
  Description of Artificial Sequence: Synthetic oligonucleotide
ucucggcuccagccuuguu

SEQ ID NO: 757866 - RNA, 19 nt, Artificial Sequence
  Description of Artificial Sequence: Synthetic oligonucleotide
gggucggagcugucccgag

SEQ ID NO: 757867 - RNA, 19 nt, Artificial Sequence
  Description of Artificial Sequence: Synthetic oligonucleotide
gccucaccguucacaggcg

SEQ ID NO: 757868 - RNA, 19 nt, Artificial Sequence
  Description of Artificial Sequence: Synthetic oligonucleotide
gacucggaggccagccgua

SEQ ID NO: 757869 - RNA, 19 nt, Artificial Sequence
  Description of Artificial Sequence: Synthetic oligonucleotide
ggcucguggcuucucgucu

SEQ ID NO: 757870 - RNA, 19 nt, Artificial Sequence
  Description of Artificial Sequence: Synthetic oligonucleotide
gcuuccgcguucgcucugc

SEQ ID NO: 757871 - RNA, 19 nt, Artificial Sequence
  Description of Artificial Sequence: Synthetic oligonucleotide
ccucugaucgcuuccgcgu

SEQ ID NO: 757872 - RNA, 19 nt, Artificial Sequence
  Description of Artificial Sequence: Synthetic oligonucleotide
cagcucacgccuccgcucu

SEQ ID NO: 757873 - RNA, 19 nt, Artificial Sequence
  Description of Artificial Sequence: Synthetic oligonucleotide
agaucggugcugggcucau

SEQ ID NO: 757874 - RNA, 19 nt, Artificial Sequence
  Description of Artificial Sequence: Synthetic oligonucleotide
gaucggugcugggcucauc

SEQ ID NO: 757875 - RNA, 19 nt, Artificial Sequence
  Description of Artificial Sequence: Synthetic oligonucleotide
ccgagacuugagccgggug

SEQ ID NO: 757876 - RNA, 19 nt, Artificial Sequence
  Description of Artificial Sequence: Synthetic oligonucleotide
cuggcucguggcuucucgu

SEQ ID NO: 757877 - RNA, 19 nt, Artificial Sequence
  Description of Artificial Sequence: Synthetic oligonucleotide
ggcuucccguacuuguccu

SEQ ID NO: 757878 - RNA, 19 nt, Artificial Sequence
  Description of Artificial Sequence: Synthetic oligonucleotide
guuuagagacugacaucuu

SEQ ID NO: 757879 - RNA, 19 nt, Artificial Sequence
  Description of Artificial Sequence: Synthetic oligonucleotide
cuuuggccccaggacccga

SEQ ID NO: 757880 - RNA, 19 nt, Artificial Sequence
  Description of Artificial Sequence: Synthetic oligonucleotide
ggcgcacuguaacuggcau

SEQ ID NO: 757881 - RNA, 19 nt, Artificial Sequence
  Description of Artificial Sequence: Synthetic oligonucleotide
caccguucacaggcgcuga

SEQ ID NO: 757882 - RNA, 19 nt, Artificial Sequence
  Description of Artificial Sequence: Synthetic oligonucleotide
ccccuuuccuauccaguga

SEQ ID NO: 757883 - RNA, 19 nt, Artificial Sequence
  Description of Artificial Sequence: Synthetic oligonucleotide
gaggcuuuccgagcucguu

SEQ ID NO: 757884 - RNA, 19 nt, Artificial Sequence
  Description of Artificial Sequence: Synthetic oligonucleotide
cucugaucgcuuccgcguu

SEQ ID NO: 757885 - RNA, 19 nt, Artificial Sequence
  Description of Artificial Sequence: Synthetic oligonucleotide
augacccuccgggucucuu

SEQ ID NO: 757886 - RNA, 19 nt, Artificial Sequence
  Description of Artificial Sequence: Synthetic oligonucleotide
cgacuuucagugcaaauuu

SEQ ID NO: 757887 - RNA, 19 nt, Artificial Sequence
  Description of Artificial Sequence: Synthetic oligonucleotide
gggauguggccucaccguu

SEQ ID NO: 757888 - RNA, 19 nt, Artificial Sequence
  Description of Artificial Sequence: Synthetic oligonucleotide
gacggccgugcugcagcca

SEQ ID NO: 757889 - RNA, 19 nt, Artificial Sequence
  Description of Artificial Sequence: Synthetic oligonucleotide
ccuuuccuauccagugaaa

SEQ ID NO: 757890 - RNA, 19 nt, Artificial Sequence
  Description of Artificial Sequence: Synthetic oligonucleotide
ccgggccacuguuuucuuc

SEQ ID NO: 757891 - RNA, 19 nt, Artificial Sequence
  Description of Artificial Sequence: Synthetic oligonucleotide
cccgccguggugcccgggc

SEQ ID NO: 757892 - RNA, 19 nt, Artificial Sequence
  Description of Artificial Sequence: Synthetic oligonucleotide
ggggucggagcugucccga

SEQ ID NO: 757893 - RNA, 19 nt, Artificial Sequence
  Description of Artificial Sequence: Synthetic oligonucleotide
caugcuccugaugcucacu

SEQ ID NO: 757894 - RNA, 19 nt, Artificial Sequence
  Description of Artificial Sequence: Synthetic oligonucleotide
cggcugcgcuucuucacag

SEQ ID NO: 757895 - RNA, 19 nt, Artificial Sequence
  Description of Artificial Sequence: Synthetic oligonucleotide
gcggaggcgcacuguaacu

SEQ ID NO: 757896 - RNA, 19 nt, Artificial Sequence
  Description of Artificial Sequence: Synthetic oligonucleotide
ccggguguagaccucugcu

SEQ ID NO: 757897 - RNA, 19 nt, Artificial Sequence
  Description of Artificial Sequence: Synthetic oligonucleotide
ggacuggugucuuccgcuu

SEQ ID NO: 757898 - RNA, 19 nt, Artificial Sequence
  Description of Artificial Sequence: Synthetic oligonucleotide
cgacggggacacacuggcc

SEQ ID NO: 757899 - RNA, 19 nt, Artificial Sequence
  Description of Artificial Sequence: Synthetic oligonucleotide
gugcccgggccacuguuuu

SEQ ID NO: 757900 - RNA, 19 nt, Artificial Sequence
  Description of Artificial Sequence: Synthetic oligonucleotide
ccgcguucgcucugccuuc

SEQ ID NO: 757901 - RNA, 19 nt, Artificial Sequence
  Description of Artificial Sequence: Synthetic oligonucleotide
ccuuguaccggcgaaucuu

SEQ ID NO: 757902 - RNA, 19 nt, Artificial Sequence
  Description of Artificial Sequence: Synthetic oligonucleotide
cgcugagagaucggugcug

SEQ ID NO: 757903 - RNA, 19 nt, Artificial Sequence
  Description of Artificial Sequence: Synthetic oligonucleotide
gcgcugagagaucggugcu

SEQ ID NO: 757904 - RNA, 19 nt, Artificial Sequence
  Description of Artificial Sequence: Synthetic oligonucleotide
cagccauaggcuccuccuu

SEQ ID NO: 757905 - RNA, 19 nt, Artificial Sequence
  Description of Artificial Sequence: Synthetic oligonucleotide
ccgucgccuccuugccucc

SEQ ID NO: 757906 - RNA, 19 nt, Artificial Sequence
  Description of Artificial Sequence: Synthetic oligonucleotide
cguucgcucugccuucaca

SEQ ID NO: 757907 - RNA, 19 nt, Artificial Sequence
  Description of Artificial Sequence: Synthetic oligonucleotide
uggcggggucggagcuguc

SEQ ID NO: 757908 - RNA, 19 nt, Artificial Sequence
  Description of Artificial Sequence: Synthetic oligonucleotide
gcgguccaccuccccgcug

SEQ ID NO: 757909 - RNA, 19 nt, Artificial Sequence
  Description of Artificial Sequence: Synthetic oligonucleotide
gcuucucgucuggccgccc

SEQ ID NO: 757910 - RNA, 19 nt, Artificial Sequence
  Description of Artificial Sequence: Synthetic oligonucleotide
ggguaaaguccuggucgcu

SEQ ID NO: 757911 - RNA, 19 nt, Artificial Sequence
  Description of Artificial Sequence: Synthetic oligonucleotide
gcgcuucuucacaggcuca

SEQ ID NO: 757912 - RNA, 19 nt, Artificial Sequence
  Description of Artificial Sequence: Synthetic oligonucleotide
gcguucgcucugccuucac

SEQ ID NO: 757913 - RNA, 19 nt, Artificial Sequence
  Description of Artificial Sequence: Synthetic oligonucleotide
ccggcgaaucuucuucagu

SEQ ID NO: 757914 - RNA, 19 nt, Artificial Sequence
  Description of Artificial Sequence: Synthetic oligonucleotide
ccgagcucguuuagagacu

SEQ ID NO: 757915 - RNA, 19 nt, Artificial Sequence
  Description of Artificial Sequence: Synthetic oligonucleotide
cgucguccugugcucuauc

SEQ ID NO: 757916 - RNA, 19 nt, Artificial Sequence
  Description of Artificial Sequence: Synthetic oligonucleotide
gcucacuggcggaggcgca

SEQ ID NO: 757917 - RNA, 19 nt, Artificial Sequence
  Description of Artificial Sequence: Synthetic oligonucleotide
gccagccguacccucucau

SEQ ID NO: 757918 - RNA, 19 nt, Artificial Sequence
  Description of Artificial Sequence: Synthetic oligonucleotide
cgccuccgcucuucaucgc

SEQ ID NO: 757919 - RNA, 19 nt, Artificial Sequence
  Description of Artificial Sequence: Synthetic oligonucleotide
caugacccuccgggucucu

SEQ ID NO: 757920 - RNA, 19 nt, Artificial Sequence
  Description of Artificial Sequence: Synthetic oligonucleotide
cucuuccgacggggacaca

SEQ ID NO: 757921 - RNA, 19 nt, Artificial Sequence
  Description of Artificial Sequence: Synthetic oligonucleotide
caggccuggcggggucgga

SEQ ID NO: 757922 - RNA, 19 nt, Artificial Sequence
  Description of Artificial Sequence: Synthetic oligonucleotide
ggugcccgggccacuguuu

SEQ ID NO: 757923 - RNA, 19 nt, Artificial Sequence
  Description of Artificial Sequence: Synthetic oligonucleotide
cccgugggccauccuccaa

SEQ ID NO: 757924 - RNA, 19 nt, Artificial Sequence
  Description of Artificial Sequence: Synthetic oligonucleotide
cacgcucugcccgcuccuu

SEQ ID NO: 757925 - RNA, 19 nt, Artificial Sequence
  Description of Artificial Sequence: Synthetic oligonucleotide
gcccgucguccugugcucu

SEQ ID NO: 757926 - RNA, 19 nt, Artificial Sequence
  Description of Artificial Sequence: Synthetic oligonucleotide
cgcguucgcucugccuuca

SEQ ID NO: 757927 - RNA, 19 nt, Artificial Sequence
  Description of Artificial Sequence: Synthetic oligonucleotide
cccgcuccuugcggcgcuc

SEQ ID NO: 757928 - RNA, 19 nt, Artificial Sequence
  Description of Artificial Sequence: Synthetic oligonucleotide
ccccgccguggugcccggg

SEQ ID NO: 757929 - RNA, 19 nt, Artificial Sequence
  Description of Artificial Sequence: Synthetic oligonucleotide
cgacaucaacccgauccuu

SEQ ID NO: 757930 - RNA, 19 nt, Artificial Sequence
  Description of Artificial Sequence: Synthetic oligonucleotide
cgucgccuccuugccucca

SEQ ID NO: 757931 - RNA, 19 nt, Artificial Sequence
  Description of Artificial Sequence: Synthetic oligonucleotide
ccgucguccugugcucuau

SEQ ID NO: 757932 - RNA, 19 nt, Artificial Sequence
  Description of Artificial Sequence: Synthetic oligonucleotide
ccguggugcccgggccacu

SEQ ID NO: 757933 - RNA, 19 nt, Artificial Sequence
  Description of Artificial Sequence: Synthetic oligonucleotide
aguaguauagcccaugagc

SEQ ID NO: 757934 - RNA, 19 nt, Artificial Sequence
  Description of Artificial Sequence: Synthetic oligonucleotide
aauaaaauagccgacauga

SEQ ID NO: 757935 - RNA, 19 nt, Artificial Sequence
  Description of Artificial Sequence: Synthetic oligonucleotide
aaggaauuugcauucauuc

SEQ ID NO: 757936 - RNA, 19 nt, Artificial Sequence
  Description of Artificial Sequence: Synthetic oligonucleotide
aauaacgccugauauaguc

SEQ ID NO: 757937 - RNA, 19 nt, Artificial Sequence
  Description of Artificial Sequence: Synthetic oligonucleotide
uaaaguguuacuaucaaac

SEQ ID NO: 757938 - RNA, 19 nt, Artificial Sequence
  Description of Artificial Sequence: Synthetic oligonucleotide
uuuuauaaguuagaggugg

SEQ ID NO: 757939 - RNA, 19 nt, Artificial Sequence
  Description of Artificial Sequence: Synthetic oligonucleotide
acuauauuuacauuaagca

SEQ ID NO: 757940 - RNA, 19 nt, Artificial Sequence
  Description of Artificial Sequence: Synthetic oligonucleotide
ugacaaacaaccaaaucgg

SEQ ID NO: 757941 - RNA, 19 nt, Artificial Sequence
  Description of Artificial Sequence: Synthetic oligonucleotide
uguuauuagaaauaauaug

SEQ ID NO: 757942 - RNA, 19 nt, Artificial Sequence
  Description of Artificial Sequence: Synthetic oligonucleotide
aaguugaccauaaagagag

SEQ ID NO: 757943 - RNA, 19 nt, Artificial Sequence
  Description of Artificial Sequence: Synthetic oligonucleotide
aaauucacgccacagaagu

SEQ ID NO: 757944 - RNA, 19 nt, Artificial Sequence
  Description of Artificial Sequence: Synthetic oligonucleotide
acuccuauuaaacauuugg

SEQ ID NO: 757945 - RNA, 19 nt, Artificial Sequence
  Description of Artificial Sequence: Synthetic oligonucleotide
aguucuaugaucuugucca

SEQ ID NO: 757946 - RNA, 19 nt, Artificial Sequence
  Description of Artificial Sequence: Synthetic oligonucleotide
uacaaauuagcacuugucc

SEQ ID NO: 757947 - RNA, 19 nt, Artificial Sequence
  Description of Artificial Sequence: Synthetic oligonucleotide
auaucuguuaacuuuaacu

SEQ ID NO: 757948 - RNA, 19 nt, Artificial Sequence
  Description of Artificial Sequence: Synthetic oligonucleotide
aaaaggcucagagucauac

SEQ ID NO: 757949 - RNA, 19 nt, Artificial Sequence
  Description of Artificial Sequence: Synthetic oligonucleotide
uuuaggguaauuuacuccu

SEQ ID NO: 757950 - RNA, 19 nt, Artificial Sequence
  Description of Artificial Sequence: Synthetic oligonucleotide
uaaaauagccgacaugaca

SEQ ID NO: 757951 - RNA, 19 nt, Artificial Sequence
  Description of Artificial Sequence: Synthetic oligonucleotide
aauuuacuccuauuaaaca

SEQ ID NO: 757952 - RNA, 19 nt, Artificial Sequence
  Description of Artificial Sequence: Synthetic oligonucleotide
acagaaguugaccauaaag

SEQ ID NO: 757953 - RNA, 19 nt, Artificial Sequence
  Description of Artificial Sequence: Synthetic oligonucleotide
ugauauagucuccauuggg

SEQ ID NO: 757954 - RNA, 19 nt, Artificial Sequence
  Description of Artificial Sequence: Synthetic oligonucleotide
aggacaggcaaauaacgcc

SEQ ID NO: 757955 - RNA, 19 nt, Artificial Sequence
  Description of Artificial Sequence: Synthetic oligonucleotide
agaucuguuaguuugaaau

SEQ ID NO: 757956 - RNA, 19 nt, Artificial Sequence
  Description of Artificial Sequence: Synthetic oligonucleotide
gaugagucuauacuaacug

SEQ ID NO: 757957 - RNA, 19 nt, Artificial Sequence
  Description of Artificial Sequence: Synthetic oligonucleotide
aaauaaaauagccgacaug

SEQ ID NO: 757958 - RNA, 19 nt, Artificial Sequence
  Description of Artificial Sequence: Synthetic oligonucleotide
uuuaccauugguuuagggu

SEQ ID NO: 757959 - RNA, 19 nt, Artificial Sequence
  Description of Artificial Sequence: Synthetic oligonucleotide
ugcaaugacucucaaaacu

SEQ ID NO: 757960 - RNA, 19 nt, Artificial Sequence
  Description of Artificial Sequence: Synthetic oligonucleotide
gaugcaagaagaccuagcc

SEQ ID NO: 757961 - RNA, 19 nt, Artificial Sequence
  Description of Artificial Sequence: Synthetic oligonucleotide
ucaaaguucgcuacccagg

SEQ ID NO: 757962 - RNA, 19 nt, Artificial Sequence
  Description of Artificial Sequence: Synthetic oligonucleotide
ucaguuacugcucugccgc

SEQ ID NO: 757963 - RNA, 19 nt, Artificial Sequence
  Description of Artificial Sequence: Synthetic oligonucleotide
caaauaacgccugauauag

SEQ ID NO: 757964 - RNA, 19 nt, Artificial Sequence
  Description of Artificial Sequence: Synthetic oligonucleotide
gacuauauuuacauuaagc

SEQ ID NO: 757965 - RNA, 19 nt, Artificial Sequence
  Description of Artificial Sequence: Synthetic oligonucleotide
aaaauaccacugcuacagc

SEQ ID NO: 757966 - RNA, 19 nt, Artificial Sequence
  Description of Artificial Sequence: Synthetic oligonucleotide
uuuaucaaagcguggguug

SEQ ID NO: 757967 - RNA, 19 nt, Artificial Sequence
  Description of Artificial Sequence: Synthetic oligonucleotide
aaaauagccgacaugacaa

SEQ ID NO: 757968 - RNA, 19 nt, Artificial Sequence
  Description of Artificial Sequence: Synthetic oligonucleotide
cauuuuaucaaagcguggg

SEQ ID NO: 757969 - RNA, 19 nt, Artificial Sequence
  Description of Artificial Sequence: Synthetic oligonucleotide
cauaaagagagaguggagg

SEQ ID NO: 757970 - RNA, 19 nt, Artificial Sequence
  Description of Artificial Sequence: Synthetic oligonucleotide
ucuggauaccuucuggugc

SEQ ID NO: 757971 - RNA, 19 nt, Artificial Sequence
  Description of Artificial Sequence: Synthetic oligonucleotide
uaucuguuaacuuuaacuu

SEQ ID NO: 757972 - RNA, 19 nt, Artificial Sequence
  Description of Artificial Sequence: Synthetic oligonucleotide
uucuaaaguguuacuauca

SEQ ID NO: 757973 - RNA, 19 nt, Artificial Sequence
  Description of Artificial Sequence: Synthetic oligonucleotide
uuaugcuccaaucagcguc

SEQ ID NO: 757974 - RNA, 19 nt, Artificial Sequence
  Description of Artificial Sequence: Synthetic oligonucleotide
aaauaccacugcuacagcu

SEQ ID NO: 757975 - RNA, 19 nt, Artificial Sequence
  Description of Artificial Sequence: Synthetic oligonucleotide
ugaaaugcgcacaaugacu

SEQ ID NO: 757976 - RNA, 19 nt, Artificial Sequence
  Description of Artificial Sequence: Synthetic oligonucleotide
uccauuuugcugacgagag

SEQ ID NO: 757977 - RNA, 19 nt, Artificial Sequence
  Description of Artificial Sequence: Synthetic oligonucleotide
cuacaggacagccacaucc

SEQ ID NO: 757978 - RNA, 19 nt, Artificial Sequence
  Description of Artificial Sequence: Synthetic oligonucleotide
uuugccaaguucuuuauau

SEQ ID NO: 757979 - RNA, 19 nt, Artificial Sequence
  Description of Artificial Sequence: Synthetic oligonucleotide
acaaauuagcacuuguccu

SEQ ID NO: 757980 - RNA, 19 nt, Artificial Sequence
  Description of Artificial Sequence: Synthetic oligonucleotide
ugguuaaacaaugauguca

SEQ ID NO: 757981 - RNA, 19 nt, Artificial Sequence
  Description of Artificial Sequence: Synthetic oligonucleotide
uauucaaacggcuugccuc

SEQ ID NO: 757982 - RNA, 19 nt, Artificial Sequence
  Description of Artificial Sequence: Synthetic oligonucleotide
auuuacuccuauuaaacau

SEQ ID NO: 757983 - RNA, 19 nt, Artificial Sequence
  Description of Artificial Sequence: Synthetic oligonucleotide
ucguagauauauuuugcag

SEQ ID NO: 757984 - RNA, 19 nt, Artificial Sequence
  Description of Artificial Sequence: Synthetic oligonucleotide
ugaaauaaaauagccgaca

SEQ ID NO: 757985 - RNA, 19 nt, Artificial Sequence
  Description of Artificial Sequence: Synthetic oligonucleotide
agucuauacuaacugugac

SEQ ID NO: 757986 - RNA, 19 nt, Artificial Sequence
  Description of Artificial Sequence: Synthetic oligonucleotide
uuaccauugguuuagggua

SEQ ID NO: 757987 - RNA, 19 nt, Artificial Sequence
  Description of Artificial Sequence: Synthetic oligonucleotide
aacuuuaacuuuuaccaua

SEQ ID NO: 757988 - RNA, 19 nt, Artificial Sequence
  Description of Artificial Sequence: Synthetic oligonucleotide
uggugcauuccaaggaucg

SEQ ID NO: 757989 - RNA, 19 nt, Artificial Sequence
  Description of Artificial Sequence: Synthetic oligonucleotide
uuucaauauucaaacggcu

SEQ ID NO: 757990 - RNA, 19 nt, Artificial Sequence
  Description of Artificial Sequence: Synthetic oligonucleotide
uauacugaugagucuauac

SEQ ID NO: 757991 - RNA, 19 nt, Artificial Sequence
  Description of Artificial Sequence: Synthetic oligonucleotide
cauucgaggucuuucaaag

SEQ ID NO: 757992 - RNA, 19 nt, Artificial Sequence
  Description of Artificial Sequence: Synthetic oligonucleotide
auuuaugcuccaaucagcg

SEQ ID NO: 757993 - RNA, 19 nt, Artificial Sequence
  Description of Artificial Sequence: Synthetic oligonucleotide
uugaaauaaaauagccgac

SEQ ID NO: 757994 - RNA, 19 nt, Artificial Sequence
  Description of Artificial Sequence: Synthetic oligonucleotide
aaauauacugaugagucua

SEQ ID NO: 757995 - RNA, 19 nt, Artificial Sequence
  Description of Artificial Sequence: Synthetic oligonucleotide
acugugacuauauuuacau

SEQ ID NO: 757996 - RNA, 19 nt, Artificial Sequence
  Description of Artificial Sequence: Synthetic oligonucleotide
ucuauacuaacugugacua

SEQ ID NO: 757997 - RNA, 19 nt, Artificial Sequence
  Description of Artificial Sequence: Synthetic oligonucleotide
aaaguucgcuacccaggcc

SEQ ID NO: 757998 - RNA, 19 nt, Artificial Sequence
  Description of Artificial Sequence: Synthetic oligonucleotide
uaagcaaaccuuuugccaa

SEQ ID NO: 757999 - RNA, 19 nt, Artificial Sequence
  Description of Artificial Sequence: Synthetic oligonucleotide
uauaucagaauaucuguua

SEQ ID NO: 758000 - RNA, 19 nt, Artificial Sequence
  Description of Artificial Sequence: Synthetic oligonucleotide
guaguauagcccaugagcc

SEQ ID NO: 758001 - RNA, 19 nt, Artificial Sequence
  Description of Artificial Sequence: Synthetic oligonucleotide
agauauauuuugcagggaa

SEQ ID NO: 758002 - RNA, 19 nt, Artificial Sequence
  Description of Artificial Sequence: Synthetic oligonucleotide
aauagccgacaugacaaac

SEQ ID NO: 758003 - RNA, 19 nt, Artificial Sequence
  Description of Artificial Sequence: Synthetic oligonucleotide
augcaagaagaccuagccc

SEQ ID NO: 758004 - RNA, 19 nt, Artificial Sequence
  Description of Artificial Sequence: Synthetic oligonucleotide
cuuaggacaggcaaauaac

SEQ ID NO: 758005 - RNA, 19 nt, Artificial Sequence
  Description of Artificial Sequence: Synthetic oligonucleotide
uccaugagcauaauguaaa

SEQ ID NO: 758006 - RNA, 19 nt, Artificial Sequence
  Description of Artificial Sequence: Synthetic oligonucleotide
auaauguaaaauaccacug

SEQ ID NO: 758007 - RNA, 19 nt, Artificial Sequence
  Description of Artificial Sequence: Synthetic oligonucleotide
auacugaugagucuauacu

SEQ ID NO: 758008 - RNA, 19 nt, Artificial Sequence
  Description of Artificial Sequence: Synthetic oligonucleotide
uuugggaucaacacuccgu

SEQ ID NO: 758009 - RNA, 19 nt, Artificial Sequence
  Description of Artificial Sequence: Synthetic oligonucleotide
acuaacugugacuauauuu

SEQ ID NO: 758010 - RNA, 19 nt, Artificial Sequence
  Description of Artificial Sequence: Synthetic oligonucleotide
ucauacucaauggaaagcu

SEQ ID NO: 758011 - RNA, 19 nt, Artificial Sequence
  Description of Artificial Sequence: Synthetic oligonucleotide
cucaauggaaagcuuagug

SEQ ID NO: 758012 - RNA, 19 nt, Artificial Sequence
  Description of Artificial Sequence: Synthetic oligonucleotide
uuccuaucacaucugaagu

SEQ ID NO: 758013 - RNA, 19 nt, Artificial Sequence
  Description of Artificial Sequence: Synthetic oligonucleotide
ugaugagucuauacuaacu

SEQ ID NO: 758014 - RNA, 19 nt, Artificial Sequence
  Description of Artificial Sequence: Synthetic oligonucleotide
ugacuauauuuacauuaag

SEQ ID NO: 758015 - RNA, 19 nt, Artificial Sequence
  Description of Artificial Sequence: Synthetic oligonucleotide
cacgugucaggaaacaugc

SEQ ID NO: 758016 - RNA, 19 nt, Artificial Sequence
  Description of Artificial Sequence: Synthetic oligonucleotide
uauuuugcagggaagccuc

SEQ ID NO: 758017 - RNA, 19 nt, Artificial Sequence
  Description of Artificial Sequence: Synthetic oligonucleotide
caacuuccagcauuuaugc

SEQ ID NO: 758018 - RNA, 19 nt, Artificial Sequence
  Description of Artificial Sequence: Synthetic oligonucleotide
acauuaagcaaaccuuuug

SEQ ID NO: 758019 - RNA, 19 nt, Artificial Sequence
  Description of Artificial Sequence: Synthetic oligonucleotide
caguguaugugaaaugcgc

SEQ ID NO: 758020 - RNA, 19 nt, Artificial Sequence
  Description of Artificial Sequence: Synthetic oligonucleotide
uugggaucaacacuccgug

SEQ ID NO: 758021 - RNA, 19 nt, Artificial Sequence
  Description of Artificial Sequence: Synthetic oligonucleotide
ucuuucaaaguucgcuacc

SEQ ID NO: 758022 - RNA, 19 nt, Artificial Sequence
  Description of Artificial Sequence: Synthetic oligonucleotide
agacaagccaucuguauca

SEQ ID NO: 758023 - RNA, 19 nt, Artificial Sequence
  Description of Artificial Sequence: Synthetic oligonucleotide
uuauaucagaauaucuguu

SEQ ID NO: 758024 - RNA, 19 nt, Artificial Sequence
  Description of Artificial Sequence: Synthetic oligonucleotide
uuaaaugaagaguccugac

SEQ ID NO: 758025 - RNA, 19 nt, Artificial Sequence
  Description of Artificial Sequence: Synthetic oligonucleotide
gaguucuaugaucuugucc

SEQ ID NO: 758026 - RNA, 19 nt, Artificial Sequence
  Description of Artificial Sequence: Synthetic oligonucleotide
guugaccauaaagagagag

SEQ ID NO: 758027 - RNA, 19 nt, Artificial Sequence
  Description of Artificial Sequence: Synthetic oligonucleotide
acugcuacagcuugggaga

SEQ ID NO: 758028 - RNA, 19 nt, Artificial Sequence
  Description of Artificial Sequence: Synthetic oligonucleotide
ugacucucaaaacuugagu

SEQ ID NO: 758029 - RNA, 19 nt, Artificial Sequence
  Description of Artificial Sequence: Synthetic oligonucleotide
uguguccuaaaauuuuaac

SEQ ID NO: 758030 - RNA, 19 nt, Artificial Sequence
  Description of Artificial Sequence: Synthetic oligonucleotide
uugaccauaaagagagagu

SEQ ID NO: 758031 - RNA, 19 nt, Artificial Sequence
  Description of Artificial Sequence: Synthetic oligonucleotide
aaaauucacgccacagaag

SEQ ID NO: 758032 - RNA, 19 nt, Artificial Sequence
  Description of Artificial Sequence: Synthetic oligonucleotide
ugguuuaggguaauuuacu

SEQ ID NO: 758033 - RNA, 19 nt, Artificial Sequence
  Description of Artificial Sequence: Synthetic oligonucleotide
auuagcacuuguccuaugu

SEQ ID NO: 758034 - RNA, 19 nt, Artificial Sequence
  Description of Artificial Sequence: Synthetic oligonucleotide
accauaaagagagagugga

SEQ ID NO: 758035 - RNA, 19 nt, Artificial Sequence
  Description of Artificial Sequence: Synthetic oligonucleotide
cuuagugauguuccauucc

SEQ ID NO: 758036 - RNA, 19 nt, Artificial Sequence
  Description of Artificial Sequence: Synthetic oligonucleotide
ugucaggaaacaugcaacu

SEQ ID NO: 758037 - RNA, 19 nt, Artificial Sequence
  Description of Artificial Sequence: Synthetic oligonucleotide
gaucguagauauauuuugc

SEQ ID NO: 758038 - RNA, 19 nt, Artificial Sequence
  Description of Artificial Sequence: Synthetic oligonucleotide
ggaucguagauauauuuug

SEQ ID NO: 758039 - RNA, 19 nt, Artificial Sequence
  Description of Artificial Sequence: Synthetic oligonucleotide
auacaaauuagcacuuguc

SEQ ID NO: 758040 - RNA, 19 nt, Artificial Sequence
  Description of Artificial Sequence: Synthetic oligonucleotide
uaugcuccaaucagcguca

SEQ ID NO: 758041 - RNA, 19 nt, Artificial Sequence
  Description of Artificial Sequence: Synthetic oligonucleotide
uauacuaacugugacuaua

SEQ ID NO: 758042 - RNA, 19 nt, Artificial Sequence
  Description of Artificial Sequence: Synthetic oligonucleotide
aaguuagagguggcugucc

SEQ ID NO: 758043 - RNA, 19 nt, Artificial Sequence
  Description of Artificial Sequence: Synthetic oligonucleotide
aaacguguaagugcuucag

SEQ ID NO: 758044 - RNA, 19 nt, Artificial Sequence
  Description of Artificial Sequence: Synthetic oligonucleotide
guuuccaugucaguuacug

SEQ ID NO: 758045 - RNA, 19 nt, Artificial Sequence
  Description of Artificial Sequence: Synthetic oligonucleotide
acaaacaaccaaaucggag

SEQ ID NO: 758046 - RNA, 19 nt, Artificial Sequence
  Description of Artificial Sequence: Synthetic oligonucleotide
uccaccauugaguucuaug

SEQ ID NO: 758047 - RNA, 19 nt, Artificial Sequence
  Description of Artificial Sequence: Synthetic oligonucleotide
agcguggguuguuuguugc

SEQ ID NO: 758048 - RNA, 19 nt, Artificial Sequence
  Description of Artificial Sequence: Synthetic oligonucleotide
auucaaacggcuugccuca

SEQ ID NO: 758049 - RNA, 19 nt, Artificial Sequence
  Description of Artificial Sequence: Synthetic oligonucleotide
ucuguuaguuugaaauaaa

SEQ ID NO: 758050 - RNA, 19 nt, Artificial Sequence
  Description of Artificial Sequence: Synthetic oligonucleotide
augaagaguccugacuggc

SEQ ID NO: 758051 - RNA, 19 nt, Artificial Sequence
  Description of Artificial Sequence: Synthetic oligonucleotide
ggaacuacaggacagccac

SEQ ID NO: 758052 - RNA, 19 nt, Artificial Sequence
  Description of Artificial Sequence: Synthetic oligonucleotide
cuuucaaaguucgcuaccc

SEQ ID NO: 758053 - RNA, 19 nt, Artificial Sequence
  Description of Artificial Sequence: Synthetic oligonucleotide
caaaguucgcuacccaggc

SEQ ID NO: 758054 - RNA, 19 nt, Artificial Sequence
  Description of Artificial Sequence: Synthetic oligonucleotide
cuugaaaagccugggaaac

SEQ ID NO: 758055 - RNA, 19 nt, Artificial Sequence
  Description of Artificial Sequence: Synthetic oligonucleotide
auguuauuagaaauaauau

SEQ ID NO: 758056 - RNA, 19 nt, Artificial Sequence
  Description of Artificial Sequence: Synthetic oligonucleotide
ucuggcuaaauggugaauc

SEQ ID NO: 758057 - RNA, 19 nt, Artificial Sequence
  Description of Artificial Sequence: Synthetic oligonucleotide
auucauucgaggucuuuca

SEQ ID NO: 758058 - RNA, 19 nt, Artificial Sequence
  Description of Artificial Sequence: Synthetic oligonucleotide
aaaucggagauaagggcug

SEQ ID NO: 758059 - RNA, 19 nt, Artificial Sequence
  Description of Artificial Sequence: Synthetic oligonucleotide
ugguuuaccauugguuuag

SEQ ID NO: 758060 - RNA, 19 nt, Artificial Sequence
  Description of Artificial Sequence: Synthetic oligonucleotide
uguuacuaucaaacacugc

SEQ ID NO: 758061 - RNA, 19 nt, Artificial Sequence
  Description of Artificial Sequence: Synthetic oligonucleotide
acaaccaaaucggagauaa

SEQ ID NO: 758062 - RNA, 19 nt, Artificial Sequence
  Description of Artificial Sequence: Synthetic oligonucleotide
agagucugaaaucuuuuau

SEQ ID NO: 758063 - RNA, 19 nt, Artificial Sequence
  Description of Artificial Sequence: Synthetic oligonucleotide
ucagacagaggggucaugc

SEQ ID NO: 758064 - RNA, 19 nt, Artificial Sequence
  Description of Artificial Sequence: Synthetic oligonucleotide
auuaggauuagaagggacu

SEQ ID NO: 758065 - RNA, 19 nt, Artificial Sequence
  Description of Artificial Sequence: Synthetic oligonucleotide
ugaagaguccugacuggcc

SEQ ID NO: 758066 - RNA, 19 nt, Artificial Sequence
  Description of Artificial Sequence: Synthetic oligonucleotide
cgaaguugugucaugaugg

SEQ ID NO: 758067 - RNA, 19 nt, Artificial Sequence
  Description of Artificial Sequence: Synthetic oligonucleotide
caaaccuuuugccaaguuc

SEQ ID NO: 758068 - RNA, 19 nt, Artificial Sequence
  Description of Artificial Sequence: Synthetic oligonucleotide
augagucuauacuaacugu

SEQ ID NO: 758069 - RNA, 19 nt, Artificial Sequence
  Description of Artificial Sequence: Synthetic oligonucleotide
gucaguuacugcucugccg

SEQ ID NO: 758070 - RNA, 19 nt, Artificial Sequence
  Description of Artificial Sequence: Synthetic oligonucleotide
ugggaucugaacacagaug

SEQ ID NO: 758071 - RNA, 19 nt, Artificial Sequence
  Description of Artificial Sequence: Synthetic oligonucleotide
ugcccauggagcuucuucc

SEQ ID NO: 758072 - RNA, 19 nt, Artificial Sequence
  Description of Artificial Sequence: Synthetic oligonucleotide
auucacgccacagaaguug

SEQ ID NO: 758073 - RNA, 19 nt, Artificial Sequence
  Description of Artificial Sequence: Synthetic oligonucleotide
uccaaaugucuuuccaaac

SEQ ID NO: 758074 - RNA, 19 nt, Artificial Sequence
  Description of Artificial Sequence: Synthetic oligonucleotide
ugucaguuacugcucugcc

SEQ ID NO: 758075 - RNA, 19 nt, Artificial Sequence
  Description of Artificial Sequence: Synthetic oligonucleotide
uaguauagcccaugagccc

SEQ ID NO: 758076 - RNA, 19 nt, Artificial Sequence
  Description of Artificial Sequence: Synthetic oligonucleotide
auauuuugcagggaagccu

SEQ ID NO: 758077 - RNA, 19 nt, Artificial Sequence
  Description of Artificial Sequence: Synthetic oligonucleotide
aacguguaagugcuucagu

SEQ ID NO: 758078 - RNA, 19 nt, Artificial Sequence
  Description of Artificial Sequence: Synthetic oligonucleotide
auaaaauagccgacaugac

SEQ ID NO: 758079 - RNA, 19 nt, Artificial Sequence
  Description of Artificial Sequence: Synthetic oligonucleotide
uuugcugacgagagucuga

SEQ ID NO: 758080 - RNA, 19 nt, Artificial Sequence
  Description of Artificial Sequence: Synthetic oligonucleotide
uuuuaucaaagcguggguu

SEQ ID NO: 758081 - RNA, 19 nt, Artificial Sequence
  Description of Artificial Sequence: Synthetic oligonucleotide
agucuuuuaagaaagucua

SEQ ID NO: 758082 - RNA, 19 nt, Artificial Sequence
  Description of Artificial Sequence: Synthetic oligonucleotide
ugggcuugcaagcaaggaa

SEQ ID NO: 758083 - RNA, 19 nt, Artificial Sequence
  Description of Artificial Sequence: Synthetic oligonucleotide
aaaggcucagagucauacu

SEQ ID NO: 758084 - RNA, 19 nt, Artificial Sequence
  Description of Artificial Sequence: Synthetic oligonucleotide
caaugacucucaaaacuug

SEQ ID NO: 758085 - RNA, 19 nt, Artificial Sequence
  Description of Artificial Sequence: Synthetic oligonucleotide
ugacgagagucugaaaucu

SEQ ID NO: 758086 - RNA, 19 nt, Artificial Sequence
  Description of Artificial Sequence: Synthetic oligonucleotide
uaagggcugaguccaguug

SEQ ID NO: 758087 - RNA, 19 nt, Artificial Sequence
  Description of Artificial Sequence: Synthetic oligonucleotide
auauucaaacggcuugccu

SEQ ID NO: 758088 - RNA, 19 nt, Artificial Sequence
  Description of Artificial Sequence: Synthetic oligonucleotide
ggagauaagggcugagucc

SEQ ID NO: 758089 - RNA, 19 nt, Artificial Sequence
  Description of Artificial Sequence: Synthetic oligonucleotide
uccaacuuccagcauuuau

SEQ ID NO: 758090 - RNA, 19 nt, Artificial Sequence
  Description of Artificial Sequence: Synthetic oligonucleotide
uccagguguuuucuaaagu

SEQ ID NO: 758091 - RNA, 19 nt, Artificial Sequence
  Description of Artificial Sequence: Synthetic oligonucleotide
uucccauuuuccugcaaug

SEQ ID NO: 758092 - RNA, 19 nt, Artificial Sequence
  Description of Artificial Sequence: Synthetic oligonucleotide
augggaucugaacacagau

SEQ ID NO: 758093 - RNA, 19 nt, Artificial Sequence
  Description of Artificial Sequence: Synthetic oligonucleotide
gaaauaaaauagccgacau

SEQ ID NO: 758094 - RNA, 19 nt, Artificial Sequence
  Description of Artificial Sequence: Synthetic oligonucleotide
aguauagcccaugagcccu

SEQ ID NO: 758095 - RNA, 19 nt, Artificial Sequence
  Description of Artificial Sequence: Synthetic oligonucleotide
ucauucgaggucuuucaaa

SEQ ID NO: 758096 - RNA, 19 nt, Artificial Sequence
  Description of Artificial Sequence: Synthetic oligonucleotide
aacgccugauauagucucc

SEQ ID NO: 758097 - RNA, 19 nt, Artificial Sequence
  Description of Artificial Sequence: Synthetic oligonucleotide
cuuugggaucaacacuccg

SEQ ID NO: 758098 - RNA, 19 nt, Artificial Sequence
  Description of Artificial Sequence: Synthetic oligonucleotide
uucuuaucccaugggaucu

SEQ ID NO: 758099 - RNA, 19 nt, Artificial Sequence
  Description of Artificial Sequence: Synthetic oligonucleotide
aacuacaggacagccacau

SEQ ID NO: 758100 - RNA, 19 nt, Artificial Sequence
  Description of Artificial Sequence: Synthetic oligonucleotide
ucuccaugagcauaaugua

SEQ ID NO: 758101 - RNA, 19 nt, Artificial Sequence
  Description of Artificial Sequence: Synthetic oligonucleotide
uagccgacaugacaaacaa

SEQ ID NO: 758102 - RNA, 19 nt, Artificial Sequence
  Description of Artificial Sequence: Synthetic oligonucleotide
aaauuagcacuuguccuau

SEQ ID NO: 758103 - RNA, 19 nt, Artificial Sequence
  Description of Artificial Sequence: Synthetic oligonucleotide
aacugugacuauauuuaca

SEQ ID NO: 758104 - RNA, 19 nt, Artificial Sequence
  Description of Artificial Sequence: Synthetic oligonucleotide
aaauagccgacaugacaaa

SEQ ID NO: 758105 - RNA, 19 nt, Artificial Sequence
  Description of Artificial Sequence: Synthetic oligonucleotide
acauccaacuuccagcauu

SEQ ID NO: 758106 - RNA, 19 nt, Artificial Sequence
  Description of Artificial Sequence: Synthetic oligonucleotide
acaguguaugugaaaugcg

SEQ ID NO: 758107 - RNA, 19 nt, Artificial Sequence
  Description of Artificial Sequence: Synthetic oligonucleotide
gaucuguuaguuugaaaua

SEQ ID NO: 758108 - RNA, 19 nt, Artificial Sequence
  Description of Artificial Sequence: Synthetic oligonucleotide
aggucuuucaaaguucgcu

SEQ ID NO: 758109 - RNA, 19 nt, Artificial Sequence
  Description of Artificial Sequence: Synthetic oligonucleotide
ugugaaugaaggacauuuu

SEQ ID NO: 758110 - RNA, 19 nt, Artificial Sequence
  Description of Artificial Sequence: Synthetic oligonucleotide
ugauagcugcaucucguuc

SEQ ID NO: 758111 - RNA, 19 nt, Artificial Sequence
  Description of Artificial Sequence: Synthetic oligonucleotide
aagcguggguuguuuguug

SEQ ID NO: 758112 - RNA, 19 nt, Artificial Sequence
  Description of Artificial Sequence: Synthetic oligonucleotide
guaaaauaccacugcuaca

SEQ ID NO: 758113 - RNA, 19 nt, Artificial Sequence
  Description of Artificial Sequence: Synthetic oligonucleotide
acguguaagugcuucaguu

SEQ ID NO: 758114 - RNA, 19 nt, Artificial Sequence
  Description of Artificial Sequence: Synthetic oligonucleotide
caaagccuagcucuuccag

SEQ ID NO: 758115 - RNA, 19 nt, Artificial Sequence
  Description of Artificial Sequence: Synthetic oligonucleotide
uuaucaaagcguggguugu

SEQ ID NO: 758116 - RNA, 19 nt, Artificial Sequence
  Description of Artificial Sequence: Synthetic oligonucleotide
uuuaugcuccaaucagcgu

SEQ ID NO: 758117 - RNA, 19 nt, Artificial Sequence
  Description of Artificial Sequence: Synthetic oligonucleotide
aauuagcacuuguccuaug

SEQ ID NO: 758118 - RNA, 19 nt, Artificial Sequence
  Description of Artificial Sequence: Synthetic oligonucleotide
agccacauccaacuuccag

SEQ ID NO: 758119 - RNA, 19 nt, Artificial Sequence
  Description of Artificial Sequence: Synthetic oligonucleotide
aauauacugaugagucuau

SEQ ID NO: 758120 - RNA, 19 nt, Artificial Sequence
  Description of Artificial Sequence: Synthetic oligonucleotide
cugacgagagucugaaauc

SEQ ID NO: 758121 - RNA, 19 nt, Artificial Sequence
  Description of Artificial Sequence: Synthetic oligonucleotide
uucacgccacagaaguuga

SEQ ID NO: 758122 - RNA, 19 nt, Artificial Sequence
  Description of Artificial Sequence: Synthetic oligonucleotide
ggcaucaauccauggaaag

SEQ ID NO: 758123 - RNA, 19 nt, Artificial Sequence
  Description of Artificial Sequence: Synthetic oligonucleotide
gaauugguuaaacaaugau

SEQ ID NO: 758124 - RNA, 19 nt, Artificial Sequence
  Description of Artificial Sequence: Synthetic oligonucleotide
agcaugguuuaccauuggu

SEQ ID NO: 758125 - RNA, 19 nt, Artificial Sequence
  Description of Artificial Sequence: Synthetic oligonucleotide
caaauuagcacuuguccua

SEQ ID NO: 758126 - RNA, 19 nt, Artificial Sequence
  Description of Artificial Sequence: Synthetic oligonucleotide
ugcacuuuccuaucacauc

SEQ ID NO: 758127 - RNA, 19 nt, Artificial Sequence
  Description of Artificial Sequence: Synthetic oligonucleotide
uucauucgaggucuuucaa

SEQ ID NO: 758128 - RNA, 19 nt, Artificial Sequence
  Description of Artificial Sequence: Synthetic oligonucleotide
aguguaugugaaaugcgca

SEQ ID NO: 758129 - RNA, 19 nt, Artificial Sequence
  Description of Artificial Sequence: Synthetic oligonucleotide
ccagguguuuucuaaagug

SEQ ID NO: 758130 - RNA, 19 nt, Artificial Sequence
  Description of Artificial Sequence: Synthetic oligonucleotide
uaccauugguuuaggguaa

SEQ ID NO: 758131 - RNA, 19 nt, Artificial Sequence
  Description of Artificial Sequence: Synthetic oligonucleotide
cuguuaguuugaaauaaaa

SEQ ID NO: 758132 - RNA, 19 nt, Artificial Sequence
  Description of Artificial Sequence: Synthetic oligonucleotide
gucuccaugagcauaaugu

SEQ ID NO: 758133 - RNA, 19 nt, Artificial Sequence
  Description of Artificial Sequence: Synthetic oligonucleotide
caaaucggagauaagggcu

SEQ ID NO: 758134 - RNA, 19 nt, Artificial Sequence
  Description of Artificial Sequence: Synthetic oligonucleotide
augacucucaaaacuugag

SEQ ID NO: 758135 - RNA, 19 nt, Artificial Sequence
  Description of Artificial Sequence: Synthetic oligonucleotide
cuguaucaaagccuagcuc

SEQ ID NO: 758136 - RNA, 19 nt, Artificial Sequence
  Description of Artificial Sequence: Synthetic oligonucleotide
agcuuagugauguuccauu

SEQ ID NO: 758137 - RNA, 19 nt, Artificial Sequence
  Description of Artificial Sequence: Synthetic oligonucleotide
cauucauucgaggucuuuc

SEQ ID NO: 758138 - RNA, 19 nt, Artificial Sequence
  Description of Artificial Sequence: Synthetic oligonucleotide
cugacuggggcgcuucccg

SEQ ID NO: 758139 - RNA, 19 nt, Artificial Sequence
  Description of Artificial Sequence: Synthetic oligonucleotide
gguuuaggguaauuuacuc

SEQ ID NO: 758140 - RNA, 19 nt, Artificial Sequence
  Description of Artificial Sequence: Synthetic oligonucleotide
cacaucugaagugaugguc

SEQ ID NO: 758141 - RNA, 19 nt, Artificial Sequence
  Description of Artificial Sequence: Synthetic oligonucleotide
uuguagagaucuguuaguu

SEQ ID NO: 758142 - RNA, 19 nt, Artificial Sequence
  Description of Artificial Sequence: Synthetic oligonucleotide
agccucuuaggacaggcaa

SEQ ID NO: 758143 - RNA, 19 nt, Artificial Sequence
  Description of Artificial Sequence: Synthetic oligonucleotide
ugccgcuggacuuugggau

SEQ ID NO: 758144 - RNA, 19 nt, Artificial Sequence
  Description of Artificial Sequence: Synthetic oligonucleotide
aaguugugucaugauggca

SEQ ID NO: 758145 - RNA, 19 nt, Artificial Sequence
  Description of Artificial Sequence: Synthetic oligonucleotide
ucccauuuuccugcaauga

SEQ ID NO: 758146 - RNA, 19 nt, Artificial Sequence
  Description of Artificial Sequence: Synthetic oligonucleotide
gucaccacgugucaggaaa

SEQ ID NO: 758147 - RNA, 19 nt, Artificial Sequence
  Description of Artificial Sequence: Synthetic oligonucleotide
auguuccauuccuugaaaa

SEQ ID NO: 758148 - RNA, 19 nt, Artificial Sequence
  Description of Artificial Sequence: Synthetic oligonucleotide
uccugacuggcccaccaac

SEQ ID NO: 758149 - RNA, 19 nt, Artificial Sequence
  Description of Artificial Sequence: Synthetic oligonucleotide
ggucguacaguguauguga

SEQ ID NO: 758150 - RNA, 19 nt, Artificial Sequence
  Description of Artificial Sequence: Synthetic oligonucleotide
uccaguaguauagcccaug

SEQ ID NO: 758151 - RNA, 19 nt, Artificial Sequence
  Description of Artificial Sequence: Synthetic oligonucleotide
gguuaaacaaugaugucaa

SEQ ID NO: 758152 - RNA, 19 nt, Artificial Sequence
  Description of Artificial Sequence: Synthetic oligonucleotide
ucauuugauuccagguguu

SEQ ID NO: 758153 - RNA, 19 nt, Artificial Sequence
  Description of Artificial Sequence: Synthetic oligonucleotide
guggguuguuuguugcugc

SEQ ID NO: 758154 - RNA, 19 nt, Artificial Sequence
  Description of Artificial Sequence: Synthetic oligonucleotide
uggcuaaauggugaaucca

SEQ ID NO: 758155 - RNA, 19 nt, Artificial Sequence
  Description of Artificial Sequence: Synthetic oligonucleotide
auagccgacaugacaaaca

SEQ ID NO: 758156 - RNA, 19 nt, Artificial Sequence
  Description of Artificial Sequence: Synthetic oligonucleotide
auucgaggucuuucaaagu

SEQ ID NO: 758157 - RNA, 19 nt, Artificial Sequence
  Description of Artificial Sequence: Synthetic oligonucleotide
acuacaggacagccacauc

SEQ ID NO: 758158 - RNA, 19 nt, Artificial Sequence
  Description of Artificial Sequence: Synthetic oligonucleotide
ugucuggcuaaauggugaa

SEQ ID NO: 758159 - RNA, 19 nt, Artificial Sequence
  Description of Artificial Sequence: Synthetic oligonucleotide
cucauuugauuccaggugu

SEQ ID NO: 758160 - RNA, 19 nt, Artificial Sequence
  Description of Artificial Sequence: Synthetic oligonucleotide
aggauuagaagggacugau

SEQ ID NO: 758161 - RNA, 19 nt, Artificial Sequence
  Description of Artificial Sequence: Synthetic oligonucleotide
ucaaacggcuugccucagc

SEQ ID NO: 758162 - RNA, 19 nt, Artificial Sequence
  Description of Artificial Sequence: Synthetic oligonucleotide
cacgccacagaaguugacc

SEQ ID NO: 758163 - RNA, 19 nt, Artificial Sequence
  Description of Artificial Sequence: Synthetic oligonucleotide
gucuauacuaacugugacu

SEQ ID NO: 758164 - RNA, 19 nt, Artificial Sequence
  Description of Artificial Sequence: Synthetic oligonucleotide
caguaguauagcccaugag

SEQ ID NO: 758165 - RNA, 19 nt, Artificial Sequence
  Description of Artificial Sequence: Synthetic oligonucleotide
aacuuuuaccauacaugaa

SEQ ID NO: 758166 - RNA, 19 nt, Artificial Sequence
  Description of Artificial Sequence: Synthetic oligonucleotide
ucguguuuccaugucaguu

SEQ ID NO: 758167 - RNA, 19 nt, Artificial Sequence
  Description of Artificial Sequence: Synthetic oligonucleotide
uuaggguaauuuacuccua

SEQ ID NO: 758168 - RNA, 19 nt, Artificial Sequence
  Description of Artificial Sequence: Synthetic oligonucleotide
ugggaucuguccuccuacc

SEQ ID NO: 758169 - RNA, 19 nt, Artificial Sequence
  Description of Artificial Sequence: Synthetic oligonucleotide
cugaacacagaugggguuc

SEQ ID NO: 758170 - RNA, 19 nt, Artificial Sequence
  Description of Artificial Sequence: Synthetic oligonucleotide
cgcacaaugacuuccacuc

SEQ ID NO: 758171 - RNA, 19 nt, Artificial Sequence
  Description of Artificial Sequence: Synthetic oligonucleotide
auaacgccugauauagucu

SEQ ID NO: 758172 - RNA, 19 nt, Artificial Sequence
  Description of Artificial Sequence: Synthetic oligonucleotide
aggucguacaguguaugug

SEQ ID NO: 758173 - RNA, 19 nt, Artificial Sequence
  Description of Artificial Sequence: Synthetic oligonucleotide
ucaccacgugucaggaaac

SEQ ID NO: 758174 - RNA, 19 nt, Artificial Sequence
  Description of Artificial Sequence: Synthetic oligonucleotide
aggcaaauaacgccugaua

SEQ ID NO: 758175 - RNA, 19 nt, Artificial Sequence
  Description of Artificial Sequence: Synthetic oligonucleotide
gauucuuaucccaugggau

SEQ ID NO: 758176 - RNA, 19 nt, Artificial Sequence
  Description of Artificial Sequence: Synthetic oligonucleotide
gggaucaacacuccguguc

SEQ ID NO: 758177 - RNA, 19 nt, Artificial Sequence
  Description of Artificial Sequence: Synthetic oligonucleotide
agaagaccuagcccucugu

SEQ ID NO: 758178 - RNA, 19 nt, Artificial Sequence
  Description of Artificial Sequence: Synthetic oligonucleotide
aagcuuagugauguuccau

SEQ ID NO: 758179 - RNA, 19 nt, Artificial Sequence
  Description of Artificial Sequence: Synthetic oligonucleotide
uaaguuagagguggcuguc

SEQ ID NO: 758180 - RNA, 19 nt, Artificial Sequence
  Description of Artificial Sequence: Synthetic oligonucleotide
cagcuugggagauuuucuc

SEQ ID NO: 758181 - RNA, 19 nt, Artificial Sequence
  Description of Artificial Sequence: Synthetic oligonucleotide
auacuaacugugacuauau

SEQ ID NO: 758182 - RNA, 19 nt, Artificial Sequence
  Description of Artificial Sequence: Synthetic oligonucleotide
gaagacaagccaucuguau

SEQ ID NO: 758183 - RNA, 19 nt, Artificial Sequence
  Description of Artificial Sequence: Synthetic oligonucleotide
aaauaacgccugauauagu

SEQ ID NO: 758184 - RNA, 19 nt, Artificial Sequence
  Description of Artificial Sequence: Synthetic oligonucleotide
ugccucagcaugguuuacc

SEQ ID NO: 758185 - RNA, 19 nt, Artificial Sequence
  Description of Artificial Sequence: Synthetic oligonucleotide
gaaaugcgcacaaugacuu

SEQ ID NO: 758186 - RNA, 19 nt, Artificial Sequence
  Description of Artificial Sequence: Synthetic oligonucleotide
aaucggagauaagggcuga

SEQ ID NO: 758187 - RNA, 19 nt, Artificial Sequence
  Description of Artificial Sequence: Synthetic oligonucleotide
acaggcaaauaacgccuga

SEQ ID NO: 758188 - RNA, 19 nt, Artificial Sequence
  Description of Artificial Sequence: Synthetic oligonucleotide
uucguguuuccaugucagu

SEQ ID NO: 758189 - RNA, 19 nt, Artificial Sequence
  Description of Artificial Sequence: Synthetic oligonucleotide
uggguuguuuguugcugcu

SEQ ID NO: 758190 - RNA, 19 nt, Artificial Sequence
  Description of Artificial Sequence: Synthetic oligonucleotide
ucggagauaagggcugagu

SEQ ID NO: 758191 - RNA, 19 nt, Artificial Sequence
  Description of Artificial Sequence: Synthetic oligonucleotide
uacuaacugugacuauauu

SEQ ID NO: 758192 - RNA, 19 nt, Artificial Sequence
  Description of Artificial Sequence: Synthetic oligonucleotide
gcaucaauccauggaaagc

SEQ ID NO: 758193 - RNA, 19 nt, Artificial Sequence
  Description of Artificial Sequence: Synthetic oligonucleotide
guaccgggaaagcugcuga

SEQ ID NO: 758194 - RNA, 19 nt, Artificial Sequence
  Description of Artificial Sequence: Synthetic oligonucleotide
ucguacaguguaugugaaa

SEQ ID NO: 758195 - RNA, 19 nt, Artificial Sequence
  Description of Artificial Sequence: Synthetic oligonucleotide
caaacguguaagugcuuca

SEQ ID NO: 758196 - RNA, 19 nt, Artificial Sequence
  Description of Artificial Sequence: Synthetic oligonucleotide
ggaaagcuuagugauguuc

SEQ ID NO: 758197 - RNA, 19 nt, Artificial Sequence
  Description of Artificial Sequence: Synthetic oligonucleotide
aaacggcuugccucagcau

SEQ ID NO: 758198 - RNA, 19 nt, Artificial Sequence
  Description of Artificial Sequence: Synthetic oligonucleotide
cacuuuccuaucacaucug

SEQ ID NO: 758199 - RNA, 19 nt, Artificial Sequence
  Description of Artificial Sequence: Synthetic oligonucleotide
aguccugacuggcccacca

SEQ ID NO: 758200 - RNA, 19 nt, Artificial Sequence
  Description of Artificial Sequence: Synthetic oligonucleotide
gagcccuccauucccauua

SEQ ID NO: 758201 - RNA, 19 nt, Artificial Sequence
  Description of Artificial Sequence: Synthetic oligonucleotide
ggacugaugcaagaagacc

SEQ ID NO: 758202 - RNA, 19 nt, Artificial Sequence
  Description of Artificial Sequence: Synthetic oligonucleotide
uugcugacgagagucugaa

SEQ ID NO: 758203 - RNA, 19 nt, Artificial Sequence
  Description of Artificial Sequence: Synthetic oligonucleotide
aggguaauuuacuccuauu

SEQ ID NO: 758204 - RNA, 19 nt, Artificial Sequence
  Description of Artificial Sequence: Synthetic oligonucleotide
cuggugcauuccaaggauc

SEQ ID NO: 758205 - RNA, 19 nt, Artificial Sequence
  Description of Artificial Sequence: Synthetic oligonucleotide
aagccuguccggccuucug

SEQ ID NO: 758206 - RNA, 19 nt, Artificial Sequence
  Description of Artificial Sequence: Synthetic oligonucleotide
aggaucguagauauauuuu

SEQ ID NO: 758207 - RNA, 19 nt, Artificial Sequence
  Description of Artificial Sequence: Synthetic oligonucleotide
ucuuaucccaugggaucug

SEQ ID NO: 758208 - RNA, 19 nt, Artificial Sequence
  Description of Artificial Sequence: Synthetic oligonucleotide
ggcaaauaacgccugauau

SEQ ID NO: 758209 - RNA, 19 nt, Artificial Sequence
  Description of Artificial Sequence: Synthetic oligonucleotide
caaccaaaucggagauaag

SEQ ID NO: 758210 - RNA, 19 nt, Artificial Sequence
  Description of Artificial Sequence: Synthetic oligonucleotide
ugacuggggcgcuucccgc

SEQ ID NO: 758211 - RNA, 19 nt, Artificial Sequence
  Description of Artificial Sequence: Synthetic oligonucleotide
gcaaauaacgccugauaua

SEQ ID NO: 758212 - RNA, 19 nt, Artificial Sequence
  Description of Artificial Sequence: Synthetic oligonucleotide
gcuuagugauguuccauuc

SEQ ID NO: 758213 - RNA, 19 nt, Artificial Sequence
  Description of Artificial Sequence: Synthetic oligonucleotide
ggucuuucaaaguucgcua

SEQ ID NO: 758214 - RNA, 19 nt, Artificial Sequence
  Description of Artificial Sequence: Synthetic oligonucleotide
ugcgcacaaugacuuccac

SEQ ID NO: 758215 - RNA, 19 nt, Artificial Sequence
  Description of Artificial Sequence: Synthetic oligonucleotide
ccauaaagagagaguggag

SEQ ID NO: 758216 - RNA, 19 nt, Artificial Sequence
  Description of Artificial Sequence: Synthetic oligonucleotide
cuugccucagcaugguuua

SEQ ID NO: 758217 - RNA, 19 nt, Artificial Sequence
  Description of Artificial Sequence: Synthetic oligonucleotide
cagguguuuucuaaagugu

SEQ ID NO: 758218 - RNA, 19 nt, Artificial Sequence
  Description of Artificial Sequence: Synthetic oligonucleotide
aggaacuacaggacagcca

SEQ ID NO: 758219 - RNA, 19 nt, Artificial Sequence
  Description of Artificial Sequence: Synthetic oligonucleotide
aacaaccaaaucggagaua

SEQ ID NO: 758220 - RNA, 19 nt, Artificial Sequence
  Description of Artificial Sequence: Synthetic oligonucleotide
ggaucugaacacagauggg

SEQ ID NO: 758221 - RNA, 19 nt, Artificial Sequence
  Description of Artificial Sequence: Synthetic oligonucleotide
cagcaugguuuaccauugg

SEQ ID NO: 758222 - RNA, 19 nt, Artificial Sequence
  Description of Artificial Sequence: Synthetic oligonucleotide
aauucacgccacagaaguu

SEQ ID NO: 758223 - RNA, 19 nt, Artificial Sequence
  Description of Artificial Sequence: Synthetic oligonucleotide
ucacgccacagaaguugac

SEQ ID NO: 758224 - RNA, 19 nt, Artificial Sequence
  Description of Artificial Sequence: Synthetic oligonucleotide
gcugcaucucguuccuucc

SEQ ID NO: 758225 - RNA, 19 nt, Artificial Sequence
  Description of Artificial Sequence: Synthetic oligonucleotide
uauagcccaugagcccucc

SEQ ID NO: 758226 - RNA, 19 nt, Artificial Sequence
  Description of Artificial Sequence: Synthetic oligonucleotide
uucaaacggcuugccucag

SEQ ID NO: 758227 - RNA, 19 nt, Artificial Sequence
  Description of Artificial Sequence: Synthetic oligonucleotide
aggcucagagucauacuca

SEQ ID NO: 758228 - RNA, 19 nt, Artificial Sequence
  Description of Artificial Sequence: Synthetic oligonucleotide
acgagagucugaaaucuuu

SEQ ID NO: 758229 - RNA, 19 nt, Artificial Sequence
  Description of Artificial Sequence: Synthetic oligonucleotide
agaagacaagccaucugua

SEQ ID NO: 758230 - RNA, 19 nt, Artificial Sequence
  Description of Artificial Sequence: Synthetic oligonucleotide
aagccucuuaggacaggca

SEQ ID NO: 758231 - RNA, 19 nt, Artificial Sequence
  Description of Artificial Sequence: Synthetic oligonucleotide
acugaugcaagaagaccua

SEQ ID NO: 758232 - RNA, 19 nt, Artificial Sequence
  Description of Artificial Sequence: Synthetic oligonucleotide
acgccugauauagucucca

SEQ ID NO: 758233 - RNA, 19 nt, Artificial Sequence
  Description of Artificial Sequence: Synthetic oligonucleotide
cagcgucaagcaguaauuc

SEQ ID NO: 758234 - RNA, 19 nt, Artificial Sequence
  Description of Artificial Sequence: Synthetic oligonucleotide
aaagccuguccggccuucu

SEQ ID NO: 758235 - RNA, 19 nt, Artificial Sequence
  Description of Artificial Sequence: Synthetic oligonucleotide
cuuccuugcuuuagcaggu

SEQ ID NO: 758236 - RNA, 19 nt, Artificial Sequence
  Description of Artificial Sequence: Synthetic oligonucleotide
aaccuuuugccaaguucuu

SEQ ID NO: 758237 - RNA, 19 nt, Artificial Sequence
  Description of Artificial Sequence: Synthetic oligonucleotide
ucugugaaugaaggacauu

SEQ ID NO: 758238 - RNA, 19 nt, Artificial Sequence
  Description of Artificial Sequence: Synthetic oligonucleotide
uucgcuacccaggccuuuc

SEQ ID NO: 758239 - RNA, 19 nt, Artificial Sequence
  Description of Artificial Sequence: Synthetic oligonucleotide
aucggagauaagggcugag

SEQ ID NO: 758240 - RNA, 19 nt, Artificial Sequence
  Description of Artificial Sequence: Synthetic oligonucleotide
uaccgggaaagcugcugau

SEQ ID NO: 758241 - RNA, 19 nt, Artificial Sequence
  Description of Artificial Sequence: Synthetic oligonucleotide
accuagcccucuguaccgg

SEQ ID NO: 758242 - RNA, 19 nt, Artificial Sequence
  Description of Artificial Sequence: Synthetic oligonucleotide
ccaaacguguaagugcuuc

SEQ ID NO: 758243 - RNA, 19 nt, Artificial Sequence
  Description of Artificial Sequence: Synthetic oligonucleotide
caaagcguggguuguuugu

SEQ ID NO: 758244 - RNA, 19 nt, Artificial Sequence
  Description of Artificial Sequence: Synthetic oligonucleotide
ccuugaaaagccugggaaa

SEQ ID NO: 758245 - RNA, 19 nt, Artificial Sequence
  Description of Artificial Sequence: Synthetic oligonucleotide
ucgcuacccaggccuuucu

SEQ ID NO: 758246 - RNA, 19 nt, Artificial Sequence
  Description of Artificial Sequence: Synthetic oligonucleotide
caaggaauuugcauucauu

SEQ ID NO: 758247 - RNA, 19 nt, Artificial Sequence
  Description of Artificial Sequence: Synthetic oligonucleotide
ggauuagaagggacugaug

SEQ ID NO: 758248 - RNA, 19 nt, Artificial Sequence
  Description of Artificial Sequence: Synthetic oligonucleotide
cagacagaggggucaugca

SEQ ID NO: 758249 - RNA, 19 nt, Artificial Sequence
  Description of Artificial Sequence: Synthetic oligonucleotide
ugcauucauucgaggucuu

SEQ ID NO: 758250 - RNA, 19 nt, Artificial Sequence
  Description of Artificial Sequence: Synthetic oligonucleotide
gauaagggcugaguccagu

SEQ ID NO: 758251 - RNA, 19 nt, Artificial Sequence
  Description of Artificial Sequence: Synthetic oligonucleotide
gugcauuccaaggaucgua

SEQ ID NO: 758252 - RNA, 19 nt, Artificial Sequence
  Description of Artificial Sequence: Synthetic oligonucleotide
cggagauaagggcugaguc

SEQ ID NO: 758253 - RNA, 19 nt, Artificial Sequence
  Description of Artificial Sequence: Synthetic oligonucleotide
ugagcccuccauucccauu

SEQ ID NO: 758254 - RNA, 19 nt, Artificial Sequence
  Description of Artificial Sequence: Synthetic oligonucleotide
gacgaaguugugucaugau

SEQ ID NO: 758255 - RNA, 19 nt, Artificial Sequence
  Description of Artificial Sequence: Synthetic oligonucleotide
cauugguuuaggguaauuu

SEQ ID NO: 758256 - RNA, 19 nt, Artificial Sequence
  Description of Artificial Sequence: Synthetic oligonucleotide
gccucagcaugguuuacca

SEQ ID NO: 758257 - RNA, 19 nt, Artificial Sequence
  Description of Artificial Sequence: Synthetic oligonucleotide
accuuuugccaaguucuuu

SEQ ID NO: 758258 - RNA, 19 nt, Artificial Sequence
  Description of Artificial Sequence: Synthetic oligonucleotide
ggacaggcaaauaacgccu

SEQ ID NO: 758259 - RNA, 19 nt, Artificial Sequence
  Description of Artificial Sequence: Synthetic oligonucleotide
ucuuccugacuggggcgcu

SEQ ID NO: 758260 - RNA, 19 nt, Artificial Sequence
  Description of Artificial Sequence: Synthetic oligonucleotide
gaacuacaggacagccaca

SEQ ID NO: 758261 - RNA, 19 nt, Artificial Sequence
  Description of Artificial Sequence: Synthetic oligonucleotide
ugcugacgagagucugaaa

SEQ ID NO: 758262 - RNA, 19 nt, Artificial Sequence
  Description of Artificial Sequence: Synthetic oligonucleotide
gccuguccggccuucugcc

SEQ ID NO: 758263 - RNA, 19 nt, Artificial Sequence
  Description of Artificial Sequence: Synthetic oligonucleotide
acugcaugucuggcuaaau

SEQ ID NO: 758264 - RNA, 19 nt, Artificial Sequence
  Description of Artificial Sequence: Synthetic oligonucleotide
cauccaacuuccagcauuu

SEQ ID NO: 758265 - RNA, 19 nt, Artificial Sequence
  Description of Artificial Sequence: Synthetic oligonucleotide
gcccaugagcccuccauuc

SEQ ID NO: 758266 - RNA, 19 nt, Artificial Sequence
  Description of Artificial Sequence: Synthetic oligonucleotide
ccaaggaucguagauauau

SEQ ID NO: 758267 - RNA, 19 nt, Artificial Sequence
  Description of Artificial Sequence: Synthetic oligonucleotide
gaaagccuguccggccuuc

SEQ ID NO: 758268 - RNA, 19 nt, Artificial Sequence
  Description of Artificial Sequence: Synthetic oligonucleotide
aguugaccauaaagagaga

SEQ ID NO: 758269 - RNA, 19 nt, Artificial Sequence
  Description of Artificial Sequence: Synthetic oligonucleotide
gucguacaguguaugugaa

SEQ ID NO: 758270 - RNA, 19 nt, Artificial Sequence
  Description of Artificial Sequence: Synthetic oligonucleotide
ggggucaugcacuuuccua

SEQ ID NO: 758271 - RNA, 19 nt, Artificial Sequence
  Description of Artificial Sequence: Synthetic oligonucleotide
caucucguuccuucccaaa

SEQ ID NO: 758272 - RNA, 19 nt, Artificial Sequence
  Description of Artificial Sequence: Synthetic oligonucleotide
ccaguaguauagcccauga

SEQ ID NO: 758273 - RNA, 19 nt, Artificial Sequence
  Description of Artificial Sequence: Synthetic oligonucleotide
ccauugggaucuguccucc

SEQ ID NO: 758274 - RNA, 19 nt, Artificial Sequence
  Description of Artificial Sequence: Synthetic oligonucleotide
ggguuguuuguugcugcug

SEQ ID NO: 758275 - RNA, 19 nt, Artificial Sequence
  Description of Artificial Sequence: Synthetic oligonucleotide
ccgacaugacaaacaacca

SEQ ID NO: 758276 - RNA, 19 nt, Artificial Sequence
  Description of Artificial Sequence: Synthetic oligonucleotide
ggccacacugcagaagaca

SEQ ID NO: 758277 - RNA, 19 nt, Artificial Sequence
  Description of Artificial Sequence: Synthetic oligonucleotide
accauugguuuaggguaau

SEQ ID NO: 758278 - RNA, 19 nt, Artificial Sequence
  Description of Artificial Sequence: Synthetic oligonucleotide
caggucguacaguguaugu

SEQ ID NO: 758279 - RNA, 19 nt, Artificial Sequence
  Description of Artificial Sequence: Synthetic oligonucleotide
ccgggaaagcugcugauaa

SEQ ID NO: 758280 - RNA, 19 nt, Artificial Sequence
  Description of Artificial Sequence: Synthetic oligonucleotide
gcauuccaaggaucguaga

SEQ ID NO: 758281 - RNA, 19 nt, Artificial Sequence
  Description of Artificial Sequence: Synthetic oligonucleotide
ggaagccucuuaggacagg

SEQ ID NO: 758282 - RNA, 19 nt, Artificial Sequence
  Description of Artificial Sequence: Synthetic oligonucleotide
guauagcccaugagcccuc

SEQ ID NO: 758283 - RNA, 19 nt, Artificial Sequence
  Description of Artificial Sequence: Synthetic oligonucleotide
gacuggggcgcuucccgcu

SEQ ID NO: 758284 - RNA, 19 nt, Artificial Sequence
  Description of Artificial Sequence: Synthetic oligonucleotide
caaggaucguagauauauu

SEQ ID NO: 758285 - RNA, 19 nt, Artificial Sequence
  Description of Artificial Sequence: Synthetic oligonucleotide
gccuacucauuugauucca

SEQ ID NO: 758286 - RNA, 19 nt, Artificial Sequence
  Description of Artificial Sequence: Synthetic oligonucleotide
caacugcaugucuggcuaa

SEQ ID NO: 758287 - RNA, 19 nt, Artificial Sequence
  Description of Artificial Sequence: Synthetic oligonucleotide
uccggccuucugcccauuu

SEQ ID NO: 758288 - RNA, 19 nt, Artificial Sequence
  Description of Artificial Sequence: Synthetic oligonucleotide
uagucuccauugggaucug

SEQ ID NO: 758289 - RNA, 19 nt, Artificial Sequence
  Description of Artificial Sequence: Synthetic oligonucleotide
cuccuucguguuuccaugu

SEQ ID NO: 758290 - RNA, 19 nt, Artificial Sequence
  Description of Artificial Sequence: Synthetic oligonucleotide
ccacagaaguugaccauaa

SEQ ID NO: 758291 - RNA, 19 nt, Artificial Sequence
  Description of Artificial Sequence: Synthetic oligonucleotide
gccgcuggacuuugggauc

SEQ ID NO: 758292 - RNA, 19 nt, Artificial Sequence
  Description of Artificial Sequence: Synthetic oligonucleotide
cauucccauuaggauuaga

SEQ ID NO: 758293 - RNA, 19 nt, Artificial Sequence
  Description of Artificial Sequence: Synthetic oligonucleotide
gcaugguuuaccauugguu

SEQ ID NO: 758294 - RNA, 19 nt, Artificial Sequence
  Description of Artificial Sequence: Synthetic oligonucleotide
uggcuaccuucuggauacc

SEQ ID NO: 758295 - RNA, 19 nt, Artificial Sequence
  Description of Artificial Sequence: Synthetic oligonucleotide
gggcaguagcaguggaaaa

SEQ ID NO: 758296 - RNA, 19 nt, Artificial Sequence
  Description of Artificial Sequence: Synthetic oligonucleotide
gguggcuguccaccauuga

SEQ ID NO: 758297 - RNA, 19 nt, Artificial Sequence
  Description of Artificial Sequence: Synthetic oligonucleotide
ggcuguccaccauugaguu

SEQ ID NO: 758298 - RNA, 19 nt, Artificial Sequence
  Description of Artificial Sequence: Synthetic oligonucleotide
uucugcccauuuggccaga

SEQ ID NO: 758299 - RNA, 19 nt, Artificial Sequence
  Description of Artificial Sequence: Synthetic oligonucleotide
gcuacagcuugggagauuu

SEQ ID NO: 758300 - RNA, 19 nt, Artificial Sequence
  Description of Artificial Sequence: Synthetic oligonucleotide
auccagcccuccugacgaa

SEQ ID NO: 758301 - RNA, 19 nt, Artificial Sequence
  Description of Artificial Sequence: Synthetic oligonucleotide
aguucgcuacccaggccuu

SEQ ID NO: 758302 - RNA, 19 nt, Artificial Sequence
  Description of Artificial Sequence: Synthetic oligonucleotide
gcgcacaaugacuuccacu

SEQ ID NO: 758303 - RNA, 19 nt, Artificial Sequence
  Description of Artificial Sequence: Synthetic oligonucleotide
gcgucaagcaguaauucuu

SEQ ID NO: 758304 - RNA, 19 nt, Artificial Sequence
  Description of Artificial Sequence: Synthetic oligonucleotide
caggcaaauaacgccugau

SEQ ID NO: 758305 - RNA, 19 nt, Artificial Sequence
  Description of Artificial Sequence: Synthetic oligonucleotide
cauuugauuccagguguuu

SEQ ID NO: 758306 - RNA, 19 nt, Artificial Sequence
  Description of Artificial Sequence: Synthetic oligonucleotide
ccggccuucugcccauuug

SEQ ID NO: 758307 - RNA, 19 nt, Artificial Sequence
  Description of Artificial Sequence: Synthetic oligonucleotide
ccagcauuuaugcuccaau

SEQ ID NO: 758308 - RNA, 19 nt, Artificial Sequence
  Description of Artificial Sequence: Synthetic oligonucleotide
cucuuaggacaggcaaaua

SEQ ID NO: 758309 - RNA, 19 nt, Artificial Sequence
  Description of Artificial Sequence: Synthetic oligonucleotide
auccaacuuccagcauuua

SEQ ID NO: 758310 - RNA, 19 nt, Artificial Sequence
  Description of Artificial Sequence: Synthetic oligonucleotide
cauugggaucuguccuccu

SEQ ID NO: 758311 - RNA, 19 nt, Artificial Sequence
  Description of Artificial Sequence: Synthetic oligonucleotide
ggugcauuccaaggaucgu

SEQ ID NO: 758312 - RNA, 19 nt, Artificial Sequence
  Description of Artificial Sequence: Synthetic oligonucleotide
gcccauggagcuucuuccu

SEQ ID NO: 758313 - RNA, 19 nt, Artificial Sequence
  Description of Artificial Sequence: Synthetic oligonucleotide
cuccaguaguauagcccau

SEQ ID NO: 758314 - RNA, 19 nt, Artificial Sequence
  Description of Artificial Sequence: Synthetic oligonucleotide
uagcugcaucucguuccuu

SEQ ID NO: 758315 - RNA, 19 nt, Artificial Sequence
  Description of Artificial Sequence: Synthetic oligonucleotide
gucuggcuaaauggugaau

SEQ ID NO: 758316 - RNA, 19 nt, Artificial Sequence
  Description of Artificial Sequence: Synthetic oligonucleotide
gcccuccugacgaaguugu

SEQ ID NO: 758317 - RNA, 19 nt, Artificial Sequence
  Description of Artificial Sequence: Synthetic oligonucleotide
ccucuuaggacaggcaaau

SEQ ID NO: 758318 - RNA, 19 nt, Artificial Sequence
  Description of Artificial Sequence: Synthetic oligonucleotide
ccuccugacgaaguugugu

SEQ ID NO: 758319 - RNA, 19 nt, Artificial Sequence
  Description of Artificial Sequence: Synthetic oligonucleotide
ccauucccauuaggauuag

SEQ ID NO: 758320 - RNA, 19 nt, Artificial Sequence
  Description of Artificial Sequence: Synthetic oligonucleotide
gcuaccuucuggauaccuu

SEQ ID NO: 758321 - RNA, 19 nt, Artificial Sequence
  Description of Artificial Sequence: Synthetic oligonucleotide
ggcuaccuucuggauaccu

SEQ ID NO: 758322 - RNA, 19 nt, Artificial Sequence
  Description of Artificial Sequence: Synthetic oligonucleotide
gcguggguuguuuguugcu

SEQ ID NO: 758323 - RNA, 19 nt, Artificial Sequence
  Description of Artificial Sequence: Synthetic oligonucleotide
ccagcccuccugacgaagu

SEQ ID NO: 758324 - RNA, 19 nt, Artificial Sequence
  Description of Artificial Sequence: Synthetic oligonucleotide
cugcuacagcuugggagau

SEQ ID NO: 758325 - RNA, 19 nt, Artificial Sequence
  Description of Artificial Sequence: Synthetic oligonucleotide
guucgcuacccaggccuuu

SEQ ID NO: 758326 - RNA, 19 nt, Artificial Sequence
  Description of Artificial Sequence: Synthetic oligonucleotide
cagaggggucaugcacuuu

SEQ ID NO: 758327 - RNA, 19 nt, Artificial Sequence
  Description of Artificial Sequence: Synthetic oligonucleotide
ccauugguuuaggguaauu

SEQ ID NO: 758328 - RNA, 19 nt, Artificial Sequence
  Description of Artificial Sequence: Synthetic oligonucleotide
ccucaguggccaguuucuu

SEQ ID NO: 758329 - RNA, 19 nt, Artificial Sequence
  Description of Artificial Sequence: Synthetic oligonucleotide
cgcuacccaggccuuucuu

SEQ ID NO: 758330 - RNA, 19 nt, Artificial Sequence
  Description of Artificial Sequence: Synthetic oligonucleotide
guccggccuucugcccauu

SEQ ID NO: 758331 - RNA, 19 nt, Artificial Sequence
  Description of Artificial Sequence: Synthetic oligonucleotide
aacguuuucagccagcgug

SEQ ID NO: 758332 - RNA, 19 nt, Artificial Sequence
  Description of Artificial Sequence: Synthetic oligonucleotide
aacaucuagaaauuaauuu

SEQ ID NO: 758333 - RNA, 19 nt, Artificial Sequence
  Description of Artificial Sequence: Synthetic oligonucleotide
aguggauggacuugaaccc

SEQ ID NO: 758334 - RNA, 19 nt, Artificial Sequence
  Description of Artificial Sequence: Synthetic oligonucleotide
ugauaagcgagacacacca

SEQ ID NO: 758335 - RNA, 19 nt, Artificial Sequence
  Description of Artificial Sequence: Synthetic oligonucleotide
acagaugauugccucaggc

SEQ ID NO: 758336 - RNA, 19 nt, Artificial Sequence
  Description of Artificial Sequence: Synthetic oligonucleotide
accguggaaagauagagag

SEQ ID NO: 758337 - RNA, 19 nt, Artificial Sequence
  Description of Artificial Sequence: Synthetic oligonucleotide
cucaggaacguuuucagcc

SEQ ID NO: 758338 - RNA, 19 nt, Artificial Sequence
  Description of Artificial Sequence: Synthetic oligonucleotide
agaguauuugaacaucuag

SEQ ID NO: 758339 - RNA, 19 nt, Artificial Sequence
  Description of Artificial Sequence: Synthetic oligonucleotide
uauucuaccaccucaucca

SEQ ID NO: 758340 - RNA, 19 nt, Artificial Sequence
  Description of Artificial Sequence: Synthetic oligonucleotide
auucaagagauccagggcu

SEQ ID NO: 758341 - RNA, 19 nt, Artificial Sequence
  Description of Artificial Sequence: Synthetic oligonucleotide
gauuccucggccuuugggg

SEQ ID NO: 758342 - RNA, 19 nt, Artificial Sequence
  Description of Artificial Sequence: Synthetic oligonucleotide
agugauaagcgagacacac

SEQ ID NO: 758343 - RNA, 19 nt, Artificial Sequence
  Description of Artificial Sequence: Synthetic oligonucleotide
agaaagauccagcaaagga

SEQ ID NO: 758344 - RNA, 19 nt, Artificial Sequence
  Description of Artificial Sequence: Synthetic oligonucleotide
ugucuuacgguccacuuug

SEQ ID NO: 758345 - RNA, 19 nt, Artificial Sequence
  Description of Artificial Sequence: Synthetic oligonucleotide
uguuggauggacuugcgca

SEQ ID NO: 758346 - RNA, 19 nt, Artificial Sequence
  Description of Artificial Sequence: Synthetic oligonucleotide
uuacgguccacuuugcacc

SEQ ID NO: 758347 - RNA, 19 nt, Artificial Sequence
  Description of Artificial Sequence: Synthetic oligonucleotide
cuuacagucaaagugcuug

SEQ ID NO: 758348 - RNA, 19 nt, Artificial Sequence
  Description of Artificial Sequence: Synthetic oligonucleotide
agugcuugagccuucgaag

SEQ ID NO: 758349 - RNA, 19 nt, Artificial Sequence
  Description of Artificial Sequence: Synthetic oligonucleotide
cuuucaggacucaaauugg

SEQ ID NO: 758350 - RNA, 19 nt, Artificial Sequence
  Description of Artificial Sequence: Synthetic oligonucleotide
ucuuguaguccacugacuc

SEQ ID NO: 758351 - RNA, 19 nt, Artificial Sequence
  Description of Artificial Sequence: Synthetic oligonucleotide
ucaucagauggcuuucagg

SEQ ID NO: 758352 - RNA, 19 nt, Artificial Sequence
  Description of Artificial Sequence: Synthetic oligonucleotide
ugccugaugguacaacccg

SEQ ID NO: 758353 - RNA, 19 nt, Artificial Sequence
  Description of Artificial Sequence: Synthetic oligonucleotide
aaacgaucgugguucauga

SEQ ID NO: 758354 - RNA, 19 nt, Artificial Sequence
  Description of Artificial Sequence: Synthetic oligonucleotide
uuagucgagaguauuugaa

SEQ ID NO: 758355 - RNA, 19 nt, Artificial Sequence
  Description of Artificial Sequence: Synthetic oligonucleotide
aaauugguccucucauuca

SEQ ID NO: 758356 - RNA, 19 nt, Artificial Sequence
  Description of Artificial Sequence: Synthetic oligonucleotide
uuagaaaggcgagacucgg

SEQ ID NO: 758357 - RNA, 19 nt, Artificial Sequence
  Description of Artificial Sequence: Synthetic oligonucleotide
agaacggguauuuugguau

SEQ ID NO: 758358 - RNA, 19 nt, Artificial Sequence
  Description of Artificial Sequence: Synthetic oligonucleotide
caucagauggcuuucagga

SEQ ID NO: 758359 - RNA, 19 nt, Artificial Sequence
  Description of Artificial Sequence: Synthetic oligonucleotide
uucaccugaaucuuuuccu

SEQ ID NO: 758360 - RNA, 19 nt, Artificial Sequence
  Description of Artificial Sequence: Synthetic oligonucleotide
acuugaaccccguggacuc

SEQ ID NO: 758361 - RNA, 19 nt, Artificial Sequence
  Description of Artificial Sequence: Synthetic oligonucleotide
uugguauuuaagccagacc

SEQ ID NO: 758362 - RNA, 19 nt, Artificial Sequence
  Description of Artificial Sequence: Synthetic oligonucleotide
guagcuaagugucgggccg

SEQ ID NO: 758363 - RNA, 19 nt, Artificial Sequence
  Description of Artificial Sequence: Synthetic oligonucleotide
uuuagucgagaguauuuga

SEQ ID NO: 758364 - RNA, 19 nt, Artificial Sequence
  Description of Artificial Sequence: Synthetic oligonucleotide
cuucaaacgaucgugguuc

SEQ ID NO: 758365 - RNA, 19 nt, Artificial Sequence
  Description of Artificial Sequence: Synthetic oligonucleotide
ucaccguggaaagauagag

SEQ ID NO: 758366 - RNA, 19 nt, Artificial Sequence
  Description of Artificial Sequence: Synthetic oligonucleotide
uucuacugaagucucaguu

SEQ ID NO: 758367 - RNA, 19 nt, Artificial Sequence
  Description of Artificial Sequence: Synthetic oligonucleotide
cuuacgguccacuuugcac

SEQ ID NO: 758368 - RNA, 19 nt, Artificial Sequence
  Description of Artificial Sequence: Synthetic oligonucleotide
caaauugguccucucauuc

SEQ ID NO: 758369 - RNA, 19 nt, Artificial Sequence
  Description of Artificial Sequence: Synthetic oligonucleotide
guagucagugauaagcgag

SEQ ID NO: 758370 - RNA, 19 nt, Artificial Sequence
  Description of Artificial Sequence: Synthetic oligonucleotide
uuugguauuuaagccagac

SEQ ID NO: 758371 - RNA, 19 nt, Artificial Sequence
  Description of Artificial Sequence: Synthetic oligonucleotide
auuccuacuucaaacgauc

SEQ ID NO: 758372 - RNA, 19 nt, Artificial Sequence
  Description of Artificial Sequence: Synthetic oligonucleotide
cauucaagagauccagggc

SEQ ID NO: 758373 - RNA, 19 nt, Artificial Sequence
  Description of Artificial Sequence: Synthetic oligonucleotide
gauccaagaggccauaucu

SEQ ID NO: 758374 - RNA, 19 nt, Artificial Sequence
  Description of Artificial Sequence: Synthetic oligonucleotide
uucggaugcagacaacccu

SEQ ID NO: 758375 - RNA, 19 nt, Artificial Sequence
  Description of Artificial Sequence: Synthetic oligonucleotide
uuucccgguagcuaagugu

SEQ ID NO: 758376 - RNA, 19 nt, Artificial Sequence
  Description of Artificial Sequence: Synthetic oligonucleotide
cuuguaguccacugacucc

SEQ ID NO: 758377 - RNA, 19 nt, Artificial Sequence
  Description of Artificial Sequence: Synthetic oligonucleotide
uagucagugauaagcgaga

SEQ ID NO: 758378 - RNA, 19 nt, Artificial Sequence
  Description of Artificial Sequence: Synthetic oligonucleotide
ucauguugcccucaaugaa

SEQ ID NO: 758379 - RNA, 19 nt, Artificial Sequence
  Description of Artificial Sequence: Synthetic oligonucleotide
gaugguacaacccggucaa

SEQ ID NO: 758380 - RNA, 19 nt, Artificial Sequence
  Description of Artificial Sequence: Synthetic oligonucleotide
uagucgagaguauuugaac

SEQ ID NO: 758381 - RNA, 19 nt, Artificial Sequence
  Description of Artificial Sequence: Synthetic oligonucleotide
cagcauuccuacuucaaac

SEQ ID NO: 758382 - RNA, 19 nt, Artificial Sequence
  Description of Artificial Sequence: Synthetic oligonucleotide
uucccgguagcuaaguguc

SEQ ID NO: 758383 - RNA, 19 nt, Artificial Sequence
  Description of Artificial Sequence: Synthetic oligonucleotide
ucagcguccccuuugccca

SEQ ID NO: 758384 - RNA, 19 nt, Artificial Sequence
  Description of Artificial Sequence: Synthetic oligonucleotide
agaggccugucuuacgguc

SEQ ID NO: 758385 - RNA, 19 nt, Artificial Sequence
  Description of Artificial Sequence: Synthetic oligonucleotide
gacgaagcgaaugcggucc

SEQ ID NO: 758386 - RNA, 19 nt, Artificial Sequence
  Description of Artificial Sequence: Synthetic oligonucleotide
cuuucaccccagcacaggg

SEQ ID NO: 758387 - RNA, 19 nt, Artificial Sequence
  Description of Artificial Sequence: Synthetic oligonucleotide
ucgugguucaugauacaga

SEQ ID NO: 758388 - RNA, 19 nt, Artificial Sequence
  Description of Artificial Sequence: Synthetic oligonucleotide
cguggaaagauagagaggg

SEQ ID NO: 758389 - RNA, 19 nt, Artificial Sequence
  Description of Artificial Sequence: Synthetic oligonucleotide
gauagagagggagcacugg

SEQ ID NO: 758390 - RNA, 19 nt, Artificial Sequence
  Description of Artificial Sequence: Synthetic oligonucleotide
cuuuagucgagaguauuug

SEQ ID NO: 758391 - RNA, 19 nt, Artificial Sequence
  Description of Artificial Sequence: Synthetic oligonucleotide
caugauacagaaggauccg

SEQ ID NO: 758392 - RNA, 19 nt, Artificial Sequence
  Description of Artificial Sequence: Synthetic oligonucleotide
ugugggacauauucccacc

SEQ ID NO: 758393 - RNA, 19 nt, Artificial Sequence
  Description of Artificial Sequence: Synthetic oligonucleotide
uacaacccggucaaagccu

SEQ ID NO: 758394 - RNA, 19 nt, Artificial Sequence
  Description of Artificial Sequence: Synthetic oligonucleotide
cucagcguccccuuugccc

SEQ ID NO: 758395 - RNA, 19 nt, Artificial Sequence
  Description of Artificial Sequence: Synthetic oligonucleotide
ugugcgcugagcagccacg

SEQ ID NO: 758396 - RNA, 19 nt, Artificial Sequence
  Description of Artificial Sequence: Synthetic oligonucleotide
uucgaagagacacggugau

SEQ ID NO: 758397 - RNA, 19 nt, Artificial Sequence
  Description of Artificial Sequence: Synthetic oligonucleotide
uugugggacauauucccac

SEQ ID NO: 758398 - RNA, 19 nt, Artificial Sequence
  Description of Artificial Sequence: Synthetic oligonucleotide
ugcgcaguaccauagccuc

SEQ ID NO: 758399 - RNA, 19 nt, Artificial Sequence
  Description of Artificial Sequence: Synthetic oligonucleotide
ucccucguucucuacaaca

SEQ ID NO: 758400 - RNA, 19 nt, Artificial Sequence
  Description of Artificial Sequence: Synthetic oligonucleotide
cuucggaugcagacaaccc

SEQ ID NO: 758401 - RNA, 19 nt, Artificial Sequence
  Description of Artificial Sequence: Synthetic oligonucleotide
uuggaugugcgcugagcag

SEQ ID NO: 758402 - RNA, 19 nt, Artificial Sequence
  Description of Artificial Sequence: Synthetic oligonucleotide
caugucacguacuggccag

SEQ ID NO: 758403 - RNA, 19 nt, Artificial Sequence
  Description of Artificial Sequence: Synthetic oligonucleotide
ugccuugcagguauucuac

SEQ ID NO: 758404 - RNA, 19 nt, Artificial Sequence
  Description of Artificial Sequence: Synthetic oligonucleotide
acaugucacguacuggcca

SEQ ID NO: 758405 - RNA, 19 nt, Artificial Sequence
  Description of Artificial Sequence: Synthetic oligonucleotide
agaaaggcgagacucgguu

SEQ ID NO: 758406 - RNA, 19 nt, Artificial Sequence
  Description of Artificial Sequence: Synthetic oligonucleotide
aucgugguucaugauacag

SEQ ID NO: 758407 - RNA, 19 nt, Artificial Sequence
  Description of Artificial Sequence: Synthetic oligonucleotide
uccuacauggccgccacug

SEQ ID NO: 758408 - RNA, 19 nt, Artificial Sequence
  Description of Artificial Sequence: Synthetic oligonucleotide
gaugauugccucaggcagc

SEQ ID NO: 758409 - RNA, 19 nt, Artificial Sequence
  Description of Artificial Sequence: Synthetic oligonucleotide
agucgugacccagaacucg

SEQ ID NO: 758410 - RNA, 19 nt, Artificial Sequence
  Description of Artificial Sequence: Synthetic oligonucleotide
cuuggaugugcgcugagca

SEQ ID NO: 758411 - RNA, 19 nt, Artificial Sequence
  Description of Artificial Sequence: Synthetic oligonucleotide
caaacgaucgugguucaug

SEQ ID NO: 758412 - RNA, 19 nt, Artificial Sequence
  Description of Artificial Sequence: Synthetic oligonucleotide
aaccccguggacucuucug

SEQ ID NO: 758413 - RNA, 19 nt, Artificial Sequence
  Description of Artificial Sequence: Synthetic oligonucleotide
uugagaggccugucuuacg

SEQ ID NO: 758414 - RNA, 19 nt, Artificial Sequence
  Description of Artificial Sequence: Synthetic oligonucleotide
cugccugaugguacaaccc

SEQ ID NO: 758415 - RNA, 19 nt, Artificial Sequence
  Description of Artificial Sequence: Synthetic oligonucleotide
gaaugcgguccccacugcc

SEQ ID NO: 758416 - RNA, 19 nt, Artificial Sequence
  Description of Artificial Sequence: Synthetic oligonucleotide
cuucgaagagacacgguga

SEQ ID NO: 758417 - RNA, 19 nt, Artificial Sequence
  Description of Artificial Sequence: Synthetic oligonucleotide
acgaucgugguucaugaua

SEQ ID NO: 758418 - RNA, 19 nt, Artificial Sequence
  Description of Artificial Sequence: Synthetic oligonucleotide
agccuucgaagagacacgg

SEQ ID NO: 758419 - RNA, 19 nt, Artificial Sequence
  Description of Artificial Sequence: Synthetic oligonucleotide
acgaagcgaaugcgguccc

SEQ ID NO: 758420 - RNA, 19 nt, Artificial Sequence
  Description of Artificial Sequence: Synthetic oligonucleotide
uuucagccagcgugaaggc

SEQ ID NO: 758421 - RNA, 19 nt, Artificial Sequence
  Description of Artificial Sequence: Synthetic oligonucleotide
gguagcuaagugucgggcc

SEQ ID NO: 758422 - RNA, 19 nt, Artificial Sequence
  Description of Artificial Sequence: Synthetic oligonucleotide
ucgguuuuguggcgccggg

SEQ ID NO: 758423 - RNA, 19 nt, Artificial Sequence
  Description of Artificial Sequence: Synthetic oligonucleotide
agacucgguuuuguggcgc

SEQ ID NO: 758424 - RNA, 19 nt, Artificial Sequence
  Description of Artificial Sequence: Synthetic oligonucleotide
cacaggguggcugauauca

SEQ ID NO: 758425 - RNA, 19 nt, Artificial Sequence
  Description of Artificial Sequence: Synthetic oligonucleotide
uguggcgccggguagguuu

SEQ ID NO: 758426 - RNA, 19 nt, Artificial Sequence
  Description of Artificial Sequence: Synthetic oligonucleotide
guuuuguggcgccggguag

SEQ ID NO: 758427 - RNA, 19 nt, Artificial Sequence
  Description of Artificial Sequence: Synthetic oligonucleotide
ucguccucuagcagggagu

SEQ ID NO: 758428 - RNA, 19 nt, Artificial Sequence
  Description of Artificial Sequence: Synthetic oligonucleotide
cagaugauugccucaggca

SEQ ID NO: 758429 - RNA, 19 nt, Artificial Sequence
  Description of Artificial Sequence: Synthetic oligonucleotide
gaaggcuugcggcugugca

SEQ ID NO: 758430 - RNA, 19 nt, Artificial Sequence
  Description of Artificial Sequence: Synthetic oligonucleotide
ggguauuuugguauuuaag

SEQ ID NO: 758431 - RNA, 19 nt, Artificial Sequence
  Description of Artificial Sequence: Synthetic oligonucleotide
gugacccagaacucguccc

SEQ ID NO: 758432 - RNA, 19 nt, Artificial Sequence
  Description of Artificial Sequence: Synthetic oligonucleotide
gcgagacucgguuuugugg

SEQ ID NO: 758433 - RNA, 19 nt, Artificial Sequence
  Description of Artificial Sequence: Synthetic oligonucleotide
ucccaccuacucuuggaug

SEQ ID NO: 758434 - RNA, 19 nt, Artificial Sequence
  Description of Artificial Sequence: Synthetic oligonucleotide
ccuacuucaaacgaucgug

SEQ ID NO: 758435 - RNA, 19 nt, Artificial Sequence
  Description of Artificial Sequence: Synthetic oligonucleotide
ggaacguuuucagccagcg

SEQ ID NO: 758436 - RNA, 19 nt, Artificial Sequence
  Description of Artificial Sequence: Synthetic oligonucleotide
uagaaaggcgagacucggu

SEQ ID NO: 758437 - RNA, 19 nt, Artificial Sequence
  Description of Artificial Sequence: Synthetic oligonucleotide
uuccuaggacauccuguug

SEQ ID NO: 758438 - RNA, 19 nt, Artificial Sequence
  Description of Artificial Sequence: Synthetic oligonucleotide
ccuucgaagagacacggug

SEQ ID NO: 758439 - RNA, 19 nt, Artificial Sequence
  Description of Artificial Sequence: Synthetic oligonucleotide
ucgagaguauuugaacauc

SEQ ID NO: 758440 - RNA, 19 nt, Artificial Sequence
  Description of Artificial Sequence: Synthetic oligonucleotide
ugucucggcagaugccuug

SEQ ID NO: 758441 - RNA, 19 nt, Artificial Sequence
  Description of Artificial Sequence: Synthetic oligonucleotide
ucccgguagcuaagugucg

SEQ ID NO: 758442 - RNA, 19 nt, Artificial Sequence
  Description of Artificial Sequence: Synthetic oligonucleotide
gaagcuggggucacacagc

SEQ ID NO: 758443 - RNA, 19 nt, Artificial Sequence
  Description of Artificial Sequence: Synthetic oligonucleotide
agggcuacucgcagggagc

SEQ ID NO: 758444 - RNA, 19 nt, Artificial Sequence
  Description of Artificial Sequence: Synthetic oligonucleotide
agccgcacacgguagucag

SEQ ID NO: 758445 - RNA, 19 nt, Artificial Sequence
  Description of Artificial Sequence: Synthetic oligonucleotide
aggauagcccgcagguggc

SEQ ID NO: 758446 - RNA, 19 nt, Artificial Sequence
  Description of Artificial Sequence: Synthetic oligonucleotide
ugucacguacuggccagag

SEQ ID NO: 758447 - RNA, 19 nt, Artificial Sequence
  Description of Artificial Sequence: Synthetic oligonucleotide
cuccggacgcucuugacca

SEQ ID NO: 758448 - RNA, 19 nt, Artificial Sequence
  Description of Artificial Sequence: Synthetic oligonucleotide
uguugggugucgucugccu

SEQ ID NO: 758449 - RNA, 19 nt, Artificial Sequence
  Description of Artificial Sequence: Synthetic oligonucleotide
ucguucucuacaacacuuu

SEQ ID NO: 758450 - RNA, 19 nt, Artificial Sequence
  Description of Artificial Sequence: Synthetic oligonucleotide
cugccucucucagaggccg

SEQ ID NO: 758451 - RNA, 19 nt, Artificial Sequence
  Description of Artificial Sequence: Synthetic oligonucleotide
aggaacguuuucagccagc

SEQ ID NO: 758452 - RNA, 19 nt, Artificial Sequence
  Description of Artificial Sequence: Synthetic oligonucleotide
cuacucgcagggagcgucg

SEQ ID NO: 758453 - RNA, 19 nt, Artificial Sequence
  Description of Artificial Sequence: Synthetic oligonucleotide
uaagugucgggccgcggau

SEQ ID NO: 758454 - RNA, 19 nt, Artificial Sequence
  Description of Artificial Sequence: Synthetic oligonucleotide
ucuucaccguggaaagaua

SEQ ID NO: 758455 - RNA, 19 nt, Artificial Sequence
  Description of Artificial Sequence: Synthetic oligonucleotide
gugauaagcgagacacacc

SEQ ID NO: 758456 - RNA, 19 nt, Artificial Sequence
  Description of Artificial Sequence: Synthetic oligonucleotide
aacgaucgugguucaugau

SEQ ID NO: 758457 - RNA, 19 nt, Artificial Sequence
  Description of Artificial Sequence: Synthetic oligonucleotide
uuacugguuguguccuccu

SEQ ID NO: 758458 - RNA, 19 nt, Artificial Sequence
  Description of Artificial Sequence: Synthetic oligonucleotide
gacucgguuuuguggcgcc

SEQ ID NO: 758459 - RNA, 19 nt, Artificial Sequence
  Description of Artificial Sequence: Synthetic oligonucleotide
acacgguagucagugauaa

SEQ ID NO: 758460 - RNA, 19 nt, Artificial Sequence
  Description of Artificial Sequence: Synthetic oligonucleotide
gcgucgguaggucagcucc

SEQ ID NO: 758461 - RNA, 19 nt, Artificial Sequence
  Description of Artificial Sequence: Synthetic oligonucleotide
augauugccucaggcagca

SEQ ID NO: 758462 - RNA, 19 nt, Artificial Sequence
  Description of Artificial Sequence: Synthetic oligonucleotide
auucuuugagaggccuguc

SEQ ID NO: 758463 - RNA, 19 nt, Artificial Sequence
  Description of Artificial Sequence: Synthetic oligonucleotide
accuacucuuggaugugcg

SEQ ID NO: 758464 - RNA, 19 nt, Artificial Sequence
  Description of Artificial Sequence: Synthetic oligonucleotide
cacuuugcaccuggggucc

SEQ ID NO: 758465 - RNA, 19 nt, Artificial Sequence
  Description of Artificial Sequence: Synthetic oligonucleotide
agugucgggccgcggaugu

SEQ ID NO: 758466 - RNA, 19 nt, Artificial Sequence
  Description of Artificial Sequence: Synthetic oligonucleotide
caggaacguuuucagccag

SEQ ID NO: 758467 - RNA, 19 nt, Artificial Sequence
  Description of Artificial Sequence: Synthetic oligonucleotide
uacgguccacuuugcaccu

SEQ ID NO: 758468 - RNA, 19 nt, Artificial Sequence
  Description of Artificial Sequence: Synthetic oligonucleotide
cuaagugucgggccgcgga

SEQ ID NO: 758469 - RNA, 19 nt, Artificial Sequence
  Description of Artificial Sequence: Synthetic oligonucleotide
cauauucccaccuacucuu

SEQ ID NO: 758470 - RNA, 19 nt, Artificial Sequence
  Description of Artificial Sequence: Synthetic oligonucleotide
ggccagaacggguauuuug

SEQ ID NO: 758471 - RNA, 19 nt, Artificial Sequence
  Description of Artificial Sequence: Synthetic oligonucleotide
gcaccugggguccucuucg

SEQ ID NO: 758472 - RNA, 19 nt, Artificial Sequence
  Description of Artificial Sequence: Synthetic oligonucleotide
ucugcguguggcuucucuu

SEQ ID NO: 758473 - RNA, 19 nt, Artificial Sequence
  Description of Artificial Sequence: Synthetic oligonucleotide
gaggccugucuuacggucc

SEQ ID NO: 758474 - RNA, 19 nt, Artificial Sequence
  Description of Artificial Sequence: Synthetic oligonucleotide
cgaucgugguucaugauac

SEQ ID NO: 758475 - RNA, 19 nt, Artificial Sequence
  Description of Artificial Sequence: Synthetic oligonucleotide
agcgaaugcgguccccacu

SEQ ID NO: 758476 - RNA, 19 nt, Artificial Sequence
  Description of Artificial Sequence: Synthetic oligonucleotide
caccuuccuacauggccgc

SEQ ID NO: 758477 - RNA, 19 nt, Artificial Sequence
  Description of Artificial Sequence: Synthetic oligonucleotide
gcugauaucagcagcguaa

SEQ ID NO: 758478 - RNA, 19 nt, Artificial Sequence
  Description of Artificial Sequence: Synthetic oligonucleotide
uccuuuagucgagaguauu

SEQ ID NO: 758479 - RNA, 19 nt, Artificial Sequence
  Description of Artificial Sequence: Synthetic oligonucleotide
gggaccucauucugagagg

SEQ ID NO: 758480 - RNA, 19 nt, Artificial Sequence
  Description of Artificial Sequence: Synthetic oligonucleotide
agcacugcgcaguaccaua

SEQ ID NO: 758481 - RNA, 19 nt, Artificial Sequence
  Description of Artificial Sequence: Synthetic oligonucleotide
gaagcgaaugcggucccca

SEQ ID NO: 758482 - RNA, 19 nt, Artificial Sequence
  Description of Artificial Sequence: Synthetic oligonucleotide
cucgguuuuguggcgccgg

SEQ ID NO: 758483 - RNA, 19 nt, Artificial Sequence
  Description of Artificial Sequence: Synthetic oligonucleotide
auagcccgcagguggcucu

SEQ ID NO: 758484 - RNA, 19 nt, Artificial Sequence
  Description of Artificial Sequence: Synthetic oligonucleotide
ggcauuagcgacggcggcg

SEQ ID NO: 758485 - RNA, 19 nt, Artificial Sequence
  Description of Artificial Sequence: Synthetic oligonucleotide
aagagcacgcuggcuuucu

SEQ ID NO: 758486 - RNA, 19 nt, Artificial Sequence
  Description of Artificial Sequence: Synthetic oligonucleotide
aaggcgagacucgguuuug

SEQ ID NO: 758487 - RNA, 19 nt, Artificial Sequence
  Description of Artificial Sequence: Synthetic oligonucleotide
agauccagggcuacucgca

SEQ ID NO: 758488 - RNA, 19 nt, Artificial Sequence
  Description of Artificial Sequence: Synthetic oligonucleotide
gcgaaugcgguccccacug

SEQ ID NO: 758489 - RNA, 19 nt, Artificial Sequence
  Description of Artificial Sequence: Synthetic oligonucleotide
ccagaacucgucccgagac

SEQ ID NO: 758490 - RNA, 19 nt, Artificial Sequence
  Description of Artificial Sequence: Synthetic oligonucleotide
gccgggagcagccugcugc

SEQ ID NO: 758491 - RNA, 19 nt, Artificial Sequence
  Description of Artificial Sequence: Synthetic oligonucleotide
ugucgggccgcggauguac

SEQ ID NO: 758492 - RNA, 19 nt, Artificial Sequence
  Description of Artificial Sequence: Synthetic oligonucleotide
aagugucgggccgcggaug

SEQ ID NO: 758493 - RNA, 19 nt, Artificial Sequence
  Description of Artificial Sequence: Synthetic oligonucleotide
gacuugaaccccguggacu

SEQ ID NO: 758494 - RNA, 19 nt, Artificial Sequence
  Description of Artificial Sequence: Synthetic oligonucleotide
uccagucgugacccagaac

SEQ ID NO: 758495 - RNA, 19 nt, Artificial Sequence
  Description of Artificial Sequence: Synthetic oligonucleotide
guugggugucgucugccuc

SEQ ID NO: 758496 - RNA, 19 nt, Artificial Sequence
  Description of Artificial Sequence: Synthetic oligonucleotide
gucacguacuggccagagc

SEQ ID NO: 758497 - RNA, 19 nt, Artificial Sequence
  Description of Artificial Sequence: Synthetic oligonucleotide
aacggguauuuugguauuu

SEQ ID NO: 758498 - RNA, 19 nt, Artificial Sequence
  Description of Artificial Sequence: Synthetic oligonucleotide
auaucugcguguggcuucu

SEQ ID NO: 758499 - RNA, 19 nt, Artificial Sequence
  Description of Artificial Sequence: Synthetic oligonucleotide
gcauuagcgacggcggcgg

SEQ ID NO: 758500 - RNA, 19 nt, Artificial Sequence
  Description of Artificial Sequence: Synthetic oligonucleotide
acauggccgccacuguccu

SEQ ID NO: 758501 - RNA, 19 nt, Artificial Sequence
  Description of Artificial Sequence: Synthetic oligonucleotide
caccguggaaagauagaga

SEQ ID NO: 758502 - RNA, 19 nt, Artificial Sequence
  Description of Artificial Sequence: Synthetic oligonucleotide
uagcuaagugucgggccgc

SEQ ID NO: 758503 - RNA, 19 nt, Artificial Sequence
  Description of Artificial Sequence: Synthetic oligonucleotide
ccagguuugggagagcaac

SEQ ID NO: 758504 - RNA, 19 nt, Artificial Sequence
  Description of Artificial Sequence: Synthetic oligonucleotide
gaacucgucccgagacucc

SEQ ID NO: 758505 - RNA, 19 nt, Artificial Sequence
  Description of Artificial Sequence: Synthetic oligonucleotide
ucgucccgagacuccauuc

SEQ ID NO: 758506 - RNA, 19 nt, Artificial Sequence
  Description of Artificial Sequence: Synthetic oligonucleotide
uugggacaauguggucucg

SEQ ID NO: 758507 - RNA, 19 nt, Artificial Sequence
  Description of Artificial Sequence: Synthetic oligonucleotide
ggacuugcgcacagggugg

SEQ ID NO: 758508 - RNA, 19 nt, Artificial Sequence
  Description of Artificial Sequence: Synthetic oligonucleotide
cacgguagucagugauaag

SEQ ID NO: 758509 - RNA, 19 nt, Artificial Sequence
  Description of Artificial Sequence: Synthetic oligonucleotide
uuuguggcgccggguaggu

SEQ ID NO: 758510 - RNA, 19 nt, Artificial Sequence
  Description of Artificial Sequence: Synthetic oligonucleotide
cagucgugacccagaacuc

SEQ ID NO: 758511 - RNA, 19 nt, Artificial Sequence
  Description of Artificial Sequence: Synthetic oligonucleotide
cauuccuacuucaaacgau

SEQ ID NO: 758512 - RNA, 19 nt, Artificial Sequence
  Description of Artificial Sequence: Synthetic oligonucleotide
cacugcgcaguaccauagc

SEQ ID NO: 758513 - RNA, 19 nt, Artificial Sequence
  Description of Artificial Sequence: Synthetic oligonucleotide
gagaguauuugaacaucua

SEQ ID NO: 758514 - RNA, 19 nt, Artificial Sequence
  Description of Artificial Sequence: Synthetic oligonucleotide
ucgugacccagaacucguc

SEQ ID NO: 758515 - RNA, 19 nt, Artificial Sequence
  Description of Artificial Sequence: Synthetic oligonucleotide
guggacucuucugaugaca

SEQ ID NO: 758516 - RNA, 19 nt, Artificial Sequence
  Description of Artificial Sequence: Synthetic oligonucleotide
ccguggaaagauagagagg

SEQ ID NO: 758517 - RNA, 19 nt, Artificial Sequence
  Description of Artificial Sequence: Synthetic oligonucleotide
caggacucaaauugguccu

SEQ ID NO: 758518 - RNA, 19 nt, Artificial Sequence
  Description of Artificial Sequence: Synthetic oligonucleotide
gccgggaccucauucugag

SEQ ID NO: 758519 - RNA, 19 nt, Artificial Sequence
  Description of Artificial Sequence: Synthetic oligonucleotide
caccuacucuuggaugugc

SEQ ID NO: 758520 - RNA, 19 nt, Artificial Sequence
  Description of Artificial Sequence: Synthetic oligonucleotide
ccuacucuuggaugugcgc

SEQ ID NO: 758521 - RNA, 19 nt, Artificial Sequence
  Description of Artificial Sequence: Synthetic oligonucleotide
agggagcgucgguagguca

SEQ ID NO: 758522 - RNA, 19 nt, Artificial Sequence
  Description of Artificial Sequence: Synthetic oligonucleotide
cccucguucucuacaacac

SEQ ID NO: 758523 - RNA, 19 nt, Artificial Sequence
  Description of Artificial Sequence: Synthetic oligonucleotide
ggauccaagaggccauauc

SEQ ID NO: 758524 - RNA, 19 nt, Artificial Sequence
  Description of Artificial Sequence: Synthetic oligonucleotide
cuugcggcugugcaggaua

SEQ ID NO: 758525 - RNA, 19 nt, Artificial Sequence
  Description of Artificial Sequence: Synthetic oligonucleotide
cagccgauggccugggcga

SEQ ID NO: 758526 - RNA, 19 nt, Artificial Sequence
  Description of Artificial Sequence: Synthetic oligonucleotide
agaaggauccgggguggcu

SEQ ID NO: 758527 - RNA, 19 nt, Artificial Sequence
  Description of Artificial Sequence: Synthetic oligonucleotide
cauccaguugugccucauc

SEQ ID NO: 758528 - RNA, 19 nt, Artificial Sequence
  Description of Artificial Sequence: Synthetic oligonucleotide
cuuugcccagcugaggaaa

SEQ ID NO: 758529 - RNA, 19 nt, Artificial Sequence
  Description of Artificial Sequence: Synthetic oligonucleotide
accuuccuacauggccgcc

SEQ ID NO: 758530 - RNA, 19 nt, Artificial Sequence
  Description of Artificial Sequence: Synthetic oligonucleotide
ugaaccccguggacucuuc

SEQ ID NO: 758531 - RNA, 19 nt, Artificial Sequence
  Description of Artificial Sequence: Synthetic oligonucleotide
gccucuuacugguuguguc

SEQ ID NO: 758532 - RNA, 19 nt, Artificial Sequence
  Description of Artificial Sequence: Synthetic oligonucleotide
gguuuuguggcgccgggua

SEQ ID NO: 758533 - RNA, 19 nt, Artificial Sequence
  Description of Artificial Sequence: Synthetic oligonucleotide
gccugaugguacaacccgg

SEQ ID NO: 758534 - RNA, 19 nt, Artificial Sequence
  Description of Artificial Sequence: Synthetic oligonucleotide
cugucccucguucucuaca

SEQ ID NO: 758535 - RNA, 19 nt, Artificial Sequence
  Description of Artificial Sequence: Synthetic oligonucleotide
cauucuuugagaggccugu

SEQ ID NO: 758536 - RNA, 19 nt, Artificial Sequence
  Description of Artificial Sequence: Synthetic oligonucleotide
acggugauuccucggccuu

SEQ ID NO: 758537 - RNA, 19 nt, Artificial Sequence
  Description of Artificial Sequence: Synthetic oligonucleotide
guccucucauucaagagau

SEQ ID NO: 758538 - RNA, 19 nt, Artificial Sequence
  Description of Artificial Sequence: Synthetic oligonucleotide
ggcgagacucgguuuugug

SEQ ID NO: 758539 - RNA, 19 nt, Artificial Sequence
  Description of Artificial Sequence: Synthetic oligonucleotide
gcacguccaggacgaagcg

SEQ ID NO: 758540 - RNA, 19 nt, Artificial Sequence
  Description of Artificial Sequence: Synthetic oligonucleotide
gauagcccgcagguggcuc

SEQ ID NO: 758541 - RNA, 19 nt, Artificial Sequence
  Description of Artificial Sequence: Synthetic oligonucleotide
cccgagacuccauucuuug

SEQ ID NO: 758542 - RNA, 19 nt, Artificial Sequence
  Description of Artificial Sequence: Synthetic oligonucleotide
gucucggcagaugccuugc

SEQ ID NO: 758543 - RNA, 19 nt, Artificial Sequence
  Description of Artificial Sequence: Synthetic oligonucleotide
gaaaggcgagacucgguuu

SEQ ID NO: 758544 - RNA, 19 nt, Artificial Sequence
  Description of Artificial Sequence: Synthetic oligonucleotide
uccuccggacgcucuugac

SEQ ID NO: 758545 - RNA, 19 nt, Artificial Sequence
  Description of Artificial Sequence: Synthetic oligonucleotide
gggcuacucgcagggagcg

SEQ ID NO: 758546 - RNA, 19 nt, Artificial Sequence
  Description of Artificial Sequence: Synthetic oligonucleotide
cacacgguagucagugaua

SEQ ID NO: 758547 - RNA, 19 nt, Artificial Sequence
  Description of Artificial Sequence: Synthetic oligonucleotide
acggguauuuugguauuua

SEQ ID NO: 758548 - RNA, 19 nt, Artificial Sequence
  Description of Artificial Sequence: Synthetic oligonucleotide
ucaaacgaucgugguucau

SEQ ID NO: 758549 - RNA, 19 nt, Artificial Sequence
  Description of Artificial Sequence: Synthetic oligonucleotide
ccggguagguuucucuccc

SEQ ID NO: 758550 - RNA, 19 nt, Artificial Sequence
  Description of Artificial Sequence: Synthetic oligonucleotide
ggugauuccucggccuuug

SEQ ID NO: 758551 - RNA, 19 nt, Artificial Sequence
  Description of Artificial Sequence: Synthetic oligonucleotide
cacugccgcgugcaggcac

SEQ ID NO: 758552 - RNA, 19 nt, Artificial Sequence
  Description of Artificial Sequence: Synthetic oligonucleotide
gaacguuuucagccagcgu

SEQ ID NO: 758553 - RNA, 19 nt, Artificial Sequence
  Description of Artificial Sequence: Synthetic oligonucleotide
cccgguagcuaagugucgg

SEQ ID NO: 758554 - RNA, 19 nt, Artificial Sequence
  Description of Artificial Sequence: Synthetic oligonucleotide
cugcgcaguaccauagccu

SEQ ID NO: 758555 - RNA, 19 nt, Artificial Sequence
  Description of Artificial Sequence: Synthetic oligonucleotide
ugucccgcgcagcccugga

SEQ ID NO: 758556 - RNA, 19 nt, Artificial Sequence
  Description of Artificial Sequence: Synthetic oligonucleotide
gccgcggauguacuucugc

SEQ ID NO: 758557 - RNA, 19 nt, Artificial Sequence
  Description of Artificial Sequence: Synthetic oligonucleotide
gucuuacgguccacuuugc

SEQ ID NO: 758558 - RNA, 19 nt, Artificial Sequence
  Description of Artificial Sequence: Synthetic oligonucleotide
cgugacccagaacucgucc

SEQ ID NO: 758559 - RNA, 19 nt, Artificial Sequence
  Description of Artificial Sequence: Synthetic oligonucleotide
gcacugcgcaguaccauag

SEQ ID NO: 758560 - RNA, 19 nt, Artificial Sequence
  Description of Artificial Sequence: Synthetic oligonucleotide
uugaaccccguggacucuu

SEQ ID NO: 758561 - RNA, 19 nt, Artificial Sequence
  Description of Artificial Sequence: Synthetic oligonucleotide
auuagcgacggcggcgguu

SEQ ID NO: 758562 - RNA, 19 nt, Artificial Sequence
  Description of Artificial Sequence: Synthetic oligonucleotide
gacccagaacucgucccga

SEQ ID NO: 758563 - RNA, 19 nt, Artificial Sequence
  Description of Artificial Sequence: Synthetic oligonucleotide
gcuacucgcagggagcguc

SEQ ID NO: 758564 - RNA, 19 nt, Artificial Sequence
  Description of Artificial Sequence: Synthetic oligonucleotide
cagacaacccugacaggcu

SEQ ID NO: 758565 - RNA, 19 nt, Artificial Sequence
  Description of Artificial Sequence: Synthetic oligonucleotide
uccggacgcucuugaccac

SEQ ID NO: 758566 - RNA, 19 nt, Artificial Sequence
  Description of Artificial Sequence: Synthetic oligonucleotide
gcuugccugucccucguuc

SEQ ID NO: 758567 - RNA, 19 nt, Artificial Sequence
  Description of Artificial Sequence: Synthetic oligonucleotide
gcgugcaggcaccucacca

SEQ ID NO: 758568 - RNA, 19 nt, Artificial Sequence
  Description of Artificial Sequence: Synthetic oligonucleotide
ccuuucaccccagcacagg

SEQ ID NO: 758569 - RNA, 19 nt, Artificial Sequence
  Description of Artificial Sequence: Synthetic oligonucleotide
ccucuucggaugcagacaa

SEQ ID NO: 758570 - RNA, 19 nt, Artificial Sequence
  Description of Artificial Sequence: Synthetic oligonucleotide
cacggugauuccucggccu

SEQ ID NO: 758571 - RNA, 19 nt, Artificial Sequence
  Description of Artificial Sequence: Synthetic oligonucleotide
aggcgagacucgguuuugu

SEQ ID NO: 758572 - RNA, 19 nt, Artificial Sequence
  Description of Artificial Sequence: Synthetic oligonucleotide
agccgggaccucauucuga

SEQ ID NO: 758573 - RNA, 19 nt, Artificial Sequence
  Description of Artificial Sequence: Synthetic oligonucleotide
gucgguaggucagcuccuc

SEQ ID NO: 758574 - RNA, 19 nt, Artificial Sequence
  Description of Artificial Sequence: Synthetic oligonucleotide
ggcugauaucagcagcgua

SEQ ID NO: 758575 - RNA, 19 nt, Artificial Sequence
  Description of Artificial Sequence: Synthetic oligonucleotide
cuuugcaccugggguccuc

SEQ ID NO: 758576 - RNA, 19 nt, Artificial Sequence
  Description of Artificial Sequence: Synthetic oligonucleotide
cagggagcgucgguagguc

SEQ ID NO: 758577 - RNA, 19 nt, Artificial Sequence
  Description of Artificial Sequence: Synthetic oligonucleotide
gaaccccguggacucuucu

SEQ ID NO: 758578 - RNA, 19 nt, Artificial Sequence
  Description of Artificial Sequence: Synthetic oligonucleotide
gucgugacccagaacucgu

SEQ ID NO: 758579 - RNA, 19 nt, Artificial Sequence
  Description of Artificial Sequence: Synthetic oligonucleotide
cccguggacucuucugaug

SEQ ID NO: 758580 - RNA, 19 nt, Artificial Sequence
  Description of Artificial Sequence: Synthetic oligonucleotide
ugcuugccugucccucguu

SEQ ID NO: 758581 - RNA, 19 nt, Artificial Sequence
  Description of Artificial Sequence: Synthetic oligonucleotide
ggagcgucgguaggucagc

SEQ ID NO: 758582 - RNA, 19 nt, Artificial Sequence
  Description of Artificial Sequence: Synthetic oligonucleotide
cgagaguauuugaacaucu

SEQ ID NO: 758583 - RNA, 19 nt, Artificial Sequence
  Description of Artificial Sequence: Synthetic oligonucleotide
gggcgaaguccuccuuggc

SEQ ID NO: 758584 - RNA, 19 nt, Artificial Sequence
  Description of Artificial Sequence: Synthetic oligonucleotide
ucgggccgcggauguacuu

SEQ ID NO: 758585 - RNA, 19 nt, Artificial Sequence
  Description of Artificial Sequence: Synthetic oligonucleotide
gagcaaccuuggugaagcu

SEQ ID NO: 758586 - RNA, 19 nt, Artificial Sequence
  Description of Artificial Sequence: Synthetic oligonucleotide
gcgugaaggcuugcggcug

SEQ ID NO: 758587 - RNA, 19 nt, Artificial Sequence
  Description of Artificial Sequence: Synthetic oligonucleotide
acgguccagucgugaccca

SEQ ID NO: 758588 - RNA, 19 nt, Artificial Sequence
  Description of Artificial Sequence: Synthetic oligonucleotide
ccuuuagucgagaguauuu

SEQ ID NO: 758589 - RNA, 19 nt, Artificial Sequence
  Description of Artificial Sequence: Synthetic oligonucleotide
acaggcuuugugggacaua

SEQ ID NO: 758590 - RNA, 19 nt, Artificial Sequence
  Description of Artificial Sequence: Synthetic oligonucleotide
augucucggcagaugccuu

SEQ ID NO: 758591 - RNA, 19 nt, Artificial Sequence
  Description of Artificial Sequence: Synthetic oligonucleotide
ugcgcacaggguggcugau

SEQ ID NO: 758592 - RNA, 19 nt, Artificial Sequence
  Description of Artificial Sequence: Synthetic oligonucleotide
ccugaugguacaacccggu

SEQ ID NO: 758593 - RNA, 19 nt, Artificial Sequence
  Description of Artificial Sequence: Synthetic oligonucleotide
cuacaacacuuucucccuu

SEQ ID NO: 758594 - RNA, 19 nt, Artificial Sequence
  Description of Artificial Sequence: Synthetic oligonucleotide
guggcgccggguagguuuc

SEQ ID NO: 758595 - RNA, 19 nt, Artificial Sequence
  Description of Artificial Sequence: Synthetic oligonucleotide
gcgcaguaccauagccucc

SEQ ID NO: 758596 - RNA, 19 nt, Artificial Sequence
  Description of Artificial Sequence: Synthetic oligonucleotide
ccgagacuccauucuuuga

SEQ ID NO: 758597 - RNA, 19 nt, Artificial Sequence
  Description of Artificial Sequence: Synthetic oligonucleotide
ccucagcguccccuuugcc

SEQ ID NO: 758598 - RNA, 19 nt, Artificial Sequence
  Description of Artificial Sequence: Synthetic oligonucleotide
ggccucuuuguuggguguc

SEQ ID NO: 758599 - RNA, 19 nt, Artificial Sequence
  Description of Artificial Sequence: Synthetic oligonucleotide
cugaggaaaccugguuccu

SEQ ID NO: 758600 - RNA, 19 nt, Artificial Sequence
  Description of Artificial Sequence: Synthetic oligonucleotide
cggacgcucuugaccacag

SEQ ID NO: 758601 - RNA, 19 nt, Artificial Sequence
  Description of Artificial Sequence: Synthetic oligonucleotide
cuggccagaacggguauuu

SEQ ID NO: 758602 - RNA, 19 nt, Artificial Sequence
  Description of Artificial Sequence: Synthetic oligonucleotide
uaucugcguguggcuucuc

SEQ ID NO: 758603 - RNA, 19 nt, Artificial Sequence
  Description of Artificial Sequence: Synthetic oligonucleotide
ccaccuacucuuggaugug

SEQ ID NO: 758604 - RNA, 19 nt, Artificial Sequence
  Description of Artificial Sequence: Synthetic oligonucleotide
cuccuguccacgguccagu

SEQ ID NO: 758605 - RNA, 19 nt, Artificial Sequence
  Description of Artificial Sequence: Synthetic oligonucleotide
ccuuccuacauggccgcca

SEQ ID NO: 758606 - RNA, 19 nt, Artificial Sequence
  Description of Artificial Sequence: Synthetic oligonucleotide
cccagaacucgucccgaga

SEQ ID NO: 758607 - RNA, 19 nt, Artificial Sequence
  Description of Artificial Sequence: Synthetic oligonucleotide
aggauccgggguggcuccu

SEQ ID NO: 758608 - RNA, 19 nt, Artificial Sequence
  Description of Artificial Sequence: Synthetic oligonucleotide
cgaaugcgguccccacugc

SEQ ID NO: 758609 - RNA, 19 nt, Artificial Sequence
  Description of Artificial Sequence: Synthetic oligonucleotide
gagcgucgguaggucagcu

SEQ ID NO: 758610 - RNA, 19 nt, Artificial Sequence
  Description of Artificial Sequence: Synthetic oligonucleotide
gcggucgggcagcaccuuc

SEQ ID NO: 758611 - RNA, 19 nt, Artificial Sequence
  Description of Artificial Sequence: Synthetic oligonucleotide
ccucguucucuacaacacu

SEQ ID NO: 758612 - RNA, 19 nt, Artificial Sequence
  Description of Artificial Sequence: Synthetic oligonucleotide
ccagccgcacacgguaguc

SEQ ID NO: 758613 - RNA, 19 nt, Artificial Sequence
  Description of Artificial Sequence: Synthetic oligonucleotide
gugcgcugagcagccacgu

SEQ ID NO: 758614 - RNA, 19 nt, Artificial Sequence
  Description of Artificial Sequence: Synthetic oligonucleotide
ugccgcgugcaggcaccuc

SEQ ID NO: 758615 - RNA, 19 nt, Artificial Sequence
  Description of Artificial Sequence: Synthetic oligonucleotide
cgaagcgaaugcggucccc

SEQ ID NO: 758616 - RNA, 19 nt, Artificial Sequence
  Description of Artificial Sequence: Synthetic oligonucleotide
ccugucuuacgguccacuu

SEQ ID NO: 758617 - RNA, 19 nt, Artificial Sequence
  Description of Artificial Sequence: Synthetic oligonucleotide
gcccuggagcggucgggca

SEQ ID NO: 758618 - RNA, 19 nt, Artificial Sequence
  Description of Artificial Sequence: Synthetic oligonucleotide
ccuacauggccgccacugu

SEQ ID NO: 758619 - RNA, 19 nt, Artificial Sequence
  Description of Artificial Sequence: Synthetic oligonucleotide
ggccgcggauguacuucug

SEQ ID NO: 758620 - RNA, 19 nt, Artificial Sequence
  Description of Artificial Sequence: Synthetic oligonucleotide
cgcgugcaggcaccucacc

SEQ ID NO: 758621 - RNA, 19 nt, Artificial Sequence
  Description of Artificial Sequence: Synthetic oligonucleotide
cauuagcgacggcggcggu

SEQ ID NO: 758622 - RNA, 19 nt, Artificial Sequence
  Description of Artificial Sequence: Synthetic oligonucleotide
cgucccgagacuccauucu

SEQ ID NO: 758623 - RNA, 19 nt, Artificial Sequence
  Description of Artificial Sequence: Synthetic oligonucleotide
ccggacgcucuugaccaca

SEQ ID NO: 758624 - RNA, 19 nt, Artificial Sequence
  Description of Artificial Sequence: Synthetic oligonucleotide
ggcgccggguagguuucuc

SEQ ID NO: 758625 - RNA, 19 nt, Artificial Sequence
  Description of Artificial Sequence: Synthetic oligonucleotide
ggauagcccgcagguggcu

SEQ ID NO: 758626 - RNA, 19 nt, Artificial Sequence
  Description of Artificial Sequence: Synthetic oligonucleotide
cauccaagcguggccucuu

SEQ ID NO: 758627 - RNA, 19 nt, Artificial Sequence
  Description of Artificial Sequence: Synthetic oligonucleotide
gucgggccgcggauguacu

SEQ ID NO: 758628 - RNA, 19 nt, Artificial Sequence
  Description of Artificial Sequence: Synthetic oligonucleotide
ccauaucugcguguggcuu

SEQ ID NO: 758629 - RNA, 19 nt, Artificial Sequence
  Description of Artificial Sequence: Synthetic oligonucleotide
ccgggaccucauucugaga

SEQ ID NO: 758630 - RNA, 19 nt, Artificial Sequence
  Description of Artificial Sequence: Synthetic oligonucleotide
caacccggucaaagccuuu

SEQ ID NO: 758631 - RNA, 19 nt, Artificial Sequence
  Description of Artificial Sequence: Synthetic oligonucleotide
gcgagacacaccagccgau

SEQ ID NO: 758632 - RNA, 19 nt, Artificial Sequence
  Description of Artificial Sequence: Synthetic oligonucleotide
gugucgggccgcggaugua

SEQ ID NO: 758633 - RNA, 19 nt, Artificial Sequence
  Description of Artificial Sequence: Synthetic oligonucleotide
cagaggccgggagcagccu

SEQ ID NO: 758634 - RNA, 19 nt, Artificial Sequence
  Description of Artificial Sequence: Synthetic oligonucleotide
cgugaaggcuugcggcugu

SEQ ID NO: 758635 - RNA, 19 nt, Artificial Sequence
  Description of Artificial Sequence: Synthetic oligonucleotide
ccccguggacucuucugau

SEQ ID NO: 758636 - RNA, 19 nt, Artificial Sequence
  Description of Artificial Sequence: Synthetic oligonucleotide
ggcuacucgcagggagcgu

SEQ ID NO: 758637 - RNA, 19 nt, Artificial Sequence
  Description of Artificial Sequence: Synthetic oligonucleotide
cgucgguaggucagcuccu

SEQ ID NO: 758638 - RNA, 19 nt, Artificial Sequence
  Description of Artificial Sequence: Synthetic oligonucleotide
gggugucgucugccucucu

SEQ ID NO: 758639 - RNA, 19 nt, Artificial Sequence
  Description of Artificial Sequence: Synthetic oligonucleotide
gcgguccccacugccgcgu

SEQ ID NO: 758640 - RNA, 19 nt, Artificial Sequence
  Description of Artificial Sequence: Synthetic oligonucleotide
gcagcacguccaggacgaa

SEQ ID NO: 758641 - RNA, 19 nt, Artificial Sequence
  Description of Artificial Sequence: Synthetic oligonucleotide
cgguuuuguggcgccgggu

SEQ ID NO: 758642 - RNA, 19 nt, Artificial Sequence
  Description of Artificial Sequence: Synthetic oligonucleotide
cgacggcggcgguuccucu

SEQ ID NO: 758643 - RNA, 19 nt, Artificial Sequence
  Description of Artificial Sequence: Synthetic oligonucleotide
cggugauuccucggccuuu

SEQ ID NO: 758644 - RNA, 19 nt, Artificial Sequence
  Description of Artificial Sequence: Synthetic oligonucleotide
aaaagcucgacccagcucc

SEQ ID NO: 758645 - RNA, 19 nt, Artificial Sequence
  Description of Artificial Sequence: Synthetic oligonucleotide
uuaaaauagaacuugauuc

SEQ ID NO: 758646 - RNA, 19 nt, Artificial Sequence
  Description of Artificial Sequence: Synthetic oligonucleotide
auauauauauauuaaaucu

SEQ ID NO: 758647 - RNA, 19 nt, Artificial Sequence
  Description of Artificial Sequence: Synthetic oligonucleotide
uuuauauauauauauauau

SEQ ID NO: 758648 - RNA, 19 nt, Artificial Sequence
  Description of Artificial Sequence: Synthetic oligonucleotide
uauauauauauauauauau

SEQ ID NO: 758649 - RNA, 19 nt, Artificial Sequence
  Description of Artificial Sequence: Synthetic oligonucleotide
uauauauauauauauauua

SEQ ID NO: 758650 - RNA, 19 nt, Artificial Sequence
  Description of Artificial Sequence: Synthetic oligonucleotide
uauauauauauauuaaauc

SEQ ID NO: 758651 - RNA, 19 nt, Artificial Sequence
  Description of Artificial Sequence: Synthetic oligonucleotide
uauguuuauauauauauau

SEQ ID NO: 758652 - RNA, 19 nt, Artificial Sequence
  Description of Artificial Sequence: Synthetic oligonucleotide
uucauaaucacauacgguc

SEQ ID NO: 758653 - RNA, 19 nt, Artificial Sequence
  Description of Artificial Sequence: Synthetic oligonucleotide
gauaauggcaaugacacag

SEQ ID NO: 758654 - RNA, 19 nt, Artificial Sequence
  Description of Artificial Sequence: Synthetic oligonucleotide
uuuacugagaauccauggg

SEQ ID NO: 758655 - RNA, 19 nt, Artificial Sequence
  Description of Artificial Sequence: Synthetic oligonucleotide
uguuuauauauauauauau

SEQ ID NO: 758656 - RNA, 19 nt, Artificial Sequence
  Description of Artificial Sequence: Synthetic oligonucleotide
auuuucccgucuuauaucc

SEQ ID NO: 758657 - RNA, 19 nt, Artificial Sequence
  Description of Artificial Sequence: Synthetic oligonucleotide
uauauauauauauauuaaa

SEQ ID NO: 758658 - RNA, 19 nt, Artificial Sequence
  Description of Artificial Sequence: Synthetic oligonucleotide
gauagugaagacuagagcu

SEQ ID NO: 758659 - RNA, 19 nt, Artificial Sequence
  Description of Artificial Sequence: Synthetic oligonucleotide
uuauauauauauauauaua

SEQ ID NO: 758660 - RNA, 19 nt, Artificial Sequence
  Description of Artificial Sequence: Synthetic oligonucleotide
  modified_base (15)..(15): a, c, u, g, unknown or other
ucuuauauccaccanguuu

SEQ ID NO: 758661 - RNA, 19 nt, Artificial Sequence
  Description of Artificial Sequence: Synthetic oligonucleotide
agaggcauagaucuugagg

SEQ ID NO: 758662 - RNA, 19 nt, Artificial Sequence
  Description of Artificial Sequence: Synthetic oligonucleotide
auuugaagccuuucacucc

SEQ ID NO: 758663 - RNA, 19 nt, Artificial Sequence
  Description of Artificial Sequence: Synthetic oligonucleotide
uugaaugcacauauggucu

SEQ ID NO: 758664 - RNA, 19 nt, Artificial Sequence
  Description of Artificial Sequence: Synthetic oligonucleotide
auuuuguauuuauugagca

SEQ ID NO: 758665 - RNA, 19 nt, Artificial Sequence
  Description of Artificial Sequence: Synthetic oligonucleotide
ucauaaucacauacggucc

SEQ ID NO: 758666 - RNA, 19 nt, Artificial Sequence
  Description of Artificial Sequence: Synthetic oligonucleotide
auaguaagucagcugcacc

SEQ ID NO: 758667 - RNA, 19 nt, Artificial Sequence
  Description of Artificial Sequence: Synthetic oligonucleotide
caugauauaaggacacacc

SEQ ID NO: 758668 - RNA, 19 nt, Artificial Sequence
  Description of Artificial Sequence: Synthetic oligonucleotide
  modified_base (16)..(16): a, c, u, g, unknown or other
caugccaaccuccacnggg

SEQ ID NO: 758669 - RNA, 19 nt, Artificial Sequence
  Description of Artificial Sequence: Synthetic oligonucleotide
aauguggugcagccgugcc

SEQ ID NO: 758670 - RNA, 19 nt, Artificial Sequence
  Description of Artificial Sequence: Synthetic oligonucleotide
ucuaaguagucacucugag

SEQ ID NO: 758671 - RNA, 19 nt, Artificial Sequence
  Description of Artificial Sequence: Synthetic oligonucleotide
ugauagugaagacuagagc

SEQ ID NO: 758672 - RNA, 19 nt, Artificial Sequence
  Description of Artificial Sequence: Synthetic oligonucleotide
uccaugacggauaauggca

SEQ ID NO: 758673 - RNA, 19 nt, Artificial Sequence
  Description of Artificial Sequence: Synthetic oligonucleotide
ucuauaaagguuuccugga

SEQ ID NO: 758674 - RNA, 19 nt, Artificial Sequence
  Description of Artificial Sequence: Synthetic oligonucleotide
cugauuacucuccucaggg

SEQ ID NO: 758675 - RNA, 19 nt, Artificial Sequence
  Description of Artificial Sequence: Synthetic oligonucleotide
ucucaaggaugucugauca

SEQ ID NO: 758676 - RNA, 19 nt, Artificial Sequence
  Description of Artificial Sequence: Synthetic oligonucleotide
auauauauauauauuaaau

SEQ ID NO: 758677 - RNA, 19 nt, Artificial Sequence
  Description of Artificial Sequence: Synthetic oligonucleotide
uccuaaagacacaugauau

SEQ ID NO: 758678 - RNA, 19 nt, Artificial Sequence
  Description of Artificial Sequence: Synthetic oligonucleotide
uugaucuuuggccagucug

SEQ ID NO: 758679 - RNA, 19 nt, Artificial Sequence
  Description of Artificial Sequence: Synthetic oligonucleotide
uaaagacacaugauauaag

SEQ ID NO: 758680 - RNA, 19 nt, Artificial Sequence
  Description of Artificial Sequence: Synthetic oligonucleotide
uacaacauugaucucugcu

SEQ ID NO: 758681 - RNA, 19 nt, Artificial Sequence
  Description of Artificial Sequence: Synthetic oligonucleotide
acaugauauaaggacacac

SEQ ID NO: 758682 - RNA, 19 nt, Artificial Sequence
  Description of Artificial Sequence: Synthetic oligonucleotide
gacguagcagcccacagcc

SEQ ID NO: 758683 - RNA, 19 nt, Artificial Sequence
  Description of Artificial Sequence: Synthetic oligonucleotide
ugguaucuggaacuguggg

SEQ ID NO: 758684 - RNA, 19 nt, Artificial Sequence
  Description of Artificial Sequence: Synthetic oligonucleotide
ugaccauacaucuccaaca

SEQ ID NO: 758685 - RNA, 19 nt, Artificial Sequence
  Description of Artificial Sequence: Synthetic oligonucleotide
aaugacugcauuacccacg

SEQ ID NO: 758686 - RNA, 19 nt, Artificial Sequence
  Description of Artificial Sequence: Synthetic oligonucleotide
acaugcaacgaaaagcucg

SEQ ID NO: 758687 - RNA, 19 nt, Artificial Sequence
  Description of Artificial Sequence: Synthetic oligonucleotide
uaucaauguuuacugagaa

SEQ ID NO: 758688 - RNA, 19 nt, Artificial Sequence
  Description of Artificial Sequence: Synthetic oligonucleotide
uugcauggcaaucuaauau

SEQ ID NO: 758689 - RNA, 19 nt, Artificial Sequence
  Description of Artificial Sequence: Synthetic oligonucleotide
ucagccaacagcagccgcg

SEQ ID NO: 758690 - RNA, 19 nt, Artificial Sequence
  Description of Artificial Sequence: Synthetic oligonucleotide
auuugcaccaaaaugggug

SEQ ID NO: 758691 - RNA, 19 nt, Artificial Sequence
  Description of Artificial Sequence: Synthetic oligonucleotide
agaaucuuggcacagucau

SEQ ID NO: 758692 - RNA, 19 nt, Artificial Sequence
  Description of Artificial Sequence: Synthetic oligonucleotide
uuauugagcacucgucaug

SEQ ID NO: 758693 - RNA, 19 nt, Artificial Sequence
  Description of Artificial Sequence: Synthetic oligonucleotide
ugcaacgaaaagcucgacc

SEQ ID NO: 758694 - RNA, 19 nt, Artificial Sequence
  Description of Artificial Sequence: Synthetic oligonucleotide
agugcuauggagacguagc

SEQ ID NO: 758695 - RNA, 19 nt, Artificial Sequence
  Description of Artificial Sequence: Synthetic oligonucleotide
gguucgaucuccaugacgg

SEQ ID NO: 758696 - RNA, 19 nt, Artificial Sequence
  Description of Artificial Sequence: Synthetic oligonucleotide
uagaacuugauucucucua

SEQ ID NO: 758697 - RNA, 19 nt, Artificial Sequence
  Description of Artificial Sequence: Synthetic oligonucleotide
accaaaauggguguaagcu

SEQ ID NO: 758698 - RNA, 19 nt, Artificial Sequence
  Description of Artificial Sequence: Synthetic oligonucleotide
cuaaguagucacucugagg

SEQ ID NO: 758699 - RNA, 19 nt, Artificial Sequence
  Description of Artificial Sequence: Synthetic oligonucleotide
gcaacgaaaagcucgaccc

SEQ ID NO: 758700 - RNA, 19 nt, Artificial Sequence
  Description of Artificial Sequence: Synthetic oligonucleotide
ugcucaacgagucacuguc

SEQ ID NO: 758701 - RNA, 19 nt, Artificial Sequence
  Description of Artificial Sequence: Synthetic oligonucleotide
  modified_base (3)..(3): a, c, u, g, unknown or other
acngggaacucuuggaaug

SEQ ID NO: 758702 - RNA, 19 nt, Artificial Sequence
  Description of Artificial Sequence: Synthetic oligonucleotide
aaauguggugcagccgugc

SEQ ID NO: 758703 - RNA, 19 nt, Artificial Sequence
  Description of Artificial Sequence: Synthetic oligonucleotide
auauauauauauauauuaa

SEQ ID NO: 758704 - RNA, 19 nt, Artificial Sequence
  Description of Artificial Sequence: Synthetic oligonucleotide
ugggguucgaucuccauga

SEQ ID NO: 758705 - RNA, 19 nt, Artificial Sequence
  Description of Artificial Sequence: Synthetic oligonucleotide
ucauagacugauccaaauc

SEQ ID NO: 758706 - RNA, 19 nt, Artificial Sequence
  Description of Artificial Sequence: Synthetic oligonucleotide
aacgaaaagcucgacccag

SEQ ID NO: 758707 - RNA, 19 nt, Artificial Sequence
  Description of Artificial Sequence: Synthetic oligonucleotide
cuagcaagagagacggugc

SEQ ID NO: 758708 - RNA, 19 nt, Artificial Sequence
  Description of Artificial Sequence: Synthetic oligonucleotide
gaagugguagggacaaugg

SEQ ID NO: 758709 - RNA, 19 nt, Artificial Sequence
  Description of Artificial Sequence: Synthetic oligonucleotide
gcuaucaauguuuacugag

SEQ ID NO: 758710 - RNA, 19 nt, Artificial Sequence
  Description of Artificial Sequence: Synthetic oligonucleotide
agcccguucauguuagcac

SEQ ID NO: 758711 - RNA, 19 nt, Artificial Sequence
  Description of Artificial Sequence: Synthetic oligonucleotide
acuagcaagagagacggug

SEQ ID NO: 758712 - RNA, 19 nt, Artificial Sequence
  Description of Artificial Sequence: Synthetic oligonucleotide
cacaagcccagucuaaacc

SEQ ID NO: 758713 - RNA, 19 nt, Artificial Sequence
  Description of Artificial Sequence: Synthetic oligonucleotide
acaacauugaucucugcua

SEQ ID NO: 758714 - RNA, 19 nt, Artificial Sequence
  Description of Artificial Sequence: Synthetic oligonucleotide
uuuauugagcacucgucau

SEQ ID NO: 758715 - RNA, 19 nt, Artificial Sequence
  Description of Artificial Sequence: Synthetic oligonucleotide
aauggguguaagcucuccu

SEQ ID NO: 758716 - RNA, 19 nt, Artificial Sequence
  Description of Artificial Sequence: Synthetic oligonucleotide
ugcacauauggucugggau

SEQ ID NO: 758717 - RNA, 19 nt, Artificial Sequence
  Description of Artificial Sequence: Synthetic oligonucleotide
uggcaaucuaauaucuacu

SEQ ID NO: 758718 - RNA, 19 nt, Artificial Sequence
  Description of Artificial Sequence: Synthetic oligonucleotide
agaucucuugaguuggucu

SEQ ID NO: 758719 - RNA, 19 nt, Artificial Sequence
  Description of Artificial Sequence: Synthetic oligonucleotide
acaagcccagucuaaacca

SEQ ID NO: 758720 - RNA, 19 nt, Artificial Sequence
  Description of Artificial Sequence: Synthetic oligonucleotide
uguaagcucuccuucuaga

SEQ ID NO: 758721 - RNA, 19 nt, Artificial Sequence
  Description of Artificial Sequence: Synthetic oligonucleotide
aauuacaaggaaacaccca

SEQ ID NO: 758722 - RNA, 19 nt, Artificial Sequence
  Description of Artificial Sequence: Synthetic oligonucleotide
agggacaaugggaaugucc

SEQ ID NO: 758723 - RNA, 19 nt, Artificial Sequence
  Description of Artificial Sequence: Synthetic oligonucleotide
gaggccuagcuucauagac

SEQ ID NO: 758724 - RNA, 19 nt, Artificial Sequence
  Description of Artificial Sequence: Synthetic oligonucleotide
cuccaugacggauaauggc

SEQ ID NO: 758725 - RNA, 19 nt, Artificial Sequence
  Description of Artificial Sequence: Synthetic oligonucleotide
aaaccucgagugugucacc

SEQ ID NO: 758726 - RNA, 19 nt, Artificial Sequence
  Description of Artificial Sequence: Synthetic oligonucleotide
cauuucagcacuagcaaga

SEQ ID NO: 758727 - RNA, 19 nt, Artificial Sequence
  Description of Artificial Sequence: Synthetic oligonucleotide
auauauauauauauauaua

SEQ ID NO: 758728 - RNA, 19 nt, Artificial Sequence
  Description of Artificial Sequence: Synthetic oligonucleotide
uuucccgucuuauauccac

SEQ ID NO: 758729 - RNA, 19 nt, Artificial Sequence
  Description of Artificial Sequence: Synthetic oligonucleotide
auauauauauauauauauu

SEQ ID NO: 758730 - RNA, 19 nt, Artificial Sequence
  Description of Artificial Sequence: Synthetic oligonucleotide
uauugagcacucgucaugu

SEQ ID NO: 758731 - RNA, 19 nt, Artificial Sequence
  Description of Artificial Sequence: Synthetic oligonucleotide
cauagacugauccaaaucu

SEQ ID NO: 758732 - RNA, 19 nt, Artificial Sequence
  Description of Artificial Sequence: Synthetic oligonucleotide
gagaagugaccauacaucu

SEQ ID NO: 758733 - RNA, 19 nt, Artificial Sequence
  Description of Artificial Sequence: Synthetic oligonucleotide
gguaucuggaacugugggg

SEQ ID NO: 758734 - RNA, 19 nt, Artificial Sequence
  Description of Artificial Sequence: Synthetic oligonucleotide
gcaauuacaaggaaacacc

SEQ ID NO: 758735 - RNA, 19 nt, Artificial Sequence
  Description of Artificial Sequence: Synthetic oligonucleotide
uuggcuagccuucuggcau

SEQ ID NO: 758736 - RNA, 19 nt, Artificial Sequence
  Description of Artificial Sequence: Synthetic oligonucleotide
gcuauggagacguagcagc

SEQ ID NO: 758737 - RNA, 19 nt, Artificial Sequence
  Description of Artificial Sequence: Synthetic oligonucleotide
gucacucugagguugcaug

SEQ ID NO: 758738 - RNA, 19 nt, Artificial Sequence
  Description of Artificial Sequence: Synthetic oligonucleotide
aagugcuauggagacguag

SEQ ID NO: 758739 - RNA, 19 nt, Artificial Sequence
  Description of Artificial Sequence: Synthetic oligonucleotide
cuugauucucucuacuaca

SEQ ID NO: 758740 - RNA, 19 nt, Artificial Sequence
  Description of Artificial Sequence: Synthetic oligonucleotide
gagugugucaccuccaucu

SEQ ID NO: 758741 - RNA, 19 nt, Artificial Sequence
  Description of Artificial Sequence: Synthetic oligonucleotide
ugcauccugcugcaaaaug

SEQ ID NO: 758742 - RNA, 19 nt, Artificial Sequence
  Description of Artificial Sequence: Synthetic oligonucleotide
uuucacuccguggggauag

SEQ ID NO: 758743 - RNA, 19 nt, Artificial Sequence
  Description of Artificial Sequence: Synthetic oligonucleotide
cuauaaagguuuccuggac

SEQ ID NO: 758744 - RNA, 19 nt, Artificial Sequence
  Description of Artificial Sequence: Synthetic oligonucleotide
ggaaaacuuccugagacag

SEQ ID NO: 758745 - RNA, 19 nt, Artificial Sequence
  Description of Artificial Sequence: Synthetic oligonucleotide
uagcaagagagacggugcc

SEQ ID NO: 758746 - RNA, 19 nt, Artificial Sequence
  Description of Artificial Sequence: Synthetic oligonucleotide
acucgauguuggcagggac

SEQ ID NO: 758747 - RNA, 19 nt, Artificial Sequence
  Description of Artificial Sequence: Synthetic oligonucleotide
ugacggauaauggcaauga

SEQ ID NO: 758748 - RNA, 19 nt, Artificial Sequence
  Description of Artificial Sequence: Synthetic oligonucleotide
guuuauauauauauauaua

SEQ ID NO: 758749 - RNA, 19 nt, Artificial Sequence
  Description of Artificial Sequence: Synthetic oligonucleotide
accccauuucagcacuagc

SEQ ID NO: 758750 - RNA, 19 nt, Artificial Sequence
  Description of Artificial Sequence: Synthetic oligonucleotide
cucacaacaaccggaggcc

SEQ ID NO: 758751 - RNA, 19 nt, Artificial Sequence
  Description of Artificial Sequence: Synthetic oligonucleotide
acucgucauguuccggccc

SEQ ID NO: 758752 - RNA, 19 nt, Artificial Sequence
  Description of Artificial Sequence: Synthetic oligonucleotide
  modified_base (6)..(6): a, c, u, g, unknown or other
uccacngggaacucuugga

SEQ ID NO: 758753 - RNA, 19 nt, Artificial Sequence
  Description of Artificial Sequence: Synthetic oligonucleotide
gcacuagcaagagagacgg

SEQ ID NO: 758754 - RNA, 19 nt, Artificial Sequence
  Description of Artificial Sequence: Synthetic oligonucleotide
aucagaggcauagaucuug

SEQ ID NO: 758755 - RNA, 19 nt, Artificial Sequence
  Description of Artificial Sequence: Synthetic oligonucleotide
ucccgcauaaugguguucc

SEQ ID NO: 758756 - RNA, 19 nt, Artificial Sequence
  Description of Artificial Sequence: Synthetic oligonucleotide
ucagaggcauagaucuuga

SEQ ID NO: 758757 - RNA, 19 nt, Artificial Sequence
  Description of Artificial Sequence: Synthetic oligonucleotide
acacggugcuggcagcugc

SEQ ID NO: 758758 - RNA, 19 nt, Artificial Sequence
  Description of Artificial Sequence: Synthetic oligonucleotide
ugagguugcauggcaaucu

SEQ ID NO: 758759 - RNA, 19 nt, Artificial Sequence
  Description of Artificial Sequence: Synthetic oligonucleotide
  modified_base (7)..(7): a, c, u, g, unknown or other
cuccacngggaacucuugg

SEQ ID NO: 758760 - RNA, 19 nt, Artificial Sequence
  Description of Artificial Sequence: Synthetic oligonucleotide
ucgcuuaaguuuuaauuuu

SEQ ID NO: 758761 - RNA, 19 nt, Artificial Sequence
  Description of Artificial Sequence: Synthetic oligonucleotide
ugucccuggcaaacuacag

SEQ ID NO: 758762 - RNA, 19 nt, Artificial Sequence
  Description of Artificial Sequence: Synthetic oligonucleotide
ugcuaucaauguuuacuga

SEQ ID NO: 758763 - RNA, 19 nt, Artificial Sequence
  Description of Artificial Sequence: Synthetic oligonucleotide
aacaaccggaggccuagcu

SEQ ID NO: 758764 - RNA, 19 nt, Artificial Sequence
  Description of Artificial Sequence: Synthetic oligonucleotide
cagcggaguuccaucaugg

SEQ ID NO: 758765 - RNA, 19 nt, Artificial Sequence
  Description of Artificial Sequence: Synthetic oligonucleotide
gugaccauacaucuccaac

SEQ ID NO: 758766 - RNA, 19 nt, Artificial Sequence
  Description of Artificial Sequence: Synthetic oligonucleotide
uuagcacucuucaccauuu

SEQ ID NO: 758767 - RNA, 19 nt, Artificial Sequence
  Description of Artificial Sequence: Synthetic oligonucleotide
uuugcucaugucuguacaa

SEQ ID NO: 758768 - RNA, 19 nt, Artificial Sequence
  Description of Artificial Sequence: Synthetic oligonucleotide
ucuuggcccucauuugaag

SEQ ID NO: 758769 - RNA, 19 nt, Artificial Sequence
  Description of Artificial Sequence: Synthetic oligonucleotide
uugggaaaagcuucauaau

SEQ ID NO: 758770 - RNA, 19 nt, Artificial Sequence
  Description of Artificial Sequence: Synthetic oligonucleotide
auccaaaucuccaaagcgu

SEQ ID NO: 758771 - RNA, 19 nt, Artificial Sequence
  Description of Artificial Sequence: Synthetic oligonucleotide
uggguguaagcucuccuuc

SEQ ID NO: 758772 - RNA, 19 nt, Artificial Sequence
  Description of Artificial Sequence: Synthetic oligonucleotide
caaucuaauaucuacuuuu

SEQ ID NO: 758773 - RNA, 19 nt, Artificial Sequence
  Description of Artificial Sequence: Synthetic oligonucleotide
cucaacgagucacugucac

SEQ ID NO: 758774 - RNA, 19 nt, Artificial Sequence
  Description of Artificial Sequence: Synthetic oligonucleotide
aggucaugacggaaagugc

SEQ ID NO: 758775 - RNA, 19 nt, Artificial Sequence
  Description of Artificial Sequence: Synthetic oligonucleotide
agcucgacccagcuccucg

SEQ ID NO: 758776 - RNA, 19 nt, Artificial Sequence
  Description of Artificial Sequence: Synthetic oligonucleotide
agcagcagucaucuggacu

SEQ ID NO: 758777 - RNA, 19 nt, Artificial Sequence
  Description of Artificial Sequence: Synthetic oligonucleotide
acggauaauggcaaugaca

SEQ ID NO: 758778 - RNA, 19 nt, Artificial Sequence
  Description of Artificial Sequence: Synthetic oligonucleotide
cccaaugacugcauuaccc

SEQ ID NO: 758779 - RNA, 19 nt, Artificial Sequence
  Description of Artificial Sequence: Synthetic oligonucleotide
ugaagccuuucacuccgug

SEQ ID NO: 758780 - RNA, 19 nt, Artificial Sequence
  Description of Artificial Sequence: Synthetic oligonucleotide
cuaaccuucucaaggaugu

SEQ ID NO: 758781 - RNA, 19 nt, Artificial Sequence
  Description of Artificial Sequence: Synthetic oligonucleotide
ugagacaguuggcuagccu

SEQ ID NO: 758782 - RNA, 19 nt, Artificial Sequence
  Description of Artificial Sequence: Synthetic oligonucleotide
uucccgucuuauauccacc

SEQ ID NO: 758783 - RNA, 19 nt, Artificial Sequence
  Description of Artificial Sequence: Synthetic oligonucleotide
cacggauuucagcugcucc

SEQ ID NO: 758784 - RNA, 19 nt, Artificial Sequence
  Description of Artificial Sequence: Synthetic oligonucleotide
acagcggaguuccaucaug

SEQ ID NO: 758785 - RNA, 19 nt, Artificial Sequence
  Description of Artificial Sequence: Synthetic oligonucleotide
gagacguagcagcccacag

SEQ ID NO: 758786 - RNA, 19 nt, Artificial Sequence
  Description of Artificial Sequence: Synthetic oligonucleotide
ugacaaguguugguagcag

SEQ ID NO: 758787 - RNA, 19 nt, Artificial Sequence
  Description of Artificial Sequence: Synthetic oligonucleotide
caugcaacgaaaagcucga

SEQ ID NO: 758788 - RNA, 19 nt, Artificial Sequence
  Description of Artificial Sequence: Synthetic oligonucleotide
caugcuaucaauguuuacu

SEQ ID NO: 758789 - RNA, 19 nt, Artificial Sequence
  Description of Artificial Sequence: Synthetic oligonucleotide
accugauuacucuccucag

SEQ ID NO: 758790 - RNA, 19 nt, Artificial Sequence
  Description of Artificial Sequence: Synthetic oligonucleotide
ccucacaacaaccggaggc

SEQ ID NO: 758791 - RNA, 19 nt, Artificial Sequence
  Description of Artificial Sequence: Synthetic oligonucleotide
ucaaugccuggucuuucac

SEQ ID NO: 758792 - RNA, 19 nt, Artificial Sequence
  Description of Artificial Sequence: Synthetic oligonucleotide
ucccgucuuauauccacca

SEQ ID NO: 758793 - RNA, 19 nt, Artificial Sequence
  Description of Artificial Sequence: Synthetic oligonucleotide
auauguuuauauauauaua

SEQ ID NO: 758794 - RNA, 19 nt, Artificial Sequence
  Description of Artificial Sequence: Synthetic oligonucleotide
gacggauaauggcaaugac

SEQ ID NO: 758795 - RNA, 19 nt, Artificial Sequence
  Description of Artificial Sequence: Synthetic oligonucleotide
uguucccaagaaucuuggc

SEQ ID NO: 758796 - RNA, 19 nt, Artificial Sequence
  Description of Artificial Sequence: Synthetic oligonucleotide
aggacacaccucuugggga

SEQ ID NO: 758797 - RNA, 19 nt, Artificial Sequence
  Description of Artificial Sequence: Synthetic oligonucleotide
agaagugaccauacaucuc

SEQ ID NO: 758798 - RNA, 19 nt, Artificial Sequence
  Description of Artificial Sequence: Synthetic oligonucleotide
gucgcuuaaguuuuaauuu

SEQ ID NO: 758799 - RNA, 19 nt, Artificial Sequence
  Description of Artificial Sequence: Synthetic oligonucleotide
ucucuacuacagcauuuuc

SEQ ID NO: 758800 - RNA, 19 nt, Artificial Sequence
  Description of Artificial Sequence: Synthetic oligonucleotide
auguuuauauauauauaua

SEQ ID NO: 758801 - RNA, 19 nt, Artificial Sequence
  Description of Artificial Sequence: Synthetic oligonucleotide
uuuucccgucuuauaucca

SEQ ID NO: 758802 - RNA, 19 nt, Artificial Sequence
  Description of Artificial Sequence: Synthetic oligonucleotide
uacaugcaacgaaaagcuc

SEQ ID NO: 758803 - RNA, 19 nt, Artificial Sequence
  Description of Artificial Sequence: Synthetic oligonucleotide
acacuauuuugcagacacc

SEQ ID NO: 758804 - RNA, 19 nt, Artificial Sequence
  Description of Artificial Sequence: Synthetic oligonucleotide
augguaucuggaacugugg

SEQ ID NO: 758805 - RNA, 19 nt, Artificial Sequence
  Description of Artificial Sequence: Synthetic oligonucleotide
cucgucauguuccggcccc

SEQ ID NO: 758806 - RNA, 19 nt, Artificial Sequence
  Description of Artificial Sequence: Synthetic oligonucleotide
gguagggacaaugggaaug

SEQ ID NO: 758807 - RNA, 19 nt, Artificial Sequence
  Description of Artificial Sequence: Synthetic oligonucleotide
augacggauaauggcaaug

SEQ ID NO: 758808 - RNA, 19 nt, Artificial Sequence
  Description of Artificial Sequence: Synthetic oligonucleotide
ucaacgagucacugucacu

SEQ ID NO: 758809 - RNA, 19 nt, Artificial Sequence
  Description of Artificial Sequence: Synthetic oligonucleotide
gagcacucgucauguuccg

SEQ ID NO: 758810 - RNA, 19 nt, Artificial Sequence
  Description of Artificial Sequence: Synthetic oligonucleotide
acgaaaagcucgacccagc

SEQ ID NO: 758811 - RNA, 19 nt, Artificial Sequence
  Description of Artificial Sequence: Synthetic oligonucleotide
aaaucuccaaagcguucua

SEQ ID NO: 758812 - RNA, 19 nt, Artificial Sequence
  Description of Artificial Sequence: Synthetic oligonucleotide
acuagggcagagggaacac

SEQ ID NO: 758813 - RNA, 19 nt, Artificial Sequence
  Description of Artificial Sequence: Synthetic oligonucleotide
gauuacucuccucaggguu

SEQ ID NO: 758814 - RNA, 19 nt, Artificial Sequence
  Description of Artificial Sequence: Synthetic oligonucleotide
guuaggcuggcuaaccuuc

SEQ ID NO: 758815 - RNA, 19 nt, Artificial Sequence
  Description of Artificial Sequence: Synthetic oligonucleotide
caacauugaucucugcuaa

SEQ ID NO: 758816 - RNA, 19 nt, Artificial Sequence
  Description of Artificial Sequence: Synthetic oligonucleotide
caugucuguacaacauuga

SEQ ID NO: 758817 - RNA, 19 nt, Artificial Sequence
  Description of Artificial Sequence: Synthetic oligonucleotide
aaccucgagugugucaccu

SEQ ID NO: 758818 - RNA, 19 nt, Artificial Sequence
  Description of Artificial Sequence: Synthetic oligonucleotide
uaucuggaacuguggggca

SEQ ID NO: 758819 - RNA, 19 nt, Artificial Sequence
  Description of Artificial Sequence: Synthetic oligonucleotide
uacgguccuaaagacacau

SEQ ID NO: 758820 - RNA, 19 nt, Artificial Sequence
  Description of Artificial Sequence: Synthetic oligonucleotide
uccugguuaggcuggcuaa

SEQ ID NO: 758821 - RNA, 19 nt, Artificial Sequence
  Description of Artificial Sequence: Synthetic oligonucleotide
uugcucaugucuguacaac

SEQ ID NO: 758822 - RNA, 19 nt, Artificial Sequence
  Description of Artificial Sequence: Synthetic oligonucleotide
agccgcguaauguccagca

SEQ ID NO: 758823 - RNA, 19 nt, Artificial Sequence
  Description of Artificial Sequence: Synthetic oligonucleotide
auagugaagacuagagcuu

SEQ ID NO: 758824 - RNA, 19 nt, Artificial Sequence
  Description of Artificial Sequence: Synthetic oligonucleotide
cacucgucauguuccggcc

SEQ ID NO: 758825 - RNA, 19 nt, Artificial Sequence
  Description of Artificial Sequence: Synthetic oligonucleotide
uaaucacauacgguccuaa

SEQ ID NO: 758826 - RNA, 19 nt, Artificial Sequence
  Description of Artificial Sequence: Synthetic oligonucleotide
auggguguaagcucuccuu

SEQ ID NO: 758827 - RNA, 19 nt, Artificial Sequence
  Description of Artificial Sequence: Synthetic oligonucleotide
  modified_base (18)..(18): a, c, u, g, unknown or other
ccgucuuauauccaccang

SEQ ID NO: 758828 - RNA, 19 nt, Artificial Sequence
  Description of Artificial Sequence: Synthetic oligonucleotide
gagacaguuggcuagccuu

SEQ ID NO: 758829 - RNA, 19 nt, Artificial Sequence
  Description of Artificial Sequence: Synthetic oligonucleotide
agacaacucgauguuggca

SEQ ID NO: 758830 - RNA, 19 nt, Artificial Sequence
  Description of Artificial Sequence: Synthetic oligonucleotide
gguagcagugucaugguuc

SEQ ID NO: 758831 - RNA, 19 nt, Artificial Sequence
  Description of Artificial Sequence: Synthetic oligonucleotide
ucgacccagcuccucggcc

SEQ ID NO: 758832 - RNA, 19 nt, Artificial Sequence
  Description of Artificial Sequence: Synthetic oligonucleotide
auaccugagaagugaccau

SEQ ID NO: 758833 - RNA, 19 nt, Artificial Sequence
  Description of Artificial Sequence: Synthetic oligonucleotide
gcugacaaguguugguagc

SEQ ID NO: 758834 - RNA, 19 nt, Artificial Sequence
  Description of Artificial Sequence: Synthetic oligonucleotide
gguguucccaagaaucuug

SEQ ID NO: 758835 - RNA, 19 nt, Artificial Sequence
  Description of Artificial Sequence: Synthetic oligonucleotide
uguugguagcagugucaug

SEQ ID NO: 758836 - RNA, 19 nt, Artificial Sequence
  Description of Artificial Sequence: Synthetic oligonucleotide
uccaggguacaugcaacga

SEQ ID NO: 758837 - RNA, 19 nt, Artificial Sequence
  Description of Artificial Sequence: Synthetic oligonucleotide
cuucauaaucacauacggu

SEQ ID NO: 758838 - RNA, 19 nt, Artificial Sequence
  Description of Artificial Sequence: Synthetic oligonucleotide
ugcauuacccacgcccacu

SEQ ID NO: 758839 - RNA, 19 nt, Artificial Sequence
  Description of Artificial Sequence: Synthetic oligonucleotide
guugcauggcaaucuaaua

SEQ ID NO: 758840 - RNA, 19 nt, Artificial Sequence
  Description of Artificial Sequence: Synthetic oligonucleotide
agccucacaacaaccggag

SEQ ID NO: 758841 - RNA, 19 nt, Artificial Sequence
  Description of Artificial Sequence: Synthetic oligonucleotide
caaaguuggaaaacuuccu

SEQ ID NO: 758842 - RNA, 19 nt, Artificial Sequence
  Description of Artificial Sequence: Synthetic oligonucleotide
gacuagggcagagggaaca

SEQ ID NO: 758843 - RNA, 19 nt, Artificial Sequence
  Description of Artificial Sequence: Synthetic oligonucleotide
  modified_base (14)..(14): a, c, u, g, unknown or other
ugccaaccuccacngggaa

SEQ ID NO: 758844 - RNA, 19 nt, Artificial Sequence
  Description of Artificial Sequence: Synthetic oligonucleotide
ggguucgaucuccaugacg

SEQ ID NO: 758845 - RNA, 19 nt, Artificial Sequence
  Description of Artificial Sequence: Synthetic oligonucleotide
aacucgauguuggcaggga

SEQ ID NO: 758846 - RNA, 19 nt, Artificial Sequence
  Description of Artificial Sequence: Synthetic oligonucleotide
augcacauauggucuggga

SEQ ID NO: 758847 - RNA, 19 nt, Artificial Sequence
  Description of Artificial Sequence: Synthetic oligonucleotide
acacaccucuuggggaccc

SEQ ID NO: 758848 - RNA, 19 nt, Artificial Sequence
  Description of Artificial Sequence: Synthetic oligonucleotide
cuguacaacauugaucucu

SEQ ID NO: 758849 - RNA, 19 nt, Artificial Sequence
  Description of Artificial Sequence: Synthetic oligonucleotide
ucgagugugucaccuccau

SEQ ID NO: 758850 - RNA, 19 nt, Artificial Sequence
  Description of Artificial Sequence: Synthetic oligonucleotide
acauacgguccuaaagaca

SEQ ID NO: 758851 - RNA, 19 nt, Artificial Sequence
  Description of Artificial Sequence: Synthetic oligonucleotide
gcuaauugcuuaaaauaga

SEQ ID NO: 758852 - RNA, 19 nt, Artificial Sequence
  Description of Artificial Sequence: Synthetic oligonucleotide
gcaagagagacggugccag

SEQ ID NO: 758853 - RNA, 19 nt, Artificial Sequence
  Description of Artificial Sequence: Synthetic oligonucleotide
agugaccauacaucuccaa

SEQ ID NO: 758854 - RNA, 19 nt, Artificial Sequence
  Description of Artificial Sequence: Synthetic oligonucleotide
gugguagggacaaugggaa

SEQ ID NO: 758855 - RNA, 19 nt, Artificial Sequence
  Description of Artificial Sequence: Synthetic oligonucleotide
guagcuauccugggccugc

SEQ ID NO: 758856 - RNA, 19 nt, Artificial Sequence
  Description of Artificial Sequence: Synthetic oligonucleotide
ugagaauccaugggccauc

SEQ ID NO: 758857 - RNA, 19 nt, Artificial Sequence
  Description of Artificial Sequence: Synthetic oligonucleotide
ggcaagcucccgcauaaug

SEQ ID NO: 758858 - RNA, 19 nt, Artificial Sequence
  Description of Artificial Sequence: Synthetic oligonucleotide
cugagaagugaccauacau

SEQ ID NO: 758859 - RNA, 19 nt, Artificial Sequence
  Description of Artificial Sequence: Synthetic oligonucleotide
cguggggauaguaagucag

SEQ ID NO: 758860 - RNA, 19 nt, Artificial Sequence
  Description of Artificial Sequence: Synthetic oligonucleotide
gcacucgucauguuccggc

SEQ ID NO: 758861 - RNA, 19 nt, Artificial Sequence
  Description of Artificial Sequence: Synthetic oligonucleotide
caccucuuggggacccugg

SEQ ID NO: 758862 - RNA, 19 nt, Artificial Sequence
  Description of Artificial Sequence: Synthetic oligonucleotide
accucgagugugucaccuc

SEQ ID NO: 758863 - RNA, 19 nt, Artificial Sequence
  Description of Artificial Sequence: Synthetic oligonucleotide
gucccuggcaaacuacaga

SEQ ID NO: 758864 - RNA, 19 nt, Artificial Sequence
  Description of Artificial Sequence: Synthetic oligonucleotide
cugacucccaaugacugca

SEQ ID NO: 758865 - RNA, 19 nt, Artificial Sequence
  Description of Artificial Sequence: Synthetic oligonucleotide
gcuaaccuucucaaggaug

SEQ ID NO: 758866 - RNA, 19 nt, Artificial Sequence
  Description of Artificial Sequence: Synthetic oligonucleotide
uggacucggcccucaucag

SEQ ID NO: 758867 - RNA, 19 nt, Artificial Sequence
  Description of Artificial Sequence: Synthetic oligonucleotide
guacaacauugaucucugc

SEQ ID NO: 758868 - RNA, 19 nt, Artificial Sequence
  Description of Artificial Sequence: Synthetic oligonucleotide
ccaugagcggccacaacag

SEQ ID NO: 758869 - RNA, 19 nt, Artificial Sequence
  Description of Artificial Sequence: Synthetic oligonucleotide
agguagcuauccugggccu

SEQ ID NO: 758870 - RNA, 19 nt, Artificial Sequence
  Description of Artificial Sequence: Synthetic oligonucleotide
cuggcacaccugauuacuc

SEQ ID NO: 758871 - RNA, 19 nt, Artificial Sequence
  Description of Artificial Sequence: Synthetic oligonucleotide
cucaaugccuggucuuuca

SEQ ID NO: 758872 - RNA, 19 nt, Artificial Sequence
  Description of Artificial Sequence: Synthetic oligonucleotide
cagucugucccuggcaaac

SEQ ID NO: 758873 - RNA, 19 nt, Artificial Sequence
  Description of Artificial Sequence: Synthetic oligonucleotide
cugacaaguguugguagca

SEQ ID NO: 758874 - RNA, 19 nt, Artificial Sequence
  Description of Artificial Sequence: Synthetic oligonucleotide
gagaucucuugaguugguc

SEQ ID NO: 758875 - RNA, 19 nt, Artificial Sequence
  Description of Artificial Sequence: Synthetic oligonucleotide
ggucgcuuaaguuuuaauu

SEQ ID NO: 758876 - RNA, 19 nt, Artificial Sequence
  Description of Artificial Sequence: Synthetic oligonucleotide
cugcuuugggguucgaucu

SEQ ID NO: 758877 - RNA, 19 nt, Artificial Sequence
  Description of Artificial Sequence: Synthetic oligonucleotide
ggaguuccaucauggugcc

SEQ ID NO: 758878 - RNA, 19 nt, Artificial Sequence
  Description of Artificial Sequence: Synthetic oligonucleotide
acacggauuucagcugcuc

SEQ ID NO: 758879 - RNA, 19 nt, Artificial Sequence
  Description of Artificial Sequence: Synthetic oligonucleotide
aggucgcuuaaguuuuaau

SEQ ID NO: 758880 - RNA, 19 nt, Artificial Sequence
  Description of Artificial Sequence: Synthetic oligonucleotide
acucggcccucaucagagg

SEQ ID NO: 758881 - RNA, 19 nt, Artificial Sequence
  Description of Artificial Sequence: Synthetic oligonucleotide
agcggaguuccaucauggu

SEQ ID NO: 758882 - RNA, 19 nt, Artificial Sequence
  Description of Artificial Sequence: Synthetic oligonucleotide
cagccucacaacaaccgga

SEQ ID NO: 758883 - RNA, 19 nt, Artificial Sequence
  Description of Artificial Sequence: Synthetic oligonucleotide
cauuacccacgcccacucc

SEQ ID NO: 758884 - RNA, 19 nt, Artificial Sequence
  Description of Artificial Sequence: Synthetic oligonucleotide
caacgaaaagcucgaccca

SEQ ID NO: 758885 - RNA, 19 nt, Artificial Sequence
  Description of Artificial Sequence: Synthetic oligonucleotide
agcucccgcauaauggugu

SEQ ID NO: 758886 - RNA, 19 nt, Artificial Sequence
  Description of Artificial Sequence: Synthetic oligonucleotide
aggccuagcuucauagacu

SEQ ID NO: 758887 - RNA, 19 nt, Artificial Sequence
  Description of Artificial Sequence: Synthetic oligonucleotide
gacuagagcuuccuugaau

SEQ ID NO: 758888 - RNA, 19 nt, Artificial Sequence
  Description of Artificial Sequence: Synthetic oligonucleotide
aacacggauuucagcugcu

SEQ ID NO: 758889 - RNA, 19 nt, Artificial Sequence
  Description of Artificial Sequence: Synthetic oligonucleotide
augcaacgaaaagcucgac

SEQ ID NO: 758890 - RNA, 19 nt, Artificial Sequence
  Description of Artificial Sequence: Synthetic oligonucleotide
ccucgagugugucaccucc

SEQ ID NO: 758891 - RNA, 19 nt, Artificial Sequence
  Description of Artificial Sequence: Synthetic oligonucleotide
uugaagccuuucacuccgu

SEQ ID NO: 758892 - RNA, 19 nt, Artificial Sequence
  Description of Artificial Sequence: Synthetic oligonucleotide
agugugucaccuccaucuu

SEQ ID NO: 758893 - RNA, 19 nt, Artificial Sequence
  Description of Artificial Sequence: Synthetic oligonucleotide
ggaaugugggcccaucucu

SEQ ID NO: 758894 - RNA, 19 nt, Artificial Sequence
  Description of Artificial Sequence: Synthetic oligonucleotide
cauggcaaucuaauaucua

SEQ ID NO: 758895 - RNA, 19 nt, Artificial Sequence
  Description of Artificial Sequence: Synthetic oligonucleotide
cugagguugcauggcaauc

SEQ ID NO: 758896 - RNA, 19 nt, Artificial Sequence
  Description of Artificial Sequence: Synthetic oligonucleotide
ugacugcauuacccacgcc

SEQ ID NO: 758897 - RNA, 19 nt, Artificial Sequence
  Description of Artificial Sequence: Synthetic oligonucleotide
ugaguuggucugccaguuu

SEQ ID NO: 758898 - RNA, 19 nt, Artificial Sequence
  Description of Artificial Sequence: Synthetic oligonucleotide
ugguagggacaaugggaau

SEQ ID NO: 758899 - RNA, 19 nt, Artificial Sequence
  Description of Artificial Sequence: Synthetic oligonucleotide
uuacucuccucaggguuau

SEQ ID NO: 758900 - RNA, 19 nt, Artificial Sequence
  Description of Artificial Sequence: Synthetic oligonucleotide
caaucucaaugccuggucu

SEQ ID NO: 758901 - RNA, 19 nt, Artificial Sequence
  Description of Artificial Sequence: Synthetic oligonucleotide
caagcucccgcauaauggu

SEQ ID NO: 758902 - RNA, 19 nt, Artificial Sequence
  Description of Artificial Sequence: Synthetic oligonucleotide
gguugauaccugagaagug

SEQ ID NO: 758903 - RNA, 19 nt, Artificial Sequence
  Description of Artificial Sequence: Synthetic oligonucleotide
ccgguugauaccugagaag

SEQ ID NO: 758904 - RNA, 19 nt, Artificial Sequence
  Description of Artificial Sequence: Synthetic oligonucleotide
uggggcaagcucccgcaua

SEQ ID NO: 758905 - RNA, 19 nt, Artificial Sequence
  Description of Artificial Sequence: Synthetic oligonucleotide
guuagcacucuucaccauu

SEQ ID NO: 758906 - RNA, 19 nt, Artificial Sequence
  Description of Artificial Sequence: Synthetic oligonucleotide
aagcucgacccagcuccuc

SEQ ID NO: 758907 - RNA, 19 nt, Artificial Sequence
  Description of Artificial Sequence: Synthetic oligonucleotide
ugguguucccaagaaucuu

SEQ ID NO: 758908 - RNA, 19 nt, Artificial Sequence
  Description of Artificial Sequence: Synthetic oligonucleotide
aaagcucgacccagcuccu

SEQ ID NO: 758909 - RNA, 19 nt, Artificial Sequence
  Description of Artificial Sequence: Synthetic oligonucleotide
guuugaucuuuggccaguc

SEQ ID NO: 758910 - RNA, 19 nt, Artificial Sequence
  Description of Artificial Sequence: Synthetic oligonucleotide
cacuccguggggauaguaa

SEQ ID NO: 758911 - RNA, 19 nt, Artificial Sequence
  Description of Artificial Sequence: Synthetic oligonucleotide
guagggacaaugggaaugu

SEQ ID NO: 758912 - RNA, 19 nt, Artificial Sequence
  Description of Artificial Sequence: Synthetic oligonucleotide
cucgacccagcuccucggc

SEQ ID NO: 758913 - RNA, 19 nt, Artificial Sequence
  Description of Artificial Sequence: Synthetic oligonucleotide
ucaggucgcuuaaguuuua

SEQ ID NO: 758914 - RNA, 19 nt, Artificial Sequence
  Description of Artificial Sequence: Synthetic oligonucleotide
cugagacaguuggcuagcc

SEQ ID NO: 758915 - RNA, 19 nt, Artificial Sequence
  Description of Artificial Sequence: Synthetic oligonucleotide
ggcaaucuaauaucuacuu

SEQ ID NO: 758916 - RNA, 19 nt, Artificial Sequence
  Description of Artificial Sequence: Synthetic oligonucleotide
cucaggucgcuuaaguuuu

SEQ ID NO: 758917 - RNA, 19 nt, Artificial Sequence
  Description of Artificial Sequence: Synthetic oligonucleotide
ucccuggaucuuugggaaa

SEQ ID NO: 758918 - RNA, 19 nt, Artificial Sequence
  Description of Artificial Sequence: Synthetic oligonucleotide
ggucaugacggaaagugcu

SEQ ID NO: 758919 - RNA, 19 nt, Artificial Sequence
  Description of Artificial Sequence: Synthetic oligonucleotide
aaccggaggccuagcuuca

SEQ ID NO: 758920 - RNA, 19 nt, Artificial Sequence
  Description of Artificial Sequence: Synthetic oligonucleotide
gagacggugccagggcuuc

SEQ ID NO: 758921 - RNA, 19 nt, Artificial Sequence
  Description of Artificial Sequence: Synthetic oligonucleotide
ccuaaagacacaugauaua

SEQ ID NO: 758922 - RNA, 19 nt, Artificial Sequence
  Description of Artificial Sequence: Synthetic oligonucleotide
caccccauuucagcacuag

SEQ ID NO: 758923 - RNA, 19 nt, Artificial Sequence
  Description of Artificial Sequence: Synthetic oligonucleotide
gcuuugggguucgaucucc

SEQ ID NO: 758924 - RNA, 19 nt, Artificial Sequence
  Description of Artificial Sequence: Synthetic oligonucleotide
  modified_base (4)..(4): a, c, u, g, unknown or other
cacngggaacucuuggaau

SEQ ID NO: 758925 - RNA, 19 nt, Artificial Sequence
  Description of Artificial Sequence: Synthetic oligonucleotide
gcucgacccagcuccucgg

SEQ ID NO: 758926 - RNA, 19 nt, Artificial Sequence
  Description of Artificial Sequence: Synthetic oligonucleotide
cucgagugugucaccucca

SEQ ID NO: 758927 - RNA, 19 nt, Artificial Sequence
  Description of Artificial Sequence: Synthetic oligonucleotide
gcauuacccacgcccacuc

SEQ ID NO: 758928 - RNA, 19 nt, Artificial Sequence
  Description of Artificial Sequence: Synthetic oligonucleotide
ccugccugugauagugaag

SEQ ID NO: 758929 - RNA, 19 nt, Artificial Sequence
  Description of Artificial Sequence: Synthetic oligonucleotide
gccucacaacaaccggagg

SEQ ID NO: 758930 - RNA, 19 nt, Artificial Sequence
  Description of Artificial Sequence: Synthetic oligonucleotide
acaccucuuggggacccug

SEQ ID NO: 758931 - RNA, 19 nt, Artificial Sequence
  Description of Artificial Sequence: Synthetic oligonucleotide
ccacaagcccagucuaaac

SEQ ID NO: 758932 - RNA, 19 nt, Artificial Sequence
  Description of Artificial Sequence: Synthetic oligonucleotide
gcucaggucgcuuaaguuu

SEQ ID NO: 758933 - RNA, 19 nt, Artificial Sequence
  Description of Artificial Sequence: Synthetic oligonucleotide
gucaugacggaaagugcua

SEQ ID NO: 758934 - RNA, 19 nt, Artificial Sequence
  Description of Artificial Sequence: Synthetic oligonucleotide
  modified_base (9)..(9): a, c, u, g, unknown or other
accuccacngggaacucuu

SEQ ID NO: 758935 - RNA, 19 nt, Artificial Sequence
  Description of Artificial Sequence: Synthetic oligonucleotide
gccccugacucccaaugac

SEQ ID NO: 758936 - RNA, 19 nt, Artificial Sequence
  Description of Artificial Sequence: Synthetic oligonucleotide
gcuccucggccugaacucg

SEQ ID NO: 758937 - RNA, 19 nt, Artificial Sequence
  Description of Artificial Sequence: Synthetic oligonucleotide
gugaagacuagagcuuccu

SEQ ID NO: 758938 - RNA, 19 nt, Artificial Sequence
  Description of Artificial Sequence: Synthetic oligonucleotide
ggaggccuagcuucauaga

SEQ ID NO: 758939 - RNA, 19 nt, Artificial Sequence
  Description of Artificial Sequence: Synthetic oligonucleotide
  modified_base (17)..(17): a, c, u, g, unknown or other
gcaugccaaccuccacngg

SEQ ID NO: 758940 - RNA, 19 nt, Artificial Sequence
  Description of Artificial Sequence: Synthetic oligonucleotide
cccaagaaucuuggcacag

SEQ ID NO: 758941 - RNA, 19 nt, Artificial Sequence
  Description of Artificial Sequence: Synthetic oligonucleotide
acgguccuaaagacacaug

SEQ ID NO: 758942 - RNA, 19 nt, Artificial Sequence
  Description of Artificial Sequence: Synthetic oligonucleotide
ggggauggaccaugguauc

SEQ ID NO: 758943 - RNA, 19 nt, Artificial Sequence
  Description of Artificial Sequence: Synthetic oligonucleotide
gcaaucuaauaucuacuuu

SEQ ID NO: 758944 - RNA, 19 nt, Artificial Sequence
  Description of Artificial Sequence: Synthetic oligonucleotide
cacaacaaccggaggccua

SEQ ID NO: 758945 - RNA, 19 nt, Artificial Sequence
  Description of Artificial Sequence: Synthetic oligonucleotide
ugcggaucuuggcccucau

SEQ ID NO: 758946 - RNA, 19 nt, Artificial Sequence
  Description of Artificial Sequence: Synthetic oligonucleotide
ccaugcuaucaauguuuac

SEQ ID NO: 758947 - RNA, 19 nt, Artificial Sequence
  Description of Artificial Sequence: Synthetic oligonucleotide
agguugcauggcaaucuaa

SEQ ID NO: 758948 - RNA, 19 nt, Artificial Sequence
  Description of Artificial Sequence: Synthetic oligonucleotide
ggacucggcccucaucaga

SEQ ID NO: 758949 - RNA, 19 nt, Artificial Sequence
  Description of Artificial Sequence: Synthetic oligonucleotide
ccaugacggauaauggcaa

SEQ ID NO: 758950 - RNA, 19 nt, Artificial Sequence
  Description of Artificial Sequence: Synthetic oligonucleotide
gugccagaagugguaggga

SEQ ID NO: 758951 - RNA, 19 nt, Artificial Sequence
  Description of Artificial Sequence: Synthetic oligonucleotide
aaagugcuauggagacgua

SEQ ID NO: 758952 - RNA, 19 nt, Artificial Sequence
  Description of Artificial Sequence: Synthetic oligonucleotide
guguugguagcagugucau

SEQ ID NO: 758953 - RNA, 19 nt, Artificial Sequence
  Description of Artificial Sequence: Synthetic oligonucleotide
gaaugugggcccaucucuu

SEQ ID NO: 758954 - RNA, 19 nt, Artificial Sequence
  Description of Artificial Sequence: Synthetic oligonucleotide
caacaaccggaggccuagc

SEQ ID NO: 758955 - RNA, 19 nt, Artificial Sequence
  Description of Artificial Sequence: Synthetic oligonucleotide
  modified_base (17)..(17): a, c, u, g, unknown or other
cgucuuauauccaccangu

SEQ ID NO: 758956 - RNA, 19 nt, Artificial Sequence
  Description of Artificial Sequence: Synthetic oligonucleotide
acgcccacucccaucccug

SEQ ID NO: 758957 - RNA, 19 nt, Artificial Sequence
  Description of Artificial Sequence: Synthetic oligonucleotide
agagacggugccagggcuu

SEQ ID NO: 758958 - RNA, 19 nt, Artificial Sequence
  Description of Artificial Sequence: Synthetic oligonucleotide
  modified_base (5)..(5): a, c, u, g, unknown or other
ccacngggaacucuuggaa

SEQ ID NO: 758959 - RNA, 19 nt, Artificial Sequence
  Description of Artificial Sequence: Synthetic oligonucleotide
ucgucauguuccggccccu

SEQ ID NO: 758960 - RNA, 19 nt, Artificial Sequence
  Description of Artificial Sequence: Synthetic oligonucleotide
ccaggguacaugcaacgaa

SEQ ID NO: 758961 - RNA, 19 nt, Artificial Sequence
  Description of Artificial Sequence: Synthetic oligonucleotide
caagcccagucuaaaccau

SEQ ID NO: 758962 - RNA, 19 nt, Artificial Sequence
  Description of Artificial Sequence: Synthetic oligonucleotide
caugacggauaauggcaau

SEQ ID NO: 758963 - RNA, 19 nt, Artificial Sequence
  Description of Artificial Sequence: Synthetic oligonucleotide
uucacuccguggggauagu

SEQ ID NO: 758964 - RNA, 19 nt, Artificial Sequence
  Description of Artificial Sequence: Synthetic oligonucleotide
ccagaagugguagggacaa

SEQ ID NO: 758965 - RNA, 19 nt, Artificial Sequence
  Description of Artificial Sequence: Synthetic oligonucleotide
gggaugucuugagacaacu

SEQ ID NO: 758966 - RNA, 19 nt, Artificial Sequence
  Description of Artificial Sequence: Synthetic oligonucleotide
caccuuccgguugauaccu

SEQ ID NO: 758967 - RNA, 19 nt, Artificial Sequence
  Description of Artificial Sequence: Synthetic oligonucleotide
cugcucaacgagucacugu

SEQ ID NO: 758968 - RNA, 19 nt, Artificial Sequence
  Description of Artificial Sequence: Synthetic oligonucleotide
cccgcauaaugguguuccc

SEQ ID NO: 758969 - RNA, 19 nt, Artificial Sequence
  Description of Artificial Sequence: Synthetic oligonucleotide
cucucuacuacagcauuuu

SEQ ID NO: 758970 - RNA, 19 nt, Artificial Sequence
  Description of Artificial Sequence: Synthetic oligonucleotide
  modified_base (11)..(11): a, c, u, g, unknown or other
caaccuccacngggaacuc

SEQ ID NO: 758971 - RNA, 19 nt, Artificial Sequence
  Description of Artificial Sequence: Synthetic oligonucleotide
cuuucacuccguggggaua

SEQ ID NO: 758972 - RNA, 19 nt, Artificial Sequence
  Description of Artificial Sequence: Synthetic oligonucleotide
  modified_base (8)..(8): a, c, u, g, unknown or other
ccuccacngggaacucuug

SEQ ID NO: 758973 - RNA, 19 nt, Artificial Sequence
  Description of Artificial Sequence: Synthetic oligonucleotide
cugagaauccaugggccau

SEQ ID NO: 758974 - RNA, 19 nt, Artificial Sequence
  Description of Artificial Sequence: Synthetic oligonucleotide
ggccccugacucccaauga

SEQ ID NO: 758975 - RNA, 19 nt, Artificial Sequence
  Description of Artificial Sequence: Synthetic oligonucleotide
gccgugccuucacacggug

SEQ ID NO: 758976 - RNA, 19 nt, Artificial Sequence
  Description of Artificial Sequence: Synthetic oligonucleotide
agccgugccuucacacggu

SEQ ID NO: 758977 - RNA, 19 nt, Artificial Sequence
  Description of Artificial Sequence: Synthetic oligonucleotide
ccgugccuucacacggugc

SEQ ID NO: 758978 - RNA, 19 nt, Artificial Sequence
  Description of Artificial Sequence: Synthetic oligonucleotide
gggguucgaucuccaugac

SEQ ID NO: 758979 - RNA, 19 nt, Artificial Sequence
  Description of Artificial Sequence: Synthetic oligonucleotide
agucagcucuccaccccau

SEQ ID NO: 758980 - RNA, 19 nt, Artificial Sequence
  Description of Artificial Sequence: Synthetic oligonucleotide
gcucaugucuguacaacau

SEQ ID NO: 758981 - RNA, 19 nt, Artificial Sequence
  Description of Artificial Sequence: Synthetic oligonucleotide
caggucgcuuaaguuuuaa

SEQ ID NO: 758982 - RNA, 19 nt, Artificial Sequence
  Description of Artificial Sequence: Synthetic oligonucleotide
cgguugauaccugagaagu

SEQ ID NO: 758983 - RNA, 19 nt, Artificial Sequence
  Description of Artificial Sequence: Synthetic oligonucleotide
ggcuaaccuucucaaggau

SEQ ID NO: 758984 - RNA, 19 nt, Artificial Sequence
  Description of Artificial Sequence: Synthetic oligonucleotide
gcucaacgagucacuguca

SEQ ID NO: 758985 - RNA, 19 nt, Artificial Sequence
  Description of Artificial Sequence: Synthetic oligonucleotide
ccguggggauaguaaguca

SEQ ID NO: 758986 - RNA, 19 nt, Artificial Sequence
  Description of Artificial Sequence: Synthetic oligonucleotide
caucagaggcauagaucuu

SEQ ID NO: 758987 - RNA, 19 nt, Artificial Sequence
  Description of Artificial Sequence: Synthetic oligonucleotide
agacggugccagggcuucu

SEQ ID NO: 758988 - RNA, 19 nt, Artificial Sequence
  Description of Artificial Sequence: Synthetic oligonucleotide
cgcguaauguccagcaccu

SEQ ID NO: 758989 - RNA, 19 nt, Artificial Sequence
  Description of Artificial Sequence: Synthetic oligonucleotide
uagcagugucaugguucuu

SEQ ID NO: 758990 - RNA, 19 nt, Artificial Sequence
  Description of Artificial Sequence: Synthetic oligonucleotide
cggccccugacucccaaug

SEQ ID NO: 758991 - RNA, 19 nt, Artificial Sequence
  Description of Artificial Sequence: Synthetic oligonucleotide
accggaggccuagcuucau

SEQ ID NO: 758992 - RNA, 19 nt, Artificial Sequence
  Description of Artificial Sequence: Synthetic oligonucleotide
cacagcggaguuccaucau

SEQ ID NO: 758993 - RNA, 19 nt, Artificial Sequence
  Description of Artificial Sequence: Synthetic oligonucleotide
cgaucuccaugacggauaa

SEQ ID NO: 758994 - RNA, 19 nt, Artificial Sequence
  Description of Artificial Sequence: Synthetic oligonucleotide
  modified_base (19)..(19): a, c, u, g, unknown or other
cccgucuuauauccaccan

SEQ ID NO: 758995 - RNA, 19 nt, Artificial Sequence
  Description of Artificial Sequence: Synthetic oligonucleotide
cacuagcaagagagacggu

SEQ ID NO: 758996 - RNA, 19 nt, Artificial Sequence
  Description of Artificial Sequence: Synthetic oligonucleotide
agggugcauccugcugcaa

SEQ ID NO: 758997 - RNA, 19 nt, Artificial Sequence
  Description of Artificial Sequence: Synthetic oligonucleotide
cgaaaagcucgacccagcu

SEQ ID NO: 758998 - RNA, 19 nt, Artificial Sequence
  Description of Artificial Sequence: Synthetic oligonucleotide
gaucuccaugacggauaau

SEQ ID NO: 758999 - RNA, 19 nt, Artificial Sequence
  Description of Artificial Sequence: Synthetic oligonucleotide
gcguaauguccagcaccuc

SEQ ID NO: 759000 - RNA, 19 nt, Artificial Sequence
  Description of Artificial Sequence: Synthetic oligonucleotide
gcucccgcauaaugguguu

SEQ ID NO: 759001 - RNA, 19 nt, Artificial Sequence
  Description of Artificial Sequence: Synthetic oligonucleotide
ccguucauguuagcacucu

SEQ ID NO: 759002 - RNA, 19 nt, Artificial Sequence
  Description of Artificial Sequence: Synthetic oligonucleotide
cguucauguuagcacucuu

SEQ ID NO: 759003 - RNA, 19 nt, Artificial Sequence
  Description of Artificial Sequence: Synthetic oligonucleotide
ggcccucauuugaagccuu

SEQ ID NO: 759004 - RNA, 19 nt, Artificial Sequence
  Description of Artificial Sequence: Synthetic oligonucleotide
cggccacaacagcuguuua

SEQ ID NO: 759005 - RNA, 19 nt, Artificial Sequence
  Description of Artificial Sequence: Synthetic oligonucleotide
cggccugaacucggccauc

SEQ ID NO: 759006 - RNA, 19 nt, Artificial Sequence
  Description of Artificial Sequence: Synthetic oligonucleotide
ccggccccugacucccaau

SEQ ID NO: 759007 - RNA, 19 nt, Artificial Sequence
  Description of Artificial Sequence: Synthetic oligonucleotide
aaucuuaauauauauauau

SEQ ID NO: 759008 - RNA, 19 nt, Artificial Sequence
  Description of Artificial Sequence: Synthetic oligonucleotide
aacgguacaauccacacuc

SEQ ID NO: 759009 - RNA, 19 nt, Artificial Sequence
  Description of Artificial Sequence: Synthetic oligonucleotide
aagacgaccaucaagagac

SEQ ID NO: 759010 - RNA, 19 nt, Artificial Sequence
  Description of Artificial Sequence: Synthetic oligonucleotide
uaauuaauaaccuuuggga

SEQ ID NO: 759011 - RNA, 19 nt, Artificial Sequence
  Description of Artificial Sequence: Synthetic oligonucleotide
auauauauauauuauauau

SEQ ID NO: 759012 - RNA, 19 nt, Artificial Sequence
  Description of Artificial Sequence: Synthetic oligonucleotide
uuaauauauauauauauua

SEQ ID NO: 759013 - RNA, 19 nt, Artificial Sequence
  Description of Artificial Sequence: Synthetic oligonucleotide
aaaacccugauuaacagac

SEQ ID NO: 759014 - RNA, 19 nt, Artificial Sequence
  Description of Artificial Sequence: Synthetic oligonucleotide
uugccuuagaccaagaagc

SEQ ID NO: 759015 - RNA, 19 nt, Artificial Sequence
  Description of Artificial Sequence: Synthetic oligonucleotide
accuauguaauacaagcgc

SEQ ID NO: 759016 - RNA, 19 nt, Artificial Sequence
  Description of Artificial Sequence: Synthetic oligonucleotide
ucuuaauauauauauauau

SEQ ID NO: 759017 - RNA, 19 nt, Artificial Sequence
  Description of Artificial Sequence: Synthetic oligonucleotide
ucagauuaaaagcauauuc

SEQ ID NO: 759018 - RNA, 19 nt, Artificial Sequence
  Description of Artificial Sequence: Synthetic oligonucleotide
aguacugcaauacuggguc

SEQ ID NO: 759019 - RNA, 19 nt, Artificial Sequence
  Description of Artificial Sequence: Synthetic oligonucleotide
auuugguguacucaguccc

SEQ ID NO: 759020 - RNA, 19 nt, Artificial Sequence
  Description of Artificial Sequence: Synthetic oligonucleotide
aauauauauauauauuaua

SEQ ID NO: 759021 - RNA, 19 nt, Artificial Sequence
  Description of Artificial Sequence: Synthetic oligonucleotide
auauauauauuauauauua

SEQ ID NO: 759022 - RNA, 19 nt, Artificial Sequence
  Description of Artificial Sequence: Synthetic oligonucleotide
uuuuggauagcaaacaguc

SEQ ID NO: 759023 - RNA, 19 nt, Artificial Sequence
  Description of Artificial Sequence: Synthetic oligonucleotide
auauauauuauauauuaaa

SEQ ID NO: 759024 - RNA, 19 nt, Artificial Sequence
  Description of Artificial Sequence: Synthetic oligonucleotide
agcaaaccuaagcagaacc

SEQ ID NO: 759025 - RNA, 19 nt, Artificial Sequence
  Description of Artificial Sequence: Synthetic oligonucleotide
ugucuuaugcccaacaaga

SEQ ID NO: 759026 - RNA, 19 nt, Artificial Sequence
  Description of Artificial Sequence: Synthetic oligonucleotide
aagucuuuaagucuucucu

SEQ ID NO: 759027 - RNA, 19 nt, Artificial Sequence
  Description of Artificial Sequence: Synthetic oligonucleotide
uaauauauauauauauuau

SEQ ID NO: 759028 - RNA, 19 nt, Artificial Sequence
  Description of Artificial Sequence: Synthetic oligonucleotide
auugcacuaucacuuaggc

SEQ ID NO: 759029 - RNA, 19 nt, Artificial Sequence
  Description of Artificial Sequence: Synthetic oligonucleotide
cauaauaagcuauugaaca

SEQ ID NO: 759030 - RNA, 19 nt, Artificial Sequence
  Description of Artificial Sequence: Synthetic oligonucleotide
ucaguuauggaaacuaaga

SEQ ID NO: 759031 - RNA, 19 nt, Artificial Sequence
  Description of Artificial Sequence: Synthetic oligonucleotide
cuuaccaacgguacaaucc

SEQ ID NO: 759032 - RNA, 19 nt, Artificial Sequence
  Description of Artificial Sequence: Synthetic oligonucleotide
aaaacuuccccaccuaugu

SEQ ID NO: 759033 - RNA, 19 nt, Artificial Sequence
  Description of Artificial Sequence: Synthetic oligonucleotide
aauacaagcgcacuccccu

SEQ ID NO: 759034 - RNA, 19 nt, Artificial Sequence
  Description of Artificial Sequence: Synthetic oligonucleotide
aggauuuacacauacuuca

SEQ ID NO: 759035 - RNA, 19 nt, Artificial Sequence
  Description of Artificial Sequence: Synthetic oligonucleotide
uaaggauuuacacauacuu

SEQ ID NO: 759036 - RNA, 19 nt, Artificial Sequence
  Description of Artificial Sequence: Synthetic oligonucleotide
uucaaaacccugauuaaca

SEQ ID NO: 759037 - RNA, 19 nt, Artificial Sequence
  Description of Artificial Sequence: Synthetic oligonucleotide
ucuacaguaagugagggcu

SEQ ID NO: 759038 - RNA, 19 nt, Artificial Sequence
  Description of Artificial Sequence: Synthetic oligonucleotide
uucagaugaagcucaaucc

SEQ ID NO: 759039 - RNA, 19 nt, Artificial Sequence
  Description of Artificial Sequence: Synthetic oligonucleotide
ugauaaacggcuucaaaac

SEQ ID NO: 759040 - RNA, 19 nt, Artificial Sequence
  Description of Artificial Sequence: Synthetic oligonucleotide
ugucucaacucucugguag

SEQ ID NO: 759041 - RNA, 19 nt, Artificial Sequence
  Description of Artificial Sequence: Synthetic oligonucleotide
auaaacggcuucaaaaccc

SEQ ID NO: 759042 - RNA, 19 nt, Artificial Sequence
  Description of Artificial Sequence: Synthetic oligonucleotide
aaauacacccuccgggcgg

SEQ ID NO: 759043 - RNA, 19 nt, Artificial Sequence
  Description of Artificial Sequence: Synthetic oligonucleotide
uauauauauauuauauauu

SEQ ID NO: 759044 - RNA, 19 nt, Artificial Sequence
  Description of Artificial Sequence: Synthetic oligonucleotide
ucgaguuagcugauaaacg

SEQ ID NO: 759045 - RNA, 19 nt, Artificial Sequence
  Description of Artificial Sequence: Synthetic oligonucleotide
ucuaccagacuuuucacug

SEQ ID NO: 759046 - RNA, 19 nt, Artificial Sequence
  Description of Artificial Sequence: Synthetic oligonucleotide
auggacgacauuuucuuac

SEQ ID NO: 759047 - RNA, 19 nt, Artificial Sequence
  Description of Artificial Sequence: Synthetic oligonucleotide
gaagaguuguuacaugaag

SEQ ID NO: 759048 - RNA, 19 nt, Artificial Sequence
  Description of Artificial Sequence: Synthetic oligonucleotide
gauaaacggcuucaaaacc

SEQ ID NO: 759049 - RNA, 19 nt, Artificial Sequence
  Description of Artificial Sequence: Synthetic oligonucleotide
uauauauauauauuauaua

SEQ ID NO: 759050 - RNA, 19 nt, Artificial Sequence
  Description of Artificial Sequence: Synthetic oligonucleotide
auauauauauauauuauau

SEQ ID NO: 759051 - RNA, 19 nt, Artificial Sequence
  Description of Artificial Sequence: Synthetic oligonucleotide
uauauauauuauauauuaa

SEQ ID NO: 759052 - RNA, 19 nt, Artificial Sequence
  Description of Artificial Sequence: Synthetic oligonucleotide
gauagcaaacaguccacgg

SEQ ID NO: 759053 - RNA, 19 nt, Artificial Sequence
  Description of Artificial Sequence: Synthetic oligonucleotide
aaagauugcacuaucacuu

SEQ ID NO: 759054 - RNA, 19 nt, Artificial Sequence
  Description of Artificial Sequence: Synthetic oligonucleotide
acgacauuuucuuaccaac

SEQ ID NO: 759055 - RNA, 19 nt, Artificial Sequence
  Description of Artificial Sequence: Synthetic oligonucleotide
gguaaauacacccuccggg

SEQ ID NO: 759056 - RNA, 19 nt, Artificial Sequence
  Description of Artificial Sequence: Synthetic oligonucleotide
uacauuaccuguauacaca

SEQ ID NO: 759057 - RNA, 19 nt, Artificial Sequence
  Description of Artificial Sequence: Synthetic oligonucleotide
auuuauaaaggcuugccuu

SEQ ID NO: 759058 - RNA, 19 nt, Artificial Sequence
  Description of Artificial Sequence: Synthetic oligonucleotide
acuguugaucacuuguuuc

SEQ ID NO: 759059 - RNA, 19 nt, Artificial Sequence
  Description of Artificial Sequence: Synthetic oligonucleotide
uaugccgaggcacuaauac

SEQ ID NO: 759060 - RNA, 19 nt, Artificial Sequence
  Description of Artificial Sequence: Synthetic oligonucleotide
agcaaggaguacuuguuac

SEQ ID NO: 759061 - RNA, 19 nt, Artificial Sequence
  Description of Artificial Sequence: Synthetic oligonucleotide
aacugaugagaccucaagu

SEQ ID NO: 759062 - RNA, 19 nt, Artificial Sequence
  Description of Artificial Sequence: Synthetic oligonucleotide
uaauaagcuauugaacacc

SEQ ID NO: 759063 - RNA, 19 nt, Artificial Sequence
  Description of Artificial Sequence: Synthetic oligonucleotide
uuaggaucucuguaugccg

SEQ ID NO: 759064 - RNA, 19 nt, Artificial Sequence
  Description of Artificial Sequence: Synthetic oligonucleotide
aguacuuguuacugucugc

SEQ ID NO: 759065 - RNA, 19 nt, Artificial Sequence
  Description of Artificial Sequence: Synthetic oligonucleotide
gauuaacagacugagccag

SEQ ID NO: 759066 - RNA, 19 nt, Artificial Sequence
  Description of Artificial Sequence: Synthetic oligonucleotide
uuaccaacgguacaaucca

SEQ ID NO: 759067 - RNA, 19 nt, Artificial Sequence
  Description of Artificial Sequence: Synthetic oligonucleotide
uacacaacuacuacuguaa

SEQ ID NO: 759068 - RNA, 19 nt, Artificial Sequence
  Description of Artificial Sequence: Synthetic oligonucleotide
aacccucugguuuaguuca

SEQ ID NO: 759069 - RNA, 19 nt, Artificial Sequence
  Description of Artificial Sequence: Synthetic oligonucleotide
cuugccuuagaccaagaag

SEQ ID NO: 759070 - RNA, 19 nt, Artificial Sequence
  Description of Artificial Sequence: Synthetic oligonucleotide
aucccaucugaguuaauac

SEQ ID NO: 759071 - RNA, 19 nt, Artificial Sequence
  Description of Artificial Sequence: Synthetic oligonucleotide
acuuguuacugucugccuc

SEQ ID NO: 759072 - RNA, 19 nt, Artificial Sequence
  Description of Artificial Sequence: Synthetic oligonucleotide
uuuauaaaggcuugccuua

SEQ ID NO: 759073 - RNA, 19 nt, Artificial Sequence
  Description of Artificial Sequence: Synthetic oligonucleotide
uucgaguuagcugauaaac

SEQ ID NO: 759074 - RNA, 19 nt, Artificial Sequence
  Description of Artificial Sequence: Synthetic oligonucleotide
agcauuucgguugacauug

SEQ ID NO: 759075 - RNA, 19 nt, Artificial Sequence
  Description of Artificial Sequence: Synthetic oligonucleotide
aagcuguaauuuauaaagg

SEQ ID NO: 759076 - RNA, 19 nt, Artificial Sequence
  Description of Artificial Sequence: Synthetic oligonucleotide
uguaauuacucuguggcuc

SEQ ID NO: 759077 - RNA, 19 nt, Artificial Sequence
  Description of Artificial Sequence: Synthetic oligonucleotide
guuccgaguaaguaacugg

SEQ ID NO: 759078 - RNA, 19 nt, Artificial Sequence
  Description of Artificial Sequence: Synthetic oligonucleotide
auaaccggcaauauauaac

SEQ ID NO: 759079 - RNA, 19 nt, Artificial Sequence
  Description of Artificial Sequence: Synthetic oligonucleotide
ugcacauucgaguuagcug

SEQ ID NO: 759080 - RNA, 19 nt, Artificial Sequence
  Description of Artificial Sequence: Synthetic oligonucleotide
aauggcaagauggacgaca

SEQ ID NO: 759081 - RNA, 19 nt, Artificial Sequence
  Description of Artificial Sequence: Synthetic oligonucleotide
aaaccugaagacgaccauc

SEQ ID NO: 759082 - RNA, 19 nt, Artificial Sequence
  Description of Artificial Sequence: Synthetic oligonucleotide
ugguaaauacacccuccgg

SEQ ID NO: 759083 - RNA, 19 nt, Artificial Sequence
  Description of Artificial Sequence: Synthetic oligonucleotide
ugaugagaccucaagugcu

SEQ ID NO: 759084 - RNA, 19 nt, Artificial Sequence
  Description of Artificial Sequence: Synthetic oligonucleotide
auuuucuuaccaacgguac

SEQ ID NO: 759085 - RNA, 19 nt, Artificial Sequence
  Description of Artificial Sequence: Synthetic oligonucleotide
uuuucuuaccaacgguaca

SEQ ID NO: 759086 - RNA, 19 nt, Artificial Sequence
  Description of Artificial Sequence: Synthetic oligonucleotide
aagaguuguuacaugaagu

SEQ ID NO: 759087 - RNA, 19 nt, Artificial Sequence
  Description of Artificial Sequence: Synthetic oligonucleotide
aaauuaguuucuacaagga

SEQ ID NO: 759088 - RNA, 19 nt, Artificial Sequence
  Description of Artificial Sequence: Synthetic oligonucleotide
cuuauggugcacauucgag

SEQ ID NO: 759089 - RNA, 19 nt, Artificial Sequence
  Description of Artificial Sequence: Synthetic oligonucleotide
uauagucauccagaggcgg

SEQ ID NO: 759090 - RNA, 19 nt, Artificial Sequence
  Description of Artificial Sequence: Synthetic oligonucleotide
cuauguaauacaagcgcac

SEQ ID NO: 759091 - RNA, 19 nt, Artificial Sequence
  Description of Artificial Sequence: Synthetic oligonucleotide
uggaaacuaagaauggaua

SEQ ID NO: 759092 - RNA, 19 nt, Artificial Sequence
  Description of Artificial Sequence: Synthetic oligonucleotide
uaguauugcaguucugugu

SEQ ID NO: 759093 - RNA, 19 nt, Artificial Sequence
  Description of Artificial Sequence: Synthetic oligonucleotide
aaggugcuuuaacugauga

SEQ ID NO: 759094 - RNA, 19 nt, Artificial Sequence
  Description of Artificial Sequence: Synthetic oligonucleotide
aaugcagguuccgaguaag

SEQ ID NO: 759095 - RNA, 19 nt, Artificial Sequence
  Description of Artificial Sequence: Synthetic oligonucleotide
uuacaauuggggcucugca

SEQ ID NO: 759096 - RNA, 19 nt, Artificial Sequence
  Description of Artificial Sequence: Synthetic oligonucleotide
caccuauguaauacaagcg

SEQ ID NO: 759097 - RNA, 19 nt, Artificial Sequence
  Description of Artificial Sequence: Synthetic oligonucleotide
ggaugguugacacauuuag

SEQ ID NO: 759098 - RNA, 19 nt, Artificial Sequence
  Description of Artificial Sequence: Synthetic oligonucleotide
cugaugagaccucaagugc

SEQ ID NO: 759099 - RNA, 19 nt, Artificial Sequence
  Description of Artificial Sequence: Synthetic oligonucleotide
uuagcugauaaacggcuuc

SEQ ID NO: 759100 - RNA, 19 nt, Artificial Sequence
  Description of Artificial Sequence: Synthetic oligonucleotide
ggaaacuaagaauggauac

SEQ ID NO: 759101 - RNA, 19 nt, Artificial Sequence
  Description of Artificial Sequence: Synthetic oligonucleotide
uagugguaaggauuuacac

SEQ ID NO: 759102 - RNA, 19 nt, Artificial Sequence
  Description of Artificial Sequence: Synthetic oligonucleotide
uguuaggaucucuguaugc

SEQ ID NO: 759103 - RNA, 19 nt, Artificial Sequence
  Description of Artificial Sequence: Synthetic oligonucleotide
uaccuguauacacaacuac

SEQ ID NO: 759104 - RNA, 19 nt, Artificial Sequence
  Description of Artificial Sequence: Synthetic oligonucleotide
gcuauugaacaccaaaaug

SEQ ID NO: 759105 - RNA, 19 nt, Artificial Sequence
  Description of Artificial Sequence: Synthetic oligonucleotide
guacaauccacacucagaa

SEQ ID NO: 759106 - RNA, 19 nt, Artificial Sequence
  Description of Artificial Sequence: Synthetic oligonucleotide
accggcaauauauaacaug

SEQ ID NO: 759107 - RNA, 19 nt, Artificial Sequence
  Description of Artificial Sequence: Synthetic oligonucleotide
agggccauucagaugaagc

SEQ ID NO: 759108 - RNA, 19 nt, Artificial Sequence
  Description of Artificial Sequence: Synthetic oligonucleotide
uaucacuuaggcacucggc

SEQ ID NO: 759109 - RNA, 19 nt, Artificial Sequence
  Description of Artificial Sequence: Synthetic oligonucleotide
uguuucgugggauuguaau

SEQ ID NO: 759110 - RNA, 19 nt, Artificial Sequence
  Description of Artificial Sequence: Synthetic oligonucleotide
ccaccuauguaauacaagc

SEQ ID NO: 759111 - RNA, 19 nt, Artificial Sequence
  Description of Artificial Sequence: Synthetic oligonucleotide
gaucucuguaugccgaggc

SEQ ID NO: 759112 - RNA, 19 nt, Artificial Sequence
  Description of Artificial Sequence: Synthetic oligonucleotide
aacauguggcaacccuuuc

SEQ ID NO: 759113 - RNA, 19 nt, Artificial Sequence
  Description of Artificial Sequence: Synthetic oligonucleotide
cugguaaauacacccuccg

SEQ ID NO: 759114 - RNA, 19 nt, Artificial Sequence
  Description of Artificial Sequence: Synthetic oligonucleotide
ucuugauacauuaccugua

SEQ ID NO: 759115 - RNA, 19 nt, Artificial Sequence
  Description of Artificial Sequence: Synthetic oligonucleotide
uggauggguauagucaucc

SEQ ID NO: 759116 - RNA, 19 nt, Artificial Sequence
  Description of Artificial Sequence: Synthetic oligonucleotide
ugacauuggagagcaaacc

SEQ ID NO: 759117 - RNA, 19 nt, Artificial Sequence
  Description of Artificial Sequence: Synthetic oligonucleotide
aucgcacugaaggggaucc

SEQ ID NO: 759118 - RNA, 19 nt, Artificial Sequence
  Description of Artificial Sequence: Synthetic oligonucleotide
aguaggagacagcucagcu

SEQ ID NO: 759119 - RNA, 19 nt, Artificial Sequence
  Description of Artificial Sequence: Synthetic oligonucleotide
gaggcggcaguucuguuag

SEQ ID NO: 759120 - RNA, 19 nt, Artificial Sequence
  Description of Artificial Sequence: Synthetic oligonucleotide
cuaucacuuaggcacucgg

SEQ ID NO: 759121 - RNA, 19 nt, Artificial Sequence
  Description of Artificial Sequence: Synthetic oligonucleotide
uauguaauacaagcgcacu

SEQ ID NO: 759122 - RNA, 19 nt, Artificial Sequence
  Description of Artificial Sequence: Synthetic oligonucleotide
uuauaaaggcuugccuuag

SEQ ID NO: 759123 - RNA, 19 nt, Artificial Sequence
  Description of Artificial Sequence: Synthetic oligonucleotide
cuguauacacaacuacuac

SEQ ID NO: 759124 - RNA, 19 nt, Artificial Sequence
  Description of Artificial Sequence: Synthetic oligonucleotide
ugugauugacaggcgagag

SEQ ID NO: 759125 - RNA, 19 nt, Artificial Sequence
  Description of Artificial Sequence: Synthetic oligonucleotide
cugucuuaugcccaacaag

SEQ ID NO: 759126 - RNA, 19 nt, Artificial Sequence
  Description of Artificial Sequence: Synthetic oligonucleotide
acuacuacuguaauuaaua

SEQ ID NO: 759127 - RNA, 19 nt, Artificial Sequence
  Description of Artificial Sequence: Synthetic oligonucleotide
aagauggacgacauuuucu

SEQ ID NO: 759128 - RNA, 19 nt, Artificial Sequence
  Description of Artificial Sequence: Synthetic oligonucleotide
acaccucaguuauggaaac

SEQ ID NO: 759129 - RNA, 19 nt, Artificial Sequence
  Description of Artificial Sequence: Synthetic oligonucleotide
auggauacagacagcagag

SEQ ID NO: 759130 - RNA, 19 nt, Artificial Sequence
  Description of Artificial Sequence: Synthetic oligonucleotide
uuguaauuacucuguggcu

SEQ ID NO: 759131 - RNA, 19 nt, Artificial Sequence
  Description of Artificial Sequence: Synthetic oligonucleotide
uaaagccgucuacaguaag

SEQ ID NO: 759132 - RNA, 19 nt, Artificial Sequence
  Description of Artificial Sequence: Synthetic oligonucleotide
uuucgugggauuguaauua

SEQ ID NO: 759133 - RNA, 19 nt, Artificial Sequence
  Description of Artificial Sequence: Synthetic oligonucleotide
guauuugguguacucaguc

SEQ ID NO: 759134 - RNA, 19 nt, Artificial Sequence
  Description of Artificial Sequence: Synthetic oligonucleotide
guacuuguuacugucugcc

SEQ ID NO: 759135 - RNA, 19 nt, Artificial Sequence
  Description of Artificial Sequence: Synthetic oligonucleotide
acaagcgcacuccccuucc

SEQ ID NO: 759136 - RNA, 19 nt, Artificial Sequence
  Description of Artificial Sequence: Synthetic oligonucleotide
ugaugacugugaagguccg

SEQ ID NO: 759137 - RNA, 19 nt, Artificial Sequence
  Description of Artificial Sequence: Synthetic oligonucleotide
uccuauaugccuucuuguc

SEQ ID NO: 759138 - RNA, 19 nt, Artificial Sequence
  Description of Artificial Sequence: Synthetic oligonucleotide
agauggacgacauuuucuu

SEQ ID NO: 759139 - RNA, 19 nt, Artificial Sequence
  Description of Artificial Sequence: Synthetic oligonucleotide
cauacuuugguucaacugu

SEQ ID NO: 759140 - RNA, 19 nt, Artificial Sequence
  Description of Artificial Sequence: Synthetic oligonucleotide
uggacgacauuuucuuacc

SEQ ID NO: 759141 - RNA, 19 nt, Artificial Sequence
  Description of Artificial Sequence: Synthetic oligonucleotide
acauuaccuguauacacaa

SEQ ID NO: 759142 - RNA, 19 nt, Artificial Sequence
  Description of Artificial Sequence: Synthetic oligonucleotide
aagugcuguuuucacucug

SEQ ID NO: 759143 - RNA, 19 nt, Artificial Sequence
  Description of Artificial Sequence: Synthetic oligonucleotide
caagacaucacuaagucuu

SEQ ID NO: 759144 - RNA, 19 nt, Artificial Sequence
  Description of Artificial Sequence: Synthetic oligonucleotide
gaguuagcugauaaacggc

SEQ ID NO: 759145 - RNA, 19 nt, Artificial Sequence
  Description of Artificial Sequence: Synthetic oligonucleotide
cuuaauauauauauauauu

SEQ ID NO: 759146 - RNA, 19 nt, Artificial Sequence
  Description of Artificial Sequence: Synthetic oligonucleotide
gcacauucgaguuagcuga

SEQ ID NO: 759147 - RNA, 19 nt, Artificial Sequence
  Description of Artificial Sequence: Synthetic oligonucleotide
ugccuuagaccaagaagca

SEQ ID NO: 759148 - RNA, 19 nt, Artificial Sequence
  Description of Artificial Sequence: Synthetic oligonucleotide
aguuagcugauaaacggcu

SEQ ID NO: 759149 - RNA, 19 nt, Artificial Sequence
  Description of Artificial Sequence: Synthetic oligonucleotide
uaccagacuuuucacugcu

SEQ ID NO: 759150 - RNA, 19 nt, Artificial Sequence
  Description of Artificial Sequence: Synthetic oligonucleotide
caagagaccugguuuguuc

SEQ ID NO: 759151 - RNA, 19 nt, Artificial Sequence
  Description of Artificial Sequence: Synthetic oligonucleotide
gagcaucgcacugaagggg

SEQ ID NO: 759152 - RNA, 19 nt, Artificial Sequence
  Description of Artificial Sequence: Synthetic oligonucleotide
aagauugcacuaucacuua

SEQ ID NO: 759153 - RNA, 19 nt, Artificial Sequence
  Description of Artificial Sequence: Synthetic oligonucleotide
guaauuacucuguggcuca

SEQ ID NO: 759154 - RNA, 19 nt, Artificial Sequence
  Description of Artificial Sequence: Synthetic oligonucleotide
aguaagugagggcugugau

SEQ ID NO: 759155 - RNA, 19 nt, Artificial Sequence
  Description of Artificial Sequence: Synthetic oligonucleotide
aguuguuacaugaagucuu

SEQ ID NO: 759156 - RNA, 19 nt, Artificial Sequence
  Description of Artificial Sequence: Synthetic oligonucleotide
cuuaugcccaacaagacau

SEQ ID NO: 759157 - RNA, 19 nt, Artificial Sequence
  Description of Artificial Sequence: Synthetic oligonucleotide
cuaccagacuuuucacugc

SEQ ID NO: 759158 - RNA, 19 nt, Artificial Sequence
  Description of Artificial Sequence: Synthetic oligonucleotide
ucuuaccaacgguacaauc

SEQ ID NO: 759159 - RNA, 19 nt, Artificial Sequence
  Description of Artificial Sequence: Synthetic oligonucleotide
ggucuugauacauuaccug

SEQ ID NO: 759160 - RNA, 19 nt, Artificial Sequence
  Description of Artificial Sequence: Synthetic oligonucleotide
cuuuccgaugagaaaccug

SEQ ID NO: 759161 - RNA, 19 nt, Artificial Sequence
  Description of Artificial Sequence: Synthetic oligonucleotide
accacuggcggagugaaug

SEQ ID NO: 759162 - RNA, 19 nt, Artificial Sequence
  Description of Artificial Sequence: Synthetic oligonucleotide
guauagucauccagaggcg

SEQ ID NO: 759163 - RNA, 19 nt, Artificial Sequence
  Description of Artificial Sequence: Synthetic oligonucleotide
aacuacuacuguaauuaau

SEQ ID NO: 759164 - RNA, 19 nt, Artificial Sequence
  Description of Artificial Sequence: Synthetic oligonucleotide
aacggcuucaaaacccuga

SEQ ID NO: 759165 - RNA, 19 nt, Artificial Sequence
  Description of Artificial Sequence: Synthetic oligonucleotide
cuuagaccaagaagcagca

SEQ ID NO: 759166 - RNA, 19 nt, Artificial Sequence
  Description of Artificial Sequence: Synthetic oligonucleotide
gaugagaccucaagugcug

SEQ ID NO: 759167 - RNA, 19 nt, Artificial Sequence
  Description of Artificial Sequence: Synthetic oligonucleotide
ucaucuaaucgucccguuu

SEQ ID NO: 759168 - RNA, 19 nt, Artificial Sequence
  Description of Artificial Sequence: Synthetic oligonucleotide
gacgacauuuucuuaccaa

SEQ ID NO: 759169 - RNA, 19 nt, Artificial Sequence
  Description of Artificial Sequence: Synthetic oligonucleotide
ggaucauacacaaauacua

SEQ ID NO: 759170 - RNA, 19 nt, Artificial Sequence
  Description of Artificial Sequence: Synthetic oligonucleotide
uguaugccgaggcacuaau

SEQ ID NO: 759171 - RNA, 19 nt, Artificial Sequence
  Description of Artificial Sequence: Synthetic oligonucleotide
guuacaauuggggcucugc

SEQ ID NO: 759172 - RNA, 19 nt, Artificial Sequence
  Description of Artificial Sequence: Synthetic oligonucleotide
ugacaggcgagagaguagu

SEQ ID NO: 759173 - RNA, 19 nt, Artificial Sequence
  Description of Artificial Sequence: Synthetic oligonucleotide
uccgguauucugcucccca

SEQ ID NO: 759174 - RNA, 19 nt, Artificial Sequence
  Description of Artificial Sequence: Synthetic oligonucleotide
gagaaaccugaagacgacc

SEQ ID NO: 759175 - RNA, 19 nt, Artificial Sequence
  Description of Artificial Sequence: Synthetic oligonucleotide
accuguauacacaacuacu

SEQ ID NO: 759176 - RNA, 19 nt, Artificial Sequence
  Description of Artificial Sequence: Synthetic oligonucleotide
caaaccuaagcagaaccuc

SEQ ID NO: 759177 - RNA, 19 nt, Artificial Sequence
  Description of Artificial Sequence: Synthetic oligonucleotide
cauaaccggcaauauauaa

SEQ ID NO: 759178 - RNA, 19 nt, Artificial Sequence
  Description of Artificial Sequence: Synthetic oligonucleotide
cauuggagagcaaaccuaa

SEQ ID NO: 759179 - RNA, 19 nt, Artificial Sequence
  Description of Artificial Sequence: Synthetic oligonucleotide
acaguccacgggaucauac

SEQ ID NO: 759180 - RNA, 19 nt, Artificial Sequence
  Description of Artificial Sequence: Synthetic oligonucleotide
uugauacauuaccuguaua

SEQ ID NO: 759181 - RNA, 19 nt, Artificial Sequence
  Description of Artificial Sequence: Synthetic oligonucleotide
gucuacaguaagugagggc

SEQ ID NO: 759182 - RNA, 19 nt, Artificial Sequence
  Description of Artificial Sequence: Synthetic oligonucleotide
caucacuaagucuuuaagu

SEQ ID NO: 759183 - RNA, 19 nt, Artificial Sequence
  Description of Artificial Sequence: Synthetic oligonucleotide
gucuugauacauuaccugu

SEQ ID NO: 759184 - RNA, 19 nt, Artificial Sequence
  Description of Artificial Sequence: Synthetic oligonucleotide
uucagauuaaaagcauauu

SEQ ID NO: 759185 - RNA, 19 nt, Artificial Sequence
  Description of Artificial Sequence: Synthetic oligonucleotide
ugcaauacugggucuugau

SEQ ID NO: 759186 - RNA, 19 nt, Artificial Sequence
  Description of Artificial Sequence: Synthetic oligonucleotide
gaguuaauacuuuguccaa

SEQ ID NO: 759187 - RNA, 19 nt, Artificial Sequence
  Description of Artificial Sequence: Synthetic oligonucleotide
uggcaacccuuuccgauga

SEQ ID NO: 759188 - RNA, 19 nt, Artificial Sequence
  Description of Artificial Sequence: Synthetic oligonucleotide
cagguuggugguuguuucg

SEQ ID NO: 759189 - RNA, 19 nt, Artificial Sequence
  Description of Artificial Sequence: Synthetic oligonucleotide
aacuaagaauggauacaga

SEQ ID NO: 759190 - RNA, 19 nt, Artificial Sequence
  Description of Artificial Sequence: Synthetic oligonucleotide
aucuuaauauauauauaua

SEQ ID NO: 759191 - RNA, 19 nt, Artificial Sequence
  Description of Artificial Sequence: Synthetic oligonucleotide
cuacaguaagugagggcug

SEQ ID NO: 759192 - RNA, 19 nt, Artificial Sequence
  Description of Artificial Sequence: Synthetic oligonucleotide
cauucgaguuagcugauaa

SEQ ID NO: 759193 - RNA, 19 nt, Artificial Sequence
  Description of Artificial Sequence: Synthetic oligonucleotide
aaagcauauuccgcaccgu

SEQ ID NO: 759194 - RNA, 19 nt, Artificial Sequence
  Description of Artificial Sequence: Synthetic oligonucleotide
ucgugggauuguaauuacu

SEQ ID NO: 759195 - RNA, 19 nt, Artificial Sequence
  Description of Artificial Sequence: Synthetic oligonucleotide
accaucaagagaccugguu

SEQ ID NO: 759196 - RNA, 19 nt, Artificial Sequence
  Description of Artificial Sequence: Synthetic oligonucleotide
gccgucuacaguaagugag

SEQ ID NO: 759197 - RNA, 19 nt, Artificial Sequence
  Description of Artificial Sequence: Synthetic oligonucleotide
cacuaauuuucccaucuaa

SEQ ID NO: 759198 - RNA, 19 nt, Artificial Sequence
  Description of Artificial Sequence: Synthetic oligonucleotide
uugacacauuuaguauugc

SEQ ID NO: 759199 - RNA, 19 nt, Artificial Sequence
  Description of Artificial Sequence: Synthetic oligonucleotide
cauuaccuguauacacaac

SEQ ID NO: 759200 - RNA, 19 nt, Artificial Sequence
  Description of Artificial Sequence: Synthetic oligonucleotide
uacaagcgcacuccccuuc

SEQ ID NO: 759201 - RNA, 19 nt, Artificial Sequence
  Description of Artificial Sequence: Synthetic oligonucleotide
uuacacacuguugcagggu

SEQ ID NO: 759202 - RNA, 19 nt, Artificial Sequence
  Description of Artificial Sequence: Synthetic oligonucleotide
ccauacuuugguucaacug

SEQ ID NO: 759203 - RNA, 19 nt, Artificial Sequence
  Description of Artificial Sequence: Synthetic oligonucleotide
uucccuggaauggaugggu

SEQ ID NO: 759204 - RNA, 19 nt, Artificial Sequence
  Description of Artificial Sequence: Synthetic oligonucleotide
uuguuacugucugccuccg

SEQ ID NO: 759205 - RNA, 19 nt, Artificial Sequence
  Description of Artificial Sequence: Synthetic oligonucleotide
ugcuugagcaucgcacuga

SEQ ID NO: 759206 - RNA, 19 nt, Artificial Sequence
  Description of Artificial Sequence: Synthetic oligonucleotide
ccuauguaauacaagcgca

SEQ ID NO: 759207 - RNA, 19 nt, Artificial Sequence
  Description of Artificial Sequence: Synthetic oligonucleotide
accucaagugcuguuuuca

SEQ ID NO: 759208 - RNA, 19 nt, Artificial Sequence
  Description of Artificial Sequence: Synthetic oligonucleotide
agccuguguccauacuuug

SEQ ID NO: 759209 - RNA, 19 nt, Artificial Sequence
  Description of Artificial Sequence: Synthetic oligonucleotide
ccggccagcgccauaaccg

SEQ ID NO: 759210 - RNA, 19 nt, Artificial Sequence
  Description of Artificial Sequence: Synthetic oligonucleotide
uuguuucgugggauuguaa

SEQ ID NO: 759211 - RNA, 19 nt, Artificial Sequence
  Description of Artificial Sequence: Synthetic oligonucleotide
aagcucaauccagcaagga

SEQ ID NO: 759212 - RNA, 19 nt, Artificial Sequence
  Description of Artificial Sequence: Synthetic oligonucleotide
auacuuuguccaaccacug

SEQ ID NO: 759213 - RNA, 19 nt, Artificial Sequence
  Description of Artificial Sequence: Synthetic oligonucleotide
gagugaauggcaagaugga

SEQ ID NO: 759214 - RNA, 19 nt, Artificial Sequence
  Description of Artificial Sequence: Synthetic oligonucleotide
augcccaacaagacaucac

SEQ ID NO: 759215 - RNA, 19 nt, Artificial Sequence
  Description of Artificial Sequence: Synthetic oligonucleotide
uaccaacgguacaauccac

SEQ ID NO: 759216 - RNA, 19 nt, Artificial Sequence
  Description of Artificial Sequence: Synthetic oligonucleotide
cugggucuugauacauuac

SEQ ID NO: 759217 - RNA, 19 nt, Artificial Sequence
  Description of Artificial Sequence: Synthetic oligonucleotide
agaggcggcaguucuguua

SEQ ID NO: 759218 - RNA, 19 nt, Artificial Sequence
  Description of Artificial Sequence: Synthetic oligonucleotide
gugauugacaggcgagaga

SEQ ID NO: 759219 - RNA, 19 nt, Artificial Sequence
  Description of Artificial Sequence: Synthetic oligonucleotide
cugugaugcauggaagguc

SEQ ID NO: 759220 - RNA, 19 nt, Artificial Sequence
  Description of Artificial Sequence: Synthetic oligonucleotide
gucuuaugcccaacaagac

SEQ ID NO: 759221 - RNA, 19 nt, Artificial Sequence
  Description of Artificial Sequence: Synthetic oligonucleotide
agccgucuacaguaaguga

SEQ ID NO: 759222 - RNA, 19 nt, Artificial Sequence
  Description of Artificial Sequence: Synthetic oligonucleotide
ccgaguaaguaacuggcug

SEQ ID NO: 759223 - RNA, 19 nt, Artificial Sequence
  Description of Artificial Sequence: Synthetic oligonucleotide
cgagagaguaguaggagac

SEQ ID NO: 759224 - RNA, 19 nt, Artificial Sequence
  Description of Artificial Sequence: Synthetic oligonucleotide
uggcggagugaauggcaag

SEQ ID NO: 759225 - RNA, 19 nt, Artificial Sequence
  Description of Artificial Sequence: Synthetic oligonucleotide
accaacgguacaauccaca

SEQ ID NO: 759226 - RNA, 19 nt, Artificial Sequence
  Description of Artificial Sequence: Synthetic oligonucleotide
acauuggagagcaaaccua

SEQ ID NO: 759227 - RNA, 19 nt, Artificial Sequence
  Description of Artificial Sequence: Synthetic oligonucleotide
cgugggauuguaauuacuc

SEQ ID NO: 759228 - RNA, 19 nt, Artificial Sequence
  Description of Artificial Sequence: Synthetic oligonucleotide
aaacggcuucaaaacccug

SEQ ID NO: 759229 - RNA, 19 nt, Artificial Sequence
  Description of Artificial Sequence: Synthetic oligonucleotide
acgaccaucaagagaccug

SEQ ID NO: 759230 - RNA, 19 nt, Artificial Sequence
  Description of Artificial Sequence: Synthetic oligonucleotide
gauggacgacauuuucuua

SEQ ID NO: 759231 - RNA, 19 nt, Artificial Sequence
  Description of Artificial Sequence: Synthetic oligonucleotide
agcgccauaaccggcaaua

SEQ ID NO: 759232 - RNA, 19 nt, Artificial Sequence
  Description of Artificial Sequence: Synthetic oligonucleotide
cccugauuaacagacugag

SEQ ID NO: 759233 - RNA, 19 nt, Artificial Sequence
  Description of Artificial Sequence: Synthetic oligonucleotide
ccgucuacaguaagugagg

SEQ ID NO: 759234 - RNA, 19 nt, Artificial Sequence
  Description of Artificial Sequence: Synthetic oligonucleotide
gagagaguaguaggagaca

SEQ ID NO: 759235 - RNA, 19 nt, Artificial Sequence
  Description of Artificial Sequence: Synthetic oligonucleotide
cacuucuagacacuaauuu

SEQ ID NO: 759236 - RNA, 19 nt, Artificial Sequence
  Description of Artificial Sequence: Synthetic oligonucleotide
ccaacgguacaauccacac

SEQ ID NO: 759237 - RNA, 19 nt, Artificial Sequence
  Description of Artificial Sequence: Synthetic oligonucleotide
caugcuugagcaucgcacu

SEQ ID NO: 759238 - RNA, 19 nt, Artificial Sequence
  Description of Artificial Sequence: Synthetic oligonucleotide
gguuccgaguaaguaacug

SEQ ID NO: 759239 - RNA, 19 nt, Artificial Sequence
  Description of Artificial Sequence: Synthetic oligonucleotide
aagacaucacuaagucuuu

SEQ ID NO: 759240 - RNA, 19 nt, Artificial Sequence
  Description of Artificial Sequence: Synthetic oligonucleotide
agcaucgcacugaagggga

SEQ ID NO: 759241 - RNA, 19 nt, Artificial Sequence
  Description of Artificial Sequence: Synthetic oligonucleotide
uuagaccaagaagcagcac

SEQ ID NO: 759242 - RNA, 19 nt, Artificial Sequence
  Description of Artificial Sequence: Synthetic oligonucleotide
gccuccgguauucugcucc

SEQ ID NO: 759243 - RNA, 19 nt, Artificial Sequence
  Description of Artificial Sequence: Synthetic oligonucleotide
cuugauacauuaccuguau

SEQ ID NO: 759244 - RNA, 19 nt, Artificial Sequence
  Description of Artificial Sequence: Synthetic oligonucleotide
uucucacaccacuuuucuu

SEQ ID NO: 759245 - RNA, 19 nt, Artificial Sequence
  Description of Artificial Sequence: Synthetic oligonucleotide
agcgcacuccccuuccuau

SEQ ID NO: 759246 - RNA, 19 nt, Artificial Sequence
  Description of Artificial Sequence: Synthetic oligonucleotide
auacuuugguucaacuguu

SEQ ID NO: 759247 - RNA, 19 nt, Artificial Sequence
  Description of Artificial Sequence: Synthetic oligonucleotide
ucaccacuggcggagugaa

SEQ ID NO: 759248 - RNA, 19 nt, Artificial Sequence
  Description of Artificial Sequence: Synthetic oligonucleotide
cucaauucccuggaaugga

SEQ ID NO: 759249 - RNA, 19 nt, Artificial Sequence
  Description of Artificial Sequence: Synthetic oligonucleotide
ugagaccucaagugcuguu

SEQ ID NO: 759250 - RNA, 19 nt, Artificial Sequence
  Description of Artificial Sequence: Synthetic oligonucleotide
aagcgcacuccccuuccua

SEQ ID NO: 759251 - RNA, 19 nt, Artificial Sequence
  Description of Artificial Sequence: Synthetic oligonucleotide
auacugggucuugauacau

SEQ ID NO: 759252 - RNA, 19 nt, Artificial Sequence
  Description of Artificial Sequence: Synthetic oligonucleotide
agacgaccaucaagagacc

SEQ ID NO: 759253 - RNA, 19 nt, Artificial Sequence
  Description of Artificial Sequence: Synthetic oligonucleotide
aaccggcaauauauaacau

SEQ ID NO: 759254 - RNA, 19 nt, Artificial Sequence
  Description of Artificial Sequence: Synthetic oligonucleotide
aaggucucuccaacccucu

SEQ ID NO: 759255 - RNA, 19 nt, Artificial Sequence
  Description of Artificial Sequence: Synthetic oligonucleotide
ggcgagagaguaguaggag

SEQ ID NO: 759256 - RNA, 19 nt, Artificial Sequence
  Description of Artificial Sequence: Synthetic oligonucleotide
ggcacuaauacuggaggca

SEQ ID NO: 759257 - RNA, 19 nt, Artificial Sequence
  Description of Artificial Sequence: Synthetic oligonucleotide
cauuucgguugacauugga

SEQ ID NO: 759258 - RNA, 19 nt, Artificial Sequence
  Description of Artificial Sequence: Synthetic oligonucleotide
caacuacuacuguaauuaa

SEQ ID NO: 759259 - RNA, 19 nt, Artificial Sequence
  Description of Artificial Sequence: Synthetic oligonucleotide
acuggcggagugaauggca

SEQ ID NO: 759260 - RNA, 19 nt, Artificial Sequence
  Description of Artificial Sequence: Synthetic oligonucleotide
acccugauuaacagacuga

SEQ ID NO: 759261 - RNA, 19 nt, Artificial Sequence
  Description of Artificial Sequence: Synthetic oligonucleotide
ugacaugcuugagcaucgc

SEQ ID NO: 759262 - RNA, 19 nt, Artificial Sequence
  Description of Artificial Sequence: Synthetic oligonucleotide
gaaaccugaagacgaccau

SEQ ID NO: 759263 - RNA, 19 nt, Artificial Sequence
  Description of Artificial Sequence: Synthetic oligonucleotide
gguugacacauuuaguauu

SEQ ID NO: 759264 - RNA, 19 nt, Artificial Sequence
  Description of Artificial Sequence: Synthetic oligonucleotide
ucuguaugccgaggcacua

SEQ ID NO: 759265 - RNA, 19 nt, Artificial Sequence
  Description of Artificial Sequence: Synthetic oligonucleotide
aggcgagagaguaguagga

SEQ ID NO: 759266 - RNA, 19 nt, Artificial Sequence
  Description of Artificial Sequence: Synthetic oligonucleotide
gcgagagaguaguaggaga

SEQ ID NO: 759267 - RNA, 19 nt, Artificial Sequence
  Description of Artificial Sequence: Synthetic oligonucleotide
auacaagcgcacuccccuu

SEQ ID NO: 759268 - RNA, 19 nt, Artificial Sequence
  Description of Artificial Sequence: Synthetic oligonucleotide
caucuaaucgucccguuuu

SEQ ID NO: 759269 - RNA, 19 nt, Artificial Sequence
  Description of Artificial Sequence: Synthetic oligonucleotide
gccugguaaauacacccuc

SEQ ID NO: 759270 - RNA, 19 nt, Artificial Sequence
  Description of Artificial Sequence: Synthetic oligonucleotide
agccugguaaauacacccu

SEQ ID NO: 759271 - RNA, 19 nt, Artificial Sequence
  Description of Artificial Sequence: Synthetic oligonucleotide
guuucgugggauuguaauu

SEQ ID NO: 759272 - RNA, 19 nt, Artificial Sequence
  Description of Artificial Sequence: Synthetic oligonucleotide
uaauuacucuguggcucaa

SEQ ID NO: 759273 - RNA, 19 nt, Artificial Sequence
  Description of Artificial Sequence: Synthetic oligonucleotide
cgaccaucaagagaccugg

SEQ ID NO: 759274 - RNA, 19 nt, Artificial Sequence
  Description of Artificial Sequence: Synthetic oligonucleotide
guaaggauuuacacauacu

SEQ ID NO: 759275 - RNA, 19 nt, Artificial Sequence
  Description of Artificial Sequence: Synthetic oligonucleotide
cagccguaucucugguuac

SEQ ID NO: 759276 - RNA, 19 nt, Artificial Sequence
  Description of Artificial Sequence: Synthetic oligonucleotide
gcugauaaacggcuucaaa

SEQ ID NO: 759277 - RNA, 19 nt, Artificial Sequence
  Description of Artificial Sequence: Synthetic oligonucleotide
cacuggcggagugaauggc

SEQ ID NO: 759278 - RNA, 19 nt, Artificial Sequence
  Description of Artificial Sequence: Synthetic oligonucleotide
ccacuggcggagugaaugg

SEQ ID NO: 759279 - RNA, 19 nt, Artificial Sequence
  Description of Artificial Sequence: Synthetic oligonucleotide
guuguuucgugggauugua

SEQ ID NO: 759280 - RNA, 19 nt, Artificial Sequence
  Description of Artificial Sequence: Synthetic oligonucleotide
guccacgggaucauacaca

SEQ ID NO: 759281 - RNA, 19 nt, Artificial Sequence
  Description of Artificial Sequence: Synthetic oligonucleotide
cugcaaauccaagcuguga

SEQ ID NO: 759282 - RNA, 19 nt, Artificial Sequence
  Description of Artificial Sequence: Synthetic oligonucleotide
gccuuagaccaagaagcag

SEQ ID NO: 759283 - RNA, 19 nt, Artificial Sequence
  Description of Artificial Sequence: Synthetic oligonucleotide
gggaucauacacaaauacu

SEQ ID NO: 759284 - RNA, 19 nt, Artificial Sequence
  Description of Artificial Sequence: Synthetic oligonucleotide
gcuggcgagcugcaggcug

SEQ ID NO: 759285 - RNA, 19 nt, Artificial Sequence
  Description of Artificial Sequence: Synthetic oligonucleotide
ggacgacauuuucuuacca

SEQ ID NO: 759286 - RNA, 19 nt, Artificial Sequence
  Description of Artificial Sequence: Synthetic oligonucleotide
auaagcuauugaacaccaa

SEQ ID NO: 759287 - RNA, 19 nt, Artificial Sequence
  Description of Artificial Sequence: Synthetic oligonucleotide
cuccgggcggcucgcuugg

SEQ ID NO: 759288 - RNA, 19 nt, Artificial Sequence
  Description of Artificial Sequence: Synthetic oligonucleotide
gacgaccaucaagagaccu

SEQ ID NO: 759289 - RNA, 19 nt, Artificial Sequence
  Description of Artificial Sequence: Synthetic oligonucleotide
uaauaaccuuugggacucu

SEQ ID NO: 759290 - RNA, 19 nt, Artificial Sequence
  Description of Artificial Sequence: Synthetic oligonucleotide
guaaagccgucuacaguaa

SEQ ID NO: 759291 - RNA, 19 nt, Artificial Sequence
  Description of Artificial Sequence: Synthetic oligonucleotide
caucgcacugaaggggauc

SEQ ID NO: 759292 - RNA, 19 nt, Artificial Sequence
  Description of Artificial Sequence: Synthetic oligonucleotide
gaauggcaagauggacgac

SEQ ID NO: 759293 - RNA, 19 nt, Artificial Sequence
  Description of Artificial Sequence: Synthetic oligonucleotide
gaagguccggccagcgcca

SEQ ID NO: 759294 - RNA, 19 nt, Artificial Sequence
  Description of Artificial Sequence: Synthetic oligonucleotide
cucuguaugccgaggcacu

SEQ ID NO: 759295 - RNA, 19 nt, Artificial Sequence
  Description of Artificial Sequence: Synthetic oligonucleotide
ggcggagugaauggcaaga

SEQ ID NO: 759296 - RNA, 19 nt, Artificial Sequence
  Description of Artificial Sequence: Synthetic oligonucleotide
gcacuaauacuggaggcaa

SEQ ID NO: 759297 - RNA, 19 nt, Artificial Sequence
  Description of Artificial Sequence: Synthetic oligonucleotide
cacuaucacuuaggcacuc

SEQ ID NO: 759298 - RNA, 19 nt, Artificial Sequence
  Description of Artificial Sequence: Synthetic oligonucleotide
acgggaucauacacaaaua

SEQ ID NO: 759299 - RNA, 19 nt, Artificial Sequence
  Description of Artificial Sequence: Synthetic oligonucleotide
gugcacauucgaguuagcu

SEQ ID NO: 759300 - RNA, 19 nt, Artificial Sequence
  Description of Artificial Sequence: Synthetic oligonucleotide
cucugguuuaguucauaau

SEQ ID NO: 759301 - RNA, 19 nt, Artificial Sequence
  Description of Artificial Sequence: Synthetic oligonucleotide
aggcggcaguucuguuagg

SEQ ID NO: 759302 - RNA, 19 nt, Artificial Sequence
  Description of Artificial Sequence: Synthetic oligonucleotide
caacgguacaauccacacu

SEQ ID NO: 759303 - RNA, 19 nt, Artificial Sequence
  Description of Artificial Sequence: Synthetic oligonucleotide
ucgcacugaaggggauccc

SEQ ID NO: 759304 - RNA, 19 nt, Artificial Sequence
  Description of Artificial Sequence: Synthetic oligonucleotide
gagaccucaagugcuguuu

SEQ ID NO: 759305 - RNA, 19 nt, Artificial Sequence
  Description of Artificial Sequence: Synthetic oligonucleotide
uggcaagauggacgacauu

SEQ ID NO: 759306 - RNA, 19 nt, Artificial Sequence
  Description of Artificial Sequence: Synthetic oligonucleotide
ugguuacaauuggggcucu

SEQ ID NO: 759307 - RNA, 19 nt, Artificial Sequence
  Description of Artificial Sequence: Synthetic oligonucleotide
gcgcuggcgagcugcaggc

SEQ ID NO: 759308 - RNA, 19 nt, Artificial Sequence
  Description of Artificial Sequence: Synthetic oligonucleotide
guacugcaauacugggucu

SEQ ID NO: 759309 - RNA, 19 nt, Artificial Sequence
  Description of Artificial Sequence: Synthetic oligonucleotide
agguuccgaguaaguaacu

SEQ ID NO: 759310 - RNA, 19 nt, Artificial Sequence
  Description of Artificial Sequence: Synthetic oligonucleotide
gcaaaccuaagcagaaccu

SEQ ID NO: 759311 - RNA, 19 nt, Artificial Sequence
  Description of Artificial Sequence: Synthetic oligonucleotide
acauucgaguuagcugaua

SEQ ID NO: 759312 - RNA, 19 nt, Artificial Sequence
  Description of Artificial Sequence: Synthetic oligonucleotide
ccuccgguauucugcuccc

SEQ ID NO: 759313 - RNA, 19 nt, Artificial Sequence
  Description of Artificial Sequence: Synthetic oligonucleotide
cugcaauacugggucuuga

SEQ ID NO: 759314 - RNA, 19 nt, Artificial Sequence
  Description of Artificial Sequence: Synthetic oligonucleotide
ccucugguuuaguucauaa

SEQ ID NO: 759315 - RNA, 19 nt, Artificial Sequence
  Description of Artificial Sequence: Synthetic oligonucleotide
uccaacccucugguuuagu

SEQ ID NO: 759316 - RNA, 19 nt, Artificial Sequence
  Description of Artificial Sequence: Synthetic oligonucleotide
ggcggcaguucuguuagga

SEQ ID NO: 759317 - RNA, 19 nt, Artificial Sequence
  Description of Artificial Sequence: Synthetic oligonucleotide
cuguguggugauggcuuuc

SEQ ID NO: 759318 - RNA, 19 nt, Artificial Sequence
  Description of Artificial Sequence: Synthetic oligonucleotide
gccuugagcucaugaugac

SEQ ID NO: 759319 - RNA, 19 nt, Artificial Sequence
  Description of Artificial Sequence: Synthetic oligonucleotide
gcauuucgguugacauugg

SEQ ID NO: 759320 - RNA, 19 nt, Artificial Sequence
  Description of Artificial Sequence: Synthetic oligonucleotide
ccaucaagagaccugguuu

SEQ ID NO: 759321 - RNA, 19 nt, Artificial Sequence
  Description of Artificial Sequence: Synthetic oligonucleotide
guuagcugauaaacggcuu

SEQ ID NO: 759322 - RNA, 19 nt, Artificial Sequence
  Description of Artificial Sequence: Synthetic oligonucleotide
gagggcugugaugcaugga

SEQ ID NO: 759323 - RNA, 19 nt, Artificial Sequence
  Description of Artificial Sequence: Synthetic oligonucleotide
gcaacccuuuccgaugaga

SEQ ID NO: 759324 - RNA, 19 nt, Artificial Sequence
  Description of Artificial Sequence: Synthetic oligonucleotide
gguuacaauuggggcucug

SEQ ID NO: 759325 - RNA, 19 nt, Artificial Sequence
  Description of Artificial Sequence: Synthetic oligonucleotide
ggcaacccuuuccgaugag

SEQ ID NO: 759326 - RNA, 19 nt, Artificial Sequence
  Description of Artificial Sequence: Synthetic oligonucleotide
gcacuccccuuccuauaug

SEQ ID NO: 759327 - RNA, 19 nt, Artificial Sequence
  Description of Artificial Sequence: Synthetic oligonucleotide
gguguacucaguccccaau

SEQ ID NO: 759328 - RNA, 19 nt, Artificial Sequence
  Description of Artificial Sequence: Synthetic oligonucleotide
guaugccgaggcacuaaua

SEQ ID NO: 759329 - RNA, 19 nt, Artificial Sequence
  Description of Artificial Sequence: Synthetic oligonucleotide
cuguaugccgaggcacuaa

SEQ ID NO: 759330 - RNA, 19 nt, Artificial Sequence
  Description of Artificial Sequence: Synthetic oligonucleotide
cugccuccgguauucugcu

SEQ ID NO: 759331 - RNA, 19 nt, Artificial Sequence
  Description of Artificial Sequence: Synthetic oligonucleotide
ccauaaccggcaauauaua

SEQ ID NO: 759332 - RNA, 19 nt, Artificial Sequence
  Description of Artificial Sequence: Synthetic oligonucleotide
gcucaucuaaucgucccgu

SEQ ID NO: 759333 - RNA, 19 nt, Artificial Sequence
  Description of Artificial Sequence: Synthetic oligonucleotide
cucaucuaaucgucccguu

SEQ ID NO: 759334 - RNA, 19 nt, Artificial Sequence
  Description of Artificial Sequence: Synthetic oligonucleotide
cauucuuauggugcacauu

SEQ ID NO: 759335 - RNA, 19 nt, Artificial Sequence
  Description of Artificial Sequence: Synthetic oligonucleotide
ccuggaauggauggguaua

SEQ ID NO: 759336 - RNA, 19 nt, Artificial Sequence
  Description of Artificial Sequence: Synthetic oligonucleotide
gccguaucucugguuacaa

SEQ ID NO: 759337 - RNA, 19 nt, Artificial Sequence
  Description of Artificial Sequence: Synthetic oligonucleotide
gcacuaucacuuaggcacu

SEQ ID NO: 759338 - RNA, 19 nt, Artificial Sequence
  Description of Artificial Sequence: Synthetic oligonucleotide
acccucugguuuaguucau

SEQ ID NO: 759339 - RNA, 19 nt, Artificial Sequence
  Description of Artificial Sequence: Synthetic oligonucleotide
caagcgcacuccccuuccu

SEQ ID NO: 759340 - RNA, 19 nt, Artificial Sequence
  Description of Artificial Sequence: Synthetic oligonucleotide
auacacccuccgggcggcu

SEQ ID NO: 759341 - RNA, 19 nt, Artificial Sequence
  Description of Artificial Sequence: Synthetic oligonucleotide
gcggcaguucuguuaggau

SEQ ID NO: 759342 - RNA, 19 nt, Artificial Sequence
  Description of Artificial Sequence: Synthetic oligonucleotide
ccaacccucugguuuaguu

SEQ ID NO: 759343 - RNA, 19 nt, Artificial Sequence
  Description of Artificial Sequence: Synthetic oligonucleotide
agguccggccagcgccaua

SEQ ID NO: 759344 - RNA, 19 nt, Artificial Sequence
  Description of Artificial Sequence: Synthetic oligonucleotide
ggcggcucgcuuggcgcug

SEQ ID NO: 759345 - RNA, 19 nt, Artificial Sequence
  Description of Artificial Sequence: Synthetic oligonucleotide
gcgcacuccccuuccuaua

SEQ ID NO: 759346 - RNA, 19 nt, Artificial Sequence
  Description of Artificial Sequence: Synthetic oligonucleotide
gcggagugaauggcaagau

SEQ ID NO: 759347 - RNA, 19 nt, Artificial Sequence
  Description of Artificial Sequence: Synthetic oligonucleotide
cgccauaaccggcaauaua

SEQ ID NO: 759348 - RNA, 19 nt, Artificial Sequence
  Description of Artificial Sequence: Synthetic oligonucleotide
ccuuuccgaugagaaaccu

SEQ ID NO: 759349 - RNA, 19 nt, Artificial Sequence
  Description of Artificial Sequence: Synthetic oligonucleotide
ccguaucucugguuacaau

SEQ ID NO: 759350 - RNA, 19 nt, Artificial Sequence
  Description of Artificial Sequence: Synthetic oligonucleotide
caccacuggcggagugaau

SEQ ID NO: 759351 - RNA, 19 nt, Artificial Sequence
  Description of Artificial Sequence: Synthetic oligonucleotide
gcgccauaaccggcaauau

SEQ ID NO: 759352 - RNA, 19 nt, Artificial Sequence
  Description of Artificial Sequence: Synthetic oligonucleotide
cgcacuccccuuccuauau

SEQ ID NO: 759353 - RNA, 19 nt, Artificial Sequence
  Description of Artificial Sequence: Synthetic oligonucleotide
cggcucgcuuggcgcuggc

SEQ ID NO: 759354 - RNA, 19 nt, Artificial Sequence
  Description of Artificial Sequence: Synthetic oligonucleotide
cgcuggcgagcugcaggcu

SEQ ID NO: 759355 - RNA, 19 nt, Artificial Sequence
  Description of Artificial Sequence: Synthetic oligonucleotide
aaaaguacgucuuuggcgc

SEQ ID NO: 759356 - RNA, 19 nt, Artificial Sequence
  Description of Artificial Sequence: Synthetic oligonucleotide
aagguagucucuuugcccc

SEQ ID NO: 759357 - RNA, 19 nt, Artificial Sequence
  Description of Artificial Sequence: Synthetic oligonucleotide
uguaagauauaccccaagg

SEQ ID NO: 759358 - RNA, 19 nt, Artificial Sequence
  Description of Artificial Sequence: Synthetic oligonucleotide
uaaucauaugcacauacag

SEQ ID NO: 759359 - RNA, 19 nt, Artificial Sequence
  Description of Artificial Sequence: Synthetic oligonucleotide
aaagcuccggucuuuggcc

SEQ ID NO: 759360 - RNA, 19 nt, Artificial Sequence
  Description of Artificial Sequence: Synthetic oligonucleotide
acuaguacacauuuguuag

SEQ ID NO: 759361 - RNA, 19 nt, Artificial Sequence
  Description of Artificial Sequence: Synthetic oligonucleotide
uucacuuagugcaaggucc

SEQ ID NO: 759362 - RNA, 19 nt, Artificial Sequence
  Description of Artificial Sequence: Synthetic oligonucleotide
uggauguucaacaagauuu

SEQ ID NO: 759363 - RNA, 19 nt, Artificial Sequence
  Description of Artificial Sequence: Synthetic oligonucleotide
cuuaguuugaucuuuuaac

SEQ ID NO: 759364 - RNA, 19 nt, Artificial Sequence
  Description of Artificial Sequence: Synthetic oligonucleotide
uuuugguggagcuauaccc

SEQ ID NO: 759365 - RNA, 19 nt, Artificial Sequence
  Description of Artificial Sequence: Synthetic oligonucleotide
aucauugucgacuggaggg

SEQ ID NO: 759366 - RNA, 19 nt, Artificial Sequence
  Description of Artificial Sequence: Synthetic oligonucleotide
caaauuucgaacucuauac

SEQ ID NO: 759367 - RNA, 19 nt, Artificial Sequence
  Description of Artificial Sequence: Synthetic oligonucleotide
aaauuugcccuugucaugg

SEQ ID NO: 759368 - RNA, 19 nt, Artificial Sequence
  Description of Artificial Sequence: Synthetic oligonucleotide
uacaguucgaccuuguuca

SEQ ID NO: 759369 - RNA, 19 nt, Artificial Sequence
  Description of Artificial Sequence: Synthetic oligonucleotide
ucauucauaaaaguagcgg

SEQ ID NO: 759370 - RNA, 19 nt, Artificial Sequence
  Description of Artificial Sequence: Synthetic oligonucleotide
guaagauauaccccaaggg

SEQ ID NO: 759371 - RNA, 19 nt, Artificial Sequence
  Description of Artificial Sequence: Synthetic oligonucleotide
uuaguuugaucuuuuaacu

SEQ ID NO: 759372 - RNA, 19 nt, Artificial Sequence
  Description of Artificial Sequence: Synthetic oligonucleotide
ucgaauauuugccuuuagg

SEQ ID NO: 759373 - RNA, 19 nt, Artificial Sequence
  Description of Artificial Sequence: Synthetic oligonucleotide
aaucauaugcacauacagg

SEQ ID NO: 759374 - RNA, 19 nt, Artificial Sequence
  Description of Artificial Sequence: Synthetic oligonucleotide
aauaaucuucucucuuggg

SEQ ID NO: 759375 - RNA, 19 nt, Artificial Sequence
  Description of Artificial Sequence: Synthetic oligonucleotide
acucuuuaaucauaugcac

SEQ ID NO: 759376 - RNA, 19 nt, Artificial Sequence
  Description of Artificial Sequence: Synthetic oligonucleotide
uuucgaacucuauacacag

SEQ ID NO: 759377 - RNA, 19 nt, Artificial Sequence
  Description of Artificial Sequence: Synthetic oligonucleotide
uccaauugagccuuugucc

SEQ ID NO: 759378 - RNA, 19 nt, Artificial Sequence
  Description of Artificial Sequence: Synthetic oligonucleotide
aaugagggcaagccuaguc

SEQ ID NO: 759379 - RNA, 19 nt, Artificial Sequence
  Description of Artificial Sequence: Synthetic oligonucleotide
agucccaccacucaauuuc

SEQ ID NO: 759380 - RNA, 19 nt, Artificial Sequence
  Description of Artificial Sequence: Synthetic oligonucleotide
ucugagaucacacucgcaa

SEQ ID NO: 759381 - RNA, 19 nt, Artificial Sequence
  Description of Artificial Sequence: Synthetic oligonucleotide
aguuugaucuuuuaacucu

SEQ ID NO: 759382 - RNA, 19 nt, Artificial Sequence
  Description of Artificial Sequence: Synthetic oligonucleotide
aauacucgcauuaaauuug

SEQ ID NO: 759383 - RNA, 19 nt, Artificial Sequence
  Description of Artificial Sequence: Synthetic oligonucleotide
agucaguagacuccaacac

SEQ ID NO: 759384 - RNA, 19 nt, Artificial Sequence
  Description of Artificial Sequence: Synthetic oligonucleotide
aaauuucgaacucuauaca

SEQ ID NO: 759385 - RNA, 19 nt, Artificial Sequence
  Description of Artificial Sequence: Synthetic oligonucleotide
aguguugccaauuggaagu

SEQ ID NO: 759386 - RNA, 19 nt, Artificial Sequence
  Description of Artificial Sequence: Synthetic oligonucleotide
acaagguagucucuuugcc

SEQ ID NO: 759387 - RNA, 19 nt, Artificial Sequence
  Description of Artificial Sequence: Synthetic oligonucleotide
ucaaauuucgaacucuaua

SEQ ID NO: 759388 - RNA, 19 nt, Artificial Sequence
  Description of Artificial Sequence: Synthetic oligonucleotide
aauaguguugccaauugga

SEQ ID NO: 759389 - RNA, 19 nt, Artificial Sequence
  Description of Artificial Sequence: Synthetic oligonucleotide
cuucguagggucuuggacc

SEQ ID NO: 759390 - RNA, 19 nt, Artificial Sequence
  Description of Artificial Sequence: Synthetic oligonucleotide
uaauacucgcauuaaauuu

SEQ ID NO: 759391 - RNA, 19 nt, Artificial Sequence
  Description of Artificial Sequence: Synthetic oligonucleotide
uaaucguugagcaaucuuu

SEQ ID NO: 759392 - RNA, 19 nt, Artificial Sequence
  Description of Artificial Sequence: Synthetic oligonucleotide
aaugagaaacccagcacuc

SEQ ID NO: 759393 - RNA, 19 nt, Artificial Sequence
  Description of Artificial Sequence: Synthetic oligonucleotide
ucgaacucuauacacagau

SEQ ID NO: 759394 - RNA, 19 nt, Artificial Sequence
  Description of Artificial Sequence: Synthetic oligonucleotide
agauuugugauuccaaaau

SEQ ID NO: 759395 - RNA, 19 nt, Artificial Sequence
  Description of Artificial Sequence: Synthetic oligonucleotide
aauucgggcuuguaguuca

SEQ ID NO: 759396 - RNA, 19 nt, Artificial Sequence
  Description of Artificial Sequence: Synthetic oligonucleotide
uuuacagcucgaauauuug

SEQ ID NO: 759397 - RNA, 19 nt, Artificial Sequence
  Description of Artificial Sequence: Synthetic oligonucleotide
cauccgaugugucagcucg

SEQ ID NO: 759398 - RNA, 19 nt, Artificial Sequence
  Description of Artificial Sequence: Synthetic oligonucleotide
guaguguucagccccaugc

SEQ ID NO: 759399 - RNA, 19 nt, Artificial Sequence
  Description of Artificial Sequence: Synthetic oligonucleotide
augagggcaagccuagucg

SEQ ID NO: 759400 - RNA, 19 nt, Artificial Sequence
  Description of Artificial Sequence: Synthetic oligonucleotide
uuagcuccuucuuaggagc

SEQ ID NO: 759401 - RNA, 19 nt, Artificial Sequence
  Description of Artificial Sequence: Synthetic oligonucleotide
acucuauacacagauaugu

SEQ ID NO: 759402 - RNA, 19 nt, Artificial Sequence
  Description of Artificial Sequence: Synthetic oligonucleotide
uucguagggucuuggaccg

SEQ ID NO: 759403 - RNA, 19 nt, Artificial Sequence
  Description of Artificial Sequence: Synthetic oligonucleotide
uccgauguagcaugagacg

SEQ ID NO: 759404 - RNA, 19 nt, Artificial Sequence
  Description of Artificial Sequence: Synthetic oligonucleotide
uuugguggagcuauaccca

SEQ ID NO: 759405 - RNA, 19 nt, Artificial Sequence
  Description of Artificial Sequence: Synthetic oligonucleotide
cauaugcacauacaggaug

SEQ ID NO: 759406 - RNA, 19 nt, Artificial Sequence
  Description of Artificial Sequence: Synthetic oligonucleotide
aguucgaccuuguucaucu

SEQ ID NO: 759407 - RNA, 19 nt, Artificial Sequence
  Description of Artificial Sequence: Synthetic oligonucleotide
uacuaguacacauuuguua

SEQ ID NO: 759408 - RNA, 19 nt, Artificial Sequence
  Description of Artificial Sequence: Synthetic oligonucleotide
uuagaagucuguucauccc

SEQ ID NO: 759409 - RNA, 19 nt, Artificial Sequence
  Description of Artificial Sequence: Synthetic oligonucleotide
uaguguugccaauuggaag

SEQ ID NO: 759410 - RNA, 19 nt, Artificial Sequence
  Description of Artificial Sequence: Synthetic oligonucleotide
cacguugacauccuugugc

SEQ ID NO: 759411 - RNA, 19 nt, Artificial Sequence
  Description of Artificial Sequence: Synthetic oligonucleotide
uaugauguaagagucccac

SEQ ID NO: 759412 - RNA, 19 nt, Artificial Sequence
  Description of Artificial Sequence: Synthetic oligonucleotide
uaaguuuucgggcagcguu

SEQ ID NO: 759413 - RNA, 19 nt, Artificial Sequence
  Description of Artificial Sequence: Synthetic oligonucleotide
cuagucgaaguaugaaugc

SEQ ID NO: 759414 - RNA, 19 nt, Artificial Sequence
  Description of Artificial Sequence: Synthetic oligonucleotide
uguccguaaucguugagca

SEQ ID NO: 759415 - RNA, 19 nt, Artificial Sequence
  Description of Artificial Sequence: Synthetic oligonucleotide
agcguuggccucuucgugc

SEQ ID NO: 759416 - RNA, 19 nt, Artificial Sequence
  Description of Artificial Sequence: Synthetic oligonucleotide
uuggaaaguagagugagaa

SEQ ID NO: 759417 - RNA, 19 nt, Artificial Sequence
  Description of Artificial Sequence: Synthetic oligonucleotide
uuuggcgcugagaaggggc

SEQ ID NO: 759418 - RNA, 19 nt, Artificial Sequence
  Description of Artificial Sequence: Synthetic oligonucleotide
aaggguaacugguguauca

SEQ ID NO: 759419 - RNA, 19 nt, Artificial Sequence
  Description of Artificial Sequence: Synthetic oligonucleotide
augauguaagagucccacc

SEQ ID NO: 759420 - RNA, 19 nt, Artificial Sequence
  Description of Artificial Sequence: Synthetic oligonucleotide
ugguguaucauugucgacu

SEQ ID NO: 759421 - RNA, 19 nt, Artificial Sequence
  Description of Artificial Sequence: Synthetic oligonucleotide
uauccgauguagcaugaga

SEQ ID NO: 759422 - RNA, 19 nt, Artificial Sequence
  Description of Artificial Sequence: Synthetic oligonucleotide
acugguguaucauugucga

SEQ ID NO: 759423 - RNA, 19 nt, Artificial Sequence
  Description of Artificial Sequence: Synthetic oligonucleotide
ugcgcuuucugucucuuug

SEQ ID NO: 759424 - RNA, 19 nt, Artificial Sequence
  Description of Artificial Sequence: Synthetic oligonucleotide
cuggguugcucaaauuucg

SEQ ID NO: 759425 - RNA, 19 nt, Artificial Sequence
  Description of Artificial Sequence: Synthetic oligonucleotide
aauuggaagucgcucuggu

SEQ ID NO: 759426 - RNA, 19 nt, Artificial Sequence
  Description of Artificial Sequence: Synthetic oligonucleotide
uuguaagauauaccccaag

SEQ ID NO: 759427 - RNA, 19 nt, Artificial Sequence
  Description of Artificial Sequence: Synthetic oligonucleotide
agauucacuuagugcaagg

SEQ ID NO: 759428 - RNA, 19 nt, Artificial Sequence
  Description of Artificial Sequence: Synthetic oligonucleotide
gaacucuauacacagauau

SEQ ID NO: 759429 - RNA, 19 nt, Artificial Sequence
  Description of Artificial Sequence: Synthetic oligonucleotide
auccgauguagcaugagac

SEQ ID NO: 759430 - RNA, 19 nt, Artificial Sequence
  Description of Artificial Sequence: Synthetic oligonucleotide
uagcaugagacgcuuaaau

SEQ ID NO: 759431 - RNA, 19 nt, Artificial Sequence
  Description of Artificial Sequence: Synthetic oligonucleotide
uguagggcacuguuuaaac

SEQ ID NO: 759432 - RNA, 19 nt, Artificial Sequence
  Description of Artificial Sequence: Synthetic oligonucleotide
ucauaaaaguagcggccug

SEQ ID NO: 759433 - RNA, 19 nt, Artificial Sequence
  Description of Artificial Sequence: Synthetic oligonucleotide
ucacuuagugcaagguccc

SEQ ID NO: 759434 - RNA, 19 nt, Artificial Sequence
  Description of Artificial Sequence: Synthetic oligonucleotide
aucauucauaaaaguagcg

SEQ ID NO: 759435 - RNA, 19 nt, Artificial Sequence
  Description of Artificial Sequence: Synthetic oligonucleotide
agggauaucgccuuccuuu

SEQ ID NO: 759436 - RNA, 19 nt, Artificial Sequence
  Description of Artificial Sequence: Synthetic oligonucleotide
cucgcauuaaauuugagau

SEQ ID NO: 759437 - RNA, 19 nt, Artificial Sequence
  Description of Artificial Sequence: Synthetic oligonucleotide
uagugcaaggucccaguag

SEQ ID NO: 759438 - RNA, 19 nt, Artificial Sequence
  Description of Artificial Sequence: Synthetic oligonucleotide
ugagaaacccagcacucuc

SEQ ID NO: 759439 - RNA, 19 nt, Artificial Sequence
  Description of Artificial Sequence: Synthetic oligonucleotide
auggcauggagauuagcca

SEQ ID NO: 759440 - RNA, 19 nt, Artificial Sequence
  Description of Artificial Sequence: Synthetic oligonucleotide
ucgacuggaggguuaagcu

SEQ ID NO: 759441 - RNA, 19 nt, Artificial Sequence
  Description of Artificial Sequence: Synthetic oligonucleotide
auaaaaguagcggccuggg

SEQ ID NO: 759442 - RNA, 19 nt, Artificial Sequence
  Description of Artificial Sequence: Synthetic oligonucleotide
gacagguuggaaaguagag

SEQ ID NO: 759443 - RNA, 19 nt, Artificial Sequence
  Description of Artificial Sequence: Synthetic oligonucleotide
uuguccguaaucguugagc

SEQ ID NO: 759444 - RNA, 19 nt, Artificial Sequence
  Description of Artificial Sequence: Synthetic oligonucleotide
agcuauacccauggcaugg

SEQ ID NO: 759445 - RNA, 19 nt, Artificial Sequence
  Description of Artificial Sequence: Synthetic oligonucleotide
ccaauugagccuuuguccg

SEQ ID NO: 759446 - RNA, 19 nt, Artificial Sequence
  Description of Artificial Sequence: Synthetic oligonucleotide
uccguaaucguugagcaau

SEQ ID NO: 759447 - RNA, 19 nt, Artificial Sequence
  Description of Artificial Sequence: Synthetic oligonucleotide
caaagcuccggucuuuggc

SEQ ID NO: 759448 - RNA, 19 nt, Artificial Sequence
  Description of Artificial Sequence: Synthetic oligonucleotide
agaucacacucgcaagggg

SEQ ID NO: 759449 - RNA, 19 nt, Artificial Sequence
  Description of Artificial Sequence: Synthetic oligonucleotide
gauguaagagucccaccac

SEQ ID NO: 759450 - RNA, 19 nt, Artificial Sequence
  Description of Artificial Sequence: Synthetic oligonucleotide
ugaaggguagcaccaggcu

SEQ ID NO: 759451 - RNA, 19 nt, Artificial Sequence
  Description of Artificial Sequence: Synthetic oligonucleotide
cuacaguucgaccuuguuc

SEQ ID NO: 759452 - RNA, 19 nt, Artificial Sequence
  Description of Artificial Sequence: Synthetic oligonucleotide
cucuauacacagauaugug

SEQ ID NO: 759453 - RNA, 19 nt, Artificial Sequence
  Description of Artificial Sequence: Synthetic oligonucleotide
gguaugauguaagaguccc

SEQ ID NO: 759454 - RNA, 19 nt, Artificial Sequence
  Description of Artificial Sequence: Synthetic oligonucleotide
aacccagcacucucuucac

SEQ ID NO: 759455 - RNA, 19 nt, Artificial Sequence
  Description of Artificial Sequence: Synthetic oligonucleotide
acuuuugguggagcuauac

SEQ ID NO: 759456 - RNA, 19 nt, Artificial Sequence
  Description of Artificial Sequence: Synthetic oligonucleotide
aacucuauacacagauaug

SEQ ID NO: 759457 - RNA, 19 nt, Artificial Sequence
  Description of Artificial Sequence: Synthetic oligonucleotide
cucccgcuuagacagagcc

SEQ ID NO: 759458 - RNA, 19 nt, Artificial Sequence
  Description of Artificial Sequence: Synthetic oligonucleotide
caagccuagucgaaguaug

SEQ ID NO: 759459 - RNA, 19 nt, Artificial Sequence
  Description of Artificial Sequence: Synthetic oligonucleotide
ugagccuuuguccguaauc

SEQ ID NO: 759460 - RNA, 19 nt, Artificial Sequence
  Description of Artificial Sequence: Synthetic oligonucleotide
uagucgaaguaugaaugcc

SEQ ID NO: 759461 - RNA, 19 nt, Artificial Sequence
  Description of Artificial Sequence: Synthetic oligonucleotide
uuugucguguugcugccuc

SEQ ID NO: 759462 - RNA, 19 nt, Artificial Sequence
  Description of Artificial Sequence: Synthetic oligonucleotide
agggaucaccucuggcucc

SEQ ID NO: 759463 - RNA, 19 nt, Artificial Sequence
  Description of Artificial Sequence: Synthetic oligonucleotide
gcuuaaauuucuucugggc

SEQ ID NO: 759464 - RNA, 19 nt, Artificial Sequence
  Description of Artificial Sequence: Synthetic oligonucleotide
gagacgcuuaaauuucuuc

SEQ ID NO: 759465 - RNA, 19 nt, Artificial Sequence
  Description of Artificial Sequence: Synthetic oligonucleotide
cuaggaucagcgguguagg

SEQ ID NO: 759466 - RNA, 19 nt, Artificial Sequence
  Description of Artificial Sequence: Synthetic oligonucleotide
ugagggcaagccuagucga

SEQ ID NO: 759467 - RNA, 19 nt, Artificial Sequence
  Description of Artificial Sequence: Synthetic oligonucleotide
ccuagucgaaguaugaaug

SEQ ID NO: 759468 - RNA, 19 nt, Artificial Sequence
  Description of Artificial Sequence: Synthetic oligonucleotide
guuccuaauacucgcauua

SEQ ID NO: 759469 - RNA, 19 nt, Artificial Sequence
  Description of Artificial Sequence: Synthetic oligonucleotide
uacccucccauacuaguac

SEQ ID NO: 759470 - RNA, 19 nt, Artificial Sequence
  Description of Artificial Sequence: Synthetic oligonucleotide
ucuccaauugagccuuugu

SEQ ID NO: 759471 - RNA, 19 nt, Artificial Sequence
  Description of Artificial Sequence: Synthetic oligonucleotide
cuccaauugagccuuuguc

SEQ ID NO: 759472 - RNA, 19 nt, Artificial Sequence
  Description of Artificial Sequence: Synthetic oligonucleotide
auaccccaaggguaacugg

SEQ ID NO: 759473 - RNA, 19 nt, Artificial Sequence
  Description of Artificial Sequence: Synthetic oligonucleotide
uaacucuacuuuuggugga

SEQ ID NO: 759474 - RNA, 19 nt, Artificial Sequence
  Description of Artificial Sequence: Synthetic oligonucleotide
auaugcacauacaggauga

SEQ ID NO: 759475 - RNA, 19 nt, Artificial Sequence
  Description of Artificial Sequence: Synthetic oligonucleotide
uuuguccguaaucguugag

SEQ ID NO: 759476 - RNA, 19 nt, Artificial Sequence
  Description of Artificial Sequence: Synthetic oligonucleotide
aucagaccgagccugacuu

SEQ ID NO: 759477 - RNA, 19 nt, Artificial Sequence
  Description of Artificial Sequence: Synthetic oligonucleotide
gagggcugaauaguguugc

SEQ ID NO: 759478 - RNA, 19 nt, Artificial Sequence
  Description of Artificial Sequence: Synthetic oligonucleotide
ugaaaugcucacgagccau

SEQ ID NO: 759479 - RNA, 19 nt, Artificial Sequence
  Description of Artificial Sequence: Synthetic oligonucleotide
agcaugagacgcuuaaauu

SEQ ID NO: 759480 - RNA, 19 nt, Artificial Sequence
  Description of Artificial Sequence: Synthetic oligonucleotide
auguucaacaagauuugug

SEQ ID NO: 759481 - RNA, 19 nt, Artificial Sequence
  Description of Artificial Sequence: Synthetic oligonucleotide
gguuggaaaguagagugag

SEQ ID NO: 759482 - RNA, 19 nt, Artificial Sequence
  Description of Artificial Sequence: Synthetic oligonucleotide
uaguguucagccccaugcu

SEQ ID NO: 759483 - RNA, 19 nt, Artificial Sequence
  Description of Artificial Sequence: Synthetic oligonucleotide
aaaugcucacgagccaugu

SEQ ID NO: 759484 - RNA, 19 nt, Artificial Sequence
  Description of Artificial Sequence: Synthetic oligonucleotide
aaaguacgucuuuggcgcu

SEQ ID NO: 759485 - RNA, 19 nt, Artificial Sequence
  Description of Artificial Sequence: Synthetic oligonucleotide
ugacuggguaaacaaggua

SEQ ID NO: 759486 - RNA, 19 nt, Artificial Sequence
  Description of Artificial Sequence: Synthetic oligonucleotide
guugccaauuggaagucgc

SEQ ID NO: 759487 - RNA, 19 nt, Artificial Sequence
  Description of Artificial Sequence: Synthetic oligonucleotide
uucgaacucuauacacaga

SEQ ID NO: 759488 - RNA, 19 nt, Artificial Sequence
  Description of Artificial Sequence: Synthetic oligonucleotide
agcgguguaggcuuaguuu

SEQ ID NO: 759489 - RNA, 19 nt, Artificial Sequence
  Description of Artificial Sequence: Synthetic oligonucleotide
aauaagcccuggcuucaaa

SEQ ID NO: 759490 - RNA, 19 nt, Artificial Sequence
  Description of Artificial Sequence: Synthetic oligonucleotide
uggguugcucaaauuucga

SEQ ID NO: 759491 - RNA, 19 nt, Artificial Sequence
  Description of Artificial Sequence: Synthetic oligonucleotide
acuuagugcaaggucccag

SEQ ID NO: 759492 - RNA, 19 nt, Artificial Sequence
  Description of Artificial Sequence: Synthetic oligonucleotide
ucgcauuaaauuugagauu

SEQ ID NO: 759493 - RNA, 19 nt, Artificial Sequence
  Description of Artificial Sequence: Synthetic oligonucleotide
gucucagucaguagacucc

SEQ ID NO: 759494 - RNA, 19 nt, Artificial Sequence
  Description of Artificial Sequence: Synthetic oligonucleotide
gucgaaguaugaaugccug

SEQ ID NO: 759495 - RNA, 19 nt, Artificial Sequence
  Description of Artificial Sequence: Synthetic oligonucleotide
ucgaaguaugaaugccugu

SEQ ID NO: 759496 - RNA, 19 nt, Artificial Sequence
  Description of Artificial Sequence: Synthetic oligonucleotide
uugccaauuggaagucgcu

SEQ ID NO: 759497 - RNA, 19 nt, Artificial Sequence
  Description of Artificial Sequence: Synthetic oligonucleotide
gaugugucagcucgaucuc

SEQ ID NO: 759498 - RNA, 19 nt, Artificial Sequence
  Description of Artificial Sequence: Synthetic oligonucleotide
gcgguguaggcuuaguuug

SEQ ID NO: 759499 - RNA, 19 nt, Artificial Sequence
  Description of Artificial Sequence: Synthetic oligonucleotide
uguuccuaauacucgcauu

SEQ ID NO: 759500 - RNA, 19 nt, Artificial Sequence
  Description of Artificial Sequence: Synthetic oligonucleotide
ucauugucgacuggagggu

SEQ ID NO: 759501 - RNA, 19 nt, Artificial Sequence
  Description of Artificial Sequence: Synthetic oligonucleotide
uucagggauaucgccuucc

SEQ ID NO: 759502 - RNA, 19 nt, Artificial Sequence
  Description of Artificial Sequence: Synthetic oligonucleotide
uuagugcaaggucccagua

SEQ ID NO: 759503 - RNA, 19 nt, Artificial Sequence
  Description of Artificial Sequence: Synthetic oligonucleotide
agucuguucaucccacuuu

SEQ ID NO: 759504 - RNA, 19 nt, Artificial Sequence
  Description of Artificial Sequence: Synthetic oligonucleotide
gagcuauacccauggcaug

SEQ ID NO: 759505 - RNA, 19 nt, Artificial Sequence
  Description of Artificial Sequence: Synthetic oligonucleotide
guuaagcugggcuggaugu

SEQ ID NO: 759506 - RNA, 19 nt, Artificial Sequence
  Description of Artificial Sequence: Synthetic oligonucleotide
aguaguguucagccccaug

SEQ ID NO: 759507 - RNA, 19 nt, Artificial Sequence
  Description of Artificial Sequence: Synthetic oligonucleotide
cuaauacucgcauuaaauu

SEQ ID NO: 759508 - RNA, 19 nt, Artificial Sequence
  Description of Artificial Sequence: Synthetic oligonucleotide
uuauccgauguagcaugag

SEQ ID NO: 759509 - RNA, 19 nt, Artificial Sequence
  Description of Artificial Sequence: Synthetic oligonucleotide
gucgacuggaggguuaagc

SEQ ID NO: 759510 - RNA, 19 nt, Artificial Sequence
  Description of Artificial Sequence: Synthetic oligonucleotide
aauugagccuuuguccgua

SEQ ID NO: 759511 - RNA, 19 nt, Artificial Sequence
  Description of Artificial Sequence: Synthetic oligonucleotide
caauuggaagucgcucugg

SEQ ID NO: 759512 - RNA, 19 nt, Artificial Sequence
  Description of Artificial Sequence: Synthetic oligonucleotide
gaaaugcucacgagccaug

SEQ ID NO: 759513 - RNA, 19 nt, Artificial Sequence
  Description of Artificial Sequence: Synthetic oligonucleotide
gacgugggcuucuaccuuc

SEQ ID NO: 759514 - RNA, 19 nt, Artificial Sequence
  Description of Artificial Sequence: Synthetic oligonucleotide
uucugagaucacacucgca

SEQ ID NO: 759515 - RNA, 19 nt, Artificial Sequence
  Description of Artificial Sequence: Synthetic oligonucleotide
uggccguacccucccauac

SEQ ID NO: 759516 - RNA, 19 nt, Artificial Sequence
  Description of Artificial Sequence: Synthetic oligonucleotide
cagggaucaccucuggcuc

SEQ ID NO: 759517 - RNA, 19 nt, Artificial Sequence
  Description of Artificial Sequence: Synthetic oligonucleotide
ccuuuguccguaaucguug

SEQ ID NO: 759518 - RNA, 19 nt, Artificial Sequence
  Description of Artificial Sequence: Synthetic oligonucleotide
cauuggguaugauguaaga

SEQ ID NO: 759519 - RNA, 19 nt, Artificial Sequence
  Description of Artificial Sequence: Synthetic oligonucleotide
aaaagguauuggauuccau

SEQ ID NO: 759520 - RNA, 19 nt, Artificial Sequence
  Description of Artificial Sequence: Synthetic oligonucleotide
uguucccucuuuacagcuc

SEQ ID NO: 759521 - RNA, 19 nt, Artificial Sequence
  Description of Artificial Sequence: Synthetic oligonucleotide
ucuguagggcacuguuuaa

SEQ ID NO: 759522 - RNA, 19 nt, Artificial Sequence
  Description of Artificial Sequence: Synthetic oligonucleotide
guaccaccaccccugucag

SEQ ID NO: 759523 - RNA, 19 nt, Artificial Sequence
  Description of Artificial Sequence: Synthetic oligonucleotide
uugguggagcuauacccau

SEQ ID NO: 759524 - RNA, 19 nt, Artificial Sequence
  Description of Artificial Sequence: Synthetic oligonucleotide
ugccaauuggaagucgcuc

SEQ ID NO: 759525 - RNA, 19 nt, Artificial Sequence
  Description of Artificial Sequence: Synthetic oligonucleotide
aaugcucacgagccauguu

SEQ ID NO: 759526 - RNA, 19 nt, Artificial Sequence
  Description of Artificial Sequence: Synthetic oligonucleotide
aggaucagcgguguaggcu

SEQ ID NO: 759527 - RNA, 19 nt, Artificial Sequence
  Description of Artificial Sequence: Synthetic oligonucleotide
aagccuagucgaaguauga

SEQ ID NO: 759528 - RNA, 19 nt, Artificial Sequence
  Description of Artificial Sequence: Synthetic oligonucleotide
aggggcaauugaaacucgg

SEQ ID NO: 759529 - RNA, 19 nt, Artificial Sequence
  Description of Artificial Sequence: Synthetic oligonucleotide
caucccacuuuauccgaug

SEQ ID NO: 759530 - RNA, 19 nt, Artificial Sequence
  Description of Artificial Sequence: Synthetic oligonucleotide
ucccgcuuagacagagcca

SEQ ID NO: 759531 - RNA, 19 nt, Artificial Sequence
  Description of Artificial Sequence: Synthetic oligonucleotide
acaagauuugugauuccaa

SEQ ID NO: 759532 - RNA, 19 nt, Artificial Sequence
  Description of Artificial Sequence: Synthetic oligonucleotide
uuuggccguacccucccau

SEQ ID NO: 759533 - RNA, 19 nt, Artificial Sequence
  Description of Artificial Sequence: Synthetic oligonucleotide
gguauuggauuccaugucu

SEQ ID NO: 759534 - RNA, 19 nt, Artificial Sequence
  Description of Artificial Sequence: Synthetic oligonucleotide
gaauucgggcuuguaguuc

SEQ ID NO: 759535 - RNA, 19 nt, Artificial Sequence
  Description of Artificial Sequence: Synthetic oligonucleotide
ccucaauuugucguguugc

SEQ ID NO: 759536 - RNA, 19 nt, Artificial Sequence
  Description of Artificial Sequence: Synthetic oligonucleotide
uauuugccuuuaggguggg

SEQ ID NO: 759537 - RNA, 19 nt, Artificial Sequence
  Description of Artificial Sequence: Synthetic oligonucleotide
auuggaagucgcucugguu

SEQ ID NO: 759538 - RNA, 19 nt, Artificial Sequence
  Description of Artificial Sequence: Synthetic oligonucleotide
augagaaacccagcacucu

SEQ ID NO: 759539 - RNA, 19 nt, Artificial Sequence
  Description of Artificial Sequence: Synthetic oligonucleotide
uuucagggauaucgccuuc

SEQ ID NO: 759540 - RNA, 19 nt, Artificial Sequence
  Description of Artificial Sequence: Synthetic oligonucleotide
gauucacuuagugcaaggu

SEQ ID NO: 759541 - RNA, 19 nt, Artificial Sequence
  Description of Artificial Sequence: Synthetic oligonucleotide
uaccuucguagggucuugg

SEQ ID NO: 759542 - RNA, 19 nt, Artificial Sequence
  Description of Artificial Sequence: Synthetic oligonucleotide
caguagucucagucaguag

SEQ ID NO: 759543 - RNA, 19 nt, Artificial Sequence
  Description of Artificial Sequence: Synthetic oligonucleotide
ucccacuuuauccgaugua

SEQ ID NO: 759544 - RNA, 19 nt, Artificial Sequence
  Description of Artificial Sequence: Synthetic oligonucleotide
auauaccccaaggguaacu

SEQ ID NO: 759545 - RNA, 19 nt, Artificial Sequence
  Description of Artificial Sequence: Synthetic oligonucleotide
gauauaccccaaggguaac

SEQ ID NO: 759546 - RNA, 19 nt, Artificial Sequence
  Description of Artificial Sequence: Synthetic oligonucleotide
ccauuggguaugauguaag

SEQ ID NO: 759547 - RNA, 19 nt, Artificial Sequence
  Description of Artificial Sequence: Synthetic oligonucleotide
cucuuuacagcucgaauau

SEQ ID NO: 759548 - RNA, 19 nt, Artificial Sequence
  Description of Artificial Sequence: Synthetic oligonucleotide
cagggcuagcaguagucuc

SEQ ID NO: 759549 - RNA, 19 nt, Artificial Sequence
  Description of Artificial Sequence: Synthetic oligonucleotide
uucgugcgcuuucugucuc

SEQ ID NO: 759550 - RNA, 19 nt, Artificial Sequence
  Description of Artificial Sequence: Synthetic oligonucleotide
ggggcaauugaaacucggg

SEQ ID NO: 759551 - RNA, 19 nt, Artificial Sequence
  Description of Artificial Sequence: Synthetic oligonucleotide
guaacugguguaucauugu

SEQ ID NO: 759552 - RNA, 19 nt, Artificial Sequence
  Description of Artificial Sequence: Synthetic oligonucleotide
gaaguaugaaugccuguuu

SEQ ID NO: 759553 - RNA, 19 nt, Artificial Sequence
  Description of Artificial Sequence: Synthetic oligonucleotide
cuggguaaacaagguaguc

SEQ ID NO: 759554 - RNA, 19 nt, Artificial Sequence
  Description of Artificial Sequence: Synthetic oligonucleotide
auacuaguacacauuuguu

SEQ ID NO: 759555 - RNA, 19 nt, Artificial Sequence
  Description of Artificial Sequence: Synthetic oligonucleotide
agguuggaaaguagaguga

SEQ ID NO: 759556 - RNA, 19 nt, Artificial Sequence
  Description of Artificial Sequence: Synthetic oligonucleotide
cugguguaucauugucgac

SEQ ID NO: 759557 - RNA, 19 nt, Artificial Sequence
  Description of Artificial Sequence: Synthetic oligonucleotide
auuugccuuuagggugggc

SEQ ID NO: 759558 - RNA, 19 nt, Artificial Sequence
  Description of Artificial Sequence: Synthetic oligonucleotide
accuucguagggucuugga

SEQ ID NO: 759559 - RNA, 19 nt, Artificial Sequence
  Description of Artificial Sequence: Synthetic oligonucleotide
gggcuucuaccuucguagg

SEQ ID NO: 759560 - RNA, 19 nt, Artificial Sequence
  Description of Artificial Sequence: Synthetic oligonucleotide
ugacgugggcuucuaccuu

SEQ ID NO: 759561 - RNA, 19 nt, Artificial Sequence
  Description of Artificial Sequence: Synthetic oligonucleotide
caucuacaguucgaccuug

SEQ ID NO: 759562 - RNA, 19 nt, Artificial Sequence
  Description of Artificial Sequence: Synthetic oligonucleotide
guagggcacuguuuaaacu

SEQ ID NO: 759563 - RNA, 19 nt, Artificial Sequence
  Description of Artificial Sequence: Synthetic oligonucleotide
ccuucguagggucuuggac

SEQ ID NO: 759564 - RNA, 19 nt, Artificial Sequence
  Description of Artificial Sequence: Synthetic oligonucleotide
cuuagugcaaggucccagu

SEQ ID NO: 759565 - RNA, 19 nt, Artificial Sequence
  Description of Artificial Sequence: Synthetic oligonucleotide
ucuuuacagcucgaauauu

SEQ ID NO: 759566 - RNA, 19 nt, Artificial Sequence
  Description of Artificial Sequence: Synthetic oligonucleotide
uccggucuuuggccguacc

SEQ ID NO: 759567 - RNA, 19 nt, Artificial Sequence
  Description of Artificial Sequence: Synthetic oligonucleotide
uugagccuuuguccguaau

SEQ ID NO: 759568 - RNA, 19 nt, Artificial Sequence
  Description of Artificial Sequence: Synthetic oligonucleotide
guuggaaaguagagugaga

SEQ ID NO: 759569 - RNA, 19 nt, Artificial Sequence
  Description of Artificial Sequence: Synthetic oligonucleotide
uugucgacuggaggguuaa

SEQ ID NO: 759570 - RNA, 19 nt, Artificial Sequence
  Description of Artificial Sequence: Synthetic oligonucleotide
cagaccgagccugacuuuc

SEQ ID NO: 759571 - RNA, 19 nt, Artificial Sequence
  Description of Artificial Sequence: Synthetic oligonucleotide
gcguuggccucuucgugcg

SEQ ID NO: 759572 - RNA, 19 nt, Artificial Sequence
  Description of Artificial Sequence: Synthetic oligonucleotide
agguagucucuuugcccca

SEQ ID NO: 759573 - RNA, 19 nt, Artificial Sequence
  Description of Artificial Sequence: Synthetic oligonucleotide
cugacgugggcuucuaccu

SEQ ID NO: 759574 - RNA, 19 nt, Artificial Sequence
  Description of Artificial Sequence: Synthetic oligonucleotide
uggguucaggaggaggcau

SEQ ID NO: 759575 - RNA, 19 nt, Artificial Sequence
  Description of Artificial Sequence: Synthetic oligonucleotide
ggguaugauguaagagucc

SEQ ID NO: 759576 - RNA, 19 nt, Artificial Sequence
  Description of Artificial Sequence: Synthetic oligonucleotide
ccaauuggaagucgcucug

SEQ ID NO: 759577 - RNA, 19 nt, Artificial Sequence
  Description of Artificial Sequence: Synthetic oligonucleotide
ggagcuauacccauggcau

SEQ ID NO: 759578 - RNA, 19 nt, Artificial Sequence
  Description of Artificial Sequence: Synthetic oligonucleotide
ccuaauacucgcauuaaau

SEQ ID NO: 759579 - RNA, 19 nt, Artificial Sequence
  Description of Artificial Sequence: Synthetic oligonucleotide
uuggccguacccucccaua

SEQ ID NO: 759580 - RNA, 19 nt, Artificial Sequence
  Description of Artificial Sequence: Synthetic oligonucleotide
guaaucguugagcaaucuu

SEQ ID NO: 759581 - RNA, 19 nt, Artificial Sequence
  Description of Artificial Sequence: Synthetic oligonucleotide
uuugccuccgaagcuucuu

SEQ ID NO: 759582 - RNA, 19 nt, Artificial Sequence
  Description of Artificial Sequence: Synthetic oligonucleotide
ggacagguuggaaaguaga

SEQ ID NO: 759583 - RNA, 19 nt, Artificial Sequence
  Description of Artificial Sequence: Synthetic oligonucleotide
agccuagucgaaguaugaa

SEQ ID NO: 759584 - RNA, 19 nt, Artificial Sequence
  Description of Artificial Sequence: Synthetic oligonucleotide
guaugauguaagaguccca

SEQ ID NO: 759585 - RNA, 19 nt, Artificial Sequence
  Description of Artificial Sequence: Synthetic oligonucleotide
gaagucuguucaucccacu

SEQ ID NO: 759586 - RNA, 19 nt, Artificial Sequence
  Description of Artificial Sequence: Synthetic oligonucleotide
ucccucuuuacagcucgaa

SEQ ID NO: 759587 - RNA, 19 nt, Artificial Sequence
  Description of Artificial Sequence: Synthetic oligonucleotide
uccgaugugucagcucgau

SEQ ID NO: 759588 - RNA, 19 nt, Artificial Sequence
  Description of Artificial Sequence: Synthetic oligonucleotide
guuuucgggcagcguuggc

SEQ ID NO: 759589 - RNA, 19 nt, Artificial Sequence
  Description of Artificial Sequence: Synthetic oligonucleotide
aucucccuuuguguuagaa

SEQ ID NO: 759590 - RNA, 19 nt, Artificial Sequence
  Description of Artificial Sequence: Synthetic oligonucleotide
ucgugcgcuuucugucucu

SEQ ID NO: 759591 - RNA, 19 nt, Artificial Sequence
  Description of Artificial Sequence: Synthetic oligonucleotide
gccaauuggaagucgcucu

SEQ ID NO: 759592 - RNA, 19 nt, Artificial Sequence
  Description of Artificial Sequence: Synthetic oligonucleotide
caguagacuccaacacaga

SEQ ID NO: 759593 - RNA, 19 nt, Artificial Sequence
  Description of Artificial Sequence: Synthetic oligonucleotide
ucagaccgagccugacuuu

SEQ ID NO: 759594 - RNA, 19 nt, Artificial Sequence
  Description of Artificial Sequence: Synthetic oligonucleotide
gaagucgcucugguuggga

SEQ ID NO: 759595 - RNA, 19 nt, Artificial Sequence
  Description of Artificial Sequence: Synthetic oligonucleotide
ggguugcucaaauuucgaa

SEQ ID NO: 759596 - RNA, 19 nt, Artificial Sequence
  Description of Artificial Sequence: Synthetic oligonucleotide
acgugggcuucuaccuucg

SEQ ID NO: 759597 - RNA, 19 nt, Artificial Sequence
  Description of Artificial Sequence: Synthetic oligonucleotide
ugucgacuggaggguuaag

SEQ ID NO: 759598 - RNA, 19 nt, Artificial Sequence
  Description of Artificial Sequence: Synthetic oligonucleotide
cuguagggcacuguuuaaa

SEQ ID NO: 759599 - RNA, 19 nt, Artificial Sequence
  Description of Artificial Sequence: Synthetic oligonucleotide
aucagcgguguaggcuuag

SEQ ID NO: 759600 - RNA, 19 nt, Artificial Sequence
  Description of Artificial Sequence: Synthetic oligonucleotide
gauguagcaugagacgcuu

SEQ ID NO: 759601 - RNA, 19 nt, Artificial Sequence
  Description of Artificial Sequence: Synthetic oligonucleotide
ccaaagcuccggucuuugg

SEQ ID NO: 759602 - RNA, 19 nt, Artificial Sequence
  Description of Artificial Sequence: Synthetic oligonucleotide
ucagcgguguaggcuuagu

SEQ ID NO: 759603 - RNA, 19 nt, Artificial Sequence
  Description of Artificial Sequence: Synthetic oligonucleotide
gccuuuagggugggcaucc

SEQ ID NO: 759604 - RNA, 19 nt, Artificial Sequence
  Description of Artificial Sequence: Synthetic oligonucleotide
guagcaugagacgcuuaaa

SEQ ID NO: 759605 - RNA, 19 nt, Artificial Sequence
  Description of Artificial Sequence: Synthetic oligonucleotide
cuucgugcgcuuucugucu

SEQ ID NO: 759606 - RNA, 19 nt, Artificial Sequence
  Description of Artificial Sequence: Synthetic oligonucleotide
caguucgaccuuguucauc

SEQ ID NO: 759607 - RNA, 19 nt, Artificial Sequence
  Description of Artificial Sequence: Synthetic oligonucleotide
cuaccuucguagggucuug

SEQ ID NO: 759608 - RNA, 19 nt, Artificial Sequence
  Description of Artificial Sequence: Synthetic oligonucleotide
aucugggcucugacguggg

SEQ ID NO: 759609 - RNA, 19 nt, Artificial Sequence
  Description of Artificial Sequence: Synthetic oligonucleotide
auugucgacuggaggguua

SEQ ID NO: 759610 - RNA, 19 nt, Artificial Sequence
  Description of Artificial Sequence: Synthetic oligonucleotide
guacccucccauacuagua

SEQ ID NO: 759611 - RNA, 19 nt, Artificial Sequence
  Description of Artificial Sequence: Synthetic oligonucleotide
ggaucagcgguguaggcuu

SEQ ID NO: 759612 - RNA, 19 nt, Artificial Sequence
  Description of Artificial Sequence: Synthetic oligonucleotide
caauugagccuuuguccgu

SEQ ID NO: 759613 - RNA, 19 nt, Artificial Sequence
  Description of Artificial Sequence: Synthetic oligonucleotide
ugcccuugucauggaauuu

SEQ ID NO: 759614 - RNA, 19 nt, Artificial Sequence
  Description of Artificial Sequence: Synthetic oligonucleotide
caauagcaucauucauaaa

SEQ ID NO: 759615 - RNA, 19 nt, Artificial Sequence
  Description of Artificial Sequence: Synthetic oligonucleotide
cacauacaggaugaagggu

SEQ ID NO: 759616 - RNA, 19 nt, Artificial Sequence
  Description of Artificial Sequence: Synthetic oligonucleotide
ggaagucgcucugguuggg

SEQ ID NO: 759617 - RNA, 19 nt, Artificial Sequence
  Description of Artificial Sequence: Synthetic oligonucleotide
gccuagucgaaguaugaau

SEQ ID NO: 759618 - RNA, 19 nt, Artificial Sequence
  Description of Artificial Sequence: Synthetic oligonucleotide
aucuaggaucagcggugua

SEQ ID NO: 759619 - RNA, 19 nt, Artificial Sequence
  Description of Artificial Sequence: Synthetic oligonucleotide
cuguuccuaauacucgcau

SEQ ID NO: 759620 - RNA, 19 nt, Artificial Sequence
  Description of Artificial Sequence: Synthetic oligonucleotide
ccagggaucaccucuggcu

SEQ ID NO: 759621 - RNA, 19 nt, Artificial Sequence
  Description of Artificial Sequence: Synthetic oligonucleotide
gugcaguaccaccaccccu

SEQ ID NO: 759622 - RNA, 19 nt, Artificial Sequence
  Description of Artificial Sequence: Synthetic oligonucleotide
gcuucuaccuucguagggu

SEQ ID NO: 759623 - RNA, 19 nt, Artificial Sequence
  Description of Artificial Sequence: Synthetic oligonucleotide
gagggcaagccuagucgaa

SEQ ID NO: 759624 - RNA, 19 nt, Artificial Sequence
  Description of Artificial Sequence: Synthetic oligonucleotide
agaccgagccugacuuucu

SEQ ID NO: 759625 - RNA, 19 nt, Artificial Sequence
  Description of Artificial Sequence: Synthetic oligonucleotide
caucagaccgagccugacu

SEQ ID NO: 759626 - RNA, 19 nt, Artificial Sequence
  Description of Artificial Sequence: Synthetic oligonucleotide
gagucccaccacucaauuu

SEQ ID NO: 759627 - RNA, 19 nt, Artificial Sequence
  Description of Artificial Sequence: Synthetic oligonucleotide
ggggcuaauaaaacucagu

SEQ ID NO: 759628 - RNA, 19 nt, Artificial Sequence
  Description of Artificial Sequence: Synthetic oligonucleotide
cacuuagugcaagguccca

SEQ ID NO: 759629 - RNA, 19 nt, Artificial Sequence
  Description of Artificial Sequence: Synthetic oligonucleotide
uggcgcugagaaggggcaa

SEQ ID NO: 759630 - RNA, 19 nt, Artificial Sequence
  Description of Artificial Sequence: Synthetic oligonucleotide
cuuuggccguacccuccca

SEQ ID NO: 759631 - RNA, 19 nt, Artificial Sequence
  Description of Artificial Sequence: Synthetic oligonucleotide
ccaguaguguucagcccca

SEQ ID NO: 759632 - RNA, 19 nt, Artificial Sequence
  Description of Artificial Sequence: Synthetic oligonucleotide
gcccuugucauggaauuua

SEQ ID NO: 759633 - RNA, 19 nt, Artificial Sequence
  Description of Artificial Sequence: Synthetic oligonucleotide
cccauacuaguacacauuu

SEQ ID NO: 759634 - RNA, 19 nt, Artificial Sequence
  Description of Artificial Sequence: Synthetic oligonucleotide
gggcaagccuagucgaagu

SEQ ID NO: 759635 - RNA, 19 nt, Artificial Sequence
  Description of Artificial Sequence: Synthetic oligonucleotide
gcuauacccauggcaugga

SEQ ID NO: 759636 - RNA, 19 nt, Artificial Sequence
  Description of Artificial Sequence: Synthetic oligonucleotide
gaucagcgguguaggcuua

SEQ ID NO: 759637 - RNA, 19 nt, Artificial Sequence
  Description of Artificial Sequence: Synthetic oligonucleotide
ggccugggagggcugaaua

SEQ ID NO: 759638 - RNA, 19 nt, Artificial Sequence
  Description of Artificial Sequence: Synthetic oligonucleotide
guucgaccuuguucaucua

SEQ ID NO: 759639 - RNA, 19 nt, Artificial Sequence
  Description of Artificial Sequence: Synthetic oligonucleotide
gcaagccuagucgaaguau

SEQ ID NO: 759640 - RNA, 19 nt, Artificial Sequence
  Description of Artificial Sequence: Synthetic oligonucleotide
ggcaucagaccgagccuga

SEQ ID NO: 759641 - RNA, 19 nt, Artificial Sequence
  Description of Artificial Sequence: Synthetic oligonucleotide
caucucccuuuguguuaga

SEQ ID NO: 759642 - RNA, 19 nt, Artificial Sequence
  Description of Artificial Sequence: Synthetic oligonucleotide
ccacucaauuucagggaua

SEQ ID NO: 759643 - RNA, 19 nt, Artificial Sequence
  Description of Artificial Sequence: Synthetic oligonucleotide
ggaccgcuucuguuccuaa

SEQ ID NO: 759644 - RNA, 19 nt, Artificial Sequence
  Description of Artificial Sequence: Synthetic oligonucleotide
guuugccuccgaagcuucu

SEQ ID NO: 759645 - RNA, 19 nt, Artificial Sequence
  Description of Artificial Sequence: Synthetic oligonucleotide
cccgcuuagacagagccau

SEQ ID NO: 759646 - RNA, 19 nt, Artificial Sequence
  Description of Artificial Sequence: Synthetic oligonucleotide
gguguaggcuuaguuugau

SEQ ID NO: 759647 - RNA, 19 nt, Artificial Sequence
  Description of Artificial Sequence: Synthetic oligonucleotide
cagcgguguaggcuuaguu

SEQ ID NO: 759648 - RNA, 19 nt, Artificial Sequence
  Description of Artificial Sequence: Synthetic oligonucleotide
cauugucgacuggaggguu

SEQ ID NO: 759649 - RNA, 19 nt, Artificial Sequence
  Description of Artificial Sequence: Synthetic oligonucleotide
cguacccucccauacuagu

SEQ ID NO: 759650 - RNA, 19 nt, Artificial Sequence
  Description of Artificial Sequence: Synthetic oligonucleotide
cagggauaucgccuuccuu

SEQ ID NO: 759651 - RNA, 19 nt, Artificial Sequence
  Description of Artificial Sequence: Synthetic oligonucleotide
cgguguaggcuuaguuuga

SEQ ID NO: 759652 - RNA, 19 nt, Artificial Sequence
  Description of Artificial Sequence: Synthetic oligonucleotide
ccaaggguaacugguguau

SEQ ID NO: 759653 - RNA, 19 nt, Artificial Sequence
  Description of Artificial Sequence: Synthetic oligonucleotide
cgaaguaugaaugccuguu

SEQ ID NO: 759654 - RNA, 19 nt, Artificial Sequence
  Description of Artificial Sequence: Synthetic oligonucleotide
cuuccacuaccaccacguu

SEQ ID NO: 759655 - RNA, 19 nt, Artificial Sequence
  Description of Artificial Sequence: Synthetic oligonucleotide
caaugagggcaagccuagu

SEQ ID NO: 759656 - RNA, 19 nt, Artificial Sequence
  Description of Artificial Sequence: Synthetic oligonucleotide
cccucuuuacagcucgaau

SEQ ID NO: 759657 - RNA, 19 nt, Artificial Sequence
  Description of Artificial Sequence: Synthetic oligonucleotide
ccgagccugacuuucucuu

SEQ ID NO: 759658 - RNA, 19 nt, Artificial Sequence
  Description of Artificial Sequence: Synthetic oligonucleotide
gugcgcuuucugucucuuu

SEQ ID NO: 759659 - RNA, 19 nt, Artificial Sequence
  Description of Artificial Sequence: Synthetic oligonucleotide
ggcgcugagaaggggcaau

SEQ ID NO: 759660 - RNA, 19 nt, Artificial Sequence
  Description of Artificial Sequence: Synthetic oligonucleotide
gccucuucgugcgcuuucu

SEQ ID NO: 759661 - RNA, 19 nt, Artificial Sequence
  Description of Artificial Sequence: Synthetic oligonucleotide
caguaguguucagccccau

SEQ ID NO: 759662 - RNA, 19 nt, Artificial Sequence
  Description of Artificial Sequence: Synthetic oligonucleotide
gcucugacgugggcuucua

SEQ ID NO: 759663 - RNA, 19 nt, Artificial Sequence
  Description of Artificial Sequence: Synthetic oligonucleotide
gcgcugagaaggggcaauu

SEQ ID NO: 759664 - RNA, 19 nt, Artificial Sequence
  Description of Artificial Sequence: Synthetic oligonucleotide
ccgcuuagacagagccauu

SEQ ID NO: 759665 - RNA, 19 nt, Artificial Sequence
  Description of Artificial Sequence: Synthetic oligonucleotide
cgugggcuucuaccuucgu

SEQ ID NO: 759666 - RNA, 19 nt, Artificial Sequence
  Description of Artificial Sequence: Synthetic oligonucleotide
cgugcgcuuucugucucuu

SEQ ID NO: 759667 - RNA, 19 nt, Artificial Sequence
  Description of Artificial Sequence: Synthetic oligonucleotide
aauauaaauauauauauau

SEQ ID NO: 759668 - RNA, 19 nt, Artificial Sequence
  Description of Artificial Sequence: Synthetic oligonucleotide
uauauauauauuuauauac

SEQ ID NO: 759669 - RNA, 19 nt, Artificial Sequence
  Description of Artificial Sequence: Synthetic oligonucleotide
aauauauauauauuuauau

SEQ ID NO: 759670 - RNA, 19 nt, Artificial Sequence
  Description of Artificial Sequence: Synthetic oligonucleotide
auuacauucauacucgccg

SEQ ID NO: 759671 - RNA, 19 nt, Artificial Sequence
  Description of Artificial Sequence: Synthetic oligonucleotide
caaaaugaucacuagaugg

SEQ ID NO: 759672 - RNA, 19 nt, Artificial Sequence
  Description of Artificial Sequence: Synthetic oligonucleotide
uauaaauauauauauauuu

SEQ ID NO: 759673 - RNA, 19 nt, Artificial Sequence
  Description of Artificial Sequence: Synthetic oligonucleotide
aaaaugaucacuagauggc

SEQ ID NO: 759674 - RNA, 19 nt, Artificial Sequence
  Description of Artificial Sequence: Synthetic oligonucleotide
uucauaauagucaauucag

SEQ ID NO: 759675 - RNA, 19 nt, Artificial Sequence
  Description of Artificial Sequence: Synthetic oligonucleotide
aauaagguucaacacauca

SEQ ID NO: 759676 - RNA, 19 nt, Artificial Sequence
  Description of Artificial Sequence: Synthetic oligonucleotide
cugacaacagacaauaagg

SEQ ID NO: 759677 - RNA, 19 nt, Artificial Sequence
  Description of Artificial Sequence: Synthetic oligonucleotide
aaagggaaauuauaaaagu

SEQ ID NO: 759678 - RNA, 19 nt, Artificial Sequence
  Description of Artificial Sequence: Synthetic oligonucleotide
uguaacuagaguugcauag

SEQ ID NO: 759679 - RNA, 19 nt, Artificial Sequence
  Description of Artificial Sequence: Synthetic oligonucleotide
aaaguguaacuagaguugc

SEQ ID NO: 759680 - RNA, 19 nt, Artificial Sequence
  Description of Artificial Sequence: Synthetic oligonucleotide
uuuaaaauguaccuggcua

SEQ ID NO: 759681 - RNA, 19 nt, Artificial Sequence
  Description of Artificial Sequence: Synthetic oligonucleotide
aaccuaaagagauuauaag

SEQ ID NO: 759682 - RNA, 19 nt, Artificial Sequence
  Description of Artificial Sequence: Synthetic oligonucleotide
agaguuauuggaaauuucc

SEQ ID NO: 759683 - RNA, 19 nt, Artificial Sequence
  Description of Artificial Sequence: Synthetic oligonucleotide
uaaauauauauauauuuau

SEQ ID NO: 759684 - RNA, 19 nt, Artificial Sequence
  Description of Artificial Sequence: Synthetic oligonucleotide
auaagcaguacuuaauuug

SEQ ID NO: 759685 - RNA, 19 nt, Artificial Sequence
  Description of Artificial Sequence: Synthetic oligonucleotide
uagaaugacagacuuaagu

SEQ ID NO: 759686 - RNA, 19 nt, Artificial Sequence
  Description of Artificial Sequence: Synthetic oligonucleotide
aauaucaccaugcuauuaa

SEQ ID NO: 759687 - RNA, 19 nt, Artificial Sequence
  Description of Artificial Sequence: Synthetic oligonucleotide
auaauagucaauucagugu

SEQ ID NO: 759688 - RNA, 19 nt, Artificial Sequence
  Description of Artificial Sequence: Synthetic oligonucleotide
auacacaacaaugaucacc

SEQ ID NO: 759689 - RNA, 19 nt, Artificial Sequence
  Description of Artificial Sequence: Synthetic oligonucleotide
auaguuuacaccuucuaca

SEQ ID NO: 759690 - RNA, 19 nt, Artificial Sequence
  Description of Artificial Sequence: Synthetic oligonucleotide
aaauguaccuggcuagguc

SEQ ID NO: 759691 - RNA, 19 nt, Artificial Sequence
  Description of Artificial Sequence: Synthetic oligonucleotide
cauaauagucaauucagug

SEQ ID NO: 759692 - RNA, 19 nt, Artificial Sequence
  Description of Artificial Sequence: Synthetic oligonucleotide
uuuguuacaccauugcacu

SEQ ID NO: 759693 - RNA, 19 nt, Artificial Sequence
  Description of Artificial Sequence: Synthetic oligonucleotide
agguucaacacaucagugc

SEQ ID NO: 759694 - RNA, 19 nt, Artificial Sequence
  Description of Artificial Sequence: Synthetic oligonucleotide
augcuauuaacauuucagg

SEQ ID NO: 759695 - RNA, 19 nt, Artificial Sequence
  Description of Artificial Sequence: Synthetic oligonucleotide
aaaaguguaacuagaguug

SEQ ID NO: 759696 - RNA, 19 nt, Artificial Sequence
  Description of Artificial Sequence: Synthetic oligonucleotide
acuggugacaauucuuggc

SEQ ID NO: 759697 - RNA, 19 nt, Artificial Sequence
  Description of Artificial Sequence: Synthetic oligonucleotide
uaauagucaauucagugua

SEQ ID NO: 759698 - RNA, 19 nt, Artificial Sequence
  Description of Artificial Sequence: Synthetic oligonucleotide
ugauuguugguagaguugg

SEQ ID NO: 759699 - RNA, 19 nt, Artificial Sequence
  Description of Artificial Sequence: Synthetic oligonucleotide
uaagguucaacacaucagu

SEQ ID NO: 759700 - RNA, 19 nt, Artificial Sequence
  Description of Artificial Sequence: Synthetic oligonucleotide
aauguaccuggcuagguca

SEQ ID NO: 759701 - RNA, 19 nt, Artificial Sequence
  Description of Artificial Sequence: Synthetic oligonucleotide
ugaugaugaagaaucgacc

SEQ ID NO: 759702 - RNA, 19 nt, Artificial Sequence
  Description of Artificial Sequence: Synthetic oligonucleotide
aggguaagcccuuagaaug

SEQ ID NO: 759703 - RNA, 19 nt, Artificial Sequence
  Description of Artificial Sequence: Synthetic oligonucleotide
cugacaaagugauauacac

SEQ ID NO: 759704 - RNA, 19 nt, Artificial Sequence
  Description of Artificial Sequence: Synthetic oligonucleotide
gaaucgaccagaguuauug

SEQ ID NO: 759705 - RNA, 19 nt, Artificial Sequence
  Description of Artificial Sequence: Synthetic oligonucleotide
aguacuuaauuuguguuuc

SEQ ID NO: 759706 - RNA, 19 nt, Artificial Sequence
  Description of Artificial Sequence: Synthetic oligonucleotide
uaugagagcuggaagugag

SEQ ID NO: 759707 - RNA, 19 nt, Artificial Sequence
  Description of Artificial Sequence: Synthetic oligonucleotide
cauuaaaucaaugugaaaa

SEQ ID NO: 759708 - RNA, 19 nt, Artificial Sequence
  Description of Artificial Sequence: Synthetic oligonucleotide
agugguauucgcccgaauc

SEQ ID NO: 759709 - RNA, 19 nt, Artificial Sequence
  Description of Artificial Sequence: Synthetic oligonucleotide
auuuuaacaaagggaaggg

SEQ ID NO: 759710 - RNA, 19 nt, Artificial Sequence
  Description of Artificial Sequence: Synthetic oligonucleotide
auauauauauauuuauaua

SEQ ID NO: 759711 - RNA, 19 nt, Artificial Sequence
  Description of Artificial Sequence: Synthetic oligonucleotide
uauauacuguauauaucug

SEQ ID NO: 759712 - RNA, 19 nt, Artificial Sequence
  Description of Artificial Sequence: Synthetic oligonucleotide
uuacauucauacucgccgg

SEQ ID NO: 759713 - RNA, 19 nt, Artificial Sequence
  Description of Artificial Sequence: Synthetic oligonucleotide
acauauauacugcaauuca

SEQ ID NO: 759714 - RNA, 19 nt, Artificial Sequence
  Description of Artificial Sequence: Synthetic oligonucleotide
ugacaacagacaauaagga

SEQ ID NO: 759715 - RNA, 19 nt, Artificial Sequence
  Description of Artificial Sequence: Synthetic oligonucleotide
aauuuagcaggucguguug

SEQ ID NO: 759716 - RNA, 19 nt, Artificial Sequence
  Description of Artificial Sequence: Synthetic oligonucleotide
uuauugauccuguauucca

SEQ ID NO: 759717 - RNA, 19 nt, Artificial Sequence
  Description of Artificial Sequence: Synthetic oligonucleotide
cagguuauaaaaucuauca

SEQ ID NO: 759718 - RNA, 19 nt, Artificial Sequence
  Description of Artificial Sequence: Synthetic oligonucleotide
cugaggacggugaaaacgg

SEQ ID NO: 759719 - RNA, 19 nt, Artificial Sequence
  Description of Artificial Sequence: Synthetic oligonucleotide
uguugcucacuugaaaggg

SEQ ID NO: 759720 - RNA, 19 nt, Artificial Sequence
  Description of Artificial Sequence: Synthetic oligonucleotide
aaauuuagcaggucguguu

SEQ ID NO: 759721 - RNA, 19 nt, Artificial Sequence
  Description of Artificial Sequence: Synthetic oligonucleotide
aaauauauauauauuuaua

SEQ ID NO: 759722 - RNA, 19 nt, Artificial Sequence
  Description of Artificial Sequence: Synthetic oligonucleotide
caagaauaagguucaacac

SEQ ID NO: 759723 - RNA, 19 nt, Artificial Sequence
  Description of Artificial Sequence: Synthetic oligonucleotide
gguggcauuacauucauac

SEQ ID NO: 759724 - RNA, 19 nt, Artificial Sequence
  Description of Artificial Sequence: Synthetic oligonucleotide
aaguacaugcaucuacagu

SEQ ID NO: 759725 - RNA, 19 nt, Artificial Sequence
  Description of Artificial Sequence: Synthetic oligonucleotide
aaucgaccagaguuauugg

SEQ ID NO: 759726 - RNA, 19 nt, Artificial Sequence
  Description of Artificial Sequence: Synthetic oligonucleotide
cuuaggagcgcugacaaag

SEQ ID NO: 759727 - RNA, 19 nt, Artificial Sequence
  Description of Artificial Sequence: Synthetic oligonucleotide
auauauauauuuauauacu

SEQ ID NO: 759728 - RNA, 19 nt, Artificial Sequence
  Description of Artificial Sequence: Synthetic oligonucleotide
ugugcauaaggguaugaga

SEQ ID NO: 759729 - RNA, 19 nt, Artificial Sequence
  Description of Artificial Sequence: Synthetic oligonucleotide
acaaaaugaucacuagaug

SEQ ID NO: 759730 - RNA, 19 nt, Artificial Sequence
  Description of Artificial Sequence: Synthetic oligonucleotide
gugcauaaggguaugagag

SEQ ID NO: 759731 - RNA, 19 nt, Artificial Sequence
  Description of Artificial Sequence: Synthetic oligonucleotide
agcauuguuuaaaauguac

SEQ ID NO: 759732 - RNA, 19 nt, Artificial Sequence
  Description of Artificial Sequence: Synthetic oligonucleotide
agcgaagagcccgacaucc

SEQ ID NO: 759733 - RNA, 19 nt, Artificial Sequence
  Description of Artificial Sequence: Synthetic oligonucleotide
uuauaggagaggcuaaaua

SEQ ID NO: 759734 - RNA, 19 nt, Artificial Sequence
  Description of Artificial Sequence: Synthetic oligonucleotide
gccgcuuucacuucaaugg

SEQ ID NO: 759735 - RNA, 19 nt, Artificial Sequence
  Description of Artificial Sequence: Synthetic oligonucleotide
auaucaccaugcuauuaac

SEQ ID NO: 759736 - RNA, 19 nt, Artificial Sequence
  Description of Artificial Sequence: Synthetic oligonucleotide
aguggcagugaguucuacc

SEQ ID NO: 759737 - RNA, 19 nt, Artificial Sequence
  Description of Artificial Sequence: Synthetic oligonucleotide
uguuuugcuguacuuuaca

SEQ ID NO: 759738 - RNA, 19 nt, Artificial Sequence
  Description of Artificial Sequence: Synthetic oligonucleotide
auaaggguaugagagcugg

SEQ ID NO: 759739 - RNA, 19 nt, Artificial Sequence
  Description of Artificial Sequence: Synthetic oligonucleotide
caauucaguguaauucucc

SEQ ID NO: 759740 - RNA, 19 nt, Artificial Sequence
  Description of Artificial Sequence: Synthetic oligonucleotide
aaauauaaauauauauaua

SEQ ID NO: 759741 - RNA, 19 nt, Artificial Sequence
  Description of Artificial Sequence: Synthetic oligonucleotide
aggaugaugauuucagcca

SEQ ID NO: 759742 - RNA, 19 nt, Artificial Sequence
  Description of Artificial Sequence: Synthetic oligonucleotide
aaaauuuagcaggucgugu

SEQ ID NO: 759743 - RNA, 19 nt, Artificial Sequence
  Description of Artificial Sequence: Synthetic oligonucleotide
uaaaauguaccuggcuagg

SEQ ID NO: 759744 - RNA, 19 nt, Artificial Sequence
  Description of Artificial Sequence: Synthetic oligonucleotide
uuauacucucaucuuuaug

SEQ ID NO: 759745 - RNA, 19 nt, Artificial Sequence
  Description of Artificial Sequence: Synthetic oligonucleotide
uuaguaccgcaugagaacc

SEQ ID NO: 759746 - RNA, 19 nt, Artificial Sequence
  Description of Artificial Sequence: Synthetic oligonucleotide
auaaauauauauauauuua

SEQ ID NO: 759747 - RNA, 19 nt, Artificial Sequence
  Description of Artificial Sequence: Synthetic oligonucleotide
acaauaaggaauggguauc

SEQ ID NO: 759748 - RNA, 19 nt, Artificial Sequence
  Description of Artificial Sequence: Synthetic oligonucleotide
ucuuacgaguggcagugag

SEQ ID NO: 759749 - RNA, 19 nt, Artificial Sequence
  Description of Artificial Sequence: Synthetic oligonucleotide
uuaaguuuauacucucauc

SEQ ID NO: 759750 - RNA, 19 nt, Artificial Sequence
  Description of Artificial Sequence: Synthetic oligonucleotide
aauggcgcaugcaugaucu

SEQ ID NO: 759751 - RNA, 19 nt, Artificial Sequence
  Description of Artificial Sequence: Synthetic oligonucleotide
ugacuugcaguacaucaug

SEQ ID NO: 759752 - RNA, 19 nt, Artificial Sequence
  Description of Artificial Sequence: Synthetic oligonucleotide
uacaguuaguaccgcauga

SEQ ID NO: 759753 - RNA, 19 nt, Artificial Sequence
  Description of Artificial Sequence: Synthetic oligonucleotide
ugaucugauccuuggagga

SEQ ID NO: 759754 - RNA, 19 nt, Artificial Sequence
  Description of Artificial Sequence: Synthetic oligonucleotide
auucauuauagucguucag

SEQ ID NO: 759755 - RNA, 19 nt, Artificial Sequence
  Description of Artificial Sequence: Synthetic oligonucleotide
uagacggucauuguggugu

SEQ ID NO: 759756 - RNA, 19 nt, Artificial Sequence
  Description of Artificial Sequence: Synthetic oligonucleotide
ugaugaagaaucgaccaga

SEQ ID NO: 759757 - RNA, 19 nt, Artificial Sequence
  Description of Artificial Sequence: Synthetic oligonucleotide
ugugauuguugguagaguu

SEQ ID NO: 759758 - RNA, 19 nt, Artificial Sequence
  Description of Artificial Sequence: Synthetic oligonucleotide
uacauucauacucgccggg

SEQ ID NO: 759759 - RNA, 19 nt, Artificial Sequence
  Description of Artificial Sequence: Synthetic oligonucleotide
gguguugcucacuugaaag

SEQ ID NO: 759760 - RNA, 19 nt, Artificial Sequence
  Description of Artificial Sequence: Synthetic oligonucleotide
guuaguaccgcaugagaac

SEQ ID NO: 759761 - RNA, 19 nt, Artificial Sequence
  Description of Artificial Sequence: Synthetic oligonucleotide
gaaaauuuagcaggucgug

SEQ ID NO: 759762 - RNA, 19 nt, Artificial Sequence
  Description of Artificial Sequence: Synthetic oligonucleotide
uccugaaacacaccauucu

SEQ ID NO: 759763 - RNA, 19 nt, Artificial Sequence
  Description of Artificial Sequence: Synthetic oligonucleotide
auaauuacacaaguacaug

SEQ ID NO: 759764 - RNA, 19 nt, Artificial Sequence
  Description of Artificial Sequence: Synthetic oligonucleotide
cauucacagcacaucaagc

SEQ ID NO: 759765 - RNA, 19 nt, Artificial Sequence
  Description of Artificial Sequence: Synthetic oligonucleotide
uaacuagaguugcauagaa

SEQ ID NO: 759766 - RNA, 19 nt, Artificial Sequence
  Description of Artificial Sequence: Synthetic oligonucleotide
ggagagaccaaagaggucc

SEQ ID NO: 759767 - RNA, 19 nt, Artificial Sequence
  Description of Artificial Sequence: Synthetic oligonucleotide
aguagcugugcauaagggu

SEQ ID NO: 759768 - RNA, 19 nt, Artificial Sequence
  Description of Artificial Sequence: Synthetic oligonucleotide
cacaaguacaugcaucuac

SEQ ID NO: 759769 - RNA, 19 nt, Artificial Sequence
  Description of Artificial Sequence: Synthetic oligonucleotide
aguuuauacucucaucuuu

SEQ ID NO: 759770 - RNA, 19 nt, Artificial Sequence
  Description of Artificial Sequence: Synthetic oligonucleotide
ucuugcgccauauccauuc

SEQ ID NO: 759771 - RNA, 19 nt, Artificial Sequence
  Description of Artificial Sequence: Synthetic oligonucleotide
auucauacucgccgggauc

SEQ ID NO: 759772 - RNA, 19 nt, Artificial Sequence
  Description of Artificial Sequence: Synthetic oligonucleotide
aauaaggaauggguaucag

SEQ ID NO: 759773 - RNA, 19 nt, Artificial Sequence
  Description of Artificial Sequence: Synthetic oligonucleotide
auaagguucaacacaucag

SEQ ID NO: 759774 - RNA, 19 nt, Artificial Sequence
  Description of Artificial Sequence: Synthetic oligonucleotide
uuauaggguaagcccuuag

SEQ ID NO: 759775 - RNA, 19 nt, Artificial Sequence
  Description of Artificial Sequence: Synthetic oligonucleotide
caauucauuauagucguuc

SEQ ID NO: 759776 - RNA, 19 nt, Artificial Sequence
  Description of Artificial Sequence: Synthetic oligonucleotide
ucacccuuauaggagaggc

SEQ ID NO: 759777 - RNA, 19 nt, Artificial Sequence
  Description of Artificial Sequence: Synthetic oligonucleotide
uuuuaacaaagggaaggga

SEQ ID NO: 759778 - RNA, 19 nt, Artificial Sequence
  Description of Artificial Sequence: Synthetic oligonucleotide
gugagguuacacugcaggg

SEQ ID NO: 759779 - RNA, 19 nt, Artificial Sequence
  Description of Artificial Sequence: Synthetic oligonucleotide
ucuacacugaagcauuguu

SEQ ID NO: 759780 - RNA, 19 nt, Artificial Sequence
  Description of Artificial Sequence: Synthetic oligonucleotide
ucgaccagaguuauuggaa

SEQ ID NO: 759781 - RNA, 19 nt, Artificial Sequence
  Description of Artificial Sequence: Synthetic oligonucleotide
agguuauaaaaucuaucau

SEQ ID NO: 759782 - RNA, 19 nt, Artificial Sequence
  Description of Artificial Sequence: Synthetic oligonucleotide
aagggaaauuauaaaaguu

SEQ ID NO: 759783 - RNA, 19 nt, Artificial Sequence
  Description of Artificial Sequence: Synthetic oligonucleotide
auugauccuguauuccaug

SEQ ID NO: 759784 - RNA, 19 nt, Artificial Sequence
  Description of Artificial Sequence: Synthetic oligonucleotide
uuuagacggucauuguggu

SEQ ID NO: 759785 - RNA, 19 nt, Artificial Sequence
  Description of Artificial Sequence: Synthetic oligonucleotide
uauugauccuguauuccau

SEQ ID NO: 759786 - RNA, 19 nt, Artificial Sequence
  Description of Artificial Sequence: Synthetic oligonucleotide
acugaagcauuguuuaaaa

SEQ ID NO: 759787 - RNA, 19 nt, Artificial Sequence
  Description of Artificial Sequence: Synthetic oligonucleotide
aacccagucagguuauaaa

SEQ ID NO: 759788 - RNA, 19 nt, Artificial Sequence
  Description of Artificial Sequence: Synthetic oligonucleotide
augcaucuacaguuaguac

SEQ ID NO: 759789 - RNA, 19 nt, Artificial Sequence
  Description of Artificial Sequence: Synthetic oligonucleotide
ggaggagcgagccagagac

SEQ ID NO: 759790 - RNA, 19 nt, Artificial Sequence
  Description of Artificial Sequence: Synthetic oligonucleotide
ggcauuacauucauacucg

SEQ ID NO: 759791 - RNA, 19 nt, Artificial Sequence
  Description of Artificial Sequence: Synthetic oligonucleotide
aggguaugagagcuggaag

SEQ ID NO: 759792 - RNA, 19 nt, Artificial Sequence
  Description of Artificial Sequence: Synthetic oligonucleotide
gauauacacagugguauuc

SEQ ID NO: 759793 - RNA, 19 nt, Artificial Sequence
  Description of Artificial Sequence: Synthetic oligonucleotide
agcgcugacaaagugauau

SEQ ID NO: 759794 - RNA, 19 nt, Artificial Sequence
  Description of Artificial Sequence: Synthetic oligonucleotide
uuauagucguucaguggac

SEQ ID NO: 759795 - RNA, 19 nt, Artificial Sequence
  Description of Artificial Sequence: Synthetic oligonucleotide
auauaaauauauauauauu

SEQ ID NO: 759796 - RNA, 19 nt, Artificial Sequence
  Description of Artificial Sequence: Synthetic oligonucleotide
caguagcugugcauaaggg

SEQ ID NO: 759797 - RNA, 19 nt, Artificial Sequence
  Description of Artificial Sequence: Synthetic oligonucleotide
aaaauguaccuggcuaggu

SEQ ID NO: 759798 - RNA, 19 nt, Artificial Sequence
  Description of Artificial Sequence: Synthetic oligonucleotide
caaguacaugcaucuacag

SEQ ID NO: 759799 - RNA, 19 nt, Artificial Sequence
  Description of Artificial Sequence: Synthetic oligonucleotide
uuuacaccuucuacacuga

SEQ ID NO: 759800 - RNA, 19 nt, Artificial Sequence
  Description of Artificial Sequence: Synthetic oligonucleotide
gacaauaaggaauggguau

SEQ ID NO: 759801 - RNA, 19 nt, Artificial Sequence
  Description of Artificial Sequence: Synthetic oligonucleotide
aggacggugaaaacggagg

SEQ ID NO: 759802 - RNA, 19 nt, Artificial Sequence
  Description of Artificial Sequence: Synthetic oligonucleotide
accgcaugagaacccaguc

SEQ ID NO: 759803 - RNA, 19 nt, Artificial Sequence
  Description of Artificial Sequence: Synthetic oligonucleotide
uucgcccgaauccucagcu

SEQ ID NO: 759804 - RNA, 19 nt, Artificial Sequence
  Description of Artificial Sequence: Synthetic oligonucleotide
gcaucuacaguuaguaccg

SEQ ID NO: 759805 - RNA, 19 nt, Artificial Sequence
  Description of Artificial Sequence: Synthetic oligonucleotide
cuaggucacccuuauagga

SEQ ID NO: 759806 - RNA, 19 nt, Artificial Sequence
  Description of Artificial Sequence: Synthetic oligonucleotide
uuccugaaacacaccauuc

SEQ ID NO: 759807 - RNA, 19 nt, Artificial Sequence
  Description of Artificial Sequence: Synthetic oligonucleotide
uuacgaguggcagugaguu

SEQ ID NO: 759808 - RNA, 19 nt, Artificial Sequence
  Description of Artificial Sequence: Synthetic oligonucleotide
auacuguauauaucuguau

SEQ ID NO: 759809 - RNA, 19 nt, Artificial Sequence
  Description of Artificial Sequence: Synthetic oligonucleotide
uacugcaauucauuauagu

SEQ ID NO: 759810 - RNA, 19 nt, Artificial Sequence
  Description of Artificial Sequence: Synthetic oligonucleotide
aaggguaugagagcuggaa

SEQ ID NO: 759811 - RNA, 19 nt, Artificial Sequence
  Description of Artificial Sequence: Synthetic oligonucleotide
gacaauucuuggcucguuc

SEQ ID NO: 759812 - RNA, 19 nt, Artificial Sequence
  Description of Artificial Sequence: Synthetic oligonucleotide
aguuaguaccgcaugagaa

SEQ ID NO: 759813 - RNA, 19 nt, Artificial Sequence
  Description of Artificial Sequence: Synthetic oligonucleotide
acaguuaguaccgcaugag

SEQ ID NO: 759814 - RNA, 19 nt, Artificial Sequence
  Description of Artificial Sequence: Synthetic oligonucleotide
uggcuuauugauccuguau

SEQ ID NO: 759815 - RNA, 19 nt, Artificial Sequence
  Description of Artificial Sequence: Synthetic oligonucleotide
gcauagaauaucaccaugc

SEQ ID NO: 759816 - RNA, 19 nt, Artificial Sequence
  Description of Artificial Sequence: Synthetic oligonucleotide
auucgcccgaauccucagc

SEQ ID NO: 759817 - RNA, 19 nt, Artificial Sequence
  Description of Artificial Sequence: Synthetic oligonucleotide
uuaggagcgcugacaaagu

SEQ ID NO: 759818 - RNA, 19 nt, Artificial Sequence
  Description of Artificial Sequence: Synthetic oligonucleotide
acgaguggcagugaguucu

SEQ ID NO: 759819 - RNA, 19 nt, Artificial Sequence
  Description of Artificial Sequence: Synthetic oligonucleotide
agcaggucguguugccacc

SEQ ID NO: 759820 - RNA, 19 nt, Artificial Sequence
  Description of Artificial Sequence: Synthetic oligonucleotide
uaggagcgcugacaaagug

SEQ ID NO: 759821 - RNA, 19 nt, Artificial Sequence
  Description of Artificial Sequence: Synthetic oligonucleotide
accauugcacuucaauaau

SEQ ID NO: 759822 - RNA, 19 nt, Artificial Sequence
  Description of Artificial Sequence: Synthetic oligonucleotide
cuccguacccugaggacgg

SEQ ID NO: 759823 - RNA, 19 nt, Artificial Sequence
  Description of Artificial Sequence: Synthetic oligonucleotide
aagaaucgaccagaguuau

SEQ ID NO: 759824 - RNA, 19 nt, Artificial Sequence
  Description of Artificial Sequence: Synthetic oligonucleotide
ucguguugccaccauuuuc

SEQ ID NO: 759825 - RNA, 19 nt, Artificial Sequence
  Description of Artificial Sequence: Synthetic oligonucleotide
gcuaggucacccuuauagg

SEQ ID NO: 759826 - RNA, 19 nt, Artificial Sequence
  Description of Artificial Sequence: Synthetic oligonucleotide
aagcccuuagaaugacaga

SEQ ID NO: 759827 - RNA, 19 nt, Artificial Sequence
  Description of Artificial Sequence: Synthetic oligonucleotide
aucuacaguuaguaccgca

SEQ ID NO: 759828 - RNA, 19 nt, Artificial Sequence
  Description of Artificial Sequence: Synthetic oligonucleotide
caccauugcacuucaauaa

SEQ ID NO: 759829 - RNA, 19 nt, Artificial Sequence
  Description of Artificial Sequence: Synthetic oligonucleotide
cuucaaugguggcauucgc

SEQ ID NO: 759830 - RNA, 19 nt, Artificial Sequence
  Description of Artificial Sequence: Synthetic oligonucleotide
auacugcaauucauuauag

SEQ ID NO: 759831 - RNA, 19 nt, Artificial Sequence
  Description of Artificial Sequence: Synthetic oligonucleotide
cagaguuauuggaaauuuc

SEQ ID NO: 759832 - RNA, 19 nt, Artificial Sequence
  Description of Artificial Sequence: Synthetic oligonucleotide
gaagagcccgacauccucc

SEQ ID NO: 759833 - RNA, 19 nt, Artificial Sequence
  Description of Artificial Sequence: Synthetic oligonucleotide
gaagaaucgaccagaguua

SEQ ID NO: 759834 - RNA, 19 nt, Artificial Sequence
  Description of Artificial Sequence: Synthetic oligonucleotide
gcuauuaacauuucagggu

SEQ ID NO: 759835 - RNA, 19 nt, Artificial Sequence
  Description of Artificial Sequence: Synthetic oligonucleotide
ugguguugcucacuugaaa

SEQ ID NO: 759836 - RNA, 19 nt, Artificial Sequence
  Description of Artificial Sequence: Synthetic oligonucleotide
gagauuauaagcaguacuu

SEQ ID NO: 759837 - RNA, 19 nt, Artificial Sequence
  Description of Artificial Sequence: Synthetic oligonucleotide
uaccgcaugagaacccagu

SEQ ID NO: 759838 - RNA, 19 nt, Artificial Sequence
  Description of Artificial Sequence: Synthetic oligonucleotide
uuagacggucauuguggug

SEQ ID NO: 759839 - RNA, 19 nt, Artificial Sequence
  Description of Artificial Sequence: Synthetic oligonucleotide
cagugcaaaagauuucaga

SEQ ID NO: 759840 - RNA, 19 nt, Artificial Sequence
  Description of Artificial Sequence: Synthetic oligonucleotide
gaucacuagauggcagcag

SEQ ID NO: 759841 - RNA, 19 nt, Artificial Sequence
  Description of Artificial Sequence: Synthetic oligonucleotide
uauucgcccgaauccucag

SEQ ID NO: 759842 - RNA, 19 nt, Artificial Sequence
  Description of Artificial Sequence: Synthetic oligonucleotide
uauagucguucaguggacu

SEQ ID NO: 759843 - RNA, 19 nt, Artificial Sequence
  Description of Artificial Sequence: Synthetic oligonucleotide
gagagcgcgcagcgaaugg

SEQ ID NO: 759844 - RNA, 19 nt, Artificial Sequence
  Description of Artificial Sequence: Synthetic oligonucleotide
guagcugugcauaagggua

SEQ ID NO: 759845 - RNA, 19 nt, Artificial Sequence
  Description of Artificial Sequence: Synthetic oligonucleotide
ggugaaaacggaggcagag

SEQ ID NO: 759846 - RNA, 19 nt, Artificial Sequence
  Description of Artificial Sequence: Synthetic oligonucleotide
agauuauaagcaguacuua

SEQ ID NO: 759847 - RNA, 19 nt, Artificial Sequence
  Description of Artificial Sequence: Synthetic oligonucleotide
ugguauucgcccgaauccu

SEQ ID NO: 759848 - RNA, 19 nt, Artificial Sequence
  Description of Artificial Sequence: Synthetic oligonucleotide
uagucaauucaguguaauu

SEQ ID NO: 759849 - RNA, 19 nt, Artificial Sequence
  Description of Artificial Sequence: Synthetic oligonucleotide
agcgagagggccagggcgc

SEQ ID NO: 759850 - RNA, 19 nt, Artificial Sequence
  Description of Artificial Sequence: Synthetic oligonucleotide
ugcucacuugaaagggaga

SEQ ID NO: 759851 - RNA, 19 nt, Artificial Sequence
  Description of Artificial Sequence: Synthetic oligonucleotide
aauagucaauucaguguaa

SEQ ID NO: 759852 - RNA, 19 nt, Artificial Sequence
  Description of Artificial Sequence: Synthetic oligonucleotide
cucgccgggaucuucugug

SEQ ID NO: 759853 - RNA, 19 nt, Artificial Sequence
  Description of Artificial Sequence: Synthetic oligonucleotide
agaggcuaaauaaggcaug

SEQ ID NO: 759854 - RNA, 19 nt, Artificial Sequence
  Description of Artificial Sequence: Synthetic oligonucleotide
agaauaucaccaugcuauu

SEQ ID NO: 759855 - RNA, 19 nt, Artificial Sequence
  Description of Artificial Sequence: Synthetic oligonucleotide
uugcgccauauccauucug

SEQ ID NO: 759856 - RNA, 19 nt, Artificial Sequence
  Description of Artificial Sequence: Synthetic oligonucleotide
caugcaucuacaguuagua

SEQ ID NO: 759857 - RNA, 19 nt, Artificial Sequence
  Description of Artificial Sequence: Synthetic oligonucleotide
guaacuagaguugcauaga

SEQ ID NO: 759858 - RNA, 19 nt, Artificial Sequence
  Description of Artificial Sequence: Synthetic oligonucleotide
ucagggucauuggaaacaa

SEQ ID NO: 759859 - RNA, 19 nt, Artificial Sequence
  Description of Artificial Sequence: Synthetic oligonucleotide
auauccauucugggugggg

SEQ ID NO: 759860 - RNA, 19 nt, Artificial Sequence
  Description of Artificial Sequence: Synthetic oligonucleotide
uggugacaauucuuggcuc

SEQ ID NO: 759861 - RNA, 19 nt, Artificial Sequence
  Description of Artificial Sequence: Synthetic oligonucleotide
gguaugagagcuggaagug

SEQ ID NO: 759862 - RNA, 19 nt, Artificial Sequence
  Description of Artificial Sequence: Synthetic oligonucleotide
auucaguguaauucuccuu

SEQ ID NO: 759863 - RNA, 19 nt, Artificial Sequence
  Description of Artificial Sequence: Synthetic oligonucleotide
uuagcaggucguguugcca

SEQ ID NO: 759864 - RNA, 19 nt, Artificial Sequence
  Description of Artificial Sequence: Synthetic oligonucleotide
uucgccuuaggagcgcuga

SEQ ID NO: 759865 - RNA, 19 nt, Artificial Sequence
  Description of Artificial Sequence: Synthetic oligonucleotide
gaguuauuggaaauuuccu

SEQ ID NO: 759866 - RNA, 19 nt, Artificial Sequence
  Description of Artificial Sequence: Synthetic oligonucleotide
acccuuauaggagaggcua

SEQ ID NO: 759867 - RNA, 19 nt, Artificial Sequence
  Description of Artificial Sequence: Synthetic oligonucleotide
agagcgcgcagcgaauggg

SEQ ID NO: 759868 - RNA, 19 nt, Artificial Sequence
  Description of Artificial Sequence: Synthetic oligonucleotide
aaguguaacuagaguugca

SEQ ID NO: 759869 - RNA, 19 nt, Artificial Sequence
  Description of Artificial Sequence: Synthetic oligonucleotide
ugucaggagccgcuuucac

SEQ ID NO: 759870 - RNA, 19 nt, Artificial Sequence
  Description of Artificial Sequence: Synthetic oligonucleotide
agccaacugacuugcagua

SEQ ID NO: 759871 - RNA, 19 nt, Artificial Sequence
  Description of Artificial Sequence: Synthetic oligonucleotide
agcgaaugggccggggccg

SEQ ID NO: 759872 - RNA, 19 nt, Artificial Sequence
  Description of Artificial Sequence: Synthetic oligonucleotide
caauaaggaauggguauca

SEQ ID NO: 759873 - RNA, 19 nt, Artificial Sequence
  Description of Artificial Sequence: Synthetic oligonucleotide
aaaauggcgcaugcaugau

SEQ ID NO: 759874 - RNA, 19 nt, Artificial Sequence
  Description of Artificial Sequence: Synthetic oligonucleotide
aguaccgcaugagaaccca

SEQ ID NO: 759875 - RNA, 19 nt, Artificial Sequence
  Description of Artificial Sequence: Synthetic oligonucleotide
aaaggccaaaguggggcaa

SEQ ID NO: 759876 - RNA, 19 nt, Artificial Sequence
  Description of Artificial Sequence: Synthetic oligonucleotide
ugaccucuucacuggugac

SEQ ID NO: 759877 - RNA, 19 nt, Artificial Sequence
  Description of Artificial Sequence: Synthetic oligonucleotide
guaccuggcuaggucaccc

SEQ ID NO: 759878 - RNA, 19 nt, Artificial Sequence
  Description of Artificial Sequence: Synthetic oligonucleotide
caguuaguaccgcaugaga

SEQ ID NO: 759879 - RNA, 19 nt, Artificial Sequence
  Description of Artificial Sequence: Synthetic oligonucleotide
gcuccguacccugaggacg

SEQ ID NO: 759880 - RNA, 19 nt, Artificial Sequence
  Description of Artificial Sequence: Synthetic oligonucleotide
gaauaucaccaugcuauua

SEQ ID NO: 759881 - RNA, 19 nt, Artificial Sequence
  Description of Artificial Sequence: Synthetic oligonucleotide
accagaguuauuggaaauu

SEQ ID NO: 759882 - RNA, 19 nt, Artificial Sequence
  Description of Artificial Sequence: Synthetic oligonucleotide
augagaacccagucagguu

SEQ ID NO: 759883 - RNA, 19 nt, Artificial Sequence
  Description of Artificial Sequence: Synthetic oligonucleotide
aggagcgcugacaaaguga

SEQ ID NO: 759884 - RNA, 19 nt, Artificial Sequence
  Description of Artificial Sequence: Synthetic oligonucleotide
agcccgacauccucccgag

SEQ ID NO: 759885 - RNA, 19 nt, Artificial Sequence
  Description of Artificial Sequence: Synthetic oligonucleotide
uuggcuuauugauccugua

SEQ ID NO: 759886 - RNA, 19 nt, Artificial Sequence
  Description of Artificial Sequence: Synthetic oligonucleotide
uuguuacaccauugcacuu

SEQ ID NO: 759887 - RNA, 19 nt, Artificial Sequence
  Description of Artificial Sequence: Synthetic oligonucleotide
agcgcgcagcgaaugggcc

SEQ ID NO: 759888 - RNA, 19 nt, Artificial Sequence
  Description of Artificial Sequence: Synthetic oligonucleotide
guaugagagcuggaaguga

SEQ ID NO: 759889 - RNA, 19 nt, Artificial Sequence
  Description of Artificial Sequence: Synthetic oligonucleotide
ggguaugagagcuggaagu

SEQ ID NO: 759890 - RNA, 19 nt, Artificial Sequence
  Description of Artificial Sequence: Synthetic oligonucleotide
ccguuuauggccagugaug

SEQ ID NO: 759891 - RNA, 19 nt, Artificial Sequence
  Description of Artificial Sequence: Synthetic oligonucleotide
uggggagcgaagagcccga

SEQ ID NO: 759892 - RNA, 19 nt, Artificial Sequence
  Description of Artificial Sequence: Synthetic oligonucleotide
cuugaaagggagagaccaa

SEQ ID NO: 759893 - RNA, 19 nt, Artificial Sequence
  Description of Artificial Sequence: Synthetic oligonucleotide
guugcucacuugaaaggga

SEQ ID NO: 759894 - RNA, 19 nt, Artificial Sequence
  Description of Artificial Sequence: Synthetic oligonucleotide
cauucuuacgaguggcagu

SEQ ID NO: 759895 - RNA, 19 nt, Artificial Sequence
  Description of Artificial Sequence: Synthetic oligonucleotide
guauucgcccgaauccuca

SEQ ID NO: 759896 - RNA, 19 nt, Artificial Sequence
  Description of Artificial Sequence: Synthetic oligonucleotide
caaagagguccaagcagaa

SEQ ID NO: 759897 - RNA, 19 nt, Artificial Sequence
  Description of Artificial Sequence: Synthetic oligonucleotide
gaacccagucagguuauaa

SEQ ID NO: 759898 - RNA, 19 nt, Artificial Sequence
  Description of Artificial Sequence: Synthetic oligonucleotide
cuuggcuuauugauccugu

SEQ ID NO: 759899 - RNA, 19 nt, Artificial Sequence
  Description of Artificial Sequence: Synthetic oligonucleotide
ggaaccuaaagagauuaua

SEQ ID NO: 759900 - RNA, 19 nt, Artificial Sequence
  Description of Artificial Sequence: Synthetic oligonucleotide
caucuacaguuaguaccgc

SEQ ID NO: 759901 - RNA, 19 nt, Artificial Sequence
  Description of Artificial Sequence: Synthetic oligonucleotide
ggcuaaauaaggcaugcuu

SEQ ID NO: 759902 - RNA, 19 nt, Artificial Sequence
  Description of Artificial Sequence: Synthetic oligonucleotide
ggcuuauugauccuguauu

SEQ ID NO: 759903 - RNA, 19 nt, Artificial Sequence
  Description of Artificial Sequence: Synthetic oligonucleotide
uacgaguggcagugaguuc

SEQ ID NO: 759904 - RNA, 19 nt, Artificial Sequence
  Description of Artificial Sequence: Synthetic oligonucleotide
ucgccuuaggagcgcugac

SEQ ID NO: 759905 - RNA, 19 nt, Artificial Sequence
  Description of Artificial Sequence: Synthetic oligonucleotide
gcugacaaagugauauaca

SEQ ID NO: 759906 - RNA, 19 nt, Artificial Sequence
  Description of Artificial Sequence: Synthetic oligonucleotide
guggcauuacauucauacu

SEQ ID NO: 759907 - RNA, 19 nt, Artificial Sequence
  Description of Artificial Sequence: Synthetic oligonucleotide
ucgccgggaucuucuguga

SEQ ID NO: 759908 - RNA, 19 nt, Artificial Sequence
  Description of Artificial Sequence: Synthetic oligonucleotide
caguacuuaauuuguguuu

SEQ ID NO: 759909 - RNA, 19 nt, Artificial Sequence
  Description of Artificial Sequence: Synthetic oligonucleotide
uacucgccgggaucuucug

SEQ ID NO: 759910 - RNA, 19 nt, Artificial Sequence
  Description of Artificial Sequence: Synthetic oligonucleotide
auacucgccgggaucuucu

SEQ ID NO: 759911 - RNA, 19 nt, Artificial Sequence
  Description of Artificial Sequence: Synthetic oligonucleotide
auuauaggguaagcccuua

SEQ ID NO: 759912 - RNA, 19 nt, Artificial Sequence
  Description of Artificial Sequence: Synthetic oligonucleotide
aggcuaaauaaggcaugcu

SEQ ID NO: 759913 - RNA, 19 nt, Artificial Sequence
  Description of Artificial Sequence: Synthetic oligonucleotide
gcaaucauacauauauacu

SEQ ID NO: 759914 - RNA, 19 nt, Artificial Sequence
  Description of Artificial Sequence: Synthetic oligonucleotide
uucuugcgccauauccauu

SEQ ID NO: 759915 - RNA, 19 nt, Artificial Sequence
  Description of Artificial Sequence: Synthetic oligonucleotide
cuuacgaguggcagugagu

SEQ ID NO: 759916 - RNA, 19 nt, Artificial Sequence
  Description of Artificial Sequence: Synthetic oligonucleotide
gguuacacugcagggugac

SEQ ID NO: 759917 - RNA, 19 nt, Artificial Sequence
  Description of Artificial Sequence: Synthetic oligonucleotide
cgaauccucagcucuuggc

SEQ ID NO: 759918 - RNA, 19 nt, Artificial Sequence
  Description of Artificial Sequence: Synthetic oligonucleotide
cauacucgccgggaucuuc

SEQ ID NO: 759919 - RNA, 19 nt, Artificial Sequence
  Description of Artificial Sequence: Synthetic oligonucleotide
gcuaaauaaggcaugcuuu

SEQ ID NO: 759920 - RNA, 19 nt, Artificial Sequence
  Description of Artificial Sequence: Synthetic oligonucleotide
uucuuacgaguggcaguga

SEQ ID NO: 759921 - RNA, 19 nt, Artificial Sequence
  Description of Artificial Sequence: Synthetic oligonucleotide
cacagugguauucgcccga

SEQ ID NO: 759922 - RNA, 19 nt, Artificial Sequence
  Description of Artificial Sequence: Synthetic oligonucleotide
guaccgcaugagaacccag

SEQ ID NO: 759923 - RNA, 19 nt, Artificial Sequence
  Description of Artificial Sequence: Synthetic oligonucleotide
gguaagcccuuagaaugac

SEQ ID NO: 759924 - RNA, 19 nt, Artificial Sequence
  Description of Artificial Sequence: Synthetic oligonucleotide
ugacaauucuuggcucguu

SEQ ID NO: 759925 - RNA, 19 nt, Artificial Sequence
  Description of Artificial Sequence: Synthetic oligonucleotide
ggcgcuggggagcgaagag

SEQ ID NO: 759926 - RNA, 19 nt, Artificial Sequence
  Description of Artificial Sequence: Synthetic oligonucleotide
gccuuaggagcgcugacaa

SEQ ID NO: 759927 - RNA, 19 nt, Artificial Sequence
  Description of Artificial Sequence: Synthetic oligonucleotide
gcaguacuuaauuuguguu

SEQ ID NO: 759928 - RNA, 19 nt, Artificial Sequence
  Description of Artificial Sequence: Synthetic oligonucleotide
uacccugaggacggugaaa

SEQ ID NO: 759929 - RNA, 19 nt, Artificial Sequence
  Description of Artificial Sequence: Synthetic oligonucleotide
cugaagcauuguuuaaaau

SEQ ID NO: 759930 - RNA, 19 nt, Artificial Sequence
  Description of Artificial Sequence: Synthetic oligonucleotide
gaaacacaccauucuccuu

SEQ ID NO: 759931 - RNA, 19 nt, Artificial Sequence
  Description of Artificial Sequence: Synthetic oligonucleotide
ggucacccuuauaggagag

SEQ ID NO: 759932 - RNA, 19 nt, Artificial Sequence
  Description of Artificial Sequence: Synthetic oligonucleotide
aggucguguugccaccauu

SEQ ID NO: 759933 - RNA, 19 nt, Artificial Sequence
  Description of Artificial Sequence: Synthetic oligonucleotide
ccgacauccucccgagccg

SEQ ID NO: 759934 - RNA, 19 nt, Artificial Sequence
  Description of Artificial Sequence: Synthetic oligonucleotide
gcgcgcagcgaaugggccg

SEQ ID NO: 759935 - RNA, 19 nt, Artificial Sequence
  Description of Artificial Sequence: Synthetic oligonucleotide
cgcugacaaagugauauac

SEQ ID NO: 759936 - RNA, 19 nt, Artificial Sequence
  Description of Artificial Sequence: Synthetic oligonucleotide
agacggucauugugguguu

SEQ ID NO: 759937 - RNA, 19 nt, Artificial Sequence
  Description of Artificial Sequence: Synthetic oligonucleotide
gacggucauugugguguug

SEQ ID NO: 759938 - RNA, 19 nt, Artificial Sequence
  Description of Artificial Sequence: Synthetic oligonucleotide
acagugguauucgcccgaa

SEQ ID NO: 759939 - RNA, 19 nt, Artificial Sequence
  Description of Artificial Sequence: Synthetic oligonucleotide
cuuauaggagaggcuaaau

SEQ ID NO: 759940 - RNA, 19 nt, Artificial Sequence
  Description of Artificial Sequence: Synthetic oligonucleotide
guuacacugcagggugaca

SEQ ID NO: 759941 - RNA, 19 nt, Artificial Sequence
  Description of Artificial Sequence: Synthetic oligonucleotide
gaguggcagugaguucuac

SEQ ID NO: 759942 - RNA, 19 nt, Artificial Sequence
  Description of Artificial Sequence: Synthetic oligonucleotide
caggagccgcuuucacuuc

SEQ ID NO: 759943 - RNA, 19 nt, Artificial Sequence
  Description of Artificial Sequence: Synthetic oligonucleotide
cgcuuucacuucaauggug

SEQ ID NO: 759944 - RNA, 19 nt, Artificial Sequence
  Description of Artificial Sequence: Synthetic oligonucleotide
gguauucgcccgaauccuc

SEQ ID NO: 759945 - RNA, 19 nt, Artificial Sequence
  Description of Artificial Sequence: Synthetic oligonucleotide
ccgaauccucagcucuugg

SEQ ID NO: 759946 - RNA, 19 nt, Artificial Sequence
  Description of Artificial Sequence: Synthetic oligonucleotide
aaacggaggcagagccaau

SEQ ID NO: 759947 - RNA, 19 nt, Artificial Sequence
  Description of Artificial Sequence: Synthetic oligonucleotide
ggaguugguggcauuacau

SEQ ID NO: 759948 - RNA, 19 nt, Artificial Sequence
  Description of Artificial Sequence: Synthetic oligonucleotide
uggcuaggucacccuuaua

SEQ ID NO: 759949 - RNA, 19 nt, Artificial Sequence
  Description of Artificial Sequence: Synthetic oligonucleotide
gggcaagguggcuccguac

SEQ ID NO: 759950 - RNA, 19 nt, Artificial Sequence
  Description of Artificial Sequence: Synthetic oligonucleotide
agaaucgaccagaguuauu

SEQ ID NO: 759951 - RNA, 19 nt, Artificial Sequence
  Description of Artificial Sequence: Synthetic oligonucleotide
ccuucuacacugaagcauu

SEQ ID NO: 759952 - RNA, 19 nt, Artificial Sequence
  Description of Artificial Sequence: Synthetic oligonucleotide
gccaacugacuugcaguac

SEQ ID NO: 759953 - RNA, 19 nt, Artificial Sequence
  Description of Artificial Sequence: Synthetic oligonucleotide
gucguucaguggacuguuc

SEQ ID NO: 759954 - RNA, 19 nt, Artificial Sequence
  Description of Artificial Sequence: Synthetic oligonucleotide
gcgcgcgagggagugagug

SEQ ID NO: 759955 - RNA, 19 nt, Artificial Sequence
  Description of Artificial Sequence: Synthetic oligonucleotide
gaauggguaucagcagcuu

SEQ ID NO: 759956 - RNA, 19 nt, Artificial Sequence
  Description of Artificial Sequence: Synthetic oligonucleotide
cuggcuaggucacccuuau

SEQ ID NO: 759957 - RNA, 19 nt, Artificial Sequence
  Description of Artificial Sequence: Synthetic oligonucleotide
gucguguugccaccauuuu

SEQ ID NO: 759958 - RNA, 19 nt, Artificial Sequence
  Description of Artificial Sequence: Synthetic oligonucleotide
cuugcgccauauccauucu

SEQ ID NO: 759959 - RNA, 19 nt, Artificial Sequence
  Description of Artificial Sequence: Synthetic oligonucleotide
ccuuauaggagaggcuaaa

SEQ ID NO: 759960 - RNA, 19 nt, Artificial Sequence
  Description of Artificial Sequence: Synthetic oligonucleotide
caagguggcuccguacccu

SEQ ID NO: 759961 - RNA, 19 nt, Artificial Sequence
  Description of Artificial Sequence: Synthetic oligonucleotide
gcugugcauaaggguauga

SEQ ID NO: 759962 - RNA, 19 nt, Artificial Sequence
  Description of Artificial Sequence: Synthetic oligonucleotide
gcauucgccuuaggagcgc

SEQ ID NO: 759963 - RNA, 19 nt, Artificial Sequence
  Description of Artificial Sequence: Synthetic oligonucleotide
cccuuauaggagaggcuaa

SEQ ID NO: 759964 - RNA, 19 nt, Artificial Sequence
  Description of Artificial Sequence: Synthetic oligonucleotide
ggucguguugccaccauuu

SEQ ID NO: 759965 - RNA, 19 nt, Artificial Sequence
  Description of Artificial Sequence: Synthetic oligonucleotide
uccguacccugaggacggu

SEQ ID NO: 759966 - RNA, 19 nt, Artificial Sequence
  Description of Artificial Sequence: Synthetic oligonucleotide
cccugaggacggugaaaac

SEQ ID NO: 759967 - RNA, 19 nt, Artificial Sequence
  Description of Artificial Sequence: Synthetic oligonucleotide
cguuuauggccagugaugu

SEQ ID NO: 759968 - RNA, 19 nt, Artificial Sequence
  Description of Artificial Sequence: Synthetic oligonucleotide
gcgaaugggccggggccgg

SEQ ID NO: 759969 - RNA, 19 nt, Artificial Sequence
  Description of Artificial Sequence: Synthetic oligonucleotide
cccuuagaaugacagacuu

SEQ ID NO: 759970 - RNA, 19 nt, Artificial Sequence
  Description of Artificial Sequence: Synthetic oligonucleotide
gcgagcgcgcgagggagug

SEQ ID NO: 759971 - RNA, 19 nt, Artificial Sequence
  Description of Artificial Sequence: Synthetic oligonucleotide
gagcgcugacaaagugaua

SEQ ID NO: 759972 - RNA, 19 nt, Artificial Sequence
  Description of Artificial Sequence: Synthetic oligonucleotide
cagggcgcuggggagcgaa

SEQ ID NO: 759973 - RNA, 19 nt, Artificial Sequence
  Description of Artificial Sequence: Synthetic oligonucleotide
ccuuaggagcgcugacaaa

SEQ ID NO: 759974 - RNA, 19 nt, Artificial Sequence
  Description of Artificial Sequence: Synthetic oligonucleotide
ccgcuuucacuucaauggu

SEQ ID NO: 759975 - RNA, 19 nt, Artificial Sequence
  Description of Artificial Sequence: Synthetic oligonucleotide
cgccauauccauucugggu

SEQ ID NO: 759976 - RNA, 19 nt, Artificial Sequence
  Description of Artificial Sequence: Synthetic oligonucleotide
gcccgacauccucccgagc

SEQ ID NO: 759977 - RNA, 19 nt, Artificial Sequence
  Description of Artificial Sequence: Synthetic oligonucleotide
ggaggcugucucgaauaau

SEQ ID NO: 759978 - RNA, 19 nt, Artificial Sequence
  Description of Artificial Sequence: Synthetic oligonucleotide
agcgcgcgagggagugagu

SEQ ID NO: 759979 - RNA, 19 nt, Artificial Sequence
  Description of Artificial Sequence: Synthetic oligonucleotide
ccguacccugaggacggug

SEQ ID NO: 759980 - RNA, 19 nt, Artificial Sequence
  Description of Artificial Sequence: Synthetic oligonucleotide
cgagggagugagugagcga

SEQ ID NO: 759981 - RNA, 19 nt, Artificial Sequence
  Description of Artificial Sequence: Synthetic oligonucleotide
cgccuuaggagcgcugaca

SEQ ID NO: 759982 - RNA, 19 nt, Artificial Sequence
  Description of Artificial Sequence: Synthetic oligonucleotide
cagugguauucgcccgaau

SEQ ID NO: 759983 - RNA, 19 nt, Artificial Sequence
  Description of Artificial Sequence: Synthetic oligonucleotide
cgggaucuucugugaucug

SEQ ID NO: 759984 - RNA, 19 nt, Artificial Sequence
  Description of Artificial Sequence: Synthetic oligonucleotide
caggucguguugccaccau

SEQ ID NO: 759985 - RNA, 19 nt, Artificial Sequence
  Description of Artificial Sequence: Synthetic oligonucleotide
cgcgcgagggagugaguga

SEQ ID NO: 759986 - RNA, 19 nt, Artificial Sequence
  Description of Artificial Sequence: Synthetic oligonucleotide
gcaauucauuauagucguu

SEQ ID NO: 759987 - RNA, 19 nt, Artificial Sequence
  Description of Artificial Sequence: Synthetic oligonucleotide
gcgagagggccagggcgcu

SEQ ID NO: 759988 - RNA, 19 nt, Artificial Sequence
  Description of Artificial Sequence: Synthetic oligonucleotide
ggcgagcgcgcgagggagu

SEQ ID NO: 759989 - RNA, 19 nt, Artificial Sequence
  Description of Artificial Sequence: Synthetic oligonucleotide
gcgaggcagcggcgcccca

SEQ ID NO: 759990 - RNA, 19 nt, Artificial Sequence
  Description of Artificial Sequence: Synthetic oligonucleotide
ugacuuaacauuauuagag

SEQ ID NO: 759991 - RNA, 19 nt, Artificial Sequence
  Description of Artificial Sequence: Synthetic oligonucleotide
uuuacuggcaaauauauga

SEQ ID NO: 759992 - RNA, 19 nt, Artificial Sequence
  Description of Artificial Sequence: Synthetic oligonucleotide
aagcuuaaagcauucauuc

SEQ ID NO: 759993 - RNA, 19 nt, Artificial Sequence
  Description of Artificial Sequence: Synthetic oligonucleotide
uagaauaacaaugagauac

SEQ ID NO: 759994 - RNA, 19 nt, Artificial Sequence
  Description of Artificial Sequence: Synthetic oligonucleotide
aguaggauuaaauaaaugu

SEQ ID NO: 759995 - RNA, 19 nt, Artificial Sequence
  Description of Artificial Sequence: Synthetic oligonucleotide
uucacuaugacaaauuacu

SEQ ID NO: 759996 - RNA, 19 nt, Artificial Sequence
  Description of Artificial Sequence: Synthetic oligonucleotide
auaagagcaauuccgaaac

SEQ ID NO: 759997 - RNA, 19 nt, Artificial Sequence
  Description of Artificial Sequence: Synthetic oligonucleotide
uauuagagcauccagugcc

SEQ ID NO: 759998 - RNA, 19 nt, Artificial Sequence
  Description of Artificial Sequence: Synthetic oligonucleotide
auacuuuacauccugauug

SEQ ID NO: 759999 - RNA, 19 nt, Artificial Sequence
  Description of Artificial Sequence: Synthetic oligonucleotide
aauaaauguacaagguacc

SEQ ID NO: 760000 - RNA, 19 nt, Artificial Sequence
  Description of Artificial Sequence: Synthetic oligonucleotide
agaaguguaugguaaagac

SEQ ID NO: 760001 - RNA, 19 nt, Artificial Sequence
  Description of Artificial Sequence: Synthetic oligonucleotide
uguaucauccacauggagc

SEQ ID NO: 760002 - RNA, 19 nt, Artificial Sequence
  Description of Artificial Sequence: Synthetic oligonucleotide
uauguuucgagguuugagg

SEQ ID NO: 760003 - RNA, 19 nt, Artificial Sequence
  Description of Artificial Sequence: Synthetic oligonucleotide
aauuccgaaacacugacau

SEQ ID NO: 760004 - RNA, 19 nt, Artificial Sequence
  Description of Artificial Sequence: Synthetic oligonucleotide
aauggaagaggagaaacgg

SEQ ID NO: 760005 - RNA, 19 nt, Artificial Sequence
  Description of Artificial Sequence: Synthetic oligonucleotide
ugaagcaugcuuuugauaa

SEQ ID NO: 760006 - RNA, 19 nt, Artificial Sequence
  Description of Artificial Sequence: Synthetic oligonucleotide
uagguuacugauuaaagca

SEQ ID NO: 760007 - RNA, 19 nt, Artificial Sequence
  Description of Artificial Sequence: Synthetic oligonucleotide
uuaaagcaagguuugauac

SEQ ID NO: 760008 - RNA, 19 nt, Artificial Sequence
  Description of Artificial Sequence: Synthetic oligonucleotide
aaagcaagguuugauacag

SEQ ID NO: 760009 - RNA, 19 nt, Artificial Sequence
  Description of Artificial Sequence: Synthetic oligonucleotide
uucaagguaaucgucaucc

SEQ ID NO: 760010 - RNA, 19 nt, Artificial Sequence
  Description of Artificial Sequence: Synthetic oligonucleotide
aauauagguaauccaagaa

SEQ ID NO: 760011 - RNA, 19 nt, Artificial Sequence
  Description of Artificial Sequence: Synthetic oligonucleotide
uauuaaguccuacaguacu

SEQ ID NO: 760012 - RNA, 19 nt, Artificial Sequence
  Description of Artificial Sequence: Synthetic oligonucleotide
aacuuuccgucaaacaucc

SEQ ID NO: 760013 - RNA, 19 nt, Artificial Sequence
  Description of Artificial Sequence: Synthetic oligonucleotide
uucaaauggguaaaggggu

SEQ ID NO: 760014 - RNA, 19 nt, Artificial Sequence
  Description of Artificial Sequence: Synthetic oligonucleotide
auaaauguacaagguaccc

SEQ ID NO: 760015 - RNA, 19 nt, Artificial Sequence
  Description of Artificial Sequence: Synthetic oligonucleotide
cagcuuucuauuuaaaagc

SEQ ID NO: 760016 - RNA, 19 nt, Artificial Sequence
  Description of Artificial Sequence: Synthetic oligonucleotide
agaucuucaauaugagggg

SEQ ID NO: 760017 - RNA, 19 nt, Artificial Sequence
  Description of Artificial Sequence: Synthetic oligonucleotide
aggaguucaagcaacagac

SEQ ID NO: 760018 - RNA, 19 nt, Artificial Sequence
  Description of Artificial Sequence: Synthetic oligonucleotide
ucuucagaggaauauuaag

SEQ ID NO: 760019 - RNA, 19 nt, Artificial Sequence
  Description of Artificial Sequence: Synthetic oligonucleotide
ucaauaauagcagaacugu

SEQ ID NO: 760020 - RNA, 19 nt, Artificial Sequence
  Description of Artificial Sequence: Synthetic oligonucleotide
ugacuggaauauaagagca

SEQ ID NO: 760021 - RNA, 19 nt, Artificial Sequence
  Description of Artificial Sequence: Synthetic oligonucleotide
aaauguacaagguacccuu

SEQ ID NO: 760022 - RNA, 19 nt, Artificial Sequence
  Description of Artificial Sequence: Synthetic oligonucleotide
uuuccgucaaacauccucc

SEQ ID NO: 760023 - RNA, 19 nt, Artificial Sequence
  Description of Artificial Sequence: Synthetic oligonucleotide
uuaaaagccuaauaguaau

SEQ ID NO: 760024 - RNA, 19 nt, Artificial Sequence
  Description of Artificial Sequence: Synthetic oligonucleotide
agaaacgggaaauaguccu

SEQ ID NO: 760025 - RNA, 19 nt, Artificial Sequence
  Description of Artificial Sequence: Synthetic oligonucleotide
ucaauguauagcugagagg

SEQ ID NO: 760026 - RNA, 19 nt, Artificial Sequence
  Description of Artificial Sequence: Synthetic oligonucleotide
ggaauauuaaguccuacag

SEQ ID NO: 760027 - RNA, 19 nt, Artificial Sequence
  Description of Artificial Sequence: Synthetic oligonucleotide
ucaguuucaugccugagaa

SEQ ID NO: 760028 - RNA, 19 nt, Artificial Sequence
  Description of Artificial Sequence: Synthetic oligonucleotide
ugguccauauuucugacac

SEQ ID NO: 760029 - RNA, 19 nt, Artificial Sequence
  Description of Artificial Sequence: Synthetic oligonucleotide
uuugcggaaaccguauucg

SEQ ID NO: 760030 - RNA, 19 nt, Artificial Sequence
  Description of Artificial Sequence: Synthetic oligonucleotide
acuuaacauuauuagagca

SEQ ID NO: 760031 - RNA, 19 nt, Artificial Sequence
  Description of Artificial Sequence: Synthetic oligonucleotide
aauugcggcauucaccacu

SEQ ID NO: 760032 - RNA, 19 nt, Artificial Sequence
  Description of Artificial Sequence: Synthetic oligonucleotide
guaaucgucauccaguaca

SEQ ID NO: 760033 - RNA, 19 nt, Artificial Sequence
  Description of Artificial Sequence: Synthetic oligonucleotide
acauuauuagagcauccag

SEQ ID NO: 760034 - RNA, 19 nt, Artificial Sequence
  Description of Artificial Sequence: Synthetic oligonucleotide
uagaauguagccacaacaa

SEQ ID NO: 760035 - RNA, 19 nt, Artificial Sequence
  Description of Artificial Sequence: Synthetic oligonucleotide
gugacuggaauauaagagc

SEQ ID NO: 760036 - RNA, 19 nt, Artificial Sequence
  Description of Artificial Sequence: Synthetic oligonucleotide
acaacucauuguuaagaac

SEQ ID NO: 760037 - RNA, 19 nt, Artificial Sequence
  Description of Artificial Sequence: Synthetic oligonucleotide
uuaguaggauuaaauaaau

SEQ ID NO: 760038 - RNA, 19 nt, Artificial Sequence
  Description of Artificial Sequence: Synthetic oligonucleotide
uucuggagcucgauaaccg

SEQ ID NO: 760039 - RNA, 19 nt, Artificial Sequence
  Description of Artificial Sequence: Synthetic oligonucleotide
uaagcccaaagucaauaag

SEQ ID NO: 760040 - RNA, 19 nt, Artificial Sequence
  Description of Artificial Sequence: Synthetic oligonucleotide
guagaauguagccacaaca

SEQ ID NO: 760041 - RNA, 19 nt, Artificial Sequence
  Description of Artificial Sequence: Synthetic oligonucleotide
gaauauagguaauccaaga

SEQ ID NO: 760042 - RNA, 19 nt, Artificial Sequence
  Description of Artificial Sequence: Synthetic oligonucleotide
uggaauugcggcauucacc

SEQ ID NO: 760043 - RNA, 19 nt, Artificial Sequence
  Description of Artificial Sequence: Synthetic oligonucleotide
auaugaucaauaauagcag

SEQ ID NO: 760044 - RNA, 19 nt, Artificial Sequence
  Description of Artificial Sequence: Synthetic oligonucleotide
auauaaagucacgauguuc

SEQ ID NO: 760045 - RNA, 19 nt, Artificial Sequence
  Description of Artificial Sequence: Synthetic oligonucleotide
uuauuagagcauccagugc

SEQ ID NO: 760046 - RNA, 19 nt, Artificial Sequence
  Description of Artificial Sequence: Synthetic oligonucleotide
uuugcguacucaacaaaga

SEQ ID NO: 760047 - RNA, 19 nt, Artificial Sequence
  Description of Artificial Sequence: Synthetic oligonucleotide
aagaacaugguugguaacu

SEQ ID NO: 760048 - RNA, 19 nt, Artificial Sequence
  Description of Artificial Sequence: Synthetic oligonucleotide
ucaucaugaagcaugcuuu

SEQ ID NO: 760049 - RNA, 19 nt, Artificial Sequence
  Description of Artificial Sequence: Synthetic oligonucleotide
ugcccuacugcacaaacga

SEQ ID NO: 760050 - RNA, 19 nt, Artificial Sequence
  Description of Artificial Sequence: Synthetic oligonucleotide
ugcguacucaacaaagacu

SEQ ID NO: 760051 - RNA, 19 nt, Artificial Sequence
  Description of Artificial Sequence: Synthetic oligonucleotide
auuaaagcaagguuugaua

SEQ ID NO: 760052 - RNA, 19 nt, Artificial Sequence
  Description of Artificial Sequence: Synthetic oligonucleotide
uauucggcggccgaggccg

SEQ ID NO: 760053 - RNA, 19 nt, Artificial Sequence
  Description of Artificial Sequence: Synthetic oligonucleotide
acaguacucccuuagaaaa

SEQ ID NO: 760054 - RNA, 19 nt, Artificial Sequence
  Description of Artificial Sequence: Synthetic oligonucleotide
gaagcuaagcccaaaguca

SEQ ID NO: 760055 - RNA, 19 nt, Artificial Sequence
  Description of Artificial Sequence: Synthetic oligonucleotide
caguaaaaugauuccgagg

SEQ ID NO: 760056 - RNA, 19 nt, Artificial Sequence
  Description of Artificial Sequence: Synthetic oligonucleotide
auaaccgucugucugaaua

SEQ ID NO: 760057 - RNA, 19 nt, Artificial Sequence
  Description of Artificial Sequence: Synthetic oligonucleotide
aucaauaauagcagaacug

SEQ ID NO: 760058 - RNA, 19 nt, Artificial Sequence
  Description of Artificial Sequence: Synthetic oligonucleotide
uaaagcaagguuugauaca

SEQ ID NO: 760059 - RNA, 19 nt, Artificial Sequence
  Description of Artificial Sequence: Synthetic oligonucleotide
auuugcguacucaacaaag

SEQ ID NO: 760060 - RNA, 19 nt, Artificial Sequence
  Description of Artificial Sequence: Synthetic oligonucleotide
gacacgacgcgccaggcag

SEQ ID NO: 760061 - RNA, 19 nt, Artificial Sequence
  Description of Artificial Sequence: Synthetic oligonucleotide
auaggcucacugcaguuuc

SEQ ID NO: 760062 - RNA, 19 nt, Artificial Sequence
  Description of Artificial Sequence: Synthetic oligonucleotide
uauacuuuacauccugauu

SEQ ID NO: 760063 - RNA, 19 nt, Artificial Sequence
  Description of Artificial Sequence: Synthetic oligonucleotide
uugcguacucaacaaagac

SEQ ID NO: 760064 - RNA, 19 nt, Artificial Sequence
  Description of Artificial Sequence: Synthetic oligonucleotide
uuuacauccugauugccuu

SEQ ID NO: 760065 - RNA, 19 nt, Artificial Sequence
  Description of Artificial Sequence: Synthetic oligonucleotide
uccuacaguacucccuuag

SEQ ID NO: 760066 - RNA, 19 nt, Artificial Sequence
  Description of Artificial Sequence: Synthetic oligonucleotide
aagguaaucgucauccagu

SEQ ID NO: 760067 - RNA, 19 nt, Artificial Sequence
  Description of Artificial Sequence: Synthetic oligonucleotide
cugauugccuucuuugaag

SEQ ID NO: 760068 - RNA, 19 nt, Artificial Sequence
  Description of Artificial Sequence: Synthetic oligonucleotide
ucacaacucauuguuaaga

SEQ ID NO: 760069 - RNA, 19 nt, Artificial Sequence
  Description of Artificial Sequence: Synthetic oligonucleotide
uuaaguccuacaguacucc

SEQ ID NO: 760070 - RNA, 19 nt, Artificial Sequence
  Description of Artificial Sequence: Synthetic oligonucleotide
cuuuccgucaaacauccuc

SEQ ID NO: 760071 - RNA, 19 nt, Artificial Sequence
  Description of Artificial Sequence: Synthetic oligonucleotide
agaucugacuguauguuuc

SEQ ID NO: 760072 - RNA, 19 nt, Artificial Sequence
  Description of Artificial Sequence: Synthetic oligonucleotide
uucacaacucauuguuaag

SEQ ID NO: 760073 - RNA, 19 nt, Artificial Sequence
  Description of Artificial Sequence: Synthetic oligonucleotide
uuacugauuaaagcaaggu

SEQ ID NO: 760074 - RNA, 19 nt, Artificial Sequence
  Description of Artificial Sequence: Synthetic oligonucleotide
agauacaccugacaauaca

SEQ ID NO: 760075 - RNA, 19 nt, Artificial Sequence
  Description of Artificial Sequence: Synthetic oligonucleotide
gguuacauacuaaagaaca

SEQ ID NO: 760076 - RNA, 19 nt, Artificial Sequence
  Description of Artificial Sequence: Synthetic oligonucleotide
auuaaguccuacaguacuc

SEQ ID NO: 760077 - RNA, 19 nt, Artificial Sequence
  Description of Artificial Sequence: Synthetic oligonucleotide
auauuaaguccuacaguac

SEQ ID NO: 760078 - RNA, 19 nt, Artificial Sequence
  Description of Artificial Sequence: Synthetic oligonucleotide
cacuaugacaaauuacuca

SEQ ID NO: 760079 - RNA, 19 nt, Artificial Sequence
  Description of Artificial Sequence: Synthetic oligonucleotide
auguacaagguacccuuuc

SEQ ID NO: 760080 - RNA, 19 nt, Artificial Sequence
  Description of Artificial Sequence: Synthetic oligonucleotide
uuggaacaagcagagaaac

SEQ ID NO: 760081 - RNA, 19 nt, Artificial Sequence
  Description of Artificial Sequence: Synthetic oligonucleotide
caagguaaucgucauccag

SEQ ID NO: 760082 - RNA, 19 nt, Artificial Sequence
  Description of Artificial Sequence: Synthetic oligonucleotide
aacgggaaauaguccuuag

SEQ ID NO: 760083 - RNA, 19 nt, Artificial Sequence
  Description of Artificial Sequence: Synthetic oligonucleotide
agcucgauaaccgucuguc

SEQ ID NO: 760084 - RNA, 19 nt, Artificial Sequence
  Description of Artificial Sequence: Synthetic oligonucleotide
ugcggaaaccguauucggc

SEQ ID NO: 760085 - RNA, 19 nt, Artificial Sequence
  Description of Artificial Sequence: Synthetic oligonucleotide
cucgauaaccgucugucug

SEQ ID NO: 760086 - RNA, 19 nt, Artificial Sequence
  Description of Artificial Sequence: Synthetic oligonucleotide
ugaggugauaggcuggaau

SEQ ID NO: 760087 - RNA, 19 nt, Artificial Sequence
  Description of Artificial Sequence: Synthetic oligonucleotide
ucgauaaccgucugucuga

SEQ ID NO: 760088 - RNA, 19 nt, Artificial Sequence
  Description of Artificial Sequence: Synthetic oligonucleotide
caauguauagcugagaggu

SEQ ID NO: 760089 - RNA, 19 nt, Artificial Sequence
  Description of Artificial Sequence: Synthetic oligonucleotide
acgggaaauaguccuuagg

SEQ ID NO: 760090 - RNA, 19 nt, Artificial Sequence
  Description of Artificial Sequence: Synthetic oligonucleotide
auacuaaagaacagcaccu

SEQ ID NO: 760091 - RNA, 19 nt, Artificial Sequence
  Description of Artificial Sequence: Synthetic oligonucleotide
ucaauaugaggggcaaaag

SEQ ID NO: 760092 - RNA, 19 nt, Artificial Sequence
  Description of Artificial Sequence: Synthetic oligonucleotide
ggaauugcggcauucacca

SEQ ID NO: 760093 - RNA, 19 nt, Artificial Sequence
  Description of Artificial Sequence: Synthetic oligonucleotide
auaaucugugaugucacca

SEQ ID NO: 760094 - RNA, 19 nt, Artificial Sequence
  Description of Artificial Sequence: Synthetic oligonucleotide
acagacagcgugauggcac

SEQ ID NO: 760095 - RNA, 19 nt, Artificial Sequence
  Description of Artificial Sequence: Synthetic oligonucleotide
ucuguaccugccacagccg

SEQ ID NO: 760096 - RNA, 19 nt, Artificial Sequence
  Description of Artificial Sequence: Synthetic oligonucleotide
uguaugguaaagacuccau

SEQ ID NO: 760097 - RNA, 19 nt, Artificial Sequence
  Description of Artificial Sequence: Synthetic oligonucleotide
cacaugggugcucuaaccc

SEQ ID NO: 760098 - RNA, 19 nt, Artificial Sequence
  Description of Artificial Sequence: Synthetic oligonucleotide
uugcggaaaccguauucgg

SEQ ID NO: 760099 - RNA, 19 nt, Artificial Sequence
  Description of Artificial Sequence: Synthetic oligonucleotide
ucacuguuugggcaauggc

SEQ ID NO: 760100 - RNA, 19 nt, Artificial Sequence
  Description of Artificial Sequence: Synthetic oligonucleotide
aauguauagcugagagguc

SEQ ID NO: 760101 - RNA, 19 nt, Artificial Sequence
  Description of Artificial Sequence: Synthetic oligonucleotide
acuuuacauccugauugcc

SEQ ID NO: 760102 - RNA, 19 nt, Artificial Sequence
  Description of Artificial Sequence: Synthetic oligonucleotide
uaaaagccuaauaguaauu

SEQ ID NO: 760103 - RNA, 19 nt, Artificial Sequence
  Description of Artificial Sequence: Synthetic oligonucleotide
gcuugggucaucaugaagc

SEQ ID NO: 760104 - RNA, 19 nt, Artificial Sequence
  Description of Artificial Sequence: Synthetic oligonucleotide
agcaagggccuccaaaaca

SEQ ID NO: 760105 - RNA, 19 nt, Artificial Sequence
  Description of Artificial Sequence: Synthetic oligonucleotide
cuuuacuggcaaauauaug

SEQ ID NO: 760106 - RNA, 19 nt, Artificial Sequence
  Description of Artificial Sequence: Synthetic oligonucleotide
uggagcucgauaaccgucu

SEQ ID NO: 760107 - RNA, 19 nt, Artificial Sequence
  Description of Artificial Sequence: Synthetic oligonucleotide
ggaacaagcagagaaacca

SEQ ID NO: 760108 - RNA, 19 nt, Artificial Sequence
  Description of Artificial Sequence: Synthetic oligonucleotide
uaaguccuacaguacuccc

SEQ ID NO: 760109 - RNA, 19 nt, Artificial Sequence
  Description of Artificial Sequence: Synthetic oligonucleotide
gauacaccgaggccgacga

SEQ ID NO: 760110 - RNA, 19 nt, Artificial Sequence
  Description of Artificial Sequence: Synthetic oligonucleotide
ugauacagguauccccucu

SEQ ID NO: 760111 - RNA, 19 nt, Artificial Sequence
  Description of Artificial Sequence: Synthetic oligonucleotide
cagcgcacccgauacaccg

SEQ ID NO: 760112 - RNA, 19 nt, Artificial Sequence
  Description of Artificial Sequence: Synthetic oligonucleotide
acuccauauaaagucacga

SEQ ID NO: 760113 - RNA, 19 nt, Artificial Sequence
  Description of Artificial Sequence: Synthetic oligonucleotide
ccuacugcacaaacgaagg

SEQ ID NO: 760114 - RNA, 19 nt, Artificial Sequence
  Description of Artificial Sequence: Synthetic oligonucleotide
guauguuucgagguuugag

SEQ ID NO: 760115 - RNA, 19 nt, Artificial Sequence
  Description of Artificial Sequence: Synthetic oligonucleotide
caagguuugauacagguau

SEQ ID NO: 760116 - RNA, 19 nt, Artificial Sequence
  Description of Artificial Sequence: Synthetic oligonucleotide
gcggaaaccguauucggcg

SEQ ID NO: 760117 - RNA, 19 nt, Artificial Sequence
  Description of Artificial Sequence: Synthetic oligonucleotide
ugcacaaacgaagggugcc

SEQ ID NO: 760118 - RNA, 19 nt, Artificial Sequence
  Description of Artificial Sequence: Synthetic oligonucleotide
gacuccauauaaagucacg

SEQ ID NO: 760119 - RNA, 19 nt, Artificial Sequence
  Description of Artificial Sequence: Synthetic oligonucleotide
gagaaacgggaaauagucc

SEQ ID NO: 760120 - RNA, 19 nt, Artificial Sequence
  Description of Artificial Sequence: Synthetic oligonucleotide
ggaauauagguaauccaag

SEQ ID NO: 760121 - RNA, 19 nt, Artificial Sequence
  Description of Artificial Sequence: Synthetic oligonucleotide
aaacgaagggugcccacau

SEQ ID NO: 760122 - RNA, 19 nt, Artificial Sequence
  Description of Artificial Sequence: Synthetic oligonucleotide
uugcaaugcagucacuguu

SEQ ID NO: 760123 - RNA, 19 nt, Artificial Sequence
  Description of Artificial Sequence: Synthetic oligonucleotide
ggagaaacgggaaauaguc

SEQ ID NO: 760124 - RNA, 19 nt, Artificial Sequence
  Description of Artificial Sequence: Synthetic oligonucleotide
ucucuuugcggaaaccgua

SEQ ID NO: 760125 - RNA, 19 nt, Artificial Sequence
  Description of Artificial Sequence: Synthetic oligonucleotide
caaugacuuaacauuauua

SEQ ID NO: 760126 - RNA, 19 nt, Artificial Sequence
  Description of Artificial Sequence: Synthetic oligonucleotide
uccuacucagugccaaugu

SEQ ID NO: 760127 - RNA, 19 nt, Artificial Sequence
  Description of Artificial Sequence: Synthetic oligonucleotide
agacuccauauaaagucac

SEQ ID NO: 760128 - RNA, 19 nt, Artificial Sequence
  Description of Artificial Sequence: Synthetic oligonucleotide
acugcacaaacgaagggug

SEQ ID NO: 760129 - RNA, 19 nt, Artificial Sequence
  Description of Artificial Sequence: Synthetic oligonucleotide
gaggucugcguggacauag

SEQ ID NO: 760130 - RNA, 19 nt, Artificial Sequence
  Description of Artificial Sequence: Synthetic oligonucleotide
cuacugcacaaacgaaggg

SEQ ID NO: 760131 - RNA, 19 nt, Artificial Sequence
  Description of Artificial Sequence: Synthetic oligonucleotide
ggauuaaauaaauguacaa

SEQ ID NO: 760132 - RNA, 19 nt, Artificial Sequence
  Description of Artificial Sequence: Synthetic oligonucleotide
guaaaggggugcuccugcg

SEQ ID NO: 760133 - RNA, 19 nt, Artificial Sequence
  Description of Artificial Sequence: Synthetic oligonucleotide
ugcggcauucaccacugcu

SEQ ID NO: 760134 - RNA, 19 nt, Artificial Sequence
  Description of Artificial Sequence: Synthetic oligonucleotide
uaagaacaugguugguaac

SEQ ID NO: 760135 - RNA, 19 nt, Artificial Sequence
  Description of Artificial Sequence: Synthetic oligonucleotide
agugccagcuagaauaaca

SEQ ID NO: 760136 - RNA, 19 nt, Artificial Sequence
  Description of Artificial Sequence: Synthetic oligonucleotide
augaucaauaauagcagaa

SEQ ID NO: 760137 - RNA, 19 nt, Artificial Sequence
  Description of Artificial Sequence: Synthetic oligonucleotide
ccagucagcaauuucugag

SEQ ID NO: 760138 - RNA, 19 nt, Artificial Sequence
  Description of Artificial Sequence: Synthetic oligonucleotide
gccagcuagaauaacaaug

SEQ ID NO: 760139 - RNA, 19 nt, Artificial Sequence
  Description of Artificial Sequence: Synthetic oligonucleotide
accgaggccgacgagccgc

SEQ ID NO: 760140 - RNA, 19 nt, Artificial Sequence
  Description of Artificial Sequence: Synthetic oligonucleotide
cagaggaauauuaaguccu

SEQ ID NO: 760141 - RNA, 19 nt, Artificial Sequence
  Description of Artificial Sequence: Synthetic oligonucleotide
aggacacgcgagccgacac

SEQ ID NO: 760142 - RNA, 19 nt, Artificial Sequence
  Description of Artificial Sequence: Synthetic oligonucleotide
ucaagguaaucgucaucca

SEQ ID NO: 760143 - RNA, 19 nt, Artificial Sequence
  Description of Artificial Sequence: Synthetic oligonucleotide
cugucugaauauacuuuac

SEQ ID NO: 760144 - RNA, 19 nt, Artificial Sequence
  Description of Artificial Sequence: Synthetic oligonucleotide
ucuggagcucgauaaccgu

SEQ ID NO: 760145 - RNA, 19 nt, Artificial Sequence
  Description of Artificial Sequence: Synthetic oligonucleotide
uaaccgucugucugaauau

SEQ ID NO: 760146 - RNA, 19 nt, Artificial Sequence
  Description of Artificial Sequence: Synthetic oligonucleotide
gguuacugauuaaagcaag

SEQ ID NO: 760147 - RNA, 19 nt, Artificial Sequence
  Description of Artificial Sequence: Synthetic oligonucleotide
cuuaacauuauuagagcau

SEQ ID NO: 760148 - RNA, 19 nt, Artificial Sequence
  Description of Artificial Sequence: Synthetic oligonucleotide
aaaccguauucggcggccg

SEQ ID NO: 760149 - RNA, 19 nt, Artificial Sequence
  Description of Artificial Sequence: Synthetic oligonucleotide
agagcaauuccgaaacacu

SEQ ID NO: 760150 - RNA, 19 nt, Artificial Sequence
  Description of Artificial Sequence: Synthetic oligonucleotide
cugcccuacugcacaaacg

SEQ ID NO: 760151 - RNA, 19 nt, Artificial Sequence
  Description of Artificial Sequence: Synthetic oligonucleotide
uauagcugagaggucuugu

SEQ ID NO: 760152 - RNA, 19 nt, Artificial Sequence
  Description of Artificial Sequence: Synthetic oligonucleotide
ggaaugcuaaagaaugggc

SEQ ID NO: 760153 - RNA, 19 nt, Artificial Sequence
  Description of Artificial Sequence: Synthetic oligonucleotide
uaaaggggugcuccugcgu

SEQ ID NO: 760154 - RNA, 19 nt, Artificial Sequence
  Description of Artificial Sequence: Synthetic oligonucleotide
cuguaucauccacauggag

SEQ ID NO: 760155 - RNA, 19 nt, Artificial Sequence
  Description of Artificial Sequence: Synthetic oligonucleotide
aaguccuacaguacucccu

SEQ ID NO: 760156 - RNA, 19 nt, Artificial Sequence
  Description of Artificial Sequence: Synthetic oligonucleotide
cugcacauuaguaggauua

SEQ ID NO: 760157 - RNA, 19 nt, Artificial Sequence
  Description of Artificial Sequence: Synthetic oligonucleotide
aacgaagggugcccacaug

SEQ ID NO: 760158 - RNA, 19 nt, Artificial Sequence
  Description of Artificial Sequence: Synthetic oligonucleotide
uuccgucaaacauccuccc

SEQ ID NO: 760159 - RNA, 19 nt, Artificial Sequence
  Description of Artificial Sequence: Synthetic oligonucleotide
aauucacaacucauuguua

SEQ ID NO: 760160 - RNA, 19 nt, Artificial Sequence
  Description of Artificial Sequence: Synthetic oligonucleotide
ccagaucuucaauaugagg

SEQ ID NO: 760161 - RNA, 19 nt, Artificial Sequence
  Description of Artificial Sequence: Synthetic oligonucleotide
cagcuagaauaacaaugag

SEQ ID NO: 760162 - RNA, 19 nt, Artificial Sequence
  Description of Artificial Sequence: Synthetic oligonucleotide
cuggaauugcggcauucac

SEQ ID NO: 760163 - RNA, 19 nt, Artificial Sequence
  Description of Artificial Sequence: Synthetic oligonucleotide
uccgucaaacauccuccca

SEQ ID NO: 760164 - RNA, 19 nt, Artificial Sequence
  Description of Artificial Sequence: Synthetic oligonucleotide
ccaguaaaaugauuccgag

SEQ ID NO: 760165 - RNA, 19 nt, Artificial Sequence
  Description of Artificial Sequence: Synthetic oligonucleotide
gaaaccguauucggcggcc

SEQ ID NO: 760166 - RNA, 19 nt, Artificial Sequence
  Description of Artificial Sequence: Synthetic oligonucleotide
gguaaaggggugcuccugc

SEQ ID NO: 760167 - RNA, 19 nt, Artificial Sequence
  Description of Artificial Sequence: Synthetic oligonucleotide
ucaugccugagaacauuuc

SEQ ID NO: 760168 - RNA, 19 nt, Artificial Sequence
  Description of Artificial Sequence: Synthetic oligonucleotide
gcaauuccgaaacacugac

SEQ ID NO: 760169 - RNA, 19 nt, Artificial Sequence
  Description of Artificial Sequence: Synthetic oligonucleotide
aaaugauuccgaggcucca

SEQ ID NO: 760170 - RNA, 19 nt, Artificial Sequence
  Description of Artificial Sequence: Synthetic oligonucleotide
ucugaggugauaggcugga

SEQ ID NO: 760171 - RNA, 19 nt, Artificial Sequence
  Description of Artificial Sequence: Synthetic oligonucleotide
uguauagcugagaggucuu

SEQ ID NO: 760172 - RNA, 19 nt, Artificial Sequence
  Description of Artificial Sequence: Synthetic oligonucleotide
cacaacucauuguuaagaa

SEQ ID NO: 760173 - RNA, 19 nt, Artificial Sequence
  Description of Artificial Sequence: Synthetic oligonucleotide
gcagcuuuggaaucaccag

SEQ ID NO: 760174 - RNA, 19 nt, Artificial Sequence
  Description of Artificial Sequence: Synthetic oligonucleotide
cagcggguagaauguagcc

SEQ ID NO: 760175 - RNA, 19 nt, Artificial Sequence
  Description of Artificial Sequence: Synthetic oligonucleotide
ccagcuagaauaacaauga

SEQ ID NO: 760176 - RNA, 19 nt, Artificial Sequence
  Description of Artificial Sequence: Synthetic oligonucleotide
agguaaucgucauccagua

SEQ ID NO: 760177 - RNA, 19 nt, Artificial Sequence
  Description of Artificial Sequence: Synthetic oligonucleotide
gaggaauauuaaguccuac

SEQ ID NO: 760178 - RNA, 19 nt, Artificial Sequence
  Description of Artificial Sequence: Synthetic oligonucleotide
cacauuaguaggauuaaau

SEQ ID NO: 760179 - RNA, 19 nt, Artificial Sequence
  Description of Artificial Sequence: Synthetic oligonucleotide
cuguaccugccacagccgc

SEQ ID NO: 760180 - RNA, 19 nt, Artificial Sequence
  Description of Artificial Sequence: Synthetic oligonucleotide
uggggcgaggacacgcgag

SEQ ID NO: 760181 - RNA, 19 nt, Artificial Sequence
  Description of Artificial Sequence: Synthetic oligonucleotide
uggcucggcaccccacgcg

SEQ ID NO: 760182 - RNA, 19 nt, Artificial Sequence
  Description of Artificial Sequence: Synthetic oligonucleotide
agcaauuccgaaacacuga

SEQ ID NO: 760183 - RNA, 19 nt, Artificial Sequence
  Description of Artificial Sequence: Synthetic oligonucleotide
cccuacugcacaaacgaag

SEQ ID NO: 760184 - RNA, 19 nt, Artificial Sequence
  Description of Artificial Sequence: Synthetic oligonucleotide
acgcgagccgacacgacgc

SEQ ID NO: 760185 - RNA, 19 nt, Artificial Sequence
  Description of Artificial Sequence: Synthetic oligonucleotide
cuuuacauccugauugccu

SEQ ID NO: 760186 - RNA, 19 nt, Artificial Sequence
  Description of Artificial Sequence: Synthetic oligonucleotide
aagcaagguuugauacagg

SEQ ID NO: 760187 - RNA, 19 nt, Artificial Sequence
  Description of Artificial Sequence: Synthetic oligonucleotide
cuggagcucgauaaccguc

SEQ ID NO: 760188 - RNA, 19 nt, Artificial Sequence
  Description of Artificial Sequence: Synthetic oligonucleotide
ugcacauuaguaggauuaa

SEQ ID NO: 760189 - RNA, 19 nt, Artificial Sequence
  Description of Artificial Sequence: Synthetic oligonucleotide
acucauuguuaagaacaug

SEQ ID NO: 760190 - RNA, 19 nt, Artificial Sequence
  Description of Artificial Sequence: Synthetic oligonucleotide
agguuacugauuaaagcaa

SEQ ID NO: 760191 - RNA, 19 nt, Artificial Sequence
  Description of Artificial Sequence: Synthetic oligonucleotide
ugggccaaacaauucugua

SEQ ID NO: 760192 - RNA, 19 nt, Artificial Sequence
  Description of Artificial Sequence: Synthetic oligonucleotide
gcggguagaauguagccac

SEQ ID NO: 760193 - RNA, 19 nt, Artificial Sequence
  Description of Artificial Sequence: Synthetic oligonucleotide
gcacaaugcuguaucaucc

SEQ ID NO: 760194 - RNA, 19 nt, Artificial Sequence
  Description of Artificial Sequence: Synthetic oligonucleotide
guaugguaaagacuccaua

SEQ ID NO: 760195 - RNA, 19 nt, Artificial Sequence
  Description of Artificial Sequence: Synthetic oligonucleotide
ugcuaaagaaugggcugca

SEQ ID NO: 760196 - RNA, 19 nt, Artificial Sequence
  Description of Artificial Sequence: Synthetic oligonucleotide
aaccguauucggcggccga

SEQ ID NO: 760197 - RNA, 19 nt, Artificial Sequence
  Description of Artificial Sequence: Synthetic oligonucleotide
gguaauccaagaaauggaa

SEQ ID NO: 760198 - RNA, 19 nt, Artificial Sequence
  Description of Artificial Sequence: Synthetic oligonucleotide
cugacacucuucuuuuaca

SEQ ID NO: 760199 - RNA, 19 nt, Artificial Sequence
  Description of Artificial Sequence: Synthetic oligonucleotide
agcggguagaauguagcca

SEQ ID NO: 760200 - RNA, 19 nt, Artificial Sequence
  Description of Artificial Sequence: Synthetic oligonucleotide
uccugugacccugcaacug

SEQ ID NO: 760201 - RNA, 19 nt, Artificial Sequence
  Description of Artificial Sequence: Synthetic oligonucleotide
acaguauguuucgagguuu

SEQ ID NO: 760202 - RNA, 19 nt, Artificial Sequence
  Description of Artificial Sequence: Synthetic oligonucleotide
auugcggcauucaccacug

SEQ ID NO: 760203 - RNA, 19 nt, Artificial Sequence
  Description of Artificial Sequence: Synthetic oligonucleotide
auuagagcauccagugcca

SEQ ID NO: 760204 - RNA, 19 nt, Artificial Sequence
  Description of Artificial Sequence: Synthetic oligonucleotide
uugauacagguauccccuc

SEQ ID NO: 760205 - RNA, 19 nt, Artificial Sequence
  Description of Artificial Sequence: Synthetic oligonucleotide
guuucgagguuugaggucu

SEQ ID NO: 760206 - RNA, 19 nt, Artificial Sequence
  Description of Artificial Sequence: Synthetic oligonucleotide
ucacauccccgcccgcacc

SEQ ID NO: 760207 - RNA, 19 nt, Artificial Sequence
  Description of Artificial Sequence: Synthetic oligonucleotide
gguagaauguagccacaac

SEQ ID NO: 760208 - RNA, 19 nt, Artificial Sequence
  Description of Artificial Sequence: Synthetic oligonucleotide
ugccagcuagaauaacaau

SEQ ID NO: 760209 - RNA, 19 nt, Artificial Sequence
  Description of Artificial Sequence: Synthetic oligonucleotide
uuucgagguuugaggucug

SEQ ID NO: 760210 - RNA, 19 nt, Artificial Sequence
  Description of Artificial Sequence: Synthetic oligonucleotide
uuguccuacucagugccaa

SEQ ID NO: 760211 - RNA, 19 nt, Artificial Sequence
  Description of Artificial Sequence: Synthetic oligonucleotide
aauguacaagguacccuuu

SEQ ID NO: 760212 - RNA, 19 nt, Artificial Sequence
  Description of Artificial Sequence: Synthetic oligonucleotide
uuacucaucuuugcuucau

SEQ ID NO: 760213 - RNA, 19 nt, Artificial Sequence
  Description of Artificial Sequence: Synthetic oligonucleotide
ggagagaaguguaugguaa

SEQ ID NO: 760214 - RNA, 19 nt, Artificial Sequence
  Description of Artificial Sequence: Synthetic oligonucleotide
guauucggcggccgaggcc

SEQ ID NO: 760215 - RNA, 19 nt, Artificial Sequence
  Description of Artificial Sequence: Synthetic oligonucleotide
acuggcgugggaagcauca

SEQ ID NO: 760216 - RNA, 19 nt, Artificial Sequence
  Description of Artificial Sequence: Synthetic oligonucleotide
uguuugcaaugcagucacu

SEQ ID NO: 760217 - RNA, 19 nt, Artificial Sequence
  Description of Artificial Sequence: Synthetic oligonucleotide
ugcguggacauagcccuca

SEQ ID NO: 760218 - RNA, 19 nt, Artificial Sequence
  Description of Artificial Sequence: Synthetic oligonucleotide
cacccgauacaccgaggcc

SEQ ID NO: 760219 - RNA, 19 nt, Artificial Sequence
  Description of Artificial Sequence: Synthetic oligonucleotide
aguauguuucgagguuuga

SEQ ID NO: 760220 - RNA, 19 nt, Artificial Sequence
  Description of Artificial Sequence: Synthetic oligonucleotide
gacacgcgagccgacacga

SEQ ID NO: 760221 - RNA, 19 nt, Artificial Sequence
  Description of Artificial Sequence: Synthetic oligonucleotide
ucaccagcauuugcguacu

SEQ ID NO: 760222 - RNA, 19 nt, Artificial Sequence
  Description of Artificial Sequence: Synthetic oligonucleotide
cauuugcguacucaacaaa

SEQ ID NO: 760223 - RNA, 19 nt, Artificial Sequence
  Description of Artificial Sequence: Synthetic oligonucleotide
gaauugcggcauucaccac

SEQ ID NO: 760224 - RNA, 19 nt, Artificial Sequence
  Description of Artificial Sequence: Synthetic oligonucleotide
gacuggaauauaagagcaa

SEQ ID NO: 760225 - RNA, 19 nt, Artificial Sequence
  Description of Artificial Sequence: Synthetic oligonucleotide
gguggcucggcaccccacg

SEQ ID NO: 760226 - RNA, 19 nt, Artificial Sequence
  Description of Artificial Sequence: Synthetic oligonucleotide
uccuuagguuacugauuaa

SEQ ID NO: 760227 - RNA, 19 nt, Artificial Sequence
  Description of Artificial Sequence: Synthetic oligonucleotide
gcuuuugauaaggucucug

SEQ ID NO: 760228 - RNA, 19 nt, Artificial Sequence
  Description of Artificial Sequence: Synthetic oligonucleotide
ggucugcguggacauagcc

SEQ ID NO: 760229 - RNA, 19 nt, Artificial Sequence
  Description of Artificial Sequence: Synthetic oligonucleotide
uguccuacucagugccaau

SEQ ID NO: 760230 - RNA, 19 nt, Artificial Sequence
  Description of Artificial Sequence: Synthetic oligonucleotide
ggacacgcgagccgacacg

SEQ ID NO: 760231 - RNA, 19 nt, Artificial Sequence
  Description of Artificial Sequence: Synthetic oligonucleotide
ugcguucagcuguggaaua

SEQ ID NO: 760232 - RNA, 19 nt, Artificial Sequence
  Description of Artificial Sequence: Synthetic oligonucleotide
agcaugcuuuugauaaggu

SEQ ID NO: 760233 - RNA, 19 nt, Artificial Sequence
  Description of Artificial Sequence: Synthetic oligonucleotide
ggagucuaagcacuggcgu

SEQ ID NO: 760234 - RNA, 19 nt, Artificial Sequence
  Description of Artificial Sequence: Synthetic oligonucleotide
aggucugcguggacauagc

SEQ ID NO: 760235 - RNA, 19 nt, Artificial Sequence
  Description of Artificial Sequence: Synthetic oligonucleotide
gauacagguauccccucuu

SEQ ID NO: 760236 - RNA, 19 nt, Artificial Sequence
  Description of Artificial Sequence: Synthetic oligonucleotide
accguauucggcggccgag

SEQ ID NO: 760237 - RNA, 19 nt, Artificial Sequence
  Description of Artificial Sequence: Synthetic oligonucleotide
gguaaucgucauccaguac

SEQ ID NO: 760238 - RNA, 19 nt, Artificial Sequence
  Description of Artificial Sequence: Synthetic oligonucleotide
ggcgaggacacgcgagccg

SEQ ID NO: 760239 - RNA, 19 nt, Artificial Sequence
  Description of Artificial Sequence: Synthetic oligonucleotide
gcauuugcguacucaacaa

SEQ ID NO: 760240 - RNA, 19 nt, Artificial Sequence
  Description of Artificial Sequence: Synthetic oligonucleotide
cugagaggucuuguccuac

SEQ ID NO: 760241 - RNA, 19 nt, Artificial Sequence
  Description of Artificial Sequence: Synthetic oligonucleotide
cugguccauauuucugaca

SEQ ID NO: 760242 - RNA, 19 nt, Artificial Sequence
  Description of Artificial Sequence: Synthetic oligonucleotide
agcacuggcgugggaagca

SEQ ID NO: 760243 - RNA, 19 nt, Artificial Sequence
  Description of Artificial Sequence: Synthetic oligonucleotide
caauaauagcagaacuguu

SEQ ID NO: 760244 - RNA, 19 nt, Artificial Sequence
  Description of Artificial Sequence: Synthetic oligonucleotide
cuccaggaagcgcgguggc

SEQ ID NO: 760245 - RNA, 19 nt, Artificial Sequence
  Description of Artificial Sequence: Synthetic oligonucleotide
auacaccgaggccgacgag

SEQ ID NO: 760246 - RNA, 19 nt, Artificial Sequence
  Description of Artificial Sequence: Synthetic oligonucleotide
cagacagcgugauggcaca

SEQ ID NO: 760247 - RNA, 19 nt, Artificial Sequence
  Description of Artificial Sequence: Synthetic oligonucleotide
gacgagccgcugcccaggc

SEQ ID NO: 760248 - RNA, 19 nt, Artificial Sequence
  Description of Artificial Sequence: Synthetic oligonucleotide
cucucuuugcggaaaccgu

SEQ ID NO: 760249 - RNA, 19 nt, Artificial Sequence
  Description of Artificial Sequence: Synthetic oligonucleotide
cucggcaccccacgcgcag

SEQ ID NO: 760250 - RNA, 19 nt, Artificial Sequence
  Description of Artificial Sequence: Synthetic oligonucleotide
gcuuuacuggcaaauauau

SEQ ID NO: 760251 - RNA, 19 nt, Artificial Sequence
  Description of Artificial Sequence: Synthetic oligonucleotide
ggcgugggaagcaucacca

SEQ ID NO: 760252 - RNA, 19 nt, Artificial Sequence
  Description of Artificial Sequence: Synthetic oligonucleotide
cugcuuuacuggcaaauau

SEQ ID NO: 760253 - RNA, 19 nt, Artificial Sequence
  Description of Artificial Sequence: Synthetic oligonucleotide
gacgcgccaggcaggcccg

SEQ ID NO: 760254 - RNA, 19 nt, Artificial Sequence
  Description of Artificial Sequence: Synthetic oligonucleotide
cacucagcggguagaaugu

SEQ ID NO: 760255 - RNA, 19 nt, Artificial Sequence
  Description of Artificial Sequence: Synthetic oligonucleotide
cauccucccagucagcaau

SEQ ID NO: 760256 - RNA, 19 nt, Artificial Sequence
  Description of Artificial Sequence: Synthetic oligonucleotide
uaucauccacauggagcaa

SEQ ID NO: 760257 - RNA, 19 nt, Artificial Sequence
  Description of Artificial Sequence: Synthetic oligonucleotide
ucccggaggcaggaacugc

SEQ ID NO: 760258 - RNA, 19 nt, Artificial Sequence
  Description of Artificial Sequence: Synthetic oligonucleotide
cuggaauauaagagcaauu

SEQ ID NO: 760259 - RNA, 19 nt, Artificial Sequence
  Description of Artificial Sequence: Synthetic oligonucleotide
gcacaaacgaagggugccc

SEQ ID NO: 760260 - RNA, 19 nt, Artificial Sequence
  Description of Artificial Sequence: Synthetic oligonucleotide
cacaaacgaagggugccca

SEQ ID NO: 760261 - RNA, 19 nt, Artificial Sequence
  Description of Artificial Sequence: Synthetic oligonucleotide
gcauucauucucagcacuc

SEQ ID NO: 760262 - RNA, 19 nt, Artificial Sequence
  Description of Artificial Sequence: Synthetic oligonucleotide
uguaggcacucagcgggua

SEQ ID NO: 760263 - RNA, 19 nt, Artificial Sequence
  Description of Artificial Sequence: Synthetic oligonucleotide
gcguacucaacaaagacuu

SEQ ID NO: 760264 - RNA, 19 nt, Artificial Sequence
  Description of Artificial Sequence: Synthetic oligonucleotide
ccugcccuacugcacaaac

SEQ ID NO: 760265 - RNA, 19 nt, Artificial Sequence
  Description of Artificial Sequence: Synthetic oligonucleotide
cacgacgcgccaggcaggc

SEQ ID NO: 760266 - RNA, 19 nt, Artificial Sequence
  Description of Artificial Sequence: Synthetic oligonucleotide
ccgaaacacugacauccag

SEQ ID NO: 760267 - RNA, 19 nt, Artificial Sequence
  Description of Artificial Sequence: Synthetic oligonucleotide
ggagcucgauaaccgucug

SEQ ID NO: 760268 - RNA, 19 nt, Artificial Sequence
  Description of Artificial Sequence: Synthetic oligonucleotide
acacgacgcgccaggcagg

SEQ ID NO: 760269 - RNA, 19 nt, Artificial Sequence
  Description of Artificial Sequence: Synthetic oligonucleotide
gaaacgggaaauaguccuu

SEQ ID NO: 760270 - RNA, 19 nt, Artificial Sequence
  Description of Artificial Sequence: Synthetic oligonucleotide
auaaggucucugaggugau

SEQ ID NO: 760271 - RNA, 19 nt, Artificial Sequence
  Description of Artificial Sequence: Synthetic oligonucleotide
gaggacacgcgagccgaca

SEQ ID NO: 760272 - RNA, 19 nt, Artificial Sequence
  Description of Artificial Sequence: Synthetic oligonucleotide
cggaaaccguauucggcgg

SEQ ID NO: 760273 - RNA, 19 nt, Artificial Sequence
  Description of Artificial Sequence: Synthetic oligonucleotide
gcgcacccgauacaccgag

SEQ ID NO: 760274 - RNA, 19 nt, Artificial Sequence
  Description of Artificial Sequence: Synthetic oligonucleotide
gagccgacacgacgcgcca

SEQ ID NO: 760275 - RNA, 19 nt, Artificial Sequence
  Description of Artificial Sequence: Synthetic oligonucleotide
cgggaaauaguccuuaggu

SEQ ID NO: 760276 - RNA, 19 nt, Artificial Sequence
  Description of Artificial Sequence: Synthetic oligonucleotide
ggguaaaggggugcuccug

SEQ ID NO: 760277 - RNA, 19 nt, Artificial Sequence
  Description of Artificial Sequence: Synthetic oligonucleotide
agcccucauggugaagaaa

SEQ ID NO: 760278 - RNA, 19 nt, Artificial Sequence
  Description of Artificial Sequence: Synthetic oligonucleotide
cauccccgcccgcacccgc

SEQ ID NO: 760279 - RNA, 19 nt, Artificial Sequence
  Description of Artificial Sequence: Synthetic oligonucleotide
gcuuucuauuuaaaagccu

SEQ ID NO: 760280 - RNA, 19 nt, Artificial Sequence
  Description of Artificial Sequence: Synthetic oligonucleotide
gcuggaauugcggcauuca

SEQ ID NO: 760281 - RNA, 19 nt, Artificial Sequence
  Description of Artificial Sequence: Synthetic oligonucleotide
acauccccgcccgcacccg

SEQ ID NO: 760282 - RNA, 19 nt, Artificial Sequence
  Description of Artificial Sequence: Synthetic oligonucleotide
cgacgcgccaggcaggccc

SEQ ID NO: 760283 - RNA, 19 nt, Artificial Sequence
  Description of Artificial Sequence: Synthetic oligonucleotide
guucccggaggcaggaacu

SEQ ID NO: 760284 - RNA, 19 nt, Artificial Sequence
  Description of Artificial Sequence: Synthetic oligonucleotide
cagugccagcuagaauaac

SEQ ID NO: 760285 - RNA, 19 nt, Artificial Sequence
  Description of Artificial Sequence: Synthetic oligonucleotide
cugcuugggucaucaugaa

SEQ ID NO: 760286 - RNA, 19 nt, Artificial Sequence
  Description of Artificial Sequence: Synthetic oligonucleotide
acgacgcgccaggcaggcc

SEQ ID NO: 760287 - RNA, 19 nt, Artificial Sequence
  Description of Artificial Sequence: Synthetic oligonucleotide
gcaagguuugauacaggua

SEQ ID NO: 760288 - RNA, 19 nt, Artificial Sequence
  Description of Artificial Sequence: Synthetic oligonucleotide
cguauucggcggccgaggc

SEQ ID NO: 760289 - RNA, 19 nt, Artificial Sequence
  Description of Artificial Sequence: Synthetic oligonucleotide
agccggaccccgccauggu

SEQ ID NO: 760290 - RNA, 19 nt, Artificial Sequence
  Description of Artificial Sequence: Synthetic oligonucleotide
cgauacaccgaggccgacg

SEQ ID NO: 760291 - RNA, 19 nt, Artificial Sequence
  Description of Artificial Sequence: Synthetic oligonucleotide
auucggcggccgaggccgc

SEQ ID NO: 760292 - RNA, 19 nt, Artificial Sequence
  Description of Artificial Sequence: Synthetic oligonucleotide
gcaagggccuccaaaacau

SEQ ID NO: 760293 - RNA, 19 nt, Artificial Sequence
  Description of Artificial Sequence: Synthetic oligonucleotide
auccccucuuguaggcacu

SEQ ID NO: 760294 - RNA, 19 nt, Artificial Sequence
  Description of Artificial Sequence: Synthetic oligonucleotide
gcacauuaguaggauuaaa

SEQ ID NO: 760295 - RNA, 19 nt, Artificial Sequence
  Description of Artificial Sequence: Synthetic oligonucleotide
accccacgcgcagccggac

SEQ ID NO: 760296 - RNA, 19 nt, Artificial Sequence
  Description of Artificial Sequence: Synthetic oligonucleotide
agcgcacccgauacaccga

SEQ ID NO: 760297 - RNA, 19 nt, Artificial Sequence
  Description of Artificial Sequence: Synthetic oligonucleotide
ccguauucggcggccgagg

SEQ ID NO: 760298 - RNA, 19 nt, Artificial Sequence
  Description of Artificial Sequence: Synthetic oligonucleotide
ccucccagucagcaauuuc

SEQ ID NO: 760299 - RNA, 19 nt, Artificial Sequence
  Description of Artificial Sequence: Synthetic oligonucleotide
gggugcuccugcguucagc

SEQ ID NO: 760300 - RNA, 19 nt, Artificial Sequence
  Description of Artificial Sequence: Synthetic oligonucleotide
gcgaggacacgcgagccga

SEQ ID NO: 760301 - RNA, 19 nt, Artificial Sequence
  Description of Artificial Sequence: Synthetic oligonucleotide
cagcgccgcccucucuuug

SEQ ID NO: 760302 - RNA, 19 nt, Artificial Sequence
  Description of Artificial Sequence: Synthetic oligonucleotide
gcgccgcccucucuuugcg

SEQ ID NO: 760303 - RNA, 19 nt, Artificial Sequence
  Description of Artificial Sequence: Synthetic oligonucleotide
gguccauauuucugacacu

SEQ ID NO: 760304 - RNA, 19 nt, Artificial Sequence
  Description of Artificial Sequence: Synthetic oligonucleotide
gccugagaacauuuccagu

SEQ ID NO: 760305 - RNA, 19 nt, Artificial Sequence
  Description of Artificial Sequence: Synthetic oligonucleotide
agacagcgugauggcacau

SEQ ID NO: 760306 - RNA, 19 nt, Artificial Sequence
  Description of Artificial Sequence: Synthetic oligonucleotide
gccggaccccgccauggug

SEQ ID NO: 760307 - RNA, 19 nt, Artificial Sequence
  Description of Artificial Sequence: Synthetic oligonucleotide
cuccugcguucagcugugg

SEQ ID NO: 760308 - RNA, 19 nt, Artificial Sequence
  Description of Artificial Sequence: Synthetic oligonucleotide
gcccucucuuugcggaaac

SEQ ID NO: 760309 - RNA, 19 nt, Artificial Sequence
  Description of Artificial Sequence: Synthetic oligonucleotide
caccagcauuugcguacuc

SEQ ID NO: 760310 - RNA, 19 nt, Artificial Sequence
  Description of Artificial Sequence: Synthetic oligonucleotide
gcucgauaaccgucugucu

SEQ ID NO: 760311 - RNA, 19 nt, Artificial Sequence
  Description of Artificial Sequence: Synthetic oligonucleotide
cccgauacaccgaggccga

SEQ ID NO: 760312 - RNA, 19 nt, Artificial Sequence
  Description of Artificial Sequence: Synthetic oligonucleotide
caccaaccuuaacaaacuu

SEQ ID NO: 760313 - RNA, 19 nt, Artificial Sequence
  Description of Artificial Sequence: Synthetic oligonucleotide
gcagcgcacccgauacacc

SEQ ID NO: 760314 - RNA, 19 nt, Artificial Sequence
  Description of Artificial Sequence: Synthetic oligonucleotide
ccgucugucugaauauacu

SEQ ID NO: 760315 - RNA, 19 nt, Artificial Sequence
  Description of Artificial Sequence: Synthetic oligonucleotide
ugguucccggaggcaggaa

SEQ ID NO: 760316 - RNA, 19 nt, Artificial Sequence
  Description of Artificial Sequence: Synthetic oligonucleotide
gcagccggaccccgccaug

SEQ ID NO: 760317 - RNA, 19 nt, Artificial Sequence
  Description of Artificial Sequence: Synthetic oligonucleotide
cgcccgaaggccuccagga

SEQ ID NO: 760318 - RNA, 19 nt, Artificial Sequence
  Description of Artificial Sequence: Synthetic oligonucleotide
cgcgagccgacacgacgcg

SEQ ID NO: 760319 - RNA, 19 nt, Artificial Sequence
  Description of Artificial Sequence: Synthetic oligonucleotide
gcgagccgacacgacgcgc

SEQ ID NO: 760320 - RNA, 19 nt, Artificial Sequence
  Description of Artificial Sequence: Synthetic oligonucleotide
gggauccuucugcuugggu

SEQ ID NO: 760321 - RNA, 19 nt, Artificial Sequence
  Description of Artificial Sequence: Synthetic oligonucleotide
ccgccgucacauccccgcc

SEQ ID NO: 760322 - RNA, 19 nt, Artificial Sequence
  Description of Artificial Sequence: Synthetic oligonucleotide
cgacgagccgcugcccagg

SEQ ID NO: 760323 - RNA, 19 nt, Artificial Sequence
  Description of Artificial Sequence: Synthetic oligonucleotide
cgaggacacgcgagccgac

SEQ ID NO: 760324 - RNA, 19 nt, Artificial Sequence
  Description of Artificial Sequence: Synthetic oligonucleotide
gccgcuccgcagggagggg

SEQ ID NO: 760325 - RNA, 19 nt, Artificial Sequence
  Description of Artificial Sequence: Synthetic oligonucleotide
gccgcugcccaggcggcuc

SEQ ID NO: 760326 - RNA, 19 nt, Artificial Sequence
  Description of Artificial Sequence: Synthetic oligonucleotide
gcgcgguggcucggcaccc

SEQ ID NO: 760327 - RNA, 19 nt, Artificial Sequence
  Description of Artificial Sequence: Synthetic oligonucleotide
cgauaaccgucugucugaa

SEQ ID NO: 760328 - RNA, 19 nt, Artificial Sequence
  Description of Artificial Sequence: Synthetic oligonucleotide
gcucggcaccccacgcgca

SEQ ID NO: 760329 - RNA, 19 nt, Artificial Sequence
  Description of Artificial Sequence: Synthetic oligonucleotide
ccgauacaccgaggccgac

SEQ ID NO: 760330 - RNA, 19 nt, Artificial Sequence
  Description of Artificial Sequence: Synthetic oligonucleotide
gcguggacauagcccucau

SEQ ID NO: 760331 - RNA, 19 nt, Artificial Sequence
  Description of Artificial Sequence: Synthetic oligonucleotide
cccuggugacuggaauaua

SEQ ID NO: 760332 - RNA, 19 nt, Artificial Sequence
  Description of Artificial Sequence: Synthetic oligonucleotide
cgcccucucuuugcggaaa

SEQ ID NO: 760333 - RNA, 19 nt, Artificial Sequence
  Description of Artificial Sequence: Synthetic oligonucleotide
ccagcgccgcccucucuuu

SEQ ID NO: 760334 - RNA, 19 nt, Artificial Sequence
  Description of Artificial Sequence: Synthetic oligonucleotide
cgaggccgacgagccgcug

SEQ ID NO: 760335 - RNA, 19 nt, Artificial Sequence
  Description of Artificial Sequence: Synthetic oligonucleotide
ccgcagcagcgcacccgau

SEQ ID NO: 760336 - RNA, 19 nt, Artificial Sequence
  Description of Artificial Sequence: Synthetic oligonucleotide
aaugauacagcuuccacag

SEQ ID NO: 760337 - RNA, 19 nt, Artificial Sequence
  Description of Artificial Sequence: Synthetic oligonucleotide
aaaauuaucaccagcauug

SEQ ID NO: 760338 - RNA, 19 nt, Artificial Sequence
  Description of Artificial Sequence: Synthetic oligonucleotide
cuaaucuugucaaauaucg

SEQ ID NO: 760339 - RNA, 19 nt, Artificial Sequence
  Description of Artificial Sequence: Synthetic oligonucleotide
aagacuuaggcuugcaaac

SEQ ID NO: 760340 - RNA, 19 nt, Artificial Sequence
  Description of Artificial Sequence: Synthetic oligonucleotide
aaucuugucaaauaucgca

SEQ ID NO: 760341 - RNA, 19 nt, Artificial Sequence
  Description of Artificial Sequence: Synthetic oligonucleotide
aacccagccaaauacuugc

SEQ ID NO: 760342 - RNA, 19 nt, Artificial Sequence
  Description of Artificial Sequence: Synthetic oligonucleotide
uuaaguaaggcuucgauaa

SEQ ID NO: 760343 - RNA, 19 nt, Artificial Sequence
  Description of Artificial Sequence: Synthetic oligonucleotide
aaagguauccucacaaacc

SEQ ID NO: 760344 - RNA, 19 nt, Artificial Sequence
  Description of Artificial Sequence: Synthetic oligonucleotide
uuagauauuucauggauga

SEQ ID NO: 760345 - RNA, 19 nt, Artificial Sequence
  Description of Artificial Sequence: Synthetic oligonucleotide
uucaguagcaauuucaggu

SEQ ID NO: 760346 - RNA, 19 nt, Artificial Sequence
  Description of Artificial Sequence: Synthetic oligonucleotide
aacaauuugaauguuguca

SEQ ID NO: 760347 - RNA, 19 nt, Artificial Sequence
  Description of Artificial Sequence: Synthetic oligonucleotide
caugaugagauuuucagac

SEQ ID NO: 760348 - RNA, 19 nt, Artificial Sequence
  Description of Artificial Sequence: Synthetic oligonucleotide
aaagcauuacuugaggguc

SEQ ID NO: 760349 - RNA, 19 nt, Artificial Sequence
  Description of Artificial Sequence: Synthetic oligonucleotide
  modified_base (6)..(6): a, c, u, g, unknown or other
auuaancucaguugcuggc

SEQ ID NO: 760350 - RNA, 19 nt, Artificial Sequence
  Description of Artificial Sequence: Synthetic oligonucleotide
uuuaagcucacacuguaug

SEQ ID NO: 760351 - RNA, 19 nt, Artificial Sequence
  Description of Artificial Sequence: Synthetic oligonucleotide
ucaaauaucgcaagaacaa

SEQ ID NO: 760352 - RNA, 19 nt, Artificial Sequence
  Description of Artificial Sequence: Synthetic oligonucleotide
ucguuuuccuuccagaacc

SEQ ID NO: 760353 - RNA, 19 nt, Artificial Sequence
  Description of Artificial Sequence: Synthetic oligonucleotide
uggaaugcagaaauaagug

SEQ ID NO: 760354 - RNA, 19 nt, Artificial Sequence
  Description of Artificial Sequence: Synthetic oligonucleotide
uuuucagacaaauucagua

SEQ ID NO: 760355 - RNA, 19 nt, Artificial Sequence
  Description of Artificial Sequence: Synthetic oligonucleotide
cacaaggacaaucauaggc

SEQ ID NO: 760356 - RNA, 19 nt, Artificial Sequence
  Description of Artificial Sequence: Synthetic oligonucleotide
uaucgcaagaacaauuuga

SEQ ID NO: 760357 - RNA, 19 nt, Artificial Sequence
  Description of Artificial Sequence: Synthetic oligonucleotide
agagggaucauacugaaau

SEQ ID NO: 760358 - RNA, 19 nt, Artificial Sequence
  Description of Artificial Sequence: Synthetic oligonucleotide
  modified_base (7)..(7): a, c, u, g, unknown or other
cauuaancucaguugcugg

SEQ ID NO: 760359 - RNA, 19 nt, Artificial Sequence
  Description of Artificial Sequence: Synthetic oligonucleotide
aagguauccucacaaaccu

SEQ ID NO: 760360 - RNA, 19 nt, Artificial Sequence
  Description of Artificial Sequence: Synthetic oligonucleotide
aguuguauauucauuuggc

SEQ ID NO: 760361 - RNA, 19 nt, Artificial Sequence
  Description of Artificial Sequence: Synthetic oligonucleotide
uauauuucccucuucugca

SEQ ID NO: 760362 - RNA, 19 nt, Artificial Sequence
  Description of Artificial Sequence: Synthetic oligonucleotide
uuugauucaaaacuagcuu

SEQ ID NO: 760363 - RNA, 19 nt, Artificial Sequence
  Description of Artificial Sequence: Synthetic oligonucleotide
gauaagugagacgacaccc

SEQ ID NO: 760364 - RNA, 19 nt, Artificial Sequence
  Description of Artificial Sequence: Synthetic oligonucleotide
uguccucuaaaguugguag

SEQ ID NO: 760365 - RNA, 19 nt, Artificial Sequence
  Description of Artificial Sequence: Synthetic oligonucleotide
uugucugcgacccagcccc

SEQ ID NO: 760366 - RNA, 19 nt, Artificial Sequence
  Description of Artificial Sequence: Synthetic oligonucleotide
aucauacugaaaugggaac

SEQ ID NO: 760367 - RNA, 19 nt, Artificial Sequence
  Description of Artificial Sequence: Synthetic oligonucleotide
ucuaaugaaaucucgggua

SEQ ID NO: 760368 - RNA, 19 nt, Artificial Sequence
  Description of Artificial Sequence: Synthetic oligonucleotide
acuaaagagggucauaaau

SEQ ID NO: 760369 - RNA, 19 nt, Artificial Sequence
  Description of Artificial Sequence: Synthetic oligonucleotide
ucaaaagugccccuucuca

SEQ ID NO: 760370 - RNA, 19 nt, Artificial Sequence
  Description of Artificial Sequence: Synthetic oligonucleotide
aauugaguauguuguccuc

SEQ ID NO: 760371 - RNA, 19 nt, Artificial Sequence
  Description of Artificial Sequence: Synthetic oligonucleotide
auaaauucagacauggacu

SEQ ID NO: 760372 - RNA, 19 nt, Artificial Sequence
  Description of Artificial Sequence: Synthetic oligonucleotide
uggguaaucauugacaauc

SEQ ID NO: 760373 - RNA, 19 nt, Artificial Sequence
  Description of Artificial Sequence: Synthetic oligonucleotide
uguauauucauuuggcauu

SEQ ID NO: 760374 - RNA, 19 nt, Artificial Sequence
  Description of Artificial Sequence: Synthetic oligonucleotide
uguuguccucuaaaguugg

SEQ ID NO: 760375 - RNA, 19 nt, Artificial Sequence
  Description of Artificial Sequence: Synthetic oligonucleotide
ugggaaaccagccuuuccc

SEQ ID NO: 760376 - RNA, 19 nt, Artificial Sequence
  Description of Artificial Sequence: Synthetic oligonucleotide
acacacguaugucugaauc

SEQ ID NO: 760377 - RNA, 19 nt, Artificial Sequence
  Description of Artificial Sequence: Synthetic oligonucleotide
cuuaauaccaggaguggac

SEQ ID NO: 760378 - RNA, 19 nt, Artificial Sequence
  Description of Artificial Sequence: Synthetic oligonucleotide
uugccaaccacuuuguggu

SEQ ID NO: 760379 - RNA, 19 nt, Artificial Sequence
  Description of Artificial Sequence: Synthetic oligonucleotide
gaaccaagaauugaguaug

SEQ ID NO: 760380 - RNA, 19 nt, Artificial Sequence
  Description of Artificial Sequence: Synthetic oligonucleotide
acggaaucagcugugaaac

SEQ ID NO: 760381 - RNA, 19 nt, Artificial Sequence
  Description of Artificial Sequence: Synthetic oligonucleotide
gucguuaugacuugggaac

SEQ ID NO: 760382 - RNA, 19 nt, Artificial Sequence
  Description of Artificial Sequence: Synthetic oligonucleotide
agaagcgguucucaugccc

SEQ ID NO: 760383 - RNA, 19 nt, Artificial Sequence
  Description of Artificial Sequence: Synthetic oligonucleotide
uaugacuugggaacacaag

SEQ ID NO: 760384 - RNA, 19 nt, Artificial Sequence
  Description of Artificial Sequence: Synthetic oligonucleotide
ugugguagucagaaguagc

SEQ ID NO: 760385 - RNA, 19 nt, Artificial Sequence
  Description of Artificial Sequence: Synthetic oligonucleotide
cucggguaaacugagaagc

SEQ ID NO: 760386 - RNA, 19 nt, Artificial Sequence
  Description of Artificial Sequence: Synthetic oligonucleotide
agccaugcuaaccauaucu

SEQ ID NO: 760387 - RNA, 19 nt, Artificial Sequence
  Description of Artificial Sequence: Synthetic oligonucleotide
caggaguaggauuugauuc

SEQ ID NO: 760388 - RNA, 19 nt, Artificial Sequence
  Description of Artificial Sequence: Synthetic oligonucleotide
aaaacuagcuucaucuccu

SEQ ID NO: 760389 - RNA, 19 nt, Artificial Sequence
  Description of Artificial Sequence: Synthetic oligonucleotide
ggaaugcagaaauaagugg

SEQ ID NO: 760390 - RNA, 19 nt, Artificial Sequence
  Description of Artificial Sequence: Synthetic oligonucleotide
uugaccuaaccucaacuca

SEQ ID NO: 760391 - RNA, 19 nt, Artificial Sequence
  Description of Artificial Sequence: Synthetic oligonucleotide
aguaggauuugauucaaaa

SEQ ID NO: 760392 - RNA, 19 nt, Artificial Sequence
  Description of Artificial Sequence: Synthetic oligonucleotide
ucucgaauuuccuggacug

SEQ ID NO: 760393 - RNA, 19 nt, Artificial Sequence
  Description of Artificial Sequence: Synthetic oligonucleotide
cuccuuaauaccaggagug

SEQ ID NO: 760394 - RNA, 19 nt, Artificial Sequence
  Description of Artificial Sequence: Synthetic oligonucleotide
uguaugcagcuacaggacc

SEQ ID NO: 760395 - RNA, 19 nt, Artificial Sequence
  Description of Artificial Sequence: Synthetic oligonucleotide
uguccauuaguagaaggag

SEQ ID NO: 760396 - RNA, 19 nt, Artificial Sequence
  Description of Artificial Sequence: Synthetic oligonucleotide
gacuuaggcuugcaaacgg

SEQ ID NO: 760397 - RNA, 19 nt, Artificial Sequence
  Description of Artificial Sequence: Synthetic oligonucleotide
ggcauuaggaaaaugauac

SEQ ID NO: 760398 - RNA, 19 nt, Artificial Sequence
  Description of Artificial Sequence: Synthetic oligonucleotide
ugcguuuuaguguuuuagc

SEQ ID NO: 760399 - RNA, 19 nt, Artificial Sequence
  Description of Artificial Sequence: Synthetic oligonucleotide
agaaccaagaauugaguau

SEQ ID NO: 760400 - RNA, 19 nt, Artificial Sequence
  Description of Artificial Sequence: Synthetic oligonucleotide
aaaugguuaagcauauuaa

SEQ ID NO: 760401 - RNA, 19 nt, Artificial Sequence
  Description of Artificial Sequence: Synthetic oligonucleotide
cucagcugaagacuuaggc

SEQ ID NO: 760402 - RNA, 19 nt, Artificial Sequence
  Description of Artificial Sequence: Synthetic oligonucleotide
ugcuaaucuugucaaauau

SEQ ID NO: 760403 - RNA, 19 nt, Artificial Sequence
  Description of Artificial Sequence: Synthetic oligonucleotide
uuacuaaagagggucauaa

SEQ ID NO: 760404 - RNA, 19 nt, Artificial Sequence
  Description of Artificial Sequence: Synthetic oligonucleotide
ucaugaugagauuuucaga

SEQ ID NO: 760405 - RNA, 19 nt, Artificial Sequence
  Description of Artificial Sequence: Synthetic oligonucleotide
acggauaguuaaguaaggc

SEQ ID NO: 760406 - RNA, 19 nt, Artificial Sequence
  Description of Artificial Sequence: Synthetic oligonucleotide
uccauuaguagaaggaguu

SEQ ID NO: 760407 - RNA, 19 nt, Artificial Sequence
  Description of Artificial Sequence: Synthetic oligonucleotide
  modified_base (9)..(9): a, c, u, g, unknown or other
uucauuaancucaguugcu

SEQ ID NO: 760408 - RNA, 19 nt, Artificial Sequence
  Description of Artificial Sequence: Synthetic oligonucleotide
cuucucauugccucaagac

SEQ ID NO: 760409 - RNA, 19 nt, Artificial Sequence
  Description of Artificial Sequence: Synthetic oligonucleotide
cuuguccuaacucgggugg

SEQ ID NO: 760410 - RNA, 19 nt, Artificial Sequence
  Description of Artificial Sequence: Synthetic oligonucleotide
aagcucacacuguaugcag

SEQ ID NO: 760411 - RNA, 19 nt, Artificial Sequence
  Description of Artificial Sequence: Synthetic oligonucleotide
  modified_base (8)..(8): a, c, u, g, unknown or other
ucauuaancucaguugcug

SEQ ID NO: 760412 - RNA, 19 nt, Artificial Sequence
  Description of Artificial Sequence: Synthetic oligonucleotide
aacucguuuucagacugac

SEQ ID NO: 760413 - RNA, 19 nt, Artificial Sequence
  Description of Artificial Sequence: Synthetic oligonucleotide
ucggguaaacugagaagcg

SEQ ID NO: 760414 - RNA, 19 nt, Artificial Sequence
  Description of Artificial Sequence: Synthetic oligonucleotide
aaaccuuguccuaacucgg

SEQ ID NO: 760415 - RNA, 19 nt, Artificial Sequence
  Description of Artificial Sequence: Synthetic oligonucleotide
aacggccuugaauacagga

SEQ ID NO: 760416 - RNA, 19 nt, Artificial Sequence
  Description of Artificial Sequence: Synthetic oligonucleotide
ucuuucguuuuccuuccag

SEQ ID NO: 760417 - RNA, 19 nt, Artificial Sequence
  Description of Artificial Sequence: Synthetic oligonucleotide
cagguuuugguauugccug

SEQ ID NO: 760418 - RNA, 19 nt, Artificial Sequence
  Description of Artificial Sequence: Synthetic oligonucleotide
ugaaucacauuuagaucug

SEQ ID NO: 760419 - RNA, 19 nt, Artificial Sequence
  Description of Artificial Sequence: Synthetic oligonucleotide
aauaucgcaagaacaauuu

SEQ ID NO: 760420 - RNA, 19 nt, Artificial Sequence
  Description of Artificial Sequence: Synthetic oligonucleotide
uuucgauugucugcgaccc

SEQ ID NO: 760421 - RNA, 19 nt, Artificial Sequence
  Description of Artificial Sequence: Synthetic oligonucleotide
ucgauaagugagacgacac

SEQ ID NO: 760422 - RNA, 19 nt, Artificial Sequence
  Description of Artificial Sequence: Synthetic oligonucleotide
uggacggauaguuaaguaa

SEQ ID NO: 760423 - RNA, 19 nt, Artificial Sequence
  Description of Artificial Sequence: Synthetic oligonucleotide
uaaguaaggcuucgauaag

SEQ ID NO: 760424 - RNA, 19 nt, Artificial Sequence
  Description of Artificial Sequence: Synthetic oligonucleotide
cauggacucaguagcaagc

SEQ ID NO: 760425 - RNA, 19 nt, Artificial Sequence
  Description of Artificial Sequence: Synthetic oligonucleotide
gucaagauucaccaccacc

SEQ ID NO: 760426 - RNA, 19 nt, Artificial Sequence
  Description of Artificial Sequence: Synthetic oligonucleotide
uggaccaggcuuaaauuga

SEQ ID NO: 760427 - RNA, 19 nt, Artificial Sequence
  Description of Artificial Sequence: Synthetic oligonucleotide
agauauuucauggaugaaa

SEQ ID NO: 760428 - RNA, 19 nt, Artificial Sequence
  Description of Artificial Sequence: Synthetic oligonucleotide
uuucccuccuuaauaccag

SEQ ID NO: 760429 - RNA, 19 nt, Artificial Sequence
  Description of Artificial Sequence: Synthetic oligonucleotide
agaaauaagugggucaaga

SEQ ID NO: 760430 - RNA, 19 nt, Artificial Sequence
  Description of Artificial Sequence: Synthetic oligonucleotide
cuugaccuaaccucaacuc

SEQ ID NO: 760431 - RNA, 19 nt, Artificial Sequence
  Description of Artificial Sequence: Synthetic oligonucleotide
aguuaaguaaggcuucgau

SEQ ID NO: 760432 - RNA, 19 nt, Artificial Sequence
  Description of Artificial Sequence: Synthetic oligonucleotide
auuuagaucuggauaaggu

SEQ ID NO: 760433 - RNA, 19 nt, Artificial Sequence
  Description of Artificial Sequence: Synthetic oligonucleotide
aaauaucgcaagaacaauu

SEQ ID NO: 760434 - RNA, 19 nt, Artificial Sequence
  Description of Artificial Sequence: Synthetic oligonucleotide
gacaugcugcuucuuuugg

SEQ ID NO: 760435 - RNA, 19 nt, Artificial Sequence
  Description of Artificial Sequence: Synthetic oligonucleotide
uucaaucucauggaaugca

SEQ ID NO: 760436 - RNA, 19 nt, Artificial Sequence
  Description of Artificial Sequence: Synthetic oligonucleotide
aacucggguggacggauag

SEQ ID NO: 760437 - RNA, 19 nt, Artificial Sequence
  Description of Artificial Sequence: Synthetic oligonucleotide
uuaagaugcucucgaauuu

SEQ ID NO: 760438 - RNA, 19 nt, Artificial Sequence
  Description of Artificial Sequence: Synthetic oligonucleotide
aaguaaggcuucgauaagu

SEQ ID NO: 760439 - RNA, 19 nt, Artificial Sequence
  Description of Artificial Sequence: Synthetic oligonucleotide
ugagcgguaagagggauca

SEQ ID NO: 760440 - RNA, 19 nt, Artificial Sequence
  Description of Artificial Sequence: Synthetic oligonucleotide
uucgauaagugagacgaca

SEQ ID NO: 760441 - RNA, 19 nt, Artificial Sequence
  Description of Artificial Sequence: Synthetic oligonucleotide
uaauugucagguuugcguu

SEQ ID NO: 760442 - RNA, 19 nt, Artificial Sequence
  Description of Artificial Sequence: Synthetic oligonucleotide
acaaggacaaucauaggca

SEQ ID NO: 760443 - RNA, 19 nt, Artificial Sequence
  Description of Artificial Sequence: Synthetic oligonucleotide
aaaucucggguaaacugag

SEQ ID NO: 760444 - RNA, 19 nt, Artificial Sequence
  Description of Artificial Sequence: Synthetic oligonucleotide
cugagguggguaaucauug

SEQ ID NO: 760445 - RNA, 19 nt, Artificial Sequence
  Description of Artificial Sequence: Synthetic oligonucleotide
auaguuaaguaaggcuucg

SEQ ID NO: 760446 - RNA, 19 nt, Artificial Sequence
  Description of Artificial Sequence: Synthetic oligonucleotide
gauaguuaaguaaggcuuc

SEQ ID NO: 760447 - RNA, 19 nt, Artificial Sequence
  Description of Artificial Sequence: Synthetic oligonucleotide
acauggacucaguagcaag

SEQ ID NO: 760448 - RNA, 19 nt, Artificial Sequence
  Description of Artificial Sequence: Synthetic oligonucleotide
uugguauugccugaauuca

SEQ ID NO: 760449 - RNA, 19 nt, Artificial Sequence
  Description of Artificial Sequence: Synthetic oligonucleotide
ucucggguaaacugagaag

SEQ ID NO: 760450 - RNA, 19 nt, Artificial Sequence
  Description of Artificial Sequence: Synthetic oligonucleotide
uccuaacucggguggacgg

SEQ ID NO: 760451 - RNA, 19 nt, Artificial Sequence
  Description of Artificial Sequence: Synthetic oligonucleotide
ucccacuauguuuucagcu

SEQ ID NO: 760452 - RNA, 19 nt, Artificial Sequence
  Description of Artificial Sequence: Synthetic oligonucleotide
ugaccuaaccucaacucau

SEQ ID NO: 760453 - RNA, 19 nt, Artificial Sequence
  Description of Artificial Sequence: Synthetic oligonucleotide
agugagacgacacccgagu

SEQ ID NO: 760454 - RNA, 19 nt, Artificial Sequence
  Description of Artificial Sequence: Synthetic oligonucleotide
uuuacucccgcucguacau

SEQ ID NO: 760455 - RNA, 19 nt, Artificial Sequence
  Description of Artificial Sequence: Synthetic oligonucleotide
gaucauacugaaaugggaa

SEQ ID NO: 760456 - RNA, 19 nt, Artificial Sequence
  Description of Artificial Sequence: Synthetic oligonucleotide
cuugaauacaggaguagga

SEQ ID NO: 760457 - RNA, 19 nt, Artificial Sequence
  Description of Artificial Sequence: Synthetic oligonucleotide
aucccacuauguuuucagc

SEQ ID NO: 760458 - RNA, 19 nt, Artificial Sequence
  Description of Artificial Sequence: Synthetic oligonucleotide
auaagugagacgacacccg

SEQ ID NO: 760459 - RNA, 19 nt, Artificial Sequence
  Description of Artificial Sequence: Synthetic oligonucleotide
auaucgcaagaacaauuug

SEQ ID NO: 760460 - RNA, 19 nt, Artificial Sequence
  Description of Artificial Sequence: Synthetic oligonucleotide
uccuuaauaccaggagugg

SEQ ID NO: 760461 - RNA, 19 nt, Artificial Sequence
  Description of Artificial Sequence: Synthetic oligonucleotide
  modified_base (5)..(5): a, c, u, g, unknown or other
uuaancucaguugcuggcu

SEQ ID NO: 760462 - RNA, 19 nt, Artificial Sequence
  Description of Artificial Sequence: Synthetic oligonucleotide
caaaugguuaagcauauua

SEQ ID NO: 760463 - RNA, 19 nt, Artificial Sequence
  Description of Artificial Sequence: Synthetic oligonucleotide
uccuuacuaaagaggguca

SEQ ID NO: 760464 - RNA, 19 nt, Artificial Sequence
  Description of Artificial Sequence: Synthetic oligonucleotide
uauugccugaauucaguaa

SEQ ID NO: 760465 - RNA, 19 nt, Artificial Sequence
  Description of Artificial Sequence: Synthetic oligonucleotide
uuaauaccaggaguggacu

SEQ ID NO: 760466 - RNA, 19 nt, Artificial Sequence
  Description of Artificial Sequence: Synthetic oligonucleotide
acaugaagauuccuccucu

SEQ ID NO: 760467 - RNA, 19 nt, Artificial Sequence
  Description of Artificial Sequence: Synthetic oligonucleotide
aaaagugccccuucucauu

SEQ ID NO: 760468 - RNA, 19 nt, Artificial Sequence
  Description of Artificial Sequence: Synthetic oligonucleotide
aucucggguaaacugagaa

SEQ ID NO: 760469 - RNA, 19 nt, Artificial Sequence
  Description of Artificial Sequence: Synthetic oligonucleotide
uuucaaucucauggaaugc

SEQ ID NO: 760470 - RNA, 19 nt, Artificial Sequence
  Description of Artificial Sequence: Synthetic oligonucleotide
cucauugccucaagacugg

SEQ ID NO: 760471 - RNA, 19 nt, Artificial Sequence
  Description of Artificial Sequence: Synthetic oligonucleotide
cucacaaaccugacacacg

SEQ ID NO: 760472 - RNA, 19 nt, Artificial Sequence
  Description of Artificial Sequence: Synthetic oligonucleotide
gcuucgauaagugagacga

SEQ ID NO: 760473 - RNA, 19 nt, Artificial Sequence
  Description of Artificial Sequence: Synthetic oligonucleotide
uuuucuggcuuggacacac

SEQ ID NO: 760474 - RNA, 19 nt, Artificial Sequence
  Description of Artificial Sequence: Synthetic oligonucleotide
gacggauaguuaaguaagg

SEQ ID NO: 760475 - RNA, 19 nt, Artificial Sequence
  Description of Artificial Sequence: Synthetic oligonucleotide
uaagagggaucauacugaa

SEQ ID NO: 760476 - RNA, 19 nt, Artificial Sequence
  Description of Artificial Sequence: Synthetic oligonucleotide
agacuuaggcuugcaaacg

SEQ ID NO: 760477 - RNA, 19 nt, Artificial Sequence
  Description of Artificial Sequence: Synthetic oligonucleotide
gaauugaguauguuguccu

SEQ ID NO: 760478 - RNA, 19 nt, Artificial Sequence
  Description of Artificial Sequence: Synthetic oligonucleotide
guagucagaaguagcacug

SEQ ID NO: 760479 - RNA, 19 nt, Artificial Sequence
  Description of Artificial Sequence: Synthetic oligonucleotide
guuaaguaaggcuucgaua

SEQ ID NO: 760480 - RNA, 19 nt, Artificial Sequence
  Description of Artificial Sequence: Synthetic oligonucleotide
uuacuugagggucguuaug

SEQ ID NO: 760481 - RNA, 19 nt, Artificial Sequence
  Description of Artificial Sequence: Synthetic oligonucleotide
ucgauugucugcgacccag

SEQ ID NO: 760482 - RNA, 19 nt, Artificial Sequence
  Description of Artificial Sequence: Synthetic oligonucleotide
uccucuaaaguugguagcu

SEQ ID NO: 760483 - RNA, 19 nt, Artificial Sequence
  Description of Artificial Sequence: Synthetic oligonucleotide
cacgguuuacucccgcucg

SEQ ID NO: 760484 - RNA, 19 nt, Artificial Sequence
  Description of Artificial Sequence: Synthetic oligonucleotide
cuccuuacuaaagaggguc

SEQ ID NO: 760485 - RNA, 19 nt, Artificial Sequence
  Description of Artificial Sequence: Synthetic oligonucleotide
gaguuggguaaaauuauca

SEQ ID NO: 760486 - RNA, 19 nt, Artificial Sequence
  Description of Artificial Sequence: Synthetic oligonucleotide
agaguuggguaaaauuauc

SEQ ID NO: 760487 - RNA, 19 nt, Artificial Sequence
  Description of Artificial Sequence: Synthetic oligonucleotide
agaaccaggaucccacuau

SEQ ID NO: 760488 - RNA, 19 nt, Artificial Sequence
  Description of Artificial Sequence: Synthetic oligonucleotide
augaugagauuuucagaca

SEQ ID NO: 760489 - RNA, 19 nt, Artificial Sequence
  Description of Artificial Sequence: Synthetic oligonucleotide
ucugcggggaaggaucagg

SEQ ID NO: 760490 - RNA, 19 nt, Artificial Sequence
  Description of Artificial Sequence: Synthetic oligonucleotide
gagguggguaaucauugac

SEQ ID NO: 760491 - RNA, 19 nt, Artificial Sequence
  Description of Artificial Sequence: Synthetic oligonucleotide
aaacucuucagagccaauu

SEQ ID NO: 760492 - RNA, 19 nt, Artificial Sequence
  Description of Artificial Sequence: Synthetic oligonucleotide
gucguuuugucaugaugag

SEQ ID NO: 760493 - RNA, 19 nt, Artificial Sequence
  Description of Artificial Sequence: Synthetic oligonucleotide
acacccgaguuucuaauga

SEQ ID NO: 760494 - RNA, 19 nt, Artificial Sequence
  Description of Artificial Sequence: Synthetic oligonucleotide
ggacggauaguuaaguaag

SEQ ID NO: 760495 - RNA, 19 nt, Artificial Sequence
  Description of Artificial Sequence: Synthetic oligonucleotide
ucuuuugcacuugaccuaa

SEQ ID NO: 760496 - RNA, 19 nt, Artificial Sequence
  Description of Artificial Sequence: Synthetic oligonucleotide
ugcccauugcaauuuuaga

SEQ ID NO: 760497 - RNA, 19 nt, Artificial Sequence
  Description of Artificial Sequence: Synthetic oligonucleotide
guugucauuugaguccucc

SEQ ID NO: 760498 - RNA, 19 nt, Artificial Sequence
  Description of Artificial Sequence: Synthetic oligonucleotide
uacaggaguaggauuugau

SEQ ID NO: 760499 - RNA, 19 nt, Artificial Sequence
  Description of Artificial Sequence: Synthetic oligonucleotide
acaggaguaggauuugauu

SEQ ID NO: 760500 - RNA, 19 nt, Artificial Sequence
  Description of Artificial Sequence: Synthetic oligonucleotide
aagaacccagccaaauacu

SEQ ID NO: 760501 - RNA, 19 nt, Artificial Sequence
  Description of Artificial Sequence: Synthetic oligonucleotide
gacacccgaguuucuaaug

SEQ ID NO: 760502 - RNA, 19 nt, Artificial Sequence
  Description of Artificial Sequence: Synthetic oligonucleotide
uccagacaacugcucgggg

SEQ ID NO: 760503 - RNA, 19 nt, Artificial Sequence
  Description of Artificial Sequence: Synthetic oligonucleotide
ucaagacuggccucuuccu

SEQ ID NO: 760504 - RNA, 19 nt, Artificial Sequence
  Description of Artificial Sequence: Synthetic oligonucleotide
ccaggcuuaaauugaacag

SEQ ID NO: 760505 - RNA, 19 nt, Artificial Sequence
  Description of Artificial Sequence: Synthetic oligonucleotide
agguuugcguuuuaguguu

SEQ ID NO: 760506 - RNA, 19 nt, Artificial Sequence
  Description of Artificial Sequence: Synthetic oligonucleotide
guggacucaaaagugcccc

SEQ ID NO: 760507 - RNA, 19 nt, Artificial Sequence
  Description of Artificial Sequence: Synthetic oligonucleotide
ugagacgacacccgaguuu

SEQ ID NO: 760508 - RNA, 19 nt, Artificial Sequence
  Description of Artificial Sequence: Synthetic oligonucleotide
uugcuaaucuugucaaaua

SEQ ID NO: 760509 - RNA, 19 nt, Artificial Sequence
  Description of Artificial Sequence: Synthetic oligonucleotide
aaccuuguccuaacucggg

SEQ ID NO: 760510 - RNA, 19 nt, Artificial Sequence
  Description of Artificial Sequence: Synthetic oligonucleotide
cuaaugaaaucucggguaa

SEQ ID NO: 760511 - RNA, 19 nt, Artificial Sequence
  Description of Artificial Sequence: Synthetic oligonucleotide
uucagacauggacucagua

SEQ ID NO: 760512 - RNA, 19 nt, Artificial Sequence
  Description of Artificial Sequence: Synthetic oligonucleotide
guccucuaaaguugguagc

SEQ ID NO: 760513 - RNA, 19 nt, Artificial Sequence
  Description of Artificial Sequence: Synthetic oligonucleotide
cauugccucaagacuggcc

SEQ ID NO: 760514 - RNA, 19 nt, Artificial Sequence
  Description of Artificial Sequence: Synthetic oligonucleotide
caaacagggcuucuuucug

SEQ ID NO: 760515 - RNA, 19 nt, Artificial Sequence
  Description of Artificial Sequence: Synthetic oligonucleotide
ugguagcuugaucucuucu

SEQ ID NO: 760516 - RNA, 19 nt, Artificial Sequence
  Description of Artificial Sequence: Synthetic oligonucleotide
cuuaagaugcucucgaauu

SEQ ID NO: 760517 - RNA, 19 nt, Artificial Sequence
  Description of Artificial Sequence: Synthetic oligonucleotide
uccggucucaucaucuaua

SEQ ID NO: 760518 - RNA, 19 nt, Artificial Sequence
  Description of Artificial Sequence: Synthetic oligonucleotide
ugagguggguaaucauuga

SEQ ID NO: 760519 - RNA, 19 nt, Artificial Sequence
  Description of Artificial Sequence: Synthetic oligonucleotide
aucgcaagaacaauuugaa

SEQ ID NO: 760520 - RNA, 19 nt, Artificial Sequence
  Description of Artificial Sequence: Synthetic oligonucleotide
gaacccagccaaauacuug

SEQ ID NO: 760521 - RNA, 19 nt, Artificial Sequence
  Description of Artificial Sequence: Synthetic oligonucleotide
agcaagcagucguuuuguc

SEQ ID NO: 760522 - RNA, 19 nt, Artificial Sequence
  Description of Artificial Sequence: Synthetic oligonucleotide
uacuaaagagggucauaaa

SEQ ID NO: 760523 - RNA, 19 nt, Artificial Sequence
  Description of Artificial Sequence: Synthetic oligonucleotide
gguacacugaaacacggaa

SEQ ID NO: 760524 - RNA, 19 nt, Artificial Sequence
  Description of Artificial Sequence: Synthetic oligonucleotide
aucuugucaaauaucgcaa

SEQ ID NO: 760525 - RNA, 19 nt, Artificial Sequence
  Description of Artificial Sequence: Synthetic oligonucleotide
ccaguuucgauugucugcg

SEQ ID NO: 760526 - RNA, 19 nt, Artificial Sequence
  Description of Artificial Sequence: Synthetic oligonucleotide
ccucaacucauuuucuggc

SEQ ID NO: 760527 - RNA, 19 nt, Artificial Sequence
  Description of Artificial Sequence: Synthetic oligonucleotide
ucguuuugucaugaugaga

SEQ ID NO: 760528 - RNA, 19 nt, Artificial Sequence
  Description of Artificial Sequence: Synthetic oligonucleotide
gguggguaaucauugacaa

SEQ ID NO: 760529 - RNA, 19 nt, Artificial Sequence
  Description of Artificial Sequence: Synthetic oligonucleotide
gacucaaaagugccccuuc

SEQ ID NO: 760530 - RNA, 19 nt, Artificial Sequence
  Description of Artificial Sequence: Synthetic oligonucleotide
ucguuaugacuugggaaca

SEQ ID NO: 760531 - RNA, 19 nt, Artificial Sequence
  Description of Artificial Sequence: Synthetic oligonucleotide
augaaaucucggguaaacu

SEQ ID NO: 760532 - RNA, 19 nt, Artificial Sequence
  Description of Artificial Sequence: Synthetic oligonucleotide
uucugacccaguuucgauu

SEQ ID NO: 760533 - RNA, 19 nt, Artificial Sequence
  Description of Artificial Sequence: Synthetic oligonucleotide
guuuacucccgcucguaca

SEQ ID NO: 760534 - RNA, 19 nt, Artificial Sequence
  Description of Artificial Sequence: Synthetic oligonucleotide
cuacaggaccaguucucag

SEQ ID NO: 760535 - RNA, 19 nt, Artificial Sequence
  Description of Artificial Sequence: Synthetic oligonucleotide
aguuucugacccaguuucg

SEQ ID NO: 760536 - RNA, 19 nt, Artificial Sequence
  Description of Artificial Sequence: Synthetic oligonucleotide
caugaagauuccuccucuc

SEQ ID NO: 760537 - RNA, 19 nt, Artificial Sequence
  Description of Artificial Sequence: Synthetic oligonucleotide
uccuggacugagcgguaag

SEQ ID NO: 760538 - RNA, 19 nt, Artificial Sequence
  Description of Artificial Sequence: Synthetic oligonucleotide
ucuggauaagguggagcca

SEQ ID NO: 760539 - RNA, 19 nt, Artificial Sequence
  Description of Artificial Sequence: Synthetic oligonucleotide
ccuugaauacaggaguagg

SEQ ID NO: 760540 - RNA, 19 nt, Artificial Sequence
  Description of Artificial Sequence: Synthetic oligonucleotide
aaccaagaauugaguaugu

SEQ ID NO: 760541 - RNA, 19 nt, Artificial Sequence
  Description of Artificial Sequence: Synthetic oligonucleotide
ucgcaagaacaauuugaau

SEQ ID NO: 760542 - RNA, 19 nt, Artificial Sequence
  Description of Artificial Sequence: Synthetic oligonucleotide
cuggacugagcgguaagag

SEQ ID NO: 760543 - RNA, 19 nt, Artificial Sequence
  Description of Artificial Sequence: Synthetic oligonucleotide
uggauaagguggagccaug

SEQ ID NO: 760544 - RNA, 19 nt, Artificial Sequence
  Description of Artificial Sequence: Synthetic oligonucleotide
cagaaguagcacugaggug

SEQ ID NO: 760545 - RNA, 19 nt, Artificial Sequence
  Description of Artificial Sequence: Synthetic oligonucleotide
gaagcgguucucaugccca

SEQ ID NO: 760546 - RNA, 19 nt, Artificial Sequence
  Description of Artificial Sequence: Synthetic oligonucleotide
aaacuagcuucaucuccuu

SEQ ID NO: 760547 - RNA, 19 nt, Artificial Sequence
  Description of Artificial Sequence: Synthetic oligonucleotide
accuuguccuaacucgggu

SEQ ID NO: 760548 - RNA, 19 nt, Artificial Sequence
  Description of Artificial Sequence: Synthetic oligonucleotide
ugcuaaccauaucuuccaa

SEQ ID NO: 760549 - RNA, 19 nt, Artificial Sequence
  Description of Artificial Sequence: Synthetic oligonucleotide
accaggaucccacuauguu

SEQ ID NO: 760550 - RNA, 19 nt, Artificial Sequence
  Description of Artificial Sequence: Synthetic oligonucleotide
uuugcguuuuaguguuuua

SEQ ID NO: 760551 - RNA, 19 nt, Artificial Sequence
  Description of Artificial Sequence: Synthetic oligonucleotide
cauuaguagaaggaguucu

SEQ ID NO: 760552 - RNA, 19 nt, Artificial Sequence
  Description of Artificial Sequence: Synthetic oligonucleotide
cuggccuuaagaugcucuc

SEQ ID NO: 760553 - RNA, 19 nt, Artificial Sequence
  Description of Artificial Sequence: Synthetic oligonucleotide
caaggacaaucauaggcaa

SEQ ID NO: 760554 - RNA, 19 nt, Artificial Sequence
  Description of Artificial Sequence: Synthetic oligonucleotide
cacggaaucagcugugaaa

SEQ ID NO: 760555 - RNA, 19 nt, Artificial Sequence
  Description of Artificial Sequence: Synthetic oligonucleotide
ucugcgacccagccccuac

SEQ ID NO: 760556 - RNA, 19 nt, Artificial Sequence
  Description of Artificial Sequence: Synthetic oligonucleotide
cuucgauaagugagacgac

SEQ ID NO: 760557 - RNA, 19 nt, Artificial Sequence
  Description of Artificial Sequence: Synthetic oligonucleotide
uuguccucuaaaguuggua

SEQ ID NO: 760558 - RNA, 19 nt, Artificial Sequence
  Description of Artificial Sequence: Synthetic oligonucleotide
ccugacacacguaugucug

SEQ ID NO: 760559 - RNA, 19 nt, Artificial Sequence
  Description of Artificial Sequence: Synthetic oligonucleotide
cccaguuucgauugucugc

SEQ ID NO: 760560 - RNA, 19 nt, Artificial Sequence
  Description of Artificial Sequence: Synthetic oligonucleotide
gaaggaucagguuccugcu

SEQ ID NO: 760561 - RNA, 19 nt, Artificial Sequence
  Description of Artificial Sequence: Synthetic oligonucleotide
uaguuaaguaaggcuucga

SEQ ID NO: 760562 - RNA, 19 nt, Artificial Sequence
  Description of Artificial Sequence: Synthetic oligonucleotide
ggucguuaugacuugggaa

SEQ ID NO: 760563 - RNA, 19 nt, Artificial Sequence
  Description of Artificial Sequence: Synthetic oligonucleotide
guauauucauuuggcauua

SEQ ID NO: 760564 - RNA, 19 nt, Artificial Sequence
  Description of Artificial Sequence: Synthetic oligonucleotide
gguagucagaaguagcacu

SEQ ID NO: 760565 - RNA, 19 nt, Artificial Sequence
  Description of Artificial Sequence: Synthetic oligonucleotide
aaggacaaucauaggcaaa

SEQ ID NO: 760566 - RNA, 19 nt, Artificial Sequence
  Description of Artificial Sequence: Synthetic oligonucleotide
guauugccugaauucagua

SEQ ID NO: 760567 - RNA, 19 nt, Artificial Sequence
  Description of Artificial Sequence: Synthetic oligonucleotide
aguagcacugaggugggua

SEQ ID NO: 760568 - RNA, 19 nt, Artificial Sequence
  Description of Artificial Sequence: Synthetic oligonucleotide
uagauauuucauggaugaa

SEQ ID NO: 760569 - RNA, 19 nt, Artificial Sequence
  Description of Artificial Sequence: Synthetic oligonucleotide
auuaguagaaggaguucuu

SEQ ID NO: 760570 - RNA, 19 nt, Artificial Sequence
  Description of Artificial Sequence: Synthetic oligonucleotide
  modified_base (2)..(2): a, c, u, g, unknown or other
ancucaguugcuggcugaa

SEQ ID NO: 760571 - RNA, 19 nt, Artificial Sequence
  Description of Artificial Sequence: Synthetic oligonucleotide
gagaagcgguucucaugcc

SEQ ID NO: 760572 - RNA, 19 nt, Artificial Sequence
  Description of Artificial Sequence: Synthetic oligonucleotide
cuugcaaacggccuugaau

SEQ ID NO: 760573 - RNA, 19 nt, Artificial Sequence
  Description of Artificial Sequence: Synthetic oligonucleotide
ggcuucgauaagugagacg

SEQ ID NO: 760574 - RNA, 19 nt, Artificial Sequence
  Description of Artificial Sequence: Synthetic oligonucleotide
ggaucauacugaaauggga

SEQ ID NO: 760575 - RNA, 19 nt, Artificial Sequence
  Description of Artificial Sequence: Synthetic oligonucleotide
gcuaaucuugucaaauauc

SEQ ID NO: 760576 - RNA, 19 nt, Artificial Sequence
  Description of Artificial Sequence: Synthetic oligonucleotide
cauuacuugagggucguua

SEQ ID NO: 760577 - RNA, 19 nt, Artificial Sequence
  Description of Artificial Sequence: Synthetic oligonucleotide
uucgauugucugcgaccca

SEQ ID NO: 760578 - RNA, 19 nt, Artificial Sequence
  Description of Artificial Sequence: Synthetic oligonucleotide
agggucguuaugacuuggg

SEQ ID NO: 760579 - RNA, 19 nt, Artificial Sequence
  Description of Artificial Sequence: Synthetic oligonucleotide
acccagccaaauacuugcc

SEQ ID NO: 760580 - RNA, 19 nt, Artificial Sequence
  Description of Artificial Sequence: Synthetic oligonucleotide
ggauaguuaaguaaggcuu

SEQ ID NO: 760581 - RNA, 19 nt, Artificial Sequence
  Description of Artificial Sequence: Synthetic oligonucleotide
cugugaaaccaaagcauua

SEQ ID NO: 760582 - RNA, 19 nt, Artificial Sequence
  Description of Artificial Sequence: Synthetic oligonucleotide
cacuugaccuaaccucaac

SEQ ID NO: 760583 - RNA, 19 nt, Artificial Sequence
  Description of Artificial Sequence: Synthetic oligonucleotide
accuaaccucaacucauuu

SEQ ID NO: 760584 - RNA, 19 nt, Artificial Sequence
  Description of Artificial Sequence: Synthetic oligonucleotide
gggcuuauggaugggaaac

SEQ ID NO: 760585 - RNA, 19 nt, Artificial Sequence
  Description of Artificial Sequence: Synthetic oligonucleotide
aaucucggguaaacugaga

SEQ ID NO: 760586 - RNA, 19 nt, Artificial Sequence
  Description of Artificial Sequence: Synthetic oligonucleotide
aagcgguucucaugcccau

SEQ ID NO: 760587 - RNA, 19 nt, Artificial Sequence
  Description of Artificial Sequence: Synthetic oligonucleotide
augauacagcuuccacaga

SEQ ID NO: 760588 - RNA, 19 nt, Artificial Sequence
  Description of Artificial Sequence: Synthetic oligonucleotide
agaacccagccaaauacuu

SEQ ID NO: 760589 - RNA, 19 nt, Artificial Sequence
  Description of Artificial Sequence: Synthetic oligonucleotide
agcgguaagagggaucaua

SEQ ID NO: 760590 - RNA, 19 nt, Artificial Sequence
  Description of Artificial Sequence: Synthetic oligonucleotide
agcagucguuuugucauga

SEQ ID NO: 760591 - RNA, 19 nt, Artificial Sequence
  Description of Artificial Sequence: Synthetic oligonucleotide
ccgaguuucuaaugaaauc

SEQ ID NO: 760592 - RNA, 19 nt, Artificial Sequence
  Description of Artificial Sequence: Synthetic oligonucleotide
acacggaaucagcugugaa

SEQ ID NO: 760593 - RNA, 19 nt, Artificial Sequence
  Description of Artificial Sequence: Synthetic oligonucleotide
gguucugcggggaaggauc

SEQ ID NO: 760594 - RNA, 19 nt, Artificial Sequence
  Description of Artificial Sequence: Synthetic oligonucleotide
acgguuuacucccgcucgu

SEQ ID NO: 760595 - RNA, 19 nt, Artificial Sequence
  Description of Artificial Sequence: Synthetic oligonucleotide
gguuuacucccgcucguac

SEQ ID NO: 760596 - RNA, 19 nt, Artificial Sequence
  Description of Artificial Sequence: Synthetic oligonucleotide
ggauaagguggagccaugc

SEQ ID NO: 760597 - RNA, 19 nt, Artificial Sequence
  Description of Artificial Sequence: Synthetic oligonucleotide
ggccuuaagaugcucucga

SEQ ID NO: 760598 - RNA, 19 nt, Artificial Sequence
  Description of Artificial Sequence: Synthetic oligonucleotide
gcgguucucaugcccauug

SEQ ID NO: 760599 - RNA, 19 nt, Artificial Sequence
  Description of Artificial Sequence: Synthetic oligonucleotide
cuuuugcacuugaccuaac

SEQ ID NO: 760600 - RNA, 19 nt, Artificial Sequence
  Description of Artificial Sequence: Synthetic oligonucleotide
cccuccuuaauaccaggag

SEQ ID NO: 760601 - RNA, 19 nt, Artificial Sequence
  Description of Artificial Sequence: Synthetic oligonucleotide
gcgguaagagggaucauac

SEQ ID NO: 760602 - RNA, 19 nt, Artificial Sequence
  Description of Artificial Sequence: Synthetic oligonucleotide
gcuaaccauaucuuccaaa

SEQ ID NO: 760603 - RNA, 19 nt, Artificial Sequence
  Description of Artificial Sequence: Synthetic oligonucleotide
cucaacucauuuucuggcu

SEQ ID NO: 760604 - RNA, 19 nt, Artificial Sequence
  Description of Artificial Sequence: Synthetic oligonucleotide
gugggucaagauucaccac

SEQ ID NO: 760605 - RNA, 19 nt, Artificial Sequence
  Description of Artificial Sequence: Synthetic oligonucleotide
cgauaagugagacgacacc

SEQ ID NO: 760606 - RNA, 19 nt, Artificial Sequence
  Description of Artificial Sequence: Synthetic oligonucleotide
uccacagaguuggguaaaa

SEQ ID NO: 760607 - RNA, 19 nt, Artificial Sequence
  Description of Artificial Sequence: Synthetic oligonucleotide
uuuccuggacugagcggua

SEQ ID NO: 760608 - RNA, 19 nt, Artificial Sequence
  Description of Artificial Sequence: Synthetic oligonucleotide
ggcuuauggaugggaaacc

SEQ ID NO: 760609 - RNA, 19 nt, Artificial Sequence
  Description of Artificial Sequence: Synthetic oligonucleotide
ccagccuuuccccauggac

SEQ ID NO: 760610 - RNA, 19 nt, Artificial Sequence
  Description of Artificial Sequence: Synthetic oligonucleotide
cguuuugucaugaugagau

SEQ ID NO: 760611 - RNA, 19 nt, Artificial Sequence
  Description of Artificial Sequence: Synthetic oligonucleotide
agguauccucacaaaccug

SEQ ID NO: 760612 - RNA, 19 nt, Artificial Sequence
  Description of Artificial Sequence: Synthetic oligonucleotide
guccauuaguagaaggagu

SEQ ID NO: 760613 - RNA, 19 nt, Artificial Sequence
  Description of Artificial Sequence: Synthetic oligonucleotide
gccuugaauacaggaguag

SEQ ID NO: 760614 - RNA, 19 nt, Artificial Sequence
  Description of Artificial Sequence: Synthetic oligonucleotide
caaaagugccccuucucau

SEQ ID NO: 760615 - RNA, 19 nt, Artificial Sequence
  Description of Artificial Sequence: Synthetic oligonucleotide
cuuacuaaagagggucaua

SEQ ID NO: 760616 - RNA, 19 nt, Artificial Sequence
  Description of Artificial Sequence: Synthetic oligonucleotide
uaacucggguggacggaua

SEQ ID NO: 760617 - RNA, 19 nt, Artificial Sequence
  Description of Artificial Sequence: Synthetic oligonucleotide
cugaaaugggaacucguuu

SEQ ID NO: 760618 - RNA, 19 nt, Artificial Sequence
  Description of Artificial Sequence: Synthetic oligonucleotide
gagccaugcuaaccauauc

SEQ ID NO: 760619 - RNA, 19 nt, Artificial Sequence
  Description of Artificial Sequence: Synthetic oligonucleotide
gccaaccacuuugugguag

SEQ ID NO: 760620 - RNA, 19 nt, Artificial Sequence
  Description of Artificial Sequence: Synthetic oligonucleotide
gggucguuaugacuuggga

SEQ ID NO: 760621 - RNA, 19 nt, Artificial Sequence
  Description of Artificial Sequence: Synthetic oligonucleotide
uucugcggggaaggaucag

SEQ ID NO: 760622 - RNA, 19 nt, Artificial Sequence
  Description of Artificial Sequence: Synthetic oligonucleotide
caaauaucgcaagaacaau

SEQ ID NO: 760623 - RNA, 19 nt, Artificial Sequence
  Description of Artificial Sequence: Synthetic oligonucleotide
cacccgaguuucuaaugaa

SEQ ID NO: 760624 - RNA, 19 nt, Artificial Sequence
  Description of Artificial Sequence: Synthetic oligonucleotide
guucugcggggaaggauca

SEQ ID NO: 760625 - RNA, 19 nt, Artificial Sequence
  Description of Artificial Sequence: Synthetic oligonucleotide
cucgaauuuccuggacuga

SEQ ID NO: 760626 - RNA, 19 nt, Artificial Sequence
  Description of Artificial Sequence: Synthetic oligonucleotide
ggucaagauucaccaccac

SEQ ID NO: 760627 - RNA, 19 nt, Artificial Sequence
  Description of Artificial Sequence: Synthetic oligonucleotide
cuggauaagguggagccau

SEQ ID NO: 760628 - RNA, 19 nt, Artificial Sequence
  Description of Artificial Sequence: Synthetic oligonucleotide
gacgacacccgaguuucua

SEQ ID NO: 760629 - RNA, 19 nt, Artificial Sequence
  Description of Artificial Sequence: Synthetic oligonucleotide
cggguaaacugagaagcgg

SEQ ID NO: 760630 - RNA, 19 nt, Artificial Sequence
  Description of Artificial Sequence: Synthetic oligonucleotide
ggcuuaaauugaacaguga

SEQ ID NO: 760631 - RNA, 19 nt, Artificial Sequence
  Description of Artificial Sequence: Synthetic oligonucleotide
gcaaacggccuugaauaca

SEQ ID NO: 760632 - RNA, 19 nt, Artificial Sequence
  Description of Artificial Sequence: Synthetic oligonucleotide
ggggcuuauggaugggaaa

SEQ ID NO: 760633 - RNA, 19 nt, Artificial Sequence
  Description of Artificial Sequence: Synthetic oligonucleotide
ggguaaacugagaagcggu

SEQ ID NO: 760634 - RNA, 19 nt, Artificial Sequence
  Description of Artificial Sequence: Synthetic oligonucleotide
ccuuaauaccaggagugga

SEQ ID NO: 760635 - RNA, 19 nt, Artificial Sequence
  Description of Artificial Sequence: Synthetic oligonucleotide
ccauuaguagaaggaguuc

SEQ ID NO: 760636 - RNA, 19 nt, Artificial Sequence
  Description of Artificial Sequence: Synthetic oligonucleotide
ugccaaccacuuuguggua

SEQ ID NO: 760637 - RNA, 19 nt, Artificial Sequence
  Description of Artificial Sequence: Synthetic oligonucleotide
uagcacugagguggguaau

SEQ ID NO: 760638 - RNA, 19 nt, Artificial Sequence
  Description of Artificial Sequence: Synthetic oligonucleotide
guuuugguauugccugaau

SEQ ID NO: 760639 - RNA, 19 nt, Artificial Sequence
  Description of Artificial Sequence: Synthetic oligonucleotide
cauuugaguccuccuuacu

SEQ ID NO: 760640 - RNA, 19 nt, Artificial Sequence
  Description of Artificial Sequence: Synthetic oligonucleotide
cagccccuacuuuggcuuc

SEQ ID NO: 760641 - RNA, 19 nt, Artificial Sequence
  Description of Artificial Sequence: Synthetic oligonucleotide
ccuccuuaauaccaggagu

SEQ ID NO: 760642 - RNA, 19 nt, Artificial Sequence
  Description of Artificial Sequence: Synthetic oligonucleotide
gggaacucguuuucagacu

SEQ ID NO: 760643 - RNA, 19 nt, Artificial Sequence
  Description of Artificial Sequence: Synthetic oligonucleotide
acucggguggacggauagu

SEQ ID NO: 760644 - RNA, 19 nt, Artificial Sequence
  Description of Artificial Sequence: Synthetic oligonucleotide
guggguaaucauugacaau

SEQ ID NO: 760645 - RNA, 19 nt, Artificial Sequence
  Description of Artificial Sequence: Synthetic oligonucleotide
ggagccaugcuaaccauau

SEQ ID NO: 760646 - RNA, 19 nt, Artificial Sequence
  Description of Artificial Sequence: Synthetic oligonucleotide
cggauaguuaaguaaggcu

SEQ ID NO: 760647 - RNA, 19 nt, Artificial Sequence
  Description of Artificial Sequence: Synthetic oligonucleotide
cugcggggaaggaucaggu

SEQ ID NO: 760648 - RNA, 19 nt, Artificial Sequence
  Description of Artificial Sequence: Synthetic oligonucleotide
gguggacggauaguuaagu

SEQ ID NO: 760649 - RNA, 19 nt, Artificial Sequence
  Description of Artificial Sequence: Synthetic oligonucleotide
cacacgguuuacucccgcu

SEQ ID NO: 760650 - RNA, 19 nt, Artificial Sequence
  Description of Artificial Sequence: Synthetic oligonucleotide
gcugugaaaccaaagcauu

SEQ ID NO: 760651 - RNA, 19 nt, Artificial Sequence
  Description of Artificial Sequence: Synthetic oligonucleotide
augcagcuacaggaccagu

SEQ ID NO: 760652 - RNA, 19 nt, Artificial Sequence
  Description of Artificial Sequence: Synthetic oligonucleotide
caguuucgauugucugcga

SEQ ID NO: 760653 - RNA, 19 nt, Artificial Sequence
  Description of Artificial Sequence: Synthetic oligonucleotide
uuacucccgcucguacauu

SEQ ID NO: 760654 - RNA, 19 nt, Artificial Sequence
  Description of Artificial Sequence: Synthetic oligonucleotide
gccuuaagaugcucucgaa

SEQ ID NO: 760655 - RNA, 19 nt, Artificial Sequence
  Description of Artificial Sequence: Synthetic oligonucleotide
cggauguuaucuuguucuc

SEQ ID NO: 760656 - RNA, 19 nt, Artificial Sequence
  Description of Artificial Sequence: Synthetic oligonucleotide
cccgaguuucuaaugaaau

SEQ ID NO: 760657 - RNA, 19 nt, Artificial Sequence
  Description of Artificial Sequence: Synthetic oligonucleotide
ccuuaagaugcucucgaau

SEQ ID NO: 760658 - RNA, 19 nt, Artificial Sequence
  Description of Artificial Sequence: Synthetic oligonucleotide
cguuaugacuugggaacac

SEQ ID NO: 760659 - RNA, 19 nt, Artificial Sequence
  Description of Artificial Sequence: Synthetic oligonucleotide
gggaaggaucagguuccug

SEQ ID NO: 760660 - RNA, 19 nt, Artificial Sequence
  Description of Artificial Sequence: Synthetic oligonucleotide
gaccuaaccucaacucauu

SEQ ID NO: 760661 - RNA, 19 nt, Artificial Sequence
  Description of Artificial Sequence: Synthetic oligonucleotide
cuaacucggguggacggau

SEQ ID NO: 760662 - RNA, 19 nt, Artificial Sequence
  Description of Artificial Sequence: Synthetic oligonucleotide
gugagacgacacccgaguu

SEQ ID NO: 760663 - RNA, 19 nt, Artificial Sequence
  Description of Artificial Sequence: Synthetic oligonucleotide
guuguccucuaaaguuggu

SEQ ID NO: 760664 - RNA, 19 nt, Artificial Sequence
  Description of Artificial Sequence: Synthetic oligonucleotide
agcgguucucaugcccauu

SEQ ID NO: 760665 - RNA, 19 nt, Artificial Sequence
  Description of Artificial Sequence: Synthetic oligonucleotide
ccuaaccucaacucauuuu

SEQ ID NO: 760666 - RNA, 19 nt, Artificial Sequence
  Description of Artificial Sequence: Synthetic oligonucleotide
agacgacacccgaguuucu

SEQ ID NO: 760667 - RNA, 19 nt, Artificial Sequence
  Description of Artificial Sequence: Synthetic oligonucleotide
ccuggacugagcgguaaga

SEQ ID NO: 760668 - RNA, 19 nt, Artificial Sequence
  Description of Artificial Sequence: Synthetic oligonucleotide
gcuugcaaacggccuugaa

SEQ ID NO: 760669 - RNA, 19 nt, Artificial Sequence
  Description of Artificial Sequence: Synthetic oligonucleotide
cuccggucucaucaucuau

SEQ ID NO: 760670 - RNA, 19 nt, Artificial Sequence
  Description of Artificial Sequence: Synthetic oligonucleotide
ccuaacucggguggacgga

SEQ ID NO: 760671 - RNA, 19 nt, Artificial Sequence
  Description of Artificial Sequence: Synthetic oligonucleotide
cugacccaguuucgauugu

SEQ ID NO: 760672 - RNA, 19 nt, Artificial Sequence
  Description of Artificial Sequence: Synthetic oligonucleotide
cugcacuuucccuggccuu

SEQ ID NO: 760673 - RNA, 19 nt, Artificial Sequence
  Description of Artificial Sequence: Synthetic oligonucleotide
gcacuugaccuaaccucaa

SEQ ID NO: 760674 - RNA, 19 nt, Artificial Sequence
  Description of Artificial Sequence: Synthetic oligonucleotide
gcucguacauuguccuuuu

SEQ ID NO: 760675 - RNA, 19 nt, Artificial Sequence
  Description of Artificial Sequence: Synthetic oligonucleotide
ggcuugcaaacggccuuga

SEQ ID NO: 760676 - RNA, 19 nt, Artificial Sequence
  Description of Artificial Sequence: Synthetic oligonucleotide
ccggucucaucaucuauau

SEQ ID NO: 760677 - RNA, 19 nt, Artificial Sequence
  Description of Artificial Sequence: Synthetic oligonucleotide
ggacucaaaagugccccuu

SEQ ID NO: 760678 - RNA, 19 nt, Artificial Sequence
  Description of Artificial Sequence: Synthetic oligonucleotide
caguagcaagcagucguuu

SEQ ID NO: 760679 - RNA, 19 nt, Artificial Sequence
  Description of Artificial Sequence: Synthetic oligonucleotide
ccuuacuaaagagggucau

SEQ ID NO: 760680 - RNA, 19 nt, Artificial Sequence
  Description of Artificial Sequence: Synthetic oligonucleotide
gcagucguuuugucaugau

SEQ ID NO: 760681 - RNA, 19 nt, Artificial Sequence
  Description of Artificial Sequence: Synthetic oligonucleotide
cugcgacccagccccuacu

SEQ ID NO: 760682 - RNA, 19 nt, Artificial Sequence
  Description of Artificial Sequence: Synthetic oligonucleotide
gucugcgacccagccccua

SEQ ID NO: 760683 - RNA, 19 nt, Artificial Sequence
  Description of Artificial Sequence: Synthetic oligonucleotide
gcaaaugguuaagcauauu

SEQ ID NO: 760684 - RNA, 19 nt, Artificial Sequence
  Description of Artificial Sequence: Synthetic oligonucleotide
cguaugucugaaucacauu

SEQ ID NO: 760685 - RNA, 19 nt, Artificial Sequence
  Description of Artificial Sequence: Synthetic oligonucleotide
gagcgguaagagggaucau

SEQ ID NO: 760686 - RNA, 19 nt, Artificial Sequence
  Description of Artificial Sequence: Synthetic oligonucleotide
ccucuucggauguuaucuu

SEQ ID NO: 760687 - RNA, 19 nt, Artificial Sequence
  Description of Artificial Sequence: Synthetic oligonucleotide
cccuggccuuaagaugcuc

SEQ ID NO: 760688 - RNA, 19 nt, Artificial Sequence
  Description of Artificial Sequence: Synthetic oligonucleotide
cgacacccgaguuucuaau

SEQ ID NO: 760689 - RNA, 19 nt, Artificial Sequence
  Description of Artificial Sequence: Synthetic oligonucleotide
ccucuaaaguugguagcuu

SEQ ID NO: 760690 - RNA, 19 nt, Artificial Sequence
  Description of Artificial Sequence: Synthetic oligonucleotide
gcgacccagccccuacuuu

SEQ ID NO: 760691 - RNA, 19 nt, Artificial Sequence
  Description of Artificial Sequence: Synthetic oligonucleotide
gguuugcguuuuaguguuu

SEQ ID NO: 760692 - RNA, 19 nt, Artificial Sequence
  Description of Artificial Sequence: Synthetic oligonucleotide
cgguuuacucccgcucgua

SEQ ID NO: 760693 - RNA, 19 nt, Artificial Sequence
  Description of Artificial Sequence: Synthetic oligonucleotide
gcauuacuugagggucguu

SEQ ID NO: 760694 - RNA, 19 nt, Artificial Sequence
  Description of Artificial Sequence: Synthetic oligonucleotide
ccgcucguacauuguccuu

SEQ ID NO: 760695 - RNA, 19 nt, Artificial Sequence
  Description of Artificial Sequence: Synthetic oligonucleotide
cggucucaucaucuauauu

SEQ ID NO: 760696 - RNA, 19 nt, Artificial Sequence
  Description of Artificial Sequence: Synthetic oligonucleotide
uaugauauuagauuccaag

SEQ ID NO: 760697 - RNA, 19 nt, Artificial Sequence
  Description of Artificial Sequence: Synthetic oligonucleotide
ugaguaacggccaaagggg

SEQ ID NO: 760698 - RNA, 19 nt, Artificial Sequence
  Description of Artificial Sequence: Synthetic oligonucleotide
uuaucuguaaggcauagga

SEQ ID NO: 760699 - RNA, 19 nt, Artificial Sequence
  Description of Artificial Sequence: Synthetic oligonucleotide
aaucaaauucagcuacuac

SEQ ID NO: 760700 - RNA, 19 nt, Artificial Sequence
  Description of Artificial Sequence: Synthetic oligonucleotide
aggcauaggacacagaaag

SEQ ID NO: 760701 - RNA, 19 nt, Artificial Sequence
  Description of Artificial Sequence: Synthetic oligonucleotide
auucguaucauccaauuca

SEQ ID NO: 760702 - RNA, 19 nt, Artificial Sequence
  Description of Artificial Sequence: Synthetic oligonucleotide
uucaauucggccauaggcc

SEQ ID NO: 760703 - RNA, 19 nt, Artificial Sequence
  Description of Artificial Sequence: Synthetic oligonucleotide
cugaguaacggccaaaggg

SEQ ID NO: 760704 - RNA, 19 nt, Artificial Sequence
  Description of Artificial Sequence: Synthetic oligonucleotide
auaggacacagaaagaccc

SEQ ID NO: 760705 - RNA, 19 nt, Artificial Sequence
  Description of Artificial Sequence: Synthetic oligonucleotide
ugauauuagauuccaaguc

SEQ ID NO: 760706 - RNA, 19 nt, Artificial Sequence
  Description of Artificial Sequence: Synthetic oligonucleotide
gaggcagauagcuagagug

SEQ ID NO: 760707 - RNA, 19 nt, Artificial Sequence
  Description of Artificial Sequence: Synthetic oligonucleotide
gaauugaacagcaugagga

SEQ ID NO: 760708 - RNA, 19 nt, Artificial Sequence
  Description of Artificial Sequence: Synthetic oligonucleotide
uggaauguauccuaggcga

SEQ ID NO: 760709 - RNA, 19 nt, Artificial Sequence
  Description of Artificial Sequence: Synthetic oligonucleotide
acauauauguccuuagaga

SEQ ID NO: 760710 - RNA, 19 nt, Artificial Sequence
  Description of Artificial Sequence: Synthetic oligonucleotide
ucaauucggccauaggccg

SEQ ID NO: 760711 - RNA, 19 nt, Artificial Sequence
  Description of Artificial Sequence: Synthetic oligonucleotide
ucuaaaaccaggacucggc

SEQ ID NO: 760712 - RNA, 19 nt, Artificial Sequence
  Description of Artificial Sequence: Synthetic oligonucleotide
aaauucagcuacuaccccu

SEQ ID NO: 760713 - RNA, 19 nt, Artificial Sequence
  Description of Artificial Sequence: Synthetic oligonucleotide
agcuacuaccccuuugucc

SEQ ID NO: 760714 - RNA, 19 nt, Artificial Sequence
  Description of Artificial Sequence: Synthetic oligonucleotide
caugauuguguucagccgg

SEQ ID NO: 760715 - RNA, 19 nt, Artificial Sequence
  Description of Artificial Sequence: Synthetic oligonucleotide
aaacgguugaggaugcggc

SEQ ID NO: 760716 - RNA, 19 nt, Artificial Sequence
  Description of Artificial Sequence: Synthetic oligonucleotide
uguagagucccacagacuu

SEQ ID NO: 760717 - RNA, 19 nt, Artificial Sequence
  Description of Artificial Sequence: Synthetic oligonucleotide
augauauuagauuccaagu

SEQ ID NO: 760718 - RNA, 19 nt, Artificial Sequence
  Description of Artificial Sequence: Synthetic oligonucleotide
ucacuaaggaccuuaaaau

SEQ ID NO: 760719 - RNA, 19 nt, Artificial Sequence
  Description of Artificial Sequence: Synthetic oligonucleotide
uaaaagaugccuccagcug

SEQ ID NO: 760720 - RNA, 19 nt, Artificial Sequence
  Description of Artificial Sequence: Synthetic oligonucleotide
aucacuaaggaccuuaaaa

SEQ ID NO: 760721 - RNA, 19 nt, Artificial Sequence
  Description of Artificial Sequence: Synthetic oligonucleotide
ucgucuaaaaccaggacuc

SEQ ID NO: 760722 - RNA, 19 nt, Artificial Sequence
  Description of Artificial Sequence: Synthetic oligonucleotide
aacacgcucaucuucacau

SEQ ID NO: 760723 - RNA, 19 nt, Artificial Sequence
  Description of Artificial Sequence: Synthetic oligonucleotide
aguccgucaaugcagaucu

SEQ ID NO: 760724 - RNA, 19 nt, Artificial Sequence
  Description of Artificial Sequence: Synthetic oligonucleotide
cacaaaugagugcaggugg

SEQ ID NO: 760725 - RNA, 19 nt, Artificial Sequence
  Description of Artificial Sequence: Synthetic oligonucleotide
guagcauagacaccuagcc

SEQ ID NO: 760726 - RNA, 19 nt, Artificial Sequence
  Description of Artificial Sequence: Synthetic oligonucleotide
acgaacuccacguggacac

SEQ ID NO: 760727 - RNA, 19 nt, Artificial Sequence
  Description of Artificial Sequence: Synthetic oligonucleotide
aacgguugaggaugcggcc

SEQ ID NO: 760728 - RNA, 19 nt, Artificial Sequence
  Description of Artificial Sequence: Synthetic oligonucleotide
cuuggaauguauccuaggc

SEQ ID NO: 760729 - RNA, 19 nt, Artificial Sequence
  Description of Artificial Sequence: Synthetic oligonucleotide
acuaacucaaggcccgggc

SEQ ID NO: 760730 - RNA, 19 nt, Artificial Sequence
  Description of Artificial Sequence: Synthetic oligonucleotide
uguucugucggccauugac

SEQ ID NO: 760731 - RNA, 19 nt, Artificial Sequence
  Description of Artificial Sequence: Synthetic oligonucleotide
aggacaaccacaaugaaga

SEQ ID NO: 760732 - RNA, 19 nt, Artificial Sequence
  Description of Artificial Sequence: Synthetic oligonucleotide
gacaccuagccuuugggag

SEQ ID NO: 760733 - RNA, 19 nt, Artificial Sequence
  Description of Artificial Sequence: Synthetic oligonucleotide
aauugaacagcaugaggau

SEQ ID NO: 760734 - RNA, 19 nt, Artificial Sequence
  Description of Artificial Sequence: Synthetic oligonucleotide
auggaagccgcacuuuggc

SEQ ID NO: 760735 - RNA, 19 nt, Artificial Sequence
  Description of Artificial Sequence: Synthetic oligonucleotide
accaccgcaucauuggccc

SEQ ID NO: 760736 - RNA, 19 nt, Artificial Sequence
  Description of Artificial Sequence: Synthetic oligonucleotide
gauauuagauuccaagucu

SEQ ID NO: 760737 - RNA, 19 nt, Artificial Sequence
  Description of Artificial Sequence: Synthetic oligonucleotide
ugauaagugcaccagucuc

SEQ ID NO: 760738 - RNA, 19 nt, Artificial Sequence
  Description of Artificial Sequence: Synthetic oligonucleotide
aguuccggaacuccacugc

SEQ ID NO: 760739 - RNA, 19 nt, Artificial Sequence
  Description of Artificial Sequence: Synthetic oligonucleotide
aaugagugcaggugggaca

SEQ ID NO: 760740 - RNA, 19 nt, Artificial Sequence
  Description of Artificial Sequence: Synthetic oligonucleotide
cauaggacacagaaagacc

SEQ ID NO: 760741 - RNA, 19 nt, Artificial Sequence
  Description of Artificial Sequence: Synthetic oligonucleotide
uggcgaacgaaucuuguug

SEQ ID NO: 760742 - RNA, 19 nt, Artificial Sequence
  Description of Artificial Sequence: Synthetic oligonucleotide
cauauauguccuuagagaa

SEQ ID NO: 760743 - RNA, 19 nt, Artificial Sequence
  Description of Artificial Sequence: Synthetic oligonucleotide
cauaaaagaugccuccagc

SEQ ID NO: 760744 - RNA, 19 nt, Artificial Sequence
  Description of Artificial Sequence: Synthetic oligonucleotide
auauccuccucugaguaac

SEQ ID NO: 760745 - RNA, 19 nt, Artificial Sequence
  Description of Artificial Sequence: Synthetic oligonucleotide
uuggcccgcauacaggagg

SEQ ID NO: 760746 - RNA, 19 nt, Artificial Sequence
  Description of Artificial Sequence: Synthetic oligonucleotide
uagacaccuagccuuuggg

SEQ ID NO: 760747 - RNA, 19 nt, Artificial Sequence
  Description of Artificial Sequence: Synthetic oligonucleotide
ugucucaucuuugauaagu

SEQ ID NO: 760748 - RNA, 19 nt, Artificial Sequence
  Description of Artificial Sequence: Synthetic oligonucleotide
uauuagauuccaagucuga

SEQ ID NO: 760749 - RNA, 19 nt, Artificial Sequence
  Description of Artificial Sequence: Synthetic oligonucleotide
uguccuuagagaaacgguu

SEQ ID NO: 760750 - RNA, 19 nt, Artificial Sequence
  Description of Artificial Sequence: Synthetic oligonucleotide
gauaagugcaccagucucc

SEQ ID NO: 760751 - RNA, 19 nt, Artificial Sequence
  Description of Artificial Sequence: Synthetic oligonucleotide
acuaaggaccuuaaaaucu

SEQ ID NO: 760752 - RNA, 19 nt, Artificial Sequence
  Description of Artificial Sequence: Synthetic oligonucleotide
uucuuaucacuaaggaccu

SEQ ID NO: 760753 - RNA, 19 nt, Artificial Sequence
  Description of Artificial Sequence: Synthetic oligonucleotide
acugaauaguuccggaacu

SEQ ID NO: 760754 - RNA, 19 nt, Artificial Sequence
  Description of Artificial Sequence: Synthetic oligonucleotide
ucuucaauucggccauagg

SEQ ID NO: 760755 - RNA, 19 nt, Artificial Sequence
  Description of Artificial Sequence: Synthetic oligonucleotide
uugauaagugcaccagucu

SEQ ID NO: 760756 - RNA, 19 nt, Artificial Sequence
  Description of Artificial Sequence: Synthetic oligonucleotide
cuuccgaccaccaugguga

SEQ ID NO: 760757 - RNA, 19 nt, Artificial Sequence
  Description of Artificial Sequence: Synthetic oligonucleotide
uccuaagguagcauagaca

SEQ ID NO: 760758 - RNA, 19 nt, Artificial Sequence
  Description of Artificial Sequence: Synthetic oligonucleotide
gaaacgguugaggaugcgg

SEQ ID NO: 760759 - RNA, 19 nt, Artificial Sequence
  Description of Artificial Sequence: Synthetic oligonucleotide
ugcaacagagcugagugca

SEQ ID NO: 760760 - RNA, 19 nt, Artificial Sequence
  Description of Artificial Sequence: Synthetic oligonucleotide
gaacgaaucuuguugugca

SEQ ID NO: 760761 - RNA, 19 nt, Artificial Sequence
  Description of Artificial Sequence: Synthetic oligonucleotide
caauucaaagccaagguua

SEQ ID NO: 760762 - RNA, 19 nt, Artificial Sequence
  Description of Artificial Sequence: Synthetic oligonucleotide
ucguaguccaugauugugu

SEQ ID NO: 760763 - RNA, 19 nt, Artificial Sequence
  Description of Artificial Sequence: Synthetic oligonucleotide
uaccccuuuguccaagacc

SEQ ID NO: 760764 - RNA, 19 nt, Artificial Sequence
  Description of Artificial Sequence: Synthetic oligonucleotide
ggcguugugucaaagaagg

SEQ ID NO: 760765 - RNA, 19 nt, Artificial Sequence
  Description of Artificial Sequence: Synthetic oligonucleotide
gauagcuagagugguguag

SEQ ID NO: 760766 - RNA, 19 nt, Artificial Sequence
  Description of Artificial Sequence: Synthetic oligonucleotide
uucguaucauccaauucaa

SEQ ID NO: 760767 - RNA, 19 nt, Artificial Sequence
  Description of Artificial Sequence: Synthetic oligonucleotide
auagacaccuagccuuugg

SEQ ID NO: 760768 - RNA, 19 nt, Artificial Sequence
  Description of Artificial Sequence: Synthetic oligonucleotide
ugagccacacauuggcucc

SEQ ID NO: 760769 - RNA, 19 nt, Artificial Sequence
  Description of Artificial Sequence: Synthetic oligonucleotide
ggaauugaacagcaugagg

SEQ ID NO: 760770 - RNA, 19 nt, Artificial Sequence
  Description of Artificial Sequence: Synthetic oligonucleotide
aagugcaccagucuccuuu

SEQ ID NO: 760771 - RNA, 19 nt, Artificial Sequence
  Description of Artificial Sequence: Synthetic oligonucleotide
ugaauaguuccggaacucc

SEQ ID NO: 760772 - RNA, 19 nt, Artificial Sequence
  Description of Artificial Sequence: Synthetic oligonucleotide
aucuuguugugcaacagag

SEQ ID NO: 760773 - RNA, 19 nt, Artificial Sequence
  Description of Artificial Sequence: Synthetic oligonucleotide
cuaacucaaggcccgggcg

SEQ ID NO: 760774 - RNA, 19 nt, Artificial Sequence
  Description of Artificial Sequence: Synthetic oligonucleotide
acguugaguccgucaaugc

SEQ ID NO: 760775 - RNA, 19 nt, Artificial Sequence
  Description of Artificial Sequence: Synthetic oligonucleotide
auauuagauuccaagucug

SEQ ID NO: 760776 - RNA, 19 nt, Artificial Sequence
  Description of Artificial Sequence: Synthetic oligonucleotide
ucggccauugaccaccgca

SEQ ID NO: 760777 - RNA, 19 nt, Artificial Sequence
  Description of Artificial Sequence: Synthetic oligonucleotide
cacugaauaguuccggaac

SEQ ID NO: 760778 - RNA, 19 nt, Artificial Sequence
  Description of Artificial Sequence: Synthetic oligonucleotide
aauucggccauaggccggg

SEQ ID NO: 760779 - RNA, 19 nt, Artificial Sequence
  Description of Artificial Sequence: Synthetic oligonucleotide
guaugagcucuucugguug

SEQ ID NO: 760780 - RNA, 19 nt, Artificial Sequence
  Description of Artificial Sequence: Synthetic oligonucleotide
uucagagcacucgaagucc

SEQ ID NO: 760781 - RNA, 19 nt, Artificial Sequence
  Description of Artificial Sequence: Synthetic oligonucleotide
uugaggaugcggccugagg

SEQ ID NO: 760782 - RNA, 19 nt, Artificial Sequence
  Description of Artificial Sequence: Synthetic oligonucleotide
uuccccacgaacuccacgu

SEQ ID NO: 760783 - RNA, 19 nt, Artificial Sequence
  Description of Artificial Sequence: Synthetic oligonucleotide
gaagccgcacuuuggcccg

SEQ ID NO: 760784 - RNA, 19 nt, Artificial Sequence
  Description of Artificial Sequence: Synthetic oligonucleotide
uagcauagacaccuagccu

SEQ ID NO: 760785 - RNA, 19 nt, Artificial Sequence
  Description of Artificial Sequence: Synthetic oligonucleotide
auguauccuaggcgagucc

SEQ ID NO: 760786 - RNA, 19 nt, Artificial Sequence
  Description of Artificial Sequence: Synthetic oligonucleotide
cguaucauccaauucaaag

SEQ ID NO: 760787 - RNA, 19 nt, Artificial Sequence
  Description of Artificial Sequence: Synthetic oligonucleotide
gccaagguuaucuguaagg

SEQ ID NO: 760788 - RNA, 19 nt, Artificial Sequence
  Description of Artificial Sequence: Synthetic oligonucleotide
cucuuggacaccaggccgg

SEQ ID NO: 760789 - RNA, 19 nt, Artificial Sequence
  Description of Artificial Sequence: Synthetic oligonucleotide
uuguccaccuucuuaucac

SEQ ID NO: 760790 - RNA, 19 nt, Artificial Sequence
  Description of Artificial Sequence: Synthetic oligonucleotide
caggauucggaagaggcag

SEQ ID NO: 760791 - RNA, 19 nt, Artificial Sequence
  Description of Artificial Sequence: Synthetic oligonucleotide
acuuccgaccaccauggug

SEQ ID NO: 760792 - RNA, 19 nt, Artificial Sequence
  Description of Artificial Sequence: Synthetic oligonucleotide
agucugacaucauucguau

SEQ ID NO: 760793 - RNA, 19 nt, Artificial Sequence
  Description of Artificial Sequence: Synthetic oligonucleotide
uagagugguguagaguccc

SEQ ID NO: 760794 - RNA, 19 nt, Artificial Sequence
  Description of Artificial Sequence: Synthetic oligonucleotide
aaagccaagguuaucugua

SEQ ID NO: 760795 - RNA, 19 nt, Artificial Sequence
  Description of Artificial Sequence: Synthetic oligonucleotide
uuguaguauuccuaaggua

SEQ ID NO: 760796 - RNA, 19 nt, Artificial Sequence
  Description of Artificial Sequence: Synthetic oligonucleotide
cagucgucaaacuggguac

SEQ ID NO: 760797 - RNA, 19 nt, Artificial Sequence
  Description of Artificial Sequence: Synthetic oligonucleotide
caaauucagcuacuacccc

SEQ ID NO: 760798 - RNA, 19 nt, Artificial Sequence
  Description of Artificial Sequence: Synthetic oligonucleotide
acaaaugagugcagguggg

SEQ ID NO: 760799 - RNA, 19 nt, Artificial Sequence
  Description of Artificial Sequence: Synthetic oligonucleotide
uguauccuaggcgaguccu

SEQ ID NO: 760800 - RNA, 19 nt, Artificial Sequence
  Description of Artificial Sequence: Synthetic oligonucleotide
gguggccucgucuaaaacc

SEQ ID NO: 760801 - RNA, 19 nt, Artificial Sequence
  Description of Artificial Sequence: Synthetic oligonucleotide
uagagaaacgguugaggau

SEQ ID NO: 760802 - RNA, 19 nt, Artificial Sequence
  Description of Artificial Sequence: Synthetic oligonucleotide
uuaucuccgccuucagagc

SEQ ID NO: 760803 - RNA, 19 nt, Artificial Sequence
  Description of Artificial Sequence: Synthetic oligonucleotide
uggcauaaucccagaacac

SEQ ID NO: 760804 - RNA, 19 nt, Artificial Sequence
  Description of Artificial Sequence: Synthetic oligonucleotide
cauacaggaggcagauagc

SEQ ID NO: 760805 - RNA, 19 nt, Artificial Sequence
  Description of Artificial Sequence: Synthetic oligonucleotide
agaacacgcucaucuucac

SEQ ID NO: 760806 - RNA, 19 nt, Artificial Sequence
  Description of Artificial Sequence: Synthetic oligonucleotide
ucggccauaggccgggaug

SEQ ID NO: 760807 - RNA, 19 nt, Artificial Sequence
  Description of Artificial Sequence: Synthetic oligonucleotide
cuagagugguguagagucc

SEQ ID NO: 760808 - RNA, 19 nt, Artificial Sequence
  Description of Artificial Sequence: Synthetic oligonucleotide
aaggaccuuaaaaucuuca

SEQ ID NO: 760809 - RNA, 19 nt, Artificial Sequence
  Description of Artificial Sequence: Synthetic oligonucleotide
ucguggaggccaaugugug

SEQ ID NO: 760810 - RNA, 19 nt, Artificial Sequence
  Description of Artificial Sequence: Synthetic oligonucleotide
acacuuccgaccaccaugg

SEQ ID NO: 760811 - RNA, 19 nt, Artificial Sequence
  Description of Artificial Sequence: Synthetic oligonucleotide
aggaccuuaaaaucuucaa

SEQ ID NO: 760812 - RNA, 19 nt, Artificial Sequence
  Description of Artificial Sequence: Synthetic oligonucleotide
ucauucguaucauccaauu

SEQ ID NO: 760813 - RNA, 19 nt, Artificial Sequence
  Description of Artificial Sequence: Synthetic oligonucleotide
aagaaggacuguggcgaac

SEQ ID NO: 760814 - RNA, 19 nt, Artificial Sequence
  Description of Artificial Sequence: Synthetic oligonucleotide
aagucugacaucauucgua

SEQ ID NO: 760815 - RNA, 19 nt, Artificial Sequence
  Description of Artificial Sequence: Synthetic oligonucleotide
gucuaaaaccaggacucgg

SEQ ID NO: 760816 - RNA, 19 nt, Artificial Sequence
  Description of Artificial Sequence: Synthetic oligonucleotide
auagcuagagugguguaga

SEQ ID NO: 760817 - RNA, 19 nt, Artificial Sequence
  Description of Artificial Sequence: Synthetic oligonucleotide
agguagcauagacaccuag

SEQ ID NO: 760818 - RNA, 19 nt, Artificial Sequence
  Description of Artificial Sequence: Synthetic oligonucleotide
agaacgcaggucguggagg

SEQ ID NO: 760819 - RNA, 19 nt, Artificial Sequence
  Description of Artificial Sequence: Synthetic oligonucleotide
ucgguuggaggcgauguag

SEQ ID NO: 760820 - RNA, 19 nt, Artificial Sequence
  Description of Artificial Sequence: Synthetic oligonucleotide
guaacggccaaaggggucc

SEQ ID NO: 760821 - RNA, 19 nt, Artificial Sequence
  Description of Artificial Sequence: Synthetic oligonucleotide
uccgccuucagagcacucg

SEQ ID NO: 760822 - RNA, 19 nt, Artificial Sequence
  Description of Artificial Sequence: Synthetic oligonucleotide
gaggaugcggccugagggc

SEQ ID NO: 760823 - RNA, 19 nt, Artificial Sequence
  Description of Artificial Sequence: Synthetic oligonucleotide
gccgggaugacacuggugc

SEQ ID NO: 760824 - RNA, 19 nt, Artificial Sequence
  Description of Artificial Sequence: Synthetic oligonucleotide
ucgaaguccaggccugcug

SEQ ID NO: 760825 - RNA, 19 nt, Artificial Sequence
  Description of Artificial Sequence: Synthetic oligonucleotide
uguggcgaacgaaucuugu

SEQ ID NO: 760826 - RNA, 19 nt, Artificial Sequence
  Description of Artificial Sequence: Synthetic oligonucleotide
auaguuccggaacuccacu

SEQ ID NO: 760827 - RNA, 19 nt, Artificial Sequence
  Description of Artificial Sequence: Synthetic oligonucleotide
uccgucaaugcagaucuca

SEQ ID NO: 760828 - RNA, 19 nt, Artificial Sequence
  Description of Artificial Sequence: Synthetic oligonucleotide
agguguuguucugucggcc

SEQ ID NO: 760829 - RNA, 19 nt, Artificial Sequence
  Description of Artificial Sequence: Synthetic oligonucleotide
augagugcaggugggacag

SEQ ID NO: 760830 - RNA, 19 nt, Artificial Sequence
  Description of Artificial Sequence: Synthetic oligonucleotide
uggaguacuccuugacucu

SEQ ID NO: 760831 - RNA, 19 nt, Artificial Sequence
  Description of Artificial Sequence: Synthetic oligonucleotide
gagaacgcaggucguggag

SEQ ID NO: 760832 - RNA, 19 nt, Artificial Sequence
  Description of Artificial Sequence: Synthetic oligonucleotide
ugcuuucggaccucguaca

SEQ ID NO: 760833 - RNA, 19 nt, Artificial Sequence
  Description of Artificial Sequence: Synthetic oligonucleotide
cauucguaucauccaauuc

SEQ ID NO: 760834 - RNA, 19 nt, Artificial Sequence
  Description of Artificial Sequence: Synthetic oligonucleotide
agacaccuagccuuuggga

SEQ ID NO: 760835 - RNA, 19 nt, Artificial Sequence
  Description of Artificial Sequence: Synthetic oligonucleotide
augguacucaucugucuca

SEQ ID NO: 760836 - RNA, 19 nt, Artificial Sequence
  Description of Artificial Sequence: Synthetic oligonucleotide
ugucuccgaaaagugggag

SEQ ID NO: 760837 - RNA, 19 nt, Artificial Sequence
  Description of Artificial Sequence: Synthetic oligonucleotide
cauuggcuccgauggaagc

SEQ ID NO: 760838 - RNA, 19 nt, Artificial Sequence
  Description of Artificial Sequence: Synthetic oligonucleotide
uauccuaggcgaguccugc

SEQ ID NO: 760839 - RNA, 19 nt, Artificial Sequence
  Description of Artificial Sequence: Synthetic oligonucleotide
ugagauuaucuccgccuuc

SEQ ID NO: 760840 - RNA, 19 nt, Artificial Sequence
  Description of Artificial Sequence: Synthetic oligonucleotide
cuuguaguauuccuaaggu

SEQ ID NO: 760841 - RNA, 19 nt, Artificial Sequence
  Description of Artificial Sequence: Synthetic oligonucleotide
guuaucuguaaggcauagg

SEQ ID NO: 760842 - RNA, 19 nt, Artificial Sequence
  Description of Artificial Sequence: Synthetic oligonucleotide
gaggccaaugugugccacg

SEQ ID NO: 760843 - RNA, 19 nt, Artificial Sequence
  Description of Artificial Sequence: Synthetic oligonucleotide
auaugucucuuggacacca

SEQ ID NO: 760844 - RNA, 19 nt, Artificial Sequence
  Description of Artificial Sequence: Synthetic oligonucleotide
cuagaaccucaucaaugac

SEQ ID NO: 760845 - RNA, 19 nt, Artificial Sequence
  Description of Artificial Sequence: Synthetic oligonucleotide
gagguguuguucugucggc

SEQ ID NO: 760846 - RNA, 19 nt, Artificial Sequence
  Description of Artificial Sequence: Synthetic oligonucleotide
aauucagcuacuaccccuu

SEQ ID NO: 760847 - RNA, 19 nt, Artificial Sequence
  Description of Artificial Sequence: Synthetic oligonucleotide
caauucggccauaggccgg

SEQ ID NO: 760848 - RNA, 19 nt, Artificial Sequence
  Description of Artificial Sequence: Synthetic oligonucleotide
agucgucaaacuggguacg

SEQ ID NO: 760849 - RNA, 19 nt, Artificial Sequence
  Description of Artificial Sequence: Synthetic oligonucleotide
uuuggcccgcauacaggag

SEQ ID NO: 760850 - RNA, 19 nt, Artificial Sequence
  Description of Artificial Sequence: Synthetic oligonucleotide
guuccggaacuccacugcc

SEQ ID NO: 760851 - RNA, 19 nt, Artificial Sequence
  Description of Artificial Sequence: Synthetic oligonucleotide
cucccaaucacugcaaaca

SEQ ID NO: 760852 - RNA, 19 nt, Artificial Sequence
  Description of Artificial Sequence: Synthetic oligonucleotide
cucgucuaaaaccaggacu

SEQ ID NO: 760853 - RNA, 19 nt, Artificial Sequence
  Description of Artificial Sequence: Synthetic oligonucleotide
agauuaucuccgccuucag

SEQ ID NO: 760854 - RNA, 19 nt, Artificial Sequence
  Description of Artificial Sequence: Synthetic oligonucleotide
cacugagauuaucuccgcc

SEQ ID NO: 760855 - RNA, 19 nt, Artificial Sequence
  Description of Artificial Sequence: Synthetic oligonucleotide
gcauaaucccagaacacgc

SEQ ID NO: 760856 - RNA, 19 nt, Artificial Sequence
  Description of Artificial Sequence: Synthetic oligonucleotide
uccgauggaagccgcacuu

SEQ ID NO: 760857 - RNA, 19 nt, Artificial Sequence
  Description of Artificial Sequence: Synthetic oligonucleotide
cacguugaguccgucaaug

SEQ ID NO: 760858 - RNA, 19 nt, Artificial Sequence
  Description of Artificial Sequence: Synthetic oligonucleotide
cacgcaguuccccacgaac

SEQ ID NO: 760859 - RNA, 19 nt, Artificial Sequence
  Description of Artificial Sequence: Synthetic oligonucleotide
gugaccgacugauggauuc

SEQ ID NO: 760860 - RNA, 19 nt, Artificial Sequence
  Description of Artificial Sequence: Synthetic oligonucleotide
agaugggugaccgacugau

SEQ ID NO: 760861 - RNA, 19 nt, Artificial Sequence
  Description of Artificial Sequence: Synthetic oligonucleotide
aacgcaggucguggaggcc

SEQ ID NO: 760862 - RNA, 19 nt, Artificial Sequence
  Description of Artificial Sequence: Synthetic oligonucleotide
ucggaccucguacauggau

SEQ ID NO: 760863 - RNA, 19 nt, Artificial Sequence
  Description of Artificial Sequence: Synthetic oligonucleotide
cacaaugaagagcggcgug

SEQ ID NO: 760864 - RNA, 19 nt, Artificial Sequence
  Description of Artificial Sequence: Synthetic oligonucleotide
ugggugaccgacugaugga

SEQ ID NO: 760865 - RNA, 19 nt, Artificial Sequence
  Description of Artificial Sequence: Synthetic oligonucleotide
gaacuccacguggacaccc

SEQ ID NO: 760866 - RNA, 19 nt, Artificial Sequence
  Description of Artificial Sequence: Synthetic oligonucleotide
gaacuccacugccccaugc

SEQ ID NO: 760867 - RNA, 19 nt, Artificial Sequence
  Description of Artificial Sequence: Synthetic oligonucleotide
ugcaaugagguugguugga

SEQ ID NO: 760868 - RNA, 19 nt, Artificial Sequence
  Description of Artificial Sequence: Synthetic oligonucleotide
ugucggccauugaccaccg

SEQ ID NO: 760869 - RNA, 19 nt, Artificial Sequence
  Description of Artificial Sequence: Synthetic oligonucleotide
cuggacacuuccgaccacc

SEQ ID NO: 760870 - RNA, 19 nt, Artificial Sequence
  Description of Artificial Sequence: Synthetic oligonucleotide
ugccuuugucaccugcauc

SEQ ID NO: 760871 - RNA, 19 nt, Artificial Sequence
  Description of Artificial Sequence: Synthetic oligonucleotide
guugguuggagaaucaaau

SEQ ID NO: 760872 - RNA, 19 nt, Artificial Sequence
  Description of Artificial Sequence: Synthetic oligonucleotide
uucaugcgcaggguccccg

SEQ ID NO: 760873 - RNA, 19 nt, Artificial Sequence
  Description of Artificial Sequence: Synthetic oligonucleotide
accucguacauggauggcu

SEQ ID NO: 760874 - RNA, 19 nt, Artificial Sequence
  Description of Artificial Sequence: Synthetic oligonucleotide
uccuaggcgaguccugcau

SEQ ID NO: 760875 - RNA, 19 nt, Artificial Sequence
  Description of Artificial Sequence: Synthetic oligonucleotide
ucguaucauccaauucaaa

SEQ ID NO: 760876 - RNA, 19 nt, Artificial Sequence
  Description of Artificial Sequence: Synthetic oligonucleotide
cugaauaguuccggaacuc

SEQ ID NO: 760877 - RNA, 19 nt, Artificial Sequence
  Description of Artificial Sequence: Synthetic oligonucleotide
aggacuguggcgaacgaau

SEQ ID NO: 760878 - RNA, 19 nt, Artificial Sequence
  Description of Artificial Sequence: Synthetic oligonucleotide
ugaccgacugauggauucc

SEQ ID NO: 760879 - RNA, 19 nt, Artificial Sequence
  Description of Artificial Sequence: Synthetic oligonucleotide
gugcaacagagcugagugc

SEQ ID NO: 760880 - RNA, 19 nt, Artificial Sequence
  Description of Artificial Sequence: Synthetic oligonucleotide
cuguggcgaacgaaucuug

SEQ ID NO: 760881 - RNA, 19 nt, Artificial Sequence
  Description of Artificial Sequence: Synthetic oligonucleotide
gcuaugauauuagauucca

SEQ ID NO: 760882 - RNA, 19 nt, Artificial Sequence
  Description of Artificial Sequence: Synthetic oligonucleotide
gcgauguagggguaugagc

SEQ ID NO: 760883 - RNA, 19 nt, Artificial Sequence
  Description of Artificial Sequence: Synthetic oligonucleotide
gaguccgucaaugcagauc

SEQ ID NO: 760884 - RNA, 19 nt, Artificial Sequence
  Description of Artificial Sequence: Synthetic oligonucleotide
gucgucaaacuggguacgg

SEQ ID NO: 760885 - RNA, 19 nt, Artificial Sequence
  Description of Artificial Sequence: Synthetic oligonucleotide
cauaugucucuuggacacc

SEQ ID NO: 760886 - RNA, 19 nt, Artificial Sequence
  Description of Artificial Sequence: Synthetic oligonucleotide
cuggguacggauggugccc

SEQ ID NO: 760887 - RNA, 19 nt, Artificial Sequence
  Description of Artificial Sequence: Synthetic oligonucleotide
ugccacguugaguccguca

SEQ ID NO: 760888 - RNA, 19 nt, Artificial Sequence
  Description of Artificial Sequence: Synthetic oligonucleotide
acccuuggaauguauccua

SEQ ID NO: 760889 - RNA, 19 nt, Artificial Sequence
  Description of Artificial Sequence: Synthetic oligonucleotide
ccuuggaauguauccuagg

SEQ ID NO: 760890 - RNA, 19 nt, Artificial Sequence
  Description of Artificial Sequence: Synthetic oligonucleotide
ugaccacaaggguggagau

SEQ ID NO: 760891 - RNA, 19 nt, Artificial Sequence
  Description of Artificial Sequence: Synthetic oligonucleotide
ucgucaaacuggguacgga

SEQ ID NO: 760892 - RNA, 19 nt, Artificial Sequence
  Description of Artificial Sequence: Synthetic oligonucleotide
agugcggcaaagagcacca

SEQ ID NO: 760893 - RNA, 19 nt, Artificial Sequence
  Description of Artificial Sequence: Synthetic oligonucleotide
caaccacaaugaagagcgg

SEQ ID NO: 760894 - RNA, 19 nt, Artificial Sequence
  Description of Artificial Sequence: Synthetic oligonucleotide
acucgaaguccaggccugc

SEQ ID NO: 760895 - RNA, 19 nt, Artificial Sequence
  Description of Artificial Sequence: Synthetic oligonucleotide
ggcgguaccucacugaaua

SEQ ID NO: 760896 - RNA, 19 nt, Artificial Sequence
  Description of Artificial Sequence: Synthetic oligonucleotide
acuguggcgaacgaaucuu

SEQ ID NO: 760897 - RNA, 19 nt, Artificial Sequence
  Description of Artificial Sequence: Synthetic oligonucleotide
cuaugauauuagauuccaa

SEQ ID NO: 760898 - RNA, 19 nt, Artificial Sequence
  Description of Artificial Sequence: Synthetic oligonucleotide
ucugucggccauugaccac

SEQ ID NO: 760899 - RNA, 19 nt, Artificial Sequence
  Description of Artificial Sequence: Synthetic oligonucleotide
uacuaccccuuuguccaag

SEQ ID NO: 760900 - RNA, 19 nt, Artificial Sequence
  Description of Artificial Sequence: Synthetic oligonucleotide
gcggcaaagagcaccacgc

SEQ ID NO: 760901 - RNA, 19 nt, Artificial Sequence
  Description of Artificial Sequence: Synthetic oligonucleotide
agaaacgguugaggaugcg

SEQ ID NO: 760902 - RNA, 19 nt, Artificial Sequence
  Description of Artificial Sequence: Synthetic oligonucleotide
ggucguggaggccaaugug

SEQ ID NO: 760903 - RNA, 19 nt, Artificial Sequence
  Description of Artificial Sequence: Synthetic oligonucleotide
cuuggaguacuccuugacu

SEQ ID NO: 760904 - RNA, 19 nt, Artificial Sequence
  Description of Artificial Sequence: Synthetic oligonucleotide
uccccacgaacuccacgug

SEQ ID NO: 760905 - RNA, 19 nt, Artificial Sequence
  Description of Artificial Sequence: Synthetic oligonucleotide
gggagguguuguucugucg

SEQ ID NO: 760906 - RNA, 19 nt, Artificial Sequence
  Description of Artificial Sequence: Synthetic oligonucleotide
cacuaacucaaggcccggg

SEQ ID NO: 760907 - RNA, 19 nt, Artificial Sequence
  Description of Artificial Sequence: Synthetic oligonucleotide
ggacaaccacaaugaagag

SEQ ID NO: 760908 - RNA, 19 nt, Artificial Sequence
  Description of Artificial Sequence: Synthetic oligonucleotide
ucagaacagugcagucguc

SEQ ID NO: 760909 - RNA, 19 nt, Artificial Sequence
  Description of Artificial Sequence: Synthetic oligonucleotide
gcugagugcagcaggcggg

SEQ ID NO: 760910 - RNA, 19 nt, Artificial Sequence
  Description of Artificial Sequence: Synthetic oligonucleotide
augauuguguucagccggu

SEQ ID NO: 760911 - RNA, 19 nt, Artificial Sequence
  Description of Artificial Sequence: Synthetic oligonucleotide
acccugucguaguccauga

SEQ ID NO: 760912 - RNA, 19 nt, Artificial Sequence
  Description of Artificial Sequence: Synthetic oligonucleotide
gaccacaaggguggagaug

SEQ ID NO: 760913 - RNA, 19 nt, Artificial Sequence
  Description of Artificial Sequence: Synthetic oligonucleotide
ccgacugauggauuccagc

SEQ ID NO: 760914 - RNA, 19 nt, Artificial Sequence
  Description of Artificial Sequence: Synthetic oligonucleotide
cugucucaucuuugauaag

SEQ ID NO: 760915 - RNA, 19 nt, Artificial Sequence
  Description of Artificial Sequence: Synthetic oligonucleotide
uguagggguaugagcucuu

SEQ ID NO: 760916 - RNA, 19 nt, Artificial Sequence
  Description of Artificial Sequence: Synthetic oligonucleotide
gaauguauccuaggcgagu

SEQ ID NO: 760917 - RNA, 19 nt, Artificial Sequence
  Description of Artificial Sequence: Synthetic oligonucleotide
ucaugcgcaggguccccga

SEQ ID NO: 760918 - RNA, 19 nt, Artificial Sequence
  Description of Artificial Sequence: Synthetic oligonucleotide
gagugguguagagucccac

SEQ ID NO: 760919 - RNA, 19 nt, Artificial Sequence
  Description of Artificial Sequence: Synthetic oligonucleotide
gcgauggucagaacagugc

SEQ ID NO: 760920 - RNA, 19 nt, Artificial Sequence
  Description of Artificial Sequence: Synthetic oligonucleotide
ugccuguuacugucuccga

SEQ ID NO: 760921 - RNA, 19 nt, Artificial Sequence
  Description of Artificial Sequence: Synthetic oligonucleotide
ggaccuuaaaaucuucaau

SEQ ID NO: 760922 - RNA, 19 nt, Artificial Sequence
  Description of Artificial Sequence: Synthetic oligonucleotide
caccgcaucauuggcccag

SEQ ID NO: 760923 - RNA, 19 nt, Artificial Sequence
  Description of Artificial Sequence: Synthetic oligonucleotide
gauucggaagaggcagaga

SEQ ID NO: 760924 - RNA, 19 nt, Artificial Sequence
  Description of Artificial Sequence: Synthetic oligonucleotide
ggcgauguagggguaugag

SEQ ID NO: 760925 - RNA, 19 nt, Artificial Sequence
  Description of Artificial Sequence: Synthetic oligonucleotide
guaccucacugaauaguuc

SEQ ID NO: 760926 - RNA, 19 nt, Artificial Sequence
  Description of Artificial Sequence: Synthetic oligonucleotide
gcaaugagguugguuggag

SEQ ID NO: 760927 - RNA, 19 nt, Artificial Sequence
  Description of Artificial Sequence: Synthetic oligonucleotide
cugucuccgaaaaguggga

SEQ ID NO: 760928 - RNA, 19 nt, Artificial Sequence
  Description of Artificial Sequence: Synthetic oligonucleotide
guauccuaggcgaguccug

SEQ ID NO: 760929 - RNA, 19 nt, Artificial Sequence
  Description of Artificial Sequence: Synthetic oligonucleotide
ccucacugaauaguuccgg

SEQ ID NO: 760930 - RNA, 19 nt, Artificial Sequence
  Description of Artificial Sequence: Synthetic oligonucleotide
cagccaucgguuggaggcg

SEQ ID NO: 760931 - RNA, 19 nt, Artificial Sequence
  Description of Artificial Sequence: Synthetic oligonucleotide
auccuaggcgaguccugca

SEQ ID NO: 760932 - RNA, 19 nt, Artificial Sequence
  Description of Artificial Sequence: Synthetic oligonucleotide
ggggcuagaaccucaucaa

SEQ ID NO: 760933 - RNA, 19 nt, Artificial Sequence
  Description of Artificial Sequence: Synthetic oligonucleotide
uggguacggauggugcccu

SEQ ID NO: 760934 - RNA, 19 nt, Artificial Sequence
  Description of Artificial Sequence: Synthetic oligonucleotide
ucuuggacaccaggccggu

SEQ ID NO: 760935 - RNA, 19 nt, Artificial Sequence
  Description of Artificial Sequence: Synthetic oligonucleotide
gccucuggccaacacugag

SEQ ID NO: 760936 - RNA, 19 nt, Artificial Sequence
  Description of Artificial Sequence: Synthetic oligonucleotide
gcgaguccugcaucuuugg

SEQ ID NO: 760937 - RNA, 19 nt, Artificial Sequence
  Description of Artificial Sequence: Synthetic oligonucleotide
gaccgacugauggauucca

SEQ ID NO: 760938 - RNA, 19 nt, Artificial Sequence
  Description of Artificial Sequence: Synthetic oligonucleotide
agaaacccuuggaauguau

SEQ ID NO: 760939 - RNA, 19 nt, Artificial Sequence
  Description of Artificial Sequence: Synthetic oligonucleotide
cgaacgaaucuuguugugc

SEQ ID NO: 760940 - RNA, 19 nt, Artificial Sequence
  Description of Artificial Sequence: Synthetic oligonucleotide
caugcgcaggguccccgag

SEQ ID NO: 760941 - RNA, 19 nt, Artificial Sequence
  Description of Artificial Sequence: Synthetic oligonucleotide
gagcacgggagcccuccac

SEQ ID NO: 760942 - RNA, 19 nt, Artificial Sequence
  Description of Artificial Sequence: Synthetic oligonucleotide
cucuugcggagcagggcuc

SEQ ID NO: 760943 - RNA, 19 nt, Artificial Sequence
  Description of Artificial Sequence: Synthetic oligonucleotide
cuaggcgaguccugcaucu

SEQ ID NO: 760944 - RNA, 19 nt, Artificial Sequence
  Description of Artificial Sequence: Synthetic oligonucleotide
caaaugagugcagguggga

SEQ ID NO: 760945 - RNA, 19 nt, Artificial Sequence
  Description of Artificial Sequence: Synthetic oligonucleotide
cuccgaaaagugggagaag

SEQ ID NO: 760946 - RNA, 19 nt, Artificial Sequence
  Description of Artificial Sequence: Synthetic oligonucleotide
augcgcaggguccccgaga

SEQ ID NO: 760947 - RNA, 19 nt, Artificial Sequence
  Description of Artificial Sequence: Synthetic oligonucleotide
agguugguuggagaaucaa

SEQ ID NO: 760948 - RNA, 19 nt, Artificial Sequence
  Description of Artificial Sequence: Synthetic oligonucleotide
ggcgaacgaaucuuguugu

SEQ ID NO: 760949 - RNA, 19 nt, Artificial Sequence
  Description of Artificial Sequence: Synthetic oligonucleotide
uguuguucugucggccauu

SEQ ID NO: 760950 - RNA, 19 nt, Artificial Sequence
  Description of Artificial Sequence: Synthetic oligonucleotide
uucggccauaggccgggau

SEQ ID NO: 760951 - RNA, 19 nt, Artificial Sequence
  Description of Artificial Sequence: Synthetic oligonucleotide
gucguggaggccaaugugu

SEQ ID NO: 760952 - RNA, 19 nt, Artificial Sequence
  Description of Artificial Sequence: Synthetic oligonucleotide
cagcuacuaccccuuuguc

SEQ ID NO: 760953 - RNA, 19 nt, Artificial Sequence
  Description of Artificial Sequence: Synthetic oligonucleotide
cacauugccugucucugcu

SEQ ID NO: 760954 - RNA, 19 nt, Artificial Sequence
  Description of Artificial Sequence: Synthetic oligonucleotide
cacgaacuccacguggaca

SEQ ID NO: 760955 - RNA, 19 nt, Artificial Sequence
  Description of Artificial Sequence: Synthetic oligonucleotide
aggguccccgagaacagga

SEQ ID NO: 760956 - RNA, 19 nt, Artificial Sequence
  Description of Artificial Sequence: Synthetic oligonucleotide
gcgaacgaaucuuguugug

SEQ ID NO: 760957 - RNA, 19 nt, Artificial Sequence
  Description of Artificial Sequence: Synthetic oligonucleotide
aggcgaguccugcaucuuu

SEQ ID NO: 760958 - RNA, 19 nt, Artificial Sequence
  Description of Artificial Sequence: Synthetic oligonucleotide
accgacugauggauuccag

SEQ ID NO: 760959 - RNA, 19 nt, Artificial Sequence
  Description of Artificial Sequence: Synthetic oligonucleotide
accgcaucauuggcccagg

SEQ ID NO: 760960 - RNA, 19 nt, Artificial Sequence
  Description of Artificial Sequence: Synthetic oligonucleotide
gguugguuggagaaucaaa

SEQ ID NO: 760961 - RNA, 19 nt, Artificial Sequence
  Description of Artificial Sequence: Synthetic oligonucleotide
ggagcccuuguaguauucc

SEQ ID NO: 760962 - RNA, 19 nt, Artificial Sequence
  Description of Artificial Sequence: Synthetic oligonucleotide
gccacguugaguccgucaa

SEQ ID NO: 760963 - RNA, 19 nt, Artificial Sequence
  Description of Artificial Sequence: Synthetic oligonucleotide
ccccacgaacuccacgugg

SEQ ID NO: 760964 - RNA, 19 nt, Artificial Sequence
  Description of Artificial Sequence: Synthetic oligonucleotide
gccuggacacuuccgacca

SEQ ID NO: 760965 - RNA, 19 nt, Artificial Sequence
  Description of Artificial Sequence: Synthetic oligonucleotide
aggauucggaagaggcaga

SEQ ID NO: 760966 - RNA, 19 nt, Artificial Sequence
  Description of Artificial Sequence: Synthetic oligonucleotide
acguggacacccagccauc

SEQ ID NO: 760967 - RNA, 19 nt, Artificial Sequence
  Description of Artificial Sequence: Synthetic oligonucleotide
cggaccucguacauggaug

SEQ ID NO: 760968 - RNA, 19 nt, Artificial Sequence
  Description of Artificial Sequence: Synthetic oligonucleotide
ugcgugggccagccuucug

SEQ ID NO: 760969 - RNA, 19 nt, Artificial Sequence
  Description of Artificial Sequence: Synthetic oligonucleotide
uuccgaccaccauggugaa

SEQ ID NO: 760970 - RNA, 19 nt, Artificial Sequence
  Description of Artificial Sequence: Synthetic oligonucleotide
ccucgucuaaaaccaggac

SEQ ID NO: 760971 - RNA, 19 nt, Artificial Sequence
  Description of Artificial Sequence: Synthetic oligonucleotide
agccggugggcgaugguca

SEQ ID NO: 760972 - RNA, 19 nt, Artificial Sequence
  Description of Artificial Sequence: Synthetic oligonucleotide
uaacggccaaaggggucca

SEQ ID NO: 760973 - RNA, 19 nt, Artificial Sequence
  Description of Artificial Sequence: Synthetic oligonucleotide
uccgaccaccauggugaag

SEQ ID NO: 760974 - RNA, 19 nt, Artificial Sequence
  Description of Artificial Sequence: Synthetic oligonucleotide
aggccgguucuggcuuucc

SEQ ID NO: 760975 - RNA, 19 nt, Artificial Sequence
  Description of Artificial Sequence: Synthetic oligonucleotide
gcgguaccucacugaauag

SEQ ID NO: 760976 - RNA, 19 nt, Artificial Sequence
  Description of Artificial Sequence: Synthetic oligonucleotide
aggcgauguagggguauga

SEQ ID NO: 760977 - RNA, 19 nt, Artificial Sequence
  Description of Artificial Sequence: Synthetic oligonucleotide
guagggguaugagcucuuc

SEQ ID NO: 760978 - RNA, 19 nt, Artificial Sequence
  Description of Artificial Sequence: Synthetic oligonucleotide
agguuaucuguaaggcaua

SEQ ID NO: 760979 - RNA, 19 nt, Artificial Sequence
  Description of Artificial Sequence: Synthetic oligonucleotide
guucaugcgcagggucccc

SEQ ID NO: 760980 - RNA, 19 nt, Artificial Sequence
  Description of Artificial Sequence: Synthetic oligonucleotide
ggcauaggacacagaaaga

SEQ ID NO: 760981 - RNA, 19 nt, Artificial Sequence
  Description of Artificial Sequence: Synthetic oligonucleotide
ugcggccugagggcguugu

SEQ ID NO: 760982 - RNA, 19 nt, Artificial Sequence
  Description of Artificial Sequence: Synthetic oligonucleotide
gcccgcauacaggaggcag

SEQ ID NO: 760983 - RNA, 19 nt, Artificial Sequence
  Description of Artificial Sequence: Synthetic oligonucleotide
cgaaucuuguugugcaaca

SEQ ID NO: 760984 - RNA, 19 nt, Artificial Sequence
  Description of Artificial Sequence: Synthetic oligonucleotide
gccucgucuaaaaccagga

SEQ ID NO: 760985 - RNA, 19 nt, Artificial Sequence
  Description of Artificial Sequence: Synthetic oligonucleotide
caucgguuggaggcgaugu

SEQ ID NO: 760986 - RNA, 19 nt, Artificial Sequence
  Description of Artificial Sequence: Synthetic oligonucleotide
ccgggaugacacuggugcc

SEQ ID NO: 760987 - RNA, 19 nt, Artificial Sequence
  Description of Artificial Sequence: Synthetic oligonucleotide
agccaucgguuggaggcga

SEQ ID NO: 760988 - RNA, 19 nt, Artificial Sequence
  Description of Artificial Sequence: Synthetic oligonucleotide
cgucuaaaaccaggacucg

SEQ ID NO: 760989 - RNA, 19 nt, Artificial Sequence
  Description of Artificial Sequence: Synthetic oligonucleotide
ggcucuugcggagcagggc

SEQ ID NO: 760990 - RNA, 19 nt, Artificial Sequence
  Description of Artificial Sequence: Synthetic oligonucleotide
guggcgaacgaaucuuguu

SEQ ID NO: 760991 - RNA, 19 nt, Artificial Sequence
  Description of Artificial Sequence: Synthetic oligonucleotide
ggccauugaccaccgcauc

SEQ ID NO: 760992 - RNA, 19 nt, Artificial Sequence
  Description of Artificial Sequence: Synthetic oligonucleotide
ccuaggcgaguccugcauc

SEQ ID NO: 760993 - RNA, 19 nt, Artificial Sequence
  Description of Artificial Sequence: Synthetic oligonucleotide
agcgguggccucgucuaaa

SEQ ID NO: 760994 - RNA, 19 nt, Artificial Sequence
  Description of Artificial Sequence: Synthetic oligonucleotide
gcacuaacucaaggcccgg

SEQ ID NO: 760995 - RNA, 19 nt, Artificial Sequence
  Description of Artificial Sequence: Synthetic oligonucleotide
caccauggugaaggcugac

SEQ ID NO: 760996 - RNA, 19 nt, Artificial Sequence
  Description of Artificial Sequence: Synthetic oligonucleotide
agcggcgugcuggccacga

SEQ ID NO: 760997 - RNA, 19 nt, Artificial Sequence
  Description of Artificial Sequence: Synthetic oligonucleotide
uaggcgaguccugcaucuu

SEQ ID NO: 760998 - RNA, 19 nt, Artificial Sequence
  Description of Artificial Sequence: Synthetic oligonucleotide
cccgcauacaggaggcaga

SEQ ID NO: 760999 - RNA, 19 nt, Artificial Sequence
  Description of Artificial Sequence: Synthetic oligonucleotide
cguggacacccagccaucg

SEQ ID NO: 761000 - RNA, 19 nt, Artificial Sequence
  Description of Artificial Sequence: Synthetic oligonucleotide
cgcaguuccccacgaacuc

SEQ ID NO: 761001 - RNA, 19 nt, Artificial Sequence
  Description of Artificial Sequence: Synthetic oligonucleotide
gucggccauugaccaccgc

SEQ ID NO: 761002 - RNA, 19 nt, Artificial Sequence
  Description of Artificial Sequence: Synthetic oligonucleotide
cuccgauggaagccgcacu

SEQ ID NO: 761003 - RNA, 19 nt, Artificial Sequence
  Description of Artificial Sequence: Synthetic oligonucleotide
cuccgccuucagagcacuc

SEQ ID NO: 761004 - RNA, 19 nt, Artificial Sequence
  Description of Artificial Sequence: Synthetic oligonucleotide
guucagccggugggcgaug

SEQ ID NO: 761005 - RNA, 19 nt, Artificial Sequence
  Description of Artificial Sequence: Synthetic oligonucleotide
ccugucguaguccaugauu

SEQ ID NO: 761006 - RNA, 19 nt, Artificial Sequence
  Description of Artificial Sequence: Synthetic oligonucleotide
gagcggcgugcuggccacg

SEQ ID NO: 761007 - RNA, 19 nt, Artificial Sequence
  Description of Artificial Sequence: Synthetic oligonucleotide
gcgguggccucgucuaaaa

SEQ ID NO: 761008 - RNA, 19 nt, Artificial Sequence
  Description of Artificial Sequence: Synthetic oligonucleotide
ggugggcgauggucagaac

SEQ ID NO: 761009 - RNA, 19 nt, Artificial Sequence
  Description of Artificial Sequence: Synthetic oligonucleotide
ccgccuucagagcacucga

SEQ ID NO: 761010 - RNA, 19 nt, Artificial Sequence
  Description of Artificial Sequence: Synthetic oligonucleotide
auucggccauaggccggga

SEQ ID NO: 761011 - RNA, 19 nt, Artificial Sequence
  Description of Artificial Sequence: Synthetic oligonucleotide
ggccgggaugacacuggug

SEQ ID NO: 761012 - RNA, 19 nt, Artificial Sequence
  Description of Artificial Sequence: Synthetic oligonucleotide
gcguugugucaaagaagga

SEQ ID NO: 761013 - RNA, 19 nt, Artificial Sequence
  Description of Artificial Sequence: Synthetic oligonucleotide
caggccgguucuggcuuuc

SEQ ID NO: 761014 - RNA, 19 nt, Artificial Sequence
  Description of Artificial Sequence: Synthetic oligonucleotide
gugcggcaaagagcaccac

SEQ ID NO: 761015 - RNA, 19 nt, Artificial Sequence
  Description of Artificial Sequence: Synthetic oligonucleotide
gggugaccgacugauggau

SEQ ID NO: 761016 - RNA, 19 nt, Artificial Sequence
  Description of Artificial Sequence: Synthetic oligonucleotide
ggagcacgggagcccucca

SEQ ID NO: 761017 - RNA, 19 nt, Artificial Sequence
  Description of Artificial Sequence: Synthetic oligonucleotide
guccgucaaugcagaucuc

SEQ ID NO: 761018 - RNA, 19 nt, Artificial Sequence
  Description of Artificial Sequence: Synthetic oligonucleotide
ccgcaucauuggcccaggc

SEQ ID NO: 761019 - RNA, 19 nt, Artificial Sequence
  Description of Artificial Sequence: Synthetic oligonucleotide
cccgggcgguaccucacug

SEQ ID NO: 761020 - RNA, 19 nt, Artificial Sequence
  Description of Artificial Sequence: Synthetic oligonucleotide
cucgaaguccaggccugcu

SEQ ID NO: 761021 - RNA, 19 nt, Artificial Sequence
  Description of Artificial Sequence: Synthetic oligonucleotide
ggacacuuccgaccaccau

SEQ ID NO: 761022 - RNA, 19 nt, Artificial Sequence
  Description of Artificial Sequence: Synthetic oligonucleotide
ggccauaggccgggaugac

SEQ ID NO: 761023 - RNA, 19 nt, Artificial Sequence
  Description of Artificial Sequence: Synthetic oligonucleotide
ccgggcgguaccucacuga

SEQ ID NO: 761024 - RNA, 19 nt, Artificial Sequence
  Description of Artificial Sequence: Synthetic oligonucleotide
gcauagacaccuagccuuu

SEQ ID NO: 761025 - RNA, 19 nt, Artificial Sequence
  Description of Artificial Sequence: Synthetic oligonucleotide
ccaugcgugggccagccuu

SEQ ID NO: 761026 - RNA, 19 nt, Artificial Sequence
  Description of Artificial Sequence: Synthetic oligonucleotide
cagcgguggccucgucuaa

SEQ ID NO: 761027 - RNA, 19 nt, Artificial Sequence
  Description of Artificial Sequence: Synthetic oligonucleotide
gugccacguugaguccguc

SEQ ID NO: 761028 - RNA, 19 nt, Artificial Sequence
  Description of Artificial Sequence: Synthetic oligonucleotide
ggaggcgauguagggguau

SEQ ID NO: 761029 - RNA, 19 nt, Artificial Sequence
  Description of Artificial Sequence: Synthetic oligonucleotide
cgggcgguaccucacugaa

SEQ ID NO: 761030 - RNA, 19 nt, Artificial Sequence
  Description of Artificial Sequence: Synthetic oligonucleotide
gcacacgcagagucagguu

SEQ ID NO: 761031 - RNA, 19 nt, Artificial Sequence
  Description of Artificial Sequence: Synthetic oligonucleotide
ggugaccgacugauggauu

SEQ ID NO: 761032 - RNA, 19 nt, Artificial Sequence
  Description of Artificial Sequence: Synthetic oligonucleotide
cacuuccgaccaccauggu

SEQ ID NO: 761033 - RNA, 19 nt, Artificial Sequence
  Description of Artificial Sequence: Synthetic oligonucleotide
ccaccgcaucauuggccca

SEQ ID NO: 761034 - RNA, 19 nt, Artificial Sequence
  Description of Artificial Sequence: Synthetic oligonucleotide
cgguaccucacugaauagu

SEQ ID NO: 761035 - RNA, 19 nt, Artificial Sequence
  Description of Artificial Sequence: Synthetic oligonucleotide
cugccgggauguggccaca

SEQ ID NO: 761036 - RNA, 19 nt, Artificial Sequence
  Description of Artificial Sequence: Synthetic oligonucleotide
ccgcacuuuggcccgcaua

SEQ ID NO: 761037 - RNA, 19 nt, Artificial Sequence
  Description of Artificial Sequence: Synthetic oligonucleotide
ggguccccgagaacaggau

SEQ ID NO: 761038 - RNA, 19 nt, Artificial Sequence
  Description of Artificial Sequence: Synthetic oligonucleotide
ccacguugaguccgucaau

SEQ ID NO: 761039 - RNA, 19 nt, Artificial Sequence
  Description of Artificial Sequence: Synthetic oligonucleotide
cuuggacaccaggccgguu

SEQ ID NO: 761040 - RNA, 19 nt, Artificial Sequence
  Description of Artificial Sequence: Synthetic oligonucleotide
gggcgguaccucacugaau

SEQ ID NO: 761041 - RNA, 19 nt, Artificial Sequence
  Description of Artificial Sequence: Synthetic oligonucleotide
cccugucguaguccaugau

SEQ ID NO: 761042 - RNA, 19 nt, Artificial Sequence
  Description of Artificial Sequence: Synthetic oligonucleotide
cccuggauucaagcuguuu

SEQ ID NO: 761043 - RNA, 19 nt, Artificial Sequence
  Description of Artificial Sequence: Synthetic oligonucleotide
gccaucgguuggaggcgau

SEQ ID NO: 761044 - RNA, 19 nt, Artificial Sequence
  Description of Artificial Sequence: Synthetic oligonucleotide
cgcauacaggaggcagaua

SEQ ID NO: 761045 - RNA, 19 nt, Artificial Sequence
  Description of Artificial Sequence: Synthetic oligonucleotide
gcggcgugcuggccacgau

SEQ ID NO: 761046 - RNA, 19 nt, Artificial Sequence
  Description of Artificial Sequence: Synthetic oligonucleotide
ccccuggauucaagcuguu

SEQ ID NO: 761047 - RNA, 19 nt, Artificial Sequence
  Description of Artificial Sequence: Synthetic oligonucleotide
gaaauugaaguacugggcg

SEQ ID NO: 761048 - RNA, 19 nt, Artificial Sequence
  Description of Artificial Sequence: Synthetic oligonucleotide
ucuuguuaaagaugcagcg

SEQ ID NO: 761049 - RNA, 19 nt, Artificial Sequence
  Description of Artificial Sequence: Synthetic oligonucleotide
acgaaauugaaguacuggg

SEQ ID NO: 761050 - RNA, 19 nt, Artificial Sequence
  Description of Artificial Sequence: Synthetic oligonucleotide
agguagucgauccuuaggc

SEQ ID NO: 761051 - RNA, 19 nt, Artificial Sequence
  Description of Artificial Sequence: Synthetic oligonucleotide
aauagauaagucaucacca

SEQ ID NO: 761052 - RNA, 19 nt, Artificial Sequence
  Description of Artificial Sequence: Synthetic oligonucleotide
aauuccucggccucauugg

SEQ ID NO: 761053 - RNA, 19 nt, Artificial Sequence
  Description of Artificial Sequence: Synthetic oligonucleotide
uuguuaaagaugcagcgga

SEQ ID NO: 761054 - RNA, 19 nt, Artificial Sequence
  Description of Artificial Sequence: Synthetic oligonucleotide
cuuucggucaugaagcggg

SEQ ID NO: 761055 - RNA, 19 nt, Artificial Sequence
  Description of Artificial Sequence: Synthetic oligonucleotide
ugcucaauaaauagauaag

SEQ ID NO: 761056 - RNA, 19 nt, Artificial Sequence
  Description of Artificial Sequence: Synthetic oligonucleotide
agguugucgggguugaagc

SEQ ID NO: 761057 - RNA, 19 nt, Artificial Sequence
  Description of Artificial Sequence: Synthetic oligonucleotide
ucaugaagcgggcaaacug

SEQ ID NO: 761058 - RNA, 19 nt, Artificial Sequence
  Description of Artificial Sequence: Synthetic oligonucleotide
uggaagacgugcaugaggu

SEQ ID NO: 761059 - RNA, 19 nt, Artificial Sequence
  Description of Artificial Sequence: Synthetic oligonucleotide
aaauugaaguacugggcgu

SEQ ID NO: 761060 - RNA, 19 nt, Artificial Sequence
  Description of Artificial Sequence: Synthetic oligonucleotide
aaagaugcagcggacccac

SEQ ID NO: 761061 - RNA, 19 nt, Artificial Sequence
  Description of Artificial Sequence: Synthetic oligonucleotide
gaugagucuguucugggug

SEQ ID NO: 761062 - RNA, 19 nt, Artificial Sequence
  Description of Artificial Sequence: Synthetic oligonucleotide
agggucagcauguaaggcg

SEQ ID NO: 761063 - RNA, 19 nt, Artificial Sequence
  Description of Artificial Sequence: Synthetic oligonucleotide
acuaacauggaggcguugc

SEQ ID NO: 761064 - RNA, 19 nt, Artificial Sequence
  Description of Artificial Sequence: Synthetic oligonucleotide
gguacuugagguuccaugg

SEQ ID NO: 761065 - RNA, 19 nt, Artificial Sequence
  Description of Artificial Sequence: Synthetic oligonucleotide
gaagcgggcaaacugccgg

SEQ ID NO: 761066 - RNA, 19 nt, Artificial Sequence
  Description of Artificial Sequence: Synthetic oligonucleotide
cuugaagcgacagaugcgg

SEQ ID NO: 761067 - RNA, 19 nt, Artificial Sequence
  Description of Artificial Sequence: Synthetic oligonucleotide
aacauggaggcguugcuga

SEQ ID NO: 761068 - RNA, 19 nt, Artificial Sequence
  Description of Artificial Sequence: Synthetic oligonucleotide
uucggaagagccacucugg

SEQ ID NO: 761069 - RNA, 19 nt, Artificial Sequence
  Description of Artificial Sequence: Synthetic oligonucleotide
gaagagcucgacuacggug

SEQ ID NO: 761070 - RNA, 19 nt, Artificial Sequence
  Description of Artificial Sequence: Synthetic oligonucleotide
acagaugcggucugugugg

SEQ ID NO: 761071 - RNA, 19 nt, Artificial Sequence
  Description of Artificial Sequence: Synthetic oligonucleotide
uagucgauccuuaggcccg

SEQ ID NO: 761072 - RNA, 19 nt, Artificial Sequence
  Description of Artificial Sequence: Synthetic oligonucleotide
ugcugacuaacauggaggc

SEQ ID NO: 761073 - RNA, 19 nt, Artificial Sequence
  Description of Artificial Sequence: Synthetic oligonucleotide
cuuguuaaagaugcagcgg

SEQ ID NO: 761074 - RNA, 19 nt, Artificial Sequence
  Description of Artificial Sequence: Synthetic oligonucleotide
ucuugaguugcgcucgcag

SEQ ID NO: 761075 - RNA, 19 nt, Artificial Sequence
  Description of Artificial Sequence: Synthetic oligonucleotide
auucggaagagccacucug

SEQ ID NO: 761076 - RNA, 19 nt, Artificial Sequence
  Description of Artificial Sequence: Synthetic oligonucleotide
acaaacgcgugggaaaagc

SEQ ID NO: 761077 - RNA, 19 nt, Artificial Sequence
  Description of Artificial Sequence: Synthetic oligonucleotide
gaagagcgggagcaggucg

SEQ ID NO: 761078 - RNA, 19 nt, Artificial Sequence
  Description of Artificial Sequence: Synthetic oligonucleotide
guagucgauccuuaggccc

SEQ ID NO: 761079 - RNA, 19 nt, Artificial Sequence
  Description of Artificial Sequence: Synthetic oligonucleotide
uccugguagauucggaaga

SEQ ID NO: 761080 - RNA, 19 nt, Artificial Sequence
  Description of Artificial Sequence: Synthetic oligonucleotide
aggauugacagcguagggg

SEQ ID NO: 761081 - RNA, 19 nt, Artificial Sequence
  Description of Artificial Sequence: Synthetic oligonucleotide
uguucuccgugaaagugug

SEQ ID NO: 761082 - RNA, 19 nt, Artificial Sequence
  Description of Artificial Sequence: Synthetic oligonucleotide
gacagaugcggucugugug

SEQ ID NO: 761083 - RNA, 19 nt, Artificial Sequence
  Description of Artificial Sequence: Synthetic oligonucleotide
gauguucuccgugaaagug

SEQ ID NO: 761084 - RNA, 19 nt, Artificial Sequence
  Description of Artificial Sequence: Synthetic oligonucleotide
aaguacugggcguuguggu

SEQ ID NO: 761085 - RNA, 19 nt, Artificial Sequence
  Description of Artificial Sequence: Synthetic oligonucleotide
ugccucagcguguagaaga

SEQ ID NO: 761086 - RNA, 19 nt, Artificial Sequence
  Description of Artificial Sequence: Synthetic oligonucleotide
cacgaaauugaaguacugg

SEQ ID NO: 761087 - RNA, 19 nt, Artificial Sequence
  Description of Artificial Sequence: Synthetic oligonucleotide
aguggcacccugcacggac

SEQ ID NO: 761088 - RNA, 19 nt, Artificial Sequence
  Description of Artificial Sequence: Synthetic oligonucleotide
cuggacgaagccauacugg

SEQ ID NO: 761089 - RNA, 19 nt, Artificial Sequence
  Description of Artificial Sequence: Synthetic oligonucleotide
agggacgggauguccaccc

SEQ ID NO: 761090 - RNA, 19 nt, Artificial Sequence
  Description of Artificial Sequence: Synthetic oligonucleotide
aagugggcgcccucgcccc

SEQ ID NO: 761091 - RNA, 19 nt, Artificial Sequence
  Description of Artificial Sequence: Synthetic oligonucleotide
accgcggagaggugcaucc

SEQ ID NO: 761092 - RNA, 19 nt, Artificial Sequence
  Description of Artificial Sequence: Synthetic oligonucleotide
agcucgacuacgguggccc

SEQ ID NO: 761093 - RNA, 19 nt, Artificial Sequence
  Description of Artificial Sequence: Synthetic oligonucleotide
uguuaaagaugcagcggac

SEQ ID NO: 761094 - RNA, 19 nt, Artificial Sequence
  Description of Artificial Sequence: Synthetic oligonucleotide
aaacgcgugggaaaagcag

SEQ ID NO: 761095 - RNA, 19 nt, Artificial Sequence
  Description of Artificial Sequence: Synthetic oligonucleotide
ucaguggcacccugcacgg

SEQ ID NO: 761096 - RNA, 19 nt, Artificial Sequence
  Description of Artificial Sequence: Synthetic oligonucleotide
uacuuuaccucccggacuu

SEQ ID NO: 761097 - RNA, 19 nt, Artificial Sequence
  Description of Artificial Sequence: Synthetic oligonucleotide
uggacgaagccauacuggu

SEQ ID NO: 761098 - RNA, 19 nt, Artificial Sequence
  Description of Artificial Sequence: Synthetic oligonucleotide
cugagugagauggugacug

SEQ ID NO: 761099 - RNA, 19 nt, Artificial Sequence
  Description of Artificial Sequence: Synthetic oligonucleotide
cagccuuucggucaugaag

SEQ ID NO: 761100 - RNA, 19 nt, Artificial Sequence
  Description of Artificial Sequence: Synthetic oligonucleotide
cucguugccagagacgagg

SEQ ID NO: 761101 - RNA, 19 nt, Artificial Sequence
  Description of Artificial Sequence: Synthetic oligonucleotide
uggauugcaugagggacgg

SEQ ID NO: 761102 - RNA, 19 nt, Artificial Sequence
  Description of Artificial Sequence: Synthetic oligonucleotide
uuaggcccgacacuggauc

SEQ ID NO: 761103 - RNA, 19 nt, Artificial Sequence
  Description of Artificial Sequence: Synthetic oligonucleotide
ugugccggcggauaggaaa

SEQ ID NO: 761104 - RNA, 19 nt, Artificial Sequence
  Description of Artificial Sequence: Synthetic oligonucleotide
ugaagcgggcaaacugccg

SEQ ID NO: 761105 - RNA, 19 nt, Artificial Sequence
  Description of Artificial Sequence: Synthetic oligonucleotide
guacuugagguuccauggg

SEQ ID NO: 761106 - RNA, 19 nt, Artificial Sequence
  Description of Artificial Sequence: Synthetic oligonucleotide
ucguacuuuaccucccgga

SEQ ID NO: 761107 - RNA, 19 nt, Artificial Sequence
  Description of Artificial Sequence: Synthetic oligonucleotide
uucuccgugaaaguguggu

SEQ ID NO: 761108 - RNA, 19 nt, Artificial Sequence
  Description of Artificial Sequence: Synthetic oligonucleotide
auggauugcaugagggacg

SEQ ID NO: 761109 - RNA, 19 nt, Artificial Sequence
  Description of Artificial Sequence: Synthetic oligonucleotide
aaacggucccaggaggcuc

SEQ ID NO: 761110 - RNA, 19 nt, Artificial Sequence
  Description of Artificial Sequence: Synthetic oligonucleotide
acugcggaccuugggaagc

SEQ ID NO: 761111 - RNA, 19 nt, Artificial Sequence
  Description of Artificial Sequence: Synthetic oligonucleotide
gaugcagcggacccacacc

SEQ ID NO: 761112 - RNA, 19 nt, Artificial Sequence
  Description of Artificial Sequence: Synthetic oligonucleotide
aacgcgugggaaaagcaga

SEQ ID NO: 761113 - RNA, 19 nt, Artificial Sequence
  Description of Artificial Sequence: Synthetic oligonucleotide
augaagcgggcaaacugcc

SEQ ID NO: 761114 - RNA, 19 nt, Artificial Sequence
  Description of Artificial Sequence: Synthetic oligonucleotide
uugcaugagggacgggaug

SEQ ID NO: 761115 - RNA, 19 nt, Artificial Sequence
  Description of Artificial Sequence: Synthetic oligonucleotide
cuacgugcugcacaccagc

SEQ ID NO: 761116 - RNA, 19 nt, Artificial Sequence
  Description of Artificial Sequence: Synthetic oligonucleotide
uaacauggaggcguugcug

SEQ ID NO: 761117 - RNA, 19 nt, Artificial Sequence
  Description of Artificial Sequence: Synthetic oligonucleotide
gacgggauguccacccucg

SEQ ID NO: 761118 - RNA, 19 nt, Artificial Sequence
  Description of Artificial Sequence: Synthetic oligonucleotide
uccgugaaagugugguucu

SEQ ID NO: 761119 - RNA, 19 nt, Artificial Sequence
  Description of Artificial Sequence: Synthetic oligonucleotide
agagcucgacuacgguggc

SEQ ID NO: 761120 - RNA, 19 nt, Artificial Sequence
  Description of Artificial Sequence: Synthetic oligonucleotide
auggaggcguugcugacca

SEQ ID NO: 761121 - RNA, 19 nt, Artificial Sequence
  Description of Artificial Sequence: Synthetic oligonucleotide
uucgccaggccacguacug

SEQ ID NO: 761122 - RNA, 19 nt, Artificial Sequence
  Description of Artificial Sequence: Synthetic oligonucleotide
agcauguaaggcgcguacg

SEQ ID NO: 761123 - RNA, 19 nt, Artificial Sequence
  Description of Artificial Sequence: Synthetic oligonucleotide
uacguguucuccccuugcu

SEQ ID NO: 761124 - RNA, 19 nt, Artificial Sequence
  Description of Artificial Sequence: Synthetic oligonucleotide
cgaaauugaaguacugggc

SEQ ID NO: 761125 - RNA, 19 nt, Artificial Sequence
  Description of Artificial Sequence: Synthetic oligonucleotide
auccaucccugugugugcc

SEQ ID NO: 761126 - RNA, 19 nt, Artificial Sequence
  Description of Artificial Sequence: Synthetic oligonucleotide
gucaggauugacagcguag

SEQ ID NO: 761127 - RNA, 19 nt, Artificial Sequence
  Description of Artificial Sequence: Synthetic oligonucleotide
caggcuacgugcugcacac

SEQ ID NO: 761128 - RNA, 19 nt, Artificial Sequence
  Description of Artificial Sequence: Synthetic oligonucleotide
gacagcguaggggaagagc

SEQ ID NO: 761129 - RNA, 19 nt, Artificial Sequence
  Description of Artificial Sequence: Synthetic oligonucleotide
augcagcggacccacacca

SEQ ID NO: 761130 - RNA, 19 nt, Artificial Sequence
  Description of Artificial Sequence: Synthetic oligonucleotide
ucgucguggaagacgugca

SEQ ID NO: 761131 - RNA, 19 nt, Artificial Sequence
  Description of Artificial Sequence: Synthetic oligonucleotide
caggauugacagcguaggg

SEQ ID NO: 761132 - RNA, 19 nt, Artificial Sequence
  Description of Artificial Sequence: Synthetic oligonucleotide
ugagugagauggugacugc

SEQ ID NO: 761133 - RNA, 19 nt, Artificial Sequence
  Description of Artificial Sequence: Synthetic oligonucleotide
uuucggucaugaagcgggc

SEQ ID NO: 761134 - RNA, 19 nt, Artificial Sequence
  Description of Artificial Sequence: Synthetic oligonucleotide
ucguguccugguagauucg

SEQ ID NO: 761135 - RNA, 19 nt, Artificial Sequence
  Description of Artificial Sequence: Synthetic oligonucleotide
aucacggaggaguugccau

SEQ ID NO: 761136 - RNA, 19 nt, Artificial Sequence
  Description of Artificial Sequence: Synthetic oligonucleotide
ccuggguacaggcugauug

SEQ ID NO: 761137 - RNA, 19 nt, Artificial Sequence
  Description of Artificial Sequence: Synthetic oligonucleotide
uguaaggcgcguacguguu

SEQ ID NO: 761138 - RNA, 19 nt, Artificial Sequence
  Description of Artificial Sequence: Synthetic oligonucleotide
gguagucgauccuuaggcc

SEQ ID NO: 761139 - RNA, 19 nt, Artificial Sequence
  Description of Artificial Sequence: Synthetic oligonucleotide
gucgucguggaagacgugc

SEQ ID NO: 761140 - RNA, 19 nt, Artificial Sequence
  Description of Artificial Sequence: Synthetic oligonucleotide
uaaggcgcguacguguucu

SEQ ID NO: 761141 - RNA, 19 nt, Artificial Sequence
  Description of Artificial Sequence: Synthetic oligonucleotide
cuccgugaaagugugguuc

SEQ ID NO: 761142 - RNA, 19 nt, Artificial Sequence
  Description of Artificial Sequence: Synthetic oligonucleotide
gguugucgggguugaagcg

SEQ ID NO: 761143 - RNA, 19 nt, Artificial Sequence
  Description of Artificial Sequence: Synthetic oligonucleotide
gacugcggaccuugggaag

SEQ ID NO: 761144 - RNA, 19 nt, Artificial Sequence
  Description of Artificial Sequence: Synthetic oligonucleotide
agaagagcgggagcagguc

SEQ ID NO: 761145 - RNA, 19 nt, Artificial Sequence
  Description of Artificial Sequence: Synthetic oligonucleotide
gcuggacgaagccauacug

SEQ ID NO: 761146 - RNA, 19 nt, Artificial Sequence
  Description of Artificial Sequence: Synthetic oligonucleotide
uaggcccgacacuggaucc

SEQ ID NO: 761147 - RNA, 19 nt, Artificial Sequence
  Description of Artificial Sequence: Synthetic oligonucleotide
gaacaccgcggagaggugc

SEQ ID NO: 761148 - RNA, 19 nt, Artificial Sequence
  Description of Artificial Sequence: Synthetic oligonucleotide
gaugagggccacgucgggc

SEQ ID NO: 761149 - RNA, 19 nt, Artificial Sequence
  Description of Artificial Sequence: Synthetic oligonucleotide
aggacugcggccagcacag

SEQ ID NO: 761150 - RNA, 19 nt, Artificial Sequence
  Description of Artificial Sequence: Synthetic oligonucleotide
cugacuaacauggaggcgu

SEQ ID NO: 761151 - RNA, 19 nt, Artificial Sequence
  Description of Artificial Sequence: Synthetic oligonucleotide
ucguugccagagacgagga

SEQ ID NO: 761152 - RNA, 19 nt, Artificial Sequence
  Description of Artificial Sequence: Synthetic oligonucleotide
cauuggaguagcacagcca

SEQ ID NO: 761153 - RNA, 19 nt, Artificial Sequence
  Description of Artificial Sequence: Synthetic oligonucleotide
aagcgggcaaacugccgga

SEQ ID NO: 761154 - RNA, 19 nt, Artificial Sequence
  Description of Artificial Sequence: Synthetic oligonucleotide
ggagaggugcauccugccg

SEQ ID NO: 761155 - RNA, 19 nt, Artificial Sequence
  Description of Artificial Sequence: Synthetic oligonucleotide
uagauucggaagagccacu

SEQ ID NO: 761156 - RNA, 19 nt, Artificial Sequence
  Description of Artificial Sequence: Synthetic oligonucleotide
uugaagcgacagaugcggu

SEQ ID NO: 761157 - RNA, 19 nt, Artificial Sequence
  Description of Artificial Sequence: Synthetic oligonucleotide
ggcguugugguccuccacc

SEQ ID NO: 761158 - RNA, 19 nt, Artificial Sequence
  Description of Artificial Sequence: Synthetic oligonucleotide
caccaugugggugccaccc

SEQ ID NO: 761159 - RNA, 19 nt, Artificial Sequence
  Description of Artificial Sequence: Synthetic oligonucleotide
uuucgccaggccacguacu

SEQ ID NO: 761160 - RNA, 19 nt, Artificial Sequence
  Description of Artificial Sequence: Synthetic oligonucleotide
cauguaaggcgcguacgug

SEQ ID NO: 761161 - RNA, 19 nt, Artificial Sequence
  Description of Artificial Sequence: Synthetic oligonucleotide
gacuacgguggccccgcgg

SEQ ID NO: 761162 - RNA, 19 nt, Artificial Sequence
  Description of Artificial Sequence: Synthetic oligonucleotide
aaggcgcguacguguucuc

SEQ ID NO: 761163 - RNA, 19 nt, Artificial Sequence
  Description of Artificial Sequence: Synthetic oligonucleotide
guacguguucuccccuugc

SEQ ID NO: 761164 - RNA, 19 nt, Artificial Sequence
  Description of Artificial Sequence: Synthetic oligonucleotide
aagagggcggugaccagcu

SEQ ID NO: 761165 - RNA, 19 nt, Artificial Sequence
  Description of Artificial Sequence: Synthetic oligonucleotide
acccauccaucccugugug

SEQ ID NO: 761166 - RNA, 19 nt, Artificial Sequence
  Description of Artificial Sequence: Synthetic oligonucleotide
caaacgcgugggaaaagca

SEQ ID NO: 761167 - RNA, 19 nt, Artificial Sequence
  Description of Artificial Sequence: Synthetic oligonucleotide
ucccugugugugccggcgg

SEQ ID NO: 761168 - RNA, 19 nt, Artificial Sequence
  Description of Artificial Sequence: Synthetic oligonucleotide
ucgauccuuaggcccgaca

SEQ ID NO: 761169 - RNA, 19 nt, Artificial Sequence
  Description of Artificial Sequence: Synthetic oligonucleotide
cacguucagccuuucgguc

SEQ ID NO: 761170 - RNA, 19 nt, Artificial Sequence
  Description of Artificial Sequence: Synthetic oligonucleotide
gaagcgacagaugcggucu

SEQ ID NO: 761171 - RNA, 19 nt, Artificial Sequence
  Description of Artificial Sequence: Synthetic oligonucleotide
ucggccucauuggaguagc

SEQ ID NO: 761172 - RNA, 19 nt, Artificial Sequence
  Description of Artificial Sequence: Synthetic oligonucleotide
uguuucgccaggccacgua

SEQ ID NO: 761173 - RNA, 19 nt, Artificial Sequence
  Description of Artificial Sequence: Synthetic oligonucleotide
acggacgccuggcaccggg

SEQ ID NO: 761174 - RNA, 19 nt, Artificial Sequence
  Description of Artificial Sequence: Synthetic oligonucleotide
aggcgcguacguguucucc

SEQ ID NO: 761175 - RNA, 19 nt, Artificial Sequence
  Description of Artificial Sequence: Synthetic oligonucleotide
uccaucccugugugugccg

SEQ ID NO: 761176 - RNA, 19 nt, Artificial Sequence
  Description of Artificial Sequence: Synthetic oligonucleotide
gcgugggaaaagcagagca

SEQ ID NO: 761177 - RNA, 19 nt, Artificial Sequence
  Description of Artificial Sequence: Synthetic oligonucleotide
gcuaagcagcuuauagagg

SEQ ID NO: 761178 - RNA, 19 nt, Artificial Sequence
  Description of Artificial Sequence: Synthetic oligonucleotide
auugaacaccgcggagagg

SEQ ID NO: 761179 - RNA, 19 nt, Artificial Sequence
  Description of Artificial Sequence: Synthetic oligonucleotide
ugacuaacauggaggcguu

SEQ ID NO: 761180 - RNA, 19 nt, Artificial Sequence
  Description of Artificial Sequence: Synthetic oligonucleotide
gucguggaagacgugcaug

SEQ ID NO: 761181 - RNA, 19 nt, Artificial Sequence
  Description of Artificial Sequence: Synthetic oligonucleotide
ugaacaccgcggagaggug

SEQ ID NO: 761182 - RNA, 19 nt, Artificial Sequence
  Description of Artificial Sequence: Synthetic oligonucleotide
aggucgucguggaagacgu

SEQ ID NO: 761183 - RNA, 19 nt, Artificial Sequence
  Description of Artificial Sequence: Synthetic oligonucleotide
ucgacuacgguggccccgc

SEQ ID NO: 761184 - RNA, 19 nt, Artificial Sequence
  Description of Artificial Sequence: Synthetic oligonucleotide
aguugcgcucgcagcagcg

SEQ ID NO: 761185 - RNA, 19 nt, Artificial Sequence
  Description of Artificial Sequence: Synthetic oligonucleotide
ggccacguacugcaggucc

SEQ ID NO: 761186 - RNA, 19 nt, Artificial Sequence
  Description of Artificial Sequence: Synthetic oligonucleotide
aacaccgcggagaggugca

SEQ ID NO: 761187 - RNA, 19 nt, Artificial Sequence
  Description of Artificial Sequence: Synthetic oligonucleotide
gaaggaugcgggccugcuc

SEQ ID NO: 761188 - RNA, 19 nt, Artificial Sequence
  Description of Artificial Sequence: Synthetic oligonucleotide
cccgacacuggauccaggg

SEQ ID NO: 761189 - RNA, 19 nt, Artificial Sequence
  Description of Artificial Sequence: Synthetic oligonucleotide
aggcgcacaugcuuccaca

SEQ ID NO: 761190 - RNA, 19 nt, Artificial Sequence
  Description of Artificial Sequence: Synthetic oligonucleotide
guaccagguggugaccuug

SEQ ID NO: 761191 - RNA, 19 nt, Artificial Sequence
  Description of Artificial Sequence: Synthetic oligonucleotide
cugaagccuggcucugcgc

SEQ ID NO: 761192 - RNA, 19 nt, Artificial Sequence
  Description of Artificial Sequence: Synthetic oligonucleotide
uuggggcuaagcagcuuau

SEQ ID NO: 761193 - RNA, 19 nt, Artificial Sequence
  Description of Artificial Sequence: Synthetic oligonucleotide
uggcacccugcacggacgc

SEQ ID NO: 761194 - RNA, 19 nt, Artificial Sequence
  Description of Artificial Sequence: Synthetic oligonucleotide
ggacaggcccacaaacgcg

SEQ ID NO: 761195 - RNA, 19 nt, Artificial Sequence
  Description of Artificial Sequence: Synthetic oligonucleotide
guugcgcucgcagcagcgg

SEQ ID NO: 761196 - RNA, 19 nt, Artificial Sequence
  Description of Artificial Sequence: Synthetic oligonucleotide
gcguugugguccuccaccg

SEQ ID NO: 761197 - RNA, 19 nt, Artificial Sequence
  Description of Artificial Sequence: Synthetic oligonucleotide
gauccuuaggcccgacacu

SEQ ID NO: 761198 - RNA, 19 nt, Artificial Sequence
  Description of Artificial Sequence: Synthetic oligonucleotide
ucuccgugaaagugugguu

SEQ ID NO: 761199 - RNA, 19 nt, Artificial Sequence
  Description of Artificial Sequence: Synthetic oligonucleotide
auugcaugagggacgggau

SEQ ID NO: 761200 - RNA, 19 nt, Artificial Sequence
  Description of Artificial Sequence: Synthetic oligonucleotide
acgcgugggaaaagcagag

SEQ ID NO: 761201 - RNA, 19 nt, Artificial Sequence
  Description of Artificial Sequence: Synthetic oligonucleotide
guacuuuaccucccggacu

SEQ ID NO: 761202 - RNA, 19 nt, Artificial Sequence
  Description of Artificial Sequence: Synthetic oligonucleotide
ucccggacuuucagguacu

SEQ ID NO: 761203 - RNA, 19 nt, Artificial Sequence
  Description of Artificial Sequence: Synthetic oligonucleotide
gagguuccaugggaucugc

SEQ ID NO: 761204 - RNA, 19 nt, Artificial Sequence
  Description of Artificial Sequence: Synthetic oligonucleotide
aguugccagcaggacugcg

SEQ ID NO: 761205 - RNA, 19 nt, Artificial Sequence
  Description of Artificial Sequence: Synthetic oligonucleotide
agggacacggucaccgucu

SEQ ID NO: 761206 - RNA, 19 nt, Artificial Sequence
  Description of Artificial Sequence: Synthetic oligonucleotide
cucgacuacgguggccccg

SEQ ID NO: 761207 - RNA, 19 nt, Artificial Sequence
  Description of Artificial Sequence: Synthetic oligonucleotide
aagaagagccgggccuccu

SEQ ID NO: 761208 - RNA, 19 nt, Artificial Sequence
  Description of Artificial Sequence: Synthetic oligonucleotide
gauucggaagagccacucu

SEQ ID NO: 761209 - RNA, 19 nt, Artificial Sequence
  Description of Artificial Sequence: Synthetic oligonucleotide
ggcgcguacguguucuccc

SEQ ID NO: 761210 - RNA, 19 nt, Artificial Sequence
  Description of Artificial Sequence: Synthetic oligonucleotide
cguacuuuaccucccggac

SEQ ID NO: 761211 - RNA, 19 nt, Artificial Sequence
  Description of Artificial Sequence: Synthetic oligonucleotide
gccuuucggucaugaagcg

SEQ ID NO: 761212 - RNA, 19 nt, Artificial Sequence
  Description of Artificial Sequence: Synthetic oligonucleotide
ggaggcguugcugaccagc

SEQ ID NO: 761213 - RNA, 19 nt, Artificial Sequence
  Description of Artificial Sequence: Synthetic oligonucleotide
gcgucuugaguugcgcucg

SEQ ID NO: 761214 - RNA, 19 nt, Artificial Sequence
  Description of Artificial Sequence: Synthetic oligonucleotide
gcguguagaagagcgggag

SEQ ID NO: 761215 - RNA, 19 nt, Artificial Sequence
  Description of Artificial Sequence: Synthetic oligonucleotide
gcugacuaacauggaggcg

SEQ ID NO: 761216 - RNA, 19 nt, Artificial Sequence
  Description of Artificial Sequence: Synthetic oligonucleotide
uccacccucguguccuggu

SEQ ID NO: 761217 - RNA, 19 nt, Artificial Sequence
  Description of Artificial Sequence: Synthetic oligonucleotide
cgauccuuaggcccgacac

SEQ ID NO: 761218 - RNA, 19 nt, Artificial Sequence
  Description of Artificial Sequence: Synthetic oligonucleotide
ggaucauguuucgccaggc

SEQ ID NO: 761219 - RNA, 19 nt, Artificial Sequence
  Description of Artificial Sequence: Synthetic oligonucleotide
ugacagcguaggggaagag

SEQ ID NO: 761220 - RNA, 19 nt, Artificial Sequence
  Description of Artificial Sequence: Synthetic oligonucleotide
gacuaacauggaggcguug

SEQ ID NO: 761221 - RNA, 19 nt, Artificial Sequence
  Description of Artificial Sequence: Synthetic oligonucleotide
cugcacggacgccuggcac

SEQ ID NO: 761222 - RNA, 19 nt, Artificial Sequence
  Description of Artificial Sequence: Synthetic oligonucleotide
guggcacccugcacggacg

SEQ ID NO: 761223 - RNA, 19 nt, Artificial Sequence
  Description of Artificial Sequence: Synthetic oligonucleotide
ugcguggcucacguucagc

SEQ ID NO: 761224 - RNA, 19 nt, Artificial Sequence
  Description of Artificial Sequence: Synthetic oligonucleotide
cugggcguugugguccucc

SEQ ID NO: 761225 - RNA, 19 nt, Artificial Sequence
  Description of Artificial Sequence: Synthetic oligonucleotide
ccggauggauugcaugagg

SEQ ID NO: 761226 - RNA, 19 nt, Artificial Sequence
  Description of Artificial Sequence: Synthetic oligonucleotide
cagggacacggucaccguc

SEQ ID NO: 761227 - RNA, 19 nt, Artificial Sequence
  Description of Artificial Sequence: Synthetic oligonucleotide
cuggcaccgggccucccgc

SEQ ID NO: 761228 - RNA, 19 nt, Artificial Sequence
  Description of Artificial Sequence: Synthetic oligonucleotide
ggugcauccugccgccacc

SEQ ID NO: 761229 - RNA, 19 nt, Artificial Sequence
  Description of Artificial Sequence: Synthetic oligonucleotide
gcggacccacaccagguag

SEQ ID NO: 761230 - RNA, 19 nt, Artificial Sequence
  Description of Artificial Sequence: Synthetic oligonucleotide
ucgccaggccacguacugc

SEQ ID NO: 761231 - RNA, 19 nt, Artificial Sequence
  Description of Artificial Sequence: Synthetic oligonucleotide
agacgugcaugagguuguc

SEQ ID NO: 761232 - RNA, 19 nt, Artificial Sequence
  Description of Artificial Sequence: Synthetic oligonucleotide
ccacgaaauugaaguacug

SEQ ID NO: 761233 - RNA, 19 nt, Artificial Sequence
  Description of Artificial Sequence: Synthetic oligonucleotide
guaaggcgcguacguguuc

SEQ ID NO: 761234 - RNA, 19 nt, Artificial Sequence
  Description of Artificial Sequence: Synthetic oligonucleotide
cuaacauggaggcguugcu

SEQ ID NO: 761235 - RNA, 19 nt, Artificial Sequence
  Description of Artificial Sequence: Synthetic oligonucleotide
cucgccccagcccuccaug

SEQ ID NO: 761236 - RNA, 19 nt, Artificial Sequence
  Description of Artificial Sequence: Synthetic oligonucleotide
cugcagccacaccucguac

SEQ ID NO: 761237 - RNA, 19 nt, Artificial Sequence
  Description of Artificial Sequence: Synthetic oligonucleotide
gagugagauggugacugcu

SEQ ID NO: 761238 - RNA, 19 nt, Artificial Sequence
  Description of Artificial Sequence: Synthetic oligonucleotide
uuccggcaacagaggugcc

SEQ ID NO: 761239 - RNA, 19 nt, Artificial Sequence
  Description of Artificial Sequence: Synthetic oligonucleotide
cugagcugcgaaggccgcc

SEQ ID NO: 761240 - RNA, 19 nt, Artificial Sequence
  Description of Artificial Sequence: Synthetic oligonucleotide
cucuggguuccggcaacag

SEQ ID NO: 761241 - RNA, 19 nt, Artificial Sequence
  Description of Artificial Sequence: Synthetic oligonucleotide
ccuuucggucaugaagcgg

SEQ ID NO: 761242 - RNA, 19 nt, Artificial Sequence
  Description of Artificial Sequence: Synthetic oligonucleotide
agcggacccacaccaggua

SEQ ID NO: 761243 - RNA, 19 nt, Artificial Sequence
  Description of Artificial Sequence: Synthetic oligonucleotide
cccugcguggcucacguuc

SEQ ID NO: 761244 - RNA, 19 nt, Artificial Sequence
  Description of Artificial Sequence: Synthetic oligonucleotide
aggcuacgugcugcacacc

SEQ ID NO: 761245 - RNA, 19 nt, Artificial Sequence
  Description of Artificial Sequence: Synthetic oligonucleotide
ccacgcgccggauggauug

SEQ ID NO: 761246 - RNA, 19 nt, Artificial Sequence
  Description of Artificial Sequence: Synthetic oligonucleotide
aggccacguacugcagguc

SEQ ID NO: 761247 - RNA, 19 nt, Artificial Sequence
  Description of Artificial Sequence: Synthetic oligonucleotide
gcauguaaggcgcguacgu

SEQ ID NO: 761248 - RNA, 19 nt, Artificial Sequence
  Description of Artificial Sequence: Synthetic oligonucleotide
ugggugcggccugugcaca

SEQ ID NO: 761249 - RNA, 19 nt, Artificial Sequence
  Description of Artificial Sequence: Synthetic oligonucleotide
caaacugccggaucucguu

SEQ ID NO: 761250 - RNA, 19 nt, Artificial Sequence
  Description of Artificial Sequence: Synthetic oligonucleotide
gccucagcguguagaagag

SEQ ID NO: 761251 - RNA, 19 nt, Artificial Sequence
  Description of Artificial Sequence: Synthetic oligonucleotide
cacccugcacggacgccug

SEQ ID NO: 761252 - RNA, 19 nt, Artificial Sequence
  Description of Artificial Sequence: Synthetic oligonucleotide
cacagacaccaggagggca

SEQ ID NO: 761253 - RNA, 19 nt, Artificial Sequence
  Description of Artificial Sequence: Synthetic oligonucleotide
ggagggccggcuggaagcg

SEQ ID NO: 761254 - RNA, 19 nt, Artificial Sequence
  Description of Artificial Sequence: Synthetic oligonucleotide
uggaggcguugcugaccag

SEQ ID NO: 761255 - RNA, 19 nt, Artificial Sequence
  Description of Artificial Sequence: Synthetic oligonucleotide
ggacgccuggcaccgggcc

SEQ ID NO: 761256 - RNA, 19 nt, Artificial Sequence
  Description of Artificial Sequence: Synthetic oligonucleotide
acgggauguccacccucgu

SEQ ID NO: 761257 - RNA, 19 nt, Artificial Sequence
  Description of Artificial Sequence: Synthetic oligonucleotide
agcgccgggagcccagguu

SEQ ID NO: 761258 - RNA, 19 nt, Artificial Sequence
  Description of Artificial Sequence: Synthetic oligonucleotide
caggccacguacugcaggu

SEQ ID NO: 761259 - RNA, 19 nt, Artificial Sequence
  Description of Artificial Sequence: Synthetic oligonucleotide
agcgacagaugcggucugu

SEQ ID NO: 761260 - RNA, 19 nt, Artificial Sequence
  Description of Artificial Sequence: Synthetic oligonucleotide
uggggcuaagcagcuuaua

SEQ ID NO: 761261 - RNA, 19 nt, Artificial Sequence
  Description of Artificial Sequence: Synthetic oligonucleotide
gcuacgugcugcacaccag

SEQ ID NO: 761262 - RNA, 19 nt, Artificial Sequence
  Description of Artificial Sequence: Synthetic oligonucleotide
ggucaggauugacagcgua

SEQ ID NO: 761263 - RNA, 19 nt, Artificial Sequence
  Description of Artificial Sequence: Synthetic oligonucleotide
gccggauggauugcaugag

SEQ ID NO: 761264 - RNA, 19 nt, Artificial Sequence
  Description of Artificial Sequence: Synthetic oligonucleotide
gcggagaggugcauccugc

SEQ ID NO: 761265 - RNA, 19 nt, Artificial Sequence
  Description of Artificial Sequence: Synthetic oligonucleotide
gcgcguacguguucucccc

SEQ ID NO: 761266 - RNA, 19 nt, Artificial Sequence
  Description of Artificial Sequence: Synthetic oligonucleotide
caggggcgccccugcgugg

SEQ ID NO: 761267 - RNA, 19 nt, Artificial Sequence
  Description of Artificial Sequence: Synthetic oligonucleotide
agucgauccuuaggcccga

SEQ ID NO: 761268 - RNA, 19 nt, Artificial Sequence
  Description of Artificial Sequence: Synthetic oligonucleotide
gcacgaacacuggcuuugg

SEQ ID NO: 761269 - RNA, 19 nt, Artificial Sequence
  Description of Artificial Sequence: Synthetic oligonucleotide
gcgccggauggauugcaug

SEQ ID NO: 761270 - RNA, 19 nt, Artificial Sequence
  Description of Artificial Sequence: Synthetic oligonucleotide
ggacacggacaggugggcc

SEQ ID NO: 761271 - RNA, 19 nt, Artificial Sequence
  Description of Artificial Sequence: Synthetic oligonucleotide
cccacaaacgcgugggaaa

SEQ ID NO: 761272 - RNA, 19 nt, Artificial Sequence
  Description of Artificial Sequence: Synthetic oligonucleotide
ccaucccugugugugccgg

SEQ ID NO: 761273 - RNA, 19 nt, Artificial Sequence
  Description of Artificial Sequence: Synthetic oligonucleotide
uggcaccgggccucccgca

SEQ ID NO: 761274 - RNA, 19 nt, Artificial Sequence
  Description of Artificial Sequence: Synthetic oligonucleotide
cguguccugguagauucgg

SEQ ID NO: 761275 - RNA, 19 nt, Artificial Sequence
  Description of Artificial Sequence: Synthetic oligonucleotide
cccggaucauguuucgcca

SEQ ID NO: 761276 - RNA, 19 nt, Artificial Sequence
  Description of Artificial Sequence: Synthetic oligonucleotide
auguuucgccaggccacgu

SEQ ID NO: 761277 - RNA, 19 nt, Artificial Sequence
  Description of Artificial Sequence: Synthetic oligonucleotide
ugagguugucgggguugaa

SEQ ID NO: 761278 - RNA, 19 nt, Artificial Sequence
  Description of Artificial Sequence: Synthetic oligonucleotide
ggaagagcucgacuacggu

SEQ ID NO: 761279 - RNA, 19 nt, Artificial Sequence
  Description of Artificial Sequence: Synthetic oligonucleotide
gccccgugcaugcugacua

SEQ ID NO: 761280 - RNA, 19 nt, Artificial Sequence
  Description of Artificial Sequence: Synthetic oligonucleotide
gcgacagaugcggucugug

SEQ ID NO: 761281 - RNA, 19 nt, Artificial Sequence
  Description of Artificial Sequence: Synthetic oligonucleotide
agugggcgcccucgcccca

SEQ ID NO: 761282 - RNA, 19 nt, Artificial Sequence
  Description of Artificial Sequence: Synthetic oligonucleotide
cacgcgccggauggauugc

SEQ ID NO: 761283 - RNA, 19 nt, Artificial Sequence
  Description of Artificial Sequence: Synthetic oligonucleotide
ccgugcaugcugacuaaca

SEQ ID NO: 761284 - RNA, 19 nt, Artificial Sequence
  Description of Artificial Sequence: Synthetic oligonucleotide
gggcuggacgaagccauac

SEQ ID NO: 761285 - RNA, 19 nt, Artificial Sequence
  Description of Artificial Sequence: Synthetic oligonucleotide
gucagcauguaaggcgcgu

SEQ ID NO: 761286 - RNA, 19 nt, Artificial Sequence
  Description of Artificial Sequence: Synthetic oligonucleotide
ccugcucaauaaauagaua

SEQ ID NO: 761287 - RNA, 19 nt, Artificial Sequence
  Description of Artificial Sequence: Synthetic oligonucleotide
ucgcccaggggcgccccug

SEQ ID NO: 761288 - RNA, 19 nt, Artificial Sequence
  Description of Artificial Sequence: Synthetic oligonucleotide
gucuugaguugcgcucgca

SEQ ID NO: 761289 - RNA, 19 nt, Artificial Sequence
  Description of Artificial Sequence: Synthetic oligonucleotide
agcaagcggcccagcgucu

SEQ ID NO: 761290 - RNA, 19 nt, Artificial Sequence
  Description of Artificial Sequence: Synthetic oligonucleotide
cagcggacccacaccaggu

SEQ ID NO: 761291 - RNA, 19 nt, Artificial Sequence
  Description of Artificial Sequence: Synthetic oligonucleotide
caaacggucccaggaggcu

SEQ ID NO: 761292 - RNA, 19 nt, Artificial Sequence
  Description of Artificial Sequence: Synthetic oligonucleotide
gccgcucagggugugugac

SEQ ID NO: 761293 - RNA, 19 nt, Artificial Sequence
  Description of Artificial Sequence: Synthetic oligonucleotide
cgccggauggauugcauga

SEQ ID NO: 761294 - RNA, 19 nt, Artificial Sequence
  Description of Artificial Sequence: Synthetic oligonucleotide
gucccgggcggcccuucac

SEQ ID NO: 761295 - RNA, 19 nt, Artificial Sequence
  Description of Artificial Sequence: Synthetic oligonucleotide
gcgggagcaggucgucgug

SEQ ID NO: 761296 - RNA, 19 nt, Artificial Sequence
  Description of Artificial Sequence: Synthetic oligonucleotide
gcccgguccagguggguga

SEQ ID NO: 761297 - RNA, 19 nt, Artificial Sequence
  Description of Artificial Sequence: Synthetic oligonucleotide
ccgcaccuugccuggguac

SEQ ID NO: 761298 - RNA, 19 nt, Artificial Sequence
  Description of Artificial Sequence: Synthetic oligonucleotide
gcaccgggccucccgcacc

SEQ ID NO: 761299 - RNA, 19 nt, Artificial Sequence
  Description of Artificial Sequence: Synthetic oligonucleotide
acgcgccggauggauugca

SEQ ID NO: 761300 - RNA, 19 nt, Artificial Sequence
  Description of Artificial Sequence: Synthetic oligonucleotide
cuccucgcccaggggcgcc

SEQ ID NO: 761301 - RNA, 19 nt, Artificial Sequence
  Description of Artificial Sequence: Synthetic oligonucleotide
ggacgaagccauacuggua

SEQ ID NO: 761302 - RNA, 19 nt, Artificial Sequence
  Description of Artificial Sequence: Synthetic oligonucleotide
gggugcggccugugcacac

SEQ ID NO: 761303 - RNA, 19 nt, Artificial Sequence
  Description of Artificial Sequence: Synthetic oligonucleotide
ccggacuuucagguacuug

SEQ ID NO: 761304 - RNA, 19 nt, Artificial Sequence
  Description of Artificial Sequence: Synthetic oligonucleotide
cgcggagaggugcauccug

SEQ ID NO: 761305 - RNA, 19 nt, Artificial Sequence
  Description of Artificial Sequence: Synthetic oligonucleotide
ccgacacuggauccaggga

SEQ ID NO: 761306 - RNA, 19 nt, Artificial Sequence
  Description of Artificial Sequence: Synthetic oligonucleotide
gucgauccuuaggcccgac

SEQ ID NO: 761307 - RNA, 19 nt, Artificial Sequence
  Description of Artificial Sequence: Synthetic oligonucleotide
cccugcacggacgccuggc

SEQ ID NO: 761308 - RNA, 19 nt, Artificial Sequence
  Description of Artificial Sequence: Synthetic oligonucleotide
cguaggggaagagcucgac

SEQ ID NO: 761309 - RNA, 19 nt, Artificial Sequence
  Description of Artificial Sequence: Synthetic oligonucleotide
accacgcgccggauggauu

SEQ ID NO: 761310 - RNA, 19 nt, Artificial Sequence
  Description of Artificial Sequence: Synthetic oligonucleotide
cgggagcaggucgucgugg

SEQ ID NO: 761311 - RNA, 19 nt, Artificial Sequence
  Description of Artificial Sequence: Synthetic oligonucleotide
gccgcaccacgucugcgaa

SEQ ID NO: 761312 - RNA, 19 nt, Artificial Sequence
  Description of Artificial Sequence: Synthetic oligonucleotide
gccggaucucguugccaga

SEQ ID NO: 761313 - RNA, 19 nt, Artificial Sequence
  Description of Artificial Sequence: Synthetic oligonucleotide
ccgugaaagugugguucug

SEQ ID NO: 761314 - RNA, 19 nt, Artificial Sequence
  Description of Artificial Sequence: Synthetic oligonucleotide
cccgugcaugcugacuaac

SEQ ID NO: 761315 - RNA, 19 nt, Artificial Sequence
  Description of Artificial Sequence: Synthetic oligonucleotide
ggcgggcagcuccacgaaa

SEQ ID NO: 761316 - RNA, 19 nt, Artificial Sequence
  Description of Artificial Sequence: Synthetic oligonucleotide
ccgcaccacgucugcgaag

SEQ ID NO: 761317 - RNA, 19 nt, Artificial Sequence
  Description of Artificial Sequence: Synthetic oligonucleotide
gcccuucaccacgcgccgg

SEQ ID NO: 761318 - RNA, 19 nt, Artificial Sequence
  Description of Artificial Sequence: Synthetic oligonucleotide
cgcgugggaaaagcagagc

SEQ ID NO: 761319 - RNA, 19 nt, Artificial Sequence
  Description of Artificial Sequence: Synthetic oligonucleotide
cccuuggucccagggccgc

SEQ ID NO: 761320 - RNA, 19 nt, Artificial Sequence
  Description of Artificial Sequence: Synthetic oligonucleotide
ccugcacggacgccuggca

SEQ ID NO: 761321 - RNA, 19 nt, Artificial Sequence
  Description of Artificial Sequence: Synthetic oligonucleotide
ggucgucguggaagacgug

SEQ ID NO: 761322 - RNA, 19 nt, Artificial Sequence
  Description of Artificial Sequence: Synthetic oligonucleotide
gcgcucgcagcagcggcug

SEQ ID NO: 761323 - RNA, 19 nt, Artificial Sequence
  Description of Artificial Sequence: Synthetic oligonucleotide
ggcgccccugcguggcuca

SEQ ID NO: 761324 - RNA, 19 nt, Artificial Sequence
  Description of Artificial Sequence: Synthetic oligonucleotide
gccccugcguggcucacgu

SEQ ID NO: 761325 - RNA, 19 nt, Artificial Sequence
  Description of Artificial Sequence: Synthetic oligonucleotide
cggaggaguugccauggaa

SEQ ID NO: 761326 - RNA, 19 nt, Artificial Sequence
  Description of Artificial Sequence: Synthetic oligonucleotide
ccgggcggcccuucaccac

SEQ ID NO: 761327 - RNA, 19 nt, Artificial Sequence
  Description of Artificial Sequence: Synthetic oligonucleotide
cccgggcggcccuucacca

SEQ ID NO: 761328 - RNA, 19 nt, Artificial Sequence
  Description of Artificial Sequence: Synthetic oligonucleotide
gcguaggggaagagcucga

SEQ ID NO: 761329 - RNA, 19 nt, Artificial Sequence
  Description of Artificial Sequence: Synthetic oligonucleotide
gugugccggcggauaggaa

SEQ ID NO: 761330 - RNA, 19 nt, Artificial Sequence
  Description of Artificial Sequence: Synthetic oligonucleotide
gagcugcgaaggccgccuu

SEQ ID NO: 761331 - RNA, 19 nt, Artificial Sequence
  Description of Artificial Sequence: Synthetic oligonucleotide
caguggcacccugcacgga

SEQ ID NO: 761332 - RNA, 19 nt, Artificial Sequence
  Description of Artificial Sequence: Synthetic oligonucleotide
gcggcugcuuggggcuaag

SEQ ID NO: 761333 - RNA, 19 nt, Artificial Sequence
  Description of Artificial Sequence: Synthetic oligonucleotide
ccccgcggggcaggaagag

SEQ ID NO: 761334 - RNA, 19 nt, Artificial Sequence
  Description of Artificial Sequence: Synthetic oligonucleotide
ggcucacguucagccuuuc

SEQ ID NO: 761335 - RNA, 19 nt, Artificial Sequence
  Description of Artificial Sequence: Synthetic oligonucleotide
gcguacguguucuccccuu

SEQ ID NO: 761336 - RNA, 19 nt, Artificial Sequence
  Description of Artificial Sequence: Synthetic oligonucleotide
ccccgugcaugcugacuaa

SEQ ID NO: 761337 - RNA, 19 nt, Artificial Sequence
  Description of Artificial Sequence: Synthetic oligonucleotide
ggccccgugcaugcugacu

SEQ ID NO: 761338 - RNA, 19 nt, Artificial Sequence
  Description of Artificial Sequence: Synthetic oligonucleotide
cgucguggaagacgugcau

SEQ ID NO: 761339 - RNA, 19 nt, Artificial Sequence
  Description of Artificial Sequence: Synthetic oligonucleotide
cguugugguccuccaccgu

SEQ ID NO: 761340 - RNA, 19 nt, Artificial Sequence
  Description of Artificial Sequence: Synthetic oligonucleotide
gcaagcggcccagcgucuu

SEQ ID NO: 761341 - RNA, 19 nt, Artificial Sequence
  Description of Artificial Sequence: Synthetic oligonucleotide
cgcguacguguucuccccu

SEQ ID NO: 761342 - RNA, 19 nt, Artificial Sequence
  Description of Artificial Sequence: Synthetic oligonucleotide
cagcccgguccaggugggu

SEQ ID NO: 761343 - RNA, 19 nt, Artificial Sequence
  Description of Artificial Sequence: Synthetic oligonucleotide
cgcgccggauggauugcau

SEQ ID NO: 761344 - RNA, 19 nt, Artificial Sequence
  Description of Artificial Sequence: Synthetic oligonucleotide
ccgcggagaggugcauccu

SEQ ID NO: 761345 - RNA, 19 nt, Artificial Sequence
  Description of Artificial Sequence: Synthetic oligonucleotide
cccggacuuucagguacuu

SEQ ID NO: 761346 - RNA, 19 nt, Artificial Sequence
  Description of Artificial Sequence: Synthetic oligonucleotide
ccccugcguggcucacguu

SEQ ID NO: 761347 - RNA, 19 nt, Artificial Sequence
  Description of Artificial Sequence: Synthetic oligonucleotide
aauuauguuacacauuaug

SEQ ID NO: 761348 - RNA, 19 nt, Artificial Sequence
  Description of Artificial Sequence: Synthetic oligonucleotide
uuugaaguaauuaauggaa

SEQ ID NO: 761349 - RNA, 19 nt, Artificial Sequence
  Description of Artificial Sequence: Synthetic oligonucleotide
uuaucucaugcuaagaccc

SEQ ID NO: 761350 - RNA, 19 nt, Artificial Sequence
  Description of Artificial Sequence: Synthetic oligonucleotide
aaguuggccaaauuagugg

SEQ ID NO: 761351 - RNA, 19 nt, Artificial Sequence
  Description of Artificial Sequence: Synthetic oligonucleotide
uggaguguaaccauggcag

SEQ ID NO: 761352 - RNA, 19 nt, Artificial Sequence
  Description of Artificial Sequence: Synthetic oligonucleotide
uguuguggacacaugaggg

SEQ ID NO: 761353 - RNA, 19 nt, Artificial Sequence
  Description of Artificial Sequence: Synthetic oligonucleotide
auagccauggcauuuuaac

SEQ ID NO: 761354 - RNA, 19 nt, Artificial Sequence
  Description of Artificial Sequence: Synthetic oligonucleotide
ugagucuugguuaaggucu

SEQ ID NO: 761355 - RNA, 19 nt, Artificial Sequence
  Description of Artificial Sequence: Synthetic oligonucleotide
auuaguggcugguagcugc

SEQ ID NO: 761356 - RNA, 19 nt, Artificial Sequence
  Description of Artificial Sequence: Synthetic oligonucleotide
uacacauuaugauagaaaa

SEQ ID NO: 761357 - RNA, 19 nt, Artificial Sequence
  Description of Artificial Sequence: Synthetic oligonucleotide
aaauccugagccuagaguu

SEQ ID NO: 761358 - RNA, 19 nt, Artificial Sequence
  Description of Artificial Sequence: Synthetic oligonucleotide
acagcuaucaugugacccc

SEQ ID NO: 761359 - RNA, 19 nt, Artificial Sequence
  Description of Artificial Sequence: Synthetic oligonucleotide
uccagaaaaggaauguugc

SEQ ID NO: 761360 - RNA, 19 nt, Artificial Sequence
  Description of Artificial Sequence: Synthetic oligonucleotide
aacuccuugggucacaacu

SEQ ID NO: 761361 - RNA, 19 nt, Artificial Sequence
  Description of Artificial Sequence: Synthetic oligonucleotide
aguaaagacacgcaagcug

SEQ ID NO: 761362 - RNA, 19 nt, Artificial Sequence
  Description of Artificial Sequence: Synthetic oligonucleotide
agcuuuaaagggcugcacc

SEQ ID NO: 761363 - RNA, 19 nt, Artificial Sequence
  Description of Artificial Sequence: Synthetic oligonucleotide
agacuauuaaaucauuuga

SEQ ID NO: 761364 - RNA, 19 nt, Artificial Sequence
  Description of Artificial Sequence: Synthetic oligonucleotide
uuuucguacggucauugcc

SEQ ID NO: 761365 - RNA, 19 nt, Artificial Sequence
  Description of Artificial Sequence: Synthetic oligonucleotide
uccuugaggaauuagcagc

SEQ ID NO: 761366 - RNA, 19 nt, Artificial Sequence
  Description of Artificial Sequence: Synthetic oligonucleotide
acauaauuauguuacacau

SEQ ID NO: 761367 - RNA, 19 nt, Artificial Sequence
  Description of Artificial Sequence: Synthetic oligonucleotide
uuucguacggucauugccc

SEQ ID NO: 761368 - RNA, 19 nt, Artificial Sequence
  Description of Artificial Sequence: Synthetic oligonucleotide
acgccaacaaccuuggagg

SEQ ID NO: 761369 - RNA, 19 nt, Artificial Sequence
  Description of Artificial Sequence: Synthetic oligonucleotide
cuuaucucaugcuaagacc

SEQ ID NO: 761370 - RNA, 19 nt, Artificial Sequence
  Description of Artificial Sequence: Synthetic oligonucleotide
uuuguucgugagaaaaucc

SEQ ID NO: 761371 - RNA, 19 nt, Artificial Sequence
  Description of Artificial Sequence: Synthetic oligonucleotide
guaagguagagccaacagg

SEQ ID NO: 761372 - RNA, 19 nt, Artificial Sequence
  Description of Artificial Sequence: Synthetic oligonucleotide
aacaauagucccuccaccu

SEQ ID NO: 761373 - RNA, 19 nt, Artificial Sequence
  Description of Artificial Sequence: Synthetic oligonucleotide
uacauggagacuauuaaau

SEQ ID NO: 761374 - RNA, 19 nt, Artificial Sequence
  Description of Artificial Sequence: Synthetic oligonucleotide
ugaggaauuagcagcagcu

SEQ ID NO: 761375 - RNA, 19 nt, Artificial Sequence
  Description of Artificial Sequence: Synthetic oligonucleotide
uggugaauauuacucacug

SEQ ID NO: 761376 - RNA, 19 nt, Artificial Sequence
  Description of Artificial Sequence: Synthetic oligonucleotide
ugaauauuacucacuguga

SEQ ID NO: 761377 - RNA, 19 nt, Artificial Sequence
  Description of Artificial Sequence: Synthetic oligonucleotide
auuuuaacgcacagaaacc

SEQ ID NO: 761378 - RNA, 19 nt, Artificial Sequence
  Description of Artificial Sequence: Synthetic oligonucleotide
uuuaagaucauauccucua

SEQ ID NO: 761379 - RNA, 19 nt, Artificial Sequence
  Description of Artificial Sequence: Synthetic oligonucleotide
uuaacgcacagaaaccacc

SEQ ID NO: 761380 - RNA, 19 nt, Artificial Sequence
  Description of Artificial Sequence: Synthetic oligonucleotide
uauuaaaucauuugauauu

SEQ ID NO: 761381 - RNA, 19 nt, Artificial Sequence
  Description of Artificial Sequence: Synthetic oligonucleotide
ucuuguagcucgcaggaug

SEQ ID NO: 761382 - RNA, 19 nt, Artificial Sequence
  Description of Artificial Sequence: Synthetic oligonucleotide
ugugauuucuuugggaacc

SEQ ID NO: 761383 - RNA, 19 nt, Artificial Sequence
  Description of Artificial Sequence: Synthetic oligonucleotide
agaucauauccucuacuac

SEQ ID NO: 761384 - RNA, 19 nt, Artificial Sequence
  Description of Artificial Sequence: Synthetic oligonucleotide
uaauguucgucuucagcgg

SEQ ID NO: 761385 - RNA, 19 nt, Artificial Sequence
  Description of Artificial Sequence: Synthetic oligonucleotide
ugaaguaauuaauggaauc

SEQ ID NO: 761386 - RNA, 19 nt, Artificial Sequence
  Description of Artificial Sequence: Synthetic oligonucleotide
uguacgaaguaaagacacg

SEQ ID NO: 761387 - RNA, 19 nt, Artificial Sequence
  Description of Artificial Sequence: Synthetic oligonucleotide
acauggagacuauuaaauc

SEQ ID NO: 761388 - RNA, 19 nt, Artificial Sequence
  Description of Artificial Sequence: Synthetic oligonucleotide
cuaucaauuugcugugucg

SEQ ID NO: 761389 - RNA, 19 nt, Artificial Sequence
  Description of Artificial Sequence: Synthetic oligonucleotide
uccguggccuuuaagauca

SEQ ID NO: 761390 - RNA, 19 nt, Artificial Sequence
  Description of Artificial Sequence: Synthetic oligonucleotide
uguucgugagaaaauccag

SEQ ID NO: 761391 - RNA, 19 nt, Artificial Sequence
  Description of Artificial Sequence: Synthetic oligonucleotide
accauguaggucucugucc

SEQ ID NO: 761392 - RNA, 19 nt, Artificial Sequence
  Description of Artificial Sequence: Synthetic oligonucleotide
uuuuaacgcacagaaacca

SEQ ID NO: 761393 - RNA, 19 nt, Artificial Sequence
  Description of Artificial Sequence: Synthetic oligonucleotide
ucuuuggugacugaguugu

SEQ ID NO: 761394 - RNA, 19 nt, Artificial Sequence
  Description of Artificial Sequence: Synthetic oligonucleotide
uuacacauuaugauagaaa

SEQ ID NO: 761395 - RNA, 19 nt, Artificial Sequence
  Description of Artificial Sequence: Synthetic oligonucleotide
cuguacgaaguaaagacac

SEQ ID NO: 761396 - RNA, 19 nt, Artificial Sequence
  Description of Artificial Sequence: Synthetic oligonucleotide
uuggcaacaaggauuuggc

SEQ ID NO: 761397 - RNA, 19 nt, Artificial Sequence
  Description of Artificial Sequence: Synthetic oligonucleotide
ugaacaaaucugugugugg

SEQ ID NO: 761398 - RNA, 19 nt, Artificial Sequence
  Description of Artificial Sequence: Synthetic oligonucleotide
uuguucgugagaaaaucca

SEQ ID NO: 761399 - RNA, 19 nt, Artificial Sequence
  Description of Artificial Sequence: Synthetic oligonucleotide
uagccauggcauuuuaacg

SEQ ID NO: 761400 - RNA, 19 nt, Artificial Sequence
  Description of Artificial Sequence: Synthetic oligonucleotide
aagaucauauccucuacua

SEQ ID NO: 761401 - RNA, 19 nt, Artificial Sequence
  Description of Artificial Sequence: Synthetic oligonucleotide
acggucauugcccuuugcc

SEQ ID NO: 761402 - RNA, 19 nt, Artificial Sequence
  Description of Artificial Sequence: Synthetic oligonucleotide
auguugauuggcuggcagc

SEQ ID NO: 761403 - RNA, 19 nt, Artificial Sequence
  Description of Artificial Sequence: Synthetic oligonucleotide
uuucguugcaaauacuaaa

SEQ ID NO: 761404 - RNA, 19 nt, Artificial Sequence
  Description of Artificial Sequence: Synthetic oligonucleotide
uaauacugcucuauagacu

SEQ ID NO: 761405 - RNA, 19 nt, Artificial Sequence
  Description of Artificial Sequence: Synthetic oligonucleotide
ggauauucuaccauguagg

SEQ ID NO: 761406 - RNA, 19 nt, Artificial Sequence
  Description of Artificial Sequence: Synthetic oligonucleotide
ucguugcaaauacuaaaag

SEQ ID NO: 761407 - RNA, 19 nt, Artificial Sequence
  Description of Artificial Sequence: Synthetic oligonucleotide
aaauuaguggcugguagcu

SEQ ID NO: 761408 - RNA, 19 nt, Artificial Sequence
  Description of Artificial Sequence: Synthetic oligonucleotide
acuaaaaguuuuauuguag

SEQ ID NO: 761409 - RNA, 19 nt, Artificial Sequence
  Description of Artificial Sequence: Synthetic oligonucleotide
gaggacauccacuuccucc

SEQ ID NO: 761410 - RNA, 19 nt, Artificial Sequence
  Description of Artificial Sequence: Synthetic oligonucleotide
aacacaagggucaccacag

SEQ ID NO: 761411 - RNA, 19 nt, Artificial Sequence
  Description of Artificial Sequence: Synthetic oligonucleotide
auagaguccccaucauggc

SEQ ID NO: 761412 - RNA, 19 nt, Artificial Sequence
  Description of Artificial Sequence: Synthetic oligonucleotide
agguagagccaacaggcac

SEQ ID NO: 761413 - RNA, 19 nt, Artificial Sequence
  Description of Artificial Sequence: Synthetic oligonucleotide
caaauuaguggcugguagc

SEQ ID NO: 761414 - RNA, 19 nt, Artificial Sequence
  Description of Artificial Sequence: Synthetic oligonucleotide
uagaguuggcggcagguag

SEQ ID NO: 761415 - RNA, 19 nt, Artificial Sequence
  Description of Artificial Sequence: Synthetic oligonucleotide
agcagcugugaccugaguc

SEQ ID NO: 761416 - RNA, 19 nt, Artificial Sequence
  Description of Artificial Sequence: Synthetic oligonucleotide
uuuucguugcaaauacuaa

SEQ ID NO: 761417 - RNA, 19 nt, Artificial Sequence
  Description of Artificial Sequence: Synthetic oligonucleotide
uuaagaucauauccucuac

SEQ ID NO: 761418 - RNA, 19 nt, Artificial Sequence
  Description of Artificial Sequence: Synthetic oligonucleotide
ucauuuggauauucuacca

SEQ ID NO: 761419 - RNA, 19 nt, Artificial Sequence
  Description of Artificial Sequence: Synthetic oligonucleotide
uccucuacuacugaggcgu

SEQ ID NO: 761420 - RNA, 19 nt, Artificial Sequence
  Description of Artificial Sequence: Synthetic oligonucleotide
ggaaggaaugguaugauag

SEQ ID NO: 761421 - RNA, 19 nt, Artificial Sequence
  Description of Artificial Sequence: Synthetic oligonucleotide
guauccaacugccagcgcc

SEQ ID NO: 761422 - RNA, 19 nt, Artificial Sequence
  Description of Artificial Sequence: Synthetic oligonucleotide
uugaggaauuagcagcagc

SEQ ID NO: 761423 - RNA, 19 nt, Artificial Sequence
  Description of Artificial Sequence: Synthetic oligonucleotide
uuuaacgcacagaaaccac

SEQ ID NO: 761424 - RNA, 19 nt, Artificial Sequence
  Description of Artificial Sequence: Synthetic oligonucleotide
ucuuaagccaaaagcaauu

SEQ ID NO: 761425 - RNA, 19 nt, Artificial Sequence
  Description of Artificial Sequence: Synthetic oligonucleotide
agaaaauccagaaaaggaa

SEQ ID NO: 761426 - RNA, 19 nt, Artificial Sequence
  Description of Artificial Sequence: Synthetic oligonucleotide
cucuauagacuuugcagag

SEQ ID NO: 761427 - RNA, 19 nt, Artificial Sequence
  Description of Artificial Sequence: Synthetic oligonucleotide
ucgucagcaguggagaagg

SEQ ID NO: 761428 - RNA, 19 nt, Artificial Sequence
  Description of Artificial Sequence: Synthetic oligonucleotide
cauaauacugcucuauaga

SEQ ID NO: 761429 - RNA, 19 nt, Artificial Sequence
  Description of Artificial Sequence: Synthetic oligonucleotide
caaguuggccaaauuagug

SEQ ID NO: 761430 - RNA, 19 nt, Artificial Sequence
  Description of Artificial Sequence: Synthetic oligonucleotide
uucgugagaaaauccagaa

SEQ ID NO: 761431 - RNA, 19 nt, Artificial Sequence
  Description of Artificial Sequence: Synthetic oligonucleotide
uagauggaaggaaugguau

SEQ ID NO: 761432 - RNA, 19 nt, Artificial Sequence
  Description of Artificial Sequence: Synthetic oligonucleotide
ugugggccuaucaauuugc

SEQ ID NO: 761433 - RNA, 19 nt, Artificial Sequence
  Description of Artificial Sequence: Synthetic oligonucleotide
agaaucucaucucuuccug

SEQ ID NO: 761434 - RNA, 19 nt, Artificial Sequence
  Description of Artificial Sequence: Synthetic oligonucleotide
aaccauggcagcgacacca

SEQ ID NO: 761435 - RNA, 19 nt, Artificial Sequence
  Description of Artificial Sequence: Synthetic oligonucleotide
uacgaaguaaagacacgca

SEQ ID NO: 761436 - RNA, 19 nt, Artificial Sequence
  Description of Artificial Sequence: Synthetic oligonucleotide
uucgugguaagguacaguu

SEQ ID NO: 761437 - RNA, 19 nt, Artificial Sequence
  Description of Artificial Sequence: Synthetic oligonucleotide
acaauagucccuccaccuc

SEQ ID NO: 761438 - RNA, 19 nt, Artificial Sequence
  Description of Artificial Sequence: Synthetic oligonucleotide
aacacuuuucguacgguca

SEQ ID NO: 761439 - RNA, 19 nt, Artificial Sequence
  Description of Artificial Sequence: Synthetic oligonucleotide
agucaguacauccucaaua

SEQ ID NO: 761440 - RNA, 19 nt, Artificial Sequence
  Description of Artificial Sequence: Synthetic oligonucleotide
caugcuaagacccuucaga

SEQ ID NO: 761441 - RNA, 19 nt, Artificial Sequence
  Description of Artificial Sequence: Synthetic oligonucleotide
guacgaaguaaagacacgc

SEQ ID NO: 761442 - RNA, 19 nt, Artificial Sequence
  Description of Artificial Sequence: Synthetic oligonucleotide
cugguagcugcaauguugc

SEQ ID NO: 761443 - RNA, 19 nt, Artificial Sequence
  Description of Artificial Sequence: Synthetic oligonucleotide
cacgccaacaaccuuggag

SEQ ID NO: 761444 - RNA, 19 nt, Artificial Sequence
  Description of Artificial Sequence: Synthetic oligonucleotide
auuuggccacuacugauug

SEQ ID NO: 761445 - RNA, 19 nt, Artificial Sequence
  Description of Artificial Sequence: Synthetic oligonucleotide
gacacagcuaucaugugac

SEQ ID NO: 761446 - RNA, 19 nt, Artificial Sequence
  Description of Artificial Sequence: Synthetic oligonucleotide
ggcaaguuugccaaguugg

SEQ ID NO: 761447 - RNA, 19 nt, Artificial Sequence
  Description of Artificial Sequence: Synthetic oligonucleotide
ucuucuguguaaugucacc

SEQ ID NO: 761448 - RNA, 19 nt, Artificial Sequence
  Description of Artificial Sequence: Synthetic oligonucleotide
uaacgcacagaaaccaccu

SEQ ID NO: 761449 - RNA, 19 nt, Artificial Sequence
  Description of Artificial Sequence: Synthetic oligonucleotide
ugguauccaacugccagcg

SEQ ID NO: 761450 - RNA, 19 nt, Artificial Sequence
  Description of Artificial Sequence: Synthetic oligonucleotide
uuuggugacugaguugucc

SEQ ID NO: 761451 - RNA, 19 nt, Artificial Sequence
  Description of Artificial Sequence: Synthetic oligonucleotide
gguaagguacaguuuagug

SEQ ID NO: 761452 - RNA, 19 nt, Artificial Sequence
  Description of Artificial Sequence: Synthetic oligonucleotide
guuggcggcagguagaauc

SEQ ID NO: 761453 - RNA, 19 nt, Artificial Sequence
  Description of Artificial Sequence: Synthetic oligonucleotide
ugguuaaggucuguacugg

SEQ ID NO: 761454 - RNA, 19 nt, Artificial Sequence
  Description of Artificial Sequence: Synthetic oligonucleotide
cagugagcgauguucuugg

SEQ ID NO: 761455 - RNA, 19 nt, Artificial Sequence
  Description of Artificial Sequence: Synthetic oligonucleotide
agcacuuacgaccuguuuu

SEQ ID NO: 761456 - RNA, 19 nt, Artificial Sequence
  Description of Artificial Sequence: Synthetic oligonucleotide
uuuggaccaacugcuuugg

SEQ ID NO: 761457 - RNA, 19 nt, Artificial Sequence
  Description of Artificial Sequence: Synthetic oligonucleotide
cucaauagaguccccauca

SEQ ID NO: 761458 - RNA, 19 nt, Artificial Sequence
  Description of Artificial Sequence: Synthetic oligonucleotide
caguuuagugcccggaggc

SEQ ID NO: 761459 - RNA, 19 nt, Artificial Sequence
  Description of Artificial Sequence: Synthetic oligonucleotide
agauggaaggaaugguaug

SEQ ID NO: 761460 - RNA, 19 nt, Artificial Sequence
  Description of Artificial Sequence: Synthetic oligonucleotide
guaaagacacgcaagcuga

SEQ ID NO: 761461 - RNA, 19 nt, Artificial Sequence
  Description of Artificial Sequence: Synthetic oligonucleotide
ucaugcuaagacccuucag

SEQ ID NO: 761462 - RNA, 19 nt, Artificial Sequence
  Description of Artificial Sequence: Synthetic oligonucleotide
gucaauccgagucaguaca

SEQ ID NO: 761463 - RNA, 19 nt, Artificial Sequence
  Description of Artificial Sequence: Synthetic oligonucleotide
uggaaucuuggauucuucu

SEQ ID NO: 761464 - RNA, 19 nt, Artificial Sequence
  Description of Artificial Sequence: Synthetic oligonucleotide
aaguaaagacacgcaagcu

SEQ ID NO: 761465 - RNA, 19 nt, Artificial Sequence
  Description of Artificial Sequence: Synthetic oligonucleotide
uguugauuggcuggcagcu

SEQ ID NO: 761466 - RNA, 19 nt, Artificial Sequence
  Description of Artificial Sequence: Synthetic oligonucleotide
acaaggauuuggccacuac

SEQ ID NO: 761467 - RNA, 19 nt, Artificial Sequence
  Description of Artificial Sequence: Synthetic oligonucleotide
caacaauagucccuccacc

SEQ ID NO: 761468 - RNA, 19 nt, Artificial Sequence
  Description of Artificial Sequence: Synthetic oligonucleotide
cucacgauugcuuuggcaa

SEQ ID NO: 761469 - RNA, 19 nt, Artificial Sequence
  Description of Artificial Sequence: Synthetic oligonucleotide
gauuucuuugggaacccug

SEQ ID NO: 761470 - RNA, 19 nt, Artificial Sequence
  Description of Artificial Sequence: Synthetic oligonucleotide
aauagucccuccaccuccg

SEQ ID NO: 761471 - RNA, 19 nt, Artificial Sequence
  Description of Artificial Sequence: Synthetic oligonucleotide
uaacacuuuucguacgguc

SEQ ID NO: 761472 - RNA, 19 nt, Artificial Sequence
  Description of Artificial Sequence: Synthetic oligonucleotide
ucuacuacugaggcguaug

SEQ ID NO: 761473 - RNA, 19 nt, Artificial Sequence
  Description of Artificial Sequence: Synthetic oligonucleotide
ugacacacaguuagaugga

SEQ ID NO: 761474 - RNA, 19 nt, Artificial Sequence
  Description of Artificial Sequence: Synthetic oligonucleotide
ugaggggacacagcuauca

SEQ ID NO: 761475 - RNA, 19 nt, Artificial Sequence
  Description of Artificial Sequence: Synthetic oligonucleotide
cugguauccaacugccagc

SEQ ID NO: 761476 - RNA, 19 nt, Artificial Sequence
  Description of Artificial Sequence: Synthetic oligonucleotide
ugucaauccgagucaguac

SEQ ID NO: 761477 - RNA, 19 nt, Artificial Sequence
  Description of Artificial Sequence: Synthetic oligonucleotide
ucuaccauguaggucucug

SEQ ID NO: 761478 - RNA, 19 nt, Artificial Sequence
  Description of Artificial Sequence: Synthetic oligonucleotide
cuauagacuuugcagagaa

SEQ ID NO: 761479 - RNA, 19 nt, Artificial Sequence
  Description of Artificial Sequence: Synthetic oligonucleotide
ggcaacaaggauuuggcca

SEQ ID NO: 761480 - RNA, 19 nt, Artificial Sequence
  Description of Artificial Sequence: Synthetic oligonucleotide
uauccaacugccagcgccu

SEQ ID NO: 761481 - RNA, 19 nt, Artificial Sequence
  Description of Artificial Sequence: Synthetic oligonucleotide
uggugacagaagaacuggc

SEQ ID NO: 761482 - RNA, 19 nt, Artificial Sequence
  Description of Artificial Sequence: Synthetic oligonucleotide
aguacauccucaauagagu

SEQ ID NO: 761483 - RNA, 19 nt, Artificial Sequence
  Description of Artificial Sequence: Synthetic oligonucleotide
agggaauguugauuggcug

SEQ ID NO: 761484 - RNA, 19 nt, Artificial Sequence
  Description of Artificial Sequence: Synthetic oligonucleotide
uguugcaaauugccuggug

SEQ ID NO: 761485 - RNA, 19 nt, Artificial Sequence
  Description of Artificial Sequence: Synthetic oligonucleotide
uacugcucuauagacuuug

SEQ ID NO: 761486 - RNA, 19 nt, Artificial Sequence
  Description of Artificial Sequence: Synthetic oligonucleotide
gguaagguagagccaacag

SEQ ID NO: 761487 - RNA, 19 nt, Artificial Sequence
  Description of Artificial Sequence: Synthetic oligonucleotide
auugccuggugaauauuac

SEQ ID NO: 761488 - RNA, 19 nt, Artificial Sequence
  Description of Artificial Sequence: Synthetic oligonucleotide
cuuugcagagaaacagcug

SEQ ID NO: 761489 - RNA, 19 nt, Artificial Sequence
  Description of Artificial Sequence: Synthetic oligonucleotide
augguaugauagccauggc

SEQ ID NO: 761490 - RNA, 19 nt, Artificial Sequence
  Description of Artificial Sequence: Synthetic oligonucleotide
cugagucuugguuaagguc

SEQ ID NO: 761491 - RNA, 19 nt, Artificial Sequence
  Description of Artificial Sequence: Synthetic oligonucleotide
uaauuauguuacacauuau

SEQ ID NO: 761492 - RNA, 19 nt, Artificial Sequence
  Description of Artificial Sequence: Synthetic oligonucleotide
uucccuuuuccugaggggu

SEQ ID NO: 761493 - RNA, 19 nt, Artificial Sequence
  Description of Artificial Sequence: Synthetic oligonucleotide
auuacucacugugauuucu

SEQ ID NO: 761494 - RNA, 19 nt, Artificial Sequence
  Description of Artificial Sequence: Synthetic oligonucleotide
gacucaaugcccugugaca

SEQ ID NO: 761495 - RNA, 19 nt, Artificial Sequence
  Description of Artificial Sequence: Synthetic oligonucleotide
uuggcggcagguagaaucu

SEQ ID NO: 761496 - RNA, 19 nt, Artificial Sequence
  Description of Artificial Sequence: Synthetic oligonucleotide
aauuaguggcugguagcug

SEQ ID NO: 761497 - RNA, 19 nt, Artificial Sequence
  Description of Artificial Sequence: Synthetic oligonucleotide
ucgugagaaaauccagaaa

SEQ ID NO: 761498 - RNA, 19 nt, Artificial Sequence
  Description of Artificial Sequence: Synthetic oligonucleotide
aggcaaguuugccaaguug

SEQ ID NO: 761499 - RNA, 19 nt, Artificial Sequence
  Description of Artificial Sequence: Synthetic oligonucleotide
uuuaggggugucagguggu

SEQ ID NO: 761500 - RNA, 19 nt, Artificial Sequence
  Description of Artificial Sequence: Synthetic oligonucleotide
cuuuucguacggucauugc

SEQ ID NO: 761501 - RNA, 19 nt, Artificial Sequence
  Description of Artificial Sequence: Synthetic oligonucleotide
ccauaauacugcucuauag

SEQ ID NO: 761502 - RNA, 19 nt, Artificial Sequence
  Description of Artificial Sequence: Synthetic oligonucleotide
uucagucuccccauguauu

SEQ ID NO: 761503 - RNA, 19 nt, Artificial Sequence
  Description of Artificial Sequence: Synthetic oligonucleotide
gcucuauagacuuugcaga

SEQ ID NO: 761504 - RNA, 19 nt, Artificial Sequence
  Description of Artificial Sequence: Synthetic oligonucleotide
ggaccaacugcuuugguga

SEQ ID NO: 761505 - RNA, 19 nt, Artificial Sequence
  Description of Artificial Sequence: Synthetic oligonucleotide
accugagucuugguuaagg

SEQ ID NO: 761506 - RNA, 19 nt, Artificial Sequence
  Description of Artificial Sequence: Synthetic oligonucleotide
ugcugucugguauccaacu

SEQ ID NO: 761507 - RNA, 19 nt, Artificial Sequence
  Description of Artificial Sequence: Synthetic oligonucleotide
ccaaauuaguggcugguag

SEQ ID NO: 761508 - RNA, 19 nt, Artificial Sequence
  Description of Artificial Sequence: Synthetic oligonucleotide
gguagaaucucaucucuuc

SEQ ID NO: 761509 - RNA, 19 nt, Artificial Sequence
  Description of Artificial Sequence: Synthetic oligonucleotide
ucaauagaguccccaucau

SEQ ID NO: 761510 - RNA, 19 nt, Artificial Sequence
  Description of Artificial Sequence: Synthetic oligonucleotide
uggccuuuaagaucauauc

SEQ ID NO: 761511 - RNA, 19 nt, Artificial Sequence
  Description of Artificial Sequence: Synthetic oligonucleotide
gcaacaaggauuuggccac

SEQ ID NO: 761512 - RNA, 19 nt, Artificial Sequence
  Description of Artificial Sequence: Synthetic oligonucleotide
ucacgauugcuuuggcaac

SEQ ID NO: 761513 - RNA, 19 nt, Artificial Sequence
  Description of Artificial Sequence: Synthetic oligonucleotide
uguauuuguucgugagaaa

SEQ ID NO: 761514 - RNA, 19 nt, Artificial Sequence
  Description of Artificial Sequence: Synthetic oligonucleotide
uggcaacaaggauuuggcc

SEQ ID NO: 761515 - RNA, 19 nt, Artificial Sequence
  Description of Artificial Sequence: Synthetic oligonucleotide
ucugguggaguguaaccau

SEQ ID NO: 761516 - RNA, 19 nt, Artificial Sequence
  Description of Artificial Sequence: Synthetic oligonucleotide
ccuuaucucaugcuaagac

SEQ ID NO: 761517 - RNA, 19 nt, Artificial Sequence
  Description of Artificial Sequence: Synthetic oligonucleotide
agucuccccauguauuugu

SEQ ID NO: 761518 - RNA, 19 nt, Artificial Sequence
  Description of Artificial Sequence: Synthetic oligonucleotide
gcagcgacaccagugagcg

SEQ ID NO: 761519 - RNA, 19 nt, Artificial Sequence
  Description of Artificial Sequence: Synthetic oligonucleotide
ugggccuaucaauuugcug

SEQ ID NO: 761520 - RNA, 19 nt, Artificial Sequence
  Description of Artificial Sequence: Synthetic oligonucleotide
uaacauacauggagacuau

SEQ ID NO: 761521 - RNA, 19 nt, Artificial Sequence
  Description of Artificial Sequence: Synthetic oligonucleotide
aggaugacaggcacucugg

SEQ ID NO: 761522 - RNA, 19 nt, Artificial Sequence
  Description of Artificial Sequence: Synthetic oligonucleotide
agcgacaccagugagcgau

SEQ ID NO: 761523 - RNA, 19 nt, Artificial Sequence
  Description of Artificial Sequence: Synthetic oligonucleotide
ucagucuccccauguauuu

SEQ ID NO: 761524 - RNA, 19 nt, Artificial Sequence
  Description of Artificial Sequence: Synthetic oligonucleotide
acacuuuucguacggucau

SEQ ID NO: 761525 - RNA, 19 nt, Artificial Sequence
  Description of Artificial Sequence: Synthetic oligonucleotide
ugaggcguauguguucuug

SEQ ID NO: 761526 - RNA, 19 nt, Artificial Sequence
  Description of Artificial Sequence: Synthetic oligonucleotide
aacaaauccugagccuaga

SEQ ID NO: 761527 - RNA, 19 nt, Artificial Sequence
  Description of Artificial Sequence: Synthetic oligonucleotide
acugcucuauagacuuugc

SEQ ID NO: 761528 - RNA, 19 nt, Artificial Sequence
  Description of Artificial Sequence: Synthetic oligonucleotide
uugcccuuugccacucagc

SEQ ID NO: 761529 - RNA, 19 nt, Artificial Sequence
  Description of Artificial Sequence: Synthetic oligonucleotide
aucccaaucuucuguguaa

SEQ ID NO: 761530 - RNA, 19 nt, Artificial Sequence
  Description of Artificial Sequence: Synthetic oligonucleotide
aggcguauguguucuugug

SEQ ID NO: 761531 - RNA, 19 nt, Artificial Sequence
  Description of Artificial Sequence: Synthetic oligonucleotide
gucagcuuuaaagggcugc

SEQ ID NO: 761532 - RNA, 19 nt, Artificial Sequence
  Description of Artificial Sequence: Synthetic oligonucleotide
cuugguuaaggucuguacu

SEQ ID NO: 761533 - RNA, 19 nt, Artificial Sequence
  Description of Artificial Sequence: Synthetic oligonucleotide
ucaauccgagucaguacau

SEQ ID NO: 761534 - RNA, 19 nt, Artificial Sequence
  Description of Artificial Sequence: Synthetic oligonucleotide
uucguacggucauugcccu

SEQ ID NO: 761535 - RNA, 19 nt, Artificial Sequence
  Description of Artificial Sequence: Synthetic oligonucleotide
cauguauuuguucgugaga

SEQ ID NO: 761536 - RNA, 19 nt, Artificial Sequence
  Description of Artificial Sequence: Synthetic oligonucleotide
ccauguauuuguucgugag

SEQ ID NO: 761537 - RNA, 19 nt, Artificial Sequence
  Description of Artificial Sequence: Synthetic oligonucleotide
gugaccugagucuugguua

SEQ ID NO: 761538 - RNA, 19 nt, Artificial Sequence
  Description of Artificial Sequence: Synthetic oligonucleotide
uccucaauagaguccccau

SEQ ID NO: 761539 - RNA, 19 nt, Artificial Sequence
  Description of Artificial Sequence: Synthetic oligonucleotide
gggccuaucaauuugcugu

SEQ ID NO: 761540 - RNA, 19 nt, Artificial Sequence
  Description of Artificial Sequence: Synthetic oligonucleotide
uguagcucgcaggauggcu

SEQ ID NO: 761541 - RNA, 19 nt, Artificial Sequence
  Description of Artificial Sequence: Synthetic oligonucleotide
uacuacugaggcguaugug

SEQ ID NO: 761542 - RNA, 19 nt, Artificial Sequence
  Description of Artificial Sequence: Synthetic oligonucleotide
ugguaagguacaguuuagu

SEQ ID NO: 761543 - RNA, 19 nt, Artificial Sequence
  Description of Artificial Sequence: Synthetic oligonucleotide
caccuuuccucaaacacaa

SEQ ID NO: 761544 - RNA, 19 nt, Artificial Sequence
  Description of Artificial Sequence: Synthetic oligonucleotide
uuuggccacuacugauugc

SEQ ID NO: 761545 - RNA, 19 nt, Artificial Sequence
  Description of Artificial Sequence: Synthetic oligonucleotide
cagaaaaggaauguugcaa

SEQ ID NO: 761546 - RNA, 19 nt, Artificial Sequence
  Description of Artificial Sequence: Synthetic oligonucleotide
gagaugcugucugguaucc

SEQ ID NO: 761547 - RNA, 19 nt, Artificial Sequence
  Description of Artificial Sequence: Synthetic oligonucleotide
ugugucgucuacagaccaa

SEQ ID NO: 761548 - RNA, 19 nt, Artificial Sequence
  Description of Artificial Sequence: Synthetic oligonucleotide
uucgucuucagcgguucug

SEQ ID NO: 761549 - RNA, 19 nt, Artificial Sequence
  Description of Artificial Sequence: Synthetic oligonucleotide
guucgugagaaaauccaga

SEQ ID NO: 761550 - RNA, 19 nt, Artificial Sequence
  Description of Artificial Sequence: Synthetic oligonucleotide
cuucugaacaaaucugugu

SEQ ID NO: 761551 - RNA, 19 nt, Artificial Sequence
  Description of Artificial Sequence: Synthetic oligonucleotide
ugugugggccuaucaauuu

SEQ ID NO: 761552 - RNA, 19 nt, Artificial Sequence
  Description of Artificial Sequence: Synthetic oligonucleotide
cuuuggugacagaagaacu

SEQ ID NO: 761553 - RNA, 19 nt, Artificial Sequence
  Description of Artificial Sequence: Synthetic oligonucleotide
ccuuuaagaucauauccuc

SEQ ID NO: 761554 - RNA, 19 nt, Artificial Sequence
  Description of Artificial Sequence: Synthetic oligonucleotide
ggcguauguguucuugugc

SEQ ID NO: 761555 - RNA, 19 nt, Artificial Sequence
  Description of Artificial Sequence: Synthetic oligonucleotide
cagcuuccggcagaggucg

SEQ ID NO: 761556 - RNA, 19 nt, Artificial Sequence
  Description of Artificial Sequence: Synthetic oligonucleotide
ucgucuucagcgguucuga

SEQ ID NO: 761557 - RNA, 19 nt, Artificial Sequence
  Description of Artificial Sequence: Synthetic oligonucleotide
cuuuaagaucauauccucu

SEQ ID NO: 761558 - RNA, 19 nt, Artificial Sequence
  Description of Artificial Sequence: Synthetic oligonucleotide
aucugcucucauuuggaua

SEQ ID NO: 761559 - RNA, 19 nt, Artificial Sequence
  Description of Artificial Sequence: Synthetic oligonucleotide
ggacucaaugcccugugac

SEQ ID NO: 761560 - RNA, 19 nt, Artificial Sequence
  Description of Artificial Sequence: Synthetic oligonucleotide
uagcucgcaggauggcucc

SEQ ID NO: 761561 - RNA, 19 nt, Artificial Sequence
  Description of Artificial Sequence: Synthetic oligonucleotide
uccgcucacgauugcuuug

SEQ ID NO: 761562 - RNA, 19 nt, Artificial Sequence
  Description of Artificial Sequence: Synthetic oligonucleotide
gacccuucagagccuguac

SEQ ID NO: 761563 - RNA, 19 nt, Artificial Sequence
  Description of Artificial Sequence: Synthetic oligonucleotide
agagccuguacgaaguaaa

SEQ ID NO: 761564 - RNA, 19 nt, Artificial Sequence
  Description of Artificial Sequence: Synthetic oligonucleotide
gauugcuuuggcaacuccu

SEQ ID NO: 761565 - RNA, 19 nt, Artificial Sequence
  Description of Artificial Sequence: Synthetic oligonucleotide
uuccagccauaauacugcu

SEQ ID NO: 761566 - RNA, 19 nt, Artificial Sequence
  Description of Artificial Sequence: Synthetic oligonucleotide
agccuguacgaaguaaaga

SEQ ID NO: 761567 - RNA, 19 nt, Artificial Sequence
  Description of Artificial Sequence: Synthetic oligonucleotide
ccuguuguggacacaugag

SEQ ID NO: 761568 - RNA, 19 nt, Artificial Sequence
  Description of Artificial Sequence: Synthetic oligonucleotide
cagaaaccaccuuuccuca

SEQ ID NO: 761569 - RNA, 19 nt, Artificial Sequence
  Description of Artificial Sequence: Synthetic oligonucleotide
acgcaagcugacaaaguug

SEQ ID NO: 761570 - RNA, 19 nt, Artificial Sequence
  Description of Artificial Sequence: Synthetic oligonucleotide
acaagggucaccacaguuu

SEQ ID NO: 761571 - RNA, 19 nt, Artificial Sequence
  Description of Artificial Sequence: Synthetic oligonucleotide
cuggcaucaucaccuuuug

SEQ ID NO: 761572 - RNA, 19 nt, Artificial Sequence
  Description of Artificial Sequence: Synthetic oligonucleotide
uaaccauggcagcgacacc

SEQ ID NO: 761573 - RNA, 19 nt, Artificial Sequence
  Description of Artificial Sequence: Synthetic oligonucleotide
caacaggcacgccaacaac

SEQ ID NO: 761574 - RNA, 19 nt, Artificial Sequence
  Description of Artificial Sequence: Synthetic oligonucleotide
ggucugguggaguguaacc

SEQ ID NO: 761575 - RNA, 19 nt, Artificial Sequence
  Description of Artificial Sequence: Synthetic oligonucleotide
ugucgucuacagaccaaau

SEQ ID NO: 761576 - RNA, 19 nt, Artificial Sequence
  Description of Artificial Sequence: Synthetic oligonucleotide
cacaguuagauggaaggaa

SEQ ID NO: 761577 - RNA, 19 nt, Artificial Sequence
  Description of Artificial Sequence: Synthetic oligonucleotide
gugguaagguacaguuuag

SEQ ID NO: 761578 - RNA, 19 nt, Artificial Sequence
  Description of Artificial Sequence: Synthetic oligonucleotide
gucuucagcgguucugaga

SEQ ID NO: 761579 - RNA, 19 nt, Artificial Sequence
  Description of Artificial Sequence: Synthetic oligonucleotide
gaccaacugcuuuggugac

SEQ ID NO: 761580 - RNA, 19 nt, Artificial Sequence
  Description of Artificial Sequence: Synthetic oligonucleotide
ucgugguaagguacaguuu

SEQ ID NO: 761581 - RNA, 19 nt, Artificial Sequence
  Description of Artificial Sequence: Synthetic oligonucleotide
uguucgucuucagcgguuc

SEQ ID NO: 761582 - RNA, 19 nt, Artificial Sequence
  Description of Artificial Sequence: Synthetic oligonucleotide
acgauugcuuuggcaacuc

SEQ ID NO: 761583 - RNA, 19 nt, Artificial Sequence
  Description of Artificial Sequence: Synthetic oligonucleotide
ggcuccuugaggaauuagc

SEQ ID NO: 761584 - RNA, 19 nt, Artificial Sequence
  Description of Artificial Sequence: Synthetic oligonucleotide
guuagauggaaggaauggu

SEQ ID NO: 761585 - RNA, 19 nt, Artificial Sequence
  Description of Artificial Sequence: Synthetic oligonucleotide
cacugucaauccgagucag

SEQ ID NO: 761586 - RNA, 19 nt, Artificial Sequence
  Description of Artificial Sequence: Synthetic oligonucleotide
agguaagguagagccaaca

SEQ ID NO: 761587 - RNA, 19 nt, Artificial Sequence
  Description of Artificial Sequence: Synthetic oligonucleotide
agacacgcaagcugacaaa

SEQ ID NO: 761588 - RNA, 19 nt, Artificial Sequence
  Description of Artificial Sequence: Synthetic oligonucleotide
ugggaaccaucuucacugu

SEQ ID NO: 761589 - RNA, 19 nt, Artificial Sequence
  Description of Artificial Sequence: Synthetic oligonucleotide
uacggucauugcccuuugc

SEQ ID NO: 761590 - RNA, 19 nt, Artificial Sequence
  Description of Artificial Sequence: Synthetic oligonucleotide
ugcucucauuuggauauuc

SEQ ID NO: 761591 - RNA, 19 nt, Artificial Sequence
  Description of Artificial Sequence: Synthetic oligonucleotide
uguauucacugguccucau

SEQ ID NO: 761592 - RNA, 19 nt, Artificial Sequence
  Description of Artificial Sequence: Synthetic oligonucleotide
ucagagccuguacgaagua

SEQ ID NO: 761593 - RNA, 19 nt, Artificial Sequence
  Description of Artificial Sequence: Synthetic oligonucleotide
cauguaggucucuguccac

SEQ ID NO: 761594 - RNA, 19 nt, Artificial Sequence
  Description of Artificial Sequence: Synthetic oligonucleotide
agaaaccaccuuuccucaa

SEQ ID NO: 761595 - RNA, 19 nt, Artificial Sequence
  Description of Artificial Sequence: Synthetic oligonucleotide
uccugagccuagaguuggc

SEQ ID NO: 761596 - RNA, 19 nt, Artificial Sequence
  Description of Artificial Sequence: Synthetic oligonucleotide
cuguucgugguaagguaca

SEQ ID NO: 761597 - RNA, 19 nt, Artificial Sequence
  Description of Artificial Sequence: Synthetic oligonucleotide
guagcucgcaggauggcuc

SEQ ID NO: 761598 - RNA, 19 nt, Artificial Sequence
  Description of Artificial Sequence: Synthetic oligonucleotide
caaauccugagccuagagu

SEQ ID NO: 761599 - RNA, 19 nt, Artificial Sequence
  Description of Artificial Sequence: Synthetic oligonucleotide
cugcaaggugaucccaauc

SEQ ID NO: 761600 - RNA, 19 nt, Artificial Sequence
  Description of Artificial Sequence: Synthetic oligonucleotide
cucaugcuaagacccuuca

SEQ ID NO: 761601 - RNA, 19 nt, Artificial Sequence
  Description of Artificial Sequence: Synthetic oligonucleotide
agugcccggaggcaaguuu

SEQ ID NO: 761602 - RNA, 19 nt, Artificial Sequence
  Description of Artificial Sequence: Synthetic oligonucleotide
ccuaucaauuugcuguguc

SEQ ID NO: 761603 - RNA, 19 nt, Artificial Sequence
  Description of Artificial Sequence: Synthetic oligonucleotide
gcugucugguauccaacug

SEQ ID NO: 761604 - RNA, 19 nt, Artificial Sequence
  Description of Artificial Sequence: Synthetic oligonucleotide
cugucaauccgagucagua

SEQ ID NO: 761605 - RNA, 19 nt, Artificial Sequence
  Description of Artificial Sequence: Synthetic oligonucleotide
gcuuuaaagggcugcaccu

SEQ ID NO: 761606 - RNA, 19 nt, Artificial Sequence
  Description of Artificial Sequence: Synthetic oligonucleotide
aacaaggauuuggccacua

SEQ ID NO: 761607 - RNA, 19 nt, Artificial Sequence
  Description of Artificial Sequence: Synthetic oligonucleotide
agugagcgauguucuuggu

SEQ ID NO: 761608 - RNA, 19 nt, Artificial Sequence
  Description of Artificial Sequence: Synthetic oligonucleotide
gcuguucgugguaagguac

SEQ ID NO: 761609 - RNA, 19 nt, Artificial Sequence
  Description of Artificial Sequence: Synthetic oligonucleotide
gcaaguuugccaaguuggc

SEQ ID NO: 761610 - RNA, 19 nt, Artificial Sequence
  Description of Artificial Sequence: Synthetic oligonucleotide
ccuguacgaaguaaagaca

SEQ ID NO: 761611 - RNA, 19 nt, Artificial Sequence
  Description of Artificial Sequence: Synthetic oligonucleotide
guuaaggucuguacuggcu

SEQ ID NO: 761612 - RNA, 19 nt, Artificial Sequence
  Description of Artificial Sequence: Synthetic oligonucleotide
cuggugaauauuacucacu

SEQ ID NO: 761613 - RNA, 19 nt, Artificial Sequence
  Description of Artificial Sequence: Synthetic oligonucleotide
guuuagugcccggaggcaa

SEQ ID NO: 761614 - RNA, 19 nt, Artificial Sequence
  Description of Artificial Sequence: Synthetic oligonucleotide
uuagugcccggaggcaagu

SEQ ID NO: 761615 - RNA, 19 nt, Artificial Sequence
  Description of Artificial Sequence: Synthetic oligonucleotide
gaggcguauguguucuugu

SEQ ID NO: 761616 - RNA, 19 nt, Artificial Sequence
  Description of Artificial Sequence: Synthetic oligonucleotide
caauccgagucaguacauc

SEQ ID NO: 761617 - RNA, 19 nt, Artificial Sequence
  Description of Artificial Sequence: Synthetic oligonucleotide
gcagaggucgucagcagug

SEQ ID NO: 761618 - RNA, 19 nt, Artificial Sequence
  Description of Artificial Sequence: Synthetic oligonucleotide
guacaguuuagugcccgga

SEQ ID NO: 761619 - RNA, 19 nt, Artificial Sequence
  Description of Artificial Sequence: Synthetic oligonucleotide
agcccuccuuuucccaaug

SEQ ID NO: 761620 - RNA, 19 nt, Artificial Sequence
  Description of Artificial Sequence: Synthetic oligonucleotide
uugccaaguuggccaaauu

SEQ ID NO: 761621 - RNA, 19 nt, Artificial Sequence
  Description of Artificial Sequence: Synthetic oligonucleotide
cauuuggauauucuaccau

SEQ ID NO: 761622 - RNA, 19 nt, Artificial Sequence
  Description of Artificial Sequence: Synthetic oligonucleotide
uggcuccuugaggaauuag

SEQ ID NO: 761623 - RNA, 19 nt, Artificial Sequence
  Description of Artificial Sequence: Synthetic oligonucleotide
aggcacucuggcucacugu

SEQ ID NO: 761624 - RNA, 19 nt, Artificial Sequence
  Description of Artificial Sequence: Synthetic oligonucleotide
caacuugcuuuggaccaac

SEQ ID NO: 761625 - RNA, 19 nt, Artificial Sequence
  Description of Artificial Sequence: Synthetic oligonucleotide
cucgcaggauggcuccuug

SEQ ID NO: 761626 - RNA, 19 nt, Artificial Sequence
  Description of Artificial Sequence: Synthetic oligonucleotide
cucaaugcccugugacaca

SEQ ID NO: 761627 - RNA, 19 nt, Artificial Sequence
  Description of Artificial Sequence: Synthetic oligonucleotide
ccagaaaaggaauguugca

SEQ ID NO: 761628 - RNA, 19 nt, Artificial Sequence
  Description of Artificial Sequence: Synthetic oligonucleotide
aucaccuuuugaaguaauu

SEQ ID NO: 761629 - RNA, 19 nt, Artificial Sequence
  Description of Artificial Sequence: Synthetic oligonucleotide
agggguucuugcuguucgu

SEQ ID NO: 761630 - RNA, 19 nt, Artificial Sequence
  Description of Artificial Sequence: Synthetic oligonucleotide
cuuuggugacugaguuguc

SEQ ID NO: 761631 - RNA, 19 nt, Artificial Sequence
  Description of Artificial Sequence: Synthetic oligonucleotide
cagcuuuaaagggcugcac

SEQ ID NO: 761632 - RNA, 19 nt, Artificial Sequence
  Description of Artificial Sequence: Synthetic oligonucleotide
gccacuacugauugccaca

SEQ ID NO: 761633 - RNA, 19 nt, Artificial Sequence
  Description of Artificial Sequence: Synthetic oligonucleotide
acaacuugcuuuggaccaa

SEQ ID NO: 761634 - RNA, 19 nt, Artificial Sequence
  Description of Artificial Sequence: Synthetic oligonucleotide
cauucagucuccccaugua

SEQ ID NO: 761635 - RNA, 19 nt, Artificial Sequence
  Description of Artificial Sequence: Synthetic oligonucleotide
ggcacgccaacaaccuugg

SEQ ID NO: 761636 - RNA, 19 nt, Artificial Sequence
  Description of Artificial Sequence: Synthetic oligonucleotide
guacggucauugcccuuug

SEQ ID NO: 761637 - RNA, 19 nt, Artificial Sequence
  Description of Artificial Sequence: Synthetic oligonucleotide
gugucgucuacagaccaaa

SEQ ID NO: 761638 - RNA, 19 nt, Artificial Sequence
  Description of Artificial Sequence: Synthetic oligonucleotide
cacuguauucacugguccu

SEQ ID NO: 761639 - RNA, 19 nt, Artificial Sequence
  Description of Artificial Sequence: Synthetic oligonucleotide
gucgucuacagaccaaauu

SEQ ID NO: 761640 - RNA, 19 nt, Artificial Sequence
  Description of Artificial Sequence: Synthetic oligonucleotide
ggugaauauuacucacugu

SEQ ID NO: 761641 - RNA, 19 nt, Artificial Sequence
  Description of Artificial Sequence: Synthetic oligonucleotide
acacgcaagcugacaaagu

SEQ ID NO: 761642 - RNA, 19 nt, Artificial Sequence
  Description of Artificial Sequence: Synthetic oligonucleotide
cacgcaagcugacaaaguu

SEQ ID NO: 761643 - RNA, 19 nt, Artificial Sequence
  Description of Artificial Sequence: Synthetic oligonucleotide
ggaagguaagguagagcca

SEQ ID NO: 761644 - RNA, 19 nt, Artificial Sequence
  Description of Artificial Sequence: Synthetic oligonucleotide
cuacuacugaggcguaugu

SEQ ID NO: 761645 - RNA, 19 nt, Artificial Sequence
  Description of Artificial Sequence: Synthetic oligonucleotide
aaucugugugugggccuau

SEQ ID NO: 761646 - RNA, 19 nt, Artificial Sequence
  Description of Artificial Sequence: Synthetic oligonucleotide
gaguuggcggcagguagaa

SEQ ID NO: 761647 - RNA, 19 nt, Artificial Sequence
  Description of Artificial Sequence: Synthetic oligonucleotide
gcucacgauugcuuuggca

SEQ ID NO: 761648 - RNA, 19 nt, Artificial Sequence
  Description of Artificial Sequence: Synthetic oligonucleotide
ccaccuccgcucacgauug

SEQ ID NO: 761649 - RNA, 19 nt, Artificial Sequence
  Description of Artificial Sequence: Synthetic oligonucleotide
gguauccaacugccagcgc

SEQ ID NO: 761650 - RNA, 19 nt, Artificial Sequence
  Description of Artificial Sequence: Synthetic oligonucleotide
guaacacuuuucguacggu

SEQ ID NO: 761651 - RNA, 19 nt, Artificial Sequence
  Description of Artificial Sequence: Synthetic oligonucleotide
gaggaauuagcagcagcuu

SEQ ID NO: 761652 - RNA, 19 nt, Artificial Sequence
  Description of Artificial Sequence: Synthetic oligonucleotide
cgcaggauggcuccuugag

SEQ ID NO: 761653 - RNA, 19 nt, Artificial Sequence
  Description of Artificial Sequence: Synthetic oligonucleotide
cuacugaggcguauguguu

SEQ ID NO: 761654 - RNA, 19 nt, Artificial Sequence
  Description of Artificial Sequence: Synthetic oligonucleotide
ggagacuauuaaaucauuu

SEQ ID NO: 761655 - RNA, 19 nt, Artificial Sequence
  Description of Artificial Sequence: Synthetic oligonucleotide
cugcuccguggccuuuaag

SEQ ID NO: 761656 - RNA, 19 nt, Artificial Sequence
  Description of Artificial Sequence: Synthetic oligonucleotide
ccgcucacgauugcuuugg

SEQ ID NO: 761657 - RNA, 19 nt, Artificial Sequence
  Description of Artificial Sequence: Synthetic oligonucleotide
gaggcaaguuugccaaguu

SEQ ID NO: 761658 - RNA, 19 nt, Artificial Sequence
  Description of Artificial Sequence: Synthetic oligonucleotide
ccaacaggcacgccaacaa

SEQ ID NO: 761659 - RNA, 19 nt, Artificial Sequence
  Description of Artificial Sequence: Synthetic oligonucleotide
cugugacacacaguuagau

SEQ ID NO: 761660 - RNA, 19 nt, Artificial Sequence
  Description of Artificial Sequence: Synthetic oligonucleotide
cuagaguuggcggcaggua

SEQ ID NO: 761661 - RNA, 19 nt, Artificial Sequence
  Description of Artificial Sequence: Synthetic oligonucleotide
cacaagggucaccacaguu

SEQ ID NO: 761662 - RNA, 19 nt, Artificial Sequence
  Description of Artificial Sequence: Synthetic oligonucleotide
gggucugguggaguguaac

SEQ ID NO: 761663 - RNA, 19 nt, Artificial Sequence
  Description of Artificial Sequence: Synthetic oligonucleotide
gaggggacacagcuaucau

SEQ ID NO: 761664 - RNA, 19 nt, Artificial Sequence
  Description of Artificial Sequence: Synthetic oligonucleotide
cagagccuguacgaaguaa

SEQ ID NO: 761665 - RNA, 19 nt, Artificial Sequence
  Description of Artificial Sequence: Synthetic oligonucleotide
auguucgucuucagcgguu

SEQ ID NO: 761666 - RNA, 19 nt, Artificial Sequence
  Description of Artificial Sequence: Synthetic oligonucleotide
cuucagcgguucugagaga

SEQ ID NO: 761667 - RNA, 19 nt, Artificial Sequence
  Description of Artificial Sequence: Synthetic oligonucleotide
cgcaagcugacaaaguugu

SEQ ID NO: 761668 - RNA, 19 nt, Artificial Sequence
  Description of Artificial Sequence: Synthetic oligonucleotide
ucguacggucauugcccuu

SEQ ID NO: 761669 - RNA, 19 nt, Artificial Sequence
  Description of Artificial Sequence: Synthetic oligonucleotide
cacgauugcuuuggcaacu

SEQ ID NO: 761670 - RNA, 19 nt, Artificial Sequence
  Description of Artificial Sequence: Synthetic oligonucleotide
guucgugguaagguacagu

SEQ ID NO: 761671 - RNA, 19 nt, Artificial Sequence
  Description of Artificial Sequence: Synthetic oligonucleotide
ggcggcagguagaaucuca

SEQ ID NO: 761672 - RNA, 19 nt, Artificial Sequence
  Description of Artificial Sequence: Synthetic oligonucleotide
gagcgauguucuugguuuu

SEQ ID NO: 761673 - RNA, 19 nt, Artificial Sequence
  Description of Artificial Sequence: Synthetic oligonucleotide
gccuuaucucaugcuaaga

SEQ ID NO: 761674 - RNA, 19 nt, Artificial Sequence
  Description of Artificial Sequence: Synthetic oligonucleotide
auacugcucuauagacuuu

SEQ ID NO: 761675 - RNA, 19 nt, Artificial Sequence
  Description of Artificial Sequence: Synthetic oligonucleotide
gugucaggugguggaaucu

SEQ ID NO: 761676 - RNA, 19 nt, Artificial Sequence
  Description of Artificial Sequence: Synthetic oligonucleotide
caccuccgcucacgauugc

SEQ ID NO: 761677 - RNA, 19 nt, Artificial Sequence
  Description of Artificial Sequence: Synthetic oligonucleotide
ucccuccaccuccgcucac

SEQ ID NO: 761678 - RNA, 19 nt, Artificial Sequence
  Description of Artificial Sequence: Synthetic oligonucleotide
cuccagcacuuacgaccug

SEQ ID NO: 761679 - RNA, 19 nt, Artificial Sequence
  Description of Artificial Sequence: Synthetic oligonucleotide
guucgucuucagcgguucu

SEQ ID NO: 761680 - RNA, 19 nt, Artificial Sequence
  Description of Artificial Sequence: Synthetic oligonucleotide
gggaaccaucuucacugua

SEQ ID NO: 761681 - RNA, 19 nt, Artificial Sequence
  Description of Artificial Sequence: Synthetic oligonucleotide
uagugcccggaggcaaguu

SEQ ID NO: 761682 - RNA, 19 nt, Artificial Sequence
  Description of Artificial Sequence: Synthetic oligonucleotide
aguuggcggcagguagaau

SEQ ID NO: 761683 - RNA, 19 nt, Artificial Sequence
  Description of Artificial Sequence: Synthetic oligonucleotide
cuccgcucacgauugcuuu

SEQ ID NO: 761684 - RNA, 19 nt, Artificial Sequence
  Description of Artificial Sequence: Synthetic oligonucleotide
agcucgcaggauggcuccu

SEQ ID NO: 761685 - RNA, 19 nt, Artificial Sequence
  Description of Artificial Sequence: Synthetic oligonucleotide
ggcucccuuuucugaaacu

SEQ ID NO: 761686 - RNA, 19 nt, Artificial Sequence
  Description of Artificial Sequence: Synthetic oligonucleotide
ggugacugaguugucccuu

SEQ ID NO: 761687 - RNA, 19 nt, Artificial Sequence
  Description of Artificial Sequence: Synthetic oligonucleotide
gcgacaccagugagcgaug

SEQ ID NO: 761688 - RNA, 19 nt, Artificial Sequence
  Description of Artificial Sequence: Synthetic oligonucleotide
ccucauucagucuccccau

SEQ ID NO: 761689 - RNA, 19 nt, Artificial Sequence
  Description of Artificial Sequence: Synthetic oligonucleotide
caacaaggauuuggccacu

SEQ ID NO: 761690 - RNA, 19 nt, Artificial Sequence
  Description of Artificial Sequence: Synthetic oligonucleotide
cagcacuuacgaccuguuu

SEQ ID NO: 761691 - RNA, 19 nt, Artificial Sequence
  Description of Artificial Sequence: Synthetic oligonucleotide
cucuacuacugaggcguau

SEQ ID NO: 761692 - RNA, 19 nt, Artificial Sequence
  Description of Artificial Sequence: Synthetic oligonucleotide
ccuagaguuggcggcaggu

SEQ ID NO: 761693 - RNA, 19 nt, Artificial Sequence
  Description of Artificial Sequence: Synthetic oligonucleotide
cagcgacaccagugagcga

SEQ ID NO: 761694 - RNA, 19 nt, Artificial Sequence
  Description of Artificial Sequence: Synthetic oligonucleotide
cgcucacgauugcuuuggc

SEQ ID NO: 761695 - RNA, 19 nt, Artificial Sequence
  Description of Artificial Sequence: Synthetic oligonucleotide
gcugcuccguggccuuuaa

SEQ ID NO: 761696 - RNA, 19 nt, Artificial Sequence
  Description of Artificial Sequence: Synthetic oligonucleotide
cugagggguucuugcuguu

SEQ ID NO: 761697 - RNA, 19 nt, Artificial Sequence
  Description of Artificial Sequence: Synthetic oligonucleotide
gccuaucaauuugcugugu

SEQ ID NO: 761698 - RNA, 19 nt, Artificial Sequence
  Description of Artificial Sequence: Synthetic oligonucleotide
gggaacccuguugggagau

SEQ ID NO: 761699 - RNA, 19 nt, Artificial Sequence
  Description of Artificial Sequence: Synthetic oligonucleotide
ccggcucccuuuucugaaa

SEQ ID NO: 761700 - RNA, 19 nt, Artificial Sequence
  Description of Artificial Sequence: Synthetic oligonucleotide
gcggcagguagaaucucau

SEQ ID NO: 761701 - RNA, 19 nt, Artificial Sequence
  Description of Artificial Sequence: Synthetic oligonucleotide
cuccaccuccgcucacgau

SEQ ID NO: 761702 - RNA, 19 nt, Artificial Sequence
  Description of Artificial Sequence: Synthetic oligonucleotide
ccucuacuacugaggcgua

SEQ ID NO: 761703 - RNA, 19 nt, Artificial Sequence
  Description of Artificial Sequence: Synthetic oligonucleotide
ccccuuucacagucacaua

SEQ ID NO: 761704 - RNA, 19 nt, Artificial Sequence
  Description of Artificial Sequence: Synthetic oligonucleotide
ccagcacuuacgaccuguu

SEQ ID NO: 761705 - RNA, 19 nt, Artificial Sequence
  Description of Artificial Sequence: Synthetic oligonucleotide
ccacucagcagcccuccuu

SEQ ID NO: 761706 - RNA, 19 nt, Artificial Sequence
  Description of Artificial Sequence: Synthetic oligonucleotide
ccauggcagcgacaccagu

SEQ ID NO: 761707 - RNA, 19 nt, Artificial Sequence
  Description of Artificial Sequence: Synthetic oligonucleotide
gcucgcaggauggcuccuu

SEQ ID NO: 761708 - RNA, 19 nt, Artificial Sequence
  Description of Artificial Sequence: Synthetic oligonucleotide
ccguggccuuuaagaucau

SEQ ID NO: 761709 - RNA, 19 nt, Artificial Sequence
  Description of Artificial Sequence: Synthetic oligonucleotide
uuuuguucgaaauagacag

SEQ ID NO: 761710 - RNA, 19 nt, Artificial Sequence
  Description of Artificial Sequence: Synthetic oligonucleotide
aaaaugguaaaucugccag

SEQ ID NO: 761711 - RNA, 19 nt, Artificial Sequence
  Description of Artificial Sequence: Synthetic oligonucleotide
aauguucagucuuugacuc

SEQ ID NO: 761712 - RNA, 19 nt, Artificial Sequence
  Description of Artificial Sequence: Synthetic oligonucleotide
ugccauauugccaucaacg

SEQ ID NO: 761713 - RNA, 19 nt, Artificial Sequence
  Description of Artificial Sequence: Synthetic oligonucleotide
aaauagacagcuaacaucu

SEQ ID NO: 761714 - RNA, 19 nt, Artificial Sequence
  Description of Artificial Sequence: Synthetic oligonucleotide
caaagaucgacucucaggg

SEQ ID NO: 761715 - RNA, 19 nt, Artificial Sequence
  Description of Artificial Sequence: Synthetic oligonucleotide
aucaccaugaaacuugaac

SEQ ID NO: 761716 - RNA, 19 nt, Artificial Sequence
  Description of Artificial Sequence: Synthetic oligonucleotide
aaccaguaaauguucaguc

SEQ ID NO: 761717 - RNA, 19 nt, Artificial Sequence
  Description of Artificial Sequence: Synthetic oligonucleotide
uugacaguuauauuacagg

SEQ ID NO: 761718 - RNA, 19 nt, Artificial Sequence
  Description of Artificial Sequence: Synthetic oligonucleotide
aaauguucagucuuugacu

SEQ ID NO: 761719 - RNA, 19 nt, Artificial Sequence
  Description of Artificial Sequence: Synthetic oligonucleotide
aagaucgacucucaggguc

SEQ ID NO: 761720 - RNA, 19 nt, Artificial Sequence
  Description of Artificial Sequence: Synthetic oligonucleotide
uuuguaucauaucugaguc

SEQ ID NO: 761721 - RNA, 19 nt, Artificial Sequence
  Description of Artificial Sequence: Synthetic oligonucleotide
uaacccucaaacuucgucg

SEQ ID NO: 761722 - RNA, 19 nt, Artificial Sequence
  Description of Artificial Sequence: Synthetic oligonucleotide
aaggcguuugcuuggaagg

SEQ ID NO: 761723 - RNA, 19 nt, Artificial Sequence
  Description of Artificial Sequence: Synthetic oligonucleotide
ugagguaucaagaaggcau

SEQ ID NO: 761724 - RNA, 19 nt, Artificial Sequence
  Description of Artificial Sequence: Synthetic oligonucleotide
agucuauagaaucuaguuc

SEQ ID NO: 761725 - RNA, 19 nt, Artificial Sequence
  Description of Artificial Sequence: Synthetic oligonucleotide
ugaaguucuugcaaguaag

SEQ ID NO: 761726 - RNA, 19 nt, Artificial Sequence
  Description of Artificial Sequence: Synthetic oligonucleotide
uucacuauagguagcgucc

SEQ ID NO: 761727 - RNA, 19 nt, Artificial Sequence
  Description of Artificial Sequence: Synthetic oligonucleotide
cacacuuuacagaugaacc

SEQ ID NO: 761728 - RNA, 19 nt, Artificial Sequence
  Description of Artificial Sequence: Synthetic oligonucleotide
aaguucuugcaaguaaggc

SEQ ID NO: 761729 - RNA, 19 nt, Artificial Sequence
  Description of Artificial Sequence: Synthetic oligonucleotide
aagauuucggaguugugcu

SEQ ID NO: 761730 - RNA, 19 nt, Artificial Sequence
  Description of Artificial Sequence: Synthetic oligonucleotide
ugacaguuauauuacagga

SEQ ID NO: 761731 - RNA, 19 nt, Artificial Sequence
  Description of Artificial Sequence: Synthetic oligonucleotide
ucucauuggaaaaugguaa

SEQ ID NO: 761732 - RNA, 19 nt, Artificial Sequence
  Description of Artificial Sequence: Synthetic oligonucleotide
ugguaaaucugccaggcug

SEQ ID NO: 761733 - RNA, 19 nt, Artificial Sequence
  Description of Artificial Sequence: Synthetic oligonucleotide
gcuauaaucaccaugaaac

SEQ ID NO: 761734 - RNA, 19 nt, Artificial Sequence
  Description of Artificial Sequence: Synthetic oligonucleotide
aagucuauagaaucuaguu

SEQ ID NO: 761735 - RNA, 19 nt, Artificial Sequence
  Description of Artificial Sequence: Synthetic oligonucleotide
uuugcaaggcguuugcuug

SEQ ID NO: 761736 - RNA, 19 nt, Artificial Sequence
  Description of Artificial Sequence: Synthetic oligonucleotide
uggguaaugacuuuuccac

SEQ ID NO: 761737 - RNA, 19 nt, Artificial Sequence
  Description of Artificial Sequence: Synthetic oligonucleotide
aacauuaagcugugugguc

SEQ ID NO: 761738 - RNA, 19 nt, Artificial Sequence
  Description of Artificial Sequence: Synthetic oligonucleotide
uuuacugacacagcaaaga

SEQ ID NO: 761739 - RNA, 19 nt, Artificial Sequence
  Description of Artificial Sequence: Synthetic oligonucleotide
uguaucauaucugaguccu

SEQ ID NO: 761740 - RNA, 19 nt, Artificial Sequence
  Description of Artificial Sequence: Synthetic oligonucleotide
uguuuacugacacagcaaa

SEQ ID NO: 761741 - RNA, 19 nt, Artificial Sequence
  Description of Artificial Sequence: Synthetic oligonucleotide
uuuuggcuaagguugaacu

SEQ ID NO: 761742 - RNA, 19 nt, Artificial Sequence
  Description of Artificial Sequence: Synthetic oligonucleotide
acuuuuguucgaaauagac

SEQ ID NO: 761743 - RNA, 19 nt, Artificial Sequence
  Description of Artificial Sequence: Synthetic oligonucleotide
cacagcaacccuaaaauac

SEQ ID NO: 761744 - RNA, 19 nt, Artificial Sequence
  Description of Artificial Sequence: Synthetic oligonucleotide
gaagauuucggaguugugc

SEQ ID NO: 761745 - RNA, 19 nt, Artificial Sequence
  Description of Artificial Sequence: Synthetic oligonucleotide
ucucaaagcauguaagagu

SEQ ID NO: 761746 - RNA, 19 nt, Artificial Sequence
  Description of Artificial Sequence: Synthetic oligonucleotide
ugccguaagucccucaggg

SEQ ID NO: 761747 - RNA, 19 nt, Artificial Sequence
  Description of Artificial Sequence: Synthetic oligonucleotide
gaaggcaugaagauuucgg

SEQ ID NO: 761748 - RNA, 19 nt, Artificial Sequence
  Description of Artificial Sequence: Synthetic oligonucleotide
ugugagcgcacuaucacgc

SEQ ID NO: 761749 - RNA, 19 nt, Artificial Sequence
  Description of Artificial Sequence: Synthetic oligonucleotide
aaaucucauuggaaaaugg

SEQ ID NO: 761750 - RNA, 19 nt, Artificial Sequence
  Description of Artificial Sequence: Synthetic oligonucleotide
ugucacuccgauuuaaccu

SEQ ID NO: 761751 - RNA, 19 nt, Artificial Sequence
  Description of Artificial Sequence: Synthetic oligonucleotide
cuguuguuccuucauauag

SEQ ID NO: 761752 - RNA, 19 nt, Artificial Sequence
  Description of Artificial Sequence: Synthetic oligonucleotide
gaagggaugcugucgagag

SEQ ID NO: 761753 - RNA, 19 nt, Artificial Sequence
  Description of Artificial Sequence: Synthetic oligonucleotide
cuuuuaacccucaaacuuc

SEQ ID NO: 761754 - RNA, 19 nt, Artificial Sequence
  Description of Artificial Sequence: Synthetic oligonucleotide
acagcuaacaucugccgag

SEQ ID NO: 761755 - RNA, 19 nt, Artificial Sequence
  Description of Artificial Sequence: Synthetic oligonucleotide
aaucucucauccucuagca

SEQ ID NO: 761756 - RNA, 19 nt, Artificial Sequence
  Description of Artificial Sequence: Synthetic oligonucleotide
uauaccacagcaugaaaau

SEQ ID NO: 761757 - RNA, 19 nt, Artificial Sequence
  Description of Artificial Sequence: Synthetic oligonucleotide
uccgauuuaaccugcagau

SEQ ID NO: 761758 - RNA, 19 nt, Artificial Sequence
  Description of Artificial Sequence: Synthetic oligonucleotide
aauuauaccacagcaugaa

SEQ ID NO: 761759 - RNA, 19 nt, Artificial Sequence
  Description of Artificial Sequence: Synthetic oligonucleotide
uagaaucuaguucuggcuc

SEQ ID NO: 761760 - RNA, 19 nt, Artificial Sequence
  Description of Artificial Sequence: Synthetic oligonucleotide
uucaucaguauucgucucc

SEQ ID NO: 761761 - RNA, 19 nt, Artificial Sequence
  Description of Artificial Sequence: Synthetic oligonucleotide
uguaagaguuacauucaac

SEQ ID NO: 761762 - RNA, 19 nt, Artificial Sequence
  Description of Artificial Sequence: Synthetic oligonucleotide
uagagaugugcgcacgggg

SEQ ID NO: 761763 - RNA, 19 nt, Artificial Sequence
  Description of Artificial Sequence: Synthetic oligonucleotide
cuuagcaucguuaagccaa

SEQ ID NO: 761764 - RNA, 19 nt, Artificial Sequence
  Description of Artificial Sequence: Synthetic oligonucleotide
aaaccaguaaauguucagu

SEQ ID NO: 761765 - RNA, 19 nt, Artificial Sequence
  Description of Artificial Sequence: Synthetic oligonucleotide
uuggguaaugacuuuucca

SEQ ID NO: 761766 - RNA, 19 nt, Artificial Sequence
  Description of Artificial Sequence: Synthetic oligonucleotide
uugugagcgcacuaucacg

SEQ ID NO: 761767 - RNA, 19 nt, Artificial Sequence
  Description of Artificial Sequence: Synthetic oligonucleotide
ucauccucuagcacucccg

SEQ ID NO: 761768 - RNA, 19 nt, Artificial Sequence
  Description of Artificial Sequence: Synthetic oligonucleotide
auucgucuccuuaucaacc

SEQ ID NO: 761769 - RNA, 19 nt, Artificial Sequence
  Description of Artificial Sequence: Synthetic oligonucleotide
ucgaaauagacagcuaaca

SEQ ID NO: 761770 - RNA, 19 nt, Artificial Sequence
  Description of Artificial Sequence: Synthetic oligonucleotide
uucucacgaacaaugauuu

SEQ ID NO: 761771 - RNA, 19 nt, Artificial Sequence
  Description of Artificial Sequence: Synthetic oligonucleotide
ugacacggcauccaagucu

SEQ ID NO: 761772 - RNA, 19 nt, Artificial Sequence
  Description of Artificial Sequence: Synthetic oligonucleotide
aaauuauaccacagcauga

SEQ ID NO: 761773 - RNA, 19 nt, Artificial Sequence
  Description of Artificial Sequence: Synthetic oligonucleotide
uuaacccucaaacuucguc

SEQ ID NO: 761774 - RNA, 19 nt, Artificial Sequence
  Description of Artificial Sequence: Synthetic oligonucleotide
acacuuuacagaugaaccu

SEQ ID NO: 761775 - RNA, 19 nt, Artificial Sequence
  Description of Artificial Sequence: Synthetic oligonucleotide
uuguucgaaauagacagcu

SEQ ID NO: 761776 - RNA, 19 nt, Artificial Sequence
  Description of Artificial Sequence: Synthetic oligonucleotide
auuuaaccugcagauguac

SEQ ID NO: 761777 - RNA, 19 nt, Artificial Sequence
  Description of Artificial Sequence: Synthetic oligonucleotide
uuugacucucccuuggaaa

SEQ ID NO: 761778 - RNA, 19 nt, Artificial Sequence
  Description of Artificial Sequence: Synthetic oligonucleotide
aaacuucgucguucggugg

SEQ ID NO: 761779 - RNA, 19 nt, Artificial Sequence
  Description of Artificial Sequence: Synthetic oligonucleotide
uuuguucgaaauagacagc

SEQ ID NO: 761780 - RNA, 19 nt, Artificial Sequence
  Description of Artificial Sequence: Synthetic oligonucleotide
ucugccguaagucccucag

SEQ ID NO: 761781 - RNA, 19 nt, Artificial Sequence
  Description of Artificial Sequence: Synthetic oligonucleotide
cuuaucaaccagugugggg

SEQ ID NO: 761782 - RNA, 19 nt, Artificial Sequence
  Description of Artificial Sequence: Synthetic oligonucleotide
aaggacugcaccugccgag

SEQ ID NO: 761783 - RNA, 19 nt, Artificial Sequence
  Description of Artificial Sequence: Synthetic oligonucleotide
uauucgucuccuuaucaac

SEQ ID NO: 761784 - RNA, 19 nt, Artificial Sequence
  Description of Artificial Sequence: Synthetic oligonucleotide
gcugcuacggucuuugggg

SEQ ID NO: 761785 - RNA, 19 nt, Artificial Sequence
  Description of Artificial Sequence: Synthetic oligonucleotide
aaguaaggcugacacggca

SEQ ID NO: 761786 - RNA, 19 nt, Artificial Sequence
  Description of Artificial Sequence: Synthetic oligonucleotide
agguugaacugucacuguc

SEQ ID NO: 761787 - RNA, 19 nt, Artificial Sequence
  Description of Artificial Sequence: Synthetic oligonucleotide
ucguuaagccaacuccucc

SEQ ID NO: 761788 - RNA, 19 nt, Artificial Sequence
  Description of Artificial Sequence: Synthetic oligonucleotide
uucauggaagcuucguaga

SEQ ID NO: 761789 - RNA, 19 nt, Artificial Sequence
  Description of Artificial Sequence: Synthetic oligonucleotide
cauuagaggccucucuuag

SEQ ID NO: 761790 - RNA, 19 nt, Artificial Sequence
  Description of Artificial Sequence: Synthetic oligonucleotide
gucacuccgauuuaaccug

SEQ ID NO: 761791 - RNA, 19 nt, Artificial Sequence
  Description of Artificial Sequence: Synthetic oligonucleotide
aguugugcuauaaucacca

SEQ ID NO: 761792 - RNA, 19 nt, Artificial Sequence
  Description of Artificial Sequence: Synthetic oligonucleotide
agagaugugcgcacggggc

SEQ ID NO: 761793 - RNA, 19 nt, Artificial Sequence
  Description of Artificial Sequence: Synthetic oligonucleotide
cuucacuauagguagcguc

SEQ ID NO: 761794 - RNA, 19 nt, Artificial Sequence
  Description of Artificial Sequence: Synthetic oligonucleotide
acuaucacgcuguuucuca

SEQ ID NO: 761795 - RNA, 19 nt, Artificial Sequence
  Description of Artificial Sequence: Synthetic oligonucleotide
cauauugccaucaacggcu

SEQ ID NO: 761796 - RNA, 19 nt, Artificial Sequence
  Description of Artificial Sequence: Synthetic oligonucleotide
gcaaagaucgacucucagg

SEQ ID NO: 761797 - RNA, 19 nt, Artificial Sequence
  Description of Artificial Sequence: Synthetic oligonucleotide
guucgaaauagacagcuaa

SEQ ID NO: 761798 - RNA, 19 nt, Artificial Sequence
  Description of Artificial Sequence: Synthetic oligonucleotide
ucaaacuucgucguucggu

SEQ ID NO: 761799 - RNA, 19 nt, Artificial Sequence
  Description of Artificial Sequence: Synthetic oligonucleotide
ucuuuugucugcucagccu

SEQ ID NO: 761800 - RNA, 19 nt, Artificial Sequence
  Description of Artificial Sequence: Synthetic oligonucleotide
uggacuuuuguucgaaaua

SEQ ID NO: 761801 - RNA, 19 nt, Artificial Sequence
  Description of Artificial Sequence: Synthetic oligonucleotide
accaguaaauguucagucu

SEQ ID NO: 761802 - RNA, 19 nt, Artificial Sequence
  Description of Artificial Sequence: Synthetic oligonucleotide
caauuuugucuccacgcag

SEQ ID NO: 761803 - RNA, 19 nt, Artificial Sequence
  Description of Artificial Sequence: Synthetic oligonucleotide
aacccucaaacuucgucgu

SEQ ID NO: 761804 - RNA, 19 nt, Artificial Sequence
  Description of Artificial Sequence: Synthetic oligonucleotide
aacuucgucguucggugga

SEQ ID NO: 761805 - RNA, 19 nt, Artificial Sequence
  Description of Artificial Sequence: Synthetic oligonucleotide
ucauggaagcuucguagac

SEQ ID NO: 761806 - RNA, 19 nt, Artificial Sequence
  Description of Artificial Sequence: Synthetic oligonucleotide
cugucacuccgauuuaacc

SEQ ID NO: 761807 - RNA, 19 nt, Artificial Sequence
  Description of Artificial Sequence: Synthetic oligonucleotide
uccuaucugcaccugggca

SEQ ID NO: 761808 - RNA, 19 nt, Artificial Sequence
  Description of Artificial Sequence: Synthetic oligonucleotide
ugacgagucagcgaggccu

SEQ ID NO: 761809 - RNA, 19 nt, Artificial Sequence
  Description of Artificial Sequence: Synthetic oligonucleotide
agggacgggaugcugaucu

SEQ ID NO: 761810 - RNA, 19 nt, Artificial Sequence
  Description of Artificial Sequence: Synthetic oligonucleotide
aucauaucugaguccuauc

SEQ ID NO: 761811 - RNA, 19 nt, Artificial Sequence
  Description of Artificial Sequence: Synthetic oligonucleotide
caaggcguuugcuuggaag

SEQ ID NO: 761812 - RNA, 19 nt, Artificial Sequence
  Description of Artificial Sequence: Synthetic oligonucleotide
gacuaccccacuuuuguuc

SEQ ID NO: 761813 - RNA, 19 nt, Artificial Sequence
  Description of Artificial Sequence: Synthetic oligonucleotide
accaagugaacuucagccu

SEQ ID NO: 761814 - RNA, 19 nt, Artificial Sequence
  Description of Artificial Sequence: Synthetic oligonucleotide
acauuaagcugugugguca

SEQ ID NO: 761815 - RNA, 19 nt, Artificial Sequence
  Description of Artificial Sequence: Synthetic oligonucleotide
uuuugcaaggcguuugcuu

SEQ ID NO: 761816 - RNA, 19 nt, Artificial Sequence
  Description of Artificial Sequence: Synthetic oligonucleotide
acgcaauuuugucuccacg

SEQ ID NO: 761817 - RNA, 19 nt, Artificial Sequence
  Description of Artificial Sequence: Synthetic oligonucleotide
aaagaucgacucucagggu

SEQ ID NO: 761818 - RNA, 19 nt, Artificial Sequence
  Description of Artificial Sequence: Synthetic oligonucleotide
uggcucguuggauugaagu

SEQ ID NO: 761819 - RNA, 19 nt, Artificial Sequence
  Description of Artificial Sequence: Synthetic oligonucleotide
ucucccuuggaaagugagc

SEQ ID NO: 761820 - RNA, 19 nt, Artificial Sequence
  Description of Artificial Sequence: Synthetic oligonucleotide
gccauauugccaucaacgg

SEQ ID NO: 761821 - RNA, 19 nt, Artificial Sequence
  Description of Artificial Sequence: Synthetic oligonucleotide
uccacaacggugacguccu

SEQ ID NO: 761822 - RNA, 19 nt, Artificial Sequence
  Description of Artificial Sequence: Synthetic oligonucleotide
ucacgaagggaugcugucg

SEQ ID NO: 761823 - RNA, 19 nt, Artificial Sequence
  Description of Artificial Sequence: Synthetic oligonucleotide
uugcaaggcguuugcuugg

SEQ ID NO: 761824 - RNA, 19 nt, Artificial Sequence
  Description of Artificial Sequence: Synthetic oligonucleotide
ggaauggaaaaguucuuac

SEQ ID NO: 761825 - RNA, 19 nt, Artificial Sequence
  Description of Artificial Sequence: Synthetic oligonucleotide
augaagauuucggaguugu

SEQ ID NO: 761826 - RNA, 19 nt, Artificial Sequence
  Description of Artificial Sequence: Synthetic oligonucleotide
auggacuuuuguucgaaau

SEQ ID NO: 761827 - RNA, 19 nt, Artificial Sequence
  Description of Artificial Sequence: Synthetic oligonucleotide
gaguccuaucugcaccugg

SEQ ID NO: 761828 - RNA, 19 nt, Artificial Sequence
  Description of Artificial Sequence: Synthetic oligonucleotide
ucugacgagucagcgaggc

SEQ ID NO: 761829 - RNA, 19 nt, Artificial Sequence
  Description of Artificial Sequence: Synthetic oligonucleotide
gaucuuugcucgugugaag

SEQ ID NO: 761830 - RNA, 19 nt, Artificial Sequence
  Description of Artificial Sequence: Synthetic oligonucleotide
ugaagauuucggaguugug

SEQ ID NO: 761831 - RNA, 19 nt, Artificial Sequence
  Description of Artificial Sequence: Synthetic oligonucleotide
gcccuuuuaacccucaaac

SEQ ID NO: 761832 - RNA, 19 nt, Artificial Sequence
  Description of Artificial Sequence: Synthetic oligonucleotide
aagguugaacugucacugu

SEQ ID NO: 761833 - RNA, 19 nt, Artificial Sequence
  Description of Artificial Sequence: Synthetic oligonucleotide
ugguguggaauggaaaagu

SEQ ID NO: 761834 - RNA, 19 nt, Artificial Sequence
  Description of Artificial Sequence: Synthetic oligonucleotide
cauggaagcuucguagacc

SEQ ID NO: 761835 - RNA, 19 nt, Artificial Sequence
  Description of Artificial Sequence: Synthetic oligonucleotide
cauccucuagcacucccgg

SEQ ID NO: 761836 - RNA, 19 nt, Artificial Sequence
  Description of Artificial Sequence: Synthetic oligonucleotide
cucucccugagcuuucagc

SEQ ID NO: 761837 - RNA, 19 nt, Artificial Sequence
  Description of Artificial Sequence: Synthetic oligonucleotide
gacagcuaacaucugccga

SEQ ID NO: 761838 - RNA, 19 nt, Artificial Sequence
  Description of Artificial Sequence: Synthetic oligonucleotide
gagguaucaagaaggcaug

SEQ ID NO: 761839 - RNA, 19 nt, Artificial Sequence
  Description of Artificial Sequence: Synthetic oligonucleotide
gagacugggaugcuccuga

SEQ ID NO: 761840 - RNA, 19 nt, Artificial Sequence
  Description of Artificial Sequence: Synthetic oligonucleotide
ucauuggaaaaugguaaau

SEQ ID NO: 761841 - RNA, 19 nt, Artificial Sequence
  Description of Artificial Sequence: Synthetic oligonucleotide
ucuccuuaucaaccagugu

SEQ ID NO: 761842 - RNA, 19 nt, Artificial Sequence
  Description of Artificial Sequence: Synthetic oligonucleotide
gcgagaaguaacauuaagc

SEQ ID NO: 761843 - RNA, 19 nt, Artificial Sequence
  Description of Artificial Sequence: Synthetic oligonucleotide
ugcuacggucuuuggggcg

SEQ ID NO: 761844 - RNA, 19 nt, Artificial Sequence
  Description of Artificial Sequence: Synthetic oligonucleotide
ucgucuccuuaucaaccag

SEQ ID NO: 761845 - RNA, 19 nt, Artificial Sequence
  Description of Artificial Sequence: Synthetic oligonucleotide
gcggauggacuuuuguucg

SEQ ID NO: 761846 - RNA, 19 nt, Artificial Sequence
  Description of Artificial Sequence: Synthetic oligonucleotide
ugucgagagcucaggcugc

SEQ ID NO: 761847 - RNA, 19 nt, Artificial Sequence
  Description of Artificial Sequence: Synthetic oligonucleotide
uguuucauggaagcuucgu

SEQ ID NO: 761848 - RNA, 19 nt, Artificial Sequence
  Description of Artificial Sequence: Synthetic oligonucleotide
ucacuccgauuuaaccugc

SEQ ID NO: 761849 - RNA, 19 nt, Artificial Sequence
  Description of Artificial Sequence: Synthetic oligonucleotide
guggucacacgucaucagc

SEQ ID NO: 761850 - RNA, 19 nt, Artificial Sequence
  Description of Artificial Sequence: Synthetic oligonucleotide
aaagcauguaagaguuaca

SEQ ID NO: 761851 - RNA, 19 nt, Artificial Sequence
  Description of Artificial Sequence: Synthetic oligonucleotide
ugccgaggcaccuuccggc

SEQ ID NO: 761852 - RNA, 19 nt, Artificial Sequence
  Description of Artificial Sequence: Synthetic oligonucleotide
ucguuggauugaaguacag

SEQ ID NO: 761853 - RNA, 19 nt, Artificial Sequence
  Description of Artificial Sequence: Synthetic oligonucleotide
cauuaagcuguguggucac

SEQ ID NO: 761854 - RNA, 19 nt, Artificial Sequence
  Description of Artificial Sequence: Synthetic oligonucleotide
ugcccuuuuaacccucaaa

SEQ ID NO: 761855 - RNA, 19 nt, Artificial Sequence
  Description of Artificial Sequence: Synthetic oligonucleotide
aguucuggcucguuggauu

SEQ ID NO: 761856 - RNA, 19 nt, Artificial Sequence
  Description of Artificial Sequence: Synthetic oligonucleotide
acgucaucagcuggcaggg

SEQ ID NO: 761857 - RNA, 19 nt, Artificial Sequence
  Description of Artificial Sequence: Synthetic oligonucleotide
ggggcgaacugccauauug

SEQ ID NO: 761858 - RNA, 19 nt, Artificial Sequence
  Description of Artificial Sequence: Synthetic oligonucleotide
guacagcacagauuccgug

SEQ ID NO: 761859 - RNA, 19 nt, Artificial Sequence
  Description of Artificial Sequence: Synthetic oligonucleotide
caaguaaggcugacacggc

SEQ ID NO: 761860 - RNA, 19 nt, Artificial Sequence
  Description of Artificial Sequence: Synthetic oligonucleotide
aucucauuggaaaauggua

SEQ ID NO: 761861 - RNA, 19 nt, Artificial Sequence
  Description of Artificial Sequence: Synthetic oligonucleotide
cacgcagguggauuccucc

SEQ ID NO: 761862 - RNA, 19 nt, Artificial Sequence
  Description of Artificial Sequence: Synthetic oligonucleotide
gcugacaagggucuucagc

SEQ ID NO: 761863 - RNA, 19 nt, Artificial Sequence
  Description of Artificial Sequence: Synthetic oligonucleotide
agauuccgugggcggaugg

SEQ ID NO: 761864 - RNA, 19 nt, Artificial Sequence
  Description of Artificial Sequence: Synthetic oligonucleotide
guauucgucuccuuaucaa

SEQ ID NO: 761865 - RNA, 19 nt, Artificial Sequence
  Description of Artificial Sequence: Synthetic oligonucleotide
uguucgaaauagacagcua

SEQ ID NO: 761866 - RNA, 19 nt, Artificial Sequence
  Description of Artificial Sequence: Synthetic oligonucleotide
gagaagguuugugagcgca

SEQ ID NO: 761867 - RNA, 19 nt, Artificial Sequence
  Description of Artificial Sequence: Synthetic oligonucleotide
ugcugaucuuugcucgugu

SEQ ID NO: 761868 - RNA, 19 nt, Artificial Sequence
  Description of Artificial Sequence: Synthetic oligonucleotide
ucaaccaguguggggauuc

SEQ ID NO: 761869 - RNA, 19 nt, Artificial Sequence
  Description of Artificial Sequence: Synthetic oligonucleotide
gacguccucuucacuauag

SEQ ID NO: 761870 - RNA, 19 nt, Artificial Sequence
  Description of Artificial Sequence: Synthetic oligonucleotide
uucuuacaaaggguugaca

SEQ ID NO: 761871 - RNA, 19 nt, Artificial Sequence
  Description of Artificial Sequence: Synthetic oligonucleotide
aucguuaagccaacuccuc

SEQ ID NO: 761872 - RNA, 19 nt, Artificial Sequence
  Description of Artificial Sequence: Synthetic oligonucleotide
cucauuggaaaaugguaaa

SEQ ID NO: 761873 - RNA, 19 nt, Artificial Sequence
  Description of Artificial Sequence: Synthetic oligonucleotide
uagguagcguccuccauuu

SEQ ID NO: 761874 - RNA, 19 nt, Artificial Sequence
  Description of Artificial Sequence: Synthetic oligonucleotide
uuuaacccucaaacuucgu

SEQ ID NO: 761875 - RNA, 19 nt, Artificial Sequence
  Description of Artificial Sequence: Synthetic oligonucleotide
agccacaguuucauuagag

SEQ ID NO: 761876 - RNA, 19 nt, Artificial Sequence
  Description of Artificial Sequence: Synthetic oligonucleotide
ggcggauggacuuuuguuc

SEQ ID NO: 761877 - RNA, 19 nt, Artificial Sequence
  Description of Artificial Sequence: Synthetic oligonucleotide
ucuccacgcagguggauuc

SEQ ID NO: 761878 - RNA, 19 nt, Artificial Sequence
  Description of Artificial Sequence: Synthetic oligonucleotide
cuaucacgcuguuucucac

SEQ ID NO: 761879 - RNA, 19 nt, Artificial Sequence
  Description of Artificial Sequence: Synthetic oligonucleotide
ccauauugccaucaacggc

SEQ ID NO: 761880 - RNA, 19 nt, Artificial Sequence
  Description of Artificial Sequence: Synthetic oligonucleotide
ucgacucucagggucuucu

SEQ ID NO: 761881 - RNA, 19 nt, Artificial Sequence
  Description of Artificial Sequence: Synthetic oligonucleotide
gagaugugcgcacggggca

SEQ ID NO: 761882 - RNA, 19 nt, Artificial Sequence
  Description of Artificial Sequence: Synthetic oligonucleotide
guuucauggaagcuucgua

SEQ ID NO: 761883 - RNA, 19 nt, Artificial Sequence
  Description of Artificial Sequence: Synthetic oligonucleotide
ucacuauagguagcguccu

SEQ ID NO: 761884 - RNA, 19 nt, Artificial Sequence
  Description of Artificial Sequence: Synthetic oligonucleotide
ugaggcgacucugacgagu

SEQ ID NO: 761885 - RNA, 19 nt, Artificial Sequence
  Description of Artificial Sequence: Synthetic oligonucleotide
uggcuaagguugaacuguc

SEQ ID NO: 761886 - RNA, 19 nt, Artificial Sequence
  Description of Artificial Sequence: Synthetic oligonucleotide
cucguuggauugaaguaca

SEQ ID NO: 761887 - RNA, 19 nt, Artificial Sequence
  Description of Artificial Sequence: Synthetic oligonucleotide
ucguugaggcgacucugac

SEQ ID NO: 761888 - RNA, 19 nt, Artificial Sequence
  Description of Artificial Sequence: Synthetic oligonucleotide
uuuggggcgaacugccaua

SEQ ID NO: 761889 - RNA, 19 nt, Artificial Sequence
  Description of Artificial Sequence: Synthetic oligonucleotide
acaucugccgaggagggaa

SEQ ID NO: 761890 - RNA, 19 nt, Artificial Sequence
  Description of Artificial Sequence: Synthetic oligonucleotide
auacacuuuugaagaauga

SEQ ID NO: 761891 - RNA, 19 nt, Artificial Sequence
  Description of Artificial Sequence: Synthetic oligonucleotide
acgcuguuucucacgaagg

SEQ ID NO: 761892 - RNA, 19 nt, Artificial Sequence
  Description of Artificial Sequence: Synthetic oligonucleotide
gacucugacgagucagcga

SEQ ID NO: 761893 - RNA, 19 nt, Artificial Sequence
  Description of Artificial Sequence: Synthetic oligonucleotide
gaaagugagcaggcgagaa

SEQ ID NO: 761894 - RNA, 19 nt, Artificial Sequence
  Description of Artificial Sequence: Synthetic oligonucleotide
cugcccuccaccaagugaa

SEQ ID NO: 761895 - RNA, 19 nt, Artificial Sequence
  Description of Artificial Sequence: Synthetic oligonucleotide
ccaucaacggcuucaucag

SEQ ID NO: 761896 - RNA, 19 nt, Artificial Sequence
  Description of Artificial Sequence: Synthetic oligonucleotide
ccaagucuauagaaucuag

SEQ ID NO: 761897 - RNA, 19 nt, Artificial Sequence
  Description of Artificial Sequence: Synthetic oligonucleotide
augguaaaucugccaggcu

SEQ ID NO: 761898 - RNA, 19 nt, Artificial Sequence
  Description of Artificial Sequence: Synthetic oligonucleotide
caucguuaagccaacuccu

SEQ ID NO: 761899 - RNA, 19 nt, Artificial Sequence
  Description of Artificial Sequence: Synthetic oligonucleotide
cacgcaauuuugucuccac

SEQ ID NO: 761900 - RNA, 19 nt, Artificial Sequence
  Description of Artificial Sequence: Synthetic oligonucleotide
cuauagguagcguccucca

SEQ ID NO: 761901 - RNA, 19 nt, Artificial Sequence
  Description of Artificial Sequence: Synthetic oligonucleotide
ccuucauauagcagcugcc

SEQ ID NO: 761902 - RNA, 19 nt, Artificial Sequence
  Description of Artificial Sequence: Synthetic oligonucleotide
cucaaacuucgucguucgg

SEQ ID NO: 761903 - RNA, 19 nt, Artificial Sequence
  Description of Artificial Sequence: Synthetic oligonucleotide
ggcgaacugccauauugcc

SEQ ID NO: 761904 - RNA, 19 nt, Artificial Sequence
  Description of Artificial Sequence: Synthetic oligonucleotide
gauggacuuuuguucgaaa

SEQ ID NO: 761905 - RNA, 19 nt, Artificial Sequence
  Description of Artificial Sequence: Synthetic oligonucleotide
uggaccagacuaccccacu

SEQ ID NO: 761906 - RNA, 19 nt, Artificial Sequence
  Description of Artificial Sequence: Synthetic oligonucleotide
agcguccuccauuucgcca

SEQ ID NO: 761907 - RNA, 19 nt, Artificial Sequence
  Description of Artificial Sequence: Synthetic oligonucleotide
ugacaagggucuucagcau

SEQ ID NO: 761908 - RNA, 19 nt, Artificial Sequence
  Description of Artificial Sequence: Synthetic oligonucleotide
caguauucgucuccuuauc

SEQ ID NO: 761909 - RNA, 19 nt, Artificial Sequence
  Description of Artificial Sequence: Synthetic oligonucleotide
cacacgcaauuuugucucc

SEQ ID NO: 761910 - RNA, 19 nt, Artificial Sequence
  Description of Artificial Sequence: Synthetic oligonucleotide
uaucaaccaguguggggau

SEQ ID NO: 761911 - RNA, 19 nt, Artificial Sequence
  Description of Artificial Sequence: Synthetic oligonucleotide
ccaagugaacuucagccuc

SEQ ID NO: 761912 - RNA, 19 nt, Artificial Sequence
  Description of Artificial Sequence: Synthetic oligonucleotide
agauuucggaguugugcua

SEQ ID NO: 761913 - RNA, 19 nt, Artificial Sequence
  Description of Artificial Sequence: Synthetic oligonucleotide
gcucguuggauugaaguac

SEQ ID NO: 761914 - RNA, 19 nt, Artificial Sequence
  Description of Artificial Sequence: Synthetic oligonucleotide
aagcuucguagaccccacu

SEQ ID NO: 761915 - RNA, 19 nt, Artificial Sequence
  Description of Artificial Sequence: Synthetic oligonucleotide
agaucgacucucagggucu

SEQ ID NO: 761916 - RNA, 19 nt, Artificial Sequence
  Description of Artificial Sequence: Synthetic oligonucleotide
cguuaagccaacuccuccc

SEQ ID NO: 761917 - RNA, 19 nt, Artificial Sequence
  Description of Artificial Sequence: Synthetic oligonucleotide
gguaaaucugccaggcuga

SEQ ID NO: 761918 - RNA, 19 nt, Artificial Sequence
  Description of Artificial Sequence: Synthetic oligonucleotide
cagcuaacaucugccgagg

SEQ ID NO: 761919 - RNA, 19 nt, Artificial Sequence
  Description of Artificial Sequence: Synthetic oligonucleotide
cacgaagggaugcugucga

SEQ ID NO: 761920 - RNA, 19 nt, Artificial Sequence
  Description of Artificial Sequence: Synthetic oligonucleotide
ugcgcacggggcauuccug

SEQ ID NO: 761921 - RNA, 19 nt, Artificial Sequence
  Description of Artificial Sequence: Synthetic oligonucleotide
caugaagauuucggaguug

SEQ ID NO: 761922 - RNA, 19 nt, Artificial Sequence
  Description of Artificial Sequence: Synthetic oligonucleotide
ggguugacaguuauauuac

SEQ ID NO: 761923 - RNA, 19 nt, Artificial Sequence
  Description of Artificial Sequence: Synthetic oligonucleotide
uggaagcuucguagacccc

SEQ ID NO: 761924 - RNA, 19 nt, Artificial Sequence
  Description of Artificial Sequence: Synthetic oligonucleotide
cucuaagagagacugggau

SEQ ID NO: 761925 - RNA, 19 nt, Artificial Sequence
  Description of Artificial Sequence: Synthetic oligonucleotide
cccuaaaauacacuuuuga

SEQ ID NO: 761926 - RNA, 19 nt, Artificial Sequence
  Description of Artificial Sequence: Synthetic oligonucleotide
cugccguaagucccucagg

SEQ ID NO: 761927 - RNA, 19 nt, Artificial Sequence
  Description of Artificial Sequence: Synthetic oligonucleotide
gauuuaaccugcagaugua

SEQ ID NO: 761928 - RNA, 19 nt, Artificial Sequence
  Description of Artificial Sequence: Synthetic oligonucleotide
aucaacggcuucaucagua

SEQ ID NO: 761929 - RNA, 19 nt, Artificial Sequence
  Description of Artificial Sequence: Synthetic oligonucleotide
cucaucguugaggcgacuc

SEQ ID NO: 761930 - RNA, 19 nt, Artificial Sequence
  Description of Artificial Sequence: Synthetic oligonucleotide
gcucgugugaaguaggcua

SEQ ID NO: 761931 - RNA, 19 nt, Artificial Sequence
  Description of Artificial Sequence: Synthetic oligonucleotide
gacacggcauccaagucua

SEQ ID NO: 761932 - RNA, 19 nt, Artificial Sequence
  Description of Artificial Sequence: Synthetic oligonucleotide
cucugacgagucagcgagg

SEQ ID NO: 761933 - RNA, 19 nt, Artificial Sequence
  Description of Artificial Sequence: Synthetic oligonucleotide
agcuaacaucugccgagga

SEQ ID NO: 761934 - RNA, 19 nt, Artificial Sequence
  Description of Artificial Sequence: Synthetic oligonucleotide
cugccgaggcaccuuccgg

SEQ ID NO: 761935 - RNA, 19 nt, Artificial Sequence
  Description of Artificial Sequence: Synthetic oligonucleotide
caucugccgaggagggaag

SEQ ID NO: 761936 - RNA, 19 nt, Artificial Sequence
  Description of Artificial Sequence: Synthetic oligonucleotide
ugcucgugugaaguaggcu

SEQ ID NO: 761937 - RNA, 19 nt, Artificial Sequence
  Description of Artificial Sequence: Synthetic oligonucleotide
uucgucguucgguggaguu

SEQ ID NO: 761938 - RNA, 19 nt, Artificial Sequence
  Description of Artificial Sequence: Synthetic oligonucleotide
agguaucaagaaggcauga

SEQ ID NO: 761939 - RNA, 19 nt, Artificial Sequence
  Description of Artificial Sequence: Synthetic oligonucleotide
agguuugugagcgcacuau

SEQ ID NO: 761940 - RNA, 19 nt, Artificial Sequence
  Description of Artificial Sequence: Synthetic oligonucleotide
cagacuaccccacuuuugu

SEQ ID NO: 761941 - RNA, 19 nt, Artificial Sequence
  Description of Artificial Sequence: Synthetic oligonucleotide
gacgagucagcgaggccug

SEQ ID NO: 761942 - RNA, 19 nt, Artificial Sequence
  Description of Artificial Sequence: Synthetic oligonucleotide
guuucucacgaacaaugau

SEQ ID NO: 761943 - RNA, 19 nt, Artificial Sequence
  Description of Artificial Sequence: Synthetic oligonucleotide
gcgacugcccuccaccaag

SEQ ID NO: 761944 - RNA, 19 nt, Artificial Sequence
  Description of Artificial Sequence: Synthetic oligonucleotide
gauuucggaguugugcuau

SEQ ID NO: 761945 - RNA, 19 nt, Artificial Sequence
  Description of Artificial Sequence: Synthetic oligonucleotide
ucuggcucguuggauugaa

SEQ ID NO: 761946 - RNA, 19 nt, Artificial Sequence
  Description of Artificial Sequence: Synthetic oligonucleotide
aacaucugccgaggaggga

SEQ ID NO: 761947 - RNA, 19 nt, Artificial Sequence
  Description of Artificial Sequence: Synthetic oligonucleotide
acuucgucguucgguggag

SEQ ID NO: 761948 - RNA, 19 nt, Artificial Sequence
  Description of Artificial Sequence: Synthetic oligonucleotide
ucucacgaacaaugauuuu

SEQ ID NO: 761949 - RNA, 19 nt, Artificial Sequence
  Description of Artificial Sequence: Synthetic oligonucleotide
ggcgacucugacgagucag

SEQ ID NO: 761950 - RNA, 19 nt, Artificial Sequence
  Description of Artificial Sequence: Synthetic oligonucleotide
gccccgugcacucaucaag

SEQ ID NO: 761951 - RNA, 19 nt, Artificial Sequence
  Description of Artificial Sequence: Synthetic oligonucleotide
gaugcugaucuuugcucgu

SEQ ID NO: 761952 - RNA, 19 nt, Artificial Sequence
  Description of Artificial Sequence: Synthetic oligonucleotide
ccccgugcacucaucaagg

SEQ ID NO: 761953 - RNA, 19 nt, Artificial Sequence
  Description of Artificial Sequence: Synthetic oligonucleotide
cugaugaaacuggugugga

SEQ ID NO: 761954 - RNA, 19 nt, Artificial Sequence
  Description of Artificial Sequence: Synthetic oligonucleotide
ccuuaucaaccaguguggg

SEQ ID NO: 761955 - RNA, 19 nt, Artificial Sequence
  Description of Artificial Sequence: Synthetic oligonucleotide
ucacugucacuccgauuua

SEQ ID NO: 761956 - RNA, 19 nt, Artificial Sequence
  Description of Artificial Sequence: Synthetic oligonucleotide
uccgugggcggauggacuu

SEQ ID NO: 761957 - RNA, 19 nt, Artificial Sequence
  Description of Artificial Sequence: Synthetic oligonucleotide
gcugaucuuugcucgugug

SEQ ID NO: 761958 - RNA, 19 nt, Artificial Sequence
  Description of Artificial Sequence: Synthetic oligonucleotide
cuccauuucgccaggcugu

SEQ ID NO: 761959 - RNA, 19 nt, Artificial Sequence
  Description of Artificial Sequence: Synthetic oligonucleotide
ugcaaggcguuugcuugga

SEQ ID NO: 761960 - RNA, 19 nt, Artificial Sequence
  Description of Artificial Sequence: Synthetic oligonucleotide
caucggaggcagcagcuga

SEQ ID NO: 761961 - RNA, 19 nt, Artificial Sequence
  Description of Artificial Sequence: Synthetic oligonucleotide
ucaaggucuuuguccucua

SEQ ID NO: 761962 - RNA, 19 nt, Artificial Sequence
  Description of Artificial Sequence: Synthetic oligonucleotide
uugaggcgacucugacgag

SEQ ID NO: 761963 - RNA, 19 nt, Artificial Sequence
  Description of Artificial Sequence: Synthetic oligonucleotide
augcugaucuuugcucgug

SEQ ID NO: 761964 - RNA, 19 nt, Artificial Sequence
  Description of Artificial Sequence: Synthetic oligonucleotide
cugacgagucagcgaggcc

SEQ ID NO: 761965 - RNA, 19 nt, Artificial Sequence
  Description of Artificial Sequence: Synthetic oligonucleotide
acacgcaauuuugucucca

SEQ ID NO: 761966 - RNA, 19 nt, Artificial Sequence
  Description of Artificial Sequence: Synthetic oligonucleotide
guguuuacugacacagcaa

SEQ ID NO: 761967 - RNA, 19 nt, Artificial Sequence
  Description of Artificial Sequence: Synthetic oligonucleotide
agacuaccccacuuuuguu

SEQ ID NO: 761968 - RNA, 19 nt, Artificial Sequence
  Description of Artificial Sequence: Synthetic oligonucleotide
ggcagacugcccuuuuaac

SEQ ID NO: 761969 - RNA, 19 nt, Artificial Sequence
  Description of Artificial Sequence: Synthetic oligonucleotide
cagucuuugacucucccuu

SEQ ID NO: 761970 - RNA, 19 nt, Artificial Sequence
  Description of Artificial Sequence: Synthetic oligonucleotide
caucauuguacagcacaga

SEQ ID NO: 761971 - RNA, 19 nt, Artificial Sequence
  Description of Artificial Sequence: Synthetic oligonucleotide
gauuccgugggcggaugga

SEQ ID NO: 761972 - RNA, 19 nt, Artificial Sequence
  Description of Artificial Sequence: Synthetic oligonucleotide
ucggaggcagcagcugaca

SEQ ID NO: 761973 - RNA, 19 nt, Artificial Sequence
  Description of Artificial Sequence: Synthetic oligonucleotide
gggcgaacugccauauugc

SEQ ID NO: 761974 - RNA, 19 nt, Artificial Sequence
  Description of Artificial Sequence: Synthetic oligonucleotide
agguagcguccuccauuuc

SEQ ID NO: 761975 - RNA, 19 nt, Artificial Sequence
  Description of Artificial Sequence: Synthetic oligonucleotide
aggcguuugcuuggaagga

SEQ ID NO: 761976 - RNA, 19 nt, Artificial Sequence
  Description of Artificial Sequence: Synthetic oligonucleotide
aaucaccaugaaacuugaa

SEQ ID NO: 761977 - RNA, 19 nt, Artificial Sequence
  Description of Artificial Sequence: Synthetic oligonucleotide
uuggggcgaacugccauau

SEQ ID NO: 761978 - RNA, 19 nt, Artificial Sequence
  Description of Artificial Sequence: Synthetic oligonucleotide
cgauuuaaccugcagaugu

SEQ ID NO: 761979 - RNA, 19 nt, Artificial Sequence
  Description of Artificial Sequence: Synthetic oligonucleotide
ccagacuaccccacuuuug

SEQ ID NO: 761980 - RNA, 19 nt, Artificial Sequence
  Description of Artificial Sequence: Synthetic oligonucleotide
guaagucccucagggccug

SEQ ID NO: 761981 - RNA, 19 nt, Artificial Sequence
  Description of Artificial Sequence: Synthetic oligonucleotide
uucuggcucguuggauuga

SEQ ID NO: 761982 - RNA, 19 nt, Artificial Sequence
  Description of Artificial Sequence: Synthetic oligonucleotide
ggcucguuggauugaagua

SEQ ID NO: 761983 - RNA, 19 nt, Artificial Sequence
  Description of Artificial Sequence: Synthetic oligonucleotide
acagauuccgugggcggau

SEQ ID NO: 761984 - RNA, 19 nt, Artificial Sequence
  Description of Artificial Sequence: Synthetic oligonucleotide
ucacgcuguuucucacgaa

SEQ ID NO: 761985 - RNA, 19 nt, Artificial Sequence
  Description of Artificial Sequence: Synthetic oligonucleotide
gaacugccauauugccauc

SEQ ID NO: 761986 - RNA, 19 nt, Artificial Sequence
  Description of Artificial Sequence: Synthetic oligonucleotide
acgagucagcgaggccugc

SEQ ID NO: 761987 - RNA, 19 nt, Artificial Sequence
  Description of Artificial Sequence: Synthetic oligonucleotide
cuaccccacuuuuguucug

SEQ ID NO: 761988 - RNA, 19 nt, Artificial Sequence
  Description of Artificial Sequence: Synthetic oligonucleotide
uuucgccaggcuguuucau

SEQ ID NO: 761989 - RNA, 19 nt, Artificial Sequence
  Description of Artificial Sequence: Synthetic oligonucleotide
gguaucaagaaggcaugaa

SEQ ID NO: 761990 - RNA, 19 nt, Artificial Sequence
  Description of Artificial Sequence: Synthetic oligonucleotide
ugcccuccaccaagugaac

SEQ ID NO: 761991 - RNA, 19 nt, Artificial Sequence
  Description of Artificial Sequence: Synthetic oligonucleotide
ugugcgcacggggcauucc

SEQ ID NO: 761992 - RNA, 19 nt, Artificial Sequence
  Description of Artificial Sequence: Synthetic oligonucleotide
ucgucguucgguggaguuu

SEQ ID NO: 761993 - RNA, 19 nt, Artificial Sequence
  Description of Artificial Sequence: Synthetic oligonucleotide
ucgugugaaguaggcuauc

SEQ ID NO: 761994 - RNA, 19 nt, Artificial Sequence
  Description of Artificial Sequence: Synthetic oligonucleotide
aucgacucucagggucuuc

SEQ ID NO: 761995 - RNA, 19 nt, Artificial Sequence
  Description of Artificial Sequence: Synthetic oligonucleotide
cuccacgcagguggauucc

SEQ ID NO: 761996 - RNA, 19 nt, Artificial Sequence
  Description of Artificial Sequence: Synthetic oligonucleotide
agaugugcgcacggggcau

SEQ ID NO: 761997 - RNA, 19 nt, Artificial Sequence
  Description of Artificial Sequence: Synthetic oligonucleotide
caacccuaaaauacacuuu

SEQ ID NO: 761998 - RNA, 19 nt, Artificial Sequence
  Description of Artificial Sequence: Synthetic oligonucleotide
uccauuucgccaggcuguu

SEQ ID NO: 761999 - RNA, 19 nt, Artificial Sequence
  Description of Artificial Sequence: Synthetic oligonucleotide
cucgugugaaguaggcuau

SEQ ID NO: 762000 - RNA, 19 nt, Artificial Sequence
  Description of Artificial Sequence: Synthetic oligonucleotide
ccucucuuagcaucguuaa

SEQ ID NO: 762001 - RNA, 19 nt, Artificial Sequence
  Description of Artificial Sequence: Synthetic oligonucleotide
gauugaaguacaggcucuu

SEQ ID NO: 762002 - RNA, 19 nt, Artificial Sequence
  Description of Artificial Sequence: Synthetic oligonucleotide
caacggugacguccucuuc

SEQ ID NO: 762003 - RNA, 19 nt, Artificial Sequence
  Description of Artificial Sequence: Synthetic oligonucleotide
caccugccgaggcaccuuc

SEQ ID NO: 762004 - RNA, 19 nt, Artificial Sequence
  Description of Artificial Sequence: Synthetic oligonucleotide
ucguucgguggaguuucuc

SEQ ID NO: 762005 - RNA, 19 nt, Artificial Sequence
  Description of Artificial Sequence: Synthetic oligonucleotide
cccucaaacuucgucguuc

SEQ ID NO: 762006 - RNA, 19 nt, Artificial Sequence
  Description of Artificial Sequence: Synthetic oligonucleotide
aggcgacucugacgaguca

SEQ ID NO: 762007 - RNA, 19 nt, Artificial Sequence
  Description of Artificial Sequence: Synthetic oligonucleotide
cuuuggggcgaacugccau

SEQ ID NO: 762008 - RNA, 19 nt, Artificial Sequence
  Description of Artificial Sequence: Synthetic oligonucleotide
acugcccuuuuaacccuca

SEQ ID NO: 762009 - RNA, 19 nt, Artificial Sequence
  Description of Artificial Sequence: Synthetic oligonucleotide
ggaaagugagcaggcgaga

SEQ ID NO: 762010 - RNA, 19 nt, Artificial Sequence
  Description of Artificial Sequence: Synthetic oligonucleotide
cugccccgugcacucauca

SEQ ID NO: 762011 - RNA, 19 nt, Artificial Sequence
  Description of Artificial Sequence: Synthetic oligonucleotide
caaggucuuuguccucuaa

SEQ ID NO: 762012 - RNA, 19 nt, Artificial Sequence
  Description of Artificial Sequence: Synthetic oligonucleotide
ggcugacacggcauccaag

SEQ ID NO: 762013 - RNA, 19 nt, Artificial Sequence
  Description of Artificial Sequence: Synthetic oligonucleotide
cagaagcuucuggaaucuc

SEQ ID NO: 762014 - RNA, 19 nt, Artificial Sequence
  Description of Artificial Sequence: Synthetic oligonucleotide
gcugucgagagcucaggcu

SEQ ID NO: 762015 - RNA, 19 nt, Artificial Sequence
  Description of Artificial Sequence: Synthetic oligonucleotide
cgaacugccauauugccau

SEQ ID NO: 762016 - RNA, 19 nt, Artificial Sequence
  Description of Artificial Sequence: Synthetic oligonucleotide
ccgauuuaaccugcagaug

SEQ ID NO: 762017 - RNA, 19 nt, Artificial Sequence
  Description of Artificial Sequence: Synthetic oligonucleotide
ccaguaaauguucagucuu

SEQ ID NO: 762018 - RNA, 19 nt, Artificial Sequence
  Description of Artificial Sequence: Synthetic oligonucleotide
gugugaaguaggcuaucuu

SEQ ID NO: 762019 - RNA, 19 nt, Artificial Sequence
  Description of Artificial Sequence: Synthetic oligonucleotide
ccgugcacucaucaagguc

SEQ ID NO: 762020 - RNA, 19 nt, Artificial Sequence
  Description of Artificial Sequence: Synthetic oligonucleotide
gccgaggagggaagcacag

SEQ ID NO: 762021 - RNA, 19 nt, Artificial Sequence
  Description of Artificial Sequence: Synthetic oligonucleotide
gcaugaagauuucggaguu

SEQ ID NO: 762022 - RNA, 19 nt, Artificial Sequence
  Description of Artificial Sequence: Synthetic oligonucleotide
cagauuccgugggcggaug

SEQ ID NO: 762023 - RNA, 19 nt, Artificial Sequence
  Description of Artificial Sequence: Synthetic oligonucleotide
agcgcacuaucacgcuguu

SEQ ID NO: 762024 - RNA, 19 nt, Artificial Sequence
  Description of Artificial Sequence: Synthetic oligonucleotide
gcuacggucuuuggggcga

SEQ ID NO: 762025 - RNA, 19 nt, Artificial Sequence
  Description of Artificial Sequence: Synthetic oligonucleotide
gcgacucugacgagucagc

SEQ ID NO: 762026 - RNA, 19 nt, Artificial Sequence
  Description of Artificial Sequence: Synthetic oligonucleotide
cccuuuuaacccucaaacu

SEQ ID NO: 762027 - RNA, 19 nt, Artificial Sequence
  Description of Artificial Sequence: Synthetic oligonucleotide
cgacucugacgagucagcg

SEQ ID NO: 762028 - RNA, 19 nt, Artificial Sequence
  Description of Artificial Sequence: Synthetic oligonucleotide
cguagaccccacugucucc

SEQ ID NO: 762029 - RNA, 19 nt, Artificial Sequence
  Description of Artificial Sequence: Synthetic oligonucleotide
gcauccaagucuauagaau

SEQ ID NO: 762030 - RNA, 19 nt, Artificial Sequence
  Description of Artificial Sequence: Synthetic oligonucleotide
aucaaccaguguggggauu

SEQ ID NO: 762031 - RNA, 19 nt, Artificial Sequence
  Description of Artificial Sequence: Synthetic oligonucleotide
cacggcauccaagucuaua

SEQ ID NO: 762032 - RNA, 19 nt, Artificial Sequence
  Description of Artificial Sequence: Synthetic oligonucleotide
gugagcgcacuaucacgcu

SEQ ID NO: 762033 - RNA, 19 nt, Artificial Sequence
  Description of Artificial Sequence: Synthetic oligonucleotide
uggggcgaacugccauauu

SEQ ID NO: 762034 - RNA, 19 nt, Artificial Sequence
  Description of Artificial Sequence: Synthetic oligonucleotide
uccgcucgccuggggagaa

SEQ ID NO: 762035 - RNA, 19 nt, Artificial Sequence
  Description of Artificial Sequence: Synthetic oligonucleotide
gugcgcacggggcauuccu

SEQ ID NO: 762036 - RNA, 19 nt, Artificial Sequence
  Description of Artificial Sequence: Synthetic oligonucleotide
guaucauaucugaguccua

SEQ ID NO: 762037 - RNA, 19 nt, Artificial Sequence
  Description of Artificial Sequence: Synthetic oligonucleotide
gguguggaauggaaaaguu

SEQ ID NO: 762038 - RNA, 19 nt, Artificial Sequence
  Description of Artificial Sequence: Synthetic oligonucleotide
cgucguucgguggaguuuc

SEQ ID NO: 762039 - RNA, 19 nt, Artificial Sequence
  Description of Artificial Sequence: Synthetic oligonucleotide
ggcguuugcuuggaaggaa

SEQ ID NO: 762040 - RNA, 19 nt, Artificial Sequence
  Description of Artificial Sequence: Synthetic oligonucleotide
cacaacggugacguccucu

SEQ ID NO: 762041 - RNA, 19 nt, Artificial Sequence
  Description of Artificial Sequence: Synthetic oligonucleotide
ggaguuucucacgaacaau

SEQ ID NO: 762042 - RNA, 19 nt, Artificial Sequence
  Description of Artificial Sequence: Synthetic oligonucleotide
ggcuaagguugaacuguca

SEQ ID NO: 762043 - RNA, 19 nt, Artificial Sequence
  Description of Artificial Sequence: Synthetic oligonucleotide
gcgcacggggcauuccuga

SEQ ID NO: 762044 - RNA, 19 nt, Artificial Sequence
  Description of Artificial Sequence: Synthetic oligonucleotide
gugggcggauggacuuuug

SEQ ID NO: 762045 - RNA, 19 nt, Artificial Sequence
  Description of Artificial Sequence: Synthetic oligonucleotide
aggcccgccagugcaugaa

SEQ ID NO: 762046 - RNA, 19 nt, Artificial Sequence
  Description of Artificial Sequence: Synthetic oligonucleotide
cugcccuuuuaacccucaa

SEQ ID NO: 762047 - RNA, 19 nt, Artificial Sequence
  Description of Artificial Sequence: Synthetic oligonucleotide
ggcccgccagugcaugaac

SEQ ID NO: 762048 - RNA, 19 nt, Artificial Sequence
  Description of Artificial Sequence: Synthetic oligonucleotide
gggcggauggacuuuuguu

SEQ ID NO: 762049 - RNA, 19 nt, Artificial Sequence
  Description of Artificial Sequence: Synthetic oligonucleotide
guuggcagacugcccuuuu

SEQ ID NO: 762050 - RNA, 19 nt, Artificial Sequence
  Description of Artificial Sequence: Synthetic oligonucleotide
gcugacacacacgcaauuu

SEQ ID NO: 762051 - RNA, 19 nt, Artificial Sequence
  Description of Artificial Sequence: Synthetic oligonucleotide
ccacgcagguggauuccuc

SEQ ID NO: 762052 - RNA, 19 nt, Artificial Sequence
  Description of Artificial Sequence: Synthetic oligonucleotide
gucuccacgcagguggauu

SEQ ID NO: 762053 - RNA, 19 nt, Artificial Sequence
  Description of Artificial Sequence: Synthetic oligonucleotide
caacggcuucaucaguauu

SEQ ID NO: 762054 - RNA, 19 nt, Artificial Sequence
  Description of Artificial Sequence: Synthetic oligonucleotide
cgcucgccuggggagaagg

SEQ ID NO: 762055 - RNA, 19 nt, Artificial Sequence
  Description of Artificial Sequence: Synthetic oligonucleotide
cgcacggggcauuccugag

SEQ ID NO: 762056 - RNA, 19 nt, Artificial Sequence
  Description of Artificial Sequence: Synthetic oligonucleotide
gucgagagcucaggcugcu

SEQ ID NO: 762057 - RNA, 19 nt, Artificial Sequence
  Description of Artificial Sequence: Synthetic oligonucleotide
cuccgcucgccuggggaga

SEQ ID NO: 762058 - RNA, 19 nt, Artificial Sequence
  Description of Artificial Sequence: Synthetic oligonucleotide
cgaagggaugcugucgaga

SEQ ID NO: 762059 - RNA, 19 nt, Artificial Sequence
  Description of Artificial Sequence: Synthetic oligonucleotide
ccccggaccccgcuuguuc

SEQ ID NO: 762060 - RNA, 19 nt, Artificial Sequence
  Description of Artificial Sequence: Synthetic oligonucleotide
gaucgacucucagggucuu

SEQ ID NO: 762061 - RNA, 19 nt, Artificial Sequence
  Description of Artificial Sequence: Synthetic oligonucleotide
gcaaggcguuugcuuggaa

SEQ ID NO: 762062 - RNA, 19 nt, Artificial Sequence
  Description of Artificial Sequence: Synthetic oligonucleotide
cucgccuggggagaagguu

SEQ ID NO: 762063 - RNA, 19 nt, Artificial Sequence
  Description of Artificial Sequence: Synthetic oligonucleotide
gccgaggcaccuuccggcu

SEQ ID NO: 762064 - RNA, 19 nt, Artificial Sequence
  Description of Artificial Sequence: Synthetic oligonucleotide
cuucgucguucgguggagu

SEQ ID NO: 762065 - RNA, 19 nt, Artificial Sequence
  Description of Artificial Sequence: Synthetic oligonucleotide
cuacggucuuuggggcgaa

SEQ ID NO: 762066 - RNA, 19 nt, Artificial Sequence
  Description of Artificial Sequence: Synthetic oligonucleotide
acacggcauccaagucuau

SEQ ID NO: 762067 - RNA, 19 nt, Artificial Sequence
  Description of Artificial Sequence: Synthetic oligonucleotide
gucguucgguggaguuucu

SEQ ID NO: 762068 - RNA, 19 nt, Artificial Sequence
  Description of Artificial Sequence: Synthetic oligonucleotide
cccggaccccgcuuguucu

SEQ ID NO: 762069 - RNA, 19 nt, Artificial Sequence
  Description of Artificial Sequence: Synthetic oligonucleotide
cccgugcacucaucaaggu

SEQ ID NO: 762070 - RNA, 19 nt, Artificial Sequence
  Description of Artificial Sequence: Synthetic oligonucleotide
gcccgccagugcaugaacu

SEQ ID NO: 762071 - RNA, 19 nt, Artificial Sequence
  Description of Artificial Sequence: Synthetic oligonucleotide
cgaggcaccuuccggcucu

SEQ ID NO: 762072 - RNA, 19 nt, Artificial Sequence
  Description of Artificial Sequence: Synthetic oligonucleotide
ccacaacggugacguccuc

SEQ ID NO: 762073 - RNA, 19 nt, Artificial Sequence
  Description of Artificial Sequence: Synthetic oligonucleotide
gggacgggaugcugaucuu

SEQ ID NO: 762074 - RNA, 19 nt, Artificial Sequence
  Description of Artificial Sequence: Synthetic oligonucleotide
cggaccccgcuuguucuuc

SEQ ID NO: 762075 - RNA, 19 nt, Artificial Sequence
  Description of Artificial Sequence: Synthetic oligonucleotide
ccgcuuguucuuccggcuu

SEQ ID NO: 762076 - RNA, 19 nt, Artificial Sequence
  Description of Artificial Sequence: Synthetic oligonucleotide
ccgcucgccuggggagaag

SEQ ID NO: 762077 - RNA, 19 nt, Artificial Sequence
  Description of Artificial Sequence: Synthetic oligonucleotide
gcgcacuaucacgcuguuu

SEQ ID NO: 762078 - RNA, 19 nt, Artificial Sequence
  Description of Artificial Sequence: Synthetic oligonucleotide
ccggaccccgcuuguucuu

SEQ ID NO: 762079 - RNA, 19 nt, Artificial Sequence
  Description of Artificial Sequence: Synthetic oligonucleotide
cgugggcggauggacuuuu

SEQ ID NO: 762080 - RNA, 19 nt, Artificial Sequence
  Description of Artificial Sequence: Synthetic oligonucleotide
ccauuucgccaggcuguuu

SEQ ID NO: 762081 - RNA, 19 nt, Artificial Sequence
  Description of Artificial Sequence: Synthetic oligonucleotide
ccgugggcggauggacuuu

SEQ ID NO: 762082 - RNA, 19 nt, Artificial Sequence
  Description of Artificial Sequence: Synthetic oligonucleotide
uauauuguauucuucaucc

SEQ ID NO: 762083 - RNA, 19 nt, Artificial Sequence
  Description of Artificial Sequence: Synthetic oligonucleotide
ugauaaacagcccacgagg

SEQ ID NO: 762084 - RNA, 19 nt, Artificial Sequence
  Description of Artificial Sequence: Synthetic oligonucleotide
uugauugcaauucucagag

SEQ ID NO: 762085 - RNA, 19 nt, Artificial Sequence
  Description of Artificial Sequence: Synthetic oligonucleotide
auuuauuccgaacuuaucu

SEQ ID NO: 762086 - RNA, 19 nt, Artificial Sequence
  Description of Artificial Sequence: Synthetic oligonucleotide
guauuuguugagcagacgg

SEQ ID NO: 762087 - RNA, 19 nt, Artificial Sequence
  Description of Artificial Sequence: Synthetic oligonucleotide
gaugauugggcgcucaugg

SEQ ID NO: 762088 - RNA, 19 nt, Artificial Sequence
  Description of Artificial Sequence: Synthetic oligonucleotide
uggaguguagaucagagac

SEQ ID NO: 762089 - RNA, 19 nt, Artificial Sequence
  Description of Artificial Sequence: Synthetic oligonucleotide
uuuauaugcauagucgagg

SEQ ID NO: 762090 - RNA, 19 nt, Artificial Sequence
  Description of Artificial Sequence: Synthetic oligonucleotide
cuuaauauuguccucuggc

SEQ ID NO: 762091 - RNA, 19 nt, Artificial Sequence
  Description of Artificial Sequence: Synthetic oligonucleotide
ucaugaauggugauaaaca

SEQ ID NO: 762092 - RNA, 19 nt, Artificial Sequence
  Description of Artificial Sequence: Synthetic oligonucleotide
uuuuauaugcauagucgag

SEQ ID NO: 762093 - RNA, 19 nt, Artificial Sequence
  Description of Artificial Sequence: Synthetic oligonucleotide
uaaacagcccacgaggucg

SEQ ID NO: 762094 - RNA, 19 nt, Artificial Sequence
  Description of Artificial Sequence: Synthetic oligonucleotide
uuuauuccgaacuuaucug

SEQ ID NO: 762095 - RNA, 19 nt, Artificial Sequence
  Description of Artificial Sequence: Synthetic oligonucleotide
ucgucggaaggucagaccg

SEQ ID NO: 762096 - RNA, 19 nt, Artificial Sequence
  Description of Artificial Sequence: Synthetic oligonucleotide
auaucaucguugaacaugc

SEQ ID NO: 762097 - RNA, 19 nt, Artificial Sequence
  Description of Artificial Sequence: Synthetic oligonucleotide
cauaguaucucaugaugcg

SEQ ID NO: 762098 - RNA, 19 nt, Artificial Sequence
  Description of Artificial Sequence: Synthetic oligonucleotide
uuauauuguauucuucauc

SEQ ID NO: 762099 - RNA, 19 nt, Artificial Sequence
  Description of Artificial Sequence: Synthetic oligonucleotide
caugaauggugauaaacag

SEQ ID NO: 762100 - RNA, 19 nt, Artificial Sequence
  Description of Artificial Sequence: Synthetic oligonucleotide
aacgaaaaggugccuggcg

SEQ ID NO: 762101 - RNA, 19 nt, Artificial Sequence
  Description of Artificial Sequence: Synthetic oligonucleotide
acgaaaaggugccuggcgc

SEQ ID NO: 762102 - RNA, 19 nt, Artificial Sequence
  Description of Artificial Sequence: Synthetic oligonucleotide
uuugauugcaauucucaga

SEQ ID NO: 762103 - RNA, 19 nt, Artificial Sequence
  Description of Artificial Sequence: Synthetic oligonucleotide
auuuugguaacacauuuau

SEQ ID NO: 762104 - RNA, 19 nt, Artificial Sequence
  Description of Artificial Sequence: Synthetic oligonucleotide
uuauaugcauagucgagga

SEQ ID NO: 762105 - RNA, 19 nt, Artificial Sequence
  Description of Artificial Sequence: Synthetic oligonucleotide
ucucggauggugcugagug

SEQ ID NO: 762106 - RNA, 19 nt, Artificial Sequence
  Description of Artificial Sequence: Synthetic oligonucleotide
ugaacgaaucauagucugg

SEQ ID NO: 762107 - RNA, 19 nt, Artificial Sequence
  Description of Artificial Sequence: Synthetic oligonucleotide
gugugaacgaaucauaguc

SEQ ID NO: 762108 - RNA, 19 nt, Artificial Sequence
  Description of Artificial Sequence: Synthetic oligonucleotide
uucucagagacacgucucg

SEQ ID NO: 762109 - RNA, 19 nt, Artificial Sequence
  Description of Artificial Sequence: Synthetic oligonucleotide
uagaucagagaccuuacaa

SEQ ID NO: 762110 - RNA, 19 nt, Artificial Sequence
  Description of Artificial Sequence: Synthetic oligonucleotide
acaccuauaauugcugugg

SEQ ID NO: 762111 - RNA, 19 nt, Artificial Sequence
  Description of Artificial Sequence: Synthetic oligonucleotide
gaacaugcaguacuuguug

SEQ ID NO: 762112 - RNA, 19 nt, Artificial Sequence
  Description of Artificial Sequence: Synthetic oligonucleotide
ucccuugacaaugagacca

SEQ ID NO: 762113 - RNA, 19 nt, Artificial Sequence
  Description of Artificial Sequence: Synthetic oligonucleotide
aacuguaggugucuagugu

SEQ ID NO: 762114 - RNA, 19 nt, Artificial Sequence
  Description of Artificial Sequence: Synthetic oligonucleotide
cuuugauugcaauucucag

SEQ ID NO: 762115 - RNA, 19 nt, Artificial Sequence
  Description of Artificial Sequence: Synthetic oligonucleotide
auaguaggaggccaaguug

SEQ ID NO: 762116 - RNA, 19 nt, Artificial Sequence
  Description of Artificial Sequence: Synthetic oligonucleotide
uugguuguuucucauagua

SEQ ID NO: 762117 - RNA, 19 nt, Artificial Sequence
  Description of Artificial Sequence: Synthetic oligonucleotide
uaguaucucaugaugcgga

SEQ ID NO: 762118 - RNA, 19 nt, Artificial Sequence
  Description of Artificial Sequence: Synthetic oligonucleotide
uucaggccgauguacagag

SEQ ID NO: 762119 - RNA, 19 nt, Artificial Sequence
  Description of Artificial Sequence: Synthetic oligonucleotide
aauuuauuccgaacuuauc

SEQ ID NO: 762120 - RNA, 19 nt, Artificial Sequence
  Description of Artificial Sequence: Synthetic oligonucleotide
accuauaauugcugugggc

SEQ ID NO: 762121 - RNA, 19 nt, Artificial Sequence
  Description of Artificial Sequence: Synthetic oligonucleotide
auaugcauagucgaggacu

SEQ ID NO: 762122 - RNA, 19 nt, Artificial Sequence
  Description of Artificial Sequence: Synthetic oligonucleotide
gaccguauugcugacaggc

SEQ ID NO: 762123 - RNA, 19 nt, Artificial Sequence
  Description of Artificial Sequence: Synthetic oligonucleotide
auaacaaggaggugggcga

SEQ ID NO: 762124 - RNA, 19 nt, Artificial Sequence
  Description of Artificial Sequence: Synthetic oligonucleotide
accaccaccgccuuaauau

SEQ ID NO: 762125 - RNA, 19 nt, Artificial Sequence
  Description of Artificial Sequence: Synthetic oligonucleotide
gaucagagaccuuacaaaa

SEQ ID NO: 762126 - RNA, 19 nt, Artificial Sequence
  Description of Artificial Sequence: Synthetic oligonucleotide
acaugcaguacuuguugcg

SEQ ID NO: 762127 - RNA, 19 nt, Artificial Sequence
  Description of Artificial Sequence: Synthetic oligonucleotide
aucgaguaguucaucauac

SEQ ID NO: 762128 - RNA, 19 nt, Artificial Sequence
  Description of Artificial Sequence: Synthetic oligonucleotide
accgccuuaauauuguccu

SEQ ID NO: 762129 - RNA, 19 nt, Artificial Sequence
  Description of Artificial Sequence: Synthetic oligonucleotide
ucuagugugaacgaaucau

SEQ ID NO: 762130 - RNA, 19 nt, Artificial Sequence
  Description of Artificial Sequence: Synthetic oligonucleotide
auaguaucucaugaugcgg

SEQ ID NO: 762131 - RNA, 19 nt, Artificial Sequence
  Description of Artificial Sequence: Synthetic oligonucleotide
gugauaaacagcccacgag

SEQ ID NO: 762132 - RNA, 19 nt, Artificial Sequence
  Description of Artificial Sequence: Synthetic oligonucleotide
agaucagagaccuuacaaa

SEQ ID NO: 762133 - RNA, 19 nt, Artificial Sequence
  Description of Artificial Sequence: Synthetic oligonucleotide
uuggagagucaugagaaug

SEQ ID NO: 762134 - RNA, 19 nt, Artificial Sequence
  Description of Artificial Sequence: Synthetic oligonucleotide
ucuagcaggacaggaaggc

SEQ ID NO: 762135 - RNA, 19 nt, Artificial Sequence
  Description of Artificial Sequence: Synthetic oligonucleotide
caucuagcaggacaggaag

SEQ ID NO: 762136 - RNA, 19 nt, Artificial Sequence
  Description of Artificial Sequence: Synthetic oligonucleotide
auuguuggugccgacaucu

SEQ ID NO: 762137 - RNA, 19 nt, Artificial Sequence
  Description of Artificial Sequence: Synthetic oligonucleotide
gugaacgaaucauagucug

SEQ ID NO: 762138 - RNA, 19 nt, Artificial Sequence
  Description of Artificial Sequence: Synthetic oligonucleotide
caggccgauguacagaggg

SEQ ID NO: 762139 - RNA, 19 nt, Artificial Sequence
  Description of Artificial Sequence: Synthetic oligonucleotide
uguuggugccgacaucuag

SEQ ID NO: 762140 - RNA, 19 nt, Artificial Sequence
  Description of Artificial Sequence: Synthetic oligonucleotide
ucaugguuuagguggcucc

SEQ ID NO: 762141 - RNA, 19 nt, Artificial Sequence
  Description of Artificial Sequence: Synthetic oligonucleotide
aaggucagaccguauugcu

SEQ ID NO: 762142 - RNA, 19 nt, Artificial Sequence
  Description of Artificial Sequence: Synthetic oligonucleotide
auagucuggaguguagauc

SEQ ID NO: 762143 - RNA, 19 nt, Artificial Sequence
  Description of Artificial Sequence: Synthetic oligonucleotide
gaucgcucggcccucagug

SEQ ID NO: 762144 - RNA, 19 nt, Artificial Sequence
  Description of Artificial Sequence: Synthetic oligonucleotide
ugucuagugugaacgaauc

SEQ ID NO: 762145 - RNA, 19 nt, Artificial Sequence
  Description of Artificial Sequence: Synthetic oligonucleotide
cauuguugcaagguggccc

SEQ ID NO: 762146 - RNA, 19 nt, Artificial Sequence
  Description of Artificial Sequence: Synthetic oligonucleotide
acgaaucauagucuggagu

SEQ ID NO: 762147 - RNA, 19 nt, Artificial Sequence
  Description of Artificial Sequence: Synthetic oligonucleotide
cacucuuaaaaggacuucc

SEQ ID NO: 762148 - RNA, 19 nt, Artificial Sequence
  Description of Artificial Sequence: Synthetic oligonucleotide
augacacccagugcuaccc

SEQ ID NO: 762149 - RNA, 19 nt, Artificial Sequence
  Description of Artificial Sequence: Synthetic oligonucleotide
uucgcgcagaucuggaacc

SEQ ID NO: 762150 - RNA, 19 nt, Artificial Sequence
  Description of Artificial Sequence: Synthetic oligonucleotide
ugauugggcgcucauggaa

SEQ ID NO: 762151 - RNA, 19 nt, Artificial Sequence
  Description of Artificial Sequence: Synthetic oligonucleotide
ugggccggaacgaaaaggu

SEQ ID NO: 762152 - RNA, 19 nt, Artificial Sequence
  Description of Artificial Sequence: Synthetic oligonucleotide
guauccucgcuucuucagg

SEQ ID NO: 762153 - RNA, 19 nt, Artificial Sequence
  Description of Artificial Sequence: Synthetic oligonucleotide
aguaucucaugaugcggag

SEQ ID NO: 762154 - RNA, 19 nt, Artificial Sequence
  Description of Artificial Sequence: Synthetic oligonucleotide
aucguauccucgcuucuuc

SEQ ID NO: 762155 - RNA, 19 nt, Artificial Sequence
  Description of Artificial Sequence: Synthetic oligonucleotide
gucaugaauggugauaaac

SEQ ID NO: 762156 - RNA, 19 nt, Artificial Sequence
  Description of Artificial Sequence: Synthetic oligonucleotide
acgcugguguuucaggccg

SEQ ID NO: 762157 - RNA, 19 nt, Artificial Sequence
  Description of Artificial Sequence: Synthetic oligonucleotide
ugaacaugcaguacuuguu

SEQ ID NO: 762158 - RNA, 19 nt, Artificial Sequence
  Description of Artificial Sequence: Synthetic oligonucleotide
cagaccguauugcugacag

SEQ ID NO: 762159 - RNA, 19 nt, Artificial Sequence
  Description of Artificial Sequence: Synthetic oligonucleotide
gaacgaaucauagucugga

SEQ ID NO: 762160 - RNA, 19 nt, Artificial Sequence
  Description of Artificial Sequence: Synthetic oligonucleotide
uacuuguccaggucgcuug

SEQ ID NO: 762161 - RNA, 19 nt, Artificial Sequence
  Description of Artificial Sequence: Synthetic oligonucleotide
uuuagguggcuccuucccu

SEQ ID NO: 762162 - RNA, 19 nt, Artificial Sequence
  Description of Artificial Sequence: Synthetic oligonucleotide
caugcaguacuuguugcgg

SEQ ID NO: 762163 - RNA, 19 nt, Artificial Sequence
  Description of Artificial Sequence: Synthetic oligonucleotide
gaaggucagaccguauugc

SEQ ID NO: 762164 - RNA, 19 nt, Artificial Sequence
  Description of Artificial Sequence: Synthetic oligonucleotide
ugcgguauuuguugagcag

SEQ ID NO: 762165 - RNA, 19 nt, Artificial Sequence
  Description of Artificial Sequence: Synthetic oligonucleotide
uggugauucucagagcagc

SEQ ID NO: 762166 - RNA, 19 nt, Artificial Sequence
  Description of Artificial Sequence: Synthetic oligonucleotide
uuccgaacuuaucugucac

SEQ ID NO: 762167 - RNA, 19 nt, Artificial Sequence
  Description of Artificial Sequence: Synthetic oligonucleotide
guggguguguauacaaugg

SEQ ID NO: 762168 - RNA, 19 nt, Artificial Sequence
  Description of Artificial Sequence: Synthetic oligonucleotide
ggaacgaaaaggugccugg

SEQ ID NO: 762169 - RNA, 19 nt, Artificial Sequence
  Description of Artificial Sequence: Synthetic oligonucleotide
uaugcauagucgaggacuu

SEQ ID NO: 762170 - RNA, 19 nt, Artificial Sequence
  Description of Artificial Sequence: Synthetic oligonucleotide
uauaugcauagucgaggac

SEQ ID NO: 762171 - RNA, 19 nt, Artificial Sequence
  Description of Artificial Sequence: Synthetic oligonucleotide
guuuagguggcuccuuccc

SEQ ID NO: 762172 - RNA, 19 nt, Artificial Sequence
  Description of Artificial Sequence: Synthetic oligonucleotide
gauugggcgcucauggaag

SEQ ID NO: 762173 - RNA, 19 nt, Artificial Sequence
  Description of Artificial Sequence: Synthetic oligonucleotide
agaugaggguuccugguga

SEQ ID NO: 762174 - RNA, 19 nt, Artificial Sequence
  Description of Artificial Sequence: Synthetic oligonucleotide
gaaaaggugccuggcgccg

SEQ ID NO: 762175 - RNA, 19 nt, Artificial Sequence
  Description of Artificial Sequence: Synthetic oligonucleotide
gacaucguauccucgcuuc

SEQ ID NO: 762176 - RNA, 19 nt, Artificial Sequence
  Description of Artificial Sequence: Synthetic oligonucleotide
aaacaccccagagagugca

SEQ ID NO: 762177 - RNA, 19 nt, Artificial Sequence
  Description of Artificial Sequence: Synthetic oligonucleotide
gagaugaggguuccuggug

SEQ ID NO: 762178 - RNA, 19 nt, Artificial Sequence
  Description of Artificial Sequence: Synthetic oligonucleotide
guuucccugaccaggaaug

SEQ ID NO: 762179 - RNA, 19 nt, Artificial Sequence
  Description of Artificial Sequence: Synthetic oligonucleotide
gaggccaugucccucagaa

SEQ ID NO: 762180 - RNA, 19 nt, Artificial Sequence
  Description of Artificial Sequence: Synthetic oligonucleotide
uguuucccugaccaggaau

SEQ ID NO: 762181 - RNA, 19 nt, Artificial Sequence
  Description of Artificial Sequence: Synthetic oligonucleotide
cuagugaccagcgcggcgc

SEQ ID NO: 762182 - RNA, 19 nt, Artificial Sequence
  Description of Artificial Sequence: Synthetic oligonucleotide
auggucuugggcaaacauc

SEQ ID NO: 762183 - RNA, 19 nt, Artificial Sequence
  Description of Artificial Sequence: Synthetic oligonucleotide
auagucgaggacuuugauu

SEQ ID NO: 762184 - RNA, 19 nt, Artificial Sequence
  Description of Artificial Sequence: Synthetic oligonucleotide
gaugcggaggagcuggaca

SEQ ID NO: 762185 - RNA, 19 nt, Artificial Sequence
  Description of Artificial Sequence: Synthetic oligonucleotide
auucagcauuguugcaagg

SEQ ID NO: 762186 - RNA, 19 nt, Artificial Sequence
  Description of Artificial Sequence: Synthetic oligonucleotide
cacaugauuggagagccug

SEQ ID NO: 762187 - RNA, 19 nt, Artificial Sequence
  Description of Artificial Sequence: Synthetic oligonucleotide
ugucggaucccaccggcga

SEQ ID NO: 762188 - RNA, 19 nt, Artificial Sequence
  Description of Artificial Sequence: Synthetic oligonucleotide
ugguuguuucucauaguau

SEQ ID NO: 762189 - RNA, 19 nt, Artificial Sequence
  Description of Artificial Sequence: Synthetic oligonucleotide
agcaacaccuauaauugcu

SEQ ID NO: 762190 - RNA, 19 nt, Artificial Sequence
  Description of Artificial Sequence: Synthetic oligonucleotide
caccuauaauugcuguggg

SEQ ID NO: 762191 - RNA, 19 nt, Artificial Sequence
  Description of Artificial Sequence: Synthetic oligonucleotide
cuuaucugucacagccugc

SEQ ID NO: 762192 - RNA, 19 nt, Artificial Sequence
  Description of Artificial Sequence: Synthetic oligonucleotide
guuggugccgacaucuagc

SEQ ID NO: 762193 - RNA, 19 nt, Artificial Sequence
  Description of Artificial Sequence: Synthetic oligonucleotide
cuucgcgcagaucuggaac

SEQ ID NO: 762194 - RNA, 19 nt, Artificial Sequence
  Description of Artificial Sequence: Synthetic oligonucleotide
aucguugaacaugcaguac

SEQ ID NO: 762195 - RNA, 19 nt, Artificial Sequence
  Description of Artificial Sequence: Synthetic oligonucleotide
caccgccuuaauauugucc

SEQ ID NO: 762196 - RNA, 19 nt, Artificial Sequence
  Description of Artificial Sequence: Synthetic oligonucleotide
agagaccuuacaaaagccu

SEQ ID NO: 762197 - RNA, 19 nt, Artificial Sequence
  Description of Artificial Sequence: Synthetic oligonucleotide
ucggugaaggcuccugcga

SEQ ID NO: 762198 - RNA, 19 nt, Artificial Sequence
  Description of Artificial Sequence: Synthetic oligonucleotide
auaggcguuguuucccuga

SEQ ID NO: 762199 - RNA, 19 nt, Artificial Sequence
  Description of Artificial Sequence: Synthetic oligonucleotide
caacuguaggugucuagug

SEQ ID NO: 762200 - RNA, 19 nt, Artificial Sequence
  Description of Artificial Sequence: Synthetic oligonucleotide
acacucuuaaaaggacuuc

SEQ ID NO: 762201 - RNA, 19 nt, Artificial Sequence
  Description of Artificial Sequence: Synthetic oligonucleotide
aaaaggugccuggcgccgg

SEQ ID NO: 762202 - RNA, 19 nt, Artificial Sequence
  Description of Artificial Sequence: Synthetic oligonucleotide
guugcgguauuuguugagc

SEQ ID NO: 762203 - RNA, 19 nt, Artificial Sequence
  Description of Artificial Sequence: Synthetic oligonucleotide
ucgaguaguucaucauacu

SEQ ID NO: 762204 - RNA, 19 nt, Artificial Sequence
  Description of Artificial Sequence: Synthetic oligonucleotide
ggaaggucagaccguauug

SEQ ID NO: 762205 - RNA, 19 nt, Artificial Sequence
  Description of Artificial Sequence: Synthetic oligonucleotide
uuguuucucauaguaucuc

SEQ ID NO: 762206 - RNA, 19 nt, Artificial Sequence
  Description of Artificial Sequence: Synthetic oligonucleotide
gaguguagaucagagaccu

SEQ ID NO: 762207 - RNA, 19 nt, Artificial Sequence
  Description of Artificial Sequence: Synthetic oligonucleotide
uccgaacuuaucugucaca

SEQ ID NO: 762208 - RNA, 19 nt, Artificial Sequence
  Description of Artificial Sequence: Synthetic oligonucleotide
ucuagccaagccagguccu

SEQ ID NO: 762209 - RNA, 19 nt, Artificial Sequence
  Description of Artificial Sequence: Synthetic oligonucleotide
ggucagaccguauugcuga

SEQ ID NO: 762210 - RNA, 19 nt, Artificial Sequence
  Description of Artificial Sequence: Synthetic oligonucleotide
guaucucaugaugcggagg

SEQ ID NO: 762211 - RNA, 19 nt, Artificial Sequence
  Description of Artificial Sequence: Synthetic oligonucleotide
aagaugauugggcgcucau

SEQ ID NO: 762212 - RNA, 19 nt, Artificial Sequence
  Description of Artificial Sequence: Synthetic oligonucleotide
cagcaacaccuauaauugc

SEQ ID NO: 762213 - RNA, 19 nt, Artificial Sequence
  Description of Artificial Sequence: Synthetic oligonucleotide
gacaucuagcaggacagga

SEQ ID NO: 762214 - RNA, 19 nt, Artificial Sequence
  Description of Artificial Sequence: Synthetic oligonucleotide
ucggauggugcugaguggu

SEQ ID NO: 762215 - RNA, 19 nt, Artificial Sequence
  Description of Artificial Sequence: Synthetic oligonucleotide
aaggcuccugcgauggcag

SEQ ID NO: 762216 - RNA, 19 nt, Artificial Sequence
  Description of Artificial Sequence: Synthetic oligonucleotide
ucugcucggugaaggcucc

SEQ ID NO: 762217 - RNA, 19 nt, Artificial Sequence
  Description of Artificial Sequence: Synthetic oligonucleotide
cucccaaacccaguaugcg

SEQ ID NO: 762218 - RNA, 19 nt, Artificial Sequence
  Description of Artificial Sequence: Synthetic oligonucleotide
agucaggaggaaaaucuca

SEQ ID NO: 762219 - RNA, 19 nt, Artificial Sequence
  Description of Artificial Sequence: Synthetic oligonucleotide
gaucccaccggcgaugaca

SEQ ID NO: 762220 - RNA, 19 nt, Artificial Sequence
  Description of Artificial Sequence: Synthetic oligonucleotide
cacgcugguguuucaggcc

SEQ ID NO: 762221 - RNA, 19 nt, Artificial Sequence
  Description of Artificial Sequence: Synthetic oligonucleotide
ggcguuguuucccugacca

SEQ ID NO: 762222 - RNA, 19 nt, Artificial Sequence
  Description of Artificial Sequence: Synthetic oligonucleotide
cuggugacaucguauccuc

SEQ ID NO: 762223 - RNA, 19 nt, Artificial Sequence
  Description of Artificial Sequence: Synthetic oligonucleotide
ucgaggacuuugauugcaa

SEQ ID NO: 762224 - RNA, 19 nt, Artificial Sequence
  Description of Artificial Sequence: Synthetic oligonucleotide
aacucaucgaguaguucau

SEQ ID NO: 762225 - RNA, 19 nt, Artificial Sequence
  Description of Artificial Sequence: Synthetic oligonucleotide
uaggcguuguuucccugac

SEQ ID NO: 762226 - RNA, 19 nt, Artificial Sequence
  Description of Artificial Sequence: Synthetic oligonucleotide
ugauugcaauucucagaga

SEQ ID NO: 762227 - RNA, 19 nt, Artificial Sequence
  Description of Artificial Sequence: Synthetic oligonucleotide
uggauaguaggaggccaag

SEQ ID NO: 762228 - RNA, 19 nt, Artificial Sequence
  Description of Artificial Sequence: Synthetic oligonucleotide
ccgacaucuagcaggacag

SEQ ID NO: 762229 - RNA, 19 nt, Artificial Sequence
  Description of Artificial Sequence: Synthetic oligonucleotide
gacuuugauugcaauucuc

SEQ ID NO: 762230 - RNA, 19 nt, Artificial Sequence
  Description of Artificial Sequence: Synthetic oligonucleotide
cugggccggaacgaaaagg

SEQ ID NO: 762231 - RNA, 19 nt, Artificial Sequence
  Description of Artificial Sequence: Synthetic oligonucleotide
cuagugugaacgaaucaua

SEQ ID NO: 762232 - RNA, 19 nt, Artificial Sequence
  Description of Artificial Sequence: Synthetic oligonucleotide
cagucaggaggaaaaucuc

SEQ ID NO: 762233 - RNA, 19 nt, Artificial Sequence
  Description of Artificial Sequence: Synthetic oligonucleotide
aucccaccggcgaugacac

SEQ ID NO: 762234 - RNA, 19 nt, Artificial Sequence
  Description of Artificial Sequence: Synthetic oligonucleotide
acucuuaaaaggacuucca

SEQ ID NO: 762235 - RNA, 19 nt, Artificial Sequence
  Description of Artificial Sequence: Synthetic oligonucleotide
caguaugcgcucuccauca

SEQ ID NO: 762236 - RNA, 19 nt, Artificial Sequence
  Description of Artificial Sequence: Synthetic oligonucleotide
ucguauccucgcuucuuca

SEQ ID NO: 762237 - RNA, 19 nt, Artificial Sequence
  Description of Artificial Sequence: Synthetic oligonucleotide
guagaucagagaccuuaca

SEQ ID NO: 762238 - RNA, 19 nt, Artificial Sequence
  Description of Artificial Sequence: Synthetic oligonucleotide
ugacaucguauccucgcuu

SEQ ID NO: 762239 - RNA, 19 nt, Artificial Sequence
  Description of Artificial Sequence: Synthetic oligonucleotide
ggguaugccuuccuuuucc

SEQ ID NO: 762240 - RNA, 19 nt, Artificial Sequence
  Description of Artificial Sequence: Synthetic oligonucleotide
agaccguauugcugacagg

SEQ ID NO: 762241 - RNA, 19 nt, Artificial Sequence
  Description of Artificial Sequence: Synthetic oligonucleotide
caccaccgccuuaauauug

SEQ ID NO: 762242 - RNA, 19 nt, Artificial Sequence
  Description of Artificial Sequence: Synthetic oligonucleotide
ucacccgcacccuggaaaa

SEQ ID NO: 762243 - RNA, 19 nt, Artificial Sequence
  Description of Artificial Sequence: Synthetic oligonucleotide
ugccguagcagcccagguc

SEQ ID NO: 762244 - RNA, 19 nt, Artificial Sequence
  Description of Artificial Sequence: Synthetic oligonucleotide
ggugauaaacagcccacga

SEQ ID NO: 762245 - RNA, 19 nt, Artificial Sequence
  Description of Artificial Sequence: Synthetic oligonucleotide
guguagaucagagaccuua

SEQ ID NO: 762246 - RNA, 19 nt, Artificial Sequence
  Description of Artificial Sequence: Synthetic oligonucleotide
ugggcgcucauggaaggag

SEQ ID NO: 762247 - RNA, 19 nt, Artificial Sequence
  Description of Artificial Sequence: Synthetic oligonucleotide
caucguugaacaugcagua

SEQ ID NO: 762248 - RNA, 19 nt, Artificial Sequence
  Description of Artificial Sequence: Synthetic oligonucleotide
aguaugcgcucuccaucag

SEQ ID NO: 762249 - RNA, 19 nt, Artificial Sequence
  Description of Artificial Sequence: Synthetic oligonucleotide
gccauaacaaggagguggg

SEQ ID NO: 762250 - RNA, 19 nt, Artificial Sequence
  Description of Artificial Sequence: Synthetic oligonucleotide
gagcagacggaaggcauug

SEQ ID NO: 762251 - RNA, 19 nt, Artificial Sequence
  Description of Artificial Sequence: Synthetic oligonucleotide
agaugauugggcgcucaug

SEQ ID NO: 762252 - RNA, 19 nt, Artificial Sequence
  Description of Artificial Sequence: Synthetic oligonucleotide
aagaucgcucggcccucag

SEQ ID NO: 762253 - RNA, 19 nt, Artificial Sequence
  Description of Artificial Sequence: Synthetic oligonucleotide
augauugggcgcucaugga

SEQ ID NO: 762254 - RNA, 19 nt, Artificial Sequence
  Description of Artificial Sequence: Synthetic oligonucleotide
uguugcaagguggcccuug

SEQ ID NO: 762255 - RNA, 19 nt, Artificial Sequence
  Description of Artificial Sequence: Synthetic oligonucleotide
gaggucgucggaaggucag

SEQ ID NO: 762256 - RNA, 19 nt, Artificial Sequence
  Description of Artificial Sequence: Synthetic oligonucleotide
cuccgcaugcuguguacag

SEQ ID NO: 762257 - RNA, 19 nt, Artificial Sequence
  Description of Artificial Sequence: Synthetic oligonucleotide
gucuagugugaacgaauca

SEQ ID NO: 762258 - RNA, 19 nt, Artificial Sequence
  Description of Artificial Sequence: Synthetic oligonucleotide
aacaaggaggugggcgaug

SEQ ID NO: 762259 - RNA, 19 nt, Artificial Sequence
  Description of Artificial Sequence: Synthetic oligonucleotide
ucgcucggcccucagugac

SEQ ID NO: 762260 - RNA, 19 nt, Artificial Sequence
  Description of Artificial Sequence: Synthetic oligonucleotide
gguauuuguugagcagacg

SEQ ID NO: 762261 - RNA, 19 nt, Artificial Sequence
  Description of Artificial Sequence: Synthetic oligonucleotide
acaucguauccucgcuucu

SEQ ID NO: 762262 - RNA, 19 nt, Artificial Sequence
  Description of Artificial Sequence: Synthetic oligonucleotide
ggccggaacgaaaaggugc

SEQ ID NO: 762263 - RNA, 19 nt, Artificial Sequence
  Description of Artificial Sequence: Synthetic oligonucleotide
aggugucuagugugaacga

SEQ ID NO: 762264 - RNA, 19 nt, Artificial Sequence
  Description of Artificial Sequence: Synthetic oligonucleotide
ggaguguagaucagagacc

SEQ ID NO: 762265 - RNA, 19 nt, Artificial Sequence
  Description of Artificial Sequence: Synthetic oligonucleotide
gauggucuugggcaaacau

SEQ ID NO: 762266 - RNA, 19 nt, Artificial Sequence
  Description of Artificial Sequence: Synthetic oligonucleotide
ucuucgcgcagaucuggaa

SEQ ID NO: 762267 - RNA, 19 nt, Artificial Sequence
  Description of Artificial Sequence: Synthetic oligonucleotide
uuucggucuuggagaguca

SEQ ID NO: 762268 - RNA, 19 nt, Artificial Sequence
  Description of Artificial Sequence: Synthetic oligonucleotide
uucgagagucacacucuua

SEQ ID NO: 762269 - RNA, 19 nt, Artificial Sequence
  Description of Artificial Sequence: Synthetic oligonucleotide
gucgucggaaggucagacc

SEQ ID NO: 762270 - RNA, 19 nt, Artificial Sequence
  Description of Artificial Sequence: Synthetic oligonucleotide
gguagcacuucucagcugu

SEQ ID NO: 762271 - RNA, 19 nt, Artificial Sequence
  Description of Artificial Sequence: Synthetic oligonucleotide
ccgaacuuaucugucacag

SEQ ID NO: 762272 - RNA, 19 nt, Artificial Sequence
  Description of Artificial Sequence: Synthetic oligonucleotide
caagguggcccuugucaug

SEQ ID NO: 762273 - RNA, 19 nt, Artificial Sequence
  Description of Artificial Sequence: Synthetic oligonucleotide
caucgaguaguucaucaua

SEQ ID NO: 762274 - RNA, 19 nt, Artificial Sequence
  Description of Artificial Sequence: Synthetic oligonucleotide
acaucuagcaggacaggaa

SEQ ID NO: 762275 - RNA, 19 nt, Artificial Sequence
  Description of Artificial Sequence: Synthetic oligonucleotide
gcccaggucucccaaaccc

SEQ ID NO: 762276 - RNA, 19 nt, Artificial Sequence
  Description of Artificial Sequence: Synthetic oligonucleotide
acacgucucggauggugcu

SEQ ID NO: 762277 - RNA, 19 nt, Artificial Sequence
  Description of Artificial Sequence: Synthetic oligonucleotide
gcaugaacucaucgaguag

SEQ ID NO: 762278 - RNA, 19 nt, Artificial Sequence
  Description of Artificial Sequence: Synthetic oligonucleotide
acagcccacgaggucgucg

SEQ ID NO: 762279 - RNA, 19 nt, Artificial Sequence
  Description of Artificial Sequence: Synthetic oligonucleotide
acgaggucgucggaagguc

SEQ ID NO: 762280 - RNA, 19 nt, Artificial Sequence
  Description of Artificial Sequence: Synthetic oligonucleotide
gaucaggccguggaugcca

SEQ ID NO: 762281 - RNA, 19 nt, Artificial Sequence
  Description of Artificial Sequence: Synthetic oligonucleotide
uucggucuuggagagucau

SEQ ID NO: 762282 - RNA, 19 nt, Artificial Sequence
  Description of Artificial Sequence: Synthetic oligonucleotide
gccgacaucuagcaggaca

SEQ ID NO: 762283 - RNA, 19 nt, Artificial Sequence
  Description of Artificial Sequence: Synthetic oligonucleotide
aggucagaccguauugcug

SEQ ID NO: 762284 - RNA, 19 nt, Artificial Sequence
  Description of Artificial Sequence: Synthetic oligonucleotide
cauaggcguuguuucccug

SEQ ID NO: 762285 - RNA, 19 nt, Artificial Sequence
  Description of Artificial Sequence: Synthetic oligonucleotide
augaauguccugccaucuu

SEQ ID NO: 762286 - RNA, 19 nt, Artificial Sequence
  Description of Artificial Sequence: Synthetic oligonucleotide
gaggacuuugauugcaauu

SEQ ID NO: 762287 - RNA, 19 nt, Artificial Sequence
  Description of Artificial Sequence: Synthetic oligonucleotide
ucagaccguauugcugaca

SEQ ID NO: 762288 - RNA, 19 nt, Artificial Sequence
  Description of Artificial Sequence: Synthetic oligonucleotide
ccagccgcggccuagugac

SEQ ID NO: 762289 - RNA, 19 nt, Artificial Sequence
  Description of Artificial Sequence: Synthetic oligonucleotide
cuggaguguagaucagaga

SEQ ID NO: 762290 - RNA, 19 nt, Artificial Sequence
  Description of Artificial Sequence: Synthetic oligonucleotide
acaugauuggagagccugu

SEQ ID NO: 762291 - RNA, 19 nt, Artificial Sequence
  Description of Artificial Sequence: Synthetic oligonucleotide
ggucuucgcgcagaucugg

SEQ ID NO: 762292 - RNA, 19 nt, Artificial Sequence
  Description of Artificial Sequence: Synthetic oligonucleotide
ccggcgaugacacccagug

SEQ ID NO: 762293 - RNA, 19 nt, Artificial Sequence
  Description of Artificial Sequence: Synthetic oligonucleotide
caggucgcuugguuguuuc

SEQ ID NO: 762294 - RNA, 19 nt, Artificial Sequence
  Description of Artificial Sequence: Synthetic oligonucleotide
ggccaugcguggcagggag

SEQ ID NO: 762295 - RNA, 19 nt, Artificial Sequence
  Description of Artificial Sequence: Synthetic oligonucleotide
gaaucauagucuggagugu

SEQ ID NO: 762296 - RNA, 19 nt, Artificial Sequence
  Description of Artificial Sequence: Synthetic oligonucleotide
gcgcccauggucuucgcgc

SEQ ID NO: 762297 - RNA, 19 nt, Artificial Sequence
  Description of Artificial Sequence: Synthetic oligonucleotide
accaccgccuuaauauugu

SEQ ID NO: 762298 - RNA, 19 nt, Artificial Sequence
  Description of Artificial Sequence: Synthetic oligonucleotide
cauuguuggugccgacauc

SEQ ID NO: 762299 - RNA, 19 nt, Artificial Sequence
  Description of Artificial Sequence: Synthetic oligonucleotide
agaucgcucggcccucagu

SEQ ID NO: 762300 - RNA, 19 nt, Artificial Sequence
  Description of Artificial Sequence: Synthetic oligonucleotide
agcagacggaaggcauugg

SEQ ID NO: 762301 - RNA, 19 nt, Artificial Sequence
  Description of Artificial Sequence: Synthetic oligonucleotide
cucacccgcacccuggaaa

SEQ ID NO: 762302 - RNA, 19 nt, Artificial Sequence
  Description of Artificial Sequence: Synthetic oligonucleotide
cucauuguuggugccgaca

SEQ ID NO: 762303 - RNA, 19 nt, Artificial Sequence
  Description of Artificial Sequence: Synthetic oligonucleotide
ggccuagugaccagcgcgg

SEQ ID NO: 762304 - RNA, 19 nt, Artificial Sequence
  Description of Artificial Sequence: Synthetic oligonucleotide
gucgaggacuuugauugca

SEQ ID NO: 762305 - RNA, 19 nt, Artificial Sequence
  Description of Artificial Sequence: Synthetic oligonucleotide
gccggaacgaaaaggugcc

SEQ ID NO: 762306 - RNA, 19 nt, Artificial Sequence
  Description of Artificial Sequence: Synthetic oligonucleotide
gcgggccugacuuggagug

SEQ ID NO: 762307 - RNA, 19 nt, Artificial Sequence
  Description of Artificial Sequence: Synthetic oligonucleotide
aucgcucggcccucaguga

SEQ ID NO: 762308 - RNA, 19 nt, Artificial Sequence
  Description of Artificial Sequence: Synthetic oligonucleotide
ucgcuugguuguuucucau

SEQ ID NO: 762309 - RNA, 19 nt, Artificial Sequence
  Description of Artificial Sequence: Synthetic oligonucleotide
ccuauaauugcugugggcu

SEQ ID NO: 762310 - RNA, 19 nt, Artificial Sequence
  Description of Artificial Sequence: Synthetic oligonucleotide
uuguuggugccgacaucua

SEQ ID NO: 762311 - RNA, 19 nt, Artificial Sequence
  Description of Artificial Sequence: Synthetic oligonucleotide
cgaaaaggugccuggcgcc

SEQ ID NO: 762312 - RNA, 19 nt, Artificial Sequence
  Description of Artificial Sequence: Synthetic oligonucleotide
aggucgcuugguuguuucu

SEQ ID NO: 762313 - RNA, 19 nt, Artificial Sequence
  Description of Artificial Sequence: Synthetic oligonucleotide
acccgcacccuggaaaaca

SEQ ID NO: 762314 - RNA, 19 nt, Artificial Sequence
  Description of Artificial Sequence: Synthetic oligonucleotide
augccguagcagcccaggu

SEQ ID NO: 762315 - RNA, 19 nt, Artificial Sequence
  Description of Artificial Sequence: Synthetic oligonucleotide
gugucggaucccaccggcg

SEQ ID NO: 762316 - RNA, 19 nt, Artificial Sequence
  Description of Artificial Sequence: Synthetic oligonucleotide
gcgguauuuguugagcaga

SEQ ID NO: 762317 - RNA, 19 nt, Artificial Sequence
  Description of Artificial Sequence: Synthetic oligonucleotide
gucagaccguauugcugac

SEQ ID NO: 762318 - RNA, 19 nt, Artificial Sequence
  Description of Artificial Sequence: Synthetic oligonucleotide
ucggaaggucagaccguau

SEQ ID NO: 762319 - RNA, 19 nt, Artificial Sequence
  Description of Artificial Sequence: Synthetic oligonucleotide
ucgcgcagaucuggaacca

SEQ ID NO: 762320 - RNA, 19 nt, Artificial Sequence
  Description of Artificial Sequence: Synthetic oligonucleotide
cuauaauugcugugggcuu

SEQ ID NO: 762321 - RNA, 19 nt, Artificial Sequence
  Description of Artificial Sequence: Synthetic oligonucleotide
uugggcgcucauggaagga

SEQ ID NO: 762322 - RNA, 19 nt, Artificial Sequence
  Description of Artificial Sequence: Synthetic oligonucleotide
guccaggucgcuugguugu

SEQ ID NO: 762323 - RNA, 19 nt, Artificial Sequence
  Description of Artificial Sequence: Synthetic oligonucleotide
cggccuagugaccagcgcg

SEQ ID NO: 762324 - RNA, 19 nt, Artificial Sequence
  Description of Artificial Sequence: Synthetic oligonucleotide
aacagcccacgaggucguc

SEQ ID NO: 762325 - RNA, 19 nt, Artificial Sequence
  Description of Artificial Sequence: Synthetic oligonucleotide
cuggaugaggcaauuuauu

SEQ ID NO: 762326 - RNA, 19 nt, Artificial Sequence
  Description of Artificial Sequence: Synthetic oligonucleotide
gccguagcagcccaggucu

SEQ ID NO: 762327 - RNA, 19 nt, Artificial Sequence
  Description of Artificial Sequence: Synthetic oligonucleotide
gugacaucguauccucgcu

SEQ ID NO: 762328 - RNA, 19 nt, Artificial Sequence
  Description of Artificial Sequence: Synthetic oligonucleotide
ggcaauuuauuccgaacuu

SEQ ID NO: 762329 - RNA, 19 nt, Artificial Sequence
  Description of Artificial Sequence: Synthetic oligonucleotide
gggcgcucauggaaggagg

SEQ ID NO: 762330 - RNA, 19 nt, Artificial Sequence
  Description of Artificial Sequence: Synthetic oligonucleotide
guaugcgcucuccaucagu

SEQ ID NO: 762331 - RNA, 19 nt, Artificial Sequence
  Description of Artificial Sequence: Synthetic oligonucleotide
ggccgauguacagaggguc

SEQ ID NO: 762332 - RNA, 19 nt, Artificial Sequence
  Description of Artificial Sequence: Synthetic oligonucleotide
ggacuuugauugcaauucu

SEQ ID NO: 762333 - RNA, 19 nt, Artificial Sequence
  Description of Artificial Sequence: Synthetic oligonucleotide
cacgucucggauggugcug

SEQ ID NO: 762334 - RNA, 19 nt, Artificial Sequence
  Description of Artificial Sequence: Synthetic oligonucleotide
ccguauugcugacaggcca

SEQ ID NO: 762335 - RNA, 19 nt, Artificial Sequence
  Description of Artificial Sequence: Synthetic oligonucleotide
cccacgaggucgucggaag

SEQ ID NO: 762336 - RNA, 19 nt, Artificial Sequence
  Description of Artificial Sequence: Synthetic oligonucleotide
gcacccuggaaaacaaaca

SEQ ID NO: 762337 - RNA, 19 nt, Artificial Sequence
  Description of Artificial Sequence: Synthetic oligonucleotide
ggccguggaugccaagcug

SEQ ID NO: 762338 - RNA, 19 nt, Artificial Sequence
  Description of Artificial Sequence: Synthetic oligonucleotide
gcggaggagcuggacaucc

SEQ ID NO: 762339 - RNA, 19 nt, Artificial Sequence
  Description of Artificial Sequence: Synthetic oligonucleotide
ggucgcuugguuguuucuc

SEQ ID NO: 762340 - RNA, 19 nt, Artificial Sequence
  Description of Artificial Sequence: Synthetic oligonucleotide
guugcaagguggcccuugu

SEQ ID NO: 762341 - RNA, 19 nt, Artificial Sequence
  Description of Artificial Sequence: Synthetic oligonucleotide
gugucuagugugaacgaau

SEQ ID NO: 762342 - RNA, 19 nt, Artificial Sequence
  Description of Artificial Sequence: Synthetic oligonucleotide
gcguuguuucccugaccag

SEQ ID NO: 762343 - RNA, 19 nt, Artificial Sequence
  Description of Artificial Sequence: Synthetic oligonucleotide
ggucgucggaaggucagac

SEQ ID NO: 762344 - RNA, 19 nt, Artificial Sequence
  Description of Artificial Sequence: Synthetic oligonucleotide
ggcgcucauggaaggaggc

SEQ ID NO: 762345 - RNA, 19 nt, Artificial Sequence
  Description of Artificial Sequence: Synthetic oligonucleotide
ggugucuagugugaacgaa

SEQ ID NO: 762346 - RNA, 19 nt, Artificial Sequence
  Description of Artificial Sequence: Synthetic oligonucleotide
guuccuggugacaucguau

SEQ ID NO: 762347 - RNA, 19 nt, Artificial Sequence
  Description of Artificial Sequence: Synthetic oligonucleotide
aacaccccagagagugcau

SEQ ID NO: 762348 - RNA, 19 nt, Artificial Sequence
  Description of Artificial Sequence: Synthetic oligonucleotide
uccugccaucuucgagagu

SEQ ID NO: 762349 - RNA, 19 nt, Artificial Sequence
  Description of Artificial Sequence: Synthetic oligonucleotide
ccacgaggucgucggaagg

SEQ ID NO: 762350 - RNA, 19 nt, Artificial Sequence
  Description of Artificial Sequence: Synthetic oligonucleotide
ggccaugccuuguugagau

SEQ ID NO: 762351 - RNA, 19 nt, Artificial Sequence
  Description of Artificial Sequence: Synthetic oligonucleotide
gucggaaggucagaccgua

SEQ ID NO: 762352 - RNA, 19 nt, Artificial Sequence
  Description of Artificial Sequence: Synthetic oligonucleotide
cauagucgaggacuuugau

SEQ ID NO: 762353 - RNA, 19 nt, Artificial Sequence
  Description of Artificial Sequence: Synthetic oligonucleotide
cuccugcgauggcagcaac

SEQ ID NO: 762354 - RNA, 19 nt, Artificial Sequence
  Description of Artificial Sequence: Synthetic oligonucleotide
cugguguuucaggccgaug

SEQ ID NO: 762355 - RNA, 19 nt, Artificial Sequence
  Description of Artificial Sequence: Synthetic oligonucleotide
cauggucuucgcgcagauc

SEQ ID NO: 762356 - RNA, 19 nt, Artificial Sequence
  Description of Artificial Sequence: Synthetic oligonucleotide
guccugcgcgccagcagag

SEQ ID NO: 762357 - RNA, 19 nt, Artificial Sequence
  Description of Artificial Sequence: Synthetic oligonucleotide
ucccacggacacgcuggug

SEQ ID NO: 762358 - RNA, 19 nt, Artificial Sequence
  Description of Artificial Sequence: Synthetic oligonucleotide
gucuucgcgcagaucugga

SEQ ID NO: 762359 - RNA, 19 nt, Artificial Sequence
  Description of Artificial Sequence: Synthetic oligonucleotide
cccaaacccaguaugcgcu

SEQ ID NO: 762360 - RNA, 19 nt, Artificial Sequence
  Description of Artificial Sequence: Synthetic oligonucleotide
aggucgucggaaggucaga

SEQ ID NO: 762361 - RNA, 19 nt, Artificial Sequence
  Description of Artificial Sequence: Synthetic oligonucleotide
cuucgagagucacacucuu

SEQ ID NO: 762362 - RNA, 19 nt, Artificial Sequence
  Description of Artificial Sequence: Synthetic oligonucleotide
cggaacgaaaaggugccug

SEQ ID NO: 762363 - RNA, 19 nt, Artificial Sequence
  Description of Artificial Sequence: Synthetic oligonucleotide
gggccggaacgaaaaggug

SEQ ID NO: 762364 - RNA, 19 nt, Artificial Sequence
  Description of Artificial Sequence: Synthetic oligonucleotide
ccugggccggaacgaaaag

SEQ ID NO: 762365 - RNA, 19 nt, Artificial Sequence
  Description of Artificial Sequence: Synthetic oligonucleotide
caccggcgaugacacccag

SEQ ID NO: 762366 - RNA, 19 nt, Artificial Sequence
  Description of Artificial Sequence: Synthetic oligonucleotide
ggauaguaggaggccaagu

SEQ ID NO: 762367 - RNA, 19 nt, Artificial Sequence
  Description of Artificial Sequence: Synthetic oligonucleotide
gcgcucauggaaggaggcc

SEQ ID NO: 762368 - RNA, 19 nt, Artificial Sequence
  Description of Artificial Sequence: Synthetic oligonucleotide
gcggcgcccauggucuucg

SEQ ID NO: 762369 - RNA, 19 nt, Artificial Sequence
  Description of Artificial Sequence: Synthetic oligonucleotide
cacgaggucgucggaaggu

SEQ ID NO: 762370 - RNA, 19 nt, Artificial Sequence
  Description of Artificial Sequence: Synthetic oligonucleotide
ccgauguacagagggucuc

SEQ ID NO: 762371 - RNA, 19 nt, Artificial Sequence
  Description of Artificial Sequence: Synthetic oligonucleotide
aucaggccguggaugccaa

SEQ ID NO: 762372 - RNA, 19 nt, Artificial Sequence
  Description of Artificial Sequence: Synthetic oligonucleotide
gccggagggugccgcaggc

SEQ ID NO: 762373 - RNA, 19 nt, Artificial Sequence
  Description of Artificial Sequence: Synthetic oligonucleotide
cgcggccuagugaccagcg

SEQ ID NO: 762374 - RNA, 19 nt, Artificial Sequence
  Description of Artificial Sequence: Synthetic oligonucleotide
cuaccccaggaaacacaua

SEQ ID NO: 762375 - RNA, 19 nt, Artificial Sequence
  Description of Artificial Sequence: Synthetic oligonucleotide
ccucauuguuggugccgac

SEQ ID NO: 762376 - RNA, 19 nt, Artificial Sequence
  Description of Artificial Sequence: Synthetic oligonucleotide
ggauggucuugggcaaaca

SEQ ID NO: 762377 - RNA, 19 nt, Artificial Sequence
  Description of Artificial Sequence: Synthetic oligonucleotide
gccaugcguggcagggagg

SEQ ID NO: 762378 - RNA, 19 nt, Artificial Sequence
  Description of Artificial Sequence: Synthetic oligonucleotide
cacccgcacccuggaaaac

SEQ ID NO: 762379 - RNA, 19 nt, Artificial Sequence
  Description of Artificial Sequence: Synthetic oligonucleotide
ccaccgccuuaauauuguc

SEQ ID NO: 762380 - RNA, 19 nt, Artificial Sequence
  Description of Artificial Sequence: Synthetic oligonucleotide
gcacggagcgaggcgggcc

SEQ ID NO: 762381 - RNA, 19 nt, Artificial Sequence
  Description of Artificial Sequence: Synthetic oligonucleotide
cacggagcgaggcgggccu

SEQ ID NO: 762382 - RNA, 19 nt, Artificial Sequence
  Description of Artificial Sequence: Synthetic oligonucleotide
cuggcgccggagggugccg

SEQ ID NO: 762383 - RNA, 19 nt, Artificial Sequence
  Description of Artificial Sequence: Synthetic oligonucleotide
ccgguagcacuucucagcu

SEQ ID NO: 762384 - RNA, 19 nt, Artificial Sequence
  Description of Artificial Sequence: Synthetic oligonucleotide
gccagccgcggccuaguga

SEQ ID NO: 762385 - RNA, 19 nt, Artificial Sequence
  Description of Artificial Sequence: Synthetic oligonucleotide
cccugggccggaacgaaaa

SEQ ID NO: 762386 - RNA, 19 nt, Artificial Sequence
  Description of Artificial Sequence: Synthetic oligonucleotide
aggccagccgcggccuagu

SEQ ID NO: 762387 - RNA, 19 nt, Artificial Sequence
  Description of Artificial Sequence: Synthetic oligonucleotide
gagcgaggcgggccugacu

SEQ ID NO: 762388 - RNA, 19 nt, Artificial Sequence
  Description of Artificial Sequence: Synthetic oligonucleotide
gcgaggcgggccugacuug

SEQ ID NO: 762389 - RNA, 19 nt, Artificial Sequence
  Description of Artificial Sequence: Synthetic oligonucleotide
caucguauccucgcuucuu

SEQ ID NO: 762390 - RNA, 19 nt, Artificial Sequence
  Description of Artificial Sequence: Synthetic oligonucleotide
gccgcggccuagugaccag

SEQ ID NO: 762391 - RNA, 19 nt, Artificial Sequence
  Description of Artificial Sequence: Synthetic oligonucleotide
ggcgggccugacuuggagu

SEQ ID NO: 762392 - RNA, 19 nt, Artificial Sequence
  Description of Artificial Sequence: Synthetic oligonucleotide
gccgauguacagagggucu

SEQ ID NO: 762393 - RNA, 19 nt, Artificial Sequence
  Description of Artificial Sequence: Synthetic oligonucleotide
cgaggucgucggaagguca

SEQ ID NO: 762394 - RNA, 19 nt, Artificial Sequence
  Description of Artificial Sequence: Synthetic oligonucleotide
ccaccggcgaugacaccca

SEQ ID NO: 762395 - RNA, 19 nt, Artificial Sequence
  Description of Artificial Sequence: Synthetic oligonucleotide
cauuucggucuuggagagu

SEQ ID NO: 762396 - RNA, 19 nt, Artificial Sequence
  Description of Artificial Sequence: Synthetic oligonucleotide
ggccagccgcggccuagug

SEQ ID NO: 762397 - RNA, 19 nt, Artificial Sequence
  Description of Artificial Sequence: Synthetic oligonucleotide
ggcccuugucaugaauggu

SEQ ID NO: 762398 - RNA, 19 nt, Artificial Sequence
  Description of Artificial Sequence: Synthetic oligonucleotide
ccguagcagcccaggucuc

SEQ ID NO: 762399 - RNA, 19 nt, Artificial Sequence
  Description of Artificial Sequence: Synthetic oligonucleotide
gcccacgaggucgucggaa

SEQ ID NO: 762400 - RNA, 19 nt, Artificial Sequence
  Description of Artificial Sequence: Synthetic oligonucleotide
ccuccgcaugcuguguaca

SEQ ID NO: 762401 - RNA, 19 nt, Artificial Sequence
  Description of Artificial Sequence: Synthetic oligonucleotide
cgcgcagaucuggaaccag

SEQ ID NO: 762402 - RNA, 19 nt, Artificial Sequence
  Description of Artificial Sequence: Synthetic oligonucleotide
ccgcggccuagugaccagc

SEQ ID NO: 762403 - RNA, 19 nt, Artificial Sequence
  Description of Artificial Sequence: Synthetic oligonucleotide
gcgccggagggugccgcag

SEQ ID NO: 762404 - RNA, 19 nt, Artificial Sequence
  Description of Artificial Sequence: Synthetic oligonucleotide
ccaccaccgccuuaauauu

SEQ ID NO: 762405 - RNA, 19 nt, Artificial Sequence
  Description of Artificial Sequence: Synthetic oligonucleotide
cgauguacagagggucucu

SEQ ID NO: 762406 - RNA, 19 nt, Artificial Sequence
  Description of Artificial Sequence: Synthetic oligonucleotide
cgucggaaggucagaccgu

SEQ ID NO: 762407 - RNA, 19 nt, Artificial Sequence
  Description of Artificial Sequence: Synthetic oligonucleotide
cggugaaggcuccugcgau

SEQ ID NO: 762408 - RNA, 19 nt, Artificial Sequence
  Description of Artificial Sequence: Synthetic oligonucleotide
gcccugggccggaacgaaa

SEQ ID NO: 762409 - RNA, 19 nt, Artificial Sequence
  Description of Artificial Sequence: Synthetic oligonucleotide
gccuggcgccggagggugc

SEQ ID NO: 762410 - RNA, 19 nt, Artificial Sequence
  Description of Artificial Sequence: Synthetic oligonucleotide
gcguggcagggaggccagc

SEQ ID NO: 762411 - RNA, 19 nt, Artificial Sequence
  Description of Artificial Sequence: Synthetic oligonucleotide
ccucacccgcacccuggaa

SEQ ID NO: 762412 - RNA, 19 nt, Artificial Sequence
  Description of Artificial Sequence: Synthetic oligonucleotide
cggaucccaccggcgauga

SEQ ID NO: 762413 - RNA, 19 nt, Artificial Sequence
  Description of Artificial Sequence: Synthetic oligonucleotide
cggacacgcugguguuuca

SEQ ID NO: 762414 - RNA, 19 nt, Artificial Sequence
  Description of Artificial Sequence: Synthetic oligonucleotide
ccggaacgaaaaggugccu

SEQ ID NO: 762415 - RNA, 19 nt, Artificial Sequence
  Description of Artificial Sequence: Synthetic oligonucleotide
cgcggcgcccauggucuuc

SEQ ID NO: 762416 - RNA, 19 nt, Artificial Sequence
  Description of Artificial Sequence: Synthetic oligonucleotide
ccaggucgcuugguuguuu

SEQ ID NO: 762417 - RNA, 19 nt, Artificial Sequence
  Description of Artificial Sequence: Synthetic oligonucleotide
aaaacuaucccauuaaucg

SEQ ID NO: 762418 - RNA, 19 nt, Artificial Sequence
  Description of Artificial Sequence: Synthetic oligonucleotide
agaauagaaaauuuggacc

SEQ ID NO: 762419 - RNA, 19 nt, Artificial Sequence
  Description of Artificial Sequence: Synthetic oligonucleotide
aaaugcuuaggcuacagac

SEQ ID NO: 762420 - RNA, 19 nt, Artificial Sequence
  Description of Artificial Sequence: Synthetic oligonucleotide
auuauugaugcuuacaacg

SEQ ID NO: 762421 - RNA, 19 nt, Artificial Sequence
  Description of Artificial Sequence: Synthetic oligonucleotide
aaaguaaugaaaagcauac

SEQ ID NO: 762422 - RNA, 19 nt, Artificial Sequence
  Description of Artificial Sequence: Synthetic oligonucleotide
uacauaagagauaagaacu

SEQ ID NO: 762423 - RNA, 19 nt, Artificial Sequence
  Description of Artificial Sequence: Synthetic oligonucleotide
caugagacgagaaugaucc

SEQ ID NO: 762424 - RNA, 19 nt, Artificial Sequence
  Description of Artificial Sequence: Synthetic oligonucleotide
aaacuaucccauuaaucgc

SEQ ID NO: 762425 - RNA, 19 nt, Artificial Sequence
  Description of Artificial Sequence: Synthetic oligonucleotide
aauucuuccaaacccgacg

SEQ ID NO: 762426 - RNA, 19 nt, Artificial Sequence
  Description of Artificial Sequence: Synthetic oligonucleotide
cuagaauccguucagaggc

SEQ ID NO: 762427 - RNA, 19 nt, Artificial Sequence
  Description of Artificial Sequence: Synthetic oligonucleotide
uuauugaugcuuacaacgg

SEQ ID NO: 762428 - RNA, 19 nt, Artificial Sequence
  Description of Artificial Sequence: Synthetic oligonucleotide
aaauaggacacaugugcac

SEQ ID NO: 762429 - RNA, 19 nt, Artificial Sequence
  Description of Artificial Sequence: Synthetic oligonucleotide
ucugauaaacagaauggag

SEQ ID NO: 762430 - RNA, 19 nt, Artificial Sequence
  Description of Artificial Sequence: Synthetic oligonucleotide
aagagauaagaacucuuuc

SEQ ID NO: 762431 - RNA, 19 nt, Artificial Sequence
  Description of Artificial Sequence: Synthetic oligonucleotide
ugugucaugugacagagac

SEQ ID NO: 762432 - RNA, 19 nt, Artificial Sequence
  Description of Artificial Sequence: Synthetic oligonucleotide
uauuaaaaugcuuaggcua

SEQ ID NO: 762433 - RNA, 19 nt, Artificial Sequence
  Description of Artificial Sequence: Synthetic oligonucleotide
aacaucagucaauauacug

SEQ ID NO: 762434 - RNA, 19 nt, Artificial Sequence
  Description of Artificial Sequence: Synthetic oligonucleotide
uaagaauuggcacauugga

SEQ ID NO: 762435 - RNA, 19 nt, Artificial Sequence
  Description of Artificial Sequence: Synthetic oligonucleotide
uuaggcuacagacugaccu

SEQ ID NO: 762436 - RNA, 19 nt, Artificial Sequence
  Description of Artificial Sequence: Synthetic oligonucleotide
uuagccaaaaguaaugaaa

SEQ ID NO: 762437 - RNA, 19 nt, Artificial Sequence
  Description of Artificial Sequence: Synthetic oligonucleotide
ugucaugugacagagacca

SEQ ID NO: 762438 - RNA, 19 nt, Artificial Sequence
  Description of Artificial Sequence: Synthetic oligonucleotide
gauaagaauuggcacauug

SEQ ID NO: 762439 - RNA, 19 nt, Artificial Sequence
  Description of Artificial Sequence: Synthetic oligonucleotide
ugagcguagacagagaugc

SEQ ID NO: 762440 - RNA, 19 nt, Artificial Sequence
  Description of Artificial Sequence: Synthetic oligonucleotide
aaagcauuaagcucaacuu

SEQ ID NO: 762441 - RNA, 19 nt, Artificial Sequence
  Description of Artificial Sequence: Synthetic oligonucleotide
cauacaucccucuagaauc

SEQ ID NO: 762442 - RNA, 19 nt, Artificial Sequence
  Description of Artificial Sequence: Synthetic oligonucleotide
auaccaauuacauuaacaa

SEQ ID NO: 762443 - RNA, 19 nt, Artificial Sequence
  Description of Artificial Sequence: Synthetic oligonucleotide
uaugaaguaucuaaauuuc

SEQ ID NO: 762444 - RNA, 19 nt, Artificial Sequence
  Description of Artificial Sequence: Synthetic oligonucleotide
ucuacauaagagauaagaa

SEQ ID NO: 762445 - RNA, 19 nt, Artificial Sequence
  Description of Artificial Sequence: Synthetic oligonucleotide
auuaaaaugcuuaggcuac

SEQ ID NO: 762446 - RNA, 19 nt, Artificial Sequence
  Description of Artificial Sequence: Synthetic oligonucleotide
uuauagauccacucaaaga

SEQ ID NO: 762447 - RNA, 19 nt, Artificial Sequence
  Description of Artificial Sequence: Synthetic oligonucleotide
aauacuuccauggggcggg

SEQ ID NO: 762448 - RNA, 19 nt, Artificial Sequence
  Description of Artificial Sequence: Synthetic oligonucleotide
caucagucaauauacuggg

SEQ ID NO: 762449 - RNA, 19 nt, Artificial Sequence
  Description of Artificial Sequence: Synthetic oligonucleotide
uucucaacgccagacaugg

SEQ ID NO: 762450 - RNA, 19 nt, Artificial Sequence
  Description of Artificial Sequence: Synthetic oligonucleotide
ucuccaguggccaaaauaa

SEQ ID NO: 762451 - RNA, 19 nt, Artificial Sequence
  Description of Artificial Sequence: Synthetic oligonucleotide
cuuaccacaauggagacug

SEQ ID NO: 762452 - RNA, 19 nt, Artificial Sequence
  Description of Artificial Sequence: Synthetic oligonucleotide
agaagagugguuuugccug

SEQ ID NO: 762453 - RNA, 19 nt, Artificial Sequence
  Description of Artificial Sequence: Synthetic oligonucleotide
caugaauacuuccaugggg

SEQ ID NO: 762454 - RNA, 19 nt, Artificial Sequence
  Description of Artificial Sequence: Synthetic oligonucleotide
aguuagacagcggagcugc

SEQ ID NO: 762455 - RNA, 19 nt, Artificial Sequence
  Description of Artificial Sequence: Synthetic oligonucleotide
aauauacugggagagccag

SEQ ID NO: 762456 - RNA, 19 nt, Artificial Sequence
  Description of Artificial Sequence: Synthetic oligonucleotide
aaggcaguuagacagcgga

SEQ ID NO: 762457 - RNA, 19 nt, Artificial Sequence
  Description of Artificial Sequence: Synthetic oligonucleotide
uauacugggagagccagcg

SEQ ID NO: 762458 - RNA, 19 nt, Artificial Sequence
  Description of Artificial Sequence: Synthetic oligonucleotide
ugugcacucugauaaacag

SEQ ID NO: 762459 - RNA, 19 nt, Artificial Sequence
  Description of Artificial Sequence: Synthetic oligonucleotide
acaucagucaauauacugg

SEQ ID NO: 762460 - RNA, 19 nt, Artificial Sequence
  Description of Artificial Sequence: Synthetic oligonucleotide
gagcccaaauauuucacgg

SEQ ID NO: 762461 - RNA, 19 nt, Artificial Sequence
  Description of Artificial Sequence: Synthetic oligonucleotide
agcacuugugcuucggcgc

SEQ ID NO: 762462 - RNA, 19 nt, Artificial Sequence
  Description of Artificial Sequence: Synthetic oligonucleotide
uagauccacucaaagauga

SEQ ID NO: 762463 - RNA, 19 nt, Artificial Sequence
  Description of Artificial Sequence: Synthetic oligonucleotide
acauuauugaugcuuacaa

SEQ ID NO: 762464 - RNA, 19 nt, Artificial Sequence
  Description of Artificial Sequence: Synthetic oligonucleotide
acgagaaugauccgcacag

SEQ ID NO: 762465 - RNA, 19 nt, Artificial Sequence
  Description of Artificial Sequence: Synthetic oligonucleotide
aaucaaccaguggugagac

SEQ ID NO: 762466 - RNA, 19 nt, Artificial Sequence
  Description of Artificial Sequence: Synthetic oligonucleotide
aaaccuuuagccaaaagua

SEQ ID NO: 762467 - RNA, 19 nt, Artificial Sequence
  Description of Artificial Sequence: Synthetic oligonucleotide
auuuucacuguccaaacau

SEQ ID NO: 762468 - RNA, 19 nt, Artificial Sequence
  Description of Artificial Sequence: Synthetic oligonucleotide
agaauuggcacauuggaua

SEQ ID NO: 762469 - RNA, 19 nt, Artificial Sequence
  Description of Artificial Sequence: Synthetic oligonucleotide
auuaagcucaacuuuggau

SEQ ID NO: 762470 - RNA, 19 nt, Artificial Sequence
  Description of Artificial Sequence: Synthetic oligonucleotide
aacccaagaauacaaguuu

SEQ ID NO: 762471 - RNA, 19 nt, Artificial Sequence
  Description of Artificial Sequence: Synthetic oligonucleotide
aacccauacaucccucuag

SEQ ID NO: 762472 - RNA, 19 nt, Artificial Sequence
  Description of Artificial Sequence: Synthetic oligonucleotide
uguccugucaauuuuguuu

SEQ ID NO: 762473 - RNA, 19 nt, Artificial Sequence
  Description of Artificial Sequence: Synthetic oligonucleotide
agaaugauccgcacagucc

SEQ ID NO: 762474 - RNA, 19 nt, Artificial Sequence
  Description of Artificial Sequence: Synthetic oligonucleotide
cuuuugaaaucaaccagug

SEQ ID NO: 762475 - RNA, 19 nt, Artificial Sequence
  Description of Artificial Sequence: Synthetic oligonucleotide
ugaauacuuccauggggcg

SEQ ID NO: 762476 - RNA, 19 nt, Artificial Sequence
  Description of Artificial Sequence: Synthetic oligonucleotide
caagauaagaauuggcaca

SEQ ID NO: 762477 - RNA, 19 nt, Artificial Sequence
  Description of Artificial Sequence: Synthetic oligonucleotide
cuuacaacggcccgagggg

SEQ ID NO: 762478 - RNA, 19 nt, Artificial Sequence
  Description of Artificial Sequence: Synthetic oligonucleotide
agagcccaaauauuucacg

SEQ ID NO: 762479 - RNA, 19 nt, Artificial Sequence
  Description of Artificial Sequence: Synthetic oligonucleotide
auagagcccaaauauuuca

SEQ ID NO: 762480 - RNA, 19 nt, Artificial Sequence
  Description of Artificial Sequence: Synthetic oligonucleotide
agcauaccagaaccuaccc

SEQ ID NO: 762481 - RNA, 19 nt, Artificial Sequence
  Description of Artificial Sequence: Synthetic oligonucleotide
uggaccaaguaaauuguga

SEQ ID NO: 762482 - RNA, 19 nt, Artificial Sequence
  Description of Artificial Sequence: Synthetic oligonucleotide
agucccugcacacugaccu

SEQ ID NO: 762483 - RNA, 19 nt, Artificial Sequence
  Description of Artificial Sequence: Synthetic oligonucleotide
guuaacugcaaguaaagcu

SEQ ID NO: 762484 - RNA, 19 nt, Artificial Sequence
  Description of Artificial Sequence: Synthetic oligonucleotide
uucacucaacagaagucag

SEQ ID NO: 762485 - RNA, 19 nt, Artificial Sequence
  Description of Artificial Sequence: Synthetic oligonucleotide
ucacugauugcaucugucc

SEQ ID NO: 762486 - RNA, 19 nt, Artificial Sequence
  Description of Artificial Sequence: Synthetic oligonucleotide
aaaucaaccaguggugaga

SEQ ID NO: 762487 - RNA, 19 nt, Artificial Sequence
  Description of Artificial Sequence: Synthetic oligonucleotide
uugaugcuuacaacggccc

SEQ ID NO: 762488 - RNA, 19 nt, Artificial Sequence
  Description of Artificial Sequence: Synthetic oligonucleotide
acauaagagauaagaacuc

SEQ ID NO: 762489 - RNA, 19 nt, Artificial Sequence
  Description of Artificial Sequence: Synthetic oligonucleotide
gaggcaaucacaccuguca

SEQ ID NO: 762490 - RNA, 19 nt, Artificial Sequence
  Description of Artificial Sequence: Synthetic oligonucleotide
aaugcuuaggcuacagacu

SEQ ID NO: 762491 - RNA, 19 nt, Artificial Sequence
  Description of Artificial Sequence: Synthetic oligonucleotide
guaaauugugaacucaaaa

SEQ ID NO: 762492 - RNA, 19 nt, Artificial Sequence
  Description of Artificial Sequence: Synthetic oligonucleotide
uagcacuugugcuucggcg

SEQ ID NO: 762493 - RNA, 19 nt, Artificial Sequence
  Description of Artificial Sequence: Synthetic oligonucleotide
ugaugcuuacaacggcccg

SEQ ID NO: 762494 - RNA, 19 nt, Artificial Sequence
  Description of Artificial Sequence: Synthetic oligonucleotide
ucccauuaaucgcugggag

SEQ ID NO: 762495 - RNA, 19 nt, Artificial Sequence
  Description of Artificial Sequence: Synthetic oligonucleotide
aucgcugggagauaauucu

SEQ ID NO: 762496 - RNA, 19 nt, Artificial Sequence
  Description of Artificial Sequence: Synthetic oligonucleotide
cauuauugaugcuuacaac

SEQ ID NO: 762497 - RNA, 19 nt, Artificial Sequence
  Description of Artificial Sequence: Synthetic oligonucleotide
aguuagagaagggauacca

SEQ ID NO: 762498 - RNA, 19 nt, Artificial Sequence
  Description of Artificial Sequence: Synthetic oligonucleotide
aaguuagagaagggauacc

SEQ ID NO: 762499 - RNA, 19 nt, Artificial Sequence
  Description of Artificial Sequence: Synthetic oligonucleotide
ggugauuagggacaaauga

SEQ ID NO: 762500 - RNA, 19 nt, Artificial Sequence
  Description of Artificial Sequence: Synthetic oligonucleotide
cuguuaacugcaaguaaag

SEQ ID NO: 762501 - RNA, 19 nt, Artificial Sequence
  Description of Artificial Sequence: Synthetic oligonucleotide
aacuaucccauuaaucgcu

SEQ ID NO: 762502 - RNA, 19 nt, Artificial Sequence
  Description of Artificial Sequence: Synthetic oligonucleotide
uacccuaguucacucaaca

SEQ ID NO: 762503 - RNA, 19 nt, Artificial Sequence
  Description of Artificial Sequence: Synthetic oligonucleotide
agaaaauuuggaccaagua

SEQ ID NO: 762504 - RNA, 19 nt, Artificial Sequence
  Description of Artificial Sequence: Synthetic oligonucleotide
uccucuagcucgcuacagg

SEQ ID NO: 762505 - RNA, 19 nt, Artificial Sequence
  Description of Artificial Sequence: Synthetic oligonucleotide
uguuaacugcaaguaaagc

SEQ ID NO: 762506 - RNA, 19 nt, Artificial Sequence
  Description of Artificial Sequence: Synthetic oligonucleotide
cacaugucaccacugggcg

SEQ ID NO: 762507 - RNA, 19 nt, Artificial Sequence
  Description of Artificial Sequence: Synthetic oligonucleotide
ugcauuguccaaacccaag

SEQ ID NO: 762508 - RNA, 19 nt, Artificial Sequence
  Description of Artificial Sequence: Synthetic oligonucleotide
gaauacuuccauggggcgg

SEQ ID NO: 762509 - RNA, 19 nt, Artificial Sequence
  Description of Artificial Sequence: Synthetic oligonucleotide
aacccgacgugcuugcuca

SEQ ID NO: 762510 - RNA, 19 nt, Artificial Sequence
  Description of Artificial Sequence: Synthetic oligonucleotide
uggggucuacauaagagau

SEQ ID NO: 762511 - RNA, 19 nt, Artificial Sequence
  Description of Artificial Sequence: Synthetic oligonucleotide
ugaaaucaaccagugguga

SEQ ID NO: 762512 - RNA, 19 nt, Artificial Sequence
  Description of Artificial Sequence: Synthetic oligonucleotide
ccaaaaguaaugaaaagca

SEQ ID NO: 762513 - RNA, 19 nt, Artificial Sequence
  Description of Artificial Sequence: Synthetic oligonucleotide
gagaaugauccgcacaguc

SEQ ID NO: 762514 - RNA, 19 nt, Artificial Sequence
  Description of Artificial Sequence: Synthetic oligonucleotide
gcuuacaacggcccgaggg

SEQ ID NO: 762515 - RNA, 19 nt, Artificial Sequence
  Description of Artificial Sequence: Synthetic oligonucleotide
agcauuaagcucaacuuug

SEQ ID NO: 762516 - RNA, 19 nt, Artificial Sequence
  Description of Artificial Sequence: Synthetic oligonucleotide
uguccauagagcccaaaua

SEQ ID NO: 762517 - RNA, 19 nt, Artificial Sequence
  Description of Artificial Sequence: Synthetic oligonucleotide
cuacagggugauuagggac

SEQ ID NO: 762518 - RNA, 19 nt, Artificial Sequence
  Description of Artificial Sequence: Synthetic oligonucleotide
gauggcacccagcuuuucc

SEQ ID NO: 762519 - RNA, 19 nt, Artificial Sequence
  Description of Artificial Sequence: Synthetic oligonucleotide
aaacccaagaauacaaguu

SEQ ID NO: 762520 - RNA, 19 nt, Artificial Sequence
  Description of Artificial Sequence: Synthetic oligonucleotide
guugauugugaccuguguc

SEQ ID NO: 762521 - RNA, 19 nt, Artificial Sequence
  Description of Artificial Sequence: Synthetic oligonucleotide
auacaucccucuagaaucc

SEQ ID NO: 762522 - RNA, 19 nt, Artificial Sequence
  Description of Artificial Sequence: Synthetic oligonucleotide
ggaguuuccauucaucuga

SEQ ID NO: 762523 - RNA, 19 nt, Artificial Sequence
  Description of Artificial Sequence: Synthetic oligonucleotide
uccguucagaggcuuaaga

SEQ ID NO: 762524 - RNA, 19 nt, Artificial Sequence
  Description of Artificial Sequence: Synthetic oligonucleotide
caugugucaugugacagag

SEQ ID NO: 762525 - RNA, 19 nt, Artificial Sequence
  Description of Artificial Sequence: Synthetic oligonucleotide
auguaacaaugacacuuuc

SEQ ID NO: 762526 - RNA, 19 nt, Artificial Sequence
  Description of Artificial Sequence: Synthetic oligonucleotide
ugcauggcuucucaacgcc

SEQ ID NO: 762527 - RNA, 19 nt, Artificial Sequence
  Description of Artificial Sequence: Synthetic oligonucleotide
uagagaagggauaccaauu

SEQ ID NO: 762528 - RNA, 19 nt, Artificial Sequence
  Description of Artificial Sequence: Synthetic oligonucleotide
aauguaacaaugacacuuu

SEQ ID NO: 762529 - RNA, 19 nt, Artificial Sequence
  Description of Artificial Sequence: Synthetic oligonucleotide
cauagagcccaaauauuuc

SEQ ID NO: 762530 - RNA, 19 nt, Artificial Sequence
  Description of Artificial Sequence: Synthetic oligonucleotide
uuggaccaaguaaauugug

SEQ ID NO: 762531 - RNA, 19 nt, Artificial Sequence
  Description of Artificial Sequence: Synthetic oligonucleotide
aguuuccauucaucugagc

SEQ ID NO: 762532 - RNA, 19 nt, Artificial Sequence
  Description of Artificial Sequence: Synthetic oligonucleotide
aaagagccgcccugggcag

SEQ ID NO: 762533 - RNA, 19 nt, Artificial Sequence
  Description of Artificial Sequence: Synthetic oligonucleotide
uagacagcggagcugcgcu

SEQ ID NO: 762534 - RNA, 19 nt, Artificial Sequence
  Description of Artificial Sequence: Synthetic oligonucleotide
cauaccagaaccuacccua

SEQ ID NO: 762535 - RNA, 19 nt, Artificial Sequence
  Description of Artificial Sequence: Synthetic oligonucleotide
cacuguccaaacaucaguc

SEQ ID NO: 762536 - RNA, 19 nt, Artificial Sequence
  Description of Artificial Sequence: Synthetic oligonucleotide
uagagcccaaauauuucac

SEQ ID NO: 762537 - RNA, 19 nt, Artificial Sequence
  Description of Artificial Sequence: Synthetic oligonucleotide
acuguuaacugcaaguaaa

SEQ ID NO: 762538 - RNA, 19 nt, Artificial Sequence
  Description of Artificial Sequence: Synthetic oligonucleotide
aagacauuauugaugcuua

SEQ ID NO: 762539 - RNA, 19 nt, Artificial Sequence
  Description of Artificial Sequence: Synthetic oligonucleotide
cauuggauauuguuucauc

SEQ ID NO: 762540 - RNA, 19 nt, Artificial Sequence
  Description of Artificial Sequence: Synthetic oligonucleotide
aauuuggaccaaguaaauu

SEQ ID NO: 762541 - RNA, 19 nt, Artificial Sequence
  Description of Artificial Sequence: Synthetic oligonucleotide
uccuaggaacugaagcaca

SEQ ID NO: 762542 - RNA, 19 nt, Artificial Sequence
  Description of Artificial Sequence: Synthetic oligonucleotide
gugaauaggaucaguccag

SEQ ID NO: 762543 - RNA, 19 nt, Artificial Sequence
  Description of Artificial Sequence: Synthetic oligonucleotide
aagaauuggcacauuggau

SEQ ID NO: 762544 - RNA, 19 nt, Artificial Sequence
  Description of Artificial Sequence: Synthetic oligonucleotide
gagauaagaacucuuucau

SEQ ID NO: 762545 - RNA, 19 nt, Artificial Sequence
  Description of Artificial Sequence: Synthetic oligonucleotide
ugggcgaugagcguagaca

SEQ ID NO: 762546 - RNA, 19 nt, Artificial Sequence
  Description of Artificial Sequence: Synthetic oligonucleotide
aaccuuuagccaaaaguaa

SEQ ID NO: 762547 - RNA, 19 nt, Artificial Sequence
  Description of Artificial Sequence: Synthetic oligonucleotide
acuguccaaacaucaguca

SEQ ID NO: 762548 - RNA, 19 nt, Artificial Sequence
  Description of Artificial Sequence: Synthetic oligonucleotide
augaaaguccacaacagua

SEQ ID NO: 762549 - RNA, 19 nt, Artificial Sequence
  Description of Artificial Sequence: Synthetic oligonucleotide
gacauuauugaugcuuaca

SEQ ID NO: 762550 - RNA, 19 nt, Artificial Sequence
  Description of Artificial Sequence: Synthetic oligonucleotide
ucagucauuaaagcauuaa

SEQ ID NO: 762551 - RNA, 19 nt, Artificial Sequence
  Description of Artificial Sequence: Synthetic oligonucleotide
auuaaucgcugggagauaa

SEQ ID NO: 762552 - RNA, 19 nt, Artificial Sequence
  Description of Artificial Sequence: Synthetic oligonucleotide
agagaugcauggcuucuca

SEQ ID NO: 762553 - RNA, 19 nt, Artificial Sequence
  Description of Artificial Sequence: Synthetic oligonucleotide
guauaaaagcaaagccugc

SEQ ID NO: 762554 - RNA, 19 nt, Artificial Sequence
  Description of Artificial Sequence: Synthetic oligonucleotide
agggacuccucuuaccaca

SEQ ID NO: 762555 - RNA, 19 nt, Artificial Sequence
  Description of Artificial Sequence: Synthetic oligonucleotide
aucccucuagaauccguuc

SEQ ID NO: 762556 - RNA, 19 nt, Artificial Sequence
  Description of Artificial Sequence: Synthetic oligonucleotide
augauccgcacaguccacc

SEQ ID NO: 762557 - RNA, 19 nt, Artificial Sequence
  Description of Artificial Sequence: Synthetic oligonucleotide
agacgagaaugauccgcac

SEQ ID NO: 762558 - RNA, 19 nt, Artificial Sequence
  Description of Artificial Sequence: Synthetic oligonucleotide
agagccuuaagcuguugau

SEQ ID NO: 762559 - RNA, 19 nt, Artificial Sequence
  Description of Artificial Sequence: Synthetic oligonucleotide
aaugauccgcacaguccac

SEQ ID NO: 762560 - RNA, 19 nt, Artificial Sequence
  Description of Artificial Sequence: Synthetic oligonucleotide
cuaucuguucauaauuuua

SEQ ID NO: 762561 - RNA, 19 nt, Artificial Sequence
  Description of Artificial Sequence: Synthetic oligonucleotide
cacacugaccugcaucagc

SEQ ID NO: 762562 - RNA, 19 nt, Artificial Sequence
  Description of Artificial Sequence: Synthetic oligonucleotide
gacgagaaugauccgcaca

SEQ ID NO: 762563 - RNA, 19 nt, Artificial Sequence
  Description of Artificial Sequence: Synthetic oligonucleotide
acccuaguucacucaacag

SEQ ID NO: 762564 - RNA, 19 nt, Artificial Sequence
  Description of Artificial Sequence: Synthetic oligonucleotide
auagauccacucaaagaug

SEQ ID NO: 762565 - RNA, 19 nt, Artificial Sequence
  Description of Artificial Sequence: Synthetic oligonucleotide
ugcgcuaucuguucauaau

SEQ ID NO: 762566 - RNA, 19 nt, Artificial Sequence
  Description of Artificial Sequence: Synthetic oligonucleotide
cuuuagccaaaaguaauga

SEQ ID NO: 762567 - RNA, 19 nt, Artificial Sequence
  Description of Artificial Sequence: Synthetic oligonucleotide
cacuuuauuuaggauggug

SEQ ID NO: 762568 - RNA, 19 nt, Artificial Sequence
  Description of Artificial Sequence: Synthetic oligonucleotide
gaggaagcugugaauagga

SEQ ID NO: 762569 - RNA, 19 nt, Artificial Sequence
  Description of Artificial Sequence: Synthetic oligonucleotide
acccauacaucccucuaga

SEQ ID NO: 762570 - RNA, 19 nt, Artificial Sequence
  Description of Artificial Sequence: Synthetic oligonucleotide
cagaaccuacccuaguuca

SEQ ID NO: 762571 - RNA, 19 nt, Artificial Sequence
  Description of Artificial Sequence: Synthetic oligonucleotide
uuagacagcggagcugcgc

SEQ ID NO: 762572 - RNA, 19 nt, Artificial Sequence
  Description of Artificial Sequence: Synthetic oligonucleotide
ugauugugaccuguguccu

SEQ ID NO: 762573 - RNA, 19 nt, Artificial Sequence
  Description of Artificial Sequence: Synthetic oligonucleotide
agaaccuacccuaguucac

SEQ ID NO: 762574 - RNA, 19 nt, Artificial Sequence
  Description of Artificial Sequence: Synthetic oligonucleotide
auaauucuuccaaacccga

SEQ ID NO: 762575 - RNA, 19 nt, Artificial Sequence
  Description of Artificial Sequence: Synthetic oligonucleotide
gaugagcguagacagagau

SEQ ID NO: 762576 - RNA, 19 nt, Artificial Sequence
  Description of Artificial Sequence: Synthetic oligonucleotide
ccuuuagccaaaaguaaug

SEQ ID NO: 762577 - RNA, 19 nt, Artificial Sequence
  Description of Artificial Sequence: Synthetic oligonucleotide
augagacgagaaugauccg

SEQ ID NO: 762578 - RNA, 19 nt, Artificial Sequence
  Description of Artificial Sequence: Synthetic oligonucleotide
gggcgaugagcguagacag

SEQ ID NO: 762579 - RNA, 19 nt, Artificial Sequence
  Description of Artificial Sequence: Synthetic oligonucleotide
auauacugggagagccagc

SEQ ID NO: 762580 - RNA, 19 nt, Artificial Sequence
  Description of Artificial Sequence: Synthetic oligonucleotide
aauccguucagaggcuuaa

SEQ ID NO: 762581 - RNA, 19 nt, Artificial Sequence
  Description of Artificial Sequence: Synthetic oligonucleotide
uuacaacggcccgaggggc

SEQ ID NO: 762582 - RNA, 19 nt, Artificial Sequence
  Description of Artificial Sequence: Synthetic oligonucleotide
gaugcuuacaacggcccga

SEQ ID NO: 762583 - RNA, 19 nt, Artificial Sequence
  Description of Artificial Sequence: Synthetic oligonucleotide
gaagggauaccaauuacau

SEQ ID NO: 762584 - RNA, 19 nt, Artificial Sequence
  Description of Artificial Sequence: Synthetic oligonucleotide
gaauuggcacauuggauau

SEQ ID NO: 762585 - RNA, 19 nt, Artificial Sequence
  Description of Artificial Sequence: Synthetic oligonucleotide
cuuaggcuacagacugacc

SEQ ID NO: 762586 - RNA, 19 nt, Artificial Sequence
  Description of Artificial Sequence: Synthetic oligonucleotide
gcaaguaaagcuggcaaug

SEQ ID NO: 762587 - RNA, 19 nt, Artificial Sequence
  Description of Artificial Sequence: Synthetic oligonucleotide
caaacccaagaauacaagu

SEQ ID NO: 762588 - RNA, 19 nt, Artificial Sequence
  Description of Artificial Sequence: Synthetic oligonucleotide
ggaccaaguaaauugugaa

SEQ ID NO: 762589 - RNA, 19 nt, Artificial Sequence
  Description of Artificial Sequence: Synthetic oligonucleotide
ucaccacugggcgaugagc

SEQ ID NO: 762590 - RNA, 19 nt, Artificial Sequence
  Description of Artificial Sequence: Synthetic oligonucleotide
gccauuauagauccacuca

SEQ ID NO: 762591 - RNA, 19 nt, Artificial Sequence
  Description of Artificial Sequence: Synthetic oligonucleotide
guagacagagaugcauggc

SEQ ID NO: 762592 - RNA, 19 nt, Artificial Sequence
  Description of Artificial Sequence: Synthetic oligonucleotide
ccucuagcucgcuacaggg

SEQ ID NO: 762593 - RNA, 19 nt, Artificial Sequence
  Description of Artificial Sequence: Synthetic oligonucleotide
gacagagaccacaugggaa

SEQ ID NO: 762594 - RNA, 19 nt, Artificial Sequence
  Description of Artificial Sequence: Synthetic oligonucleotide
aguaaauugugaacucaaa

SEQ ID NO: 762595 - RNA, 19 nt, Artificial Sequence
  Description of Artificial Sequence: Synthetic oligonucleotide
accuuuagccaaaaguaau

SEQ ID NO: 762596 - RNA, 19 nt, Artificial Sequence
  Description of Artificial Sequence: Synthetic oligonucleotide
auacugggagagccagcgg

SEQ ID NO: 762597 - RNA, 19 nt, Artificial Sequence
  Description of Artificial Sequence: Synthetic oligonucleotide
ugaggcaaucacaccuguc

SEQ ID NO: 762598 - RNA, 19 nt, Artificial Sequence
  Description of Artificial Sequence: Synthetic oligonucleotide
uaggcuacagacugaccuu

SEQ ID NO: 762599 - RNA, 19 nt, Artificial Sequence
  Description of Artificial Sequence: Synthetic oligonucleotide
gcgaugagcguagacagag

SEQ ID NO: 762600 - RNA, 19 nt, Artificial Sequence
  Description of Artificial Sequence: Synthetic oligonucleotide
uugcugaaauaggacacau

SEQ ID NO: 762601 - RNA, 19 nt, Artificial Sequence
  Description of Artificial Sequence: Synthetic oligonucleotide
agcguagacagagaugcau

SEQ ID NO: 762602 - RNA, 19 nt, Artificial Sequence
  Description of Artificial Sequence: Synthetic oligonucleotide
cauuaagcucaacuuugga

SEQ ID NO: 762603 - RNA, 19 nt, Artificial Sequence
  Description of Artificial Sequence: Synthetic oligonucleotide
ucgcuacagggugauuagg

SEQ ID NO: 762604 - RNA, 19 nt, Artificial Sequence
  Description of Artificial Sequence: Synthetic oligonucleotide
caaaaguaaugaaaagcau

SEQ ID NO: 762605 - RNA, 19 nt, Artificial Sequence
  Description of Artificial Sequence: Synthetic oligonucleotide
gacugccccggguaaggcc

SEQ ID NO: 762606 - RNA, 19 nt, Artificial Sequence
  Description of Artificial Sequence: Synthetic oligonucleotide
uuaaucgcugggagauaau

SEQ ID NO: 762607 - RNA, 19 nt, Artificial Sequence
  Description of Artificial Sequence: Synthetic oligonucleotide
uaccagaaccuacccuagu

SEQ ID NO: 762608 - RNA, 19 nt, Artificial Sequence
  Description of Artificial Sequence: Synthetic oligonucleotide
uacaacggcccgaggggcu

SEQ ID NO: 762609 - RNA, 19 nt, Artificial Sequence
  Description of Artificial Sequence: Synthetic oligonucleotide
augcuuacaacggcccgag

SEQ ID NO: 762610 - RNA, 19 nt, Artificial Sequence
  Description of Artificial Sequence: Synthetic oligonucleotide
aguauggggucuacauaag

SEQ ID NO: 762611 - RNA, 19 nt, Artificial Sequence
  Description of Artificial Sequence: Synthetic oligonucleotide
auaccagaaccuacccuag

SEQ ID NO: 762612 - RNA, 19 nt, Artificial Sequence
  Description of Artificial Sequence: Synthetic oligonucleotide
gauugugaccuguguccuc

SEQ ID NO: 762613 - RNA, 19 nt, Artificial Sequence
  Description of Artificial Sequence: Synthetic oligonucleotide
ccggguaaggccaaggcuc

SEQ ID NO: 762614 - RNA, 19 nt, Artificial Sequence
  Description of Artificial Sequence: Synthetic oligonucleotide
aguccucuagcucgcuaca

SEQ ID NO: 762615 - RNA, 19 nt, Artificial Sequence
  Description of Artificial Sequence: Synthetic oligonucleotide
ggcaaucacaccugucaug

SEQ ID NO: 762616 - RNA, 19 nt, Artificial Sequence
  Description of Artificial Sequence: Synthetic oligonucleotide
ugcuuacaacggcccgagg

SEQ ID NO: 762617 - RNA, 19 nt, Artificial Sequence
  Description of Artificial Sequence: Synthetic oligonucleotide
gcugugaauaggaucaguc

SEQ ID NO: 762618 - RNA, 19 nt, Artificial Sequence
  Description of Artificial Sequence: Synthetic oligonucleotide
aaggaaggugcuacacaga

SEQ ID NO: 762619 - RNA, 19 nt, Artificial Sequence
  Description of Artificial Sequence: Synthetic oligonucleotide
ccguucagaggcuuaagac

SEQ ID NO: 762620 - RNA, 19 nt, Artificial Sequence
  Description of Artificial Sequence: Synthetic oligonucleotide
cuacccuaguucacucaac

SEQ ID NO: 762621 - RNA, 19 nt, Artificial Sequence
  Description of Artificial Sequence: Synthetic oligonucleotide
acuaucccauuaaucgcug

SEQ ID NO: 762622 - RNA, 19 nt, Artificial Sequence
  Description of Artificial Sequence: Synthetic oligonucleotide
uccaugagacgagaaugau

SEQ ID NO: 762623 - RNA, 19 nt, Artificial Sequence
  Description of Artificial Sequence: Synthetic oligonucleotide
agccagcggaaacccucgc

SEQ ID NO: 762624 - RNA, 19 nt, Artificial Sequence
  Description of Artificial Sequence: Synthetic oligonucleotide
cacugggcgaugagcguag

SEQ ID NO: 762625 - RNA, 19 nt, Artificial Sequence
  Description of Artificial Sequence: Synthetic oligonucleotide
augagcguagacagagaug

SEQ ID NO: 762626 - RNA, 19 nt, Artificial Sequence
  Description of Artificial Sequence: Synthetic oligonucleotide
ugucugcggggcaggaauc

SEQ ID NO: 762627 - RNA, 19 nt, Artificial Sequence
  Description of Artificial Sequence: Synthetic oligonucleotide
ucugcggggcaggaaucag

SEQ ID NO: 762628 - RNA, 19 nt, Artificial Sequence
  Description of Artificial Sequence: Synthetic oligonucleotide
gagaccacaugggaaaccu

SEQ ID NO: 762629 - RNA, 19 nt, Artificial Sequence
  Description of Artificial Sequence: Synthetic oligonucleotide
cauuccagcaauugucagu

SEQ ID NO: 762630 - RNA, 19 nt, Artificial Sequence
  Description of Artificial Sequence: Synthetic oligonucleotide
ccauuauagauccacucaa

SEQ ID NO: 762631 - RNA, 19 nt, Artificial Sequence
  Description of Artificial Sequence: Synthetic oligonucleotide
cccuaguucacucaacaga

SEQ ID NO: 762632 - RNA, 19 nt, Artificial Sequence
  Description of Artificial Sequence: Synthetic oligonucleotide
gcuacagggugauuaggga

SEQ ID NO: 762633 - RNA, 19 nt, Artificial Sequence
  Description of Artificial Sequence: Synthetic oligonucleotide
gcgacccucccucagaaca

SEQ ID NO: 762634 - RNA, 19 nt, Artificial Sequence
  Description of Artificial Sequence: Synthetic oligonucleotide
cuagcucgcuacaggguga

SEQ ID NO: 762635 - RNA, 19 nt, Artificial Sequence
  Description of Artificial Sequence: Synthetic oligonucleotide
acaacggcccgaggggcuc

SEQ ID NO: 762636 - RNA, 19 nt, Artificial Sequence
  Description of Artificial Sequence: Synthetic oligonucleotide
gaaccuacccuaguucacu

SEQ ID NO: 762637 - RNA, 19 nt, Artificial Sequence
  Description of Artificial Sequence: Synthetic oligonucleotide
caguuagacagcggagcug

SEQ ID NO: 762638 - RNA, 19 nt, Artificial Sequence
  Description of Artificial Sequence: Synthetic oligonucleotide
agacagagaugcauggcuu

SEQ ID NO: 762639 - RNA, 19 nt, Artificial Sequence
  Description of Artificial Sequence: Synthetic oligonucleotide
gaaacccucgccguagccu

SEQ ID NO: 762640 - RNA, 19 nt, Artificial Sequence
  Description of Artificial Sequence: Synthetic oligonucleotide
uuguuucaucagucauuaa

SEQ ID NO: 762641 - RNA, 19 nt, Artificial Sequence
  Description of Artificial Sequence: Synthetic oligonucleotide
aucagucaauauacuggga

SEQ ID NO: 762642 - RNA, 19 nt, Artificial Sequence
  Description of Artificial Sequence: Synthetic oligonucleotide
ccucuccuagcacuugugc

SEQ ID NO: 762643 - RNA, 19 nt, Artificial Sequence
  Description of Artificial Sequence: Synthetic oligonucleotide
gcguagacagagaugcaug

SEQ ID NO: 762644 - RNA, 19 nt, Artificial Sequence
  Description of Artificial Sequence: Synthetic oligonucleotide
cucaacgccagacaugguu

SEQ ID NO: 762645 - RNA, 19 nt, Artificial Sequence
  Description of Artificial Sequence: Synthetic oligonucleotide
cugcauuguccaaacccaa

SEQ ID NO: 762646 - RNA, 19 nt, Artificial Sequence
  Description of Artificial Sequence: Synthetic oligonucleotide
auccguucagaggcuuaag

SEQ ID NO: 762647 - RNA, 19 nt, Artificial Sequence
  Description of Artificial Sequence: Synthetic oligonucleotide
ucucaacgccagacauggu

SEQ ID NO: 762648 - RNA, 19 nt, Artificial Sequence
  Description of Artificial Sequence: Synthetic oligonucleotide
gugcuucggcgccaccucc

SEQ ID NO: 762649 - RNA, 19 nt, Artificial Sequence
  Description of Artificial Sequence: Synthetic oligonucleotide
cugggcgaugagcguagac

SEQ ID NO: 762650 - RNA, 19 nt, Artificial Sequence
  Description of Artificial Sequence: Synthetic oligonucleotide
ucggcgccaccuccaacaa

SEQ ID NO: 762651 - RNA, 19 nt, Artificial Sequence
  Description of Artificial Sequence: Synthetic oligonucleotide
ccaaacccgacgugcuugc

SEQ ID NO: 762652 - RNA, 19 nt, Artificial Sequence
  Description of Artificial Sequence: Synthetic oligonucleotide
agaauccguucagaggcuu

SEQ ID NO: 762653 - RNA, 19 nt, Artificial Sequence
  Description of Artificial Sequence: Synthetic oligonucleotide
cugcgcuaucuguucauaa

SEQ ID NO: 762654 - RNA, 19 nt, Artificial Sequence
  Description of Artificial Sequence: Synthetic oligonucleotide
aggcuacagacugaccuuu

SEQ ID NO: 762655 - RNA, 19 nt, Artificial Sequence
  Description of Artificial Sequence: Synthetic oligonucleotide
aggaagcugugaauaggau

SEQ ID NO: 762656 - RNA, 19 nt, Artificial Sequence
  Description of Artificial Sequence: Synthetic oligonucleotide
gacacucaguauggggucu

SEQ ID NO: 762657 - RNA, 19 nt, Artificial Sequence
  Description of Artificial Sequence: Synthetic oligonucleotide
gaauccguucagaggcuua

SEQ ID NO: 762658 - RNA, 19 nt, Artificial Sequence
  Description of Artificial Sequence: Synthetic oligonucleotide
cugcggggcaggaaucaga

SEQ ID NO: 762659 - RNA, 19 nt, Artificial Sequence
  Description of Artificial Sequence: Synthetic oligonucleotide
uagcucgcuacagggugau

SEQ ID NO: 762660 - RNA, 19 nt, Artificial Sequence
  Description of Artificial Sequence: Synthetic oligonucleotide
gcggaaacccucgccguag

SEQ ID NO: 762661 - RNA, 19 nt, Artificial Sequence
  Description of Artificial Sequence: Synthetic oligonucleotide
ggcguucagcucuuucaga

SEQ ID NO: 762662 - RNA, 19 nt, Artificial Sequence
  Description of Artificial Sequence: Synthetic oligonucleotide
gcucgcuacagggugauua

SEQ ID NO: 762663 - RNA, 19 nt, Artificial Sequence
  Description of Artificial Sequence: Synthetic oligonucleotide
cuucggcgccaccuccaac

SEQ ID NO: 762664 - RNA, 19 nt, Artificial Sequence
  Description of Artificial Sequence: Synthetic oligonucleotide
agacagcggagcugcgcua

SEQ ID NO: 762665 - RNA, 19 nt, Artificial Sequence
  Description of Artificial Sequence: Synthetic oligonucleotide
uuccauggggcgggcguuc

SEQ ID NO: 762666 - RNA, 19 nt, Artificial Sequence
  Description of Artificial Sequence: Synthetic oligonucleotide
cgcugggagauaauucuuc

SEQ ID NO: 762667 - RNA, 19 nt, Artificial Sequence
  Description of Artificial Sequence: Synthetic oligonucleotide
gucugcggggcaggaauca

SEQ ID NO: 762668 - RNA, 19 nt, Artificial Sequence
  Description of Artificial Sequence: Synthetic oligonucleotide
caucccucuagaauccguu

SEQ ID NO: 762669 - RNA, 19 nt, Artificial Sequence
  Description of Artificial Sequence: Synthetic oligonucleotide
cggguaaggccaaggcucc

SEQ ID NO: 762670 - RNA, 19 nt, Artificial Sequence
  Description of Artificial Sequence: Synthetic oligonucleotide
cuggcggcgcgacccuccc

SEQ ID NO: 762671 - RNA, 19 nt, Artificial Sequence
  Description of Artificial Sequence: Synthetic oligonucleotide
ccuacccuaguucacucaa

SEQ ID NO: 762672 - RNA, 19 nt, Artificial Sequence
  Description of Artificial Sequence: Synthetic oligonucleotide
gagcguagacagagaugca

SEQ ID NO: 762673 - RNA, 19 nt, Artificial Sequence
  Description of Artificial Sequence: Synthetic oligonucleotide
gcauaccagaaccuacccu

SEQ ID NO: 762674 - RNA, 19 nt, Artificial Sequence
  Description of Artificial Sequence: Synthetic oligonucleotide
ccauuaaucgcugggagau

SEQ ID NO: 762675 - RNA, 19 nt, Artificial Sequence
  Description of Artificial Sequence: Synthetic oligonucleotide
gcaauguaacaaugacacu

SEQ ID NO: 762676 - RNA, 19 nt, Artificial Sequence
  Description of Artificial Sequence: Synthetic oligonucleotide
acacucaguauggggucua

SEQ ID NO: 762677 - RNA, 19 nt, Artificial Sequence
  Description of Artificial Sequence: Synthetic oligonucleotide
augugucaugugacagaga

SEQ ID NO: 762678 - RNA, 19 nt, Artificial Sequence
  Description of Artificial Sequence: Synthetic oligonucleotide
ccccggguaaggccaaggc

SEQ ID NO: 762679 - RNA, 19 nt, Artificial Sequence
  Description of Artificial Sequence: Synthetic oligonucleotide
ggcuuaagacacucaguau

SEQ ID NO: 762680 - RNA, 19 nt, Artificial Sequence
  Description of Artificial Sequence: Synthetic oligonucleotide
gcgcuaucuguucauaauu

SEQ ID NO: 762681 - RNA, 19 nt, Artificial Sequence
  Description of Artificial Sequence: Synthetic oligonucleotide
gacagcggagcugcgcuau

SEQ ID NO: 762682 - RNA, 19 nt, Artificial Sequence
  Description of Artificial Sequence: Synthetic oligonucleotide
ccagaugagggacuccucu

SEQ ID NO: 762683 - RNA, 19 nt, Artificial Sequence
  Description of Artificial Sequence: Synthetic oligonucleotide
aacggcccgaggggcuccu

SEQ ID NO: 762684 - RNA, 19 nt, Artificial Sequence
  Description of Artificial Sequence: Synthetic oligonucleotide
cauuaaucgcugggagaua

SEQ ID NO: 762685 - RNA, 19 nt, Artificial Sequence
  Description of Artificial Sequence: Synthetic oligonucleotide
gcccgaggggcuccucccg

SEQ ID NO: 762686 - RNA, 19 nt, Artificial Sequence
  Description of Artificial Sequence: Synthetic oligonucleotide
agaccacaugggaaaccuu

SEQ ID NO: 762687 - RNA, 19 nt, Artificial Sequence
  Description of Artificial Sequence: Synthetic oligonucleotide
gccuuaagcuguugauugu

SEQ ID NO: 762688 - RNA, 19 nt, Artificial Sequence
  Description of Artificial Sequence: Synthetic oligonucleotide
ggggucuacauaagagaua

SEQ ID NO: 762689 - RNA, 19 nt, Artificial Sequence
  Description of Artificial Sequence: Synthetic oligonucleotide
caacggcccgaggggcucc

SEQ ID NO: 762690 - RNA, 19 nt, Artificial Sequence
  Description of Artificial Sequence: Synthetic oligonucleotide
acugggcgaugagcguaga

SEQ ID NO: 762691 - RNA, 19 nt, Artificial Sequence
  Description of Artificial Sequence: Synthetic oligonucleotide
augucaccacugggcgaug

SEQ ID NO: 762692 - RNA, 19 nt, Artificial Sequence
  Description of Artificial Sequence: Synthetic oligonucleotide
ggcgcgacccucccucaga

SEQ ID NO: 762693 - RNA, 19 nt, Artificial Sequence
  Description of Artificial Sequence: Synthetic oligonucleotide
ggcgaugagcguagacaga

SEQ ID NO: 762694 - RNA, 19 nt, Artificial Sequence
  Description of Artificial Sequence: Synthetic oligonucleotide
gccccggguaaggccaagg

SEQ ID NO: 762695 - RNA, 19 nt, Artificial Sequence
  Description of Artificial Sequence: Synthetic oligonucleotide
acccgacgugcuugcucau

SEQ ID NO: 762696 - RNA, 19 nt, Artificial Sequence
  Description of Artificial Sequence: Synthetic oligonucleotide
gcgggcguucagcucuuuc

SEQ ID NO: 762697 - RNA, 19 nt, Artificial Sequence
  Description of Artificial Sequence: Synthetic oligonucleotide
caguggugagacguguuuu

SEQ ID NO: 762698 - RNA, 19 nt, Artificial Sequence
  Description of Artificial Sequence: Synthetic oligonucleotide
cggaaacccucgccguagc

SEQ ID NO: 762699 - RNA, 19 nt, Artificial Sequence
  Description of Artificial Sequence: Synthetic oligonucleotide
gguaaggccaaggcuccau

SEQ ID NO: 762700 - RNA, 19 nt, Artificial Sequence
  Description of Artificial Sequence: Synthetic oligonucleotide
gcgcgacccucccucagaa

SEQ ID NO: 762701 - RNA, 19 nt, Artificial Sequence
  Description of Artificial Sequence: Synthetic oligonucleotide
cgcuaucuguucauaauuu

SEQ ID NO: 762702 - RNA, 19 nt, Artificial Sequence
  Description of Artificial Sequence: Synthetic oligonucleotide
cccggguaaggccaaggcu

SEQ ID NO: 762703 - RNA, 19 nt, Artificial Sequence
  Description of Artificial Sequence: Synthetic oligonucleotide
cgaugagcguagacagaga

SEQ ID NO: 762704 - RNA, 19 nt, Artificial Sequence
  Description of Artificial Sequence: Synthetic oligonucleotide
ccacugggcgaugagcgua

SEQ ID NO: 762705 - RNA, 19 nt, Artificial Sequence
  Description of Artificial Sequence: Synthetic oligonucleotide
agcucgcuacagggugauu

SEQ ID NO: 762706 - RNA, 19 nt, Artificial Sequence
  Description of Artificial Sequence: Synthetic oligonucleotide
caaacccgacgugcuugcu

SEQ ID NO: 762707 - RNA, 19 nt, Artificial Sequence
  Description of Artificial Sequence: Synthetic oligonucleotide
cgcgacccucccucagaac

SEQ ID NO: 762708 - RNA, 19 nt, Artificial Sequence
  Description of Artificial Sequence: Synthetic oligonucleotide
cggcgccaccuccaacaag

SEQ ID NO: 762709 - RNA, 19 nt, Artificial Sequence
  Description of Artificial Sequence: Synthetic oligonucleotide
gcggcgcgacccucccuca

SEQ ID NO: 762710 - RNA, 19 nt, Artificial Sequence
  Description of Artificial Sequence: Synthetic oligonucleotide
ggcuacagacugaccuuuu

SEQ ID NO: 762711 - RNA, 19 nt, Artificial Sequence
  Description of Artificial Sequence: Synthetic oligonucleotide
cggcgcgacccucccucag

SEQ ID NO: 762712 - RNA, 19 nt, Artificial Sequence
  Description of Artificial Sequence: Synthetic oligonucleotide
aguuugagccuccugagcc

SEQ ID NO: 762713 - RNA, 19 nt, Artificial Sequence
  Description of Artificial Sequence: Synthetic oligonucleotide
aacgaaagcucccuccucc

SEQ ID NO: 762714 - RNA, 19 nt, Artificial Sequence
  Description of Artificial Sequence: Synthetic oligonucleotide
aucgaaguguucuuuaacg

SEQ ID NO: 762715 - RNA, 19 nt, Artificial Sequence
  Description of Artificial Sequence: Synthetic oligonucleotide
uguucuuuaacgaaagcuc

SEQ ID NO: 762716 - RNA, 19 nt, Artificial Sequence
  Description of Artificial Sequence: Synthetic oligonucleotide
aguggagaggguuggaagc

SEQ ID NO: 762717 - RNA, 19 nt, Artificial Sequence
  Description of Artificial Sequence: Synthetic oligonucleotide
caggauaggagucucaucc

SEQ ID NO: 762718 - RNA, 19 nt, Artificial Sequence
  Description of Artificial Sequence: Synthetic oligonucleotide
ucaaucggaugcaugagcc

SEQ ID NO: 762719 - RNA, 19 nt, Artificial Sequence
  Description of Artificial Sequence: Synthetic oligonucleotide
uuuaacgaaagcucccucc

SEQ ID NO: 762720 - RNA, 19 nt, Artificial Sequence
  Description of Artificial Sequence: Synthetic oligonucleotide
ugguagacuucuuggaugg

SEQ ID NO: 762721 - RNA, 19 nt, Artificial Sequence
  Description of Artificial Sequence: Synthetic oligonucleotide
gauuaguggguacuugucc

SEQ ID NO: 762722 - RNA, 19 nt, Artificial Sequence
  Description of Artificial Sequence: Synthetic oligonucleotide
acacaaaacacgcagcgcu

SEQ ID NO: 762723 - RNA, 19 nt, Artificial Sequence
  Description of Artificial Sequence: Synthetic oligonucleotide
uugucuaggauguacuugu

SEQ ID NO: 762724 - RNA, 19 nt, Artificial Sequence
  Description of Artificial Sequence: Synthetic oligonucleotide
ucuucacucccaaaguagc

SEQ ID NO: 762725 - RNA, 19 nt, Artificial Sequence
  Description of Artificial Sequence: Synthetic oligonucleotide
aaguggagaggguuggaag

SEQ ID NO: 762726 - RNA, 19 nt, Artificial Sequence
  Description of Artificial Sequence: Synthetic oligonucleotide
auaccagauggacuugagc

SEQ ID NO: 762727 - RNA, 19 nt, Artificial Sequence
  Description of Artificial Sequence: Synthetic oligonucleotide
ggauaguucuucuuggccg

SEQ ID NO: 762728 - RNA, 19 nt, Artificial Sequence
  Description of Artificial Sequence: Synthetic oligonucleotide
gacuuggagaccuugccgc

SEQ ID NO: 762729 - RNA, 19 nt, Artificial Sequence
  Description of Artificial Sequence: Synthetic oligonucleotide
uuaacgaaagcucccuccu

SEQ ID NO: 762730 - RNA, 19 nt, Artificial Sequence
  Description of Artificial Sequence: Synthetic oligonucleotide
uucuuuaacgaaagcuccc

SEQ ID NO: 762731 - RNA, 19 nt, Artificial Sequence
  Description of Artificial Sequence: Synthetic oligonucleotide
auuaguggguacuuguccu

SEQ ID NO: 762732 - RNA, 19 nt, Artificial Sequence
  Description of Artificial Sequence: Synthetic oligonucleotide
ucagcagauacucaaccuc

SEQ ID NO: 762733 - RNA, 19 nt, Artificial Sequence
  Description of Artificial Sequence: Synthetic oligonucleotide
uguuucaggacaucuugga

SEQ ID NO: 762734 - RNA, 19 nt, Artificial Sequence
  Description of Artificial Sequence: Synthetic oligonucleotide
aaucggaugcaugagccug

SEQ ID NO: 762735 - RNA, 19 nt, Artificial Sequence
  Description of Artificial Sequence: Synthetic oligonucleotide
aggauaggagucucauccc

SEQ ID NO: 762736 - RNA, 19 nt, Artificial Sequence
  Description of Artificial Sequence: Synthetic oligonucleotide
ucgaaguguucuuuaacga

SEQ ID NO: 762737 - RNA, 19 nt, Artificial Sequence
  Description of Artificial Sequence: Synthetic oligonucleotide
agacaagaaguugaagagg

SEQ ID NO: 762738 - RNA, 19 nt, Artificial Sequence
  Description of Artificial Sequence: Synthetic oligonucleotide
ucgucgggaaccaugauua

SEQ ID NO: 762739 - RNA, 19 nt, Artificial Sequence
  Description of Artificial Sequence: Synthetic oligonucleotide
augauuaguggguacuugu

SEQ ID NO: 762740 - RNA, 19 nt, Artificial Sequence
  Description of Artificial Sequence: Synthetic oligonucleotide
guucuuuaacgaaagcucc

SEQ ID NO: 762741 - RNA, 19 nt, Artificial Sequence
  Description of Artificial Sequence: Synthetic oligonucleotide
aaguguucuuuaacgaaag

SEQ ID NO: 762742 - RNA, 19 nt, Artificial Sequence
  Description of Artificial Sequence: Synthetic oligonucleotide
ggaacugccagacacugag

SEQ ID NO: 762743 - RNA, 19 nt, Artificial Sequence
  Description of Artificial Sequence: Synthetic oligonucleotide
accguguacagguuauggg

SEQ ID NO: 762744 - RNA, 19 nt, Artificial Sequence
  Description of Artificial Sequence: Synthetic oligonucleotide
cauugagagacuuccguuc

SEQ ID NO: 762745 - RNA, 19 nt, Artificial Sequence
  Description of Artificial Sequence: Synthetic oligonucleotide
cuugacuggacacggggcc

SEQ ID NO: 762746 - RNA, 19 nt, Artificial Sequence
  Description of Artificial Sequence: Synthetic oligonucleotide
gguccuaguagacacagug

SEQ ID NO: 762747 - RNA, 19 nt, Artificial Sequence
  Description of Artificial Sequence: Synthetic oligonucleotide
guuuuaaagaggagucccg

SEQ ID NO: 762748 - RNA, 19 nt, Artificial Sequence
  Description of Artificial Sequence: Synthetic oligonucleotide
agagguuaauuuucuggug

SEQ ID NO: 762749 - RNA, 19 nt, Artificial Sequence
  Description of Artificial Sequence: Synthetic oligonucleotide
ugccggauaguucuucuug

SEQ ID NO: 762750 - RNA, 19 nt, Artificial Sequence
  Description of Artificial Sequence: Synthetic oligonucleotide
gucugaggcgcucaucucg

SEQ ID NO: 762751 - RNA, 19 nt, Artificial Sequence
  Description of Artificial Sequence: Synthetic oligonucleotide
ugaagcaccuccacacagc

SEQ ID NO: 762752 - RNA, 19 nt, Artificial Sequence
  Description of Artificial Sequence: Synthetic oligonucleotide
auugagagacuuccguuca

SEQ ID NO: 762753 - RNA, 19 nt, Artificial Sequence
  Description of Artificial Sequence: Synthetic oligonucleotide
ugauuggagagcaggcugu

SEQ ID NO: 762754 - RNA, 19 nt, Artificial Sequence
  Description of Artificial Sequence: Synthetic oligonucleotide
gaggcgcucaucucguacg

SEQ ID NO: 762755 - RNA, 19 nt, Artificial Sequence
  Description of Artificial Sequence: Synthetic oligonucleotide
aagcccaucuccaagcuca

SEQ ID NO: 762756 - RNA, 19 nt, Artificial Sequence
  Description of Artificial Sequence: Synthetic oligonucleotide
gauacucaaccucgucggg

SEQ ID NO: 762757 - RNA, 19 nt, Artificial Sequence
  Description of Artificial Sequence: Synthetic oligonucleotide
uucgcgguccugaagcacc

SEQ ID NO: 762758 - RNA, 19 nt, Artificial Sequence
  Description of Artificial Sequence: Synthetic oligonucleotide
cucaaucggaugcaugagc

SEQ ID NO: 762759 - RNA, 19 nt, Artificial Sequence
  Description of Artificial Sequence: Synthetic oligonucleotide
ugauuaguggguacuuguc

SEQ ID NO: 762760 - RNA, 19 nt, Artificial Sequence
  Description of Artificial Sequence: Synthetic oligonucleotide
ucggccugcagccggauug

SEQ ID NO: 762761 - RNA, 19 nt, Artificial Sequence
  Description of Artificial Sequence: Synthetic oligonucleotide
ucuuuaacgaaagcucccu

SEQ ID NO: 762762 - RNA, 19 nt, Artificial Sequence
  Description of Artificial Sequence: Synthetic oligonucleotide
aaacacgcagcgcuuuccu

SEQ ID NO: 762763 - RNA, 19 nt, Artificial Sequence
  Description of Artificial Sequence: Synthetic oligonucleotide
uuggucgcuugucuccugg

SEQ ID NO: 762764 - RNA, 19 nt, Artificial Sequence
  Description of Artificial Sequence: Synthetic oligonucleotide
ggucaggcguuuuaaagag

SEQ ID NO: 762765 - RNA, 19 nt, Artificial Sequence
  Description of Artificial Sequence: Synthetic oligonucleotide
gaugcgcugccguugccgg

SEQ ID NO: 762766 - RNA, 19 nt, Artificial Sequence
  Description of Artificial Sequence: Synthetic oligonucleotide
uggaagccggugaaggagc

SEQ ID NO: 762767 - RNA, 19 nt, Artificial Sequence
  Description of Artificial Sequence: Synthetic oligonucleotide
uuccaguguuucacguugg

SEQ ID NO: 762768 - RNA, 19 nt, Artificial Sequence
  Description of Artificial Sequence: Synthetic oligonucleotide
aucaucccggaagugcucc

SEQ ID NO: 762769 - RNA, 19 nt, Artificial Sequence
  Description of Artificial Sequence: Synthetic oligonucleotide
guagccagguccuaguaga

SEQ ID NO: 762770 - RNA, 19 nt, Artificial Sequence
  Description of Artificial Sequence: Synthetic oligonucleotide
gaccguguacagguuaugg

SEQ ID NO: 762771 - RNA, 19 nt, Artificial Sequence
  Description of Artificial Sequence: Synthetic oligonucleotide
uggauccaguuuaucuucc

SEQ ID NO: 762772 - RNA, 19 nt, Artificial Sequence
  Description of Artificial Sequence: Synthetic oligonucleotide
aggcauaccagauggacuu

SEQ ID NO: 762773 - RNA, 19 nt, Artificial Sequence
  Description of Artificial Sequence: Synthetic oligonucleotide
gaaguguucuuuaacgaaa

SEQ ID NO: 762774 - RNA, 19 nt, Artificial Sequence
  Description of Artificial Sequence: Synthetic oligonucleotide
agagacggaaggcauccug

SEQ ID NO: 762775 - RNA, 19 nt, Artificial Sequence
  Description of Artificial Sequence: Synthetic oligonucleotide
gguacuuguccucagacaa

SEQ ID NO: 762776 - RNA, 19 nt, Artificial Sequence
  Description of Artificial Sequence: Synthetic oligonucleotide
agugcggugaaggcauacc

SEQ ID NO: 762777 - RNA, 19 nt, Artificial Sequence
  Description of Artificial Sequence: Synthetic oligonucleotide
uccugguagacuucuugga

SEQ ID NO: 762778 - RNA, 19 nt, Artificial Sequence
  Description of Artificial Sequence: Synthetic oligonucleotide
gggaaccaugauuaguggg

SEQ ID NO: 762779 - RNA, 19 nt, Artificial Sequence
  Description of Artificial Sequence: Synthetic oligonucleotide
aucucguacgugcggcucg

SEQ ID NO: 762780 - RNA, 19 nt, Artificial Sequence
  Description of Artificial Sequence: Synthetic oligonucleotide
ucaucgaaguguucuuuaa

SEQ ID NO: 762781 - RNA, 19 nt, Artificial Sequence
  Description of Artificial Sequence: Synthetic oligonucleotide
uagccuugacuggacacgg

SEQ ID NO: 762782 - RNA, 19 nt, Artificial Sequence
  Description of Artificial Sequence: Synthetic oligonucleotide
aggcguuuuaaagaggagu

SEQ ID NO: 762783 - RNA, 19 nt, Artificial Sequence
  Description of Artificial Sequence: Synthetic oligonucleotide
agcucuaggaacugccaga

SEQ ID NO: 762784 - RNA, 19 nt, Artificial Sequence
  Description of Artificial Sequence: Synthetic oligonucleotide
caucgaaguguucuuuaac

SEQ ID NO: 762785 - RNA, 19 nt, Artificial Sequence
  Description of Artificial Sequence: Synthetic oligonucleotide
guuaugggacagcaccuug

SEQ ID NO: 762786 - RNA, 19 nt, Artificial Sequence
  Description of Artificial Sequence: Synthetic oligonucleotide
aggcauccugauuggagag

SEQ ID NO: 762787 - RNA, 19 nt, Artificial Sequence
  Description of Artificial Sequence: Synthetic oligonucleotide
cugcauagaggcccgggcc

SEQ ID NO: 762788 - RNA, 19 nt, Artificial Sequence
  Description of Artificial Sequence: Synthetic oligonucleotide
ugaggcgcucaucucguac

SEQ ID NO: 762789 - RNA, 19 nt, Artificial Sequence
  Description of Artificial Sequence: Synthetic oligonucleotide
gguuggaagccggugaagg

SEQ ID NO: 762790 - RNA, 19 nt, Artificial Sequence
  Description of Artificial Sequence: Synthetic oligonucleotide
ugcagcgacgucuuccccu

SEQ ID NO: 762791 - RNA, 19 nt, Artificial Sequence
  Description of Artificial Sequence: Synthetic oligonucleotide
cacagugucagaagaacaa

SEQ ID NO: 762792 - RNA, 19 nt, Artificial Sequence
  Description of Artificial Sequence: Synthetic oligonucleotide
ucgcugucuucacacaaaa

SEQ ID NO: 762793 - RNA, 19 nt, Artificial Sequence
  Description of Artificial Sequence: Synthetic oligonucleotide
agcacagcucaucgaagug

SEQ ID NO: 762794 - RNA, 19 nt, Artificial Sequence
  Description of Artificial Sequence: Synthetic oligonucleotide
gucagaagaacaagggguc

SEQ ID NO: 762795 - RNA, 19 nt, Artificial Sequence
  Description of Artificial Sequence: Synthetic oligonucleotide
uccacagauagcccuguuu

SEQ ID NO: 762796 - RNA, 19 nt, Artificial Sequence
  Description of Artificial Sequence: Synthetic oligonucleotide
cagcgcuccgcccaguucc

SEQ ID NO: 762797 - RNA, 19 nt, Artificial Sequence
  Description of Artificial Sequence: Synthetic oligonucleotide
uuaguggguacuuguccuc

SEQ ID NO: 762798 - RNA, 19 nt, Artificial Sequence
  Description of Artificial Sequence: Synthetic oligonucleotide
ugagagacuuccguucacu

SEQ ID NO: 762799 - RNA, 19 nt, Artificial Sequence
  Description of Artificial Sequence: Synthetic oligonucleotide
ggauaggagucucaucccc

SEQ ID NO: 762800 - RNA, 19 nt, Artificial Sequence
  Description of Artificial Sequence: Synthetic oligonucleotide
aagccaggauaggagucuc

SEQ ID NO: 762801 - RNA, 19 nt, Artificial Sequence
  Description of Artificial Sequence: Synthetic oligonucleotide
accaugauuaguggguacu

SEQ ID NO: 762802 - RNA, 19 nt, Artificial Sequence
  Description of Artificial Sequence: Synthetic oligonucleotide
cucaucucguacgugcggc

SEQ ID NO: 762803 - RNA, 19 nt, Artificial Sequence
  Description of Artificial Sequence: Synthetic oligonucleotide
caugauuaguggguacuug

SEQ ID NO: 762804 - RNA, 19 nt, Artificial Sequence
  Description of Artificial Sequence: Synthetic oligonucleotide
cucaaccucgucgggaacc

SEQ ID NO: 762805 - RNA, 19 nt, Artificial Sequence
  Description of Artificial Sequence: Synthetic oligonucleotide
cuuuaacgaaagcucccuc

SEQ ID NO: 762806 - RNA, 19 nt, Artificial Sequence
  Description of Artificial Sequence: Synthetic oligonucleotide
uccuuucgcagggccaugg

SEQ ID NO: 762807 - RNA, 19 nt, Artificial Sequence
  Description of Artificial Sequence: Synthetic oligonucleotide
gcugcaacuggaaccagcg

SEQ ID NO: 762808 - RNA, 19 nt, Artificial Sequence
  Description of Artificial Sequence: Synthetic oligonucleotide
uugggaaccccaguggguc

SEQ ID NO: 762809 - RNA, 19 nt, Artificial Sequence
  Description of Artificial Sequence: Synthetic oligonucleotide
ggcucaaucggaugcauga

SEQ ID NO: 762810 - RNA, 19 nt, Artificial Sequence
  Description of Artificial Sequence: Synthetic oligonucleotide
agcgacgucuuccccucgg

SEQ ID NO: 762811 - RNA, 19 nt, Artificial Sequence
  Description of Artificial Sequence: Synthetic oligonucleotide
uccaguguuucacguuggu

SEQ ID NO: 762812 - RNA, 19 nt, Artificial Sequence
  Description of Artificial Sequence: Synthetic oligonucleotide
uaacgaaagcucccuccuc

SEQ ID NO: 762813 - RNA, 19 nt, Artificial Sequence
  Description of Artificial Sequence: Synthetic oligonucleotide
cagagguuaauuuucuggu

SEQ ID NO: 762814 - RNA, 19 nt, Artificial Sequence
  Description of Artificial Sequence: Synthetic oligonucleotide
guacuuguugagguagggc

SEQ ID NO: 762815 - RNA, 19 nt, Artificial Sequence
  Description of Artificial Sequence: Synthetic oligonucleotide
uggcucaaucggaugcaug

SEQ ID NO: 762816 - RNA, 19 nt, Artificial Sequence
  Description of Artificial Sequence: Synthetic oligonucleotide
caguuugagccuccugagc

SEQ ID NO: 762817 - RNA, 19 nt, Artificial Sequence
  Description of Artificial Sequence: Synthetic oligonucleotide
cacacaaaacacgcagcgc

SEQ ID NO: 762818 - RNA, 19 nt, Artificial Sequence
  Description of Artificial Sequence: Synthetic oligonucleotide
gccggauaguucuucuugg

SEQ ID NO: 762819 - RNA, 19 nt, Artificial Sequence
  Description of Artificial Sequence: Synthetic oligonucleotide
gccaucgucaucaucccgg

SEQ ID NO: 762820 - RNA, 19 nt, Artificial Sequence
  Description of Artificial Sequence: Synthetic oligonucleotide
cagaguugaagagcucuag

SEQ ID NO: 762821 - RNA, 19 nt, Artificial Sequence
  Description of Artificial Sequence: Synthetic oligonucleotide
ugcgcucgcucgauguagc

SEQ ID NO: 762822 - RNA, 19 nt, Artificial Sequence
  Description of Artificial Sequence: Synthetic oligonucleotide
ucguacgugcggcucgcug

SEQ ID NO: 762823 - RNA, 19 nt, Artificial Sequence
  Description of Artificial Sequence: Synthetic oligonucleotide
aaccucgucgggaaccaug

SEQ ID NO: 762824 - RNA, 19 nt, Artificial Sequence
  Description of Artificial Sequence: Synthetic oligonucleotide
gaugugcaggaccguguac

SEQ ID NO: 762825 - RNA, 19 nt, Artificial Sequence
  Description of Artificial Sequence: Synthetic oligonucleotide
acucaaccucgucgggaac

SEQ ID NO: 762826 - RNA, 19 nt, Artificial Sequence
  Description of Artificial Sequence: Synthetic oligonucleotide
ggcauguagccuugacugg

SEQ ID NO: 762827 - RNA, 19 nt, Artificial Sequence
  Description of Artificial Sequence: Synthetic oligonucleotide
cggauugcggucuggaugg

SEQ ID NO: 762828 - RNA, 19 nt, Artificial Sequence
  Description of Artificial Sequence: Synthetic oligonucleotide
ugcugcgcucgcucgaugu

SEQ ID NO: 762829 - RNA, 19 nt, Artificial Sequence
  Description of Artificial Sequence: Synthetic oligonucleotide
uuccuucgcgguccugaag

SEQ ID NO: 762830 - RNA, 19 nt, Artificial Sequence
  Description of Artificial Sequence: Synthetic oligonucleotide
guuggaagccggugaagga

SEQ ID NO: 762831 - RNA, 19 nt, Artificial Sequence
  Description of Artificial Sequence: Synthetic oligonucleotide
ucaaccucgucgggaacca

SEQ ID NO: 762832 - RNA, 19 nt, Artificial Sequence
  Description of Artificial Sequence: Synthetic oligonucleotide
ucaucucguacgugcggcu

SEQ ID NO: 762833 - RNA, 19 nt, Artificial Sequence
  Description of Artificial Sequence: Synthetic oligonucleotide
ggugcccucucuuccacag

SEQ ID NO: 762834 - RNA, 19 nt, Artificial Sequence
  Description of Artificial Sequence: Synthetic oligonucleotide
caggcguuuuaaagaggag

SEQ ID NO: 762835 - RNA, 19 nt, Artificial Sequence
  Description of Artificial Sequence: Synthetic oligonucleotide
gcuggcgcgugucugaggc

SEQ ID NO: 762836 - RNA, 19 nt, Artificial Sequence
  Description of Artificial Sequence: Synthetic oligonucleotide
caaaacacgcagcgcuuuc

SEQ ID NO: 762837 - RNA, 19 nt, Artificial Sequence
  Description of Artificial Sequence: Synthetic oligonucleotide
ggcuuucaccuccagcugc

SEQ ID NO: 762838 - RNA, 19 nt, Artificial Sequence
  Description of Artificial Sequence: Synthetic oligonucleotide
guacuuguccucagacaag

SEQ ID NO: 762839 - RNA, 19 nt, Artificial Sequence
  Description of Artificial Sequence: Synthetic oligonucleotide
guuugagccuccugagcca

SEQ ID NO: 762840 - RNA, 19 nt, Artificial Sequence
  Description of Artificial Sequence: Synthetic oligonucleotide
caugcugagggacucccga

SEQ ID NO: 762841 - RNA, 19 nt, Artificial Sequence
  Description of Artificial Sequence: Synthetic oligonucleotide
uggcgcgugucugaggcgc

SEQ ID NO: 762842 - RNA, 19 nt, Artificial Sequence
  Description of Artificial Sequence: Synthetic oligonucleotide
gucgcuugucuccuggcuc

SEQ ID NO: 762843 - RNA, 19 nt, Artificial Sequence
  Description of Artificial Sequence: Synthetic oligonucleotide
ugggcgugcugcagggagc

SEQ ID NO: 762844 - RNA, 19 nt, Artificial Sequence
  Description of Artificial Sequence: Synthetic oligonucleotide
aacacgcagcgcuuuccuu

SEQ ID NO: 762845 - RNA, 19 nt, Artificial Sequence
  Description of Artificial Sequence: Synthetic oligonucleotide
gucaggcguuuuaaagagg

SEQ ID NO: 762846 - RNA, 19 nt, Artificial Sequence
  Description of Artificial Sequence: Synthetic oligonucleotide
acccacgccccgcaggcag

SEQ ID NO: 762847 - RNA, 19 nt, Artificial Sequence
  Description of Artificial Sequence: Synthetic oligonucleotide
aggguuggaagccggugaa

SEQ ID NO: 762848 - RNA, 19 nt, Artificial Sequence
  Description of Artificial Sequence: Synthetic oligonucleotide
accagagacggaaggcauc

SEQ ID NO: 762849 - RNA, 19 nt, Artificial Sequence
  Description of Artificial Sequence: Synthetic oligonucleotide
ugagcuccugguagacuuc

SEQ ID NO: 762850 - RNA, 19 nt, Artificial Sequence
  Description of Artificial Sequence: Synthetic oligonucleotide
uuuccuucgcgguccugaa

SEQ ID NO: 762851 - RNA, 19 nt, Artificial Sequence
  Description of Artificial Sequence: Synthetic oligonucleotide
ugccguugcgccuccugca

SEQ ID NO: 762852 - RNA, 19 nt, Artificial Sequence
  Description of Artificial Sequence: Synthetic oligonucleotide
agggagcggcucugcagcg

SEQ ID NO: 762853 - RNA, 19 nt, Artificial Sequence
  Description of Artificial Sequence: Synthetic oligonucleotide
gcgcucaucucguacgugc

SEQ ID NO: 762854 - RNA, 19 nt, Artificial Sequence
  Description of Artificial Sequence: Synthetic oligonucleotide
cugccguugcgccuccugc

SEQ ID NO: 762855 - RNA, 19 nt, Artificial Sequence
  Description of Artificial Sequence: Synthetic oligonucleotide
gacgucuuccccucggccu

SEQ ID NO: 762856 - RNA, 19 nt, Artificial Sequence
  Description of Artificial Sequence: Synthetic oligonucleotide
gaaccagcgcuccgcccag

SEQ ID NO: 762857 - RNA, 19 nt, Artificial Sequence
  Description of Artificial Sequence: Synthetic oligonucleotide
cacuccuggcgcuggcgcg

SEQ ID NO: 762858 - RNA, 19 nt, Artificial Sequence
  Description of Artificial Sequence: Synthetic oligonucleotide
uccguucacugcuguuggc

SEQ ID NO: 762859 - RNA, 19 nt, Artificial Sequence
  Description of Artificial Sequence: Synthetic oligonucleotide
agguuaugggacagcaccu

SEQ ID NO: 762860 - RNA, 19 nt, Artificial Sequence
  Description of Artificial Sequence: Synthetic oligonucleotide
uccgcccaguuccuccuca

SEQ ID NO: 762861 - RNA, 19 nt, Artificial Sequence
  Description of Artificial Sequence: Synthetic oligonucleotide
ccuugcacucuucacuccc

SEQ ID NO: 762862 - RNA, 19 nt, Artificial Sequence
  Description of Artificial Sequence: Synthetic oligonucleotide
ugccagacacugagucccc

SEQ ID NO: 762863 - RNA, 19 nt, Artificial Sequence
  Description of Artificial Sequence: Synthetic oligonucleotide
gaaccaugauuagugggua

SEQ ID NO: 762864 - RNA, 19 nt, Artificial Sequence
  Description of Artificial Sequence: Synthetic oligonucleotide
agugggucaggcguuuuaa

SEQ ID NO: 762865 - RNA, 19 nt, Artificial Sequence
  Description of Artificial Sequence: Synthetic oligonucleotide
ugcacucuucacucccaaa

SEQ ID NO: 762866 - RNA, 19 nt, Artificial Sequence
  Description of Artificial Sequence: Synthetic oligonucleotide
ggcgcaacuuccucugagc

SEQ ID NO: 762867 - RNA, 19 nt, Artificial Sequence
  Description of Artificial Sequence: Synthetic oligonucleotide
agcucaucgaaguguucuu

SEQ ID NO: 762868 - RNA, 19 nt, Artificial Sequence
  Description of Artificial Sequence: Synthetic oligonucleotide
ggacucccgacccacgccc

SEQ ID NO: 762869 - RNA, 19 nt, Artificial Sequence
  Description of Artificial Sequence: Synthetic oligonucleotide
uggucgcuugucuccuggc

SEQ ID NO: 762870 - RNA, 19 nt, Artificial Sequence
  Description of Artificial Sequence: Synthetic oligonucleotide
cucguccgcccucugccgg

SEQ ID NO: 762871 - RNA, 19 nt, Artificial Sequence
  Description of Artificial Sequence: Synthetic oligonucleotide
gaugcaugagccuguucau

SEQ ID NO: 762872 - RNA, 19 nt, Artificial Sequence
  Description of Artificial Sequence: Synthetic oligonucleotide
caucagagguuaauuuucu

SEQ ID NO: 762873 - RNA, 19 nt, Artificial Sequence
  Description of Artificial Sequence: Synthetic oligonucleotide
gcagcgcuuuccuucgcgg

SEQ ID NO: 762874 - RNA, 19 nt, Artificial Sequence
  Description of Artificial Sequence: Synthetic oligonucleotide
ugcagccggauugcggucu

SEQ ID NO: 762875 - RNA, 19 nt, Artificial Sequence
  Description of Artificial Sequence: Synthetic oligonucleotide
gcucaucucguacgugcgg

SEQ ID NO: 762876 - RNA, 19 nt, Artificial Sequence
  Description of Artificial Sequence: Synthetic oligonucleotide
ccguguacagguuauggga

SEQ ID NO: 762877 - RNA, 19 nt, Artificial Sequence
  Description of Artificial Sequence: Synthetic oligonucleotide
ucucguacgugcggcucgc

SEQ ID NO: 762878 - RNA, 19 nt, Artificial Sequence
  Description of Artificial Sequence: Synthetic oligonucleotide
acaaaacacgcagcgcuuu

SEQ ID NO: 762879 - RNA, 19 nt, Artificial Sequence
  Description of Artificial Sequence: Synthetic oligonucleotide
ggaaccaugauuagugggu

SEQ ID NO: 762880 - RNA, 19 nt, Artificial Sequence
  Description of Artificial Sequence: Synthetic oligonucleotide
gcccgcuguagccaggucc

SEQ ID NO: 762881 - RNA, 19 nt, Artificial Sequence
  Description of Artificial Sequence: Synthetic oligonucleotide
ucuggacauuccaguguuu

SEQ ID NO: 762882 - RNA, 19 nt, Artificial Sequence
  Description of Artificial Sequence: Synthetic oligonucleotide
caucaucccggaagugcuc

SEQ ID NO: 762883 - RNA, 19 nt, Artificial Sequence
  Description of Artificial Sequence: Synthetic oligonucleotide
accucgucgggaaccauga

SEQ ID NO: 762884 - RNA, 19 nt, Artificial Sequence
  Description of Artificial Sequence: Synthetic oligonucleotide
ucgcgguccugaagcaccu

SEQ ID NO: 762885 - RNA, 19 nt, Artificial Sequence
  Description of Artificial Sequence: Synthetic oligonucleotide
cuuggaugagcuccuggua

SEQ ID NO: 762886 - RNA, 19 nt, Artificial Sequence
  Description of Artificial Sequence: Synthetic oligonucleotide
cacugcuguuggcugcaag

SEQ ID NO: 762887 - RNA, 19 nt, Artificial Sequence
  Description of Artificial Sequence: Synthetic oligonucleotide
aggcgcucaucucguacgu

SEQ ID NO: 762888 - RNA, 19 nt, Artificial Sequence
  Description of Artificial Sequence: Synthetic oligonucleotide
cugcgcucgcucgauguag

SEQ ID NO: 762889 - RNA, 19 nt, Artificial Sequence
  Description of Artificial Sequence: Synthetic oligonucleotide
gcagcggccagaguugaag

SEQ ID NO: 762890 - RNA, 19 nt, Artificial Sequence
  Description of Artificial Sequence: Synthetic oligonucleotide
gaaccccagugggucaggc

SEQ ID NO: 762891 - RNA, 19 nt, Artificial Sequence
  Description of Artificial Sequence: Synthetic oligonucleotide
cggauaguucuucuuggcc

SEQ ID NO: 762892 - RNA, 19 nt, Artificial Sequence
  Description of Artificial Sequence: Synthetic oligonucleotide
ggguacuuguccucagaca

SEQ ID NO: 762893 - RNA, 19 nt, Artificial Sequence
  Description of Artificial Sequence: Synthetic oligonucleotide
gccgucagcguccagcaca

SEQ ID NO: 762894 - RNA, 19 nt, Artificial Sequence
  Description of Artificial Sequence: Synthetic oligonucleotide
cuaggaacugccagacacu

SEQ ID NO: 762895 - RNA, 19 nt, Artificial Sequence
  Description of Artificial Sequence: Synthetic oligonucleotide
ggcgggcaaguggagaggg

SEQ ID NO: 762896 - RNA, 19 nt, Artificial Sequence
  Description of Artificial Sequence: Synthetic oligonucleotide
cucgcugucuucacacaaa

SEQ ID NO: 762897 - RNA, 19 nt, Artificial Sequence
  Description of Artificial Sequence: Synthetic oligonucleotide
ucgcucgauguagcgcucc

SEQ ID NO: 762898 - RNA, 19 nt, Artificial Sequence
  Description of Artificial Sequence: Synthetic oligonucleotide
caucuggacauuccagugu

SEQ ID NO: 762899 - RNA, 19 nt, Artificial Sequence
  Description of Artificial Sequence: Synthetic oligonucleotide
guacgugcggcucgcuguc

SEQ ID NO: 762900 - RNA, 19 nt, Artificial Sequence
  Description of Artificial Sequence: Synthetic oligonucleotide
gcauccugauuggagagca

SEQ ID NO: 762901 - RNA, 19 nt, Artificial Sequence
  Description of Artificial Sequence: Synthetic oligonucleotide
aucggaugcaugagccugu

SEQ ID NO: 762902 - RNA, 19 nt, Artificial Sequence
  Description of Artificial Sequence: Synthetic oligonucleotide
gagggacucccgacccacg

SEQ ID NO: 762903 - RNA, 19 nt, Artificial Sequence
  Description of Artificial Sequence: Synthetic oligonucleotide
gaguugggacuuggagacc

SEQ ID NO: 762904 - RNA, 19 nt, Artificial Sequence
  Description of Artificial Sequence: Synthetic oligonucleotide
guuggucgcuugucuccug

SEQ ID NO: 762905 - RNA, 19 nt, Artificial Sequence
  Description of Artificial Sequence: Synthetic oligonucleotide
gcugcggcggcgcucuucc

SEQ ID NO: 762906 - RNA, 19 nt, Artificial Sequence
  Description of Artificial Sequence: Synthetic oligonucleotide
cuggcgcgugucugaggcg

SEQ ID NO: 762907 - RNA, 19 nt, Artificial Sequence
  Description of Artificial Sequence: Synthetic oligonucleotide
ccuggcgcaacuuccucug

SEQ ID NO: 762908 - RNA, 19 nt, Artificial Sequence
  Description of Artificial Sequence: Synthetic oligonucleotide
cuucgcgguccugaagcac

SEQ ID NO: 762909 - RNA, 19 nt, Artificial Sequence
  Description of Artificial Sequence: Synthetic oligonucleotide
caucccgccuggcuuucac

SEQ ID NO: 762910 - RNA, 19 nt, Artificial Sequence
  Description of Artificial Sequence: Synthetic oligonucleotide
ccagcacagcucaucgaag

SEQ ID NO: 762911 - RNA, 19 nt, Artificial Sequence
  Description of Artificial Sequence: Synthetic oligonucleotide
caucucguacgugcggcuc

SEQ ID NO: 762912 - RNA, 19 nt, Artificial Sequence
  Description of Artificial Sequence: Synthetic oligonucleotide
aggaccguguacagguuau

SEQ ID NO: 762913 - RNA, 19 nt, Artificial Sequence
  Description of Artificial Sequence: Synthetic oligonucleotide
caaguggagaggguuggaa

SEQ ID NO: 762914 - RNA, 19 nt, Artificial Sequence
  Description of Artificial Sequence: Synthetic oligonucleotide
uccgcccucugccggugcu

SEQ ID NO: 762915 - RNA, 19 nt, Artificial Sequence
  Description of Artificial Sequence: Synthetic oligonucleotide
gcgcaacuuccucugagca

SEQ ID NO: 762916 - RNA, 19 nt, Artificial Sequence
  Description of Artificial Sequence: Synthetic oligonucleotide
ucggccugccguugcgccu

SEQ ID NO: 762917 - RNA, 19 nt, Artificial Sequence
  Description of Artificial Sequence: Synthetic oligonucleotide
guguuucacguuggugcug

SEQ ID NO: 762918 - RNA, 19 nt, Artificial Sequence
  Description of Artificial Sequence: Synthetic oligonucleotide
cagcggccagaguugaaga

SEQ ID NO: 762919 - RNA, 19 nt, Artificial Sequence
  Description of Artificial Sequence: Synthetic oligonucleotide
ugacuggacacggggccau

SEQ ID NO: 762920 - RNA, 19 nt, Artificial Sequence
  Description of Artificial Sequence: Synthetic oligonucleotide
cuuucgcagggccauggcu

SEQ ID NO: 762921 - RNA, 19 nt, Artificial Sequence
  Description of Artificial Sequence: Synthetic oligonucleotide
gugggucaggcguuuuaaa

SEQ ID NO: 762922 - RNA, 19 nt, Artificial Sequence
  Description of Artificial Sequence: Synthetic oligonucleotide
ucuuggccgucagcgucca

SEQ ID NO: 762923 - RNA, 19 nt, Artificial Sequence
  Description of Artificial Sequence: Synthetic oligonucleotide
agccuugacuggacacggg

SEQ ID NO: 762924 - RNA, 19 nt, Artificial Sequence
  Description of Artificial Sequence: Synthetic oligonucleotide
ggcugcaacuggaaccagc

SEQ ID NO: 762925 - RNA, 19 nt, Artificial Sequence
  Description of Artificial Sequence: Synthetic oligonucleotide
gcuggauccaguuuaucuu

SEQ ID NO: 762926 - RNA, 19 nt, Artificial Sequence
  Description of Artificial Sequence: Synthetic oligonucleotide
ccggcgggcaaguggagag

SEQ ID NO: 762927 - RNA, 19 nt, Artificial Sequence
  Description of Artificial Sequence: Synthetic oligonucleotide
agacuuccguucacugcug

SEQ ID NO: 762928 - RNA, 19 nt, Artificial Sequence
  Description of Artificial Sequence: Synthetic oligonucleotide
cgaaguguucuuuaacgaa

SEQ ID NO: 762929 - RNA, 19 nt, Artificial Sequence
  Description of Artificial Sequence: Synthetic oligonucleotide
ucguccgcccucugccggu

SEQ ID NO: 762930 - RNA, 19 nt, Artificial Sequence
  Description of Artificial Sequence: Synthetic oligonucleotide
gcucgcucgauguagcgcu

SEQ ID NO: 762931 - RNA, 19 nt, Artificial Sequence
  Description of Artificial Sequence: Synthetic oligonucleotide
gucccggcgggcaagugga

SEQ ID NO: 762932 - RNA, 19 nt, Artificial Sequence
  Description of Artificial Sequence: Synthetic oligonucleotide
gcaccagagacggaaggca

SEQ ID NO: 762933 - RNA, 19 nt, Artificial Sequence
  Description of Artificial Sequence: Synthetic oligonucleotide
agccggauugcggucugga

SEQ ID NO: 762934 - RNA, 19 nt, Artificial Sequence
  Description of Artificial Sequence: Synthetic oligonucleotide
ggggaugugcaggaccgug

SEQ ID NO: 762935 - RNA, 19 nt, Artificial Sequence
  Description of Artificial Sequence: Synthetic oligonucleotide
ucccggcgggcaaguggag

SEQ ID NO: 762936 - RNA, 19 nt, Artificial Sequence
  Description of Artificial Sequence: Synthetic oligonucleotide
ccgucagcguccagcacag

SEQ ID NO: 762937 - RNA, 19 nt, Artificial Sequence
  Description of Artificial Sequence: Synthetic oligonucleotide
cugccguugccgggcagcc

SEQ ID NO: 762938 - RNA, 19 nt, Artificial Sequence
  Description of Artificial Sequence: Synthetic oligonucleotide
caaucggaugcaugagccu

SEQ ID NO: 762939 - RNA, 19 nt, Artificial Sequence
  Description of Artificial Sequence: Synthetic oligonucleotide
gcuggugguuggucgcuug

SEQ ID NO: 762940 - RNA, 19 nt, Artificial Sequence
  Description of Artificial Sequence: Synthetic oligonucleotide
ggacaucuuggaugagcuc

SEQ ID NO: 762941 - RNA, 19 nt, Artificial Sequence
  Description of Artificial Sequence: Synthetic oligonucleotide
gcagcgacgucuuccccuc

SEQ ID NO: 762942 - RNA, 19 nt, Artificial Sequence
  Description of Artificial Sequence: Synthetic oligonucleotide
gucgggaaccaugauuagu

SEQ ID NO: 762943 - RNA, 19 nt, Artificial Sequence
  Description of Artificial Sequence: Synthetic oligonucleotide
ggaugugcaggaccgugua

SEQ ID NO: 762944 - RNA, 19 nt, Artificial Sequence
  Description of Artificial Sequence: Synthetic oligonucleotide
cuggucugggcgaggcgca

SEQ ID NO: 762945 - RNA, 19 nt, Artificial Sequence
  Description of Artificial Sequence: Synthetic oligonucleotide
cucgcucgauguagcgcuc

SEQ ID NO: 762946 - RNA, 19 nt, Artificial Sequence
  Description of Artificial Sequence: Synthetic oligonucleotide
gugcagcgacgucuucccc

SEQ ID NO: 762947 - RNA, 19 nt, Artificial Sequence
  Description of Artificial Sequence: Synthetic oligonucleotide
caggaccguguacagguua

SEQ ID NO: 762948 - RNA, 19 nt, Artificial Sequence
  Description of Artificial Sequence: Synthetic oligonucleotide
cucgucgggaaccaugauu

SEQ ID NO: 762949 - RNA, 19 nt, Artificial Sequence
  Description of Artificial Sequence: Synthetic oligonucleotide
gucugccggauaguucuuc

SEQ ID NO: 762950 - RNA, 19 nt, Artificial Sequence
  Description of Artificial Sequence: Synthetic oligonucleotide
gacacggggccaucgucau

SEQ ID NO: 762951 - RNA, 19 nt, Artificial Sequence
  Description of Artificial Sequence: Synthetic oligonucleotide
gcgcucgcucgauguagcg

SEQ ID NO: 762952 - RNA, 19 nt, Artificial Sequence
  Description of Artificial Sequence: Synthetic oligonucleotide
auagaggcccgggccugcu

SEQ ID NO: 762953 - RNA, 19 nt, Artificial Sequence
  Description of Artificial Sequence: Synthetic oligonucleotide
accagcgcuccgcccaguu

SEQ ID NO: 762954 - RNA, 19 nt, Artificial Sequence
  Description of Artificial Sequence: Synthetic oligonucleotide
ucggaugcaugagccuguu

SEQ ID NO: 762955 - RNA, 19 nt, Artificial Sequence
  Description of Artificial Sequence: Synthetic oligonucleotide
gccugcauagaggcccggg

SEQ ID NO: 762956 - RNA, 19 nt, Artificial Sequence
  Description of Artificial Sequence: Synthetic oligonucleotide
ggguuggaagccggugaag

SEQ ID NO: 762957 - RNA, 19 nt, Artificial Sequence
  Description of Artificial Sequence: Synthetic oligonucleotide
cccggugcuggcugcggcg

SEQ ID NO: 762958 - RNA, 19 nt, Artificial Sequence
  Description of Artificial Sequence: Synthetic oligonucleotide
ccuuucgcagggccauggc

SEQ ID NO: 762959 - RNA, 19 nt, Artificial Sequence
  Description of Artificial Sequence: Synthetic oligonucleotide
ggucugggcgaggcgcacg

SEQ ID NO: 762960 - RNA, 19 nt, Artificial Sequence
  Description of Artificial Sequence: Synthetic oligonucleotide
ucgcagggccauggcugag

SEQ ID NO: 762961 - RNA, 19 nt, Artificial Sequence
  Description of Artificial Sequence: Synthetic oligonucleotide
gcgacgucuuccccucggc

SEQ ID NO: 762962 - RNA, 19 nt, Artificial Sequence
  Description of Artificial Sequence: Synthetic oligonucleotide
gcugccguugccgggcagc

SEQ ID NO: 762963 - RNA, 19 nt, Artificial Sequence
  Description of Artificial Sequence: Synthetic oligonucleotide
caagcucaugcugcccaga

SEQ ID NO: 762964 - RNA, 19 nt, Artificial Sequence
  Description of Artificial Sequence: Synthetic oligonucleotide
caccagagacggaaggcau

SEQ ID NO: 762965 - RNA, 19 nt, Artificial Sequence
  Description of Artificial Sequence: Synthetic oligonucleotide
ucaucccgccuggcuuuca

SEQ ID NO: 762966 - RNA, 19 nt, Artificial Sequence
  Description of Artificial Sequence: Synthetic oligonucleotide
uggcggccguccacuccug

SEQ ID NO: 762967 - RNA, 19 nt, Artificial Sequence
  Description of Artificial Sequence: Synthetic oligonucleotide
gcugucugccggauaguuc

SEQ ID NO: 762968 - RNA, 19 nt, Artificial Sequence
  Description of Artificial Sequence: Synthetic oligonucleotide
cucccggugcuggcugcgg

SEQ ID NO: 762969 - RNA, 19 nt, Artificial Sequence
  Description of Artificial Sequence: Synthetic oligonucleotide
ggaccguguacagguuaug

SEQ ID NO: 762970 - RNA, 19 nt, Artificial Sequence
  Description of Artificial Sequence: Synthetic oligonucleotide
gcacagcucaucgaagugu

SEQ ID NO: 762971 - RNA, 19 nt, Artificial Sequence
  Description of Artificial Sequence: Synthetic oligonucleotide
ggaaccccagugggucagg

SEQ ID NO: 762972 - RNA, 19 nt, Artificial Sequence
  Description of Artificial Sequence: Synthetic oligonucleotide
cgcagcgcuuuccuucgcg

SEQ ID NO: 762973 - RNA, 19 nt, Artificial Sequence
  Description of Artificial Sequence: Synthetic oligonucleotide
gauuggagagcaggcuguu

SEQ ID NO: 762974 - RNA, 19 nt, Artificial Sequence
  Description of Artificial Sequence: Synthetic oligonucleotide
cugcugcgcucgcucgaug

SEQ ID NO: 762975 - RNA, 19 nt, Artificial Sequence
  Description of Artificial Sequence: Synthetic oligonucleotide
cauugcugucugccggaua

SEQ ID NO: 762976 - RNA, 19 nt, Artificial Sequence
  Description of Artificial Sequence: Synthetic oligonucleotide
cagugggucaggcguuuua

SEQ ID NO: 762977 - RNA, 19 nt, Artificial Sequence
  Description of Artificial Sequence: Synthetic oligonucleotide
gccauggcugaggcgcccg

SEQ ID NO: 762978 - RNA, 19 nt, Artificial Sequence
  Description of Artificial Sequence: Synthetic oligonucleotide
ggucgcuugucuccuggcu

SEQ ID NO: 762979 - RNA, 19 nt, Artificial Sequence
  Description of Artificial Sequence: Synthetic oligonucleotide
ccuugaguugggacuugga

SEQ ID NO: 762980 - RNA, 19 nt, Artificial Sequence
  Description of Artificial Sequence: Synthetic oligonucleotide
cuccuuucgcagggccaug

SEQ ID NO: 762981 - RNA, 19 nt, Artificial Sequence
  Description of Artificial Sequence: Synthetic oligonucleotide
cagccggauugcggucugg

SEQ ID NO: 762982 - RNA, 19 nt, Artificial Sequence
  Description of Artificial Sequence: Synthetic oligonucleotide
cgacccacgccccgcaggc

SEQ ID NO: 762983 - RNA, 19 nt, Artificial Sequence
  Description of Artificial Sequence: Synthetic oligonucleotide
cucaucccgccuggcuuuc

SEQ ID NO: 762984 - RNA, 19 nt, Artificial Sequence
  Description of Artificial Sequence: Synthetic oligonucleotide
cuggcgcaacuuccucuga

SEQ ID NO: 762985 - RNA, 19 nt, Artificial Sequence
  Description of Artificial Sequence: Synthetic oligonucleotide
cuuggccgucagcguccag

SEQ ID NO: 762986 - RNA, 19 nt, Artificial Sequence
  Description of Artificial Sequence: Synthetic oligonucleotide
gagucccggcgggcaagug

SEQ ID NO: 762987 - RNA, 19 nt, Artificial Sequence
  Description of Artificial Sequence: Synthetic oligonucleotide
ggagaccuugccgcucuuc

SEQ ID NO: 762988 - RNA, 19 nt, Artificial Sequence
  Description of Artificial Sequence: Synthetic oligonucleotide
cgucgggaaccaugauuag

SEQ ID NO: 762989 - RNA, 19 nt, Artificial Sequence
  Description of Artificial Sequence: Synthetic oligonucleotide
ccagguccuaguagacaca

SEQ ID NO: 762990 - RNA, 19 nt, Artificial Sequence
  Description of Artificial Sequence: Synthetic oligonucleotide
ggcgcucaucucguacgug

SEQ ID NO: 762991 - RNA, 19 nt, Artificial Sequence
  Description of Artificial Sequence: Synthetic oligonucleotide
guccgcccucugccggugc

SEQ ID NO: 762992 - RNA, 19 nt, Artificial Sequence
  Description of Artificial Sequence: Synthetic oligonucleotide
cuccgcccaguuccuccuc

SEQ ID NO: 762993 - RNA, 19 nt, Artificial Sequence
  Description of Artificial Sequence: Synthetic oligonucleotide
cugaggcgcccgccccggc

SEQ ID NO: 762994 - RNA, 19 nt, Artificial Sequence
  Description of Artificial Sequence: Synthetic oligonucleotide
ccguugcgccuccugcagc

SEQ ID NO: 762995 - RNA, 19 nt, Artificial Sequence
  Description of Artificial Sequence: Synthetic oligonucleotide
gggucaucagagguuaauu

SEQ ID NO: 762996 - RNA, 19 nt, Artificial Sequence
  Description of Artificial Sequence: Synthetic oligonucleotide
cuggacacggggccaucgu

SEQ ID NO: 762997 - RNA, 19 nt, Artificial Sequence
  Description of Artificial Sequence: Synthetic oligonucleotide
gguuggucgcuugucuccu

SEQ ID NO: 762998 - RNA, 19 nt, Artificial Sequence
  Description of Artificial Sequence: Synthetic oligonucleotide
gguuaugggacagcaccuu

SEQ ID NO: 762999 - RNA, 19 nt, Artificial Sequence
  Description of Artificial Sequence: Synthetic oligonucleotide
ccuucgcgguccugaagca

SEQ ID NO: 763000 - RNA, 19 nt, Artificial Sequence
  Description of Artificial Sequence: Synthetic oligonucleotide
acggggccaucgucaucau

SEQ ID NO: 763001 - RNA, 19 nt, Artificial Sequence
  Description of Artificial Sequence: Synthetic oligonucleotide
ggauugcggucuggauggc

SEQ ID NO: 763002 - RNA, 19 nt, Artificial Sequence
  Description of Artificial Sequence: Synthetic oligonucleotide
gccuggcgcaacuuccucu

SEQ ID NO: 763003 - RNA, 19 nt, Artificial Sequence
  Description of Artificial Sequence: Synthetic oligonucleotide
ccgcccaguuccuccucag

SEQ ID NO: 763004 - RNA, 19 nt, Artificial Sequence
  Description of Artificial Sequence: Synthetic oligonucleotide
cgcucgcucgauguagcgc

SEQ ID NO: 763005 - RNA, 19 nt, Artificial Sequence
  Description of Artificial Sequence: Synthetic oligonucleotide
cugaggcgcucaucucgua

SEQ ID NO: 763006 - RNA, 19 nt, Artificial Sequence
  Description of Artificial Sequence: Synthetic oligonucleotide
cacgccccgcaggcagcgg

SEQ ID NO: 763007 - RNA, 19 nt, Artificial Sequence
  Description of Artificial Sequence: Synthetic oligonucleotide
ccagcucggcgaugcgcug

SEQ ID NO: 763008 - RNA, 19 nt, Artificial Sequence
  Description of Artificial Sequence: Synthetic oligonucleotide
ggggucaucagagguuaau

SEQ ID NO: 763009 - RNA, 19 nt, Artificial Sequence
  Description of Artificial Sequence: Synthetic oligonucleotide
ggugcuggauccaguuuau

SEQ ID NO: 763010 - RNA, 19 nt, Artificial Sequence
  Description of Artificial Sequence: Synthetic oligonucleotide
ccagcgcuccgcccaguuc

SEQ ID NO: 763011 - RNA, 19 nt, Artificial Sequence
  Description of Artificial Sequence: Synthetic oligonucleotide
gcugcgcucgcucgaugua

SEQ ID NO: 763012 - RNA, 19 nt, Artificial Sequence
  Description of Artificial Sequence: Synthetic oligonucleotide
cguacgugcggcucgcugu

SEQ ID NO: 763013 - RNA, 19 nt, Artificial Sequence
  Description of Artificial Sequence: Synthetic oligonucleotide
ggaagccggugaaggagcu

SEQ ID NO: 763014 - RNA, 19 nt, Artificial Sequence
  Description of Artificial Sequence: Synthetic oligonucleotide
cggccagaguugaagagcu

SEQ ID NO: 763015 - RNA, 19 nt, Artificial Sequence
  Description of Artificial Sequence: Synthetic oligonucleotide
gcaccuugaguugggacuu

SEQ ID NO: 763016 - RNA, 19 nt, Artificial Sequence
  Description of Artificial Sequence: Synthetic oligonucleotide
ggccgucagcguccagcac

SEQ ID NO: 763017 - RNA, 19 nt, Artificial Sequence
  Description of Artificial Sequence: Synthetic oligonucleotide
ccuuggcugcccggcgccg

SEQ ID NO: 763018 - RNA, 19 nt, Artificial Sequence
  Description of Artificial Sequence: Synthetic oligonucleotide
gcgcuggcgcgugucugag

SEQ ID NO: 763019 - RNA, 19 nt, Artificial Sequence
  Description of Artificial Sequence: Synthetic oligonucleotide
cccgccguuucugcuucag

SEQ ID NO: 763020 - RNA, 19 nt, Artificial Sequence
  Description of Artificial Sequence: Synthetic oligonucleotide
agcguccagcacagcucau

SEQ ID NO: 763021 - RNA, 19 nt, Artificial Sequence
  Description of Artificial Sequence: Synthetic oligonucleotide
ccgcucggccugccguugc

SEQ ID NO: 763022 - RNA, 19 nt, Artificial Sequence
  Description of Artificial Sequence: Synthetic oligonucleotide
gccgcucggccugccguug

SEQ ID NO: 763023 - RNA, 19 nt, Artificial Sequence
  Description of Artificial Sequence: Synthetic oligonucleotide
ccguccacuccuggcgcug

SEQ ID NO: 763024 - RNA, 19 nt, Artificial Sequence
  Description of Artificial Sequence: Synthetic oligonucleotide
cagagacggaaggcauccu

SEQ ID NO: 763025 - RNA, 19 nt, Artificial Sequence
  Description of Artificial Sequence: Synthetic oligonucleotide
ccucaucccgccuggcuuu

SEQ ID NO: 763026 - RNA, 19 nt, Artificial Sequence
  Description of Artificial Sequence: Synthetic oligonucleotide
cggcgaugcgcugccguug

SEQ ID NO: 763027 - RNA, 19 nt, Artificial Sequence
  Description of Artificial Sequence: Synthetic oligonucleotide
gcugggcgugcugcaggga

SEQ ID NO: 763028 - RNA, 19 nt, Artificial Sequence
  Description of Artificial Sequence: Synthetic oligonucleotide
ggagucccggcgggcaagu

SEQ ID NO: 763029 - RNA, 19 nt, Artificial Sequence
  Description of Artificial Sequence: Synthetic oligonucleotide
gcgcgugucugaggcgcuc

SEQ ID NO: 763030 - RNA, 19 nt, Artificial Sequence
  Description of Artificial Sequence: Synthetic oligonucleotide
cucggccugcagccggauu

SEQ ID NO: 763031 - RNA, 19 nt, Artificial Sequence
  Description of Artificial Sequence: Synthetic oligonucleotide
ccacguccagugcggugaa

SEQ ID NO: 763032 - RNA, 19 nt, Artificial Sequence
  Description of Artificial Sequence: Synthetic oligonucleotide
gcgugucugaggcgcucau

SEQ ID NO: 763033 - RNA, 19 nt, Artificial Sequence
  Description of Artificial Sequence: Synthetic oligonucleotide
cccgcaggcagcggccaga

SEQ ID NO: 763034 - RNA, 19 nt, Artificial Sequence
  Description of Artificial Sequence: Synthetic oligonucleotide
cucguacgugcggcucgcu

SEQ ID NO: 763035 - RNA, 19 nt, Artificial Sequence
  Description of Artificial Sequence: Synthetic oligonucleotide
caaccucgucgggaaccau

SEQ ID NO: 763036 - RNA, 19 nt, Artificial Sequence
  Description of Artificial Sequence: Synthetic oligonucleotide
cgcgugucugaggcgcuca

SEQ ID NO: 763037 - RNA, 19 nt, Artificial Sequence
  Description of Artificial Sequence: Synthetic oligonucleotide
gcgggcaaguggagagggu

SEQ ID NO: 763038 - RNA, 19 nt, Artificial Sequence
  Description of Artificial Sequence: Synthetic oligonucleotide
cgggcaaguggagaggguu

SEQ ID NO: 763039 - RNA, 19 nt, Artificial Sequence
  Description of Artificial Sequence: Synthetic oligonucleotide
cugcggcggcgcucuuccu

SEQ ID NO: 763040 - RNA, 19 nt, Artificial Sequence
  Description of Artificial Sequence: Synthetic oligonucleotide
ggcgcgugucugaggcgcu

SEQ ID NO: 763041 - RNA, 19 nt, Artificial Sequence
  Description of Artificial Sequence: Synthetic oligonucleotide
ccucgucgggaaccaugau

SEQ ID NO: 763042 - RNA, 19 nt, Artificial Sequence
  Description of Artificial Sequence: Synthetic oligonucleotide
cccagugggucaggcguuu

SEQ ID NO: 763043 - RNA, 19 nt, Artificial Sequence
  Description of Artificial Sequence: Synthetic oligonucleotide
aaugaagaaagcuggaugg

SEQ ID NO: 763044 - RNA, 19 nt, Artificial Sequence
  Description of Artificial Sequence: Synthetic oligonucleotide
uuuauaacaaguucaauga

SEQ ID NO: 763045 - RNA, 19 nt, Artificial Sequence
  Description of Artificial Sequence: Synthetic oligonucleotide
uuaaagacgugccacaagg

SEQ ID NO: 763046 - RNA, 19 nt, Artificial Sequence
  Description of Artificial Sequence: Synthetic oligonucleotide
ucuaauuccacccauacuc

SEQ ID NO: 763047 - RNA, 19 nt, Artificial Sequence
  Description of Artificial Sequence: Synthetic oligonucleotide
guaaaguuuauuuuggugc

SEQ ID NO: 763048 - RNA, 19 nt, Artificial Sequence
  Description of Artificial Sequence: Synthetic oligonucleotide
uuuacuguauuucaaaggu

SEQ ID NO: 763049 - RNA, 19 nt, Artificial Sequence
  Description of Artificial Sequence: Synthetic oligonucleotide
uauaacaaguucaaugaag

SEQ ID NO: 763050 - RNA, 19 nt, Artificial Sequence
  Description of Artificial Sequence: Synthetic oligonucleotide
auucggacuagacacaucc

SEQ ID NO: 763051 - RNA, 19 nt, Artificial Sequence
  Description of Artificial Sequence: Synthetic oligonucleotide
aucuugacacauuagaaac

SEQ ID NO: 763052 - RNA, 19 nt, Artificial Sequence
  Description of Artificial Sequence: Synthetic oligonucleotide
cuagguuucuaaaagaccc

SEQ ID NO: 763053 - RNA, 19 nt, Artificial Sequence
  Description of Artificial Sequence: Synthetic oligonucleotide
caaagcaucgcaaauaaag

SEQ ID NO: 763054 - RNA, 19 nt, Artificial Sequence
  Description of Artificial Sequence: Synthetic oligonucleotide
uuaaucagcaaauuccugc

SEQ ID NO: 763055 - RNA, 19 nt, Artificial Sequence
  Description of Artificial Sequence: Synthetic oligonucleotide
aaagacgugccacaaggac

SEQ ID NO: 763056 - RNA, 19 nt, Artificial Sequence
  Description of Artificial Sequence: Synthetic oligonucleotide
uauuggaacccacugagag

SEQ ID NO: 763057 - RNA, 19 nt, Artificial Sequence
  Description of Artificial Sequence: Synthetic oligonucleotide
aaagcaucgcaaauaaagc

SEQ ID NO: 763058 - RNA, 19 nt, Artificial Sequence
  Description of Artificial Sequence: Synthetic oligonucleotide
agaaacucaacacaaagga

SEQ ID NO: 763059 - RNA, 19 nt, Artificial Sequence
  Description of Artificial Sequence: Synthetic oligonucleotide
ucaaagacccucaucauug

SEQ ID NO: 763060 - RNA, 19 nt, Artificial Sequence
  Description of Artificial Sequence: Synthetic oligonucleotide
aaaaccuuccaagagauga

SEQ ID NO: 763061 - RNA, 19 nt, Artificial Sequence
  Description of Artificial Sequence: Synthetic oligonucleotide
cuucauucggacuagacac

SEQ ID NO: 763062 - RNA, 19 nt, Artificial Sequence
  Description of Artificial Sequence: Synthetic oligonucleotide
uuuuagguuacacacagua

SEQ ID NO: 763063 - RNA, 19 nt, Artificial Sequence
  Description of Artificial Sequence: Synthetic oligonucleotide
uuaccuagguuucuaaaag

SEQ ID NO: 763064 - RNA, 19 nt, Artificial Sequence
  Description of Artificial Sequence: Synthetic oligonucleotide
uguaaugaguuacaaggug

SEQ ID NO: 763065 - RNA, 19 nt, Artificial Sequence
  Description of Artificial Sequence: Synthetic oligonucleotide
uauaugacucauuuuauaa

SEQ ID NO: 763066 - RNA, 19 nt, Artificial Sequence
  Description of Artificial Sequence: Synthetic oligonucleotide
auuaucuucgugaagggac

SEQ ID NO: 763067 - RNA, 19 nt, Artificial Sequence
  Description of Artificial Sequence: Synthetic oligonucleotide
aguuauaagaaaccaugag

SEQ ID NO: 763068 - RNA, 19 nt, Artificial Sequence
  Description of Artificial Sequence: Synthetic oligonucleotide
ugguuuauguaaauagugc

SEQ ID NO: 763069 - RNA, 19 nt, Artificial Sequence
  Description of Artificial Sequence: Synthetic oligonucleotide
ucauaucccaagauugacg

SEQ ID NO: 763070 - RNA, 19 nt, Artificial Sequence
  Description of Artificial Sequence: Synthetic oligonucleotide
cauaucccaagauugacgc

SEQ ID NO: 763071 - RNA, 19 nt, Artificial Sequence
  Description of Artificial Sequence: Synthetic oligonucleotide
aguaaaguuuauuuuggug

SEQ ID NO: 763072 - RNA, 19 nt, Artificial Sequence
  Description of Artificial Sequence: Synthetic oligonucleotide
aaauggacuaugauccggc

SEQ ID NO: 763073 - RNA, 19 nt, Artificial Sequence
  Description of Artificial Sequence: Synthetic oligonucleotide
gacgcuucacuccagagcc

SEQ ID NO: 763074 - RNA, 19 nt, Artificial Sequence
  Description of Artificial Sequence: Synthetic oligonucleotide
uccaucuugacacauuaga

SEQ ID NO: 763075 - RNA, 19 nt, Artificial Sequence
  Description of Artificial Sequence: Synthetic oligonucleotide
agguauugcaucuguuucc

SEQ ID NO: 763076 - RNA, 19 nt, Artificial Sequence
  Description of Artificial Sequence: Synthetic oligonucleotide
aauguaucgggcaucugac

SEQ ID NO: 763077 - RNA, 19 nt, Artificial Sequence
  Description of Artificial Sequence: Synthetic oligonucleotide
ucuaccucacgguauagag

SEQ ID NO: 763078 - RNA, 19 nt, Artificial Sequence
  Description of Artificial Sequence: Synthetic oligonucleotide
aagcaucgcaaauaaagca

SEQ ID NO: 763079 - RNA, 19 nt, Artificial Sequence
  Description of Artificial Sequence: Synthetic oligonucleotide
uauagaguuucuuuauaug

SEQ ID NO: 763080 - RNA, 19 nt, Artificial Sequence
  Description of Artificial Sequence: Synthetic oligonucleotide
aagacgugccacaaggacc

SEQ ID NO: 763081 - RNA, 19 nt, Artificial Sequence
  Description of Artificial Sequence: Synthetic oligonucleotide
aaaauggacuaugauccgg

SEQ ID NO: 763082 - RNA, 19 nt, Artificial Sequence
  Description of Artificial Sequence: Synthetic oligonucleotide
uuacaagguguuauuaucu

SEQ ID NO: 763083 - RNA, 19 nt, Artificial Sequence
  Description of Artificial Sequence: Synthetic oligonucleotide
gacgcauagaaacuguuug

SEQ ID NO: 763084 - RNA, 19 nt, Artificial Sequence
  Description of Artificial Sequence: Synthetic oligonucleotide
uauaagaaaccaugaguug

SEQ ID NO: 763085 - RNA, 19 nt, Artificial Sequence
  Description of Artificial Sequence: Synthetic oligonucleotide
agaguuauaagaaaccaug

SEQ ID NO: 763086 - RNA, 19 nt, Artificial Sequence
  Description of Artificial Sequence: Synthetic oligonucleotide
uggacuaugauccggcaca

SEQ ID NO: 763087 - RNA, 19 nt, Artificial Sequence
  Description of Artificial Sequence: Synthetic oligonucleotide
acuaugauccggcacaugu

SEQ ID NO: 763088 - RNA, 19 nt, Artificial Sequence
  Description of Artificial Sequence: Synthetic oligonucleotide
uuuaccuagguuucuaaaa

SEQ ID NO: 763089 - RNA, 19 nt, Artificial Sequence
  Description of Artificial Sequence: Synthetic oligonucleotide
uaauguuuucacagaagug

SEQ ID NO: 763090 - RNA, 19 nt, Artificial Sequence
  Description of Artificial Sequence: Synthetic oligonucleotide
cuuugaguaggagacaccg

SEQ ID NO: 763091 - RNA, 19 nt, Artificial Sequence
  Description of Artificial Sequence: Synthetic oligonucleotide
uguauuuuccagaccggcc

SEQ ID NO: 763092 - RNA, 19 nt, Artificial Sequence
  Description of Artificial Sequence: Synthetic oligonucleotide
guuagucugguuccuaagg

SEQ ID NO: 763093 - RNA, 19 nt, Artificial Sequence
  Description of Artificial Sequence: Synthetic oligonucleotide
uguaucgggcaucugacac

SEQ ID NO: 763094 - RNA, 19 nt, Artificial Sequence
  Description of Artificial Sequence: Synthetic oligonucleotide
uuuauaugacucauuuuau

SEQ ID NO: 763095 - RNA, 19 nt, Artificial Sequence
  Description of Artificial Sequence: Synthetic oligonucleotide
uaaaauggacuaugauccg

SEQ ID NO: 763096 - RNA, 19 nt, Artificial Sequence
  Description of Artificial Sequence: Synthetic oligonucleotide
ugucauguaggccauguuc

SEQ ID NO: 763097 - RNA, 19 nt, Artificial Sequence
  Description of Artificial Sequence: Synthetic oligonucleotide
uuggaaagugugcuugggg

SEQ ID NO: 763098 - RNA, 19 nt, Artificial Sequence
  Description of Artificial Sequence: Synthetic oligonucleotide
ucggacuagacacauccag

SEQ ID NO: 763099 - RNA, 19 nt, Artificial Sequence
  Description of Artificial Sequence: Synthetic oligonucleotide
aaccuuccaagagaugacc

SEQ ID NO: 763100 - RNA, 19 nt, Artificial Sequence
  Description of Artificial Sequence: Synthetic oligonucleotide
cuaauuccacccauacucg

SEQ ID NO: 763101 - RNA, 19 nt, Artificial Sequence
  Description of Artificial Sequence: Synthetic oligonucleotide
caugaguugaauguaucgg

SEQ ID NO: 763102 - RNA, 19 nt, Artificial Sequence
  Description of Artificial Sequence: Synthetic oligonucleotide
auaagaaaccaugaguuga

SEQ ID NO: 763103 - RNA, 19 nt, Artificial Sequence
  Description of Artificial Sequence: Synthetic oligonucleotide
cucccgaucaccaagaaga

SEQ ID NO: 763104 - RNA, 19 nt, Artificial Sequence
  Description of Artificial Sequence: Synthetic oligonucleotide
uuuguucuaauuccaccca

SEQ ID NO: 763105 - RNA, 19 nt, Artificial Sequence
  Description of Artificial Sequence: Synthetic oligonucleotide
uuaucuucgugaagggacc

SEQ ID NO: 763106 - RNA, 19 nt, Artificial Sequence
  Description of Artificial Sequence: Synthetic oligonucleotide
uccuagauaaacaggcacu

SEQ ID NO: 763107 - RNA, 19 nt, Artificial Sequence
  Description of Artificial Sequence: Synthetic oligonucleotide
aguacgaggcuucaagaug

SEQ ID NO: 763108 - RNA, 19 nt, Artificial Sequence
  Description of Artificial Sequence: Synthetic oligonucleotide
auguauuuuccagaccggc

SEQ ID NO: 763109 - RNA, 19 nt, Artificial Sequence
  Description of Artificial Sequence: Synthetic oligonucleotide
aacaugucgggagagcgag

SEQ ID NO: 763110 - RNA, 19 nt, Artificial Sequence
  Description of Artificial Sequence: Synthetic oligonucleotide
cauuguaaguaggaguacg

SEQ ID NO: 763111 - RNA, 19 nt, Artificial Sequence
  Description of Artificial Sequence: Synthetic oligonucleotide
gacccgaguauucaacagg

SEQ ID NO: 763112 - RNA, 19 nt, Artificial Sequence
  Description of Artificial Sequence: Synthetic oligonucleotide
agcaauucaagcugccgag

SEQ ID NO: 763113 - RNA, 19 nt, Artificial Sequence
  Description of Artificial Sequence: Synthetic oligonucleotide
ucaucauuguaaguaggag

SEQ ID NO: 763114 - RNA, 19 nt, Artificial Sequence
  Description of Artificial Sequence: Synthetic oligonucleotide
aggaguacgaggcuucaag

SEQ ID NO: 763115 - RNA, 19 nt, Artificial Sequence
  Description of Artificial Sequence: Synthetic oligonucleotide
agucagucgggccagucuc

SEQ ID NO: 763116 - RNA, 19 nt, Artificial Sequence
  Description of Artificial Sequence: Synthetic oligonucleotide
uucgugaagggaccgaccu

SEQ ID NO: 763117 - RNA, 19 nt, Artificial Sequence
  Description of Artificial Sequence: Synthetic oligonucleotide
uuucuaaccuacccauccc

SEQ ID NO: 763118 - RNA, 19 nt, Artificial Sequence
  Description of Artificial Sequence: Synthetic oligonucleotide
uaaccuacccaucccuucc

SEQ ID NO: 763119 - RNA, 19 nt, Artificial Sequence
  Description of Artificial Sequence: Synthetic oligonucleotide
auaaagcaagagaaggcgg

SEQ ID NO: 763120 - RNA, 19 nt, Artificial Sequence
  Description of Artificial Sequence: Synthetic oligonucleotide
agguguuauuaucucgcac

SEQ ID NO: 763121 - RNA, 19 nt, Artificial Sequence
  Description of Artificial Sequence: Synthetic oligonucleotide
aucauaucccaagauugac

SEQ ID NO: 763122 - RNA, 19 nt, Artificial Sequence
  Description of Artificial Sequence: Synthetic oligonucleotide
gauugacgcauagaaacug

SEQ ID NO: 763123 - RNA, 19 nt, Artificial Sequence
  Description of Artificial Sequence: Synthetic oligonucleotide
uacuucaaccccauggcuc

SEQ ID NO: 763124 - RNA, 19 nt, Artificial Sequence
  Description of Artificial Sequence: Synthetic oligonucleotide
auggacuaugauccggcac

SEQ ID NO: 763125 - RNA, 19 nt, Artificial Sequence
  Description of Artificial Sequence: Synthetic oligonucleotide
ucccacauaaaauggacua

SEQ ID NO: 763126 - RNA, 19 nt, Artificial Sequence
  Description of Artificial Sequence: Synthetic oligonucleotide
uccacgucuucccacauaa

SEQ ID NO: 763127 - RNA, 19 nt, Artificial Sequence
  Description of Artificial Sequence: Synthetic oligonucleotide
aucgcaaauaaagcaagag

SEQ ID NO: 763128 - RNA, 19 nt, Artificial Sequence
  Description of Artificial Sequence: Synthetic oligonucleotide
aguuacaagguguuauuau

SEQ ID NO: 763129 - RNA, 19 nt, Artificial Sequence
  Description of Artificial Sequence: Synthetic oligonucleotide
gacaguauaugguuaucca

SEQ ID NO: 763130 - RNA, 19 nt, Artificial Sequence
  Description of Artificial Sequence: Synthetic oligonucleotide
cuucccacauaaaauggac

SEQ ID NO: 763131 - RNA, 19 nt, Artificial Sequence
  Description of Artificial Sequence: Synthetic oligonucleotide
uguuagucugguuccuaag

SEQ ID NO: 763132 - RNA, 19 nt, Artificial Sequence
  Description of Artificial Sequence: Synthetic oligonucleotide
uucuaaccuacccaucccu

SEQ ID NO: 763133 - RNA, 19 nt, Artificial Sequence
  Description of Artificial Sequence: Synthetic oligonucleotide
cauguauuuuccagaccgg

SEQ ID NO: 763134 - RNA, 19 nt, Artificial Sequence
  Description of Artificial Sequence: Synthetic oligonucleotide
gagggagggaacaugucgg

SEQ ID NO: 763135 - RNA, 19 nt, Artificial Sequence
  Description of Artificial Sequence: Synthetic oligonucleotide
auaccaguuggcuauugga

SEQ ID NO: 763136 - RNA, 19 nt, Artificial Sequence
  Description of Artificial Sequence: Synthetic oligonucleotide
agacgugccacaaggaccg

SEQ ID NO: 763137 - RNA, 19 nt, Artificial Sequence
  Description of Artificial Sequence: Synthetic oligonucleotide
gauaguaggaagcuuacuu

SEQ ID NO: 763138 - RNA, 19 nt, Artificial Sequence
  Description of Artificial Sequence: Synthetic oligonucleotide
uaccaguuggcuauuggaa

SEQ ID NO: 763139 - RNA, 19 nt, Artificial Sequence
  Description of Artificial Sequence: Synthetic oligonucleotide
accggcuuuaccuagguuu

SEQ ID NO: 763140 - RNA, 19 nt, Artificial Sequence
  Description of Artificial Sequence: Synthetic oligonucleotide
uuuuccaccagagggcgcc

SEQ ID NO: 763141 - RNA, 19 nt, Artificial Sequence
  Description of Artificial Sequence: Synthetic oligonucleotide
acaguauaugguuauccau

SEQ ID NO: 763142 - RNA, 19 nt, Artificial Sequence
  Description of Artificial Sequence: Synthetic oligonucleotide
accaaagcaucgcaaauaa

SEQ ID NO: 763143 - RNA, 19 nt, Artificial Sequence
  Description of Artificial Sequence: Synthetic oligonucleotide
aaaagucaguucaggccac

SEQ ID NO: 763144 - RNA, 19 nt, Artificial Sequence
  Description of Artificial Sequence: Synthetic oligonucleotide
aauuccacccauacucgag

SEQ ID NO: 763145 - RNA, 19 nt, Artificial Sequence
  Description of Artificial Sequence: Synthetic oligonucleotide
gaagcuuacuuguggugug

SEQ ID NO: 763146 - RNA, 19 nt, Artificial Sequence
  Description of Artificial Sequence: Synthetic oligonucleotide
accgauaccaguuggcuau

SEQ ID NO: 763147 - RNA, 19 nt, Artificial Sequence
  Description of Artificial Sequence: Synthetic oligonucleotide
uggcuauuggaacccacug

SEQ ID NO: 763148 - RNA, 19 nt, Artificial Sequence
  Description of Artificial Sequence: Synthetic oligonucleotide
uaaagacgugccacaagga

SEQ ID NO: 763149 - RNA, 19 nt, Artificial Sequence
  Description of Artificial Sequence: Synthetic oligonucleotide
acuucaaccccauggcuca

SEQ ID NO: 763150 - RNA, 19 nt, Artificial Sequence
  Description of Artificial Sequence: Synthetic oligonucleotide
uaccuagguuucuaaaaga

SEQ ID NO: 763151 - RNA, 19 nt, Artificial Sequence
  Description of Artificial Sequence: Synthetic oligonucleotide
guacgaggcuucaagaugc

SEQ ID NO: 763152 - RNA, 19 nt, Artificial Sequence
  Description of Artificial Sequence: Synthetic oligonucleotide
uucccacauaaaauggacu

SEQ ID NO: 763153 - RNA, 19 nt, Artificial Sequence
  Description of Artificial Sequence: Synthetic oligonucleotide
aaggaccggcuuuaccuag

SEQ ID NO: 763154 - RNA, 19 nt, Artificial Sequence
  Description of Artificial Sequence: Synthetic oligonucleotide
aauggacuaugauccggca

SEQ ID NO: 763155 - RNA, 19 nt, Artificial Sequence
  Description of Artificial Sequence: Synthetic oligonucleotide
ucuuuaggauauaggaauu

SEQ ID NO: 763156 - RNA, 19 nt, Artificial Sequence
  Description of Artificial Sequence: Synthetic oligonucleotide
aaauagugcccagauguaa

SEQ ID NO: 763157 - RNA, 19 nt, Artificial Sequence
  Description of Artificial Sequence: Synthetic oligonucleotide
aaggacccgaguauucaac

SEQ ID NO: 763158 - RNA, 19 nt, Artificial Sequence
  Description of Artificial Sequence: Synthetic oligonucleotide
uguggugugguauuuccua

SEQ ID NO: 763159 - RNA, 19 nt, Artificial Sequence
  Description of Artificial Sequence: Synthetic oligonucleotide
ucuuugaguaggagacacc

SEQ ID NO: 763160 - RNA, 19 nt, Artificial Sequence
  Description of Artificial Sequence: Synthetic oligonucleotide
ucuuggauaguaggaagcu

SEQ ID NO: 763161 - RNA, 19 nt, Artificial Sequence
  Description of Artificial Sequence: Synthetic oligonucleotide
cucguguacaugcguaggg

SEQ ID NO: 763162 - RNA, 19 nt, Artificial Sequence
  Description of Artificial Sequence: Synthetic oligonucleotide
auagugcccagauguaaug

SEQ ID NO: 763163 - RNA, 19 nt, Artificial Sequence
  Description of Artificial Sequence: Synthetic oligonucleotide
ccaagaagaaacucaacac

SEQ ID NO: 763164 - RNA, 19 nt, Artificial Sequence
  Description of Artificial Sequence: Synthetic oligonucleotide
uauuaucuucgugaaggga

SEQ ID NO: 763165 - RNA, 19 nt, Artificial Sequence
  Description of Artificial Sequence: Synthetic oligonucleotide
uuugaguaggagacaccga

SEQ ID NO: 763166 - RNA, 19 nt, Artificial Sequence
  Description of Artificial Sequence: Synthetic oligonucleotide
uggauaguaggaagcuuac

SEQ ID NO: 763167 - RNA, 19 nt, Artificial Sequence
  Description of Artificial Sequence: Synthetic oligonucleotide
agaguccuagauaaacagg

SEQ ID NO: 763168 - RNA, 19 nt, Artificial Sequence
  Description of Artificial Sequence: Synthetic oligonucleotide
uagggcugcgaucuuaauc

SEQ ID NO: 763169 - RNA, 19 nt, Artificial Sequence
  Description of Artificial Sequence: Synthetic oligonucleotide
aauagugcccagauguaau

SEQ ID NO: 763170 - RNA, 19 nt, Artificial Sequence
  Description of Artificial Sequence: Synthetic oligonucleotide
uguacaugcguagggcugc

SEQ ID NO: 763171 - RNA, 19 nt, Artificial Sequence
  Description of Artificial Sequence: Synthetic oligonucleotide
aaaggacccgaguauucaa

SEQ ID NO: 763172 - RNA, 19 nt, Artificial Sequence
  Description of Artificial Sequence: Synthetic oligonucleotide
caucuugacacauuagaaa

SEQ ID NO: 763173 - RNA, 19 nt, Artificial Sequence
  Description of Artificial Sequence: Synthetic oligonucleotide
auuggaacccacugagaga

SEQ ID NO: 763174 - RNA, 19 nt, Artificial Sequence
  Description of Artificial Sequence: Synthetic oligonucleotide
gaguugaauguaucgggca

SEQ ID NO: 763175 - RNA, 19 nt, Artificial Sequence
  Description of Artificial Sequence: Synthetic oligonucleotide
acgguauagaguuucuuua

SEQ ID NO: 763176 - RNA, 19 nt, Artificial Sequence
  Description of Artificial Sequence: Synthetic oligonucleotide
agaugacccaaacucucug

SEQ ID NO: 763177 - RNA, 19 nt, Artificial Sequence
  Description of Artificial Sequence: Synthetic oligonucleotide
cuucuuuaggauauaggaa

SEQ ID NO: 763178 - RNA, 19 nt, Artificial Sequence
  Description of Artificial Sequence: Synthetic oligonucleotide
ugcgaucuuaaucuuccau

SEQ ID NO: 763179 - RNA, 19 nt, Artificial Sequence
  Description of Artificial Sequence: Synthetic oligonucleotide
ugggaaaucuuggauagua

SEQ ID NO: 763180 - RNA, 19 nt, Artificial Sequence
  Description of Artificial Sequence: Synthetic oligonucleotide
ugagagauguuagucuggu

SEQ ID NO: 763181 - RNA, 19 nt, Artificial Sequence
  Description of Artificial Sequence: Synthetic oligonucleotide
aucucgcacucacagagga

SEQ ID NO: 763182 - RNA, 19 nt, Artificial Sequence
  Description of Artificial Sequence: Synthetic oligonucleotide
ugcuguucaaaagucaguu

SEQ ID NO: 763183 - RNA, 19 nt, Artificial Sequence
  Description of Artificial Sequence: Synthetic oligonucleotide
aagcuuacuuguggugugg

SEQ ID NO: 763184 - RNA, 19 nt, Artificial Sequence
  Description of Artificial Sequence: Synthetic oligonucleotide
uuaagagcucagauuguuu

SEQ ID NO: 763185 - RNA, 19 nt, Artificial Sequence
  Description of Artificial Sequence: Synthetic oligonucleotide
augaguuacaagguguuau

SEQ ID NO: 763186 - RNA, 19 nt, Artificial Sequence
  Description of Artificial Sequence: Synthetic oligonucleotide
ugauccggcacauguauuu

SEQ ID NO: 763187 - RNA, 19 nt, Artificial Sequence
  Description of Artificial Sequence: Synthetic oligonucleotide
agaccggccuuccugcuuc

SEQ ID NO: 763188 - RNA, 19 nt, Artificial Sequence
  Description of Artificial Sequence: Synthetic oligonucleotide
gauccccucaucauauccc

SEQ ID NO: 763189 - RNA, 19 nt, Artificial Sequence
  Description of Artificial Sequence: Synthetic oligonucleotide
ucgcuucugguuuauguaa

SEQ ID NO: 763190 - RNA, 19 nt, Artificial Sequence
  Description of Artificial Sequence: Synthetic oligonucleotide
gagacaccgauaccaguug

SEQ ID NO: 763191 - RNA, 19 nt, Artificial Sequence
  Description of Artificial Sequence: Synthetic oligonucleotide
ugaguuacaagguguuauu

SEQ ID NO: 763192 - RNA, 19 nt, Artificial Sequence
  Description of Artificial Sequence: Synthetic oligonucleotide
ccgaguauucaacaggugc

SEQ ID NO: 763193 - RNA, 19 nt, Artificial Sequence
  Description of Artificial Sequence: Synthetic oligonucleotide
ugcccagauguaaugaguu

SEQ ID NO: 763194 - RNA, 19 nt, Artificial Sequence
  Description of Artificial Sequence: Synthetic oligonucleotide
aguaggaguacgaggcuuc

SEQ ID NO: 763195 - RNA, 19 nt, Artificial Sequence
  Description of Artificial Sequence: Synthetic oligonucleotide
uuguucuaauuccacccau

SEQ ID NO: 763196 - RNA, 19 nt, Artificial Sequence
  Description of Artificial Sequence: Synthetic oligonucleotide
ggagggaacaugucgggag

SEQ ID NO: 763197 - RNA, 19 nt, Artificial Sequence
  Description of Artificial Sequence: Synthetic oligonucleotide
uaucuucgugaagggaccg

SEQ ID NO: 763198 - RNA, 19 nt, Artificial Sequence
  Description of Artificial Sequence: Synthetic oligonucleotide
gucagaagcagauccucac

SEQ ID NO: 763199 - RNA, 19 nt, Artificial Sequence
  Description of Artificial Sequence: Synthetic oligonucleotide
agcgagaugaccucccgau

SEQ ID NO: 763200 - RNA, 19 nt, Artificial Sequence
  Description of Artificial Sequence: Synthetic oligonucleotide
aggaagcuuacuuguggug

SEQ ID NO: 763201 - RNA, 19 nt, Artificial Sequence
  Description of Artificial Sequence: Synthetic oligonucleotide
agcucguguacaugcguag

SEQ ID NO: 763202 - RNA, 19 nt, Artificial Sequence
  Description of Artificial Sequence: Synthetic oligonucleotide
uccagaccggccuuccugc

SEQ ID NO: 763203 - RNA, 19 nt, Artificial Sequence
  Description of Artificial Sequence: Synthetic oligonucleotide
auaugguuauccaucuuga

SEQ ID NO: 763204 - RNA, 19 nt, Artificial Sequence
  Description of Artificial Sequence: Synthetic oligonucleotide
auuguaaguaggaguacga

SEQ ID NO: 763205 - RNA, 19 nt, Artificial Sequence
  Description of Artificial Sequence: Synthetic oligonucleotide
uguuauuaucucgcacuca

SEQ ID NO: 763206 - RNA, 19 nt, Artificial Sequence
  Description of Artificial Sequence: Synthetic oligonucleotide
ugacgcauagaaacuguuu

SEQ ID NO: 763207 - RNA, 19 nt, Artificial Sequence
  Description of Artificial Sequence: Synthetic oligonucleotide
aaaccaugaguugaaugua

SEQ ID NO: 763208 - RNA, 19 nt, Artificial Sequence
  Description of Artificial Sequence: Synthetic oligonucleotide
ccuagguuucuaaaagacc

SEQ ID NO: 763209 - RNA, 19 nt, Artificial Sequence
  Description of Artificial Sequence: Synthetic oligonucleotide
ggugcuguucaaaagucag

SEQ ID NO: 763210 - RNA, 19 nt, Artificial Sequence
  Description of Artificial Sequence: Synthetic oligonucleotide
cuaaccuacccaucccuuc

SEQ ID NO: 763211 - RNA, 19 nt, Artificial Sequence
  Description of Artificial Sequence: Synthetic oligonucleotide
caucauaucccaagauuga

SEQ ID NO: 763212 - RNA, 19 nt, Artificial Sequence
  Description of Artificial Sequence: Synthetic oligonucleotide
uaucgggcaucugacaccu

SEQ ID NO: 763213 - RNA, 19 nt, Artificial Sequence
  Description of Artificial Sequence: Synthetic oligonucleotide
guaucgggcaucugacacc

SEQ ID NO: 763214 - RNA, 19 nt, Artificial Sequence
  Description of Artificial Sequence: Synthetic oligonucleotide
gguguuauuaucucgcacu

SEQ ID NO: 763215 - RNA, 19 nt, Artificial Sequence
  Description of Artificial Sequence: Synthetic oligonucleotide
caucauuguaaguaggagu

SEQ ID NO: 763216 - RNA, 19 nt, Artificial Sequence
  Description of Artificial Sequence: Synthetic oligonucleotide
auguaaugaguuacaaggu

SEQ ID NO: 763217 - RNA, 19 nt, Artificial Sequence
  Description of Artificial Sequence: Synthetic oligonucleotide
ucguguacaugcguagggc

SEQ ID NO: 763218 - RNA, 19 nt, Artificial Sequence
  Description of Artificial Sequence: Synthetic oligonucleotide
aaggcggcuugauuuguaa

SEQ ID NO: 763219 - RNA, 19 nt, Artificial Sequence
  Description of Artificial Sequence: Synthetic oligonucleotide
guauagaguuucuuuauau

SEQ ID NO: 763220 - RNA, 19 nt, Artificial Sequence
  Description of Artificial Sequence: Synthetic oligonucleotide
aggacccgaguauucaaca

SEQ ID NO: 763221 - RNA, 19 nt, Artificial Sequence
  Description of Artificial Sequence: Synthetic oligonucleotide
agguuucuaaaagacccug

SEQ ID NO: 763222 - RNA, 19 nt, Artificial Sequence
  Description of Artificial Sequence: Synthetic oligonucleotide
agcaucgcaaauaaagcaa

SEQ ID NO: 763223 - RNA, 19 nt, Artificial Sequence
  Description of Artificial Sequence: Synthetic oligonucleotide
uuguggugugguauuuccu

SEQ ID NO: 763224 - RNA, 19 nt, Artificial Sequence
  Description of Artificial Sequence: Synthetic oligonucleotide
aggacucgcaccagcaacg

SEQ ID NO: 763225 - RNA, 19 nt, Artificial Sequence
  Description of Artificial Sequence: Synthetic oligonucleotide
ucuaaccuacccaucccuu

SEQ ID NO: 763226 - RNA, 19 nt, Artificial Sequence
  Description of Artificial Sequence: Synthetic oligonucleotide
agguuacacacaguaaagu

SEQ ID NO: 763227 - RNA, 19 nt, Artificial Sequence
  Description of Artificial Sequence: Synthetic oligonucleotide
ggcggcuugauuuguaaug

SEQ ID NO: 763228 - RNA, 19 nt, Artificial Sequence
  Description of Artificial Sequence: Synthetic oligonucleotide
ggcaagacuguucccaccc

SEQ ID NO: 763229 - RNA, 19 nt, Artificial Sequence
  Description of Artificial Sequence: Synthetic oligonucleotide
ugaggggccccuuucuaac

SEQ ID NO: 763230 - RNA, 19 nt, Artificial Sequence
  Description of Artificial Sequence: Synthetic oligonucleotide
accaugaguugaauguauc

SEQ ID NO: 763231 - RNA, 19 nt, Artificial Sequence
  Description of Artificial Sequence: Synthetic oligonucleotide
gaucaccaagaagaaacuc

SEQ ID NO: 763232 - RNA, 19 nt, Artificial Sequence
  Description of Artificial Sequence: Synthetic oligonucleotide
gguuucuaaaagacccugg

SEQ ID NO: 763233 - RNA, 19 nt, Artificial Sequence
  Description of Artificial Sequence: Synthetic oligonucleotide
ggacaguauaugguuaucc

SEQ ID NO: 763234 - RNA, 19 nt, Artificial Sequence
  Description of Artificial Sequence: Synthetic oligonucleotide
cgcaaauaaagcaagagaa

SEQ ID NO: 763235 - RNA, 19 nt, Artificial Sequence
  Description of Artificial Sequence: Synthetic oligonucleotide
ugaguaggagacaccgaua

SEQ ID NO: 763236 - RNA, 19 nt, Artificial Sequence
  Description of Artificial Sequence: Synthetic oligonucleotide
uucggacuagacacaucca

SEQ ID NO: 763237 - RNA, 19 nt, Artificial Sequence
  Description of Artificial Sequence: Synthetic oligonucleotide
ucuucgugaagggaccgac

SEQ ID NO: 763238 - RNA, 19 nt, Artificial Sequence
  Description of Artificial Sequence: Synthetic oligonucleotide
cuucgugaagggaccgacc

SEQ ID NO: 763239 - RNA, 19 nt, Artificial Sequence
  Description of Artificial Sequence: Synthetic oligonucleotide
uugacgcauagaaacuguu

SEQ ID NO: 763240 - RNA, 19 nt, Artificial Sequence
  Description of Artificial Sequence: Synthetic oligonucleotide
cuaaggacucgcaccagca

SEQ ID NO: 763241 - RNA, 19 nt, Artificial Sequence
  Description of Artificial Sequence: Synthetic oligonucleotide
aaccuacccaucccuuccu

SEQ ID NO: 763242 - RNA, 19 nt, Artificial Sequence
  Description of Artificial Sequence: Synthetic oligonucleotide
auguuagucugguuccuaa

SEQ ID NO: 763243 - RNA, 19 nt, Artificial Sequence
  Description of Artificial Sequence: Synthetic oligonucleotide
augcguagggcugcgaucu

SEQ ID NO: 763244 - RNA, 19 nt, Artificial Sequence
  Description of Artificial Sequence: Synthetic oligonucleotide
caagauugacgcauagaaa

SEQ ID NO: 763245 - RNA, 19 nt, Artificial Sequence
  Description of Artificial Sequence: Synthetic oligonucleotide
ucgcacucacagaggacgc

SEQ ID NO: 763246 - RNA, 19 nt, Artificial Sequence
  Description of Artificial Sequence: Synthetic oligonucleotide
caucagaaaggauccccuc

SEQ ID NO: 763247 - RNA, 19 nt, Artificial Sequence
  Description of Artificial Sequence: Synthetic oligonucleotide
ggauccccucaucauaucc

SEQ ID NO: 763248 - RNA, 19 nt, Artificial Sequence
  Description of Artificial Sequence: Synthetic oligonucleotide
aguaggaagcuuacuugug

SEQ ID NO: 763249 - RNA, 19 nt, Artificial Sequence
  Description of Artificial Sequence: Synthetic oligonucleotide
gaucuuaaucuuccauuua

SEQ ID NO: 763250 - RNA, 19 nt, Artificial Sequence
  Description of Artificial Sequence: Synthetic oligonucleotide
auugacgcauagaaacugu

SEQ ID NO: 763251 - RNA, 19 nt, Artificial Sequence
  Description of Artificial Sequence: Synthetic oligonucleotide
cauacucgagacugguuca

SEQ ID NO: 763252 - RNA, 19 nt, Artificial Sequence
  Description of Artificial Sequence: Synthetic oligonucleotide
gcuucauucggacuagaca

SEQ ID NO: 763253 - RNA, 19 nt, Artificial Sequence
  Description of Artificial Sequence: Synthetic oligonucleotide
ccauacucgagacugguuc

SEQ ID NO: 763254 - RNA, 19 nt, Artificial Sequence
  Description of Artificial Sequence: Synthetic oligonucleotide
aacccacugagagauguua

SEQ ID NO: 763255 - RNA, 19 nt, Artificial Sequence
  Description of Artificial Sequence: Synthetic oligonucleotide
cuuuaccuagguuucuaaa

SEQ ID NO: 763256 - RNA, 19 nt, Artificial Sequence
  Description of Artificial Sequence: Synthetic oligonucleotide
auaucccaagauugacgca

SEQ ID NO: 763257 - RNA, 19 nt, Artificial Sequence
  Description of Artificial Sequence: Synthetic oligonucleotide
uccacccauacucgagacu

SEQ ID NO: 763258 - RNA, 19 nt, Artificial Sequence
  Description of Artificial Sequence: Synthetic oligonucleotide
acaugcguagggcugcgau

SEQ ID NO: 763259 - RNA, 19 nt, Artificial Sequence
  Description of Artificial Sequence: Synthetic oligonucleotide
cacaaggaccggcuuuacc

SEQ ID NO: 763260 - RNA, 19 nt, Artificial Sequence
  Description of Artificial Sequence: Synthetic oligonucleotide
auguaucgggcaucugaca

SEQ ID NO: 763261 - RNA, 19 nt, Artificial Sequence
  Description of Artificial Sequence: Synthetic oligonucleotide
uggcauacuucacuccauu

SEQ ID NO: 763262 - RNA, 19 nt, Artificial Sequence
  Description of Artificial Sequence: Synthetic oligonucleotide
gcaucgcaaauaaagcaag

SEQ ID NO: 763263 - RNA, 19 nt, Artificial Sequence
  Description of Artificial Sequence: Synthetic oligonucleotide
auacuucacuccauuaaaa

SEQ ID NO: 763264 - RNA, 19 nt, Artificial Sequence
  Description of Artificial Sequence: Synthetic oligonucleotide
acccgaguauucaacaggu

SEQ ID NO: 763265 - RNA, 19 nt, Artificial Sequence
  Description of Artificial Sequence: Synthetic oligonucleotide
cuagauaaacaggcacuuc

SEQ ID NO: 763266 - RNA, 19 nt, Artificial Sequence
  Description of Artificial Sequence: Synthetic oligonucleotide
acaccgauaccaguuggcu

SEQ ID NO: 763267 - RNA, 19 nt, Artificial Sequence
  Description of Artificial Sequence: Synthetic oligonucleotide
caucgcaaauaaagcaaga

SEQ ID NO: 763268 - RNA, 19 nt, Artificial Sequence
  Description of Artificial Sequence: Synthetic oligonucleotide
accgaccuucuccucaaca

SEQ ID NO: 763269 - RNA, 19 nt, Artificial Sequence
  Description of Artificial Sequence: Synthetic oligonucleotide
gaaaggauccccucaucau

SEQ ID NO: 763270 - RNA, 19 nt, Artificial Sequence
  Description of Artificial Sequence: Synthetic oligonucleotide
gagggcgccaucucacuuc

SEQ ID NO: 763271 - RNA, 19 nt, Artificial Sequence
  Description of Artificial Sequence: Synthetic oligonucleotide
caugcguagggcugcgauc

SEQ ID NO: 763272 - RNA, 19 nt, Artificial Sequence
  Description of Artificial Sequence: Synthetic oligonucleotide
gaggggccccuuucuaacc

SEQ ID NO: 763273 - RNA, 19 nt, Artificial Sequence
  Description of Artificial Sequence: Synthetic oligonucleotide
ugguuccuaaggacucgca

SEQ ID NO: 763274 - RNA, 19 nt, Artificial Sequence
  Description of Artificial Sequence: Synthetic oligonucleotide
agucgggccagucucucaa

SEQ ID NO: 763275 - RNA, 19 nt, Artificial Sequence
  Description of Artificial Sequence: Synthetic oligonucleotide
accuacccaucccuuccuc

SEQ ID NO: 763276 - RNA, 19 nt, Artificial Sequence
  Description of Artificial Sequence: Synthetic oligonucleotide
ucgggagagcgagaugacc

SEQ ID NO: 763277 - RNA, 19 nt, Artificial Sequence
  Description of Artificial Sequence: Synthetic oligonucleotide
uuggugcauggcauacuuc

SEQ ID NO: 763278 - RNA, 19 nt, Artificial Sequence
  Description of Artificial Sequence: Synthetic oligonucleotide
ggacccgaguauucaacag

SEQ ID NO: 763279 - RNA, 19 nt, Artificial Sequence
  Description of Artificial Sequence: Synthetic oligonucleotide
aagcucucagucacaugug

SEQ ID NO: 763280 - RNA, 19 nt, Artificial Sequence
  Description of Artificial Sequence: Synthetic oligonucleotide
cacccauacucgagacugg

SEQ ID NO: 763281 - RNA, 19 nt, Artificial Sequence
  Description of Artificial Sequence: Synthetic oligonucleotide
gaguacgaggcuucaagau

SEQ ID NO: 763282 - RNA, 19 nt, Artificial Sequence
  Description of Artificial Sequence: Synthetic oligonucleotide
cuauuggaacccacugaga

SEQ ID NO: 763283 - RNA, 19 nt, Artificial Sequence
  Description of Artificial Sequence: Synthetic oligonucleotide
cugucagaagcagauccuc

SEQ ID NO: 763284 - RNA, 19 nt, Artificial Sequence
  Description of Artificial Sequence: Synthetic oligonucleotide
ggaguacgaggcuucaaga

SEQ ID NO: 763285 - RNA, 19 nt, Artificial Sequence
  Description of Artificial Sequence: Synthetic oligonucleotide
gaguuacaagguguuauua

SEQ ID NO: 763286 - RNA, 19 nt, Artificial Sequence
  Description of Artificial Sequence: Synthetic oligonucleotide
ccgaccuucuccucaacag

SEQ ID NO: 763287 - RNA, 19 nt, Artificial Sequence
  Description of Artificial Sequence: Synthetic oligonucleotide
uacgaggcuucaagaugcu

SEQ ID NO: 763288 - RNA, 19 nt, Artificial Sequence
  Description of Artificial Sequence: Synthetic oligonucleotide
aaguggcgucuaccucacg

SEQ ID NO: 763289 - RNA, 19 nt, Artificial Sequence
  Description of Artificial Sequence: Synthetic oligonucleotide
cacugagagauguuagucu

SEQ ID NO: 763290 - RNA, 19 nt, Artificial Sequence
  Description of Artificial Sequence: Synthetic oligonucleotide
gacucgcaccagcaacgcc

SEQ ID NO: 763291 - RNA, 19 nt, Artificial Sequence
  Description of Artificial Sequence: Synthetic oligonucleotide
ccacccauacucgagacug

SEQ ID NO: 763292 - RNA, 19 nt, Artificial Sequence
  Description of Artificial Sequence: Synthetic oligonucleotide
cugguuccuaaggacucgc

SEQ ID NO: 763293 - RNA, 19 nt, Artificial Sequence
  Description of Artificial Sequence: Synthetic oligonucleotide
gaaguggcgucuaccucac

SEQ ID NO: 763294 - RNA, 19 nt, Artificial Sequence
  Description of Artificial Sequence: Synthetic oligonucleotide
uugucauguaggccauguu

SEQ ID NO: 763295 - RNA, 19 nt, Artificial Sequence
  Description of Artificial Sequence: Synthetic oligonucleotide
gaacaugucgggagagcga

SEQ ID NO: 763296 - RNA, 19 nt, Artificial Sequence
  Description of Artificial Sequence: Synthetic oligonucleotide
cucgcuucugguuuaugua

SEQ ID NO: 763297 - RNA, 19 nt, Artificial Sequence
  Description of Artificial Sequence: Synthetic oligonucleotide
caucucacuucuccuguca

SEQ ID NO: 763298 - RNA, 19 nt, Artificial Sequence
  Description of Artificial Sequence: Synthetic oligonucleotide
cuuacuuguggugugguau

SEQ ID NO: 763299 - RNA, 19 nt, Artificial Sequence
  Description of Artificial Sequence: Synthetic oligonucleotide
cagaguuauaagaaaccau

SEQ ID NO: 763300 - RNA, 19 nt, Artificial Sequence
  Description of Artificial Sequence: Synthetic oligonucleotide
ggcuauuggaacccacuga

SEQ ID NO: 763301 - RNA, 19 nt, Artificial Sequence
  Description of Artificial Sequence: Synthetic oligonucleotide
cauucggacuagacacauc

SEQ ID NO: 763302 - RNA, 19 nt, Artificial Sequence
  Description of Artificial Sequence: Synthetic oligonucleotide
gagcgagaugaccucccga

SEQ ID NO: 763303 - RNA, 19 nt, Artificial Sequence
  Description of Artificial Sequence: Synthetic oligonucleotide
cuaugauccggcacaugua

SEQ ID NO: 763304 - RNA, 19 nt, Artificial Sequence
  Description of Artificial Sequence: Synthetic oligonucleotide
uccuaaggacucgcaccag

SEQ ID NO: 763305 - RNA, 19 nt, Artificial Sequence
  Description of Artificial Sequence: Synthetic oligonucleotide
aggaccggcuuuaccuagg

SEQ ID NO: 763306 - RNA, 19 nt, Artificial Sequence
  Description of Artificial Sequence: Synthetic oligonucleotide
cacgguauagaguuucuuu

SEQ ID NO: 763307 - RNA, 19 nt, Artificial Sequence
  Description of Artificial Sequence: Synthetic oligonucleotide
guacaugcguagggcugcg

SEQ ID NO: 763308 - RNA, 19 nt, Artificial Sequence
  Description of Artificial Sequence: Synthetic oligonucleotide
agaaggcggcuugauuugu

SEQ ID NO: 763309 - RNA, 19 nt, Artificial Sequence
  Description of Artificial Sequence: Synthetic oligonucleotide
uccccucaucauaucccaa

SEQ ID NO: 763310 - RNA, 19 nt, Artificial Sequence
  Description of Artificial Sequence: Synthetic oligonucleotide
caaccccauggcucauagc

SEQ ID NO: 763311 - RNA, 19 nt, Artificial Sequence
  Description of Artificial Sequence: Synthetic oligonucleotide
ggaagcuuacuuguggugu

SEQ ID NO: 763312 - RNA, 19 nt, Artificial Sequence
  Description of Artificial Sequence: Synthetic oligonucleotide
gcucguguacaugcguagg

SEQ ID NO: 763313 - RNA, 19 nt, Artificial Sequence
  Description of Artificial Sequence: Synthetic oligonucleotide
gacuaugauccggcacaug

SEQ ID NO: 763314 - RNA, 19 nt, Artificial Sequence
  Description of Artificial Sequence: Synthetic oligonucleotide
agagggcgccaucucacuu

SEQ ID NO: 763315 - RNA, 19 nt, Artificial Sequence
  Description of Artificial Sequence: Synthetic oligonucleotide
augucgggagagcgagaug

SEQ ID NO: 763316 - RNA, 19 nt, Artificial Sequence
  Description of Artificial Sequence: Synthetic oligonucleotide
auacucgagacugguucau

SEQ ID NO: 763317 - RNA, 19 nt, Artificial Sequence
  Description of Artificial Sequence: Synthetic oligonucleotide
guauugcaucuguuuccuc

SEQ ID NO: 763318 - RNA, 19 nt, Artificial Sequence
  Description of Artificial Sequence: Synthetic oligonucleotide
ggagagcgagaugaccucc

SEQ ID NO: 763319 - RNA, 19 nt, Artificial Sequence
  Description of Artificial Sequence: Synthetic oligonucleotide
ccggcuuuaccuagguuuc

SEQ ID NO: 763320 - RNA, 19 nt, Artificial Sequence
  Description of Artificial Sequence: Synthetic oligonucleotide
aucuucgugaagggaccga

SEQ ID NO: 763321 - RNA, 19 nt, Artificial Sequence
  Description of Artificial Sequence: Synthetic oligonucleotide
ccauaacucugccucgcug

SEQ ID NO: 763322 - RNA, 19 nt, Artificial Sequence
  Description of Artificial Sequence: Synthetic oligonucleotide
cuacuucaaccccauggcu

SEQ ID NO: 763323 - RNA, 19 nt, Artificial Sequence
  Description of Artificial Sequence: Synthetic oligonucleotide
cuuaagagcucagauuguu

SEQ ID NO: 763324 - RNA, 19 nt, Artificial Sequence
  Description of Artificial Sequence: Synthetic oligonucleotide
accccauggcucauagcug

SEQ ID NO: 763325 - RNA, 19 nt, Artificial Sequence
  Description of Artificial Sequence: Synthetic oligonucleotide
uaggaguacgaggcuucaa

SEQ ID NO: 763326 - RNA, 19 nt, Artificial Sequence
  Description of Artificial Sequence: Synthetic oligonucleotide
gguauugcaucuguuuccu

SEQ ID NO: 763327 - RNA, 19 nt, Artificial Sequence
  Description of Artificial Sequence: Synthetic oligonucleotide
gcaagacuguucccacccc

SEQ ID NO: 763328 - RNA, 19 nt, Artificial Sequence
  Description of Artificial Sequence: Synthetic oligonucleotide
gggaccgaccuucuccuca

SEQ ID NO: 763329 - RNA, 19 nt, Artificial Sequence
  Description of Artificial Sequence: Synthetic oligonucleotide
gcuuuaccuagguuucuaa

SEQ ID NO: 763330 - RNA, 19 nt, Artificial Sequence
  Description of Artificial Sequence: Synthetic oligonucleotide
gcugccgagggucuucaca

SEQ ID NO: 763331 - RNA, 19 nt, Artificial Sequence
  Description of Artificial Sequence: Synthetic oligonucleotide
ugccucgcugcuccacguc

SEQ ID NO: 763332 - RNA, 19 nt, Artificial Sequence
  Description of Artificial Sequence: Synthetic oligonucleotide
guaggaguacgaggcuuca

SEQ ID NO: 763333 - RNA, 19 nt, Artificial Sequence
  Description of Artificial Sequence: Synthetic oligonucleotide
gggcaagacuguucccacc

SEQ ID NO: 763334 - RNA, 19 nt, Artificial Sequence
  Description of Artificial Sequence: Synthetic oligonucleotide
gcgaucuuaaucuuccauu

SEQ ID NO: 763335 - RNA, 19 nt, Artificial Sequence
  Description of Artificial Sequence: Synthetic oligonucleotide
gcuuggggcuucucuugag

SEQ ID NO: 763336 - RNA, 19 nt, Artificial Sequence
  Description of Artificial Sequence: Synthetic oligonucleotide
gggagagcgagaugaccuc

SEQ ID NO: 763337 - RNA, 19 nt, Artificial Sequence
  Description of Artificial Sequence: Synthetic oligonucleotide
ccucacgguauagaguuuc

SEQ ID NO: 763338 - RNA, 19 nt, Artificial Sequence
  Description of Artificial Sequence: Synthetic oligonucleotide
caccgauaccaguuggcua

SEQ ID NO: 763339 - RNA, 19 nt, Artificial Sequence
  Description of Artificial Sequence: Synthetic oligonucleotide
ccucccgaucaccaagaag

SEQ ID NO: 763340 - RNA, 19 nt, Artificial Sequence
  Description of Artificial Sequence: Synthetic oligonucleotide
ggagggcaagacuguuccc

SEQ ID NO: 763341 - RNA, 19 nt, Artificial Sequence
  Description of Artificial Sequence: Synthetic oligonucleotide
guggugugguauuuccuau

SEQ ID NO: 763342 - RNA, 19 nt, Artificial Sequence
  Description of Artificial Sequence: Synthetic oligonucleotide
caaagacccucaucauugu

SEQ ID NO: 763343 - RNA, 19 nt, Artificial Sequence
  Description of Artificial Sequence: Synthetic oligonucleotide
cgugaagggaccgaccuuc

SEQ ID NO: 763344 - RNA, 19 nt, Artificial Sequence
  Description of Artificial Sequence: Synthetic oligonucleotide
uacaugcguagggcugcga

SEQ ID NO: 763345 - RNA, 19 nt, Artificial Sequence
  Description of Artificial Sequence: Synthetic oligonucleotide
agaggacgcuucacuccag

SEQ ID NO: 763346 - RNA, 19 nt, Artificial Sequence
  Description of Artificial Sequence: Synthetic oligonucleotide
accucccgaucaccaagaa

SEQ ID NO: 763347 - RNA, 19 nt, Artificial Sequence
  Description of Artificial Sequence: Synthetic oligonucleotide
gaaggcggcuugauuugua

SEQ ID NO: 763348 - RNA, 19 nt, Artificial Sequence
  Description of Artificial Sequence: Synthetic oligonucleotide
gaccgaccuucuccucaac

SEQ ID NO: 763349 - RNA, 19 nt, Artificial Sequence
  Description of Artificial Sequence: Synthetic oligonucleotide
ccacgaucaucagaaagga

SEQ ID NO: 763350 - RNA, 19 nt, Artificial Sequence
  Description of Artificial Sequence: Synthetic oligonucleotide
caugucgggagagcgagau

SEQ ID NO: 763351 - RNA, 19 nt, Artificial Sequence
  Description of Artificial Sequence: Synthetic oligonucleotide
ugccgagggucuucacauu

SEQ ID NO: 763352 - RNA, 19 nt, Artificial Sequence
  Description of Artificial Sequence: Synthetic oligonucleotide
ggggacaguauaugguuau

SEQ ID NO: 763353 - RNA, 19 nt, Artificial Sequence
  Description of Artificial Sequence: Synthetic oligonucleotide
cccgaguauucaacaggug

SEQ ID NO: 763354 - RNA, 19 nt, Artificial Sequence
  Description of Artificial Sequence: Synthetic oligonucleotide
ccccgcuugcaaccaaagc

SEQ ID NO: 763355 - RNA, 19 nt, Artificial Sequence
  Description of Artificial Sequence: Synthetic oligonucleotide
gugcuguucaaaagucagu

SEQ ID NO: 763356 - RNA, 19 nt, Artificial Sequence
  Description of Artificial Sequence: Synthetic oligonucleotide
gggacaguauaugguuauc

SEQ ID NO: 763357 - RNA, 19 nt, Artificial Sequence
  Description of Artificial Sequence: Synthetic oligonucleotide
ccaucucacuucuccuguc

SEQ ID NO: 763358 - RNA, 19 nt, Artificial Sequence
  Description of Artificial Sequence: Synthetic oligonucleotide
gcgagaugaccucccgauc

SEQ ID NO: 763359 - RNA, 19 nt, Artificial Sequence
  Description of Artificial Sequence: Synthetic oligonucleotide
ggaccgaccuucuccucaa

SEQ ID NO: 763360 - RNA, 19 nt, Artificial Sequence
  Description of Artificial Sequence: Synthetic oligonucleotide
cacaaaggacccgaguauu

SEQ ID NO: 763361 - RNA, 19 nt, Artificial Sequence
  Description of Artificial Sequence: Synthetic oligonucleotide
ugcguagggcugcgaucuu

SEQ ID NO: 763362 - RNA, 19 nt, Artificial Sequence
  Description of Artificial Sequence: Synthetic oligonucleotide
cuuggauaguaggaagcuu

SEQ ID NO: 763363 - RNA, 19 nt, Artificial Sequence
  Description of Artificial Sequence: Synthetic oligonucleotide
gcggcuugauuuguaaugu

SEQ ID NO: 763364 - RNA, 19 nt, Artificial Sequence
  Description of Artificial Sequence: Synthetic oligonucleotide
gcuuacuugugguguggua

SEQ ID NO: 763365 - RNA, 19 nt, Artificial Sequence
  Description of Artificial Sequence: Synthetic oligonucleotide
ccccauaacucugccucgc

SEQ ID NO: 763366 - RNA, 19 nt, Artificial Sequence
  Description of Artificial Sequence: Synthetic oligonucleotide
gauccggcacauguauuuu

SEQ ID NO: 763367 - RNA, 19 nt, Artificial Sequence
  Description of Artificial Sequence: Synthetic oligonucleotide
cacgaucaucagaaaggau

SEQ ID NO: 763368 - RNA, 19 nt, Artificial Sequence
  Description of Artificial Sequence: Synthetic oligonucleotide
gccccuuaagagcucagau

SEQ ID NO: 763369 - RNA, 19 nt, Artificial Sequence
  Description of Artificial Sequence: Synthetic oligonucleotide
ccaaagcaucgcaaauaaa

SEQ ID NO: 763370 - RNA, 19 nt, Artificial Sequence
  Description of Artificial Sequence: Synthetic oligonucleotide
gcaacgccauguuccucca

SEQ ID NO: 763371 - RNA, 19 nt, Artificial Sequence
  Description of Artificial Sequence: Synthetic oligonucleotide
ggauaguaggaagcuuacu

SEQ ID NO: 763372 - RNA, 19 nt, Artificial Sequence
  Description of Artificial Sequence: Synthetic oligonucleotide
cgaucuuaaucuuccauuu

SEQ ID NO: 763373 - RNA, 19 nt, Artificial Sequence
  Description of Artificial Sequence: Synthetic oligonucleotide
aggccccuuaagagcucag

SEQ ID NO: 763374 - RNA, 19 nt, Artificial Sequence
  Description of Artificial Sequence: Synthetic oligonucleotide
cagcaacgccauguuccuc

SEQ ID NO: 763375 - RNA, 19 nt, Artificial Sequence
  Description of Artificial Sequence: Synthetic oligonucleotide
ccgcuugcaaccaaagcau

SEQ ID NO: 763376 - RNA, 19 nt, Artificial Sequence
  Description of Artificial Sequence: Synthetic oligonucleotide
cccaagauugacgcauaga

SEQ ID NO: 763377 - RNA, 19 nt, Artificial Sequence
  Description of Artificial Sequence: Synthetic oligonucleotide
gccccgcuugcaaccaaag

SEQ ID NO: 763378 - RNA, 19 nt, Artificial Sequence
  Description of Artificial Sequence: Synthetic oligonucleotide
cagagggcgccaucucacu

SEQ ID NO: 763379 - RNA, 19 nt, Artificial Sequence
  Description of Artificial Sequence: Synthetic oligonucleotide
ccuagauaaacaggcacuu

SEQ ID NO: 763380 - RNA, 19 nt, Artificial Sequence
  Description of Artificial Sequence: Synthetic oligonucleotide
ccuuaagagcucagauugu

SEQ ID NO: 763381 - RNA, 19 nt, Artificial Sequence
  Description of Artificial Sequence: Synthetic oligonucleotide
cucgcaccagcaacgccau

SEQ ID NO: 763382 - RNA, 19 nt, Artificial Sequence
  Description of Artificial Sequence: Synthetic oligonucleotide
agcagucagucgggccagu

SEQ ID NO: 763383 - RNA, 19 nt, Artificial Sequence
  Description of Artificial Sequence: Synthetic oligonucleotide
ggacuuggaaagugugcuu

SEQ ID NO: 763384 - RNA, 19 nt, Artificial Sequence
  Description of Artificial Sequence: Synthetic oligonucleotide
cguguacaugcguagggcu

SEQ ID NO: 763385 - RNA, 19 nt, Artificial Sequence
  Description of Artificial Sequence: Synthetic oligonucleotide
ccacugucuuugaguagga

SEQ ID NO: 763386 - RNA, 19 nt, Artificial Sequence
  Description of Artificial Sequence: Synthetic oligonucleotide
cgcuucugguuuauguaaa

SEQ ID NO: 763387 - RNA, 19 nt, Artificial Sequence
  Description of Artificial Sequence: Synthetic oligonucleotide
ggaccggcuuuaccuaggu

SEQ ID NO: 763388 - RNA, 19 nt, Artificial Sequence
  Description of Artificial Sequence: Synthetic oligonucleotide
gugaagggaccgaccuucu

SEQ ID NO: 763389 - RNA, 19 nt, Artificial Sequence
  Description of Artificial Sequence: Synthetic oligonucleotide
accucacgguauagaguuu

SEQ ID NO: 763390 - RNA, 19 nt, Artificial Sequence
  Description of Artificial Sequence: Synthetic oligonucleotide
ccccuuaagagcucagauu

SEQ ID NO: 763391 - RNA, 19 nt, Artificial Sequence
  Description of Artificial Sequence: Synthetic oligonucleotide
ggacuaugauccggcacau

SEQ ID NO: 763392 - RNA, 19 nt, Artificial Sequence
  Description of Artificial Sequence: Synthetic oligonucleotide
cgucuaccucacgguauag

SEQ ID NO: 763393 - RNA, 19 nt, Artificial Sequence
  Description of Artificial Sequence: Synthetic oligonucleotide
cccgaucaccaagaagaaa

SEQ ID NO: 763394 - RNA, 19 nt, Artificial Sequence
  Description of Artificial Sequence: Synthetic oligonucleotide
gcguagggcugcgaucuua

SEQ ID NO: 763395 - RNA, 19 nt, Artificial Sequence
  Description of Artificial Sequence: Synthetic oligonucleotide
cagaccggccuuccugcuu

SEQ ID NO: 763396 - RNA, 19 nt, Artificial Sequence
  Description of Artificial Sequence: Synthetic oligonucleotide
cuucaaccccauggcucau

SEQ ID NO: 763397 - RNA, 19 nt, Artificial Sequence
  Description of Artificial Sequence: Synthetic oligonucleotide
auuccaaucgacuauauac

SEQ ID NO: 763398 - RNA, 19 nt, Artificial Sequence
  Description of Artificial Sequence: Synthetic oligonucleotide
agaauaaauugcuauaucg

SEQ ID NO: 763399 - RNA, 19 nt, Artificial Sequence
  Description of Artificial Sequence: Synthetic oligonucleotide
aauaaauugcuauaucgag

SEQ ID NO: 763400 - RNA, 19 nt, Artificial Sequence
  Description of Artificial Sequence: Synthetic oligonucleotide
acauuaauagcuaauaagc

SEQ ID NO: 763401 - RNA, 19 nt, Artificial Sequence
  Description of Artificial Sequence: Synthetic oligonucleotide
auagcuaauaagcagacag

SEQ ID NO: 763402 - RNA, 19 nt, Artificial Sequence
  Description of Artificial Sequence: Synthetic oligonucleotide
uguacaauuuuccaugggg

SEQ ID NO: 763403 - RNA, 19 nt, Artificial Sequence
  Description of Artificial Sequence: Synthetic oligonucleotide
acaugaauauucuaagacc

SEQ ID NO: 763404 - RNA, 19 nt, Artificial Sequence
  Description of Artificial Sequence: Synthetic oligonucleotide
ugugcaauugcauacauca

SEQ ID NO: 763405 - RNA, 19 nt, Artificial Sequence
  Description of Artificial Sequence: Synthetic oligonucleotide
uuaauagcuaauaagcaga

SEQ ID NO: 763406 - RNA, 19 nt, Artificial Sequence
  Description of Artificial Sequence: Synthetic oligonucleotide
uuuauguccuuccuggugg

SEQ ID NO: 763407 - RNA, 19 nt, Artificial Sequence
  Description of Artificial Sequence: Synthetic oligonucleotide
auuaauagcuaauaagcag

SEQ ID NO: 763408 - RNA, 19 nt, Artificial Sequence
  Description of Artificial Sequence: Synthetic oligonucleotide
ugagauguuuuauaaagag

SEQ ID NO: 763409 - RNA, 19 nt, Artificial Sequence
  Description of Artificial Sequence: Synthetic oligonucleotide
ucuguuaauauuacaaugu

SEQ ID NO: 763410 - RNA, 19 nt, Artificial Sequence
  Description of Artificial Sequence: Synthetic oligonucleotide
uauucuaagaccucauucc

SEQ ID NO: 763411 - RNA, 19 nt, Artificial Sequence
  Description of Artificial Sequence: Synthetic oligonucleotide
uaagaccucauuccaaucg

SEQ ID NO: 763412 - RNA, 19 nt, Artificial Sequence
  Description of Artificial Sequence: Synthetic oligonucleotide
uguuaauauuacaaugugc

SEQ ID NO: 763413 - RNA, 19 nt, Artificial Sequence
  Description of Artificial Sequence: Synthetic oligonucleotide
uaaauugcuauaucgaguc

SEQ ID NO: 763414 - RNA, 19 nt, Artificial Sequence
  Description of Artificial Sequence: Synthetic oligonucleotide
gauuugauuagguugagaa

SEQ ID NO: 763415 - RNA, 19 nt, Artificial Sequence
  Description of Artificial Sequence: Synthetic oligonucleotide
uguucccaaaccaaagcgg

SEQ ID NO: 763416 - RNA, 19 nt, Artificial Sequence
  Description of Artificial Sequence: Synthetic oligonucleotide
uuuaggggaacuaggacca

SEQ ID NO: 763417 - RNA, 19 nt, Artificial Sequence
  Description of Artificial Sequence: Synthetic oligonucleotide
uauugguauaaauauacau

SEQ ID NO: 763418 - RNA, 19 nt, Artificial Sequence
  Description of Artificial Sequence: Synthetic oligonucleotide
uggauaguugcuuaggugu

SEQ ID NO: 763419 - RNA, 19 nt, Artificial Sequence
  Description of Artificial Sequence: Synthetic oligonucleotide
ucgaagguuaccaaccaag

SEQ ID NO: 763420 - RNA, 19 nt, Artificial Sequence
  Description of Artificial Sequence: Synthetic oligonucleotide
uuuacaggugccaaaauuu

SEQ ID NO: 763421 - RNA, 19 nt, Artificial Sequence
  Description of Artificial Sequence: Synthetic oligonucleotide
aacguaagugaauaucugu

SEQ ID NO: 763422 - RNA, 19 nt, Artificial Sequence
  Description of Artificial Sequence: Synthetic oligonucleotide
ucuuguuccgcuugggccg

SEQ ID NO: 763423 - RNA, 19 nt, Artificial Sequence
  Description of Artificial Sequence: Synthetic oligonucleotide
cuauauacacgaauccggg

SEQ ID NO: 763424 - RNA, 19 nt, Artificial Sequence
  Description of Artificial Sequence: Synthetic oligonucleotide
acuauauacacgaauccgg

SEQ ID NO: 763425 - RNA, 19 nt, Artificial Sequence
  Description of Artificial Sequence: Synthetic oligonucleotide
gacuauauacacgaauccg

SEQ ID NO: 763426 - RNA, 19 nt, Artificial Sequence
  Description of Artificial Sequence: Synthetic oligonucleotide
ucgacuauauacacgaauc

SEQ ID NO: 763427 - RNA, 19 nt, Artificial Sequence
  Description of Artificial Sequence: Synthetic oligonucleotide
uccgaauugccccuuuugg

SEQ ID NO: 763428 - RNA, 19 nt, Artificial Sequence
  Description of Artificial Sequence: Synthetic oligonucleotide
agcuucgagaccuguagcc

SEQ ID NO: 763429 - RNA, 19 nt, Artificial Sequence
  Description of Artificial Sequence: Synthetic oligonucleotide
auauacacgaauccgggcu

SEQ ID NO: 763430 - RNA, 19 nt, Artificial Sequence
  Description of Artificial Sequence: Synthetic oligonucleotide
guaggucugacacaaauac

SEQ ID NO: 763431 - RNA, 19 nt, Artificial Sequence
  Description of Artificial Sequence: Synthetic oligonucleotide
agaaacgagagaaagaaga

SEQ ID NO: 763432 - RNA, 19 nt, Artificial Sequence
  Description of Artificial Sequence: Synthetic oligonucleotide
uuccaaucgacuauauaca

SEQ ID NO: 763433 - RNA, 19 nt, Artificial Sequence
  Description of Artificial Sequence: Synthetic oligonucleotide
caagaucuaauauauauaa

SEQ ID NO: 763434 - RNA, 19 nt, Artificial Sequence
  Description of Artificial Sequence: Synthetic oligonucleotide
ugaauauucuaagaccuca

SEQ ID NO: 763435 - RNA, 19 nt, Artificial Sequence
  Description of Artificial Sequence: Synthetic oligonucleotide
uuauugguauaaauauaca

SEQ ID NO: 763436 - RNA, 19 nt, Artificial Sequence
  Description of Artificial Sequence: Synthetic oligonucleotide
uuuagucacuuucuuggug

SEQ ID NO: 763437 - RNA, 19 nt, Artificial Sequence
  Description of Artificial Sequence: Synthetic oligonucleotide
aaugcccaagaucuaauau

SEQ ID NO: 763438 - RNA, 19 nt, Artificial Sequence
  Description of Artificial Sequence: Synthetic oligonucleotide
ucugacacaaauacacccu

SEQ ID NO: 763439 - RNA, 19 nt, Artificial Sequence
  Description of Artificial Sequence: Synthetic oligonucleotide
uauuagugugcucuguuaa

SEQ ID NO: 763440 - RNA, 19 nt, Artificial Sequence
  Description of Artificial Sequence: Synthetic oligonucleotide
uuuuacaggugccaaaauu

SEQ ID NO: 763441 - RNA, 19 nt, Artificial Sequence
  Description of Artificial Sequence: Synthetic oligonucleotide
auuacaaugugcaauugca

SEQ ID NO: 763442 - RNA, 19 nt, Artificial Sequence
  Description of Artificial Sequence: Synthetic oligonucleotide
uaagugaauaucugugaga

SEQ ID NO: 763443 - RNA, 19 nt, Artificial Sequence
  Description of Artificial Sequence: Synthetic oligonucleotide
uauaucgagucauguguag

SEQ ID NO: 763444 - RNA, 19 nt, Artificial Sequence
  Description of Artificial Sequence: Synthetic oligonucleotide
uguaacguaagugaauauc

SEQ ID NO: 763445 - RNA, 19 nt, Artificial Sequence
  Description of Artificial Sequence: Synthetic oligonucleotide
uugauuagguugagaaagc

SEQ ID NO: 763446 - RNA, 19 nt, Artificial Sequence
  Description of Artificial Sequence: Synthetic oligonucleotide
uaacguaagugaauaucug

SEQ ID NO: 763447 - RNA, 19 nt, Artificial Sequence
  Description of Artificial Sequence: Synthetic oligonucleotide
aauugcuauaucgagucau

SEQ ID NO: 763448 - RNA, 19 nt, Artificial Sequence
  Description of Artificial Sequence: Synthetic oligonucleotide
uuaccaaccaagcuuuaaa

SEQ ID NO: 763449 - RNA, 19 nt, Artificial Sequence
  Description of Artificial Sequence: Synthetic oligonucleotide
uauauacacgaauccgggc

SEQ ID NO: 763450 - RNA, 19 nt, Artificial Sequence
  Description of Artificial Sequence: Synthetic oligonucleotide
cuguuaauauuacaaugug

SEQ ID NO: 763451 - RNA, 19 nt, Artificial Sequence
  Description of Artificial Sequence: Synthetic oligonucleotide
uggauuugcucccuuggug

SEQ ID NO: 763452 - RNA, 19 nt, Artificial Sequence
  Description of Artificial Sequence: Synthetic oligonucleotide
ugaaggcauaagaaacgag

SEQ ID NO: 763453 - RNA, 19 nt, Artificial Sequence
  Description of Artificial Sequence: Synthetic oligonucleotide
uuaggugugaguccaguua

SEQ ID NO: 763454 - RNA, 19 nt, Artificial Sequence
  Description of Artificial Sequence: Synthetic oligonucleotide
ugagaaagccacuucuccu

SEQ ID NO: 763455 - RNA, 19 nt, Artificial Sequence
  Description of Artificial Sequence: Synthetic oligonucleotide
ugcuauaucgagucaugug

SEQ ID NO: 763456 - RNA, 19 nt, Artificial Sequence
  Description of Artificial Sequence: Synthetic oligonucleotide
ucucacacuguguucuuag

SEQ ID NO: 763457 - RNA, 19 nt, Artificial Sequence
  Description of Artificial Sequence: Synthetic oligonucleotide
agaucgugggcauccgagc

SEQ ID NO: 763458 - RNA, 19 nt, Artificial Sequence
  Description of Artificial Sequence: Synthetic oligonucleotide
uaucgagucauguguaggu

SEQ ID NO: 763459 - RNA, 19 nt, Artificial Sequence
  Description of Artificial Sequence: Synthetic oligonucleotide
ugugcguucggcagcacca

SEQ ID NO: 763460 - RNA, 19 nt, Artificial Sequence
  Description of Artificial Sequence: Synthetic oligonucleotide
uccaaucgacuauauacac

SEQ ID NO: 763461 - RNA, 19 nt, Artificial Sequence
  Description of Artificial Sequence: Synthetic oligonucleotide
uugcauacaucaagaauaa

SEQ ID NO: 763462 - RNA, 19 nt, Artificial Sequence
  Description of Artificial Sequence: Synthetic oligonucleotide
uagcuaauaagcagacaga

SEQ ID NO: 763463 - RNA, 19 nt, Artificial Sequence
  Description of Artificial Sequence: Synthetic oligonucleotide
auaaauugcuauaucgagu

SEQ ID NO: 763464 - RNA, 19 nt, Artificial Sequence
  Description of Artificial Sequence: Synthetic oligonucleotide
aaugugcaauugcauacau

SEQ ID NO: 763465 - RNA, 19 nt, Artificial Sequence
  Description of Artificial Sequence: Synthetic oligonucleotide
ugauuagguugagaaagcc

SEQ ID NO: 763466 - RNA, 19 nt, Artificial Sequence
  Description of Artificial Sequence: Synthetic oligonucleotide
aaccaaagcgggccucugg

SEQ ID NO: 763467 - RNA, 19 nt, Artificial Sequence
  Description of Artificial Sequence: Synthetic oligonucleotide
uugguaaaguguuccaguc

SEQ ID NO: 763468 - RNA, 19 nt, Artificial Sequence
  Description of Artificial Sequence: Synthetic oligonucleotide
aagacgcacugcccguggc

SEQ ID NO: 763469 - RNA, 19 nt, Artificial Sequence
  Description of Artificial Sequence: Synthetic oligonucleotide
aaauugcuauaucgaguca

SEQ ID NO: 763470 - RNA, 19 nt, Artificial Sequence
  Description of Artificial Sequence: Synthetic oligonucleotide
aucgacuauauacacgaau

SEQ ID NO: 763471 - RNA, 19 nt, Artificial Sequence
  Description of Artificial Sequence: Synthetic oligonucleotide
agaaauuaaaggccuucaa

SEQ ID NO: 763472 - RNA, 19 nt, Artificial Sequence
  Description of Artificial Sequence: Synthetic oligonucleotide
ugucacugcgcucaacccu

SEQ ID NO: 763473 - RNA, 19 nt, Artificial Sequence
  Description of Artificial Sequence: Synthetic oligonucleotide
auaucgagucauguguagg

SEQ ID NO: 763474 - RNA, 19 nt, Artificial Sequence
  Description of Artificial Sequence: Synthetic oligonucleotide
ugguaaaguguuccagucu

SEQ ID NO: 763475 - RNA, 19 nt, Artificial Sequence
  Description of Artificial Sequence: Synthetic oligonucleotide
aacaaugcccaagaucuaa

SEQ ID NO: 763476 - RNA, 19 nt, Artificial Sequence
  Description of Artificial Sequence: Synthetic oligonucleotide
uggagcgcgauuugauuag

SEQ ID NO: 763477 - RNA, 19 nt, Artificial Sequence
  Description of Artificial Sequence: Synthetic oligonucleotide
ucgagucauguguaggucu

SEQ ID NO: 763478 - RNA, 19 nt, Artificial Sequence
  Description of Artificial Sequence: Synthetic oligonucleotide
cuucgagaccuguagcccc

SEQ ID NO: 763479 - RNA, 19 nt, Artificial Sequence
  Description of Artificial Sequence: Synthetic oligonucleotide
aauagcuaauaagcagaca

SEQ ID NO: 763480 - RNA, 19 nt, Artificial Sequence
  Description of Artificial Sequence: Synthetic oligonucleotide
uuacaggugccaaaauuuu

SEQ ID NO: 763481 - RNA, 19 nt, Artificial Sequence
  Description of Artificial Sequence: Synthetic oligonucleotide
gaauccgggcuucucacac

SEQ ID NO: 763482 - RNA, 19 nt, Artificial Sequence
  Description of Artificial Sequence: Synthetic oligonucleotide
agcuaauaagcagacagaa

SEQ ID NO: 763483 - RNA, 19 nt, Artificial Sequence
  Description of Artificial Sequence: Synthetic oligonucleotide
ucccaaaccaaagcgggcc

SEQ ID NO: 763484 - RNA, 19 nt, Artificial Sequence
  Description of Artificial Sequence: Synthetic oligonucleotide
cagaucgugggcauccgag

SEQ ID NO: 763485 - RNA, 19 nt, Artificial Sequence
  Description of Artificial Sequence: Synthetic oligonucleotide
uggggaugagaacucuucu

SEQ ID NO: 763486 - RNA, 19 nt, Artificial Sequence
  Description of Artificial Sequence: Synthetic oligonucleotide
augaauauucuaagaccuc

SEQ ID NO: 763487 - RNA, 19 nt, Artificial Sequence
  Description of Artificial Sequence: Synthetic oligonucleotide
gaagacgcacugcccgugg

SEQ ID NO: 763488 - RNA, 19 nt, Artificial Sequence
  Description of Artificial Sequence: Synthetic oligonucleotide
guaacguaagugaauaucu

SEQ ID NO: 763489 - RNA, 19 nt, Artificial Sequence
  Description of Artificial Sequence: Synthetic oligonucleotide
uauacacgaauccgggcuu

SEQ ID NO: 763490 - RNA, 19 nt, Artificial Sequence
  Description of Artificial Sequence: Synthetic oligonucleotide
uuucagccuguaacguaag

SEQ ID NO: 763491 - RNA, 19 nt, Artificial Sequence
  Description of Artificial Sequence: Synthetic oligonucleotide
guacaauuuuccaugggga

SEQ ID NO: 763492 - RNA, 19 nt, Artificial Sequence
  Description of Artificial Sequence: Synthetic oligonucleotide
gaauugccccuuuugggga

SEQ ID NO: 763493 - RNA, 19 nt, Artificial Sequence
  Description of Artificial Sequence: Synthetic oligonucleotide
uggaauaauugcuggcuuu

SEQ ID NO: 763494 - RNA, 19 nt, Artificial Sequence
  Description of Artificial Sequence: Synthetic oligonucleotide
aauguguagcugccucaga

SEQ ID NO: 763495 - RNA, 19 nt, Artificial Sequence
  Description of Artificial Sequence: Synthetic oligonucleotide
gaacuaggaccagauggag

SEQ ID NO: 763496 - RNA, 19 nt, Artificial Sequence
  Description of Artificial Sequence: Synthetic oligonucleotide
cuuucagccuguaacguaa

SEQ ID NO: 763497 - RNA, 19 nt, Artificial Sequence
  Description of Artificial Sequence: Synthetic oligonucleotide
ugugcauucgcggcucucc

SEQ ID NO: 763498 - RNA, 19 nt, Artificial Sequence
  Description of Artificial Sequence: Synthetic oligonucleotide
agugaauaucugugagaug

SEQ ID NO: 763499 - RNA, 19 nt, Artificial Sequence
  Description of Artificial Sequence: Synthetic oligonucleotide
ugggccguaacuugguaaa

SEQ ID NO: 763500 - RNA, 19 nt, Artificial Sequence
  Description of Artificial Sequence: Synthetic oligonucleotide
ugugggcuaccccugcugu

SEQ ID NO: 763501 - RNA, 19 nt, Artificial Sequence
  Description of Artificial Sequence: Synthetic oligonucleotide
cacaaauacacccugcagu

SEQ ID NO: 763502 - RNA, 19 nt, Artificial Sequence
  Description of Artificial Sequence: Synthetic oligonucleotide
uccucugacagacccuccu

SEQ ID NO: 763503 - RNA, 19 nt, Artificial Sequence
  Description of Artificial Sequence: Synthetic oligonucleotide
uucgaagguuaccaaccaa

SEQ ID NO: 763504 - RNA, 19 nt, Artificial Sequence
  Description of Artificial Sequence: Synthetic oligonucleotide
ccaaucgacuauauacacg

SEQ ID NO: 763505 - RNA, 19 nt, Artificial Sequence
  Description of Artificial Sequence: Synthetic oligonucleotide
gaucgugggcauccgagca

SEQ ID NO: 763506 - RNA, 19 nt, Artificial Sequence
  Description of Artificial Sequence: Synthetic oligonucleotide
cauagcgccggccacucug

SEQ ID NO: 763507 - RNA, 19 nt, Artificial Sequence
  Description of Artificial Sequence: Synthetic oligonucleotide
gcuauaucgagucaugugu

SEQ ID NO: 763508 - RNA, 19 nt, Artificial Sequence
  Description of Artificial Sequence: Synthetic oligonucleotide
cugcgcucaacccugcuug

SEQ ID NO: 763509 - RNA, 19 nt, Artificial Sequence
  Description of Artificial Sequence: Synthetic oligonucleotide
accaaagcgggccucugga

SEQ ID NO: 763510 - RNA, 19 nt, Artificial Sequence
  Description of Artificial Sequence: Synthetic oligonucleotide
agaguaguauuuagacauc

SEQ ID NO: 763511 - RNA, 19 nt, Artificial Sequence
  Description of Artificial Sequence: Synthetic oligonucleotide
auugcuauaucgagucaug

SEQ ID NO: 763512 - RNA, 19 nt, Artificial Sequence
  Description of Artificial Sequence: Synthetic oligonucleotide
aauugccccuuuuggggau

SEQ ID NO: 763513 - RNA, 19 nt, Artificial Sequence
  Description of Artificial Sequence: Synthetic oligonucleotide
gaagguuaccaaccaagcu

SEQ ID NO: 763514 - RNA, 19 nt, Artificial Sequence
  Description of Artificial Sequence: Synthetic oligonucleotide
aucgagucauguguagguc

SEQ ID NO: 763515 - RNA, 19 nt, Artificial Sequence
  Description of Artificial Sequence: Synthetic oligonucleotide
agaucgcugccuguguagg

SEQ ID NO: 763516 - RNA, 19 nt, Artificial Sequence
  Description of Artificial Sequence: Synthetic oligonucleotide
cgaauugccccuuuugggg

SEQ ID NO: 763517 - RNA, 19 nt, Artificial Sequence
  Description of Artificial Sequence: Synthetic oligonucleotide
gagcuucgagaccuguagc

SEQ ID NO: 763518 - RNA, 19 nt, Artificial Sequence
  Description of Artificial Sequence: Synthetic oligonucleotide
uugcuauaucgagucaugu

SEQ ID NO: 763519 - RNA, 19 nt, Artificial Sequence
  Description of Artificial Sequence: Synthetic oligonucleotide
uucuggagcgcgauuugau

SEQ ID NO: 763520 - RNA, 19 nt, Artificial Sequence
  Description of Artificial Sequence: Synthetic oligonucleotide
uacagaucgcugccugugu

SEQ ID NO: 763521 - RNA, 19 nt, Artificial Sequence
  Description of Artificial Sequence: Synthetic oligonucleotide
auccgggcuucucacacug

SEQ ID NO: 763522 - RNA, 19 nt, Artificial Sequence
  Description of Artificial Sequence: Synthetic oligonucleotide
ucugaccgcucuguguugc

SEQ ID NO: 763523 - RNA, 19 nt, Artificial Sequence
  Description of Artificial Sequence: Synthetic oligonucleotide
aucgugggcauccgagcag

SEQ ID NO: 763524 - RNA, 19 nt, Artificial Sequence
  Description of Artificial Sequence: Synthetic oligonucleotide
uguguucagcugcuuuuau

SEQ ID NO: 763525 - RNA, 19 nt, Artificial Sequence
  Description of Artificial Sequence: Synthetic oligonucleotide
gccguaacuugguaaagug

SEQ ID NO: 763526 - RNA, 19 nt, Artificial Sequence
  Description of Artificial Sequence: Synthetic oligonucleotide
guuugggcacuguuccgcc

SEQ ID NO: 763527 - RNA, 19 nt, Artificial Sequence
  Description of Artificial Sequence: Synthetic oligonucleotide
gagauguuuuauaaagagu

SEQ ID NO: 763528 - RNA, 19 nt, Artificial Sequence
  Description of Artificial Sequence: Synthetic oligonucleotide
gaucgcugccuguguaggc

SEQ ID NO: 763529 - RNA, 19 nt, Artificial Sequence
  Description of Artificial Sequence: Synthetic oligonucleotide
ccgaauugccccuuuuggg

SEQ ID NO: 763530 - RNA, 19 nt, Artificial Sequence
  Description of Artificial Sequence: Synthetic oligonucleotide
auaagcagacagaaauuaa

SEQ ID NO: 763531 - RNA, 19 nt, Artificial Sequence
  Description of Artificial Sequence: Synthetic oligonucleotide
uacuccugagccuguggac

SEQ ID NO: 763532 - RNA, 19 nt, Artificial Sequence
  Description of Artificial Sequence: Synthetic oligonucleotide
uuugggcacuguuccgccc

SEQ ID NO: 763533 - RNA, 19 nt, Artificial Sequence
  Description of Artificial Sequence: Synthetic oligonucleotide
auaccaugcagggcaaugu

SEQ ID NO: 763534 - RNA, 19 nt, Artificial Sequence
  Description of Artificial Sequence: Synthetic oligonucleotide
agugugcucuguuaauauu

SEQ ID NO: 763535 - RNA, 19 nt, Artificial Sequence
  Description of Artificial Sequence: Synthetic oligonucleotide
gugaaggcauaagaaacga

SEQ ID NO: 763536 - RNA, 19 nt, Artificial Sequence
  Description of Artificial Sequence: Synthetic oligonucleotide
cauugacaaucuucuucug

SEQ ID NO: 763537 - RNA, 19 nt, Artificial Sequence
  Description of Artificial Sequence: Synthetic oligonucleotide
gcaauugcauacaucaaga

SEQ ID NO: 763538 - RNA, 19 nt, Artificial Sequence
  Description of Artificial Sequence: Synthetic oligonucleotide
augugcaauugcauacauc

SEQ ID NO: 763539 - RNA, 19 nt, Artificial Sequence
  Description of Artificial Sequence: Synthetic oligonucleotide
acuggcggacuccgaauug

SEQ ID NO: 763540 - RNA, 19 nt, Artificial Sequence
  Description of Artificial Sequence: Synthetic oligonucleotide
uggcggacuccgaauugcc

SEQ ID NO: 763541 - RNA, 19 nt, Artificial Sequence
  Description of Artificial Sequence: Synthetic oligonucleotide
guacagaucgcugccugug

SEQ ID NO: 763542 - RNA, 19 nt, Artificial Sequence
  Description of Artificial Sequence: Synthetic oligonucleotide
cacgcuccuuguccgaggg

SEQ ID NO: 763543 - RNA, 19 nt, Artificial Sequence
  Description of Artificial Sequence: Synthetic oligonucleotide
cuauaucgagucaugugua

SEQ ID NO: 763544 - RNA, 19 nt, Artificial Sequence
  Description of Artificial Sequence: Synthetic oligonucleotide
agcgcgauuugauuagguu

SEQ ID NO: 763545 - RNA, 19 nt, Artificial Sequence
  Description of Artificial Sequence: Synthetic oligonucleotide
gucacugcgcucaacccug

SEQ ID NO: 763546 - RNA, 19 nt, Artificial Sequence
  Description of Artificial Sequence: Synthetic oligonucleotide
guaacuugguaaaguguuc

SEQ ID NO: 763547 - RNA, 19 nt, Artificial Sequence
  Description of Artificial Sequence: Synthetic oligonucleotide
ggggaugagaacucuucug

SEQ ID NO: 763548 - RNA, 19 nt, Artificial Sequence
  Description of Artificial Sequence: Synthetic oligonucleotide
caauugcauacaucaagaa

SEQ ID NO: 763549 - RNA, 19 nt, Artificial Sequence
  Description of Artificial Sequence: Synthetic oligonucleotide
auacacgaauccgggcuuc

SEQ ID NO: 763550 - RNA, 19 nt, Artificial Sequence
  Description of Artificial Sequence: Synthetic oligonucleotide
gugcauucgcggcucuccg

SEQ ID NO: 763551 - RNA, 19 nt, Artificial Sequence
  Description of Artificial Sequence: Synthetic oligonucleotide
aaauucaaguagggcccgu

SEQ ID NO: 763552 - RNA, 19 nt, Artificial Sequence
  Description of Artificial Sequence: Synthetic oligonucleotide
agcgccggccacucugugg

SEQ ID NO: 763553 - RNA, 19 nt, Artificial Sequence
  Description of Artificial Sequence: Synthetic oligonucleotide
ugcauucgcggcucuccgc

SEQ ID NO: 763554 - RNA, 19 nt, Artificial Sequence
  Description of Artificial Sequence: Synthetic oligonucleotide
ucaggaccguggguggccg

SEQ ID NO: 763555 - RNA, 19 nt, Artificial Sequence
  Description of Artificial Sequence: Synthetic oligonucleotide
cgacuauauacacgaaucc

SEQ ID NO: 763556 - RNA, 19 nt, Artificial Sequence
  Description of Artificial Sequence: Synthetic oligonucleotide
cccguggaauaauugcugg

SEQ ID NO: 763557 - RNA, 19 nt, Artificial Sequence
  Description of Artificial Sequence: Synthetic oligonucleotide
ucgugggcauccgagcagc

SEQ ID NO: 763558 - RNA, 19 nt, Artificial Sequence
  Description of Artificial Sequence: Synthetic oligonucleotide
gggcccguggaauaauugc

SEQ ID NO: 763559 - RNA, 19 nt, Artificial Sequence
  Description of Artificial Sequence: Synthetic oligonucleotide
ggaacuaggaccagaugga

SEQ ID NO: 763560 - RNA, 19 nt, Artificial Sequence
  Description of Artificial Sequence: Synthetic oligonucleotide
ugauacuccugagccugug

SEQ ID NO: 763561 - RNA, 19 nt, Artificial Sequence
  Description of Artificial Sequence: Synthetic oligonucleotide
cuggcggacuccgaauugc

SEQ ID NO: 763562 - RNA, 19 nt, Artificial Sequence
  Description of Artificial Sequence: Synthetic oligonucleotide
cuggagcgcgauuugauua

SEQ ID NO: 763563 - RNA, 19 nt, Artificial Sequence
  Description of Artificial Sequence: Synthetic oligonucleotide
ggcaauguguagcugccuc

SEQ ID NO: 763564 - RNA, 19 nt, Artificial Sequence
  Description of Artificial Sequence: Synthetic oligonucleotide
gauggucuucgaagguuac

SEQ ID NO: 763565 - RNA, 19 nt, Artificial Sequence
  Description of Artificial Sequence: Synthetic oligonucleotide
ugcgcucaacccugcuugc

SEQ ID NO: 763566 - RNA, 19 nt, Artificial Sequence
  Description of Artificial Sequence: Synthetic oligonucleotide
aucgcugccuguguaggcu

SEQ ID NO: 763567 - RNA, 19 nt, Artificial Sequence
  Description of Artificial Sequence: Synthetic oligonucleotide
gaguccguucuguucucca

SEQ ID NO: 763568 - RNA, 19 nt, Artificial Sequence
  Description of Artificial Sequence: Synthetic oligonucleotide
ugaguccguucuguucucc

SEQ ID NO: 763569 - RNA, 19 nt, Artificial Sequence
  Description of Artificial Sequence: Synthetic oligonucleotide
ggauaguugcuuaggugug

SEQ ID NO: 763570 - RNA, 19 nt, Artificial Sequence
  Description of Artificial Sequence: Synthetic oligonucleotide
uaguugcuuaggugugagu

SEQ ID NO: 763571 - RNA, 19 nt, Artificial Sequence
  Description of Artificial Sequence: Synthetic oligonucleotide
gcaucaggaccgugggugg

SEQ ID NO: 763572 - RNA, 19 nt, Artificial Sequence
  Description of Artificial Sequence: Synthetic oligonucleotide
cacgaauccgggcuucuca

SEQ ID NO: 763573 - RNA, 19 nt, Artificial Sequence
  Description of Artificial Sequence: Synthetic oligonucleotide
gccgcucaguucuggagcg

SEQ ID NO: 763574 - RNA, 19 nt, Artificial Sequence
  Description of Artificial Sequence: Synthetic oligonucleotide
agacgcacugcccguggcu

SEQ ID NO: 763575 - RNA, 19 nt, Artificial Sequence
  Description of Artificial Sequence: Synthetic oligonucleotide
ucgcugccuguguaggcug

SEQ ID NO: 763576 - RNA, 19 nt, Artificial Sequence
  Description of Artificial Sequence: Synthetic oligonucleotide
uguguaggucugacacaaa

SEQ ID NO: 763577 - RNA, 19 nt, Artificial Sequence
  Description of Artificial Sequence: Synthetic oligonucleotide
aguaguauuuagacaucuu

SEQ ID NO: 763578 - RNA, 19 nt, Artificial Sequence
  Description of Artificial Sequence: Synthetic oligonucleotide
uuaggggaacuaggaccag

SEQ ID NO: 763579 - RNA, 19 nt, Artificial Sequence
  Description of Artificial Sequence: Synthetic oligonucleotide
guccguucuguucuccauc

SEQ ID NO: 763580 - RNA, 19 nt, Artificial Sequence
  Description of Artificial Sequence: Synthetic oligonucleotide
aaucgacuauauacacgaa

SEQ ID NO: 763581 - RNA, 19 nt, Artificial Sequence
  Description of Artificial Sequence: Synthetic oligonucleotide
guuccgcccgcaucugacc

SEQ ID NO: 763582 - RNA, 19 nt, Artificial Sequence
  Description of Artificial Sequence: Synthetic oligonucleotide
aucugaccgcucuguguug

SEQ ID NO: 763583 - RNA, 19 nt, Artificial Sequence
  Description of Artificial Sequence: Synthetic oligonucleotide
acgcuggaggagcuucgag

SEQ ID NO: 763584 - RNA, 19 nt, Artificial Sequence
  Description of Artificial Sequence: Synthetic oligonucleotide
gaauauucuaagaccucau

SEQ ID NO: 763585 - RNA, 19 nt, Artificial Sequence
  Description of Artificial Sequence: Synthetic oligonucleotide
guucggcagcaccauugug

SEQ ID NO: 763586 - RNA, 19 nt, Artificial Sequence
  Description of Artificial Sequence: Synthetic oligonucleotide
agugccccuacagaagcau

SEQ ID NO: 763587 - RNA, 19 nt, Artificial Sequence
  Description of Artificial Sequence: Synthetic oligonucleotide
caaugcccaagaucuaaua

SEQ ID NO: 763588 - RNA, 19 nt, Artificial Sequence
  Description of Artificial Sequence: Synthetic oligonucleotide
acacgaauccgggcuucuc

SEQ ID NO: 763589 - RNA, 19 nt, Artificial Sequence
  Description of Artificial Sequence: Synthetic oligonucleotide
aggggaacuaggaccagau

SEQ ID NO: 763590 - RNA, 19 nt, Artificial Sequence
  Description of Artificial Sequence: Synthetic oligonucleotide
ggugguguccacuggcgga

SEQ ID NO: 763591 - RNA, 19 nt, Artificial Sequence
  Description of Artificial Sequence: Synthetic oligonucleotide
gcaccguuacacaaaauaa

SEQ ID NO: 763592 - RNA, 19 nt, Artificial Sequence
  Description of Artificial Sequence: Synthetic oligonucleotide
cauuccaaucgacuauaua

SEQ ID NO: 763593 - RNA, 19 nt, Artificial Sequence
  Description of Artificial Sequence: Synthetic oligonucleotide
gcuucgagaccuguagccc

SEQ ID NO: 763594 - RNA, 19 nt, Artificial Sequence
  Description of Artificial Sequence: Synthetic oligonucleotide
uagggcccguggaauaauu

SEQ ID NO: 763595 - RNA, 19 nt, Artificial Sequence
  Description of Artificial Sequence: Synthetic oligonucleotide
cguaagugaauaucuguga

SEQ ID NO: 763596 - RNA, 19 nt, Artificial Sequence
  Description of Artificial Sequence: Synthetic oligonucleotide
cucauuccaaucgacuaua

SEQ ID NO: 763597 - RNA, 19 nt, Artificial Sequence
  Description of Artificial Sequence: Synthetic oligonucleotide
gacgcacugcccguggcuc

SEQ ID NO: 763598 - RNA, 19 nt, Artificial Sequence
  Description of Artificial Sequence: Synthetic oligonucleotide
agccuguaacguaagugaa

SEQ ID NO: 763599 - RNA, 19 nt, Artificial Sequence
  Description of Artificial Sequence: Synthetic oligonucleotide
cgcgauuugauuagguuga

SEQ ID NO: 763600 - RNA, 19 nt, Artificial Sequence
  Description of Artificial Sequence: Synthetic oligonucleotide
gagaagacgcacugcccgu

SEQ ID NO: 763601 - RNA, 19 nt, Artificial Sequence
  Description of Artificial Sequence: Synthetic oligonucleotide
uucaggucgggaggcaguu

SEQ ID NO: 763602 - RNA, 19 nt, Artificial Sequence
  Description of Artificial Sequence: Synthetic oligonucleotide
caucaggaccguggguggc

SEQ ID NO: 763603 - RNA, 19 nt, Artificial Sequence
  Description of Artificial Sequence: Synthetic oligonucleotide
ggaaggaagugccccuaca

SEQ ID NO: 763604 - RNA, 19 nt, Artificial Sequence
  Description of Artificial Sequence: Synthetic oligonucleotide
ccaugaguccguucuguuc

SEQ ID NO: 763605 - RNA, 19 nt, Artificial Sequence
  Description of Artificial Sequence: Synthetic oligonucleotide
agggcccguggaauaauug

SEQ ID NO: 763606 - RNA, 19 nt, Artificial Sequence
  Description of Artificial Sequence: Synthetic oligonucleotide
gggaaaagguccugggacu

SEQ ID NO: 763607 - RNA, 19 nt, Artificial Sequence
  Description of Artificial Sequence: Synthetic oligonucleotide
gcuaccccugcugucacug

SEQ ID NO: 763608 - RNA, 19 nt, Artificial Sequence
  Description of Artificial Sequence: Synthetic oligonucleotide
ggagcgcgauuugauuagg

SEQ ID NO: 763609 - RNA, 19 nt, Artificial Sequence
  Description of Artificial Sequence: Synthetic oligonucleotide
gcuaauaagcagacagaaa

SEQ ID NO: 763610 - RNA, 19 nt, Artificial Sequence
  Description of Artificial Sequence: Synthetic oligonucleotide
ccaguuacuucauuaauuu

SEQ ID NO: 763611 - RNA, 19 nt, Artificial Sequence
  Description of Artificial Sequence: Synthetic oligonucleotide
ccuguaacguaagugaaua

SEQ ID NO: 763612 - RNA, 19 nt, Artificial Sequence
  Description of Artificial Sequence: Synthetic oligonucleotide
auugccccuuuuggggaug

SEQ ID NO: 763613 - RNA, 19 nt, Artificial Sequence
  Description of Artificial Sequence: Synthetic oligonucleotide
caccugcacauagcgccgg

SEQ ID NO: 763614 - RNA, 19 nt, Artificial Sequence
  Description of Artificial Sequence: Synthetic oligonucleotide
ggggaacuaggaccagaug

SEQ ID NO: 763615 - RNA, 19 nt, Artificial Sequence
  Description of Artificial Sequence: Synthetic oligonucleotide
cccugcaugggaaggcuug

SEQ ID NO: 763616 - RNA, 19 nt, Artificial Sequence
  Description of Artificial Sequence: Synthetic oligonucleotide
uccgggcuucucacacugu

SEQ ID NO: 763617 - RNA, 19 nt, Artificial Sequence
  Description of Artificial Sequence: Synthetic oligonucleotide
ugaccgcucuguguugcuc

SEQ ID NO: 763618 - RNA, 19 nt, Artificial Sequence
  Description of Artificial Sequence: Synthetic oligonucleotide
gcauccgagcagcgugugg

SEQ ID NO: 763619 - RNA, 19 nt, Artificial Sequence
  Description of Artificial Sequence: Synthetic oligonucleotide
gcguucggcagcaccauug

SEQ ID NO: 763620 - RNA, 19 nt, Artificial Sequence
  Description of Artificial Sequence: Synthetic oligonucleotide
gcccguggaauaauugcug

SEQ ID NO: 763621 - RNA, 19 nt, Artificial Sequence
  Description of Artificial Sequence: Synthetic oligonucleotide
ugcguucggcagcaccauu

SEQ ID NO: 763622 - RNA, 19 nt, Artificial Sequence
  Description of Artificial Sequence: Synthetic oligonucleotide
cauuguguucagcugcuuu

SEQ ID NO: 763623 - RNA, 19 nt, Artificial Sequence
  Description of Artificial Sequence: Synthetic oligonucleotide
caggucgggaggcaguucu

SEQ ID NO: 763624 - RNA, 19 nt, Artificial Sequence
  Description of Artificial Sequence: Synthetic oligonucleotide
uagcgccggccacucugug

SEQ ID NO: 763625 - RNA, 19 nt, Artificial Sequence
  Description of Artificial Sequence: Synthetic oligonucleotide
auagcgccggccacucugu

SEQ ID NO: 763626 - RNA, 19 nt, Artificial Sequence
  Description of Artificial Sequence: Synthetic oligonucleotide
uugccccuuuuggggauga

SEQ ID NO: 763627 - RNA, 19 nt, Artificial Sequence
  Description of Artificial Sequence: Synthetic oligonucleotide
cuuaggugugaguccaguu

SEQ ID NO: 763628 - RNA, 19 nt, Artificial Sequence
  Description of Artificial Sequence: Synthetic oligonucleotide
cauucgcggcucuccgcuc

SEQ ID NO: 763629 - RNA, 19 nt, Artificial Sequence
  Description of Artificial Sequence: Synthetic oligonucleotide
gugcaauugcauacaucaa

SEQ ID NO: 763630 - RNA, 19 nt, Artificial Sequence
  Description of Artificial Sequence: Synthetic oligonucleotide
uucuggcaucaggaccgug

SEQ ID NO: 763631 - RNA, 19 nt, Artificial Sequence
  Description of Artificial Sequence: Synthetic oligonucleotide
guuccgcuugggccguaac

SEQ ID NO: 763632 - RNA, 19 nt, Artificial Sequence
  Description of Artificial Sequence: Synthetic oligonucleotide
cgcuugggccguaacuugg

SEQ ID NO: 763633 - RNA, 19 nt, Artificial Sequence
  Description of Artificial Sequence: Synthetic oligonucleotide
cuuagcugugcuugcugau

SEQ ID NO: 763634 - RNA, 19 nt, Artificial Sequence
  Description of Artificial Sequence: Synthetic oligonucleotide
aggaccguggguggccgcu

SEQ ID NO: 763635 - RNA, 19 nt, Artificial Sequence
  Description of Artificial Sequence: Synthetic oligonucleotide
ccgggcuucucacacugug

SEQ ID NO: 763636 - RNA, 19 nt, Artificial Sequence
  Description of Artificial Sequence: Synthetic oligonucleotide
gaccguggguggccgcuca

SEQ ID NO: 763637 - RNA, 19 nt, Artificial Sequence
  Description of Artificial Sequence: Synthetic oligonucleotide
gcgauuugauuagguugag

SEQ ID NO: 763638 - RNA, 19 nt, Artificial Sequence
  Description of Artificial Sequence: Synthetic oligonucleotide
cuguaacguaagugaauau

SEQ ID NO: 763639 - RNA, 19 nt, Artificial Sequence
  Description of Artificial Sequence: Synthetic oligonucleotide
gcuucggacuggugggcac

SEQ ID NO: 763640 - RNA, 19 nt, Artificial Sequence
  Description of Artificial Sequence: Synthetic oligonucleotide
ggaauaauugcuggcuuuu

SEQ ID NO: 763641 - RNA, 19 nt, Artificial Sequence
  Description of Artificial Sequence: Synthetic oligonucleotide
ugccccuuuuggggaugag

SEQ ID NO: 763642 - RNA, 19 nt, Artificial Sequence
  Description of Artificial Sequence: Synthetic oligonucleotide
cagcguguggaugaccucu

SEQ ID NO: 763643 - RNA, 19 nt, Artificial Sequence
  Description of Artificial Sequence: Synthetic oligonucleotide
cuugggccguaacuuggua

SEQ ID NO: 763644 - RNA, 19 nt, Artificial Sequence
  Description of Artificial Sequence: Synthetic oligonucleotide
gggccguaacuugguaaag

SEQ ID NO: 763645 - RNA, 19 nt, Artificial Sequence
  Description of Artificial Sequence: Synthetic oligonucleotide
ugguguccacuggcggacu

SEQ ID NO: 763646 - RNA, 19 nt, Artificial Sequence
  Description of Artificial Sequence: Synthetic oligonucleotide
gcauucgcggcucuccgcu

SEQ ID NO: 763647 - RNA, 19 nt, Artificial Sequence
  Description of Artificial Sequence: Synthetic oligonucleotide
gguguccacuggcggacuc

SEQ ID NO: 763648 - RNA, 19 nt, Artificial Sequence
  Description of Artificial Sequence: Synthetic oligonucleotide
ggacgaugcuggugguaca

SEQ ID NO: 763649 - RNA, 19 nt, Artificial Sequence
  Description of Artificial Sequence: Synthetic oligonucleotide
cgcucaguucuggagcgcg

SEQ ID NO: 763650 - RNA, 19 nt, Artificial Sequence
  Description of Artificial Sequence: Synthetic oligonucleotide
ggcccguggaauaauugcu

SEQ ID NO: 763651 - RNA, 19 nt, Artificial Sequence
  Description of Artificial Sequence: Synthetic oligonucleotide
ccguaacuugguaaagugu

SEQ ID NO: 763652 - RNA, 19 nt, Artificial Sequence
  Description of Artificial Sequence: Synthetic oligonucleotide
agcguguggaugaccucuu

SEQ ID NO: 763653 - RNA, 19 nt, Artificial Sequence
  Description of Artificial Sequence: Synthetic oligonucleotide
ccguggcuccucucugagg

SEQ ID NO: 763654 - RNA, 19 nt, Artificial Sequence
  Description of Artificial Sequence: Synthetic oligonucleotide
ucugugcguucggcagcac

SEQ ID NO: 763655 - RNA, 19 nt, Artificial Sequence
  Description of Artificial Sequence: Synthetic oligonucleotide
gccccuuuuggggaugaga

SEQ ID NO: 763656 - RNA, 19 nt, Artificial Sequence
  Description of Artificial Sequence: Synthetic oligonucleotide
ggccguaacuugguaaagu

SEQ ID NO: 763657 - RNA, 19 nt, Artificial Sequence
  Description of Artificial Sequence: Synthetic oligonucleotide
ccaaaccaaagcgggccuc

SEQ ID NO: 763658 - RNA, 19 nt, Artificial Sequence
  Description of Artificial Sequence: Synthetic oligonucleotide
gcagcguguggaugaccuc

SEQ ID NO: 763659 - RNA, 19 nt, Artificial Sequence
  Description of Artificial Sequence: Synthetic oligonucleotide
cacgcuggaggagcuucga

SEQ ID NO: 763660 - RNA, 19 nt, Artificial Sequence
  Description of Artificial Sequence: Synthetic oligonucleotide
ggcauccgagcagcgugug

SEQ ID NO: 763661 - RNA, 19 nt, Artificial Sequence
  Description of Artificial Sequence: Synthetic oligonucleotide
cuccuagaauucccguuuu

SEQ ID NO: 763662 - RNA, 19 nt, Artificial Sequence
  Description of Artificial Sequence: Synthetic oligonucleotide
cacuggcggacuccgaauu

SEQ ID NO: 763663 - RNA, 19 nt, Artificial Sequence
  Description of Artificial Sequence: Synthetic oligonucleotide
cucaguucuggagcgcgau

SEQ ID NO: 763664 - RNA, 19 nt, Artificial Sequence
  Description of Artificial Sequence: Synthetic oligonucleotide
gggcuucggacuggugggc

SEQ ID NO: 763665 - RNA, 19 nt, Artificial Sequence
  Description of Artificial Sequence: Synthetic oligonucleotide
gacuccgaauugccccuuu

SEQ ID NO: 763666 - RNA, 19 nt, Artificial Sequence
  Description of Artificial Sequence: Synthetic oligonucleotide
ggcuucggacuggugggca

SEQ ID NO: 763667 - RNA, 19 nt, Artificial Sequence
  Description of Artificial Sequence: Synthetic oligonucleotide
cccagaucgugggcauccg

SEQ ID NO: 763668 - RNA, 19 nt, Artificial Sequence
  Description of Artificial Sequence: Synthetic oligonucleotide
ucgcggcucuccgcuccug

SEQ ID NO: 763669 - RNA, 19 nt, Artificial Sequence
  Description of Artificial Sequence: Synthetic oligonucleotide
cgugggcauccgagcagcg

SEQ ID NO: 763670 - RNA, 19 nt, Artificial Sequence
  Description of Artificial Sequence: Synthetic oligonucleotide
gcuuaggugugaguccagu

SEQ ID NO: 763671 - RNA, 19 nt, Artificial Sequence
  Description of Artificial Sequence: Synthetic oligonucleotide
acccugcaugggaaggcuu

SEQ ID NO: 763672 - RNA, 19 nt, Artificial Sequence
  Description of Artificial Sequence: Synthetic oligonucleotide
cuuguuccgcuugggccgu

SEQ ID NO: 763673 - RNA, 19 nt, Artificial Sequence
  Description of Artificial Sequence: Synthetic oligonucleotide
ccagaucgugggcauccga

SEQ ID NO: 763674 - RNA, 19 nt, Artificial Sequence
  Description of Artificial Sequence: Synthetic oligonucleotide
gcccguggcuccucucuga

SEQ ID NO: 763675 - RNA, 19 nt, Artificial Sequence
  Description of Artificial Sequence: Synthetic oligonucleotide
cugaccgcucuguguugcu

SEQ ID NO: 763676 - RNA, 19 nt, Artificial Sequence
  Description of Artificial Sequence: Synthetic oligonucleotide
gcucaguucuggagcgcga

SEQ ID NO: 763677 - RNA, 19 nt, Artificial Sequence
  Description of Artificial Sequence: Synthetic oligonucleotide
cacccugcaugggaaggcu

SEQ ID NO: 763678 - RNA, 19 nt, Artificial Sequence
  Description of Artificial Sequence: Synthetic oligonucleotide
cgauuugauuagguugaga

SEQ ID NO: 763679 - RNA, 19 nt, Artificial Sequence
  Description of Artificial Sequence: Synthetic oligonucleotide
aggucgggaggcaguucuu

SEQ ID NO: 763680 - RNA, 19 nt, Artificial Sequence
  Description of Artificial Sequence: Synthetic oligonucleotide
guagggcccguggaauaau

SEQ ID NO: 763681 - RNA, 19 nt, Artificial Sequence
  Description of Artificial Sequence: Synthetic oligonucleotide
cgaauccgggcuucucaca

SEQ ID NO: 763682 - RNA, 19 nt, Artificial Sequence
  Description of Artificial Sequence: Synthetic oligonucleotide
gcccgcaucugaccgcucu

SEQ ID NO: 763683 - RNA, 19 nt, Artificial Sequence
  Description of Artificial Sequence: Synthetic oligonucleotide
ggcacuguuccgcccgcau

SEQ ID NO: 763684 - RNA, 19 nt, Artificial Sequence
  Description of Artificial Sequence: Synthetic oligonucleotide
ggccacucugugggcuacc

SEQ ID NO: 763685 - RNA, 19 nt, Artificial Sequence
  Description of Artificial Sequence: Synthetic oligonucleotide
guccacuggcggacuccga

SEQ ID NO: 763686 - RNA, 19 nt, Artificial Sequence
  Description of Artificial Sequence: Synthetic oligonucleotide
cccaaaccaaagcgggccu

SEQ ID NO: 763687 - RNA, 19 nt, Artificial Sequence
  Description of Artificial Sequence: Synthetic oligonucleotide
gcuugggccguaacuuggu

SEQ ID NO: 763688 - RNA, 19 nt, Artificial Sequence
  Description of Artificial Sequence: Synthetic oligonucleotide
cuuguccgaggggacuuuu

SEQ ID NO: 763689 - RNA, 19 nt, Artificial Sequence
  Description of Artificial Sequence: Synthetic oligonucleotide
uuguuccgcuugggccgua

SEQ ID NO: 763690 - RNA, 19 nt, Artificial Sequence
  Description of Artificial Sequence: Synthetic oligonucleotide
gugcguucggcagcaccau

SEQ ID NO: 763691 - RNA, 19 nt, Artificial Sequence
  Description of Artificial Sequence: Synthetic oligonucleotide
ggagcaccugggugcaguu

SEQ ID NO: 763692 - RNA, 19 nt, Artificial Sequence
  Description of Artificial Sequence: Synthetic oligonucleotide
ccgcucaguucuggagcgc

SEQ ID NO: 763693 - RNA, 19 nt, Artificial Sequence
  Description of Artificial Sequence: Synthetic oligonucleotide
ccgcucuguguugcucaag

SEQ ID NO: 763694 - RNA, 19 nt, Artificial Sequence
  Description of Artificial Sequence: Synthetic oligonucleotide
gggcauccgagcagcgugu

SEQ ID NO: 763695 - RNA, 19 nt, Artificial Sequence
  Description of Artificial Sequence: Synthetic oligonucleotide
gggcaauguguagcugccu

SEQ ID NO: 763696 - RNA, 19 nt, Artificial Sequence
  Description of Artificial Sequence: Synthetic oligonucleotide
ggcuaccccugcugucacu

SEQ ID NO: 763697 - RNA, 19 nt, Artificial Sequence
  Description of Artificial Sequence: Synthetic oligonucleotide
cguucggcagcaccauugu

SEQ ID NO: 763698 - RNA, 19 nt, Artificial Sequence
  Description of Artificial Sequence: Synthetic oligonucleotide
ggguggccgcucaguucug

SEQ ID NO: 763699 - RNA, 19 nt, Artificial Sequence
  Description of Artificial Sequence: Synthetic oligonucleotide
gccggccacucugugggcu

SEQ ID NO: 763700 - RNA, 19 nt, Artificial Sequence
  Description of Artificial Sequence: Synthetic oligonucleotide
ccggccacucugugggcua

SEQ ID NO: 763701 - RNA, 19 nt, Artificial Sequence
  Description of Artificial Sequence: Synthetic oligonucleotide
gcgcucaacccugcuugcu

SEQ ID NO: 763702 - RNA, 19 nt, Artificial Sequence
  Description of Artificial Sequence: Synthetic oligonucleotide
ccgcaucugaccgcucugu

SEQ ID NO: 763703 - RNA, 19 nt, Artificial Sequence
  Description of Artificial Sequence: Synthetic oligonucleotide
cgcucaacccugcuugcuu

SEQ ID NO: 763704 - RNA, 19 nt, Artificial Sequence
  Description of Artificial Sequence: Synthetic oligonucleotide
ccguggguggccgcucagu

SEQ ID NO: 763705 - RNA, 19 nt, Artificial Sequence
  Description of Artificial Sequence: Synthetic oligonucleotide
ccuuguccgaggggacuuu

SEQ ID NO: 763706 - RNA, 19 nt, Artificial Sequence
  Description of Artificial Sequence: Synthetic oligonucleotide
cgcccgcaucugaccgcuc

SEQ ID NO: 763707 - RNA, 19 nt, Artificial Sequence
  Description of Artificial Sequence: Synthetic oligonucleotide
auaagugauauucuuaugc

SEQ ID NO: 763708 - RNA, 19 nt, Artificial Sequence
  Description of Artificial Sequence: Synthetic oligonucleotide
aaucauauaauccagcgcu

SEQ ID NO: 763709 - RNA, 19 nt, Artificial Sequence
  Description of Artificial Sequence: Synthetic oligonucleotide
aguaaauuuacucaaauga

SEQ ID NO: 763710 - RNA, 19 nt, Artificial Sequence
  Description of Artificial Sequence: Synthetic oligonucleotide
aaauguucgacuaucaugg

SEQ ID NO: 763711 - RNA, 19 nt, Artificial Sequence
  Description of Artificial Sequence: Synthetic oligonucleotide
uuaacuguaaacaauucug

SEQ ID NO: 763712 - RNA, 19 nt, Artificial Sequence
  Description of Artificial Sequence: Synthetic oligonucleotide
aguaagucuacacagcagc

SEQ ID NO: 763713 - RNA, 19 nt, Artificial Sequence
  Description of Artificial Sequence: Synthetic oligonucleotide
uaaugauuggucuuuauag

SEQ ID NO: 763714 - RNA, 19 nt, Artificial Sequence
  Description of Artificial Sequence: Synthetic oligonucleotide
aauagcccaauuuagaaga

SEQ ID NO: 763715 - RNA, 19 nt, Artificial Sequence
  Description of Artificial Sequence: Synthetic oligonucleotide
uauauuaccaguauauccu

SEQ ID NO: 763716 - RNA, 19 nt, Artificial Sequence
  Description of Artificial Sequence: Synthetic oligonucleotide
ucuacaugaauguaaaccc

SEQ ID NO: 763717 - RNA, 19 nt, Artificial Sequence
  Description of Artificial Sequence: Synthetic oligonucleotide
uucauacuaaccauuagag

SEQ ID NO: 763718 - RNA, 19 nt, Artificial Sequence
  Description of Artificial Sequence: Synthetic oligonucleotide
cuugaagccaguuuaagcc

SEQ ID NO: 763719 - RNA, 19 nt, Artificial Sequence
  Description of Artificial Sequence: Synthetic oligonucleotide
uuaauauuacuuacuauga

SEQ ID NO: 763720 - RNA, 19 nt, Artificial Sequence
  Description of Artificial Sequence: Synthetic oligonucleotide
aaagggaugacgaacuagc

SEQ ID NO: 763721 - RNA, 19 nt, Artificial Sequence
  Description of Artificial Sequence: Synthetic oligonucleotide
uuugaauagcccaauuuag

SEQ ID NO: 763722 - RNA, 19 nt, Artificial Sequence
  Description of Artificial Sequence: Synthetic oligonucleotide
aaauuagccaaacuccaag

SEQ ID NO: 763723 - RNA, 19 nt, Artificial Sequence
  Description of Artificial Sequence: Synthetic oligonucleotide
aauucugaaacauguacga

SEQ ID NO: 763724 - RNA, 19 nt, Artificial Sequence
  Description of Artificial Sequence: Synthetic oligonucleotide
uccaguuaaacauucauac

SEQ ID NO: 763725 - RNA, 19 nt, Artificial Sequence
  Description of Artificial Sequence: Synthetic oligonucleotide
acacauaacaugaagauuc

SEQ ID NO: 763726 - RNA, 19 nt, Artificial Sequence
  Description of Artificial Sequence: Synthetic oligonucleotide
agauauacugcuuuucuuc

SEQ ID NO: 763727 - RNA, 19 nt, Artificial Sequence
  Description of Artificial Sequence: Synthetic oligonucleotide
ugggauuucauacuaacca

SEQ ID NO: 763728 - RNA, 19 nt, Artificial Sequence
  Description of Artificial Sequence: Synthetic oligonucleotide
caacuguuaauaaauaagc

SEQ ID NO: 763729 - RNA, 19 nt, Artificial Sequence
  Description of Artificial Sequence: Synthetic oligonucleotide
uaugguauaggauauauuu

SEQ ID NO: 763730 - RNA, 19 nt, Artificial Sequence
  Description of Artificial Sequence: Synthetic oligonucleotide
aaagaacuagauuucauau

SEQ ID NO: 763731 - RNA, 19 nt, Artificial Sequence
  Description of Artificial Sequence: Synthetic oligonucleotide
uguuauaacacauuggcuu

SEQ ID NO: 763732 - RNA, 19 nt, Artificial Sequence
  Description of Artificial Sequence: Synthetic oligonucleotide
cauacuaaccauuagagga

SEQ ID NO: 763733 - RNA, 19 nt, Artificial Sequence
  Description of Artificial Sequence: Synthetic oligonucleotide
aaccacuauauuuugacga

SEQ ID NO: 763734 - RNA, 19 nt, Artificial Sequence
  Description of Artificial Sequence: Synthetic oligonucleotide
uaaagacuuuacuagaggc

SEQ ID NO: 763735 - RNA, 19 nt, Artificial Sequence
  Description of Artificial Sequence: Synthetic oligonucleotide
uucuacaugaauguaaacc

SEQ ID NO: 763736 - RNA, 19 nt, Artificial Sequence
  Description of Artificial Sequence: Synthetic oligonucleotide
uguaacaaggauuuggaaa

SEQ ID NO: 763737 - RNA, 19 nt, Artificial Sequence
  Description of Artificial Sequence: Synthetic oligonucleotide
uuagagauccucuuucuag

SEQ ID NO: 763738 - RNA, 19 nt, Artificial Sequence
  Description of Artificial Sequence: Synthetic oligonucleotide
ugaaguaaagacuuuacua

SEQ ID NO: 763739 - RNA, 19 nt, Artificial Sequence
  Description of Artificial Sequence: Synthetic oligonucleotide
uuuugcauacuauaaguga

SEQ ID NO: 763740 - RNA, 19 nt, Artificial Sequence
  Description of Artificial Sequence: Synthetic oligonucleotide
agucgaacagucuucauag

SEQ ID NO: 763741 - RNA, 19 nt, Artificial Sequence
  Description of Artificial Sequence: Synthetic oligonucleotide
aaaccacuauauuuugacg

SEQ ID NO: 763742 - RNA, 19 nt, Artificial Sequence
  Description of Artificial Sequence: Synthetic oligonucleotide
uacuagugaaauuagagau

SEQ ID NO: 763743 - RNA, 19 nt, Artificial Sequence
  Description of Artificial Sequence: Synthetic oligonucleotide
aauuuuccggcagauggcc

SEQ ID NO: 763744 - RNA, 19 nt, Artificial Sequence
  Description of Artificial Sequence: Synthetic oligonucleotide
caauucugaaacauguacg

SEQ ID NO: 763745 - RNA, 19 nt, Artificial Sequence
  Description of Artificial Sequence: Synthetic oligonucleotide
auguguuggaacuuaaaag

SEQ ID NO: 763746 - RNA, 19 nt, Artificial Sequence
  Description of Artificial Sequence: Synthetic oligonucleotide
uuuacucaaaugaaguuaa

SEQ ID NO: 763747 - RNA, 19 nt, Artificial Sequence
  Description of Artificial Sequence: Synthetic oligonucleotide
aaugauuggucuuuauagu

SEQ ID NO: 763748 - RNA, 19 nt, Artificial Sequence
  Description of Artificial Sequence: Synthetic oligonucleotide
agaacuagauuucauauaa

SEQ ID NO: 763749 - RNA, 19 nt, Artificial Sequence
  Description of Artificial Sequence: Synthetic oligonucleotide
ucuacuuauguaagcagcc

SEQ ID NO: 763750 - RNA, 19 nt, Artificial Sequence
  Description of Artificial Sequence: Synthetic oligonucleotide
aagugauauucuuaugcag

SEQ ID NO: 763751 - RNA, 19 nt, Artificial Sequence
  Description of Artificial Sequence: Synthetic oligonucleotide
uguacaugguaucagugug

SEQ ID NO: 763752 - RNA, 19 nt, Artificial Sequence
  Description of Artificial Sequence: Synthetic oligonucleotide
ggaacuuaaaaguacaaug

SEQ ID NO: 763753 - RNA, 19 nt, Artificial Sequence
  Description of Artificial Sequence: Synthetic oligonucleotide
uuagaugagaguucugacc

SEQ ID NO: 763754 - RNA, 19 nt, Artificial Sequence
  Description of Artificial Sequence: Synthetic oligonucleotide
aagacuuuacuagaggcag

SEQ ID NO: 763755 - RNA, 19 nt, Artificial Sequence
  Description of Artificial Sequence: Synthetic oligonucleotide
uugguguuauaacacauug

SEQ ID NO: 763756 - RNA, 19 nt, Artificial Sequence
  Description of Artificial Sequence: Synthetic oligonucleotide
uuuauuugccaugucacag

SEQ ID NO: 763757 - RNA, 19 nt, Artificial Sequence
  Description of Artificial Sequence: Synthetic oligonucleotide
uaagccaacuauuacauau

SEQ ID NO: 763758 - RNA, 19 nt, Artificial Sequence
  Description of Artificial Sequence: Synthetic oligonucleotide
gaagaaaauagcugcacac

SEQ ID NO: 763759 - RNA, 19 nt, Artificial Sequence
  Description of Artificial Sequence: Synthetic oligonucleotide
ucauacuaaccauuagagg

SEQ ID NO: 763760 - RNA, 19 nt, Artificial Sequence
  Description of Artificial Sequence: Synthetic oligonucleotide
uuacuagugaaauuagaga

SEQ ID NO: 763761 - RNA, 19 nt, Artificial Sequence
  Description of Artificial Sequence: Synthetic oligonucleotide
cuagugaaauuagagaucc

SEQ ID NO: 763762 - RNA, 19 nt, Artificial Sequence
  Description of Artificial Sequence: Synthetic oligonucleotide
uucuuaaccuccuucaugu

SEQ ID NO: 763763 - RNA, 19 nt, Artificial Sequence
  Description of Artificial Sequence: Synthetic oligonucleotide
aauaaguucugucuuguuu

SEQ ID NO: 763764 - RNA, 19 nt, Artificial Sequence
  Description of Artificial Sequence: Synthetic oligonucleotide
agugaauauaaauuagcca

SEQ ID NO: 763765 - RNA, 19 nt, Artificial Sequence
  Description of Artificial Sequence: Synthetic oligonucleotide
acucaaaugaaguuaaaau

SEQ ID NO: 763766 - RNA, 19 nt, Artificial Sequence
  Description of Artificial Sequence: Synthetic oligonucleotide
cacuauauuuugacgaugg

SEQ ID NO: 763767 - RNA, 19 nt, Artificial Sequence
  Description of Artificial Sequence: Synthetic oligonucleotide
uguucgacuaucauggcgu

SEQ ID NO: 763768 - RNA, 19 nt, Artificial Sequence
  Description of Artificial Sequence: Synthetic oligonucleotide
uuugcauacuauaagugau

SEQ ID NO: 763769 - RNA, 19 nt, Artificial Sequence
  Description of Artificial Sequence: Synthetic oligonucleotide
gauuggucuuuauaguucc

SEQ ID NO: 763770 - RNA, 19 nt, Artificial Sequence
  Description of Artificial Sequence: Synthetic oligonucleotide
cuauccucacuaaauaagc

SEQ ID NO: 763771 - RNA, 19 nt, Artificial Sequence
  Description of Artificial Sequence: Synthetic oligonucleotide
agccaagugagauauacug

SEQ ID NO: 763772 - RNA, 19 nt, Artificial Sequence
  Description of Artificial Sequence: Synthetic oligonucleotide
gaauagcccaauuuagaag

SEQ ID NO: 763773 - RNA, 19 nt, Artificial Sequence
  Description of Artificial Sequence: Synthetic oligonucleotide
uuaaggcauuuguacaugg

SEQ ID NO: 763774 - RNA, 19 nt, Artificial Sequence
  Description of Artificial Sequence: Synthetic oligonucleotide
ugagauauacugcuuuucu

SEQ ID NO: 763775 - RNA, 19 nt, Artificial Sequence
  Description of Artificial Sequence: Synthetic oligonucleotide
gauuguuaggauuucauua

SEQ ID NO: 763776 - RNA, 19 nt, Artificial Sequence
  Description of Artificial Sequence: Synthetic oligonucleotide
uauccuggaaccaaaguaa

SEQ ID NO: 763777 - RNA, 19 nt, Artificial Sequence
  Description of Artificial Sequence: Synthetic oligonucleotide
aaauuuuccggcagauggc

SEQ ID NO: 763778 - RNA, 19 nt, Artificial Sequence
  Description of Artificial Sequence: Synthetic oligonucleotide
ucuuaugcaggauugaguu

SEQ ID NO: 763779 - RNA, 19 nt, Artificial Sequence
  Description of Artificial Sequence: Synthetic oligonucleotide
ucacuaaauaagcuacaag

SEQ ID NO: 763780 - RNA, 19 nt, Artificial Sequence
  Description of Artificial Sequence: Synthetic oligonucleotide
uauuacugcuugaagccag

SEQ ID NO: 763781 - RNA, 19 nt, Artificial Sequence
  Description of Artificial Sequence: Synthetic oligonucleotide
uugaaguaaagacuuuacu

SEQ ID NO: 763782 - RNA, 19 nt, Artificial Sequence
  Description of Artificial Sequence: Synthetic oligonucleotide
aauguucgacuaucauggc

SEQ ID NO: 763783 - RNA, 19 nt, Artificial Sequence
  Description of Artificial Sequence: Synthetic oligonucleotide
ugguguuauaacacauugg

SEQ ID NO: 763784 - RNA, 19 nt, Artificial Sequence
  Description of Artificial Sequence: Synthetic oligonucleotide
caugguaucaguguggaac

SEQ ID NO: 763785 - RNA, 19 nt, Artificial Sequence
  Description of Artificial Sequence: Synthetic oligonucleotide
guuuaagccaacuauuaca

SEQ ID NO: 763786 - RNA, 19 nt, Artificial Sequence
  Description of Artificial Sequence: Synthetic oligonucleotide
uauuaccaguauauccugg

SEQ ID NO: 763787 - RNA, 19 nt, Artificial Sequence
  Description of Artificial Sequence: Synthetic oligonucleotide
uugaauagcccaauuuaga

SEQ ID NO: 763788 - RNA, 19 nt, Artificial Sequence
  Description of Artificial Sequence: Synthetic oligonucleotide
uuuucagaacacauguagu

SEQ ID NO: 763789 - RNA, 19 nt, Artificial Sequence
  Description of Artificial Sequence: Synthetic oligonucleotide
ugaauagcccaauuuagaa

SEQ ID NO: 763790 - RNA, 19 nt, Artificial Sequence
  Description of Artificial Sequence: Synthetic oligonucleotide
ucuucuauccucacuaaau

SEQ ID NO: 763791 - RNA, 19 nt, Artificial Sequence
  Description of Artificial Sequence: Synthetic oligonucleotide
aauaugguauaggauauau

SEQ ID NO: 763792 - RNA, 19 nt, Artificial Sequence
  Description of Artificial Sequence: Synthetic oligonucleotide
uucauagugcacuuucacc

SEQ ID NO: 763793 - RNA, 19 nt, Artificial Sequence
  Description of Artificial Sequence: Synthetic oligonucleotide
uuaaugauuggucuuuaua

SEQ ID NO: 763794 - RNA, 19 nt, Artificial Sequence
  Description of Artificial Sequence: Synthetic oligonucleotide
uuacuaugauguuuuaaac

SEQ ID NO: 763795 - RNA, 19 nt, Artificial Sequence
  Description of Artificial Sequence: Synthetic oligonucleotide
uggucuuuauaguuccugg

SEQ ID NO: 763796 - RNA, 19 nt, Artificial Sequence
  Description of Artificial Sequence: Synthetic oligonucleotide
uuuggagauuucuuaaccu

SEQ ID NO: 763797 - RNA, 19 nt, Artificial Sequence
  Description of Artificial Sequence: Synthetic oligonucleotide
ugguauaggauauauuuua

SEQ ID NO: 763798 - RNA, 19 nt, Artificial Sequence
  Description of Artificial Sequence: Synthetic oligonucleotide
uguucuacuuauguaagca

SEQ ID NO: 763799 - RNA, 19 nt, Artificial Sequence
  Description of Artificial Sequence: Synthetic oligonucleotide
uauuugccaugucacagcc

SEQ ID NO: 763800 - RNA, 19 nt, Artificial Sequence
  Description of Artificial Sequence: Synthetic oligonucleotide
uuauguaagcagccaacug

SEQ ID NO: 763801 - RNA, 19 nt, Artificial Sequence
  Description of Artificial Sequence: Synthetic oligonucleotide
uuuagaagaugaaaucuuu

SEQ ID NO: 763802 - RNA, 19 nt, Artificial Sequence
  Description of Artificial Sequence: Synthetic oligonucleotide
uuuuaucaugccagaagca

SEQ ID NO: 763803 - RNA, 19 nt, Artificial Sequence
  Description of Artificial Sequence: Synthetic oligonucleotide
uuagcuauauuaccaguau

SEQ ID NO: 763804 - RNA, 19 nt, Artificial Sequence
  Description of Artificial Sequence: Synthetic oligonucleotide
auaaguucugucuuguuuu

SEQ ID NO: 763805 - RNA, 19 nt, Artificial Sequence
  Description of Artificial Sequence: Synthetic oligonucleotide
agagauauugguguuauaa

SEQ ID NO: 763806 - RNA, 19 nt, Artificial Sequence
  Description of Artificial Sequence: Synthetic oligonucleotide
ucaauaauuaaggcauuug

SEQ ID NO: 763807 - RNA, 19 nt, Artificial Sequence
  Description of Artificial Sequence: Synthetic oligonucleotide
gagauauugguguuauaac

SEQ ID NO: 763808 - RNA, 19 nt, Artificial Sequence
  Description of Artificial Sequence: Synthetic oligonucleotide
auuuagaugagaguucuga

SEQ ID NO: 763809 - RNA, 19 nt, Artificial Sequence
  Description of Artificial Sequence: Synthetic oligonucleotide
uaucauggcguaaauuuuc

SEQ ID NO: 763810 - RNA, 19 nt, Artificial Sequence
  Description of Artificial Sequence: Synthetic oligonucleotide
auguucgacuaucauggcg

SEQ ID NO: 763811 - RNA, 19 nt, Artificial Sequence
  Description of Artificial Sequence: Synthetic oligonucleotide
ugauuggucuuuauaguuc

SEQ ID NO: 763812 - RNA, 19 nt, Artificial Sequence
  Description of Artificial Sequence: Synthetic oligonucleotide
uauaagugauauucuuaug

SEQ ID NO: 763813 - RNA, 19 nt, Artificial Sequence
  Description of Artificial Sequence: Synthetic oligonucleotide
ggcuuaucaauaauuaagg

SEQ ID NO: 763814 - RNA, 19 nt, Artificial Sequence
  Description of Artificial Sequence: Synthetic oligonucleotide
aagaacuagauuucauaua

SEQ ID NO: 763815 - RNA, 19 nt, Artificial Sequence
  Description of Artificial Sequence: Synthetic oligonucleotide
aguaaagacuuuacuagag

SEQ ID NO: 763816 - RNA, 19 nt, Artificial Sequence
  Description of Artificial Sequence: Synthetic oligonucleotide
aauguaaaccccugauuua

SEQ ID NO: 763817 - RNA, 19 nt, Artificial Sequence
  Description of Artificial Sequence: Synthetic oligonucleotide
auauugguguuauaacaca

SEQ ID NO: 763818 - RNA, 19 nt, Artificial Sequence
  Description of Artificial Sequence: Synthetic oligonucleotide
uaccaguauauccuggaac

SEQ ID NO: 763819 - RNA, 19 nt, Artificial Sequence
  Description of Artificial Sequence: Synthetic oligonucleotide
ugacgaacuagcuuucugu

SEQ ID NO: 763820 - RNA, 19 nt, Artificial Sequence
  Description of Artificial Sequence: Synthetic oligonucleotide
aacagagaugcuaaaauuu

SEQ ID NO: 763821 - RNA, 19 nt, Artificial Sequence
  Description of Artificial Sequence: Synthetic oligonucleotide
uuagugguuuuauuaugug

SEQ ID NO: 763822 - RNA, 19 nt, Artificial Sequence
  Description of Artificial Sequence: Synthetic oligonucleotide
uugguuagaacaggaaggc

SEQ ID NO: 763823 - RNA, 19 nt, Artificial Sequence
  Description of Artificial Sequence: Synthetic oligonucleotide
uuguacaugguaucagugu

SEQ ID NO: 763824 - RNA, 19 nt, Artificial Sequence
  Description of Artificial Sequence: Synthetic oligonucleotide
aagugagauauacugcuuu

SEQ ID NO: 763825 - RNA, 19 nt, Artificial Sequence
  Description of Artificial Sequence: Synthetic oligonucleotide
uauccucacuaaauaagcu

SEQ ID NO: 763826 - RNA, 19 nt, Artificial Sequence
  Description of Artificial Sequence: Synthetic oligonucleotide
uucuuaugcaggauugagu

SEQ ID NO: 763827 - RNA, 19 nt, Artificial Sequence
  Description of Artificial Sequence: Synthetic oligonucleotide
agcugcacacauuuaagug

SEQ ID NO: 763828 - RNA, 19 nt, Artificial Sequence
  Description of Artificial Sequence: Synthetic oligonucleotide
gaugcaauguguuggaacu

SEQ ID NO: 763829 - RNA, 19 nt, Artificial Sequence
  Description of Artificial Sequence: Synthetic oligonucleotide
aagucuacacagcagccaa

SEQ ID NO: 763830 - RNA, 19 nt, Artificial Sequence
  Description of Artificial Sequence: Synthetic oligonucleotide
auuaccaguauauccugga

SEQ ID NO: 763831 - RNA, 19 nt, Artificial Sequence
  Description of Artificial Sequence: Synthetic oligonucleotide
aagucgaacagucuucaua

SEQ ID NO: 763832 - RNA, 19 nt, Artificial Sequence
  Description of Artificial Sequence: Synthetic oligonucleotide
ugaaauuagagauccucuu

SEQ ID NO: 763833 - RNA, 19 nt, Artificial Sequence
  Description of Artificial Sequence: Synthetic oligonucleotide
acuuauguaagcagccaac

SEQ ID NO: 763834 - RNA, 19 nt, Artificial Sequence
  Description of Artificial Sequence: Synthetic oligonucleotide
acuagugaaauuagagauc

SEQ ID NO: 763835 - RNA, 19 nt, Artificial Sequence
  Description of Artificial Sequence: Synthetic oligonucleotide
uacuuauguaagcagccaa

SEQ ID NO: 763836 - RNA, 19 nt, Artificial Sequence
  Description of Artificial Sequence: Synthetic oligonucleotide
uccugagaaaccacuauau

SEQ ID NO: 763837 - RNA, 19 nt, Artificial Sequence
  Description of Artificial Sequence: Synthetic oligonucleotide
uccuguaaacuauugguua

SEQ ID NO: 763838 - RNA, 19 nt, Artificial Sequence
  Description of Artificial Sequence: Synthetic oligonucleotide
uaaauuagccaaacuccaa

SEQ ID NO: 763839 - RNA, 19 nt, Artificial Sequence
  Description of Artificial Sequence: Synthetic oligonucleotide
uaggauuucauuagugguu

SEQ ID NO: 763840 - RNA, 19 nt, Artificial Sequence
  Description of Artificial Sequence: Synthetic oligonucleotide
gagaaaccacuauauuuug

SEQ ID NO: 763841 - RNA, 19 nt, Artificial Sequence
  Description of Artificial Sequence: Synthetic oligonucleotide
gacgaacuagcuuucugug

SEQ ID NO: 763842 - RNA, 19 nt, Artificial Sequence
  Description of Artificial Sequence: Synthetic oligonucleotide
gcuuaguucuguaacaagg

SEQ ID NO: 763843 - RNA, 19 nt, Artificial Sequence
  Description of Artificial Sequence: Synthetic oligonucleotide
uucacuuauacuucucuuu

SEQ ID NO: 763844 - RNA, 19 nt, Artificial Sequence
  Description of Artificial Sequence: Synthetic oligonucleotide
uaguucuguaacaaggauu

SEQ ID NO: 763845 - RNA, 19 nt, Artificial Sequence
  Description of Artificial Sequence: Synthetic oligonucleotide
uacguccuuagcuauauua

SEQ ID NO: 763846 - RNA, 19 nt, Artificial Sequence
  Description of Artificial Sequence: Synthetic oligonucleotide
aguaagaauugguuuuccu

SEQ ID NO: 763847 - RNA, 19 nt, Artificial Sequence
  Description of Artificial Sequence: Synthetic oligonucleotide
uacuauaagugauauucuu

SEQ ID NO: 763848 - RNA, 19 nt, Artificial Sequence
  Description of Artificial Sequence: Synthetic oligonucleotide
guuuugcauacuauaagug

SEQ ID NO: 763849 - RNA, 19 nt, Artificial Sequence
  Description of Artificial Sequence: Synthetic oligonucleotide
aguucuguaacaaggauuu

SEQ ID NO: 763850 - RNA, 19 nt, Artificial Sequence
  Description of Artificial Sequence: Synthetic oligonucleotide
aaguagauuguuaggauuu

SEQ ID NO: 763851 - RNA, 19 nt, Artificial Sequence
  Description of Artificial Sequence: Synthetic oligonucleotide
cuuaguucuguaacaagga

SEQ ID NO: 763852 - RNA, 19 nt, Artificial Sequence
  Description of Artificial Sequence: Synthetic oligonucleotide
guagagaugcaauguguug

SEQ ID NO: 763853 - RNA, 19 nt, Artificial Sequence
  Description of Artificial Sequence: Synthetic oligonucleotide
acggccauaaagauucuac

SEQ ID NO: 763854 - RNA, 19 nt, Artificial Sequence
  Description of Artificial Sequence: Synthetic oligonucleotide
uuggcuuaucaauaauuaa

SEQ ID NO: 763855 - RNA, 19 nt, Artificial Sequence
  Description of Artificial Sequence: Synthetic oligonucleotide
uacucaaaugaaguuaaaa

SEQ ID NO: 763856 - RNA, 19 nt, Artificial Sequence
  Description of Artificial Sequence: Synthetic oligonucleotide
gaagaugaaaucuuucaau

SEQ ID NO: 763857 - RNA, 19 nt, Artificial Sequence
  Description of Artificial Sequence: Synthetic oligonucleotide
agcuauauuaccaguauau

SEQ ID NO: 763858 - RNA, 19 nt, Artificial Sequence
  Description of Artificial Sequence: Synthetic oligonucleotide
augauuggucuuuauaguu

SEQ ID NO: 763859 - RNA, 19 nt, Artificial Sequence
  Description of Artificial Sequence: Synthetic oligonucleotide
uaacuacaaauguucgacu

SEQ ID NO: 763860 - RNA, 19 nt, Artificial Sequence
  Description of Artificial Sequence: Synthetic oligonucleotide
gaaucacuggcauuaacua

SEQ ID NO: 763861 - RNA, 19 nt, Artificial Sequence
  Description of Artificial Sequence: Synthetic oligonucleotide
agaucuacuuuuggaaauc

SEQ ID NO: 763862 - RNA, 19 nt, Artificial Sequence
  Description of Artificial Sequence: Synthetic oligonucleotide
acguccuuagcuauauuac

SEQ ID NO: 763863 - RNA, 19 nt, Artificial Sequence
  Description of Artificial Sequence: Synthetic oligonucleotide
gacccagcaguucuuaaac

SEQ ID NO: 763864 - RNA, 19 nt, Artificial Sequence
  Description of Artificial Sequence: Synthetic oligonucleotide
ucuuucaaugcaacuguua

SEQ ID NO: 763865 - RNA, 19 nt, Artificial Sequence
  Description of Artificial Sequence: Synthetic oligonucleotide
augguaucaguguggaaca

SEQ ID NO: 763866 - RNA, 19 nt, Artificial Sequence
  Description of Artificial Sequence: Synthetic oligonucleotide
gugaaguagauuguuagga

SEQ ID NO: 763867 - RNA, 19 nt, Artificial Sequence
  Description of Artificial Sequence: Synthetic oligonucleotide
augcuaaaauuuucucaag

SEQ ID NO: 763868 - RNA, 19 nt, Artificial Sequence
  Description of Artificial Sequence: Synthetic oligonucleotide
ugcacaagccaguucauuu

SEQ ID NO: 763869 - RNA, 19 nt, Artificial Sequence
  Description of Artificial Sequence: Synthetic oligonucleotide
agaaagucaaagcuacauu

SEQ ID NO: 763870 - RNA, 19 nt, Artificial Sequence
  Description of Artificial Sequence: Synthetic oligonucleotide
aagaauugguuuuccuguu

SEQ ID NO: 763871 - RNA, 19 nt, Artificial Sequence
  Description of Artificial Sequence: Synthetic oligonucleotide
cuuuuaggggacugcuuag

SEQ ID NO: 763872 - RNA, 19 nt, Artificial Sequence
  Description of Artificial Sequence: Synthetic oligonucleotide
uguaaacuauugguuagaa

SEQ ID NO: 763873 - RNA, 19 nt, Artificial Sequence
  Description of Artificial Sequence: Synthetic oligonucleotide
acaggaaggcaaucuacca

SEQ ID NO: 763874 - RNA, 19 nt, Artificial Sequence
  Description of Artificial Sequence: Synthetic oligonucleotide
uaagucuacacagcagcca

SEQ ID NO: 763875 - RNA, 19 nt, Artificial Sequence
  Description of Artificial Sequence: Synthetic oligonucleotide
ugcauacuauaagugauau

SEQ ID NO: 763876 - RNA, 19 nt, Artificial Sequence
  Description of Artificial Sequence: Synthetic oligonucleotide
guuauaacacauuggcuua

SEQ ID NO: 763877 - RNA, 19 nt, Artificial Sequence
  Description of Artificial Sequence: Synthetic oligonucleotide
acuguucuacuuauguaag

SEQ ID NO: 763878 - RNA, 19 nt, Artificial Sequence
  Description of Artificial Sequence: Synthetic oligonucleotide
aguagauuguuaggauuuc

SEQ ID NO: 763879 - RNA, 19 nt, Artificial Sequence
  Description of Artificial Sequence: Synthetic oligonucleotide
agcgcuguuugaauagccc

SEQ ID NO: 763880 - RNA, 19 nt, Artificial Sequence
  Description of Artificial Sequence: Synthetic oligonucleotide
gauugaguuaagacccagc

SEQ ID NO: 763881 - RNA, 19 nt, Artificial Sequence
  Description of Artificial Sequence: Synthetic oligonucleotide
guuggaacuuaaaaguaca

SEQ ID NO: 763882 - RNA, 19 nt, Artificial Sequence
  Description of Artificial Sequence: Synthetic oligonucleotide
auuuugacgaugggcuuuc

SEQ ID NO: 763883 - RNA, 19 nt, Artificial Sequence
  Description of Artificial Sequence: Synthetic oligonucleotide
cuuagcuauauuaccagua

SEQ ID NO: 763884 - RNA, 19 nt, Artificial Sequence
  Description of Artificial Sequence: Synthetic oligonucleotide
agcccaauuuagaagauga

SEQ ID NO: 763885 - RNA, 19 nt, Artificial Sequence
  Description of Artificial Sequence: Synthetic oligonucleotide
cagaacuugggccauuguc

SEQ ID NO: 763886 - RNA, 19 nt, Artificial Sequence
  Description of Artificial Sequence: Synthetic oligonucleotide
uuaccaguauauccuggaa

SEQ ID NO: 763887 - RNA, 19 nt, Artificial Sequence
  Description of Artificial Sequence: Synthetic oligonucleotide
ucgacuaucauggcguaaa

SEQ ID NO: 763888 - RNA, 19 nt, Artificial Sequence
  Description of Artificial Sequence: Synthetic oligonucleotide
uugcauacuauaagugaua

SEQ ID NO: 763889 - RNA, 19 nt, Artificial Sequence
  Description of Artificial Sequence: Synthetic oligonucleotide
augacgaacuagcuuucug

SEQ ID NO: 763890 - RNA, 19 nt, Artificial Sequence
  Description of Artificial Sequence: Synthetic oligonucleotide
cuugcgcaguuuaucuggg

SEQ ID NO: 763891 - RNA, 19 nt, Artificial Sequence
  Description of Artificial Sequence: Synthetic oligonucleotide
guuaagacccagcaguucu

SEQ ID NO: 763892 - RNA, 19 nt, Artificial Sequence
  Description of Artificial Sequence: Synthetic oligonucleotide
acuauugguuagaacagga

SEQ ID NO: 763893 - RNA, 19 nt, Artificial Sequence
  Description of Artificial Sequence: Synthetic oligonucleotide
accauuagaggagguagag

SEQ ID NO: 763894 - RNA, 19 nt, Artificial Sequence
  Description of Artificial Sequence: Synthetic oligonucleotide
accacuauauuuugacgau

SEQ ID NO: 763895 - RNA, 19 nt, Artificial Sequence
  Description of Artificial Sequence: Synthetic oligonucleotide
auuaaugauuggucuuuau

SEQ ID NO: 763896 - RNA, 19 nt, Artificial Sequence
  Description of Artificial Sequence: Synthetic oligonucleotide
uuuaggggacugcuuaguu

SEQ ID NO: 763897 - RNA, 19 nt, Artificial Sequence
  Description of Artificial Sequence: Synthetic oligonucleotide
aggcaaucuaccacaacuc

SEQ ID NO: 763898 - RNA, 19 nt, Artificial Sequence
  Description of Artificial Sequence: Synthetic oligonucleotide
uaauccagcgcuguuugaa

SEQ ID NO: 763899 - RNA, 19 nt, Artificial Sequence
  Description of Artificial Sequence: Synthetic oligonucleotide
agcauuaacuguaaacaau

SEQ ID NO: 763900 - RNA, 19 nt, Artificial Sequence
  Description of Artificial Sequence: Synthetic oligonucleotide
accaaacggccauaaagau

SEQ ID NO: 763901 - RNA, 19 nt, Artificial Sequence
  Description of Artificial Sequence: Synthetic oligonucleotide
auuagagauccucuuucua

SEQ ID NO: 763902 - RNA, 19 nt, Artificial Sequence
  Description of Artificial Sequence: Synthetic oligonucleotide
acuauaagugauauucuua

SEQ ID NO: 763903 - RNA, 19 nt, Artificial Sequence
  Description of Artificial Sequence: Synthetic oligonucleotide
guaagucuacacagcagcc

SEQ ID NO: 763904 - RNA, 19 nt, Artificial Sequence
  Description of Artificial Sequence: Synthetic oligonucleotide
ucuuucuaggaagaucaau

SEQ ID NO: 763905 - RNA, 19 nt, Artificial Sequence
  Description of Artificial Sequence: Synthetic oligonucleotide
uuccuggaaauaaguucug

SEQ ID NO: 763906 - RNA, 19 nt, Artificial Sequence
  Description of Artificial Sequence: Synthetic oligonucleotide
acgaacuagcuuucuguga

SEQ ID NO: 763907 - RNA, 19 nt, Artificial Sequence
  Description of Artificial Sequence: Synthetic oligonucleotide
auacuauaagugauauucu

SEQ ID NO: 763908 - RNA, 19 nt, Artificial Sequence
  Description of Artificial Sequence: Synthetic oligonucleotide
uugggccauugucucgugg

SEQ ID NO: 763909 - RNA, 19 nt, Artificial Sequence
  Description of Artificial Sequence: Synthetic oligonucleotide
auguaaaccccugauuuaa

SEQ ID NO: 763910 - RNA, 19 nt, Artificial Sequence
  Description of Artificial Sequence: Synthetic oligonucleotide
uguaaaccccugauuuaau

SEQ ID NO: 763911 - RNA, 19 nt, Artificial Sequence
  Description of Artificial Sequence: Synthetic oligonucleotide
ggcaaucuaccacaacucc

SEQ ID NO: 763912 - RNA, 19 nt, Artificial Sequence
  Description of Artificial Sequence: Synthetic oligonucleotide
uuguccaacuguucuacuu

SEQ ID NO: 763913 - RNA, 19 nt, Artificial Sequence
  Description of Artificial Sequence: Synthetic oligonucleotide
uuuuaggggacugcuuagu

SEQ ID NO: 763914 - RNA, 19 nt, Artificial Sequence
  Description of Artificial Sequence: Synthetic oligonucleotide
ccuugcgcaguuuaucugg

SEQ ID NO: 763915 - RNA, 19 nt, Artificial Sequence
  Description of Artificial Sequence: Synthetic oligonucleotide
uauuuccaucacuuguaau

SEQ ID NO: 763916 - RNA, 19 nt, Artificial Sequence
  Description of Artificial Sequence: Synthetic oligonucleotide
cauagugcacuuucaccuc

SEQ ID NO: 763917 - RNA, 19 nt, Artificial Sequence
  Description of Artificial Sequence: Synthetic oligonucleotide
gaaguagauuguuaggauu

SEQ ID NO: 763918 - RNA, 19 nt, Artificial Sequence
  Description of Artificial Sequence: Synthetic oligonucleotide
ucuacguccuuagcuauau

SEQ ID NO: 763919 - RNA, 19 nt, Artificial Sequence
  Description of Artificial Sequence: Synthetic oligonucleotide
uauuuugacgaugggcuuu

SEQ ID NO: 763920 - RNA, 19 nt, Artificial Sequence
  Description of Artificial Sequence: Synthetic oligonucleotide
aaagucgaacagucuucau

SEQ ID NO: 763921 - RNA, 19 nt, Artificial Sequence
  Description of Artificial Sequence: Synthetic oligonucleotide
auaguuugcugggauuuca

SEQ ID NO: 763922 - RNA, 19 nt, Artificial Sequence
  Description of Artificial Sequence: Synthetic oligonucleotide
acgaugggcuuucuugucu

SEQ ID NO: 763923 - RNA, 19 nt, Artificial Sequence
  Description of Artificial Sequence: Synthetic oligonucleotide
gaucuacuuuuggaaauca

SEQ ID NO: 763924 - RNA, 19 nt, Artificial Sequence
  Description of Artificial Sequence: Synthetic oligonucleotide
cucgugguccugagaaacc

SEQ ID NO: 763925 - RNA, 19 nt, Artificial Sequence
  Description of Artificial Sequence: Synthetic oligonucleotide
ugcaauguguuggaacuua

SEQ ID NO: 763926 - RNA, 19 nt, Artificial Sequence
  Description of Artificial Sequence: Synthetic oligonucleotide
aggauuucauuagugguuu

SEQ ID NO: 763927 - RNA, 19 nt, Artificial Sequence
  Description of Artificial Sequence: Synthetic oligonucleotide
agggaugacgaacuagcuu

SEQ ID NO: 763928 - RNA, 19 nt, Artificial Sequence
  Description of Artificial Sequence: Synthetic oligonucleotide
ucgugguccugagaaacca

SEQ ID NO: 763929 - RNA, 19 nt, Artificial Sequence
  Description of Artificial Sequence: Synthetic oligonucleotide
agacccagcaguucuuaaa

SEQ ID NO: 763930 - RNA, 19 nt, Artificial Sequence
  Description of Artificial Sequence: Synthetic oligonucleotide
uauaguuugcugggauuuc

SEQ ID NO: 763931 - RNA, 19 nt, Artificial Sequence
  Description of Artificial Sequence: Synthetic oligonucleotide
caaggauuuggaaagggau

SEQ ID NO: 763932 - RNA, 19 nt, Artificial Sequence
  Description of Artificial Sequence: Synthetic oligonucleotide
cagcauuaacuguaaacaa

SEQ ID NO: 763933 - RNA, 19 nt, Artificial Sequence
  Description of Artificial Sequence: Synthetic oligonucleotide
cuauugguuagaacaggaa

SEQ ID NO: 763934 - RNA, 19 nt, Artificial Sequence
  Description of Artificial Sequence: Synthetic oligonucleotide
cagcgcuguuugaauagcc

SEQ ID NO: 763935 - RNA, 19 nt, Artificial Sequence
  Description of Artificial Sequence: Synthetic oligonucleotide
accuugcgcaguuuaucug

SEQ ID NO: 763936 - RNA, 19 nt, Artificial Sequence
  Description of Artificial Sequence: Synthetic oligonucleotide
ggcguaaauuuuccggcag

SEQ ID NO: 763937 - RNA, 19 nt, Artificial Sequence
  Description of Artificial Sequence: Synthetic oligonucleotide
aaccccugauuuaauucca

SEQ ID NO: 763938 - RNA, 19 nt, Artificial Sequence
  Description of Artificial Sequence: Synthetic oligonucleotide
cacauuggcuuaucaauaa

SEQ ID NO: 763939 - RNA, 19 nt, Artificial Sequence
  Description of Artificial Sequence: Synthetic oligonucleotide
uagugaaauuagagauccu

SEQ ID NO: 763940 - RNA, 19 nt, Artificial Sequence
  Description of Artificial Sequence: Synthetic oligonucleotide
ugguuagaacaggaaggca

SEQ ID NO: 763941 - RNA, 19 nt, Artificial Sequence
  Description of Artificial Sequence: Synthetic oligonucleotide
aagccaguuuaagccaacu

SEQ ID NO: 763942 - RNA, 19 nt, Artificial Sequence
  Description of Artificial Sequence: Synthetic oligonucleotide
ggcauuuguacaugguauc

SEQ ID NO: 763943 - RNA, 19 nt, Artificial Sequence
  Description of Artificial Sequence: Synthetic oligonucleotide
gacuuuacuagaggcagua

SEQ ID NO: 763944 - RNA, 19 nt, Artificial Sequence
  Description of Artificial Sequence: Synthetic oligonucleotide
agcuacauucaaucucaaa

SEQ ID NO: 763945 - RNA, 19 nt, Artificial Sequence
  Description of Artificial Sequence: Synthetic oligonucleotide
acuugggccauugucucgu

SEQ ID NO: 763946 - RNA, 19 nt, Artificial Sequence
  Description of Artificial Sequence: Synthetic oligonucleotide
guagauuguuaggauuuca

SEQ ID NO: 763947 - RNA, 19 nt, Artificial Sequence
  Description of Artificial Sequence: Synthetic oligonucleotide
agccaacuguuuuggagau

SEQ ID NO: 763948 - RNA, 19 nt, Artificial Sequence
  Description of Artificial Sequence: Synthetic oligonucleotide
aagccaacuauuacauauu

SEQ ID NO: 763949 - RNA, 19 nt, Artificial Sequence
  Description of Artificial Sequence: Synthetic oligonucleotide
gugaaauuagagauccucu

SEQ ID NO: 763950 - RNA, 19 nt, Artificial Sequence
  Description of Artificial Sequence: Synthetic oligonucleotide
gugagauauacugcuuuuc

SEQ ID NO: 763951 - RNA, 19 nt, Artificial Sequence
  Description of Artificial Sequence: Synthetic oligonucleotide
acacauuggcuuaucaaua

SEQ ID NO: 763952 - RNA, 19 nt, Artificial Sequence
  Description of Artificial Sequence: Synthetic oligonucleotide
cucacuaaauaagcuacaa

SEQ ID NO: 763953 - RNA, 19 nt, Artificial Sequence
  Description of Artificial Sequence: Synthetic oligonucleotide
uugcgcaguuuaucugggc

SEQ ID NO: 763954 - RNA, 19 nt, Artificial Sequence
  Description of Artificial Sequence: Synthetic oligonucleotide
gggaugacgaacuagcuuu

SEQ ID NO: 763955 - RNA, 19 nt, Artificial Sequence
  Description of Artificial Sequence: Synthetic oligonucleotide
gcuauauuaccaguauauc

SEQ ID NO: 763956 - RNA, 19 nt, Artificial Sequence
  Description of Artificial Sequence: Synthetic oligonucleotide
cguccuuagcuauauuacc

SEQ ID NO: 763957 - RNA, 19 nt, Artificial Sequence
  Description of Artificial Sequence: Synthetic oligonucleotide
cuacuuauguaagcagcca

SEQ ID NO: 763958 - RNA, 19 nt, Artificial Sequence
  Description of Artificial Sequence: Synthetic oligonucleotide
cuuauguaagcagccaacu

SEQ ID NO: 763959 - RNA, 19 nt, Artificial Sequence
  Description of Artificial Sequence: Synthetic oligonucleotide
cuguaacaaggauuuggaa

SEQ ID NO: 763960 - RNA, 19 nt, Artificial Sequence
  Description of Artificial Sequence: Synthetic oligonucleotide
caaggucuucuauccucac

SEQ ID NO: 763961 - RNA, 19 nt, Artificial Sequence
  Description of Artificial Sequence: Synthetic oligonucleotide
uaagacccagcaguucuua

SEQ ID NO: 763962 - RNA, 19 nt, Artificial Sequence
  Description of Artificial Sequence: Synthetic oligonucleotide
ggauugaguuaagacccag

SEQ ID NO: 763963 - RNA, 19 nt, Artificial Sequence
  Description of Artificial Sequence: Synthetic oligonucleotide
ugcuaccaaacggccauaa

SEQ ID NO: 763964 - RNA, 19 nt, Artificial Sequence
  Description of Artificial Sequence: Synthetic oligonucleotide
ucuuaaccuccuucauguu

SEQ ID NO: 763965 - RNA, 19 nt, Artificial Sequence
  Description of Artificial Sequence: Synthetic oligonucleotide
ccaagugagauauacugcu

SEQ ID NO: 763966 - RNA, 19 nt, Artificial Sequence
  Description of Artificial Sequence: Synthetic oligonucleotide
acuaaccauuagaggaggu

SEQ ID NO: 763967 - RNA, 19 nt, Artificial Sequence
  Description of Artificial Sequence: Synthetic oligonucleotide
aacggccauaaagauucua

SEQ ID NO: 763968 - RNA, 19 nt, Artificial Sequence
  Description of Artificial Sequence: Synthetic oligonucleotide
guaaaccccugauuuaauu

SEQ ID NO: 763969 - RNA, 19 nt, Artificial Sequence
  Description of Artificial Sequence: Synthetic oligonucleotide
caguuuaucugggcuuuuc

SEQ ID NO: 763970 - RNA, 19 nt, Artificial Sequence
  Description of Artificial Sequence: Synthetic oligonucleotide
guucacuuauacuucucuu

SEQ ID NO: 763971 - RNA, 19 nt, Artificial Sequence
  Description of Artificial Sequence: Synthetic oligonucleotide
cuaucauggcguaaauuuu

SEQ ID NO: 763972 - RNA, 19 nt, Artificial Sequence
  Description of Artificial Sequence: Synthetic oligonucleotide
uacaugcagcaaagucgaa

SEQ ID NO: 763973 - RNA, 19 nt, Artificial Sequence
  Description of Artificial Sequence: Synthetic oligonucleotide
agacuuuacuagaggcagu

SEQ ID NO: 763974 - RNA, 19 nt, Artificial Sequence
  Description of Artificial Sequence: Synthetic oligonucleotide
uucgacuaucauggcguaa

SEQ ID NO: 763975 - RNA, 19 nt, Artificial Sequence
  Description of Artificial Sequence: Synthetic oligonucleotide
cagaaagucaaagcuacau

SEQ ID NO: 763976 - RNA, 19 nt, Artificial Sequence
  Description of Artificial Sequence: Synthetic oligonucleotide
gcgcuguuugaauagccca

SEQ ID NO: 763977 - RNA, 19 nt, Artificial Sequence
  Description of Artificial Sequence: Synthetic oligonucleotide
ggccauaaagauucuacau

SEQ ID NO: 763978 - RNA, 19 nt, Artificial Sequence
  Description of Artificial Sequence: Synthetic oligonucleotide
acuuuacuagaggcaguaa

SEQ ID NO: 763979 - RNA, 19 nt, Artificial Sequence
  Description of Artificial Sequence: Synthetic oligonucleotide
acaugguaucaguguggaa

SEQ ID NO: 763980 - RNA, 19 nt, Artificial Sequence
  Description of Artificial Sequence: Synthetic oligonucleotide
caccuugcgcaguuuaucu

SEQ ID NO: 763981 - RNA, 19 nt, Artificial Sequence
  Description of Artificial Sequence: Synthetic oligonucleotide
ugguaucaguguggaacaa

SEQ ID NO: 763982 - RNA, 19 nt, Artificial Sequence
  Description of Artificial Sequence: Synthetic oligonucleotide
cccaauuuagaagaugaaa

SEQ ID NO: 763983 - RNA, 19 nt, Artificial Sequence
  Description of Artificial Sequence: Synthetic oligonucleotide
auagcccaauuuagaagau

SEQ ID NO: 763984 - RNA, 19 nt, Artificial Sequence
  Description of Artificial Sequence: Synthetic oligonucleotide
uuacugcuugaagccaguu

SEQ ID NO: 763985 - RNA, 19 nt, Artificial Sequence
  Description of Artificial Sequence: Synthetic oligonucleotide
aagcuacauucaaucucaa

SEQ ID NO: 763986 - RNA, 19 nt, Artificial Sequence
  Description of Artificial Sequence: Synthetic oligonucleotide
gcguaaauuuuccggcaga

SEQ ID NO: 763987 - RNA, 19 nt, Artificial Sequence
  Description of Artificial Sequence: Synthetic oligonucleotide
aaacggccauaaagauucu

SEQ ID NO: 763988 - RNA, 19 nt, Artificial Sequence
  Description of Artificial Sequence: Synthetic oligonucleotide
gaugacgaacuagcuuucu

SEQ ID NO: 763989 - RNA, 19 nt, Artificial Sequence
  Description of Artificial Sequence: Synthetic oligonucleotide
gagaugcaauguguuggaa

SEQ ID NO: 763990 - RNA, 19 nt, Artificial Sequence
  Description of Artificial Sequence: Synthetic oligonucleotide
ccacuauauuuugacgaug

SEQ ID NO: 763991 - RNA, 19 nt, Artificial Sequence
  Description of Artificial Sequence: Synthetic oligonucleotide
ccccugauuuaauuccaug

SEQ ID NO: 763992 - RNA, 19 nt, Artificial Sequence
  Description of Artificial Sequence: Synthetic oligonucleotide
uuuugacgaugggcuuucu

SEQ ID NO: 763993 - RNA, 19 nt, Artificial Sequence
  Description of Artificial Sequence: Synthetic oligonucleotide
gguaucaguguggaacaaa

SEQ ID NO: 763994 - RNA, 19 nt, Artificial Sequence
  Description of Artificial Sequence: Synthetic oligonucleotide
gaguuaagacccagcaguu

SEQ ID NO: 763995 - RNA, 19 nt, Artificial Sequence
  Description of Artificial Sequence: Synthetic oligonucleotide
guucgacuaucauggcgua

SEQ ID NO: 763996 - RNA, 19 nt, Artificial Sequence
  Description of Artificial Sequence: Synthetic oligonucleotide
augcaauguguuggaacuu

SEQ ID NO: 763997 - RNA, 19 nt, Artificial Sequence
  Description of Artificial Sequence: Synthetic oligonucleotide
gcauauaguuugcugggau

SEQ ID NO: 763998 - RNA, 19 nt, Artificial Sequence
  Description of Artificial Sequence: Synthetic oligonucleotide
gucucgugguccugagaaa

SEQ ID NO: 763999 - RNA, 19 nt, Artificial Sequence
  Description of Artificial Sequence: Synthetic oligonucleotide
caagugagauauacugcuu

SEQ ID NO: 764000 - RNA, 19 nt, Artificial Sequence
  Description of Artificial Sequence: Synthetic oligonucleotide
ggaugacgaacuagcuuuc

SEQ ID NO: 764001 - RNA, 19 nt, Artificial Sequence
  Description of Artificial Sequence: Synthetic oligonucleotide
gguccugagaaaccacuau

SEQ ID NO: 764002 - RNA, 19 nt, Artificial Sequence
  Description of Artificial Sequence: Synthetic oligonucleotide
accccugauuuaauuccau

SEQ ID NO: 764003 - RNA, 19 nt, Artificial Sequence
  Description of Artificial Sequence: Synthetic oligonucleotide
cggccauaaagauucuaca

SEQ ID NO: 764004 - RNA, 19 nt, Artificial Sequence
  Description of Artificial Sequence: Synthetic oligonucleotide
gccaacuauuacauauucu

SEQ ID NO: 764005 - RNA, 19 nt, Artificial Sequence
  Description of Artificial Sequence: Synthetic oligonucleotide
ccuuagcuauauuaccagu

SEQ ID NO: 764006 - RNA, 19 nt, Artificial Sequence
  Description of Artificial Sequence: Synthetic oligonucleotide
gcacaagccaguucauuuu

SEQ ID NO: 764007 - RNA, 19 nt, Artificial Sequence
  Description of Artificial Sequence: Synthetic oligonucleotide
ccaguauauccuggaacca

SEQ ID NO: 764008 - RNA, 19 nt, Artificial Sequence
  Description of Artificial Sequence: Synthetic oligonucleotide
gcccaauuuagaagaugaa

SEQ ID NO: 764009 - RNA, 19 nt, Artificial Sequence
  Description of Artificial Sequence: Synthetic oligonucleotide
ccaaacggccauaaagauu

SEQ ID NO: 764010 - RNA, 19 nt, Artificial Sequence
  Description of Artificial Sequence: Synthetic oligonucleotide
gaguucugaccaccaccuu

SEQ ID NO: 764011 - RNA, 19 nt, Artificial Sequence
  Description of Artificial Sequence: Synthetic oligonucleotide
gcgcaguuuaucugggcuu

SEQ ID NO: 764012 - RNA, 19 nt, Artificial Sequence
  Description of Artificial Sequence: Synthetic oligonucleotide
cguaaauuuuccggcagau

SEQ ID NO: 764013 - RNA, 19 nt, Artificial Sequence
  Description of Artificial Sequence: Synthetic oligonucleotide
cugcacaagccaguucauu

SEQ ID NO: 764014 - RNA, 19 nt, Artificial Sequence
  Description of Artificial Sequence: Synthetic oligonucleotide
cuacguccuuagcuauauu

SEQ ID NO: 764015 - RNA, 19 nt, Artificial Sequence
  Description of Artificial Sequence: Synthetic oligonucleotide
ccugcacaagccaguucau

SEQ ID NO: 764016 - RNA, 19 nt, Artificial Sequence
  Description of Artificial Sequence: Synthetic oligonucleotide
gcaguuuaucugggcuuuu

SEQ ID NO: 764017 - RNA, 19 nt, Artificial Sequence
  Description of Artificial Sequence: Synthetic oligonucleotide
cgacuaucauggcguaaau

SEQ ID NO: 764018 - RNA, 19 nt, Artificial Sequence
  Description of Artificial Sequence: Synthetic oligonucleotide
gccaacuguuuuggagauu

SEQ ID NO: 764019 - RNA, 19 nt, Artificial Sequence
  Description of Artificial Sequence: Synthetic oligonucleotide
ugaugugucauccaggucc

SEQ ID NO: 764020 - RNA, 19 nt, Artificial Sequence
  Description of Artificial Sequence: Synthetic oligonucleotide
uuuagaaacacuuccagga

SEQ ID NO: 764021 - RNA, 19 nt, Artificial Sequence
  Description of Artificial Sequence: Synthetic oligonucleotide
aacucauucugguauuucc

SEQ ID NO: 764022 - RNA, 19 nt, Artificial Sequence
  Description of Artificial Sequence: Synthetic oligonucleotide
uguauugaacucauucugg

SEQ ID NO: 764023 - RNA, 19 nt, Artificial Sequence
  Description of Artificial Sequence: Synthetic oligonucleotide
uaugucgaagacaaacugg

SEQ ID NO: 764024 - RNA, 19 nt, Artificial Sequence
  Description of Artificial Sequence: Synthetic oligonucleotide
uuuuacucggcccagggug

SEQ ID NO: 764025 - RNA, 19 nt, Artificial Sequence
  Description of Artificial Sequence: Synthetic oligonucleotide
auacuugacagccagcggg

SEQ ID NO: 764026 - RNA, 19 nt, Artificial Sequence
  Description of Artificial Sequence: Synthetic oligonucleotide
uuauuaaagaauguuccag

SEQ ID NO: 764027 - RNA, 19 nt, Artificial Sequence
  Description of Artificial Sequence: Synthetic oligonucleotide
uggggaagagaccaaacgg

SEQ ID NO: 764028 - RNA, 19 nt, Artificial Sequence
  Description of Artificial Sequence: Synthetic oligonucleotide
uuuguauugaacucauucu

SEQ ID NO: 764029 - RNA, 19 nt, Artificial Sequence
  Description of Artificial Sequence: Synthetic oligonucleotide
agcuauucacaguuggugc

SEQ ID NO: 764030 - RNA, 19 nt, Artificial Sequence
  Description of Artificial Sequence: Synthetic oligonucleotide
agcguguucaguuucuuac

SEQ ID NO: 764031 - RNA, 19 nt, Artificial Sequence
  Description of Artificial Sequence: Synthetic oligonucleotide
cucgcuguaacacucauag

SEQ ID NO: 764032 - RNA, 19 nt, Artificial Sequence
  Description of Artificial Sequence: Synthetic oligonucleotide
aauacuugacagccagcgg

SEQ ID NO: 764033 - RNA, 19 nt, Artificial Sequence
  Description of Artificial Sequence: Synthetic oligonucleotide
uagauauuguucuccauca

SEQ ID NO: 764034 - RNA, 19 nt, Artificial Sequence
  Description of Artificial Sequence: Synthetic oligonucleotide
auucugguauuuccgagac

SEQ ID NO: 764035 - RNA, 19 nt, Artificial Sequence
  Description of Artificial Sequence: Synthetic oligonucleotide
ucaaguagaucucuggcaa

SEQ ID NO: 764036 - RNA, 19 nt, Artificial Sequence
  Description of Artificial Sequence: Synthetic oligonucleotide
uuaaagaauguuccagaga

SEQ ID NO: 764037 - RNA, 19 nt, Artificial Sequence
  Description of Artificial Sequence: Synthetic oligonucleotide
gaauguuccagagaguccc

SEQ ID NO: 764038 - RNA, 19 nt, Artificial Sequence
  Description of Artificial Sequence: Synthetic oligonucleotide
ugaggcaaaccauucgagg

SEQ ID NO: 764039 - RNA, 19 nt, Artificial Sequence
  Description of Artificial Sequence: Synthetic oligonucleotide
ucuaugucgaagacaaacu

SEQ ID NO: 764040 - RNA, 19 nt, Artificial Sequence
  Description of Artificial Sequence: Synthetic oligonucleotide
aacaccuucuugcgguggc

SEQ ID NO: 764041 - RNA, 19 nt, Artificial Sequence
  Description of Artificial Sequence: Synthetic oligonucleotide
uguacaaucuuccgguacu

SEQ ID NO: 764042 - RNA, 19 nt, Artificial Sequence
  Description of Artificial Sequence: Synthetic oligonucleotide
cuuagcauauuuauagauc

SEQ ID NO: 764043 - RNA, 19 nt, Artificial Sequence
  Description of Artificial Sequence: Synthetic oligonucleotide
ucagagauagagcaggcau

SEQ ID NO: 764044 - RNA, 19 nt, Artificial Sequence
  Description of Artificial Sequence: Synthetic oligonucleotide
gauuggguaguccagcuac

SEQ ID NO: 764045 - RNA, 19 nt, Artificial Sequence
  Description of Artificial Sequence: Synthetic oligonucleotide
ucuuuuacucggcccaggg

SEQ ID NO: 764046 - RNA, 19 nt, Artificial Sequence
  Description of Artificial Sequence: Synthetic oligonucleotide
ucugguauuuccgagacuc

SEQ ID NO: 764047 - RNA, 19 nt, Artificial Sequence
  Description of Artificial Sequence: Synthetic oligonucleotide
caaguuaagaggugugggg

SEQ ID NO: 764048 - RNA, 19 nt, Artificial Sequence
  Description of Artificial Sequence: Synthetic oligonucleotide
ucucggaugcucaggauag

SEQ ID NO: 764049 - RNA, 19 nt, Artificial Sequence
  Description of Artificial Sequence: Synthetic oligonucleotide
caaacggaggcccaagugg

SEQ ID NO: 764050 - RNA, 19 nt, Artificial Sequence
  Description of Artificial Sequence: Synthetic oligonucleotide
gcauacagaagcuuguugg

SEQ ID NO: 764051 - RNA, 19 nt, Artificial Sequence
  Description of Artificial Sequence: Synthetic oligonucleotide
ggaagcaauguucaaagcc

SEQ ID NO: 764052 - RNA, 19 nt, Artificial Sequence
  Description of Artificial Sequence: Synthetic oligonucleotide
guaggugcucuuuagaaac

SEQ ID NO: 764053 - RNA, 19 nt, Artificial Sequence
  Description of Artificial Sequence: Synthetic oligonucleotide
ugggcgauaccucuuagca

SEQ ID NO: 764054 - RNA, 19 nt, Artificial Sequence
  Description of Artificial Sequence: Synthetic oligonucleotide
uucugucucgguaacauuc

SEQ ID NO: 764055 - RNA, 19 nt, Artificial Sequence
  Description of Artificial Sequence: Synthetic oligonucleotide
agagauagagcaggcaucg

SEQ ID NO: 764056 - RNA, 19 nt, Artificial Sequence
  Description of Artificial Sequence: Synthetic oligonucleotide
aaugacccugcuuggaacu

SEQ ID NO: 764057 - RNA, 19 nt, Artificial Sequence
  Description of Artificial Sequence: Synthetic oligonucleotide
aaaaugacccugcuuggaa

SEQ ID NO: 764058 - RNA, 19 nt, Artificial Sequence
  Description of Artificial Sequence: Synthetic oligonucleotide
ccucuuagcauauuuauag

SEQ ID NO: 764059 - RNA, 19 nt, Artificial Sequence
  Description of Artificial Sequence: Synthetic oligonucleotide
ugaucugugggcgauaccu

SEQ ID NO: 764060 - RNA, 19 nt, Artificial Sequence
  Description of Artificial Sequence: Synthetic oligonucleotide
aagcagaaauuccacucug

SEQ ID NO: 764061 - RNA, 19 nt, Artificial Sequence
  Description of Artificial Sequence: Synthetic oligonucleotide
uuucuuacggccguccucc

SEQ ID NO: 764062 - RNA, 19 nt, Artificial Sequence
  Description of Artificial Sequence: Synthetic oligonucleotide
guaguguucugggauaugg

SEQ ID NO: 764063 - RNA, 19 nt, Artificial Sequence
  Description of Artificial Sequence: Synthetic oligonucleotide
ggaucuguuuguaauagcg

SEQ ID NO: 764064 - RNA, 19 nt, Artificial Sequence
  Description of Artificial Sequence: Synthetic oligonucleotide
aaguuaagaggugugggga

SEQ ID NO: 764065 - RNA, 19 nt, Artificial Sequence
  Description of Artificial Sequence: Synthetic oligonucleotide
cucuaugucgaagacaaac

SEQ ID NO: 764066 - RNA, 19 nt, Artificial Sequence
  Description of Artificial Sequence: Synthetic oligonucleotide
cuaugucgaagacaaacug

SEQ ID NO: 764067 - RNA, 19 nt, Artificial Sequence
  Description of Artificial Sequence: Synthetic oligonucleotide
uucagugucacagcaggag

SEQ ID NO: 764068 - RNA, 19 nt, Artificial Sequence
  Description of Artificial Sequence: Synthetic oligonucleotide
gaguaggguacauucuugc

SEQ ID NO: 764069 - RNA, 19 nt, Artificial Sequence
  Description of Artificial Sequence: Synthetic oligonucleotide
aagauuggguaguccagcu

SEQ ID NO: 764070 - RNA, 19 nt, Artificial Sequence
  Description of Artificial Sequence: Synthetic oligonucleotide
gauagagcaggcaucgaug

SEQ ID NO: 764071 - RNA, 19 nt, Artificial Sequence
  Description of Artificial Sequence: Synthetic oligonucleotide
aaccauucgagguccacau

SEQ ID NO: 764072 - RNA, 19 nt, Artificial Sequence
  Description of Artificial Sequence: Synthetic oligonucleotide
uuaagauguucacccagaa

SEQ ID NO: 764073 - RNA, 19 nt, Artificial Sequence
  Description of Artificial Sequence: Synthetic oligonucleotide
aagcggaggggacagagau

SEQ ID NO: 764074 - RNA, 19 nt, Artificial Sequence
  Description of Artificial Sequence: Synthetic oligonucleotide
ugugaguaggguacauucu

SEQ ID NO: 764075 - RNA, 19 nt, Artificial Sequence
  Description of Artificial Sequence: Synthetic oligonucleotide
guauuuccgagacuccucc

SEQ ID NO: 764076 - RNA, 19 nt, Artificial Sequence
  Description of Artificial Sequence: Synthetic oligonucleotide
aggcaaaccauucgagguc

SEQ ID NO: 764077 - RNA, 19 nt, Artificial Sequence
  Description of Artificial Sequence: Synthetic oligonucleotide
ucccgcaggacauagcucu

SEQ ID NO: 764078 - RNA, 19 nt, Artificial Sequence
  Description of Artificial Sequence: Synthetic oligonucleotide
gauauggccaccucuccca

SEQ ID NO: 764079 - RNA, 19 nt, Artificial Sequence
  Description of Artificial Sequence: Synthetic oligonucleotide
gcucuuuagaaacacuucc

SEQ ID NO: 764080 - RNA, 19 nt, Artificial Sequence
  Description of Artificial Sequence: Synthetic oligonucleotide
ucccaaugugugcugagca

SEQ ID NO: 764081 - RNA, 19 nt, Artificial Sequence
  Description of Artificial Sequence: Synthetic oligonucleotide
uuacuguuuucugucucgg

SEQ ID NO: 764082 - RNA, 19 nt, Artificial Sequence
  Description of Artificial Sequence: Synthetic oligonucleotide
agaauguuccagagagucc

SEQ ID NO: 764083 - RNA, 19 nt, Artificial Sequence
  Description of Artificial Sequence: Synthetic oligonucleotide
aagcuuguuggugggagag

SEQ ID NO: 764084 - RNA, 19 nt, Artificial Sequence
  Description of Artificial Sequence: Synthetic oligonucleotide
gauuacuguuuucugucuc

SEQ ID NO: 764085 - RNA, 19 nt, Artificial Sequence
  Description of Artificial Sequence: Synthetic oligonucleotide
cuuacggccguccuccacc

SEQ ID NO: 764086 - RNA, 19 nt, Artificial Sequence
  Description of Artificial Sequence: Synthetic oligonucleotide
aauuccacucugccaggug

SEQ ID NO: 764087 - RNA, 19 nt, Artificial Sequence
  Description of Artificial Sequence: Synthetic oligonucleotide
gcuauucacaguuggugcg

SEQ ID NO: 764088 - RNA, 19 nt, Artificial Sequence
  Description of Artificial Sequence: Synthetic oligonucleotide
cuugcucaaacuugugcug

SEQ ID NO: 764089 - RNA, 19 nt, Artificial Sequence
  Description of Artificial Sequence: Synthetic oligonucleotide
agauagagcaggcaucgau

SEQ ID NO: 764090 - RNA, 19 nt, Artificial Sequence
  Description of Artificial Sequence: Synthetic oligonucleotide
aauguucaaagcccuuguu

SEQ ID NO: 764091 - RNA, 19 nt, Artificial Sequence
  Description of Artificial Sequence: Synthetic oligonucleotide
uagcgcuguacaaucuucc

SEQ ID NO: 764092 - RNA, 19 nt, Artificial Sequence
  Description of Artificial Sequence: Synthetic oligonucleotide
uaacacucauagauauugu

SEQ ID NO: 764093 - RNA, 19 nt, Artificial Sequence
  Description of Artificial Sequence: Synthetic oligonucleotide
aaagccuuguuggggacug

SEQ ID NO: 764094 - RNA, 19 nt, Artificial Sequence
  Description of Artificial Sequence: Synthetic oligonucleotide
agcgcuguacaaucuuccg

SEQ ID NO: 764095 - RNA, 19 nt, Artificial Sequence
  Description of Artificial Sequence: Synthetic oligonucleotide
uucuuaggcuccaccagcu

SEQ ID NO: 764096 - RNA, 19 nt, Artificial Sequence
  Description of Artificial Sequence: Synthetic oligonucleotide
aguaggugcucuuuagaaa

SEQ ID NO: 764097 - RNA, 19 nt, Artificial Sequence
  Description of Artificial Sequence: Synthetic oligonucleotide
uauuuccgagacuccuccg

SEQ ID NO: 764098 - RNA, 19 nt, Artificial Sequence
  Description of Artificial Sequence: Synthetic oligonucleotide
gucaaguagaucucuggca

SEQ ID NO: 764099 - RNA, 19 nt, Artificial Sequence
  Description of Artificial Sequence: Synthetic oligonucleotide
aaaccauucgagguccaca

SEQ ID NO: 764100 - RNA, 19 nt, Artificial Sequence
  Description of Artificial Sequence: Synthetic oligonucleotide
ugucucgguaacauucagu

SEQ ID NO: 764101 - RNA, 19 nt, Artificial Sequence
  Description of Artificial Sequence: Synthetic oligonucleotide
agaagcuuguuggugggag

SEQ ID NO: 764102 - RNA, 19 nt, Artificial Sequence
  Description of Artificial Sequence: Synthetic oligonucleotide
agguggaugagguaguguu

SEQ ID NO: 764103 - RNA, 19 nt, Artificial Sequence
  Description of Artificial Sequence: Synthetic oligonucleotide
guuuguaauagcgcuguac

SEQ ID NO: 764104 - RNA, 19 nt, Artificial Sequence
  Description of Artificial Sequence: Synthetic oligonucleotide
ucgaugaaggccugugcga

SEQ ID NO: 764105 - RNA, 19 nt, Artificial Sequence
  Description of Artificial Sequence: Synthetic oligonucleotide
ugcguucauuuccuguuca

SEQ ID NO: 764106 - RNA, 19 nt, Artificial Sequence
  Description of Artificial Sequence: Synthetic oligonucleotide
ucccugcccaaguuaagag

SEQ ID NO: 764107 - RNA, 19 nt, Artificial Sequence
  Description of Artificial Sequence: Synthetic oligonucleotide
uacccuuuguugacagcag

SEQ ID NO: 764108 - RNA, 19 nt, Artificial Sequence
  Description of Artificial Sequence: Synthetic oligonucleotide
ugggcuagcguguucaguu

SEQ ID NO: 764109 - RNA, 19 nt, Artificial Sequence
  Description of Artificial Sequence: Synthetic oligonucleotide
gaggcaaaccauucgaggu

SEQ ID NO: 764110 - RNA, 19 nt, Artificial Sequence
  Description of Artificial Sequence: Synthetic oligonucleotide
uggguaguccagcuacagc

SEQ ID NO: 764111 - RNA, 19 nt, Artificial Sequence
  Description of Artificial Sequence: Synthetic oligonucleotide
aucauucuaugggcaaugg

SEQ ID NO: 764112 - RNA, 19 nt, Artificial Sequence
  Description of Artificial Sequence: Synthetic oligonucleotide
aguuaagagguguggggaa

SEQ ID NO: 764113 - RNA, 19 nt, Artificial Sequence
  Description of Artificial Sequence: Synthetic oligonucleotide
cagagauagagcaggcauc

SEQ ID NO: 764114 - RNA, 19 nt, Artificial Sequence
  Description of Artificial Sequence: Synthetic oligonucleotide
uuguagugggcuagcgugu

SEQ ID NO: 764115 - RNA, 19 nt, Artificial Sequence
  Description of Artificial Sequence: Synthetic oligonucleotide
uacucggggaucuccuuug

SEQ ID NO: 764116 - RNA, 19 nt, Artificial Sequence
  Description of Artificial Sequence: Synthetic oligonucleotide
auacagaagcuuguuggug

SEQ ID NO: 764117 - RNA, 19 nt, Artificial Sequence
  Description of Artificial Sequence: Synthetic oligonucleotide
guuaagagguguggggaag

SEQ ID NO: 764118 - RNA, 19 nt, Artificial Sequence
  Description of Artificial Sequence: Synthetic oligonucleotide
cuguacaaucuuccgguac

SEQ ID NO: 764119 - RNA, 19 nt, Artificial Sequence
  Description of Artificial Sequence: Synthetic oligonucleotide
acuaagaggccaguguccu

SEQ ID NO: 764120 - RNA, 19 nt, Artificial Sequence
  Description of Artificial Sequence: Synthetic oligonucleotide
auagcgcuguacaaucuuc

SEQ ID NO: 764121 - RNA, 19 nt, Artificial Sequence
  Description of Artificial Sequence: Synthetic oligonucleotide
ucuaugggcaaugggcacu

SEQ ID NO: 764122 - RNA, 19 nt, Artificial Sequence
  Description of Artificial Sequence: Synthetic oligonucleotide
uucuaugggcaaugggcac

SEQ ID NO: 764123 - RNA, 19 nt, Artificial Sequence
  Description of Artificial Sequence: Synthetic oligonucleotide
uuaagagguguggggaaga

SEQ ID NO: 764124 - RNA, 19 nt, Artificial Sequence
  Description of Artificial Sequence: Synthetic oligonucleotide
uaggugcucuuuagaaaca

SEQ ID NO: 764125 - RNA, 19 nt, Artificial Sequence
  Description of Artificial Sequence: Synthetic oligonucleotide
guguucaguuucuuacggc

SEQ ID NO: 764126 - RNA, 19 nt, Artificial Sequence
  Description of Artificial Sequence: Synthetic oligonucleotide
cauggccacguuuguauug

SEQ ID NO: 764127 - RNA, 19 nt, Artificial Sequence
  Description of Artificial Sequence: Synthetic oligonucleotide
ugugggcgauaccucuuag

SEQ ID NO: 764128 - RNA, 19 nt, Artificial Sequence
  Description of Artificial Sequence: Synthetic oligonucleotide
ugaggcucauggcuaggga

SEQ ID NO: 764129 - RNA, 19 nt, Artificial Sequence
  Description of Artificial Sequence: Synthetic oligonucleotide
uuggguaguccagcuacag

SEQ ID NO: 764130 - RNA, 19 nt, Artificial Sequence
  Description of Artificial Sequence: Synthetic oligonucleotide
ucucgguaacauucagugu

SEQ ID NO: 764131 - RNA, 19 nt, Artificial Sequence
  Description of Artificial Sequence: Synthetic oligonucleotide
guguacccuuuguugacag

SEQ ID NO: 764132 - RNA, 19 nt, Artificial Sequence
  Description of Artificial Sequence: Synthetic oligonucleotide
gauaccucuuagcauauuu

SEQ ID NO: 764133 - RNA, 19 nt, Artificial Sequence
  Description of Artificial Sequence: Synthetic oligonucleotide
uccuguucacugagaggag

SEQ ID NO: 764134 - RNA, 19 nt, Artificial Sequence
  Description of Artificial Sequence: Synthetic oligonucleotide
ucucccaaugugugcugag

SEQ ID NO: 764135 - RNA, 19 nt, Artificial Sequence
  Description of Artificial Sequence: Synthetic oligonucleotide
uagugggcuagcguguuca

SEQ ID NO: 764136 - RNA, 19 nt, Artificial Sequence
  Description of Artificial Sequence: Synthetic oligonucleotide
aguccagcuacagccccgc

SEQ ID NO: 764137 - RNA, 19 nt, Artificial Sequence
  Description of Artificial Sequence: Synthetic oligonucleotide
guacauucuugcagaaggc

SEQ ID NO: 764138 - RNA, 19 nt, Artificial Sequence
  Description of Artificial Sequence: Synthetic oligonucleotide
guauugaacucauucuggu

SEQ ID NO: 764139 - RNA, 19 nt, Artificial Sequence
  Description of Artificial Sequence: Synthetic oligonucleotide
uucccugcccaaguuaaga

SEQ ID NO: 764140 - RNA, 19 nt, Artificial Sequence
  Description of Artificial Sequence: Synthetic oligonucleotide
ugcccaaguuaagaggugu

SEQ ID NO: 764141 - RNA, 19 nt, Artificial Sequence
  Description of Artificial Sequence: Synthetic oligonucleotide
cugguauuuccgagacucc

SEQ ID NO: 764142 - RNA, 19 nt, Artificial Sequence
  Description of Artificial Sequence: Synthetic oligonucleotide
gcauauuuauagaucucag

SEQ ID NO: 764143 - RNA, 19 nt, Artificial Sequence
  Description of Artificial Sequence: Synthetic oligonucleotide
uuggugcgugauaagguuu

SEQ ID NO: 764144 - RNA, 19 nt, Artificial Sequence
  Description of Artificial Sequence: Synthetic oligonucleotide
gacccaagggucucugcac

SEQ ID NO: 764145 - RNA, 19 nt, Artificial Sequence
  Description of Artificial Sequence: Synthetic oligonucleotide
uccagcuacagccccgcau

SEQ ID NO: 764146 - RNA, 19 nt, Artificial Sequence
  Description of Artificial Sequence: Synthetic oligonucleotide
uauucacaguuggugcgug

SEQ ID NO: 764147 - RNA, 19 nt, Artificial Sequence
  Description of Artificial Sequence: Synthetic oligonucleotide
aguuggugcgugauaaggu

SEQ ID NO: 764148 - RNA, 19 nt, Artificial Sequence
  Description of Artificial Sequence: Synthetic oligonucleotide
ggaugagguaguguucugg

SEQ ID NO: 764149 - RNA, 19 nt, Artificial Sequence
  Description of Artificial Sequence: Synthetic oligonucleotide
caagcggcagcuauucaca

SEQ ID NO: 764150 - RNA, 19 nt, Artificial Sequence
  Description of Artificial Sequence: Synthetic oligonucleotide
caguguacccuuuguugac

SEQ ID NO: 764151 - RNA, 19 nt, Artificial Sequence
  Description of Artificial Sequence: Synthetic oligonucleotide
cuacagccccgcauccucg

SEQ ID NO: 764152 - RNA, 19 nt, Artificial Sequence
  Description of Artificial Sequence: Synthetic oligonucleotide
cacguuuguauugaacuca

SEQ ID NO: 764153 - RNA, 19 nt, Artificial Sequence
  Description of Artificial Sequence: Synthetic oligonucleotide
aucuuguagugggcuagcg

SEQ ID NO: 764154 - RNA, 19 nt, Artificial Sequence
  Description of Artificial Sequence: Synthetic oligonucleotide
cagaugugcagggugucag

SEQ ID NO: 764155 - RNA, 19 nt, Artificial Sequence
  Description of Artificial Sequence: Synthetic oligonucleotide
ggcgauaccucuuagcaua

SEQ ID NO: 764156 - RNA, 19 nt, Artificial Sequence
  Description of Artificial Sequence: Synthetic oligonucleotide
gaagcuuguuggugggaga

SEQ ID NO: 764157 - RNA, 19 nt, Artificial Sequence
  Description of Artificial Sequence: Synthetic oligonucleotide
ggauauggccaccucuccc

SEQ ID NO: 764158 - RNA, 19 nt, Artificial Sequence
  Description of Artificial Sequence: Synthetic oligonucleotide
accauucgagguccacauc

SEQ ID NO: 764159 - RNA, 19 nt, Artificial Sequence
  Description of Artificial Sequence: Synthetic oligonucleotide
ugugagggacacagaugac

SEQ ID NO: 764160 - RNA, 19 nt, Artificial Sequence
  Description of Artificial Sequence: Synthetic oligonucleotide
acauucagugucacagcag

SEQ ID NO: 764161 - RNA, 19 nt, Artificial Sequence
  Description of Artificial Sequence: Synthetic oligonucleotide
gcguguucaguuucuuacg

SEQ ID NO: 764162 - RNA, 19 nt, Artificial Sequence
  Description of Artificial Sequence: Synthetic oligonucleotide
ugugcugagcagccuggaa

SEQ ID NO: 764163 - RNA, 19 nt, Artificial Sequence
  Description of Artificial Sequence: Synthetic oligonucleotide
cucuggggacccaaggguc

SEQ ID NO: 764164 - RNA, 19 nt, Artificial Sequence
  Description of Artificial Sequence: Synthetic oligonucleotide
aucuguaggcagcaccaaa

SEQ ID NO: 764165 - RNA, 19 nt, Artificial Sequence
  Description of Artificial Sequence: Synthetic oligonucleotide
gggugcuugaggcaaacca

SEQ ID NO: 764166 - RNA, 19 nt, Artificial Sequence
  Description of Artificial Sequence: Synthetic oligonucleotide
gcaguguacccuuuguuga

SEQ ID NO: 764167 - RNA, 19 nt, Artificial Sequence
  Description of Artificial Sequence: Synthetic oligonucleotide
ccuuguuggggacuggaag

SEQ ID NO: 764168 - RNA, 19 nt, Artificial Sequence
  Description of Artificial Sequence: Synthetic oligonucleotide
gugggcgauaccucuuagc

SEQ ID NO: 764169 - RNA, 19 nt, Artificial Sequence
  Description of Artificial Sequence: Synthetic oligonucleotide
gcgcuguacaaucuuccgg

SEQ ID NO: 764170 - RNA, 19 nt, Artificial Sequence
  Description of Artificial Sequence: Synthetic oligonucleotide
gggacuggaagcaauguuc

SEQ ID NO: 764171 - RNA, 19 nt, Artificial Sequence
  Description of Artificial Sequence: Synthetic oligonucleotide
accaaacggaggcccaagu

SEQ ID NO: 764172 - RNA, 19 nt, Artificial Sequence
  Description of Artificial Sequence: Synthetic oligonucleotide
cauggcuagggaggcaccc

SEQ ID NO: 764173 - RNA, 19 nt, Artificial Sequence
  Description of Artificial Sequence: Synthetic oligonucleotide
ucuuaggcuccaccagcuc

SEQ ID NO: 764174 - RNA, 19 nt, Artificial Sequence
  Description of Artificial Sequence: Synthetic oligonucleotide
ccuuuguugacagcaggcg

SEQ ID NO: 764175 - RNA, 19 nt, Artificial Sequence
  Description of Artificial Sequence: Synthetic oligonucleotide
ucuuacggccguccuccac

SEQ ID NO: 764176 - RNA, 19 nt, Artificial Sequence
  Description of Artificial Sequence: Synthetic oligonucleotide
cugugcgaugacagacagg

SEQ ID NO: 764177 - RNA, 19 nt, Artificial Sequence
  Description of Artificial Sequence: Synthetic oligonucleotide
uuacggccguccuccacca

SEQ ID NO: 764178 - RNA, 19 nt, Artificial Sequence
  Description of Artificial Sequence: Synthetic oligonucleotide
auggccacguuuguauuga

SEQ ID NO: 764179 - RNA, 19 nt, Artificial Sequence
  Description of Artificial Sequence: Synthetic oligonucleotide
gguguuguccuucuugucu

SEQ ID NO: 764180 - RNA, 19 nt, Artificial Sequence
  Description of Artificial Sequence: Synthetic oligonucleotide
aguguacccuuuguugaca

SEQ ID NO: 764181 - RNA, 19 nt, Artificial Sequence
  Description of Artificial Sequence: Synthetic oligonucleotide
uuucugucucgguaacauu

SEQ ID NO: 764182 - RNA, 19 nt, Artificial Sequence
  Description of Artificial Sequence: Synthetic oligonucleotide
aguucccugcccaaguuaa

SEQ ID NO: 764183 - RNA, 19 nt, Artificial Sequence
  Description of Artificial Sequence: Synthetic oligonucleotide
agugggcuagcguguucag

SEQ ID NO: 764184 - RNA, 19 nt, Artificial Sequence
  Description of Artificial Sequence: Synthetic oligonucleotide
uguuuguaauagcgcugua

SEQ ID NO: 764185 - RNA, 19 nt, Artificial Sequence
  Description of Artificial Sequence: Synthetic oligonucleotide
uuccuaccccagcaggcuc

SEQ ID NO: 764186 - RNA, 19 nt, Artificial Sequence
  Description of Artificial Sequence: Synthetic oligonucleotide
cuaugggcaaugggcacug

SEQ ID NO: 764187 - RNA, 19 nt, Artificial Sequence
  Description of Artificial Sequence: Synthetic oligonucleotide
gagggacacagaugacuuc

SEQ ID NO: 764188 - RNA, 19 nt, Artificial Sequence
  Description of Artificial Sequence: Synthetic oligonucleotide
agauuggguaguccagcua

SEQ ID NO: 764189 - RNA, 19 nt, Artificial Sequence
  Description of Artificial Sequence: Synthetic oligonucleotide
gugagagauuacuguuuuc

SEQ ID NO: 764190 - RNA, 19 nt, Artificial Sequence
  Description of Artificial Sequence: Synthetic oligonucleotide
ugcucaaacuugugcugua

SEQ ID NO: 764191 - RNA, 19 nt, Artificial Sequence
  Description of Artificial Sequence: Synthetic oligonucleotide
agcggcagcuauucacagu

SEQ ID NO: 764192 - RNA, 19 nt, Artificial Sequence
  Description of Artificial Sequence: Synthetic oligonucleotide
caaaccauucgagguccac

SEQ ID NO: 764193 - RNA, 19 nt, Artificial Sequence
  Description of Artificial Sequence: Synthetic oligonucleotide
aggguacauucuugcagaa

SEQ ID NO: 764194 - RNA, 19 nt, Artificial Sequence
  Description of Artificial Sequence: Synthetic oligonucleotide
gcuggugagagauuacugu

SEQ ID NO: 764195 - RNA, 19 nt, Artificial Sequence
  Description of Artificial Sequence: Synthetic oligonucleotide
ucgggcaagcggaggggac

SEQ ID NO: 764196 - RNA, 19 nt, Artificial Sequence
  Description of Artificial Sequence: Synthetic oligonucleotide
ccacguuuguauugaacuc

SEQ ID NO: 764197 - RNA, 19 nt, Artificial Sequence
  Description of Artificial Sequence: Synthetic oligonucleotide
acguuuguauugaacucau

SEQ ID NO: 764198 - RNA, 19 nt, Artificial Sequence
  Description of Artificial Sequence: Synthetic oligonucleotide
uuccgguacucggggaucu

SEQ ID NO: 764199 - RNA, 19 nt, Artificial Sequence
  Description of Artificial Sequence: Synthetic oligonucleotide
gggauauggccaccucucc

SEQ ID NO: 764200 - RNA, 19 nt, Artificial Sequence
  Description of Artificial Sequence: Synthetic oligonucleotide
ggacuggaagcaauguuca

SEQ ID NO: 764201 - RNA, 19 nt, Artificial Sequence
  Description of Artificial Sequence: Synthetic oligonucleotide
ccugugcgaugacagacag

SEQ ID NO: 764202 - RNA, 19 nt, Artificial Sequence
  Description of Artificial Sequence: Synthetic oligonucleotide
aagccuuguuggggacugg

SEQ ID NO: 764203 - RNA, 19 nt, Artificial Sequence
  Description of Artificial Sequence: Synthetic oligonucleotide
guuggugcgugauaagguu

SEQ ID NO: 764204 - RNA, 19 nt, Artificial Sequence
  Description of Artificial Sequence: Synthetic oligonucleotide
cccaaugugugcugagcag

SEQ ID NO: 764205 - RNA, 19 nt, Artificial Sequence
  Description of Artificial Sequence: Synthetic oligonucleotide
cugaugugucauccagguc

SEQ ID NO: 764206 - RNA, 19 nt, Artificial Sequence
  Description of Artificial Sequence: Synthetic oligonucleotide
ggacccaagggucucugca

SEQ ID NO: 764207 - RNA, 19 nt, Artificial Sequence
  Description of Artificial Sequence: Synthetic oligonucleotide
gugagggacacagaugacu

SEQ ID NO: 764208 - RNA, 19 nt, Artificial Sequence
  Description of Artificial Sequence: Synthetic oligonucleotide
ucaguuucuuacggccguc

SEQ ID NO: 764209 - RNA, 19 nt, Artificial Sequence
  Description of Artificial Sequence: Synthetic oligonucleotide
gucagagauagagcaggca

SEQ ID NO: 764210 - RNA, 19 nt, Artificial Sequence
  Description of Artificial Sequence: Synthetic oligonucleotide
ugccgauggccgacggaac

SEQ ID NO: 764211 - RNA, 19 nt, Artificial Sequence
  Description of Artificial Sequence: Synthetic oligonucleotide
auuggguaguccagcuaca

SEQ ID NO: 764212 - RNA, 19 nt, Artificial Sequence
  Description of Artificial Sequence: Synthetic oligonucleotide
cauagcucugggugcuuga

SEQ ID NO: 764213 - RNA, 19 nt, Artificial Sequence
  Description of Artificial Sequence: Synthetic oligonucleotide
accucuuagcauauuuaua

SEQ ID NO: 764214 - RNA, 19 nt, Artificial Sequence
  Description of Artificial Sequence: Synthetic oligonucleotide
gcaagcggaggggacagag

SEQ ID NO: 764215 - RNA, 19 nt, Artificial Sequence
  Description of Artificial Sequence: Synthetic oligonucleotide
ccaaacggaggcccaagug

SEQ ID NO: 764216 - RNA, 19 nt, Artificial Sequence
  Description of Artificial Sequence: Synthetic oligonucleotide
augacccugcuuggaacug

SEQ ID NO: 764217 - RNA, 19 nt, Artificial Sequence
  Description of Artificial Sequence: Synthetic oligonucleotide
ugggugcuugaggcaaacc

SEQ ID NO: 764218 - RNA, 19 nt, Artificial Sequence
  Description of Artificial Sequence: Synthetic oligonucleotide
gagaccaaacggaggccca

SEQ ID NO: 764219 - RNA, 19 nt, Artificial Sequence
  Description of Artificial Sequence: Synthetic oligonucleotide
agccccgcauccucgacuu

SEQ ID NO: 764220 - RNA, 19 nt, Artificial Sequence
  Description of Artificial Sequence: Synthetic oligonucleotide
ugaaggccugugcgaugac

SEQ ID NO: 764221 - RNA, 19 nt, Artificial Sequence
  Description of Artificial Sequence: Synthetic oligonucleotide
ggcacuaagaggccagugu

SEQ ID NO: 764222 - RNA, 19 nt, Artificial Sequence
  Description of Artificial Sequence: Synthetic oligonucleotide
gaggguggccugugcugug

SEQ ID NO: 764223 - RNA, 19 nt, Artificial Sequence
  Description of Artificial Sequence: Synthetic oligonucleotide
uucuuacggccguccucca

SEQ ID NO: 764224 - RNA, 19 nt, Artificial Sequence
  Description of Artificial Sequence: Synthetic oligonucleotide
gcuacagccccgcauccuc

SEQ ID NO: 764225 - RNA, 19 nt, Artificial Sequence
  Description of Artificial Sequence: Synthetic oligonucleotide
cuggugagagauuacuguu

SEQ ID NO: 764226 - RNA, 19 nt, Artificial Sequence
  Description of Artificial Sequence: Synthetic oligonucleotide
guucccugcccaaguuaag

SEQ ID NO: 764227 - RNA, 19 nt, Artificial Sequence
  Description of Artificial Sequence: Synthetic oligonucleotide
ggccugugcgaugacagac

SEQ ID NO: 764228 - RNA, 19 nt, Artificial Sequence
  Description of Artificial Sequence: Synthetic oligonucleotide
gcuguaacacucauagaua

SEQ ID NO: 764229 - RNA, 19 nt, Artificial Sequence
  Description of Artificial Sequence: Synthetic oligonucleotide
ggcuagcguguucaguuuc

SEQ ID NO: 764230 - RNA, 19 nt, Artificial Sequence
  Description of Artificial Sequence: Synthetic oligonucleotide
ccggugggacuucuuaggc

SEQ ID NO: 764231 - RNA, 19 nt, Artificial Sequence
  Description of Artificial Sequence: Synthetic oligonucleotide
agcccuuguuccagucagg

SEQ ID NO: 764232 - RNA, 19 nt, Artificial Sequence
  Description of Artificial Sequence: Synthetic oligonucleotide
auggcuagggaggcacccu

SEQ ID NO: 764233 - RNA, 19 nt, Artificial Sequence
  Description of Artificial Sequence: Synthetic oligonucleotide
aggucccgcaggacauagc

SEQ ID NO: 764234 - RNA, 19 nt, Artificial Sequence
  Description of Artificial Sequence: Synthetic oligonucleotide
cucggaugcucaggauagc

SEQ ID NO: 764235 - RNA, 19 nt, Artificial Sequence
  Description of Artificial Sequence: Synthetic oligonucleotide
ggcccaaguggccugugca

SEQ ID NO: 764236 - RNA, 19 nt, Artificial Sequence
  Description of Artificial Sequence: Synthetic oligonucleotide
guagugggcuagcguguuc

SEQ ID NO: 764237 - RNA, 19 nt, Artificial Sequence
  Description of Artificial Sequence: Synthetic oligonucleotide
gaaagccuuguuggggacu

SEQ ID NO: 764238 - RNA, 19 nt, Artificial Sequence
  Description of Artificial Sequence: Synthetic oligonucleotide
gcguucauuuccuguucac

SEQ ID NO: 764239 - RNA, 19 nt, Artificial Sequence
  Description of Artificial Sequence: Synthetic oligonucleotide
gagauagagcaggcaucga

SEQ ID NO: 764240 - RNA, 19 nt, Artificial Sequence
  Description of Artificial Sequence: Synthetic oligonucleotide
acucggcccaggguguugu

SEQ ID NO: 764241 - RNA, 19 nt, Artificial Sequence
  Description of Artificial Sequence: Synthetic oligonucleotide
caaccugucuccuucucuu

SEQ ID NO: 764242 - RNA, 19 nt, Artificial Sequence
  Description of Artificial Sequence: Synthetic oligonucleotide
ggcacaguccaggcugucc

SEQ ID NO: 764243 - RNA, 19 nt, Artificial Sequence
  Description of Artificial Sequence: Synthetic oligonucleotide
caucaauguggucugucuu

SEQ ID NO: 764244 - RNA, 19 nt, Artificial Sequence
  Description of Artificial Sequence: Synthetic oligonucleotide
caccuucuugcgguggcuc

SEQ ID NO: 764245 - RNA, 19 nt, Artificial Sequence
  Description of Artificial Sequence: Synthetic oligonucleotide
agcaauguucaaagcccuu

SEQ ID NO: 764246 - RNA, 19 nt, Artificial Sequence
  Description of Artificial Sequence: Synthetic oligonucleotide
cuauucacaguuggugcgu

SEQ ID NO: 764247 - RNA, 19 nt, Artificial Sequence
  Description of Artificial Sequence: Synthetic oligonucleotide
gcacaagcggcagcuauuc

SEQ ID NO: 764248 - RNA, 19 nt, Artificial Sequence
  Description of Artificial Sequence: Synthetic oligonucleotide
ggcaucaauguggucuguc

SEQ ID NO: 764249 - RNA, 19 nt, Artificial Sequence
  Description of Artificial Sequence: Synthetic oligonucleotide
ucugcacaagcggcagcua

SEQ ID NO: 764250 - RNA, 19 nt, Artificial Sequence
  Description of Artificial Sequence: Synthetic oligonucleotide
ggccacguuuguauugaac

SEQ ID NO: 764251 - RNA, 19 nt, Artificial Sequence
  Description of Artificial Sequence: Synthetic oligonucleotide
gcccaaguuaagaggugug

SEQ ID NO: 764252 - RNA, 19 nt, Artificial Sequence
  Description of Artificial Sequence: Synthetic oligonucleotide
uuuuccccggcaggcuuuu

SEQ ID NO: 764253 - RNA, 19 nt, Artificial Sequence
  Description of Artificial Sequence: Synthetic oligonucleotide
gccgauggccgacggaaca

SEQ ID NO: 764254 - RNA, 19 nt, Artificial Sequence
  Description of Artificial Sequence: Synthetic oligonucleotide
guucacugagaggagucau

SEQ ID NO: 764255 - RNA, 19 nt, Artificial Sequence
  Description of Artificial Sequence: Synthetic oligonucleotide
caguucccugcccaaguua

SEQ ID NO: 764256 - RNA, 19 nt, Artificial Sequence
  Description of Artificial Sequence: Synthetic oligonucleotide
cucucccaaugugugcuga

SEQ ID NO: 764257 - RNA, 19 nt, Artificial Sequence
  Description of Artificial Sequence: Synthetic oligonucleotide
uggggacccaagggucucu

SEQ ID NO: 764258 - RNA, 19 nt, Artificial Sequence
  Description of Artificial Sequence: Synthetic oligonucleotide
gcaccaaauggaaauacuu

SEQ ID NO: 764259 - RNA, 19 nt, Artificial Sequence
  Description of Artificial Sequence: Synthetic oligonucleotide
cugugggcgauaccucuua

SEQ ID NO: 764260 - RNA, 19 nt, Artificial Sequence
  Description of Artificial Sequence: Synthetic oligonucleotide
gggacccaagggucucugc

SEQ ID NO: 764261 - RNA, 19 nt, Artificial Sequence
  Description of Artificial Sequence: Synthetic oligonucleotide
cugccggugggacuucuua

SEQ ID NO: 764262 - RNA, 19 nt, Artificial Sequence
  Description of Artificial Sequence: Synthetic oligonucleotide
uacggccguccuccaccac

SEQ ID NO: 764263 - RNA, 19 nt, Artificial Sequence
  Description of Artificial Sequence: Synthetic oligonucleotide
cucgggcaagcggagggga

SEQ ID NO: 764264 - RNA, 19 nt, Artificial Sequence
  Description of Artificial Sequence: Synthetic oligonucleotide
cgcuguacaaucuuccggu

SEQ ID NO: 764265 - RNA, 19 nt, Artificial Sequence
  Description of Artificial Sequence: Synthetic oligonucleotide
uccugcgggcagugggguu

SEQ ID NO: 764266 - RNA, 19 nt, Artificial Sequence
  Description of Artificial Sequence: Synthetic oligonucleotide
cucccucaggccucgcugu

SEQ ID NO: 764267 - RNA, 19 nt, Artificial Sequence
  Description of Artificial Sequence: Synthetic oligonucleotide
ccgcaggacauagcucugg

SEQ ID NO: 764268 - RNA, 19 nt, Artificial Sequence
  Description of Artificial Sequence: Synthetic oligonucleotide
gaggcccaaguggccugug

SEQ ID NO: 764269 - RNA, 19 nt, Artificial Sequence
  Description of Artificial Sequence: Synthetic oligonucleotide
gccugugcgaugacagaca

SEQ ID NO: 764270 - RNA, 19 nt, Artificial Sequence
  Description of Artificial Sequence: Synthetic oligonucleotide
ggacauagcucugggugcu

SEQ ID NO: 764271 - RNA, 19 nt, Artificial Sequence
  Description of Artificial Sequence: Synthetic oligonucleotide
ccucucccaaugugugcug

SEQ ID NO: 764272 - RNA, 19 nt, Artificial Sequence
  Description of Artificial Sequence: Synthetic oligonucleotide
cacccucaggaaucuugua

SEQ ID NO: 764273 - RNA, 19 nt, Artificial Sequence
  Description of Artificial Sequence: Synthetic oligonucleotide
cucggcccaggguguuguc

SEQ ID NO: 764274 - RNA, 19 nt, Artificial Sequence
  Description of Artificial Sequence: Synthetic oligonucleotide
gggcgauaccucuuagcau

SEQ ID NO: 764275 - RNA, 19 nt, Artificial Sequence
  Description of Artificial Sequence: Synthetic oligonucleotide
gcggaggggaaggcuguug

SEQ ID NO: 764276 - RNA, 19 nt, Artificial Sequence
  Description of Artificial Sequence: Synthetic oligonucleotide
ggcuagggaggcacccuca

SEQ ID NO: 764277 - RNA, 19 nt, Artificial Sequence
  Description of Artificial Sequence: Synthetic oligonucleotide
gcuagcguguucaguuucu

SEQ ID NO: 764278 - RNA, 19 nt, Artificial Sequence
  Description of Artificial Sequence: Synthetic oligonucleotide
cccgcaggacauagcucug

SEQ ID NO: 764279 - RNA, 19 nt, Artificial Sequence
  Description of Artificial Sequence: Synthetic oligonucleotide
guccagcuacagccccgca

SEQ ID NO: 764280 - RNA, 19 nt, Artificial Sequence
  Description of Artificial Sequence: Synthetic oligonucleotide
gguguggggaagagaccaa

SEQ ID NO: 764281 - RNA, 19 nt, Artificial Sequence
  Description of Artificial Sequence: Synthetic oligonucleotide
gcccuuguuccagucaggu

SEQ ID NO: 764282 - RNA, 19 nt, Artificial Sequence
  Description of Artificial Sequence: Synthetic oligonucleotide
cggccguccuccaccacug

SEQ ID NO: 764283 - RNA, 19 nt, Artificial Sequence
  Description of Artificial Sequence: Synthetic oligonucleotide
ccccggcaggcuuuuauua

SEQ ID NO: 764284 - RNA, 19 nt, Artificial Sequence
  Description of Artificial Sequence: Synthetic oligonucleotide
ccgaggccacugugaguag

SEQ ID NO: 764285 - RNA, 19 nt, Artificial Sequence
  Description of Artificial Sequence: Synthetic oligonucleotide
ccaugcugccgauggccga

SEQ ID NO: 764286 - RNA, 19 nt, Artificial Sequence
  Description of Artificial Sequence: Synthetic oligonucleotide
cuagcguguucaguuucuu

SEQ ID NO: 764287 - RNA, 19 nt, Artificial Sequence
  Description of Artificial Sequence: Synthetic oligonucleotide
ggccucgcuguaacacuca

SEQ ID NO: 764288 - RNA, 19 nt, Artificial Sequence
  Description of Artificial Sequence: Synthetic oligonucleotide
cacugugaguaggguacau

SEQ ID NO: 764289 - RNA, 19 nt, Artificial Sequence
  Description of Artificial Sequence: Synthetic oligonucleotide
cucugcccgaggccacugu

SEQ ID NO: 764290 - RNA, 19 nt, Artificial Sequence
  Description of Artificial Sequence: Synthetic oligonucleotide
cccggcaggcuuuuauuau

SEQ ID NO: 764291 - RNA, 19 nt, Artificial Sequence
  Description of Artificial Sequence: Synthetic oligonucleotide
gccucgcuguaacacucau

SEQ ID NO: 764292 - RNA, 19 nt, Artificial Sequence
  Description of Artificial Sequence: Synthetic oligonucleotide
ccgauggccgacggaacaa

SEQ ID NO: 764293 - RNA, 19 nt, Artificial Sequence
  Description of Artificial Sequence: Synthetic oligonucleotide
gcgauaccucuuagcauau

SEQ ID NO: 764294 - RNA, 19 nt, Artificial Sequence
  Description of Artificial Sequence: Synthetic oligonucleotide
cggugggacuucuuaggcu

SEQ ID NO: 764295 - RNA, 19 nt, Artificial Sequence
  Description of Artificial Sequence: Synthetic oligonucleotide
cgaugaaggccugugcgau

SEQ ID NO: 764296 - RNA, 19 nt, Artificial Sequence
  Description of Artificial Sequence: Synthetic oligonucleotide
gccucccguuccagcccag

SEQ ID NO: 764297 - RNA, 19 nt, Artificial Sequence
  Description of Artificial Sequence: Synthetic oligonucleotide
cacugcccaugcugccgau

SEQ ID NO: 764298 - RNA, 19 nt, Artificial Sequence
  Description of Artificial Sequence: Synthetic oligonucleotide
cgauggccgacggaacaaa

SEQ ID NO: 764299 - RNA, 19 nt, Artificial Sequence
  Description of Artificial Sequence: Synthetic oligonucleotide
ccaugaucugugggcgaua

SEQ ID NO: 764300 - RNA, 19 nt, Artificial Sequence
  Description of Artificial Sequence: Synthetic oligonucleotide
cgauaccucuuagcauauu

SEQ ID NO: 764301 - RNA, 19 nt, Artificial Sequence
  Description of Artificial Sequence: Synthetic oligonucleotide
gccccgcauccucgacuuu

SEQ ID NO: 764302 - RNA, 19 nt, Artificial Sequence
  Description of Artificial Sequence: Synthetic oligonucleotide
aaauaugaagcacuaugcc

SEQ ID NO: 764303 - RNA, 19 nt, Artificial Sequence
  Description of Artificial Sequence: Synthetic oligonucleotide
uuuauaagcccaaagauga

SEQ ID NO: 764304 - RNA, 19 nt, Artificial Sequence
  Description of Artificial Sequence: Synthetic oligonucleotide
acauguaucaauuugcagg

SEQ ID NO: 764305 - RNA, 19 nt, Artificial Sequence
  Description of Artificial Sequence: Synthetic oligonucleotide
aaaauaugaagcacuaugc

SEQ ID NO: 764306 - RNA, 19 nt, Artificial Sequence
  Description of Artificial Sequence: Synthetic oligonucleotide
aacguugugaaacuguaac

SEQ ID NO: 764307 - RNA, 19 nt, Artificial Sequence
  Description of Artificial Sequence: Synthetic oligonucleotide
acuaugccaacucagaccc

SEQ ID NO: 764308 - RNA, 19 nt, Artificial Sequence
  Description of Artificial Sequence: Synthetic oligonucleotide
auauucgucacagaaaucc

SEQ ID NO: 764309 - RNA, 19 nt, Artificial Sequence
  Description of Artificial Sequence: Synthetic oligonucleotide
gaucuuauaagcuauguac

SEQ ID NO: 764310 - RNA, 19 nt, Artificial Sequence
  Description of Artificial Sequence: Synthetic oligonucleotide
uuuacauguaucaauuugc

SEQ ID NO: 764311 - RNA, 19 nt, Artificial Sequence
  Description of Artificial Sequence: Synthetic oligonucleotide
aauaugaagcacuaugcca

SEQ ID NO: 764312 - RNA, 19 nt, Artificial Sequence
  Description of Artificial Sequence: Synthetic oligonucleotide
auaagcuauguacagcagc

SEQ ID NO: 764313 - RNA, 19 nt, Artificial Sequence
  Description of Artificial Sequence: Synthetic oligonucleotide
uuauaagcuauguacagca

SEQ ID NO: 764314 - RNA, 19 nt, Artificial Sequence
  Description of Artificial Sequence: Synthetic oligonucleotide
aauaaaaccucuuuuccaa

SEQ ID NO: 764315 - RNA, 19 nt, Artificial Sequence
  Description of Artificial Sequence: Synthetic oligonucleotide
uaauucuucaggucaaggg

SEQ ID NO: 764316 - RNA, 19 nt, Artificial Sequence
  Description of Artificial Sequence: Synthetic oligonucleotide
aauccguguaggcacaugg

SEQ ID NO: 764317 - RNA, 19 nt, Artificial Sequence
  Description of Artificial Sequence: Synthetic oligonucleotide
cugaagaucuuuauaagcc

SEQ ID NO: 764318 - RNA, 19 nt, Artificial Sequence
  Description of Artificial Sequence: Synthetic oligonucleotide
agagcuacuuguuuuauag

SEQ ID NO: 764319 - RNA, 19 nt, Artificial Sequence
  Description of Artificial Sequence: Synthetic oligonucleotide
aguucguauauauuggguc

SEQ ID NO: 764320 - RNA, 19 nt, Artificial Sequence
  Description of Artificial Sequence: Synthetic oligonucleotide
uaugcgucuagacauuccg

SEQ ID NO: 764321 - RNA, 19 nt, Artificial Sequence
  Description of Artificial Sequence: Synthetic oligonucleotide
ucuuauaagcuauguacag

SEQ ID NO: 764322 - RNA, 19 nt, Artificial Sequence
  Description of Artificial Sequence: Synthetic oligonucleotide
uugguaggaccuaaguucg

SEQ ID NO: 764323 - RNA, 19 nt, Artificial Sequence
  Description of Artificial Sequence: Synthetic oligonucleotide
aaagagaucuuauaagcua

SEQ ID NO: 764324 - RNA, 19 nt, Artificial Sequence
  Description of Artificial Sequence: Synthetic oligonucleotide
aauucaugacauauauucg

SEQ ID NO: 764325 - RNA, 19 nt, Artificial Sequence
  Description of Artificial Sequence: Synthetic oligonucleotide
uaaguucguauauauuggg

SEQ ID NO: 764326 - RNA, 19 nt, Artificial Sequence
  Description of Artificial Sequence: Synthetic oligonucleotide
auuauuguccugucuaaag

SEQ ID NO: 764327 - RNA, 19 nt, Artificial Sequence
  Description of Artificial Sequence: Synthetic oligonucleotide
agaucgaugcccuacguag

SEQ ID NO: 764328 - RNA, 19 nt, Artificial Sequence
  Description of Artificial Sequence: Synthetic oligonucleotide
ucauacgaggucauggaag

SEQ ID NO: 764329 - RNA, 19 nt, Artificial Sequence
  Description of Artificial Sequence: Synthetic oligonucleotide
auaagcccaaagaugaugc

SEQ ID NO: 764330 - RNA, 19 nt, Artificial Sequence
  Description of Artificial Sequence: Synthetic oligonucleotide
uagcuaauucuuuucagag

SEQ ID NO: 764331 - RNA, 19 nt, Artificial Sequence
  Description of Artificial Sequence: Synthetic oligonucleotide
ugagcuuaccaaaauagaa

SEQ ID NO: 764332 - RNA, 19 nt, Artificial Sequence
  Description of Artificial Sequence: Synthetic oligonucleotide
caaucauuguuccuggacg

SEQ ID NO: 764333 - RNA, 19 nt, Artificial Sequence
  Description of Artificial Sequence: Synthetic oligonucleotide
uguaucaauuugcagggca

SEQ ID NO: 764334 - RNA, 19 nt, Artificial Sequence
  Description of Artificial Sequence: Synthetic oligonucleotide
ucuaaagcgaauggcacgg

SEQ ID NO: 764335 - RNA, 19 nt, Artificial Sequence
  Description of Artificial Sequence: Synthetic oligonucleotide
acaaauuuuguuguaugcg

SEQ ID NO: 764336 - RNA, 19 nt, Artificial Sequence
  Description of Artificial Sequence: Synthetic oligonucleotide
agcuaauucuuuucagagc

SEQ ID NO: 764337 - RNA, 19 nt, Artificial Sequence
  Description of Artificial Sequence: Synthetic oligonucleotide
guugguaggaccuaaguuc

SEQ ID NO: 764338 - RNA, 19 nt, Artificial Sequence
  Description of Artificial Sequence: Synthetic oligonucleotide
uuuaacguugugaaacugu

SEQ ID NO: 764339 - RNA, 19 nt, Artificial Sequence
  Description of Artificial Sequence: Synthetic oligonucleotide
acauauauucgucacagaa

SEQ ID NO: 764340 - RNA, 19 nt, Artificial Sequence
  Description of Artificial Sequence: Synthetic oligonucleotide
cuuucggacaaauaaggac

SEQ ID NO: 764341 - RNA, 19 nt, Artificial Sequence
  Description of Artificial Sequence: Synthetic oligonucleotide
aaauuuuguuguaugcguc

SEQ ID NO: 764342 - RNA, 19 nt, Artificial Sequence
  Description of Artificial Sequence: Synthetic oligonucleotide
gagguggacggcuugaucc

SEQ ID NO: 764343 - RNA, 19 nt, Artificial Sequence
  Description of Artificial Sequence: Synthetic oligonucleotide
ucacuaugcaagccuaggg

SEQ ID NO: 764344 - RNA, 19 nt, Artificial Sequence
  Description of Artificial Sequence: Synthetic oligonucleotide
aaucauuguuccuggacga

SEQ ID NO: 764345 - RNA, 19 nt, Artificial Sequence
  Description of Artificial Sequence: Synthetic oligonucleotide
uguguaaucuguaaacgua

SEQ ID NO: 764346 - RNA, 19 nt, Artificial Sequence
  Description of Artificial Sequence: Synthetic oligonucleotide
agugcuaagcuaccacacc

SEQ ID NO: 764347 - RNA, 19 nt, Artificial Sequence
  Description of Artificial Sequence: Synthetic oligonucleotide
cacuucuugacaaauuuug

SEQ ID NO: 764348 - RNA, 19 nt, Artificial Sequence
  Description of Artificial Sequence: Synthetic oligonucleotide
guucguauauauugggucc

SEQ ID NO: 764349 - RNA, 19 nt, Artificial Sequence
  Description of Artificial Sequence: Synthetic oligonucleotide
cauaccaacccuuuaggac

SEQ ID NO: 764350 - RNA, 19 nt, Artificial Sequence
  Description of Artificial Sequence: Synthetic oligonucleotide
ugcacugcccuucauacga

SEQ ID NO: 764351 - RNA, 19 nt, Artificial Sequence
  Description of Artificial Sequence: Synthetic oligonucleotide
caugcuugugccaugcugc

SEQ ID NO: 764352 - RNA, 19 nt, Artificial Sequence
  Description of Artificial Sequence: Synthetic oligonucleotide
uuugagguguuuauuccca

SEQ ID NO: 764353 - RNA, 19 nt, Artificial Sequence
  Description of Artificial Sequence: Synthetic oligonucleotide
ccuaaguucguauauauug

SEQ ID NO: 764354 - RNA, 19 nt, Artificial Sequence
  Description of Artificial Sequence: Synthetic oligonucleotide
uaaccuaggacuuacugua

SEQ ID NO: 764355 - RNA, 19 nt, Artificial Sequence
  Description of Artificial Sequence: Synthetic oligonucleotide
auagcuaauucuuuucaga

SEQ ID NO: 764356 - RNA, 19 nt, Artificial Sequence
  Description of Artificial Sequence: Synthetic oligonucleotide
accggcucauuccagaaac

SEQ ID NO: 764357 - RNA, 19 nt, Artificial Sequence
  Description of Artificial Sequence: Synthetic oligonucleotide
ucaaucauuguuccuggac

SEQ ID NO: 764358 - RNA, 19 nt, Artificial Sequence
  Description of Artificial Sequence: Synthetic oligonucleotide
uauuggguccugaucuugg

SEQ ID NO: 764359 - RNA, 19 nt, Artificial Sequence
  Description of Artificial Sequence: Synthetic oligonucleotide
guaaacguaaaacagauuu

SEQ ID NO: 764360 - RNA, 19 nt, Artificial Sequence
  Description of Artificial Sequence: Synthetic oligonucleotide
uugugaaacuguaacuugu

SEQ ID NO: 764361 - RNA, 19 nt, Artificial Sequence
  Description of Artificial Sequence: Synthetic oligonucleotide
uuggguacacucaaaauuu

SEQ ID NO: 764362 - RNA, 19 nt, Artificial Sequence
  Description of Artificial Sequence: Synthetic oligonucleotide
gagugugcaucuuuccugg

SEQ ID NO: 764363 - RNA, 19 nt, Artificial Sequence
  Description of Artificial Sequence: Synthetic oligonucleotide
guaauugccccauucaauc

SEQ ID NO: 764364 - RNA, 19 nt, Artificial Sequence
  Description of Artificial Sequence: Synthetic oligonucleotide
acuaaccuaggacuuacug

SEQ ID NO: 764365 - RNA, 19 nt, Artificial Sequence
  Description of Artificial Sequence: Synthetic oligonucleotide
uccugucuaaagcgaaugg

SEQ ID NO: 764366 - RNA, 19 nt, Artificial Sequence
  Description of Artificial Sequence: Synthetic oligonucleotide
uuccguaugucuucccugg

SEQ ID NO: 764367 - RNA, 19 nt, Artificial Sequence
  Description of Artificial Sequence: Synthetic oligonucleotide
uacauguaucaauuugcag

SEQ ID NO: 764368 - RNA, 19 nt, Artificial Sequence
  Description of Artificial Sequence: Synthetic oligonucleotide
ugcuaagcuaccacacccg

SEQ ID NO: 764369 - RNA, 19 nt, Artificial Sequence
  Description of Artificial Sequence: Synthetic oligonucleotide
ugucacuucuggcuuuacg

SEQ ID NO: 764370 - RNA, 19 nt, Artificial Sequence
  Description of Artificial Sequence: Synthetic oligonucleotide
uuaacguugugaaacugua

SEQ ID NO: 764371 - RNA, 19 nt, Artificial Sequence
  Description of Artificial Sequence: Synthetic oligonucleotide
aacaugacgugauuugcau

SEQ ID NO: 764372 - RNA, 19 nt, Artificial Sequence
  Description of Artificial Sequence: Synthetic oligonucleotide
ucaugacauauauucguca

SEQ ID NO: 764373 - RNA, 19 nt, Artificial Sequence
  Description of Artificial Sequence: Synthetic oligonucleotide
uauaagcuauguacagcag

SEQ ID NO: 764374 - RNA, 19 nt, Artificial Sequence
  Description of Artificial Sequence: Synthetic oligonucleotide
acuaugcaagccuaggggu

SEQ ID NO: 764375 - RNA, 19 nt, Artificial Sequence
  Description of Artificial Sequence: Synthetic oligonucleotide
ucacagaaauccguguagg

SEQ ID NO: 764376 - RNA, 19 nt, Artificial Sequence
  Description of Artificial Sequence: Synthetic oligonucleotide
uucaugacauauauucguc

SEQ ID NO: 764377 - RNA, 19 nt, Artificial Sequence
  Description of Artificial Sequence: Synthetic oligonucleotide
gucuaaagcgaauggcacg

SEQ ID NO: 764378 - RNA, 19 nt, Artificial Sequence
  Description of Artificial Sequence: Synthetic oligonucleotide
ugagugcuaagcuaccaca

SEQ ID NO: 764379 - RNA, 19 nt, Artificial Sequence
  Description of Artificial Sequence: Synthetic oligonucleotide
auguguaaucuguaaacgu

SEQ ID NO: 764380 - RNA, 19 nt, Artificial Sequence
  Description of Artificial Sequence: Synthetic oligonucleotide
cuuauaagcuauguacagc

SEQ ID NO: 764381 - RNA, 19 nt, Artificial Sequence
  Description of Artificial Sequence: Synthetic oligonucleotide
ugcgucuagacauuccggc

SEQ ID NO: 764382 - RNA, 19 nt, Artificial Sequence
  Description of Artificial Sequence: Synthetic oligonucleotide
ucagaugauucaaauuuua

SEQ ID NO: 764383 - RNA, 19 nt, Artificial Sequence
  Description of Artificial Sequence: Synthetic oligonucleotide
aauuccugguuuucuuuga

SEQ ID NO: 764384 - RNA, 19 nt, Artificial Sequence
  Description of Artificial Sequence: Synthetic oligonucleotide
uuugguaagcagagaugag

SEQ ID NO: 764385 - RNA, 19 nt, Artificial Sequence
  Description of Artificial Sequence: Synthetic oligonucleotide
acccuuucagcucagggug

SEQ ID NO: 764386 - RNA, 19 nt, Artificial Sequence
  Description of Artificial Sequence: Synthetic oligonucleotide
auuaucauguuuuccugaa

SEQ ID NO: 764387 - RNA, 19 nt, Artificial Sequence
  Description of Artificial Sequence: Synthetic oligonucleotide
uaaacguaaaacagauuuu

SEQ ID NO: 764388 - RNA, 19 nt, Artificial Sequence
  Description of Artificial Sequence: Synthetic oligonucleotide
uaaagcgaauggcacgggc

SEQ ID NO: 764389 - RNA, 19 nt, Artificial Sequence
  Description of Artificial Sequence: Synthetic oligonucleotide
uggcuuuacggaaauuuac

SEQ ID NO: 764390 - RNA, 19 nt, Artificial Sequence
  Description of Artificial Sequence: Synthetic oligonucleotide
ucauaccaacccuuuagga

SEQ ID NO: 764391 - RNA, 19 nt, Artificial Sequence
  Description of Artificial Sequence: Synthetic oligonucleotide
accuuucggacaaauaagg

SEQ ID NO: 764392 - RNA, 19 nt, Artificial Sequence
  Description of Artificial Sequence: Synthetic oligonucleotide
uaugccaacucagacccag

SEQ ID NO: 764393 - RNA, 19 nt, Artificial Sequence
  Description of Artificial Sequence: Synthetic oligonucleotide
uguaaucuguaaacguaaa

SEQ ID NO: 764394 - RNA, 19 nt, Artificial Sequence
  Description of Artificial Sequence: Synthetic oligonucleotide
auauauagcugcccaauuu

SEQ ID NO: 764395 - RNA, 19 nt, Artificial Sequence
  Description of Artificial Sequence: Synthetic oligonucleotide
auagcugcccaauuugaga

SEQ ID NO: 764396 - RNA, 19 nt, Artificial Sequence
  Description of Artificial Sequence: Synthetic oligonucleotide
uggaagcuucacuggaggg

SEQ ID NO: 764397 - RNA, 19 nt, Artificial Sequence
  Description of Artificial Sequence: Synthetic oligonucleotide
ugugaccacccuuucagcu

SEQ ID NO: 764398 - RNA, 19 nt, Artificial Sequence
  Description of Artificial Sequence: Synthetic oligonucleotide
cuacguaguucaauccccg

SEQ ID NO: 764399 - RNA, 19 nt, Artificial Sequence
  Description of Artificial Sequence: Synthetic oligonucleotide
aagagaucuuauaagcuau

SEQ ID NO: 764400 - RNA, 19 nt, Artificial Sequence
  Description of Artificial Sequence: Synthetic oligonucleotide
aaaacugcuugggaaacau

SEQ ID NO: 764401 - RNA, 19 nt, Artificial Sequence
  Description of Artificial Sequence: Synthetic oligonucleotide
uuagagcuauuugaggugu

SEQ ID NO: 764402 - RNA, 19 nt, Artificial Sequence
  Description of Artificial Sequence: Synthetic oligonucleotide
ucuuuucagagcuggaauu

SEQ ID NO: 764403 - RNA, 19 nt, Artificial Sequence
  Description of Artificial Sequence: Synthetic oligonucleotide
gugcuaagcuaccacaccc

SEQ ID NO: 764404 - RNA, 19 nt, Artificial Sequence
  Description of Artificial Sequence: Synthetic oligonucleotide
ucagaguauucccagccau

SEQ ID NO: 764405 - RNA, 19 nt, Artificial Sequence
  Description of Artificial Sequence: Synthetic oligonucleotide
ucccugagugcuaagcuac

SEQ ID NO: 764406 - RNA, 19 nt, Artificial Sequence
  Description of Artificial Sequence: Synthetic oligonucleotide
guuguaugcgucuagacau

SEQ ID NO: 764407 - RNA, 19 nt, Artificial Sequence
  Description of Artificial Sequence: Synthetic oligonucleotide
caccuuucggacaaauaag

SEQ ID NO: 764408 - RNA, 19 nt, Artificial Sequence
  Description of Artificial Sequence: Synthetic oligonucleotide
uccugcucgccauaccacg

SEQ ID NO: 764409 - RNA, 19 nt, Artificial Sequence
  Description of Artificial Sequence: Synthetic oligonucleotide
aaucucguguggugcacug

SEQ ID NO: 764410 - RNA, 19 nt, Artificial Sequence
  Description of Artificial Sequence: Synthetic oligonucleotide
aauggcacgggcccaguaa

SEQ ID NO: 764411 - RNA, 19 nt, Artificial Sequence
  Description of Artificial Sequence: Synthetic oligonucleotide
aggacuuacuguaauucuc

SEQ ID NO: 764412 - RNA, 19 nt, Artificial Sequence
  Description of Artificial Sequence: Synthetic oligonucleotide
cauuccggcuuuaacguug

SEQ ID NO: 764413 - RNA, 19 nt, Artificial Sequence
  Description of Artificial Sequence: Synthetic oligonucleotide
ugugccaugcugcguuccg

SEQ ID NO: 764414 - RNA, 19 nt, Artificial Sequence
  Description of Artificial Sequence: Synthetic oligonucleotide
agacuaaccuaggacuuac

SEQ ID NO: 764415 - RNA, 19 nt, Artificial Sequence
  Description of Artificial Sequence: Synthetic oligonucleotide
cuaggacuuacuguaauuc

SEQ ID NO: 764416 - RNA, 19 nt, Artificial Sequence
  Description of Artificial Sequence: Synthetic oligonucleotide
agcgggaucaugauucugg

SEQ ID NO: 764417 - RNA, 19 nt, Artificial Sequence
  Description of Artificial Sequence: Synthetic oligonucleotide
aaacaugacgugauuugca

SEQ ID NO: 764418 - RNA, 19 nt, Artificial Sequence
  Description of Artificial Sequence: Synthetic oligonucleotide
cugaccagaagucacaaaa

SEQ ID NO: 764419 - RNA, 19 nt, Artificial Sequence
  Description of Artificial Sequence: Synthetic oligonucleotide
gaguauucccagccauugg

SEQ ID NO: 764420 - RNA, 19 nt, Artificial Sequence
  Description of Artificial Sequence: Synthetic oligonucleotide
uucauacgaggucauggaa

SEQ ID NO: 764421 - RNA, 19 nt, Artificial Sequence
  Description of Artificial Sequence: Synthetic oligonucleotide
gaugaggcagaucgaugcc

SEQ ID NO: 764422 - RNA, 19 nt, Artificial Sequence
  Description of Artificial Sequence: Synthetic oligonucleotide
ugacugaccagaagucaca

SEQ ID NO: 764423 - RNA, 19 nt, Artificial Sequence
  Description of Artificial Sequence: Synthetic oligonucleotide
agggcuagaggcuuaagua

SEQ ID NO: 764424 - RNA, 19 nt, Artificial Sequence
  Description of Artificial Sequence: Synthetic oligonucleotide
agaguauucccagccauug

SEQ ID NO: 764425 - RNA, 19 nt, Artificial Sequence
  Description of Artificial Sequence: Synthetic oligonucleotide
ugaucuuggcaccggcuca

SEQ ID NO: 764426 - RNA, 19 nt, Artificial Sequence
  Description of Artificial Sequence: Synthetic oligonucleotide
ucacucagaugauucaaau

SEQ ID NO: 764427 - RNA, 19 nt, Artificial Sequence
  Description of Artificial Sequence: Synthetic oligonucleotide
aaguucguauauauugggu

SEQ ID NO: 764428 - RNA, 19 nt, Artificial Sequence
  Description of Artificial Sequence: Synthetic oligonucleotide
uacgaggucauggaagugu

SEQ ID NO: 764429 - RNA, 19 nt, Artificial Sequence
  Description of Artificial Sequence: Synthetic oligonucleotide
guaucaauuugcagggcag

SEQ ID NO: 764430 - RNA, 19 nt, Artificial Sequence
  Description of Artificial Sequence: Synthetic oligonucleotide
uccguguaggcacauggaa

SEQ ID NO: 764431 - RNA, 19 nt, Artificial Sequence
  Description of Artificial Sequence: Synthetic oligonucleotide
caaaauuuguuccuagucu

SEQ ID NO: 764432 - RNA, 19 nt, Artificial Sequence
  Description of Artificial Sequence: Synthetic oligonucleotide
agaucuuauaagcuaugua

SEQ ID NO: 764433 - RNA, 19 nt, Artificial Sequence
  Description of Artificial Sequence: Synthetic oligonucleotide
aguucaauccccggauuuc

SEQ ID NO: 764434 - RNA, 19 nt, Artificial Sequence
  Description of Artificial Sequence: Synthetic oligonucleotide
acguugugaaacuguaacu

SEQ ID NO: 764435 - RNA, 19 nt, Artificial Sequence
  Description of Artificial Sequence: Synthetic oligonucleotide
acguguuccauguccccac

SEQ ID NO: 764436 - RNA, 19 nt, Artificial Sequence
  Description of Artificial Sequence: Synthetic oligonucleotide
cagcuuacaccucaguuuc

SEQ ID NO: 764437 - RNA, 19 nt, Artificial Sequence
  Description of Artificial Sequence: Synthetic oligonucleotide
uguacagacugcucgucuc

SEQ ID NO: 764438 - RNA, 19 nt, Artificial Sequence
  Description of Artificial Sequence: Synthetic oligonucleotide
guagcccagacuaaccuag

SEQ ID NO: 764439 - RNA, 19 nt, Artificial Sequence
  Description of Artificial Sequence: Synthetic oligonucleotide
gaagcacuaugccaacuca

SEQ ID NO: 764440 - RNA, 19 nt, Artificial Sequence
  Description of Artificial Sequence: Synthetic oligonucleotide
uuguuguaugcgucuagac

SEQ ID NO: 764441 - RNA, 19 nt, Artificial Sequence
  Description of Artificial Sequence: Synthetic oligonucleotide
uucaauccccggauuuccc

SEQ ID NO: 764442 - RNA, 19 nt, Artificial Sequence
  Description of Artificial Sequence: Synthetic oligonucleotide
agcgggaccguguaguaca

SEQ ID NO: 764443 - RNA, 19 nt, Artificial Sequence
  Description of Artificial Sequence: Synthetic oligonucleotide
gacauuccggcuuuaacgu

SEQ ID NO: 764444 - RNA, 19 nt, Artificial Sequence
  Description of Artificial Sequence: Synthetic oligonucleotide
ugcccuacguaguucaauc

SEQ ID NO: 764445 - RNA, 19 nt, Artificial Sequence
  Description of Artificial Sequence: Synthetic oligonucleotide
agcuauuugagguguuuau

SEQ ID NO: 764446 - RNA, 19 nt, Artificial Sequence
  Description of Artificial Sequence: Synthetic oligonucleotide
uccggcuuuaacguuguga

SEQ ID NO: 764447 - RNA, 19 nt, Artificial Sequence
  Description of Artificial Sequence: Synthetic oligonucleotide
accacguguuccauguccc

SEQ ID NO: 764448 - RNA, 19 nt, Artificial Sequence
  Description of Artificial Sequence: Synthetic oligonucleotide
aggucagaggucacaaacg

SEQ ID NO: 764449 - RNA, 19 nt, Artificial Sequence
  Description of Artificial Sequence: Synthetic oligonucleotide
aggaccuaaguucguauau

SEQ ID NO: 764450 - RNA, 19 nt, Artificial Sequence
  Description of Artificial Sequence: Synthetic oligonucleotide
ucguguggugcacugguuc

SEQ ID NO: 764451 - RNA, 19 nt, Artificial Sequence
  Description of Artificial Sequence: Synthetic oligonucleotide
cgugauuugcauuucuucc

SEQ ID NO: 764452 - RNA, 19 nt, Artificial Sequence
  Description of Artificial Sequence: Synthetic oligonucleotide
uucguauauauuggguccu

SEQ ID NO: 764453 - RNA, 19 nt, Artificial Sequence
  Description of Artificial Sequence: Synthetic oligonucleotide
guaaucuguaaacguaaaa

SEQ ID NO: 764454 - RNA, 19 nt, Artificial Sequence
  Description of Artificial Sequence: Synthetic oligonucleotide
uaacguugugaaacuguaa

SEQ ID NO: 764455 - RNA, 19 nt, Artificial Sequence
  Description of Artificial Sequence: Synthetic oligonucleotide
acggcuugauccugcucgc

SEQ ID NO: 764456 - RNA, 19 nt, Artificial Sequence
  Description of Artificial Sequence: Synthetic oligonucleotide
aagagcuacuuguuuuaua

SEQ ID NO: 764457 - RNA, 19 nt, Artificial Sequence
  Description of Artificial Sequence: Synthetic oligonucleotide
acguaguucaauccccgga

SEQ ID NO: 764458 - RNA, 19 nt, Artificial Sequence
  Description of Artificial Sequence: Synthetic oligonucleotide
ccggcuuugaauuaucaug

SEQ ID NO: 764459 - RNA, 19 nt, Artificial Sequence
  Description of Artificial Sequence: Synthetic oligonucleotide
cuaugcaagccuagggguc

SEQ ID NO: 764460 - RNA, 19 nt, Artificial Sequence
  Description of Artificial Sequence: Synthetic oligonucleotide
agcagcuuacaccucaguu

SEQ ID NO: 764461 - RNA, 19 nt, Artificial Sequence
  Description of Artificial Sequence: Synthetic oligonucleotide
uuauaagcccaaagaugau

SEQ ID NO: 764462 - RNA, 19 nt, Artificial Sequence
  Description of Artificial Sequence: Synthetic oligonucleotide
aucagaguauucccagcca

SEQ ID NO: 764463 - RNA, 19 nt, Artificial Sequence
  Description of Artificial Sequence: Synthetic oligonucleotide
augaugcaccauauauagc

SEQ ID NO: 764464 - RNA, 19 nt, Artificial Sequence
  Description of Artificial Sequence: Synthetic oligonucleotide
guuccguaugucuucccug

SEQ ID NO: 764465 - RNA, 19 nt, Artificial Sequence
  Description of Artificial Sequence: Synthetic oligonucleotide
uugccccauucaaucauug

SEQ ID NO: 764466 - RNA, 19 nt, Artificial Sequence
  Description of Artificial Sequence: Synthetic oligonucleotide
gaaguugguaggaccuaag

SEQ ID NO: 764467 - RNA, 19 nt, Artificial Sequence
  Description of Artificial Sequence: Synthetic oligonucleotide
auguaucaauuugcagggc

SEQ ID NO: 764468 - RNA, 19 nt, Artificial Sequence
  Description of Artificial Sequence: Synthetic oligonucleotide
cugagugcuaagcuaccac

SEQ ID NO: 764469 - RNA, 19 nt, Artificial Sequence
  Description of Artificial Sequence: Synthetic oligonucleotide
aguaauugccccauucaau

SEQ ID NO: 764470 - RNA, 19 nt, Artificial Sequence
  Description of Artificial Sequence: Synthetic oligonucleotide
cuuuaacguugugaaacug

SEQ ID NO: 764471 - RNA, 19 nt, Artificial Sequence
  Description of Artificial Sequence: Synthetic oligonucleotide
uacaaggguacugcuugcc

SEQ ID NO: 764472 - RNA, 19 nt, Artificial Sequence
  Description of Artificial Sequence: Synthetic oligonucleotide
ugcugcguuccguaugucu

SEQ ID NO: 764473 - RNA, 19 nt, Artificial Sequence
  Description of Artificial Sequence: Synthetic oligonucleotide
ccuacguaguucaaucccc

SEQ ID NO: 764474 - RNA, 19 nt, Artificial Sequence
  Description of Artificial Sequence: Synthetic oligonucleotide
acaaacgguggcuuacaaa

SEQ ID NO: 764475 - RNA, 19 nt, Artificial Sequence
  Description of Artificial Sequence: Synthetic oligonucleotide
ggacuuacuguaauucucc

SEQ ID NO: 764476 - RNA, 19 nt, Artificial Sequence
  Description of Artificial Sequence: Synthetic oligonucleotide
agagaugaggcagaucgau

SEQ ID NO: 764477 - RNA, 19 nt, Artificial Sequence
  Description of Artificial Sequence: Synthetic oligonucleotide
uagcccagacuaaccuagg

SEQ ID NO: 764478 - RNA, 19 nt, Artificial Sequence
  Description of Artificial Sequence: Synthetic oligonucleotide
gagugcuaagcuaccacac

SEQ ID NO: 764479 - RNA, 19 nt, Artificial Sequence
  Description of Artificial Sequence: Synthetic oligonucleotide
caccaagguacaaggguac

SEQ ID NO: 764480 - RNA, 19 nt, Artificial Sequence
  Description of Artificial Sequence: Synthetic oligonucleotide
ugauuccuccuggagagaa

SEQ ID NO: 764481 - RNA, 19 nt, Artificial Sequence
  Description of Artificial Sequence: Synthetic oligonucleotide
cuaaccuaggacuuacugu

SEQ ID NO: 764482 - RNA, 19 nt, Artificial Sequence
  Description of Artificial Sequence: Synthetic oligonucleotide
uccugaucuuggcaccggc

SEQ ID NO: 764483 - RNA, 19 nt, Artificial Sequence
  Description of Artificial Sequence: Synthetic oligonucleotide
gaugagcgggaccguguag

SEQ ID NO: 764484 - RNA, 19 nt, Artificial Sequence
  Description of Artificial Sequence: Synthetic oligonucleotide
uaggaccuaaguucguaua

SEQ ID NO: 764485 - RNA, 19 nt, Artificial Sequence
  Description of Artificial Sequence: Synthetic oligonucleotide
ggacaaauaaggacuugag

SEQ ID NO: 764486 - RNA, 19 nt, Artificial Sequence
  Description of Artificial Sequence: Synthetic oligonucleotide
acucagacccagcgugcac

SEQ ID NO: 764487 - RNA, 19 nt, Artificial Sequence
  Description of Artificial Sequence: Synthetic oligonucleotide
aggcagaucgaugcccuac

SEQ ID NO: 764488 - RNA, 19 nt, Artificial Sequence
  Description of Artificial Sequence: Synthetic oligonucleotide
gcuaagcuaccacacccgg

SEQ ID NO: 764489 - RNA, 19 nt, Artificial Sequence
  Description of Artificial Sequence: Synthetic oligonucleotide
gagaugaggcagaucgaug

SEQ ID NO: 764490 - RNA, 19 nt, Artificial Sequence
  Description of Artificial Sequence: Synthetic oligonucleotide
gcaauagcuaauucuuuuc

SEQ ID NO: 764491 - RNA, 19 nt, Artificial Sequence
  Description of Artificial Sequence: Synthetic oligonucleotide
uuguuccuagucugagaca

SEQ ID NO: 764492 - RNA, 19 nt, Artificial Sequence
  Description of Artificial Sequence: Synthetic oligonucleotide
uguaugcgucuagacauuc

SEQ ID NO: 764493 - RNA, 19 nt, Artificial Sequence
  Description of Artificial Sequence: Synthetic oligonucleotide
uagaggcuuaaguaauguu

SEQ ID NO: 764494 - RNA, 19 nt, Artificial Sequence
  Description of Artificial Sequence: Synthetic oligonucleotide
agaugaugcaccauauaua

SEQ ID NO: 764495 - RNA, 19 nt, Artificial Sequence
  Description of Artificial Sequence: Synthetic oligonucleotide
cuucaggucaaggggacuc

SEQ ID NO: 764496 - RNA, 19 nt, Artificial Sequence
  Description of Artificial Sequence: Synthetic oligonucleotide
guguaaucuguaaacguaa

SEQ ID NO: 764497 - RNA, 19 nt, Artificial Sequence
  Description of Artificial Sequence: Synthetic oligonucleotide
guuggagugugcaucuuuc

SEQ ID NO: 764498 - RNA, 19 nt, Artificial Sequence
  Description of Artificial Sequence: Synthetic oligonucleotide
cauacgaggucauggaagu

SEQ ID NO: 764499 - RNA, 19 nt, Artificial Sequence
  Description of Artificial Sequence: Synthetic oligonucleotide
agagaucuuauaagcuaug

SEQ ID NO: 764500 - RNA, 19 nt, Artificial Sequence
  Description of Artificial Sequence: Synthetic oligonucleotide
ggcagaucgaugcccuacg

SEQ ID NO: 764501 - RNA, 19 nt, Artificial Sequence
  Description of Artificial Sequence: Synthetic oligonucleotide
aaauccguguaggcacaug

SEQ ID NO: 764502 - RNA, 19 nt, Artificial Sequence
  Description of Artificial Sequence: Synthetic oligonucleotide
ugcucgccauaccacgugu

SEQ ID NO: 764503 - RNA, 19 nt, Artificial Sequence
  Description of Artificial Sequence: Synthetic oligonucleotide
accuaggacuuacuguaau

SEQ ID NO: 764504 - RNA, 19 nt, Artificial Sequence
  Description of Artificial Sequence: Synthetic oligonucleotide
cucacaaauuggcacacua

SEQ ID NO: 764505 - RNA, 19 nt, Artificial Sequence
  Description of Artificial Sequence: Synthetic oligonucleotide
acgaggucauggaaguguc

SEQ ID NO: 764506 - RNA, 19 nt, Artificial Sequence
  Description of Artificial Sequence: Synthetic oligonucleotide
uucaggucaaggggacucc

SEQ ID NO: 764507 - RNA, 19 nt, Artificial Sequence
  Description of Artificial Sequence: Synthetic oligonucleotide
ucguauauauuggguccug

SEQ ID NO: 764508 - RNA, 19 nt, Artificial Sequence
  Description of Artificial Sequence: Synthetic oligonucleotide
caugacgugauuugcauuu

SEQ ID NO: 764509 - RNA, 19 nt, Artificial Sequence
  Description of Artificial Sequence: Synthetic oligonucleotide
augagugacugaaaugaau

SEQ ID NO: 764510 - RNA, 19 nt, Artificial Sequence
  Description of Artificial Sequence: Synthetic oligonucleotide
guccugucuaaagcgaaug

SEQ ID NO: 764511 - RNA, 19 nt, Artificial Sequence
  Description of Artificial Sequence: Synthetic oligonucleotide
caguaauugccccauucaa

SEQ ID NO: 764512 - RNA, 19 nt, Artificial Sequence
  Description of Artificial Sequence: Synthetic oligonucleotide
augacgugauuugcauuuc

SEQ ID NO: 764513 - RNA, 19 nt, Artificial Sequence
  Description of Artificial Sequence: Synthetic oligonucleotide
augcgucuagacauuccgg

SEQ ID NO: 764514 - RNA, 19 nt, Artificial Sequence
  Description of Artificial Sequence: Synthetic oligonucleotide
cacaaauuggcacacuaau

SEQ ID NO: 764515 - RNA, 19 nt, Artificial Sequence
  Description of Artificial Sequence: Synthetic oligonucleotide
ugcguuccguaugucuucc

SEQ ID NO: 764516 - RNA, 19 nt, Artificial Sequence
  Description of Artificial Sequence: Synthetic oligonucleotide
cuggucggggcacugugac

SEQ ID NO: 764517 - RNA, 19 nt, Artificial Sequence
  Description of Artificial Sequence: Synthetic oligonucleotide
gucacaaacgguggcuuac

SEQ ID NO: 764518 - RNA, 19 nt, Artificial Sequence
  Description of Artificial Sequence: Synthetic oligonucleotide
accacacccggcuuugaau

SEQ ID NO: 764519 - RNA, 19 nt, Artificial Sequence
  Description of Artificial Sequence: Synthetic oligonucleotide
ccugggauccaccuuucgg

SEQ ID NO: 764520 - RNA, 19 nt, Artificial Sequence
  Description of Artificial Sequence: Synthetic oligonucleotide
cccuacguaguucaauccc

SEQ ID NO: 764521 - RNA, 19 nt, Artificial Sequence
  Description of Artificial Sequence: Synthetic oligonucleotide
agcccagacuaaccuagga

SEQ ID NO: 764522 - RNA, 19 nt, Artificial Sequence
  Description of Artificial Sequence: Synthetic oligonucleotide
gggaccguguaguacacca

SEQ ID NO: 764523 - RNA, 19 nt, Artificial Sequence
  Description of Artificial Sequence: Synthetic oligonucleotide
gagaucuuauaagcuaugu

SEQ ID NO: 764524 - RNA, 19 nt, Artificial Sequence
  Description of Artificial Sequence: Synthetic oligonucleotide
acaugacgugauuugcauu

SEQ ID NO: 764525 - RNA, 19 nt, Artificial Sequence
  Description of Artificial Sequence: Synthetic oligonucleotide
aucgaugcccuacguaguu

SEQ ID NO: 764526 - RNA, 19 nt, Artificial Sequence
  Description of Artificial Sequence: Synthetic oligonucleotide
gcgagcagcacucgugccg

SEQ ID NO: 764527 - RNA, 19 nt, Artificial Sequence
  Description of Artificial Sequence: Synthetic oligonucleotide
caagccuagggguccaaga

SEQ ID NO: 764528 - RNA, 19 nt, Artificial Sequence
  Description of Artificial Sequence: Synthetic oligonucleotide
cuaaagcgaauggcacggg

SEQ ID NO: 764529 - RNA, 19 nt, Artificial Sequence
  Description of Artificial Sequence: Synthetic oligonucleotide
caacagcugauuccuccug

SEQ ID NO: 764530 - RNA, 19 nt, Artificial Sequence
  Description of Artificial Sequence: Synthetic oligonucleotide
ucggacaaauaaggacuug

SEQ ID NO: 764531 - RNA, 19 nt, Artificial Sequence
  Description of Artificial Sequence: Synthetic oligonucleotide
auuuuguuguaugcgucua

SEQ ID NO: 764532 - RNA, 19 nt, Artificial Sequence
  Description of Artificial Sequence: Synthetic oligonucleotide
uucccuuggugguuuuaaa

SEQ ID NO: 764533 - RNA, 19 nt, Artificial Sequence
  Description of Artificial Sequence: Synthetic oligonucleotide
auccccggauuucccuugg

SEQ ID NO: 764534 - RNA, 19 nt, Artificial Sequence
  Description of Artificial Sequence: Synthetic oligonucleotide
guauauauuggguccugau

SEQ ID NO: 764535 - RNA, 19 nt, Artificial Sequence
  Description of Artificial Sequence: Synthetic oligonucleotide
uuaggacacagugccucgu

SEQ ID NO: 764536 - RNA, 19 nt, Artificial Sequence
  Description of Artificial Sequence: Synthetic oligonucleotide
ccguguaggcacauggaag

SEQ ID NO: 764537 - RNA, 19 nt, Artificial Sequence
  Description of Artificial Sequence: Synthetic oligonucleotide
guaugcgucuagacauucc

SEQ ID NO: 764538 - RNA, 19 nt, Artificial Sequence
  Description of Artificial Sequence: Synthetic oligonucleotide
cuggcuuuacggaaauuua

SEQ ID NO: 764539 - RNA, 19 nt, Artificial Sequence
  Description of Artificial Sequence: Synthetic oligonucleotide
ggcuuuacggaaauuuaca

SEQ ID NO: 764540 - RNA, 19 nt, Artificial Sequence
  Description of Artificial Sequence: Synthetic oligonucleotide
uccguaugucuucccuggu

SEQ ID NO: 764541 - RNA, 19 nt, Artificial Sequence
  Description of Artificial Sequence: Synthetic oligonucleotide
ccaccuuucggacaaauaa

SEQ ID NO: 764542 - RNA, 19 nt, Artificial Sequence
  Description of Artificial Sequence: Synthetic oligonucleotide
acgggcccaguaauugccc

SEQ ID NO: 764543 - RNA, 19 nt, Artificial Sequence
  Description of Artificial Sequence: Synthetic oligonucleotide
agaaauccguguaggcaca

SEQ ID NO: 764544 - RNA, 19 nt, Artificial Sequence
  Description of Artificial Sequence: Synthetic oligonucleotide
aucucguguggugcacugg

SEQ ID NO: 764545 - RNA, 19 nt, Artificial Sequence
  Description of Artificial Sequence: Synthetic oligonucleotide
cugcguuccguaugucuuc

SEQ ID NO: 764546 - RNA, 19 nt, Artificial Sequence
  Description of Artificial Sequence: Synthetic oligonucleotide
agagcuauuugagguguuu

SEQ ID NO: 764547 - RNA, 19 nt, Artificial Sequence
  Description of Artificial Sequence: Synthetic oligonucleotide
ugccaugcugcguuccgua

SEQ ID NO: 764548 - RNA, 19 nt, Artificial Sequence
  Description of Artificial Sequence: Synthetic oligonucleotide
cucuccggagcccgggcag

SEQ ID NO: 764549 - RNA, 19 nt, Artificial Sequence
  Description of Artificial Sequence: Synthetic oligonucleotide
cccaaaucucguguggugc

SEQ ID NO: 764550 - RNA, 19 nt, Artificial Sequence
  Description of Artificial Sequence: Synthetic oligonucleotide
uggucggggcacugugacc

SEQ ID NO: 764551 - RNA, 19 nt, Artificial Sequence
  Description of Artificial Sequence: Synthetic oligonucleotide
acauuccggcuuuaacguu

SEQ ID NO: 764552 - RNA, 19 nt, Artificial Sequence
  Description of Artificial Sequence: Synthetic oligonucleotide
aaccuaggacuuacuguaa

SEQ ID NO: 764553 - RNA, 19 nt, Artificial Sequence
  Description of Artificial Sequence: Synthetic oligonucleotide
ccacccuuucagcucaggg

SEQ ID NO: 764554 - RNA, 19 nt, Artificial Sequence
  Description of Artificial Sequence: Synthetic oligonucleotide
gagcuauuugagguguuua

SEQ ID NO: 764555 - RNA, 19 nt, Artificial Sequence
  Description of Artificial Sequence: Synthetic oligonucleotide
ugagcgggaccguguagua

SEQ ID NO: 764556 - RNA, 19 nt, Artificial Sequence
  Description of Artificial Sequence: Synthetic oligonucleotide
ccaugcuugugccaugcug

SEQ ID NO: 764557 - RNA, 19 nt, Artificial Sequence
  Description of Artificial Sequence: Synthetic oligonucleotide
ccggcuuuaacguugugaa

SEQ ID NO: 764558 - RNA, 19 nt, Artificial Sequence
  Description of Artificial Sequence: Synthetic oligonucleotide
gaagggcuagaggcuuaag

SEQ ID NO: 764559 - RNA, 19 nt, Artificial Sequence
  Description of Artificial Sequence: Synthetic oligonucleotide
gcucgucuccuucuuggcc

SEQ ID NO: 764560 - RNA, 19 nt, Artificial Sequence
  Description of Artificial Sequence: Synthetic oligonucleotide
auacgaggucauggaagug

SEQ ID NO: 764561 - RNA, 19 nt, Artificial Sequence
  Description of Artificial Sequence: Synthetic oligonucleotide
gcuagaggcuuaaguaaug

SEQ ID NO: 764562 - RNA, 19 nt, Artificial Sequence
  Description of Artificial Sequence: Synthetic oligonucleotide
agcacucgugccgccaucu

SEQ ID NO: 764563 - RNA, 19 nt, Artificial Sequence
  Description of Artificial Sequence: Synthetic oligonucleotide
cucagaugauucaaauuuu

SEQ ID NO: 764564 - RNA, 19 nt, Artificial Sequence
  Description of Artificial Sequence: Synthetic oligonucleotide
aucauuguuccuggacgaa

SEQ ID NO: 764565 - RNA, 19 nt, Artificial Sequence
  Description of Artificial Sequence: Synthetic oligonucleotide
ccaguaauugccccauuca

SEQ ID NO: 764566 - RNA, 19 nt, Artificial Sequence
  Description of Artificial Sequence: Synthetic oligonucleotide
gggacucccacaugaugac

SEQ ID NO: 764567 - RNA, 19 nt, Artificial Sequence
  Description of Artificial Sequence: Synthetic oligonucleotide
gccuagggguccaagauga

SEQ ID NO: 764568 - RNA, 19 nt, Artificial Sequence
  Description of Artificial Sequence: Synthetic oligonucleotide
caugcugcguuccguaugu

SEQ ID NO: 764569 - RNA, 19 nt, Artificial Sequence
  Description of Artificial Sequence: Synthetic oligonucleotide
gcccuacguaguucaaucc

SEQ ID NO: 764570 - RNA, 19 nt, Artificial Sequence
  Description of Artificial Sequence: Synthetic oligonucleotide
cccaguaauugccccauuc

SEQ ID NO: 764571 - RNA, 19 nt, Artificial Sequence
  Description of Artificial Sequence: Synthetic oligonucleotide
cagcccugcugacugacca

SEQ ID NO: 764572 - RNA, 19 nt, Artificial Sequence
  Description of Artificial Sequence: Synthetic oligonucleotide
guaggaccuaaguucguau

SEQ ID NO: 764573 - RNA, 19 nt, Artificial Sequence
  Description of Artificial Sequence: Synthetic oligonucleotide
ucgaugcccuacguaguuc

SEQ ID NO: 764574 - RNA, 19 nt, Artificial Sequence
  Description of Artificial Sequence: Synthetic oligonucleotide
ucgugccgccaucuuugcu

SEQ ID NO: 764575 - RNA, 19 nt, Artificial Sequence
  Description of Artificial Sequence: Synthetic oligonucleotide
ccuuucggacaaauaagga

SEQ ID NO: 764576 - RNA, 19 nt, Artificial Sequence
  Description of Artificial Sequence: Synthetic oligonucleotide
cucccugagugcuaagcua

SEQ ID NO: 764577 - RNA, 19 nt, Artificial Sequence
  Description of Artificial Sequence: Synthetic oligonucleotide
ggcacgggcccaguaauug

SEQ ID NO: 764578 - RNA, 19 nt, Artificial Sequence
  Description of Artificial Sequence: Synthetic oligonucleotide
auuccggcuuuaacguugu

SEQ ID NO: 764579 - RNA, 19 nt, Artificial Sequence
  Description of Artificial Sequence: Synthetic oligonucleotide
cccagacuaaccuaggacu

SEQ ID NO: 764580 - RNA, 19 nt, Artificial Sequence
  Description of Artificial Sequence: Synthetic oligonucleotide
gcuuuaacguugugaaacu

SEQ ID NO: 764581 - RNA, 19 nt, Artificial Sequence
  Description of Artificial Sequence: Synthetic oligonucleotide
guggacggcuugauccugc

SEQ ID NO: 764582 - RNA, 19 nt, Artificial Sequence
  Description of Artificial Sequence: Synthetic oligonucleotide
auccguguaggcacaugga

SEQ ID NO: 764583 - RNA, 19 nt, Artificial Sequence
  Description of Artificial Sequence: Synthetic oligonucleotide
cauauauagcugcccaauu

SEQ ID NO: 764584 - RNA, 19 nt, Artificial Sequence
  Description of Artificial Sequence: Synthetic oligonucleotide
agguacaaggguacugcuu

SEQ ID NO: 764585 - RNA, 19 nt, Artificial Sequence
  Description of Artificial Sequence: Synthetic oligonucleotide
gagcgggaccguguaguac

SEQ ID NO: 764586 - RNA, 19 nt, Artificial Sequence
  Description of Artificial Sequence: Synthetic oligonucleotide
cacucuccggagcccgggc

SEQ ID NO: 764587 - RNA, 19 nt, Artificial Sequence
  Description of Artificial Sequence: Synthetic oligonucleotide
auugccccauucaaucauu

SEQ ID NO: 764588 - RNA, 19 nt, Artificial Sequence
  Description of Artificial Sequence: Synthetic oligonucleotide
gaucgaugcccuacguagu

SEQ ID NO: 764589 - RNA, 19 nt, Artificial Sequence
  Description of Artificial Sequence: Synthetic oligonucleotide
uuccggcuuuaacguugug

SEQ ID NO: 764590 - RNA, 19 nt, Artificial Sequence
  Description of Artificial Sequence: Synthetic oligonucleotide
accacccuuucagcucagg

SEQ ID NO: 764591 - RNA, 19 nt, Artificial Sequence
  Description of Artificial Sequence: Synthetic oligonucleotide
ggcacauggaagcuucacu

SEQ ID NO: 764592 - RNA, 19 nt, Artificial Sequence
  Description of Artificial Sequence: Synthetic oligonucleotide
gucucacuaugcaagccua

SEQ ID NO: 764593 - RNA, 19 nt, Artificial Sequence
  Description of Artificial Sequence: Synthetic oligonucleotide
cagaucgaugcccuacgua

SEQ ID NO: 764594 - RNA, 19 nt, Artificial Sequence
  Description of Artificial Sequence: Synthetic oligonucleotide
cacguguuccaugucccca

SEQ ID NO: 764595 - RNA, 19 nt, Artificial Sequence
  Description of Artificial Sequence: Synthetic oligonucleotide
cacaaacgguggcuuacaa

SEQ ID NO: 764596 - RNA, 19 nt, Artificial Sequence
  Description of Artificial Sequence: Synthetic oligonucleotide
ggucaaggggacucccaca

SEQ ID NO: 764597 - RNA, 19 nt, Artificial Sequence
  Description of Artificial Sequence: Synthetic oligonucleotide
ccaaaucucguguggugca

SEQ ID NO: 764598 - RNA, 19 nt, Artificial Sequence
  Description of Artificial Sequence: Synthetic oligonucleotide
uccccggauuucccuuggu

SEQ ID NO: 764599 - RNA, 19 nt, Artificial Sequence
  Description of Artificial Sequence: Synthetic oligonucleotide
ggguccaagaugaaacucu

SEQ ID NO: 764600 - RNA, 19 nt, Artificial Sequence
  Description of Artificial Sequence: Synthetic oligonucleotide
cuagacauuccggcuuuaa

SEQ ID NO: 764601 - RNA, 19 nt, Artificial Sequence
  Description of Artificial Sequence: Synthetic oligonucleotide
ggcuuaaguaauguuuggu

SEQ ID NO: 764602 - RNA, 19 nt, Artificial Sequence
  Description of Artificial Sequence: Synthetic oligonucleotide
acccggcuuugaauuauca

SEQ ID NO: 764603 - RNA, 19 nt, Artificial Sequence
  Description of Artificial Sequence: Synthetic oligonucleotide
gcccaaagaugaugcacca

SEQ ID NO: 764604 - RNA, 19 nt, Artificial Sequence
  Description of Artificial Sequence: Synthetic oligonucleotide
gcuaccacacccggcuuug

SEQ ID NO: 764605 - RNA, 19 nt, Artificial Sequence
  Description of Artificial Sequence: Synthetic oligonucleotide
ccaugcugcguuccguaug

SEQ ID NO: 764606 - RNA, 19 nt, Artificial Sequence
  Description of Artificial Sequence: Synthetic oligonucleotide
guaguucaauccccggauu

SEQ ID NO: 764607 - RNA, 19 nt, Artificial Sequence
  Description of Artificial Sequence: Synthetic oligonucleotide
gccucauuauuguccuguc

SEQ ID NO: 764608 - RNA, 19 nt, Artificial Sequence
  Description of Artificial Sequence: Synthetic oligonucleotide
ccacguguuccaugucccc

SEQ ID NO: 764609 - RNA, 19 nt, Artificial Sequence
  Description of Artificial Sequence: Synthetic oligonucleotide
cucgcgcgagcagcacucg

SEQ ID NO: 764610 - RNA, 19 nt, Artificial Sequence
  Description of Artificial Sequence: Synthetic oligonucleotide
gucuagacauuccggcuuu

SEQ ID NO: 764611 - RNA, 19 nt, Artificial Sequence
  Description of Artificial Sequence: Synthetic oligonucleotide
gaugcccuacguaguucaa

SEQ ID NO: 764612 - RNA, 19 nt, Artificial Sequence
  Description of Artificial Sequence: Synthetic oligonucleotide
ccguaugucuucccugguc

SEQ ID NO: 764613 - RNA, 19 nt, Artificial Sequence
  Description of Artificial Sequence: Synthetic oligonucleotide
cuugauccugcucgccaua

SEQ ID NO: 764614 - RNA, 19 nt, Artificial Sequence
  Description of Artificial Sequence: Synthetic oligonucleotide
gucagaggucacaaacggu

SEQ ID NO: 764615 - RNA, 19 nt, Artificial Sequence
  Description of Artificial Sequence: Synthetic oligonucleotide
ggaccuaaguucguauaua

SEQ ID NO: 764616 - RNA, 19 nt, Artificial Sequence
  Description of Artificial Sequence: Synthetic oligonucleotide
cagacuaaccuaggacuua

SEQ ID NO: 764617 - RNA, 19 nt, Artificial Sequence
  Description of Artificial Sequence: Synthetic oligonucleotide
cucagacccagcgugcacu

SEQ ID NO: 764618 - RNA, 19 nt, Artificial Sequence
  Description of Artificial Sequence: Synthetic oligonucleotide
gccugcauuucuggucggg

SEQ ID NO: 764619 - RNA, 19 nt, Artificial Sequence
  Description of Artificial Sequence: Synthetic oligonucleotide
ccccggauuucccuuggug

SEQ ID NO: 764620 - RNA, 19 nt, Artificial Sequence
  Description of Artificial Sequence: Synthetic oligonucleotide
ccaagaugaaacucucuau

SEQ ID NO: 764621 - RNA, 19 nt, Artificial Sequence
  Description of Artificial Sequence: Synthetic oligonucleotide
augcaagccuaggggucca

SEQ ID NO: 764622 - RNA, 19 nt, Artificial Sequence
  Description of Artificial Sequence: Synthetic oligonucleotide
gaggcagaucgaugcccua

SEQ ID NO: 764623 - RNA, 19 nt, Artificial Sequence
  Description of Artificial Sequence: Synthetic oligonucleotide
cacacccggcuuugaauua

SEQ ID NO: 764624 - RNA, 19 nt, Artificial Sequence
  Description of Artificial Sequence: Synthetic oligonucleotide
cggacaaauaaggacuuga

SEQ ID NO: 764625 - RNA, 19 nt, Artificial Sequence
  Description of Artificial Sequence: Synthetic oligonucleotide
ccucgcgcgagcagcacuc

SEQ ID NO: 764626 - RNA, 19 nt, Artificial Sequence
  Description of Artificial Sequence: Synthetic oligonucleotide
ggaugagcgggaccgugua

SEQ ID NO: 764627 - RNA, 19 nt, Artificial Sequence
  Description of Artificial Sequence: Synthetic oligonucleotide
ccacaugaugacacucaca

SEQ ID NO: 764628 - RNA, 19 nt, Artificial Sequence
  Description of Artificial Sequence: Synthetic oligonucleotide
gcaagccuagggguccaag

SEQ ID NO: 764629 - RNA, 19 nt, Artificial Sequence
  Description of Artificial Sequence: Synthetic oligonucleotide
cgaugcccuacguaguuca

SEQ ID NO: 764630 - RNA, 19 nt, Artificial Sequence
  Description of Artificial Sequence: Synthetic oligonucleotide
gccuucguggaucuuuggu

SEQ ID NO: 764631 - RNA, 19 nt, Artificial Sequence
  Description of Artificial Sequence: Synthetic oligonucleotide
cuuugcuccggagccugaa

SEQ ID NO: 764632 - RNA, 19 nt, Artificial Sequence
  Description of Artificial Sequence: Synthetic oligonucleotide
gcgaauggcacgggcccag

SEQ ID NO: 764633 - RNA, 19 nt, Artificial Sequence
  Description of Artificial Sequence: Synthetic oligonucleotide
gaccacccuuucagcucag

SEQ ID NO: 764634 - RNA, 19 nt, Artificial Sequence
  Description of Artificial Sequence: Synthetic oligonucleotide
cguggaucuuugguaacac

SEQ ID NO: 764635 - RNA, 19 nt, Artificial Sequence
  Description of Artificial Sequence: Synthetic oligonucleotide
gcgucuagacauuccggcu

SEQ ID NO: 764636 - RNA, 19 nt, Artificial Sequence
  Description of Artificial Sequence: Synthetic oligonucleotide
gaaauccguguaggcacau

SEQ ID NO: 764637 - RNA, 19 nt, Artificial Sequence
  Description of Artificial Sequence: Synthetic oligonucleotide
caccggcucauuccagaaa

SEQ ID NO: 764638 - RNA, 19 nt, Artificial Sequence
  Description of Artificial Sequence: Synthetic oligonucleotide
gcacugcccuucauacgag

SEQ ID NO: 764639 - RNA, 19 nt, Artificial Sequence
  Description of Artificial Sequence: Synthetic oligonucleotide
caauccccggauuucccuu

SEQ ID NO: 764640 - RNA, 19 nt, Artificial Sequence
  Description of Artificial Sequence: Synthetic oligonucleotide
ccagcgugcacugcccuuc

SEQ ID NO: 764641 - RNA, 19 nt, Artificial Sequence
  Description of Artificial Sequence: Synthetic oligonucleotide
gcuugauccugcucgccau

SEQ ID NO: 764642 - RNA, 19 nt, Artificial Sequence
  Description of Artificial Sequence: Synthetic oligonucleotide
gcguuccguaugucuuccc

SEQ ID NO: 764643 - RNA, 19 nt, Artificial Sequence
  Description of Artificial Sequence: Synthetic oligonucleotide
cgggcccaguaauugcccc

SEQ ID NO: 764644 - RNA, 19 nt, Artificial Sequence
  Description of Artificial Sequence: Synthetic oligonucleotide
ccagacuaaccuaggacuu

SEQ ID NO: 764645 - RNA, 19 nt, Artificial Sequence
  Description of Artificial Sequence: Synthetic oligonucleotide
ccauauauagcugcccaau

SEQ ID NO: 764646 - RNA, 19 nt, Artificial Sequence
  Description of Artificial Sequence: Synthetic oligonucleotide
cgccauaccacguguucca

SEQ ID NO: 764647 - RNA, 19 nt, Artificial Sequence
  Description of Artificial Sequence: Synthetic oligonucleotide
cagcgugcacugcccuuca

SEQ ID NO: 764648 - RNA, 19 nt, Artificial Sequence
  Description of Artificial Sequence: Synthetic oligonucleotide
ggcuuugaauuaucauguu

SEQ ID NO: 764649 - RNA, 19 nt, Artificial Sequence
  Description of Artificial Sequence: Synthetic oligonucleotide
gcagaucgaugcccuacgu

SEQ ID NO: 764650 - RNA, 19 nt, Artificial Sequence
  Description of Artificial Sequence: Synthetic oligonucleotide
cguaguucaauccccggau

SEQ ID NO: 764651 - RNA, 19 nt, Artificial Sequence
  Description of Artificial Sequence: Synthetic oligonucleotide
cguauauauuggguccuga

SEQ ID NO: 764652 - RNA, 19 nt, Artificial Sequence
  Description of Artificial Sequence: Synthetic oligonucleotide
ccuaggacuuacuguaauu

SEQ ID NO: 764653 - RNA, 19 nt, Artificial Sequence
  Description of Artificial Sequence: Synthetic oligonucleotide
cacucgugccgccaucuuu

SEQ ID NO: 764654 - RNA, 19 nt, Artificial Sequence
  Description of Artificial Sequence: Synthetic oligonucleotide
cuaccacacccggcuuuga

SEQ ID NO: 764655 - RNA, 19 nt, Artificial Sequence
  Description of Artificial Sequence: Synthetic oligonucleotide
ccugaucuuggcaccggcu

SEQ ID NO: 764656 - RNA, 19 nt, Artificial Sequence
  Description of Artificial Sequence: Synthetic oligonucleotide
cgguggcuuacaaaauaaa

SEQ ID NO: 764657 - RNA, 19 nt, Artificial Sequence
  Description of Artificial Sequence: Synthetic oligonucleotide
gugccaugcugcguuccgu

SEQ ID NO: 764658 - RNA, 19 nt, Artificial Sequence
  Description of Artificial Sequence: Synthetic oligonucleotide
ccuccucgcgcgagcagca

SEQ ID NO: 764659 - RNA, 19 nt, Artificial Sequence
  Description of Artificial Sequence: Synthetic oligonucleotide
gcaugucacuucuggcuuu

SEQ ID NO: 764660 - RNA, 19 nt, Artificial Sequence
  Description of Artificial Sequence: Synthetic oligonucleotide
gcgggaccguguaguacac

SEQ ID NO: 764661 - RNA, 19 nt, Artificial Sequence
  Description of Artificial Sequence: Synthetic oligonucleotide
cccggcuuugaauuaucau

SEQ ID NO: 764662 - RNA, 19 nt, Artificial Sequence
  Description of Artificial Sequence: Synthetic oligonucleotide
cguuccguaugucuucccu

SEQ ID NO: 764663 - RNA, 19 nt, Artificial Sequence
  Description of Artificial Sequence: Synthetic oligonucleotide
ggcccaguaauugccccau

SEQ ID NO: 764664 - RNA, 19 nt, Artificial Sequence
  Description of Artificial Sequence: Synthetic oligonucleotide
cgucuagacauuccggcuu

SEQ ID NO: 764665 - RNA, 19 nt, Artificial Sequence
  Description of Artificial Sequence: Synthetic oligonucleotide
cggcuuuaacguugugaaa

SEQ ID NO: 764666 - RNA, 19 nt, Artificial Sequence
  Description of Artificial Sequence: Synthetic oligonucleotide
gccaugcuugugccaugcu

SEQ ID NO: 764667 - RNA, 19 nt, Artificial Sequence
  Description of Artificial Sequence: Synthetic oligonucleotide
cccgagccucugugacuug

SEQ ID NO: 764668 - RNA, 19 nt, Artificial Sequence
  Description of Artificial Sequence: Synthetic oligonucleotide
cgggaccguguaguacacc

SEQ ID NO: 764669 - RNA, 19 nt, Artificial Sequence
  Description of Artificial Sequence: Synthetic oligonucleotide
caggggcggcuggccgcag

SEQ ID NO: 764670 - RNA, 19 nt, Artificial Sequence
  Description of Artificial Sequence: Synthetic oligonucleotide
cccaaagaugaugcaccau

SEQ ID NO: 764671 - RNA, 19 nt, Artificial Sequence
  Description of Artificial Sequence: Synthetic oligonucleotide
gcucgccauaccacguguu

SEQ ID NO: 764672 - RNA, 19 nt, Artificial Sequence
  Description of Artificial Sequence: Synthetic oligonucleotide
gcccaguaauugccccauu

SEQ ID NO: 764673 - RNA, 19 nt, Artificial Sequence
  Description of Artificial Sequence: Synthetic oligonucleotide
cccagcgugcacugcccuu

SEQ ID NO: 764674 - RNA, 19 nt, Artificial Sequence
  Description of Artificial Sequence: Synthetic oligonucleotide
cgaauggcacgggcccagu

SEQ ID NO: 764675 - RNA, 19 nt, Artificial Sequence
  Description of Artificial Sequence: Synthetic oligonucleotide
aaaacaaagcauacuaucc

SEQ ID NO: 764676 - RNA, 19 nt, Artificial Sequence
  Description of Artificial Sequence: Synthetic oligonucleotide
aagcauacuaucccaaagc

SEQ ID NO: 764677 - RNA, 19 nt, Artificial Sequence
  Description of Artificial Sequence: Synthetic oligonucleotide
uauagaugaauaaaccucc

SEQ ID NO: 764678 - RNA, 19 nt, Artificial Sequence
  Description of Artificial Sequence: Synthetic oligonucleotide
uagaguaaaggaaaggcag

SEQ ID NO: 764679 - RNA, 19 nt, Artificial Sequence
  Description of Artificial Sequence: Synthetic oligonucleotide
ugauuauagaugaauaaac

SEQ ID NO: 764680 - RNA, 19 nt, Artificial Sequence
  Description of Artificial Sequence: Synthetic oligonucleotide
uuauagaugaauaaaccuc

SEQ ID NO: 764681 - RNA, 19 nt, Artificial Sequence
  Description of Artificial Sequence: Synthetic oligonucleotide
aaaguaagcagccauuaca

SEQ ID NO: 764682 - RNA, 19 nt, Artificial Sequence
  Description of Artificial Sequence: Synthetic oligonucleotide
aaagaguucauuucggcga

SEQ ID NO: 764683 - RNA, 19 nt, Artificial Sequence
  Description of Artificial Sequence: Synthetic oligonucleotide
uuauagaggaauucgaaga

SEQ ID NO: 764684 - RNA, 19 nt, Artificial Sequence
  Description of Artificial Sequence: Synthetic oligonucleotide
gacauuagcagauuuacac

SEQ ID NO: 764685 - RNA, 19 nt, Artificial Sequence
  Description of Artificial Sequence: Synthetic oligonucleotide
auuauagaugaauaaaccu

SEQ ID NO: 764686 - RNA, 19 nt, Artificial Sequence
  Description of Artificial Sequence: Synthetic oligonucleotide
uuaacacuagccaacaacu

SEQ ID NO: 764687 - RNA, 19 nt, Artificial Sequence
  Description of Artificial Sequence: Synthetic oligonucleotide
aacuaaugggaucacccgg

SEQ ID NO: 764688 - RNA, 19 nt, Artificial Sequence
  Description of Artificial Sequence: Synthetic oligonucleotide
aucaauggcaauugauugc

SEQ ID NO: 764689 - RNA, 19 nt, Artificial Sequence
  Description of Artificial Sequence: Synthetic oligonucleotide
uauaacuggacgaagucac

SEQ ID NO: 764690 - RNA, 19 nt, Artificial Sequence
  Description of Artificial Sequence: Synthetic oligonucleotide
aacaacuccuacucuacag

SEQ ID NO: 764691 - RNA, 19 nt, Artificial Sequence
  Description of Artificial Sequence: Synthetic oligonucleotide
uucagaccuauacucaggg

SEQ ID NO: 764692 - RNA, 19 nt, Artificial Sequence
  Description of Artificial Sequence: Synthetic oligonucleotide
cuuauagaggaauucgaag

SEQ ID NO: 764693 - RNA, 19 nt, Artificial Sequence
  Description of Artificial Sequence: Synthetic oligonucleotide
uaucgcacccauuugauga

SEQ ID NO: 764694 - RNA, 19 nt, Artificial Sequence
  Description of Artificial Sequence: Synthetic oligonucleotide
ugugauuccuucaugccug

SEQ ID NO: 764695 - RNA, 19 nt, Artificial Sequence
  Description of Artificial Sequence: Synthetic oligonucleotide
ugugauuauagaugaauaa

SEQ ID NO: 764696 - RNA, 19 nt, Artificial Sequence
  Description of Artificial Sequence: Synthetic oligonucleotide
auaucucaugaguucaaac

SEQ ID NO: 764697 - RNA, 19 nt, Artificial Sequence
  Description of Artificial Sequence: Synthetic oligonucleotide
ucguauaugagcacaaaau

SEQ ID NO: 764698 - RNA, 19 nt, Artificial Sequence
  Description of Artificial Sequence: Synthetic oligonucleotide
uagaggaauucgaagacca

SEQ ID NO: 764699 - RNA, 19 nt, Artificial Sequence
  Description of Artificial Sequence: Synthetic oligonucleotide
cauacuaucccaaagcaga

SEQ ID NO: 764700 - RNA, 19 nt, Artificial Sequence
  Description of Artificial Sequence: Synthetic oligonucleotide
ucaaccauccuacugcaga

SEQ ID NO: 764701 - RNA, 19 nt, Artificial Sequence
  Description of Artificial Sequence: Synthetic oligonucleotide
uguuacuggccuuuagggg

SEQ ID NO: 764702 - RNA, 19 nt, Artificial Sequence
  Description of Artificial Sequence: Synthetic oligonucleotide
cauaaaugccacuucggcc

SEQ ID NO: 764703 - RNA, 19 nt, Artificial Sequence
  Description of Artificial Sequence: Synthetic oligonucleotide
uguggaaaagggugggugg

SEQ ID NO: 764704 - RNA, 19 nt, Artificial Sequence
  Description of Artificial Sequence: Synthetic oligonucleotide
uuuauaacuggacgaaguc

SEQ ID NO: 764705 - RNA, 19 nt, Artificial Sequence
  Description of Artificial Sequence: Synthetic oligonucleotide
uguuggaccgcuuaacaug

SEQ ID NO: 764706 - RNA, 19 nt, Artificial Sequence
  Description of Artificial Sequence: Synthetic oligonucleotide
gaacuaaugggaucacccg

SEQ ID NO: 764707 - RNA, 19 nt, Artificial Sequence
  Description of Artificial Sequence: Synthetic oligonucleotide
uaacaggcccaccagaccc

SEQ ID NO: 764708 - RNA, 19 nt, Artificial Sequence
  Description of Artificial Sequence: Synthetic oligonucleotide
uucauuucggcgauacuug

SEQ ID NO: 764709 - RNA, 19 nt, Artificial Sequence
  Description of Artificial Sequence: Synthetic oligonucleotide
cagaccuauacucaggggc

SEQ ID NO: 764710 - RNA, 19 nt, Artificial Sequence
  Description of Artificial Sequence: Synthetic oligonucleotide
ucuuauagaggaauucgaa

SEQ ID NO: 764711 - RNA, 19 nt, Artificial Sequence
  Description of Artificial Sequence: Synthetic oligonucleotide
guaagcagccauuacauca

SEQ ID NO: 764712 - RNA, 19 nt, Artificial Sequence
  Description of Artificial Sequence: Synthetic oligonucleotide
cuugaucuuccauacaaug

SEQ ID NO: 764713 - RNA, 19 nt, Artificial Sequence
  Description of Artificial Sequence: Synthetic oligonucleotide
ugacuuuggucacaaaacu

SEQ ID NO: 764714 - RNA, 19 nt, Artificial Sequence
  Description of Artificial Sequence: Synthetic oligonucleotide
agaugaauaaaccuccaau

SEQ ID NO: 764715 - RNA, 19 nt, Artificial Sequence
  Description of Artificial Sequence: Synthetic oligonucleotide
cuguuacuggccuuuaggg

SEQ ID NO: 764716 - RNA, 19 nt, Artificial Sequence
  Description of Artificial Sequence: Synthetic oligonucleotide
cauuagcagauuuacacuc

SEQ ID NO: 764717 - RNA, 19 nt, Artificial Sequence
  Description of Artificial Sequence: Synthetic oligonucleotide
aauggcaccucaaaguuca

SEQ ID NO: 764718 - RNA, 19 nt, Artificial Sequence
  Description of Artificial Sequence: Synthetic oligonucleotide
auggcaauugauugcuuac

SEQ ID NO: 764719 - RNA, 19 nt, Artificial Sequence
  Description of Artificial Sequence: Synthetic oligonucleotide
cuuaacauggaagaagcug

SEQ ID NO: 764720 - RNA, 19 nt, Artificial Sequence
  Description of Artificial Sequence: Synthetic oligonucleotide
agaguuaacaggcccacca

SEQ ID NO: 764721 - RNA, 19 nt, Artificial Sequence
  Description of Artificial Sequence: Synthetic oligonucleotide
uucaucaccacccggccug

SEQ ID NO: 764722 - RNA, 19 nt, Artificial Sequence
  Description of Artificial Sequence: Synthetic oligonucleotide
ggcaccucaaaguucaugg

SEQ ID NO: 764723 - RNA, 19 nt, Artificial Sequence
  Description of Artificial Sequence: Synthetic oligonucleotide
aggaauucgaagaccaugg

SEQ ID NO: 764724 - RNA, 19 nt, Artificial Sequence
  Description of Artificial Sequence: Synthetic oligonucleotide
auguuugugacagggcugc

SEQ ID NO: 764725 - RNA, 19 nt, Artificial Sequence
  Description of Artificial Sequence: Synthetic oligonucleotide
aauggcaauugauugcuua

SEQ ID NO: 764726 - RNA, 19 nt, Artificial Sequence
  Description of Artificial Sequence: Synthetic oligonucleotide
uauuggguuuauaacugga

SEQ ID NO: 764727 - RNA, 19 nt, Artificial Sequence
  Description of Artificial Sequence: Synthetic oligonucleotide
aauugauugcuuaccgcuc

SEQ ID NO: 764728 - RNA, 19 nt, Artificial Sequence
  Description of Artificial Sequence: Synthetic oligonucleotide
acauguguacaaaacaaag

SEQ ID NO: 764729 - RNA, 19 nt, Artificial Sequence
  Description of Artificial Sequence: Synthetic oligonucleotide
agaguaaaggaaaggcagc

SEQ ID NO: 764730 - RNA, 19 nt, Artificial Sequence
  Description of Artificial Sequence: Synthetic oligonucleotide
cuucgguucaaauaccuuc

SEQ ID NO: 764731 - RNA, 19 nt, Artificial Sequence
  Description of Artificial Sequence: Synthetic oligonucleotide
caagccagauguuggaccg

SEQ ID NO: 764732 - RNA, 19 nt, Artificial Sequence
  Description of Artificial Sequence: Synthetic oligonucleotide
uuauaacuggacgaaguca

SEQ ID NO: 764733 - RNA, 19 nt, Artificial Sequence
  Description of Artificial Sequence: Synthetic oligonucleotide
cacaugggcacucagcacc

SEQ ID NO: 764734 - RNA, 19 nt, Artificial Sequence
  Description of Artificial Sequence: Synthetic oligonucleotide
guuacuggccuuuagggga

SEQ ID NO: 764735 - RNA, 19 nt, Artificial Sequence
  Description of Artificial Sequence: Synthetic oligonucleotide
agcauacuaucccaaagca

SEQ ID NO: 764736 - RNA, 19 nt, Artificial Sequence
  Description of Artificial Sequence: Synthetic oligonucleotide
uugcuuaccgcucuugccu

SEQ ID NO: 764737 - RNA, 19 nt, Artificial Sequence
  Description of Artificial Sequence: Synthetic oligonucleotide
ugaaccuguggaaaagggu

SEQ ID NO: 764738 - RNA, 19 nt, Artificial Sequence
  Description of Artificial Sequence: Synthetic oligonucleotide
auacucaggggcuagagua

SEQ ID NO: 764739 - RNA, 19 nt, Artificial Sequence
  Description of Artificial Sequence: Synthetic oligonucleotide
gaauucgaagaccauggca

SEQ ID NO: 764740 - RNA, 19 nt, Artificial Sequence
  Description of Artificial Sequence: Synthetic oligonucleotide
acuggacgaagucacaugu

SEQ ID NO: 764741 - RNA, 19 nt, Artificial Sequence
  Description of Artificial Sequence: Synthetic oligonucleotide
acuucggccaauguaucgc

SEQ ID NO: 764742 - RNA, 19 nt, Artificial Sequence
  Description of Artificial Sequence: Synthetic oligonucleotide
uucguucagagucaaacuu

SEQ ID NO: 764743 - RNA, 19 nt, Artificial Sequence
  Description of Artificial Sequence: Synthetic oligonucleotide
uacgauaucucaugaguuc

SEQ ID NO: 764744 - RNA, 19 nt, Artificial Sequence
  Description of Artificial Sequence: Synthetic oligonucleotide
auuggguuuauaacuggac

SEQ ID NO: 764745 - RNA, 19 nt, Artificial Sequence
  Description of Artificial Sequence: Synthetic oligonucleotide
gauugcuuaccgcucuugc

SEQ ID NO: 764746 - RNA, 19 nt, Artificial Sequence
  Description of Artificial Sequence: Synthetic oligonucleotide
uuucggcgauacuugaugc

SEQ ID NO: 764747 - RNA, 19 nt, Artificial Sequence
  Description of Artificial Sequence: Synthetic oligonucleotide
cuagaguaaaggaaaggca

SEQ ID NO: 764748 - RNA, 19 nt, Artificial Sequence
  Description of Artificial Sequence: Synthetic oligonucleotide
auugauugcuuaccgcucu

SEQ ID NO: 764749 - RNA, 19 nt, Artificial Sequence
  Description of Artificial Sequence: Synthetic oligonucleotide
uguucagugggguugggau

SEQ ID NO: 764750 - RNA, 19 nt, Artificial Sequence
  Description of Artificial Sequence: Synthetic oligonucleotide
aagguuuucagugcaccug

SEQ ID NO: 764751 - RNA, 19 nt, Artificial Sequence
  Description of Artificial Sequence: Synthetic oligonucleotide
gaucccaagauguccgccc

SEQ ID NO: 764752 - RNA, 19 nt, Artificial Sequence
  Description of Artificial Sequence: Synthetic oligonucleotide
cuuuggucacaaaacucag

SEQ ID NO: 764753 - RNA, 19 nt, Artificial Sequence
  Description of Artificial Sequence: Synthetic oligonucleotide
ugaagguuuucagugcacc

SEQ ID NO: 764754 - RNA, 19 nt, Artificial Sequence
  Description of Artificial Sequence: Synthetic oligonucleotide
gaaguuggacuugaugacc

SEQ ID NO: 764755 - RNA, 19 nt, Artificial Sequence
  Description of Artificial Sequence: Synthetic oligonucleotide
gcaccuugaggccagaagg

SEQ ID NO: 764756 - RNA, 19 nt, Artificial Sequence
  Description of Artificial Sequence: Synthetic oligonucleotide
ggcaauugauugcuuaccg

SEQ ID NO: 764757 - RNA, 19 nt, Artificial Sequence
  Description of Artificial Sequence: Synthetic oligonucleotide
gcucuugccuguuucaucg

SEQ ID NO: 764758 - RNA, 19 nt, Artificial Sequence
  Description of Artificial Sequence: Synthetic oligonucleotide
aauggcguucucgcuggcc

SEQ ID NO: 764759 - RNA, 19 nt, Artificial Sequence
  Description of Artificial Sequence: Synthetic oligonucleotide
uuggugguacgauaucuca

SEQ ID NO: 764760 - RNA, 19 nt, Artificial Sequence
  Description of Artificial Sequence: Synthetic oligonucleotide
ugguucagaccuauacuca

SEQ ID NO: 764761 - RNA, 19 nt, Artificial Sequence
  Description of Artificial Sequence: Synthetic oligonucleotide
gaccgcuuaacauggaaga

SEQ ID NO: 764762 - RNA, 19 nt, Artificial Sequence
  Description of Artificial Sequence: Synthetic oligonucleotide
auguaucgcacccauuuga

SEQ ID NO: 764763 - RNA, 19 nt, Artificial Sequence
  Description of Artificial Sequence: Synthetic oligonucleotide
ucagaccuauacucagggg

SEQ ID NO: 764764 - RNA, 19 nt, Artificial Sequence
  Description of Artificial Sequence: Synthetic oligonucleotide
ugcgcuugaucuuccauac

SEQ ID NO: 764765 - RNA, 19 nt, Artificial Sequence
  Description of Artificial Sequence: Synthetic oligonucleotide
aucaccugcaccccgcuug

SEQ ID NO: 764766 - RNA, 19 nt, Artificial Sequence
  Description of Artificial Sequence: Synthetic oligonucleotide
cugacgaguggucacuggg

SEQ ID NO: 764767 - RNA, 19 nt, Artificial Sequence
  Description of Artificial Sequence: Synthetic oligonucleotide
uuacuggccuuuaggggag

SEQ ID NO: 764768 - RNA, 19 nt, Artificial Sequence
  Description of Artificial Sequence: Synthetic oligonucleotide
caugcagaucaccugcacc

SEQ ID NO: 764769 - RNA, 19 nt, Artificial Sequence
  Description of Artificial Sequence: Synthetic oligonucleotide
aagaguucauuucggcgau

SEQ ID NO: 764770 - RNA, 19 nt, Artificial Sequence
  Description of Artificial Sequence: Synthetic oligonucleotide
cagcggguuucauaaaugc

SEQ ID NO: 764771 - RNA, 19 nt, Artificial Sequence
  Description of Artificial Sequence: Synthetic oligonucleotide
ugguacgauaucucaugag

SEQ ID NO: 764772 - RNA, 19 nt, Artificial Sequence
  Description of Artificial Sequence: Synthetic oligonucleotide
uguaucgcacccauuugau

SEQ ID NO: 764773 - RNA, 19 nt, Artificial Sequence
  Description of Artificial Sequence: Synthetic oligonucleotide
gaguuaacaggcccaccag

SEQ ID NO: 764774 - RNA, 19 nt, Artificial Sequence
  Description of Artificial Sequence: Synthetic oligonucleotide
agaaggcgcgaauggcacc

SEQ ID NO: 764775 - RNA, 19 nt, Artificial Sequence
  Description of Artificial Sequence: Synthetic oligonucleotide
aucgcacccauuugaugac

SEQ ID NO: 764776 - RNA, 19 nt, Artificial Sequence
  Description of Artificial Sequence: Synthetic oligonucleotide
aaguuggacuugaugacca

SEQ ID NO: 764777 - RNA, 19 nt, Artificial Sequence
  Description of Artificial Sequence: Synthetic oligonucleotide
gugauuauagaugaauaaa

SEQ ID NO: 764778 - RNA, 19 nt, Artificial Sequence
  Description of Artificial Sequence: Synthetic oligonucleotide
ccgugcaugaaucacauug

SEQ ID NO: 764779 - RNA, 19 nt, Artificial Sequence
  Description of Artificial Sequence: Synthetic oligonucleotide
ggugguacgauaucucaug

SEQ ID NO: 764780 - RNA, 19 nt, Artificial Sequence
  Description of Artificial Sequence: Synthetic oligonucleotide
ucauuucggcgauacuuga

SEQ ID NO: 764781 - RNA, 19 nt, Artificial Sequence
  Description of Artificial Sequence: Synthetic oligonucleotide
gguucagaccuauacucag

SEQ ID NO: 764782 - RNA, 19 nt, Artificial Sequence
  Description of Artificial Sequence: Synthetic oligonucleotide
auuagugggcagaaguuca

SEQ ID NO: 764783 - RNA, 19 nt, Artificial Sequence
  Description of Artificial Sequence: Synthetic oligonucleotide
ucggccaauguaucgcacc

SEQ ID NO: 764784 - RNA, 19 nt, Artificial Sequence
  Description of Artificial Sequence: Synthetic oligonucleotide
gaucacccggaaaggaagg

SEQ ID NO: 764785 - RNA, 19 nt, Artificial Sequence
  Description of Artificial Sequence: Synthetic oligonucleotide
gaguaaaggaaaggcagca

SEQ ID NO: 764786 - RNA, 19 nt, Artificial Sequence
  Description of Artificial Sequence: Synthetic oligonucleotide
acccgaaaggcauccacug

SEQ ID NO: 764787 - RNA, 19 nt, Artificial Sequence
  Description of Artificial Sequence: Synthetic oligonucleotide
accauccuacugcagaggu

SEQ ID NO: 764788 - RNA, 19 nt, Artificial Sequence
  Description of Artificial Sequence: Synthetic oligonucleotide
uucggcgauacuugaugcc

SEQ ID NO: 764789 - RNA, 19 nt, Artificial Sequence
  Description of Artificial Sequence: Synthetic oligonucleotide
cuuggugguacgauaucuc

SEQ ID NO: 764790 - RNA, 19 nt, Artificial Sequence
  Description of Artificial Sequence: Synthetic oligonucleotide
uggcaauugauugcuuacc

SEQ ID NO: 764791 - RNA, 19 nt, Artificial Sequence
  Description of Artificial Sequence: Synthetic oligonucleotide
augaaucacauugacccga

SEQ ID NO: 764792 - RNA, 19 nt, Artificial Sequence
  Description of Artificial Sequence: Synthetic oligonucleotide
cuaucccaaagcagaguag

SEQ ID NO: 764793 - RNA, 19 nt, Artificial Sequence
  Description of Artificial Sequence: Synthetic oligonucleotide
ugacccgaaaggcauccac

SEQ ID NO: 764794 - RNA, 19 nt, Artificial Sequence
  Description of Artificial Sequence: Synthetic oligonucleotide
aucccaagauguccgcccg

SEQ ID NO: 764795 - RNA, 19 nt, Artificial Sequence
  Description of Artificial Sequence: Synthetic oligonucleotide
caauugauugcuuaccgcu

SEQ ID NO: 764796 - RNA, 19 nt, Artificial Sequence
  Description of Artificial Sequence: Synthetic oligonucleotide
caccucaaucuucugggcc

SEQ ID NO: 764797 - RNA, 19 nt, Artificial Sequence
  Description of Artificial Sequence: Synthetic oligonucleotide
cugguacuaagccaggaca

SEQ ID NO: 764798 - RNA, 19 nt, Artificial Sequence
  Description of Artificial Sequence: Synthetic oligonucleotide
cacuucggccaauguaucg

SEQ ID NO: 764799 - RNA, 19 nt, Artificial Sequence
  Description of Artificial Sequence: Synthetic oligonucleotide
ugaaucacauugacccgaa

SEQ ID NO: 764800 - RNA, 19 nt, Artificial Sequence
  Description of Artificial Sequence: Synthetic oligonucleotide
acgauaucucaugaguuca

SEQ ID NO: 764801 - RNA, 19 nt, Artificial Sequence
  Description of Artificial Sequence: Synthetic oligonucleotide
cauuagugggcagaaguuc

SEQ ID NO: 764802 - RNA, 19 nt, Artificial Sequence
  Description of Artificial Sequence: Synthetic oligonucleotide
ugagucgcacacacuggug

SEQ ID NO: 764803 - RNA, 19 nt, Artificial Sequence
  Description of Artificial Sequence: Synthetic oligonucleotide
acugacgaguggucacugg

SEQ ID NO: 764804 - RNA, 19 nt, Artificial Sequence
  Description of Artificial Sequence: Synthetic oligonucleotide
uccuacugcagaggugugg

SEQ ID NO: 764805 - RNA, 19 nt, Artificial Sequence
  Description of Artificial Sequence: Synthetic oligonucleotide
agggguuaagggcugggga

SEQ ID NO: 764806 - RNA, 19 nt, Artificial Sequence
  Description of Artificial Sequence: Synthetic oligonucleotide
auguuggaccgcuuaacau

SEQ ID NO: 764807 - RNA, 19 nt, Artificial Sequence
  Description of Artificial Sequence: Synthetic oligonucleotide
agccauuacaucacacauc

SEQ ID NO: 764808 - RNA, 19 nt, Artificial Sequence
  Description of Artificial Sequence: Synthetic oligonucleotide
auacuaucccaaagcagag

SEQ ID NO: 764809 - RNA, 19 nt, Artificial Sequence
  Description of Artificial Sequence: Synthetic oligonucleotide
ucggcgauacuugaugccu

SEQ ID NO: 764810 - RNA, 19 nt, Artificial Sequence
  Description of Artificial Sequence: Synthetic oligonucleotide
uguacacccgggagaugag

SEQ ID NO: 764811 - RNA, 19 nt, Artificial Sequence
  Description of Artificial Sequence: Synthetic oligonucleotide
aaacuugcacucaggcaug

SEQ ID NO: 764812 - RNA, 19 nt, Artificial Sequence
  Description of Artificial Sequence: Synthetic oligonucleotide
cacccggccugacacaugg

SEQ ID NO: 764813 - RNA, 19 nt, Artificial Sequence
  Description of Artificial Sequence: Synthetic oligonucleotide
cagaaggcgcgaauggcac

SEQ ID NO: 764814 - RNA, 19 nt, Artificial Sequence
  Description of Artificial Sequence: Synthetic oligonucleotide
aucacacaucuuauagagg

SEQ ID NO: 764815 - RNA, 19 nt, Artificial Sequence
  Description of Artificial Sequence: Synthetic oligonucleotide
ccuacucuacaguuuauug

SEQ ID NO: 764816 - RNA, 19 nt, Artificial Sequence
  Description of Artificial Sequence: Synthetic oligonucleotide
acuaaugggaucacccgga

SEQ ID NO: 764817 - RNA, 19 nt, Artificial Sequence
  Description of Artificial Sequence: Synthetic oligonucleotide
uggugguacgauaucucau

SEQ ID NO: 764818 - RNA, 19 nt, Artificial Sequence
  Description of Artificial Sequence: Synthetic oligonucleotide
uggaccgcuuaacauggaa

SEQ ID NO: 764819 - RNA, 19 nt, Artificial Sequence
  Description of Artificial Sequence: Synthetic oligonucleotide
acacccgggagaugagcac

SEQ ID NO: 764820 - RNA, 19 nt, Artificial Sequence
  Description of Artificial Sequence: Synthetic oligonucleotide
ugccacuucggccaaugua

SEQ ID NO: 764821 - RNA, 19 nt, Artificial Sequence
  Description of Artificial Sequence: Synthetic oligonucleotide
aagccagauguuggaccgc

SEQ ID NO: 764822 - RNA, 19 nt, Artificial Sequence
  Description of Artificial Sequence: Synthetic oligonucleotide
cuauacucaggggcuagag

SEQ ID NO: 764823 - RNA, 19 nt, Artificial Sequence
  Description of Artificial Sequence: Synthetic oligonucleotide
gguacgauaucucaugagu

SEQ ID NO: 764824 - RNA, 19 nt, Artificial Sequence
  Description of Artificial Sequence: Synthetic oligonucleotide
ugcuuaccgcucuugccug

SEQ ID NO: 764825 - RNA, 19 nt, Artificial Sequence
  Description of Artificial Sequence: Synthetic oligonucleotide
gcaauugauugcuuaccgc

SEQ ID NO: 764826 - RNA, 19 nt, Artificial Sequence
  Description of Artificial Sequence: Synthetic oligonucleotide
gaaguucaaucucugcgcu

SEQ ID NO: 764827 - RNA, 19 nt, Artificial Sequence
  Description of Artificial Sequence: Synthetic oligonucleotide
uucgaagaccauggcagca

SEQ ID NO: 764828 - RNA, 19 nt, Artificial Sequence
  Description of Artificial Sequence: Synthetic oligonucleotide
guaucgcacccauuugaug

SEQ ID NO: 764829 - RNA, 19 nt, Artificial Sequence
  Description of Artificial Sequence: Synthetic oligonucleotide
uaacuggacgaagucacau

SEQ ID NO: 764830 - RNA, 19 nt, Artificial Sequence
  Description of Artificial Sequence: Synthetic oligonucleotide
gcuucguucagagucaaac

SEQ ID NO: 764831 - RNA, 19 nt, Artificial Sequence
  Description of Artificial Sequence: Synthetic oligonucleotide
ugauguccuuggugguacg

SEQ ID NO: 764832 - RNA, 19 nt, Artificial Sequence
  Description of Artificial Sequence: Synthetic oligonucleotide
cacagaguuaacaggccca

SEQ ID NO: 764833 - RNA, 19 nt, Artificial Sequence
  Description of Artificial Sequence: Synthetic oligonucleotide
guuuauaacuggacgaagu

SEQ ID NO: 764834 - RNA, 19 nt, Artificial Sequence
  Description of Artificial Sequence: Synthetic oligonucleotide
gccauuacaucacacaucu

SEQ ID NO: 764835 - RNA, 19 nt, Artificial Sequence
  Description of Artificial Sequence: Synthetic oligonucleotide
uaaugggaucacccggaaa

SEQ ID NO: 764836 - RNA, 19 nt, Artificial Sequence
  Description of Artificial Sequence: Synthetic oligonucleotide
agaccuauacucaggggcu

SEQ ID NO: 764837 - RNA, 19 nt, Artificial Sequence
  Description of Artificial Sequence: Synthetic oligonucleotide
ugggauccucaccucaauc

SEQ ID NO: 764838 - RNA, 19 nt, Artificial Sequence
  Description of Artificial Sequence: Synthetic oligonucleotide
gguacuugaaccuguggaa

SEQ ID NO: 764839 - RNA, 19 nt, Artificial Sequence
  Description of Artificial Sequence: Synthetic oligonucleotide
augaagguuuucagugcac

SEQ ID NO: 764840 - RNA, 19 nt, Artificial Sequence
  Description of Artificial Sequence: Synthetic oligonucleotide
cuuccauacaauggcguuc

SEQ ID NO: 764841 - RNA, 19 nt, Artificial Sequence
  Description of Artificial Sequence: Synthetic oligonucleotide
ugccgugcaugaaucacau

SEQ ID NO: 764842 - RNA, 19 nt, Artificial Sequence
  Description of Artificial Sequence: Synthetic oligonucleotide
cucguauaugagcacaaaa

SEQ ID NO: 764843 - RNA, 19 nt, Artificial Sequence
  Description of Artificial Sequence: Synthetic oligonucleotide
agcaaagcaggagggagga

SEQ ID NO: 764844 - RNA, 19 nt, Artificial Sequence
  Description of Artificial Sequence: Synthetic oligonucleotide
ugcauuccucccgauguca

SEQ ID NO: 764845 - RNA, 19 nt, Artificial Sequence
  Description of Artificial Sequence: Synthetic oligonucleotide
gcugcaagccagauguugg

SEQ ID NO: 764846 - RNA, 19 nt, Artificial Sequence
  Description of Artificial Sequence: Synthetic oligonucleotide
cucagggccugguacuaag

SEQ ID NO: 764847 - RNA, 19 nt, Artificial Sequence
  Description of Artificial Sequence: Synthetic oligonucleotide
acuucccgaacuaauggga

SEQ ID NO: 764848 - RNA, 19 nt, Artificial Sequence
  Description of Artificial Sequence: Synthetic oligonucleotide
caaucaugguggcagcuca

SEQ ID NO: 764849 - RNA, 19 nt, Artificial Sequence
  Description of Artificial Sequence: Synthetic oligonucleotide
cagaucaccugcaccccgc

SEQ ID NO: 764850 - RNA, 19 nt, Artificial Sequence
  Description of Artificial Sequence: Synthetic oligonucleotide
augcgcuugaucuuccaua

SEQ ID NO: 764851 - RNA, 19 nt, Artificial Sequence
  Description of Artificial Sequence: Synthetic oligonucleotide
gaagaccauggcagcauug

SEQ ID NO: 764852 - RNA, 19 nt, Artificial Sequence
  Description of Artificial Sequence: Synthetic oligonucleotide
gacccauugcucugagaac

SEQ ID NO: 764853 - RNA, 19 nt, Artificial Sequence
  Description of Artificial Sequence: Synthetic oligonucleotide
acgaagucacauguguaca

SEQ ID NO: 764854 - RNA, 19 nt, Artificial Sequence
  Description of Artificial Sequence: Synthetic oligonucleotide
gaagguuuucagugcaccu

SEQ ID NO: 764855 - RNA, 19 nt, Artificial Sequence
  Description of Artificial Sequence: Synthetic oligonucleotide
cccgaugucaucucuguac

SEQ ID NO: 764856 - RNA, 19 nt, Artificial Sequence
  Description of Artificial Sequence: Synthetic oligonucleotide
ucgguucaaauaccuucaa

SEQ ID NO: 764857 - RNA, 19 nt, Artificial Sequence
  Description of Artificial Sequence: Synthetic oligonucleotide
agucgcacacacuggugga

SEQ ID NO: 764858 - RNA, 19 nt, Artificial Sequence
  Description of Artificial Sequence: Synthetic oligonucleotide
ucccacuucccgaacuaau

SEQ ID NO: 764859 - RNA, 19 nt, Artificial Sequence
  Description of Artificial Sequence: Synthetic oligonucleotide
ggaucacccggaaaggaag

SEQ ID NO: 764860 - RNA, 19 nt, Artificial Sequence
  Description of Artificial Sequence: Synthetic oligonucleotide
ugggaucacccggaaagga

SEQ ID NO: 764861 - RNA, 19 nt, Artificial Sequence
  Description of Artificial Sequence: Synthetic oligonucleotide
cuggacgaagucacaugug

SEQ ID NO: 764862 - RNA, 19 nt, Artificial Sequence
  Description of Artificial Sequence: Synthetic oligonucleotide
gugguacgauaucucauga

SEQ ID NO: 764863 - RNA, 19 nt, Artificial Sequence
  Description of Artificial Sequence: Synthetic oligonucleotide
gcagcauugacauucugcu

SEQ ID NO: 764864 - RNA, 19 nt, Artificial Sequence
  Description of Artificial Sequence: Synthetic oligonucleotide
ggaauucgaagaccauggc

SEQ ID NO: 764865 - RNA, 19 nt, Artificial Sequence
  Description of Artificial Sequence: Synthetic oligonucleotide
uucggccaauguaucgcac

SEQ ID NO: 764866 - RNA, 19 nt, Artificial Sequence
  Description of Artificial Sequence: Synthetic oligonucleotide
gcauacuaucccaaagcag

SEQ ID NO: 764867 - RNA, 19 nt, Artificial Sequence
  Description of Artificial Sequence: Synthetic oligonucleotide
cagcuucgguucaaauacc

SEQ ID NO: 764868 - RNA, 19 nt, Artificial Sequence
  Description of Artificial Sequence: Synthetic oligonucleotide
ugcaagccagauguuggac

SEQ ID NO: 764869 - RNA, 19 nt, Artificial Sequence
  Description of Artificial Sequence: Synthetic oligonucleotide
ugcgagcgauguuugugac

SEQ ID NO: 764870 - RNA, 19 nt, Artificial Sequence
  Description of Artificial Sequence: Synthetic oligonucleotide
ugccacuaggcagcuagca

SEQ ID NO: 764871 - RNA, 19 nt, Artificial Sequence
  Description of Artificial Sequence: Synthetic oligonucleotide
gugcgagcgauguuuguga

SEQ ID NO: 764872 - RNA, 19 nt, Artificial Sequence
  Description of Artificial Sequence: Synthetic oligonucleotide
ggccagaaggcgcgaaugg

SEQ ID NO: 764873 - RNA, 19 nt, Artificial Sequence
  Description of Artificial Sequence: Synthetic oligonucleotide
guucauuucggcgauacuu

SEQ ID NO: 764874 - RNA, 19 nt, Artificial Sequence
  Description of Artificial Sequence: Synthetic oligonucleotide
uaccgcucuugccuguuuc

SEQ ID NO: 764875 - RNA, 19 nt, Artificial Sequence
  Description of Artificial Sequence: Synthetic oligonucleotide
agagucaaacuugcugagu

SEQ ID NO: 764876 - RNA, 19 nt, Artificial Sequence
  Description of Artificial Sequence: Synthetic oligonucleotide
accgccucagcagucccac

SEQ ID NO: 764877 - RNA, 19 nt, Artificial Sequence
  Description of Artificial Sequence: Synthetic oligonucleotide
aggggcuagaguaaaggaa

SEQ ID NO: 764878 - RNA, 19 nt, Artificial Sequence
  Description of Artificial Sequence: Synthetic oligonucleotide
ucaccugcaccccgcuugu

SEQ ID NO: 764879 - RNA, 19 nt, Artificial Sequence
  Description of Artificial Sequence: Synthetic oligonucleotide
agcuucgguucaaauaccu

SEQ ID NO: 764880 - RNA, 19 nt, Artificial Sequence
  Description of Artificial Sequence: Synthetic oligonucleotide
aacuccuacucuacaguuu

SEQ ID NO: 764881 - RNA, 19 nt, Artificial Sequence
  Description of Artificial Sequence: Synthetic oligonucleotide
uccuuggugguacgauauc

SEQ ID NO: 764882 - RNA, 19 nt, Artificial Sequence
  Description of Artificial Sequence: Synthetic oligonucleotide
guaguucagcuucgguuca

SEQ ID NO: 764883 - RNA, 19 nt, Artificial Sequence
  Description of Artificial Sequence: Synthetic oligonucleotide
auaugagcacaaaauuguu

SEQ ID NO: 764884 - RNA, 19 nt, Artificial Sequence
  Description of Artificial Sequence: Synthetic oligonucleotide
uccucccgaugucaucucu

SEQ ID NO: 764885 - RNA, 19 nt, Artificial Sequence
  Description of Artificial Sequence: Synthetic oligonucleotide
uccccgacagccccauuaa

SEQ ID NO: 764886 - RNA, 19 nt, Artificial Sequence
  Description of Artificial Sequence: Synthetic oligonucleotide
ucgaagaccauggcagcau

SEQ ID NO: 764887 - RNA, 19 nt, Artificial Sequence
  Description of Artificial Sequence: Synthetic oligonucleotide
uugggauccucaccucaau

SEQ ID NO: 764888 - RNA, 19 nt, Artificial Sequence
  Description of Artificial Sequence: Synthetic oligonucleotide
ccgacagccccauuaacac

SEQ ID NO: 764889 - RNA, 19 nt, Artificial Sequence
  Description of Artificial Sequence: Synthetic oligonucleotide
cgagcgauguuugugacag

SEQ ID NO: 764890 - RNA, 19 nt, Artificial Sequence
  Description of Artificial Sequence: Synthetic oligonucleotide
caggggcuagaguaaagga

SEQ ID NO: 764891 - RNA, 19 nt, Artificial Sequence
  Description of Artificial Sequence: Synthetic oligonucleotide
ucccaagauguccgcccgc

SEQ ID NO: 764892 - RNA, 19 nt, Artificial Sequence
  Description of Artificial Sequence: Synthetic oligonucleotide
gccccauuaacacuagcca

SEQ ID NO: 764893 - RNA, 19 nt, Artificial Sequence
  Description of Artificial Sequence: Synthetic oligonucleotide
accccgcuuguguucagug

SEQ ID NO: 764894 - RNA, 19 nt, Artificial Sequence
  Description of Artificial Sequence: Synthetic oligonucleotide
cuucguucagagucaaacu

SEQ ID NO: 764895 - RNA, 19 nt, Artificial Sequence
  Description of Artificial Sequence: Synthetic oligonucleotide
gccacuaggcagcuagcag

SEQ ID NO: 764896 - RNA, 19 nt, Artificial Sequence
  Description of Artificial Sequence: Synthetic oligonucleotide
uccccuucaugcagaucac

SEQ ID NO: 764897 - RNA, 19 nt, Artificial Sequence
  Description of Artificial Sequence: Synthetic oligonucleotide
gagcgauguuugugacagg

SEQ ID NO: 764898 - RNA, 19 nt, Artificial Sequence
  Description of Artificial Sequence: Synthetic oligonucleotide
ggugcgagcgauguuugug

SEQ ID NO: 764899 - RNA, 19 nt, Artificial Sequence
  Description of Artificial Sequence: Synthetic oligonucleotide
auaacuggacgaagucaca

SEQ ID NO: 764900 - RNA, 19 nt, Artificial Sequence
  Description of Artificial Sequence: Synthetic oligonucleotide
cugccgugcaugaaucaca

SEQ ID NO: 764901 - RNA, 19 nt, Artificial Sequence
  Description of Artificial Sequence: Synthetic oligonucleotide
uguguucagugggguuggg

SEQ ID NO: 764902 - RNA, 19 nt, Artificial Sequence
  Description of Artificial Sequence: Synthetic oligonucleotide
agaucaccugcaccccgcu

SEQ ID NO: 764903 - RNA, 19 nt, Artificial Sequence
  Description of Artificial Sequence: Synthetic oligonucleotide
gauguccuuggugguacga

SEQ ID NO: 764904 - RNA, 19 nt, Artificial Sequence
  Description of Artificial Sequence: Synthetic oligonucleotide
cccacuucccgaacuaaug

SEQ ID NO: 764905 - RNA, 19 nt, Artificial Sequence
  Description of Artificial Sequence: Synthetic oligonucleotide
ccgcuuaacauggaagaag

SEQ ID NO: 764906 - RNA, 19 nt, Artificial Sequence
  Description of Artificial Sequence: Synthetic oligonucleotide
gcgaauggcaccucaaagu

SEQ ID NO: 764907 - RNA, 19 nt, Artificial Sequence
  Description of Artificial Sequence: Synthetic oligonucleotide
accgcuuaacauggaagaa

SEQ ID NO: 764908 - RNA, 19 nt, Artificial Sequence
  Description of Artificial Sequence: Synthetic oligonucleotide
guacacccgggagaugagc

SEQ ID NO: 764909 - RNA, 19 nt, Artificial Sequence
  Description of Artificial Sequence: Synthetic oligonucleotide
aucacccggaaaggaagga

SEQ ID NO: 764910 - RNA, 19 nt, Artificial Sequence
  Description of Artificial Sequence: Synthetic oligonucleotide
gaaggcgcgaauggcaccu

SEQ ID NO: 764911 - RNA, 19 nt, Artificial Sequence
  Description of Artificial Sequence: Synthetic oligonucleotide
cugccacuaggcagcuagc

SEQ ID NO: 764912 - RNA, 19 nt, Artificial Sequence
  Description of Artificial Sequence: Synthetic oligonucleotide
cugcucgccuguccgcugc

SEQ ID NO: 764913 - RNA, 19 nt, Artificial Sequence
  Description of Artificial Sequence: Synthetic oligonucleotide
cauuaacacuagccaacaa

SEQ ID NO: 764914 - RNA, 19 nt, Artificial Sequence
  Description of Artificial Sequence: Synthetic oligonucleotide
uagugggcagaaguucaau

SEQ ID NO: 764915 - RNA, 19 nt, Artificial Sequence
  Description of Artificial Sequence: Synthetic oligonucleotide
aaggcgcgaauggcaccuc

SEQ ID NO: 764916 - RNA, 19 nt, Artificial Sequence
  Description of Artificial Sequence: Synthetic oligonucleotide
acccauuugaugacaucau

SEQ ID NO: 764917 - RNA, 19 nt, Artificial Sequence
  Description of Artificial Sequence: Synthetic oligonucleotide
gguuucauaaaugccacuu

SEQ ID NO: 764918 - RNA, 19 nt, Artificial Sequence
  Description of Artificial Sequence: Synthetic oligonucleotide
ucgcacccauuugaugaca

SEQ ID NO: 764919 - RNA, 19 nt, Artificial Sequence
  Description of Artificial Sequence: Synthetic oligonucleotide
uuggugcgucccacuuccc

SEQ ID NO: 764920 - RNA, 19 nt, Artificial Sequence
  Description of Artificial Sequence: Synthetic oligonucleotide
uggugcgagcgauguuugu

SEQ ID NO: 764921 - RNA, 19 nt, Artificial Sequence
  Description of Artificial Sequence: Synthetic oligonucleotide
ccggaaaggaaggaugaug

SEQ ID NO: 764922 - RNA, 19 nt, Artificial Sequence
  Description of Artificial Sequence: Synthetic oligonucleotide
guacgauaucucaugaguu

SEQ ID NO: 764923 - RNA, 19 nt, Artificial Sequence
  Description of Artificial Sequence: Synthetic oligonucleotide
gaugaagcugaugcuucgu

SEQ ID NO: 764924 - RNA, 19 nt, Artificial Sequence
  Description of Artificial Sequence: Synthetic oligonucleotide
ugcuucguucagagucaaa

SEQ ID NO: 764925 - RNA, 19 nt, Artificial Sequence
  Description of Artificial Sequence: Synthetic oligonucleotide
gccacucucggaucccaag

SEQ ID NO: 764926 - RNA, 19 nt, Artificial Sequence
  Description of Artificial Sequence: Synthetic oligonucleotide
guuucaucggcugugccuu

SEQ ID NO: 764927 - RNA, 19 nt, Artificial Sequence
  Description of Artificial Sequence: Synthetic oligonucleotide
agcucguauaugagcacaa

SEQ ID NO: 764928 - RNA, 19 nt, Artificial Sequence
  Description of Artificial Sequence: Synthetic oligonucleotide
gcagcggguuucauaaaug

SEQ ID NO: 764929 - RNA, 19 nt, Artificial Sequence
  Description of Artificial Sequence: Synthetic oligonucleotide
cucuacaguuuauuggguu

SEQ ID NO: 764930 - RNA, 19 nt, Artificial Sequence
  Description of Artificial Sequence: Synthetic oligonucleotide
cugagucgcacacacuggu

SEQ ID NO: 764931 - RNA, 19 nt, Artificial Sequence
  Description of Artificial Sequence: Synthetic oligonucleotide
ggacauuagcagauuuaca

SEQ ID NO: 764932 - RNA, 19 nt, Artificial Sequence
  Description of Artificial Sequence: Synthetic oligonucleotide
cccgacagccccauuaaca

SEQ ID NO: 764933 - RNA, 19 nt, Artificial Sequence
  Description of Artificial Sequence: Synthetic oligonucleotide
ggcgauacuugaugccuuc

SEQ ID NO: 764934 - RNA, 19 nt, Artificial Sequence
  Description of Artificial Sequence: Synthetic oligonucleotide
cgcgaauggcaccucaaag

SEQ ID NO: 764935 - RNA, 19 nt, Artificial Sequence
  Description of Artificial Sequence: Synthetic oligonucleotide
aggcgcgaauggcaccuca

SEQ ID NO: 764936 - RNA, 19 nt, Artificial Sequence
  Description of Artificial Sequence: Synthetic oligonucleotide
uuaccgcucuugccuguuu

SEQ ID NO: 764937 - RNA, 19 nt, Artificial Sequence
  Description of Artificial Sequence: Synthetic oligonucleotide
cuucccgaacuaaugggau

SEQ ID NO: 764938 - RNA, 19 nt, Artificial Sequence
  Description of Artificial Sequence: Synthetic oligonucleotide
uugacccgaaaggcaucca

SEQ ID NO: 764939 - RNA, 19 nt, Artificial Sequence
  Description of Artificial Sequence: Synthetic oligonucleotide
cagccccauuaacacuagc

SEQ ID NO: 764940 - RNA, 19 nt, Artificial Sequence
  Description of Artificial Sequence: Synthetic oligonucleotide
ggcgccagccaaucugccc

SEQ ID NO: 764941 - RNA, 19 nt, Artificial Sequence
  Description of Artificial Sequence: Synthetic oligonucleotide
acagccccauuaacacuag

SEQ ID NO: 764942 - RNA, 19 nt, Artificial Sequence
  Description of Artificial Sequence: Synthetic oligonucleotide
uuccucccgaugucaucuc

SEQ ID NO: 764943 - RNA, 19 nt, Artificial Sequence
  Description of Artificial Sequence: Synthetic oligonucleotide
caacuccuacucuacaguu

SEQ ID NO: 764944 - RNA, 19 nt, Artificial Sequence
  Description of Artificial Sequence: Synthetic oligonucleotide
accuccaaucaugguggca

SEQ ID NO: 764945 - RNA, 19 nt, Artificial Sequence
  Description of Artificial Sequence: Synthetic oligonucleotide
cgguucaaauaccuucaag

SEQ ID NO: 764946 - RNA, 19 nt, Artificial Sequence
  Description of Artificial Sequence: Synthetic oligonucleotide
gcugccgugcaugaaucac

SEQ ID NO: 764947 - RNA, 19 nt, Artificial Sequence
  Description of Artificial Sequence: Synthetic oligonucleotide
cgugcaugaaucacauuga

SEQ ID NO: 764948 - RNA, 19 nt, Artificial Sequence
  Description of Artificial Sequence: Synthetic oligonucleotide
ccccgcuuguguucagugg

SEQ ID NO: 764949 - RNA, 19 nt, Artificial Sequence
  Description of Artificial Sequence: Synthetic oligonucleotide
uuucaucggcugugccuuu

SEQ ID NO: 764950 - RNA, 19 nt, Artificial Sequence
  Description of Artificial Sequence: Synthetic oligonucleotide
accacccggccugacacau

SEQ ID NO: 764951 - RNA, 19 nt, Artificial Sequence
  Description of Artificial Sequence: Synthetic oligonucleotide
cgaguggucacugggguac

SEQ ID NO: 764952 - RNA, 19 nt, Artificial Sequence
  Description of Artificial Sequence: Synthetic oligonucleotide
gcuagcagcggguuucaua

SEQ ID NO: 764953 - RNA, 19 nt, Artificial Sequence
  Description of Artificial Sequence: Synthetic oligonucleotide
caauggcguucucgcuggc

SEQ ID NO: 764954 - RNA, 19 nt, Artificial Sequence
  Description of Artificial Sequence: Synthetic oligonucleotide
cggccaauguaucgcaccc

SEQ ID NO: 764955 - RNA, 19 nt, Artificial Sequence
  Description of Artificial Sequence: Synthetic oligonucleotide
ccauuaacacuagccaaca

SEQ ID NO: 764956 - RNA, 19 nt, Artificial Sequence
  Description of Artificial Sequence: Synthetic oligonucleotide
gccacuucggccaauguau

SEQ ID NO: 764957 - RNA, 19 nt, Artificial Sequence
  Description of Artificial Sequence: Synthetic oligonucleotide
gaccuauacucaggggcua

SEQ ID NO: 764958 - RNA, 19 nt, Artificial Sequence
  Description of Artificial Sequence: Synthetic oligonucleotide
cccaagauguccgcccgcc

SEQ ID NO: 764959 - RNA, 19 nt, Artificial Sequence
  Description of Artificial Sequence: Synthetic oligonucleotide
cauuucggcgauacuugau

SEQ ID NO: 764960 - RNA, 19 nt, Artificial Sequence
  Description of Artificial Sequence: Synthetic oligonucleotide
cguauaugagcacaaaauu

SEQ ID NO: 764961 - RNA, 19 nt, Artificial Sequence
  Description of Artificial Sequence: Synthetic oligonucleotide
gggguuaagggcuggggau

SEQ ID NO: 764962 - RNA, 19 nt, Artificial Sequence
  Description of Artificial Sequence: Synthetic oligonucleotide
ggucgagcccacuucuucu

SEQ ID NO: 764963 - RNA, 19 nt, Artificial Sequence
  Description of Artificial Sequence: Synthetic oligonucleotide
cgcaccuugaggccagaag

SEQ ID NO: 764964 - RNA, 19 nt, Artificial Sequence
  Description of Artificial Sequence: Synthetic oligonucleotide
cuucaucaccacccggccu

SEQ ID NO: 764965 - RNA, 19 nt, Artificial Sequence
  Description of Artificial Sequence: Synthetic oligonucleotide
ccccuguggggacauuagc

SEQ ID NO: 764966 - RNA, 19 nt, Artificial Sequence
  Description of Artificial Sequence: Synthetic oligonucleotide
ccaagauguccgcccgccc

SEQ ID NO: 764967 - RNA, 19 nt, Artificial Sequence
  Description of Artificial Sequence: Synthetic oligonucleotide
cgauguuugugacagggcu

SEQ ID NO: 764968 - RNA, 19 nt, Artificial Sequence
  Description of Artificial Sequence: Synthetic oligonucleotide
ccacuucggccaauguauc

SEQ ID NO: 764969 - RNA, 19 nt, Artificial Sequence
  Description of Artificial Sequence: Synthetic oligonucleotide
gccaauguaucgcacccau

SEQ ID NO: 764970 - RNA, 19 nt, Artificial Sequence
  Description of Artificial Sequence: Synthetic oligonucleotide
ggaccgccucagcaguccc

SEQ ID NO: 764971 - RNA, 19 nt, Artificial Sequence
  Description of Artificial Sequence: Synthetic oligonucleotide
ggauccucaccucaaucuu

SEQ ID NO: 764972 - RNA, 19 nt, Artificial Sequence
  Description of Artificial Sequence: Synthetic oligonucleotide
gcgagcgauguuugugaca

SEQ ID NO: 764973 - RNA, 19 nt, Artificial Sequence
  Description of Artificial Sequence: Synthetic oligonucleotide
gggaccgccucagcagucc

SEQ ID NO: 764974 - RNA, 19 nt, Artificial Sequence
  Description of Artificial Sequence: Synthetic oligonucleotide
cacucucggaucccaagau

SEQ ID NO: 764975 - RNA, 19 nt, Artificial Sequence
  Description of Artificial Sequence: Synthetic oligonucleotide
ccacucucggaucccaaga

SEQ ID NO: 764976 - RNA, 19 nt, Artificial Sequence
  Description of Artificial Sequence: Synthetic oligonucleotide
gggcagaaguucaaucucu

SEQ ID NO: 764977 - RNA, 19 nt, Artificial Sequence
  Description of Artificial Sequence: Synthetic oligonucleotide
gaccgccucagcaguccca

SEQ ID NO: 764978 - RNA, 19 nt, Artificial Sequence
  Description of Artificial Sequence: Synthetic oligonucleotide
agaguucauuucggcgaua

SEQ ID NO: 764979 - RNA, 19 nt, Artificial Sequence
  Description of Artificial Sequence: Synthetic oligonucleotide
gcuggugcgagcgauguuu

SEQ ID NO: 764980 - RNA, 19 nt, Artificial Sequence
  Description of Artificial Sequence: Synthetic oligonucleotide
gccccuguggggacauuag

SEQ ID NO: 764981 - RNA, 19 nt, Artificial Sequence
  Description of Artificial Sequence: Synthetic oligonucleotide
gguugucaaccauccuacu

SEQ ID NO: 764982 - RNA, 19 nt, Artificial Sequence
  Description of Artificial Sequence: Synthetic oligonucleotide
gucgagcccacuucuucuu

SEQ ID NO: 764983 - RNA, 19 nt, Artificial Sequence
  Description of Artificial Sequence: Synthetic oligonucleotide
gccuuuaggggagcucuga

SEQ ID NO: 764984 - RNA, 19 nt, Artificial Sequence
  Description of Artificial Sequence: Synthetic oligonucleotide
gcgcgaauggcaccucaaa

SEQ ID NO: 764985 - RNA, 19 nt, Artificial Sequence
  Description of Artificial Sequence: Synthetic oligonucleotide
ggccaauguaucgcaccca

SEQ ID NO: 764986 - RNA, 19 nt, Artificial Sequence
  Description of Artificial Sequence: Synthetic oligonucleotide
gcucguauaugagcacaaa

SEQ ID NO: 764987 - RNA, 19 nt, Artificial Sequence
  Description of Artificial Sequence: Synthetic oligonucleotide
ggccuuuaggggagcucug

SEQ ID NO: 764988 - RNA, 19 nt, Artificial Sequence
  Description of Artificial Sequence: Synthetic oligonucleotide
caccacccggccugacaca

SEQ ID NO: 764989 - RNA, 19 nt, Artificial Sequence
  Description of Artificial Sequence: Synthetic oligonucleotide
acaaggccggcgggccacu

SEQ ID NO: 764990 - RNA, 19 nt, Artificial Sequence
  Description of Artificial Sequence: Synthetic oligonucleotide
ggcaugccacucagguaac

SEQ ID NO: 764991 - RNA, 19 nt, Artificial Sequence
  Description of Artificial Sequence: Synthetic oligonucleotide
cgauaucucaugaguucaa

SEQ ID NO: 764992 - RNA, 19 nt, Artificial Sequence
  Description of Artificial Sequence: Synthetic oligonucleotide
ggcgggccacucucggauc

SEQ ID NO: 764993 - RNA, 19 nt, Artificial Sequence
  Description of Artificial Sequence: Synthetic oligonucleotide
ccugcucgccuguccgcug

SEQ ID NO: 764994 - RNA, 19 nt, Artificial Sequence
  Description of Artificial Sequence: Synthetic oligonucleotide
gcuuguguucagugggguu

SEQ ID NO: 764995 - RNA, 19 nt, Artificial Sequence
  Description of Artificial Sequence: Synthetic oligonucleotide
ccccgacagccccauuaac

SEQ ID NO: 764996 - RNA, 19 nt, Artificial Sequence
  Description of Artificial Sequence: Synthetic oligonucleotide
ccuauacucaggggcuaga

SEQ ID NO: 764997 - RNA, 19 nt, Artificial Sequence
  Description of Artificial Sequence: Synthetic oligonucleotide
gcgcugaucugugauuccu

SEQ ID NO: 764998 - RNA, 19 nt, Artificial Sequence
  Description of Artificial Sequence: Synthetic oligonucleotide
ggcgcgaauggcaccucaa

SEQ ID NO: 764999 - RNA, 19 nt, Artificial Sequence
  Description of Artificial Sequence: Synthetic oligonucleotide
ggccggcgggccacucucg

SEQ ID NO: 765000 - RNA, 19 nt, Artificial Sequence
  Description of Artificial Sequence: Synthetic oligonucleotide
caaggccggcgggccacuc

SEQ ID NO: 765001 - RNA, 19 nt, Artificial Sequence
  Description of Artificial Sequence: Synthetic oligonucleotide
gcuuaccgcucuugccugu

SEQ ID NO: 765002 - RNA, 19 nt, Artificial Sequence
  Description of Artificial Sequence: Synthetic oligonucleotide
gcaccccgcuuguguucag

SEQ ID NO: 765003 - RNA, 19 nt, Artificial Sequence
  Description of Artificial Sequence: Synthetic oligonucleotide
cuuaccgcucuugccuguu

SEQ ID NO: 765004 - RNA, 19 nt, Artificial Sequence
  Description of Artificial Sequence: Synthetic oligonucleotide
guggggacauuagcagauu

SEQ ID NO: 765005 - RNA, 19 nt, Artificial Sequence
  Description of Artificial Sequence: Synthetic oligonucleotide
gcuucgguucaaauaccuu

SEQ ID NO: 765006 - RNA, 19 nt, Artificial Sequence
  Description of Artificial Sequence: Synthetic oligonucleotide
ccacccggccugacacaug

SEQ ID NO: 765007 - RNA, 19 nt, Artificial Sequence
  Description of Artificial Sequence: Synthetic oligonucleotide
ggggaccgccucagcaguc

SEQ ID NO: 765008 - RNA, 19 nt, Artificial Sequence
  Description of Artificial Sequence: Synthetic oligonucleotide
gcauuccucccgaugucau

SEQ ID NO: 765009 - RNA, 19 nt, Artificial Sequence
  Description of Artificial Sequence: Synthetic oligonucleotide
cggcgccagccaaucugcc

SEQ ID NO: 765010 - RNA, 19 nt, Artificial Sequence
  Description of Artificial Sequence: Synthetic oligonucleotide
ccaauguaucgcacccauu

SEQ ID NO: 765011 - RNA, 19 nt, Artificial Sequence
  Description of Artificial Sequence: Synthetic oligonucleotide
gcgcaccugcugccgugca

SEQ ID NO: 765012 - RNA, 19 nt, Artificial Sequence
  Description of Artificial Sequence: Synthetic oligonucleotide
caccccgcuuguguucagu

SEQ ID NO: 765013 - RNA, 19 nt, Artificial Sequence
  Description of Artificial Sequence: Synthetic oligonucleotide
cgacagccccauuaacacu

SEQ ID NO: 765014 - RNA, 19 nt, Artificial Sequence
  Description of Artificial Sequence: Synthetic oligonucleotide
cgcacccauuugaugacau

SEQ ID NO: 765015 - RNA, 19 nt, Artificial Sequence
  Description of Artificial Sequence: Synthetic oligonucleotide
cgaagaccauggcagcauu

SEQ ID NO: 765016 - RNA, 19 nt, Artificial Sequence
  Description of Artificial Sequence: Synthetic oligonucleotide
cggcgggccacucucggau

SEQ ID NO: 765017 - RNA, 19 nt, Artificial Sequence
  Description of Artificial Sequence: Synthetic oligonucleotide
cggcgauacuugaugccuu

SEQ ID NO: 765018 - RNA, 19 nt, Artificial Sequence
  Description of Artificial Sequence: Synthetic oligonucleotide
cguucucgcuggccuugua

SEQ ID NO: 765019 - RNA, 19 nt, Artificial Sequence
  Description of Artificial Sequence: Synthetic oligonucleotide
uucguuagggccaugagag

SEQ ID NO: 765020 - RNA, 19 nt, Artificial Sequence
  Description of Artificial Sequence: Synthetic oligonucleotide
aaccacgguaccucgaucc

SEQ ID NO: 765021 - RNA, 19 nt, Artificial Sequence
  Description of Artificial Sequence: Synthetic oligonucleotide
ugauguaguucucacagag

SEQ ID NO: 765022 - RNA, 19 nt, Artificial Sequence
  Description of Artificial Sequence: Synthetic oligonucleotide
aagaucuccagccagugug

SEQ ID NO: 765023 - RNA, 19 nt, Artificial Sequence
  Description of Artificial Sequence: Synthetic oligonucleotide
uuguauagguccuugagca

SEQ ID NO: 765024 - RNA, 19 nt, Artificial Sequence
  Description of Artificial Sequence: Synthetic oligonucleotide
uuuacgucugcaucaaagg

SEQ ID NO: 765025 - RNA, 19 nt, Artificial Sequence
  Description of Artificial Sequence: Synthetic oligonucleotide
aguucuguaguccugagca

SEQ ID NO: 765026 - RNA, 19 nt, Artificial Sequence
  Description of Artificial Sequence: Synthetic oligonucleotide
cagaccuugaucaaugacc

SEQ ID NO: 765027 - RNA, 19 nt, Artificial Sequence
  Description of Artificial Sequence: Synthetic oligonucleotide
agauccugcaccucuuugc

SEQ ID NO: 765028 - RNA, 19 nt, Artificial Sequence
  Description of Artificial Sequence: Synthetic oligonucleotide
acacagagcgaucacacuc

SEQ ID NO: 765029 - RNA, 19 nt, Artificial Sequence
  Description of Artificial Sequence: Synthetic oligonucleotide
cuuuacgucugcaucaaag

SEQ ID NO: 765030 - RNA, 19 nt, Artificial Sequence
  Description of Artificial Sequence: Synthetic oligonucleotide
ugcauagccacuuucggca

SEQ ID NO: 765031 - RNA, 19 nt, Artificial Sequence
  Description of Artificial Sequence: Synthetic oligonucleotide
cacacgauuuauuggaggg

SEQ ID NO: 765032 - RNA, 19 nt, Artificial Sequence
  Description of Artificial Sequence: Synthetic oligonucleotide
ucacuacagacauaggggc

SEQ ID NO: 765033 - RNA, 19 nt, Artificial Sequence
  Description of Artificial Sequence: Synthetic oligonucleotide
agaccuugaucaaugaccc

SEQ ID NO: 765034 - RNA, 19 nt, Artificial Sequence
  Description of Artificial Sequence: Synthetic oligonucleotide
cauugcauagccacuuucg

SEQ ID NO: 765035 - RNA, 19 nt, Artificial Sequence
  Description of Artificial Sequence: Synthetic oligonucleotide
gauccaagcuuacagaguc

SEQ ID NO: 765036 - RNA, 19 nt, Artificial Sequence
  Description of Artificial Sequence: Synthetic oligonucleotide
uacgucugcaucaaaggug

SEQ ID NO: 765037 - RNA, 19 nt, Artificial Sequence
  Description of Artificial Sequence: Synthetic oligonucleotide
cuuguauagguccuugagc

SEQ ID NO: 765038 - RNA, 19 nt, Artificial Sequence
  Description of Artificial Sequence: Synthetic oligonucleotide
acaggaguuugucagcacg

SEQ ID NO: 765039 - RNA, 19 nt, Artificial Sequence
  Description of Artificial Sequence: Synthetic oligonucleotide
ggagggaugaaccugcugg

SEQ ID NO: 765040 - RNA, 19 nt, Artificial Sequence
  Description of Artificial Sequence: Synthetic oligonucleotide
gguaaguuuggcaagagcc

SEQ ID NO: 765041 - RNA, 19 nt, Artificial Sequence
  Description of Artificial Sequence: Synthetic oligonucleotide
agcuucuucacacgagccc

SEQ ID NO: 765042 - RNA, 19 nt, Artificial Sequence
  Description of Artificial Sequence: Synthetic oligonucleotide
agagacaaggggccggacc

SEQ ID NO: 765043 - RNA, 19 nt, Artificial Sequence
  Description of Artificial Sequence: Synthetic oligonucleotide
agagcgaucacacucucca

SEQ ID NO: 765044 - RNA, 19 nt, Artificial Sequence
  Description of Artificial Sequence: Synthetic oligonucleotide
ugcaccucuuugcucaugg

SEQ ID NO: 765045 - RNA, 19 nt, Artificial Sequence
  Description of Artificial Sequence: Synthetic oligonucleotide
agcgcucugaugcggaugc

SEQ ID NO: 765046 - RNA, 19 nt, Artificial Sequence
  Description of Artificial Sequence: Synthetic oligonucleotide
cuuacagagucccacuagc

SEQ ID NO: 765047 - RNA, 19 nt, Artificial Sequence
  Description of Artificial Sequence: Synthetic oligonucleotide
guuggguuggaugaggccg

SEQ ID NO: 765048 - RNA, 19 nt, Artificial Sequence
  Description of Artificial Sequence: Synthetic oligonucleotide
cucuccacuguauagcacc

SEQ ID NO: 765049 - RNA, 19 nt, Artificial Sequence
  Description of Artificial Sequence: Synthetic oligonucleotide
ucccacacgauuuauugga

SEQ ID NO: 765050 - RNA, 19 nt, Artificial Sequence
  Description of Artificial Sequence: Synthetic oligonucleotide
uccucgaacauguagcccu

SEQ ID NO: 765051 - RNA, 19 nt, Artificial Sequence
  Description of Artificial Sequence: Synthetic oligonucleotide
uuggccaacacugacagaa

SEQ ID NO: 765052 - RNA, 19 nt, Artificial Sequence
  Description of Artificial Sequence: Synthetic oligonucleotide
auacuuggcgagcucuacc

SEQ ID NO: 765053 - RNA, 19 nt, Artificial Sequence
  Description of Artificial Sequence: Synthetic oligonucleotide
ucaaagagauccugcaccu

SEQ ID NO: 765054 - RNA, 19 nt, Artificial Sequence
  Description of Artificial Sequence: Synthetic oligonucleotide
uccggguuagaggugaugg

SEQ ID NO: 765055 - RNA, 19 nt, Artificial Sequence
  Description of Artificial Sequence: Synthetic oligonucleotide
uuacgucugcaucaaaggu

SEQ ID NO: 765056 - RNA, 19 nt, Artificial Sequence
  Description of Artificial Sequence: Synthetic oligonucleotide
cuggucauugcauagccac

SEQ ID NO: 765057 - RNA, 19 nt, Artificial Sequence
  Description of Artificial Sequence: Synthetic oligonucleotide
agaguagcucccuacagga

SEQ ID NO: 765058 - RNA, 19 nt, Artificial Sequence
  Description of Artificial Sequence: Synthetic oligonucleotide
acugcgaagagcacugacc

SEQ ID NO: 765059 - RNA, 19 nt, Artificial Sequence
  Description of Artificial Sequence: Synthetic oligonucleotide
ugaugguaaguuuggcaag

SEQ ID NO: 765060 - RNA, 19 nt, Artificial Sequence
  Description of Artificial Sequence: Synthetic oligonucleotide
uguaguccugagcaguuga

SEQ ID NO: 765061 - RNA, 19 nt, Artificial Sequence
  Description of Artificial Sequence: Synthetic oligonucleotide
guauagguccuugagcagg

SEQ ID NO: 765062 - RNA, 19 nt, Artificial Sequence
  Description of Artificial Sequence: Synthetic oligonucleotide
ccaguuugagaguagagcc

SEQ ID NO: 765063 - RNA, 19 nt, Artificial Sequence
  Description of Artificial Sequence: Synthetic oligonucleotide
ucuugguuggggcuuagaa

SEQ ID NO: 765064 - RNA, 19 nt, Artificial Sequence
  Description of Artificial Sequence: Synthetic oligonucleotide
uacacgucauggcugacac

SEQ ID NO: 765065 - RNA, 19 nt, Artificial Sequence
  Description of Artificial Sequence: Synthetic oligonucleotide
agccgguggaaauuuuccc

SEQ ID NO: 765066 - RNA, 19 nt, Artificial Sequence
  Description of Artificial Sequence: Synthetic oligonucleotide
accuugaucaaugacccag

SEQ ID NO: 765067 - RNA, 19 nt, Artificial Sequence
  Description of Artificial Sequence: Synthetic oligonucleotide
acuucguagauccgcucac

SEQ ID NO: 765068 - RNA, 19 nt, Artificial Sequence
  Description of Artificial Sequence: Synthetic oligonucleotide
cauuucaugcuccucgaac

SEQ ID NO: 765069 - RNA, 19 nt, Artificial Sequence
  Description of Artificial Sequence: Synthetic oligonucleotide
auaggggcccuccugagug

SEQ ID NO: 765070 - RNA, 19 nt, Artificial Sequence
  Description of Artificial Sequence: Synthetic oligonucleotide
guugcccugggcuucaaag

SEQ ID NO: 765071 - RNA, 19 nt, Artificial Sequence
  Description of Artificial Sequence: Synthetic oligonucleotide
agcuucaaccggucguugc

SEQ ID NO: 765072 - RNA, 19 nt, Artificial Sequence
  Description of Artificial Sequence: Synthetic oligonucleotide
gcuugcaucaaucugguca

SEQ ID NO: 765073 - RNA, 19 nt, Artificial Sequence
  Description of Artificial Sequence: Synthetic oligonucleotide
uugcauagccacuuucggc

SEQ ID NO: 765074 - RNA, 19 nt, Artificial Sequence
  Description of Artificial Sequence: Synthetic oligonucleotide
uaaguuuggcaagagccug

SEQ ID NO: 765075 - RNA, 19 nt, Artificial Sequence
  Description of Artificial Sequence: Synthetic oligonucleotide
gugaugguaaguuuggcaa

SEQ ID NO: 765076 - RNA, 19 nt, Artificial Sequence
  Description of Artificial Sequence: Synthetic oligonucleotide
uguauagguccuugagcag

SEQ ID NO: 765077 - RNA, 19 nt, Artificial Sequence
  Description of Artificial Sequence: Synthetic oligonucleotide
ugguaaguuuggcaagagc

SEQ ID NO: 765078 - RNA, 19 nt, Artificial Sequence
  Description of Artificial Sequence: Synthetic oligonucleotide
aaggcaggacacugucugg

SEQ ID NO: 765079 - RNA, 19 nt, Artificial Sequence
  Description of Artificial Sequence: Synthetic oligonucleotide
uuucaguucccacacgauu

SEQ ID NO: 765080 - RNA, 19 nt, Artificial Sequence
  Description of Artificial Sequence: Synthetic oligonucleotide
uauuggagggaugaaccug

SEQ ID NO: 765081 - RNA, 19 nt, Artificial Sequence
  Description of Artificial Sequence: Synthetic oligonucleotide
uuggcgagcucuaccaucu

SEQ ID NO: 765082 - RNA, 19 nt, Artificial Sequence
  Description of Artificial Sequence: Synthetic oligonucleotide
gaguuugucagcacgggac

SEQ ID NO: 765083 - RNA, 19 nt, Artificial Sequence
  Description of Artificial Sequence: Synthetic oligonucleotide
uuugucugcccaacaucag

SEQ ID NO: 765084 - RNA, 19 nt, Artificial Sequence
  Description of Artificial Sequence: Synthetic oligonucleotide
agaaucuccagcaccucac

SEQ ID NO: 765085 - RNA, 19 nt, Artificial Sequence
  Description of Artificial Sequence: Synthetic oligonucleotide
uucguagauccgcucacca

SEQ ID NO: 765086 - RNA, 19 nt, Artificial Sequence
  Description of Artificial Sequence: Synthetic oligonucleotide
agaggugaugguaaguuug

SEQ ID NO: 765087 - RNA, 19 nt, Artificial Sequence
  Description of Artificial Sequence: Synthetic oligonucleotide
gaggugaugguaaguuugg

SEQ ID NO: 765088 - RNA, 19 nt, Artificial Sequence
  Description of Artificial Sequence: Synthetic oligonucleotide
ugauccaagcuuacagagu

SEQ ID NO: 765089 - RNA, 19 nt, Artificial Sequence
  Description of Artificial Sequence: Synthetic oligonucleotide
cuaaagucagucccuccag

SEQ ID NO: 765090 - RNA, 19 nt, Artificial Sequence
  Description of Artificial Sequence: Synthetic oligonucleotide
aggaaaggucaucuccggg

SEQ ID NO: 765091 - RNA, 19 nt, Artificial Sequence
  Description of Artificial Sequence: Synthetic oligonucleotide
gaugcggcugcagagugag

SEQ ID NO: 765092 - RNA, 19 nt, Artificial Sequence
  Description of Artificial Sequence: Synthetic oligonucleotide
augaacgaggcccgcuugg

SEQ ID NO: 765093 - RNA, 19 nt, Artificial Sequence
  Description of Artificial Sequence: Synthetic oligonucleotide
gagacaaggggccggacca

SEQ ID NO: 765094 - RNA, 19 nt, Artificial Sequence
  Description of Artificial Sequence: Synthetic oligonucleotide
ucauugcauagccacuuuc

SEQ ID NO: 765095 - RNA, 19 nt, Artificial Sequence
  Description of Artificial Sequence: Synthetic oligonucleotide
gguaccucgauccuccacc

SEQ ID NO: 765096 - RNA, 19 nt, Artificial Sequence
  Description of Artificial Sequence: Synthetic oligonucleotide
cuuaggaugcugcucagga

SEQ ID NO: 765097 - RNA, 19 nt, Artificial Sequence
  Description of Artificial Sequence: Synthetic oligonucleotide
aggucaucgaacagcuugc

SEQ ID NO: 765098 - RNA, 19 nt, Artificial Sequence
  Description of Artificial Sequence: Synthetic oligonucleotide
gauggcucgcagcuucccg

SEQ ID NO: 765099 - RNA, 19 nt, Artificial Sequence
  Description of Artificial Sequence: Synthetic oligonucleotide
aguuugucagcacgggacu

SEQ ID NO: 765100 - RNA, 19 nt, Artificial Sequence
  Description of Artificial Sequence: Synthetic oligonucleotide
auggcucgcagcuucccgg

SEQ ID NO: 765101 - RNA, 19 nt, Artificial Sequence
  Description of Artificial Sequence: Synthetic oligonucleotide
caucgaacagcuugcugag

SEQ ID NO: 765102 - RNA, 19 nt, Artificial Sequence
  Description of Artificial Sequence: Synthetic oligonucleotide
uaguccugagcaguugagg

SEQ ID NO: 765103 - RNA, 19 nt, Artificial Sequence
  Description of Artificial Sequence: Synthetic oligonucleotide
uucggaccugcugagcugg

SEQ ID NO: 765104 - RNA, 19 nt, Artificial Sequence
  Description of Artificial Sequence: Synthetic oligonucleotide
cacuacagacauaggggcc

SEQ ID NO: 765105 - RNA, 19 nt, Artificial Sequence
  Description of Artificial Sequence: Synthetic oligonucleotide
agcucaucguccucuccac

SEQ ID NO: 765106 - RNA, 19 nt, Artificial Sequence
  Description of Artificial Sequence: Synthetic oligonucleotide
ucguagauccgcucaccag

SEQ ID NO: 765107 - RNA, 19 nt, Artificial Sequence
  Description of Artificial Sequence: Synthetic oligonucleotide
guucguuagggccaugaga

SEQ ID NO: 765108 - RNA, 19 nt, Artificial Sequence
  Description of Artificial Sequence: Synthetic oligonucleotide
cagugaugaacgaggcccg

SEQ ID NO: 765109 - RNA, 19 nt, Artificial Sequence
  Description of Artificial Sequence: Synthetic oligonucleotide
uucuguaguccugagcagu

SEQ ID NO: 765110 - RNA, 19 nt, Artificial Sequence
  Description of Artificial Sequence: Synthetic oligonucleotide
caggaaaggucaucuccgg

SEQ ID NO: 765111 - RNA, 19 nt, Artificial Sequence
  Description of Artificial Sequence: Synthetic oligonucleotide
ccaggaaaggucaucuccg

SEQ ID NO: 765112 - RNA, 19 nt, Artificial Sequence
  Description of Artificial Sequence: Synthetic oligonucleotide
gaugaacgaggcccgcuug

SEQ ID NO: 765113 - RNA, 19 nt, Artificial Sequence
  Description of Artificial Sequence: Synthetic oligonucleotide
ucugucugagccucucacu

SEQ ID NO: 765114 - RNA, 19 nt, Artificial Sequence
  Description of Artificial Sequence: Synthetic oligonucleotide
agcgccgagugcuugcauc

SEQ ID NO: 765115 - RNA, 19 nt, Artificial Sequence
  Description of Artificial Sequence: Synthetic oligonucleotide
aacgaggcccgcuuggcuu

SEQ ID NO: 765116 - RNA, 19 nt, Artificial Sequence
  Description of Artificial Sequence: Synthetic oligonucleotide
acccuuggccaacacugac

SEQ ID NO: 765117 - RNA, 19 nt, Artificial Sequence
  Description of Artificial Sequence: Synthetic oligonucleotide
cacgucauggcugacacca

SEQ ID NO: 765118 - RNA, 19 nt, Artificial Sequence
  Description of Artificial Sequence: Synthetic oligonucleotide
ugcccggcggaucauuuca

SEQ ID NO: 765119 - RNA, 19 nt, Artificial Sequence
  Description of Artificial Sequence: Synthetic oligonucleotide
cacugacagaaucuccagc

SEQ ID NO: 765120 - RNA, 19 nt, Artificial Sequence
  Description of Artificial Sequence: Synthetic oligonucleotide
agcaguugaggugcaacag

SEQ ID NO: 765121 - RNA, 19 nt, Artificial Sequence
  Description of Artificial Sequence: Synthetic oligonucleotide
agucguagcuguuggugca

SEQ ID NO: 765122 - RNA, 19 nt, Artificial Sequence
  Description of Artificial Sequence: Synthetic oligonucleotide
ugcuaaagucagucccucc

SEQ ID NO: 765123 - RNA, 19 nt, Artificial Sequence
  Description of Artificial Sequence: Synthetic oligonucleotide
cucucuucggaccugcuga

SEQ ID NO: 765124 - RNA, 19 nt, Artificial Sequence
  Description of Artificial Sequence: Synthetic oligonucleotide
aggugaugguaaguuuggc

SEQ ID NO: 765125 - RNA, 19 nt, Artificial Sequence
  Description of Artificial Sequence: Synthetic oligonucleotide
acagagcgaucacacucuc

SEQ ID NO: 765126 - RNA, 19 nt, Artificial Sequence
  Description of Artificial Sequence: Synthetic oligonucleotide
uuaggaugcugcucaggaa

SEQ ID NO: 765127 - RNA, 19 nt, Artificial Sequence
  Description of Artificial Sequence: Synthetic oligonucleotide
uuuucaccauacacgucau

SEQ ID NO: 765128 - RNA, 19 nt, Artificial Sequence
  Description of Artificial Sequence: Synthetic oligonucleotide
uuucggcacugcuuggcca

SEQ ID NO: 765129 - RNA, 19 nt, Artificial Sequence
  Description of Artificial Sequence: Synthetic oligonucleotide
agauccgcucaccaggaaa

SEQ ID NO: 765130 - RNA, 19 nt, Artificial Sequence
  Description of Artificial Sequence: Synthetic oligonucleotide
uggucauugcauagccacu

SEQ ID NO: 765131 - RNA, 19 nt, Artificial Sequence
  Description of Artificial Sequence: Synthetic oligonucleotide
cuguuuucaccauacacgu

SEQ ID NO: 765132 - RNA, 19 nt, Artificial Sequence
  Description of Artificial Sequence: Synthetic oligonucleotide
ugaugaacgaggcccgcuu

SEQ ID NO: 765133 - RNA, 19 nt, Artificial Sequence
  Description of Artificial Sequence: Synthetic oligonucleotide
ggugaugguaaguuuggca

SEQ ID NO: 765134 - RNA, 19 nt, Artificial Sequence
  Description of Artificial Sequence: Synthetic oligonucleotide
gaugaaccugcuggcaggc

SEQ ID NO: 765135 - RNA, 19 nt, Artificial Sequence
  Description of Artificial Sequence: Synthetic oligonucleotide
guuggggcuuagaagcagg

SEQ ID NO: 765136 - RNA, 19 nt, Artificial Sequence
  Description of Artificial Sequence: Synthetic oligonucleotide
gagccgguggaaauuuucc

SEQ ID NO: 765137 - RNA, 19 nt, Artificial Sequence
  Description of Artificial Sequence: Synthetic oligonucleotide
uguuuucaccauacacguc

SEQ ID NO: 765138 - RNA, 19 nt, Artificial Sequence
  Description of Artificial Sequence: Synthetic oligonucleotide
gaagacccuggagaguagc

SEQ ID NO: 765139 - RNA, 19 nt, Artificial Sequence
  Description of Artificial Sequence: Synthetic oligonucleotide
agcuugguuuguccuuagg

SEQ ID NO: 765140 - RNA, 19 nt, Artificial Sequence
  Description of Artificial Sequence: Synthetic oligonucleotide
ugcaguugaccagugccga

SEQ ID NO: 765141 - RNA, 19 nt, Artificial Sequence
  Description of Artificial Sequence: Synthetic oligonucleotide
agagccgguggaaauuuuc

SEQ ID NO: 765142 - RNA, 19 nt, Artificial Sequence
  Description of Artificial Sequence: Synthetic oligonucleotide
cugcauucugcagggagcc

SEQ ID NO: 765143 - RNA, 19 nt, Artificial Sequence
  Description of Artificial Sequence: Synthetic oligonucleotide
augcuaaagucagucccuc

SEQ ID NO: 765144 - RNA, 19 nt, Artificial Sequence
  Description of Artificial Sequence: Synthetic oligonucleotide
ucagaggcacacagagcga

SEQ ID NO: 765145 - RNA, 19 nt, Artificial Sequence
  Description of Artificial Sequence: Synthetic oligonucleotide
agcaaacugcuucaugcua

SEQ ID NO: 765146 - RNA, 19 nt, Artificial Sequence
  Description of Artificial Sequence: Synthetic oligonucleotide
ggccaaguuacacaugcac

SEQ ID NO: 765147 - RNA, 19 nt, Artificial Sequence
  Description of Artificial Sequence: Synthetic oligonucleotide
acacgucauggcugacacc

SEQ ID NO: 765148 - RNA, 19 nt, Artificial Sequence
  Description of Artificial Sequence: Synthetic oligonucleotide
acucaugcggcuguuggcu

SEQ ID NO: 765149 - RNA, 19 nt, Artificial Sequence
  Description of Artificial Sequence: Synthetic oligonucleotide
caaugcucacuccccauuc

SEQ ID NO: 765150 - RNA, 19 nt, Artificial Sequence
  Description of Artificial Sequence: Synthetic oligonucleotide
cguagauccgcucaccagg

SEQ ID NO: 765151 - RNA, 19 nt, Artificial Sequence
  Description of Artificial Sequence: Synthetic oligonucleotide
accauacacgucauggcug

SEQ ID NO: 765152 - RNA, 19 nt, Artificial Sequence
  Description of Artificial Sequence: Synthetic oligonucleotide
ucgaacauguagcccucaa

SEQ ID NO: 765153 - RNA, 19 nt, Artificial Sequence
  Description of Artificial Sequence: Synthetic oligonucleotide
cuucacacgagcccgcaca

SEQ ID NO: 765154 - RNA, 19 nt, Artificial Sequence
  Description of Artificial Sequence: Synthetic oligonucleotide
ucuuugcucauggccaagu

SEQ ID NO: 765155 - RNA, 19 nt, Artificial Sequence
  Description of Artificial Sequence: Synthetic oligonucleotide
uucacacgagcccgcacaa

SEQ ID NO: 765156 - RNA, 19 nt, Artificial Sequence
  Description of Artificial Sequence: Synthetic oligonucleotide
ugaggccguauuccacugc

SEQ ID NO: 765157 - RNA, 19 nt, Artificial Sequence
  Description of Artificial Sequence: Synthetic oligonucleotide
aaaggucaucuccggguua

SEQ ID NO: 765158 - RNA, 19 nt, Artificial Sequence
  Description of Artificial Sequence: Synthetic oligonucleotide
cuucuucacacgagcccgc

SEQ ID NO: 765159 - RNA, 19 nt, Artificial Sequence
  Description of Artificial Sequence: Synthetic oligonucleotide
aggaagacccuggagagua

SEQ ID NO: 765160 - RNA, 19 nt, Artificial Sequence
  Description of Artificial Sequence: Synthetic oligonucleotide
gccaguuugagaguagagc

SEQ ID NO: 765161 - RNA, 19 nt, Artificial Sequence
  Description of Artificial Sequence: Synthetic oligonucleotide
gcuugguuuguccuuagga

SEQ ID NO: 765162 - RNA, 19 nt, Artificial Sequence
  Description of Artificial Sequence: Synthetic oligonucleotide
uagaggugaugguaaguuu

SEQ ID NO: 765163 - RNA, 19 nt, Artificial Sequence
  Description of Artificial Sequence: Synthetic oligonucleotide
uggcggaugcaugagcugu

SEQ ID NO: 765164 - RNA, 19 nt, Artificial Sequence
  Description of Artificial Sequence: Synthetic oligonucleotide
agguaagccaagccuucca

SEQ ID NO: 765165 - RNA, 19 nt, Artificial Sequence
  Description of Artificial Sequence: Synthetic oligonucleotide
cacucaugcggcuguuggc

SEQ ID NO: 765166 - RNA, 19 nt, Artificial Sequence
  Description of Artificial Sequence: Synthetic oligonucleotide
gcuuacagagucccacuag

SEQ ID NO: 765167 - RNA, 19 nt, Artificial Sequence
  Description of Artificial Sequence: Synthetic oligonucleotide
uucaaccggucguugcccu

SEQ ID NO: 765168 - RNA, 19 nt, Artificial Sequence
  Description of Artificial Sequence: Synthetic oligonucleotide
gucugcccaacaucagugc

SEQ ID NO: 765169 - RNA, 19 nt, Artificial Sequence
  Description of Artificial Sequence: Synthetic oligonucleotide
ugcucauggccaaguuaca

SEQ ID NO: 765170 - RNA, 19 nt, Artificial Sequence
  Description of Artificial Sequence: Synthetic oligonucleotide
ucccugggcaaccacggua

SEQ ID NO: 765171 - RNA, 19 nt, Artificial Sequence
  Description of Artificial Sequence: Synthetic oligonucleotide
cacucagcuccaaggcccg

SEQ ID NO: 765172 - RNA, 19 nt, Artificial Sequence
  Description of Artificial Sequence: Synthetic oligonucleotide
cuuccacugcccagcgccg

SEQ ID NO: 765173 - RNA, 19 nt, Artificial Sequence
  Description of Artificial Sequence: Synthetic oligonucleotide
ugaacgaggcccgcuuggc

SEQ ID NO: 765174 - RNA, 19 nt, Artificial Sequence
  Description of Artificial Sequence: Synthetic oligonucleotide
cugcuucaugcuaaaguca

SEQ ID NO: 765175 - RNA, 19 nt, Artificial Sequence
  Description of Artificial Sequence: Synthetic oligonucleotide
uccuuaggaugcugcucag

SEQ ID NO: 765176 - RNA, 19 nt, Artificial Sequence
  Description of Artificial Sequence: Synthetic oligonucleotide
aaccggucguugcccuggg

SEQ ID NO: 765177 - RNA, 19 nt, Artificial Sequence
  Description of Artificial Sequence: Synthetic oligonucleotide
guauagcaccagcagcuuc

SEQ ID NO: 765178 - RNA, 19 nt, Artificial Sequence
  Description of Artificial Sequence: Synthetic oligonucleotide
aggcacacagagcgaucac

SEQ ID NO: 765179 - RNA, 19 nt, Artificial Sequence
  Description of Artificial Sequence: Synthetic oligonucleotide
caccccugcugucaguagc

SEQ ID NO: 765180 - RNA, 19 nt, Artificial Sequence
  Description of Artificial Sequence: Synthetic oligonucleotide
cuucaaccggucguugccc

SEQ ID NO: 765181 - RNA, 19 nt, Artificial Sequence
  Description of Artificial Sequence: Synthetic oligonucleotide
ucguuagggccaugagagc

SEQ ID NO: 765182 - RNA, 19 nt, Artificial Sequence
  Description of Artificial Sequence: Synthetic oligonucleotide
ucuucacacgagcccgcac

SEQ ID NO: 765183 - RNA, 19 nt, Artificial Sequence
  Description of Artificial Sequence: Synthetic oligonucleotide
ccacacgauuuauuggagg

SEQ ID NO: 765184 - RNA, 19 nt, Artificial Sequence
  Description of Artificial Sequence: Synthetic oligonucleotide
gcgagcucuaccaucuugg

SEQ ID NO: 765185 - RNA, 19 nt, Artificial Sequence
  Description of Artificial Sequence: Synthetic oligonucleotide
caucagugccuuccagggc

SEQ ID NO: 765186 - RNA, 19 nt, Artificial Sequence
  Description of Artificial Sequence: Synthetic oligonucleotide
cauguucaacaccaccaca

SEQ ID NO: 765187 - RNA, 19 nt, Artificial Sequence
  Description of Artificial Sequence: Synthetic oligonucleotide
ucaugcggcuguuggcugu

SEQ ID NO: 765188 - RNA, 19 nt, Artificial Sequence
  Description of Artificial Sequence: Synthetic oligonucleotide
gcccgcuuggcuuugccgg

SEQ ID NO: 765189 - RNA, 19 nt, Artificial Sequence
  Description of Artificial Sequence: Synthetic oligonucleotide
ugccuuugucugcccaaca

SEQ ID NO: 765190 - RNA, 19 nt, Artificial Sequence
  Description of Artificial Sequence: Synthetic oligonucleotide
acacgauuuauuggaggga

SEQ ID NO: 765191 - RNA, 19 nt, Artificial Sequence
  Description of Artificial Sequence: Synthetic oligonucleotide
caccaaagccaggaagacc

SEQ ID NO: 765192 - RNA, 19 nt, Artificial Sequence
  Description of Artificial Sequence: Synthetic oligonucleotide
cuucguagauccgcucacc

SEQ ID NO: 765193 - RNA, 19 nt, Artificial Sequence
  Description of Artificial Sequence: Synthetic oligonucleotide
ucagcacgggacucucugu

SEQ ID NO: 765194 - RNA, 19 nt, Artificial Sequence
  Description of Artificial Sequence: Synthetic oligonucleotide
ucguccucuccacuguaua

SEQ ID NO: 765195 - RNA, 19 nt, Artificial Sequence
  Description of Artificial Sequence: Synthetic oligonucleotide
cagagcgaucacacucucc

SEQ ID NO: 765196 - RNA, 19 nt, Artificial Sequence
  Description of Artificial Sequence: Synthetic oligonucleotide
gcuucaaccggucguugcc

SEQ ID NO: 765197 - RNA, 19 nt, Artificial Sequence
  Description of Artificial Sequence: Synthetic oligonucleotide
guaguccugagcaguugag

SEQ ID NO: 765198 - RNA, 19 nt, Artificial Sequence
  Description of Artificial Sequence: Synthetic oligonucleotide
cacuucguagauccgcuca

SEQ ID NO: 765199 - RNA, 19 nt, Artificial Sequence
  Description of Artificial Sequence: Synthetic oligonucleotide
ucccugccagguucguuag

SEQ ID NO: 765200 - RNA, 19 nt, Artificial Sequence
  Description of Artificial Sequence: Synthetic oligonucleotide
gcugauccaagcuuacaga

SEQ ID NO: 765201 - RNA, 19 nt, Artificial Sequence
  Description of Artificial Sequence: Synthetic oligonucleotide
cauacuuggcgagcucuac

SEQ ID NO: 765202 - RNA, 19 nt, Artificial Sequence
  Description of Artificial Sequence: Synthetic oligonucleotide
cuucggaccugcugagcug

SEQ ID NO: 765203 - RNA, 19 nt, Artificial Sequence
  Description of Artificial Sequence: Synthetic oligonucleotide
guaaguuuggcaagagccu

SEQ ID NO: 765204 - RNA, 19 nt, Artificial Sequence
  Description of Artificial Sequence: Synthetic oligonucleotide
gacaccaccccugcuguca

SEQ ID NO: 765205 - RNA, 19 nt, Artificial Sequence
  Description of Artificial Sequence: Synthetic oligonucleotide
ggaaaggucaucuccgggu

SEQ ID NO: 765206 - RNA, 19 nt, Artificial Sequence
  Description of Artificial Sequence: Synthetic oligonucleotide
uccuuuacgucugcaucaa

SEQ ID NO: 765207 - RNA, 19 nt, Artificial Sequence
  Description of Artificial Sequence: Synthetic oligonucleotide
ugcauggaucagcgccucc

SEQ ID NO: 765208 - RNA, 19 nt, Artificial Sequence
  Description of Artificial Sequence: Synthetic oligonucleotide
gguucguuagggccaugag

SEQ ID NO: 765209 - RNA, 19 nt, Artificial Sequence
  Description of Artificial Sequence: Synthetic oligonucleotide
caaccggucguugcccugg

SEQ ID NO: 765210 - RNA, 19 nt, Artificial Sequence
  Description of Artificial Sequence: Synthetic oligonucleotide
ucaaccggucguugcccug

SEQ ID NO: 765211 - RNA, 19 nt, Artificial Sequence
  Description of Artificial Sequence: Synthetic oligonucleotide
uuggagggaugaaccugcu

SEQ ID NO: 765212 - RNA, 19 nt, Artificial Sequence
  Description of Artificial Sequence: Synthetic oligonucleotide
ccuacaggaguuugucagc

SEQ ID NO: 765213 - RNA, 19 nt, Artificial Sequence
  Description of Artificial Sequence: Synthetic oligonucleotide
cacuuucggcacugcuugg

SEQ ID NO: 765214 - RNA, 19 nt, Artificial Sequence
  Description of Artificial Sequence: Synthetic oligonucleotide
cugccagguucguuagggc

SEQ ID NO: 765215 - RNA, 19 nt, Artificial Sequence
  Description of Artificial Sequence: Synthetic oligonucleotide
cugcgaagagcacugaccu

SEQ ID NO: 765216 - RNA, 19 nt, Artificial Sequence
  Description of Artificial Sequence: Synthetic oligonucleotide
uccgcucaccaggaaaggu

SEQ ID NO: 765217 - RNA, 19 nt, Artificial Sequence
  Description of Artificial Sequence: Synthetic oligonucleotide
ugggaugcggcugcagagu

SEQ ID NO: 765218 - RNA, 19 nt, Artificial Sequence
  Description of Artificial Sequence: Synthetic oligonucleotide
uguauagcaccagcagcuu

SEQ ID NO: 765219 - RNA, 19 nt, Artificial Sequence
  Description of Artificial Sequence: Synthetic oligonucleotide
accacgguaccucgauccu

SEQ ID NO: 765220 - RNA, 19 nt, Artificial Sequence
  Description of Artificial Sequence: Synthetic oligonucleotide
ucccucucggcaucacacu

SEQ ID NO: 765221 - RNA, 19 nt, Artificial Sequence
  Description of Artificial Sequence: Synthetic oligonucleotide
agcccuccgcaguagcuca

SEQ ID NO: 765222 - RNA, 19 nt, Artificial Sequence
  Description of Artificial Sequence: Synthetic oligonucleotide
cucaugcggcuguuggcug

SEQ ID NO: 765223 - RNA, 19 nt, Artificial Sequence
  Description of Artificial Sequence: Synthetic oligonucleotide
gaaaggucaucuccggguu

SEQ ID NO: 765224 - RNA, 19 nt, Artificial Sequence
  Description of Artificial Sequence: Synthetic oligonucleotide
gcgaucacacucuccauga

SEQ ID NO: 765225 - RNA, 19 nt, Artificial Sequence
  Description of Artificial Sequence: Synthetic oligonucleotide
ugcgaagagcacugaccuc

SEQ ID NO: 765226 - RNA, 19 nt, Artificial Sequence
  Description of Artificial Sequence: Synthetic oligonucleotide
agacaaggggccggaccac

SEQ ID NO: 765227 - RNA, 19 nt, Artificial Sequence
  Description of Artificial Sequence: Synthetic oligonucleotide
cacuagcgcucugaugcgg

SEQ ID NO: 765228 - RNA, 19 nt, Artificial Sequence
  Description of Artificial Sequence: Synthetic oligonucleotide
ccggcggaucauuucaugc

SEQ ID NO: 765229 - RNA, 19 nt, Artificial Sequence
  Description of Artificial Sequence: Synthetic oligonucleotide
ggcggaucauuucaugcuc

SEQ ID NO: 765230 - RNA, 19 nt, Artificial Sequence
  Description of Artificial Sequence: Synthetic oligonucleotide
ugccgaggcuacugcgaag

SEQ ID NO: 765231 - RNA, 19 nt, Artificial Sequence
  Description of Artificial Sequence: Synthetic oligonucleotide
cuccucgaacauguagccc

SEQ ID NO: 765232 - RNA, 19 nt, Artificial Sequence
  Description of Artificial Sequence: Synthetic oligonucleotide
ugcuggcaaucuccuuuga

SEQ ID NO: 765233 - RNA, 19 nt, Artificial Sequence
  Description of Artificial Sequence: Synthetic oligonucleotide
agucccacuagcgcucuga

SEQ ID NO: 765234 - RNA, 19 nt, Artificial Sequence
  Description of Artificial Sequence: Synthetic oligonucleotide
uaguucucacagagccggu

SEQ ID NO: 765235 - RNA, 19 nt, Artificial Sequence
  Description of Artificial Sequence: Synthetic oligonucleotide
cacugaccucucuucggac

SEQ ID NO: 765236 - RNA, 19 nt, Artificial Sequence
  Description of Artificial Sequence: Synthetic oligonucleotide
ggcagugaugaacgaggcc

SEQ ID NO: 765237 - RNA, 19 nt, Artificial Sequence
  Description of Artificial Sequence: Synthetic oligonucleotide
uggugacugggcucucuuc

SEQ ID NO: 765238 - RNA, 19 nt, Artificial Sequence
  Description of Artificial Sequence: Synthetic oligonucleotide
agugccgaggcuacugcga

SEQ ID NO: 765239 - RNA, 19 nt, Artificial Sequence
  Description of Artificial Sequence: Synthetic oligonucleotide
caccauacacgucauggcu

SEQ ID NO: 765240 - RNA, 19 nt, Artificial Sequence
  Description of Artificial Sequence: Synthetic oligonucleotide
aggcccgguugccugcauc

SEQ ID NO: 765241 - RNA, 19 nt, Artificial Sequence
  Description of Artificial Sequence: Synthetic oligonucleotide
gaccucucuucggaccugc

SEQ ID NO: 765242 - RNA, 19 nt, Artificial Sequence
  Description of Artificial Sequence: Synthetic oligonucleotide
ggaguuugucagcacggga

SEQ ID NO: 765243 - RNA, 19 nt, Artificial Sequence
  Description of Artificial Sequence: Synthetic oligonucleotide
agggaugaaccugcuggca

SEQ ID NO: 765244 - RNA, 19 nt, Artificial Sequence
  Description of Artificial Sequence: Synthetic oligonucleotide
ggcgagcucuaccaucuug

SEQ ID NO: 765245 - RNA, 19 nt, Artificial Sequence
  Description of Artificial Sequence: Synthetic oligonucleotide
ggucaucuccggguuagag

SEQ ID NO: 765246 - RNA, 19 nt, Artificial Sequence
  Description of Artificial Sequence: Synthetic oligonucleotide
uagcgcucugaugcggaug

SEQ ID NO: 765247 - RNA, 19 nt, Artificial Sequence
  Description of Artificial Sequence: Synthetic oligonucleotide
cacagagcgaucacacucu

SEQ ID NO: 765248 - RNA, 19 nt, Artificial Sequence
  Description of Artificial Sequence: Synthetic oligonucleotide
ggaacaugcugcuuggcau

SEQ ID NO: 765249 - RNA, 19 nt, Artificial Sequence
  Description of Artificial Sequence: Synthetic oligonucleotide
agcucccuacaggaguuug

SEQ ID NO: 765250 - RNA, 19 nt, Artificial Sequence
  Description of Artificial Sequence: Synthetic oligonucleotide
uaggggcccuccugagugc

SEQ ID NO: 765251 - RNA, 19 nt, Artificial Sequence
  Description of Artificial Sequence: Synthetic oligonucleotide
acagagccgguggaaauuu

SEQ ID NO: 765252 - RNA, 19 nt, Artificial Sequence
  Description of Artificial Sequence: Synthetic oligonucleotide
acuagcgcucugaugcgga

SEQ ID NO: 765253 - RNA, 19 nt, Artificial Sequence
  Description of Artificial Sequence: Synthetic oligonucleotide
guggcugcccggcggauca

SEQ ID NO: 765254 - RNA, 19 nt, Artificial Sequence
  Description of Artificial Sequence: Synthetic oligonucleotide
caguuugagaguagagccu

SEQ ID NO: 765255 - RNA, 19 nt, Artificial Sequence
  Description of Artificial Sequence: Synthetic oligonucleotide
cacuugugggaugcggcug

SEQ ID NO: 765256 - RNA, 19 nt, Artificial Sequence
  Description of Artificial Sequence: Synthetic oligonucleotide
gucguagcuguuggugcag

SEQ ID NO: 765257 - RNA, 19 nt, Artificial Sequence
  Description of Artificial Sequence: Synthetic oligonucleotide
guuugucagcacgggacuc

SEQ ID NO: 765258 - RNA, 19 nt, Artificial Sequence
  Description of Artificial Sequence: Synthetic oligonucleotide
ggccggaccacuucguaga

SEQ ID NO: 765259 - RNA, 19 nt, Artificial Sequence
  Description of Artificial Sequence: Synthetic oligonucleotide
gggccggaccacuucguag

SEQ ID NO: 765260 - RNA, 19 nt, Artificial Sequence
  Description of Artificial Sequence: Synthetic oligonucleotide
agcacgggacucucuguuu

SEQ ID NO: 765261 - RNA, 19 nt, Artificial Sequence
  Description of Artificial Sequence: Synthetic oligonucleotide
ccgcacaaagcuugguuug

SEQ ID NO: 765262 - RNA, 19 nt, Artificial Sequence
  Description of Artificial Sequence: Synthetic oligonucleotide
cucgguguuggagcucuug

SEQ ID NO: 765263 - RNA, 19 nt, Artificial Sequence
  Description of Artificial Sequence: Synthetic oligonucleotide
uugucagcacgggacucuc

SEQ ID NO: 765264 - RNA, 19 nt, Artificial Sequence
  Description of Artificial Sequence: Synthetic oligonucleotide
uugugggaugcggcugcag

SEQ ID NO: 765265 - RNA, 19 nt, Artificial Sequence
  Description of Artificial Sequence: Synthetic oligonucleotide
caucuccggguuagaggug

SEQ ID NO: 765266 - RNA, 19 nt, Artificial Sequence
  Description of Artificial Sequence: Synthetic oligonucleotide
cccugggcaaccacgguac

SEQ ID NO: 765267 - RNA, 19 nt, Artificial Sequence
  Description of Artificial Sequence: Synthetic oligonucleotide
gggcaaccacgguaccucg

SEQ ID NO: 765268 - RNA, 19 nt, Artificial Sequence
  Description of Artificial Sequence: Synthetic oligonucleotide
cauuggcagugaugaacga

SEQ ID NO: 765269 - RNA, 19 nt, Artificial Sequence
  Description of Artificial Sequence: Synthetic oligonucleotide
caaccacgguaccucgauc

SEQ ID NO: 765270 - RNA, 19 nt, Artificial Sequence
  Description of Artificial Sequence: Synthetic oligonucleotide
cacgauuuauuggagggau

SEQ ID NO: 765271 - RNA, 19 nt, Artificial Sequence
  Description of Artificial Sequence: Synthetic oligonucleotide
caaguuacacaugcacucu

SEQ ID NO: 765272 - RNA, 19 nt, Artificial Sequence
  Description of Artificial Sequence: Synthetic oligonucleotide
uaccucgauccuccaccuc

SEQ ID NO: 765273 - RNA, 19 nt, Artificial Sequence
  Description of Artificial Sequence: Synthetic oligonucleotide
agcggcccuggugacuggg

SEQ ID NO: 765274 - RNA, 19 nt, Artificial Sequence
  Description of Artificial Sequence: Synthetic oligonucleotide
ccgcucaccaggaaagguc

SEQ ID NO: 765275 - RNA, 19 nt, Artificial Sequence
  Description of Artificial Sequence: Synthetic oligonucleotide
gugagguaagccaagccuu

SEQ ID NO: 765276 - RNA, 19 nt, Artificial Sequence
  Description of Artificial Sequence: Synthetic oligonucleotide
ccuccgcaguagcucaucg

SEQ ID NO: 765277 - RNA, 19 nt, Artificial Sequence
  Description of Artificial Sequence: Synthetic oligonucleotide
ggguuagaggugaugguaa

SEQ ID NO: 765278 - RNA, 19 nt, Artificial Sequence
  Description of Artificial Sequence: Synthetic oligonucleotide
ccuuggcccucaaaccagc

SEQ ID NO: 765279 - RNA, 19 nt, Artificial Sequence
  Description of Artificial Sequence: Synthetic oligonucleotide
cuaccaucuuggggucagg

SEQ ID NO: 765280 - RNA, 19 nt, Artificial Sequence
  Description of Artificial Sequence: Synthetic oligonucleotide
gaacgaggcccgcuuggcu

SEQ ID NO: 765281 - RNA, 19 nt, Artificial Sequence
  Description of Artificial Sequence: Synthetic oligonucleotide
ugacaccaccccugcuguc

SEQ ID NO: 765282 - RNA, 19 nt, Artificial Sequence
  Description of Artificial Sequence: Synthetic oligonucleotide
ccacuagcgcucugaugcg

SEQ ID NO: 765283 - RNA, 19 nt, Artificial Sequence
  Description of Artificial Sequence: Synthetic oligonucleotide
gaaccugcuggcaggcucu

SEQ ID NO: 765284 - RNA, 19 nt, Artificial Sequence
  Description of Artificial Sequence: Synthetic oligonucleotide
ucuccggguuagaggugau

SEQ ID NO: 765285 - RNA, 19 nt, Artificial Sequence
  Description of Artificial Sequence: Synthetic oligonucleotide
acgaggcccgcuuggcuuu

SEQ ID NO: 765286 - RNA, 19 nt, Artificial Sequence
  Description of Artificial Sequence: Synthetic oligonucleotide
cgggagcagagccuuaccc

SEQ ID NO: 765287 - RNA, 19 nt, Artificial Sequence
  Description of Artificial Sequence: Synthetic oligonucleotide
gugccgaggcuacugcgaa

SEQ ID NO: 765288 - RNA, 19 nt, Artificial Sequence
  Description of Artificial Sequence: Synthetic oligonucleotide
ucggaccugcugagcugga

SEQ ID NO: 765289 - RNA, 19 nt, Artificial Sequence
  Description of Artificial Sequence: Synthetic oligonucleotide
gccguauuccacugccuuc

SEQ ID NO: 765290 - RNA, 19 nt, Artificial Sequence
  Description of Artificial Sequence: Synthetic oligonucleotide
ccuuaggaugcugcucagg

SEQ ID NO: 765291 - RNA, 19 nt, Artificial Sequence
  Description of Artificial Sequence: Synthetic oligonucleotide
ggcccgguugccugcauca

SEQ ID NO: 765292 - RNA, 19 nt, Artificial Sequence
  Description of Artificial Sequence: Synthetic oligonucleotide
gcggaugcaugagcugugg

SEQ ID NO: 765293 - RNA, 19 nt, Artificial Sequence
  Description of Artificial Sequence: Synthetic oligonucleotide
gccgguggaaauuuucccu

SEQ ID NO: 765294 - RNA, 19 nt, Artificial Sequence
  Description of Artificial Sequence: Synthetic oligonucleotide
cagcccuccgcaguagcuc

SEQ ID NO: 765295 - RNA, 19 nt, Artificial Sequence
  Description of Artificial Sequence: Synthetic oligonucleotide
ggcuuagaagcagggccug

SEQ ID NO: 765296 - RNA, 19 nt, Artificial Sequence
  Description of Artificial Sequence: Synthetic oligonucleotide
gccaaguuacacaugcacu

SEQ ID NO: 765297 - RNA, 19 nt, Artificial Sequence
  Description of Artificial Sequence: Synthetic oligonucleotide
gccgaggcuacugcgaaga

SEQ ID NO: 765298 - RNA, 19 nt, Artificial Sequence
  Description of Artificial Sequence: Synthetic oligonucleotide
ggccaaugcucacucccca

SEQ ID NO: 765299 - RNA, 19 nt, Artificial Sequence
  Description of Artificial Sequence: Synthetic oligonucleotide
cuuggccaacacugacaga

SEQ ID NO: 765300 - RNA, 19 nt, Artificial Sequence
  Description of Artificial Sequence: Synthetic oligonucleotide
cuccggguuagaggugaug

SEQ ID NO: 765301 - RNA, 19 nt, Artificial Sequence
  Description of Artificial Sequence: Synthetic oligonucleotide
aucguccucuccacuguau

SEQ ID NO: 765302 - RNA, 19 nt, Artificial Sequence
  Description of Artificial Sequence: Synthetic oligonucleotide
cacugugagcuccccagcu

SEQ ID NO: 765303 - RNA, 19 nt, Artificial Sequence
  Description of Artificial Sequence: Synthetic oligonucleotide
gcgccgagugcuugcauca

SEQ ID NO: 765304 - RNA, 19 nt, Artificial Sequence
  Description of Artificial Sequence: Synthetic oligonucleotide
cacacagagcgaucacacu

SEQ ID NO: 765305 - RNA, 19 nt, Artificial Sequence
  Description of Artificial Sequence: Synthetic oligonucleotide
uugaggccuccaccauguu

SEQ ID NO: 765306 - RNA, 19 nt, Artificial Sequence
  Description of Artificial Sequence: Synthetic oligonucleotide
aaggcccgguugccugcau

SEQ ID NO: 765307 - RNA, 19 nt, Artificial Sequence
  Description of Artificial Sequence: Synthetic oligonucleotide
ggcauacuuggcgagcucu

SEQ ID NO: 765308 - RNA, 19 nt, Artificial Sequence
  Description of Artificial Sequence: Synthetic oligonucleotide
ggaccacuucguagauccg

SEQ ID NO: 765309 - RNA, 19 nt, Artificial Sequence
  Description of Artificial Sequence: Synthetic oligonucleotide
cgaggcuacugcgaagagc

SEQ ID NO: 765310 - RNA, 19 nt, Artificial Sequence
  Description of Artificial Sequence: Synthetic oligonucleotide
cauaggggcccuccugagu

SEQ ID NO: 765311 - RNA, 19 nt, Artificial Sequence
  Description of Artificial Sequence: Synthetic oligonucleotide
guagcucccuacaggaguu

SEQ ID NO: 765312 - RNA, 19 nt, Artificial Sequence
  Description of Artificial Sequence: Synthetic oligonucleotide
cuuggcccucaaaccagcu

SEQ ID NO: 765313 - RNA, 19 nt, Artificial Sequence
  Description of Artificial Sequence: Synthetic oligonucleotide
gucauugcauagccacuuu

SEQ ID NO: 765314 - RNA, 19 nt, Artificial Sequence
  Description of Artificial Sequence: Synthetic oligonucleotide
cugcaucacaugggcccug

SEQ ID NO: 765315 - RNA, 19 nt, Artificial Sequence
  Description of Artificial Sequence: Synthetic oligonucleotide
ggucauugcauagccacuu

SEQ ID NO: 765316 - RNA, 19 nt, Artificial Sequence
  Description of Artificial Sequence: Synthetic oligonucleotide
caucguccucuccacugua

SEQ ID NO: 765317 - RNA, 19 nt, Artificial Sequence
  Description of Artificial Sequence: Synthetic oligonucleotide
uggcgagcucuaccaucuu

SEQ ID NO: 765318 - RNA, 19 nt, Artificial Sequence
  Description of Artificial Sequence: Synthetic oligonucleotide
cucgaacauguagcccuca

SEQ ID NO: 765319 - RNA, 19 nt, Artificial Sequence
  Description of Artificial Sequence: Synthetic oligonucleotide
cggaugcaugagcuguggg

SEQ ID NO: 765320 - RNA, 19 nt, Artificial Sequence
  Description of Artificial Sequence: Synthetic oligonucleotide
gcgggagcagagccuuacc

SEQ ID NO: 765321 - RNA, 19 nt, Artificial Sequence
  Description of Artificial Sequence: Synthetic oligonucleotide
guguggucacuugugggau

SEQ ID NO: 765322 - RNA, 19 nt, Artificial Sequence
  Description of Artificial Sequence: Synthetic oligonucleotide
gugaugaacgaggcccgcu

SEQ ID NO: 765323 - RNA, 19 nt, Artificial Sequence
  Description of Artificial Sequence: Synthetic oligonucleotide
cccagcgccgagugcuugc

SEQ ID NO: 765324 - RNA, 19 nt, Artificial Sequence
  Description of Artificial Sequence: Synthetic oligonucleotide
cccggcggaucauuucaug

SEQ ID NO: 765325 - RNA, 19 nt, Artificial Sequence
  Description of Artificial Sequence: Synthetic oligonucleotide
cuuugcucauggccaaguu

SEQ ID NO: 765326 - RNA, 19 nt, Artificial Sequence
  Description of Artificial Sequence: Synthetic oligonucleotide
gggcuuagaagcagggccu

SEQ ID NO: 765327 - RNA, 19 nt, Artificial Sequence
  Description of Artificial Sequence: Synthetic oligonucleotide
ccaugacaccacucagcuc

SEQ ID NO: 765328 - RNA, 19 nt, Artificial Sequence
  Description of Artificial Sequence: Synthetic oligonucleotide
cuccgcaguagcucaucgu

SEQ ID NO: 765329 - RNA, 19 nt, Artificial Sequence
  Description of Artificial Sequence: Synthetic oligonucleotide
agcccgcacaaagcuuggu

SEQ ID NO: 765330 - RNA, 19 nt, Artificial Sequence
  Description of Artificial Sequence: Synthetic oligonucleotide
ggucguugcccugggcuuc

SEQ ID NO: 765331 - RNA, 19 nt, Artificial Sequence
  Description of Artificial Sequence: Synthetic oligonucleotide
cuacugcgaagagcacuga

SEQ ID NO: 765332 - RNA, 19 nt, Artificial Sequence
  Description of Artificial Sequence: Synthetic oligonucleotide
gaggugcaacagagagaca

SEQ ID NO: 765333 - RNA, 19 nt, Artificial Sequence
  Description of Artificial Sequence: Synthetic oligonucleotide
acgagcccgcacaaagcuu

SEQ ID NO: 765334 - RNA, 19 nt, Artificial Sequence
  Description of Artificial Sequence: Synthetic oligonucleotide
gucguugcccugggcuuca

SEQ ID NO: 765335 - RNA, 19 nt, Artificial Sequence
  Description of Artificial Sequence: Synthetic oligonucleotide
ccugggcaaccacgguacc

SEQ ID NO: 765336 - RNA, 19 nt, Artificial Sequence
  Description of Artificial Sequence: Synthetic oligonucleotide
cagcggcccuggugacugg

SEQ ID NO: 765337 - RNA, 19 nt, Artificial Sequence
  Description of Artificial Sequence: Synthetic oligonucleotide
cucuugguuggggcuuaga

SEQ ID NO: 765338 - RNA, 19 nt, Artificial Sequence
  Description of Artificial Sequence: Synthetic oligonucleotide
ggccguauuccacugccuu

SEQ ID NO: 765339 - RNA, 19 nt, Artificial Sequence
  Description of Artificial Sequence: Synthetic oligonucleotide
ccucaaucaugggcacagc

SEQ ID NO: 765340 - RNA, 19 nt, Artificial Sequence
  Description of Artificial Sequence: Synthetic oligonucleotide
ccaccccugcugucaguag

SEQ ID NO: 765341 - RNA, 19 nt, Artificial Sequence
  Description of Artificial Sequence: Synthetic oligonucleotide
ccgaggcuacugcgaagag

SEQ ID NO: 765342 - RNA, 19 nt, Artificial Sequence
  Description of Artificial Sequence: Synthetic oligonucleotide
cagcacgggacucucuguu

SEQ ID NO: 765343 - RNA, 19 nt, Artificial Sequence
  Description of Artificial Sequence: Synthetic oligonucleotide
cuagcgcucugaugcggau

SEQ ID NO: 765344 - RNA, 19 nt, Artificial Sequence
  Description of Artificial Sequence: Synthetic oligonucleotide
ggaugcggcugcagaguga

SEQ ID NO: 765345 - RNA, 19 nt, Artificial Sequence
  Description of Artificial Sequence: Synthetic oligonucleotide
ggcaaccacgguaccucga

SEQ ID NO: 765346 - RNA, 19 nt, Artificial Sequence
  Description of Artificial Sequence: Synthetic oligonucleotide
ggaugcugucccucucgcu

SEQ ID NO: 765347 - RNA, 19 nt, Artificial Sequence
  Description of Artificial Sequence: Synthetic oligonucleotide
caaggcccgguugccugca

SEQ ID NO: 765348 - RNA, 19 nt, Artificial Sequence
  Description of Artificial Sequence: Synthetic oligonucleotide
cccgcacaaagcuugguuu

SEQ ID NO: 765349 - RNA, 19 nt, Artificial Sequence
  Description of Artificial Sequence: Synthetic oligonucleotide
cacagagccgguggaaauu

SEQ ID NO: 765350 - RNA, 19 nt, Artificial Sequence
  Description of Artificial Sequence: Synthetic oligonucleotide
ccacgguaccucgauccuc

SEQ ID NO: 765351 - RNA, 19 nt, Artificial Sequence
  Description of Artificial Sequence: Synthetic oligonucleotide
cccgguugccugcaucaca

SEQ ID NO: 765352 - RNA, 19 nt, Artificial Sequence
  Description of Artificial Sequence: Synthetic oligonucleotide
ccgguugccugcaucacau

SEQ ID NO: 765353 - RNA, 19 nt, Artificial Sequence
  Description of Artificial Sequence: Synthetic oligonucleotide
gcacgggacucucuguuuu

SEQ ID NO: 765354 - RNA, 19 nt, Artificial Sequence
  Description of Artificial Sequence: Synthetic oligonucleotide
ggucaucgaacagcuugcu

SEQ ID NO: 765355 - RNA, 19 nt, Artificial Sequence
  Description of Artificial Sequence: Synthetic oligonucleotide
gcccucaaaccagcuccug

SEQ ID NO: 765356 - RNA, 19 nt, Artificial Sequence
  Description of Artificial Sequence: Synthetic oligonucleotide
gcggcuguuggcugucacu

SEQ ID NO: 765357 - RNA, 19 nt, Artificial Sequence
  Description of Artificial Sequence: Synthetic oligonucleotide
cgagugcuugcaucaaucu

SEQ ID NO: 765358 - RNA, 19 nt, Artificial Sequence
  Description of Artificial Sequence: Synthetic oligonucleotide
gccacuuucggcacugcuu

SEQ ID NO: 765359 - RNA, 19 nt, Artificial Sequence
  Description of Artificial Sequence: Synthetic oligonucleotide
gcuucaugcuaaagucagu

SEQ ID NO: 765360 - RNA, 19 nt, Artificial Sequence
  Description of Artificial Sequence: Synthetic oligonucleotide
ccugagcaguugaggugca

SEQ ID NO: 765361 - RNA, 19 nt, Artificial Sequence
  Description of Artificial Sequence: Synthetic oligonucleotide
cggguuagaggugauggua

SEQ ID NO: 765362 - RNA, 19 nt, Artificial Sequence
  Description of Artificial Sequence: Synthetic oligonucleotide
gcccgcacaaagcuugguu

SEQ ID NO: 765363 - RNA, 19 nt, Artificial Sequence
  Description of Artificial Sequence: Synthetic oligonucleotide
cagguucguuagggccaug

SEQ ID NO: 765364 - RNA, 19 nt, Artificial Sequence
  Description of Artificial Sequence: Synthetic oligonucleotide
cggcggaucauuucaugcu

SEQ ID NO: 765365 - RNA, 19 nt, Artificial Sequence
  Description of Artificial Sequence: Synthetic oligonucleotide
gcggcccuggugacugggc

SEQ ID NO: 765366 - RNA, 19 nt, Artificial Sequence
  Description of Artificial Sequence: Synthetic oligonucleotide
cucccugggcaaccacggu

SEQ ID NO: 765367 - RNA, 19 nt, Artificial Sequence
  Description of Artificial Sequence: Synthetic oligonucleotide
cagagccgguggaaauuuu

SEQ ID NO: 765368 - RNA, 19 nt, Artificial Sequence
  Description of Artificial Sequence: Synthetic oligonucleotide
gaccagugccgaggcuacu

SEQ ID NO: 765369 - RNA, 19 nt, Artificial Sequence
  Description of Artificial Sequence: Synthetic oligonucleotide
ccaaugcucacuccccauu

SEQ ID NO: 765370 - RNA, 19 nt, Artificial Sequence
  Description of Artificial Sequence: Synthetic oligonucleotide
ccucucgcugcacuuguau

SEQ ID NO: 765371 - RNA, 19 nt, Artificial Sequence
  Description of Artificial Sequence: Synthetic oligonucleotide
ccggguuagaggugauggu

SEQ ID NO: 765372 - RNA, 19 nt, Artificial Sequence
  Description of Artificial Sequence: Synthetic oligonucleotide
ccgcauggaggugagcaua

SEQ ID NO: 765373 - RNA, 19 nt, Artificial Sequence
  Description of Artificial Sequence: Synthetic oligonucleotide
uggcugcccggcggaucau

SEQ ID NO: 765374 - RNA, 19 nt, Artificial Sequence
  Description of Artificial Sequence: Synthetic oligonucleotide
cgguugccugcaucacaug

SEQ ID NO: 765375 - RNA, 19 nt, Artificial Sequence
  Description of Artificial Sequence: Synthetic oligonucleotide
gcagcccuccgcaguagcu

SEQ ID NO: 765376 - RNA, 19 nt, Artificial Sequence
  Description of Artificial Sequence: Synthetic oligonucleotide
cgguguuggagcucuuggu

SEQ ID NO: 765377 - RNA, 19 nt, Artificial Sequence
  Description of Artificial Sequence: Synthetic oligonucleotide
ccagcgccgagugcuugca

SEQ ID NO: 765378 - RNA, 19 nt, Artificial Sequence
  Description of Artificial Sequence: Synthetic oligonucleotide
gccggaccacuucguagau

SEQ ID NO: 765379 - RNA, 19 nt, Artificial Sequence
  Description of Artificial Sequence: Synthetic oligonucleotide
cccucucggcaucacacuu

SEQ ID NO: 765380 - RNA, 19 nt, Artificial Sequence
  Description of Artificial Sequence: Synthetic oligonucleotide
ggguuggaugaggccguau

SEQ ID NO: 765381 - RNA, 19 nt, Artificial Sequence
  Description of Artificial Sequence: Synthetic oligonucleotide
cagcgccgagugcuugcau

SEQ ID NO: 765382 - RNA, 19 nt, Artificial Sequence
  Description of Artificial Sequence: Synthetic oligonucleotide
ccagguucguuagggccau

SEQ ID NO: 765383 - RNA, 19 nt, Artificial Sequence
  Description of Artificial Sequence: Synthetic oligonucleotide
cgaggcccgcuuggcuuug

SEQ ID NO: 765384 - RNA, 19 nt, Artificial Sequence
  Description of Artificial Sequence: Synthetic oligonucleotide
cggucguugcccugggcuu

SEQ ID NO: 765385 - RNA, 19 nt, Artificial Sequence
  Description of Artificial Sequence: Synthetic oligonucleotide
gcccggcggaucauuucau

SEQ ID NO: 765386 - RNA, 19 nt, Artificial Sequence
  Description of Artificial Sequence: Synthetic oligonucleotide
cccuggugacugggcucuc

SEQ ID NO: 765387 - RNA, 19 nt, Artificial Sequence
  Description of Artificial Sequence: Synthetic oligonucleotide
ggcugcccggcggaucauu

SEQ ID NO: 765388 - RNA, 19 nt, Artificial Sequence
  Description of Artificial Sequence: Synthetic oligonucleotide
ccgcuuggcuuugccggcu

SEQ ID NO: 765389 - RNA, 19 nt, Artificial Sequence
  Description of Artificial Sequence: Synthetic oligonucleotide
gcgcucugaugcggaugcu

SEQ ID NO: 765390 - RNA, 19 nt, Artificial Sequence
  Description of Artificial Sequence: Synthetic oligonucleotide
gcccuccgcaguagcucau

SEQ ID NO: 765391 - RNA, 19 nt, Artificial Sequence
  Description of Artificial Sequence: Synthetic oligonucleotide
ccccugcugucaguagcuu

SEQ ID NO: 765392 - RNA, 19 nt, Artificial Sequence
  Description of Artificial Sequence: Synthetic oligonucleotide
aaaacuaagacgcaggaug

SEQ ID NO: 765393 - RNA, 19 nt, Artificial Sequence
  Description of Artificial Sequence: Synthetic oligonucleotide
aagacgauaucauugacgu

SEQ ID NO: 765394 - RNA, 19 nt, Artificial Sequence
  Description of Artificial Sequence: Synthetic oligonucleotide
aauucuugcgaccaccuuc

SEQ ID NO: 765395 - RNA, 19 nt, Artificial Sequence
  Description of Artificial Sequence: Synthetic oligonucleotide
auugaagcaaccuaaccgg

SEQ ID NO: 765396 - RNA, 19 nt, Artificial Sequence
  Description of Artificial Sequence: Synthetic oligonucleotide
caaauugugagucaugcgg

SEQ ID NO: 765397 - RNA, 19 nt, Artificial Sequence
  Description of Artificial Sequence: Synthetic oligonucleotide
uguacgguagcucauuagg

SEQ ID NO: 765398 - RNA, 19 nt, Artificial Sequence
  Description of Artificial Sequence: Synthetic oligonucleotide
auugacguaacagaaaccg

SEQ ID NO: 765399 - RNA, 19 nt, Artificial Sequence
  Description of Artificial Sequence: Synthetic oligonucleotide
aaauaagggguccaagaag

SEQ ID NO: 765400 - RNA, 19 nt, Artificial Sequence
  Description of Artificial Sequence: Synthetic oligonucleotide
cuagaaagcuuaauaaggg

SEQ ID NO: 765401 - RNA, 19 nt, Artificial Sequence
  Description of Artificial Sequence: Synthetic oligonucleotide
uccaagaagacccaguuac

SEQ ID NO: 765402 - RNA, 19 nt, Artificial Sequence
  Description of Artificial Sequence: Synthetic oligonucleotide
aauaagggcaucguaacag

SEQ ID NO: 765403 - RNA, 19 nt, Artificial Sequence
  Description of Artificial Sequence: Synthetic oligonucleotide
uugauauuaccuaagccug

SEQ ID NO: 765404 - RNA, 19 nt, Artificial Sequence
  Description of Artificial Sequence: Synthetic oligonucleotide
guaguuuccaacaucaccg

SEQ ID NO: 765405 - RNA, 19 nt, Artificial Sequence
  Description of Artificial Sequence: Synthetic oligonucleotide
aagaacuuaauguagucau

SEQ ID NO: 765406 - RNA, 19 nt, Artificial Sequence
  Description of Artificial Sequence: Synthetic oligonucleotide
cuaagccugaaaauaaggg

SEQ ID NO: 765407 - RNA, 19 nt, Artificial Sequence
  Description of Artificial Sequence: Synthetic oligonucleotide
ucauugacguaacagaaac

SEQ ID NO: 765408 - RNA, 19 nt, Artificial Sequence
  Description of Artificial Sequence: Synthetic oligonucleotide
auaauaguaguuuccaaca

SEQ ID NO: 765409 - RNA, 19 nt, Artificial Sequence
  Description of Artificial Sequence: Synthetic oligonucleotide
uauuuaugaaaggacacag

SEQ ID NO: 765410 - RNA, 19 nt, Artificial Sequence
  Description of Artificial Sequence: Synthetic oligonucleotide
ucuggugauacuuuagcag

SEQ ID NO: 765411 - RNA, 19 nt, Artificial Sequence
  Description of Artificial Sequence: Synthetic oligonucleotide
uauuaccuaagccugaaaa

SEQ ID NO: 765412 - RNA, 19 nt, Artificial Sequence
  Description of Artificial Sequence: Synthetic oligonucleotide
aaaauaagggguccaagaa

SEQ ID NO: 765413 - RNA, 19 nt, Artificial Sequence
  Description of Artificial Sequence: Synthetic oligonucleotide
uauuaaguuucacagcacu

SEQ ID NO: 765414 - RNA, 19 nt, Artificial Sequence
  Description of Artificial Sequence: Synthetic oligonucleotide
uuucguaaguccagcaccg

SEQ ID NO: 765415 - RNA, 19 nt, Artificial Sequence
  Description of Artificial Sequence: Synthetic oligonucleotide
uucguuaguguucugguug

SEQ ID NO: 765416 - RNA, 19 nt, Artificial Sequence
  Description of Artificial Sequence: Synthetic oligonucleotide
auaucauugacguaacaga

SEQ ID NO: 765417 - RNA, 19 nt, Artificial Sequence
  Description of Artificial Sequence: Synthetic oligonucleotide
aagacuacugcacuaggcu

SEQ ID NO: 765418 - RNA, 19 nt, Artificial Sequence
  Description of Artificial Sequence: Synthetic oligonucleotide
gaugcuucagacuucuuug

SEQ ID NO: 765419 - RNA, 19 nt, Artificial Sequence
  Description of Artificial Sequence: Synthetic oligonucleotide
aaguugaaacucuugacaa

SEQ ID NO: 765420 - RNA, 19 nt, Artificial Sequence
  Description of Artificial Sequence: Synthetic oligonucleotide
aauaagggguccaagaaga

SEQ ID NO: 765421 - RNA, 19 nt, Artificial Sequence
  Description of Artificial Sequence: Synthetic oligonucleotide
ucagauugaagcaaccuaa

SEQ ID NO: 765422 - RNA, 19 nt, Artificial Sequence
  Description of Artificial Sequence: Synthetic oligonucleotide
aacgcaagaacuuaaugua

SEQ ID NO: 765423 - RNA, 19 nt, Artificial Sequence
  Description of Artificial Sequence: Synthetic oligonucleotide
acuacacugagcucuaguc

SEQ ID NO: 765424 - RNA, 19 nt, Artificial Sequence
  Description of Artificial Sequence: Synthetic oligonucleotide
gauacuuuagcaguuccag

SEQ ID NO: 765425 - RNA, 19 nt, Artificial Sequence
  Description of Artificial Sequence: Synthetic oligonucleotide
ugacguaacagaaaccgga

SEQ ID NO: 765426 - RNA, 19 nt, Artificial Sequence
  Description of Artificial Sequence: Synthetic oligonucleotide
caagacgauaucauugacg

SEQ ID NO: 765427 - RNA, 19 nt, Artificial Sequence
  Description of Artificial Sequence: Synthetic oligonucleotide
ugaugaauaucaaugucaa

SEQ ID NO: 765428 - RNA, 19 nt, Artificial Sequence
  Description of Artificial Sequence: Synthetic oligonucleotide
ucguuugucagaagaacag

SEQ ID NO: 765429 - RNA, 19 nt, Artificial Sequence
  Description of Artificial Sequence: Synthetic oligonucleotide
aguuaccccuucuagaaag

SEQ ID NO: 765430 - RNA, 19 nt, Artificial Sequence
  Description of Artificial Sequence: Synthetic oligonucleotide
uaucauugacguaacagaa

SEQ ID NO: 765431 - RNA, 19 nt, Artificial Sequence
  Description of Artificial Sequence: Synthetic oligonucleotide
uauugccugcauuuggacg

SEQ ID NO: 765432 - RNA, 19 nt, Artificial Sequence
  Description of Artificial Sequence: Synthetic oligonucleotide
aaaugguugauauuaccua

SEQ ID NO: 765433 - RNA, 19 nt, Artificial Sequence
  Description of Artificial Sequence: Synthetic oligonucleotide
aaacuaagacgcaggaugg

SEQ ID NO: 765434 - RNA, 19 nt, Artificial Sequence
  Description of Artificial Sequence: Synthetic oligonucleotide
uuaaguuucacagcacuug

SEQ ID NO: 765435 - RNA, 19 nt, Artificial Sequence
  Description of Artificial Sequence: Synthetic oligonucleotide
guaguuaacagcauaguac

SEQ ID NO: 765436 - RNA, 19 nt, Artificial Sequence
  Description of Artificial Sequence: Synthetic oligonucleotide
uguuuugacucuuuuggcu

SEQ ID NO: 765437 - RNA, 19 nt, Artificial Sequence
  Description of Artificial Sequence: Synthetic oligonucleotide
ucgguagagaccauaguug

SEQ ID NO: 765438 - RNA, 19 nt, Artificial Sequence
  Description of Artificial Sequence: Synthetic oligonucleotide
uucguuugucagaagaaca

SEQ ID NO: 765439 - RNA, 19 nt, Artificial Sequence
  Description of Artificial Sequence: Synthetic oligonucleotide
auuagcauaggcaaguuga

SEQ ID NO: 765440 - RNA, 19 nt, Artificial Sequence
  Description of Artificial Sequence: Synthetic oligonucleotide
agaaguggggaacuugggg

SEQ ID NO: 765441 - RNA, 19 nt, Artificial Sequence
  Description of Artificial Sequence: Synthetic oligonucleotide
uaguugagcagcaaauugu

SEQ ID NO: 765442 - RNA, 19 nt, Artificial Sequence
  Description of Artificial Sequence: Synthetic oligonucleotide
uaagacuacugcacuaggc

SEQ ID NO: 765443 - RNA, 19 nt, Artificial Sequence
  Description of Artificial Sequence: Synthetic oligonucleotide
cauuacggaugguauaucc

SEQ ID NO: 765444 - RNA, 19 nt, Artificial Sequence
  Description of Artificial Sequence: Synthetic oligonucleotide
ugauaugaagcuugaaguc

SEQ ID NO: 765445 - RNA, 19 nt, Artificial Sequence
  Description of Artificial Sequence: Synthetic oligonucleotide
uugacguaacagaaaccgg

SEQ ID NO: 765446 - RNA, 19 nt, Artificial Sequence
  Description of Artificial Sequence: Synthetic oligonucleotide
accaguagacagcugacag

SEQ ID NO: 765447 - RNA, 19 nt, Artificial Sequence
  Description of Artificial Sequence: Synthetic oligonucleotide
auaaacagaaccaaucuaa

SEQ ID NO: 765448 - RNA, 19 nt, Artificial Sequence
  Description of Artificial Sequence: Synthetic oligonucleotide
caagccaucaaauacugga

SEQ ID NO: 765449 - RNA, 19 nt, Artificial Sequence
  Description of Artificial Sequence: Synthetic oligonucleotide
uuacggaugguauauccac

SEQ ID NO: 765450 - RNA, 19 nt, Artificial Sequence
  Description of Artificial Sequence: Synthetic oligonucleotide
ugguugauauuaccuaagc

SEQ ID NO: 765451 - RNA, 19 nt, Artificial Sequence
  Description of Artificial Sequence: Synthetic oligonucleotide
auaguaguuuccaacauca

SEQ ID NO: 765452 - RNA, 19 nt, Artificial Sequence
  Description of Artificial Sequence: Synthetic oligonucleotide
acucaggcuagcuugaccu

SEQ ID NO: 765453 - RNA, 19 nt, Artificial Sequence
  Description of Artificial Sequence: Synthetic oligonucleotide
uucggugaggcuucauugg

SEQ ID NO: 765454 - RNA, 19 nt, Artificial Sequence
  Description of Artificial Sequence: Synthetic oligonucleotide
cagacauauugucugggcg

SEQ ID NO: 765455 - RNA, 19 nt, Artificial Sequence
  Description of Artificial Sequence: Synthetic oligonucleotide
aagccaucaaauacuggac

SEQ ID NO: 765456 - RNA, 19 nt, Artificial Sequence
  Description of Artificial Sequence: Synthetic oligonucleotide
augcuucagacuucuuugc

SEQ ID NO: 765457 - RNA, 19 nt, Artificial Sequence
  Description of Artificial Sequence: Synthetic oligonucleotide
uauucguuaguguucuggu

SEQ ID NO: 765458 - RNA, 19 nt, Artificial Sequence
  Description of Artificial Sequence: Synthetic oligonucleotide
uccauaauaguaguuucca

SEQ ID NO: 765459 - RNA, 19 nt, Artificial Sequence
  Description of Artificial Sequence: Synthetic oligonucleotide
auucggugaggcuucauug

SEQ ID NO: 765460 - RNA, 19 nt, Artificial Sequence
  Description of Artificial Sequence: Synthetic oligonucleotide
ucguuaguguucugguugg

SEQ ID NO: 765461 - RNA, 19 nt, Artificial Sequence
  Description of Artificial Sequence: Synthetic oligonucleotide
agggcaucguaacagagcu

SEQ ID NO: 765462 - RNA, 19 nt, Artificial Sequence
  Description of Artificial Sequence: Synthetic oligonucleotide
uaauaagggcaucguaaca

SEQ ID NO: 765463 - RNA, 19 nt, Artificial Sequence
  Description of Artificial Sequence: Synthetic oligonucleotide
uauacagcacccucuggug

SEQ ID NO: 765464 - RNA, 19 nt, Artificial Sequence
  Description of Artificial Sequence: Synthetic oligonucleotide
cuugaagucugguccaaag

SEQ ID NO: 765465 - RNA, 19 nt, Artificial Sequence
  Description of Artificial Sequence: Synthetic oligonucleotide
agacauauugucugggcga

SEQ ID NO: 765466 - RNA, 19 nt, Artificial Sequence
  Description of Artificial Sequence: Synthetic oligonucleotide
uuugugaggacgauagauu

SEQ ID NO: 765467 - RNA, 19 nt, Artificial Sequence
  Description of Artificial Sequence: Synthetic oligonucleotide
gauaaggaaucugagccac

SEQ ID NO: 765468 - RNA, 19 nt, Artificial Sequence
  Description of Artificial Sequence: Synthetic oligonucleotide
ucggugaggcuucauuggg

SEQ ID NO: 765469 - RNA, 19 nt, Artificial Sequence
  Description of Artificial Sequence: Synthetic oligonucleotide
aaccuaaccggucuccaga

SEQ ID NO: 765470 - RNA, 19 nt, Artificial Sequence
  Description of Artificial Sequence: Synthetic oligonucleotide
aauaacagacuuuccucuu

SEQ ID NO: 765471 - RNA, 19 nt, Artificial Sequence
  Description of Artificial Sequence: Synthetic oligonucleotide
cacuguaagacuacugcac

SEQ ID NO: 765472 - RNA, 19 nt, Artificial Sequence
  Description of Artificial Sequence: Synthetic oligonucleotide
cuacacugagcucuagucc

SEQ ID NO: 765473 - RNA, 19 nt, Artificial Sequence
  Description of Artificial Sequence: Synthetic oligonucleotide
aagguauaaacagaaccaa

SEQ ID NO: 765474 - RNA, 19 nt, Artificial Sequence
  Description of Artificial Sequence: Synthetic oligonucleotide
uguguuguuuuauuauaaa

SEQ ID NO: 765475 - RNA, 19 nt, Artificial Sequence
  Description of Artificial Sequence: Synthetic oligonucleotide
ugauauuaccuaagccuga

SEQ ID NO: 765476 - RNA, 19 nt, Artificial Sequence
  Description of Artificial Sequence: Synthetic oligonucleotide
uaccuaagccugaaaauaa

SEQ ID NO: 765477 - RNA, 19 nt, Artificial Sequence
  Description of Artificial Sequence: Synthetic oligonucleotide
aucaaucccaucucggaga

SEQ ID NO: 765478 - RNA, 19 nt, Artificial Sequence
  Description of Artificial Sequence: Synthetic oligonucleotide
uacgguagcucauuaggga

SEQ ID NO: 765479 - RNA, 19 nt, Artificial Sequence
  Description of Artificial Sequence: Synthetic oligonucleotide
gagaggguaguuaacagca

SEQ ID NO: 765480 - RNA, 19 nt, Artificial Sequence
  Description of Artificial Sequence: Synthetic oligonucleotide
uuuccacccuacauguuug

SEQ ID NO: 765481 - RNA, 19 nt, Artificial Sequence
  Description of Artificial Sequence: Synthetic oligonucleotide
uugaagucugguccaaagu

SEQ ID NO: 765482 - RNA, 19 nt, Artificial Sequence
  Description of Artificial Sequence: Synthetic oligonucleotide
agucaugcggauucgguga

SEQ ID NO: 765483 - RNA, 19 nt, Artificial Sequence
  Description of Artificial Sequence: Synthetic oligonucleotide
aacaucaccgucguaguaa

SEQ ID NO: 765484 - RNA, 19 nt, Artificial Sequence
  Description of Artificial Sequence: Synthetic oligonucleotide
cugauaugaagcuugaagu

SEQ ID NO: 765485 - RNA, 19 nt, Artificial Sequence
  Description of Artificial Sequence: Synthetic oligonucleotide
caagaagacccaguuaccc

SEQ ID NO: 765486 - RNA, 19 nt, Artificial Sequence
  Description of Artificial Sequence: Synthetic oligonucleotide
ugagccacacuguaagacu

SEQ ID NO: 765487 - RNA, 19 nt, Artificial Sequence
  Description of Artificial Sequence: Synthetic oligonucleotide
ucguaaguccagcaccgag

SEQ ID NO: 765488 - RNA, 19 nt, Artificial Sequence
  Description of Artificial Sequence: Synthetic oligonucleotide
ucuugcgaccaccuucucc

SEQ ID NO: 765489 - RNA, 19 nt, Artificial Sequence
  Description of Artificial Sequence: Synthetic oligonucleotide
gauggagaugcguuuguca

SEQ ID NO: 765490 - RNA, 19 nt, Artificial Sequence
  Description of Artificial Sequence: Synthetic oligonucleotide
uccucaccaacguugaauc

SEQ ID NO: 765491 - RNA, 19 nt, Artificial Sequence
  Description of Artificial Sequence: Synthetic oligonucleotide
uaagacgcaggauggacaa

SEQ ID NO: 765492 - RNA, 19 nt, Artificial Sequence
  Description of Artificial Sequence: Synthetic oligonucleotide
gguugauauuaccuaagcc

SEQ ID NO: 765493 - RNA, 19 nt, Artificial Sequence
  Description of Artificial Sequence: Synthetic oligonucleotide
gucauuguacgguagcuca

SEQ ID NO: 765494 - RNA, 19 nt, Artificial Sequence
  Description of Artificial Sequence: Synthetic oligonucleotide
guaagacuacugcacuagg

SEQ ID NO: 765495 - RNA, 19 nt, Artificial Sequence
  Description of Artificial Sequence: Synthetic oligonucleotide
acacuguaagacuacugca

SEQ ID NO: 765496 - RNA, 19 nt, Artificial Sequence
  Description of Artificial Sequence: Synthetic oligonucleotide
gugaggacgauagauuucc

SEQ ID NO: 765497 - RNA, 19 nt, Artificial Sequence
  Description of Artificial Sequence: Synthetic oligonucleotide
agacuacugcacuaggcug

SEQ ID NO: 765498 - RNA, 19 nt, Artificial Sequence
  Description of Artificial Sequence: Synthetic oligonucleotide
uacggaugguauauccacc

SEQ ID NO: 765499 - RNA, 19 nt, Artificial Sequence
  Description of Artificial Sequence: Synthetic oligonucleotide
agccguagaucuuacucag

SEQ ID NO: 765500 - RNA, 19 nt, Artificial Sequence
  Description of Artificial Sequence: Synthetic oligonucleotide
gagucaugcggauucggug

SEQ ID NO: 765501 - RNA, 19 nt, Artificial Sequence
  Description of Artificial Sequence: Synthetic oligonucleotide
guagucauuguacgguagc

SEQ ID NO: 765502 - RNA, 19 nt, Artificial Sequence
  Description of Artificial Sequence: Synthetic oligonucleotide
gucaauauacagcacccuc

SEQ ID NO: 765503 - RNA, 19 nt, Artificial Sequence
  Description of Artificial Sequence: Synthetic oligonucleotide
uugugaggacgauagauuu

SEQ ID NO: 765504 - RNA, 19 nt, Artificial Sequence
  Description of Artificial Sequence: Synthetic oligonucleotide
uuagcauaggcaaguugaa

SEQ ID NO: 765505 - RNA, 19 nt, Artificial Sequence
  Description of Artificial Sequence: Synthetic oligonucleotide
cauugacguaacagaaacc

SEQ ID NO: 765506 - RNA, 19 nt, Artificial Sequence
  Description of Artificial Sequence: Synthetic oligonucleotide
ugagucaugcggauucggu

SEQ ID NO: 765507 - RNA, 19 nt, Artificial Sequence
  Description of Artificial Sequence: Synthetic oligonucleotide
uaaggaaucugagccacac

SEQ ID NO: 765508 - RNA, 19 nt, Artificial Sequence
  Description of Artificial Sequence: Synthetic oligonucleotide
uuguacgguagcucauuag

SEQ ID NO: 765509 - RNA, 19 nt, Artificial Sequence
  Description of Artificial Sequence: Synthetic oligonucleotide
aauggaacgcaagaacuua

SEQ ID NO: 765510 - RNA, 19 nt, Artificial Sequence
  Description of Artificial Sequence: Synthetic oligonucleotide
ugaggcuucauuggguggc

SEQ ID NO: 765511 - RNA, 19 nt, Artificial Sequence
  Description of Artificial Sequence: Synthetic oligonucleotide
aggacgauagauuuccauu

SEQ ID NO: 765512 - RNA, 19 nt, Artificial Sequence
  Description of Artificial Sequence: Synthetic oligonucleotide
aggguaguuaacagcauag

SEQ ID NO: 765513 - RNA, 19 nt, Artificial Sequence
  Description of Artificial Sequence: Synthetic oligonucleotide
guacgguagcucauuaggg

SEQ ID NO: 765514 - RNA, 19 nt, Artificial Sequence
  Description of Artificial Sequence: Synthetic oligonucleotide
agucauuguacgguagcuc

SEQ ID NO: 765515 - RNA, 19 nt, Artificial Sequence
  Description of Artificial Sequence: Synthetic oligonucleotide
cauauugucugggcgaaug

SEQ ID NO: 765516 - RNA, 19 nt, Artificial Sequence
  Description of Artificial Sequence: Synthetic oligonucleotide
uugaagcaaccuaaccggu

SEQ ID NO: 765517 - RNA, 19 nt, Artificial Sequence
  Description of Artificial Sequence: Synthetic oligonucleotide
ggcaucguaacagagcucc

SEQ ID NO: 765518 - RNA, 19 nt, Artificial Sequence
  Description of Artificial Sequence: Synthetic oligonucleotide
ugaagcaaccuaaccgguc

SEQ ID NO: 765519 - RNA, 19 nt, Artificial Sequence
  Description of Artificial Sequence: Synthetic oligonucleotide
uagacagcugacagaacuc

SEQ ID NO: 765520 - RNA, 19 nt, Artificial Sequence
  Description of Artificial Sequence: Synthetic oligonucleotide
accgucguaguaauaacag

SEQ ID NO: 765521 - RNA, 19 nt, Artificial Sequence
  Description of Artificial Sequence: Synthetic oligonucleotide
ugugaggacgauagauuuc

SEQ ID NO: 765522 - RNA, 19 nt, Artificial Sequence
  Description of Artificial Sequence: Synthetic oligonucleotide
ugggcgaauggaacgcaag

SEQ ID NO: 765523 - RNA, 19 nt, Artificial Sequence
  Description of Artificial Sequence: Synthetic oligonucleotide
gcuuauuaaguuucacagc

SEQ ID NO: 765524 - RNA, 19 nt, Artificial Sequence
  Description of Artificial Sequence: Synthetic oligonucleotide
accauaguugagcagcaaa

SEQ ID NO: 765525 - RNA, 19 nt, Artificial Sequence
  Description of Artificial Sequence: Synthetic oligonucleotide
ugguauagaaggccucuuc

SEQ ID NO: 765526 - RNA, 19 nt, Artificial Sequence
  Description of Artificial Sequence: Synthetic oligonucleotide
ucggagaggguaguuaaca

SEQ ID NO: 765527 - RNA, 19 nt, Artificial Sequence
  Description of Artificial Sequence: Synthetic oligonucleotide
agcaaccuaaccggucucc

SEQ ID NO: 765528 - RNA, 19 nt, Artificial Sequence
  Description of Artificial Sequence: Synthetic oligonucleotide
uacucaggcuagcuugacc

SEQ ID NO: 765529 - RNA, 19 nt, Artificial Sequence
  Description of Artificial Sequence: Synthetic oligonucleotide
auggucagauugaagcaac

SEQ ID NO: 765530 - RNA, 19 nt, Artificial Sequence
  Description of Artificial Sequence: Synthetic oligonucleotide
uauugucugggcgaaugga

SEQ ID NO: 765531 - RNA, 19 nt, Artificial Sequence
  Description of Artificial Sequence: Synthetic oligonucleotide
cuaggcuaacaccuccacc

SEQ ID NO: 765532 - RNA, 19 nt, Artificial Sequence
  Description of Artificial Sequence: Synthetic oligonucleotide
cagauugaagcaaccuaac

SEQ ID NO: 765533 - RNA, 19 nt, Artificial Sequence
  Description of Artificial Sequence: Synthetic oligonucleotide
uaaccggucuccagauaag

SEQ ID NO: 765534 - RNA, 19 nt, Artificial Sequence
  Description of Artificial Sequence: Synthetic oligonucleotide
aucguaacagagcuccuaa

SEQ ID NO: 765535 - RNA, 19 nt, Artificial Sequence
  Description of Artificial Sequence: Synthetic oligonucleotide
cagguauucguuaguguuc

SEQ ID NO: 765536 - RNA, 19 nt, Artificial Sequence
  Description of Artificial Sequence: Synthetic oligonucleotide
acccaguuaccccuucuag

SEQ ID NO: 765537 - RNA, 19 nt, Artificial Sequence
  Description of Artificial Sequence: Synthetic oligonucleotide
aucaccgucguaguaauaa

SEQ ID NO: 765538 - RNA, 19 nt, Artificial Sequence
  Description of Artificial Sequence: Synthetic oligonucleotide
aauaucccgaaggucccca

SEQ ID NO: 765539 - RNA, 19 nt, Artificial Sequence
  Description of Artificial Sequence: Synthetic oligonucleotide
gucugcgccaucuugcuca

SEQ ID NO: 765540 - RNA, 19 nt, Artificial Sequence
  Description of Artificial Sequence: Synthetic oligonucleotide
ccagauaaggaaucugagc

SEQ ID NO: 765541 - RNA, 19 nt, Artificial Sequence
  Description of Artificial Sequence: Synthetic oligonucleotide
gauggccaagacgauauca

SEQ ID NO: 765542 - RNA, 19 nt, Artificial Sequence
  Description of Artificial Sequence: Synthetic oligonucleotide
agggcugauaugaagcuug

SEQ ID NO: 765543 - RNA, 19 nt, Artificial Sequence
  Description of Artificial Sequence: Synthetic oligonucleotide
gaagcaaccuaaccggucu

SEQ ID NO: 765544 - RNA, 19 nt, Artificial Sequence
  Description of Artificial Sequence: Synthetic oligonucleotide
acguaacagaaaccggaug

SEQ ID NO: 765545 - RNA, 19 nt, Artificial Sequence
  Description of Artificial Sequence: Synthetic oligonucleotide
ugugagucaugcggauucg

SEQ ID NO: 765546 - RNA, 19 nt, Artificial Sequence
  Description of Artificial Sequence: Synthetic oligonucleotide
cuaaccggucuccagauaa

SEQ ID NO: 765547 - RNA, 19 nt, Artificial Sequence
  Description of Artificial Sequence: Synthetic oligonucleotide
cgucguaguaauaacagac

SEQ ID NO: 765548 - RNA, 19 nt, Artificial Sequence
  Description of Artificial Sequence: Synthetic oligonucleotide
gcaaauugugagucaugcg

SEQ ID NO: 765549 - RNA, 19 nt, Artificial Sequence
  Description of Artificial Sequence: Synthetic oligonucleotide
ugcccuuugauggucagau

SEQ ID NO: 765550 - RNA, 19 nt, Artificial Sequence
  Description of Artificial Sequence: Synthetic oligonucleotide
ggaacgcaagaacuuaaug

SEQ ID NO: 765551 - RNA, 19 nt, Artificial Sequence
  Description of Artificial Sequence: Synthetic oligonucleotide
agccugaaaauaagggguc

SEQ ID NO: 765552 - RNA, 19 nt, Artificial Sequence
  Description of Artificial Sequence: Synthetic oligonucleotide
cuaagacgcaggauggaca

SEQ ID NO: 765553 - RNA, 19 nt, Artificial Sequence
  Description of Artificial Sequence: Synthetic oligonucleotide
cauaggcaaguugaaacuc

SEQ ID NO: 765554 - RNA, 19 nt, Artificial Sequence
  Description of Artificial Sequence: Synthetic oligonucleotide
agcaacauuacggauggua

SEQ ID NO: 765555 - RNA, 19 nt, Artificial Sequence
  Description of Artificial Sequence: Synthetic oligonucleotide
acgguagcucauuagggau

SEQ ID NO: 765556 - RNA, 19 nt, Artificial Sequence
  Description of Artificial Sequence: Synthetic oligonucleotide
agguauucguuaguguucu

SEQ ID NO: 765557 - RNA, 19 nt, Artificial Sequence
  Description of Artificial Sequence: Synthetic oligonucleotide
cccuuugauggucagauug

SEQ ID NO: 765558 - RNA, 19 nt, Artificial Sequence
  Description of Artificial Sequence: Synthetic oligonucleotide
uggaacgcaagaacuuaau

SEQ ID NO: 765559 - RNA, 19 nt, Artificial Sequence
  Description of Artificial Sequence: Synthetic oligonucleotide
auuacggaugguauaucca

SEQ ID NO: 765560 - RNA, 19 nt, Artificial Sequence
  Description of Artificial Sequence: Synthetic oligonucleotide
augguugauauuaccuaag

SEQ ID NO: 765561 - RNA, 19 nt, Artificial Sequence
  Description of Artificial Sequence: Synthetic oligonucleotide
gucagauugaagcaaccua

SEQ ID NO: 765562 - RNA, 19 nt, Artificial Sequence
  Description of Artificial Sequence: Synthetic oligonucleotide
caagaacuuaauguaguca

SEQ ID NO: 765563 - RNA, 19 nt, Artificial Sequence
  Description of Artificial Sequence: Synthetic oligonucleotide
gauggucagauugaagcaa

SEQ ID NO: 765564 - RNA, 19 nt, Artificial Sequence
  Description of Artificial Sequence: Synthetic oligonucleotide
augguauauccaccuccuc

SEQ ID NO: 765565 - RNA, 19 nt, Artificial Sequence
  Description of Artificial Sequence: Synthetic oligonucleotide
cugagccacacuguaagac

SEQ ID NO: 765566 - RNA, 19 nt, Artificial Sequence
  Description of Artificial Sequence: Synthetic oligonucleotide
caugcggauucggugaggc

SEQ ID NO: 765567 - RNA, 19 nt, Artificial Sequence
  Description of Artificial Sequence: Synthetic oligonucleotide
auaagggguccaagaagac

SEQ ID NO: 765568 - RNA, 19 nt, Artificial Sequence
  Description of Artificial Sequence: Synthetic oligonucleotide
acgcaagaacuuaauguag

SEQ ID NO: 765569 - RNA, 19 nt, Artificial Sequence
  Description of Artificial Sequence: Synthetic oligonucleotide
ucaccgucguaguaauaac

SEQ ID NO: 765570 - RNA, 19 nt, Artificial Sequence
  Description of Artificial Sequence: Synthetic oligonucleotide
agaaaccggaugcuucaga

SEQ ID NO: 765571 - RNA, 19 nt, Artificial Sequence
  Description of Artificial Sequence: Synthetic oligonucleotide
acgauaucauugacguaac

SEQ ID NO: 765572 - RNA, 19 nt, Artificial Sequence
  Description of Artificial Sequence: Synthetic oligonucleotide
uugcuguacucagacauau

SEQ ID NO: 765573 - RNA, 19 nt, Artificial Sequence
  Description of Artificial Sequence: Synthetic oligonucleotide
ucauuguacgguagcucau

SEQ ID NO: 765574 - RNA, 19 nt, Artificial Sequence
  Description of Artificial Sequence: Synthetic oligonucleotide
aggcaauucguuugucaga

SEQ ID NO: 765575 - RNA, 19 nt, Artificial Sequence
  Description of Artificial Sequence: Synthetic oligonucleotide
ugcggauucggugaggcuu

SEQ ID NO: 765576 - RNA, 19 nt, Artificial Sequence
  Description of Artificial Sequence: Synthetic oligonucleotide
cuggugauacuuuagcagu

SEQ ID NO: 765577 - RNA, 19 nt, Artificial Sequence
  Description of Artificial Sequence: Synthetic oligonucleotide
gggacauuauauuuaauau

SEQ ID NO: 765578 - RNA, 19 nt, Artificial Sequence
  Description of Artificial Sequence: Synthetic oligonucleotide
uuaccccuucuagaaagcu

SEQ ID NO: 765579 - RNA, 19 nt, Artificial Sequence
  Description of Artificial Sequence: Synthetic oligonucleotide
gaggguaguuaacagcaua

SEQ ID NO: 765580 - RNA, 19 nt, Artificial Sequence
  Description of Artificial Sequence: Synthetic oligonucleotide
gcgaauggaacgcaagaac

SEQ ID NO: 765581 - RNA, 19 nt, Artificial Sequence
  Description of Artificial Sequence: Synthetic oligonucleotide
cgagcaacauuacggaugg

SEQ ID NO: 765582 - RNA, 19 nt, Artificial Sequence
  Description of Artificial Sequence: Synthetic oligonucleotide
auuguacgguagcucauua

SEQ ID NO: 765583 - RNA, 19 nt, Artificial Sequence
  Description of Artificial Sequence: Synthetic oligonucleotide
caaccuaaccggucuccag

SEQ ID NO: 765584 - RNA, 19 nt, Artificial Sequence
  Description of Artificial Sequence: Synthetic oligonucleotide
acauuacggaugguauauc

SEQ ID NO: 765585 - RNA, 19 nt, Artificial Sequence
  Description of Artificial Sequence: Synthetic oligonucleotide
cguaacagagcuccuaaag

SEQ ID NO: 765586 - RNA, 19 nt, Artificial Sequence
  Description of Artificial Sequence: Synthetic oligonucleotide
acaucaccgucguaguaau

SEQ ID NO: 765587 - RNA, 19 nt, Artificial Sequence
  Description of Artificial Sequence: Synthetic oligonucleotide
auucguuaguguucugguu

SEQ ID NO: 765588 - RNA, 19 nt, Artificial Sequence
  Description of Artificial Sequence: Synthetic oligonucleotide
gucaugcggauucggugag

SEQ ID NO: 765589 - RNA, 19 nt, Artificial Sequence
  Description of Artificial Sequence: Synthetic oligonucleotide
aagucugguccaaaguauu

SEQ ID NO: 765590 - RNA, 19 nt, Artificial Sequence
  Description of Artificial Sequence: Synthetic oligonucleotide
gaugguauauccaccuccu

SEQ ID NO: 765591 - RNA, 19 nt, Artificial Sequence
  Description of Artificial Sequence: Synthetic oligonucleotide
gcaagaacuuaauguaguc

SEQ ID NO: 765592 - RNA, 19 nt, Artificial Sequence
  Description of Artificial Sequence: Synthetic oligonucleotide
agcuuaauaagggcaucgu

SEQ ID NO: 765593 - RNA, 19 nt, Artificial Sequence
  Description of Artificial Sequence: Synthetic oligonucleotide
agucugcgccaucuugcuc

SEQ ID NO: 765594 - RNA, 19 nt, Artificial Sequence
  Description of Artificial Sequence: Synthetic oligonucleotide
caccgucguaguaauaaca

SEQ ID NO: 765595 - RNA, 19 nt, Artificial Sequence
  Description of Artificial Sequence: Synthetic oligonucleotide
auugucugggcgaauggaa

SEQ ID NO: 765596 - RNA, 19 nt, Artificial Sequence
  Description of Artificial Sequence: Synthetic oligonucleotide
ucguaacagagcuccuaaa

SEQ ID NO: 765597 - RNA, 19 nt, Artificial Sequence
  Description of Artificial Sequence: Synthetic oligonucleotide
agcuguuucguaaguccag

SEQ ID NO: 765598 - RNA, 19 nt, Artificial Sequence
  Description of Artificial Sequence: Synthetic oligonucleotide
uagcauaggcaaguugaaa

SEQ ID NO: 765599 - RNA, 19 nt, Artificial Sequence
  Description of Artificial Sequence: Synthetic oligonucleotide
gaagcuaggcuaacaccuc

SEQ ID NO: 765600 - RNA, 19 nt, Artificial Sequence
  Description of Artificial Sequence: Synthetic oligonucleotide
gacauauugucugggcgaa

SEQ ID NO: 765601 - RNA, 19 nt, Artificial Sequence
  Description of Artificial Sequence: Synthetic oligonucleotide
gaugcguuugucagggucu

SEQ ID NO: 765602 - RNA, 19 nt, Artificial Sequence
  Description of Artificial Sequence: Synthetic oligonucleotide
aucauugacguaacagaaa

SEQ ID NO: 765603 - RNA, 19 nt, Artificial Sequence
  Description of Artificial Sequence: Synthetic oligonucleotide
gccaagacgauaucauuga

SEQ ID NO: 765604 - RNA, 19 nt, Artificial Sequence
  Description of Artificial Sequence: Synthetic oligonucleotide
acuuuggacaugacuggcu

SEQ ID NO: 765605 - RNA, 19 nt, Artificial Sequence
  Description of Artificial Sequence: Synthetic oligonucleotide
cagggccacagcuguuucg

SEQ ID NO: 765606 - RNA, 19 nt, Artificial Sequence
  Description of Artificial Sequence: Synthetic oligonucleotide
guuugaaaacuaagacgca

SEQ ID NO: 765607 - RNA, 19 nt, Artificial Sequence
  Description of Artificial Sequence: Synthetic oligonucleotide
accuaaccggucuccagau

SEQ ID NO: 765608 - RNA, 19 nt, Artificial Sequence
  Description of Artificial Sequence: Synthetic oligonucleotide
ccaauaucccgaagguccc

SEQ ID NO: 765609 - RNA, 19 nt, Artificial Sequence
  Description of Artificial Sequence: Synthetic oligonucleotide
ucgccaugaugaauaucaa

SEQ ID NO: 765610 - RNA, 19 nt, Artificial Sequence
  Description of Artificial Sequence: Synthetic oligonucleotide
cagcuguuucguaagucca

SEQ ID NO: 765611 - RNA, 19 nt, Artificial Sequence
  Description of Artificial Sequence: Synthetic oligonucleotide
uuccacccuacauguuuga

SEQ ID NO: 765612 - RNA, 19 nt, Artificial Sequence
  Description of Artificial Sequence: Synthetic oligonucleotide
aagacgcaggauggacaag

SEQ ID NO: 765613 - RNA, 19 nt, Artificial Sequence
  Description of Artificial Sequence: Synthetic oligonucleotide
ucaugcggauucggugagg

SEQ ID NO: 765614 - RNA, 19 nt, Artificial Sequence
  Description of Artificial Sequence: Synthetic oligonucleotide
caugcccuuugauggucag

SEQ ID NO: 765615 - RNA, 19 nt, Artificial Sequence
  Description of Artificial Sequence: Synthetic oligonucleotide
uccucacaggcaauucguu

SEQ ID NO: 765616 - RNA, 19 nt, Artificial Sequence
  Description of Artificial Sequence: Synthetic oligonucleotide
gucugggcgaauggaacgc

SEQ ID NO: 765617 - RNA, 19 nt, Artificial Sequence
  Description of Artificial Sequence: Synthetic oligonucleotide
caacauuacggaugguaua

SEQ ID NO: 765618 - RNA, 19 nt, Artificial Sequence
  Description of Artificial Sequence: Synthetic oligonucleotide
ggguauagaaauguguugu

SEQ ID NO: 765619 - RNA, 19 nt, Artificial Sequence
  Description of Artificial Sequence: Synthetic oligonucleotide
agucccuggggacauuaua

SEQ ID NO: 765620 - RNA, 19 nt, Artificial Sequence
  Description of Artificial Sequence: Synthetic oligonucleotide
caucacuuuggacaugacu

SEQ ID NO: 765621 - RNA, 19 nt, Artificial Sequence
  Description of Artificial Sequence: Synthetic oligonucleotide
cacugugguacuuagucau

SEQ ID NO: 765622 - RNA, 19 nt, Artificial Sequence
  Description of Artificial Sequence: Synthetic oligonucleotide
ucugggcgaauggaacgca

SEQ ID NO: 765623 - RNA, 19 nt, Artificial Sequence
  Description of Artificial Sequence: Synthetic oligonucleotide
ggcaauucguuugucagaa

SEQ ID NO: 765624 - RNA, 19 nt, Artificial Sequence
  Description of Artificial Sequence: Synthetic oligonucleotide
gauucggugaggcuucauu

SEQ ID NO: 765625 - RNA, 19 nt, Artificial Sequence
  Description of Artificial Sequence: Synthetic oligonucleotide
uuggugcccugagucugcg

SEQ ID NO: 765626 - RNA, 19 nt, Artificial Sequence
  Description of Artificial Sequence: Synthetic oligonucleotide
gaaaacuaagacgcaggau

SEQ ID NO: 765627 - RNA, 19 nt, Artificial Sequence
  Description of Artificial Sequence: Synthetic oligonucleotide
caauaucccgaaggucccc

SEQ ID NO: 765628 - RNA, 19 nt, Artificial Sequence
  Description of Artificial Sequence: Synthetic oligonucleotide
auggaacgcaagaacuuaa

SEQ ID NO: 765629 - RNA, 19 nt, Artificial Sequence
  Description of Artificial Sequence: Synthetic oligonucleotide
aggcgcauggggcagcauu

SEQ ID NO: 765630 - RNA, 19 nt, Artificial Sequence
  Description of Artificial Sequence: Synthetic oligonucleotide
agaccauaguugagcagca

SEQ ID NO: 765631 - RNA, 19 nt, Artificial Sequence
  Description of Artificial Sequence: Synthetic oligonucleotide
gcuguuucguaaguccagc

SEQ ID NO: 765632 - RNA, 19 nt, Artificial Sequence
  Description of Artificial Sequence: Synthetic oligonucleotide
augaaaggacacagucaug

SEQ ID NO: 765633 - RNA, 19 nt, Artificial Sequence
  Description of Artificial Sequence: Synthetic oligonucleotide
cucaggcuagcuugaccuc

SEQ ID NO: 765634 - RNA, 19 nt, Artificial Sequence
  Description of Artificial Sequence: Synthetic oligonucleotide
ucugcgccaucuugcucac

SEQ ID NO: 765635 - RNA, 19 nt, Artificial Sequence
  Description of Artificial Sequence: Synthetic oligonucleotide
ugcuguacucagacauauu

SEQ ID NO: 765636 - RNA, 19 nt, Artificial Sequence
  Description of Artificial Sequence: Synthetic oligonucleotide
gacgauagauuuccauuuu

SEQ ID NO: 765637 - RNA, 19 nt, Artificial Sequence
  Description of Artificial Sequence: Synthetic oligonucleotide
gacccaguuaccccuucua

SEQ ID NO: 765638 - RNA, 19 nt, Artificial Sequence
  Description of Artificial Sequence: Synthetic oligonucleotide
gaucuuacucaggcuagcu

SEQ ID NO: 765639 - RNA, 19 nt, Artificial Sequence
  Description of Artificial Sequence: Synthetic oligonucleotide
uccacccuacauguuugaa

SEQ ID NO: 765640 - RNA, 19 nt, Artificial Sequence
  Description of Artificial Sequence: Synthetic oligonucleotide
gacguaacagaaaccggau

SEQ ID NO: 765641 - RNA, 19 nt, Artificial Sequence
  Description of Artificial Sequence: Synthetic oligonucleotide
gcuaggcuaacaccuccac

SEQ ID NO: 765642 - RNA, 19 nt, Artificial Sequence
  Description of Artificial Sequence: Synthetic oligonucleotide
gggcgaauggaacgcaaga

SEQ ID NO: 765643 - RNA, 19 nt, Artificial Sequence
  Description of Artificial Sequence: Synthetic oligonucleotide
gccugaaaauaaggggucc

SEQ ID NO: 765644 - RNA, 19 nt, Artificial Sequence
  Description of Artificial Sequence: Synthetic oligonucleotide
uggacgccaggcgcauggg

SEQ ID NO: 765645 - RNA, 19 nt, Artificial Sequence
  Description of Artificial Sequence: Synthetic oligonucleotide
ggccuuguccauaauagua

SEQ ID NO: 765646 - RNA, 19 nt, Artificial Sequence
  Description of Artificial Sequence: Synthetic oligonucleotide
ccaagacgauaucauugac

SEQ ID NO: 765647 - RNA, 19 nt, Artificial Sequence
  Description of Artificial Sequence: Synthetic oligonucleotide
gagucugcgccaucuugcu

SEQ ID NO: 765648 - RNA, 19 nt, Artificial Sequence
  Description of Artificial Sequence: Synthetic oligonucleotide
ggacgccaggcgcaugggg

SEQ ID NO: 765649 - RNA, 19 nt, Artificial Sequence
  Description of Artificial Sequence: Synthetic oligonucleotide
augcggauucggugaggcu

SEQ ID NO: 765650 - RNA, 19 nt, Artificial Sequence
  Description of Artificial Sequence: Synthetic oligonucleotide
gcaauucguuugucagaag

SEQ ID NO: 765651 - RNA, 19 nt, Artificial Sequence
  Description of Artificial Sequence: Synthetic oligonucleotide
augacccggucugugguau

SEQ ID NO: 765652 - RNA, 19 nt, Artificial Sequence
  Description of Artificial Sequence: Synthetic oligonucleotide
gggaagguauaaacagaac

SEQ ID NO: 765653 - RNA, 19 nt, Artificial Sequence
  Description of Artificial Sequence: Synthetic oligonucleotide
ccggucugugguauagaag

SEQ ID NO: 765654 - RNA, 19 nt, Artificial Sequence
  Description of Artificial Sequence: Synthetic oligonucleotide
gcuaacaccuccaccugca

SEQ ID NO: 765655 - RNA, 19 nt, Artificial Sequence
  Description of Artificial Sequence: Synthetic oligonucleotide
aguccagugggaagguaua

SEQ ID NO: 765656 - RNA, 19 nt, Artificial Sequence
  Description of Artificial Sequence: Synthetic oligonucleotide
ggcgaauggaacgcaagaa

SEQ ID NO: 765657 - RNA, 19 nt, Artificial Sequence
  Description of Artificial Sequence: Synthetic oligonucleotide
cccaguuaccccuucuaga

SEQ ID NO: 765658 - RNA, 19 nt, Artificial Sequence
  Description of Artificial Sequence: Synthetic oligonucleotide
agcacccucuggugauacu

SEQ ID NO: 765659 - RNA, 19 nt, Artificial Sequence
  Description of Artificial Sequence: Synthetic oligonucleotide
uucuugcgaccaccuucuc

SEQ ID NO: 765660 - RNA, 19 nt, Artificial Sequence
  Description of Artificial Sequence: Synthetic oligonucleotide
gguauucguuaguguucug

SEQ ID NO: 765661 - RNA, 19 nt, Artificial Sequence
  Description of Artificial Sequence: Synthetic oligonucleotide
caucguaacagagcuccua

SEQ ID NO: 765662 - RNA, 19 nt, Artificial Sequence
  Description of Artificial Sequence: Synthetic oligonucleotide
gguauagaaauguguuguu

SEQ ID NO: 765663 - RNA, 19 nt, Artificial Sequence
  Description of Artificial Sequence: Synthetic oligonucleotide
cagcaccgagcaacauuac

SEQ ID NO: 765664 - RNA, 19 nt, Artificial Sequence
  Description of Artificial Sequence: Synthetic oligonucleotide
acuuggcaguucaggauuu

SEQ ID NO: 765665 - RNA, 19 nt, Artificial Sequence
  Description of Artificial Sequence: Synthetic oligonucleotide
gucccuggggacauuauau

SEQ ID NO: 765666 - RNA, 19 nt, Artificial Sequence
  Description of Artificial Sequence: Synthetic oligonucleotide
gcaacauuacggaugguau

SEQ ID NO: 765667 - RNA, 19 nt, Artificial Sequence
  Description of Artificial Sequence: Synthetic oligonucleotide
guccgucugcugcuuauua

SEQ ID NO: 765668 - RNA, 19 nt, Artificial Sequence
  Description of Artificial Sequence: Synthetic oligonucleotide
gcauggggcagcauucuca

SEQ ID NO: 765669 - RNA, 19 nt, Artificial Sequence
  Description of Artificial Sequence: Synthetic oligonucleotide
caguuaccccuucuagaaa

SEQ ID NO: 765670 - RNA, 19 nt, Artificial Sequence
  Description of Artificial Sequence: Synthetic oligonucleotide
guccucaccaacguugaau

SEQ ID NO: 765671 - RNA, 19 nt, Artificial Sequence
  Description of Artificial Sequence: Synthetic oligonucleotide
uguccgucugcugcuuauu

SEQ ID NO: 765672 - RNA, 19 nt, Artificial Sequence
  Description of Artificial Sequence: Synthetic oligonucleotide
cugggcgaauggaacgcaa

SEQ ID NO: 765673 - RNA, 19 nt, Artificial Sequence
  Description of Artificial Sequence: Synthetic oligonucleotide
augcccuuugauggucaga

SEQ ID NO: 765674 - RNA, 19 nt, Artificial Sequence
  Description of Artificial Sequence: Synthetic oligonucleotide
ccacccuacauguuugaaa

SEQ ID NO: 765675 - RNA, 19 nt, Artificial Sequence
  Description of Artificial Sequence: Synthetic oligonucleotide
acauauugucugggcgaau

SEQ ID NO: 765676 - RNA, 19 nt, Artificial Sequence
  Description of Artificial Sequence: Synthetic oligonucleotide
ccagguauucguuaguguu

SEQ ID NO: 765677 - RNA, 19 nt, Artificial Sequence
  Description of Artificial Sequence: Synthetic oligonucleotide
ggcgcauggggcagcauuc

SEQ ID NO: 765678 - RNA, 19 nt, Artificial Sequence
  Description of Artificial Sequence: Synthetic oligonucleotide
cuagucccuggggacauua

SEQ ID NO: 765679 - RNA, 19 nt, Artificial Sequence
  Description of Artificial Sequence: Synthetic oligonucleotide
ccgucguaguaauaacaga

SEQ ID NO: 765680 - RNA, 19 nt, Artificial Sequence
  Description of Artificial Sequence: Synthetic oligonucleotide
gggguccaagaagacccag

SEQ ID NO: 765681 - RNA, 19 nt, Artificial Sequence
  Description of Artificial Sequence: Synthetic oligonucleotide
gcucauuagggaucuccgu

SEQ ID NO: 765682 - RNA, 19 nt, Artificial Sequence
  Description of Artificial Sequence: Synthetic oligonucleotide
cgguagcucauuagggauc

SEQ ID NO: 765683 - RNA, 19 nt, Artificial Sequence
  Description of Artificial Sequence: Synthetic oligonucleotide
gcaaccuaaccggucucca

SEQ ID NO: 765684 - RNA, 19 nt, Artificial Sequence
  Description of Artificial Sequence: Synthetic oligonucleotide
ggcaugcccuuugaugguc

SEQ ID NO: 765685 - RNA, 19 nt, Artificial Sequence
  Description of Artificial Sequence: Synthetic oligonucleotide
acccggucugugguauaga

SEQ ID NO: 765686 - RNA, 19 nt, Artificial Sequence
  Description of Artificial Sequence: Synthetic oligonucleotide
cauuguacgguagcucauu

SEQ ID NO: 765687 - RNA, 19 nt, Artificial Sequence
  Description of Artificial Sequence: Synthetic oligonucleotide
ucuagucccuggggacauu

SEQ ID NO: 765688 - RNA, 19 nt, Artificial Sequence
  Description of Artificial Sequence: Synthetic oligonucleotide
cccggucugugguauagaa

SEQ ID NO: 765689 - RNA, 19 nt, Artificial Sequence
  Description of Artificial Sequence: Synthetic oligonucleotide
gcaccacuacacugagcuc

SEQ ID NO: 765690 - RNA, 19 nt, Artificial Sequence
  Description of Artificial Sequence: Synthetic oligonucleotide
caucaccgucguaguaaua

SEQ ID NO: 765691 - RNA, 19 nt, Artificial Sequence
  Description of Artificial Sequence: Synthetic oligonucleotide
gagaugcguuugucagggu

SEQ ID NO: 765692 - RNA, 19 nt, Artificial Sequence
  Description of Artificial Sequence: Synthetic oligonucleotide
gaagacccaguuaccccuu

SEQ ID NO: 765693 - RNA, 19 nt, Artificial Sequence
  Description of Artificial Sequence: Synthetic oligonucleotide
cacagccguagaucuuacu

SEQ ID NO: 765694 - RNA, 19 nt, Artificial Sequence
  Description of Artificial Sequence: Synthetic oligonucleotide
gcaugcccuuugaugguca

SEQ ID NO: 765695 - RNA, 19 nt, Artificial Sequence
  Description of Artificial Sequence: Synthetic oligonucleotide
cgauaucauugacguaaca

SEQ ID NO: 765696 - RNA, 19 nt, Artificial Sequence
  Description of Artificial Sequence: Synthetic oligonucleotide
cugcgccaucuugcucacc

SEQ ID NO: 765697 - RNA, 19 nt, Artificial Sequence
  Description of Artificial Sequence: Synthetic oligonucleotide
cucuagucccuggggacau

SEQ ID NO: 765698 - RNA, 19 nt, Artificial Sequence
  Description of Artificial Sequence: Synthetic oligonucleotide
gggcaucguaacagagcuc

SEQ ID NO: 765699 - RNA, 19 nt, Artificial Sequence
  Description of Artificial Sequence: Synthetic oligonucleotide
ggcuucauuggguggccuu

SEQ ID NO: 765700 - RNA, 19 nt, Artificial Sequence
  Description of Artificial Sequence: Synthetic oligonucleotide
cugcuugccugaguccagu

SEQ ID NO: 765701 - RNA, 19 nt, Artificial Sequence
  Description of Artificial Sequence: Synthetic oligonucleotide
gcacccucuggugauacuu

SEQ ID NO: 765702 - RNA, 19 nt, Artificial Sequence
  Description of Artificial Sequence: Synthetic oligonucleotide
cacacuuggcaugcccuuu

SEQ ID NO: 765703 - RNA, 19 nt, Artificial Sequence
  Description of Artificial Sequence: Synthetic oligonucleotide
ccucaccaacguugaaucu

SEQ ID NO: 765704 - RNA, 19 nt, Artificial Sequence
  Description of Artificial Sequence: Synthetic oligonucleotide
ccccuucuagaaagcuuaa

SEQ ID NO: 765705 - RNA, 19 nt, Artificial Sequence
  Description of Artificial Sequence: Synthetic oligonucleotide
gagcaacauuacggauggu

SEQ ID NO: 765706 - RNA, 19 nt, Artificial Sequence
  Description of Artificial Sequence: Synthetic oligonucleotide
ccuaaccggucuccagaua

SEQ ID NO: 765707 - RNA, 19 nt, Artificial Sequence
  Description of Artificial Sequence: Synthetic oligonucleotide
caauguccgucugcugcuu

SEQ ID NO: 765708 - RNA, 19 nt, Artificial Sequence
  Description of Artificial Sequence: Synthetic oligonucleotide
gcgaggccacagccguaga

SEQ ID NO: 765709 - RNA, 19 nt, Artificial Sequence
  Description of Artificial Sequence: Synthetic oligonucleotide
gcaucguaacagagcuccu

SEQ ID NO: 765710 - RNA, 19 nt, Artificial Sequence
  Description of Artificial Sequence: Synthetic oligonucleotide
gcgcauggggcagcauucu

SEQ ID NO: 765711 - RNA, 19 nt, Artificial Sequence
  Description of Artificial Sequence: Synthetic oligonucleotide
ccaggcgcauggggcagca

SEQ ID NO: 765712 - RNA, 19 nt, Artificial Sequence
  Description of Artificial Sequence: Synthetic oligonucleotide
ggauucggugaggcuucau

SEQ ID NO: 765713 - RNA, 19 nt, Artificial Sequence
  Description of Artificial Sequence: Synthetic oligonucleotide
gggcgaggccacagccgua

SEQ ID NO: 765714 - RNA, 19 nt, Artificial Sequence
  Description of Artificial Sequence: Synthetic oligonucleotide
caggcgcauggggcagcau

SEQ ID NO: 765715 - RNA, 19 nt, Artificial Sequence
  Description of Artificial Sequence: Synthetic oligonucleotide
cggaugcuucagacuucuu

SEQ ID NO: 765716 - RNA, 19 nt, Artificial Sequence
  Description of Artificial Sequence: Synthetic oligonucleotide
acacauauccuacaggucc

SEQ ID NO: 765717 - RNA, 19 nt, Artificial Sequence
  Description of Artificial Sequence: Synthetic oligonucleotide
augauuuggagccauggcc

SEQ ID NO: 765718 - RNA, 19 nt, Artificial Sequence
  Description of Artificial Sequence: Synthetic oligonucleotide
uuaacugucgcuuccaggc

SEQ ID NO: 765719 - RNA, 19 nt, Artificial Sequence
  Description of Artificial Sequence: Synthetic oligonucleotide
aagaccuuagagcacacag

SEQ ID NO: 765720 - RNA, 19 nt, Artificial Sequence
  Description of Artificial Sequence: Synthetic oligonucleotide
cuuggaguaggcuugaccc

SEQ ID NO: 765721 - RNA, 19 nt, Artificial Sequence
  Description of Artificial Sequence: Synthetic oligonucleotide
cauugaaauauucaccucc

SEQ ID NO: 765722 - RNA, 19 nt, Artificial Sequence
  Description of Artificial Sequence: Synthetic oligonucleotide
ugugcugugaaccagcgac

SEQ ID NO: 765723 - RNA, 19 nt, Artificial Sequence
  Description of Artificial Sequence: Synthetic oligonucleotide
caucuugugaagaucaagg

SEQ ID NO: 765724 - RNA, 19 nt, Artificial Sequence
  Description of Artificial Sequence: Synthetic oligonucleotide
aagaacgagcccuccaggc

SEQ ID NO: 765725 - RNA, 19 nt, Artificial Sequence
  Description of Artificial Sequence: Synthetic oligonucleotide
agaauuaacugucgcuucc

SEQ ID NO: 765726 - RNA, 19 nt, Artificial Sequence
  Description of Artificial Sequence: Synthetic oligonucleotide
aagaauuaacugucgcuuc

SEQ ID NO: 765727 - RNA, 19 nt, Artificial Sequence
  Description of Artificial Sequence: Synthetic oligonucleotide
accaaagacccacagcugc

SEQ ID NO: 765728 - RNA, 19 nt, Artificial Sequence
  Description of Artificial Sequence: Synthetic oligonucleotide
uaggcuugaccccugaagg

SEQ ID NO: 765729 - RNA, 19 nt, Artificial Sequence
  Description of Artificial Sequence: Synthetic oligonucleotide
aacauggcgucucugugac

SEQ ID NO: 765730 - RNA, 19 nt, Artificial Sequence
  Description of Artificial Sequence: Synthetic oligonucleotide
ugaagaucaaggcaguaga

SEQ ID NO: 765731 - RNA, 19 nt, Artificial Sequence
  Description of Artificial Sequence: Synthetic oligonucleotide
uccgaaaaggauuaauuca

SEQ ID NO: 765732 - RNA, 19 nt, Artificial Sequence
  Description of Artificial Sequence: Synthetic oligonucleotide
accccugaaggauuaaucc

SEQ ID NO: 765733 - RNA, 19 nt, Artificial Sequence
  Description of Artificial Sequence: Synthetic oligonucleotide
gucacuaagggucaccugg

SEQ ID NO: 765734 - RNA, 19 nt, Artificial Sequence
  Description of Artificial Sequence: Synthetic oligonucleotide
ucacaucucacucuaaccu

SEQ ID NO: 765735 - RNA, 19 nt, Artificial Sequence
  Description of Artificial Sequence: Synthetic oligonucleotide
aauauucaccuccgaaaag

SEQ ID NO: 765736 - RNA, 19 nt, Artificial Sequence
  Description of Artificial Sequence: Synthetic oligonucleotide
uaaagaacgagcccuccag

SEQ ID NO: 765737 - RNA, 19 nt, Artificial Sequence
  Description of Artificial Sequence: Synthetic oligonucleotide
aucgaugaaugcuuuugcc

SEQ ID NO: 765738 - RNA, 19 nt, Artificial Sequence
  Description of Artificial Sequence: Synthetic oligonucleotide
ucauuaaagaacgagcccu

SEQ ID NO: 765739 - RNA, 19 nt, Artificial Sequence
  Description of Artificial Sequence: Synthetic oligonucleotide
auauucaccuccgaaaagg

SEQ ID NO: 765740 - RNA, 19 nt, Artificial Sequence
  Description of Artificial Sequence: Synthetic oligonucleotide
uccacuacgaccugaagga

SEQ ID NO: 765741 - RNA, 19 nt, Artificial Sequence
  Description of Artificial Sequence: Synthetic oligonucleotide
uguugaccgaaucuguucc

SEQ ID NO: 765742 - RNA, 19 nt, Artificial Sequence
  Description of Artificial Sequence: Synthetic oligonucleotide
uguagaguucauuauacau

SEQ ID NO: 765743 - RNA, 19 nt, Artificial Sequence
  Description of Artificial Sequence: Synthetic oligonucleotide
ugauuuggagccauggcca

SEQ ID NO: 765744 - RNA, 19 nt, Artificial Sequence
  Description of Artificial Sequence: Synthetic oligonucleotide
uuuuaucaccuccagcggc

SEQ ID NO: 765745 - RNA, 19 nt, Artificial Sequence
  Description of Artificial Sequence: Synthetic oligonucleotide
ugaaggauuaauccggguc

SEQ ID NO: 765746 - RNA, 19 nt, Artificial Sequence
  Description of Artificial Sequence: Synthetic oligonucleotide
aaggacaccagugauguug

SEQ ID NO: 765747 - RNA, 19 nt, Artificial Sequence
  Description of Artificial Sequence: Synthetic oligonucleotide
gaaauauucaccuccgaaa

SEQ ID NO: 765748 - RNA, 19 nt, Artificial Sequence
  Description of Artificial Sequence: Synthetic oligonucleotide
aaagaauuaacugucgcuu

SEQ ID NO: 765749 - RNA, 19 nt, Artificial Sequence
  Description of Artificial Sequence: Synthetic oligonucleotide
cuuguaaugguagaacugc

SEQ ID NO: 765750 - RNA, 19 nt, Artificial Sequence
  Description of Artificial Sequence: Synthetic oligonucleotide
aaagaacgagcccuccagg

SEQ ID NO: 765751 - RNA, 19 nt, Artificial Sequence
  Description of Artificial Sequence: Synthetic oligonucleotide
aggucauuaaagaacgagc

SEQ ID NO: 765752 - RNA, 19 nt, Artificial Sequence
  Description of Artificial Sequence: Synthetic oligonucleotide
agaucaaggcaguagaggu

SEQ ID NO: 765753 - RNA, 19 nt, Artificial Sequence
  Description of Artificial Sequence: Synthetic oligonucleotide
uuccaucuugugaagauca

SEQ ID NO: 765754 - RNA, 19 nt, Artificial Sequence
  Description of Artificial Sequence: Synthetic oligonucleotide
gaagccaucacucagucua

SEQ ID NO: 765755 - RNA, 19 nt, Artificial Sequence
  Description of Artificial Sequence: Synthetic oligonucleotide
ugauacuguagauguagag

SEQ ID NO: 765756 - RNA, 19 nt, Artificial Sequence
  Description of Artificial Sequence: Synthetic oligonucleotide
agaacacauauccuacagg

SEQ ID NO: 765757 - RNA, 19 nt, Artificial Sequence
  Description of Artificial Sequence: Synthetic oligonucleotide
aacuuuuguccagguaucc

SEQ ID NO: 765758 - RNA, 19 nt, Artificial Sequence
  Description of Artificial Sequence: Synthetic oligonucleotide
ugcaucggggcccaugugg

SEQ ID NO: 765759 - RNA, 19 nt, Artificial Sequence
  Description of Artificial Sequence: Synthetic oligonucleotide
gcaagcacuuguuugaugg

SEQ ID NO: 765760 - RNA, 19 nt, Artificial Sequence
  Description of Artificial Sequence: Synthetic oligonucleotide
gauguagaguucauuauac

SEQ ID NO: 765761 - RNA, 19 nt, Artificial Sequence
  Description of Artificial Sequence: Synthetic oligonucleotide
cauuugaacguggacacgg

SEQ ID NO: 765762 - RNA, 19 nt, Artificial Sequence
  Description of Artificial Sequence: Synthetic oligonucleotide
ucgaugaaugcuuuugcca

SEQ ID NO: 765763 - RNA, 19 nt, Artificial Sequence
  Description of Artificial Sequence: Synthetic oligonucleotide
auugaaauauucaccuccg

SEQ ID NO: 765764 - RNA, 19 nt, Artificial Sequence
  Description of Artificial Sequence: Synthetic oligonucleotide
acuacgaccugaaggaccc

SEQ ID NO: 765765 - RNA, 19 nt, Artificial Sequence
  Description of Artificial Sequence: Synthetic oligonucleotide
gacaagaacacauauccua

SEQ ID NO: 765766 - RNA, 19 nt, Artificial Sequence
  Description of Artificial Sequence: Synthetic oligonucleotide
ucuuguccgacuugggucc

SEQ ID NO: 765767 - RNA, 19 nt, Artificial Sequence
  Description of Artificial Sequence: Synthetic oligonucleotide
aagguguacacaucacugu

SEQ ID NO: 765768 - RNA, 19 nt, Artificial Sequence
  Description of Artificial Sequence: Synthetic oligonucleotide
uuaaccguggggugggcgg

SEQ ID NO: 765769 - RNA, 19 nt, Artificial Sequence
  Description of Artificial Sequence: Synthetic oligonucleotide
cucagucuaauguuuggcc

SEQ ID NO: 765770 - RNA, 19 nt, Artificial Sequence
  Description of Artificial Sequence: Synthetic oligonucleotide
ucagucuaauguuuggccu

SEQ ID NO: 765771 - RNA, 19 nt, Artificial Sequence
  Description of Artificial Sequence: Synthetic oligonucleotide
gaugauuuggagccauggc

SEQ ID NO: 765772 - RNA, 19 nt, Artificial Sequence
  Description of Artificial Sequence: Synthetic oligonucleotide
cuuagguggggcuuguggc

SEQ ID NO: 765773 - RNA, 19 nt, Artificial Sequence
  Description of Artificial Sequence: Synthetic oligonucleotide
uuuaucaccuccagcggcu

SEQ ID NO: 765774 - RNA, 19 nt, Artificial Sequence
  Description of Artificial Sequence: Synthetic oligonucleotide
gcagacagggaauuaaccg

SEQ ID NO: 765775 - RNA, 19 nt, Artificial Sequence
  Description of Artificial Sequence: Synthetic oligonucleotide
gacauagaguaguccaugc

SEQ ID NO: 765776 - RNA, 19 nt, Artificial Sequence
  Description of Artificial Sequence: Synthetic oligonucleotide
uggcauuugaacguggaca

SEQ ID NO: 765777 - RNA, 19 nt, Artificial Sequence
  Description of Artificial Sequence: Synthetic oligonucleotide
uucaccuccgaaaaggauu

SEQ ID NO: 765778 - RNA, 19 nt, Artificial Sequence
  Description of Artificial Sequence: Synthetic oligonucleotide
uaaccuucucucagagugg

SEQ ID NO: 765779 - RNA, 19 nt, Artificial Sequence
  Description of Artificial Sequence: Synthetic oligonucleotide
aggagcuaccucugggugc

SEQ ID NO: 765780 - RNA, 19 nt, Artificial Sequence
  Description of Artificial Sequence: Synthetic oligonucleotide
guagauguagaguucauua

SEQ ID NO: 765781 - RNA, 19 nt, Artificial Sequence
  Description of Artificial Sequence: Synthetic oligonucleotide
uucauuauacaugaagguu

SEQ ID NO: 765782 - RNA, 19 nt, Artificial Sequence
  Description of Artificial Sequence: Synthetic oligonucleotide
uuagcaggaacaugucuga

SEQ ID NO: 765783 - RNA, 19 nt, Artificial Sequence
  Description of Artificial Sequence: Synthetic oligonucleotide
ugauggugaucacuguccc

SEQ ID NO: 765784 - RNA, 19 nt, Artificial Sequence
  Description of Artificial Sequence: Synthetic oligonucleotide
gucauuaaagaacgagccc

SEQ ID NO: 765785 - RNA, 19 nt, Artificial Sequence
  Description of Artificial Sequence: Synthetic oligonucleotide
auuuuggauccaucucuac

SEQ ID NO: 765786 - RNA, 19 nt, Artificial Sequence
  Description of Artificial Sequence: Synthetic oligonucleotide
uauucaccuccgaaaagga

SEQ ID NO: 765787 - RNA, 19 nt, Artificial Sequence
  Description of Artificial Sequence: Synthetic oligonucleotide
uuugcaucggggcccaugu

SEQ ID NO: 765788 - RNA, 19 nt, Artificial Sequence
  Description of Artificial Sequence: Synthetic oligonucleotide
uaauguuuggccugugcaa

SEQ ID NO: 765789 - RNA, 19 nt, Artificial Sequence
  Description of Artificial Sequence: Synthetic oligonucleotide
agggaauuaaccguggggu

SEQ ID NO: 765790 - RNA, 19 nt, Artificial Sequence
  Description of Artificial Sequence: Synthetic oligonucleotide
ugaaccagcgacuccuggc

SEQ ID NO: 765791 - RNA, 19 nt, Artificial Sequence
  Description of Artificial Sequence: Synthetic oligonucleotide
aacacauauccuacagguc

SEQ ID NO: 765792 - RNA, 19 nt, Artificial Sequence
  Description of Artificial Sequence: Synthetic oligonucleotide
uuggcggccgucuuuuccg

SEQ ID NO: 765793 - RNA, 19 nt, Artificial Sequence
  Description of Artificial Sequence: Synthetic oligonucleotide
gaauuaaccgugggguggg

SEQ ID NO: 765794 - RNA, 19 nt, Artificial Sequence
  Description of Artificial Sequence: Synthetic oligonucleotide
agauguagaguucauuaua

SEQ ID NO: 765795 - RNA, 19 nt, Artificial Sequence
  Description of Artificial Sequence: Synthetic oligonucleotide
uguaguagauguagucccu

SEQ ID NO: 765796 - RNA, 19 nt, Artificial Sequence
  Description of Artificial Sequence: Synthetic oligonucleotide
uugggcuacuuucagcacu

SEQ ID NO: 765797 - RNA, 19 nt, Artificial Sequence
  Description of Artificial Sequence: Synthetic oligonucleotide
ccagcauggcauuugaacg

SEQ ID NO: 765798 - RNA, 19 nt, Artificial Sequence
  Description of Artificial Sequence: Synthetic oligonucleotide
ucaugccuggcuuaaggac

SEQ ID NO: 765799 - RNA, 19 nt, Artificial Sequence
  Description of Artificial Sequence: Synthetic oligonucleotide
guagauguagucccuugug

SEQ ID NO: 765800 - RNA, 19 nt, Artificial Sequence
  Description of Artificial Sequence: Synthetic oligonucleotide
uccuacaggucccacacau

SEQ ID NO: 765801 - RNA, 19 nt, Artificial Sequence
  Description of Artificial Sequence: Synthetic oligonucleotide
uugaacguggacacggcuc

SEQ ID NO: 765802 - RNA, 19 nt, Artificial Sequence
  Description of Artificial Sequence: Synthetic oligonucleotide
uuguaaugguagaacugcu

SEQ ID NO: 765803 - RNA, 19 nt, Artificial Sequence
  Description of Artificial Sequence: Synthetic oligonucleotide
uuugaacguggacacggcu

SEQ ID NO: 765804 - RNA, 19 nt, Artificial Sequence
  Description of Artificial Sequence: Synthetic oligonucleotide
caucaggagaugcaaacuc

SEQ ID NO: 765805 - RNA, 19 nt, Artificial Sequence
  Description of Artificial Sequence: Synthetic oligonucleotide
gaagaucaaggcaguagag

SEQ ID NO: 765806 - RNA, 19 nt, Artificial Sequence
  Description of Artificial Sequence: Synthetic oligonucleotide
gaccgaaucuguucccagg

SEQ ID NO: 765807 - RNA, 19 nt, Artificial Sequence
  Description of Artificial Sequence: Synthetic oligonucleotide
uaaugguagaacugcucac

SEQ ID NO: 765808 - RNA, 19 nt, Artificial Sequence
  Description of Artificial Sequence: Synthetic oligonucleotide
ggcagcaucauagacauac

SEQ ID NO: 765809 - RNA, 19 nt, Artificial Sequence
  Description of Artificial Sequence: Synthetic oligonucleotide
cuaauguuuggccugugca

SEQ ID NO: 765810 - RNA, 19 nt, Artificial Sequence
  Description of Artificial Sequence: Synthetic oligonucleotide
agaacauggcgucucugug

SEQ ID NO: 765811 - RNA, 19 nt, Artificial Sequence
  Description of Artificial Sequence: Synthetic oligonucleotide
cacacagccaguuuuauua

SEQ ID NO: 765812 - RNA, 19 nt, Artificial Sequence
  Description of Artificial Sequence: Synthetic oligonucleotide
aagcacuuguuugauggug

SEQ ID NO: 765813 - RNA, 19 nt, Artificial Sequence
  Description of Artificial Sequence: Synthetic oligonucleotide
uagacauacaggucauuaa

SEQ ID NO: 765814 - RNA, 19 nt, Artificial Sequence
  Description of Artificial Sequence: Synthetic oligonucleotide
accaguugccccauucucc

SEQ ID NO: 765815 - RNA, 19 nt, Artificial Sequence
  Description of Artificial Sequence: Synthetic oligonucleotide
gaguccgucuccuccagcc

SEQ ID NO: 765816 - RNA, 19 nt, Artificial Sequence
  Description of Artificial Sequence: Synthetic oligonucleotide
cacucuaaccuucucucag

SEQ ID NO: 765817 - RNA, 19 nt, Artificial Sequence
  Description of Artificial Sequence: Synthetic oligonucleotide
caggucauuaaagaacgag

SEQ ID NO: 765818 - RNA, 19 nt, Artificial Sequence
  Description of Artificial Sequence: Synthetic oligonucleotide
cacuacgaccugaaggacc

SEQ ID NO: 765819 - RNA, 19 nt, Artificial Sequence
  Description of Artificial Sequence: Synthetic oligonucleotide
ugccccauucuccuguuca

SEQ ID NO: 765820 - RNA, 19 nt, Artificial Sequence
  Description of Artificial Sequence: Synthetic oligonucleotide
cauuaaagaacgagcccuc

SEQ ID NO: 765821 - RNA, 19 nt, Artificial Sequence
  Description of Artificial Sequence: Synthetic oligonucleotide
uaguagauguagucccuug

SEQ ID NO: 765822 - RNA, 19 nt, Artificial Sequence
  Description of Artificial Sequence: Synthetic oligonucleotide
gaguaguccaugcuugaca

SEQ ID NO: 765823 - RNA, 19 nt, Artificial Sequence
  Description of Artificial Sequence: Synthetic oligonucleotide
cagccugaugagcacagcg

SEQ ID NO: 765824 - RNA, 19 nt, Artificial Sequence
  Description of Artificial Sequence: Synthetic oligonucleotide
ggaauuaaccguggggugg

SEQ ID NO: 765825 - RNA, 19 nt, Artificial Sequence
  Description of Artificial Sequence: Synthetic oligonucleotide
gacucaagcugcugugaag

SEQ ID NO: 765826 - RNA, 19 nt, Artificial Sequence
  Description of Artificial Sequence: Synthetic oligonucleotide
cuucguacugcuccccagg

SEQ ID NO: 765827 - RNA, 19 nt, Artificial Sequence
  Description of Artificial Sequence: Synthetic oligonucleotide
acucaagcugcugugaaga

SEQ ID NO: 765828 - RNA, 19 nt, Artificial Sequence
  Description of Artificial Sequence: Synthetic oligonucleotide
cucagguuuuagcaggaac

SEQ ID NO: 765829 - RNA, 19 nt, Artificial Sequence
  Description of Artificial Sequence: Synthetic oligonucleotide
agcacagcgccuuggaggu

SEQ ID NO: 765830 - RNA, 19 nt, Artificial Sequence
  Description of Artificial Sequence: Synthetic oligonucleotide
uguucagugcgggacaggu

SEQ ID NO: 765831 - RNA, 19 nt, Artificial Sequence
  Description of Artificial Sequence: Synthetic oligonucleotide
guucauuauacaugaaggu

SEQ ID NO: 765832 - RNA, 19 nt, Artificial Sequence
  Description of Artificial Sequence: Synthetic oligonucleotide
auauccuacaggucccaca

SEQ ID NO: 765833 - RNA, 19 nt, Artificial Sequence
  Description of Artificial Sequence: Synthetic oligonucleotide
ggcauuugaacguggacac

SEQ ID NO: 765834 - RNA, 19 nt, Artificial Sequence
  Description of Artificial Sequence: Synthetic oligonucleotide
acaucucacucuaaccuuc

SEQ ID NO: 765835 - RNA, 19 nt, Artificial Sequence
  Description of Artificial Sequence: Synthetic oligonucleotide
cucuaaccuucucucagag

SEQ ID NO: 765836 - RNA, 19 nt, Artificial Sequence
  Description of Artificial Sequence: Synthetic oligonucleotide
uaacugucgcuuccaggcc

SEQ ID NO: 765837 - RNA, 19 nt, Artificial Sequence
  Description of Artificial Sequence: Synthetic oligonucleotide
ugagcagacagggaauuaa

SEQ ID NO: 765838 - RNA, 19 nt, Artificial Sequence
  Description of Artificial Sequence: Synthetic oligonucleotide
auagacauacaggucauua

SEQ ID NO: 765839 - RNA, 19 nt, Artificial Sequence
  Description of Artificial Sequence: Synthetic oligonucleotide
gauuaauccggguccaagu

SEQ ID NO: 765840 - RNA, 19 nt, Artificial Sequence
  Description of Artificial Sequence: Synthetic oligonucleotide
guagccaagugcaggaccc

SEQ ID NO: 765841 - RNA, 19 nt, Artificial Sequence
  Description of Artificial Sequence: Synthetic oligonucleotide
cccugaaggauuaauccgg

SEQ ID NO: 765842 - RNA, 19 nt, Artificial Sequence
  Description of Artificial Sequence: Synthetic oligonucleotide
aauuaaccguggggugggc

SEQ ID NO: 765843 - RNA, 19 nt, Artificial Sequence
  Description of Artificial Sequence: Synthetic oligonucleotide
agaacaguaucugaugauu

SEQ ID NO: 765844 - RNA, 19 nt, Artificial Sequence
  Description of Artificial Sequence: Synthetic oligonucleotide
accgaaucuguucccaggu

SEQ ID NO: 765845 - RNA, 19 nt, Artificial Sequence
  Description of Artificial Sequence: Synthetic oligonucleotide
caacuuuuguccagguauc

SEQ ID NO: 765846 - RNA, 19 nt, Artificial Sequence
  Description of Artificial Sequence: Synthetic oligonucleotide
aaggauuaauccgggucca

SEQ ID NO: 765847 - RNA, 19 nt, Artificial Sequence
  Description of Artificial Sequence: Synthetic oligonucleotide
uagaguaguccaugcuuga

SEQ ID NO: 765848 - RNA, 19 nt, Artificial Sequence
  Description of Artificial Sequence: Synthetic oligonucleotide
ugaccgaaucuguucccag

SEQ ID NO: 765849 - RNA, 19 nt, Artificial Sequence
  Description of Artificial Sequence: Synthetic oligonucleotide
aggaagaccuuagagcaca

SEQ ID NO: 765850 - RNA, 19 nt, Artificial Sequence
  Description of Artificial Sequence: Synthetic oligonucleotide
aguugccccauucuccugu

SEQ ID NO: 765851 - RNA, 19 nt, Artificial Sequence
  Description of Artificial Sequence: Synthetic oligonucleotide
gacagggaauuaaccgugg

SEQ ID NO: 765852 - RNA, 19 nt, Artificial Sequence
  Description of Artificial Sequence: Synthetic oligonucleotide
agaacgagcccuccaggcu

SEQ ID NO: 765853 - RNA, 19 nt, Artificial Sequence
  Description of Artificial Sequence: Synthetic oligonucleotide
cuucucucagaguggacuc

SEQ ID NO: 765854 - RNA, 19 nt, Artificial Sequence
  Description of Artificial Sequence: Synthetic oligonucleotide
gaacgagcccuccaggcuc

SEQ ID NO: 765855 - RNA, 19 nt, Artificial Sequence
  Description of Artificial Sequence: Synthetic oligonucleotide
uucguacugcuccccagga

SEQ ID NO: 765856 - RNA, 19 nt, Artificial Sequence
  Description of Artificial Sequence: Synthetic oligonucleotide
agguucuccauucuuccau

SEQ ID NO: 765857 - RNA, 19 nt, Artificial Sequence
  Description of Artificial Sequence: Synthetic oligonucleotide
aguacuguucagugcggga

SEQ ID NO: 765858 - RNA, 19 nt, Artificial Sequence
  Description of Artificial Sequence: Synthetic oligonucleotide
gcuuagguggggcuugugg

SEQ ID NO: 765859 - RNA, 19 nt, Artificial Sequence
  Description of Artificial Sequence: Synthetic oligonucleotide
ugaagacagugaauuccuc

SEQ ID NO: 765860 - RNA, 19 nt, Artificial Sequence
  Description of Artificial Sequence: Synthetic oligonucleotide
auuaaccguggggugggcg

SEQ ID NO: 765861 - RNA, 19 nt, Artificial Sequence
  Description of Artificial Sequence: Synthetic oligonucleotide
ucuaaccuucucucagagu

SEQ ID NO: 765862 - RNA, 19 nt, Artificial Sequence
  Description of Artificial Sequence: Synthetic oligonucleotide
gcggucaccagcuucaaac

SEQ ID NO: 765863 - RNA, 19 nt, Artificial Sequence
  Description of Artificial Sequence: Synthetic oligonucleotide
cucucugcuuugaguaacc

SEQ ID NO: 765864 - RNA, 19 nt, Artificial Sequence
  Description of Artificial Sequence: Synthetic oligonucleotide
gguuuuagcaggaacaugu

SEQ ID NO: 765865 - RNA, 19 nt, Artificial Sequence
  Description of Artificial Sequence: Synthetic oligonucleotide
ucguacugcuccccaggag

SEQ ID NO: 765866 - RNA, 19 nt, Artificial Sequence
  Description of Artificial Sequence: Synthetic oligonucleotide
uguagauguagaguucauu

SEQ ID NO: 765867 - RNA, 19 nt, Artificial Sequence
  Description of Artificial Sequence: Synthetic oligonucleotide
cuuggcggccgucuuuucc

SEQ ID NO: 765868 - RNA, 19 nt, Artificial Sequence
  Description of Artificial Sequence: Synthetic oligonucleotide
ggagcaagcacuuguuuga

SEQ ID NO: 765869 - RNA, 19 nt, Artificial Sequence
  Description of Artificial Sequence: Synthetic oligonucleotide
gccauugaaauauucaccu

SEQ ID NO: 765870 - RNA, 19 nt, Artificial Sequence
  Description of Artificial Sequence: Synthetic oligonucleotide
ugugaaccagcgacuccug

SEQ ID NO: 765871 - RNA, 19 nt, Artificial Sequence
  Description of Artificial Sequence: Synthetic oligonucleotide
uguacacaucacuguagua

SEQ ID NO: 765872 - RNA, 19 nt, Artificial Sequence
  Description of Artificial Sequence: Synthetic oligonucleotide
uggaguaggcuugaccccu

SEQ ID NO: 765873 - RNA, 19 nt, Artificial Sequence
  Description of Artificial Sequence: Synthetic oligonucleotide
cuuccgagagcgcuuggac

SEQ ID NO: 765874 - RNA, 19 nt, Artificial Sequence
  Description of Artificial Sequence: Synthetic oligonucleotide
gaauuaacugucgcuucca

SEQ ID NO: 765875 - RNA, 19 nt, Artificial Sequence
  Description of Artificial Sequence: Synthetic oligonucleotide
uguuuggccugugcaaugu

SEQ ID NO: 765876 - RNA, 19 nt, Artificial Sequence
  Description of Artificial Sequence: Synthetic oligonucleotide
ucuucaggcuuaggugggg

SEQ ID NO: 765877 - RNA, 19 nt, Artificial Sequence
  Description of Artificial Sequence: Synthetic oligonucleotide
ucugaugauuuggagccau

SEQ ID NO: 765878 - RNA, 19 nt, Artificial Sequence
  Description of Artificial Sequence: Synthetic oligonucleotide
ugcuuuugccauggcuugg

SEQ ID NO: 765879 - RNA, 19 nt, Artificial Sequence
  Description of Artificial Sequence: Synthetic oligonucleotide
ugucaacuuuuguccaggu

SEQ ID NO: 765880 - RNA, 19 nt, Artificial Sequence
  Description of Artificial Sequence: Synthetic oligonucleotide
uugaccgaaucuguuccca

SEQ ID NO: 765881 - RNA, 19 nt, Artificial Sequence
  Description of Artificial Sequence: Synthetic oligonucleotide
ucaccaucaggagaugcaa

SEQ ID NO: 765882 - RNA, 19 nt, Artificial Sequence
  Description of Artificial Sequence: Synthetic oligonucleotide
cacagccugaugagcacag

SEQ ID NO: 765883 - RNA, 19 nt, Artificial Sequence
  Description of Artificial Sequence: Synthetic oligonucleotide
gucuuuuccgcgccgcggc

SEQ ID NO: 765884 - RNA, 19 nt, Artificial Sequence
  Description of Artificial Sequence: Synthetic oligonucleotide
uccagguauccuuucugau

SEQ ID NO: 765885 - RNA, 19 nt, Artificial Sequence
  Description of Artificial Sequence: Synthetic oligonucleotide
guggacucaagcugcugug

SEQ ID NO: 765886 - RNA, 19 nt, Artificial Sequence
  Description of Artificial Sequence: Synthetic oligonucleotide
agguauccaggcugaaggu

SEQ ID NO: 765887 - RNA, 19 nt, Artificial Sequence
  Description of Artificial Sequence: Synthetic oligonucleotide
gagaacauggcgucucugu

SEQ ID NO: 765888 - RNA, 19 nt, Artificial Sequence
  Description of Artificial Sequence: Synthetic oligonucleotide
ugaaugcuuuugccauggc

SEQ ID NO: 765889 - RNA, 19 nt, Artificial Sequence
  Description of Artificial Sequence: Synthetic oligonucleotide
gugaaccagcgacuccugg

SEQ ID NO: 765890 - RNA, 19 nt, Artificial Sequence
  Description of Artificial Sequence: Synthetic oligonucleotide
ucccuugugcuuucaugga

SEQ ID NO: 765891 - RNA, 19 nt, Artificial Sequence
  Description of Artificial Sequence: Synthetic oligonucleotide
ccagagguccuuguaaugg

SEQ ID NO: 765892 - RNA, 19 nt, Artificial Sequence
  Description of Artificial Sequence: Synthetic oligonucleotide
ugggcuacuuucagcacuu

SEQ ID NO: 765893 - RNA, 19 nt, Artificial Sequence
  Description of Artificial Sequence: Synthetic oligonucleotide
ccccugaaggauuaauccg

SEQ ID NO: 765894 - RNA, 19 nt, Artificial Sequence
  Description of Artificial Sequence: Synthetic oligonucleotide
ucucugcuuugaguaaccc

SEQ ID NO: 765895 - RNA, 19 nt, Artificial Sequence
  Description of Artificial Sequence: Synthetic oligonucleotide
acuuuuguccagguauccu

SEQ ID NO: 765896 - RNA, 19 nt, Artificial Sequence
  Description of Artificial Sequence: Synthetic oligonucleotide
aggccaccauccgaugucc

SEQ ID NO: 765897 - RNA, 19 nt, Artificial Sequence
  Description of Artificial Sequence: Synthetic oligonucleotide
ugcgggacagguacucuuc

SEQ ID NO: 765898 - RNA, 19 nt, Artificial Sequence
  Description of Artificial Sequence: Synthetic oligonucleotide
ggaaaugggcuaugagggc

SEQ ID NO: 765899 - RNA, 19 nt, Artificial Sequence
  Description of Artificial Sequence: Synthetic oligonucleotide
ucuuuuccgcgccgcggcc

SEQ ID NO: 765900 - RNA, 19 nt, Artificial Sequence
  Description of Artificial Sequence: Synthetic oligonucleotide
cuuucucaggaugagcaga

SEQ ID NO: 765901 - RNA, 19 nt, Artificial Sequence
  Description of Artificial Sequence: Synthetic oligonucleotide
ccugaaggauuaauccggg

SEQ ID NO: 765902 - RNA, 19 nt, Artificial Sequence
  Description of Artificial Sequence: Synthetic oligonucleotide
gagcagacagggaauuaac

SEQ ID NO: 765903 - RNA, 19 nt, Artificial Sequence
  Description of Artificial Sequence: Synthetic oligonucleotide
ugaugagcacagcgccuug

SEQ ID NO: 765904 - RNA, 19 nt, Artificial Sequence
  Description of Artificial Sequence: Synthetic oligonucleotide
gguguacacaucacuguag

SEQ ID NO: 765905 - RNA, 19 nt, Artificial Sequence
  Description of Artificial Sequence: Synthetic oligonucleotide
ggacagguacucuucguac

SEQ ID NO: 765906 - RNA, 19 nt, Artificial Sequence
  Description of Artificial Sequence: Synthetic oligonucleotide
gaccccugaaggauuaauc

SEQ ID NO: 765907 - RNA, 19 nt, Artificial Sequence
  Description of Artificial Sequence: Synthetic oligonucleotide
agcauggcauuugaacgug

SEQ ID NO: 765908 - RNA, 19 nt, Artificial Sequence
  Description of Artificial Sequence: Synthetic oligonucleotide
gggaauuaaccguggggug

SEQ ID NO: 765909 - RNA, 19 nt, Artificial Sequence
  Description of Artificial Sequence: Synthetic oligonucleotide
aggcuugaccccugaagga

SEQ ID NO: 765910 - RNA, 19 nt, Artificial Sequence
  Description of Artificial Sequence: Synthetic oligonucleotide
gauuuuggauccaucucua

SEQ ID NO: 765911 - RNA, 19 nt, Artificial Sequence
  Description of Artificial Sequence: Synthetic oligonucleotide
cuuuugccauggcuugggc

SEQ ID NO: 765912 - RNA, 19 nt, Artificial Sequence
  Description of Artificial Sequence: Synthetic oligonucleotide
caguacuguucagugcggg

SEQ ID NO: 765913 - RNA, 19 nt, Artificial Sequence
  Description of Artificial Sequence: Synthetic oligonucleotide
agucuaauguuuggccugu

SEQ ID NO: 765914 - RNA, 19 nt, Artificial Sequence
  Description of Artificial Sequence: Synthetic oligonucleotide
ugcuuucauggaagccacc

SEQ ID NO: 765915 - RNA, 19 nt, Artificial Sequence
  Description of Artificial Sequence: Synthetic oligonucleotide
cuugggcuacuuucagcac

SEQ ID NO: 765916 - RNA, 19 nt, Artificial Sequence
  Description of Artificial Sequence: Synthetic oligonucleotide
ggauuaauccggguccaag

SEQ ID NO: 765917 - RNA, 19 nt, Artificial Sequence
  Description of Artificial Sequence: Synthetic oligonucleotide
ucuugacucucugcuuuga

SEQ ID NO: 765918 - RNA, 19 nt, Artificial Sequence
  Description of Artificial Sequence: Synthetic oligonucleotide
agcgcugcuggccuccaca

SEQ ID NO: 765919 - RNA, 19 nt, Artificial Sequence
  Description of Artificial Sequence: Synthetic oligonucleotide
cugaugauuuggagccaug

SEQ ID NO: 765920 - RNA, 19 nt, Artificial Sequence
  Description of Artificial Sequence: Synthetic oligonucleotide
ugaguccgucuccuccagc

SEQ ID NO: 765921 - RNA, 19 nt, Artificial Sequence
  Description of Artificial Sequence: Synthetic oligonucleotide
guguacacaucacuguagu

SEQ ID NO: 765922 - RNA, 19 nt, Artificial Sequence
  Description of Artificial Sequence: Synthetic oligonucleotide
caccaguugccccauucuc

SEQ ID NO: 765923 - RNA, 19 nt, Artificial Sequence
  Description of Artificial Sequence: Synthetic oligonucleotide
uuuuccgcgccgcggcccu

SEQ ID NO: 765924 - RNA, 19 nt, Artificial Sequence
  Description of Artificial Sequence: Synthetic oligonucleotide
aucaucgaugaaugcuuuu

SEQ ID NO: 765925 - RNA, 19 nt, Artificial Sequence
  Description of Artificial Sequence: Synthetic oligonucleotide
gugcaaugucuugaacugc

SEQ ID NO: 765926 - RNA, 19 nt, Artificial Sequence
  Description of Artificial Sequence: Synthetic oligonucleotide
uacuuugccccgccuccgu

SEQ ID NO: 765927 - RNA, 19 nt, Artificial Sequence
  Description of Artificial Sequence: Synthetic oligonucleotide
uggccuaaggcugcacaga

SEQ ID NO: 765928 - RNA, 19 nt, Artificial Sequence
  Description of Artificial Sequence: Synthetic oligonucleotide
ccuuggaguaggcuugacc

SEQ ID NO: 765929 - RNA, 19 nt, Artificial Sequence
  Description of Artificial Sequence: Synthetic oligonucleotide
ucggggcccaugugguucc

SEQ ID NO: 765930 - RNA, 19 nt, Artificial Sequence
  Description of Artificial Sequence: Synthetic oligonucleotide
cugcugugaagacagugaa

SEQ ID NO: 765931 - RNA, 19 nt, Artificial Sequence
  Description of Artificial Sequence: Synthetic oligonucleotide
guccgucuccuccagccac

SEQ ID NO: 765932 - RNA, 19 nt, Artificial Sequence
  Description of Artificial Sequence: Synthetic oligonucleotide
uccgggcaagcuucagcca

SEQ ID NO: 765933 - RNA, 19 nt, Artificial Sequence
  Description of Artificial Sequence: Synthetic oligonucleotide
cuuucauggaagccaccaa

SEQ ID NO: 765934 - RNA, 19 nt, Artificial Sequence
  Description of Artificial Sequence: Synthetic oligonucleotide
aguccgucuccuccagcca

SEQ ID NO: 765935 - RNA, 19 nt, Artificial Sequence
  Description of Artificial Sequence: Synthetic oligonucleotide
aguaggcuugaccccugaa

SEQ ID NO: 765936 - RNA, 19 nt, Artificial Sequence
  Description of Artificial Sequence: Synthetic oligonucleotide
uugcaucggggcccaugug

SEQ ID NO: 765937 - RNA, 19 nt, Artificial Sequence
  Description of Artificial Sequence: Synthetic oligonucleotide
ugaccccugaaggauuaau

SEQ ID NO: 765938 - RNA, 19 nt, Artificial Sequence
  Description of Artificial Sequence: Synthetic oligonucleotide
cuuuuccgcgccgcggccc

SEQ ID NO: 765939 - RNA, 19 nt, Artificial Sequence
  Description of Artificial Sequence: Synthetic oligonucleotide
ccagggaugucaacuuuug

SEQ ID NO: 765940 - RNA, 19 nt, Artificial Sequence
  Description of Artificial Sequence: Synthetic oligonucleotide
accuccgaaaaggauuaau

SEQ ID NO: 765941 - RNA, 19 nt, Artificial Sequence
  Description of Artificial Sequence: Synthetic oligonucleotide
cauauccuacaggucccac

SEQ ID NO: 765942 - RNA, 19 nt, Artificial Sequence
  Description of Artificial Sequence: Synthetic oligonucleotide
cuggggcaccaguugcccc

SEQ ID NO: 765943 - RNA, 19 nt, Artificial Sequence
  Description of Artificial Sequence: Synthetic oligonucleotide
auucaccuccgaaaaggau

SEQ ID NO: 765944 - RNA, 19 nt, Artificial Sequence
  Description of Artificial Sequence: Synthetic oligonucleotide
ccaucuugugaagaucaag

SEQ ID NO: 765945 - RNA, 19 nt, Artificial Sequence
  Description of Artificial Sequence: Synthetic oligonucleotide
cuugaccccugaaggauua

SEQ ID NO: 765946 - RNA, 19 nt, Artificial Sequence
  Description of Artificial Sequence: Synthetic oligonucleotide
aacgagcccuccaggcucu

SEQ ID NO: 765947 - RNA, 19 nt, Artificial Sequence
  Description of Artificial Sequence: Synthetic oligonucleotide
uuccucuacuuugccccgc

SEQ ID NO: 765948 - RNA, 19 nt, Artificial Sequence
  Description of Artificial Sequence: Synthetic oligonucleotide
uccucaucagguggccuaa

SEQ ID NO: 765949 - RNA, 19 nt, Artificial Sequence
  Description of Artificial Sequence: Synthetic oligonucleotide
uaaccguggggugggcgga

SEQ ID NO: 765950 - RNA, 19 nt, Artificial Sequence
  Description of Artificial Sequence: Synthetic oligonucleotide
ugguagccaagugcaggac

SEQ ID NO: 765951 - RNA, 19 nt, Artificial Sequence
  Description of Artificial Sequence: Synthetic oligonucleotide
uuaucaccuccagcggcuc

SEQ ID NO: 765952 - RNA, 19 nt, Artificial Sequence
  Description of Artificial Sequence: Synthetic oligonucleotide
auccuacaggucccacaca

SEQ ID NO: 765953 - RNA, 19 nt, Artificial Sequence
  Description of Artificial Sequence: Synthetic oligonucleotide
aagccaucacucagucuaa

SEQ ID NO: 765954 - RNA, 19 nt, Artificial Sequence
  Description of Artificial Sequence: Synthetic oligonucleotide
ggucacuaagggucaccug

SEQ ID NO: 765955 - RNA, 19 nt, Artificial Sequence
  Description of Artificial Sequence: Synthetic oligonucleotide
gcauuugaacguggacacg

SEQ ID NO: 765956 - RNA, 19 nt, Artificial Sequence
  Description of Artificial Sequence: Synthetic oligonucleotide
ccgggcaagcuucagccag

SEQ ID NO: 765957 - RNA, 19 nt, Artificial Sequence
  Description of Artificial Sequence: Synthetic oligonucleotide
uggcggccgucuuuuccgc

SEQ ID NO: 765958 - RNA, 19 nt, Artificial Sequence
  Description of Artificial Sequence: Synthetic oligonucleotide
agugcgggacagguacucu

SEQ ID NO: 765959 - RNA, 19 nt, Artificial Sequence
  Description of Artificial Sequence: Synthetic oligonucleotide
accuuggaguaggcuugac

SEQ ID NO: 765960 - RNA, 19 nt, Artificial Sequence
  Description of Artificial Sequence: Synthetic oligonucleotide
cuguucagugcgggacagg

SEQ ID NO: 765961 - RNA, 19 nt, Artificial Sequence
  Description of Artificial Sequence: Synthetic oligonucleotide
cagcugugcugugaaccag

SEQ ID NO: 765962 - RNA, 19 nt, Artificial Sequence
  Description of Artificial Sequence: Synthetic oligonucleotide
cacuccugagauuuuggau

SEQ ID NO: 765963 - RNA, 19 nt, Artificial Sequence
  Description of Artificial Sequence: Synthetic oligonucleotide
cuuguccgacuuggguccc

SEQ ID NO: 765964 - RNA, 19 nt, Artificial Sequence
  Description of Artificial Sequence: Synthetic oligonucleotide
ggccuaaggcugcacagaa

SEQ ID NO: 765965 - RNA, 19 nt, Artificial Sequence
  Description of Artificial Sequence: Synthetic oligonucleotide
ugggugccuuuguccacgu

SEQ ID NO: 765966 - RNA, 19 nt, Artificial Sequence
  Description of Artificial Sequence: Synthetic oligonucleotide
agcuaccucugggugcugu

SEQ ID NO: 765967 - RNA, 19 nt, Artificial Sequence
  Description of Artificial Sequence: Synthetic oligonucleotide
cagugcgggacagguacuc

SEQ ID NO: 765968 - RNA, 19 nt, Artificial Sequence
  Description of Artificial Sequence: Synthetic oligonucleotide
gcuaccucugggugcugug

SEQ ID NO: 765969 - RNA, 19 nt, Artificial Sequence
  Description of Artificial Sequence: Synthetic oligonucleotide
caguugccccauucuccug

SEQ ID NO: 765970 - RNA, 19 nt, Artificial Sequence
  Description of Artificial Sequence: Synthetic oligonucleotide
acuuugccccgccuccguu

SEQ ID NO: 765971 - RNA, 19 nt, Artificial Sequence
  Description of Artificial Sequence: Synthetic oligonucleotide
ggagaacauggcgucucug

SEQ ID NO: 765972 - RNA, 19 nt, Artificial Sequence
  Description of Artificial Sequence: Synthetic oligonucleotide
ccgacuugggucccuucag

SEQ ID NO: 765973 - RNA, 19 nt, Artificial Sequence
  Description of Artificial Sequence: Synthetic oligonucleotide
gaccuuggaguaggcuuga

SEQ ID NO: 765974 - RNA, 19 nt, Artificial Sequence
  Description of Artificial Sequence: Synthetic oligonucleotide
aggauuaauccggguccaa

SEQ ID NO: 765975 - RNA, 19 nt, Artificial Sequence
  Description of Artificial Sequence: Synthetic oligonucleotide
caccauccgauguccacua

SEQ ID NO: 765976 - RNA, 19 nt, Artificial Sequence
  Description of Artificial Sequence: Synthetic oligonucleotide
caagcacuuguuugauggu

SEQ ID NO: 765977 - RNA, 19 nt, Artificial Sequence
  Description of Artificial Sequence: Synthetic oligonucleotide
gcggccgucuuuuccgcgc

SEQ ID NO: 765978 - RNA, 19 nt, Artificial Sequence
  Description of Artificial Sequence: Synthetic oligonucleotide
uugaccccugaaggauuaa

SEQ ID NO: 765979 - RNA, 19 nt, Artificial Sequence
  Description of Artificial Sequence: Synthetic oligonucleotide
ccugggugugggcccaggg

SEQ ID NO: 765980 - RNA, 19 nt, Artificial Sequence
  Description of Artificial Sequence: Synthetic oligonucleotide
ccaggucuugguagccaag

SEQ ID NO: 765981 - RNA, 19 nt, Artificial Sequence
  Description of Artificial Sequence: Synthetic oligonucleotide
aauccggguccaaguccau

SEQ ID NO: 765982 - RNA, 19 nt, Artificial Sequence
  Description of Artificial Sequence: Synthetic oligonucleotide
ccacuccugagauuuugga

SEQ ID NO: 765983 - RNA, 19 nt, Artificial Sequence
  Description of Artificial Sequence: Synthetic oligonucleotide
caucaucgaugaaugcuuu

SEQ ID NO: 765984 - RNA, 19 nt, Artificial Sequence
  Description of Artificial Sequence: Synthetic oligonucleotide
cuacgaccugaaggacccc

SEQ ID NO: 765985 - RNA, 19 nt, Artificial Sequence
  Description of Artificial Sequence: Synthetic oligonucleotide
gcaucaucgaugaaugcuu

SEQ ID NO: 765986 - RNA, 19 nt, Artificial Sequence
  Description of Artificial Sequence: Synthetic oligonucleotide
uuguccgacuugggucccu

SEQ ID NO: 765987 - RNA, 19 nt, Artificial Sequence
  Description of Artificial Sequence: Synthetic oligonucleotide
guacugcuccccaggagcu

SEQ ID NO: 765988 - RNA, 19 nt, Artificial Sequence
  Description of Artificial Sequence: Synthetic oligonucleotide
caggucuugguagccaagu

SEQ ID NO: 765989 - RNA, 19 nt, Artificial Sequence
  Description of Artificial Sequence: Synthetic oligonucleotide
caaguccauuugccuucuc

SEQ ID NO: 765990 - RNA, 19 nt, Artificial Sequence
  Description of Artificial Sequence: Synthetic oligonucleotide
guaguagauguagucccuu

SEQ ID NO: 765991 - RNA, 19 nt, Artificial Sequence
  Description of Artificial Sequence: Synthetic oligonucleotide
ccuccgaaaaggauuaauu

SEQ ID NO: 765992 - RNA, 19 nt, Artificial Sequence
  Description of Artificial Sequence: Synthetic oligonucleotide
ggagcuaccucugggugcu

SEQ ID NO: 765993 - RNA, 19 nt, Artificial Sequence
  Description of Artificial Sequence: Synthetic oligonucleotide
gucgcuuccaggccaccau

SEQ ID NO: 765994 - RNA, 19 nt, Artificial Sequence
  Description of Artificial Sequence: Synthetic oligonucleotide
cagggaugucaacuuuugu

SEQ ID NO: 765995 - RNA, 19 nt, Artificial Sequence
  Description of Artificial Sequence: Synthetic oligonucleotide
ggaagaccuuagagcacac

SEQ ID NO: 765996 - RNA, 19 nt, Artificial Sequence
  Description of Artificial Sequence: Synthetic oligonucleotide
cggguccaaguccauuugc

SEQ ID NO: 765997 - RNA, 19 nt, Artificial Sequence
  Description of Artificial Sequence: Synthetic oligonucleotide
ggcaagcuucagccaguac

SEQ ID NO: 765998 - RNA, 19 nt, Artificial Sequence
  Description of Artificial Sequence: Synthetic oligonucleotide
cuguagauguagaguucau

SEQ ID NO: 765999 - RNA, 19 nt, Artificial Sequence
  Description of Artificial Sequence: Synthetic oligonucleotide
ccgucuuuuccgcgccgcg

SEQ ID NO: 766000 - RNA, 19 nt, Artificial Sequence
  Description of Artificial Sequence: Synthetic oligonucleotide
ccgaaucuguucccagguc

SEQ ID NO: 766001 - RNA, 19 nt, Artificial Sequence
  Description of Artificial Sequence: Synthetic oligonucleotide
gcggagaacauggcgucuc

SEQ ID NO: 766002 - RNA, 19 nt, Artificial Sequence
  Description of Artificial Sequence: Synthetic oligonucleotide
ugccauggcuugggcuacu

SEQ ID NO: 766003 - RNA, 19 nt, Artificial Sequence
  Description of Artificial Sequence: Synthetic oligonucleotide
guagucccuugugcuuuca

SEQ ID NO: 766004 - RNA, 19 nt, Artificial Sequence
  Description of Artificial Sequence: Synthetic oligonucleotide
cgucuuuuccgcgccgcgg

SEQ ID NO: 766005 - RNA, 19 nt, Artificial Sequence
  Description of Artificial Sequence: Synthetic oligonucleotide
auccggguccaaguccauu

SEQ ID NO: 766006 - RNA, 19 nt, Artificial Sequence
  Description of Artificial Sequence: Synthetic oligonucleotide
guucagugcgggacaggua

SEQ ID NO: 766007 - RNA, 19 nt, Artificial Sequence
  Description of Artificial Sequence: Synthetic oligonucleotide
gugcugugaaccagcgacu

SEQ ID NO: 766008 - RNA, 19 nt, Artificial Sequence
  Description of Artificial Sequence: Synthetic oligonucleotide
gugcgggacagguacucuu

SEQ ID NO: 766009 - RNA, 19 nt, Artificial Sequence
  Description of Artificial Sequence: Synthetic oligonucleotide
ccacuacgaccugaaggac

SEQ ID NO: 766010 - RNA, 19 nt, Artificial Sequence
  Description of Artificial Sequence: Synthetic oligonucleotide
cuccaucuuggcggccguc

SEQ ID NO: 766011 - RNA, 19 nt, Artificial Sequence
  Description of Artificial Sequence: Synthetic oligonucleotide
uuccgcgccgcggcccuuc

SEQ ID NO: 766012 - RNA, 19 nt, Artificial Sequence
  Description of Artificial Sequence: Synthetic oligonucleotide
gcacuuguuugauggugau

SEQ ID NO: 766013 - RNA, 19 nt, Artificial Sequence
  Description of Artificial Sequence: Synthetic oligonucleotide
acgagcccuccaggcucuc

SEQ ID NO: 766014 - RNA, 19 nt, Artificial Sequence
  Description of Artificial Sequence: Synthetic oligonucleotide
gugggcccagggaugucaa

SEQ ID NO: 766015 - RNA, 19 nt, Artificial Sequence
  Description of Artificial Sequence: Synthetic oligonucleotide
ccugaugagcacagcgccu

SEQ ID NO: 766016 - RNA, 19 nt, Artificial Sequence
  Description of Artificial Sequence: Synthetic oligonucleotide
caucuuggcggccgucuuu

SEQ ID NO: 766017 - RNA, 19 nt, Artificial Sequence
  Description of Artificial Sequence: Synthetic oligonucleotide
cagcgccuuggaggugggc

SEQ ID NO: 766018 - RNA, 19 nt, Artificial Sequence
  Description of Artificial Sequence: Synthetic oligonucleotide
cccuguugaccgaaucugu

SEQ ID NO: 766019 - RNA, 19 nt, Artificial Sequence
  Description of Artificial Sequence: Synthetic oligonucleotide
ccaucaggagaugcaaacu

SEQ ID NO: 766020 - RNA, 19 nt, Artificial Sequence
  Description of Artificial Sequence: Synthetic oligonucleotide
ggcuuagguggggcuugug

SEQ ID NO: 766021 - RNA, 19 nt, Artificial Sequence
  Description of Artificial Sequence: Synthetic oligonucleotide
ccuguugaccgaaucuguu

SEQ ID NO: 766022 - RNA, 19 nt, Artificial Sequence
  Description of Artificial Sequence: Synthetic oligonucleotide
gcaucggggcccauguggu

SEQ ID NO: 766023 - RNA, 19 nt, Artificial Sequence
  Description of Artificial Sequence: Synthetic oligonucleotide
ggcccagggaugucaacuu

SEQ ID NO: 766024 - RNA, 19 nt, Artificial Sequence
  Description of Artificial Sequence: Synthetic oligonucleotide
gcacacagccaguuuuauu

SEQ ID NO: 766025 - RNA, 19 nt, Artificial Sequence
  Description of Artificial Sequence: Synthetic oligonucleotide
ggacaccagugauguugaa

SEQ ID NO: 766026 - RNA, 19 nt, Artificial Sequence
  Description of Artificial Sequence: Synthetic oligonucleotide
cggccgucuuuuccgcgcc

SEQ ID NO: 766027 - RNA, 19 nt, Artificial Sequence
  Description of Artificial Sequence: Synthetic oligonucleotide
gcuugaccccugaaggauu

SEQ ID NO: 766028 - RNA, 19 nt, Artificial Sequence
  Description of Artificial Sequence: Synthetic oligonucleotide
ggcggagaacauggcgucu

SEQ ID NO: 766029 - RNA, 19 nt, Artificial Sequence
  Description of Artificial Sequence: Synthetic oligonucleotide
caucggggcccaugugguu

SEQ ID NO: 766030 - RNA, 19 nt, Artificial Sequence
  Description of Artificial Sequence: Synthetic oligonucleotide
uuuccgcgccgcggcccuu

SEQ ID NO: 766031 - RNA, 19 nt, Artificial Sequence
  Description of Artificial Sequence: Synthetic oligonucleotide
ccucagguuuuagcaggaa

SEQ ID NO: 766032 - RNA, 19 nt, Artificial Sequence
  Description of Artificial Sequence: Synthetic oligonucleotide
cagccacuccugagauuuu

SEQ ID NO: 766033 - RNA, 19 nt, Artificial Sequence
  Description of Artificial Sequence: Synthetic oligonucleotide
cgggcaagcuucagccagu

SEQ ID NO: 766034 - RNA, 19 nt, Artificial Sequence
  Description of Artificial Sequence: Synthetic oligonucleotide
gggcuacuuucagcacuuu

SEQ ID NO: 766035 - RNA, 19 nt, Artificial Sequence
  Description of Artificial Sequence: Synthetic oligonucleotide
cgccuccguuucuucuugu

SEQ ID NO: 766036 - RNA, 19 nt, Artificial Sequence
  Description of Artificial Sequence: Synthetic oligonucleotide
ccgcggcccuucuucucuu

SEQ ID NO: 766037 - RNA, 19 nt, Artificial Sequence
  Description of Artificial Sequence: Synthetic oligonucleotide
cgcggcccuucuucucuuu

SEQ ID NO: 766038 - RNA, 19 nt, Artificial Sequence
  Description of Artificial Sequence: Synthetic oligonucleotide
aagauagcgauucagcagc

SEQ ID NO: 766039 - RNA, 19 nt, Artificial Sequence
  Description of Artificial Sequence: Synthetic oligonucleotide
aauaagauagcgauucagc

SEQ ID NO: 766040 - RNA, 19 nt, Artificial Sequence
  Description of Artificial Sequence: Synthetic oligonucleotide
aacuguugcaaauaggaug

SEQ ID NO: 766041 - RNA, 19 nt, Artificial Sequence
  Description of Artificial Sequence: Synthetic oligonucleotide
uccaacaacagauuuaagc

SEQ ID NO: 766042 - RNA, 19 nt, Artificial Sequence
  Description of Artificial Sequence: Synthetic oligonucleotide
uacaaaaucugcaaggcga

SEQ ID NO: 766043 - RNA, 19 nt, Artificial Sequence
  Description of Artificial Sequence: Synthetic oligonucleotide
ugauucacauuuuaacucg

SEQ ID NO: 766044 - RNA, 19 nt, Artificial Sequence
  Description of Artificial Sequence: Synthetic oligonucleotide
augauucacauuuuaacuc

SEQ ID NO: 766045 - RNA, 19 nt, Artificial Sequence
  Description of Artificial Sequence: Synthetic oligonucleotide
aauuuacugucuuuccuuc

SEQ ID NO: 766046 - RNA, 19 nt, Artificial Sequence
  Description of Artificial Sequence: Synthetic oligonucleotide
uuuaucggaaccauccucc

SEQ ID NO: 766047 - RNA, 19 nt, Artificial Sequence
  Description of Artificial Sequence: Synthetic oligonucleotide
acaauuuaugugcagacug

SEQ ID NO: 766048 - RNA, 19 nt, Artificial Sequence
  Description of Artificial Sequence: Synthetic oligonucleotide
ucagggaucuuaacuaugg

SEQ ID NO: 766049 - RNA, 19 nt, Artificial Sequence
  Description of Artificial Sequence: Synthetic oligonucleotide
ugucacacgugguagaggg

SEQ ID NO: 766050 - RNA, 19 nt, Artificial Sequence
  Description of Artificial Sequence: Synthetic oligonucleotide
uagacaagcugcuaucugg

SEQ ID NO: 766051 - RNA, 19 nt, Artificial Sequence
  Description of Artificial Sequence: Synthetic oligonucleotide
auggaugugaaccagggca

SEQ ID NO: 766052 - RNA, 19 nt, Artificial Sequence
  Description of Artificial Sequence: Synthetic oligonucleotide
uaagauagcgauucagcag

SEQ ID NO: 766053 - RNA, 19 nt, Artificial Sequence
  Description of Artificial Sequence: Synthetic oligonucleotide
ucuaguuggggaauggaug

SEQ ID NO: 766054 - RNA, 19 nt, Artificial Sequence
  Description of Artificial Sequence: Synthetic oligonucleotide
uucguaagagcaauaauaa

SEQ ID NO: 766055 - RNA, 19 nt, Artificial Sequence
  Description of Artificial Sequence: Synthetic oligonucleotide
uuaacuaugggugaaacuu

SEQ ID NO: 766056 - RNA, 19 nt, Artificial Sequence
  Description of Artificial Sequence: Synthetic oligonucleotide
uuuucugcgugcuuccugg

SEQ ID NO: 766057 - RNA, 19 nt, Artificial Sequence
  Description of Artificial Sequence: Synthetic oligonucleotide
ugaucauccuuacuuuccg

SEQ ID NO: 766058 - RNA, 19 nt, Artificial Sequence
  Description of Artificial Sequence: Synthetic oligonucleotide
uucguaguaggaaucagga

SEQ ID NO: 766059 - RNA, 19 nt, Artificial Sequence
  Description of Artificial Sequence: Synthetic oligonucleotide
agaacuagagcuaugggag

SEQ ID NO: 766060 - RNA, 19 nt, Artificial Sequence
  Description of Artificial Sequence: Synthetic oligonucleotide
auaagauagcgauucagca

SEQ ID NO: 766061 - RNA, 19 nt, Artificial Sequence
  Description of Artificial Sequence: Synthetic oligonucleotide
ugcggaagagcuuuaaagc

SEQ ID NO: 766062 - RNA, 19 nt, Artificial Sequence
  Description of Artificial Sequence: Synthetic oligonucleotide
uugcggaagagcuuuaaag

SEQ ID NO: 766063 - RNA, 19 nt, Artificial Sequence
  Description of Artificial Sequence: Synthetic oligonucleotide
acguggaugacucuaguuc

SEQ ID NO: 766064 - RNA, 19 nt, Artificial Sequence
  Description of Artificial Sequence: Synthetic oligonucleotide
aaauccguugauccuuuuc

SEQ ID NO: 766065 - RNA, 19 nt, Artificial Sequence
  Description of Artificial Sequence: Synthetic oligonucleotide
uucauuuagacaaucgauu

SEQ ID NO: 766066 - RNA, 19 nt, Artificial Sequence
  Description of Artificial Sequence: Synthetic oligonucleotide
agagcaauaauaagauagc

SEQ ID NO: 766067 - RNA, 19 nt, Artificial Sequence
  Description of Artificial Sequence: Synthetic oligonucleotide
auagcgauucagcagcuuc

SEQ ID NO: 766068 - RNA, 19 nt, Artificial Sequence
  Description of Artificial Sequence: Synthetic oligonucleotide
gugaaauguagucaccagg

SEQ ID NO: 766069 - RNA, 19 nt, Artificial Sequence
  Description of Artificial Sequence: Synthetic oligonucleotide
cucuuauugucacacgugg

SEQ ID NO: 766070 - RNA, 19 nt, Artificial Sequence
  Description of Artificial Sequence: Synthetic oligonucleotide
aucauccuuacuuuccgac

SEQ ID NO: 766071 - RNA, 19 nt, Artificial Sequence
  Description of Artificial Sequence: Synthetic oligonucleotide
gaguguuugaggcuuuggg

SEQ ID NO: 766072 - RNA, 19 nt, Artificial Sequence
  Description of Artificial Sequence: Synthetic oligonucleotide
uuugcgugauaacuguugc

SEQ ID NO: 766073 - RNA, 19 nt, Artificial Sequence
  Description of Artificial Sequence: Synthetic oligonucleotide
uucucuuauugucacacgu

SEQ ID NO: 766074 - RNA, 19 nt, Artificial Sequence
  Description of Artificial Sequence: Synthetic oligonucleotide
aguccuagaucuugcaagg

SEQ ID NO: 766075 - RNA, 19 nt, Artificial Sequence
  Description of Artificial Sequence: Synthetic oligonucleotide
gagcaauaauaagauagcg

SEQ ID NO: 766076 - RNA, 19 nt, Artificial Sequence
  Description of Artificial Sequence: Synthetic oligonucleotide
ucauccuuacuuuccgacg

SEQ ID NO: 766077 - RNA, 19 nt, Artificial Sequence
  Description of Artificial Sequence: Synthetic oligonucleotide
ucauuuagacaaucgauua

SEQ ID NO: 766078 - RNA, 19 nt, Artificial Sequence
  Description of Artificial Sequence: Synthetic oligonucleotide
ucuaaaauccguugauccu

SEQ ID NO: 766079 - RNA, 19 nt, Artificial Sequence
  Description of Artificial Sequence: Synthetic oligonucleotide
ucgauuauauuuuccacau

SEQ ID NO: 766080 - RNA, 19 nt, Artificial Sequence
  Description of Artificial Sequence: Synthetic oligonucleotide
caaagaaggauauugcgga

SEQ ID NO: 766081 - RNA, 19 nt, Artificial Sequence
  Description of Artificial Sequence: Synthetic oligonucleotide
cuucguaguaggaaucagg

SEQ ID NO: 766082 - RNA, 19 nt, Artificial Sequence
  Description of Artificial Sequence: Synthetic oligonucleotide
uaaacucugugauggaugu

SEQ ID NO: 766083 - RNA, 19 nt, Artificial Sequence
  Description of Artificial Sequence: Synthetic oligonucleotide
cagaggauuccaaucaagc

SEQ ID NO: 766084 - RNA, 19 nt, Artificial Sequence
  Description of Artificial Sequence: Synthetic oligonucleotide
uuuaacucgucuugccugc

SEQ ID NO: 766085 - RNA, 19 nt, Artificial Sequence
  Description of Artificial Sequence: Synthetic oligonucleotide
uuauugucacacgugguag

SEQ ID NO: 766086 - RNA, 19 nt, Artificial Sequence
  Description of Artificial Sequence: Synthetic oligonucleotide
uuuuaucggaaccauccuc

SEQ ID NO: 766087 - RNA, 19 nt, Artificial Sequence
  Description of Artificial Sequence: Synthetic oligonucleotide
caauuuaugugcagacugc

SEQ ID NO: 766088 - RNA, 19 nt, Artificial Sequence
  Description of Artificial Sequence: Synthetic oligonucleotide
uguacguggaugacucuag

SEQ ID NO: 766089 - RNA, 19 nt, Artificial Sequence
  Description of Artificial Sequence: Synthetic oligonucleotide
uuuggggcaaacaguauuc

SEQ ID NO: 766090 - RNA, 19 nt, Artificial Sequence
  Description of Artificial Sequence: Synthetic oligonucleotide
uuuagacaaucgauuauau

SEQ ID NO: 766091 - RNA, 19 nt, Artificial Sequence
  Description of Artificial Sequence: Synthetic oligonucleotide
uuccaaucaagcaacugaa

SEQ ID NO: 766092 - RNA, 19 nt, Artificial Sequence
  Description of Artificial Sequence: Synthetic oligonucleotide
aaggcuucguaguaggaau

SEQ ID NO: 766093 - RNA, 19 nt, Artificial Sequence
  Description of Artificial Sequence: Synthetic oligonucleotide
acucaaacgccugaaauug

SEQ ID NO: 766094 - RNA, 19 nt, Artificial Sequence
  Description of Artificial Sequence: Synthetic oligonucleotide
agcaacugaacucguauca

SEQ ID NO: 766095 - RNA, 19 nt, Artificial Sequence
  Description of Artificial Sequence: Synthetic oligonucleotide
uucuauugauuucuuaauu

SEQ ID NO: 766096 - RNA, 19 nt, Artificial Sequence
  Description of Artificial Sequence: Synthetic oligonucleotide
ucguaagagcaauaauaag

SEQ ID NO: 766097 - RNA, 19 nt, Artificial Sequence
  Description of Artificial Sequence: Synthetic oligonucleotide
caguccuagaucuugcaag

SEQ ID NO: 766098 - RNA, 19 nt, Artificial Sequence
  Description of Artificial Sequence: Synthetic oligonucleotide
ugaugucucagcuuugcgu

SEQ ID NO: 766099 - RNA, 19 nt, Artificial Sequence
  Description of Artificial Sequence: Synthetic oligonucleotide
aguuggggaauggaugucc

SEQ ID NO: 766100 - RNA, 19 nt, Artificial Sequence
  Description of Artificial Sequence: Synthetic oligonucleotide
accaacgaaggcuucguag

SEQ ID NO: 766101 - RNA, 19 nt, Artificial Sequence
  Description of Artificial Sequence: Synthetic oligonucleotide
caguuaaacuucuugucug

SEQ ID NO: 766102 - RNA, 19 nt, Artificial Sequence
  Description of Artificial Sequence: Synthetic oligonucleotide
gaaaccaacgaaggcuucg

SEQ ID NO: 766103 - RNA, 19 nt, Artificial Sequence
  Description of Artificial Sequence: Synthetic oligonucleotide
uacauccagugaaauguag

SEQ ID NO: 766104 - RNA, 19 nt, Artificial Sequence
  Description of Artificial Sequence: Synthetic oligonucleotide
auaaaagcugcaucaggga

SEQ ID NO: 766105 - RNA, 19 nt, Artificial Sequence
  Description of Artificial Sequence: Synthetic oligonucleotide
gaacuagagcuaugggagg

SEQ ID NO: 766106 - RNA, 19 nt, Artificial Sequence
  Description of Artificial Sequence: Synthetic oligonucleotide
cuuugcgugauaacuguug

SEQ ID NO: 766107 - RNA, 19 nt, Artificial Sequence
  Description of Artificial Sequence: Synthetic oligonucleotide
agaaggauauugcggaaga

SEQ ID NO: 766108 - RNA, 19 nt, Artificial Sequence
  Description of Artificial Sequence: Synthetic oligonucleotide
uuuccgacgagggaugugc

SEQ ID NO: 766109 - RNA, 19 nt, Artificial Sequence
  Description of Artificial Sequence: Synthetic oligonucleotide
uuaccacgggcccugcgcg

SEQ ID NO: 766110 - RNA, 19 nt, Artificial Sequence
  Description of Artificial Sequence: Synthetic oligonucleotide
aacgccugaaauuggggau

SEQ ID NO: 766111 - RNA, 19 nt, Artificial Sequence
  Description of Artificial Sequence: Synthetic oligonucleotide
gaugguuuacauccaguga

SEQ ID NO: 766112 - RNA, 19 nt, Artificial Sequence
  Description of Artificial Sequence: Synthetic oligonucleotide
cuuuaaagcgccccagaac

SEQ ID NO: 766113 - RNA, 19 nt, Artificial Sequence
  Description of Artificial Sequence: Synthetic oligonucleotide
ucuuauugucacacguggu

SEQ ID NO: 766114 - RNA, 19 nt, Artificial Sequence
  Description of Artificial Sequence: Synthetic oligonucleotide
agcaauaauaagauagcga

SEQ ID NO: 766115 - RNA, 19 nt, Artificial Sequence
  Description of Artificial Sequence: Synthetic oligonucleotide
uuacuuuccgacgagggau

SEQ ID NO: 766116 - RNA, 19 nt, Artificial Sequence
  Description of Artificial Sequence: Synthetic oligonucleotide
uucaucuggagccaagcuu

SEQ ID NO: 766117 - RNA, 19 nt, Artificial Sequence
  Description of Artificial Sequence: Synthetic oligonucleotide
aaagaaggauauugcggaa

SEQ ID NO: 766118 - RNA, 19 nt, Artificial Sequence
  Description of Artificial Sequence: Synthetic oligonucleotide
ugcguuucaaaagugcuuc

SEQ ID NO: 766119 - RNA, 19 nt, Artificial Sequence
  Description of Artificial Sequence: Synthetic oligonucleotide
agccauggaguccaacuuc

SEQ ID NO: 766120 - RNA, 19 nt, Artificial Sequence
  Description of Artificial Sequence: Synthetic oligonucleotide
uguucguuguucccuaaau

SEQ ID NO: 766121 - RNA, 19 nt, Artificial Sequence
  Description of Artificial Sequence: Synthetic oligonucleotide
auaaacucugugauggaug

SEQ ID NO: 766122 - RNA, 19 nt, Artificial Sequence
  Description of Artificial Sequence: Synthetic oligonucleotide
ucaucgucacuagaagucc

SEQ ID NO: 766123 - RNA, 19 nt, Artificial Sequence
  Description of Artificial Sequence: Synthetic oligonucleotide
aaagcaacguguacgugga

SEQ ID NO: 766124 - RNA, 19 nt, Artificial Sequence
  Description of Artificial Sequence: Synthetic oligonucleotide
ucguuguucccuaaauguc

SEQ ID NO: 766125 - RNA, 19 nt, Artificial Sequence
  Description of Artificial Sequence: Synthetic oligonucleotide
auaauaagauagcgauuca

SEQ ID NO: 766126 - RNA, 19 nt, Artificial Sequence
  Description of Artificial Sequence: Synthetic oligonucleotide
gacaaucgauuauauuuuc

SEQ ID NO: 766127 - RNA, 19 nt, Artificial Sequence
  Description of Artificial Sequence: Synthetic oligonucleotide
uauugucacacgugguaga

SEQ ID NO: 766128 - RNA, 19 nt, Artificial Sequence
  Description of Artificial Sequence: Synthetic oligonucleotide
uccucuaaaauccguugau

SEQ ID NO: 766129 - RNA, 19 nt, Artificial Sequence
  Description of Artificial Sequence: Synthetic oligonucleotide
accaggauaagaauuauuu

SEQ ID NO: 766130 - RNA, 19 nt, Artificial Sequence
  Description of Artificial Sequence: Synthetic oligonucleotide
uaccuuaaccaggauaaga

SEQ ID NO: 766131 - RNA, 19 nt, Artificial Sequence
  Description of Artificial Sequence: Synthetic oligonucleotide
uagagcuaugggaggcugg

SEQ ID NO: 766132 - RNA, 19 nt, Artificial Sequence
  Description of Artificial Sequence: Synthetic oligonucleotide
accuguggacaauuuaugu

SEQ ID NO: 766133 - RNA, 19 nt, Artificial Sequence
  Description of Artificial Sequence: Synthetic oligonucleotide
cucucuuacaaucuuguaa

SEQ ID NO: 766134 - RNA, 19 nt, Artificial Sequence
  Description of Artificial Sequence: Synthetic oligonucleotide
gcaauaauaagauagcgau

SEQ ID NO: 766135 - RNA, 19 nt, Artificial Sequence
  Description of Artificial Sequence: Synthetic oligonucleotide
agauuuaagcaaauccugu

SEQ ID NO: 766136 - RNA, 19 nt, Artificial Sequence
  Description of Artificial Sequence: Synthetic oligonucleotide
uuaaagcgccccagaacug

SEQ ID NO: 766137 - RNA, 19 nt, Artificial Sequence
  Description of Artificial Sequence: Synthetic oligonucleotide
aacuaugggugaaacuucu

SEQ ID NO: 766138 - RNA, 19 nt, Artificial Sequence
  Description of Artificial Sequence: Synthetic oligonucleotide
uucagaggauuccaaucaa

SEQ ID NO: 766139 - RNA, 19 nt, Artificial Sequence
  Description of Artificial Sequence: Synthetic oligonucleotide
aacucacguuuucugcgug

SEQ ID NO: 766140 - RNA, 19 nt, Artificial Sequence
  Description of Artificial Sequence: Synthetic oligonucleotide
uuggaacuuugaauguggu

SEQ ID NO: 766141 - RNA, 19 nt, Artificial Sequence
  Description of Artificial Sequence: Synthetic oligonucleotide
uacuuuccgacgagggaug

SEQ ID NO: 766142 - RNA, 19 nt, Artificial Sequence
  Description of Artificial Sequence: Synthetic oligonucleotide
acguguacguggaugacuc

SEQ ID NO: 766143 - RNA, 19 nt, Artificial Sequence
  Description of Artificial Sequence: Synthetic oligonucleotide
guuaccacgggcccugcgc

SEQ ID NO: 766144 - RNA, 19 nt, Artificial Sequence
  Description of Artificial Sequence: Synthetic oligonucleotide
gauuccaaucaagcaacug

SEQ ID NO: 766145 - RNA, 19 nt, Artificial Sequence
  Description of Artificial Sequence: Synthetic oligonucleotide
auugucacacgugguagag

SEQ ID NO: 766146 - RNA, 19 nt, Artificial Sequence
  Description of Artificial Sequence: Synthetic oligonucleotide
agcaaauccuguuuugcuu

SEQ ID NO: 766147 - RNA, 19 nt, Artificial Sequence
  Description of Artificial Sequence: Synthetic oligonucleotide
aacguguacguggaugacu

SEQ ID NO: 766148 - RNA, 19 nt, Artificial Sequence
  Description of Artificial Sequence: Synthetic oligonucleotide
uuuuguucguuguucccua

SEQ ID NO: 766149 - RNA, 19 nt, Artificial Sequence
  Description of Artificial Sequence: Synthetic oligonucleotide
ugcgggaagcaguuccggg

SEQ ID NO: 766150 - RNA, 19 nt, Artificial Sequence
  Description of Artificial Sequence: Synthetic oligonucleotide
uucaccuguggacaauuua

SEQ ID NO: 766151 - RNA, 19 nt, Artificial Sequence
  Description of Artificial Sequence: Synthetic oligonucleotide
ucugcgugcuuccuggaua

SEQ ID NO: 766152 - RNA, 19 nt, Artificial Sequence
  Description of Artificial Sequence: Synthetic oligonucleotide
uccuuacuuuccgacgagg

SEQ ID NO: 766153 - RNA, 19 nt, Artificial Sequence
  Description of Artificial Sequence: Synthetic oligonucleotide
accuuaaccaggauaagaa

SEQ ID NO: 766154 - RNA, 19 nt, Artificial Sequence
  Description of Artificial Sequence: Synthetic oligonucleotide
cagcuuugcgugauaacug

SEQ ID NO: 766155 - RNA, 19 nt, Artificial Sequence
  Description of Artificial Sequence: Synthetic oligonucleotide
caucgucacuagaaguccc

SEQ ID NO: 766156 - RNA, 19 nt, Artificial Sequence
  Description of Artificial Sequence: Synthetic oligonucleotide
gaaggauauugcggaagag

SEQ ID NO: 766157 - RNA, 19 nt, Artificial Sequence
  Description of Artificial Sequence: Synthetic oligonucleotide
aaaccaacgaaggcuucgu

SEQ ID NO: 766158 - RNA, 19 nt, Artificial Sequence
  Description of Artificial Sequence: Synthetic oligonucleotide
ggacaauuuaugugcagac

SEQ ID NO: 766159 - RNA, 19 nt, Artificial Sequence
  Description of Artificial Sequence: Synthetic oligonucleotide
guaagagcaauaauaagau

SEQ ID NO: 766160 - RNA, 19 nt, Artificial Sequence
  Description of Artificial Sequence: Synthetic oligonucleotide
uuucuaguuggggaaugga

SEQ ID NO: 766161 - RNA, 19 nt, Artificial Sequence
  Description of Artificial Sequence: Synthetic oligonucleotide
agcaacguguacguggaug

SEQ ID NO: 766162 - RNA, 19 nt, Artificial Sequence
  Description of Artificial Sequence: Synthetic oligonucleotide
ccaacucacguuuucugcg

SEQ ID NO: 766163 - RNA, 19 nt, Artificial Sequence
  Description of Artificial Sequence: Synthetic oligonucleotide
uccgcuugauucaaagcuu

SEQ ID NO: 766164 - RNA, 19 nt, Artificial Sequence
  Description of Artificial Sequence: Synthetic oligonucleotide
agcucgcccacacccgacc

SEQ ID NO: 766165 - RNA, 19 nt, Artificial Sequence
  Description of Artificial Sequence: Synthetic oligonucleotide
gaagcccauuccaaagaag

SEQ ID NO: 766166 - RNA, 19 nt, Artificial Sequence
  Description of Artificial Sequence: Synthetic oligonucleotide
cauccuuacuuuccgacga

SEQ ID NO: 766167 - RNA, 19 nt, Artificial Sequence
  Description of Artificial Sequence: Synthetic oligonucleotide
uaaagcgccccagaacugu

SEQ ID NO: 766168 - RNA, 19 nt, Artificial Sequence
  Description of Artificial Sequence: Synthetic oligonucleotide
cuuaaccaggauaagaauu

SEQ ID NO: 766169 - RNA, 19 nt, Artificial Sequence
  Description of Artificial Sequence: Synthetic oligonucleotide
ggacuuaaaagcuuuggua

SEQ ID NO: 766170 - RNA, 19 nt, Artificial Sequence
  Description of Artificial Sequence: Synthetic oligonucleotide
gauuuaagcaaauccuguu

SEQ ID NO: 766171 - RNA, 19 nt, Artificial Sequence
  Description of Artificial Sequence: Synthetic oligonucleotide
ucacacgugguagagggau

SEQ ID NO: 766172 - RNA, 19 nt, Artificial Sequence
  Description of Artificial Sequence: Synthetic oligonucleotide
uuccaacaacagauuuaag

SEQ ID NO: 766173 - RNA, 19 nt, Artificial Sequence
  Description of Artificial Sequence: Synthetic oligonucleotide
auccuucgagcuucaaucu

SEQ ID NO: 766174 - RNA, 19 nt, Artificial Sequence
  Description of Artificial Sequence: Synthetic oligonucleotide
agacaaucgauuauauuuu

SEQ ID NO: 766175 - RNA, 19 nt, Artificial Sequence
  Description of Artificial Sequence: Synthetic oligonucleotide
gcuuuuacuaacuucauuu

SEQ ID NO: 766176 - RNA, 19 nt, Artificial Sequence
  Description of Artificial Sequence: Synthetic oligonucleotide
uuaucggaaccauccuccu

SEQ ID NO: 766177 - RNA, 19 nt, Artificial Sequence
  Description of Artificial Sequence: Synthetic oligonucleotide
uccguugauccuuuucauc

SEQ ID NO: 766178 - RNA, 19 nt, Artificial Sequence
  Description of Artificial Sequence: Synthetic oligonucleotide
uugcgugauaacuguugca

SEQ ID NO: 766179 - RNA, 19 nt, Artificial Sequence
  Description of Artificial Sequence: Synthetic oligonucleotide
ccuuacuuuccgacgaggg

SEQ ID NO: 766180 - RNA, 19 nt, Artificial Sequence
  Description of Artificial Sequence: Synthetic oligonucleotide
aucaggggacuuaaaagcu

SEQ ID NO: 766181 - RNA, 19 nt, Artificial Sequence
  Description of Artificial Sequence: Synthetic oligonucleotide
gugauggaugugaaccagg

SEQ ID NO: 766182 - RNA, 19 nt, Artificial Sequence
  Description of Artificial Sequence: Synthetic oligonucleotide
ccuucgagcuucaaucucc

SEQ ID NO: 766183 - RNA, 19 nt, Artificial Sequence
  Description of Artificial Sequence: Synthetic oligonucleotide
uuaccuuaaccaggauaag

SEQ ID NO: 766184 - RNA, 19 nt, Artificial Sequence
  Description of Artificial Sequence: Synthetic oligonucleotide
agcuuuaaagcgccccaga

SEQ ID NO: 766185 - RNA, 19 nt, Artificial Sequence
  Description of Artificial Sequence: Synthetic oligonucleotide
aacucgucuugccugcguu

SEQ ID NO: 766186 - RNA, 19 nt, Artificial Sequence
  Description of Artificial Sequence: Synthetic oligonucleotide
ucguaguaggaaucaggaa

SEQ ID NO: 766187 - RNA, 19 nt, Artificial Sequence
  Description of Artificial Sequence: Synthetic oligonucleotide
cuuacuuuccgacgaggga

SEQ ID NO: 766188 - RNA, 19 nt, Artificial Sequence
  Description of Artificial Sequence: Synthetic oligonucleotide
aucuguugagaggucaacu

SEQ ID NO: 766189 - RNA, 19 nt, Artificial Sequence
  Description of Artificial Sequence: Synthetic oligonucleotide
auugcggaagagcuuuaaa

SEQ ID NO: 766190 - RNA, 19 nt, Artificial Sequence
  Description of Artificial Sequence: Synthetic oligonucleotide
uccuucgagcuucaaucuc

SEQ ID NO: 766191 - RNA, 19 nt, Artificial Sequence
  Description of Artificial Sequence: Synthetic oligonucleotide
acauccagugaaauguagu

SEQ ID NO: 766192 - RNA, 19 nt, Artificial Sequence
  Description of Artificial Sequence: Synthetic oligonucleotide
uuaacucgucuugccugcg

SEQ ID NO: 766193 - RNA, 19 nt, Artificial Sequence
  Description of Artificial Sequence: Synthetic oligonucleotide
aaagcgccccagaacuguc

SEQ ID NO: 766194 - RNA, 19 nt, Artificial Sequence
  Description of Artificial Sequence: Synthetic oligonucleotide
cacguuuucugcgugcuuc

SEQ ID NO: 766195 - RNA, 19 nt, Artificial Sequence
  Description of Artificial Sequence: Synthetic oligonucleotide
guuuagagccauggagucc

SEQ ID NO: 766196 - RNA, 19 nt, Artificial Sequence
  Description of Artificial Sequence: Synthetic oligonucleotide
auccuuacuuuccgacgag

SEQ ID NO: 766197 - RNA, 19 nt, Artificial Sequence
  Description of Artificial Sequence: Synthetic oligonucleotide
cuaguuggggaauggaugu

SEQ ID NO: 766198 - RNA, 19 nt, Artificial Sequence
  Description of Artificial Sequence: Synthetic oligonucleotide
gcaaauaggaugauucaca

SEQ ID NO: 766199 - RNA, 19 nt, Artificial Sequence
  Description of Artificial Sequence: Synthetic oligonucleotide
guucccuaaaugucuuuga

SEQ ID NO: 766200 - RNA, 19 nt, Artificial Sequence
  Description of Artificial Sequence: Synthetic oligonucleotide
uuguucguuguucccuaaa

SEQ ID NO: 766201 - RNA, 19 nt, Artificial Sequence
  Description of Artificial Sequence: Synthetic oligonucleotide
ugccugcguuucaaaagug

SEQ ID NO: 766202 - RNA, 19 nt, Artificial Sequence
  Description of Artificial Sequence: Synthetic oligonucleotide
ggaucuuaacuauggguga

SEQ ID NO: 766203 - RNA, 19 nt, Artificial Sequence
  Description of Artificial Sequence: Synthetic oligonucleotide
aaguccccuccugaugguc

SEQ ID NO: 766204 - RNA, 19 nt, Artificial Sequence
  Description of Artificial Sequence: Synthetic oligonucleotide
aguaggaaucaggaaacuu

SEQ ID NO: 766205 - RNA, 19 nt, Artificial Sequence
  Description of Artificial Sequence: Synthetic oligonucleotide
cucggccccgguuaccacg

SEQ ID NO: 766206 - RNA, 19 nt, Artificial Sequence
  Description of Artificial Sequence: Synthetic oligonucleotide
uacguggaugacucuaguu

SEQ ID NO: 766207 - RNA, 19 nt, Artificial Sequence
  Description of Artificial Sequence: Synthetic oligonucleotide
uaucggaaccauccuccuc

SEQ ID NO: 766208 - RNA, 19 nt, Artificial Sequence
  Description of Artificial Sequence: Synthetic oligonucleotide
ggagcuagcucaucgucac

SEQ ID NO: 766209 - RNA, 19 nt, Artificial Sequence
  Description of Artificial Sequence: Synthetic oligonucleotide
ucugagggacuccgcuuga

SEQ ID NO: 766210 - RNA, 19 nt, Artificial Sequence
  Description of Artificial Sequence: Synthetic oligonucleotide
gcaacguguacguggauga

SEQ ID NO: 766211 - RNA, 19 nt, Artificial Sequence
  Description of Artificial Sequence: Synthetic oligonucleotide
gccaacucacguuuucugc

SEQ ID NO: 766212 - RNA, 19 nt, Artificial Sequence
  Description of Artificial Sequence: Synthetic oligonucleotide
cagugaaauguagucacca

SEQ ID NO: 766213 - RNA, 19 nt, Artificial Sequence
  Description of Artificial Sequence: Synthetic oligonucleotide
gcgggaagcaguuccgggg

SEQ ID NO: 766214 - RNA, 19 nt, Artificial Sequence
  Description of Artificial Sequence: Synthetic oligonucleotide
cucagcuuugcgugauaac

SEQ ID NO: 766215 - RNA, 19 nt, Artificial Sequence
  Description of Artificial Sequence: Synthetic oligonucleotide
uaacucgucuugccugcgu

SEQ ID NO: 766216 - RNA, 19 nt, Artificial Sequence
  Description of Artificial Sequence: Synthetic oligonucleotide
uuuguucguuguucccuaa

SEQ ID NO: 766217 - RNA, 19 nt, Artificial Sequence
  Description of Artificial Sequence: Synthetic oligonucleotide
aaacucugugauggaugug

SEQ ID NO: 766218 - RNA, 19 nt, Artificial Sequence
  Description of Artificial Sequence: Synthetic oligonucleotide
auccguugauccuuuucau

SEQ ID NO: 766219 - RNA, 19 nt, Artificial Sequence
  Description of Artificial Sequence: Synthetic oligonucleotide
cuucuauugauuucuuaau

SEQ ID NO: 766220 - RNA, 19 nt, Artificial Sequence
  Description of Artificial Sequence: Synthetic oligonucleotide
uggcauucguaagagcaau

SEQ ID NO: 766221 - RNA, 19 nt, Artificial Sequence
  Description of Artificial Sequence: Synthetic oligonucleotide
guaggaaucaggaaacuuu

SEQ ID NO: 766222 - RNA, 19 nt, Artificial Sequence
  Description of Artificial Sequence: Synthetic oligonucleotide
uggagccaagcuuccauuu

SEQ ID NO: 766223 - RNA, 19 nt, Artificial Sequence
  Description of Artificial Sequence: Synthetic oligonucleotide
caggagcuagcucaucguc

SEQ ID NO: 766224 - RNA, 19 nt, Artificial Sequence
  Description of Artificial Sequence: Synthetic oligonucleotide
aguuuucuaguuggggaau

SEQ ID NO: 766225 - RNA, 19 nt, Artificial Sequence
  Description of Artificial Sequence: Synthetic oligonucleotide
agcgcccuugcuugucuuc

SEQ ID NO: 766226 - RNA, 19 nt, Artificial Sequence
  Description of Artificial Sequence: Synthetic oligonucleotide
uauugcggaagagcuuuaa

SEQ ID NO: 766227 - RNA, 19 nt, Artificial Sequence
  Description of Artificial Sequence: Synthetic oligonucleotide
cacuagaaguccccuccug

SEQ ID NO: 766228 - RNA, 19 nt, Artificial Sequence
  Description of Artificial Sequence: Synthetic oligonucleotide
cuagagcuaugggaggcug

SEQ ID NO: 766229 - RNA, 19 nt, Artificial Sequence
  Description of Artificial Sequence: Synthetic oligonucleotide
aaccaacgaaggcuucgua

SEQ ID NO: 766230 - RNA, 19 nt, Artificial Sequence
  Description of Artificial Sequence: Synthetic oligonucleotide
aggagcuagcucaucguca

SEQ ID NO: 766231 - RNA, 19 nt, Artificial Sequence
  Description of Artificial Sequence: Synthetic oligonucleotide
ucgucuugccugcguuuca

SEQ ID NO: 766232 - RNA, 19 nt, Artificial Sequence
  Description of Artificial Sequence: Synthetic oligonucleotide
augucucagcuuugcguga

SEQ ID NO: 766233 - RNA, 19 nt, Artificial Sequence
  Description of Artificial Sequence: Synthetic oligonucleotide
gugauaacuguugcaaaua

SEQ ID NO: 766234 - RNA, 19 nt, Artificial Sequence
  Description of Artificial Sequence: Synthetic oligonucleotide
ugguagagggaugguuuac

SEQ ID NO: 766235 - RNA, 19 nt, Artificial Sequence
  Description of Artificial Sequence: Synthetic oligonucleotide
uggccaacucacguuuucu

SEQ ID NO: 766236 - RNA, 19 nt, Artificial Sequence
  Description of Artificial Sequence: Synthetic oligonucleotide
acuagagcuaugggaggcu

SEQ ID NO: 766237 - RNA, 19 nt, Artificial Sequence
  Description of Artificial Sequence: Synthetic oligonucleotide
uuccgacgagggaugugcu

SEQ ID NO: 766238 - RNA, 19 nt, Artificial Sequence
  Description of Artificial Sequence: Synthetic oligonucleotide
gcuagcucaucgucacuag

SEQ ID NO: 766239 - RNA, 19 nt, Artificial Sequence
  Description of Artificial Sequence: Synthetic oligonucleotide
cacacgugguagagggaug

SEQ ID NO: 766240 - RNA, 19 nt, Artificial Sequence
  Description of Artificial Sequence: Synthetic oligonucleotide
cuagcucaucgucacuaga

SEQ ID NO: 766241 - RNA, 19 nt, Artificial Sequence
  Description of Artificial Sequence: Synthetic oligonucleotide
cccuaaaugucuuugauuu

SEQ ID NO: 766242 - RNA, 19 nt, Artificial Sequence
  Description of Artificial Sequence: Synthetic oligonucleotide
cauucuuugucugaguguu

SEQ ID NO: 766243 - RNA, 19 nt, Artificial Sequence
  Description of Artificial Sequence: Synthetic oligonucleotide
acauuggaucccaaauaaa

SEQ ID NO: 766244 - RNA, 19 nt, Artificial Sequence
  Description of Artificial Sequence: Synthetic oligonucleotide
gggacuuaaaagcuuuggu

SEQ ID NO: 766245 - RNA, 19 nt, Artificial Sequence
  Description of Artificial Sequence: Synthetic oligonucleotide
gcuuuaaagcgccccagaa

SEQ ID NO: 766246 - RNA, 19 nt, Artificial Sequence
  Description of Artificial Sequence: Synthetic oligonucleotide
gaugugaaccagggcaucu

SEQ ID NO: 766247 - RNA, 19 nt, Artificial Sequence
  Description of Artificial Sequence: Synthetic oligonucleotide
aaaugucaccuuggcguuu

SEQ ID NO: 766248 - RNA, 19 nt, Artificial Sequence
  Description of Artificial Sequence: Synthetic oligonucleotide
ucguaucaggggacuuaaa

SEQ ID NO: 766249 - RNA, 19 nt, Artificial Sequence
  Description of Artificial Sequence: Synthetic oligonucleotide
gaaccagggcaucugguuu

SEQ ID NO: 766250 - RNA, 19 nt, Artificial Sequence
  Description of Artificial Sequence: Synthetic oligonucleotide
ggauggcauucguaagagc

SEQ ID NO: 766251 - RNA, 19 nt, Artificial Sequence
  Description of Artificial Sequence: Synthetic oligonucleotide
cacucaaacgccugaaauu

SEQ ID NO: 766252 - RNA, 19 nt, Artificial Sequence
  Description of Artificial Sequence: Synthetic oligonucleotide
acugucuuucuuggaacuu

SEQ ID NO: 766253 - RNA, 19 nt, Artificial Sequence
  Description of Artificial Sequence: Synthetic oligonucleotide
aacucguaucaggggacuu

SEQ ID NO: 766254 - RNA, 19 nt, Artificial Sequence
  Description of Artificial Sequence: Synthetic oligonucleotide
ggaugacucuaguuccuca

SEQ ID NO: 766255 - RNA, 19 nt, Artificial Sequence
  Description of Artificial Sequence: Synthetic oligonucleotide
acucguaucaggggacuua

SEQ ID NO: 766256 - RNA, 19 nt, Artificial Sequence
  Description of Artificial Sequence: Synthetic oligonucleotide
guagagggaugguuuacau

SEQ ID NO: 766257 - RNA, 19 nt, Artificial Sequence
  Description of Artificial Sequence: Synthetic oligonucleotide
gguagagggaugguuuaca

SEQ ID NO: 766258 - RNA, 19 nt, Artificial Sequence
  Description of Artificial Sequence: Synthetic oligonucleotide
cugcgggaagcaguuccgg

SEQ ID NO: 766259 - RNA, 19 nt, Artificial Sequence
  Description of Artificial Sequence: Synthetic oligonucleotide
ucacguuuucugcgugcuu

SEQ ID NO: 766260 - RNA, 19 nt, Artificial Sequence
  Description of Artificial Sequence: Synthetic oligonucleotide
cccugcgggaagcaguucc

SEQ ID NO: 766261 - RNA, 19 nt, Artificial Sequence
  Description of Artificial Sequence: Synthetic oligonucleotide
aagcaacguguacguggau

SEQ ID NO: 766262 - RNA, 19 nt, Artificial Sequence
  Description of Artificial Sequence: Synthetic oligonucleotide
cugcgugcuuccuggauaa

SEQ ID NO: 766263 - RNA, 19 nt, Artificial Sequence
  Description of Artificial Sequence: Synthetic oligonucleotide
gcugcuaucuggcugcacu

SEQ ID NO: 766264 - RNA, 19 nt, Artificial Sequence
  Description of Artificial Sequence: Synthetic oligonucleotide
gccugcguuucaaaagugc

SEQ ID NO: 766265 - RNA, 19 nt, Artificial Sequence
  Description of Artificial Sequence: Synthetic oligonucleotide
gcuucguaguaggaaucag

SEQ ID NO: 766266 - RNA, 19 nt, Artificial Sequence
  Description of Artificial Sequence: Synthetic oligonucleotide
uccgacgagggaugugcuu

SEQ ID NO: 766267 - RNA, 19 nt, Artificial Sequence
  Description of Artificial Sequence: Synthetic oligonucleotide
aguugccagagagcgcccu

SEQ ID NO: 766268 - RNA, 19 nt, Artificial Sequence
  Description of Artificial Sequence: Synthetic oligonucleotide
guguacguggaugacucua

SEQ ID NO: 766269 - RNA, 19 nt, Artificial Sequence
  Description of Artificial Sequence: Synthetic oligonucleotide
cucguaucaggggacuuaa

SEQ ID NO: 766270 - RNA, 19 nt, Artificial Sequence
  Description of Artificial Sequence: Synthetic oligonucleotide
cuuuccgacgagggaugug

SEQ ID NO: 766271 - RNA, 19 nt, Artificial Sequence
  Description of Artificial Sequence: Synthetic oligonucleotide
caacguguacguggaugac

SEQ ID NO: 766272 - RNA, 19 nt, Artificial Sequence
  Description of Artificial Sequence: Synthetic oligonucleotide
acgugguagagggaugguu

SEQ ID NO: 766273 - RNA, 19 nt, Artificial Sequence
  Description of Artificial Sequence: Synthetic oligonucleotide
caacgaaggcuucguagua

SEQ ID NO: 766274 - RNA, 19 nt, Artificial Sequence
  Description of Artificial Sequence: Synthetic oligonucleotide
cguaucaggggacuuaaaa

SEQ ID NO: 766275 - RNA, 19 nt, Artificial Sequence
  Description of Artificial Sequence: Synthetic oligonucleotide
agcugcuaucuggcugcac

SEQ ID NO: 766276 - RNA, 19 nt, Artificial Sequence
  Description of Artificial Sequence: Synthetic oligonucleotide
acgccugaaauuggggaua

SEQ ID NO: 766277 - RNA, 19 nt, Artificial Sequence
  Description of Artificial Sequence: Synthetic oligonucleotide
caacucacguuuucugcgu

SEQ ID NO: 766278 - RNA, 19 nt, Artificial Sequence
  Description of Artificial Sequence: Synthetic oligonucleotide
ggcuucguaguaggaauca

SEQ ID NO: 766279 - RNA, 19 nt, Artificial Sequence
  Description of Artificial Sequence: Synthetic oligonucleotide
gcuugauucaaagcuuuua

SEQ ID NO: 766280 - RNA, 19 nt, Artificial Sequence
  Description of Artificial Sequence: Synthetic oligonucleotide
gcacucaaacgccugaaau

SEQ ID NO: 766281 - RNA, 19 nt, Artificial Sequence
  Description of Artificial Sequence: Synthetic oligonucleotide
gaacucguaucaggggacu

SEQ ID NO: 766282 - RNA, 19 nt, Artificial Sequence
  Description of Artificial Sequence: Synthetic oligonucleotide
guuugaggcuuuggggcaa

SEQ ID NO: 766283 - RNA, 19 nt, Artificial Sequence
  Description of Artificial Sequence: Synthetic oligonucleotide
ccaacgaaggcuucguagu

SEQ ID NO: 766284 - RNA, 19 nt, Artificial Sequence
  Description of Artificial Sequence: Synthetic oligonucleotide
guacguggaugacucuagu

SEQ ID NO: 766285 - RNA, 19 nt, Artificial Sequence
  Description of Artificial Sequence: Synthetic oligonucleotide
acuaugggugaaacuucuu

SEQ ID NO: 766286 - RNA, 19 nt, Artificial Sequence
  Description of Artificial Sequence: Synthetic oligonucleotide
ccugcguuucaaaagugcu

SEQ ID NO: 766287 - RNA, 19 nt, Artificial Sequence
  Description of Artificial Sequence: Synthetic oligonucleotide
ggagccaagcuuccauuua

SEQ ID NO: 766288 - RNA, 19 nt, Artificial Sequence
  Description of Artificial Sequence: Synthetic oligonucleotide
gguccuggccaacucacgu

SEQ ID NO: 766289 - RNA, 19 nt, Artificial Sequence
  Description of Artificial Sequence: Synthetic oligonucleotide
ccgacgagggaugugcuuc

SEQ ID NO: 766290 - RNA, 19 nt, Artificial Sequence
  Description of Artificial Sequence: Synthetic oligonucleotide
gcgugauaacuguugcaaa

SEQ ID NO: 766291 - RNA, 19 nt, Artificial Sequence
  Description of Artificial Sequence: Synthetic oligonucleotide
cucgcccacacccgaccuc

SEQ ID NO: 766292 - RNA, 19 nt, Artificial Sequence
  Description of Artificial Sequence: Synthetic oligonucleotide
gaaguccccuccugauggu

SEQ ID NO: 766293 - RNA, 19 nt, Artificial Sequence
  Description of Artificial Sequence: Synthetic oligonucleotide
guuggggaauggauguccu

SEQ ID NO: 766294 - RNA, 19 nt, Artificial Sequence
  Description of Artificial Sequence: Synthetic oligonucleotide
cugcguuucaaaagugcuu

SEQ ID NO: 766295 - RNA, 19 nt, Artificial Sequence
  Description of Artificial Sequence: Synthetic oligonucleotide
ggagcucgcccacacccga

SEQ ID NO: 766296 - RNA, 19 nt, Artificial Sequence
  Description of Artificial Sequence: Synthetic oligonucleotide
gggaggcuggacucugauc

SEQ ID NO: 766297 - RNA, 19 nt, Artificial Sequence
  Description of Artificial Sequence: Synthetic oligonucleotide
cucacguuuucugcgugcu

SEQ ID NO: 766298 - RNA, 19 nt, Artificial Sequence
  Description of Artificial Sequence: Synthetic oligonucleotide
auauugcggaagagcuuua

SEQ ID NO: 766299 - RNA, 19 nt, Artificial Sequence
  Description of Artificial Sequence: Synthetic oligonucleotide
gagcucgcccacacccgac

SEQ ID NO: 766300 - RNA, 19 nt, Artificial Sequence
  Description of Artificial Sequence: Synthetic oligonucleotide
gucacacgugguagaggga

SEQ ID NO: 766301 - RNA, 19 nt, Artificial Sequence
  Description of Artificial Sequence: Synthetic oligonucleotide
cgugauaacuguugcaaau

SEQ ID NO: 766302 - RNA, 19 nt, Artificial Sequence
  Description of Artificial Sequence: Synthetic oligonucleotide
cugcgcggcggcuccgcuc

SEQ ID NO: 766303 - RNA, 19 nt, Artificial Sequence
  Description of Artificial Sequence: Synthetic oligonucleotide
gauagcgauucagcagcuu

SEQ ID NO: 766304 - RNA, 19 nt, Artificial Sequence
  Description of Artificial Sequence: Synthetic oligonucleotide
gcgugcuuccuggauaaaa

SEQ ID NO: 766305 - RNA, 19 nt, Artificial Sequence
  Description of Artificial Sequence: Synthetic oligonucleotide
gcagaguucucaaaccauu

SEQ ID NO: 766306 - RNA, 19 nt, Artificial Sequence
  Description of Artificial Sequence: Synthetic oligonucleotide
guccuagaucuugcaaggu

SEQ ID NO: 766307 - RNA, 19 nt, Artificial Sequence
  Description of Artificial Sequence: Synthetic oligonucleotide
ugcgugcuuccuggauaaa

SEQ ID NO: 766308 - RNA, 19 nt, Artificial Sequence
  Description of Artificial Sequence: Synthetic oligonucleotide
ccccgguuaccacgggccc

SEQ ID NO: 766309 - RNA, 19 nt, Artificial Sequence
  Description of Artificial Sequence: Synthetic oligonucleotide
gccgggagcucgcccacac

SEQ ID NO: 766310 - RNA, 19 nt, Artificial Sequence
  Description of Artificial Sequence: Synthetic oligonucleotide
gggaugguuuacauccagu

SEQ ID NO: 766311 - RNA, 19 nt, Artificial Sequence
  Description of Artificial Sequence: Synthetic oligonucleotide
gcuaucuggcugcacuuuu

SEQ ID NO: 766312 - RNA, 19 nt, Artificial Sequence
  Description of Artificial Sequence: Synthetic oligonucleotide
ggcauucguaagagcaaua

SEQ ID NO: 766313 - RNA, 19 nt, Artificial Sequence
  Description of Artificial Sequence: Synthetic oligonucleotide
gcguuucaaaagugcuucu

SEQ ID NO: 766314 - RNA, 19 nt, Artificial Sequence
  Description of Artificial Sequence: Synthetic oligonucleotide
ggauuccaaucaagcaacu

SEQ ID NO: 766315 - RNA, 19 nt, Artificial Sequence
  Description of Artificial Sequence: Synthetic oligonucleotide
ggcgaggaacaacugucuu

SEQ ID NO: 766316 - RNA, 19 nt, Artificial Sequence
  Description of Artificial Sequence: Synthetic oligonucleotide
ccuaaaugucuuugauuuu

SEQ ID NO: 766317 - RNA, 19 nt, Artificial Sequence
  Description of Artificial Sequence: Synthetic oligonucleotide
gccugaaauuggggauaug

SEQ ID NO: 766318 - RNA, 19 nt, Artificial Sequence
  Description of Artificial Sequence: Synthetic oligonucleotide
gagcgcccuugcuugucuu

SEQ ID NO: 766319 - RNA, 19 nt, Artificial Sequence
  Description of Artificial Sequence: Synthetic oligonucleotide
cgauuauauuuuccacaua

SEQ ID NO: 766320 - RNA, 19 nt, Artificial Sequence
  Description of Artificial Sequence: Synthetic oligonucleotide
caccgcggucccugcggga

SEQ ID NO: 766321 - RNA, 19 nt, Artificial Sequence
  Description of Artificial Sequence: Synthetic oligonucleotide
ccgcuugauucaaagcuuu

SEQ ID NO: 766322 - RNA, 19 nt, Artificial Sequence
  Description of Artificial Sequence: Synthetic oligonucleotide
ccucggccccgguuaccac

SEQ ID NO: 766323 - RNA, 19 nt, Artificial Sequence
  Description of Artificial Sequence: Synthetic oligonucleotide
gcucgcccacacccgaccu

SEQ ID NO: 766324 - RNA, 19 nt, Artificial Sequence
  Description of Artificial Sequence: Synthetic oligonucleotide
gcgcccuugcuugucuucu

SEQ ID NO: 766325 - RNA, 19 nt, Artificial Sequence
  Description of Artificial Sequence: Synthetic oligonucleotide
ccgccugcagacggccggc

SEQ ID NO: 766326 - RNA, 19 nt, Artificial Sequence
  Description of Artificial Sequence: Synthetic oligonucleotide
ggacuccgcuugauucaaa

SEQ ID NO: 766327 - RNA, 19 nt, Artificial Sequence
  Description of Artificial Sequence: Synthetic oligonucleotide
cgacgagggaugugcuucu

SEQ ID NO: 766328 - RNA, 19 nt, Artificial Sequence
  Description of Artificial Sequence: Synthetic oligonucleotide
cguguacguggaugacucu

SEQ ID NO: 766329 - RNA, 19 nt, Artificial Sequence
  Description of Artificial Sequence: Synthetic oligonucleotide
gcgccccagaacugucuuu

SEQ ID NO: 766330 - RNA, 19 nt, Artificial Sequence
  Description of Artificial Sequence: Synthetic oligonucleotide
cccgguuaccacgggcccu

SEQ ID NO: 766331 - RNA, 19 nt, Artificial Sequence
  Description of Artificial Sequence: Synthetic oligonucleotide
cgccugaaauuggggauau

SEQ ID NO: 766332 - RNA, 19 nt, Artificial Sequence
  Description of Artificial Sequence: Synthetic oligonucleotide
aagaauaaguaauuucugc

SEQ ID NO: 766333 - RNA, 19 nt, Artificial Sequence
  Description of Artificial Sequence: Synthetic oligonucleotide
uucacuauaaggcaucucg

SEQ ID NO: 766334 - RNA, 19 nt, Artificial Sequence
  Description of Artificial Sequence: Synthetic oligonucleotide
aacuaacagauucagcacc

SEQ ID NO: 766335 - RNA, 19 nt, Artificial Sequence
  Description of Artificial Sequence: Synthetic oligonucleotide
aaagugauaaucaaaacug

SEQ ID NO: 766336 - RNA, 19 nt, Artificial Sequence
  Description of Artificial Sequence: Synthetic oligonucleotide
gaaucuuugaauauuaaag

SEQ ID NO: 766337 - RNA, 19 nt, Artificial Sequence
  Description of Artificial Sequence: Synthetic oligonucleotide
agaacuaacagauucagca

SEQ ID NO: 766338 - RNA, 19 nt, Artificial Sequence
  Description of Artificial Sequence: Synthetic oligonucleotide
agcugauuaacauuguacc

SEQ ID NO: 766339 - RNA, 19 nt, Artificial Sequence
  Description of Artificial Sequence: Synthetic oligonucleotide
uugaaauucguaacgaucc

SEQ ID NO: 766340 - RNA, 19 nt, Artificial Sequence
  Description of Artificial Sequence: Synthetic oligonucleotide
aaaguaaucagcaugccag

SEQ ID NO: 766341 - RNA, 19 nt, Artificial Sequence
  Description of Artificial Sequence: Synthetic oligonucleotide
  modified_base (15)..(15): a, c, u, g, unknown or other
acaacuguaaggaanaccc

SEQ ID NO: 766342 - RNA, 19 nt, Artificial Sequence
  Description of Artificial Sequence: Synthetic oligonucleotide
cuugugagacaauagaugg

SEQ ID NO: 766343 - RNA, 19 nt, Artificial Sequence
  Description of Artificial Sequence: Synthetic oligonucleotide
  modified_base (16)..(16): a, c, u, g, unknown or other
aacaacuguaaggaanacc

SEQ ID NO: 766344 - RNA, 19 nt, Artificial Sequence
  Description of Artificial Sequence: Synthetic oligonucleotide
auaguuagaauacucauca

SEQ ID NO: 766345 - RNA, 19 nt, Artificial Sequence
  Description of Artificial Sequence: Synthetic oligonucleotide
ucgagaaaucgaaagaccg

SEQ ID NO: 766346 - RNA, 19 nt, Artificial Sequence
  Description of Artificial Sequence: Synthetic oligonucleotide
ugaagaaucacaaaaugua

SEQ ID NO: 766347 - RNA, 19 nt, Artificial Sequence
  Description of Artificial Sequence: Synthetic oligonucleotide
ucugauaccuuacaacugc

SEQ ID NO: 766348 - RNA, 19 nt, Artificial Sequence
  Description of Artificial Sequence: Synthetic oligonucleotide
  modified_base (8)..(8): a, c, u, g, unknown or other
uaaggaanacccuugugag

SEQ ID NO: 766349 - RNA, 19 nt, Artificial Sequence
  Description of Artificial Sequence: Synthetic oligonucleotide
uauuguguuuccuccaugg

SEQ ID NO: 766350 - RNA, 19 nt, Artificial Sequence
  Description of Artificial Sequence: Synthetic oligonucleotide
aacacgaugccaucucggc

SEQ ID NO: 766351 - RNA, 19 nt, Artificial Sequence
  Description of Artificial Sequence: Synthetic oligonucleotide
acauaacuaacauccauuc

SEQ ID NO: 766352 - RNA, 19 nt, Artificial Sequence
  Description of Artificial Sequence: Synthetic oligonucleotide
agcuacucaaaguuaagac

SEQ ID NO: 766353 - RNA, 19 nt, Artificial Sequence
  Description of Artificial Sequence: Synthetic oligonucleotide
uuuauuaccaggcgucucc

SEQ ID NO: 766354 - RNA, 19 nt, Artificial Sequence
  Description of Artificial Sequence: Synthetic oligonucleotide
uuaguguugucuauuauaa

SEQ ID NO: 766355 - RNA, 19 nt, Artificial Sequence
  Description of Artificial Sequence: Synthetic oligonucleotide
ugaucaaaagcaaacaguu

SEQ ID NO: 766356 - RNA, 19 nt, Artificial Sequence
  Description of Artificial Sequence: Synthetic oligonucleotide
aaguacugcagguaaccac

SEQ ID NO: 766357 - RNA, 19 nt, Artificial Sequence
  Description of Artificial Sequence: Synthetic oligonucleotide
uuugaaauucguaacgauc

SEQ ID NO: 766358 - RNA, 19 nt, Artificial Sequence
  Description of Artificial Sequence: Synthetic oligonucleotide
aaaauguuuggugguagac

SEQ ID NO: 766359 - RNA, 19 nt, Artificial Sequence
  Description of Artificial Sequence: Synthetic oligonucleotide
aaaccugucuguucuauug

SEQ ID NO: 766360 - RNA, 19 nt, Artificial Sequence
  Description of Artificial Sequence: Synthetic oligonucleotide
  modified_base (6)..(6): a, c, u, g, unknown or other
aggaanacccuugugagac

SEQ ID NO: 766361 - RNA, 19 nt, Artificial Sequence
  Description of Artificial Sequence: Synthetic oligonucleotide
aaauucguaacgauccaac

SEQ ID NO: 766362 - RNA, 19 nt, Artificial Sequence
  Description of Artificial Sequence: Synthetic oligonucleotide
gaaaucgaaagaccguccg

SEQ ID NO: 766363 - RNA, 19 nt, Artificial Sequence
  Description of Artificial Sequence: Synthetic oligonucleotide
cuugaugaugaaaauaguc

SEQ ID NO: 766364 - RNA, 19 nt, Artificial Sequence
  Description of Artificial Sequence: Synthetic oligonucleotide
uauagauuucaucaucccu

SEQ ID NO: 766365 - RNA, 19 nt, Artificial Sequence
  Description of Artificial Sequence: Synthetic oligonucleotide
uaacgauccaacaucugag

SEQ ID NO: 766366 - RNA, 19 nt, Artificial Sequence
  Description of Artificial Sequence: Synthetic oligonucleotide
uuuuccuauggccauuucc

SEQ ID NO: 766367 - RNA, 19 nt, Artificial Sequence
  Description of Artificial Sequence: Synthetic oligonucleotide
uguacugacugccauucag

SEQ ID NO: 766368 - RNA, 19 nt, Artificial Sequence
  Description of Artificial Sequence: Synthetic oligonucleotide
ucaggaucaaacuuccacc

SEQ ID NO: 766369 - RNA, 19 nt, Artificial Sequence
  Description of Artificial Sequence: Synthetic oligonucleotide
ugaaaauagucaucagugc

SEQ ID NO: 766370 - RNA, 19 nt, Artificial Sequence
  Description of Artificial Sequence: Synthetic oligonucleotide
aucuacuuuauuaccaggc

SEQ ID NO: 766371 - RNA, 19 nt, Artificial Sequence
  Description of Artificial Sequence: Synthetic oligonucleotide
uuuuaagguaucauugguc

SEQ ID NO: 766372 - RNA, 19 nt, Artificial Sequence
  Description of Artificial Sequence: Synthetic oligonucleotide
aauuucacuauaaggcauc

SEQ ID NO: 766373 - RNA, 19 nt, Artificial Sequence
  Description of Artificial Sequence: Synthetic oligonucleotide
aaucgaaagaccguccgag

SEQ ID NO: 766374 - RNA, 19 nt, Artificial Sequence
  Description of Artificial Sequence: Synthetic oligonucleotide
ugaccaagcagaauucgag

SEQ ID NO: 766375 - RNA, 19 nt, Artificial Sequence
  Description of Artificial Sequence: Synthetic oligonucleotide
uagauagcgaugaagacuu

SEQ ID NO: 766376 - RNA, 19 nt, Artificial Sequence
  Description of Artificial Sequence: Synthetic oligonucleotide
ucgcaaaagaauaaguaau

SEQ ID NO: 766377 - RNA, 19 nt, Artificial Sequence
  Description of Artificial Sequence: Synthetic oligonucleotide
ugggguaugacaaacggau

SEQ ID NO: 766378 - RNA, 19 nt, Artificial Sequence
  Description of Artificial Sequence: Synthetic oligonucleotide
  modified_base (9)..(9): a, c, u, g, unknown or other
guaaggaanacccuuguga

SEQ ID NO: 766379 - RNA, 19 nt, Artificial Sequence
  Description of Artificial Sequence: Synthetic oligonucleotide
uucguaacgauccaacauc

SEQ ID NO: 766380 - RNA, 19 nt, Artificial Sequence
  Description of Artificial Sequence: Synthetic oligonucleotide
aauucguaacgauccaaca

SEQ ID NO: 766381 - RNA, 19 nt, Artificial Sequence
  Description of Artificial Sequence: Synthetic oligonucleotide
ucuauuauaacuggagauc

SEQ ID NO: 766382 - RNA, 19 nt, Artificial Sequence
  Description of Artificial Sequence: Synthetic oligonucleotide
ucuuccgagacacaccaug

SEQ ID NO: 766383 - RNA, 19 nt, Artificial Sequence
  Description of Artificial Sequence: Synthetic oligonucleotide
uacuuuauuaccaggcguc

SEQ ID NO: 766384 - RNA, 19 nt, Artificial Sequence
  Description of Artificial Sequence: Synthetic oligonucleotide
uauuuagcuucucuucuug

SEQ ID NO: 766385 - RNA, 19 nt, Artificial Sequence
  Description of Artificial Sequence: Synthetic oligonucleotide
uuugugaguucuuuuccag

SEQ ID NO: 766386 - RNA, 19 nt, Artificial Sequence
  Description of Artificial Sequence: Synthetic oligonucleotide
acaaaauguagguaucacu

SEQ ID NO: 766387 - RNA, 19 nt, Artificial Sequence
  Description of Artificial Sequence: Synthetic oligonucleotide
ugaucgauagcuuguuuug

SEQ ID NO: 766388 - RNA, 19 nt, Artificial Sequence
  Description of Artificial Sequence: Synthetic oligonucleotide
ugcuacucaaaccauaguu

SEQ ID NO: 766389 - RNA, 19 nt, Artificial Sequence
  Description of Artificial Sequence: Synthetic oligonucleotide
accacaacgugucugaaga

SEQ ID NO: 766390 - RNA, 19 nt, Artificial Sequence
  Description of Artificial Sequence: Synthetic oligonucleotide
caucucgagaaaucgaaag

SEQ ID NO: 766391 - RNA, 19 nt, Artificial Sequence
  Description of Artificial Sequence: Synthetic oligonucleotide
ucauuuguuccugggaagg

SEQ ID NO: 766392 - RNA, 19 nt, Artificial Sequence
  Description of Artificial Sequence: Synthetic oligonucleotide
augacaaacggauguacug

SEQ ID NO: 766393 - RNA, 19 nt, Artificial Sequence
  Description of Artificial Sequence: Synthetic oligonucleotide
aaccauaguuagaauacuc

SEQ ID NO: 766394 - RNA, 19 nt, Artificial Sequence
  Description of Artificial Sequence: Synthetic oligonucleotide
  modified_base (7)..(7): a, c, u, g, unknown or other
aaggaanacccuugugaga

SEQ ID NO: 766395 - RNA, 19 nt, Artificial Sequence
  Description of Artificial Sequence: Synthetic oligonucleotide
uuaagacaggcucacuacu

SEQ ID NO: 766396 - RNA, 19 nt, Artificial Sequence
  Description of Artificial Sequence: Synthetic oligonucleotide
aguuagaauacucaucauu

SEQ ID NO: 766397 - RNA, 19 nt, Artificial Sequence
  Description of Artificial Sequence: Synthetic oligonucleotide
uagauuucaucaucccuag

SEQ ID NO: 766398 - RNA, 19 nt, Artificial Sequence
  Description of Artificial Sequence: Synthetic oligonucleotide
ugguucauccuccaaguac

SEQ ID NO: 766399 - RNA, 19 nt, Artificial Sequence
  Description of Artificial Sequence: Synthetic oligonucleotide
uguucuauuguguuuccuc

SEQ ID NO: 766400 - RNA, 19 nt, Artificial Sequence
  Description of Artificial Sequence: Synthetic oligonucleotide
acugacugccauucaggcc

SEQ ID NO: 766401 - RNA, 19 nt, Artificial Sequence
  Description of Artificial Sequence: Synthetic oligonucleotide
aucaaaacugggaagagga

SEQ ID NO: 766402 - RNA, 19 nt, Artificial Sequence
  Description of Artificial Sequence: Synthetic oligonucleotide
aaauagucaucagugcuga

SEQ ID NO: 766403 - RNA, 19 nt, Artificial Sequence
  Description of Artificial Sequence: Synthetic oligonucleotide
acuauaaggcaucucgaga

SEQ ID NO: 766404 - RNA, 19 nt, Artificial Sequence
  Description of Artificial Sequence: Synthetic oligonucleotide
ucucgagaaaucgaaagac

SEQ ID NO: 766405 - RNA, 19 nt, Artificial Sequence
  Description of Artificial Sequence: Synthetic oligonucleotide
uaugaaugcuuuacuugug

SEQ ID NO: 766406 - RNA, 19 nt, Artificial Sequence
  Description of Artificial Sequence: Synthetic oligonucleotide
agcaugguuccuuugugag

SEQ ID NO: 766407 - RNA, 19 nt, Artificial Sequence
  Description of Artificial Sequence: Synthetic oligonucleotide
cucgagaaaucgaaagacc

SEQ ID NO: 766408 - RNA, 19 nt, Artificial Sequence
  Description of Artificial Sequence: Synthetic oligonucleotide
uucgagacaauguuguuuu

SEQ ID NO: 766409 - RNA, 19 nt, Artificial Sequence
  Description of Artificial Sequence: Synthetic oligonucleotide
aaaucgaaagaccguccga

SEQ ID NO: 766410 - RNA, 19 nt, Artificial Sequence
  Description of Artificial Sequence: Synthetic oligonucleotide
ugcagcuacucaaaguuaa

SEQ ID NO: 766411 - RNA, 19 nt, Artificial Sequence
  Description of Artificial Sequence: Synthetic oligonucleotide
ggaucuaaacaacuguaag

SEQ ID NO: 766412 - RNA, 19 nt, Artificial Sequence
  Description of Artificial Sequence: Synthetic oligonucleotide
aauuccgucuucugaaguu

SEQ ID NO: 766413 - RNA, 19 nt, Artificial Sequence
  Description of Artificial Sequence: Synthetic oligonucleotide
ucacuauaaggcaucucga

SEQ ID NO: 766414 - RNA, 19 nt, Artificial Sequence
  Description of Artificial Sequence: Synthetic oligonucleotide
guuaagacaggcucacuac

SEQ ID NO: 766415 - RNA, 19 nt, Artificial Sequence
  Description of Artificial Sequence: Synthetic oligonucleotide
ucuucccugaucgauagcu

SEQ ID NO: 766416 - RNA, 19 nt, Artificial Sequence
  Description of Artificial Sequence: Synthetic oligonucleotide
gaaagaccguccgagacgc

SEQ ID NO: 766417 - RNA, 19 nt, Artificial Sequence
  Description of Artificial Sequence: Synthetic oligonucleotide
agaaaucgaaagaccgucc

SEQ ID NO: 766418 - RNA, 19 nt, Artificial Sequence
  Description of Artificial Sequence: Synthetic oligonucleotide
aguuaagacaggcucacua

SEQ ID NO: 766419 - RNA, 19 nt, Artificial Sequence
  Description of Artificial Sequence: Synthetic oligonucleotide
aucauuuguuccugggaag

SEQ ID NO: 766420 - RNA, 19 nt, Artificial Sequence
  Description of Artificial Sequence: Synthetic oligonucleotide
cauggaaggaucucuccag

SEQ ID NO: 766421 - RNA, 19 nt, Artificial Sequence
  Description of Artificial Sequence: Synthetic oligonucleotide
gacugugugagucuagaga

SEQ ID NO: 766422 - RNA, 19 nt, Artificial Sequence
  Description of Artificial Sequence: Synthetic oligonucleotide
uuccgguucaugaaacucu

SEQ ID NO: 766423 - RNA, 19 nt, Artificial Sequence
  Description of Artificial Sequence: Synthetic oligonucleotide
ucgaaagaccguccgagac

SEQ ID NO: 766424 - RNA, 19 nt, Artificial Sequence
  Description of Artificial Sequence: Synthetic oligonucleotide
aguuaaugguggcuacagg

SEQ ID NO: 766425 - RNA, 19 nt, Artificial Sequence
  Description of Artificial Sequence: Synthetic oligonucleotide
gacaauuccgucuucugaa

SEQ ID NO: 766426 - RNA, 19 nt, Artificial Sequence
  Description of Artificial Sequence: Synthetic oligonucleotide
auucguaacgauccaacau

SEQ ID NO: 766427 - RNA, 19 nt, Artificial Sequence
  Description of Artificial Sequence: Synthetic oligonucleotide
cuauaaggcaucucgagaa

SEQ ID NO: 766428 - RNA, 19 nt, Artificial Sequence
  Description of Artificial Sequence: Synthetic oligonucleotide
uucuugagaccacugguuc

SEQ ID NO: 766429 - RNA, 19 nt, Artificial Sequence
  Description of Artificial Sequence: Synthetic oligonucleotide
acuuuaggaucuaaacaac

SEQ ID NO: 766430 - RNA, 19 nt, Artificial Sequence
  Description of Artificial Sequence: Synthetic oligonucleotide
ucguaacgauccaacaucu

SEQ ID NO: 766431 - RNA, 19 nt, Artificial Sequence
  Description of Artificial Sequence: Synthetic oligonucleotide
uggaguuaaauuucuguuu

SEQ ID NO: 766432 - RNA, 19 nt, Artificial Sequence
  Description of Artificial Sequence: Synthetic oligonucleotide
auaccuuacaacugcccug

SEQ ID NO: 766433 - RNA, 19 nt, Artificial Sequence
  Description of Artificial Sequence: Synthetic oligonucleotide
uguauccuuuuccuauggc

SEQ ID NO: 766434 - RNA, 19 nt, Artificial Sequence
  Description of Artificial Sequence: Synthetic oligonucleotide
ugugagacaauagaugguu

SEQ ID NO: 766435 - RNA, 19 nt, Artificial Sequence
  Description of Artificial Sequence: Synthetic oligonucleotide
cuacucuguauccuuuucc

SEQ ID NO: 766436 - RNA, 19 nt, Artificial Sequence
  Description of Artificial Sequence: Synthetic oligonucleotide
uugauggggcaaaacacaa

SEQ ID NO: 766437 - RNA, 19 nt, Artificial Sequence
  Description of Artificial Sequence: Synthetic oligonucleotide
gagaaaucgaaagaccguc

SEQ ID NO: 766438 - RNA, 19 nt, Artificial Sequence
  Description of Artificial Sequence: Synthetic oligonucleotide
ugacaaacggauguacuga

SEQ ID NO: 766439 - RNA, 19 nt, Artificial Sequence
  Description of Artificial Sequence: Synthetic oligonucleotide
ucuaaacaacuguaaggaa

SEQ ID NO: 766440 - RNA, 19 nt, Artificial Sequence
  Description of Artificial Sequence: Synthetic oligonucleotide
ucuagccuggguacuuuag

SEQ ID NO: 766441 - RNA, 19 nt, Artificial Sequence
  Description of Artificial Sequence: Synthetic oligonucleotide
ugcagguaaccacaacgug

SEQ ID NO: 766442 - RNA, 19 nt, Artificial Sequence
  Description of Artificial Sequence: Synthetic oligonucleotide
gacaaacggauguacugac

SEQ ID NO: 766443 - RNA, 19 nt, Artificial Sequence
  Description of Artificial Sequence: Synthetic oligonucleotide
uucccugaucgauagcuug

SEQ ID NO: 766444 - RNA, 19 nt, Artificial Sequence
  Description of Artificial Sequence: Synthetic oligonucleotide
cucgcaaaagaauaaguaa

SEQ ID NO: 766445 - RNA, 19 nt, Artificial Sequence
  Description of Artificial Sequence: Synthetic oligonucleotide
ggaucaaacuuccaccaag

SEQ ID NO: 766446 - RNA, 19 nt, Artificial Sequence
  Description of Artificial Sequence: Synthetic oligonucleotide
uuggagucuagccugggua

SEQ ID NO: 766447 - RNA, 19 nt, Artificial Sequence
  Description of Artificial Sequence: Synthetic oligonucleotide
cuuacaacugcccugugaa

SEQ ID NO: 766448 - RNA, 19 nt, Artificial Sequence
  Description of Artificial Sequence: Synthetic oligonucleotide
acaauuccgucuucugaag

SEQ ID NO: 766449 - RNA, 19 nt, Artificial Sequence
  Description of Artificial Sequence: Synthetic oligonucleotide
ugguuuugucuuccugagg

SEQ ID NO: 766450 - RNA, 19 nt, Artificial Sequence
  Description of Artificial Sequence: Synthetic oligonucleotide
uagccauuucuaaagggau

SEQ ID NO: 766451 - RNA, 19 nt, Artificial Sequence
  Description of Artificial Sequence: Synthetic oligonucleotide
aucgauagcuuguuuugcu

SEQ ID NO: 766452 - RNA, 19 nt, Artificial Sequence
  Description of Artificial Sequence: Synthetic oligonucleotide
ucuugagaccacugguuca

SEQ ID NO: 766453 - RNA, 19 nt, Artificial Sequence
  Description of Artificial Sequence: Synthetic oligonucleotide
agaauucgagacaauguug

SEQ ID NO: 766454 - RNA, 19 nt, Artificial Sequence
  Description of Artificial Sequence: Synthetic oligonucleotide
ggacauuugaaauucguaa

SEQ ID NO: 766455 - RNA, 19 nt, Artificial Sequence
  Description of Artificial Sequence: Synthetic oligonucleotide
aguacugcagguaaccaca

SEQ ID NO: 766456 - RNA, 19 nt, Artificial Sequence
  Description of Artificial Sequence: Synthetic oligonucleotide
uccaccaaguuuccgguuc

SEQ ID NO: 766457 - RNA, 19 nt, Artificial Sequence
  Description of Artificial Sequence: Synthetic oligonucleotide
gauaccuuacaacugcccu

SEQ ID NO: 766458 - RNA, 19 nt, Artificial Sequence
  Description of Artificial Sequence: Synthetic oligonucleotide
acccuugugagacaauaga

SEQ ID NO: 766459 - RNA, 19 nt, Artificial Sequence
  Description of Artificial Sequence: Synthetic oligonucleotide
acuugugcuauagauuuca

SEQ ID NO: 766460 - RNA, 19 nt, Artificial Sequence
  Description of Artificial Sequence: Synthetic oligonucleotide
  modified_base (13)..(13): a, c, u, g, unknown or other
aacuguaaggaanacccuu

SEQ ID NO: 766461 - RNA, 19 nt, Artificial Sequence
  Description of Artificial Sequence: Synthetic oligonucleotide
auagcuuguuuugcucugc

SEQ ID NO: 766462 - RNA, 19 nt, Artificial Sequence
  Description of Artificial Sequence: Synthetic oligonucleotide
cauuggucuggucguaagg

SEQ ID NO: 766463 - RNA, 19 nt, Artificial Sequence
  Description of Artificial Sequence: Synthetic oligonucleotide
caacuuaagagcuaucugu

SEQ ID NO: 766464 - RNA, 19 nt, Artificial Sequence
  Description of Artificial Sequence: Synthetic oligonucleotide
agucuagagagccucccca

SEQ ID NO: 766465 - RNA, 19 nt, Artificial Sequence
  Description of Artificial Sequence: Synthetic oligonucleotide
ucuaugaguuggagucuag

SEQ ID NO: 766466 - RNA, 19 nt, Artificial Sequence
  Description of Artificial Sequence: Synthetic oligonucleotide
gaacacgaugccaucucgg

SEQ ID NO: 766467 - RNA, 19 nt, Artificial Sequence
  Description of Artificial Sequence: Synthetic oligonucleotide
uagcgaugaagacuuucca

SEQ ID NO: 766468 - RNA, 19 nt, Artificial Sequence
  Description of Artificial Sequence: Synthetic oligonucleotide
agguaucacuuguucauca

SEQ ID NO: 766469 - RNA, 19 nt, Artificial Sequence
  Description of Artificial Sequence: Synthetic oligonucleotide
guaaccacaacgugucuga

SEQ ID NO: 766470 - RNA, 19 nt, Artificial Sequence
  Description of Artificial Sequence: Synthetic oligonucleotide
uccuauggccauuuccaca

SEQ ID NO: 766471 - RNA, 19 nt, Artificial Sequence
  Description of Artificial Sequence: Synthetic oligonucleotide
  modified_base (2)..(2): a, c, u, g, unknown or other
anacccuugugagacaaua

SEQ ID NO: 766472 - RNA, 19 nt, Artificial Sequence
  Description of Artificial Sequence: Synthetic oligonucleotide
auuguaccuguacccaucu

SEQ ID NO: 766473 - RNA, 19 nt, Artificial Sequence
  Description of Artificial Sequence: Synthetic oligonucleotide
cucugauaccuuacaacug

SEQ ID NO: 766474 - RNA, 19 nt, Artificial Sequence
  Description of Artificial Sequence: Synthetic oligonucleotide
ucguaaggaaucauuuguu

SEQ ID NO: 766475 - RNA, 19 nt, Artificial Sequence
  Description of Artificial Sequence: Synthetic oligonucleotide
uguauuaguguugucuauu

SEQ ID NO: 766476 - RNA, 19 nt, Artificial Sequence
  Description of Artificial Sequence: Synthetic oligonucleotide
aauggggccuaugaaugcu

SEQ ID NO: 766477 - RNA, 19 nt, Artificial Sequence
  Description of Artificial Sequence: Synthetic oligonucleotide
gcuacucaaaguuaagaca

SEQ ID NO: 766478 - RNA, 19 nt, Artificial Sequence
  Description of Artificial Sequence: Synthetic oligonucleotide
acgauccaacaucugagca

SEQ ID NO: 766479 - RNA, 19 nt, Artificial Sequence
  Description of Artificial Sequence: Synthetic oligonucleotide
ccuaugaaugcuuuacuug

SEQ ID NO: 766480 - RNA, 19 nt, Artificial Sequence
  Description of Artificial Sequence: Synthetic oligonucleotide
gaauucgagacaauguugu

SEQ ID NO: 766481 - RNA, 19 nt, Artificial Sequence
  Description of Artificial Sequence: Synthetic oligonucleotide
uggagucuagccuggguac

SEQ ID NO: 766482 - RNA, 19 nt, Artificial Sequence
  Description of Artificial Sequence: Synthetic oligonucleotide
gaucgauagcuuguuuugc

SEQ ID NO: 766483 - RNA, 19 nt, Artificial Sequence
  Description of Artificial Sequence: Synthetic oligonucleotide
auuggucuggucguaagga

SEQ ID NO: 766484 - RNA, 19 nt, Artificial Sequence
  Description of Artificial Sequence: Synthetic oligonucleotide
ucuguucuauuguguuucc

SEQ ID NO: 766485 - RNA, 19 nt, Artificial Sequence
  Description of Artificial Sequence: Synthetic oligonucleotide
agacuuagcgggcgaaucu

SEQ ID NO: 766486 - RNA, 19 nt, Artificial Sequence
  Description of Artificial Sequence: Synthetic oligonucleotide
aucaucccuagauagcgau

SEQ ID NO: 766487 - RNA, 19 nt, Artificial Sequence
  Description of Artificial Sequence: Synthetic oligonucleotide
cuucuuccgagacacacca

SEQ ID NO: 766488 - RNA, 19 nt, Artificial Sequence
  Description of Artificial Sequence: Synthetic oligonucleotide
gucguaaggaaucauuugu

SEQ ID NO: 766489 - RNA, 19 nt, Artificial Sequence
  Description of Artificial Sequence: Synthetic oligonucleotide
aauucgagacaauguuguu

SEQ ID NO: 766490 - RNA, 19 nt, Artificial Sequence
  Description of Artificial Sequence: Synthetic oligonucleotide
uauuauaacuggagaucuu

SEQ ID NO: 766491 - RNA, 19 nt, Artificial Sequence
  Description of Artificial Sequence: Synthetic oligonucleotide
uuagcgggcgaaucuuuga

SEQ ID NO: 766492 - RNA, 19 nt, Artificial Sequence
  Description of Artificial Sequence: Synthetic oligonucleotide
ucaucccuagauagcgaug

SEQ ID NO: 766493 - RNA, 19 nt, Artificial Sequence
  Description of Artificial Sequence: Synthetic oligonucleotide
gauagcgaugaagacuuuc

SEQ ID NO: 766494 - RNA, 19 nt, Artificial Sequence
  Description of Artificial Sequence: Synthetic oligonucleotide
uuuccgguucaugaaacuc

SEQ ID NO: 766495 - RNA, 19 nt, Artificial Sequence
  Description of Artificial Sequence: Synthetic oligonucleotide
gucuauuauaacuggagau

SEQ ID NO: 766496 - RNA, 19 nt, Artificial Sequence
  Description of Artificial Sequence: Synthetic oligonucleotide
agcuuguuuugcucugcuc

SEQ ID NO: 766497 - RNA, 19 nt, Artificial Sequence
  Description of Artificial Sequence: Synthetic oligonucleotide
uacagggguccuauuauuu

SEQ ID NO: 766498 - RNA, 19 nt, Artificial Sequence
  Description of Artificial Sequence: Synthetic oligonucleotide
uaccuuacaacugcccugu

SEQ ID NO: 766499 - RNA, 19 nt, Artificial Sequence
  Description of Artificial Sequence: Synthetic oligonucleotide
cauuugaaauucguaacga

SEQ ID NO: 766500 - RNA, 19 nt, Artificial Sequence
  Description of Artificial Sequence: Synthetic oligonucleotide
ucgauagcuuguuuugcuc

SEQ ID NO: 766501 - RNA, 19 nt, Artificial Sequence
  Description of Artificial Sequence: Synthetic oligonucleotide
ccuugugagacaauagaug

SEQ ID NO: 766502 - RNA, 19 nt, Artificial Sequence
  Description of Artificial Sequence: Synthetic oligonucleotide
ucuacaccacuggaagugc

SEQ ID NO: 766503 - RNA, 19 nt, Artificial Sequence
  Description of Artificial Sequence: Synthetic oligonucleotide
cuugagaccacugguucac

SEQ ID NO: 766504 - RNA, 19 nt, Artificial Sequence
  Description of Artificial Sequence: Synthetic oligonucleotide
ucccugaucgauagcuugu

SEQ ID NO: 766505 - RNA, 19 nt, Artificial Sequence
  Description of Artificial Sequence: Synthetic oligonucleotide
agcuauccacauaacuaac

SEQ ID NO: 766506 - RNA, 19 nt, Artificial Sequence
  Description of Artificial Sequence: Synthetic oligonucleotide
accgugggguaugacaaac

SEQ ID NO: 766507 - RNA, 19 nt, Artificial Sequence
  Description of Artificial Sequence: Synthetic oligonucleotide
cuuagcgggcgaaucuuug

SEQ ID NO: 766508 - RNA, 19 nt, Artificial Sequence
  Description of Artificial Sequence: Synthetic oligonucleotide
ugagucuagagagccuccc

SEQ ID NO: 766509 - RNA, 19 nt, Artificial Sequence
  Description of Artificial Sequence: Synthetic oligonucleotide
  modified_base (4)..(4): a, c, u, g, unknown or other
gaanacccuugugagacaa

SEQ ID NO: 766510 - RNA, 19 nt, Artificial Sequence
  Description of Artificial Sequence: Synthetic oligonucleotide
guagguaucacuuguucau

SEQ ID NO: 766511 - RNA, 19 nt, Artificial Sequence
  Description of Artificial Sequence: Synthetic oligonucleotide
cagauucagcaccaucuac

SEQ ID NO: 766512 - RNA, 19 nt, Artificial Sequence
  Description of Artificial Sequence: Synthetic oligonucleotide
ggucguaaggaaucauuug

SEQ ID NO: 766513 - RNA, 19 nt, Artificial Sequence
  Description of Artificial Sequence: Synthetic oligonucleotide
ugacaggugcuugacugug

SEQ ID NO: 766514 - RNA, 19 nt, Artificial Sequence
  Description of Artificial Sequence: Synthetic oligonucleotide
auucgagacaauguuguuu

SEQ ID NO: 766515 - RNA, 19 nt, Artificial Sequence
  Description of Artificial Sequence: Synthetic oligonucleotide
gaaggaucucuccagcacu

SEQ ID NO: 766516 - RNA, 19 nt, Artificial Sequence
  Description of Artificial Sequence: Synthetic oligonucleotide
uccgguucaugaaacucua

SEQ ID NO: 766517 - RNA, 19 nt, Artificial Sequence
  Description of Artificial Sequence: Synthetic oligonucleotide
gcgaugaagacuuuccauc

SEQ ID NO: 766518 - RNA, 19 nt, Artificial Sequence
  Description of Artificial Sequence: Synthetic oligonucleotide
gaaauucguaacgauccaa

SEQ ID NO: 766519 - RNA, 19 nt, Artificial Sequence
  Description of Artificial Sequence: Synthetic oligonucleotide
ugagaccacugguucacaa

SEQ ID NO: 766520 - RNA, 19 nt, Artificial Sequence
  Description of Artificial Sequence: Synthetic oligonucleotide
auuucacuauaaggcaucu

SEQ ID NO: 766521 - RNA, 19 nt, Artificial Sequence
  Description of Artificial Sequence: Synthetic oligonucleotide
uguacacuguagccauuuc

SEQ ID NO: 766522 - RNA, 19 nt, Artificial Sequence
  Description of Artificial Sequence: Synthetic oligonucleotide
aucgaaagaccguccgaga

SEQ ID NO: 766523 - RNA, 19 nt, Artificial Sequence
  Description of Artificial Sequence: Synthetic oligonucleotide
aagguaucauuggucuggu

SEQ ID NO: 766524 - RNA, 19 nt, Artificial Sequence
  Description of Artificial Sequence: Synthetic oligonucleotide
uagcgggcgaaucuuugaa

SEQ ID NO: 766525 - RNA, 19 nt, Artificial Sequence
  Description of Artificial Sequence: Synthetic oligonucleotide
uuauuaccaggcgucuccu

SEQ ID NO: 766526 - RNA, 19 nt, Artificial Sequence
  Description of Artificial Sequence: Synthetic oligonucleotide
aacugcccugugaagcauc

SEQ ID NO: 766527 - RNA, 19 nt, Artificial Sequence
  Description of Artificial Sequence: Synthetic oligonucleotide
caucccuagauagcgauga

SEQ ID NO: 766528 - RNA, 19 nt, Artificial Sequence
  Description of Artificial Sequence: Synthetic oligonucleotide
uggaaaauguuugguggua

SEQ ID NO: 766529 - RNA, 19 nt, Artificial Sequence
  Description of Artificial Sequence: Synthetic oligonucleotide
uugcagcuacucaaaguua

SEQ ID NO: 766530 - RNA, 19 nt, Artificial Sequence
  Description of Artificial Sequence: Synthetic oligonucleotide
auaaggcaucucgagaaau

SEQ ID NO: 766531 - RNA, 19 nt, Artificial Sequence
  Description of Artificial Sequence: Synthetic oligonucleotide
aggaucuaaacaacuguaa

SEQ ID NO: 766532 - RNA, 19 nt, Artificial Sequence
  Description of Artificial Sequence: Synthetic oligonucleotide
uaguuagaauacucaucau

SEQ ID NO: 766533 - RNA, 19 nt, Artificial Sequence
  Description of Artificial Sequence: Synthetic oligonucleotide
ucucuaugaguuggagucu

SEQ ID NO: 766534 - RNA, 19 nt, Artificial Sequence
  Description of Artificial Sequence: Synthetic oligonucleotide
ccacauaugguuucauuuc

SEQ ID NO: 766535 - RNA, 19 nt, Artificial Sequence
  Description of Artificial Sequence: Synthetic oligonucleotide
cuaacccagccaacuuaag

SEQ ID NO: 766536 - RNA, 19 nt, Artificial Sequence
  Description of Artificial Sequence: Synthetic oligonucleotide
gugguagacuuagcgggcg

SEQ ID NO: 766537 - RNA, 19 nt, Artificial Sequence
  Description of Artificial Sequence: Synthetic oligonucleotide
caggcucacuacuuuguuc

SEQ ID NO: 766538 - RNA, 19 nt, Artificial Sequence
  Description of Artificial Sequence: Synthetic oligonucleotide
aucaaacuuccaccaaguu

SEQ ID NO: 766539 - RNA, 19 nt, Artificial Sequence
  Description of Artificial Sequence: Synthetic oligonucleotide
gaggccucgcaaaagaaua

SEQ ID NO: 766540 - RNA, 19 nt, Artificial Sequence
  Description of Artificial Sequence: Synthetic oligonucleotide
caaguuuccgguucaugaa

SEQ ID NO: 766541 - RNA, 19 nt, Artificial Sequence
  Description of Artificial Sequence: Synthetic oligonucleotide
cuccauggaaggaucucuc

SEQ ID NO: 766542 - RNA, 19 nt, Artificial Sequence
  Description of Artificial Sequence: Synthetic oligonucleotide
agucaucuugccauggaaa

SEQ ID NO: 766543 - RNA, 19 nt, Artificial Sequence
  Description of Artificial Sequence: Synthetic oligonucleotide
ugguagacuuagcgggcga

SEQ ID NO: 766544 - RNA, 19 nt, Artificial Sequence
  Description of Artificial Sequence: Synthetic oligonucleotide
aggcuuguaaauggggccu

SEQ ID NO: 766545 - RNA, 19 nt, Artificial Sequence
  Description of Artificial Sequence: Synthetic oligonucleotide
gaucaaacuuccaccaagu

SEQ ID NO: 766546 - RNA, 19 nt, Artificial Sequence
  Description of Artificial Sequence: Synthetic oligonucleotide
agaccguccgagacgcagc

SEQ ID NO: 766547 - RNA, 19 nt, Artificial Sequence
  Description of Artificial Sequence: Synthetic oligonucleotide
cuacuuuauuaccaggcgu

SEQ ID NO: 766548 - RNA, 19 nt, Artificial Sequence
  Description of Artificial Sequence: Synthetic oligonucleotide
uagguaucacuuguucauc

SEQ ID NO: 766549 - RNA, 19 nt, Artificial Sequence
  Description of Artificial Sequence: Synthetic oligonucleotide
gagaccacugguucacaaa

SEQ ID NO: 766550 - RNA, 19 nt, Artificial Sequence
  Description of Artificial Sequence: Synthetic oligonucleotide
ccaacuuaagagcuaucug

SEQ ID NO: 766551 - RNA, 19 nt, Artificial Sequence
  Description of Artificial Sequence: Synthetic oligonucleotide
gggguccuauuauuucugg

SEQ ID NO: 766552 - RNA, 19 nt, Artificial Sequence
  Description of Artificial Sequence: Synthetic oligonucleotide
augccagcuaacccagcca

SEQ ID NO: 766553 - RNA, 19 nt, Artificial Sequence
  Description of Artificial Sequence: Synthetic oligonucleotide
ggguaugacaaacggaugu

SEQ ID NO: 766554 - RNA, 19 nt, Artificial Sequence
  Description of Artificial Sequence: Synthetic oligonucleotide
cacauaacuaacauccauu

SEQ ID NO: 766555 - RNA, 19 nt, Artificial Sequence
  Description of Artificial Sequence: Synthetic oligonucleotide
uccugaggacaauuccguc

SEQ ID NO: 766556 - RNA, 19 nt, Artificial Sequence
  Description of Artificial Sequence: Synthetic oligonucleotide
cacuguagccauuucuaaa

SEQ ID NO: 766557 - RNA, 19 nt, Artificial Sequence
  Description of Artificial Sequence: Synthetic oligonucleotide
uuucacuauaaggcaucuc

SEQ ID NO: 766558 - RNA, 19 nt, Artificial Sequence
  Description of Artificial Sequence: Synthetic oligonucleotide
ccagcuauccacauaacua

SEQ ID NO: 766559 - RNA, 19 nt, Artificial Sequence
  Description of Artificial Sequence: Synthetic oligonucleotide
cagaauucgagacaauguu

SEQ ID NO: 766560 - RNA, 19 nt, Artificial Sequence
  Description of Artificial Sequence: Synthetic oligonucleotide
accaggcgucuccuugcac

SEQ ID NO: 766561 - RNA, 19 nt, Artificial Sequence
  Description of Artificial Sequence: Synthetic oligonucleotide
cugagcaaucuucuuccga

SEQ ID NO: 766562 - RNA, 19 nt, Artificial Sequence
  Description of Artificial Sequence: Synthetic oligonucleotide
cgaaagaccguccgagacg

SEQ ID NO: 766563 - RNA, 19 nt, Artificial Sequence
  Description of Artificial Sequence: Synthetic oligonucleotide
acaaacggauguacugacu

SEQ ID NO: 766564 - RNA, 19 nt, Artificial Sequence
  Description of Artificial Sequence: Synthetic oligonucleotide
gcugauuaacauuguaccu

SEQ ID NO: 766565 - RNA, 19 nt, Artificial Sequence
  Description of Artificial Sequence: Synthetic oligonucleotide
cugaucgauagcuuguuuu

SEQ ID NO: 766566 - RNA, 19 nt, Artificial Sequence
  Description of Artificial Sequence: Synthetic oligonucleotide
agggguccuauuauuucug

SEQ ID NO: 766567 - RNA, 19 nt, Artificial Sequence
  Description of Artificial Sequence: Synthetic oligonucleotide
cugcagguaaccacaacgu

SEQ ID NO: 766568 - RNA, 19 nt, Artificial Sequence
  Description of Artificial Sequence: Synthetic oligonucleotide
ugguuccacugaauucauc

SEQ ID NO: 766569 - RNA, 19 nt, Artificial Sequence
  Description of Artificial Sequence: Synthetic oligonucleotide
gcuacucaaaccauaguua

SEQ ID NO: 766570 - RNA, 19 nt, Artificial Sequence
  Description of Artificial Sequence: Synthetic oligonucleotide
acgugucugaagagcagug

SEQ ID NO: 766571 - RNA, 19 nt, Artificial Sequence
  Description of Artificial Sequence: Synthetic oligonucleotide
ucuggucguaaggaaucau

SEQ ID NO: 766572 - RNA, 19 nt, Artificial Sequence
  Description of Artificial Sequence: Synthetic oligonucleotide
gggccuaugaaugcuuuac

SEQ ID NO: 766573 - RNA, 19 nt, Artificial Sequence
  Description of Artificial Sequence: Synthetic oligonucleotide
gcuauccacauaacuaaca

SEQ ID NO: 766574 - RNA, 19 nt, Artificial Sequence
  Description of Artificial Sequence: Synthetic oligonucleotide
uaccuguacccaucuugau

SEQ ID NO: 766575 - RNA, 19 nt, Artificial Sequence
  Description of Artificial Sequence: Synthetic oligonucleotide
agaucuucccugaucgaua

SEQ ID NO: 766576 - RNA, 19 nt, Artificial Sequence
  Description of Artificial Sequence: Synthetic oligonucleotide
cugugacuaucagaaccac

SEQ ID NO: 766577 - RNA, 19 nt, Artificial Sequence
  Description of Artificial Sequence: Synthetic oligonucleotide
agguaaccacaacgugucu

SEQ ID NO: 766578 - RNA, 19 nt, Artificial Sequence
  Description of Artificial Sequence: Synthetic oligonucleotide
caucaucccuagauagcga

SEQ ID NO: 766579 - RNA, 19 nt, Artificial Sequence
  Description of Artificial Sequence: Synthetic oligonucleotide
ucuuggagucugugacuau

SEQ ID NO: 766580 - RNA, 19 nt, Artificial Sequence
  Description of Artificial Sequence: Synthetic oligonucleotide
  modified_base (3)..(3): a, c, u, g, unknown or other
aanacccuugugagacaau

SEQ ID NO: 766581 - RNA, 19 nt, Artificial Sequence
  Description of Artificial Sequence: Synthetic oligonucleotide
uauuaccaggcgucuccuu

SEQ ID NO: 766582 - RNA, 19 nt, Artificial Sequence
  Description of Artificial Sequence: Synthetic oligonucleotide
gagaucuucccugaucgau

SEQ ID NO: 766583 - RNA, 19 nt, Artificial Sequence
  Description of Artificial Sequence: Synthetic oligonucleotide
ccucgcaaaagaauaagua

SEQ ID NO: 766584 - RNA, 19 nt, Artificial Sequence
  Description of Artificial Sequence: Synthetic oligonucleotide
gguccuauuauuucugguu

SEQ ID NO: 766585 - RNA, 19 nt, Artificial Sequence
  Description of Artificial Sequence: Synthetic oligonucleotide
ggauugaacauuacugcua

SEQ ID NO: 766586 - RNA, 19 nt, Artificial Sequence
  Description of Artificial Sequence: Synthetic oligonucleotide
uaucauuggucuggucgua

SEQ ID NO: 766587 - RNA, 19 nt, Artificial Sequence
  Description of Artificial Sequence: Synthetic oligonucleotide
gugggguaugacaaacgga

SEQ ID NO: 766588 - RNA, 19 nt, Artificial Sequence
  Description of Artificial Sequence: Synthetic oligonucleotide
gugagucuagagagccucc

SEQ ID NO: 766589 - RNA, 19 nt, Artificial Sequence
  Description of Artificial Sequence: Synthetic oligonucleotide
caugguuccuuugugaguu

SEQ ID NO: 766590 - RNA, 19 nt, Artificial Sequence
  Description of Artificial Sequence: Synthetic oligonucleotide
cuuccgagacacaccaugu

SEQ ID NO: 766591 - RNA, 19 nt, Artificial Sequence
  Description of Artificial Sequence: Synthetic oligonucleotide
cuuccaccaaguuuccggu

SEQ ID NO: 766592 - RNA, 19 nt, Artificial Sequence
  Description of Artificial Sequence: Synthetic oligonucleotide
uugagaccacugguucaca

SEQ ID NO: 766593 - RNA, 19 nt, Artificial Sequence
  Description of Artificial Sequence: Synthetic oligonucleotide
uucuuccgagacacaccau

SEQ ID NO: 766594 - RNA, 19 nt, Artificial Sequence
  Description of Artificial Sequence: Synthetic oligonucleotide
agccauuucuaaagggauu

SEQ ID NO: 766595 - RNA, 19 nt, Artificial Sequence
  Description of Artificial Sequence: Synthetic oligonucleotide
ccgucuucugaaguuaaug

SEQ ID NO: 766596 - RNA, 19 nt, Artificial Sequence
  Description of Artificial Sequence: Synthetic oligonucleotide
gccauucaggccugaagga

SEQ ID NO: 766597 - RNA, 19 nt, Artificial Sequence
  Description of Artificial Sequence: Synthetic oligonucleotide
agccaacuuaagagcuauc

SEQ ID NO: 766598 - RNA, 19 nt, Artificial Sequence
  Description of Artificial Sequence: Synthetic oligonucleotide
gcagguaaccacaacgugu

SEQ ID NO: 766599 - RNA, 19 nt, Artificial Sequence
  Description of Artificial Sequence: Synthetic oligonucleotide
guguauuaguguugucuau

SEQ ID NO: 766600 - RNA, 19 nt, Artificial Sequence
  Description of Artificial Sequence: Synthetic oligonucleotide
aucccuagauagcgaugaa

SEQ ID NO: 766601 - RNA, 19 nt, Artificial Sequence
  Description of Artificial Sequence: Synthetic oligonucleotide
ggcgaaucuuugaauauua

SEQ ID NO: 766602 - RNA, 19 nt, Artificial Sequence
  Description of Artificial Sequence: Synthetic oligonucleotide
ggcuacagggguccuauua

SEQ ID NO: 766603 - RNA, 19 nt, Artificial Sequence
  Description of Artificial Sequence: Synthetic oligonucleotide
ggaccgugggguaugacaa

SEQ ID NO: 766604 - RNA, 19 nt, Artificial Sequence
  Description of Artificial Sequence: Synthetic oligonucleotide
caauuccgucuucugaagu

SEQ ID NO: 766605 - RNA, 19 nt, Artificial Sequence
  Description of Artificial Sequence: Synthetic oligonucleotide
  modified_base (5)..(5): a, c, u, g, unknown or other
ggaanacccuugugagaca

SEQ ID NO: 766606 - RNA, 19 nt, Artificial Sequence
  Description of Artificial Sequence: Synthetic oligonucleotide
cucuaugaguuggagucua

SEQ ID NO: 766607 - RNA, 19 nt, Artificial Sequence
  Description of Artificial Sequence: Synthetic oligonucleotide
gggguaugacaaacggaug

SEQ ID NO: 766608 - RNA, 19 nt, Artificial Sequence
  Description of Artificial Sequence: Synthetic oligonucleotide
ccaggcgucuccuugcaca

SEQ ID NO: 766609 - RNA, 19 nt, Artificial Sequence
  Description of Artificial Sequence: Synthetic oligonucleotide
gcuaacccagccaacuuaa

SEQ ID NO: 766610 - RNA, 19 nt, Artificial Sequence
  Description of Artificial Sequence: Synthetic oligonucleotide
cuggucguaaggaaucauu

SEQ ID NO: 766611 - RNA, 19 nt, Artificial Sequence
  Description of Artificial Sequence: Synthetic oligonucleotide
gaccgugggguaugacaaa

SEQ ID NO: 766612 - RNA, 19 nt, Artificial Sequence
  Description of Artificial Sequence: Synthetic oligonucleotide
gcuuguguauuaguguugu

SEQ ID NO: 766613 - RNA, 19 nt, Artificial Sequence
  Description of Artificial Sequence: Synthetic oligonucleotide
aggccucgcaaaagaauaa

SEQ ID NO: 766614 - RNA, 19 nt, Artificial Sequence
  Description of Artificial Sequence: Synthetic oligonucleotide
ggagaucuucccugaucga

SEQ ID NO: 766615 - RNA, 19 nt, Artificial Sequence
  Description of Artificial Sequence: Synthetic oligonucleotide
acuuagcgggcgaaucuuu

SEQ ID NO: 766616 - RNA, 19 nt, Artificial Sequence
  Description of Artificial Sequence: Synthetic oligonucleotide
ccuauggccauuuccacau

SEQ ID NO: 766617 - RNA, 19 nt, Artificial Sequence
  Description of Artificial Sequence: Synthetic oligonucleotide
caggcgucuccuugcacaa

SEQ ID NO: 766618 - RNA, 19 nt, Artificial Sequence
  Description of Artificial Sequence: Synthetic oligonucleotide
gaccguccgagacgcagcu

SEQ ID NO: 766619 - RNA, 19 nt, Artificial Sequence
  Description of Artificial Sequence: Synthetic oligonucleotide
gcuacagggguccuauuau

SEQ ID NO: 766620 - RNA, 19 nt, Artificial Sequence
  Description of Artificial Sequence: Synthetic oligonucleotide
gccuaugaaugcuuuacuu

SEQ ID NO: 766621 - RNA, 19 nt, Artificial Sequence
  Description of Artificial Sequence: Synthetic oligonucleotide
gucuagccuggguacuuua

SEQ ID NO: 766622 - RNA, 19 nt, Artificial Sequence
  Description of Artificial Sequence: Synthetic oligonucleotide
ccgagacacaccauguuua

SEQ ID NO: 766623 - RNA, 19 nt, Artificial Sequence
  Description of Artificial Sequence: Synthetic oligonucleotide
agucuagccuggguacuuu

SEQ ID NO: 766624 - RNA, 19 nt, Artificial Sequence
  Description of Artificial Sequence: Synthetic oligonucleotide
aaagaccguccgagacgca

SEQ ID NO: 766625 - RNA, 19 nt, Artificial Sequence
  Description of Artificial Sequence: Synthetic oligonucleotide
cuaucugugacaggugcuu

SEQ ID NO: 766626 - RNA, 19 nt, Artificial Sequence
  Description of Artificial Sequence: Synthetic oligonucleotide
gacuuagcgggcgaaucuu

SEQ ID NO: 766627 - RNA, 19 nt, Artificial Sequence
  Description of Artificial Sequence: Synthetic oligonucleotide
cugguucauccuccaagua

SEQ ID NO: 766628 - RNA, 19 nt, Artificial Sequence
  Description of Artificial Sequence: Synthetic oligonucleotide
cuugugcuauagauuucau

SEQ ID NO: 766629 - RNA, 19 nt, Artificial Sequence
  Description of Artificial Sequence: Synthetic oligonucleotide
cguaacgauccaacaucug

SEQ ID NO: 766630 - RNA, 19 nt, Artificial Sequence
  Description of Artificial Sequence: Synthetic oligonucleotide
cuacagggguccuauuauu

SEQ ID NO: 766631 - RNA, 19 nt, Artificial Sequence
  Description of Artificial Sequence: Synthetic oligonucleotide
ggccuaugaaugcuuuacu

SEQ ID NO: 766632 - RNA, 19 nt, Artificial Sequence
  Description of Artificial Sequence: Synthetic oligonucleotide
ggguccuauuauuucuggu

SEQ ID NO: 766633 - RNA, 19 nt, Artificial Sequence
  Description of Artificial Sequence: Synthetic oligonucleotide
gguagacuuagcgggcgaa

SEQ ID NO: 766634 - RNA, 19 nt, Artificial Sequence
  Description of Artificial Sequence: Synthetic oligonucleotide
cccuugugagacaauagau

SEQ ID NO: 766635 - RNA, 19 nt, Artificial Sequence
  Description of Artificial Sequence: Synthetic oligonucleotide
gcaucucgagaaaucgaaa

SEQ ID NO: 766636 - RNA, 19 nt, Artificial Sequence
  Description of Artificial Sequence: Synthetic oligonucleotide
gcgaaucuuugaauauuaa

SEQ ID NO: 766637 - RNA, 19 nt, Artificial Sequence
  Description of Artificial Sequence: Synthetic oligonucleotide
gcaugguuccuuugugagu

SEQ ID NO: 766638 - RNA, 19 nt, Artificial Sequence
  Description of Artificial Sequence: Synthetic oligonucleotide
ccgguucaugaaacucuac

SEQ ID NO: 766639 - RNA, 19 nt, Artificial Sequence
  Description of Artificial Sequence: Synthetic oligonucleotide
guagacuuagcgggcgaau

SEQ ID NO: 766640 - RNA, 19 nt, Artificial Sequence
  Description of Artificial Sequence: Synthetic oligonucleotide
ggauguacugacugccauu

SEQ ID NO: 766641 - RNA, 19 nt, Artificial Sequence
  Description of Artificial Sequence: Synthetic oligonucleotide
ggugcuugacugugugagu

SEQ ID NO: 766642 - RNA, 19 nt, Artificial Sequence
  Description of Artificial Sequence: Synthetic oligonucleotide
cuucccugaucgauagcuu

SEQ ID NO: 766643 - RNA, 19 nt, Artificial Sequence
  Description of Artificial Sequence: Synthetic oligonucleotide
gccucgcaaaagaauaagu

SEQ ID NO: 766644 - RNA, 19 nt, Artificial Sequence
  Description of Artificial Sequence: Synthetic oligonucleotide
cuguucuauuguguuuccu

SEQ ID NO: 766645 - RNA, 19 nt, Artificial Sequence
  Description of Artificial Sequence: Synthetic oligonucleotide
gagucuagccuggguacuu

SEQ ID NO: 766646 - RNA, 19 nt, Artificial Sequence
  Description of Artificial Sequence: Synthetic oligonucleotide
ggggccuaugaaugcuuua

SEQ ID NO: 766647 - RNA, 19 nt, Artificial Sequence
  Description of Artificial Sequence: Synthetic oligonucleotide
ggaggccucgcaaaagaau

SEQ ID NO: 766648 - RNA, 19 nt, Artificial Sequence
  Description of Artificial Sequence: Synthetic oligonucleotide
caucagugcugaacacgau

SEQ ID NO: 766649 - RNA, 19 nt, Artificial Sequence
  Description of Artificial Sequence: Synthetic oligonucleotide
agauagcgaugaagacuuu

SEQ ID NO: 766650 - RNA, 19 nt, Artificial Sequence
  Description of Artificial Sequence: Synthetic oligonucleotide
gccagcuaacccagccaac

SEQ ID NO: 766651 - RNA, 19 nt, Artificial Sequence
  Description of Artificial Sequence: Synthetic oligonucleotide
ccaagcugauuaacauugu

SEQ ID NO: 766652 - RNA, 19 nt, Artificial Sequence
  Description of Artificial Sequence: Synthetic oligonucleotide
ggcuuguaaauggggccua

SEQ ID NO: 766653 - RNA, 19 nt, Artificial Sequence
  Description of Artificial Sequence: Synthetic oligonucleotide
gggcgaaucuuugaauauu

SEQ ID NO: 766654 - RNA, 19 nt, Artificial Sequence
  Description of Artificial Sequence: Synthetic oligonucleotide
ggaggaccgugggguauga

SEQ ID NO: 766655 - RNA, 19 nt, Artificial Sequence
  Description of Artificial Sequence: Synthetic oligonucleotide
gguggcuacagggguccua

SEQ ID NO: 766656 - RNA, 19 nt, Artificial Sequence
  Description of Artificial Sequence: Synthetic oligonucleotide
accguccgagacgcagcua

SEQ ID NO: 766657 - RNA, 19 nt, Artificial Sequence
  Description of Artificial Sequence: Synthetic oligonucleotide
cgagacacaccauguuuau

SEQ ID NO: 766658 - RNA, 19 nt, Artificial Sequence
  Description of Artificial Sequence: Synthetic oligonucleotide
gcuuguaaauggggccuau

SEQ ID NO: 766659 - RNA, 19 nt, Artificial Sequence
  Description of Artificial Sequence: Synthetic oligonucleotide
ccacuuugauggggcaaaa

SEQ ID NO: 766660 - RNA, 19 nt, Artificial Sequence
  Description of Artificial Sequence: Synthetic oligonucleotide
ccugaucgauagcuuguuu

SEQ ID NO: 766661 - RNA, 19 nt, Artificial Sequence
  Description of Artificial Sequence: Synthetic oligonucleotide
cccugaucgauagcuuguu

SEQ ID NO: 766662 - RNA, 19 nt, Artificial Sequence
  Description of Artificial Sequence: Synthetic oligonucleotide
  modified_base (1)..(1): a, c, u, g, unknown or other
nacccuugugagacaauag

SEQ ID NO: 766663 - RNA, 19 nt, Artificial Sequence
  Description of Artificial Sequence: Synthetic oligonucleotide
uuuaucuacaauaugaucc

SEQ ID NO: 766664 - RNA, 19 nt, Artificial Sequence
  Description of Artificial Sequence: Synthetic oligonucleotide
uacaauaugauccagacca

SEQ ID NO: 766665 - RNA, 19 nt, Artificial Sequence
  Description of Artificial Sequence: Synthetic oligonucleotide
acuguaguuacauugauag

SEQ ID NO: 766666 - RNA, 19 nt, Artificial Sequence
  Description of Artificial Sequence: Synthetic oligonucleotide
ucauuaguuaaauugagca

SEQ ID NO: 766667 - RNA, 19 nt, Artificial Sequence
  Description of Artificial Sequence: Synthetic oligonucleotide
guuaaauugagcaauaccc

SEQ ID NO: 766668 - RNA, 19 nt, Artificial Sequence
  Description of Artificial Sequence: Synthetic oligonucleotide
aaugauagcccucaugcag

SEQ ID NO: 766669 - RNA, 19 nt, Artificial Sequence
  Description of Artificial Sequence: Synthetic oligonucleotide
aguuaaauugagcaauacc

SEQ ID NO: 766670 - RNA, 19 nt, Artificial Sequence
  Description of Artificial Sequence: Synthetic oligonucleotide
uuuauugaggucaaguucu

SEQ ID NO: 766671 - RNA, 19 nt, Artificial Sequence
  Description of Artificial Sequence: Synthetic oligonucleotide
ugucauuuagcaaaugcag

SEQ ID NO: 766672 - RNA, 19 nt, Artificial Sequence
  Description of Artificial Sequence: Synthetic oligonucleotide
uuagcugaugaaaugauga

SEQ ID NO: 766673 - RNA, 19 nt, Artificial Sequence
  Description of Artificial Sequence: Synthetic oligonucleotide
acucuuaucaugcugagug

SEQ ID NO: 766674 - RNA, 19 nt, Artificial Sequence
  Description of Artificial Sequence: Synthetic oligonucleotide
uaaaccaaucuccugcucg

SEQ ID NO: 766675 - RNA, 19 nt, Artificial Sequence
  Description of Artificial Sequence: Synthetic oligonucleotide
uuuacgauuggaaucauuc

SEQ ID NO: 766676 - RNA, 19 nt, Artificial Sequence
  Description of Artificial Sequence: Synthetic oligonucleotide
aauaugauccagaccaccc

SEQ ID NO: 766677 - RNA, 19 nt, Artificial Sequence
  Description of Artificial Sequence: Synthetic oligonucleotide
guacuuuggaaccugaagg

SEQ ID NO: 766678 - RNA, 19 nt, Artificial Sequence
  Description of Artificial Sequence: Synthetic oligonucleotide
aaucacucuagagauagac

SEQ ID NO: 766679 - RNA, 19 nt, Artificial Sequence
  Description of Artificial Sequence: Synthetic oligonucleotide
uagaucaagaugcuuauug

SEQ ID NO: 766680 - RNA, 19 nt, Artificial Sequence
  Description of Artificial Sequence: Synthetic oligonucleotide
agcaucuuguuccaguucc

SEQ ID NO: 766681 - RNA, 19 nt, Artificial Sequence
  Description of Artificial Sequence: Synthetic oligonucleotide
uguacuaaugccugaacag

SEQ ID NO: 766682 - RNA, 19 nt, Artificial Sequence
  Description of Artificial Sequence: Synthetic oligonucleotide
aauaccucaguagcuaagc

SEQ ID NO: 766683 - RNA, 19 nt, Artificial Sequence
  Description of Artificial Sequence: Synthetic oligonucleotide
uuaucaguagacccaaucc

SEQ ID NO: 766684 - RNA, 19 nt, Artificial Sequence
  Description of Artificial Sequence: Synthetic oligonucleotide
aaaggaacuaagcuguugu

SEQ ID NO: 766685 - RNA, 19 nt, Artificial Sequence
  Description of Artificial Sequence: Synthetic oligonucleotide
ugguauaucuucaaggacu

SEQ ID NO: 766686 - RNA, 19 nt, Artificial Sequence
  Description of Artificial Sequence: Synthetic oligonucleotide
ucucguucaagaaauagcu

SEQ ID NO: 766687 - RNA, 19 nt, Artificial Sequence
  Description of Artificial Sequence: Synthetic oligonucleotide
uuacuuucugccaacuggg

SEQ ID NO: 766688 - RNA, 19 nt, Artificial Sequence
  Description of Artificial Sequence: Synthetic oligonucleotide
uuucaguugacacccauug

SEQ ID NO: 766689 - RNA, 19 nt, Artificial Sequence
  Description of Artificial Sequence: Synthetic oligonucleotide
ucuacuuaaaugauccaca

SEQ ID NO: 766690 - RNA, 19 nt, Artificial Sequence
  Description of Artificial Sequence: Synthetic oligonucleotide
ucugcuaugcauaugcugu

SEQ ID NO: 766691 - RNA, 19 nt, Artificial Sequence
  Description of Artificial Sequence: Synthetic oligonucleotide
uaucauuaguuaaauugag

SEQ ID NO: 766692 - RNA, 19 nt, Artificial Sequence
  Description of Artificial Sequence: Synthetic oligonucleotide
uuuaaauacugcaugggau

SEQ ID NO: 766693 - RNA, 19 nt, Artificial Sequence
  Description of Artificial Sequence: Synthetic oligonucleotide
ucaaucacucuagagauag

SEQ ID NO: 766694 - RNA, 19 nt, Artificial Sequence
  Description of Artificial Sequence: Synthetic oligonucleotide
uuuagcaaaugcagaaugc

SEQ ID NO: 766695 - RNA, 19 nt, Artificial Sequence
  Description of Artificial Sequence: Synthetic oligonucleotide
uaucaguagacccaauccc

SEQ ID NO: 766696 - RNA, 19 nt, Artificial Sequence
  Description of Artificial Sequence: Synthetic oligonucleotide
uuauuuacgauuggaauca

SEQ ID NO: 766697 - RNA, 19 nt, Artificial Sequence
  Description of Artificial Sequence: Synthetic oligonucleotide
uaaguguauuuaaauacug

SEQ ID NO: 766698 - RNA, 19 nt, Artificial Sequence
  Description of Artificial Sequence: Synthetic oligonucleotide
aaagggaggguauagacuu

SEQ ID NO: 766699 - RNA, 19 nt, Artificial Sequence
  Description of Artificial Sequence: Synthetic oligonucleotide
gaguugugaauccuuauag

SEQ ID NO: 766700 - RNA, 19 nt, Artificial Sequence
  Description of Artificial Sequence: Synthetic oligonucleotide
acacccauuguauuucucc

SEQ ID NO: 766701 - RNA, 19 nt, Artificial Sequence
  Description of Artificial Sequence: Synthetic oligonucleotide
cuagagauagacuucuggc

SEQ ID NO: 766702 - RNA, 19 nt, Artificial Sequence
  Description of Artificial Sequence: Synthetic oligonucleotide
ugcagauugauguaguaac

SEQ ID NO: 766703 - RNA, 19 nt, Artificial Sequence
  Description of Artificial Sequence: Synthetic oligonucleotide
gaagcaaagguaaagcagc

SEQ ID NO: 766704 - RNA, 19 nt, Artificial Sequence
  Description of Artificial Sequence: Synthetic oligonucleotide
ucgaauaucgaaucucugc

SEQ ID NO: 766705 - RNA, 19 nt, Artificial Sequence
  Description of Artificial Sequence: Synthetic oligonucleotide
uuaguuacauucugguaag

SEQ ID NO: 766706 - RNA, 19 nt, Artificial Sequence
  Description of Artificial Sequence: Synthetic oligonucleotide
auagcuaaaugaccagucg

SEQ ID NO: 766707 - RNA, 19 nt, Artificial Sequence
  Description of Artificial Sequence: Synthetic oligonucleotide
auccuuauaggcuaucaag

SEQ ID NO: 766708 - RNA, 19 nt, Artificial Sequence
  Description of Artificial Sequence: Synthetic oligonucleotide
uugagcaauaccccaauga

SEQ ID NO: 766709 - RNA, 19 nt, Artificial Sequence
  Description of Artificial Sequence: Synthetic oligonucleotide
agguagguacuuuggaacc

SEQ ID NO: 766710 - RNA, 19 nt, Artificial Sequence
  Description of Artificial Sequence: Synthetic oligonucleotide
aaggacacaguucauugcu

SEQ ID NO: 766711 - RNA, 19 nt, Artificial Sequence
  Description of Artificial Sequence: Synthetic oligonucleotide
ugauauugaugaauguucu

SEQ ID NO: 766712 - RNA, 19 nt, Artificial Sequence
  Description of Artificial Sequence: Synthetic oligonucleotide
ucauuuagcaaaugcagaa

SEQ ID NO: 766713 - RNA, 19 nt, Artificial Sequence
  Description of Artificial Sequence: Synthetic oligonucleotide
uccuuauaggcuaucaagu

SEQ ID NO: 766714 - RNA, 19 nt, Artificial Sequence
  Description of Artificial Sequence: Synthetic oligonucleotide
uagagauagacuucuggcc

SEQ ID NO: 766715 - RNA, 19 nt, Artificial Sequence
  Description of Artificial Sequence: Synthetic oligonucleotide
ucuaaggauagcuccagca

SEQ ID NO: 766716 - RNA, 19 nt, Artificial Sequence
  Description of Artificial Sequence: Synthetic oligonucleotide
uuuaucaguagacccaauc

SEQ ID NO: 766717 - RNA, 19 nt, Artificial Sequence
  Description of Artificial Sequence: Synthetic oligonucleotide
accucaguagcuaagcugc

SEQ ID NO: 766718 - RNA, 19 nt, Artificial Sequence
  Description of Artificial Sequence: Synthetic oligonucleotide
gauagcugcagauugaugu

SEQ ID NO: 766719 - RNA, 19 nt, Artificial Sequence
  Description of Artificial Sequence: Synthetic oligonucleotide
auauucaaucacucuagag

SEQ ID NO: 766720 - RNA, 19 nt, Artificial Sequence
  Description of Artificial Sequence: Synthetic oligonucleotide
aaagguaaagcagcuagca

SEQ ID NO: 766721 - RNA, 19 nt, Artificial Sequence
  Description of Artificial Sequence: Synthetic oligonucleotide
gauucuccggauuauguac

SEQ ID NO: 766722 - RNA, 19 nt, Artificial Sequence
  Description of Artificial Sequence: Synthetic oligonucleotide
cauucaguagcuuagcuga

SEQ ID NO: 766723 - RNA, 19 nt, Artificial Sequence
  Description of Artificial Sequence: Synthetic oligonucleotide
ugcacuaacagcagcacaa

SEQ ID NO: 766724 - RNA, 19 nt, Artificial Sequence
  Description of Artificial Sequence: Synthetic oligonucleotide
aucauuaguuaaauugagc

SEQ ID NO: 766725 - RNA, 19 nt, Artificial Sequence
  Description of Artificial Sequence: Synthetic oligonucleotide
uacgauuggaaucauucaa

SEQ ID NO: 766726 - RNA, 19 nt, Artificial Sequence
  Description of Artificial Sequence: Synthetic oligonucleotide
auauuuucuagaucaagau

SEQ ID NO: 766727 - RNA, 19 nt, Artificial Sequence
  Description of Artificial Sequence: Synthetic oligonucleotide
auucccucacuguaguuac

SEQ ID NO: 766728 - RNA, 19 nt, Artificial Sequence
  Description of Artificial Sequence: Synthetic oligonucleotide
uuauguuucuccucuguac

SEQ ID NO: 766729 - RNA, 19 nt, Artificial Sequence
  Description of Artificial Sequence: Synthetic oligonucleotide
auaugcuguucucagcgcg

SEQ ID NO: 766730 - RNA, 19 nt, Artificial Sequence
  Description of Artificial Sequence: Synthetic oligonucleotide
uucuuuaaaccaaucuccu

SEQ ID NO: 766731 - RNA, 19 nt, Artificial Sequence
  Description of Artificial Sequence: Synthetic oligonucleotide
ucacucuagagauagacuu

SEQ ID NO: 766732 - RNA, 19 nt, Artificial Sequence
  Description of Artificial Sequence: Synthetic oligonucleotide
uuauguacuguuacacucu

SEQ ID NO: 766733 - RNA, 19 nt, Artificial Sequence
  Description of Artificial Sequence: Synthetic oligonucleotide
agaucuaggcacuuuugag

SEQ ID NO: 766734 - RNA, 19 nt, Artificial Sequence
  Description of Artificial Sequence: Synthetic oligonucleotide
ugccuaaaauaaagcaagg

SEQ ID NO: 766735 - RNA, 19 nt, Artificial Sequence
  Description of Artificial Sequence: Synthetic oligonucleotide
uacuaaugccugaacagca

SEQ ID NO: 766736 - RNA, 19 nt, Artificial Sequence
  Description of Artificial Sequence: Synthetic oligonucleotide
ugugaauccuuauaggcua

SEQ ID NO: 766737 - RNA, 19 nt, Artificial Sequence
  Description of Artificial Sequence: Synthetic oligonucleotide
uguacugccccacucauua

SEQ ID NO: 766738 - RNA, 19 nt, Artificial Sequence
  Description of Artificial Sequence: Synthetic oligonucleotide
aguagcuuagcugaagaag

SEQ ID NO: 766739 - RNA, 19 nt, Artificial Sequence
  Description of Artificial Sequence: Synthetic oligonucleotide
ugagcaauaccccaaugau

SEQ ID NO: 766740 - RNA, 19 nt, Artificial Sequence
  Description of Artificial Sequence: Synthetic oligonucleotide
aaaucggguggucauaaaa

SEQ ID NO: 766741 - RNA, 19 nt, Artificial Sequence
  Description of Artificial Sequence: Synthetic oligonucleotide
ucaagaaauagcuguacua

SEQ ID NO: 766742 - RNA, 19 nt, Artificial Sequence
  Description of Artificial Sequence: Synthetic oligonucleotide
cucucguucaagaaauagc

SEQ ID NO: 766743 - RNA, 19 nt, Artificial Sequence
  Description of Artificial Sequence: Synthetic oligonucleotide
aaccuugccuaaaauaaag

SEQ ID NO: 766744 - RNA, 19 nt, Artificial Sequence
  Description of Artificial Sequence: Synthetic oligonucleotide
agguaaagcagcuagcaau

SEQ ID NO: 766745 - RNA, 19 nt, Artificial Sequence
  Description of Artificial Sequence: Synthetic oligonucleotide
uacuguuacacucuccaaa

SEQ ID NO: 766746 - RNA, 19 nt, Artificial Sequence
  Description of Artificial Sequence: Synthetic oligonucleotide
cucgcaaacaucucucugc

SEQ ID NO: 766747 - RNA, 19 nt, Artificial Sequence
  Description of Artificial Sequence: Synthetic oligonucleotide
ugucuccauagcuaaauga

SEQ ID NO: 766748 - RNA, 19 nt, Artificial Sequence
  Description of Artificial Sequence: Synthetic oligonucleotide
guagcuuagcugaagaagc

SEQ ID NO: 766749 - RNA, 19 nt, Artificial Sequence
  Description of Artificial Sequence: Synthetic oligonucleotide
agauugauguaguaacugu

SEQ ID NO: 766750 - RNA, 19 nt, Artificial Sequence
  Description of Artificial Sequence: Synthetic oligonucleotide
uagacuuugccaaguaagu

SEQ ID NO: 766751 - RNA, 19 nt, Artificial Sequence
  Description of Artificial Sequence: Synthetic oligonucleotide
agcaguugcacuaacagca

SEQ ID NO: 766752 - RNA, 19 nt, Artificial Sequence
  Description of Artificial Sequence: Synthetic oligonucleotide
agaacauucaauaccucag

SEQ ID NO: 766753 - RNA, 19 nt, Artificial Sequence
  Description of Artificial Sequence: Synthetic oligonucleotide
uuugauagcugcagauuga

SEQ ID NO: 766754 - RNA, 19 nt, Artificial Sequence
  Description of Artificial Sequence: Synthetic oligonucleotide
gaggucaaguucuucauca

SEQ ID NO: 766755 - RNA, 19 nt, Artificial Sequence
  Description of Artificial Sequence: Synthetic oligonucleotide
auuccgggcacuauauucc

SEQ ID NO: 766756 - RNA, 19 nt, Artificial Sequence
  Description of Artificial Sequence: Synthetic oligonucleotide
aaacucgcaaacaucucuc

SEQ ID NO: 766757 - RNA, 19 nt, Artificial Sequence
  Description of Artificial Sequence: Synthetic oligonucleotide
cagaccacccaaaagccgg

SEQ ID NO: 766758 - RNA, 19 nt, Artificial Sequence
  Description of Artificial Sequence: Synthetic oligonucleotide
agucguuauauuuucuaga

SEQ ID NO: 766759 - RNA, 19 nt, Artificial Sequence
  Description of Artificial Sequence: Synthetic oligonucleotide
gcaaagguaaagcagcuag

SEQ ID NO: 766760 - RNA, 19 nt, Artificial Sequence
  Description of Artificial Sequence: Synthetic oligonucleotide
gauuccgggcacuauauuc

SEQ ID NO: 766761 - RNA, 19 nt, Artificial Sequence
  Description of Artificial Sequence: Synthetic oligonucleotide
gaaucaugagaucuaggca

SEQ ID NO: 766762 - RNA, 19 nt, Artificial Sequence
  Description of Artificial Sequence: Synthetic oligonucleotide
aaaccaaucuccugcucgu

SEQ ID NO: 766763 - RNA, 19 nt, Artificial Sequence
  Description of Artificial Sequence: Synthetic oligonucleotide
uccuuaaacucugaucucc

SEQ ID NO: 766764 - RNA, 19 nt, Artificial Sequence
  Description of Artificial Sequence: Synthetic oligonucleotide
aaacaaagggaggguauag

SEQ ID NO: 766765 - RNA, 19 nt, Artificial Sequence
  Description of Artificial Sequence: Synthetic oligonucleotide
uugguauaucuucaaggac

SEQ ID NO: 766766 - RNA, 19 nt, Artificial Sequence
  Description of Artificial Sequence: Synthetic oligonucleotide
uuuaaaccuugccuaaaau

SEQ ID NO: 766767 - RNA, 19 nt, Artificial Sequence
  Description of Artificial Sequence: Synthetic oligonucleotide
aacauucaauaccucagua

SEQ ID NO: 766768 - RNA, 19 nt, Artificial Sequence
  Description of Artificial Sequence: Synthetic oligonucleotide
agaucaagaugcuuauugu

SEQ ID NO: 766769 - RNA, 19 nt, Artificial Sequence
  Description of Artificial Sequence: Synthetic oligonucleotide
uuacgauuggaaucauuca

SEQ ID NO: 766770 - RNA, 19 nt, Artificial Sequence
  Description of Artificial Sequence: Synthetic oligonucleotide
uuaguuaaauugagcaaua

SEQ ID NO: 766771 - RNA, 19 nt, Artificial Sequence
  Description of Artificial Sequence: Synthetic oligonucleotide
cauagcuaaaugaccaguc

SEQ ID NO: 766772 - RNA, 19 nt, Artificial Sequence
  Description of Artificial Sequence: Synthetic oligonucleotide
guaaggcugagguuuacug

SEQ ID NO: 766773 - RNA, 19 nt, Artificial Sequence
  Description of Artificial Sequence: Synthetic oligonucleotide
aauugagcaauaccccaau

SEQ ID NO: 766774 - RNA, 19 nt, Artificial Sequence
  Description of Artificial Sequence: Synthetic oligonucleotide
aagagucgaaucaugagau

SEQ ID NO: 766775 - RNA, 19 nt, Artificial Sequence
  Description of Artificial Sequence: Synthetic oligonucleotide
uugaugaauguucuuggua

SEQ ID NO: 766776 - RNA, 19 nt, Artificial Sequence
  Description of Artificial Sequence: Synthetic oligonucleotide
uaaaugaccagucguuaua

SEQ ID NO: 766777 - RNA, 19 nt, Artificial Sequence
  Description of Artificial Sequence: Synthetic oligonucleotide
uagcugaugaaaugaugag

SEQ ID NO: 766778 - RNA, 19 nt, Artificial Sequence
  Description of Artificial Sequence: Synthetic oligonucleotide
uaccucaguagcuaagcug

SEQ ID NO: 766779 - RNA, 19 nt, Artificial Sequence
  Description of Artificial Sequence: Synthetic oligonucleotide
ucgaaucaugagaucuagg

SEQ ID NO: 766780 - RNA, 19 nt, Artificial Sequence
  Description of Artificial Sequence: Synthetic oligonucleotide
aaacacgaaugauauugau

SEQ ID NO: 766781 - RNA, 19 nt, Artificial Sequence
  Description of Artificial Sequence: Synthetic oligonucleotide
uucauucaguagcuuagcu

SEQ ID NO: 766782 - RNA, 19 nt, Artificial Sequence
  Description of Artificial Sequence: Synthetic oligonucleotide
ugagaucuaggcacuuuug

SEQ ID NO: 766783 - RNA, 19 nt, Artificial Sequence
  Description of Artificial Sequence: Synthetic oligonucleotide
ugagguagguacuuuggaa

SEQ ID NO: 766784 - RNA, 19 nt, Artificial Sequence
  Description of Artificial Sequence: Synthetic oligonucleotide
ucuagaucaagaugcuuau

SEQ ID NO: 766785 - RNA, 19 nt, Artificial Sequence
  Description of Artificial Sequence: Synthetic oligonucleotide
guugaaucaguucuucaca

SEQ ID NO: 766786 - RNA, 19 nt, Artificial Sequence
  Description of Artificial Sequence: Synthetic oligonucleotide
caacaguggcucaacauac

SEQ ID NO: 766787 - RNA, 19 nt, Artificial Sequence
  Description of Artificial Sequence: Synthetic oligonucleotide
cagucguuauauuuucuag

SEQ ID NO: 766788 - RNA, 19 nt, Artificial Sequence
  Description of Artificial Sequence: Synthetic oligonucleotide
cugacuggcaugacaacag

SEQ ID NO: 766789 - RNA, 19 nt, Artificial Sequence
  Description of Artificial Sequence: Synthetic oligonucleotide
uaugauccagaccacccaa

SEQ ID NO: 766790 - RNA, 19 nt, Artificial Sequence
  Description of Artificial Sequence: Synthetic oligonucleotide
guaagauucaugaagcuua

SEQ ID NO: 766791 - RNA, 19 nt, Artificial Sequence
  Description of Artificial Sequence: Synthetic oligonucleotide
gauccagaccacccaaaag

SEQ ID NO: 766792 - RNA, 19 nt, Artificial Sequence
  Description of Artificial Sequence: Synthetic oligonucleotide
uauaggcuaucaaguagcu

SEQ ID NO: 766793 - RNA, 19 nt, Artificial Sequence
  Description of Artificial Sequence: Synthetic oligonucleotide
cucuacuuaaaugauccac

SEQ ID NO: 766794 - RNA, 19 nt, Artificial Sequence
  Description of Artificial Sequence: Synthetic oligonucleotide
uccauagcuaaaugaccag

SEQ ID NO: 766795 - RNA, 19 nt, Artificial Sequence
  Description of Artificial Sequence: Synthetic oligonucleotide
caagagucgaaucaugaga

SEQ ID NO: 766796 - RNA, 19 nt, Artificial Sequence
  Description of Artificial Sequence: Synthetic oligonucleotide
aagaugcuuauugugcaca

SEQ ID NO: 766797 - RNA, 19 nt, Artificial Sequence
  Description of Artificial Sequence: Synthetic oligonucleotide
cuccauagcuaaaugacca

SEQ ID NO: 766798 - RNA, 19 nt, Artificial Sequence
  Description of Artificial Sequence: Synthetic oligonucleotide
agauuuaucaguagaccca

SEQ ID NO: 766799 - RNA, 19 nt, Artificial Sequence
  Description of Artificial Sequence: Synthetic oligonucleotide
ucguuuggaagugagggac

SEQ ID NO: 766800 - RNA, 19 nt, Artificial Sequence
  Description of Artificial Sequence: Synthetic oligonucleotide
uccucagaacauucaauac

SEQ ID NO: 766801 - RNA, 19 nt, Artificial Sequence
  Description of Artificial Sequence: Synthetic oligonucleotide
auagcccucaugcaguccu

SEQ ID NO: 766802 - RNA, 19 nt, Artificial Sequence
  Description of Artificial Sequence: Synthetic oligonucleotide
cuaugaguccaucuuguuc

SEQ ID NO: 766803 - RNA, 19 nt, Artificial Sequence
  Description of Artificial Sequence: Synthetic oligonucleotide
agaugcuuauugugcacag

SEQ ID NO: 766804 - RNA, 19 nt, Artificial Sequence
  Description of Artificial Sequence: Synthetic oligonucleotide
auaaagaggcuacuaguuu

SEQ ID NO: 766805 - RNA, 19 nt, Artificial Sequence
  Description of Artificial Sequence: Synthetic oligonucleotide
ucuaggcacuuuugagugg

SEQ ID NO: 766806 - RNA, 19 nt, Artificial Sequence
  Description of Artificial Sequence: Synthetic oligonucleotide
aaaugaccagucguuauau

SEQ ID NO: 766807 - RNA, 19 nt, Artificial Sequence
  Description of Artificial Sequence: Synthetic oligonucleotide
gagaucuaggcacuuuuga

SEQ ID NO: 766808 - RNA, 19 nt, Artificial Sequence
  Description of Artificial Sequence: Synthetic oligonucleotide
cucuuaucaugcugagugg

SEQ ID NO: 766809 - RNA, 19 nt, Artificial Sequence
  Description of Artificial Sequence: Synthetic oligonucleotide
accuugccuaaaauaaagc

SEQ ID NO: 766810 - RNA, 19 nt, Artificial Sequence
  Description of Artificial Sequence: Synthetic oligonucleotide
ucuuaucaugcugaguggu

SEQ ID NO: 766811 - RNA, 19 nt, Artificial Sequence
  Description of Artificial Sequence: Synthetic oligonucleotide
gaauaucgaaucucugcuc

SEQ ID NO: 766812 - RNA, 19 nt, Artificial Sequence
  Description of Artificial Sequence: Synthetic oligonucleotide
ucaaguagcuuugauucuc

SEQ ID NO: 766813 - RNA, 19 nt, Artificial Sequence
  Description of Artificial Sequence: Synthetic oligonucleotide
auaugauccagaccaccca

SEQ ID NO: 766814 - RNA, 19 nt, Artificial Sequence
  Description of Artificial Sequence: Synthetic oligonucleotide
aaagccggagcucuucuuu

SEQ ID NO: 766815 - RNA, 19 nt, Artificial Sequence
  Description of Artificial Sequence: Synthetic oligonucleotide
cuuaucaugcugaguggug

SEQ ID NO: 766816 - RNA, 19 nt, Artificial Sequence
  Description of Artificial Sequence: Synthetic oligonucleotide
cagaacauucaauaccuca

SEQ ID NO: 766817 - RNA, 19 nt, Artificial Sequence
  Description of Artificial Sequence: Synthetic oligonucleotide
augccugaacagcaugaac

SEQ ID NO: 766818 - RNA, 19 nt, Artificial Sequence
  Description of Artificial Sequence: Synthetic oligonucleotide
cuguaguuacauugauagg

SEQ ID NO: 766819 - RNA, 19 nt, Artificial Sequence
  Description of Artificial Sequence: Synthetic oligonucleotide
ucgcaaacaucucucugcu

SEQ ID NO: 766820 - RNA, 19 nt, Artificial Sequence
  Description of Artificial Sequence: Synthetic oligonucleotide
cuuuggaaccugaaggaca

SEQ ID NO: 766821 - RNA, 19 nt, Artificial Sequence
  Description of Artificial Sequence: Synthetic oligonucleotide
accacccaaaagccggagc

SEQ ID NO: 766822 - RNA, 19 nt, Artificial Sequence
  Description of Artificial Sequence: Synthetic oligonucleotide
ucgcucucguucaagaaau

SEQ ID NO: 766823 - RNA, 19 nt, Artificial Sequence
  Description of Artificial Sequence: Synthetic oligonucleotide
aaauugagcaauaccccaa

SEQ ID NO: 766824 - RNA, 19 nt, Artificial Sequence
  Description of Artificial Sequence: Synthetic oligonucleotide
auccuuaaacucugaucuc

SEQ ID NO: 766825 - RNA, 19 nt, Artificial Sequence
  Description of Artificial Sequence: Synthetic oligonucleotide
ucguuauauuuucuagauc

SEQ ID NO: 766826 - RNA, 19 nt, Artificial Sequence
  Description of Artificial Sequence: Synthetic oligonucleotide
uccacuagaggaggaauca

SEQ ID NO: 766827 - RNA, 19 nt, Artificial Sequence
  Description of Artificial Sequence: Synthetic oligonucleotide
cauuaguuaaauugagcaa

SEQ ID NO: 766828 - RNA, 19 nt, Artificial Sequence
  Description of Artificial Sequence: Synthetic oligonucleotide
auuauggagaaaucuccuu

SEQ ID NO: 766829 - RNA, 19 nt, Artificial Sequence
  Description of Artificial Sequence: Synthetic oligonucleotide
ccucagaacauucaauacc

SEQ ID NO: 766830 - RNA, 19 nt, Artificial Sequence
  Description of Artificial Sequence: Synthetic oligonucleotide
agagucgaaucaugagauc

SEQ ID NO: 766831 - RNA, 19 nt, Artificial Sequence
  Description of Artificial Sequence: Synthetic oligonucleotide
ugauagcugcagauugaug

SEQ ID NO: 766832 - RNA, 19 nt, Artificial Sequence
  Description of Artificial Sequence: Synthetic oligonucleotide
caauaugauccagaccacc

SEQ ID NO: 766833 - RNA, 19 nt, Artificial Sequence
  Description of Artificial Sequence: Synthetic oligonucleotide
agccugaaccuuuucccuc

SEQ ID NO: 766834 - RNA, 19 nt, Artificial Sequence
  Description of Artificial Sequence: Synthetic oligonucleotide
uagacccaaucccagcacu

SEQ ID NO: 766835 - RNA, 19 nt, Artificial Sequence
  Description of Artificial Sequence: Synthetic oligonucleotide
acgaaugauauugaugaau

SEQ ID NO: 766836 - RNA, 19 nt, Artificial Sequence
  Description of Artificial Sequence: Synthetic oligonucleotide
aggaacuaagcuguugucu

SEQ ID NO: 766837 - RNA, 19 nt, Artificial Sequence
  Description of Artificial Sequence: Synthetic oligonucleotide
caauaccucaguagcuaag

SEQ ID NO: 766838 - RNA, 19 nt, Artificial Sequence
  Description of Artificial Sequence: Synthetic oligonucleotide
uucaguugacacccauugu

SEQ ID NO: 766839 - RNA, 19 nt, Artificial Sequence
  Description of Artificial Sequence: Synthetic oligonucleotide
auugagcaauaccccaaug

SEQ ID NO: 766840 - RNA, 19 nt, Artificial Sequence
  Description of Artificial Sequence: Synthetic oligonucleotide
uuuucaguugacacccauu

SEQ ID NO: 766841 - RNA, 19 nt, Artificial Sequence
  Description of Artificial Sequence: Synthetic oligonucleotide
cauaugcuguucucagcgc

SEQ ID NO: 766842 - RNA, 19 nt, Artificial Sequence
  Description of Artificial Sequence: Synthetic oligonucleotide
guagcuaagcugccuuugc

SEQ ID NO: 766843 - RNA, 19 nt, Artificial Sequence
  Description of Artificial Sequence: Synthetic oligonucleotide
agguuuacugucugcuaug

SEQ ID NO: 766844 - RNA, 19 nt, Artificial Sequence
  Description of Artificial Sequence: Synthetic oligonucleotide
aguggugggagcaucuuug

SEQ ID NO: 766845 - RNA, 19 nt, Artificial Sequence
  Description of Artificial Sequence: Synthetic oligonucleotide
ucucuacuuaaaugaucca

SEQ ID NO: 766846 - RNA, 19 nt, Artificial Sequence
  Description of Artificial Sequence: Synthetic oligonucleotide
gaccagucguuauauuuuc

SEQ ID NO: 766847 - RNA, 19 nt, Artificial Sequence
  Description of Artificial Sequence: Synthetic oligonucleotide
uuugcaccugacuggcaug

SEQ ID NO: 766848 - RNA, 19 nt, Artificial Sequence
  Description of Artificial Sequence: Synthetic oligonucleotide
guugacaaggcagugucga

SEQ ID NO: 766849 - RNA, 19 nt, Artificial Sequence
  Description of Artificial Sequence: Synthetic oligonucleotide
uacugccccacucauuauc

SEQ ID NO: 766850 - RNA, 19 nt, Artificial Sequence
  Description of Artificial Sequence: Synthetic oligonucleotide
auaccucaguagcuaagcu

SEQ ID NO: 766851 - RNA, 19 nt, Artificial Sequence
  Description of Artificial Sequence: Synthetic oligonucleotide
agcgcgguuguacuguuga

SEQ ID NO: 766852 - RNA, 19 nt, Artificial Sequence
  Description of Artificial Sequence: Synthetic oligonucleotide
acucgaauaucgaaucucu

SEQ ID NO: 766853 - RNA, 19 nt, Artificial Sequence
  Description of Artificial Sequence: Synthetic oligonucleotide
cucgaauaucgaaucucug

SEQ ID NO: 766854 - RNA, 19 nt, Artificial Sequence
  Description of Artificial Sequence: Synthetic oligonucleotide
gugggagcaucuuugauua

SEQ ID NO: 766855 - RNA, 19 nt, Artificial Sequence
  Description of Artificial Sequence: Synthetic oligonucleotide
ucgauuccgggcacuauau

SEQ ID NO: 766856 - RNA, 19 nt, Artificial Sequence
  Description of Artificial Sequence: Synthetic oligonucleotide
uucucagcgcgguuguacu

SEQ ID NO: 766857 - RNA, 19 nt, Artificial Sequence
  Description of Artificial Sequence: Synthetic oligonucleotide
aaugccugaacagcaugaa

SEQ ID NO: 766858 - RNA, 19 nt, Artificial Sequence
  Description of Artificial Sequence: Synthetic oligonucleotide
aagcaaagguaaagcagcu

SEQ ID NO: 766859 - RNA, 19 nt, Artificial Sequence
  Description of Artificial Sequence: Synthetic oligonucleotide
guucaagaaauagcuguac

SEQ ID NO: 766860 - RNA, 19 nt, Artificial Sequence
  Description of Artificial Sequence: Synthetic oligonucleotide
caaacacgaaugauauuga

SEQ ID NO: 766861 - RNA, 19 nt, Artificial Sequence
  Description of Artificial Sequence: Synthetic oligonucleotide
aaugaccagucguuauauu

SEQ ID NO: 766862 - RNA, 19 nt, Artificial Sequence
  Description of Artificial Sequence: Synthetic oligonucleotide
gagucgaaucaugagaucu

SEQ ID NO: 766863 - RNA, 19 nt, Artificial Sequence
  Description of Artificial Sequence: Synthetic oligonucleotide
gaagguauucccucacugu

SEQ ID NO: 766864 - RNA, 19 nt, Artificial Sequence
  Description of Artificial Sequence: Synthetic oligonucleotide
aguagcuaagcugccuuug

SEQ ID NO: 766865 - RNA, 19 nt, Artificial Sequence
  Description of Artificial Sequence: Synthetic oligonucleotide
cuuuaaaccuugccuaaaa

SEQ ID NO: 766866 - RNA, 19 nt, Artificial Sequence
  Description of Artificial Sequence: Synthetic oligonucleotide
ugcuuauugugcacaguuu

SEQ ID NO: 766867 - RNA, 19 nt, Artificial Sequence
  Description of Artificial Sequence: Synthetic oligonucleotide
cuaugcauaugcuguucuc

SEQ ID NO: 766868 - RNA, 19 nt, Artificial Sequence
  Description of Artificial Sequence: Synthetic oligonucleotide
uagguacuuuggaaccuga

SEQ ID NO: 766869 - RNA, 19 nt, Artificial Sequence
  Description of Artificial Sequence: Synthetic oligonucleotide
cuccacuagaggaggaauc

SEQ ID NO: 766870 - RNA, 19 nt, Artificial Sequence
  Description of Artificial Sequence: Synthetic oligonucleotide
gaacauucaauaccucagu

SEQ ID NO: 766871 - RNA, 19 nt, Artificial Sequence
  Description of Artificial Sequence: Synthetic oligonucleotide
uccggauuauguacuguua

SEQ ID NO: 766872 - RNA, 19 nt, Artificial Sequence
  Description of Artificial Sequence: Synthetic oligonucleotide
cugucauuauggagaaauc

SEQ ID NO: 766873 - RNA, 19 nt, Artificial Sequence
  Description of Artificial Sequence: Synthetic oligonucleotide
auagcugcagauugaugua

SEQ ID NO: 766874 - RNA, 19 nt, Artificial Sequence
  Description of Artificial Sequence: Synthetic oligonucleotide
cauuaccaagcaccugaag

SEQ ID NO: 766875 - RNA, 19 nt, Artificial Sequence
  Description of Artificial Sequence: Synthetic oligonucleotide
augaguugugaauccuuau

SEQ ID NO: 766876 - RNA, 19 nt, Artificial Sequence
  Description of Artificial Sequence: Synthetic oligonucleotide
ugagguuuacugucugcua

SEQ ID NO: 766877 - RNA, 19 nt, Artificial Sequence
  Description of Artificial Sequence: Synthetic oligonucleotide
ggcagugucgauuccgggc

SEQ ID NO: 766878 - RNA, 19 nt, Artificial Sequence
  Description of Artificial Sequence: Synthetic oligonucleotide
aaaagccggagcucuucuu

SEQ ID NO: 766879 - RNA, 19 nt, Artificial Sequence
  Description of Artificial Sequence: Synthetic oligonucleotide
cacucgaauaucgaaucuc

SEQ ID NO: 766880 - RNA, 19 nt, Artificial Sequence
  Description of Artificial Sequence: Synthetic oligonucleotide
aucgaaucucugcuccuga

SEQ ID NO: 766881 - RNA, 19 nt, Artificial Sequence
  Description of Artificial Sequence: Synthetic oligonucleotide
uuauugaggucaaguucuu

SEQ ID NO: 766882 - RNA, 19 nt, Artificial Sequence
  Description of Artificial Sequence: Synthetic oligonucleotide
agguauucccucacuguag

SEQ ID NO: 766883 - RNA, 19 nt, Artificial Sequence
  Description of Artificial Sequence: Synthetic oligonucleotide
ugacacccauuguauuucu

SEQ ID NO: 766884 - RNA, 19 nt, Artificial Sequence
  Description of Artificial Sequence: Synthetic oligonucleotide
aguucauugcugugccuau

SEQ ID NO: 766885 - RNA, 19 nt, Artificial Sequence
  Description of Artificial Sequence: Synthetic oligonucleotide
agaaaucggguggucauaa

SEQ ID NO: 766886 - RNA, 19 nt, Artificial Sequence
  Description of Artificial Sequence: Synthetic oligonucleotide
uuccgggcacuauauucca

SEQ ID NO: 766887 - RNA, 19 nt, Artificial Sequence
  Description of Artificial Sequence: Synthetic oligonucleotide
caguugcacuaacagcagc

SEQ ID NO: 766888 - RNA, 19 nt, Artificial Sequence
  Description of Artificial Sequence: Synthetic oligonucleotide
guagguacuuuggaaccug

SEQ ID NO: 766889 - RNA, 19 nt, Artificial Sequence
  Description of Artificial Sequence: Synthetic oligonucleotide
cuguuacacucuccaaaac

SEQ ID NO: 766890 - RNA, 19 nt, Artificial Sequence
  Description of Artificial Sequence: Synthetic oligonucleotide
gagguuuacugucugcuau

SEQ ID NO: 766891 - RNA, 19 nt, Artificial Sequence
  Description of Artificial Sequence: Synthetic oligonucleotide
cauuauggagaaaucuccu

SEQ ID NO: 766892 - RNA, 19 nt, Artificial Sequence
  Description of Artificial Sequence: Synthetic oligonucleotide
gaugaagaaaucggguggu

SEQ ID NO: 766893 - RNA, 19 nt, Artificial Sequence
  Description of Artificial Sequence: Synthetic oligonucleotide
ucucagcgcgguuguacug

SEQ ID NO: 766894 - RNA, 19 nt, Artificial Sequence
  Description of Artificial Sequence: Synthetic oligonucleotide
ccaagagucgaaucaugag

SEQ ID NO: 766895 - RNA, 19 nt, Artificial Sequence
  Description of Artificial Sequence: Synthetic oligonucleotide
ggaacuaagcuguugucua

SEQ ID NO: 766896 - RNA, 19 nt, Artificial Sequence
  Description of Artificial Sequence: Synthetic oligonucleotide
ggcaugacaacaguggcuc

SEQ ID NO: 766897 - RNA, 19 nt, Artificial Sequence
  Description of Artificial Sequence: Synthetic oligonucleotide
cacccauuguauuucucca

SEQ ID NO: 766898 - RNA, 19 nt, Artificial Sequence
  Description of Artificial Sequence: Synthetic oligonucleotide
caccugacuggcaugacaa

SEQ ID NO: 766899 - RNA, 19 nt, Artificial Sequence
  Description of Artificial Sequence: Synthetic oligonucleotide
agggaggguauagacuuug

SEQ ID NO: 766900 - RNA, 19 nt, Artificial Sequence
  Description of Artificial Sequence: Synthetic oligonucleotide
agcacagguaagauucaug

SEQ ID NO: 766901 - RNA, 19 nt, Artificial Sequence
  Description of Artificial Sequence: Synthetic oligonucleotide
augcuuuagcugaugaaau

SEQ ID NO: 766902 - RNA, 19 nt, Artificial Sequence
  Description of Artificial Sequence: Synthetic oligonucleotide
guugcacuaacagcagcac

SEQ ID NO: 766903 - RNA, 19 nt, Artificial Sequence
  Description of Artificial Sequence: Synthetic oligonucleotide
gcgguuguacuguugaauc

SEQ ID NO: 766904 - RNA, 19 nt, Artificial Sequence
  Description of Artificial Sequence: Synthetic oligonucleotide
gacaacaguggcucaacau

SEQ ID NO: 766905 - RNA, 19 nt, Artificial Sequence
  Description of Artificial Sequence: Synthetic oligonucleotide
auauuccacuagauuuauc

SEQ ID NO: 766906 - RNA, 19 nt, Artificial Sequence
  Description of Artificial Sequence: Synthetic oligonucleotide
agcccucaugcaguccucc

SEQ ID NO: 766907 - RNA, 19 nt, Artificial Sequence
  Description of Artificial Sequence: Synthetic oligonucleotide
aagaaaucggguggucaua

SEQ ID NO: 766908 - RNA, 19 nt, Artificial Sequence
  Description of Artificial Sequence: Synthetic oligonucleotide
ggguauagacuuugccaag

SEQ ID NO: 766909 - RNA, 19 nt, Artificial Sequence
  Description of Artificial Sequence: Synthetic oligonucleotide
guugacacccauuguauuu

SEQ ID NO: 766910 - RNA, 19 nt, Artificial Sequence
  Description of Artificial Sequence: Synthetic oligonucleotide
ccggauuauguacuguuac

SEQ ID NO: 766911 - RNA, 19 nt, Artificial Sequence
  Description of Artificial Sequence: Synthetic oligonucleotide
ggucaaguucuucaucauc

SEQ ID NO: 766912 - RNA, 19 nt, Artificial Sequence
  Description of Artificial Sequence: Synthetic oligonucleotide
ugcuaugcauaugcuguuc

SEQ ID NO: 766913 - RNA, 19 nt, Artificial Sequence
  Description of Artificial Sequence: Synthetic oligonucleotide
gcucucguucaagaaauag

SEQ ID NO: 766914 - RNA, 19 nt, Artificial Sequence
  Description of Artificial Sequence: Synthetic oligonucleotide
cucguuuggaagugaggga

SEQ ID NO: 766915 - RNA, 19 nt, Artificial Sequence
  Description of Artificial Sequence: Synthetic oligonucleotide
caaagggaggguauagacu

SEQ ID NO: 766916 - RNA, 19 nt, Artificial Sequence
  Description of Artificial Sequence: Synthetic oligonucleotide
uugacaaggcagugucgau

SEQ ID NO: 766917 - RNA, 19 nt, Artificial Sequence
  Description of Artificial Sequence: Synthetic oligonucleotide
uagcuuugauucuccggau

SEQ ID NO: 766918 - RNA, 19 nt, Artificial Sequence
  Description of Artificial Sequence: Synthetic oligonucleotide
cucgcucucguucaagaaa

SEQ ID NO: 766919 - RNA, 19 nt, Artificial Sequence
  Description of Artificial Sequence: Synthetic oligonucleotide
gagcaauaccccaaugaua

SEQ ID NO: 766920 - RNA, 19 nt, Artificial Sequence
  Description of Artificial Sequence: Synthetic oligonucleotide
uguuaacagccugaaccuu

SEQ ID NO: 766921 - RNA, 19 nt, Artificial Sequence
  Description of Artificial Sequence: Synthetic oligonucleotide
acuaaugccugaacagcau

SEQ ID NO: 766922 - RNA, 19 nt, Artificial Sequence
  Description of Artificial Sequence: Synthetic oligonucleotide
ccauguguuugccagcaug

SEQ ID NO: 766923 - RNA, 19 nt, Artificial Sequence
  Description of Artificial Sequence: Synthetic oligonucleotide
cuaaaugaccagucguuau

SEQ ID NO: 766924 - RNA, 19 nt, Artificial Sequence
  Description of Artificial Sequence: Synthetic oligonucleotide
ucuccggauuauguacugu

SEQ ID NO: 766925 - RNA, 19 nt, Artificial Sequence
  Description of Artificial Sequence: Synthetic oligonucleotide
uccaaacacgaaugauauu

SEQ ID NO: 766926 - RNA, 19 nt, Artificial Sequence
  Description of Artificial Sequence: Synthetic oligonucleotide
gucgauuccgggcacuaua

SEQ ID NO: 766927 - RNA, 19 nt, Artificial Sequence
  Description of Artificial Sequence: Synthetic oligonucleotide
uauuuacgauuggaaucau

SEQ ID NO: 766928 - RNA, 19 nt, Artificial Sequence
  Description of Artificial Sequence: Synthetic oligonucleotide
gaaaucggguggucauaaa

SEQ ID NO: 766929 - RNA, 19 nt, Artificial Sequence
  Description of Artificial Sequence: Synthetic oligonucleotide
gcaccugaagcaaagguaa

SEQ ID NO: 766930 - RNA, 19 nt, Artificial Sequence
  Description of Artificial Sequence: Synthetic oligonucleotide
guacuguuacacucuccaa

SEQ ID NO: 766931 - RNA, 19 nt, Artificial Sequence
  Description of Artificial Sequence: Synthetic oligonucleotide
cugcagauugauguaguaa

SEQ ID NO: 766932 - RNA, 19 nt, Artificial Sequence
  Description of Artificial Sequence: Synthetic oligonucleotide
caguagcuuagcugaagaa

SEQ ID NO: 766933 - RNA, 19 nt, Artificial Sequence
  Description of Artificial Sequence: Synthetic oligonucleotide
agucgaaucaugagaucua

SEQ ID NO: 766934 - RNA, 19 nt, Artificial Sequence
  Description of Artificial Sequence: Synthetic oligonucleotide
gggauuguuaacagccuga

SEQ ID NO: 766935 - RNA, 19 nt, Artificial Sequence
  Description of Artificial Sequence: Synthetic oligonucleotide
cagccucacugugacauuc

SEQ ID NO: 766936 - RNA, 19 nt, Artificial Sequence
  Description of Artificial Sequence: Synthetic oligonucleotide
auuuacgauuggaaucauu

SEQ ID NO: 766937 - RNA, 19 nt, Artificial Sequence
  Description of Artificial Sequence: Synthetic oligonucleotide
gaccacccaaaagccggag

SEQ ID NO: 766938 - RNA, 19 nt, Artificial Sequence
  Description of Artificial Sequence: Synthetic oligonucleotide
cuuugcaccugacuggcau

SEQ ID NO: 766939 - RNA, 19 nt, Artificial Sequence
  Description of Artificial Sequence: Synthetic oligonucleotide
guggugggagcaucuuuga

SEQ ID NO: 766940 - RNA, 19 nt, Artificial Sequence
  Description of Artificial Sequence: Synthetic oligonucleotide
ccggagcucuucuuuaaac

SEQ ID NO: 766941 - RNA, 19 nt, Artificial Sequence
  Description of Artificial Sequence: Synthetic oligonucleotide
gguauucccucacuguagu

SEQ ID NO: 766942 - RNA, 19 nt, Artificial Sequence
  Description of Artificial Sequence: Synthetic oligonucleotide
caguucauugcugugccua

SEQ ID NO: 766943 - RNA, 19 nt, Artificial Sequence
  Description of Artificial Sequence: Synthetic oligonucleotide
agcaaagguaaagcagcua

SEQ ID NO: 766944 - RNA, 19 nt, Artificial Sequence
  Description of Artificial Sequence: Synthetic oligonucleotide
caguugacacccauuguau

SEQ ID NO: 766945 - RNA, 19 nt, Artificial Sequence
  Description of Artificial Sequence: Synthetic oligonucleotide
cccaaugauagcccucaug

SEQ ID NO: 766946 - RNA, 19 nt, Artificial Sequence
  Description of Artificial Sequence: Synthetic oligonucleotide
gaacuuguccagccauccu

SEQ ID NO: 766947 - RNA, 19 nt, Artificial Sequence
  Description of Artificial Sequence: Synthetic oligonucleotide
ccuuauaggcuaucaagua

SEQ ID NO: 766948 - RNA, 19 nt, Artificial Sequence
  Description of Artificial Sequence: Synthetic oligonucleotide
ccauaaagaggcuacuagu

SEQ ID NO: 766949 - RNA, 19 nt, Artificial Sequence
  Description of Artificial Sequence: Synthetic oligonucleotide
agugucgauuccgggcacu

SEQ ID NO: 766950 - RNA, 19 nt, Artificial Sequence
  Description of Artificial Sequence: Synthetic oligonucleotide
ggauuguuaacagccugaa

SEQ ID NO: 766951 - RNA, 19 nt, Artificial Sequence
  Description of Artificial Sequence: Synthetic oligonucleotide
ccacucuuaucaugcugag

SEQ ID NO: 766952 - RNA, 19 nt, Artificial Sequence
  Description of Artificial Sequence: Synthetic oligonucleotide
caaucacucuagagauaga

SEQ ID NO: 766953 - RNA, 19 nt, Artificial Sequence
  Description of Artificial Sequence: Synthetic oligonucleotide
uuggaaccugaaggacaca

SEQ ID NO: 766954 - RNA, 19 nt, Artificial Sequence
  Description of Artificial Sequence: Synthetic oligonucleotide
ucagcgcgguuguacuguu

SEQ ID NO: 766955 - RNA, 19 nt, Artificial Sequence
  Description of Artificial Sequence: Synthetic oligonucleotide
guuguacuguugaaucagu

SEQ ID NO: 766956 - RNA, 19 nt, Artificial Sequence
  Description of Artificial Sequence: Synthetic oligonucleotide
gcuaugcauaugcuguucu

SEQ ID NO: 766957 - RNA, 19 nt, Artificial Sequence
  Description of Artificial Sequence: Synthetic oligonucleotide
gccacgaugcaauccucca

SEQ ID NO: 766958 - RNA, 19 nt, Artificial Sequence
  Description of Artificial Sequence: Synthetic oligonucleotide
ugucgauuccgggcacuau

SEQ ID NO: 766959 - RNA, 19 nt, Artificial Sequence
  Description of Artificial Sequence: Synthetic oligonucleotide
agguacuuuggaaccugaa

SEQ ID NO: 766960 - RNA, 19 nt, Artificial Sequence
  Description of Artificial Sequence: Synthetic oligonucleotide
cgaauaucgaaucucugcu

SEQ ID NO: 766961 - RNA, 19 nt, Artificial Sequence
  Description of Artificial Sequence: Synthetic oligonucleotide
gcaccugacuggcaugaca

SEQ ID NO: 766962 - RNA, 19 nt, Artificial Sequence
  Description of Artificial Sequence: Synthetic oligonucleotide
cuccggauuauguacuguu

SEQ ID NO: 766963 - RNA, 19 nt, Artificial Sequence
  Description of Artificial Sequence: Synthetic oligonucleotide
cuaagcuguugucuagaau

SEQ ID NO: 766964 - RNA, 19 nt, Artificial Sequence
  Description of Artificial Sequence: Synthetic oligonucleotide
cagugucgauuccgggcac

SEQ ID NO: 766965 - RNA, 19 nt, Artificial Sequence
  Description of Artificial Sequence: Synthetic oligonucleotide
accaagcaccugaagcaaa

SEQ ID NO: 766966 - RNA, 19 nt, Artificial Sequence
  Description of Artificial Sequence: Synthetic oligonucleotide
guaaagcagcuagcaaugu

SEQ ID NO: 766967 - RNA, 19 nt, Artificial Sequence
  Description of Artificial Sequence: Synthetic oligonucleotide
aggccacgaugcaauccuc

SEQ ID NO: 766968 - RNA, 19 nt, Artificial Sequence
  Description of Artificial Sequence: Synthetic oligonucleotide
ccagcacucgaauaucgaa

SEQ ID NO: 766969 - RNA, 19 nt, Artificial Sequence
  Description of Artificial Sequence: Synthetic oligonucleotide
gguauaucuucaaggacuu

SEQ ID NO: 766970 - RNA, 19 nt, Artificial Sequence
  Description of Artificial Sequence: Synthetic oligonucleotide
cggauuauguacuguuaca

SEQ ID NO: 766971 - RNA, 19 nt, Artificial Sequence
  Description of Artificial Sequence: Synthetic oligonucleotide
gcuaucaaguagcuuugau

SEQ ID NO: 766972 - RNA, 19 nt, Artificial Sequence
  Description of Artificial Sequence: Synthetic oligonucleotide
gggaggguauagacuuugc

SEQ ID NO: 766973 - RNA, 19 nt, Artificial Sequence
  Description of Artificial Sequence: Synthetic oligonucleotide
gcugcagauugauguagua

SEQ ID NO: 766974 - RNA, 19 nt, Artificial Sequence
  Description of Artificial Sequence: Synthetic oligonucleotide
cagcgcgguuguacuguug

SEQ ID NO: 766975 - RNA, 19 nt, Artificial Sequence
  Description of Artificial Sequence: Synthetic oligonucleotide
ccaacugggcugcucgcuc

SEQ ID NO: 766976 - RNA, 19 nt, Artificial Sequence
  Description of Artificial Sequence: Synthetic oligonucleotide
uguucucagcgcgguugua

SEQ ID NO: 766977 - RNA, 19 nt, Artificial Sequence
  Description of Artificial Sequence: Synthetic oligonucleotide
gguagguacuuuggaaccu

SEQ ID NO: 766978 - RNA, 19 nt, Artificial Sequence
  Description of Artificial Sequence: Synthetic oligonucleotide
cuguucucagcgcgguugu

SEQ ID NO: 766979 - RNA, 19 nt, Artificial Sequence
  Description of Artificial Sequence: Synthetic oligonucleotide
cucagcgcgguuguacugu

SEQ ID NO: 766980 - RNA, 19 nt, Artificial Sequence
  Description of Artificial Sequence: Synthetic oligonucleotide
gcacucgaauaucgaaucu

SEQ ID NO: 766981 - RNA, 19 nt, Artificial Sequence
  Description of Artificial Sequence: Synthetic oligonucleotide
gcaugacaacaguggcuca

SEQ ID NO: 766982 - RNA, 19 nt, Artificial Sequence
  Description of Artificial Sequence: Synthetic oligonucleotide
gguaaggcugagguuuacu

SEQ ID NO: 766983 - RNA, 19 nt, Artificial Sequence
  Description of Artificial Sequence: Synthetic oligonucleotide
gccuaugaguccaucuugu

SEQ ID NO: 766984 - RNA, 19 nt, Artificial Sequence
  Description of Artificial Sequence: Synthetic oligonucleotide
guauucccucacuguaguu

SEQ ID NO: 766985 - RNA, 19 nt, Artificial Sequence
  Description of Artificial Sequence: Synthetic oligonucleotide
gugucgauuccgggcacua

SEQ ID NO: 766986 - RNA, 19 nt, Artificial Sequence
  Description of Artificial Sequence: Synthetic oligonucleotide
gcacuaacagcagcacaaa

SEQ ID NO: 766987 - RNA, 19 nt, Artificial Sequence
  Description of Artificial Sequence: Synthetic oligonucleotide
cacucuuaucaugcugagu

SEQ ID NO: 766988 - RNA, 19 nt, Artificial Sequence
  Description of Artificial Sequence: Synthetic oligonucleotide
caugagaucuaggcacuuu

SEQ ID NO: 766989 - RNA, 19 nt, Artificial Sequence
  Description of Artificial Sequence: Synthetic oligonucleotide
ccauagcuaaaugaccagu

SEQ ID NO: 766990 - RNA, 19 nt, Artificial Sequence
  Description of Artificial Sequence: Synthetic oligonucleotide
ccgggcacuauauuccacu

SEQ ID NO: 766991 - RNA, 19 nt, Artificial Sequence
  Description of Artificial Sequence: Synthetic oligonucleotide
gccggagcucuucuuuaaa

SEQ ID NO: 766992 - RNA, 19 nt, Artificial Sequence
  Description of Artificial Sequence: Synthetic oligonucleotide
cuagaucaagaugcuuauu

SEQ ID NO: 766993 - RNA, 19 nt, Artificial Sequence
  Description of Artificial Sequence: Synthetic oligonucleotide
gauagacuucuggccuguu

SEQ ID NO: 766994 - RNA, 19 nt, Artificial Sequence
  Description of Artificial Sequence: Synthetic oligonucleotide
ccuuugcaccugacuggca

SEQ ID NO: 766995 - RNA, 19 nt, Artificial Sequence
  Description of Artificial Sequence: Synthetic oligonucleotide
ccccauaaagaggcuacua

SEQ ID NO: 766996 - RNA, 19 nt, Artificial Sequence
  Description of Artificial Sequence: Synthetic oligonucleotide
gcgcgguuguacuguugaa

SEQ ID NO: 766997 - RNA, 19 nt, Artificial Sequence
  Description of Artificial Sequence: Synthetic oligonucleotide
ccugcucguuuggaaguga

SEQ ID NO: 766998 - RNA, 19 nt, Artificial Sequence
  Description of Artificial Sequence: Synthetic oligonucleotide
cgcgguuguacuguugaau

SEQ ID NO: 766999 - RNA, 19 nt, Artificial Sequence
  Description of Artificial Sequence: Synthetic oligonucleotide
cgcucucguucaagaaaua

SEQ ID NO: 767000 - RNA, 19 nt, Artificial Sequence
  Description of Artificial Sequence: Synthetic oligonucleotide
cgauuccgggcacuauauu

SEQ ID NO: 767001 - RNA, 19 nt, Artificial Sequence
  Description of Artificial Sequence: Synthetic oligonucleotide
agugauaauagguauagcc

SEQ ID NO: 767002 - RNA, 19 nt, Artificial Sequence
  Description of Artificial Sequence: Synthetic oligonucleotide
uguucuugagauuagagcc

SEQ ID NO: 767003 - RNA, 19 nt, Artificial Sequence
  Description of Artificial Sequence: Synthetic oligonucleotide
uuuccuaugagcuuccucg

SEQ ID NO: 767004 - RNA, 19 nt, Artificial Sequence
  Description of Artificial Sequence: Synthetic oligonucleotide
ugugagaacaucauaaugu

SEQ ID NO: 767005 - RNA, 19 nt, Artificial Sequence
  Description of Artificial Sequence: Synthetic oligonucleotide
uaugauaaaacauccgugc

SEQ ID NO: 767006 - RNA, 19 nt, Artificial Sequence
  Description of Artificial Sequence: Synthetic oligonucleotide
uaagcgaaguuacugaagg

SEQ ID NO: 767007 - RNA, 19 nt, Artificial Sequence
  Description of Artificial Sequence: Synthetic oligonucleotide
aggccaauaaauuucgggc

SEQ ID NO: 767008 - RNA, 19 nt, Artificial Sequence
  Description of Artificial Sequence: Synthetic oligonucleotide
ucaacgucaaugcucacgg

SEQ ID NO: 767009 - RNA, 19 nt, Artificial Sequence
  Description of Artificial Sequence: Synthetic oligonucleotide
aaacauccgugccauaccc

SEQ ID NO: 767010 - RNA, 19 nt, Artificial Sequence
  Description of Artificial Sequence: Synthetic oligonucleotide
uucacuuaauguuaagcgg

SEQ ID NO: 767011 - RNA, 19 nt, Artificial Sequence
  Description of Artificial Sequence: Synthetic oligonucleotide
uugauuaauuugaugauga

SEQ ID NO: 767012 - RNA, 19 nt, Artificial Sequence
  Description of Artificial Sequence: Synthetic oligonucleotide
ugagauuagagccaccgag

SEQ ID NO: 767013 - RNA, 19 nt, Artificial Sequence
  Description of Artificial Sequence: Synthetic oligonucleotide
uauaauaagucugauuugc

SEQ ID NO: 767014 - RNA, 19 nt, Artificial Sequence
  Description of Artificial Sequence: Synthetic oligonucleotide
auguucuugagauuagagc

SEQ ID NO: 767015 - RNA, 19 nt, Artificial Sequence
  Description of Artificial Sequence: Synthetic oligonucleotide
acauauuguauacucuagc

SEQ ID NO: 767016 - RNA, 19 nt, Artificial Sequence
  Description of Artificial Sequence: Synthetic oligonucleotide
uuaugauaaaacauccgug

SEQ ID NO: 767017 - RNA, 19 nt, Artificial Sequence
  Description of Artificial Sequence: Synthetic oligonucleotide
uauaagguguguaucacca

SEQ ID NO: 767018 - RNA, 19 nt, Artificial Sequence
  Description of Artificial Sequence: Synthetic oligonucleotide
aauagguuugguaagguug

SEQ ID NO: 767019 - RNA, 19 nt, Artificial Sequence
  Description of Artificial Sequence: Synthetic oligonucleotide
aacaucauaaugucuucag

SEQ ID NO: 767020 - RNA, 19 nt, Artificial Sequence
  Description of Artificial Sequence: Synthetic oligonucleotide
ugagaguauaggaaguuag

SEQ ID NO: 767021 - RNA, 19 nt, Artificial Sequence
  Description of Artificial Sequence: Synthetic oligonucleotide
auacucuagcaguauagcc

SEQ ID NO: 767022 - RNA, 19 nt, Artificial Sequence
  Description of Artificial Sequence: Synthetic oligonucleotide
aaagacccagaacauauug

SEQ ID NO: 767023 - RNA, 19 nt, Artificial Sequence
  Description of Artificial Sequence: Synthetic oligonucleotide
aucacguagacuuccaagg

SEQ ID NO: 767024 - RNA, 19 nt, Artificial Sequence
  Description of Artificial Sequence: Synthetic oligonucleotide
uaauaaaugagugugguau

SEQ ID NO: 767025 - RNA, 19 nt, Artificial Sequence
  Description of Artificial Sequence: Synthetic oligonucleotide
auaaauuucgggcaguggu

SEQ ID NO: 767026 - RNA, 19 nt, Artificial Sequence
  Description of Artificial Sequence: Synthetic oligonucleotide
acaagugagccacagauug

SEQ ID NO: 767027 - RNA, 19 nt, Artificial Sequence
  Description of Artificial Sequence: Synthetic oligonucleotide
uucuggagugaacauaccg

SEQ ID NO: 767028 - RNA, 19 nt, Artificial Sequence
  Description of Artificial Sequence: Synthetic oligonucleotide
ucacuuaauguuaagcgga

SEQ ID NO: 767029 - RNA, 19 nt, Artificial Sequence
  Description of Artificial Sequence: Synthetic oligonucleotide
aagguuggaauacaaguga

SEQ ID NO: 767030 - RNA, 19 nt, Artificial Sequence
  Description of Artificial Sequence: Synthetic oligonucleotide
ucagugaucucuuuguaug

SEQ ID NO: 767031 - RNA, 19 nt, Artificial Sequence
  Description of Artificial Sequence: Synthetic oligonucleotide
aggauuacaucuaaaauag

SEQ ID NO: 767032 - RNA, 19 nt, Artificial Sequence
  Description of Artificial Sequence: Synthetic oligonucleotide
aaacgaaggcaauuucuuc

SEQ ID NO: 767033 - RNA, 19 nt, Artificial Sequence
  Description of Artificial Sequence: Synthetic oligonucleotide
auagccaccauaauuaguc

SEQ ID NO: 767034 - RNA, 19 nt, Artificial Sequence
  Description of Artificial Sequence: Synthetic oligonucleotide
agugguaaaggcuucuguc

SEQ ID NO: 767035 - RNA, 19 nt, Artificial Sequence
  Description of Artificial Sequence: Synthetic oligonucleotide
uuuacagccgaucucugug

SEQ ID NO: 767036 - RNA, 19 nt, Artificial Sequence
  Description of Artificial Sequence: Synthetic oligonucleotide
ugcaguauuucucuguucu

SEQ ID NO: 767037 - RNA, 19 nt, Artificial Sequence
  Description of Artificial Sequence: Synthetic oligonucleotide
acgauuuucccauccagac

SEQ ID NO: 767038 - RNA, 19 nt, Artificial Sequence
  Description of Artificial Sequence: Synthetic oligonucleotide
ugauaaaacauccgugcca

SEQ ID NO: 767039 - RNA, 19 nt, Artificial Sequence
  Description of Artificial Sequence: Synthetic oligonucleotide
uguaauuaugggcacauuu

SEQ ID NO: 767040 - RNA, 19 nt, Artificial Sequence
  Description of Artificial Sequence: Synthetic oligonucleotide
ucaguggucacaaguuucg

SEQ ID NO: 767041 - RNA, 19 nt, Artificial Sequence
  Description of Artificial Sequence: Synthetic oligonucleotide
gauuauaagguguguauca

SEQ ID NO: 767042 - RNA, 19 nt, Artificial Sequence
  Description of Artificial Sequence: Synthetic oligonucleotide
acauaugauuccauggucc

SEQ ID NO: 767043 - RNA, 19 nt, Artificial Sequence
  Description of Artificial Sequence: Synthetic oligonucleotide
cuccagaucaccaaucugc

SEQ ID NO: 767044 - RNA, 19 nt, Artificial Sequence
  Description of Artificial Sequence: Synthetic oligonucleotide
auauagaacauguguuggg

SEQ ID NO: 767045 - RNA, 19 nt, Artificial Sequence
  Description of Artificial Sequence: Synthetic oligonucleotide
acaaguuucggaaagagga

SEQ ID NO: 767046 - RNA, 19 nt, Artificial Sequence
  Description of Artificial Sequence: Synthetic oligonucleotide
uuuccgaaguucuaguagc

SEQ ID NO: 767047 - RNA, 19 nt, Artificial Sequence
  Description of Artificial Sequence: Synthetic oligonucleotide
cauagcccacuuaagaucc

SEQ ID NO: 767048 - RNA, 19 nt, Artificial Sequence
  Description of Artificial Sequence: Synthetic oligonucleotide
uguuccuuuaauugccagg

SEQ ID NO: 767049 - RNA, 19 nt, Artificial Sequence
  Description of Artificial Sequence: Synthetic oligonucleotide
ucucuuuguaugaagacau

SEQ ID NO: 767050 - RNA, 19 nt, Artificial Sequence
  Description of Artificial Sequence: Synthetic oligonucleotide
cuuauaaaugccucguuuc

SEQ ID NO: 767051 - RNA, 19 nt, Artificial Sequence
  Description of Artificial Sequence: Synthetic oligonucleotide
uggaauacaagugagccac

SEQ ID NO: 767052 - RNA, 19 nt, Artificial Sequence
  Description of Artificial Sequence: Synthetic oligonucleotide
cacugaaucaggauaaaug

SEQ ID NO: 767053 - RNA, 19 nt, Artificial Sequence
  Description of Artificial Sequence: Synthetic oligonucleotide
uugugagaacaucauaaug

SEQ ID NO: 767054 - RNA, 19 nt, Artificial Sequence
  Description of Artificial Sequence: Synthetic oligonucleotide
guuggaauacaagugagcc

SEQ ID NO: 767055 - RNA, 19 nt, Artificial Sequence
  Description of Artificial Sequence: Synthetic oligonucleotide
uucgccaucaaauuguaau

SEQ ID NO: 767056 - RNA, 19 nt, Artificial Sequence
  Description of Artificial Sequence: Synthetic oligonucleotide
uguuaagcggauagcagug

SEQ ID NO: 767057 - RNA, 19 nt, Artificial Sequence
  Description of Artificial Sequence: Synthetic oligonucleotide
uaauguuaagcggauagca

SEQ ID NO: 767058 - RNA, 19 nt, Artificial Sequence
  Description of Artificial Sequence: Synthetic oligonucleotide
aauuaguccacagcugcuc

SEQ ID NO: 767059 - RNA, 19 nt, Artificial Sequence
  Description of Artificial Sequence: Synthetic oligonucleotide
aauaaauuucgggcagugg

SEQ ID NO: 767060 - RNA, 19 nt, Artificial Sequence
  Description of Artificial Sequence: Synthetic oligonucleotide
uguaauaaaugaguguggu

SEQ ID NO: 767061 - RNA, 19 nt, Artificial Sequence
  Description of Artificial Sequence: Synthetic oligonucleotide
aauagguauagccaccaua

SEQ ID NO: 767062 - RNA, 19 nt, Artificial Sequence
  Description of Artificial Sequence: Synthetic oligonucleotide
aggaaguuaggauuacauc

SEQ ID NO: 767063 - RNA, 19 nt, Artificial Sequence
  Description of Artificial Sequence: Synthetic oligonucleotide
uggguuuaugauaaaacau

SEQ ID NO: 767064 - RNA, 19 nt, Artificial Sequence
  Description of Artificial Sequence: Synthetic oligonucleotide
cuugagauuagagccaccg

SEQ ID NO: 767065 - RNA, 19 nt, Artificial Sequence
  Description of Artificial Sequence: Synthetic oligonucleotide
aaucauaagccacuugauu

SEQ ID NO: 767066 - RNA, 19 nt, Artificial Sequence
  Description of Artificial Sequence: Synthetic oligonucleotide
ucaccaaucugcaaagccu

SEQ ID NO: 767067 - RNA, 19 nt, Artificial Sequence
  Description of Artificial Sequence: Synthetic oligonucleotide
uuauaagguguguaucacc

SEQ ID NO: 767068 - RNA, 19 nt, Artificial Sequence
  Description of Artificial Sequence: Synthetic oligonucleotide
cagaacauauuguauacuc

SEQ ID NO: 767069 - RNA, 19 nt, Artificial Sequence
  Description of Artificial Sequence: Synthetic oligonucleotide
aacauaccgcagauuagcc

SEQ ID NO: 767070 - RNA, 19 nt, Artificial Sequence
  Description of Artificial Sequence: Synthetic oligonucleotide
auuauaagguguguaucac

SEQ ID NO: 767071 - RNA, 19 nt, Artificial Sequence
  Description of Artificial Sequence: Synthetic oligonucleotide
ucuuauaaaugccucguuu

SEQ ID NO: 767072 - RNA, 19 nt, Artificial Sequence
  Description of Artificial Sequence: Synthetic oligonucleotide
augcucacggcacugguac

SEQ ID NO: 767073 - RNA, 19 nt, Artificial Sequence
  Description of Artificial Sequence: Synthetic oligonucleotide
uagcaguauagccugcuag

SEQ ID NO: 767074 - RNA, 19 nt, Artificial Sequence
  Description of Artificial Sequence: Synthetic oligonucleotide
augacuugaucacguagac

SEQ ID NO: 767075 - RNA, 19 nt, Artificial Sequence
  Description of Artificial Sequence: Synthetic oligonucleotide
aaguagguuucauaggcau

SEQ ID NO: 767076 - RNA, 19 nt, Artificial Sequence
  Description of Artificial Sequence: Synthetic oligonucleotide
aacauauuguauacucuag

SEQ ID NO: 767077 - RNA, 19 nt, Artificial Sequence
  Description of Artificial Sequence: Synthetic oligonucleotide
ugcagaaugccuucuaggu

SEQ ID NO: 767078 - RNA, 19 nt, Artificial Sequence
  Description of Artificial Sequence: Synthetic oligonucleotide
aacuccgaggcuucuuuuc

SEQ ID NO: 767079 - RNA, 19 nt, Artificial Sequence
  Description of Artificial Sequence: Synthetic oligonucleotide
gaacauaccgcagauuagc

SEQ ID NO: 767080 - RNA, 19 nt, Artificial Sequence
  Description of Artificial Sequence: Synthetic oligonucleotide
agaaauguucuugagauua

SEQ ID NO: 767081 - RNA, 19 nt, Artificial Sequence
  Description of Artificial Sequence: Synthetic oligonucleotide
cacaaguccggcuaacagg

SEQ ID NO: 767082 - RNA, 19 nt, Artificial Sequence
  Description of Artificial Sequence: Synthetic oligonucleotide
auguuaagcggauagcagu

SEQ ID NO: 767083 - RNA, 19 nt, Artificial Sequence
  Description of Artificial Sequence: Synthetic oligonucleotide
cauauuguauacucuagca

SEQ ID NO: 767084 - RNA, 19 nt, Artificial Sequence
  Description of Artificial Sequence: Synthetic oligonucleotide
guuuaugauaaaacauccg

SEQ ID NO: 767085 - RNA, 19 nt, Artificial Sequence
  Description of Artificial Sequence: Synthetic oligonucleotide
uacuaagcgaaguuacuga

SEQ ID NO: 767086 - RNA, 19 nt, Artificial Sequence
  Description of Artificial Sequence: Synthetic oligonucleotide
uauagaacauguguuggga

SEQ ID NO: 767087 - RNA, 19 nt, Artificial Sequence
  Description of Artificial Sequence: Synthetic oligonucleotide
auaaaugccucguuucacu

SEQ ID NO: 767088 - RNA, 19 nt, Artificial Sequence
  Description of Artificial Sequence: Synthetic oligonucleotide
ucacgauuuucccauccag

SEQ ID NO: 767089 - RNA, 19 nt, Artificial Sequence
  Description of Artificial Sequence: Synthetic oligonucleotide
ucguuucacuucaucaaag

SEQ ID NO: 767090 - RNA, 19 nt, Artificial Sequence
  Description of Artificial Sequence: Synthetic oligonucleotide
aauacaagugagccacaga

SEQ ID NO: 767091 - RNA, 19 nt, Artificial Sequence
  Description of Artificial Sequence: Synthetic oligonucleotide
aaagcgccagccuccuucg

SEQ ID NO: 767092 - RNA, 19 nt, Artificial Sequence
  Description of Artificial Sequence: Synthetic oligonucleotide
cuugauuaauuugaugaug

SEQ ID NO: 767093 - RNA, 19 nt, Artificial Sequence
  Description of Artificial Sequence: Synthetic oligonucleotide
agauagaaagaaauguucu

SEQ ID NO: 767094 - RNA, 19 nt, Artificial Sequence
  Description of Artificial Sequence: Synthetic oligonucleotide
gauaauagguauagccacc

SEQ ID NO: 767095 - RNA, 19 nt, Artificial Sequence
  Description of Artificial Sequence: Synthetic oligonucleotide
uauacucuagcaguauagc

SEQ ID NO: 767096 - RNA, 19 nt, Artificial Sequence
  Description of Artificial Sequence: Synthetic oligonucleotide
gaacauauuguauacucua

SEQ ID NO: 767097 - RNA, 19 nt, Artificial Sequence
  Description of Artificial Sequence: Synthetic oligonucleotide
uuaauguuaagcggauagc

SEQ ID NO: 767098 - RNA, 19 nt, Artificial Sequence
  Description of Artificial Sequence: Synthetic oligonucleotide
ugagaacaucauaaugucu

SEQ ID NO: 767099 - RNA, 19 nt, Artificial Sequence
  Description of Artificial Sequence: Synthetic oligonucleotide
aacgcuugccaaugauggg

SEQ ID NO: 767100 - RNA, 19 nt, Artificial Sequence
  Description of Artificial Sequence: Synthetic oligonucleotide
cugcauucaguccaggcgc

SEQ ID NO: 767101 - RNA, 19 nt, Artificial Sequence
  Description of Artificial Sequence: Synthetic oligonucleotide
cagaggccaauaaauuucg

SEQ ID NO: 767102 - RNA, 19 nt, Artificial Sequence
  Description of Artificial Sequence: Synthetic oligonucleotide
aaguccggcuaacagggug

SEQ ID NO: 767103 - RNA, 19 nt, Artificial Sequence
  Description of Artificial Sequence: Synthetic oligonucleotide
ucuacuaagcgaaguuacu

SEQ ID NO: 767104 - RNA, 19 nt, Artificial Sequence
  Description of Artificial Sequence: Synthetic oligonucleotide
uguccgaucgcuaaccaua

SEQ ID NO: 767105 - RNA, 19 nt, Artificial Sequence
  Description of Artificial Sequence: Synthetic oligonucleotide
guauacucuagcaguauag

SEQ ID NO: 767106 - RNA, 19 nt, Artificial Sequence
  Description of Artificial Sequence: Synthetic oligonucleotide
agguguguaucaccacucc

SEQ ID NO: 767107 - RNA, 19 nt, Artificial Sequence
  Description of Artificial Sequence: Synthetic oligonucleotide
aaauagguuugguaagguu

SEQ ID NO: 767108 - RNA, 19 nt, Artificial Sequence
  Description of Artificial Sequence: Synthetic oligonucleotide
gguuuaugauaaaacaucc

SEQ ID NO: 767109 - RNA, 19 nt, Artificial Sequence
  Description of Artificial Sequence: Synthetic oligonucleotide
cugaaucaggauaaaugac

SEQ ID NO: 767110 - RNA, 19 nt, Artificial Sequence
  Description of Artificial Sequence: Synthetic oligonucleotide
ucaucaagaacuguucuau

SEQ ID NO: 767111 - RNA, 19 nt, Artificial Sequence
  Description of Artificial Sequence: Synthetic oligonucleotide
cauauuuaucaccuuauaa

SEQ ID NO: 767112 - RNA, 19 nt, Artificial Sequence
  Description of Artificial Sequence: Synthetic oligonucleotide
ugcuuuaaacgcuugccaa

SEQ ID NO: 767113 - RNA, 19 nt, Artificial Sequence
  Description of Artificial Sequence: Synthetic oligonucleotide
uuaagauccugaagagaga

SEQ ID NO: 767114 - RNA, 19 nt, Artificial Sequence
  Description of Artificial Sequence: Synthetic oligonucleotide
uucaguggucacaaguuuc

SEQ ID NO: 767115 - RNA, 19 nt, Artificial Sequence
  Description of Artificial Sequence: Synthetic oligonucleotide
uuuaaacgcuugccaauga

SEQ ID NO: 767116 - RNA, 19 nt, Artificial Sequence
  Description of Artificial Sequence: Synthetic oligonucleotide
auagguauagccaccauaa

SEQ ID NO: 767117 - RNA, 19 nt, Artificial Sequence
  Description of Artificial Sequence: Synthetic oligonucleotide
auagccugcuaguucagug

SEQ ID NO: 767118 - RNA, 19 nt, Artificial Sequence
  Description of Artificial Sequence: Synthetic oligonucleotide
ggaaguuaggauuacaucu

SEQ ID NO: 767119 - RNA, 19 nt, Artificial Sequence
  Description of Artificial Sequence: Synthetic oligonucleotide
acauagauagaaagaaaug

SEQ ID NO: 767120 - RNA, 19 nt, Artificial Sequence
  Description of Artificial Sequence: Synthetic oligonucleotide
cuaagcgaaguuacugaag

SEQ ID NO: 767121 - RNA, 19 nt, Artificial Sequence
  Description of Artificial Sequence: Synthetic oligonucleotide
guagcaguccggaugagag

SEQ ID NO: 767122 - RNA, 19 nt, Artificial Sequence
  Description of Artificial Sequence: Synthetic oligonucleotide
uaaauuucgggcaguggua

SEQ ID NO: 767123 - RNA, 19 nt, Artificial Sequence
  Description of Artificial Sequence: Synthetic oligonucleotide
ggccagacugcuuuaaacg

SEQ ID NO: 767124 - RNA, 19 nt, Artificial Sequence
  Description of Artificial Sequence: Synthetic oligonucleotide
gcaaucauaagccacuuga

SEQ ID NO: 767125 - RNA, 19 nt, Artificial Sequence
  Description of Artificial Sequence: Synthetic oligonucleotide
gaauacaagugagccacag

SEQ ID NO: 767126 - RNA, 19 nt, Artificial Sequence
  Description of Artificial Sequence: Synthetic oligonucleotide
uauagccaccauaauuagu

SEQ ID NO: 767127 - RNA, 19 nt, Artificial Sequence
  Description of Artificial Sequence: Synthetic oligonucleotide
gauggcaaucauaagccac

SEQ ID NO: 767128 - RNA, 19 nt, Artificial Sequence
  Description of Artificial Sequence: Synthetic oligonucleotide
uguuauggacagcaaggaa

SEQ ID NO: 767129 - RNA, 19 nt, Artificial Sequence
  Description of Artificial Sequence: Synthetic oligonucleotide
caguguaccaaauuuggga

SEQ ID NO: 767130 - RNA, 19 nt, Artificial Sequence
  Description of Artificial Sequence: Synthetic oligonucleotide
acguagacuuccaagggac

SEQ ID NO: 767131 - RNA, 19 nt, Artificial Sequence
  Description of Artificial Sequence: Synthetic oligonucleotide
acagauugugagaacauca

SEQ ID NO: 767132 - RNA, 19 nt, Artificial Sequence
  Description of Artificial Sequence: Synthetic oligonucleotide
uuaaacgcuugccaaugau

SEQ ID NO: 767133 - RNA, 19 nt, Artificial Sequence
  Description of Artificial Sequence: Synthetic oligonucleotide
agcaguauagccugcuagu

SEQ ID NO: 767134 - RNA, 19 nt, Artificial Sequence
  Description of Artificial Sequence: Synthetic oligonucleotide
uuccuaugagcuuccucgg

SEQ ID NO: 767135 - RNA, 19 nt, Artificial Sequence
  Description of Artificial Sequence: Synthetic oligonucleotide
uauaaaugccucguuucac

SEQ ID NO: 767136 - RNA, 19 nt, Artificial Sequence
  Description of Artificial Sequence: Synthetic oligonucleotide
uaauuaguccacagcugcu

SEQ ID NO: 767137 - RNA, 19 nt, Artificial Sequence
  Description of Artificial Sequence: Synthetic oligonucleotide
cuuuuguaauuaugggcac

SEQ ID NO: 767138 - RNA, 19 nt, Artificial Sequence
  Description of Artificial Sequence: Synthetic oligonucleotide
aaguuacugaaggccaaag

SEQ ID NO: 767139 - RNA, 19 nt, Artificial Sequence
  Description of Artificial Sequence: Synthetic oligonucleotide
cuugaucacguagacuucc

SEQ ID NO: 767140 - RNA, 19 nt, Artificial Sequence
  Description of Artificial Sequence: Synthetic oligonucleotide
cauacuuggguuuaugaua

SEQ ID NO: 767141 - RNA, 19 nt, Artificial Sequence
  Description of Artificial Sequence: Synthetic oligonucleotide
cuacuaagcgaaguuacug

SEQ ID NO: 767142 - RNA, 19 nt, Artificial Sequence
  Description of Artificial Sequence: Synthetic oligonucleotide
cuuuaaacgcuugccaaug

SEQ ID NO: 767143 - RNA, 19 nt, Artificial Sequence
  Description of Artificial Sequence: Synthetic oligonucleotide
auagauagaaagaaauguu

SEQ ID NO: 767144 - RNA, 19 nt, Artificial Sequence
  Description of Artificial Sequence: Synthetic oligonucleotide
uuucgggcagugguaaagg

SEQ ID NO: 767145 - RNA, 19 nt, Artificial Sequence
  Description of Artificial Sequence: Synthetic oligonucleotide
uuuuguaauuaugggcaca

SEQ ID NO: 767146 - RNA, 19 nt, Artificial Sequence
  Description of Artificial Sequence: Synthetic oligonucleotide
acuaagcgaaguuacugaa

SEQ ID NO: 767147 - RNA, 19 nt, Artificial Sequence
  Description of Artificial Sequence: Synthetic oligonucleotide
uuaagcggauagcaguguc

SEQ ID NO: 767148 - RNA, 19 nt, Artificial Sequence
  Description of Artificial Sequence: Synthetic oligonucleotide
gcuuuuguaauuaugggca

SEQ ID NO: 767149 - RNA, 19 nt, Artificial Sequence
  Description of Artificial Sequence: Synthetic oligonucleotide
auaauagguauagccacca

SEQ ID NO: 767150 - RNA, 19 nt, Artificial Sequence
  Description of Artificial Sequence: Synthetic oligonucleotide
agcacuguugacaaaggug

SEQ ID NO: 767151 - RNA, 19 nt, Artificial Sequence
  Description of Artificial Sequence: Synthetic oligonucleotide
ugauuaauuugaugaugaa

SEQ ID NO: 767152 - RNA, 19 nt, Artificial Sequence
  Description of Artificial Sequence: Synthetic oligonucleotide
uuacagccgaucucugugc

SEQ ID NO: 767153 - RNA, 19 nt, Artificial Sequence
  Description of Artificial Sequence: Synthetic oligonucleotide
uuauagaggaugccuucau

SEQ ID NO: 767154 - RNA, 19 nt, Artificial Sequence
  Description of Artificial Sequence: Synthetic oligonucleotide
aggugguuuauagaggaug

SEQ ID NO: 767155 - RNA, 19 nt, Artificial Sequence
  Description of Artificial Sequence: Synthetic oligonucleotide
ugcagugauaauagguaua

SEQ ID NO: 767156 - RNA, 19 nt, Artificial Sequence
  Description of Artificial Sequence: Synthetic oligonucleotide
ugaugaaacuccgaggcuu

SEQ ID NO: 767157 - RNA, 19 nt, Artificial Sequence
  Description of Artificial Sequence: Synthetic oligonucleotide
cacauagauagaaagaaau

SEQ ID NO: 767158 - RNA, 19 nt, Artificial Sequence
  Description of Artificial Sequence: Synthetic oligonucleotide
acccagaacauauuguaua

SEQ ID NO: 767159 - RNA, 19 nt, Artificial Sequence
  Description of Artificial Sequence: Synthetic oligonucleotide
ggauguagcaguccggaug

SEQ ID NO: 767160 - RNA, 19 nt, Artificial Sequence
  Description of Artificial Sequence: Synthetic oligonucleotide
cacauaugauuccaugguc

SEQ ID NO: 767161 - RNA, 19 nt, Artificial Sequence
  Description of Artificial Sequence: Synthetic oligonucleotide
aagaaauguucuugagauu

SEQ ID NO: 767162 - RNA, 19 nt, Artificial Sequence
  Description of Artificial Sequence: Synthetic oligonucleotide
agcacuuuagcaguggcau

SEQ ID NO: 767163 - RNA, 19 nt, Artificial Sequence
  Description of Artificial Sequence: Synthetic oligonucleotide
cagagcauaugccgcagcc

SEQ ID NO: 767164 - RNA, 19 nt, Artificial Sequence
  Description of Artificial Sequence: Synthetic oligonucleotide
agaacauauuguauacucu

SEQ ID NO: 767165 - RNA, 19 nt, Artificial Sequence
  Description of Artificial Sequence: Synthetic oligonucleotide
uggcuaugauucuggagug

SEQ ID NO: 767166 - RNA, 19 nt, Artificial Sequence
  Description of Artificial Sequence: Synthetic oligonucleotide
auacuuggguuuaugauaa

SEQ ID NO: 767167 - RNA, 19 nt, Artificial Sequence
  Description of Artificial Sequence: Synthetic oligonucleotide
aagggacauguauggccuc

SEQ ID NO: 767168 - RNA, 19 nt, Artificial Sequence
  Description of Artificial Sequence: Synthetic oligonucleotide
acgaaggcaauuucuucca

SEQ ID NO: 767169 - RNA, 19 nt, Artificial Sequence
  Description of Artificial Sequence: Synthetic oligonucleotide
auaugauuccaugguccac

SEQ ID NO: 767170 - RNA, 19 nt, Artificial Sequence
  Description of Artificial Sequence: Synthetic oligonucleotide
auuucgggcagugguaaag

SEQ ID NO: 767171 - RNA, 19 nt, Artificial Sequence
  Description of Artificial Sequence: Synthetic oligonucleotide
ggucacaaguuucggaaag

SEQ ID NO: 767172 - RNA, 19 nt, Artificial Sequence
  Description of Artificial Sequence: Synthetic oligonucleotide
gcagugauaauagguauag

SEQ ID NO: 767173 - RNA, 19 nt, Artificial Sequence
  Description of Artificial Sequence: Synthetic oligonucleotide
cauaugauuccauggucca

SEQ ID NO: 767174 - RNA, 19 nt, Artificial Sequence
  Description of Artificial Sequence: Synthetic oligonucleotide
uagcacuguugacaaaggu

SEQ ID NO: 767175 - RNA, 19 nt, Artificial Sequence
  Description of Artificial Sequence: Synthetic oligonucleotide
ccaaauuugggagagcaag

SEQ ID NO: 767176 - RNA, 19 nt, Artificial Sequence
  Description of Artificial Sequence: Synthetic oligonucleotide
uggccagacugcuuuaaac

SEQ ID NO: 767177 - RNA, 19 nt, Artificial Sequence
  Description of Artificial Sequence: Synthetic oligonucleotide
gucuacuaagcgaaguuac

SEQ ID NO: 767178 - RNA, 19 nt, Artificial Sequence
  Description of Artificial Sequence: Synthetic oligonucleotide
acauaccgcagauuagccu

SEQ ID NO: 767179 - RNA, 19 nt, Artificial Sequence
  Description of Artificial Sequence: Synthetic oligonucleotide
agaacauguguugggaggu

SEQ ID NO: 767180 - RNA, 19 nt, Artificial Sequence
  Description of Artificial Sequence: Synthetic oligonucleotide
uugcacaaugugguagagg

SEQ ID NO: 767181 - RNA, 19 nt, Artificial Sequence
  Description of Artificial Sequence: Synthetic oligonucleotide
cagauuagccuuuccuaug

SEQ ID NO: 767182 - RNA, 19 nt, Artificial Sequence
  Description of Artificial Sequence: Synthetic oligonucleotide
uggucuacuaagcgaaguu

SEQ ID NO: 767183 - RNA, 19 nt, Artificial Sequence
  Description of Artificial Sequence: Synthetic oligonucleotide
uguauggccucuguggaau

SEQ ID NO: 767184 - RNA, 19 nt, Artificial Sequence
  Description of Artificial Sequence: Synthetic oligonucleotide
aaguuucggaaagaggauu

SEQ ID NO: 767185 - RNA, 19 nt, Artificial Sequence
  Description of Artificial Sequence: Synthetic oligonucleotide
agccacgccguuucagugg

SEQ ID NO: 767186 - RNA, 19 nt, Artificial Sequence
  Description of Artificial Sequence: Synthetic oligonucleotide
uucuguccgaucgcuaacc

SEQ ID NO: 767187 - RNA, 19 nt, Artificial Sequence
  Description of Artificial Sequence: Synthetic oligonucleotide
gauaaaacauccgugccau

SEQ ID NO: 767188 - RNA, 19 nt, Artificial Sequence
  Description of Artificial Sequence: Synthetic oligonucleotide
cuuugcacaaugugguaga

SEQ ID NO: 767189 - RNA, 19 nt, Artificial Sequence
  Description of Artificial Sequence: Synthetic oligonucleotide
ggguagauccaugucaucc

SEQ ID NO: 767190 - RNA, 19 nt, Artificial Sequence
  Description of Artificial Sequence: Synthetic oligonucleotide
ggauuuuccgaaguucuag

SEQ ID NO: 767191 - RNA, 19 nt, Artificial Sequence
  Description of Artificial Sequence: Synthetic oligonucleotide
ucuguccgaucgcuaacca

SEQ ID NO: 767192 - RNA, 19 nt, Artificial Sequence
  Description of Artificial Sequence: Synthetic oligonucleotide
ucagagcauaugccgcagc

SEQ ID NO: 767193 - RNA, 19 nt, Artificial Sequence
  Description of Artificial Sequence: Synthetic oligonucleotide
uugggaggugguuuauaga

SEQ ID NO: 767194 - RNA, 19 nt, Artificial Sequence
  Description of Artificial Sequence: Synthetic oligonucleotide
cuaugauucuggagugaac

SEQ ID NO: 767195 - RNA, 19 nt, Artificial Sequence
  Description of Artificial Sequence: Synthetic oligonucleotide
ccgaucgcuaaccauagcc

SEQ ID NO: 767196 - RNA, 19 nt, Artificial Sequence
  Description of Artificial Sequence: Synthetic oligonucleotide
ggucuuggucaguauaacc

SEQ ID NO: 767197 - RNA, 19 nt, Artificial Sequence
  Description of Artificial Sequence: Synthetic oligonucleotide
uuaguccacagcugcucca

SEQ ID NO: 767198 - RNA, 19 nt, Artificial Sequence
  Description of Artificial Sequence: Synthetic oligonucleotide
agguuggaauacaagugag

SEQ ID NO: 767199 - RNA, 19 nt, Artificial Sequence
  Description of Artificial Sequence: Synthetic oligonucleotide
uucgggcagugguaaaggc

SEQ ID NO: 767200 - RNA, 19 nt, Artificial Sequence
  Description of Artificial Sequence: Synthetic oligonucleotide
caacuguucaaagcgccag

SEQ ID NO: 767201 - RNA, 19 nt, Artificial Sequence
  Description of Artificial Sequence: Synthetic oligonucleotide
uguguguuauggacagcaa

SEQ ID NO: 767202 - RNA, 19 nt, Artificial Sequence
  Description of Artificial Sequence: Synthetic oligonucleotide
uacaagugagccacagauu

SEQ ID NO: 767203 - RNA, 19 nt, Artificial Sequence
  Description of Artificial Sequence: Synthetic oligonucleotide
ugagggguagauccauguc

SEQ ID NO: 767204 - RNA, 19 nt, Artificial Sequence
  Description of Artificial Sequence: Synthetic oligonucleotide
acauccgugccauacccau

SEQ ID NO: 767205 - RNA, 19 nt, Artificial Sequence
  Description of Artificial Sequence: Synthetic oligonucleotide
ucuagcaguauagccugcu

SEQ ID NO: 767206 - RNA, 19 nt, Artificial Sequence
  Description of Artificial Sequence: Synthetic oligonucleotide
ugaucacguagacuuccaa

SEQ ID NO: 767207 - RNA, 19 nt, Artificial Sequence
  Description of Artificial Sequence: Synthetic oligonucleotide
agagccacgccguuucagu

SEQ ID NO: 767208 - RNA, 19 nt, Artificial Sequence
  Description of Artificial Sequence: Synthetic oligonucleotide
ugggauuauaaggugugua

SEQ ID NO: 767209 - RNA, 19 nt, Artificial Sequence
  Description of Artificial Sequence: Synthetic oligonucleotide
auggcaaucauaagccacu

SEQ ID NO: 767210 - RNA, 19 nt, Artificial Sequence
  Description of Artificial Sequence: Synthetic oligonucleotide
uuggucaguauaaccuuuu

SEQ ID NO: 767211 - RNA, 19 nt, Artificial Sequence
  Description of Artificial Sequence: Synthetic oligonucleotide
uguagcaguccggaugaga

SEQ ID NO: 767212 - RNA, 19 nt, Artificial Sequence
  Description of Artificial Sequence: Synthetic oligonucleotide
gccagacugcuuuaaacgc

SEQ ID NO: 767213 - RNA, 19 nt, Artificial Sequence
  Description of Artificial Sequence: Synthetic oligonucleotide
aggguuuucagagcauaug

SEQ ID NO: 767214 - RNA, 19 nt, Artificial Sequence
  Description of Artificial Sequence: Synthetic oligonucleotide
cacgauuuucccauccaga

SEQ ID NO: 767215 - RNA, 19 nt, Artificial Sequence
  Description of Artificial Sequence: Synthetic oligonucleotide
gcccuauugggcuugcucc

SEQ ID NO: 767216 - RNA, 19 nt, Artificial Sequence
  Description of Artificial Sequence: Synthetic oligonucleotide
ggccaauaaauuucgggca

SEQ ID NO: 767217 - RNA, 19 nt, Artificial Sequence
  Description of Artificial Sequence: Synthetic oligonucleotide
auuguauacucuagcagua

SEQ ID NO: 767218 - RNA, 19 nt, Artificial Sequence
  Description of Artificial Sequence: Synthetic oligonucleotide
uaauagguauagccaccau

SEQ ID NO: 767219 - RNA, 19 nt, Artificial Sequence
  Description of Artificial Sequence: Synthetic oligonucleotide
aaacuccgaggcuucuuuu

SEQ ID NO: 767220 - RNA, 19 nt, Artificial Sequence
  Description of Artificial Sequence: Synthetic oligonucleotide
uuagagccaccgaguggag

SEQ ID NO: 767221 - RNA, 19 nt, Artificial Sequence
  Description of Artificial Sequence: Synthetic oligonucleotide
uuuccacgaugcuuuucac

SEQ ID NO: 767222 - RNA, 19 nt, Artificial Sequence
  Description of Artificial Sequence: Synthetic oligonucleotide
cccagaacauauuguauac

SEQ ID NO: 767223 - RNA, 19 nt, Artificial Sequence
  Description of Artificial Sequence: Synthetic oligonucleotide
auaggaaguuaggauuaca

SEQ ID NO: 767224 - RNA, 19 nt, Artificial Sequence
  Description of Artificial Sequence: Synthetic oligonucleotide
acccaguguaccaaauuug

SEQ ID NO: 767225 - RNA, 19 nt, Artificial Sequence
  Description of Artificial Sequence: Synthetic oligonucleotide
ccaguguaccaaauuuggg

SEQ ID NO: 767226 - RNA, 19 nt, Artificial Sequence
  Description of Artificial Sequence: Synthetic oligonucleotide
aaugcauacuuggguuuau

SEQ ID NO: 767227 - RNA, 19 nt, Artificial Sequence
  Description of Artificial Sequence: Synthetic oligonucleotide
uagguauagccaccauaau

SEQ ID NO: 767228 - RNA, 19 nt, Artificial Sequence
  Description of Artificial Sequence: Synthetic oligonucleotide
gagccacgccguuucagug

SEQ ID NO: 767229 - RNA, 19 nt, Artificial Sequence
  Description of Artificial Sequence: Synthetic oligonucleotide
ggauuauaagguguguauc

SEQ ID NO: 767230 - RNA, 19 nt, Artificial Sequence
  Description of Artificial Sequence: Synthetic oligonucleotide
agcaguccggaugagagua

SEQ ID NO: 767231 - RNA, 19 nt, Artificial Sequence
  Description of Artificial Sequence: Synthetic oligonucleotide
guguaccaaauuugggaga

SEQ ID NO: 767232 - RNA, 19 nt, Artificial Sequence
  Description of Artificial Sequence: Synthetic oligonucleotide
gguuggaauacaagugagc

SEQ ID NO: 767233 - RNA, 19 nt, Artificial Sequence
  Description of Artificial Sequence: Synthetic oligonucleotide
uuguauacucuagcaguau

SEQ ID NO: 767234 - RNA, 19 nt, Artificial Sequence
  Description of Artificial Sequence: Synthetic oligonucleotide
ggcauggucuacuaagcga

SEQ ID NO: 767235 - RNA, 19 nt, Artificial Sequence
  Description of Artificial Sequence: Synthetic oligonucleotide
auggucuacuaagcgaagu

SEQ ID NO: 767236 - RNA, 19 nt, Artificial Sequence
  Description of Artificial Sequence: Synthetic oligonucleotide
guguaucaccacuccuugc

SEQ ID NO: 767237 - RNA, 19 nt, Artificial Sequence
  Description of Artificial Sequence: Synthetic oligonucleotide
gccacauagauagaaagaa

SEQ ID NO: 767238 - RNA, 19 nt, Artificial Sequence
  Description of Artificial Sequence: Synthetic oligonucleotide
aguuucggaaagaggauuu

SEQ ID NO: 767239 - RNA, 19 nt, Artificial Sequence
  Description of Artificial Sequence: Synthetic oligonucleotide
ccauaauuaguccacagcu

SEQ ID NO: 767240 - RNA, 19 nt, Artificial Sequence
  Description of Artificial Sequence: Synthetic oligonucleotide
ucacggcacugguacauuc

SEQ ID NO: 767241 - RNA, 19 nt, Artificial Sequence
  Description of Artificial Sequence: Synthetic oligonucleotide
cacguagacuuccaaggga

SEQ ID NO: 767242 - RNA, 19 nt, Artificial Sequence
  Description of Artificial Sequence: Synthetic oligonucleotide
ucugugcaaugcaguauuu

SEQ ID NO: 767243 - RNA, 19 nt, Artificial Sequence
  Description of Artificial Sequence: Synthetic oligonucleotide
cucguuucacuucaucaaa

SEQ ID NO: 767244 - RNA, 19 nt, Artificial Sequence
  Description of Artificial Sequence: Synthetic oligonucleotide
gugguuuauagaggaugcc

SEQ ID NO: 767245 - RNA, 19 nt, Artificial Sequence
  Description of Artificial Sequence: Synthetic oligonucleotide
agccugcuaguucagugau

SEQ ID NO: 767246 - RNA, 19 nt, Artificial Sequence
  Description of Artificial Sequence: Synthetic oligonucleotide
gccaaugaugggauagagg

SEQ ID NO: 767247 - RNA, 19 nt, Artificial Sequence
  Description of Artificial Sequence: Synthetic oligonucleotide
cauaccgcagauuagccuu

SEQ ID NO: 767248 - RNA, 19 nt, Artificial Sequence
  Description of Artificial Sequence: Synthetic oligonucleotide
gagauuagagccaccgagu

SEQ ID NO: 767249 - RNA, 19 nt, Artificial Sequence
  Description of Artificial Sequence: Synthetic oligonucleotide
aacauccgugccauaccca

SEQ ID NO: 767250 - RNA, 19 nt, Artificial Sequence
  Description of Artificial Sequence: Synthetic oligonucleotide
agagcauaugccgcagcca

SEQ ID NO: 767251 - RNA, 19 nt, Artificial Sequence
  Description of Artificial Sequence: Synthetic oligonucleotide
accacaaacgaaggcaauu

SEQ ID NO: 767252 - RNA, 19 nt, Artificial Sequence
  Description of Artificial Sequence: Synthetic oligonucleotide
guccgaucgcuaaccauag

SEQ ID NO: 767253 - RNA, 19 nt, Artificial Sequence
  Description of Artificial Sequence: Synthetic oligonucleotide
ggccauagcccacuuaaga

SEQ ID NO: 767254 - RNA, 19 nt, Artificial Sequence
  Description of Artificial Sequence: Synthetic oligonucleotide
uagaggguuuucagagcau

SEQ ID NO: 767255 - RNA, 19 nt, Artificial Sequence
  Description of Artificial Sequence: Synthetic oligonucleotide
ggaauauagaacauguguu

SEQ ID NO: 767256 - RNA, 19 nt, Artificial Sequence
  Description of Artificial Sequence: Synthetic oligonucleotide
cugugcaaugcaguauuuc

SEQ ID NO: 767257 - RNA, 19 nt, Artificial Sequence
  Description of Artificial Sequence: Synthetic oligonucleotide
ugccucguuucacuucauc

SEQ ID NO: 767258 - RNA, 19 nt, Artificial Sequence
  Description of Artificial Sequence: Synthetic oligonucleotide
auguauggccucuguggaa

SEQ ID NO: 767259 - RNA, 19 nt, Artificial Sequence
  Description of Artificial Sequence: Synthetic oligonucleotide
acggcacugguacauucau

SEQ ID NO: 767260 - RNA, 19 nt, Artificial Sequence
  Description of Artificial Sequence: Synthetic oligonucleotide
agaggguuuucagagcaua

SEQ ID NO: 767261 - RNA, 19 nt, Artificial Sequence
  Description of Artificial Sequence: Synthetic oligonucleotide
gguuugguaagguuggaau

SEQ ID NO: 767262 - RNA, 19 nt, Artificial Sequence
  Description of Artificial Sequence: Synthetic oligonucleotide
acgccguuucaguggucac

SEQ ID NO: 767263 - RNA, 19 nt, Artificial Sequence
  Description of Artificial Sequence: Synthetic oligonucleotide
agggguagauccaugucau

SEQ ID NO: 767264 - RNA, 19 nt, Artificial Sequence
  Description of Artificial Sequence: Synthetic oligonucleotide
cuggauguagcaguccgga

SEQ ID NO: 767265 - RNA, 19 nt, Artificial Sequence
  Description of Artificial Sequence: Synthetic oligonucleotide
cauagccugcuuugggcca

SEQ ID NO: 767266 - RNA, 19 nt, Artificial Sequence
  Description of Artificial Sequence: Synthetic oligonucleotide
caacgucaaugcucacggc

SEQ ID NO: 767267 - RNA, 19 nt, Artificial Sequence
  Description of Artificial Sequence: Synthetic oligonucleotide
gaaacuccgaggcuucuuu

SEQ ID NO: 767268 - RNA, 19 nt, Artificial Sequence
  Description of Artificial Sequence: Synthetic oligonucleotide
ugauuccaugguccacauc

SEQ ID NO: 767269 - RNA, 19 nt, Artificial Sequence
  Description of Artificial Sequence: Synthetic oligonucleotide
accuuauaauaagucugau

SEQ ID NO: 767270 - RNA, 19 nt, Artificial Sequence
  Description of Artificial Sequence: Synthetic oligonucleotide
ccacuugauuaauuugaug

SEQ ID NO: 767271 - RNA, 19 nt, Artificial Sequence
  Description of Artificial Sequence: Synthetic oligonucleotide
ccggcuaacagggugggcc

SEQ ID NO: 767272 - RNA, 19 nt, Artificial Sequence
  Description of Artificial Sequence: Synthetic oligonucleotide
ccacaaguccggcuaacag

SEQ ID NO: 767273 - RNA, 19 nt, Artificial Sequence
  Description of Artificial Sequence: Synthetic oligonucleotide
gggauuauaagguguguau

SEQ ID NO: 767274 - RNA, 19 nt, Artificial Sequence
  Description of Artificial Sequence: Synthetic oligonucleotide
agccgaucucugugcaaug

SEQ ID NO: 767275 - RNA, 19 nt, Artificial Sequence
  Description of Artificial Sequence: Synthetic oligonucleotide
auguguugggaggugguuu

SEQ ID NO: 767276 - RNA, 19 nt, Artificial Sequence
  Description of Artificial Sequence: Synthetic oligonucleotide
ggcaaucauaagccacuug

SEQ ID NO: 767277 - RNA, 19 nt, Artificial Sequence
  Description of Artificial Sequence: Synthetic oligonucleotide
accacaaguccggcuaaca

SEQ ID NO: 767278 - RNA, 19 nt, Artificial Sequence
  Description of Artificial Sequence: Synthetic oligonucleotide
uagguuugguaagguugga

SEQ ID NO: 767279 - RNA, 19 nt, Artificial Sequence
  Description of Artificial Sequence: Synthetic oligonucleotide
acuuaauguuaagcggaua

SEQ ID NO: 767280 - RNA, 19 nt, Artificial Sequence
  Description of Artificial Sequence: Synthetic oligonucleotide
caugcaugucauccacuga

SEQ ID NO: 767281 - RNA, 19 nt, Artificial Sequence
  Description of Artificial Sequence: Synthetic oligonucleotide
gguagauccaugucauccu

SEQ ID NO: 767282 - RNA, 19 nt, Artificial Sequence
  Description of Artificial Sequence: Synthetic oligonucleotide
cagauugugagaacaucau

SEQ ID NO: 767283 - RNA, 19 nt, Artificial Sequence
  Description of Artificial Sequence: Synthetic oligonucleotide
caaucauaagccacuugau

SEQ ID NO: 767284 - RNA, 19 nt, Artificial Sequence
  Description of Artificial Sequence: Synthetic oligonucleotide
gguaaaggcuucuguccga

SEQ ID NO: 767285 - RNA, 19 nt, Artificial Sequence
  Description of Artificial Sequence: Synthetic oligonucleotide
ugaaacuccgaggcuucuu

SEQ ID NO: 767286 - RNA, 19 nt, Artificial Sequence
  Description of Artificial Sequence: Synthetic oligonucleotide
cacggcacugguacauuca

SEQ ID NO: 767287 - RNA, 19 nt, Artificial Sequence
  Description of Artificial Sequence: Synthetic oligonucleotide
guccauaacagcaucccau

SEQ ID NO: 767288 - RNA, 19 nt, Artificial Sequence
  Description of Artificial Sequence: Synthetic oligonucleotide
gcgaaguuacugaaggcca

SEQ ID NO: 767289 - RNA, 19 nt, Artificial Sequence
  Description of Artificial Sequence: Synthetic oligonucleotide
uccgugccauacccauucu

SEQ ID NO: 767290 - RNA, 19 nt, Artificial Sequence
  Description of Artificial Sequence: Synthetic oligonucleotide
guccggguuggccagccuc

SEQ ID NO: 767291 - RNA, 19 nt, Artificial Sequence
  Description of Artificial Sequence: Synthetic oligonucleotide
caaguuucggaaagaggau

SEQ ID NO: 767292 - RNA, 19 nt, Artificial Sequence
  Description of Artificial Sequence: Synthetic oligonucleotide
cugagggguagauccaugu

SEQ ID NO: 767293 - RNA, 19 nt, Artificial Sequence
  Description of Artificial Sequence: Synthetic oligonucleotide
gcagauuagccuuuccuau

SEQ ID NO: 767294 - RNA, 19 nt, Artificial Sequence
  Description of Artificial Sequence: Synthetic oligonucleotide
acagccgaucucugugcaa

SEQ ID NO: 767295 - RNA, 19 nt, Artificial Sequence
  Description of Artificial Sequence: Synthetic oligonucleotide
gcuaugauucuggagugaa

SEQ ID NO: 767296 - RNA, 19 nt, Artificial Sequence
  Description of Artificial Sequence: Synthetic oligonucleotide
cacgccguuucagugguca

SEQ ID NO: 767297 - RNA, 19 nt, Artificial Sequence
  Description of Artificial Sequence: Synthetic oligonucleotide
uuguaauuaugggcacauu

SEQ ID NO: 767298 - RNA, 19 nt, Artificial Sequence
  Description of Artificial Sequence: Synthetic oligonucleotide
gcauacuuggguuuaugau

SEQ ID NO: 767299 - RNA, 19 nt, Artificial Sequence
  Description of Artificial Sequence: Synthetic oligonucleotide
cagagccacgccguuucag

SEQ ID NO: 767300 - RNA, 19 nt, Artificial Sequence
  Description of Artificial Sequence: Synthetic oligonucleotide
cauaugccgcagccaccag

SEQ ID NO: 767301 - RNA, 19 nt, Artificial Sequence
  Description of Artificial Sequence: Synthetic oligonucleotide
cuucaacgucaaugcucac

SEQ ID NO: 767302 - RNA, 19 nt, Artificial Sequence
  Description of Artificial Sequence: Synthetic oligonucleotide
uguucucugcaggcgggua

SEQ ID NO: 767303 - RNA, 19 nt, Artificial Sequence
  Description of Artificial Sequence: Synthetic oligonucleotide
ggcccuauugggcuugcuc

SEQ ID NO: 767304 - RNA, 19 nt, Artificial Sequence
  Description of Artificial Sequence: Synthetic oligonucleotide
guagacuuccaagggacau

SEQ ID NO: 767305 - RNA, 19 nt, Artificial Sequence
  Description of Artificial Sequence: Synthetic oligonucleotide
ccucguuucacuucaucaa

SEQ ID NO: 767306 - RNA, 19 nt, Artificial Sequence
  Description of Artificial Sequence: Synthetic oligonucleotide
aggcuucuguccgaucgcu

SEQ ID NO: 767307 - RNA, 19 nt, Artificial Sequence
  Description of Artificial Sequence: Synthetic oligonucleotide
cucuuuguaugaagacaua

SEQ ID NO: 767308 - RNA, 19 nt, Artificial Sequence
  Description of Artificial Sequence: Synthetic oligonucleotide
caaugcauacuuggguuua

SEQ ID NO: 767309 - RNA, 19 nt, Artificial Sequence
  Description of Artificial Sequence: Synthetic oligonucleotide
ggucuacuaagcgaaguua

SEQ ID NO: 767310 - RNA, 19 nt, Artificial Sequence
  Description of Artificial Sequence: Synthetic oligonucleotide
cacuuaauguuaagcggau

SEQ ID NO: 767311 - RNA, 19 nt, Artificial Sequence
  Description of Artificial Sequence: Synthetic oligonucleotide
ccccugauagcacuguuga

SEQ ID NO: 767312 - RNA, 19 nt, Artificial Sequence
  Description of Artificial Sequence: Synthetic oligonucleotide
aucccagccccuagagcag

SEQ ID NO: 767313 - RNA, 19 nt, Artificial Sequence
  Description of Artificial Sequence: Synthetic oligonucleotide
cuagcaguauagccugcua

SEQ ID NO: 767314 - RNA, 19 nt, Artificial Sequence
  Description of Artificial Sequence: Synthetic oligonucleotide
gccauagcccacuuaagau

SEQ ID NO: 767315 - RNA, 19 nt, Artificial Sequence
  Description of Artificial Sequence: Synthetic oligonucleotide
auagccugcuuugggccau

SEQ ID NO: 767316 - RNA, 19 nt, Artificial Sequence
  Description of Artificial Sequence: Synthetic oligonucleotide
gcuuuaaacgcuugccaau

SEQ ID NO: 767317 - RNA, 19 nt, Artificial Sequence
  Description of Artificial Sequence: Synthetic oligonucleotide
ccuagagcagccugaaaua

SEQ ID NO: 767318 - RNA, 19 nt, Artificial Sequence
  Description of Artificial Sequence: Synthetic oligonucleotide
gguuuauagaggaugccuu

SEQ ID NO: 767319 - RNA, 19 nt, Artificial Sequence
  Description of Artificial Sequence: Synthetic oligonucleotide
cuagagcagccugaaauau

SEQ ID NO: 767320 - RNA, 19 nt, Artificial Sequence
  Description of Artificial Sequence: Synthetic oligonucleotide
cguuucacuucaucaaaga

SEQ ID NO: 767321 - RNA, 19 nt, Artificial Sequence
  Description of Artificial Sequence: Synthetic oligonucleotide
guuaagcggauagcagugu

SEQ ID NO: 767322 - RNA, 19 nt, Artificial Sequence
  Description of Artificial Sequence: Synthetic oligonucleotide
caucuaaaauagguuuggu

SEQ ID NO: 767323 - RNA, 19 nt, Artificial Sequence
  Description of Artificial Sequence: Synthetic oligonucleotide
gcggguaagcggcugcuuc

SEQ ID NO: 767324 - RNA, 19 nt, Artificial Sequence
  Description of Artificial Sequence: Synthetic oligonucleotide
gaggguuuucagagcauau

SEQ ID NO: 767325 - RNA, 19 nt, Artificial Sequence
  Description of Artificial Sequence: Synthetic oligonucleotide
uaacagggugggcccuauu

SEQ ID NO: 767326 - RNA, 19 nt, Artificial Sequence
  Description of Artificial Sequence: Synthetic oligonucleotide
auguagcaguccggaugag

SEQ ID NO: 767327 - RNA, 19 nt, Artificial Sequence
  Description of Artificial Sequence: Synthetic oligonucleotide
gccauacccauucucugcu

SEQ ID NO: 767328 - RNA, 19 nt, Artificial Sequence
  Description of Artificial Sequence: Synthetic oligonucleotide
cacgaugcuuuucacgauu

SEQ ID NO: 767329 - RNA, 19 nt, Artificial Sequence
  Description of Artificial Sequence: Synthetic oligonucleotide
cucuuauaaaugccucguu

SEQ ID NO: 767330 - RNA, 19 nt, Artificial Sequence
  Description of Artificial Sequence: Synthetic oligonucleotide
auaccgcagauuagccuuu

SEQ ID NO: 767331 - RNA, 19 nt, Artificial Sequence
  Description of Artificial Sequence: Synthetic oligonucleotide
cccugauagcacuguugac

SEQ ID NO: 767332 - RNA, 19 nt, Artificial Sequence
  Description of Artificial Sequence: Synthetic oligonucleotide
cguuucaguggucacaagu

SEQ ID NO: 767333 - RNA, 19 nt, Artificial Sequence
  Description of Artificial Sequence: Synthetic oligonucleotide
ggcuaugauucuggaguga

SEQ ID NO: 767334 - RNA, 19 nt, Artificial Sequence
  Description of Artificial Sequence: Synthetic oligonucleotide
ccagacugcuuuaaacgcu

SEQ ID NO: 767335 - RNA, 19 nt, Artificial Sequence
  Description of Artificial Sequence: Synthetic oligonucleotide
ggaauacaagugagccaca

SEQ ID NO: 767336 - RNA, 19 nt, Artificial Sequence
  Description of Artificial Sequence: Synthetic oligonucleotide
cauaagccacuugauuaau

SEQ ID NO: 767337 - RNA, 19 nt, Artificial Sequence
  Description of Artificial Sequence: Synthetic oligonucleotide
gggguagauccaugucauc

SEQ ID NO: 767338 - RNA, 19 nt, Artificial Sequence
  Description of Artificial Sequence: Synthetic oligonucleotide
ugggcccuauugggcuugc

SEQ ID NO: 767339 - RNA, 19 nt, Artificial Sequence
  Description of Artificial Sequence: Synthetic oligonucleotide
ccgaucucugugcaaugca

SEQ ID NO: 767340 - RNA, 19 nt, Artificial Sequence
  Description of Artificial Sequence: Synthetic oligonucleotide
guuucggaaagaggauuuu

SEQ ID NO: 767341 - RNA, 19 nt, Artificial Sequence
  Description of Artificial Sequence: Synthetic oligonucleotide
gggugggcccuauugggcu

SEQ ID NO: 767342 - RNA, 19 nt, Artificial Sequence
  Description of Artificial Sequence: Synthetic oligonucleotide
gccuuuccuaugagcuucc

SEQ ID NO: 767343 - RNA, 19 nt, Artificial Sequence
  Description of Artificial Sequence: Synthetic oligonucleotide
gaggugguuuauagaggau

SEQ ID NO: 767344 - RNA, 19 nt, Artificial Sequence
  Description of Artificial Sequence: Synthetic oligonucleotide
cuguccgaucgcuaaccau

SEQ ID NO: 767345 - RNA, 19 nt, Artificial Sequence
  Description of Artificial Sequence: Synthetic oligonucleotide
ccgugccauacccauucuc

SEQ ID NO: 767346 - RNA, 19 nt, Artificial Sequence
  Description of Artificial Sequence: Synthetic oligonucleotide
cagccgaucucugugcaau

SEQ ID NO: 767347 - RNA, 19 nt, Artificial Sequence
  Description of Artificial Sequence: Synthetic oligonucleotide
ccuauugggcuugcuccuc

SEQ ID NO: 767348 - RNA, 19 nt, Artificial Sequence
  Description of Artificial Sequence: Synthetic oligonucleotide
cgaucgcuaaccauagccu

SEQ ID NO: 767349 - RNA, 19 nt, Artificial Sequence
  Description of Artificial Sequence: Synthetic oligonucleotide
cguagacuuccaagggaca

SEQ ID NO: 767350 - RNA, 19 nt, Artificial Sequence
  Description of Artificial Sequence: Synthetic oligonucleotide
gagcaagcuuucagcacuu

SEQ ID NO: 767351 - RNA, 19 nt, Artificial Sequence
  Description of Artificial Sequence: Synthetic oligonucleotide
ccagaucaccaaucugcaa

SEQ ID NO: 767352 - RNA, 19 nt, Artificial Sequence
  Description of Artificial Sequence: Synthetic oligonucleotide
ccgcagauuagccuuuccu

SEQ ID NO: 767353 - RNA, 19 nt, Artificial Sequence
  Description of Artificial Sequence: Synthetic oligonucleotide
ccguuucaguggucacaag

SEQ ID NO: 767354 - RNA, 19 nt, Artificial Sequence
  Description of Artificial Sequence: Synthetic oligonucleotide
uagccugcuuugggccauc

SEQ ID NO: 767355 - RNA, 19 nt, Artificial Sequence
  Description of Artificial Sequence: Synthetic oligonucleotide
ccgaguggaggcagagcca

SEQ ID NO: 767356 - RNA, 19 nt, Artificial Sequence
  Description of Artificial Sequence: Synthetic oligonucleotide
caaguccggcuaacagggu

SEQ ID NO: 767357 - RNA, 19 nt, Artificial Sequence
  Description of Artificial Sequence: Synthetic oligonucleotide
ccagaacauauuguauacu

SEQ ID NO: 767358 - RNA, 19 nt, Artificial Sequence
  Description of Artificial Sequence: Synthetic oligonucleotide
gccugcuaguucagugauc

SEQ ID NO: 767359 - RNA, 19 nt, Artificial Sequence
  Description of Artificial Sequence: Synthetic oligonucleotide
augccucguuucacuucau

SEQ ID NO: 767360 - RNA, 19 nt, Artificial Sequence
  Description of Artificial Sequence: Synthetic oligonucleotide
gcuaacagggugggcccua

SEQ ID NO: 767361 - RNA, 19 nt, Artificial Sequence
  Description of Artificial Sequence: Synthetic oligonucleotide
cuaacagggugggcccuau

SEQ ID NO: 767362 - RNA, 19 nt, Artificial Sequence
  Description of Artificial Sequence: Synthetic oligonucleotide
ccggguuggccagccuccc

SEQ ID NO: 767363 - RNA, 19 nt, Artificial Sequence
  Description of Artificial Sequence: Synthetic oligonucleotide
ggcuucuguccgaucgcua

SEQ ID NO: 767364 - RNA, 19 nt, Artificial Sequence
  Description of Artificial Sequence: Synthetic oligonucleotide
gccccuagagcagccugaa

SEQ ID NO: 767365 - RNA, 19 nt, Artificial Sequence
  Description of Artificial Sequence: Synthetic oligonucleotide
ccacugaaucaggauaaau

SEQ ID NO: 767366 - RNA, 19 nt, Artificial Sequence
  Description of Artificial Sequence: Synthetic oligonucleotide
cucacggcacugguacauu

SEQ ID NO: 767367 - RNA, 19 nt, Artificial Sequence
  Description of Artificial Sequence: Synthetic oligonucleotide
cggguaagcggcugcuucu

SEQ ID NO: 767368 - RNA, 19 nt, Artificial Sequence
  Description of Artificial Sequence: Synthetic oligonucleotide
ccacgccguuucagugguc

SEQ ID NO: 767369 - RNA, 19 nt, Artificial Sequence
  Description of Artificial Sequence: Synthetic oligonucleotide
ccauacccauucucugcuu

SEQ ID NO: 767370 - RNA, 19 nt, Artificial Sequence
  Description of Artificial Sequence: Synthetic oligonucleotide
ccccuagagcagccugaaa

SEQ ID NO: 767371 - RNA, 19 nt, Artificial Sequence
  Description of Artificial Sequence: Synthetic oligonucleotide
ggcggguaagcggcugcuu

SEQ ID NO: 767372 - RNA, 19 nt, Artificial Sequence
  Description of Artificial Sequence: Synthetic oligonucleotide
gggcccuauugggcuugcu

SEQ ID NO: 767373 - RNA, 19 nt, Artificial Sequence
  Description of Artificial Sequence: Synthetic oligonucleotide
gcaccggaucugguccauu

SEQ ID NO: 767374 - RNA, 19 nt, Artificial Sequence
  Description of Artificial Sequence: Synthetic oligonucleotide
aaauuaugagcucagaaag

SEQ ID NO: 767375 - RNA, 19 nt, Artificial Sequence
  Description of Artificial Sequence: Synthetic oligonucleotide
aauuauagaaacauacugc

SEQ ID NO: 767376 - RNA, 19 nt, Artificial Sequence
  Description of Artificial Sequence: Synthetic oligonucleotide
aaaaccuccauccaaaucu

SEQ ID NO: 767377 - RNA, 19 nt, Artificial Sequence
  Description of Artificial Sequence: Synthetic oligonucleotide
aaaauauccauugaugagg

SEQ ID NO: 767378 - RNA, 19 nt, Artificial Sequence
  Description of Artificial Sequence: Synthetic oligonucleotide
aacucaauuggacuuuucc

SEQ ID NO: 767379 - RNA, 19 nt, Artificial Sequence
  Description of Artificial Sequence: Synthetic oligonucleotide
uuuguaacggauuacuggg

SEQ ID NO: 767380 - RNA, 19 nt, Artificial Sequence
  Description of Artificial Sequence: Synthetic oligonucleotide
aaaauuaugagcucagaaa

SEQ ID NO: 767381 - RNA, 19 nt, Artificial Sequence
  Description of Artificial Sequence: Synthetic oligonucleotide
uccaauacaacgaugacgu

SEQ ID NO: 767382 - RNA, 19 nt, Artificial Sequence
  Description of Artificial Sequence: Synthetic oligonucleotide
uuaauuugaacauaugcaa

SEQ ID NO: 767383 - RNA, 19 nt, Artificial Sequence
  Description of Artificial Sequence: Synthetic oligonucleotide
uauugcaugaccaaggaau

SEQ ID NO: 767384 - RNA, 19 nt, Artificial Sequence
  Description of Artificial Sequence: Synthetic oligonucleotide
aaguccaaacguucuaccc

SEQ ID NO: 767385 - RNA, 19 nt, Artificial Sequence
  Description of Artificial Sequence: Synthetic oligonucleotide
aagugcgcuauguuaaggc

SEQ ID NO: 767386 - RNA, 19 nt, Artificial Sequence
  Description of Artificial Sequence: Synthetic oligonucleotide
aauaccauuagauuugaua

SEQ ID NO: 767387 - RNA, 19 nt, Artificial Sequence
  Description of Artificial Sequence: Synthetic oligonucleotide
uauaaacgaagcauaguag

SEQ ID NO: 767388 - RNA, 19 nt, Artificial Sequence
  Description of Artificial Sequence: Synthetic oligonucleotide
acucaauuggacuuuuccc

SEQ ID NO: 767389 - RNA, 19 nt, Artificial Sequence
  Description of Artificial Sequence: Synthetic oligonucleotide
aaagcuuuggcagugagcu

SEQ ID NO: 767390 - RNA, 19 nt, Artificial Sequence
  Description of Artificial Sequence: Synthetic oligonucleotide
ucaccuaaagcuuuggcag

SEQ ID NO: 767391 - RNA, 19 nt, Artificial Sequence
  Description of Artificial Sequence: Synthetic oligonucleotide
gguuguauaauucacacug

SEQ ID NO: 767392 - RNA, 19 nt, Artificial Sequence
  Description of Artificial Sequence: Synthetic oligonucleotide
aaacguucuacccaggagu

SEQ ID NO: 767393 - RNA, 19 nt, Artificial Sequence
  Description of Artificial Sequence: Synthetic oligonucleotide
agcauaguagaccaaauug

SEQ ID NO: 767394 - RNA, 19 nt, Artificial Sequence
  Description of Artificial Sequence: Synthetic oligonucleotide
auaccauuagauuugauaa

SEQ ID NO: 767395 - RNA, 19 nt, Artificial Sequence
  Description of Artificial Sequence: Synthetic oligonucleotide
uuaugcaucgaucaaguaa

SEQ ID NO: 767396 - RNA, 19 nt, Artificial Sequence
  Description of Artificial Sequence: Synthetic oligonucleotide
auuaugagcucagaaagcg

SEQ ID NO: 767397 - RNA, 19 nt, Artificial Sequence
  Description of Artificial Sequence: Synthetic oligonucleotide
aacauacugcuuaaagugc

SEQ ID NO: 767398 - RNA, 19 nt, Artificial Sequence
  Description of Artificial Sequence: Synthetic oligonucleotide
uuggacuuuucccaaaugc

SEQ ID NO: 767399 - RNA, 19 nt, Artificial Sequence
  Description of Artificial Sequence: Synthetic oligonucleotide
auauaaacgaagcauagua

SEQ ID NO: 767400 - RNA, 19 nt, Artificial Sequence
  Description of Artificial Sequence: Synthetic oligonucleotide
agauagguaaaugucuugc

SEQ ID NO: 767401 - RNA, 19 nt, Artificial Sequence
  Description of Artificial Sequence: Synthetic oligonucleotide
auaaacgaagcauaguaga

SEQ ID NO: 767402 - RNA, 19 nt, Artificial Sequence
  Description of Artificial Sequence: Synthetic oligonucleotide
ucggucaggauuaaagucc

SEQ ID NO: 767403 - RNA, 19 nt, Artificial Sequence
  Description of Artificial Sequence: Synthetic oligonucleotide
ucuacuuagcauuuaauuu

SEQ ID NO: 767404 - RNA, 19 nt, Artificial Sequence
  Description of Artificial Sequence: Synthetic oligonucleotide
uaugguuaucaagucaugg

SEQ ID NO: 767405 - RNA, 19 nt, Artificial Sequence
  Description of Artificial Sequence: Synthetic oligonucleotide
uauguggagucuaguaacg

SEQ ID NO: 767406 - RNA, 19 nt, Artificial Sequence
  Description of Artificial Sequence: Synthetic oligonucleotide
uaguguuuauuaauuuuag

SEQ ID NO: 767407 - RNA, 19 nt, Artificial Sequence
  Description of Artificial Sequence: Synthetic oligonucleotide
uucaaguuaaaauuucaaa

SEQ ID NO: 767408 - RNA, 19 nt, Artificial Sequence
  Description of Artificial Sequence: Synthetic oligonucleotide
cuagcuguuaaaauuauga

SEQ ID NO: 767409 - RNA, 19 nt, Artificial Sequence
  Description of Artificial Sequence: Synthetic oligonucleotide
cuuagcauuuaauuucacc

SEQ ID NO: 767410 - RNA, 19 nt, Artificial Sequence
  Description of Artificial Sequence: Synthetic oligonucleotide
agucuaguaacguuuggag

SEQ ID NO: 767411 - RNA, 19 nt, Artificial Sequence
  Description of Artificial Sequence: Synthetic oligonucleotide
uucaccuaaagcuuuggca

SEQ ID NO: 767412 - RNA, 19 nt, Artificial Sequence
  Description of Artificial Sequence: Synthetic oligonucleotide
aaucaugguuguauaauuc

SEQ ID NO: 767413 - RNA, 19 nt, Artificial Sequence
  Description of Artificial Sequence: Synthetic oligonucleotide
acaacgaugacguccagcu

SEQ ID NO: 767414 - RNA, 19 nt, Artificial Sequence
  Description of Artificial Sequence: Synthetic oligonucleotide
caucacuccaucuacuuag

SEQ ID NO: 767415 - RNA, 19 nt, Artificial Sequence
  Description of Artificial Sequence: Synthetic oligonucleotide
agugcgcuauguuaaggcc

SEQ ID NO: 767416 - RNA, 19 nt, Artificial Sequence
  Description of Artificial Sequence: Synthetic oligonucleotide
uaaacgaagcauaguagac

SEQ ID NO: 767417 - RNA, 19 nt, Artificial Sequence
  Description of Artificial Sequence: Synthetic oligonucleotide
ugcgucugaagcuaggcag

SEQ ID NO: 767418 - RNA, 19 nt, Artificial Sequence
  Description of Artificial Sequence: Synthetic oligonucleotide
aauacaacgaugacgucca

SEQ ID NO: 767419 - RNA, 19 nt, Artificial Sequence
  Description of Artificial Sequence: Synthetic oligonucleotide
gaccauguggcccacggcg

SEQ ID NO: 767420 - RNA, 19 nt, Artificial Sequence
  Description of Artificial Sequence: Synthetic oligonucleotide
cuuuccguguaaacaaugg

SEQ ID NO: 767421 - RNA, 19 nt, Artificial Sequence
  Description of Artificial Sequence: Synthetic oligonucleotide
caauacaacgaugacgucc

SEQ ID NO: 767422 - RNA, 19 nt, Artificial Sequence
  Description of Artificial Sequence: Synthetic oligonucleotide
aauaguguacccugccaca

SEQ ID NO: 767423 - RNA, 19 nt, Artificial Sequence
  Description of Artificial Sequence: Synthetic oligonucleotide
aaugcuauugcaugaccaa

SEQ ID NO: 767424 - RNA, 19 nt, Artificial Sequence
  Description of Artificial Sequence: Synthetic oligonucleotide
agcuugcagucauaaaccc

SEQ ID NO: 767425 - RNA, 19 nt, Artificial Sequence
  Description of Artificial Sequence: Synthetic oligonucleotide
auauccauugaugagguca

SEQ ID NO: 767426 - RNA, 19 nt, Artificial Sequence
  Description of Artificial Sequence: Synthetic oligonucleotide
uaaguaucggucaggauua

SEQ ID NO: 767427 - RNA, 19 nt, Artificial Sequence
  Description of Artificial Sequence: Synthetic oligonucleotide
aagaagaagcccauccagg

SEQ ID NO: 767428 - RNA, 19 nt, Artificial Sequence
  Description of Artificial Sequence: Synthetic oligonucleotide
ugguuaucaagucaugguc

SEQ ID NO: 767429 - RNA, 19 nt, Artificial Sequence
  Description of Artificial Sequence: Synthetic oligonucleotide
aagauagguaaaugucuug

SEQ ID NO: 767430 - RNA, 19 nt, Artificial Sequence
  Description of Artificial Sequence: Synthetic oligonucleotide
uggcacaucguaugcaacg

SEQ ID NO: 767431 - RNA, 19 nt, Artificial Sequence
  Description of Artificial Sequence: Synthetic oligonucleotide
augacguccagcuccaaag

SEQ ID NO: 767432 - RNA, 19 nt, Artificial Sequence
  Description of Artificial Sequence: Synthetic oligonucleotide
uacacgaauccuaucaaaa

SEQ ID NO: 767433 - RNA, 19 nt, Artificial Sequence
  Description of Artificial Sequence: Synthetic oligonucleotide
gaauaguguacccugccac

SEQ ID NO: 767434 - RNA, 19 nt, Artificial Sequence
  Description of Artificial Sequence: Synthetic oligonucleotide
ugaagcuaggcagaggcag

SEQ ID NO: 767435 - RNA, 19 nt, Artificial Sequence
  Description of Artificial Sequence: Synthetic oligonucleotide
uggacuuuucccaaaugcu

SEQ ID NO: 767436 - RNA, 19 nt, Artificial Sequence
  Description of Artificial Sequence: Synthetic oligonucleotide
uguauggcggacuuuucgc

SEQ ID NO: 767437 - RNA, 19 nt, Artificial Sequence
  Description of Artificial Sequence: Synthetic oligonucleotide
guaacauccacaagcaccc

SEQ ID NO: 767438 - RNA, 19 nt, Artificial Sequence
  Description of Artificial Sequence: Synthetic oligonucleotide
aguaggagaaacacacacc

SEQ ID NO: 767439 - RNA, 19 nt, Artificial Sequence
  Description of Artificial Sequence: Synthetic oligonucleotide
cauaguagaccaaauuguc

SEQ ID NO: 767440 - RNA, 19 nt, Artificial Sequence
  Description of Artificial Sequence: Synthetic oligonucleotide
auguauggcggacuuuucg

SEQ ID NO: 767441 - RNA, 19 nt, Artificial Sequence
  Description of Artificial Sequence: Synthetic oligonucleotide
uucccauccuuguaugugg

SEQ ID NO: 767442 - RNA, 19 nt, Artificial Sequence
  Description of Artificial Sequence: Synthetic oligonucleotide
uuuucuccaauacaacgau

SEQ ID NO: 767443 - RNA, 19 nt, Artificial Sequence
  Description of Artificial Sequence: Synthetic oligonucleotide
cuuuuaugcaucgaucaag

SEQ ID NO: 767444 - RNA, 19 nt, Artificial Sequence
  Description of Artificial Sequence: Synthetic oligonucleotide
aucuacuuagcauuuaauu

SEQ ID NO: 767445 - RNA, 19 nt, Artificial Sequence
  Description of Artificial Sequence: Synthetic oligonucleotide
guuaaaauuaugagcucag

SEQ ID NO: 767446 - RNA, 19 nt, Artificial Sequence
  Description of Artificial Sequence: Synthetic oligonucleotide
agguaaaugucuugcccac

SEQ ID NO: 767447 - RNA, 19 nt, Artificial Sequence
  Description of Artificial Sequence: Synthetic oligonucleotide
gcaucgaucaaguaaauuc

SEQ ID NO: 767448 - RNA, 19 nt, Artificial Sequence
  Description of Artificial Sequence: Synthetic oligonucleotide
guauguggagucuaguaac

SEQ ID NO: 767449 - RNA, 19 nt, Artificial Sequence
  Description of Artificial Sequence: Synthetic oligonucleotide
uaguagaccaaauugucuu

SEQ ID NO: 767450 - RNA, 19 nt, Artificial Sequence
  Description of Artificial Sequence: Synthetic oligonucleotide
aacaauggcuagcuguuaa

SEQ ID NO: 767451 - RNA, 19 nt, Artificial Sequence
  Description of Artificial Sequence: Synthetic oligonucleotide
uuauccuguaaguaucggu

SEQ ID NO: 767452 - RNA, 19 nt, Artificial Sequence
  Description of Artificial Sequence: Synthetic oligonucleotide
agaagauagguaaaugucu

SEQ ID NO: 767453 - RNA, 19 nt, Artificial Sequence
  Description of Artificial Sequence: Synthetic oligonucleotide
cuuuacgcacagaaguggc

SEQ ID NO: 767454 - RNA, 19 nt, Artificial Sequence
  Description of Artificial Sequence: Synthetic oligonucleotide
auuucgucaucugucagag

SEQ ID NO: 767455 - RNA, 19 nt, Artificial Sequence
  Description of Artificial Sequence: Synthetic oligonucleotide
uguacccugccacagucug

SEQ ID NO: 767456 - RNA, 19 nt, Artificial Sequence
  Description of Artificial Sequence: Synthetic oligonucleotide
uauuccuuacccucugaca

SEQ ID NO: 767457 - RNA, 19 nt, Artificial Sequence
  Description of Artificial Sequence: Synthetic oligonucleotide
uuaugagcucagaaagcgc

SEQ ID NO: 767458 - RNA, 19 nt, Artificial Sequence
  Description of Artificial Sequence: Synthetic oligonucleotide
ucaucugucagaggguucc

SEQ ID NO: 767459 - RNA, 19 nt, Artificial Sequence
  Description of Artificial Sequence: Synthetic oligonucleotide
cagaaagcgccucaaacac

SEQ ID NO: 767460 - RNA, 19 nt, Artificial Sequence
  Description of Artificial Sequence: Synthetic oligonucleotide
cauccaaaucugcauacag

SEQ ID NO: 767461 - RNA, 19 nt, Artificial Sequence
  Description of Artificial Sequence: Synthetic oligonucleotide
agcauuuaauuucaccuaa

SEQ ID NO: 767462 - RNA, 19 nt, Artificial Sequence
  Description of Artificial Sequence: Synthetic oligonucleotide
guaaacaauggcuagcugu

SEQ ID NO: 767463 - RNA, 19 nt, Artificial Sequence
  Description of Artificial Sequence: Synthetic oligonucleotide
cacaucguaugcaacgccc

SEQ ID NO: 767464 - RNA, 19 nt, Artificial Sequence
  Description of Artificial Sequence: Synthetic oligonucleotide
aacacggguccauacuucu

SEQ ID NO: 767465 - RNA, 19 nt, Artificial Sequence
  Description of Artificial Sequence: Synthetic oligonucleotide
caucgaucaaguaaauuca

SEQ ID NO: 767466 - RNA, 19 nt, Artificial Sequence
  Description of Artificial Sequence: Synthetic oligonucleotide
uaugcaacgcccuucccaa

SEQ ID NO: 767467 - RNA, 19 nt, Artificial Sequence
  Description of Artificial Sequence: Synthetic oligonucleotide
auggcuagcuguuaaaauu

SEQ ID NO: 767468 - RNA, 19 nt, Artificial Sequence
  Description of Artificial Sequence: Synthetic oligonucleotide
uaaacacggguccauacuu

SEQ ID NO: 767469 - RNA, 19 nt, Artificial Sequence
  Description of Artificial Sequence: Synthetic oligonucleotide
gaguugacuucuaauuucc

SEQ ID NO: 767470 - RNA, 19 nt, Artificial Sequence
  Description of Artificial Sequence: Synthetic oligonucleotide
ugcgcuauguuaaggccgc

SEQ ID NO: 767471 - RNA, 19 nt, Artificial Sequence
  Description of Artificial Sequence: Synthetic oligonucleotide
uaaagugcgcuauguuaag

SEQ ID NO: 767472 - RNA, 19 nt, Artificial Sequence
  Description of Artificial Sequence: Synthetic oligonucleotide
ugaaucaugguuguauaau

SEQ ID NO: 767473 - RNA, 19 nt, Artificial Sequence
  Description of Artificial Sequence: Synthetic oligonucleotide
aacguucuacccaggaguc

SEQ ID NO: 767474 - RNA, 19 nt, Artificial Sequence
  Description of Artificial Sequence: Synthetic oligonucleotide
uccuaucaaaauuauuaua

SEQ ID NO: 767475 - RNA, 19 nt, Artificial Sequence
  Description of Artificial Sequence: Synthetic oligonucleotide
acaagcacccuuuaguguu

SEQ ID NO: 767476 - RNA, 19 nt, Artificial Sequence
  Description of Artificial Sequence: Synthetic oligonucleotide
gagcaucccugcuauuucg

SEQ ID NO: 767477 - RNA, 19 nt, Artificial Sequence
  Description of Artificial Sequence: Synthetic oligonucleotide
guuguauaauucacacugg

SEQ ID NO: 767478 - RNA, 19 nt, Artificial Sequence
  Description of Artificial Sequence: Synthetic oligonucleotide
uuaaaauuaugagcucaga

SEQ ID NO: 767479 - RNA, 19 nt, Artificial Sequence
  Description of Artificial Sequence: Synthetic oligonucleotide
auggcggacuuuucgcgcc

SEQ ID NO: 767480 - RNA, 19 nt, Artificial Sequence
  Description of Artificial Sequence: Synthetic oligonucleotide
guauggcggacuuuucgcg

SEQ ID NO: 767481 - RNA, 19 nt, Artificial Sequence
  Description of Artificial Sequence: Synthetic oligonucleotide
uuacgcacagaaguggccc

SEQ ID NO: 767482 - RNA, 19 nt, Artificial Sequence
  Description of Artificial Sequence: Synthetic oligonucleotide
guaaguaucggucaggauu

SEQ ID NO: 767483 - RNA, 19 nt, Artificial Sequence
  Description of Artificial Sequence: Synthetic oligonucleotide
ucguaugcaacgcccuucc

SEQ ID NO: 767484 - RNA, 19 nt, Artificial Sequence
  Description of Artificial Sequence: Synthetic oligonucleotide
uucacacugggaaaauauc

SEQ ID NO: 767485 - RNA, 19 nt, Artificial Sequence
  Description of Artificial Sequence: Synthetic oligonucleotide
aacguuuggagaaugucau

SEQ ID NO: 767486 - RNA, 19 nt, Artificial Sequence
  Description of Artificial Sequence: Synthetic oligonucleotide
ugcuauugaaaagcagugc

SEQ ID NO: 767487 - RNA, 19 nt, Artificial Sequence
  Description of Artificial Sequence: Synthetic oligonucleotide
uggcuagcuguuaaaauua

SEQ ID NO: 767488 - RNA, 19 nt, Artificial Sequence
  Description of Artificial Sequence: Synthetic oligonucleotide
uguguuaauauagccuuaa

SEQ ID NO: 767489 - RNA, 19 nt, Artificial Sequence
  Description of Artificial Sequence: Synthetic oligonucleotide
uguaacggauuacuggguu

SEQ ID NO: 767490 - RNA, 19 nt, Artificial Sequence
  Description of Artificial Sequence: Synthetic oligonucleotide
uuucagucuuugauugaca

SEQ ID NO: 767491 - RNA, 19 nt, Artificial Sequence
  Description of Artificial Sequence: Synthetic oligonucleotide
aaauuauuauaaacuguuu

SEQ ID NO: 767492 - RNA, 19 nt, Artificial Sequence
  Description of Artificial Sequence: Synthetic oligonucleotide
gcuauugaaaagcagugca

SEQ ID NO: 767493 - RNA, 19 nt, Artificial Sequence
  Description of Artificial Sequence: Synthetic oligonucleotide
auaaguuaagggaggcagg

SEQ ID NO: 767494 - RNA, 19 nt, Artificial Sequence
  Description of Artificial Sequence: Synthetic oligonucleotide
ugugaaucaugguuguaua

SEQ ID NO: 767495 - RNA, 19 nt, Artificial Sequence
  Description of Artificial Sequence: Synthetic oligonucleotide
guaaaugucuugcccacca

SEQ ID NO: 767496 - RNA, 19 nt, Artificial Sequence
  Description of Artificial Sequence: Synthetic oligonucleotide
uuguauguggagucuagua

SEQ ID NO: 767497 - RNA, 19 nt, Artificial Sequence
  Description of Artificial Sequence: Synthetic oligonucleotide
guuuucaggggugugaauc

SEQ ID NO: 767498 - RNA, 19 nt, Artificial Sequence
  Description of Artificial Sequence: Synthetic oligonucleotide
uagcauuuaauuucaccua

SEQ ID NO: 767499 - RNA, 19 nt, Artificial Sequence
  Description of Artificial Sequence: Synthetic oligonucleotide
uauggcggacuuuucgcgc

SEQ ID NO: 767500 - RNA, 19 nt, Artificial Sequence
  Description of Artificial Sequence: Synthetic oligonucleotide
caaacguucuacccaggag

SEQ ID NO: 767501 - RNA, 19 nt, Artificial Sequence
  Description of Artificial Sequence: Synthetic oligonucleotide
aaacacggguccauacuuc

SEQ ID NO: 767502 - RNA, 19 nt, Artificial Sequence
  Description of Artificial Sequence: Synthetic oligonucleotide
ggaggaauaguguacccug

SEQ ID NO: 767503 - RNA, 19 nt, Artificial Sequence
  Description of Artificial Sequence: Synthetic oligonucleotide
caucuuuacgcacagaagu

SEQ ID NO: 767504 - RNA, 19 nt, Artificial Sequence
  Description of Artificial Sequence: Synthetic oligonucleotide
ggauuacuggguuuucagg

SEQ ID NO: 767505 - RNA, 19 nt, Artificial Sequence
  Description of Artificial Sequence: Synthetic oligonucleotide
agcgccucaaacacauucc

SEQ ID NO: 767506 - RNA, 19 nt, Artificial Sequence
  Description of Artificial Sequence: Synthetic oligonucleotide
aaauacggguguggucagc

SEQ ID NO: 767507 - RNA, 19 nt, Artificial Sequence
  Description of Artificial Sequence: Synthetic oligonucleotide
cuggcaacagccaggcagc

SEQ ID NO: 767508 - RNA, 19 nt, Artificial Sequence
  Description of Artificial Sequence: Synthetic oligonucleotide
acacgaauccuaucaaaau

SEQ ID NO: 767509 - RNA, 19 nt, Artificial Sequence
  Description of Artificial Sequence: Synthetic oligonucleotide
agcgugaaggcgcaggcga

SEQ ID NO: 767510 - RNA, 19 nt, Artificial Sequence
  Description of Artificial Sequence: Synthetic oligonucleotide
cucauaaguuaagggaggc

SEQ ID NO: 767511 - RNA, 19 nt, Artificial Sequence
  Description of Artificial Sequence: Synthetic oligonucleotide
ugguuguauaauucacacu

SEQ ID NO: 767512 - RNA, 19 nt, Artificial Sequence
  Description of Artificial Sequence: Synthetic oligonucleotide
ucauugaguugacuucuaa

SEQ ID NO: 767513 - RNA, 19 nt, Artificial Sequence
  Description of Artificial Sequence: Synthetic oligonucleotide
auaguagaccaaauugucu

SEQ ID NO: 767514 - RNA, 19 nt, Artificial Sequence
  Description of Artificial Sequence: Synthetic oligonucleotide
aauguauggcggacuuuuc

SEQ ID NO: 767515 - RNA, 19 nt, Artificial Sequence
  Description of Artificial Sequence: Synthetic oligonucleotide
uucccaaauacgggugugg

SEQ ID NO: 767516 - RNA, 19 nt, Artificial Sequence
  Description of Artificial Sequence: Synthetic oligonucleotide
auacacgaauccuaucaaa

SEQ ID NO: 767517 - RNA, 19 nt, Artificial Sequence
  Description of Artificial Sequence: Synthetic oligonucleotide
gagaaaauguauggcggac

SEQ ID NO: 767518 - RNA, 19 nt, Artificial Sequence
  Description of Artificial Sequence: Synthetic oligonucleotide
uuguaacggauuacugggu

SEQ ID NO: 767519 - RNA, 19 nt, Artificial Sequence
  Description of Artificial Sequence: Synthetic oligonucleotide
auccuccgcguucagaucu

SEQ ID NO: 767520 - RNA, 19 nt, Artificial Sequence
  Description of Artificial Sequence: Synthetic oligonucleotide
agaaaauguauggcggacu

SEQ ID NO: 767521 - RNA, 19 nt, Artificial Sequence
  Description of Artificial Sequence: Synthetic oligonucleotide
auuucaccuaaagcuuugg

SEQ ID NO: 767522 - RNA, 19 nt, Artificial Sequence
  Description of Artificial Sequence: Synthetic oligonucleotide
auaguguacccugccacag

SEQ ID NO: 767523 - RNA, 19 nt, Artificial Sequence
  Description of Artificial Sequence: Synthetic oligonucleotide
uggucagccgacuguagac

SEQ ID NO: 767524 - RNA, 19 nt, Artificial Sequence
  Description of Artificial Sequence: Synthetic oligonucleotide
aacgcccuucccaaauacg

SEQ ID NO: 767525 - RNA, 19 nt, Artificial Sequence
  Description of Artificial Sequence: Synthetic oligonucleotide
agccaaccuggcaacagcc

SEQ ID NO: 767526 - RNA, 19 nt, Artificial Sequence
  Description of Artificial Sequence: Synthetic oligonucleotide
auguccuggaggaauagug

SEQ ID NO: 767527 - RNA, 19 nt, Artificial Sequence
  Description of Artificial Sequence: Synthetic oligonucleotide
uacggguguggucagccga

SEQ ID NO: 767528 - RNA, 19 nt, Artificial Sequence
  Description of Artificial Sequence: Synthetic oligonucleotide
cuuuucccaaaugcuauug

SEQ ID NO: 767529 - RNA, 19 nt, Artificial Sequence
  Description of Artificial Sequence: Synthetic oligonucleotide
gugcgcuauguuaaggccg

SEQ ID NO: 767530 - RNA, 19 nt, Artificial Sequence
  Description of Artificial Sequence: Synthetic oligonucleotide
guugccgccugucaccugc

SEQ ID NO: 767531 - RNA, 19 nt, Artificial Sequence
  Description of Artificial Sequence: Synthetic oligonucleotide
aaaccuccauccaaaucug

SEQ ID NO: 767532 - RNA, 19 nt, Artificial Sequence
  Description of Artificial Sequence: Synthetic oligonucleotide
acgcccuucccaaauacgg

SEQ ID NO: 767533 - RNA, 19 nt, Artificial Sequence
  Description of Artificial Sequence: Synthetic oligonucleotide
uguggagucuaguaacguu

SEQ ID NO: 767534 - RNA, 19 nt, Artificial Sequence
  Description of Artificial Sequence: Synthetic oligonucleotide
guuauccuguaaguaucgg

SEQ ID NO: 767535 - RNA, 19 nt, Artificial Sequence
  Description of Artificial Sequence: Synthetic oligonucleotide
augugggaccaguaacauc

SEQ ID NO: 767536 - RNA, 19 nt, Artificial Sequence
  Description of Artificial Sequence: Synthetic oligonucleotide
ugagaagcguggagagcag

SEQ ID NO: 767537 - RNA, 19 nt, Artificial Sequence
  Description of Artificial Sequence: Synthetic oligonucleotide
uggaggaauaguguacccu

SEQ ID NO: 767538 - RNA, 19 nt, Artificial Sequence
  Description of Artificial Sequence: Synthetic oligonucleotide
acacugggaaaauauccau

SEQ ID NO: 767539 - RNA, 19 nt, Artificial Sequence
  Description of Artificial Sequence: Synthetic oligonucleotide
uccaaacguucuacccagg

SEQ ID NO: 767540 - RNA, 19 nt, Artificial Sequence
  Description of Artificial Sequence: Synthetic oligonucleotide
acgaauccuaucaaaauua

SEQ ID NO: 767541 - RNA, 19 nt, Artificial Sequence
  Description of Artificial Sequence: Synthetic oligonucleotide
uccgcguucagaucuucgu

SEQ ID NO: 767542 - RNA, 19 nt, Artificial Sequence
  Description of Artificial Sequence: Synthetic oligonucleotide
uccuuacccucugacaucu

SEQ ID NO: 767543 - RNA, 19 nt, Artificial Sequence
  Description of Artificial Sequence: Synthetic oligonucleotide
aucguaugcaacgcccuuc

SEQ ID NO: 767544 - RNA, 19 nt, Artificial Sequence
  Description of Artificial Sequence: Synthetic oligonucleotide
uagacauccuccgcguuca

SEQ ID NO: 767545 - RNA, 19 nt, Artificial Sequence
  Description of Artificial Sequence: Synthetic oligonucleotide
ggacuuuucgcgccggcgg

SEQ ID NO: 767546 - RNA, 19 nt, Artificial Sequence
  Description of Artificial Sequence: Synthetic oligonucleotide
acguuuggagaaugucauc

SEQ ID NO: 767547 - RNA, 19 nt, Artificial Sequence
  Description of Artificial Sequence: Synthetic oligonucleotide
gcauuuggcacaucguaug

SEQ ID NO: 767548 - RNA, 19 nt, Artificial Sequence
  Description of Artificial Sequence: Synthetic oligonucleotide
ccgacuguagacauccucc

SEQ ID NO: 767549 - RNA, 19 nt, Artificial Sequence
  Description of Artificial Sequence: Synthetic oligonucleotide
augcuauugcaugaccaag

SEQ ID NO: 767550 - RNA, 19 nt, Artificial Sequence
  Description of Artificial Sequence: Synthetic oligonucleotide
uggcuaaaaccuccaucca

SEQ ID NO: 767551 - RNA, 19 nt, Artificial Sequence
  Description of Artificial Sequence: Synthetic oligonucleotide
aacggauuacuggguuuuc

SEQ ID NO: 767552 - RNA, 19 nt, Artificial Sequence
  Description of Artificial Sequence: Synthetic oligonucleotide
gguuauccuguaaguaucg

SEQ ID NO: 767553 - RNA, 19 nt, Artificial Sequence
  Description of Artificial Sequence: Synthetic oligonucleotide
gaaucaugguuguauaauu

SEQ ID NO: 767554 - RNA, 19 nt, Artificial Sequence
  Description of Artificial Sequence: Synthetic oligonucleotide
ggcgaggcggaacagguag

SEQ ID NO: 767555 - RNA, 19 nt, Artificial Sequence
  Description of Artificial Sequence: Synthetic oligonucleotide
guagacauccuccgcguuc

SEQ ID NO: 767556 - RNA, 19 nt, Artificial Sequence
  Description of Artificial Sequence: Synthetic oligonucleotide
aagaagcacuuuucuugaa

SEQ ID NO: 767557 - RNA, 19 nt, Artificial Sequence
  Description of Artificial Sequence: Synthetic oligonucleotide
uuuaugcaucgaucaagua

SEQ ID NO: 767558 - RNA, 19 nt, Artificial Sequence
  Description of Artificial Sequence: Synthetic oligonucleotide
uaguaacguuuggagaaug

SEQ ID NO: 767559 - RNA, 19 nt, Artificial Sequence
  Description of Artificial Sequence: Synthetic oligonucleotide
uuggcacaucguaugcaac

SEQ ID NO: 767560 - RNA, 19 nt, Artificial Sequence
  Description of Artificial Sequence: Synthetic oligonucleotide
gagaagcguggagagcagg

SEQ ID NO: 767561 - RNA, 19 nt, Artificial Sequence
  Description of Artificial Sequence: Synthetic oligonucleotide
gaaaauguauggcggacuu

SEQ ID NO: 767562 - RNA, 19 nt, Artificial Sequence
  Description of Artificial Sequence: Synthetic oligonucleotide
auacggguguggucagccg

SEQ ID NO: 767563 - RNA, 19 nt, Artificial Sequence
  Description of Artificial Sequence: Synthetic oligonucleotide
uguaaguaucggucaggau

SEQ ID NO: 767564 - RNA, 19 nt, Artificial Sequence
  Description of Artificial Sequence: Synthetic oligonucleotide
uaacggauuacuggguuuu

SEQ ID NO: 767565 - RNA, 19 nt, Artificial Sequence
  Description of Artificial Sequence: Synthetic oligonucleotide
caaauacggguguggucag

SEQ ID NO: 767566 - RNA, 19 nt, Artificial Sequence
  Description of Artificial Sequence: Synthetic oligonucleotide
guagaccaggcugagcgug

SEQ ID NO: 767567 - RNA, 19 nt, Artificial Sequence
  Description of Artificial Sequence: Synthetic oligonucleotide
ucccauccuuguaugugga

SEQ ID NO: 767568 - RNA, 19 nt, Artificial Sequence
  Description of Artificial Sequence: Synthetic oligonucleotide
uacugcuuaaagugcgcua

SEQ ID NO: 767569 - RNA, 19 nt, Artificial Sequence
  Description of Artificial Sequence: Synthetic oligonucleotide
uuaucaagucauggucugu

SEQ ID NO: 767570 - RNA, 19 nt, Artificial Sequence
  Description of Artificial Sequence: Synthetic oligonucleotide
cucugacaucuuuacgcac

SEQ ID NO: 767571 - RNA, 19 nt, Artificial Sequence
  Description of Artificial Sequence: Synthetic oligonucleotide
aagcccauccaggcacugg

SEQ ID NO: 767572 - RNA, 19 nt, Artificial Sequence
  Description of Artificial Sequence: Synthetic oligonucleotide
uacgcacagaaguggccca

SEQ ID NO: 767573 - RNA, 19 nt, Artificial Sequence
  Description of Artificial Sequence: Synthetic oligonucleotide
gugaaucaugguuguauaa

SEQ ID NO: 767574 - RNA, 19 nt, Artificial Sequence
  Description of Artificial Sequence: Synthetic oligonucleotide
ugauugacaguaggagaaa

SEQ ID NO: 767575 - RNA, 19 nt, Artificial Sequence
  Description of Artificial Sequence: Synthetic oligonucleotide
ggagucuaguaacguuugg

SEQ ID NO: 767576 - RNA, 19 nt, Artificial Sequence
  Description of Artificial Sequence: Synthetic oligonucleotide
aaaggacacaucacuccau

SEQ ID NO: 767577 - RNA, 19 nt, Artificial Sequence
  Description of Artificial Sequence: Synthetic oligonucleotide
ggcgcaggcgaugagaagc

SEQ ID NO: 767578 - RNA, 19 nt, Artificial Sequence
  Description of Artificial Sequence: Synthetic oligonucleotide
acaucacuccaucuacuua

SEQ ID NO: 767579 - RNA, 19 nt, Artificial Sequence
  Description of Artificial Sequence: Synthetic oligonucleotide
aaacuggaauucagaauua

SEQ ID NO: 767580 - RNA, 19 nt, Artificial Sequence
  Description of Artificial Sequence: Synthetic oligonucleotide
uaguguacccugccacagu

SEQ ID NO: 767581 - RNA, 19 nt, Artificial Sequence
  Description of Artificial Sequence: Synthetic oligonucleotide
ccaaauacgggugugguca

SEQ ID NO: 767582 - RNA, 19 nt, Artificial Sequence
  Description of Artificial Sequence: Synthetic oligonucleotide
aggguacauaggcaaacuu

SEQ ID NO: 767583 - RNA, 19 nt, Artificial Sequence
  Description of Artificial Sequence: Synthetic oligonucleotide
gaagauagguaaaugucuu

SEQ ID NO: 767584 - RNA, 19 nt, Artificial Sequence
  Description of Artificial Sequence: Synthetic oligonucleotide
acuuuucgcgccggcgggc

SEQ ID NO: 767585 - RNA, 19 nt, Artificial Sequence
  Description of Artificial Sequence: Synthetic oligonucleotide
uggcggacuuuucgcgccg

SEQ ID NO: 767586 - RNA, 19 nt, Artificial Sequence
  Description of Artificial Sequence: Synthetic oligonucleotide
ccaaauugucuuaauuuga

SEQ ID NO: 767587 - RNA, 19 nt, Artificial Sequence
  Description of Artificial Sequence: Synthetic oligonucleotide
cuccgcguucagaucuucg

SEQ ID NO: 767588 - RNA, 19 nt, Artificial Sequence
  Description of Artificial Sequence: Synthetic oligonucleotide
ggaauuggagagaaaaugu

SEQ ID NO: 767589 - RNA, 19 nt, Artificial Sequence
  Description of Artificial Sequence: Synthetic oligonucleotide
aaggcgcaggcgaugagaa

SEQ ID NO: 767590 - RNA, 19 nt, Artificial Sequence
  Description of Artificial Sequence: Synthetic oligonucleotide
gaaggcgcaggcgaugaga

SEQ ID NO: 767591 - RNA, 19 nt, Artificial Sequence
  Description of Artificial Sequence: Synthetic oligonucleotide
uuucccgaugggcucuguc

SEQ ID NO: 767592 - RNA, 19 nt, Artificial Sequence
  Description of Artificial Sequence: Synthetic oligonucleotide
uguagacauccuccgcguu

SEQ ID NO: 767593 - RNA, 19 nt, Artificial Sequence
  Description of Artificial Sequence: Synthetic oligonucleotide
aagcuaaacacggguccau

SEQ ID NO: 767594 - RNA, 19 nt, Artificial Sequence
  Description of Artificial Sequence: Synthetic oligonucleotide
gagcgugaaggcgcaggcg

SEQ ID NO: 767595 - RNA, 19 nt, Artificial Sequence
  Description of Artificial Sequence: Synthetic oligonucleotide
ugcaucgaucaaguaaauu

SEQ ID NO: 767596 - RNA, 19 nt, Artificial Sequence
  Description of Artificial Sequence: Synthetic oligonucleotide
cugucagaggguucccauc

SEQ ID NO: 767597 - RNA, 19 nt, Artificial Sequence
  Description of Artificial Sequence: Synthetic oligonucleotide
gacuuuucccaaaugcuau

SEQ ID NO: 767598 - RNA, 19 nt, Artificial Sequence
  Description of Artificial Sequence: Synthetic oligonucleotide
ugcguuucuugauggcuuu

SEQ ID NO: 767599 - RNA, 19 nt, Artificial Sequence
  Description of Artificial Sequence: Synthetic oligonucleotide
ggcgaugagaagcguggag

SEQ ID NO: 767600 - RNA, 19 nt, Artificial Sequence
  Description of Artificial Sequence: Synthetic oligonucleotide
auguggagucuaguaacgu

SEQ ID NO: 767601 - RNA, 19 nt, Artificial Sequence
  Description of Artificial Sequence: Synthetic oligonucleotide
cuaaacacggguccauacu

SEQ ID NO: 767602 - RNA, 19 nt, Artificial Sequence
  Description of Artificial Sequence: Synthetic oligonucleotide
acacaccugauguccugga

SEQ ID NO: 767603 - RNA, 19 nt, Artificial Sequence
  Description of Artificial Sequence: Synthetic oligonucleotide
acggauuacuggguuuuca

SEQ ID NO: 767604 - RNA, 19 nt, Artificial Sequence
  Description of Artificial Sequence: Synthetic oligonucleotide
gcuaaaaccuccauccaaa

SEQ ID NO: 767605 - RNA, 19 nt, Artificial Sequence
  Description of Artificial Sequence: Synthetic oligonucleotide
ggcuaaaaccuccauccaa

SEQ ID NO: 767606 - RNA, 19 nt, Artificial Sequence
  Description of Artificial Sequence: Synthetic oligonucleotide
agaaagcgccucaaacaca

SEQ ID NO: 767607 - RNA, 19 nt, Artificial Sequence
  Description of Artificial Sequence: Synthetic oligonucleotide
cauugaguugacuucuaau

SEQ ID NO: 767608 - RNA, 19 nt, Artificial Sequence
  Description of Artificial Sequence: Synthetic oligonucleotide
uuuucgcgccggcgggcag

SEQ ID NO: 767609 - RNA, 19 nt, Artificial Sequence
  Description of Artificial Sequence: Synthetic oligonucleotide
cuuauuccuuacccucuga

SEQ ID NO: 767610 - RNA, 19 nt, Artificial Sequence
  Description of Artificial Sequence: Synthetic oligonucleotide
cacgaauccuaucaaaauu

SEQ ID NO: 767611 - RNA, 19 nt, Artificial Sequence
  Description of Artificial Sequence: Synthetic oligonucleotide
ggcacaucguaugcaacgc

SEQ ID NO: 767612 - RNA, 19 nt, Artificial Sequence
  Description of Artificial Sequence: Synthetic oligonucleotide
ggguuauccuguaaguauc

SEQ ID NO: 767613 - RNA, 19 nt, Artificial Sequence
  Description of Artificial Sequence: Synthetic oligonucleotide
gguuaucaagucauggucu

SEQ ID NO: 767614 - RNA, 19 nt, Artificial Sequence
  Description of Artificial Sequence: Synthetic oligonucleotide
acaguaggagaaacacaca

SEQ ID NO: 767615 - RNA, 19 nt, Artificial Sequence
  Description of Artificial Sequence: Synthetic oligonucleotide
auacaacgaugacguccag

SEQ ID NO: 767616 - RNA, 19 nt, Artificial Sequence
  Description of Artificial Sequence: Synthetic oligonucleotide
cauauaaacgaagcauagu

SEQ ID NO: 767617 - RNA, 19 nt, Artificial Sequence
  Description of Artificial Sequence: Synthetic oligonucleotide
gaggcggaacagguagacc

SEQ ID NO: 767618 - RNA, 19 nt, Artificial Sequence
  Description of Artificial Sequence: Synthetic oligonucleotide
guacauaggcaaacuucuc

SEQ ID NO: 767619 - RNA, 19 nt, Artificial Sequence
  Description of Artificial Sequence: Synthetic oligonucleotide
acacaucacuccaucuacu

SEQ ID NO: 767620 - RNA, 19 nt, Artificial Sequence
  Description of Artificial Sequence: Synthetic oligonucleotide
aggaacucaauuggacuuu

SEQ ID NO: 767621 - RNA, 19 nt, Artificial Sequence
  Description of Artificial Sequence: Synthetic oligonucleotide
ccugcuauuucgucaucug

SEQ ID NO: 767622 - RNA, 19 nt, Artificial Sequence
  Description of Artificial Sequence: Synthetic oligonucleotide
gcuagcuguuaaaauuaug

SEQ ID NO: 767623 - RNA, 19 nt, Artificial Sequence
  Description of Artificial Sequence: Synthetic oligonucleotide
cacggcgaggcggaacagg

SEQ ID NO: 767624 - RNA, 19 nt, Artificial Sequence
  Description of Artificial Sequence: Synthetic oligonucleotide
gcacaucguaugcaacgcc

SEQ ID NO: 767625 - RNA, 19 nt, Artificial Sequence
  Description of Artificial Sequence: Synthetic oligonucleotide
cgacuguagacauccuccg

SEQ ID NO: 767626 - RNA, 19 nt, Artificial Sequence
  Description of Artificial Sequence: Synthetic oligonucleotide
ugcugcccugcgaguagca

SEQ ID NO: 767627 - RNA, 19 nt, Artificial Sequence
  Description of Artificial Sequence: Synthetic oligonucleotide
ggguccauacuucucauau

SEQ ID NO: 767628 - RNA, 19 nt, Artificial Sequence
  Description of Artificial Sequence: Synthetic oligonucleotide
accuucucauugaguugac

SEQ ID NO: 767629 - RNA, 19 nt, Artificial Sequence
  Description of Artificial Sequence: Synthetic oligonucleotide
cccaaaugcuauugcauga

SEQ ID NO: 767630 - RNA, 19 nt, Artificial Sequence
  Description of Artificial Sequence: Synthetic oligonucleotide
uuucgcgccggcgggcagc

SEQ ID NO: 767631 - RNA, 19 nt, Artificial Sequence
  Description of Artificial Sequence: Synthetic oligonucleotide
ggguucccauccuuguaug

SEQ ID NO: 767632 - RNA, 19 nt, Artificial Sequence
  Description of Artificial Sequence: Synthetic oligonucleotide
aucugucagaggguuccca

SEQ ID NO: 767633 - RNA, 19 nt, Artificial Sequence
  Description of Artificial Sequence: Synthetic oligonucleotide
gauuucccgaugggcucug

SEQ ID NO: 767634 - RNA, 19 nt, Artificial Sequence
  Description of Artificial Sequence: Synthetic oligonucleotide
acggguccauacuucucau

SEQ ID NO: 767635 - RNA, 19 nt, Artificial Sequence
  Description of Artificial Sequence: Synthetic oligonucleotide
cauccuccgcguucagauc

SEQ ID NO: 767636 - RNA, 19 nt, Artificial Sequence
  Description of Artificial Sequence: Synthetic oligonucleotide
acggcgaggcggaacaggu

SEQ ID NO: 767637 - RNA, 19 nt, Artificial Sequence
  Description of Artificial Sequence: Synthetic oligonucleotide
caacgaugacguccagcuc

SEQ ID NO: 767638 - RNA, 19 nt, Artificial Sequence
  Description of Artificial Sequence: Synthetic oligonucleotide
cacaagcacccuuuagugu

SEQ ID NO: 767639 - RNA, 19 nt, Artificial Sequence
  Description of Artificial Sequence: Synthetic oligonucleotide
cguuuggagaaugucauca

SEQ ID NO: 767640 - RNA, 19 nt, Artificial Sequence
  Description of Artificial Sequence: Synthetic oligonucleotide
cuggguuauccuguaagua

SEQ ID NO: 767641 - RNA, 19 nt, Artificial Sequence
  Description of Artificial Sequence: Synthetic oligonucleotide
gccucaaacacauuccuuu

SEQ ID NO: 767642 - RNA, 19 nt, Artificial Sequence
  Description of Artificial Sequence: Synthetic oligonucleotide
caccgagccgcccgacugc

SEQ ID NO: 767643 - RNA, 19 nt, Artificial Sequence
  Description of Artificial Sequence: Synthetic oligonucleotide
caucugucagaggguuccc

SEQ ID NO: 767644 - RNA, 19 nt, Artificial Sequence
  Description of Artificial Sequence: Synthetic oligonucleotide
guggagucuaguaacguuu

SEQ ID NO: 767645 - RNA, 19 nt, Artificial Sequence
  Description of Artificial Sequence: Synthetic oligonucleotide
guaacggauuacuggguuu

SEQ ID NO: 767646 - RNA, 19 nt, Artificial Sequence
  Description of Artificial Sequence: Synthetic oligonucleotide
agcaccgagccgcccgacu

SEQ ID NO: 767647 - RNA, 19 nt, Artificial Sequence
  Description of Artificial Sequence: Synthetic oligonucleotide
acgaugacguccagcucca

SEQ ID NO: 767648 - RNA, 19 nt, Artificial Sequence
  Description of Artificial Sequence: Synthetic oligonucleotide
accauguggcccacggcga

SEQ ID NO: 767649 - RNA, 19 nt, Artificial Sequence
  Description of Artificial Sequence: Synthetic oligonucleotide
agguugccgccugucaccu

SEQ ID NO: 767650 - RNA, 19 nt, Artificial Sequence
  Description of Artificial Sequence: Synthetic oligonucleotide
gccgacuguagacauccuc

SEQ ID NO: 767651 - RNA, 19 nt, Artificial Sequence
  Description of Artificial Sequence: Synthetic oligonucleotide
cccugcgaguagcaggccg

SEQ ID NO: 767652 - RNA, 19 nt, Artificial Sequence
  Description of Artificial Sequence: Synthetic oligonucleotide
cuguagacauccuccgcgu

SEQ ID NO: 767653 - RNA, 19 nt, Artificial Sequence
  Description of Artificial Sequence: Synthetic oligonucleotide
cucauugaguugacuucua

SEQ ID NO: 767654 - RNA, 19 nt, Artificial Sequence
  Description of Artificial Sequence: Synthetic oligonucleotide
cgaucaaguaaauucagau

SEQ ID NO: 767655 - RNA, 19 nt, Artificial Sequence
  Description of Artificial Sequence: Synthetic oligonucleotide
ggauuaaaguccaaacguu

SEQ ID NO: 767656 - RNA, 19 nt, Artificial Sequence
  Description of Artificial Sequence: Synthetic oligonucleotide
agcuaaacacggguccaua

SEQ ID NO: 767657 - RNA, 19 nt, Artificial Sequence
  Description of Artificial Sequence: Synthetic oligonucleotide
acguucuacccaggagucu

SEQ ID NO: 767658 - RNA, 19 nt, Artificial Sequence
  Description of Artificial Sequence: Synthetic oligonucleotide
aagcacccuuuaguguuua

SEQ ID NO: 767659 - RNA, 19 nt, Artificial Sequence
  Description of Artificial Sequence: Synthetic oligonucleotide
gcuggguuauccuguaagu

SEQ ID NO: 767660 - RNA, 19 nt, Artificial Sequence
  Description of Artificial Sequence: Synthetic oligonucleotide
cacaucacuccaucuacuu

SEQ ID NO: 767661 - RNA, 19 nt, Artificial Sequence
  Description of Artificial Sequence: Synthetic oligonucleotide
ccaaacguucuacccagga

SEQ ID NO: 767662 - RNA, 19 nt, Artificial Sequence
  Description of Artificial Sequence: Synthetic oligonucleotide
gcgcaggcgaugagaagcg

SEQ ID NO: 767663 - RNA, 19 nt, Artificial Sequence
  Description of Artificial Sequence: Synthetic oligonucleotide
gcuauguuaaggccgcuuu

SEQ ID NO: 767664 - RNA, 19 nt, Artificial Sequence
  Description of Artificial Sequence: Synthetic oligonucleotide
gucagccgacuguagacau

SEQ ID NO: 767665 - RNA, 19 nt, Artificial Sequence
  Description of Artificial Sequence: Synthetic oligonucleotide
ggguguggucagccgacug

SEQ ID NO: 767666 - RNA, 19 nt, Artificial Sequence
  Description of Artificial Sequence: Synthetic oligonucleotide
ucccugcuauuucgucauc

SEQ ID NO: 767667 - RNA, 19 nt, Artificial Sequence
  Description of Artificial Sequence: Synthetic oligonucleotide
cgcccuucccaaauacggg

SEQ ID NO: 767668 - RNA, 19 nt, Artificial Sequence
  Description of Artificial Sequence: Synthetic oligonucleotide
uccuccgcguucagaucuu

SEQ ID NO: 767669 - RNA, 19 nt, Artificial Sequence
  Description of Artificial Sequence: Synthetic oligonucleotide
ggucagccgacuguagaca

SEQ ID NO: 767670 - RNA, 19 nt, Artificial Sequence
  Description of Artificial Sequence: Synthetic oligonucleotide
gcauuuaauuucaccuaaa

SEQ ID NO: 767671 - RNA, 19 nt, Artificial Sequence
  Description of Artificial Sequence: Synthetic oligonucleotide
cuauguuaaggccgcuuuu

SEQ ID NO: 767672 - RNA, 19 nt, Artificial Sequence
  Description of Artificial Sequence: Synthetic oligonucleotide
cugcguuucuugauggcuu

SEQ ID NO: 767673 - RNA, 19 nt, Artificial Sequence
  Description of Artificial Sequence: Synthetic oligonucleotide
cuuuucgcgccggcgggca

SEQ ID NO: 767674 - RNA, 19 nt, Artificial Sequence
  Description of Artificial Sequence: Synthetic oligonucleotide
augcaucgaucaaguaaau

SEQ ID NO: 767675 - RNA, 19 nt, Artificial Sequence
  Description of Artificial Sequence: Synthetic oligonucleotide
gggugugaaucaugguugu

SEQ ID NO: 767676 - RNA, 19 nt, Artificial Sequence
  Description of Artificial Sequence: Synthetic oligonucleotide
acgaagcauaguagaccaa

SEQ ID NO: 767677 - RNA, 19 nt, Artificial Sequence
  Description of Artificial Sequence: Synthetic oligonucleotide
uucgcgccggcgggcagcu

SEQ ID NO: 767678 - RNA, 19 nt, Artificial Sequence
  Description of Artificial Sequence: Synthetic oligonucleotide
guacccugccacagucuga

SEQ ID NO: 767679 - RNA, 19 nt, Artificial Sequence
  Description of Artificial Sequence: Synthetic oligonucleotide
gcuuaaagugcgcuauguu

SEQ ID NO: 767680 - RNA, 19 nt, Artificial Sequence
  Description of Artificial Sequence: Synthetic oligonucleotide
cuggaccauguggcccacg

SEQ ID NO: 767681 - RNA, 19 nt, Artificial Sequence
  Description of Artificial Sequence: Synthetic oligonucleotide
cgagccgcccgacugcagc

SEQ ID NO: 767682 - RNA, 19 nt, Artificial Sequence
  Description of Artificial Sequence: Synthetic oligonucleotide
auuucccgaugggcucugu

SEQ ID NO: 767683 - RNA, 19 nt, Artificial Sequence
  Description of Artificial Sequence: Synthetic oligonucleotide
ggcggacuuuucgcgccgg

SEQ ID NO: 767684 - RNA, 19 nt, Artificial Sequence
  Description of Artificial Sequence: Synthetic oligonucleotide
gaugagcaucccugcuauu

SEQ ID NO: 767685 - RNA, 19 nt, Artificial Sequence
  Description of Artificial Sequence: Synthetic oligonucleotide
cccacggcgaggcggaaca

SEQ ID NO: 767686 - RNA, 19 nt, Artificial Sequence
  Description of Artificial Sequence: Synthetic oligonucleotide
ccggcgggcagcuggacca

SEQ ID NO: 767687 - RNA, 19 nt, Artificial Sequence
  Description of Artificial Sequence: Synthetic oligonucleotide
cggacuuuucgcgccggcg

SEQ ID NO: 767688 - RNA, 19 nt, Artificial Sequence
  Description of Artificial Sequence: Synthetic oligonucleotide
gcggacuuuucgcgccggc

SEQ ID NO: 767689 - RNA, 19 nt, Artificial Sequence
  Description of Artificial Sequence: Synthetic oligonucleotide
gcaacgcccuucccaaaua

SEQ ID NO: 767690 - RNA, 19 nt, Artificial Sequence
  Description of Artificial Sequence: Synthetic oligonucleotide
gccgcccgacugcagcaag

SEQ ID NO: 767691 - RNA, 19 nt, Artificial Sequence
  Description of Artificial Sequence: Synthetic oligonucleotide
ccgcccgacugcagcaagc

SEQ ID NO: 767692 - RNA, 19 nt, Artificial Sequence
  Description of Artificial Sequence: Synthetic oligonucleotide
caagcacccuuuaguguuu

SEQ ID NO: 767693 - RNA, 19 nt, Artificial Sequence
  Description of Artificial Sequence: Synthetic oligonucleotide
cagguccucgccacacacu

SEQ ID NO: 767694 - RNA, 19 nt, Artificial Sequence
  Description of Artificial Sequence: Synthetic oligonucleotide
ccgaugagcaucccugcua

SEQ ID NO: 767695 - RNA, 19 nt, Artificial Sequence
  Description of Artificial Sequence: Synthetic oligonucleotide
ggcuagcuguuaaaauuau

SEQ ID NO: 767696 - RNA, 19 nt, Artificial Sequence
  Description of Artificial Sequence: Synthetic oligonucleotide
ccuucccaaauacgggugu

SEQ ID NO: 767697 - RNA, 19 nt, Artificial Sequence
  Description of Artificial Sequence: Synthetic oligonucleotide
agccgacuguagacauccu

SEQ ID NO: 767698 - RNA, 19 nt, Artificial Sequence
  Description of Artificial Sequence: Synthetic oligonucleotide
ggaacucaauuggacuuuu

SEQ ID NO: 767699 - RNA, 19 nt, Artificial Sequence
  Description of Artificial Sequence: Synthetic oligonucleotide
gcgaggcggaacagguaga

SEQ ID NO: 767700 - RNA, 19 nt, Artificial Sequence
  Description of Artificial Sequence: Synthetic oligonucleotide
cgcguucagaucuucguuu

SEQ ID NO: 767701 - RNA, 19 nt, Artificial Sequence
  Description of Artificial Sequence: Synthetic oligonucleotide
ccccagaagauagguaaau

SEQ ID NO: 767702 - RNA, 19 nt, Artificial Sequence
  Description of Artificial Sequence: Synthetic oligonucleotide
gcccacggcgaggcggaac

SEQ ID NO: 767703 - RNA, 19 nt, Artificial Sequence
  Description of Artificial Sequence: Synthetic oligonucleotide
ccacggcgaggcggaacag

SEQ ID NO: 767704 - RNA, 19 nt, Artificial Sequence
  Description of Artificial Sequence: Synthetic oligonucleotide
ccgcguucagaucuucguu

SEQ ID NO: 767705 - RNA, 19 nt, Artificial Sequence
  Description of Artificial Sequence: Synthetic oligonucleotide
cccgaugggcucugucccu

SEQ ID NO: 767706 - RNA, 19 nt, Artificial Sequence
  Description of Artificial Sequence: Synthetic oligonucleotide
cggguccauacuucucaua

SEQ ID NO: 767707 - RNA, 19 nt, Artificial Sequence
  Description of Artificial Sequence: Synthetic oligonucleotide
gcgugaaggcgcaggcgau

SEQ ID NO: 767708 - RNA, 19 nt, Artificial Sequence
  Description of Artificial Sequence: Synthetic oligonucleotide
cugagggguccuggccauu

SEQ ID NO: 767709 - RNA, 19 nt, Artificial Sequence
  Description of Artificial Sequence: Synthetic oligonucleotide
gcgcuauguuaaggccgcu

SEQ ID NO: 767710 - RNA, 19 nt, Artificial Sequence
  Description of Artificial Sequence: Synthetic oligonucleotide
cgcuauguuaaggccgcuu

SEQ ID NO: 767711 - RNA, 19 nt, Artificial Sequence
  Description of Artificial Sequence: Synthetic oligonucleotide
cgaugacguccagcuccaa

SEQ ID NO: 767712 - RNA, 19 nt, Artificial Sequence
  Description of Artificial Sequence: Synthetic oligonucleotide
aauauuaucuaccuacucc

SEQ ID NO: 767713 - RNA, 19 nt, Artificial Sequence
  Description of Artificial Sequence: Synthetic oligonucleotide
uauuauuugaucaagaaaa

SEQ ID NO: 767714 - RNA, 19 nt, Artificial Sequence
  Description of Artificial Sequence: Synthetic oligonucleotide
aacuaauucaaacauccuc

SEQ ID NO: 767715 - RNA, 19 nt, Artificial Sequence
  Description of Artificial Sequence: Synthetic oligonucleotide
acagauaagggcuugggcc

SEQ ID NO: 767716 - RNA, 19 nt, Artificial Sequence
  Description of Artificial Sequence: Synthetic oligonucleotide
ucuaaagaaucauaauugg

SEQ ID NO: 767717 - RNA, 19 nt, Artificial Sequence
  Description of Artificial Sequence: Synthetic oligonucleotide
agugucuacagauaagggc

SEQ ID NO: 767718 - RNA, 19 nt, Artificial Sequence
  Description of Artificial Sequence: Synthetic oligonucleotide
uucaauauacacaggauug

SEQ ID NO: 767719 - RNA, 19 nt, Artificial Sequence
  Description of Artificial Sequence: Synthetic oligonucleotide
uguucuaagaagaugcugc

SEQ ID NO: 767720 - RNA, 19 nt, Artificial Sequence
  Description of Artificial Sequence: Synthetic oligonucleotide
cuugauaucuucaaugacc

SEQ ID NO: 767721 - RNA, 19 nt, Artificial Sequence
  Description of Artificial Sequence: Synthetic oligonucleotide
aauagguuccuccaaacca

SEQ ID NO: 767722 - RNA, 19 nt, Artificial Sequence
  Description of Artificial Sequence: Synthetic oligonucleotide
auaauugcuauugaguucg

SEQ ID NO: 767723 - RNA, 19 nt, Artificial Sequence
  Description of Artificial Sequence: Synthetic oligonucleotide
agucuaugaauucugcgcc

SEQ ID NO: 767724 - RNA, 19 nt, Artificial Sequence
  Description of Artificial Sequence: Synthetic oligonucleotide
aacauaaacagccaaggaa

SEQ ID NO: 767725 - RNA, 19 nt, Artificial Sequence
  Description of Artificial Sequence: Synthetic oligonucleotide
aaauaauaggcguuauuug

SEQ ID NO: 767726 - RNA, 19 nt, Artificial Sequence
  Description of Artificial Sequence: Synthetic oligonucleotide
aaaauuuccuucuguaugu

SEQ ID NO: 767727 - RNA, 19 nt, Artificial Sequence
  Description of Artificial Sequence: Synthetic oligonucleotide
aaauauuaucuaccuacuc

SEQ ID NO: 767728 - RNA, 19 nt, Artificial Sequence
  Description of Artificial Sequence: Synthetic oligonucleotide
aaagccuaaaauauuaucu

SEQ ID NO: 767729 - RNA, 19 nt, Artificial Sequence
  Description of Artificial Sequence: Synthetic oligonucleotide
ucauacuuggacauaacug

SEQ ID NO: 767730 - RNA, 19 nt, Artificial Sequence
  Description of Artificial Sequence: Synthetic oligonucleotide
ugaucaagaaaacagacuu

SEQ ID NO: 767731 - RNA, 19 nt, Artificial Sequence
  Description of Artificial Sequence: Synthetic oligonucleotide
ugaaacauaaacagccaag

SEQ ID NO: 767732 - RNA, 19 nt, Artificial Sequence
  Description of Artificial Sequence: Synthetic oligonucleotide
acuguauuugguccaaacc

SEQ ID NO: 767733 - RNA, 19 nt, Artificial Sequence
  Description of Artificial Sequence: Synthetic oligonucleotide
ugacuuaaggauaugguga

SEQ ID NO: 767734 - RNA, 19 nt, Artificial Sequence
  Description of Artificial Sequence: Synthetic oligonucleotide
aagaccuucauguugaguu

SEQ ID NO: 767735 - RNA, 19 nt, Artificial Sequence
  Description of Artificial Sequence: Synthetic oligonucleotide
auguaaaccauagacgagc

SEQ ID NO: 767736 - RNA, 19 nt, Artificial Sequence
  Description of Artificial Sequence: Synthetic oligonucleotide
uucuguauguaaaccauag

SEQ ID NO: 767737 - RNA, 19 nt, Artificial Sequence
  Description of Artificial Sequence: Synthetic oligonucleotide
uguagggcugcuuuuauag

SEQ ID NO: 767738 - RNA, 19 nt, Artificial Sequence
  Description of Artificial Sequence: Synthetic oligonucleotide
uugauaucuucaaugacca

SEQ ID NO: 767739 - RNA, 19 nt, Artificial Sequence
  Description of Artificial Sequence: Synthetic oligonucleotide
ucaccuaagaauccuauga

SEQ ID NO: 767740 - RNA, 19 nt, Artificial Sequence
  Description of Artificial Sequence: Synthetic oligonucleotide
ucugaacuaauucaaacau

SEQ ID NO: 767741 - RNA, 19 nt, Artificial Sequence
  Description of Artificial Sequence: Synthetic oligonucleotide
uucuaaaugcuccccaucc

SEQ ID NO: 767742 - RNA, 19 nt, Artificial Sequence
  Description of Artificial Sequence: Synthetic oligonucleotide
cauuugauggauugaauag

SEQ ID NO: 767743 - RNA, 19 nt, Artificial Sequence
  Description of Artificial Sequence: Synthetic oligonucleotide
uugacuuaaggauauggug

SEQ ID NO: 767744 - RNA, 19 nt, Artificial Sequence
  Description of Artificial Sequence: Synthetic oligonucleotide
cuaaagaaucauaauuggc

SEQ ID NO: 767745 - RNA, 19 nt, Artificial Sequence
  Description of Artificial Sequence: Synthetic oligonucleotide
gagucuaugaauucugcgc

SEQ ID NO: 767746 - RNA, 19 nt, Artificial Sequence
  Description of Artificial Sequence: Synthetic oligonucleotide
ucuucuuaguacuuguccc

SEQ ID NO: 767747 - RNA, 19 nt, Artificial Sequence
  Description of Artificial Sequence: Synthetic oligonucleotide
acuuggacauaacugacuc

SEQ ID NO: 767748 - RNA, 19 nt, Artificial Sequence
  Description of Artificial Sequence: Synthetic oligonucleotide
uucuaucuaggaaacacug

SEQ ID NO: 767749 - RNA, 19 nt, Artificial Sequence
  Description of Artificial Sequence: Synthetic oligonucleotide
uuugguuuaugcccaggcg

SEQ ID NO: 767750 - RNA, 19 nt, Artificial Sequence
  Description of Artificial Sequence: Synthetic oligonucleotide
uuccccaagauccauacca

SEQ ID NO: 767751 - RNA, 19 nt, Artificial Sequence
  Description of Artificial Sequence: Synthetic oligonucleotide
ugaguucucacuaucuuac

SEQ ID NO: 767752 - RNA, 19 nt, Artificial Sequence
  Description of Artificial Sequence: Synthetic oligonucleotide
aauuaagagguguacguuu

SEQ ID NO: 767753 - RNA, 19 nt, Artificial Sequence
  Description of Artificial Sequence: Synthetic oligonucleotide
gaauccuaugaaauaauag

SEQ ID NO: 767754 - RNA, 19 nt, Artificial Sequence
  Description of Artificial Sequence: Synthetic oligonucleotide
ugauggauugaauagcaac

SEQ ID NO: 767755 - RNA, 19 nt, Artificial Sequence
  Description of Artificial Sequence: Synthetic oligonucleotide
uuuaggguaugguuggugc

SEQ ID NO: 767756 - RNA, 19 nt, Artificial Sequence
  Description of Artificial Sequence: Synthetic oligonucleotide
acaauuaagagguguacgu

SEQ ID NO: 767757 - RNA, 19 nt, Artificial Sequence
  Description of Artificial Sequence: Synthetic oligonucleotide
auaauaggcguuauuuggc

SEQ ID NO: 767758 - RNA, 19 nt, Artificial Sequence
  Description of Artificial Sequence: Synthetic oligonucleotide
uuugguccaaaccauucgc

SEQ ID NO: 767759 - RNA, 19 nt, Artificial Sequence
  Description of Artificial Sequence: Synthetic oligonucleotide
uugguuuaugcccaggcga

SEQ ID NO: 767760 - RNA, 19 nt, Artificial Sequence
  Description of Artificial Sequence: Synthetic oligonucleotide
gacaauuaagagguguacg

SEQ ID NO: 767761 - RNA, 19 nt, Artificial Sequence
  Description of Artificial Sequence: Synthetic oligonucleotide
uccuaaagccccuaaagac

SEQ ID NO: 767762 - RNA, 19 nt, Artificial Sequence
  Description of Artificial Sequence: Synthetic oligonucleotide
auuugguccaaaccauucg

SEQ ID NO: 767763 - RNA, 19 nt, Artificial Sequence
  Description of Artificial Sequence: Synthetic oligonucleotide
uauguaaaccauagacgag

SEQ ID NO: 767764 - RNA, 19 nt, Artificial Sequence
  Description of Artificial Sequence: Synthetic oligonucleotide
aacaagaguauuucucccu

SEQ ID NO: 767765 - RNA, 19 nt, Artificial Sequence
  Description of Artificial Sequence: Synthetic oligonucleotide
uugauuugguuuaugccca

SEQ ID NO: 767766 - RNA, 19 nt, Artificial Sequence
  Description of Artificial Sequence: Synthetic oligonucleotide
uucuccuacacccauuugu

SEQ ID NO: 767767 - RNA, 19 nt, Artificial Sequence
  Description of Artificial Sequence: Synthetic oligonucleotide
ugugccauuugauggauug

SEQ ID NO: 767768 - RNA, 19 nt, Artificial Sequence
  Description of Artificial Sequence: Synthetic oligonucleotide
ugaguucguaugcuguugg

SEQ ID NO: 767769 - RNA, 19 nt, Artificial Sequence
  Description of Artificial Sequence: Synthetic oligonucleotide
acuaauucaaacauccuca

SEQ ID NO: 767770 - RNA, 19 nt, Artificial Sequence
  Description of Artificial Sequence: Synthetic oligonucleotide
cacagcgcagcauacaucc

SEQ ID NO: 767771 - RNA, 19 nt, Artificial Sequence
  Description of Artificial Sequence: Synthetic oligonucleotide
auuauuugaucaagaaaac

SEQ ID NO: 767772 - RNA, 19 nt, Artificial Sequence
  Description of Artificial Sequence: Synthetic oligonucleotide
aauucugcgccugugguug

SEQ ID NO: 767773 - RNA, 19 nt, Artificial Sequence
  Description of Artificial Sequence: Synthetic oligonucleotide
cauucaucaaauaaagcga

SEQ ID NO: 767774 - RNA, 19 nt, Artificial Sequence
  Description of Artificial Sequence: Synthetic oligonucleotide
aaggcuacaccaauuauca

SEQ ID NO: 767775 - RNA, 19 nt, Artificial Sequence
  Description of Artificial Sequence: Synthetic oligonucleotide
auugcuauugaguucguau

SEQ ID NO: 767776 - RNA, 19 nt, Artificial Sequence
  Description of Artificial Sequence: Synthetic oligonucleotide
ugcuauugaguucguaugc

SEQ ID NO: 767777 - RNA, 19 nt, Artificial Sequence
  Description of Artificial Sequence: Synthetic oligonucleotide
gacauaacugacuccauuc

SEQ ID NO: 767778 - RNA, 19 nt, Artificial Sequence
  Description of Artificial Sequence: Synthetic oligonucleotide
uauugaguucguaugcugu

SEQ ID NO: 767779 - RNA, 19 nt, Artificial Sequence
  Description of Artificial Sequence: Synthetic oligonucleotide
uauccgggaauucuucuag

SEQ ID NO: 767780 - RNA, 19 nt, Artificial Sequence
  Description of Artificial Sequence: Synthetic oligonucleotide
uuuaugcccaggcgaaggg

SEQ ID NO: 767781 - RNA, 19 nt, Artificial Sequence
  Description of Artificial Sequence: Synthetic oligonucleotide
ucaguaaggguggagacug

SEQ ID NO: 767782 - RNA, 19 nt, Artificial Sequence
  Description of Artificial Sequence: Synthetic oligonucleotide
uuucuaucuaggaaacacu

SEQ ID NO: 767783 - RNA, 19 nt, Artificial Sequence
  Description of Artificial Sequence: Synthetic oligonucleotide
uccuacacccauuugugcc

SEQ ID NO: 767784 - RNA, 19 nt, Artificial Sequence
  Description of Artificial Sequence: Synthetic oligonucleotide
uguauuugguccaaaccau

SEQ ID NO: 767785 - RNA, 19 nt, Artificial Sequence
  Description of Artificial Sequence: Synthetic oligonucleotide
aaugcgauggguguuucug

SEQ ID NO: 767786 - RNA, 19 nt, Artificial Sequence
  Description of Artificial Sequence: Synthetic oligonucleotide
agcucaucaccuaagaauc

SEQ ID NO: 767787 - RNA, 19 nt, Artificial Sequence
  Description of Artificial Sequence: Synthetic oligonucleotide
uugcuauugaguucguaug

SEQ ID NO: 767788 - RNA, 19 nt, Artificial Sequence
  Description of Artificial Sequence: Synthetic oligonucleotide
ucuccuacacccauuugug

SEQ ID NO: 767789 - RNA, 19 nt, Artificial Sequence
  Description of Artificial Sequence: Synthetic oligonucleotide
ucaucgucuacuauuccac

SEQ ID NO: 767790 - RNA, 19 nt, Artificial Sequence
  Description of Artificial Sequence: Synthetic oligonucleotide
gauggauugaauagcaaca

SEQ ID NO: 767791 - RNA, 19 nt, Artificial Sequence
  Description of Artificial Sequence: Synthetic oligonucleotide
cuaucuuacacacucagaa

SEQ ID NO: 767792 - RNA, 19 nt, Artificial Sequence
  Description of Artificial Sequence: Synthetic oligonucleotide
aagagguguacguuugaca

SEQ ID NO: 767793 - RNA, 19 nt, Artificial Sequence
  Description of Artificial Sequence: Synthetic oligonucleotide
ucauguugaguucucacua

SEQ ID NO: 767794 - RNA, 19 nt, Artificial Sequence
  Description of Artificial Sequence: Synthetic oligonucleotide
uccuucuguauguaaacca

SEQ ID NO: 767795 - RNA, 19 nt, Artificial Sequence
  Description of Artificial Sequence: Synthetic oligonucleotide
uucaggauacucauucgcu

SEQ ID NO: 767796 - RNA, 19 nt, Artificial Sequence
  Description of Artificial Sequence: Synthetic oligonucleotide
uuuaacaccugugcaacug

SEQ ID NO: 767797 - RNA, 19 nt, Artificial Sequence
  Description of Artificial Sequence: Synthetic oligonucleotide
uguaaaccauagacgagca

SEQ ID NO: 767798 - RNA, 19 nt, Artificial Sequence
  Description of Artificial Sequence: Synthetic oligonucleotide
auagacgagcacuuauauc

SEQ ID NO: 767799 - RNA, 19 nt, Artificial Sequence
  Description of Artificial Sequence: Synthetic oligonucleotide
cugcuaaagacuuacuguc

SEQ ID NO: 767800 - RNA, 19 nt, Artificial Sequence
  Description of Artificial Sequence: Synthetic oligonucleotide
uguugaguucucacuaucu

SEQ ID NO: 767801 - RNA, 19 nt, Artificial Sequence
  Description of Artificial Sequence: Synthetic oligonucleotide
uacguuugacaucauuucu

SEQ ID NO: 767802 - RNA, 19 nt, Artificial Sequence
  Description of Artificial Sequence: Synthetic oligonucleotide
uuuucuguuuaggguaugg

SEQ ID NO: 767803 - RNA, 19 nt, Artificial Sequence
  Description of Artificial Sequence: Synthetic oligonucleotide
ugcuaaagacuuacugucc

SEQ ID NO: 767804 - RNA, 19 nt, Artificial Sequence
  Description of Artificial Sequence: Synthetic oligonucleotide
ucaggauacucauucgcug

SEQ ID NO: 767805 - RNA, 19 nt, Artificial Sequence
  Description of Artificial Sequence: Synthetic oligonucleotide
aacaaagaccacauggccu

SEQ ID NO: 767806 - RNA, 19 nt, Artificial Sequence
  Description of Artificial Sequence: Synthetic oligonucleotide
uuuauguaacaaguucuug

SEQ ID NO: 767807 - RNA, 19 nt, Artificial Sequence
  Description of Artificial Sequence: Synthetic oligonucleotide
cuucuccuagauuccaugg

SEQ ID NO: 767808 - RNA, 19 nt, Artificial Sequence
  Description of Artificial Sequence: Synthetic oligonucleotide
cauccaucaguaagggugg

SEQ ID NO: 767809 - RNA, 19 nt, Artificial Sequence
  Description of Artificial Sequence: Synthetic oligonucleotide
uaugaaauaauaggcguua

SEQ ID NO: 767810 - RNA, 19 nt, Artificial Sequence
  Description of Artificial Sequence: Synthetic oligonucleotide
uugaauagcaacagucuuu

SEQ ID NO: 767811 - RNA, 19 nt, Artificial Sequence
  Description of Artificial Sequence: Synthetic oligonucleotide
acauaaacagccaaggaau

SEQ ID NO: 767812 - RNA, 19 nt, Artificial Sequence
  Description of Artificial Sequence: Synthetic oligonucleotide
aucgucuacuauuccacuc

SEQ ID NO: 767813 - RNA, 19 nt, Artificial Sequence
  Description of Artificial Sequence: Synthetic oligonucleotide
agcacagaauaguuacaac

SEQ ID NO: 767814 - RNA, 19 nt, Artificial Sequence
  Description of Artificial Sequence: Synthetic oligonucleotide
agacaauuaagagguguac

SEQ ID NO: 767815 - RNA, 19 nt, Artificial Sequence
  Description of Artificial Sequence: Synthetic oligonucleotide
caaagccuaaaauauuauc

SEQ ID NO: 767816 - RNA, 19 nt, Artificial Sequence
  Description of Artificial Sequence: Synthetic oligonucleotide
acaagaguauuucucccug

SEQ ID NO: 767817 - RNA, 19 nt, Artificial Sequence
  Description of Artificial Sequence: Synthetic oligonucleotide
uagguagucagugaaaaua

SEQ ID NO: 767818 - RNA, 19 nt, Artificial Sequence
  Description of Artificial Sequence: Synthetic oligonucleotide
guucaggauacucauucgc

SEQ ID NO: 767819 - RNA, 19 nt, Artificial Sequence
  Description of Artificial Sequence: Synthetic oligonucleotide
ugaauucugcgccuguggu

SEQ ID NO: 767820 - RNA, 19 nt, Artificial Sequence
  Description of Artificial Sequence: Synthetic oligonucleotide
auugaauagcaacagucuu

SEQ ID NO: 767821 - RNA, 19 nt, Artificial Sequence
  Description of Artificial Sequence: Synthetic oligonucleotide
aaaccauucgccaauugau

SEQ ID NO: 767822 - RNA, 19 nt, Artificial Sequence
  Description of Artificial Sequence: Synthetic oligonucleotide
uaauaggcguuauuuggcu

SEQ ID NO: 767823 - RNA, 19 nt, Artificial Sequence
  Description of Artificial Sequence: Synthetic oligonucleotide
cauaauugcuauugaguuc

SEQ ID NO: 767824 - RNA, 19 nt, Artificial Sequence
  Description of Artificial Sequence: Synthetic oligonucleotide
gggaccuuuacccugacug

SEQ ID NO: 767825 - RNA, 19 nt, Artificial Sequence
  Description of Artificial Sequence: Synthetic oligonucleotide
ucgucuacuauuccacucu

SEQ ID NO: 767826 - RNA, 19 nt, Artificial Sequence
  Description of Artificial Sequence: Synthetic oligonucleotide
cuaagaagaugcugcuucc

SEQ ID NO: 767827 - RNA, 19 nt, Artificial Sequence
  Description of Artificial Sequence: Synthetic oligonucleotide
ucuguauguaaaccauaga

SEQ ID NO: 767828 - RNA, 19 nt, Artificial Sequence
  Description of Artificial Sequence: Synthetic oligonucleotide
aagaguauuucucccugau

SEQ ID NO: 767829 - RNA, 19 nt, Artificial Sequence
  Description of Artificial Sequence: Synthetic oligonucleotide
aagugucuacagauaaggg

SEQ ID NO: 767830 - RNA, 19 nt, Artificial Sequence
  Description of Artificial Sequence: Synthetic oligonucleotide
ucaucaaauaaagcgaguu

SEQ ID NO: 767831 - RNA, 19 nt, Artificial Sequence
  Description of Artificial Sequence: Synthetic oligonucleotide
ucuagguagucagugaaaa

SEQ ID NO: 767832 - RNA, 19 nt, Artificial Sequence
  Description of Artificial Sequence: Synthetic oligonucleotide
auguugaguucucacuauc

SEQ ID NO: 767833 - RNA, 19 nt, Artificial Sequence
  Description of Artificial Sequence: Synthetic oligonucleotide
gagcacuuauaucagacaa

SEQ ID NO: 767834 - RNA, 19 nt, Artificial Sequence
  Description of Artificial Sequence: Synthetic oligonucleotide
aaucggugaaaauuuccuu

SEQ ID NO: 767835 - RNA, 19 nt, Artificial Sequence
  Description of Artificial Sequence: Synthetic oligonucleotide
gaaauaauaggcguuauuu

SEQ ID NO: 767836 - RNA, 19 nt, Artificial Sequence
  Description of Artificial Sequence: Synthetic oligonucleotide
uugcugaccagaaaaguuu

SEQ ID NO: 767837 - RNA, 19 nt, Artificial Sequence
  Description of Artificial Sequence: Synthetic oligonucleotide
auccauaccagcucaucug

SEQ ID NO: 767838 - RNA, 19 nt, Artificial Sequence
  Description of Artificial Sequence: Synthetic oligonucleotide
acaggauugauuugguuua

SEQ ID NO: 767839 - RNA, 19 nt, Artificial Sequence
  Description of Artificial Sequence: Synthetic oligonucleotide
auaguaaucugguucucau

SEQ ID NO: 767840 - RNA, 19 nt, Artificial Sequence
  Description of Artificial Sequence: Synthetic oligonucleotide
acauaacugacuccauucu

SEQ ID NO: 767841 - RNA, 19 nt, Artificial Sequence
  Description of Artificial Sequence: Synthetic oligonucleotide
ugaaauaauaggcguuauu

SEQ ID NO: 767842 - RNA, 19 nt, Artificial Sequence
  Description of Artificial Sequence: Synthetic oligonucleotide
uuaacaccugugcaacugu

SEQ ID NO: 767843 - RNA, 19 nt, Artificial Sequence
  Description of Artificial Sequence: Synthetic oligonucleotide
ucuacagauaagggcuugg

SEQ ID NO: 767844 - RNA, 19 nt, Artificial Sequence
  Description of Artificial Sequence: Synthetic oligonucleotide
acgagcacuuauaucagac

SEQ ID NO: 767845 - RNA, 19 nt, Artificial Sequence
  Description of Artificial Sequence: Synthetic oligonucleotide
ugcucaguggagucuauga

SEQ ID NO: 767846 - RNA, 19 nt, Artificial Sequence
  Description of Artificial Sequence: Synthetic oligonucleotide
cagcaucagaugaagggcc

SEQ ID NO: 767847 - RNA, 19 nt, Artificial Sequence
  Description of Artificial Sequence: Synthetic oligonucleotide
agaccuucauguugaguuc

SEQ ID NO: 767848 - RNA, 19 nt, Artificial Sequence
  Description of Artificial Sequence: Synthetic oligonucleotide
caaaaggaggccaaugcga

SEQ ID NO: 767849 - RNA, 19 nt, Artificial Sequence
  Description of Artificial Sequence: Synthetic oligonucleotide
uacuauguagggcugcuuu

SEQ ID NO: 767850 - RNA, 19 nt, Artificial Sequence
  Description of Artificial Sequence: Synthetic oligonucleotide
ugugguugucacuuccggc

SEQ ID NO: 767851 - RNA, 19 nt, Artificial Sequence
  Description of Artificial Sequence: Synthetic oligonucleotide
uucgcuguggagacugcag

SEQ ID NO: 767852 - RNA, 19 nt, Artificial Sequence
  Description of Artificial Sequence: Synthetic oligonucleotide
auaauuuaacaagaguauu

SEQ ID NO: 767853 - RNA, 19 nt, Artificial Sequence
  Description of Artificial Sequence: Synthetic oligonucleotide
ugguuugacuuaaggauau

SEQ ID NO: 767854 - RNA, 19 nt, Artificial Sequence
  Description of Artificial Sequence: Synthetic oligonucleotide
caugguuugacuuaaggau

SEQ ID NO: 767855 - RNA, 19 nt, Artificial Sequence
  Description of Artificial Sequence: Synthetic oligonucleotide
cuauugaguucguaugcug

SEQ ID NO: 767856 - RNA, 19 nt, Artificial Sequence
  Description of Artificial Sequence: Synthetic oligonucleotide
agguguacguuugacauca

SEQ ID NO: 767857 - RNA, 19 nt, Artificial Sequence
  Description of Artificial Sequence: Synthetic oligonucleotide
cguuauuuggcuuuccucc

SEQ ID NO: 767858 - RNA, 19 nt, Artificial Sequence
  Description of Artificial Sequence: Synthetic oligonucleotide
guuuaugcccaggcgaagg

SEQ ID NO: 767859 - RNA, 19 nt, Artificial Sequence
  Description of Artificial Sequence: Synthetic oligonucleotide
uucuccuagauuccauggu

SEQ ID NO: 767860 - RNA, 19 nt, Artificial Sequence
  Description of Artificial Sequence: Synthetic oligonucleotide
ucuccuagauuccaugguu

SEQ ID NO: 767861 - RNA, 19 nt, Artificial Sequence
  Description of Artificial Sequence: Synthetic oligonucleotide
uccccaagauccauaccag

SEQ ID NO: 767862 - RNA, 19 nt, Artificial Sequence
  Description of Artificial Sequence: Synthetic oligonucleotide
auuaagagguguacguuug

SEQ ID NO: 767863 - RNA, 19 nt, Artificial Sequence
  Description of Artificial Sequence: Synthetic oligonucleotide
agcacuuauaucagacaac

SEQ ID NO: 767864 - RNA, 19 nt, Artificial Sequence
  Description of Artificial Sequence: Synthetic oligonucleotide
uggccuacaaagccuaaaa

SEQ ID NO: 767865 - RNA, 19 nt, Artificial Sequence
  Description of Artificial Sequence: Synthetic oligonucleotide
augaccaccguguuaucca

SEQ ID NO: 767866 - RNA, 19 nt, Artificial Sequence
  Description of Artificial Sequence: Synthetic oligonucleotide
gcuaaagacuuacuguccc

SEQ ID NO: 767867 - RNA, 19 nt, Artificial Sequence
  Description of Artificial Sequence: Synthetic oligonucleotide
uguauccgggaauucuucu

SEQ ID NO: 767868 - RNA, 19 nt, Artificial Sequence
  Description of Artificial Sequence: Synthetic oligonucleotide
accuaagaauccuaugaaa

SEQ ID NO: 767869 - RNA, 19 nt, Artificial Sequence
  Description of Artificial Sequence: Synthetic oligonucleotide
aucaccuaagaauccuaug

SEQ ID NO: 767870 - RNA, 19 nt, Artificial Sequence
  Description of Artificial Sequence: Synthetic oligonucleotide
ugguuuaugcccaggcgaa

SEQ ID NO: 767871 - RNA, 19 nt, Artificial Sequence
  Description of Artificial Sequence: Synthetic oligonucleotide
aaucagcucaucaccuaag

SEQ ID NO: 767872 - RNA, 19 nt, Artificial Sequence
  Description of Artificial Sequence: Synthetic oligonucleotide
ugcauacuauguagggcug

SEQ ID NO: 767873 - RNA, 19 nt, Artificial Sequence
  Description of Artificial Sequence: Synthetic oligonucleotide
aagacaauuaagaggugua

SEQ ID NO: 767874 - RNA, 19 nt, Artificial Sequence
  Description of Artificial Sequence: Synthetic oligonucleotide
uauuuggcuuuccuccuaa

SEQ ID NO: 767875 - RNA, 19 nt, Artificial Sequence
  Description of Artificial Sequence: Synthetic oligonucleotide
caaaccauucgccaauuga

SEQ ID NO: 767876 - RNA, 19 nt, Artificial Sequence
  Description of Artificial Sequence: Synthetic oligonucleotide
ugucacuuccggcuuggcu

SEQ ID NO: 767877 - RNA, 19 nt, Artificial Sequence
  Description of Artificial Sequence: Synthetic oligonucleotide
auaggcguuauuuggcuuu

SEQ ID NO: 767878 - RNA, 19 nt, Artificial Sequence
  Description of Artificial Sequence: Synthetic oligonucleotide
uucuagguagucagugaaa

SEQ ID NO: 767879 - RNA, 19 nt, Artificial Sequence
  Description of Artificial Sequence: Synthetic oligonucleotide
uucgccaauugauuucccu

SEQ ID NO: 767880 - RNA, 19 nt, Artificial Sequence
  Description of Artificial Sequence: Synthetic oligonucleotide
cucaucgucuacuauucca

SEQ ID NO: 767881 - RNA, 19 nt, Artificial Sequence
  Description of Artificial Sequence: Synthetic oligonucleotide
uccgggaauucuucuaggu

SEQ ID NO: 767882 - RNA, 19 nt, Artificial Sequence
  Description of Artificial Sequence: Synthetic oligonucleotide
accauucgccaauugauuu

SEQ ID NO: 767883 - RNA, 19 nt, Artificial Sequence
  Description of Artificial Sequence: Synthetic oligonucleotide
ucucaucgucuacuauucc

SEQ ID NO: 767884 - RNA, 19 nt, Artificial Sequence
  Description of Artificial Sequence: Synthetic oligonucleotide
uaagagguguacguuugac

SEQ ID NO: 767885 - RNA, 19 nt, Artificial Sequence
  Description of Artificial Sequence: Synthetic oligonucleotide
ugauuugguuuaugcccag

SEQ ID NO: 767886 - RNA, 19 nt, Artificial Sequence
  Description of Artificial Sequence: Synthetic oligonucleotide
gauggaaggcagaagaccu

SEQ ID NO: 767887 - RNA, 19 nt, Artificial Sequence
  Description of Artificial Sequence: Synthetic oligonucleotide
ugccauuugauggauugaa

SEQ ID NO: 767888 - RNA, 19 nt, Artificial Sequence
  Description of Artificial Sequence: Synthetic oligonucleotide
uucuuaguacuugucccca

SEQ ID NO: 767889 - RNA, 19 nt, Artificial Sequence
  Description of Artificial Sequence: Synthetic oligonucleotide
uugaguucguaugcuguug

SEQ ID NO: 767890 - RNA, 19 nt, Artificial Sequence
  Description of Artificial Sequence: Synthetic oligonucleotide
cuucugaacaaggcuacac

SEQ ID NO: 767891 - RNA, 19 nt, Artificial Sequence
  Description of Artificial Sequence: Synthetic oligonucleotide
gaggccaaugcgaugggug

SEQ ID NO: 767892 - RNA, 19 nt, Artificial Sequence
  Description of Artificial Sequence: Synthetic oligonucleotide
ucgcuguggagacugcaga

SEQ ID NO: 767893 - RNA, 19 nt, Artificial Sequence
  Description of Artificial Sequence: Synthetic oligonucleotide
auugaguucguaugcuguu

SEQ ID NO: 767894 - RNA, 19 nt, Artificial Sequence
  Description of Artificial Sequence: Synthetic oligonucleotide
uauguagggcugcuuuuau

SEQ ID NO: 767895 - RNA, 19 nt, Artificial Sequence
  Description of Artificial Sequence: Synthetic oligonucleotide
cagcgcagcauacaucccc

SEQ ID NO: 767896 - RNA, 19 nt, Artificial Sequence
  Description of Artificial Sequence: Synthetic oligonucleotide
uacuuguccccaaguacaa

SEQ ID NO: 767897 - RNA, 19 nt, Artificial Sequence
  Description of Artificial Sequence: Synthetic oligonucleotide
aguucguaugcuguuggca

SEQ ID NO: 767898 - RNA, 19 nt, Artificial Sequence
  Description of Artificial Sequence: Synthetic oligonucleotide
gucauaauugcuauugagu

SEQ ID NO: 767899 - RNA, 19 nt, Artificial Sequence
  Description of Artificial Sequence: Synthetic oligonucleotide
uaggguaugguuggugcca

SEQ ID NO: 767900 - RNA, 19 nt, Artificial Sequence
  Description of Artificial Sequence: Synthetic oligonucleotide
ggcuacaccaauuaucaaa

SEQ ID NO: 767901 - RNA, 19 nt, Artificial Sequence
  Description of Artificial Sequence: Synthetic oligonucleotide
guacaaaaggaggccaaug

SEQ ID NO: 767902 - RNA, 19 nt, Artificial Sequence
  Description of Artificial Sequence: Synthetic oligonucleotide
ggaccuuuacccugacugg

SEQ ID NO: 767903 - RNA, 19 nt, Artificial Sequence
  Description of Artificial Sequence: Synthetic oligonucleotide
aaucccuucccaagugucu

SEQ ID NO: 767904 - RNA, 19 nt, Artificial Sequence
  Description of Artificial Sequence: Synthetic oligonucleotide
agacuguggcaucuuaaaa

SEQ ID NO: 767905 - RNA, 19 nt, Artificial Sequence
  Description of Artificial Sequence: Synthetic oligonucleotide
agauccauaccagcucauc

SEQ ID NO: 767906 - RNA, 19 nt, Artificial Sequence
  Description of Artificial Sequence: Synthetic oligonucleotide
uggcucagucauaauugcu

SEQ ID NO: 767907 - RNA, 19 nt, Artificial Sequence
  Description of Artificial Sequence: Synthetic oligonucleotide
aucuguauccgggaauucu

SEQ ID NO: 767908 - RNA, 19 nt, Artificial Sequence
  Description of Artificial Sequence: Synthetic oligonucleotide
gaagaugcugcuuccccaa

SEQ ID NO: 767909 - RNA, 19 nt, Artificial Sequence
  Description of Artificial Sequence: Synthetic oligonucleotide
uuauuuggcuuuccuccua

SEQ ID NO: 767910 - RNA, 19 nt, Artificial Sequence
  Description of Artificial Sequence: Synthetic oligonucleotide
guaugcuguuggcauauca

SEQ ID NO: 767911 - RNA, 19 nt, Artificial Sequence
  Description of Artificial Sequence: Synthetic oligonucleotide
caaucccuucccaaguguc

SEQ ID NO: 767912 - RNA, 19 nt, Artificial Sequence
  Description of Artificial Sequence: Synthetic oligonucleotide
cuccuacacccauuugugc

SEQ ID NO: 767913 - RNA, 19 nt, Artificial Sequence
  Description of Artificial Sequence: Synthetic oligonucleotide
ucgccaauugauuucccuu

SEQ ID NO: 767914 - RNA, 19 nt, Artificial Sequence
  Description of Artificial Sequence: Synthetic oligonucleotide
aguuugcucaccucugauu

SEQ ID NO: 767915 - RNA, 19 nt, Artificial Sequence
  Description of Artificial Sequence: Synthetic oligonucleotide
gaguucguaugcuguuggc

SEQ ID NO: 767916 - RNA, 19 nt, Artificial Sequence
  Description of Artificial Sequence: Synthetic oligonucleotide
gaaagucucaucgucuacu

SEQ ID NO: 767917 - RNA, 19 nt, Artificial Sequence
  Description of Artificial Sequence: Synthetic oligonucleotide
acuauguagggcugcuuuu

SEQ ID NO: 767918 - RNA, 19 nt, Artificial Sequence
  Description of Artificial Sequence: Synthetic oligonucleotide
aucaguaaggguggagacu

SEQ ID NO: 767919 - RNA, 19 nt, Artificial Sequence
  Description of Artificial Sequence: Synthetic oligonucleotide
uaguaaucugguucucaua

SEQ ID NO: 767920 - RNA, 19 nt, Artificial Sequence
  Description of Artificial Sequence: Synthetic oligonucleotide
guuuaggguaugguuggug

SEQ ID NO: 767921 - RNA, 19 nt, Artificial Sequence
  Description of Artificial Sequence: Synthetic oligonucleotide
uccaucaguaaggguggag

SEQ ID NO: 767922 - RNA, 19 nt, Artificial Sequence
  Description of Artificial Sequence: Synthetic oligonucleotide
agaauccuaugaaauaaua

SEQ ID NO: 767923 - RNA, 19 nt, Artificial Sequence
  Description of Artificial Sequence: Synthetic oligonucleotide
cuguauccgggaauucuuc

SEQ ID NO: 767924 - RNA, 19 nt, Artificial Sequence
  Description of Artificial Sequence: Synthetic oligonucleotide
uguggagacugcagacagu

SEQ ID NO: 767925 - RNA, 19 nt, Artificial Sequence
  Description of Artificial Sequence: Synthetic oligonucleotide
ccguguuauccauugaaac

SEQ ID NO: 767926 - RNA, 19 nt, Artificial Sequence
  Description of Artificial Sequence: Synthetic oligonucleotide
ucuuaguacuuguccccaa

SEQ ID NO: 767927 - RNA, 19 nt, Artificial Sequence
  Description of Artificial Sequence: Synthetic oligonucleotide
gucucaucgucuacuauuc

SEQ ID NO: 767928 - RNA, 19 nt, Artificial Sequence
  Description of Artificial Sequence: Synthetic oligonucleotide
guaaaccauagacgagcac

SEQ ID NO: 767929 - RNA, 19 nt, Artificial Sequence
  Description of Artificial Sequence: Synthetic oligonucleotide
aaccauucgccaauugauu

SEQ ID NO: 767930 - RNA, 19 nt, Artificial Sequence
  Description of Artificial Sequence: Synthetic oligonucleotide
uguccacagcgcagcauac

SEQ ID NO: 767931 - RNA, 19 nt, Artificial Sequence
  Description of Artificial Sequence: Synthetic oligonucleotide
acuaucuuacacacucaga

SEQ ID NO: 767932 - RNA, 19 nt, Artificial Sequence
  Description of Artificial Sequence: Synthetic oligonucleotide
gacgagcacuuauaucaga

SEQ ID NO: 767933 - RNA, 19 nt, Artificial Sequence
  Description of Artificial Sequence: Synthetic oligonucleotide
aauugcuauugaguucgua

SEQ ID NO: 767934 - RNA, 19 nt, Artificial Sequence
  Description of Artificial Sequence: Synthetic oligonucleotide
uucguaugcuguuggcaua

SEQ ID NO: 767935 - RNA, 19 nt, Artificial Sequence
  Description of Artificial Sequence: Synthetic oligonucleotide
guuauuuggcuuuccuccu

SEQ ID NO: 767936 - RNA, 19 nt, Artificial Sequence
  Description of Artificial Sequence: Synthetic oligonucleotide
gaccuuuacccugacugga

SEQ ID NO: 767937 - RNA, 19 nt, Artificial Sequence
  Description of Artificial Sequence: Synthetic oligonucleotide
aaacacucuuugaaugcuu

SEQ ID NO: 767938 - RNA, 19 nt, Artificial Sequence
  Description of Artificial Sequence: Synthetic oligonucleotide
guacaaccaucucucaucu

SEQ ID NO: 767939 - RNA, 19 nt, Artificial Sequence
  Description of Artificial Sequence: Synthetic oligonucleotide
ugcucaccucugauucaag

SEQ ID NO: 767940 - RNA, 19 nt, Artificial Sequence
  Description of Artificial Sequence: Synthetic oligonucleotide
gcauaucaggcacuugcug

SEQ ID NO: 767941 - RNA, 19 nt, Artificial Sequence
  Description of Artificial Sequence: Synthetic oligonucleotide
guucguaugcuguuggcau

SEQ ID NO: 767942 - RNA, 19 nt, Artificial Sequence
  Description of Artificial Sequence: Synthetic oligonucleotide
caccuaagaauccuaugaa

SEQ ID NO: 767943 - RNA, 19 nt, Artificial Sequence
  Description of Artificial Sequence: Synthetic oligonucleotide
uacaaccaucucucaucug

SEQ ID NO: 767944 - RNA, 19 nt, Artificial Sequence
  Description of Artificial Sequence: Synthetic oligonucleotide
uugcucaccucugauucaa

SEQ ID NO: 767945 - RNA, 19 nt, Artificial Sequence
  Description of Artificial Sequence: Synthetic oligonucleotide
uaauugcuauugaguucgu

SEQ ID NO: 767946 - RNA, 19 nt, Artificial Sequence
  Description of Artificial Sequence: Synthetic oligonucleotide
ucguaugcuguuggcauau

SEQ ID NO: 767947 - RNA, 19 nt, Artificial Sequence
  Description of Artificial Sequence: Synthetic oligonucleotide
auucgccaauugauuuccc

SEQ ID NO: 767948 - RNA, 19 nt, Artificial Sequence
  Description of Artificial Sequence: Synthetic oligonucleotide
cagugauuuggugccacug

SEQ ID NO: 767949 - RNA, 19 nt, Artificial Sequence
  Description of Artificial Sequence: Synthetic oligonucleotide
ggauacucauucgcugugg

SEQ ID NO: 767950 - RNA, 19 nt, Artificial Sequence
  Description of Artificial Sequence: Synthetic oligonucleotide
augaaauaauaggcguuau

SEQ ID NO: 767951 - RNA, 19 nt, Artificial Sequence
  Description of Artificial Sequence: Synthetic oligonucleotide
cuaugaaauaauaggcguu

SEQ ID NO: 767952 - RNA, 19 nt, Artificial Sequence
  Description of Artificial Sequence: Synthetic oligonucleotide
caagaguauuucucccuga

SEQ ID NO: 767953 - RNA, 19 nt, Artificial Sequence
  Description of Artificial Sequence: Synthetic oligonucleotide
gaauuccauucaucaaaua

SEQ ID NO: 767954 - RNA, 19 nt, Artificial Sequence
  Description of Artificial Sequence: Synthetic oligonucleotide
acguuugacaucauuucuu

SEQ ID NO: 767955 - RNA, 19 nt, Artificial Sequence
  Description of Artificial Sequence: Synthetic oligonucleotide
gucuacuauuccacucucc

SEQ ID NO: 767956 - RNA, 19 nt, Artificial Sequence
  Description of Artificial Sequence: Synthetic oligonucleotide
ugaccaccguguuauccau

SEQ ID NO: 767957 - RNA, 19 nt, Artificial Sequence
  Description of Artificial Sequence: Synthetic oligonucleotide
cuuccccaagauccauacc

SEQ ID NO: 767958 - RNA, 19 nt, Artificial Sequence
  Description of Artificial Sequence: Synthetic oligonucleotide
caccguguuauccauugaa

SEQ ID NO: 767959 - RNA, 19 nt, Artificial Sequence
  Description of Artificial Sequence: Synthetic oligonucleotide
cgaaggggcacaaugagca

SEQ ID NO: 767960 - RNA, 19 nt, Artificial Sequence
  Description of Artificial Sequence: Synthetic oligonucleotide
cguguuauccauugaaaca

SEQ ID NO: 767961 - RNA, 19 nt, Artificial Sequence
  Description of Artificial Sequence: Synthetic oligonucleotide
guaaggguggagacuguga

SEQ ID NO: 767962 - RNA, 19 nt, Artificial Sequence
  Description of Artificial Sequence: Synthetic oligonucleotide
auuuggugccacugauuuu

SEQ ID NO: 767963 - RNA, 19 nt, Artificial Sequence
  Description of Artificial Sequence: Synthetic oligonucleotide
ccugugguugucacuuccg

SEQ ID NO: 767964 - RNA, 19 nt, Artificial Sequence
  Description of Artificial Sequence: Synthetic oligonucleotide
accguguuauccauugaaa

SEQ ID NO: 767965 - RNA, 19 nt, Artificial Sequence
  Description of Artificial Sequence: Synthetic oligonucleotide
ccaaggaauuccauucauc

SEQ ID NO: 767966 - RNA, 19 nt, Artificial Sequence
  Description of Artificial Sequence: Synthetic oligonucleotide
agccagcaucagaugaagg

SEQ ID NO: 767967 - RNA, 19 nt, Artificial Sequence
  Description of Artificial Sequence: Synthetic oligonucleotide
guauccgggaauucuucua

SEQ ID NO: 767968 - RNA, 19 nt, Artificial Sequence
  Description of Artificial Sequence: Synthetic oligonucleotide
uuccuccuaaagccccuaa

SEQ ID NO: 767969 - RNA, 19 nt, Artificial Sequence
  Description of Artificial Sequence: Synthetic oligonucleotide
acagcgcagcauacauccc

SEQ ID NO: 767970 - RNA, 19 nt, Artificial Sequence
  Description of Artificial Sequence: Synthetic oligonucleotide
aggcguuauuuggcuuucc

SEQ ID NO: 767971 - RNA, 19 nt, Artificial Sequence
  Description of Artificial Sequence: Synthetic oligonucleotide
auguagggcugcuuuuaua

SEQ ID NO: 767972 - RNA, 19 nt, Artificial Sequence
  Description of Artificial Sequence: Synthetic oligonucleotide
uaauuggcucagucauaau

SEQ ID NO: 767973 - RNA, 19 nt, Artificial Sequence
  Description of Artificial Sequence: Synthetic oligonucleotide
ccagcugcuaaagacuuac

SEQ ID NO: 767974 - RNA, 19 nt, Artificial Sequence
  Description of Artificial Sequence: Synthetic oligonucleotide
guaaucugguucucauacu

SEQ ID NO: 767975 - RNA, 19 nt, Artificial Sequence
  Description of Artificial Sequence: Synthetic oligonucleotide
agcaucagaugaagggccu

SEQ ID NO: 767976 - RNA, 19 nt, Artificial Sequence
  Description of Artificial Sequence: Synthetic oligonucleotide
gcguuauuuggcuuuccuc

SEQ ID NO: 767977 - RNA, 19 nt, Artificial Sequence
  Description of Artificial Sequence: Synthetic oligonucleotide
caggauacucauucgcugu

SEQ ID NO: 767978 - RNA, 19 nt, Artificial Sequence
  Description of Artificial Sequence: Synthetic oligonucleotide
cuaggaaacacugcaguau

SEQ ID NO: 767979 - RNA, 19 nt, Artificial Sequence
  Description of Artificial Sequence: Synthetic oligonucleotide
gaaggcagaagaccuucau

SEQ ID NO: 767980 - RNA, 19 nt, Artificial Sequence
  Description of Artificial Sequence: Synthetic oligonucleotide
ucugcgccugugguuguca

SEQ ID NO: 767981 - RNA, 19 nt, Artificial Sequence
  Description of Artificial Sequence: Synthetic oligonucleotide
cauaccagcucaucuguau

SEQ ID NO: 767982 - RNA, 19 nt, Artificial Sequence
  Description of Artificial Sequence: Synthetic oligonucleotide
agccagauggaaggcagaa

SEQ ID NO: 767983 - RNA, 19 nt, Artificial Sequence
  Description of Artificial Sequence: Synthetic oligonucleotide
aggcgaaggggcacaauga

SEQ ID NO: 767984 - RNA, 19 nt, Artificial Sequence
  Description of Artificial Sequence: Synthetic oligonucleotide
ucucccugauucacuuauu

SEQ ID NO: 767985 - RNA, 19 nt, Artificial Sequence
  Description of Artificial Sequence: Synthetic oligonucleotide
gguccaaaccauucgccaa

SEQ ID NO: 767986 - RNA, 19 nt, Artificial Sequence
  Description of Artificial Sequence: Synthetic oligonucleotide
agcgcagcauacaucccca

SEQ ID NO: 767987 - RNA, 19 nt, Artificial Sequence
  Description of Artificial Sequence: Synthetic oligonucleotide
ccuaaagccccuaaagacu

SEQ ID NO: 767988 - RNA, 19 nt, Artificial Sequence
  Description of Artificial Sequence: Synthetic oligonucleotide
auaagggcuugggccagca

SEQ ID NO: 767989 - RNA, 19 nt, Artificial Sequence
  Description of Artificial Sequence: Synthetic oligonucleotide
ccuacuccuuuacagaaaa

SEQ ID NO: 767990 - RNA, 19 nt, Artificial Sequence
  Description of Artificial Sequence: Synthetic oligonucleotide
auggccuacaaagccuaaa

SEQ ID NO: 767991 - RNA, 19 nt, Artificial Sequence
  Description of Artificial Sequence: Synthetic oligonucleotide
cuauguagggcugcuuuua

SEQ ID NO: 767992 - RNA, 19 nt, Artificial Sequence
  Description of Artificial Sequence: Synthetic oligonucleotide
caucaccuaagaauccuau

SEQ ID NO: 767993 - RNA, 19 nt, Artificial Sequence
  Description of Artificial Sequence: Synthetic oligonucleotide
aggcuacaccaauuaucaa

SEQ ID NO: 767994 - RNA, 19 nt, Artificial Sequence
  Description of Artificial Sequence: Synthetic oligonucleotide
gcauacuauguagggcugc

SEQ ID NO: 767995 - RNA, 19 nt, Artificial Sequence
  Description of Artificial Sequence: Synthetic oligonucleotide
ccccaagauccauaccagc

SEQ ID NO: 767996 - RNA, 19 nt, Artificial Sequence
  Description of Artificial Sequence: Synthetic oligonucleotide
gguuuaugcccaggcgaag

SEQ ID NO: 767997 - RNA, 19 nt, Artificial Sequence
  Description of Artificial Sequence: Synthetic oligonucleotide
gcucaucaccuaagaaucc

SEQ ID NO: 767998 - RNA, 19 nt, Artificial Sequence
  Description of Artificial Sequence: Synthetic oligonucleotide
cucaucaccuaagaauccu

SEQ ID NO: 767999 - RNA, 19 nt, Artificial Sequence
  Description of Artificial Sequence: Synthetic oligonucleotide
aucccuucccaagugucua

SEQ ID NO: 768000 - RNA, 19 nt, Artificial Sequence
  Description of Artificial Sequence: Synthetic oligonucleotide
gacuuacuguccccaugua

SEQ ID NO: 768001 - RNA, 19 nt, Artificial Sequence
  Description of Artificial Sequence: Synthetic oligonucleotide
auucugcgccugugguugu

SEQ ID NO: 768002 - RNA, 19 nt, Artificial Sequence
  Description of Artificial Sequence: Synthetic oligonucleotide
caucuguauccgggaauuc

SEQ ID NO: 768003 - RNA, 19 nt, Artificial Sequence
  Description of Artificial Sequence: Synthetic oligonucleotide
gcgaaggggcacaaugagc

SEQ ID NO: 768004 - RNA, 19 nt, Artificial Sequence
  Description of Artificial Sequence: Synthetic oligonucleotide
accuuuacccugacuggaa

SEQ ID NO: 768005 - RNA, 19 nt, Artificial Sequence
  Description of Artificial Sequence: Synthetic oligonucleotide
cuagguagucagugaaaau

SEQ ID NO: 768006 - RNA, 19 nt, Artificial Sequence
  Description of Artificial Sequence: Synthetic oligonucleotide
gugcucaguggagucuaug

SEQ ID NO: 768007 - RNA, 19 nt, Artificial Sequence
  Description of Artificial Sequence: Synthetic oligonucleotide
accuacuccuuuacagaaa

SEQ ID NO: 768008 - RNA, 19 nt, Artificial Sequence
  Description of Artificial Sequence: Synthetic oligonucleotide
ugggagcaauggauuccua

SEQ ID NO: 768009 - RNA, 19 nt, Artificial Sequence
  Description of Artificial Sequence: Synthetic oligonucleotide
caucgucuacuauuccacu

SEQ ID NO: 768010 - RNA, 19 nt, Artificial Sequence
  Description of Artificial Sequence: Synthetic oligonucleotide
cauacuauguagggcugcu

SEQ ID NO: 768011 - RNA, 19 nt, Artificial Sequence
  Description of Artificial Sequence: Synthetic oligonucleotide
cugcgccugugguugucac

SEQ ID NO: 768012 - RNA, 19 nt, Artificial Sequence
  Description of Artificial Sequence: Synthetic oligonucleotide
ccaauugauuucccuucuc

SEQ ID NO: 768013 - RNA, 19 nt, Artificial Sequence
  Description of Artificial Sequence: Synthetic oligonucleotide
gguuugacuuaaggauaug

SEQ ID NO: 768014 - RNA, 19 nt, Artificial Sequence
  Description of Artificial Sequence: Synthetic oligonucleotide
uccggcuuggcuggaggua

SEQ ID NO: 768015 - RNA, 19 nt, Artificial Sequence
  Description of Artificial Sequence: Synthetic oligonucleotide
cuacaccaauuaucaaagu

SEQ ID NO: 768016 - RNA, 19 nt, Artificial Sequence
  Description of Artificial Sequence: Synthetic oligonucleotide
auacuauguagggcugcuu

SEQ ID NO: 768017 - RNA, 19 nt, Artificial Sequence
  Description of Artificial Sequence: Synthetic oligonucleotide
cuccuagauuccaugguuu

SEQ ID NO: 768018 - RNA, 19 nt, Artificial Sequence
  Description of Artificial Sequence: Synthetic oligonucleotide
agacuucuucuuaguacuu

SEQ ID NO: 768019 - RNA, 19 nt, Artificial Sequence
  Description of Artificial Sequence: Synthetic oligonucleotide
caguggaaagucucaucgu

SEQ ID NO: 768020 - RNA, 19 nt, Artificial Sequence
  Description of Artificial Sequence: Synthetic oligonucleotide
caauuaagagguguacguu

SEQ ID NO: 768021 - RNA, 19 nt, Artificial Sequence
  Description of Artificial Sequence: Synthetic oligonucleotide
ggcguuauuuggcuuuccu

SEQ ID NO: 768022 - RNA, 19 nt, Artificial Sequence
  Description of Artificial Sequence: Synthetic oligonucleotide
gcuauugaguucguaugcu

SEQ ID NO: 768023 - RNA, 19 nt, Artificial Sequence
  Description of Artificial Sequence: Synthetic oligonucleotide
gccaauugauuucccuucu

SEQ ID NO: 768024 - RNA, 19 nt, Artificial Sequence
  Description of Artificial Sequence: Synthetic oligonucleotide
cauggccuacaaagccuaa

SEQ ID NO: 768025 - RNA, 19 nt, Artificial Sequence
  Description of Artificial Sequence: Synthetic oligonucleotide
gguagucagugaaaauagu

SEQ ID NO: 768026 - RNA, 19 nt, Artificial Sequence
  Description of Artificial Sequence: Synthetic oligonucleotide
cgagcacuuauaucagaca

SEQ ID NO: 768027 - RNA, 19 nt, Artificial Sequence
  Description of Artificial Sequence: Synthetic oligonucleotide
gcagagggaccuuuacccu

SEQ ID NO: 768028 - RNA, 19 nt, Artificial Sequence
  Description of Artificial Sequence: Synthetic oligonucleotide
ccggcuuggcuggagguac

SEQ ID NO: 768029 - RNA, 19 nt, Artificial Sequence
  Description of Artificial Sequence: Synthetic oligonucleotide
gcauguggcagagggaccu

SEQ ID NO: 768030 - RNA, 19 nt, Artificial Sequence
  Description of Artificial Sequence: Synthetic oligonucleotide
cgucuacuauuccacucuc

SEQ ID NO: 768031 - RNA, 19 nt, Artificial Sequence
  Description of Artificial Sequence: Synthetic oligonucleotide
gccaaggaauuccauucau

SEQ ID NO: 768032 - RNA, 19 nt, Artificial Sequence
  Description of Artificial Sequence: Synthetic oligonucleotide
ggguggagacugugaacua

SEQ ID NO: 768033 - RNA, 19 nt, Artificial Sequence
  Description of Artificial Sequence: Synthetic oligonucleotide
gcugaccagaaaaguuuua

SEQ ID NO: 768034 - RNA, 19 nt, Artificial Sequence
  Description of Artificial Sequence: Synthetic oligonucleotide
cugcugguacuugcagcaa

SEQ ID NO: 768035 - RNA, 19 nt, Artificial Sequence
  Description of Artificial Sequence: Synthetic oligonucleotide
ccaaugcgauggguguuuc

SEQ ID NO: 768036 - RNA, 19 nt, Artificial Sequence
  Description of Artificial Sequence: Synthetic oligonucleotide
caggauugauuugguuuau

SEQ ID NO: 768037 - RNA, 19 nt, Artificial Sequence
  Description of Artificial Sequence: Synthetic oligonucleotide
caguauccuuugguauucu

SEQ ID NO: 768038 - RNA, 19 nt, Artificial Sequence
  Description of Artificial Sequence: Synthetic oligonucleotide
gaccaccguguuauccauu

SEQ ID NO: 768039 - RNA, 19 nt, Artificial Sequence
  Description of Artificial Sequence: Synthetic oligonucleotide
gccaaugcgauggguguuu

SEQ ID NO: 768040 - RNA, 19 nt, Artificial Sequence
  Description of Artificial Sequence: Synthetic oligonucleotide
cguaugcuguuggcauauc

SEQ ID NO: 768041 - RNA, 19 nt, Artificial Sequence
  Description of Artificial Sequence: Synthetic oligonucleotide
ggccaaugcgauggguguu

SEQ ID NO: 768042 - RNA, 19 nt, Artificial Sequence
  Description of Artificial Sequence: Synthetic oligonucleotide
ggugcucaguggagucuau

SEQ ID NO: 768043 - RNA, 19 nt, Artificial Sequence
  Description of Artificial Sequence: Synthetic oligonucleotide
gguguacguuugacaucau

SEQ ID NO: 768044 - RNA, 19 nt, Artificial Sequence
  Description of Artificial Sequence: Synthetic oligonucleotide
aauggcaacuaccagaagc

SEQ ID NO: 768045 - RNA, 19 nt, Artificial Sequence
  Description of Artificial Sequence: Synthetic oligonucleotide
uuuauuuccgccaaaggug

SEQ ID NO: 768046 - RNA, 19 nt, Artificial Sequence
  Description of Artificial Sequence: Synthetic oligonucleotide
ugcuucaugauuauuacag

SEQ ID NO: 768047 - RNA, 19 nt, Artificial Sequence
  Description of Artificial Sequence: Synthetic oligonucleotide
aauauugagcagcugguuc

SEQ ID NO: 768048 - RNA, 19 nt, Artificial Sequence
  Description of Artificial Sequence: Synthetic oligonucleotide
uauuuuaucauaacugaug

SEQ ID NO: 768049 - RNA, 19 nt, Artificial Sequence
  Description of Artificial Sequence: Synthetic oligonucleotide
ugaguuaagcccuugagcc

SEQ ID NO: 768050 - RNA, 19 nt, Artificial Sequence
  Description of Artificial Sequence: Synthetic oligonucleotide
aaacacguugcguagaaag

SEQ ID NO: 768051 - RNA, 19 nt, Artificial Sequence
  Description of Artificial Sequence: Synthetic oligonucleotide
auuauuacaguuuugcagu

SEQ ID NO: 768052 - RNA, 19 nt, Artificial Sequence
  Description of Artificial Sequence: Synthetic oligonucleotide
guaucaacagaucuaaggg

SEQ ID NO: 768053 - RNA, 19 nt, Artificial Sequence
  Description of Artificial Sequence: Synthetic oligonucleotide
agcauaaccauuccguagc

SEQ ID NO: 768054 - RNA, 19 nt, Artificial Sequence
  Description of Artificial Sequence: Synthetic oligonucleotide
aaaguagguccuuugugac

SEQ ID NO: 768055 - RNA, 19 nt, Artificial Sequence
  Description of Artificial Sequence: Synthetic oligonucleotide
uuggcaccaaguuauaugg

SEQ ID NO: 768056 - RNA, 19 nt, Artificial Sequence
  Description of Artificial Sequence: Synthetic oligonucleotide
aacugaugcuaauugggac

SEQ ID NO: 768057 - RNA, 19 nt, Artificial Sequence
  Description of Artificial Sequence: Synthetic oligonucleotide
aauuccuagcagcucauag

SEQ ID NO: 768058 - RNA, 19 nt, Artificial Sequence
  Description of Artificial Sequence: Synthetic oligonucleotide
uuuugcucaggacaaaggc

SEQ ID NO: 768059 - RNA, 19 nt, Artificial Sequence
  Description of Artificial Sequence: Synthetic oligonucleotide
ucaccaaccaauuucauuc

SEQ ID NO: 768060 - RNA, 19 nt, Artificial Sequence
  Description of Artificial Sequence: Synthetic oligonucleotide
guaguuauuaucuaccuuc

SEQ ID NO: 768061 - RNA, 19 nt, Artificial Sequence
  Description of Artificial Sequence: Synthetic oligonucleotide
ucauaacugaugcuaauug

SEQ ID NO: 768062 - RNA, 19 nt, Artificial Sequence
  Description of Artificial Sequence: Synthetic oligonucleotide
agcacaauuccuuugacca

SEQ ID NO: 768063 - RNA, 19 nt, Artificial Sequence
  Description of Artificial Sequence: Synthetic oligonucleotide
gaagcuggauccuauaggc

SEQ ID NO: 768064 - RNA, 19 nt, Artificial Sequence
  Description of Artificial Sequence: Synthetic oligonucleotide
agagaauacagcccaguac

SEQ ID NO: 768065 - RNA, 19 nt, Artificial Sequence
  Description of Artificial Sequence: Synthetic oligonucleotide
auucaacaggagcauaacc

SEQ ID NO: 768066 - RNA, 19 nt, Artificial Sequence
  Description of Artificial Sequence: Synthetic oligonucleotide
cuuucuaccacuccgaguc

SEQ ID NO: 768067 - RNA, 19 nt, Artificial Sequence
  Description of Artificial Sequence: Synthetic oligonucleotide
caaagaaucgaauggcucc

SEQ ID NO: 768068 - RNA, 19 nt, Artificial Sequence
  Description of Artificial Sequence: Synthetic oligonucleotide
gguaucaacagaucuaagg

SEQ ID NO: 768069 - RNA, 19 nt, Artificial Sequence
  Description of Artificial Sequence: Synthetic oligonucleotide
cuuaggaauuccuagcagc

SEQ ID NO: 768070 - RNA, 19 nt, Artificial Sequence
  Description of Artificial Sequence: Synthetic oligonucleotide
uaugagaaauucuaacaca

SEQ ID NO: 768071 - RNA, 19 nt, Artificial Sequence
  Description of Artificial Sequence: Synthetic oligonucleotide
cuaugagaaauucuaacac

SEQ ID NO: 768072 - RNA, 19 nt, Artificial Sequence
  Description of Artificial Sequence: Synthetic oligonucleotide
cauaacugaugcuaauugg

SEQ ID NO: 768073 - RNA, 19 nt, Artificial Sequence
  Description of Artificial Sequence: Synthetic oligonucleotide
uuauuuccgccaaaggugc

SEQ ID NO: 768074 - RNA, 19 nt, Artificial Sequence
  Description of Artificial Sequence: Synthetic oligonucleotide
guuauauggguuccgacag

SEQ ID NO: 768075 - RNA, 19 nt, Artificial Sequence
  Description of Artificial Sequence: Synthetic oligonucleotide
ucuagaagcugacugguga

SEQ ID NO: 768076 - RNA, 19 nt, Artificial Sequence
  Description of Artificial Sequence: Synthetic oligonucleotide
aaguuauauggguuccgac

SEQ ID NO: 768077 - RNA, 19 nt, Artificial Sequence
  Description of Artificial Sequence: Synthetic oligonucleotide
ucuuguaauuugcuuguag

SEQ ID NO: 768078 - RNA, 19 nt, Artificial Sequence
  Description of Artificial Sequence: Synthetic oligonucleotide
auaaccauuccguagcaug

SEQ ID NO: 768079 - RNA, 19 nt, Artificial Sequence
  Description of Artificial Sequence: Synthetic oligonucleotide
aguuauauggguuccgaca

SEQ ID NO: 768080 - RNA, 19 nt, Artificial Sequence
  Description of Artificial Sequence: Synthetic oligonucleotide
uucaggagaccaaauuuag

SEQ ID NO: 768081 - RNA, 19 nt, Artificial Sequence
  Description of Artificial Sequence: Synthetic oligonucleotide
agguagaucauaguuguac

SEQ ID NO: 768082 - RNA, 19 nt, Artificial Sequence
  Description of Artificial Sequence: Synthetic oligonucleotide
guaggcugagcacauaagg

SEQ ID NO: 768083 - RNA, 19 nt, Artificial Sequence
  Description of Artificial Sequence: Synthetic oligonucleotide
uauucaggagaccaaauuu

SEQ ID NO: 768084 - RNA, 19 nt, Artificial Sequence
  Description of Artificial Sequence: Synthetic oligonucleotide
acacguaguuauuaucuac

SEQ ID NO: 768085 - RNA, 19 nt, Artificial Sequence
  Description of Artificial Sequence: Synthetic oligonucleotide
uuggcuuaggaauuccuag

SEQ ID NO: 768086 - RNA, 19 nt, Artificial Sequence
  Description of Artificial Sequence: Synthetic oligonucleotide
acuaccagaagccaugggu

SEQ ID NO: 768087 - RNA, 19 nt, Artificial Sequence
  Description of Artificial Sequence: Synthetic oligonucleotide
acagguagaucauaguugu

SEQ ID NO: 768088 - RNA, 19 nt, Artificial Sequence
  Description of Artificial Sequence: Synthetic oligonucleotide
aaugguuccaucacaauau

SEQ ID NO: 768089 - RNA, 19 nt, Artificial Sequence
  Description of Artificial Sequence: Synthetic oligonucleotide
aauuucauuccuaggaagu

SEQ ID NO: 768090 - RNA, 19 nt, Artificial Sequence
  Description of Artificial Sequence: Synthetic oligonucleotide
uuugcuuguagcaggcuca

SEQ ID NO: 768091 - RNA, 19 nt, Artificial Sequence
  Description of Artificial Sequence: Synthetic oligonucleotide
ucguuguagcuuuugaaug

SEQ ID NO: 768092 - RNA, 19 nt, Artificial Sequence
  Description of Artificial Sequence: Synthetic oligonucleotide
uacaacugcuucaugauua

SEQ ID NO: 768093 - RNA, 19 nt, Artificial Sequence
  Description of Artificial Sequence: Synthetic oligonucleotide
uuggaaacuaucugguaug

SEQ ID NO: 768094 - RNA, 19 nt, Artificial Sequence
  Description of Artificial Sequence: Synthetic oligonucleotide
ggcgccuugaucuagaagc

SEQ ID NO: 768095 - RNA, 19 nt, Artificial Sequence
  Description of Artificial Sequence: Synthetic oligonucleotide
ucugagggauguaucuugg

SEQ ID NO: 768096 - RNA, 19 nt, Artificial Sequence
  Description of Artificial Sequence: Synthetic oligonucleotide
gaugcuaauugggacaaag

SEQ ID NO: 768097 - RNA, 19 nt, Artificial Sequence
  Description of Artificial Sequence: Synthetic oligonucleotide
uuaaugacguagugaaucu

SEQ ID NO: 768098 - RNA, 19 nt, Artificial Sequence
  Description of Artificial Sequence: Synthetic oligonucleotide
cacguaguuauuaucuacc

SEQ ID NO: 768099 - RNA, 19 nt, Artificial Sequence
  Description of Artificial Sequence: Synthetic oligonucleotide
ugugucggagcacaauucc

SEQ ID NO: 768100 - RNA, 19 nt, Artificial Sequence
  Description of Artificial Sequence: Synthetic oligonucleotide
caaggcuacagcuacuaag

SEQ ID NO: 768101 - RNA, 19 nt, Artificial Sequence
  Description of Artificial Sequence: Synthetic oligonucleotide
ugguaugauucuacaaaag

SEQ ID NO: 768102 - RNA, 19 nt, Artificial Sequence
  Description of Artificial Sequence: Synthetic oligonucleotide
ucugaguagcucaccaacc

SEQ ID NO: 768103 - RNA, 19 nt, Artificial Sequence
  Description of Artificial Sequence: Synthetic oligonucleotide
ucucgaugcccauuugugg

SEQ ID NO: 768104 - RNA, 19 nt, Artificial Sequence
  Description of Artificial Sequence: Synthetic oligonucleotide
aacagaucuaagggacucc

SEQ ID NO: 768105 - RNA, 19 nt, Artificial Sequence
  Description of Artificial Sequence: Synthetic oligonucleotide
aaugacguagugaaucucu

SEQ ID NO: 768106 - RNA, 19 nt, Artificial Sequence
  Description of Artificial Sequence: Synthetic oligonucleotide
gacguagugaaucucuuca

SEQ ID NO: 768107 - RNA, 19 nt, Artificial Sequence
  Description of Artificial Sequence: Synthetic oligonucleotide
ucuuuucuaagcccaggug

SEQ ID NO: 768108 - RNA, 19 nt, Artificial Sequence
  Description of Artificial Sequence: Synthetic oligonucleotide
aaggagguugaugugucgg

SEQ ID NO: 768109 - RNA, 19 nt, Artificial Sequence
  Description of Artificial Sequence: Synthetic oligonucleotide
acaguuuugcaguggcugg

SEQ ID NO: 768110 - RNA, 19 nt, Artificial Sequence
  Description of Artificial Sequence: Synthetic oligonucleotide
agacauucugaguagcuca

SEQ ID NO: 768111 - RNA, 19 nt, Artificial Sequence
  Description of Artificial Sequence: Synthetic oligonucleotide
cugaguuaagcccuugagc

SEQ ID NO: 768112 - RNA, 19 nt, Artificial Sequence
  Description of Artificial Sequence: Synthetic oligonucleotide
aaugccugaguuaagcccu

SEQ ID NO: 768113 - RNA, 19 nt, Artificial Sequence
  Description of Artificial Sequence: Synthetic oligonucleotide
guagaucauaguuguacag

SEQ ID NO: 768114 - RNA, 19 nt, Artificial Sequence
  Description of Artificial Sequence: Synthetic oligonucleotide
aacacguugcguagaaagg

SEQ ID NO: 768115 - RNA, 19 nt, Artificial Sequence
  Description of Artificial Sequence: Synthetic oligonucleotide
aguuaagcccuugagccac

SEQ ID NO: 768116 - RNA, 19 nt, Artificial Sequence
  Description of Artificial Sequence: Synthetic oligonucleotide
uugcguagaaaggaaaagc

SEQ ID NO: 768117 - RNA, 19 nt, Artificial Sequence
  Description of Artificial Sequence: Synthetic oligonucleotide
ccaaaguauacauggaugc

SEQ ID NO: 768118 - RNA, 19 nt, Artificial Sequence
  Description of Artificial Sequence: Synthetic oligonucleotide
cuuggcaccaaguuauaug

SEQ ID NO: 768119 - RNA, 19 nt, Artificial Sequence
  Description of Artificial Sequence: Synthetic oligonucleotide
aucuaagggacuccccugg

SEQ ID NO: 768120 - RNA, 19 nt, Artificial Sequence
  Description of Artificial Sequence: Synthetic oligonucleotide
gagcauaaccauuccguag

SEQ ID NO: 768121 - RNA, 19 nt, Artificial Sequence
  Description of Artificial Sequence: Synthetic oligonucleotide
aaggagugaacauccucug

SEQ ID NO: 768122 - RNA, 19 nt, Artificial Sequence
  Description of Artificial Sequence: Synthetic oligonucleotide
cuaacugcaaccaaguacu

SEQ ID NO: 768123 - RNA, 19 nt, Artificial Sequence
  Description of Artificial Sequence: Synthetic oligonucleotide
aaaguauacauggaugcuu

SEQ ID NO: 768124 - RNA, 19 nt, Artificial Sequence
  Description of Artificial Sequence: Synthetic oligonucleotide
uaaacacguaguuauuauc

SEQ ID NO: 768125 - RNA, 19 nt, Artificial Sequence
  Description of Artificial Sequence: Synthetic oligonucleotide
cucgaugcccauuuguggc

SEQ ID NO: 768126 - RNA, 19 nt, Artificial Sequence
  Description of Artificial Sequence: Synthetic oligonucleotide
ugauucuacaaaagguuua

SEQ ID NO: 768127 - RNA, 19 nt, Artificial Sequence
  Description of Artificial Sequence: Synthetic oligonucleotide
cuagagagcgcagugacac

SEQ ID NO: 768128 - RNA, 19 nt, Artificial Sequence
  Description of Artificial Sequence: Synthetic oligonucleotide
aaccaaguacuguuucuca

SEQ ID NO: 768129 - RNA, 19 nt, Artificial Sequence
  Description of Artificial Sequence: Synthetic oligonucleotide
uuuuaucauaacugaugcu

SEQ ID NO: 768130 - RNA, 19 nt, Artificial Sequence
  Description of Artificial Sequence: Synthetic oligonucleotide
uuauuacaguuuugcagug

SEQ ID NO: 768131 - RNA, 19 nt, Artificial Sequence
  Description of Artificial Sequence: Synthetic oligonucleotide
gauguaucuuggcaccaag

SEQ ID NO: 768132 - RNA, 19 nt, Artificial Sequence
  Description of Artificial Sequence: Synthetic oligonucleotide
cagcuacuaaggaaggacg

SEQ ID NO: 768133 - RNA, 19 nt, Artificial Sequence
  Description of Artificial Sequence: Synthetic oligonucleotide
accaaguuauauggguucc

SEQ ID NO: 768134 - RNA, 19 nt, Artificial Sequence
  Description of Artificial Sequence: Synthetic oligonucleotide
aacacugagaggcgccuug

SEQ ID NO: 768135 - RNA, 19 nt, Artificial Sequence
  Description of Artificial Sequence: Synthetic oligonucleotide
accaaauuuaggaaucaag

SEQ ID NO: 768136 - RNA, 19 nt, Artificial Sequence
  Description of Artificial Sequence: Synthetic oligonucleotide
aacuaucugguaugauucu

SEQ ID NO: 768137 - RNA, 19 nt, Artificial Sequence
  Description of Artificial Sequence: Synthetic oligonucleotide
caaaguagguccuuuguga

SEQ ID NO: 768138 - RNA, 19 nt, Artificial Sequence
  Description of Artificial Sequence: Synthetic oligonucleotide
cuaucugguaugauucuac

SEQ ID NO: 768139 - RNA, 19 nt, Artificial Sequence
  Description of Artificial Sequence: Synthetic oligonucleotide
gauccuauaggcgacuuca

SEQ ID NO: 768140 - RNA, 19 nt, Artificial Sequence
  Description of Artificial Sequence: Synthetic oligonucleotide
uguaggcugagcacauaag

SEQ ID NO: 768141 - RNA, 19 nt, Artificial Sequence
  Description of Artificial Sequence: Synthetic oligonucleotide
cugaaaacacguugcguag

SEQ ID NO: 768142 - RNA, 19 nt, Artificial Sequence
  Description of Artificial Sequence: Synthetic oligonucleotide
aguucucagagagaauccg

SEQ ID NO: 768143 - RNA, 19 nt, Artificial Sequence
  Description of Artificial Sequence: Synthetic oligonucleotide
accaaguacuguuucucag

SEQ ID NO: 768144 - RNA, 19 nt, Artificial Sequence
  Description of Artificial Sequence: Synthetic oligonucleotide
gcuuucaacaacccagugg

SEQ ID NO: 768145 - RNA, 19 nt, Artificial Sequence
  Description of Artificial Sequence: Synthetic oligonucleotide
uacuaaggaaggacggaca

SEQ ID NO: 768146 - RNA, 19 nt, Artificial Sequence
  Description of Artificial Sequence: Synthetic oligonucleotide
gaaucgaauggcucccacc

SEQ ID NO: 768147 - RNA, 19 nt, Artificial Sequence
  Description of Artificial Sequence: Synthetic oligonucleotide
aagucaauguagcuccgau

SEQ ID NO: 768148 - RNA, 19 nt, Artificial Sequence
  Description of Artificial Sequence: Synthetic oligonucleotide
uuaucaggccaaagcagga

SEQ ID NO: 768149 - RNA, 19 nt, Artificial Sequence
  Description of Artificial Sequence: Synthetic oligonucleotide
uauuaucuaccuucuuccu

SEQ ID NO: 768150 - RNA, 19 nt, Artificial Sequence
  Description of Artificial Sequence: Synthetic oligonucleotide
gauuccuuuggcuuaggaa

SEQ ID NO: 768151 - RNA, 19 nt, Artificial Sequence
  Description of Artificial Sequence: Synthetic oligonucleotide
aacuaccagaagccauggg

SEQ ID NO: 768152 - RNA, 19 nt, Artificial Sequence
  Description of Artificial Sequence: Synthetic oligonucleotide
agaaucgaauggcucccac

SEQ ID NO: 768153 - RNA, 19 nt, Artificial Sequence
  Description of Artificial Sequence: Synthetic oligonucleotide
cacauaaggagguugaugu

SEQ ID NO: 768154 - RNA, 19 nt, Artificial Sequence
  Description of Artificial Sequence: Synthetic oligonucleotide
auauucaggagaccaaauu

SEQ ID NO: 768155 - RNA, 19 nt, Artificial Sequence
  Description of Artificial Sequence: Synthetic oligonucleotide
uguauagccucaguuuuac

SEQ ID NO: 768156 - RNA, 19 nt, Artificial Sequence
  Description of Artificial Sequence: Synthetic oligonucleotide
uauaggcgacuucagugac

SEQ ID NO: 768157 - RNA, 19 nt, Artificial Sequence
  Description of Artificial Sequence: Synthetic oligonucleotide
uaaggagguugaugugucg

SEQ ID NO: 768158 - RNA, 19 nt, Artificial Sequence
  Description of Artificial Sequence: Synthetic oligonucleotide
guucacacacaccuuugag

SEQ ID NO: 768159 - RNA, 19 nt, Artificial Sequence
  Description of Artificial Sequence: Synthetic oligonucleotide
ugagcacauaaggagguug

SEQ ID NO: 768160 - RNA, 19 nt, Artificial Sequence
  Description of Artificial Sequence: Synthetic oligonucleotide
cacaauauucaggagacca

SEQ ID NO: 768161 - RNA, 19 nt, Artificial Sequence
  Description of Artificial Sequence: Synthetic oligonucleotide
auuuccgccaaaggugcgc

SEQ ID NO: 768162 - RNA, 19 nt, Artificial Sequence
  Description of Artificial Sequence: Synthetic oligonucleotide
ucacacuaaacacguaguu

SEQ ID NO: 768163 - RNA, 19 nt, Artificial Sequence
  Description of Artificial Sequence: Synthetic oligonucleotide
uucguucacacacaccuuu

SEQ ID NO: 768164 - RNA, 19 nt, Artificial Sequence
  Description of Artificial Sequence: Synthetic oligonucleotide
acuaaggaaggacggacaa

SEQ ID NO: 768165 - RNA, 19 nt, Artificial Sequence
  Description of Artificial Sequence: Synthetic oligonucleotide
guugcguagaaaggaaaag

SEQ ID NO: 768166 - RNA, 19 nt, Artificial Sequence
  Description of Artificial Sequence: Synthetic oligonucleotide
aaguagguaucaaacacuu

SEQ ID NO: 768167 - RNA, 19 nt, Artificial Sequence
  Description of Artificial Sequence: Synthetic oligonucleotide
ucucagagagaauccgucu

SEQ ID NO: 768168 - RNA, 19 nt, Artificial Sequence
  Description of Artificial Sequence: Synthetic oligonucleotide
cuuugagaaaaucugcuua

SEQ ID NO: 768169 - RNA, 19 nt, Artificial Sequence
  Description of Artificial Sequence: Synthetic oligonucleotide
aacuuccuaacugcaacca

SEQ ID NO: 768170 - RNA, 19 nt, Artificial Sequence
  Description of Artificial Sequence: Synthetic oligonucleotide
acguaguuauuaucuaccu

SEQ ID NO: 768171 - RNA, 19 nt, Artificial Sequence
  Description of Artificial Sequence: Synthetic oligonucleotide
ggcgacuucagugacaaag

SEQ ID NO: 768172 - RNA, 19 nt, Artificial Sequence
  Description of Artificial Sequence: Synthetic oligonucleotide
auaaggagguugauguguc

SEQ ID NO: 768173 - RNA, 19 nt, Artificial Sequence
  Description of Artificial Sequence: Synthetic oligonucleotide
uccuuucuaccacuccgag

SEQ ID NO: 768174 - RNA, 19 nt, Artificial Sequence
  Description of Artificial Sequence: Synthetic oligonucleotide
uagcuuucaacaacccagu

SEQ ID NO: 768175 - RNA, 19 nt, Artificial Sequence
  Description of Artificial Sequence: Synthetic oligonucleotide
gagaccaaauuuaggaauc

SEQ ID NO: 768176 - RNA, 19 nt, Artificial Sequence
  Description of Artificial Sequence: Synthetic oligonucleotide
aaguacuguuucucaguga

SEQ ID NO: 768177 - RNA, 19 nt, Artificial Sequence
  Description of Artificial Sequence: Synthetic oligonucleotide
ccuaacugcaaccaaguac

SEQ ID NO: 768178 - RNA, 19 nt, Artificial Sequence
  Description of Artificial Sequence: Synthetic oligonucleotide
uauuuccgccaaaggugcg

SEQ ID NO: 768179 - RNA, 19 nt, Artificial Sequence
  Description of Artificial Sequence: Synthetic oligonucleotide
cuauaggcgacuucaguga

SEQ ID NO: 768180 - RNA, 19 nt, Artificial Sequence
  Description of Artificial Sequence: Synthetic oligonucleotide
agcuacuaaggaaggacgg

SEQ ID NO: 768181 - RNA, 19 nt, Artificial Sequence
  Description of Artificial Sequence: Synthetic oligonucleotide
augccgucuucguucacac

SEQ ID NO: 768182 - RNA, 19 nt, Artificial Sequence
  Description of Artificial Sequence: Synthetic oligonucleotide
acguagugaaucucuucag

SEQ ID NO: 768183 - RNA, 19 nt, Artificial Sequence
  Description of Artificial Sequence: Synthetic oligonucleotide
uggcaccaaguuauauggg

SEQ ID NO: 768184 - RNA, 19 nt, Artificial Sequence
  Description of Artificial Sequence: Synthetic oligonucleotide
aucgaacuggcuuccucuc

SEQ ID NO: 768185 - RNA, 19 nt, Artificial Sequence
  Description of Artificial Sequence: Synthetic oligonucleotide
uagcuuuugaaugccgucu

SEQ ID NO: 768186 - RNA, 19 nt, Artificial Sequence
  Description of Artificial Sequence: Synthetic oligonucleotide
aggagcauaaccauuccgu

SEQ ID NO: 768187 - RNA, 19 nt, Artificial Sequence
  Description of Artificial Sequence: Synthetic oligonucleotide
aauaacuggcacagguaga

SEQ ID NO: 768188 - RNA, 19 nt, Artificial Sequence
  Description of Artificial Sequence: Synthetic oligonucleotide
guacaguuuauuuccgcca

SEQ ID NO: 768189 - RNA, 19 nt, Artificial Sequence
  Description of Artificial Sequence: Synthetic oligonucleotide
cuacuaaggaaggacggac

SEQ ID NO: 768190 - RNA, 19 nt, Artificial Sequence
  Description of Artificial Sequence: Synthetic oligonucleotide
agacacauccuccucucga

SEQ ID NO: 768191 - RNA, 19 nt, Artificial Sequence
  Description of Artificial Sequence: Synthetic oligonucleotide
cuuuucuaagcccaggugu

SEQ ID NO: 768192 - RNA, 19 nt, Artificial Sequence
  Description of Artificial Sequence: Synthetic oligonucleotide
uuguagcaggcucauucac

SEQ ID NO: 768193 - RNA, 19 nt, Artificial Sequence
  Description of Artificial Sequence: Synthetic oligonucleotide
caccaaguuauauggguuc

SEQ ID NO: 768194 - RNA, 19 nt, Artificial Sequence
  Description of Artificial Sequence: Synthetic oligonucleotide
ugaguagcucaccaaccaa

SEQ ID NO: 768195 - RNA, 19 nt, Artificial Sequence
  Description of Artificial Sequence: Synthetic oligonucleotide
auggauaacugguuuugaa

SEQ ID NO: 768196 - RNA, 19 nt, Artificial Sequence
  Description of Artificial Sequence: Synthetic oligonucleotide
gaaaacacguugcguagaa

SEQ ID NO: 768197 - RNA, 19 nt, Artificial Sequence
  Description of Artificial Sequence: Synthetic oligonucleotide
auaacuggcacagguagau

SEQ ID NO: 768198 - RNA, 19 nt, Artificial Sequence
  Description of Artificial Sequence: Synthetic oligonucleotide
caggagcauaaccauuccg

SEQ ID NO: 768199 - RNA, 19 nt, Artificial Sequence
  Description of Artificial Sequence: Synthetic oligonucleotide
caguacaguuuauuuccgc

SEQ ID NO: 768200 - RNA, 19 nt, Artificial Sequence
  Description of Artificial Sequence: Synthetic oligonucleotide
accauuccguagcaugguc

SEQ ID NO: 768201 - RNA, 19 nt, Artificial Sequence
  Description of Artificial Sequence: Synthetic oligonucleotide
uuacaguuuugcaguggcu

SEQ ID NO: 768202 - RNA, 19 nt, Artificial Sequence
  Description of Artificial Sequence: Synthetic oligonucleotide
agguuuaaagagcccuaug

SEQ ID NO: 768203 - RNA, 19 nt, Artificial Sequence
  Description of Artificial Sequence: Synthetic oligonucleotide
ugaaaacacguugcguaga

SEQ ID NO: 768204 - RNA, 19 nt, Artificial Sequence
  Description of Artificial Sequence: Synthetic oligonucleotide
ugcauccgagcauuucuug

SEQ ID NO: 768205 - RNA, 19 nt, Artificial Sequence
  Description of Artificial Sequence: Synthetic oligonucleotide
ucaucuguauagccucagu

SEQ ID NO: 768206 - RNA, 19 nt, Artificial Sequence
  Description of Artificial Sequence: Synthetic oligonucleotide
aacugcaaccaaguacugu

SEQ ID NO: 768207 - RNA, 19 nt, Artificial Sequence
  Description of Artificial Sequence: Synthetic oligonucleotide
acuaaacacguaguuauua

SEQ ID NO: 768208 - RNA, 19 nt, Artificial Sequence
  Description of Artificial Sequence: Synthetic oligonucleotide
aucgaauggcucccacccg

SEQ ID NO: 768209 - RNA, 19 nt, Artificial Sequence
  Description of Artificial Sequence: Synthetic oligonucleotide
acacguugcguagaaagga

SEQ ID NO: 768210 - RNA, 19 nt, Artificial Sequence
  Description of Artificial Sequence: Synthetic oligonucleotide
uggguuccgacagagccgc

SEQ ID NO: 768211 - RNA, 19 nt, Artificial Sequence
  Description of Artificial Sequence: Synthetic oligonucleotide
uggaaacuaucugguauga

SEQ ID NO: 768212 - RNA, 19 nt, Artificial Sequence
  Description of Artificial Sequence: Synthetic oligonucleotide
guagcuuuugaaugccguc

SEQ ID NO: 768213 - RNA, 19 nt, Artificial Sequence
  Description of Artificial Sequence: Synthetic oligonucleotide
ggauaacugguuuugaagu

SEQ ID NO: 768214 - RNA, 19 nt, Artificial Sequence
  Description of Artificial Sequence: Synthetic oligonucleotide
ugccgcaauaacuggcaca

SEQ ID NO: 768215 - RNA, 19 nt, Artificial Sequence
  Description of Artificial Sequence: Synthetic oligonucleotide
aggguaucaacagaucuaa

SEQ ID NO: 768216 - RNA, 19 nt, Artificial Sequence
  Description of Artificial Sequence: Synthetic oligonucleotide
gguagaucauaguuguaca

SEQ ID NO: 768217 - RNA, 19 nt, Artificial Sequence
  Description of Artificial Sequence: Synthetic oligonucleotide
ucggagcacaauuccuuug

SEQ ID NO: 768218 - RNA, 19 nt, Artificial Sequence
  Description of Artificial Sequence: Synthetic oligonucleotide
aaguaacagccuuccucga

SEQ ID NO: 768219 - RNA, 19 nt, Artificial Sequence
  Description of Artificial Sequence: Synthetic oligonucleotide
gaucauaguuguacagaac

SEQ ID NO: 768220 - RNA, 19 nt, Artificial Sequence
  Description of Artificial Sequence: Synthetic oligonucleotide
uaggcgacuucagugacaa

SEQ ID NO: 768221 - RNA, 19 nt, Artificial Sequence
  Description of Artificial Sequence: Synthetic oligonucleotide
agaagcugacuggugaacu

SEQ ID NO: 768222 - RNA, 19 nt, Artificial Sequence
  Description of Artificial Sequence: Synthetic oligonucleotide
auucaggagaccaaauuua

SEQ ID NO: 768223 - RNA, 19 nt, Artificial Sequence
  Description of Artificial Sequence: Synthetic oligonucleotide
ugacguagugaaucucuuc

SEQ ID NO: 768224 - RNA, 19 nt, Artificial Sequence
  Description of Artificial Sequence: Synthetic oligonucleotide
aguaacagccuuccucgaa

SEQ ID NO: 768225 - RNA, 19 nt, Artificial Sequence
  Description of Artificial Sequence: Synthetic oligonucleotide
uccgucuagcuuucaacaa

SEQ ID NO: 768226 - RNA, 19 nt, Artificial Sequence
  Description of Artificial Sequence: Synthetic oligonucleotide
uuccuuuggcuuaggaauu

SEQ ID NO: 768227 - RNA, 19 nt, Artificial Sequence
  Description of Artificial Sequence: Synthetic oligonucleotide
guaucuuggcaccaaguua

SEQ ID NO: 768228 - RNA, 19 nt, Artificial Sequence
  Description of Artificial Sequence: Synthetic oligonucleotide
gaguuaagcccuugagcca

SEQ ID NO: 768229 - RNA, 19 nt, Artificial Sequence
  Description of Artificial Sequence: Synthetic oligonucleotide
ucgaugcccauuuguggca

SEQ ID NO: 768230 - RNA, 19 nt, Artificial Sequence
  Description of Artificial Sequence: Synthetic oligonucleotide
gaaagcuguuuaaugacgu

SEQ ID NO: 768231 - RNA, 19 nt, Artificial Sequence
  Description of Artificial Sequence: Synthetic oligonucleotide
uuucuaagcccagguguca

SEQ ID NO: 768232 - RNA, 19 nt, Artificial Sequence
  Description of Artificial Sequence: Synthetic oligonucleotide
augugucggagcacaauuc

SEQ ID NO: 768233 - RNA, 19 nt, Artificial Sequence
  Description of Artificial Sequence: Synthetic oligonucleotide
agcuuucaacaacccagug

SEQ ID NO: 768234 - RNA, 19 nt, Artificial Sequence
  Description of Artificial Sequence: Synthetic oligonucleotide
ugcgccgcaugaagaaggc

SEQ ID NO: 768235 - RNA, 19 nt, Artificial Sequence
  Description of Artificial Sequence: Synthetic oligonucleotide
agagguauuuggaaacuau

SEQ ID NO: 768236 - RNA, 19 nt, Artificial Sequence
  Description of Artificial Sequence: Synthetic oligonucleotide
cccuaugagaaauucuaac

SEQ ID NO: 768237 - RNA, 19 nt, Artificial Sequence
  Description of Artificial Sequence: Synthetic oligonucleotide
auauggguuccgacagagc

SEQ ID NO: 768238 - RNA, 19 nt, Artificial Sequence
  Description of Artificial Sequence: Synthetic oligonucleotide
cagaucuaagggacucccc

SEQ ID NO: 768239 - RNA, 19 nt, Artificial Sequence
  Description of Artificial Sequence: Synthetic oligonucleotide
uacagcuacuaaggaagga

SEQ ID NO: 768240 - RNA, 19 nt, Artificial Sequence
  Description of Artificial Sequence: Synthetic oligonucleotide
agcccaguacaguuuauuu

SEQ ID NO: 768241 - RNA, 19 nt, Artificial Sequence
  Description of Artificial Sequence: Synthetic oligonucleotide
uuuccgccaaaggugcgcc

SEQ ID NO: 768242 - RNA, 19 nt, Artificial Sequence
  Description of Artificial Sequence: Synthetic oligonucleotide
gcuuaggaauuccuagcag

SEQ ID NO: 768243 - RNA, 19 nt, Artificial Sequence
  Description of Artificial Sequence: Synthetic oligonucleotide
aggagugaacauccucuga

SEQ ID NO: 768244 - RNA, 19 nt, Artificial Sequence
  Description of Artificial Sequence: Synthetic oligonucleotide
gaugugucggagcacaauu

SEQ ID NO: 768245 - RNA, 19 nt, Artificial Sequence
  Description of Artificial Sequence: Synthetic oligonucleotide
gccgcaauaacuggcacag

SEQ ID NO: 768246 - RNA, 19 nt, Artificial Sequence
  Description of Artificial Sequence: Synthetic oligonucleotide
agaccaaauuuaggaauca

SEQ ID NO: 768247 - RNA, 19 nt, Artificial Sequence
  Description of Artificial Sequence: Synthetic oligonucleotide
caacuaccagaagccaugg

SEQ ID NO: 768248 - RNA, 19 nt, Artificial Sequence
  Description of Artificial Sequence: Synthetic oligonucleotide
agcccuaugagaaauucua

SEQ ID NO: 768249 - RNA, 19 nt, Artificial Sequence
  Description of Artificial Sequence: Synthetic oligonucleotide
ccaaaugccugaguuaagc

SEQ ID NO: 768250 - RNA, 19 nt, Artificial Sequence
  Description of Artificial Sequence: Synthetic oligonucleotide
aaccauuccguagcauggu

SEQ ID NO: 768251 - RNA, 19 nt, Artificial Sequence
  Description of Artificial Sequence: Synthetic oligonucleotide
agcgacuccuugucccuuc

SEQ ID NO: 768252 - RNA, 19 nt, Artificial Sequence
  Description of Artificial Sequence: Synthetic oligonucleotide
gaauggcaacuaccagaag

SEQ ID NO: 768253 - RNA, 19 nt, Artificial Sequence
  Description of Artificial Sequence: Synthetic oligonucleotide
uuucuaccacuccgagucu

SEQ ID NO: 768254 - RNA, 19 nt, Artificial Sequence
  Description of Artificial Sequence: Synthetic oligonucleotide
uaaugacguagugaaucuc

SEQ ID NO: 768255 - RNA, 19 nt, Artificial Sequence
  Description of Artificial Sequence: Synthetic oligonucleotide
gagcacauaaggagguuga

SEQ ID NO: 768256 - RNA, 19 nt, Artificial Sequence
  Description of Artificial Sequence: Synthetic oligonucleotide
uagaagcugacuggugaac

SEQ ID NO: 768257 - RNA, 19 nt, Artificial Sequence
  Description of Artificial Sequence: Synthetic oligonucleotide
uccuaacugcaaccaagua

SEQ ID NO: 768258 - RNA, 19 nt, Artificial Sequence
  Description of Artificial Sequence: Synthetic oligonucleotide
ccgagucucacaaaagcug

SEQ ID NO: 768259 - RNA, 19 nt, Artificial Sequence
  Description of Artificial Sequence: Synthetic oligonucleotide
ucgaagucccugagugugu

SEQ ID NO: 768260 - RNA, 19 nt, Artificial Sequence
  Description of Artificial Sequence: Synthetic oligonucleotide
uugcauccgagcauuucuu

SEQ ID NO: 768261 - RNA, 19 nt, Artificial Sequence
  Description of Artificial Sequence: Synthetic oligonucleotide
cagagagaauccgucuagc

SEQ ID NO: 768262 - RNA, 19 nt, Artificial Sequence
  Description of Artificial Sequence: Synthetic oligonucleotide
cagggucuccaaaguauac

SEQ ID NO: 768263 - RNA, 19 nt, Artificial Sequence
  Description of Artificial Sequence: Synthetic oligonucleotide
aagaaucgaauggcuccca

SEQ ID NO: 768264 - RNA, 19 nt, Artificial Sequence
  Description of Artificial Sequence: Synthetic oligonucleotide
aaaacacguugcguagaaa

SEQ ID NO: 768265 - RNA, 19 nt, Artificial Sequence
  Description of Artificial Sequence: Synthetic oligonucleotide
agcuuuugaaugccgucuu

SEQ ID NO: 768266 - RNA, 19 nt, Artificial Sequence
  Description of Artificial Sequence: Synthetic oligonucleotide
cuuccucgaagucccugag

SEQ ID NO: 768267 - RNA, 19 nt, Artificial Sequence
  Description of Artificial Sequence: Synthetic oligonucleotide
gaggguaucaacagaucua

SEQ ID NO: 768268 - RNA, 19 nt, Artificial Sequence
  Description of Artificial Sequence: Synthetic oligonucleotide
cucguuguagcuuuugaau

SEQ ID NO: 768269 - RNA, 19 nt, Artificial Sequence
  Description of Artificial Sequence: Synthetic oligonucleotide
ccugaguuaagcccuugag

SEQ ID NO: 768270 - RNA, 19 nt, Artificial Sequence
  Description of Artificial Sequence: Synthetic oligonucleotide
cuaaacacguaguuauuau

SEQ ID NO: 768271 - RNA, 19 nt, Artificial Sequence
  Description of Artificial Sequence: Synthetic oligonucleotide
cuugcauccgagcauuucu

SEQ ID NO: 768272 - RNA, 19 nt, Artificial Sequence
  Description of Artificial Sequence: Synthetic oligonucleotide
ucccacccgcaguuugugg

SEQ ID NO: 768273 - RNA, 19 nt, Artificial Sequence
  Description of Artificial Sequence: Synthetic oligonucleotide
ucccagucaucuguauagc

SEQ ID NO: 768274 - RNA, 19 nt, Artificial Sequence
  Description of Artificial Sequence: Synthetic oligonucleotide
cuagaagcugacuggugaa

SEQ ID NO: 768275 - RNA, 19 nt, Artificial Sequence
  Description of Artificial Sequence: Synthetic oligonucleotide
gaucuagaagcugacuggu

SEQ ID NO: 768276 - RNA, 19 nt, Artificial Sequence
  Description of Artificial Sequence: Synthetic oligonucleotide
uccgccaaaggugcgccgc

SEQ ID NO: 768277 - RNA, 19 nt, Artificial Sequence
  Description of Artificial Sequence: Synthetic oligonucleotide
cauaaggagguugaugugu

SEQ ID NO: 768278 - RNA, 19 nt, Artificial Sequence
  Description of Artificial Sequence: Synthetic oligonucleotide
ucuugcauccgagcauuuc

SEQ ID NO: 768279 - RNA, 19 nt, Artificial Sequence
  Description of Artificial Sequence: Synthetic oligonucleotide
gcccugacgcuagagagcg

SEQ ID NO: 768280 - RNA, 19 nt, Artificial Sequence
  Description of Artificial Sequence: Synthetic oligonucleotide
acuaucugguaugauucua

SEQ ID NO: 768281 - RNA, 19 nt, Artificial Sequence
  Description of Artificial Sequence: Synthetic oligonucleotide
ccucugacugcuucugagg

SEQ ID NO: 768282 - RNA, 19 nt, Artificial Sequence
  Description of Artificial Sequence: Synthetic oligonucleotide
aacaacccagugguggauu

SEQ ID NO: 768283 - RNA, 19 nt, Artificial Sequence
  Description of Artificial Sequence: Synthetic oligonucleotide
ggagaccaaauuuaggaau

SEQ ID NO: 768284 - RNA, 19 nt, Artificial Sequence
  Description of Artificial Sequence: Synthetic oligonucleotide
uagagagcgcagugacaca

SEQ ID NO: 768285 - RNA, 19 nt, Artificial Sequence
  Description of Artificial Sequence: Synthetic oligonucleotide
ugacgcuagagagcgcagu

SEQ ID NO: 768286 - RNA, 19 nt, Artificial Sequence
  Description of Artificial Sequence: Synthetic oligonucleotide
uuccgccaaaggugcgccg

SEQ ID NO: 768287 - RNA, 19 nt, Artificial Sequence
  Description of Artificial Sequence: Synthetic oligonucleotide
uggcaacuaccagaagcca

SEQ ID NO: 768288 - RNA, 19 nt, Artificial Sequence
  Description of Artificial Sequence: Synthetic oligonucleotide
uccgagcauuucuuguaau

SEQ ID NO: 768289 - RNA, 19 nt, Artificial Sequence
  Description of Artificial Sequence: Synthetic oligonucleotide
ucauuccuaggaaguccau

SEQ ID NO: 768290 - RNA, 19 nt, Artificial Sequence
  Description of Artificial Sequence: Synthetic oligonucleotide
gaagcauggcucaggucuc

SEQ ID NO: 768291 - RNA, 19 nt, Artificial Sequence
  Description of Artificial Sequence: Synthetic oligonucleotide
cacacuaaacacguaguua

SEQ ID NO: 768292 - RNA, 19 nt, Artificial Sequence
  Description of Artificial Sequence: Synthetic oligonucleotide
ccaggaucgaacuggcuuc

SEQ ID NO: 768293 - RNA, 19 nt, Artificial Sequence
  Description of Artificial Sequence: Synthetic oligonucleotide
gaccaaauuuaggaaucaa

SEQ ID NO: 768294 - RNA, 19 nt, Artificial Sequence
  Description of Artificial Sequence: Synthetic oligonucleotide
ggugucaugugcaaggcua

SEQ ID NO: 768295 - RNA, 19 nt, Artificial Sequence
  Description of Artificial Sequence: Synthetic oligonucleotide
ugcccauuuguggcaaagu

SEQ ID NO: 768296 - RNA, 19 nt, Artificial Sequence
  Description of Artificial Sequence: Synthetic oligonucleotide
gagaggcgccuugaucuag

SEQ ID NO: 768297 - RNA, 19 nt, Artificial Sequence
  Description of Artificial Sequence: Synthetic oligonucleotide
gcacauaaggagguugaug

SEQ ID NO: 768298 - RNA, 19 nt, Artificial Sequence
  Description of Artificial Sequence: Synthetic oligonucleotide
cauccgagcauuucuugua

SEQ ID NO: 768299 - RNA, 19 nt, Artificial Sequence
  Description of Artificial Sequence: Synthetic oligonucleotide
cacguugcguagaaaggaa

SEQ ID NO: 768300 - RNA, 19 nt, Artificial Sequence
  Description of Artificial Sequence: Synthetic oligonucleotide
ugagaggcgccuugaucua

SEQ ID NO: 768301 - RNA, 19 nt, Artificial Sequence
  Description of Artificial Sequence: Synthetic oligonucleotide
cugacgcuagagagcgcag

SEQ ID NO: 768302 - RNA, 19 nt, Artificial Sequence
  Description of Artificial Sequence: Synthetic oligonucleotide
cauuucugagcauccagau

SEQ ID NO: 768303 - RNA, 19 nt, Artificial Sequence
  Description of Artificial Sequence: Synthetic oligonucleotide
ggcaccaaguuauaugggu

SEQ ID NO: 768304 - RNA, 19 nt, Artificial Sequence
  Description of Artificial Sequence: Synthetic oligonucleotide
cagagaauacagcccagua

SEQ ID NO: 768305 - RNA, 19 nt, Artificial Sequence
  Description of Artificial Sequence: Synthetic oligonucleotide
auccuauaggcgacuucag

SEQ ID NO: 768306 - RNA, 19 nt, Artificial Sequence
  Description of Artificial Sequence: Synthetic oligonucleotide
ccgucuagcuuucaacaac

SEQ ID NO: 768307 - RNA, 19 nt, Artificial Sequence
  Description of Artificial Sequence: Synthetic oligonucleotide
guauagccucaguuuuaca

SEQ ID NO: 768308 - RNA, 19 nt, Artificial Sequence
  Description of Artificial Sequence: Synthetic oligonucleotide
ggagcauaaccauuccgua

SEQ ID NO: 768309 - RNA, 19 nt, Artificial Sequence
  Description of Artificial Sequence: Synthetic oligonucleotide
auuuaggaaucaaggucuu

SEQ ID NO: 768310 - RNA, 19 nt, Artificial Sequence
  Description of Artificial Sequence: Synthetic oligonucleotide
cucggaggguaucaacaga

SEQ ID NO: 768311 - RNA, 19 nt, Artificial Sequence
  Description of Artificial Sequence: Synthetic oligonucleotide
ccaaguuauauggguuccg

SEQ ID NO: 768312 - RNA, 19 nt, Artificial Sequence
  Description of Artificial Sequence: Synthetic oligonucleotide
caacccagugguggauucc

SEQ ID NO: 768313 - RNA, 19 nt, Artificial Sequence
  Description of Artificial Sequence: Synthetic oligonucleotide
ggucuuggcagagcgacuc

SEQ ID NO: 768314 - RNA, 19 nt, Artificial Sequence
  Description of Artificial Sequence: Synthetic oligonucleotide
ccgcccugacgcuagagag

SEQ ID NO: 768315 - RNA, 19 nt, Artificial Sequence
  Description of Artificial Sequence: Synthetic oligonucleotide
cagaagcauggcucagguc

SEQ ID NO: 768316 - RNA, 19 nt, Artificial Sequence
  Description of Artificial Sequence: Synthetic oligonucleotide
ggucuccaaaguauacaug

SEQ ID NO: 768317 - RNA, 19 nt, Artificial Sequence
  Description of Artificial Sequence: Synthetic oligonucleotide
gaagcugacuggugaacuu

SEQ ID NO: 768318 - RNA, 19 nt, Artificial Sequence
  Description of Artificial Sequence: Synthetic oligonucleotide
cugccgcaauaacuggcac

SEQ ID NO: 768319 - RNA, 19 nt, Artificial Sequence
  Description of Artificial Sequence: Synthetic oligonucleotide
ggaucgaacuggcuuccuc

SEQ ID NO: 768320 - RNA, 19 nt, Artificial Sequence
  Description of Artificial Sequence: Synthetic oligonucleotide
cauggguucagagccaggu

SEQ ID NO: 768321 - RNA, 19 nt, Artificial Sequence
  Description of Artificial Sequence: Synthetic oligonucleotide
aagagcccuaugagaaauu

SEQ ID NO: 768322 - RNA, 19 nt, Artificial Sequence
  Description of Artificial Sequence: Synthetic oligonucleotide
acgcuagagagcgcaguga

SEQ ID NO: 768323 - RNA, 19 nt, Artificial Sequence
  Description of Artificial Sequence: Synthetic oligonucleotide
gcuacuaaggaaggacgga

SEQ ID NO: 768324 - RNA, 19 nt, Artificial Sequence
  Description of Artificial Sequence: Synthetic oligonucleotide
augacguagugaaucucuu

SEQ ID NO: 768325 - RNA, 19 nt, Artificial Sequence
  Description of Artificial Sequence: Synthetic oligonucleotide
acguugcguagaaaggaaa

SEQ ID NO: 768326 - RNA, 19 nt, Artificial Sequence
  Description of Artificial Sequence: Synthetic oligonucleotide
augugcaaggcuacagcua

SEQ ID NO: 768327 - RNA, 19 nt, Artificial Sequence
  Description of Artificial Sequence: Synthetic oligonucleotide
cuagcagcucauaggcaua

SEQ ID NO: 768328 - RNA, 19 nt, Artificial Sequence
  Description of Artificial Sequence: Synthetic oligonucleotide
cuaccacuccgagucucac

SEQ ID NO: 768329 - RNA, 19 nt, Artificial Sequence
  Description of Artificial Sequence: Synthetic oligonucleotide
gcuuuugaaugccgucuuc

SEQ ID NO: 768330 - RNA, 19 nt, Artificial Sequence
  Description of Artificial Sequence: Synthetic oligonucleotide
gcugguuaucaggccaaag

SEQ ID NO: 768331 - RNA, 19 nt, Artificial Sequence
  Description of Artificial Sequence: Synthetic oligonucleotide
cuuccucucggaggguauc

SEQ ID NO: 768332 - RNA, 19 nt, Artificial Sequence
  Description of Artificial Sequence: Synthetic oligonucleotide
gcauaaccauuccguagca

SEQ ID NO: 768333 - RNA, 19 nt, Artificial Sequence
  Description of Artificial Sequence: Synthetic oligonucleotide
cuaagcccaggugucaugu

SEQ ID NO: 768334 - RNA, 19 nt, Artificial Sequence
  Description of Artificial Sequence: Synthetic oligonucleotide
ggauccuauaggcgacuuc

SEQ ID NO: 768335 - RNA, 19 nt, Artificial Sequence
  Description of Artificial Sequence: Synthetic oligonucleotide
uggauccuauaggcgacuu

SEQ ID NO: 768336 - RNA, 19 nt, Artificial Sequence
  Description of Artificial Sequence: Synthetic oligonucleotide
agaggcgccuugaucuaga

SEQ ID NO: 768337 - RNA, 19 nt, Artificial Sequence
  Description of Artificial Sequence: Synthetic oligonucleotide
ugaugcuaauugggacaaa

SEQ ID NO: 768338 - RNA, 19 nt, Artificial Sequence
  Description of Artificial Sequence: Synthetic oligonucleotide
gcucauaggcauaaagagu

SEQ ID NO: 768339 - RNA, 19 nt, Artificial Sequence
  Description of Artificial Sequence: Synthetic oligonucleotide
cauuccguagcauggucuu

SEQ ID NO: 768340 - RNA, 19 nt, Artificial Sequence
  Description of Artificial Sequence: Synthetic oligonucleotide
ggguaucaacagaucuaag

SEQ ID NO: 768341 - RNA, 19 nt, Artificial Sequence
  Description of Artificial Sequence: Synthetic oligonucleotide
acccgcaguuuguggcuca

SEQ ID NO: 768342 - RNA, 19 nt, Artificial Sequence
  Description of Artificial Sequence: Synthetic oligonucleotide
guagcucaccaaccaauuu

SEQ ID NO: 768343 - RNA, 19 nt, Artificial Sequence
  Description of Artificial Sequence: Synthetic oligonucleotide
ccugccgcaauaacuggca

SEQ ID NO: 768344 - RNA, 19 nt, Artificial Sequence
  Description of Artificial Sequence: Synthetic oligonucleotide
gaauuccuagcagcucaua

SEQ ID NO: 768345 - RNA, 19 nt, Artificial Sequence
  Description of Artificial Sequence: Synthetic oligonucleotide
gaggcgccuugaucuagaa

SEQ ID NO: 768346 - RNA, 19 nt, Artificial Sequence
  Description of Artificial Sequence: Synthetic oligonucleotide
cguagugaaucucuucaga

SEQ ID NO: 768347 - RNA, 19 nt, Artificial Sequence
  Description of Artificial Sequence: Synthetic oligonucleotide
cacaauuccuuugaccauu

SEQ ID NO: 768348 - RNA, 19 nt, Artificial Sequence
  Description of Artificial Sequence: Synthetic oligonucleotide
cucccacccgcaguuugug

SEQ ID NO: 768349 - RNA, 19 nt, Artificial Sequence
  Description of Artificial Sequence: Synthetic oligonucleotide
cagcucguuguagcuuuug

SEQ ID NO: 768350 - RNA, 19 nt, Artificial Sequence
  Description of Artificial Sequence: Synthetic oligonucleotide
ccugacgcuagagagcgca

SEQ ID NO: 768351 - RNA, 19 nt, Artificial Sequence
  Description of Artificial Sequence: Synthetic oligonucleotide
gauggccuucccagucauc

SEQ ID NO: 768352 - RNA, 19 nt, Artificial Sequence
  Description of Artificial Sequence: Synthetic oligonucleotide
gcauccgagcauuucuugu

SEQ ID NO: 768353 - RNA, 19 nt, Artificial Sequence
  Description of Artificial Sequence: Synthetic oligonucleotide
gccugaguuaagcccuuga

SEQ ID NO: 768354 - RNA, 19 nt, Artificial Sequence
  Description of Artificial Sequence: Synthetic oligonucleotide
cguugcguagaaaggaaaa

SEQ ID NO: 768355 - RNA, 19 nt, Artificial Sequence
  Description of Artificial Sequence: Synthetic oligonucleotide
caacaggagcauaaccauu

SEQ ID NO: 768356 - RNA, 19 nt, Artificial Sequence
  Description of Artificial Sequence: Synthetic oligonucleotide
aggaucgaacuggcuuccu

SEQ ID NO: 768357 - RNA, 19 nt, Artificial Sequence
  Description of Artificial Sequence: Synthetic oligonucleotide
guuaagcccuugagccaca

SEQ ID NO: 768358 - RNA, 19 nt, Artificial Sequence
  Description of Artificial Sequence: Synthetic oligonucleotide
gugucggagcacaauuccu

SEQ ID NO: 768359 - RNA, 19 nt, Artificial Sequence
  Description of Artificial Sequence: Synthetic oligonucleotide
cgcaauaacuggcacaggu

SEQ ID NO: 768360 - RNA, 19 nt, Artificial Sequence
  Description of Artificial Sequence: Synthetic oligonucleotide
agaaggccccagacauucu

SEQ ID NO: 768361 - RNA, 19 nt, Artificial Sequence
  Description of Artificial Sequence: Synthetic oligonucleotide
agcugguuaucaggccaaa

SEQ ID NO: 768362 - RNA, 19 nt, Artificial Sequence
  Description of Artificial Sequence: Synthetic oligonucleotide
gggauguaucuuggcacca

SEQ ID NO: 768363 - RNA, 19 nt, Artificial Sequence
  Description of Artificial Sequence: Synthetic oligonucleotide
ggauguaucuuggcaccaa

SEQ ID NO: 768364 - RNA, 19 nt, Artificial Sequence
  Description of Artificial Sequence: Synthetic oligonucleotide
cgcccugacgcuagagagc

SEQ ID NO: 768365 - RNA, 19 nt, Artificial Sequence
  Description of Artificial Sequence: Synthetic oligonucleotide
gcaaggcuacagcuacuaa

SEQ ID NO: 768366 - RNA, 19 nt, Artificial Sequence
  Description of Artificial Sequence: Synthetic oligonucleotide
ccauuccguagcauggucu

SEQ ID NO: 768367 - RNA, 19 nt, Artificial Sequence
  Description of Artificial Sequence: Synthetic oligonucleotide
ggcaacuaccagaagccau

SEQ ID NO: 768368 - RNA, 19 nt, Artificial Sequence
  Description of Artificial Sequence: Synthetic oligonucleotide
cauaaccauuccguagcau

SEQ ID NO: 768369 - RNA, 19 nt, Artificial Sequence
  Description of Artificial Sequence: Synthetic oligonucleotide
cuuggcagagcgacuccuu

SEQ ID NO: 768370 - RNA, 19 nt, Artificial Sequence
  Description of Artificial Sequence: Synthetic oligonucleotide
ccgucuucguucacacaca

SEQ ID NO: 768371 - RNA, 19 nt, Artificial Sequence
  Description of Artificial Sequence: Synthetic oligonucleotide
cggaggguaucaacagauc

SEQ ID NO: 768372 - RNA, 19 nt, Artificial Sequence
  Description of Artificial Sequence: Synthetic oligonucleotide
gcaccaaguuauauggguu

SEQ ID NO: 768373 - RNA, 19 nt, Artificial Sequence
  Description of Artificial Sequence: Synthetic oligonucleotide
augccugaguuaagcccuu

SEQ ID NO: 768374 - RNA, 19 nt, Artificial Sequence
  Description of Artificial Sequence: Synthetic oligonucleotide
ccuuucuaccacuccgagu

SEQ ID NO: 768375 - RNA, 19 nt, Artificial Sequence
  Description of Artificial Sequence: Synthetic oligonucleotide
aggcgacuucagugacaaa

SEQ ID NO: 768376 - RNA, 19 nt, Artificial Sequence
  Description of Artificial Sequence: Synthetic oligonucleotide
cuggauccuauaggcgacu

SEQ ID NO: 768377 - RNA, 19 nt, Artificial Sequence
  Description of Artificial Sequence: Synthetic oligonucleotide
ccgcaauaacuggcacagg

SEQ ID NO: 768378 - RNA, 19 nt, Artificial Sequence
  Description of Artificial Sequence: Synthetic oligonucleotide
ccgagcauuucuuguaauu

SEQ ID NO: 768379 - RNA, 19 nt, Artificial Sequence
  Description of Artificial Sequence: Synthetic oligonucleotide
cgaauggcucccacccgca

SEQ ID NO: 768380 - RNA, 19 nt, Artificial Sequence
  Description of Artificial Sequence: Synthetic oligonucleotide
gcgccuugaucuagaagcu

SEQ ID NO: 768381 - RNA, 19 nt, Artificial Sequence
  Description of Artificial Sequence: Synthetic oligonucleotide
cugagcacauaaggagguu

SEQ ID NO: 768382 - RNA, 19 nt, Artificial Sequence
  Description of Artificial Sequence: Synthetic oligonucleotide
ggacagcucguuguagcuu

SEQ ID NO: 768383 - RNA, 19 nt, Artificial Sequence
  Description of Artificial Sequence: Synthetic oligonucleotide
gagcgacuccuugucccuu

SEQ ID NO: 768384 - RNA, 19 nt, Artificial Sequence
  Description of Artificial Sequence: Synthetic oligonucleotide
ccgccaaaggugcgccgca

SEQ ID NO: 768385 - RNA, 19 nt, Artificial Sequence
  Description of Artificial Sequence: Synthetic oligonucleotide
cccugucauugacaaggcu

SEQ ID NO: 768386 - RNA, 19 nt, Artificial Sequence
  Description of Artificial Sequence: Synthetic oligonucleotide
ccuuugugacugucacuau

SEQ ID NO: 768387 - RNA, 19 nt, Artificial Sequence
  Description of Artificial Sequence: Synthetic oligonucleotide
gucuugcauccgagcauuu

SEQ ID NO: 768388 - RNA, 19 nt, Artificial Sequence
  Description of Artificial Sequence: Synthetic oligonucleotide
cgaugcccauuuguggcaa

SEQ ID NO: 768389 - RNA, 19 nt, Artificial Sequence
  Description of Artificial Sequence: Synthetic oligonucleotide
cccgcaguuuguggcucau

SEQ ID NO: 768390 - RNA, 19 nt, Artificial Sequence
  Description of Artificial Sequence: Synthetic oligonucleotide
cgccaaaggugcgccgcau

SEQ ID NO: 768391 - RNA, 19 nt, Artificial Sequence
  Description of Artificial Sequence: Synthetic oligonucleotide
ccgcaguuuguggcucauu

SEQ ID NO: 768392 - RNA, 19 nt, Artificial Sequence
  Description of Artificial Sequence: Synthetic oligonucleotide
aaaacuuagaaacaauucg

SEQ ID NO: 768393 - RNA, 19 nt, Artificial Sequence
  Description of Artificial Sequence: Synthetic oligonucleotide
aauuuuaaggggcauaaag

SEQ ID NO: 768394 - RNA, 19 nt, Artificial Sequence
  Description of Artificial Sequence: Synthetic oligonucleotide
gaauuuacagaacagcgcg

SEQ ID NO: 768395 - RNA, 19 nt, Artificial Sequence
  Description of Artificial Sequence: Synthetic oligonucleotide
aacauugauauauauauuu

SEQ ID NO: 768396 - RNA, 19 nt, Artificial Sequence
  Description of Artificial Sequence: Synthetic oligonucleotide
ugacguaugucccagaggc

SEQ ID NO: 768397 - RNA, 19 nt, Artificial Sequence
  Description of Artificial Sequence: Synthetic oligonucleotide
aaacuuagaaacaauucgg

SEQ ID NO: 768398 - RNA, 19 nt, Artificial Sequence
  Description of Artificial Sequence: Synthetic oligonucleotide
cugaacacaauauugcccg

SEQ ID NO: 768399 - RNA, 19 nt, Artificial Sequence
  Description of Artificial Sequence: Synthetic oligonucleotide
uucaccuuauguaugaaug

SEQ ID NO: 768400 - RNA, 19 nt, Artificial Sequence
  Description of Artificial Sequence: Synthetic oligonucleotide
uuuaaggggcauaaagggg

SEQ ID NO: 768401 - RNA, 19 nt, Artificial Sequence
  Description of Artificial Sequence: Synthetic oligonucleotide
uuaaggggcauaaagggga

SEQ ID NO: 768402 - RNA, 19 nt, Artificial Sequence
  Description of Artificial Sequence: Synthetic oligonucleotide
guugguguuugcuagaacc

SEQ ID NO: 768403 - RNA, 19 nt, Artificial Sequence
  Description of Artificial Sequence: Synthetic oligonucleotide
agcaaaagcaacgugauug

SEQ ID NO: 768404 - RNA, 19 nt, Artificial Sequence
  Description of Artificial Sequence: Synthetic oligonucleotide
agcauguuaguuuccaagg

SEQ ID NO: 768405 - RNA, 19 nt, Artificial Sequence
  Description of Artificial Sequence: Synthetic oligonucleotide
aacagcgcgagaucgcugg

SEQ ID NO: 768406 - RNA, 19 nt, Artificial Sequence
  Description of Artificial Sequence: Synthetic oligonucleotide
uuugcuagaaccggguacg

SEQ ID NO: 768407 - RNA, 19 nt, Artificial Sequence
  Description of Artificial Sequence: Synthetic oligonucleotide
aacaauucggcaaagucca

SEQ ID NO: 768408 - RNA, 19 nt, Artificial Sequence
  Description of Artificial Sequence: Synthetic oligonucleotide
aaugcaucaggccuggaaa

SEQ ID NO: 768409 - RNA, 19 nt, Artificial Sequence
  Description of Artificial Sequence: Synthetic oligonucleotide
aaacggaggagagccaucc

SEQ ID NO: 768410 - RNA, 19 nt, Artificial Sequence
  Description of Artificial Sequence: Synthetic oligonucleotide
aguagugaaagcauguuag

SEQ ID NO: 768411 - RNA, 19 nt, Artificial Sequence
  Description of Artificial Sequence: Synthetic oligonucleotide
uugguguuugcuagaaccg

SEQ ID NO: 768412 - RNA, 19 nt, Artificial Sequence
  Description of Artificial Sequence: Synthetic oligonucleotide
uuuauugcagguugguucu

SEQ ID NO: 768413 - RNA, 19 nt, Artificial Sequence
  Description of Artificial Sequence: Synthetic oligonucleotide
uucggcaaaguccacagcu

SEQ ID NO: 768414 - RNA, 19 nt, Artificial Sequence
  Description of Artificial Sequence: Synthetic oligonucleotide
uguaugaaugcaucaggcc

SEQ ID NO: 768415 - RNA, 19 nt, Artificial Sequence
  Description of Artificial Sequence: Synthetic oligonucleotide
cacaauauugcccgguugg

SEQ ID NO: 768416 - RNA, 19 nt, Artificial Sequence
  Description of Artificial Sequence: Synthetic oligonucleotide
aauauugcccgguugguuu

SEQ ID NO: 768417 - RNA, 19 nt, Artificial Sequence
  Description of Artificial Sequence: Synthetic oligonucleotide
auguaugaaugcaucaggc

SEQ ID NO: 768418 - RNA, 19 nt, Artificial Sequence
  Description of Artificial Sequence: Synthetic oligonucleotide
cauguuaguuuccaaggcc

SEQ ID NO: 768419 - RNA, 19 nt, Artificial Sequence
  Description of Artificial Sequence: Synthetic oligonucleotide
gaaaaugggaacgggcgcg

SEQ ID NO: 768420 - RNA, 19 nt, Artificial Sequence
  Description of Artificial Sequence: Synthetic oligonucleotide
aaagcgaugccaagucacc

SEQ ID NO: 768421 - RNA, 19 nt, Artificial Sequence
  Description of Artificial Sequence: Synthetic oligonucleotide
agcgcggccaaugacagcc

SEQ ID NO: 768422 - RNA, 19 nt, Artificial Sequence
  Description of Artificial Sequence: Synthetic oligonucleotide
ucaccuuauguaugaaugc

SEQ ID NO: 768423 - RNA, 19 nt, Artificial Sequence
  Description of Artificial Sequence: Synthetic oligonucleotide
cuagagucaaaagcaaggg

SEQ ID NO: 768424 - RNA, 19 nt, Artificial Sequence
  Description of Artificial Sequence: Synthetic oligonucleotide
aagcaugaggggcauggag

SEQ ID NO: 768425 - RNA, 19 nt, Artificial Sequence
  Description of Artificial Sequence: Synthetic oligonucleotide
aaauucucagucaaucagu

SEQ ID NO: 768426 - RNA, 19 nt, Artificial Sequence
  Description of Artificial Sequence: Synthetic oligonucleotide
aagggguucaccuuaugua

SEQ ID NO: 768427 - RNA, 19 nt, Artificial Sequence
  Description of Artificial Sequence: Synthetic oligonucleotide
agaaucacagggcuggggu

SEQ ID NO: 768428 - RNA, 19 nt, Artificial Sequence
  Description of Artificial Sequence: Synthetic oligonucleotide
uugaacugaacacaauauu

SEQ ID NO: 768429 - RNA, 19 nt, Artificial Sequence
  Description of Artificial Sequence: Synthetic oligonucleotide
agugacguaugucccagag

SEQ ID NO: 768430 - RNA, 19 nt, Artificial Sequence
  Description of Artificial Sequence: Synthetic oligonucleotide
auuuacagaacagcgcgag

SEQ ID NO: 768431 - RNA, 19 nt, Artificial Sequence
  Description of Artificial Sequence: Synthetic oligonucleotide
uuacccucagcucuuggcu

SEQ ID NO: 768432 - RNA, 19 nt, Artificial Sequence
  Description of Artificial Sequence: Synthetic oligonucleotide
agccugaccucagaaagcc

SEQ ID NO: 768433 - RNA, 19 nt, Artificial Sequence
  Description of Artificial Sequence: Synthetic oligonucleotide
cacugauauagccauuccc

SEQ ID NO: 768434 - RNA, 19 nt, Artificial Sequence
  Description of Artificial Sequence: Synthetic oligonucleotide
agaugguuucagaacagcg

SEQ ID NO: 768435 - RNA, 19 nt, Artificial Sequence
  Description of Artificial Sequence: Synthetic oligonucleotide
cagaaguguuuauugcagg

SEQ ID NO: 768436 - RNA, 19 nt, Artificial Sequence
  Description of Artificial Sequence: Synthetic oligonucleotide
ugcccuuacccucagcucu

SEQ ID NO: 768437 - RNA, 19 nt, Artificial Sequence
  Description of Artificial Sequence: Synthetic oligonucleotide
accagcgcauuacacagag

SEQ ID NO: 768438 - RNA, 19 nt, Artificial Sequence
  Description of Artificial Sequence: Synthetic oligonucleotide
gaaagcgaugccaagucac

SEQ ID NO: 768439 - RNA, 19 nt, Artificial Sequence
  Description of Artificial Sequence: Synthetic oligonucleotide
agcgaucucaucacagugc

SEQ ID NO: 768440 - RNA, 19 nt, Artificial Sequence
  Description of Artificial Sequence: Synthetic oligonucleotide
aaaaugggaacgggcgcgg

SEQ ID NO: 768441 - RNA, 19 nt, Artificial Sequence
  Description of Artificial Sequence: Synthetic oligonucleotide
agcgaugccaagucaccac

SEQ ID NO: 768442 - RNA, 19 nt, Artificial Sequence
  Description of Artificial Sequence: Synthetic oligonucleotide
gggacaaaucuuuuguugc

SEQ ID NO: 768443 - RNA, 19 nt, Artificial Sequence
  Description of Artificial Sequence: Synthetic oligonucleotide
agcggcaugggauguuagc

SEQ ID NO: 768444 - RNA, 19 nt, Artificial Sequence
  Description of Artificial Sequence: Synthetic oligonucleotide
acagaaguguuuauugcag

SEQ ID NO: 768445 - RNA, 19 nt, Artificial Sequence
  Description of Artificial Sequence: Synthetic oligonucleotide
guuugcuagaaccggguac

SEQ ID NO: 768446 - RNA, 19 nt, Artificial Sequence
  Description of Artificial Sequence: Synthetic oligonucleotide
guaugaaugcaucaggccu

SEQ ID NO: 768447 - RNA, 19 nt, Artificial Sequence
  Description of Artificial Sequence: Synthetic oligonucleotide
gaagagagucucaaagcug

SEQ ID NO: 768448 - RNA, 19 nt, Artificial Sequence
  Description of Artificial Sequence: Synthetic oligonucleotide
ugaaagcauguuaguuucc

SEQ ID NO: 768449 - RNA, 19 nt, Artificial Sequence
  Description of Artificial Sequence: Synthetic oligonucleotide
ugguguuugcuagaaccgg

SEQ ID NO: 768450 - RNA, 19 nt, Artificial Sequence
  Description of Artificial Sequence: Synthetic oligonucleotide
cuucauaauugaccuggcc

SEQ ID NO: 768451 - RNA, 19 nt, Artificial Sequence
  Description of Artificial Sequence: Synthetic oligonucleotide
uucagaacagcgccagcga

SEQ ID NO: 768452 - RNA, 19 nt, Artificial Sequence
  Description of Artificial Sequence: Synthetic oligonucleotide
aucgcuggagggaugaggg

SEQ ID NO: 768453 - RNA, 19 nt, Artificial Sequence
  Description of Artificial Sequence: Synthetic oligonucleotide
uucgcggucaucaucugua

SEQ ID NO: 768454 - RNA, 19 nt, Artificial Sequence
  Description of Artificial Sequence: Synthetic oligonucleotide
cuuuaguuggcccggcaug

SEQ ID NO: 768455 - RNA, 19 nt, Artificial Sequence
  Description of Artificial Sequence: Synthetic oligonucleotide
ucccgauaugcccuguccc

SEQ ID NO: 768456 - RNA, 19 nt, Artificial Sequence
  Description of Artificial Sequence: Synthetic oligonucleotide
aguguuuauugcagguugg

SEQ ID NO: 768457 - RNA, 19 nt, Artificial Sequence
  Description of Artificial Sequence: Synthetic oligonucleotide
cucggcggcacugauauag

SEQ ID NO: 768458 - RNA, 19 nt, Artificial Sequence
  Description of Artificial Sequence: Synthetic oligonucleotide
cuagaaccggguacgcagg

SEQ ID NO: 768459 - RNA, 19 nt, Artificial Sequence
  Description of Artificial Sequence: Synthetic oligonucleotide
gcuagaaccggguacgcag

SEQ ID NO: 768460 - RNA, 19 nt, Artificial Sequence
  Description of Artificial Sequence: Synthetic oligonucleotide
aguugguguuugcuagaac

SEQ ID NO: 768461 - RNA, 19 nt, Artificial Sequence
  Description of Artificial Sequence: Synthetic oligonucleotide
uagaaccggguacgcaggg

SEQ ID NO: 768462 - RNA, 19 nt, Artificial Sequence
  Description of Artificial Sequence: Synthetic oligonucleotide
agggguucaccuuauguau

SEQ ID NO: 768463 - RNA, 19 nt, Artificial Sequence
  Description of Artificial Sequence: Synthetic oligonucleotide
agcgcgagaucgcuggagg

SEQ ID NO: 768464 - RNA, 19 nt, Artificial Sequence
  Description of Artificial Sequence: Synthetic oligonucleotide
uuuaguuggcccggcaugu

SEQ ID NO: 768465 - RNA, 19 nt, Artificial Sequence
  Description of Artificial Sequence: Synthetic oligonucleotide
aauucucagucaaucaguu

SEQ ID NO: 768466 - RNA, 19 nt, Artificial Sequence
  Description of Artificial Sequence: Synthetic oligonucleotide
ggaauuuacagaacagcgc

SEQ ID NO: 768467 - RNA, 19 nt, Artificial Sequence
  Description of Artificial Sequence: Synthetic oligonucleotide
aauuuacagaacagcgcga

SEQ ID NO: 768468 - RNA, 19 nt, Artificial Sequence
  Description of Artificial Sequence: Synthetic oligonucleotide
acgucauucuuggaccagc

SEQ ID NO: 768469 - RNA, 19 nt, Artificial Sequence
  Description of Artificial Sequence: Synthetic oligonucleotide
gaucgcuggagggaugagg

SEQ ID NO: 768470 - RNA, 19 nt, Artificial Sequence
  Description of Artificial Sequence: Synthetic oligonucleotide
acacaauauugcccgguug

SEQ ID NO: 768471 - RNA, 19 nt, Artificial Sequence
  Description of Artificial Sequence: Synthetic oligonucleotide
agguucgucaugacguggc

SEQ ID NO: 768472 - RNA, 19 nt, Artificial Sequence
  Description of Artificial Sequence: Synthetic oligonucleotide
auguuaguuuccaaggccu

SEQ ID NO: 768473 - RNA, 19 nt, Artificial Sequence
  Description of Artificial Sequence: Synthetic oligonucleotide
agugugaucggcagcgcgg

SEQ ID NO: 768474 - RNA, 19 nt, Artificial Sequence
  Description of Artificial Sequence: Synthetic oligonucleotide
aaaacggaggagagccauc

SEQ ID NO: 768475 - RNA, 19 nt, Artificial Sequence
  Description of Artificial Sequence: Synthetic oligonucleotide
gugacguaugucccagagg

SEQ ID NO: 768476 - RNA, 19 nt, Artificial Sequence
  Description of Artificial Sequence: Synthetic oligonucleotide
agcgcauuacacagaggcc

SEQ ID NO: 768477 - RNA, 19 nt, Artificial Sequence
  Description of Artificial Sequence: Synthetic oligonucleotide
guaacugccccacguugag

SEQ ID NO: 768478 - RNA, 19 nt, Artificial Sequence
  Description of Artificial Sequence: Synthetic oligonucleotide
ugaccucagaaagccagcc

SEQ ID NO: 768479 - RNA, 19 nt, Artificial Sequence
  Description of Artificial Sequence: Synthetic oligonucleotide
ggaaaaugggaacgggcgc

SEQ ID NO: 768480 - RNA, 19 nt, Artificial Sequence
  Description of Artificial Sequence: Synthetic oligonucleotide
ucuccccacccuuuaguug

SEQ ID NO: 768481 - RNA, 19 nt, Artificial Sequence
  Description of Artificial Sequence: Synthetic oligonucleotide
uagaaacaauucggcaaag

SEQ ID NO: 768482 - RNA, 19 nt, Artificial Sequence
  Description of Artificial Sequence: Synthetic oligonucleotide
gagugcguccguccguccg

SEQ ID NO: 768483 - RNA, 19 nt, Artificial Sequence
  Description of Artificial Sequence: Synthetic oligonucleotide
gagagucucaaagcugggc

SEQ ID NO: 768484 - RNA, 19 nt, Artificial Sequence
  Description of Artificial Sequence: Synthetic oligonucleotide
gaaccggguacgcagggga

SEQ ID NO: 768485 - RNA, 19 nt, Artificial Sequence
  Description of Artificial Sequence: Synthetic oligonucleotide
uguuugcuagaaccgggua

SEQ ID NO: 768486 - RNA, 19 nt, Artificial Sequence
  Description of Artificial Sequence: Synthetic oligonucleotide
agaaacaauucggcaaagu

SEQ ID NO: 768487 - RNA, 19 nt, Artificial Sequence
  Description of Artificial Sequence: Synthetic oligonucleotide
uguuaguuuccaaggccuu

SEQ ID NO: 768488 - RNA, 19 nt, Artificial Sequence
  Description of Artificial Sequence: Synthetic oligonucleotide
gcauguuaguuuccaaggc

SEQ ID NO: 768489 - RNA, 19 nt, Artificial Sequence
  Description of Artificial Sequence: Synthetic oligonucleotide
cagcgaucucaucacagug

SEQ ID NO: 768490 - RNA, 19 nt, Artificial Sequence
  Description of Artificial Sequence: Synthetic oligonucleotide
gacguggcgcagcucggcg

SEQ ID NO: 768491 - RNA, 19 nt, Artificial Sequence
  Description of Artificial Sequence: Synthetic oligonucleotide
cagugugaucggcagcgcg

SEQ ID NO: 768492 - RNA, 19 nt, Artificial Sequence
  Description of Artificial Sequence: Synthetic oligonucleotide
ggcaugggauguuagcacc

SEQ ID NO: 768493 - RNA, 19 nt, Artificial Sequence
  Description of Artificial Sequence: Synthetic oligonucleotide
gguguuugcuagaaccggg

SEQ ID NO: 768494 - RNA, 19 nt, Artificial Sequence
  Description of Artificial Sequence: Synthetic oligonucleotide
gagguuacucuggcggcgg

SEQ ID NO: 768495 - RNA, 19 nt, Artificial Sequence
  Description of Artificial Sequence: Synthetic oligonucleotide
gcgaucucaucacagugcc

SEQ ID NO: 768496 - RNA, 19 nt, Artificial Sequence
  Description of Artificial Sequence: Synthetic oligonucleotide
cucccgauaugcccugucc

SEQ ID NO: 768497 - RNA, 19 nt, Artificial Sequence
  Description of Artificial Sequence: Synthetic oligonucleotide
accccggcacccuaagaag

SEQ ID NO: 768498 - RNA, 19 nt, Artificial Sequence
  Description of Artificial Sequence: Synthetic oligonucleotide
cagaacagcgcgagaucgc

SEQ ID NO: 768499 - RNA, 19 nt, Artificial Sequence
  Description of Artificial Sequence: Synthetic oligonucleotide
guuacucuggcggcggcag

SEQ ID NO: 768500 - RNA, 19 nt, Artificial Sequence
  Description of Artificial Sequence: Synthetic oligonucleotide
ucaguagugaaagcauguu

SEQ ID NO: 768501 - RNA, 19 nt, Artificial Sequence
  Description of Artificial Sequence: Synthetic oligonucleotide
agcgagacccgagugcguc

SEQ ID NO: 768502 - RNA, 19 nt, Artificial Sequence
  Description of Artificial Sequence: Synthetic oligonucleotide
gguuucagaacagcgccag

SEQ ID NO: 768503 - RNA, 19 nt, Artificial Sequence
  Description of Artificial Sequence: Synthetic oligonucleotide
agguuacucuggcggcggc

SEQ ID NO: 768504 - RNA, 19 nt, Artificial Sequence
  Description of Artificial Sequence: Synthetic oligonucleotide
agaacagcgcgagaucgcu

SEQ ID NO: 768505 - RNA, 19 nt, Artificial Sequence
  Description of Artificial Sequence: Synthetic oligonucleotide
gagcucgagguuacucugg

SEQ ID NO: 768506 - RNA, 19 nt, Artificial Sequence
  Description of Artificial Sequence: Synthetic oligonucleotide
cauggcgaggcaccgggug

SEQ ID NO: 768507 - RNA, 19 nt, Artificial Sequence
  Description of Artificial Sequence: Synthetic oligonucleotide
acguugagugacguauguc

SEQ ID NO: 768508 - RNA, 19 nt, Artificial Sequence
  Description of Artificial Sequence: Synthetic oligonucleotide
ucggcaaaguccacagcuu

SEQ ID NO: 768509 - RNA, 19 nt, Artificial Sequence
  Description of Artificial Sequence: Synthetic oligonucleotide
caccuuauguaugaaugca

SEQ ID NO: 768510 - RNA, 19 nt, Artificial Sequence
  Description of Artificial Sequence: Synthetic oligonucleotide
gacuguaacugccccacgu

SEQ ID NO: 768511 - RNA, 19 nt, Artificial Sequence
  Description of Artificial Sequence: Synthetic oligonucleotide
aaggggcauaaaggggaag

SEQ ID NO: 768512 - RNA, 19 nt, Artificial Sequence
  Description of Artificial Sequence: Synthetic oligonucleotide
acccgagugcguccguccg

SEQ ID NO: 768513 - RNA, 19 nt, Artificial Sequence
  Description of Artificial Sequence: Synthetic oligonucleotide
cagggcgagggcagaaagc

SEQ ID NO: 768514 - RNA, 19 nt, Artificial Sequence
  Description of Artificial Sequence: Synthetic oligonucleotide
caacgugauugcccugggg

SEQ ID NO: 768515 - RNA, 19 nt, Artificial Sequence
  Description of Artificial Sequence: Synthetic oligonucleotide
ucggcggcacugauauagc

SEQ ID NO: 768516 - RNA, 19 nt, Artificial Sequence
  Description of Artificial Sequence: Synthetic oligonucleotide
guuaguuuccaaggccuuc

SEQ ID NO: 768517 - RNA, 19 nt, Artificial Sequence
  Description of Artificial Sequence: Synthetic oligonucleotide
acguaugucccagaggcua

SEQ ID NO: 768518 - RNA, 19 nt, Artificial Sequence
  Description of Artificial Sequence: Synthetic oligonucleotide
ggagcucgagguuacucug

SEQ ID NO: 768519 - RNA, 19 nt, Artificial Sequence
  Description of Artificial Sequence: Synthetic oligonucleotide
caugggauguuagcaccag

SEQ ID NO: 768520 - RNA, 19 nt, Artificial Sequence
  Description of Artificial Sequence: Synthetic oligonucleotide
ccacccuuuaguuggcccg

SEQ ID NO: 768521 - RNA, 19 nt, Artificial Sequence
  Description of Artificial Sequence: Synthetic oligonucleotide
agaaccggguacgcagggg

SEQ ID NO: 768522 - RNA, 19 nt, Artificial Sequence
  Description of Artificial Sequence: Synthetic oligonucleotide
ucggcagcgcggccaauga

SEQ ID NO: 768523 - RNA, 19 nt, Artificial Sequence
  Description of Artificial Sequence: Synthetic oligonucleotide
guagugaaagcauguuagu

SEQ ID NO: 768524 - RNA, 19 nt, Artificial Sequence
  Description of Artificial Sequence: Synthetic oligonucleotide
gagaucgcuggagggauga

SEQ ID NO: 768525 - RNA, 19 nt, Artificial Sequence
  Description of Artificial Sequence: Synthetic oligonucleotide
aguuggcccggcauguuug

SEQ ID NO: 768526 - RNA, 19 nt, Artificial Sequence
  Description of Artificial Sequence: Synthetic oligonucleotide
ucgccgucaaugucagccu

SEQ ID NO: 768527 - RNA, 19 nt, Artificial Sequence
  Description of Artificial Sequence: Synthetic oligonucleotide
gagcagucaugcagcuugg

SEQ ID NO: 768528 - RNA, 19 nt, Artificial Sequence
  Description of Artificial Sequence: Synthetic oligonucleotide
ugcuagaaccggguacgca

SEQ ID NO: 768529 - RNA, 19 nt, Artificial Sequence
  Description of Artificial Sequence: Synthetic oligonucleotide
cucccucaaggcuggugcc

SEQ ID NO: 768530 - RNA, 19 nt, Artificial Sequence
  Description of Artificial Sequence: Synthetic oligonucleotide
ugcaucaggccuggaaaau

SEQ ID NO: 768531 - RNA, 19 nt, Artificial Sequence
  Description of Artificial Sequence: Synthetic oligonucleotide
ugaucggcagcgcggccaa

SEQ ID NO: 768532 - RNA, 19 nt, Artificial Sequence
  Description of Artificial Sequence: Synthetic oligonucleotide
cagguucgucaugacgugg

SEQ ID NO: 768533 - RNA, 19 nt, Artificial Sequence
  Description of Artificial Sequence: Synthetic oligonucleotide
cacccuuuaguuggcccgg

SEQ ID NO: 768534 - RNA, 19 nt, Artificial Sequence
  Description of Artificial Sequence: Synthetic oligonucleotide
acaauucggcaaaguccac

SEQ ID NO: 768535 - RNA, 19 nt, Artificial Sequence
  Description of Artificial Sequence: Synthetic oligonucleotide
ucucccgauaugcccuguc

SEQ ID NO: 768536 - RNA, 19 nt, Artificial Sequence
  Description of Artificial Sequence: Synthetic oligonucleotide
ggguucaccuuauguauga

SEQ ID NO: 768537 - RNA, 19 nt, Artificial Sequence
  Description of Artificial Sequence: Synthetic oligonucleotide
acccuaagaagggccaaca

SEQ ID NO: 768538 - RNA, 19 nt, Artificial Sequence
  Description of Artificial Sequence: Synthetic oligonucleotide
ucgcggucaucaucuguac

SEQ ID NO: 768539 - RNA, 19 nt, Artificial Sequence
  Description of Artificial Sequence: Synthetic oligonucleotide
acgcaggggaguguugaag

SEQ ID NO: 768540 - RNA, 19 nt, Artificial Sequence
  Description of Artificial Sequence: Synthetic oligonucleotide
cuugucgaagagggagaag

SEQ ID NO: 768541 - RNA, 19 nt, Artificial Sequence
  Description of Artificial Sequence: Synthetic oligonucleotide
ccagaugguuucagaacag

SEQ ID NO: 768542 - RNA, 19 nt, Artificial Sequence
  Description of Artificial Sequence: Synthetic oligonucleotide
agcagucaugcagcuuggg

SEQ ID NO: 768543 - RNA, 19 nt, Artificial Sequence
  Description of Artificial Sequence: Synthetic oligonucleotide
uugcccgguugguuuaaaa

SEQ ID NO: 768544 - RNA, 19 nt, Artificial Sequence
  Description of Artificial Sequence: Synthetic oligonucleotide
augggaacgggcgcgggga

SEQ ID NO: 768545 - RNA, 19 nt, Artificial Sequence
  Description of Artificial Sequence: Synthetic oligonucleotide
ggauguuagcaccaggaau

SEQ ID NO: 768546 - RNA, 19 nt, Artificial Sequence
  Description of Artificial Sequence: Synthetic oligonucleotide
ccagcgagacccgagugcg

SEQ ID NO: 768547 - RNA, 19 nt, Artificial Sequence
  Description of Artificial Sequence: Synthetic oligonucleotide
guucaccuuauguaugaau

SEQ ID NO: 768548 - RNA, 19 nt, Artificial Sequence
  Description of Artificial Sequence: Synthetic oligonucleotide
ugcaagccacagaggcaga

SEQ ID NO: 768549 - RNA, 19 nt, Artificial Sequence
  Description of Artificial Sequence: Synthetic oligonucleotide
acccuuuaguuggcccggc

SEQ ID NO: 768550 - RNA, 19 nt, Artificial Sequence
  Description of Artificial Sequence: Synthetic oligonucleotide
gugugaucggcagcgcggc

SEQ ID NO: 768551 - RNA, 19 nt, Artificial Sequence
  Description of Artificial Sequence: Synthetic oligonucleotide
gcacugauauagccauucc

SEQ ID NO: 768552 - RNA, 19 nt, Artificial Sequence
  Description of Artificial Sequence: Synthetic oligonucleotide
cuccccucuuggcaccccg

SEQ ID NO: 768553 - RNA, 19 nt, Artificial Sequence
  Description of Artificial Sequence: Synthetic oligonucleotide
uguuagcaccaggaauuua

SEQ ID NO: 768554 - RNA, 19 nt, Artificial Sequence
  Description of Artificial Sequence: Synthetic oligonucleotide
gaacagcgcgagaucgcug

SEQ ID NO: 768555 - RNA, 19 nt, Artificial Sequence
  Description of Artificial Sequence: Synthetic oligonucleotide
ugacguggcgcagcucggc

SEQ ID NO: 768556 - RNA, 19 nt, Artificial Sequence
  Description of Artificial Sequence: Synthetic oligonucleotide
ucgcuccccuccccacugg

SEQ ID NO: 768557 - RNA, 19 nt, Artificial Sequence
  Description of Artificial Sequence: Synthetic oligonucleotide
aucggcagcgcggccaaug

SEQ ID NO: 768558 - RNA, 19 nt, Artificial Sequence
  Description of Artificial Sequence: Synthetic oligonucleotide
cuuggaccagcccuggacu

SEQ ID NO: 768559 - RNA, 19 nt, Artificial Sequence
  Description of Artificial Sequence: Synthetic oligonucleotide
uacgcaggggaguguugaa

SEQ ID NO: 768560 - RNA, 19 nt, Artificial Sequence
  Description of Artificial Sequence: Synthetic oligonucleotide
ugcucugcgcggcggccca

SEQ ID NO: 768561 - RNA, 19 nt, Artificial Sequence
  Description of Artificial Sequence: Synthetic oligonucleotide
cucgcuccccuccccacug

SEQ ID NO: 768562 - RNA, 19 nt, Artificial Sequence
  Description of Artificial Sequence: Synthetic oligonucleotide
cacgucauucuuggaccag

SEQ ID NO: 768563 - RNA, 19 nt, Artificial Sequence
  Description of Artificial Sequence: Synthetic oligonucleotide
gcaacgugauugcccuggg

SEQ ID NO: 768564 - RNA, 19 nt, Artificial Sequence
  Description of Artificial Sequence: Synthetic oligonucleotide
gaagcaugaggggcaugga

SEQ ID NO: 768565 - RNA, 19 nt, Artificial Sequence
  Description of Artificial Sequence: Synthetic oligonucleotide
cacccuaagaagggccaac

SEQ ID NO: 768566 - RNA, 19 nt, Artificial Sequence
  Description of Artificial Sequence: Synthetic oligonucleotide
cccggcacccuaagaaggg

SEQ ID NO: 768567 - RNA, 19 nt, Artificial Sequence
  Description of Artificial Sequence: Synthetic oligonucleotide
gggauguuagcaccaggaa

SEQ ID NO: 768568 - RNA, 19 nt, Artificial Sequence
  Description of Artificial Sequence: Synthetic oligonucleotide
cccagacuguaacugcccc

SEQ ID NO: 768569 - RNA, 19 nt, Artificial Sequence
  Description of Artificial Sequence: Synthetic oligonucleotide
aacgggcgcggggaggcca

SEQ ID NO: 768570 - RNA, 19 nt, Artificial Sequence
  Description of Artificial Sequence: Synthetic oligonucleotide
augacguggcgcagcucgg

SEQ ID NO: 768571 - RNA, 19 nt, Artificial Sequence
  Description of Artificial Sequence: Synthetic oligonucleotide
ggacaagggguucaccuua

SEQ ID NO: 768572 - RNA, 19 nt, Artificial Sequence
  Description of Artificial Sequence: Synthetic oligonucleotide
gugaucggcagcgcggcca

SEQ ID NO: 768573 - RNA, 19 nt, Artificial Sequence
  Description of Artificial Sequence: Synthetic oligonucleotide
gggguucaccuuauguaug

SEQ ID NO: 768574 - RNA, 19 nt, Artificial Sequence
  Description of Artificial Sequence: Synthetic oligonucleotide
uauugcccgguugguuuaa

SEQ ID NO: 768575 - RNA, 19 nt, Artificial Sequence
  Description of Artificial Sequence: Synthetic oligonucleotide
gggacucaacucccucucc

SEQ ID NO: 768576 - RNA, 19 nt, Artificial Sequence
  Description of Artificial Sequence: Synthetic oligonucleotide
caggggaguguugaagaga

SEQ ID NO: 768577 - RNA, 19 nt, Artificial Sequence
  Description of Artificial Sequence: Synthetic oligonucleotide
gcgcgagaucgcuggaggg

SEQ ID NO: 768578 - RNA, 19 nt, Artificial Sequence
  Description of Artificial Sequence: Synthetic oligonucleotide
gagugacguaugucccaga

SEQ ID NO: 768579 - RNA, 19 nt, Artificial Sequence
  Description of Artificial Sequence: Synthetic oligonucleotide
gguagagaagagagucuca

SEQ ID NO: 768580 - RNA, 19 nt, Artificial Sequence
  Description of Artificial Sequence: Synthetic oligonucleotide
caaaagcaaggguggggua

SEQ ID NO: 768581 - RNA, 19 nt, Artificial Sequence
  Description of Artificial Sequence: Synthetic oligonucleotide
ccauccgggccagaggagg

SEQ ID NO: 768582 - RNA, 19 nt, Artificial Sequence
  Description of Artificial Sequence: Synthetic oligonucleotide
gcgaugccaagucaccaca

SEQ ID NO: 768583 - RNA, 19 nt, Artificial Sequence
  Description of Artificial Sequence: Synthetic oligonucleotide
ggcagcgcggccaaugaca

SEQ ID NO: 768584 - RNA, 19 nt, Artificial Sequence
  Description of Artificial Sequence: Synthetic oligonucleotide
gucaugacguggcgcagcu

SEQ ID NO: 768585 - RNA, 19 nt, Artificial Sequence
  Description of Artificial Sequence: Synthetic oligonucleotide
cauccgggccagaggagga

SEQ ID NO: 768586 - RNA, 19 nt, Artificial Sequence
  Description of Artificial Sequence: Synthetic oligonucleotide
ugggcauggugggacucaa

SEQ ID NO: 768587 - RNA, 19 nt, Artificial Sequence
  Description of Artificial Sequence: Synthetic oligonucleotide
gcggcaugggauguuagca

SEQ ID NO: 768588 - RNA, 19 nt, Artificial Sequence
  Description of Artificial Sequence: Synthetic oligonucleotide
agaucgcuggagggaugag

SEQ ID NO: 768589 - RNA, 19 nt, Artificial Sequence
  Description of Artificial Sequence: Synthetic oligonucleotide
ccagguucgucaugacgug

SEQ ID NO: 768590 - RNA, 19 nt, Artificial Sequence
  Description of Artificial Sequence: Synthetic oligonucleotide
ggcggcacugauauagcca

SEQ ID NO: 768591 - RNA, 19 nt, Artificial Sequence
  Description of Artificial Sequence: Synthetic oligonucleotide
cagcgcgagaucgcuggag

SEQ ID NO: 768592 - RNA, 19 nt, Artificial Sequence
  Description of Artificial Sequence: Synthetic oligonucleotide
uuaguuggcccggcauguu

SEQ ID NO: 768593 - RNA, 19 nt, Artificial Sequence
  Description of Artificial Sequence: Synthetic oligonucleotide
accggguacgcaggggagu

SEQ ID NO: 768594 - RNA, 19 nt, Artificial Sequence
  Description of Artificial Sequence: Synthetic oligonucleotide
ggcaccggguguccggagc

SEQ ID NO: 768595 - RNA, 19 nt, Artificial Sequence
  Description of Artificial Sequence: Synthetic oligonucleotide
cacguugagugacguaugu

SEQ ID NO: 768596 - RNA, 19 nt, Artificial Sequence
  Description of Artificial Sequence: Synthetic oligonucleotide
cgauaugcccugucccucc

SEQ ID NO: 768597 - RNA, 19 nt, Artificial Sequence
  Description of Artificial Sequence: Synthetic oligonucleotide
gguguccggagcucgaggu

SEQ ID NO: 768598 - RNA, 19 nt, Artificial Sequence
  Description of Artificial Sequence: Synthetic oligonucleotide
uuauugcagguugguucuu

SEQ ID NO: 768599 - RNA, 19 nt, Artificial Sequence
  Description of Artificial Sequence: Synthetic oligonucleotide
guaugucccagaggcuaga

SEQ ID NO: 768600 - RNA, 19 nt, Artificial Sequence
  Description of Artificial Sequence: Synthetic oligonucleotide
ccacguugagugacguaug

SEQ ID NO: 768601 - RNA, 19 nt, Artificial Sequence
  Description of Artificial Sequence: Synthetic oligonucleotide
ugaaugcaucaggccugga

SEQ ID NO: 768602 - RNA, 19 nt, Artificial Sequence
  Description of Artificial Sequence: Synthetic oligonucleotide
caguugguguuugcuagaa

SEQ ID NO: 768603 - RNA, 19 nt, Artificial Sequence
  Description of Artificial Sequence: Synthetic oligonucleotide
gaggggcauggagggcggg

SEQ ID NO: 768604 - RNA, 19 nt, Artificial Sequence
  Description of Artificial Sequence: Synthetic oligonucleotide
ucaugccuaccugcccuua

SEQ ID NO: 768605 - RNA, 19 nt, Artificial Sequence
  Description of Artificial Sequence: Synthetic oligonucleotide
gaggcaccggguguccgga

SEQ ID NO: 768606 - RNA, 19 nt, Artificial Sequence
  Description of Artificial Sequence: Synthetic oligonucleotide
gccgucaaugucagccucc

SEQ ID NO: 768607 - RNA, 19 nt, Artificial Sequence
  Description of Artificial Sequence: Synthetic oligonucleotide
cgaugccaagucaccacag

SEQ ID NO: 768608 - RNA, 19 nt, Artificial Sequence
  Description of Artificial Sequence: Synthetic oligonucleotide
ggcacccuaagaagggcca

SEQ ID NO: 768609 - RNA, 19 nt, Artificial Sequence
  Description of Artificial Sequence: Synthetic oligonucleotide
gcggcacugauauagccau

SEQ ID NO: 768610 - RNA, 19 nt, Artificial Sequence
  Description of Artificial Sequence: Synthetic oligonucleotide
ccagcgcauuacacagagg

SEQ ID NO: 768611 - RNA, 19 nt, Artificial Sequence
  Description of Artificial Sequence: Synthetic oligonucleotide
ccccucaguagugaaagca

SEQ ID NO: 768612 - RNA, 19 nt, Artificial Sequence
  Description of Artificial Sequence: Synthetic oligonucleotide
caccagcgcauuacacaga

SEQ ID NO: 768613 - RNA, 19 nt, Artificial Sequence
  Description of Artificial Sequence: Synthetic oligonucleotide
gcgagagaagagaccagga

SEQ ID NO: 768614 - RNA, 19 nt, Artificial Sequence
  Description of Artificial Sequence: Synthetic oligonucleotide
gacguaugucccagaggcu

SEQ ID NO: 768615 - RNA, 19 nt, Artificial Sequence
  Description of Artificial Sequence: Synthetic oligonucleotide
ccagacuguaacugcccca

SEQ ID NO: 768616 - RNA, 19 nt, Artificial Sequence
  Description of Artificial Sequence: Synthetic oligonucleotide
cgagguuacucuggcggcg

SEQ ID NO: 768617 - RNA, 19 nt, Artificial Sequence
  Description of Artificial Sequence: Synthetic oligonucleotide
cggcacccuaagaagggcc

SEQ ID NO: 768618 - RNA, 19 nt, Artificial Sequence
  Description of Artificial Sequence: Synthetic oligonucleotide
gcgagacccgagugcgucc

SEQ ID NO: 768619 - RNA, 19 nt, Artificial Sequence
  Description of Artificial Sequence: Synthetic oligonucleotide
ggcaaaggccucgcucccc

SEQ ID NO: 768620 - RNA, 19 nt, Artificial Sequence
  Description of Artificial Sequence: Synthetic oligonucleotide
guccggagcucgagguuac

SEQ ID NO: 768621 - RNA, 19 nt, Artificial Sequence
  Description of Artificial Sequence: Synthetic oligonucleotide
ccgggccuucacuucgcgg

SEQ ID NO: 768622 - RNA, 19 nt, Artificial Sequence
  Description of Artificial Sequence: Synthetic oligonucleotide
auugcccgguugguuuaaa

SEQ ID NO: 768623 - RNA, 19 nt, Artificial Sequence
  Description of Artificial Sequence: Synthetic oligonucleotide
gguuacucuggcggcggca

SEQ ID NO: 768624 - RNA, 19 nt, Artificial Sequence
  Description of Artificial Sequence: Synthetic oligonucleotide
gugcccgcggcgugcucug

SEQ ID NO: 768625 - RNA, 19 nt, Artificial Sequence
  Description of Artificial Sequence: Synthetic oligonucleotide
ccccucuuggcaccccgcc

SEQ ID NO: 768626 - RNA, 19 nt, Artificial Sequence
  Description of Artificial Sequence: Synthetic oligonucleotide
caauauugcccgguugguu

SEQ ID NO: 768627 - RNA, 19 nt, Artificial Sequence
  Description of Artificial Sequence: Synthetic oligonucleotide
cgaggcaccggguguccgg

SEQ ID NO: 768628 - RNA, 19 nt, Artificial Sequence
  Description of Artificial Sequence: Synthetic oligonucleotide
cggcggcacugauauagcc

SEQ ID NO: 768629 - RNA, 19 nt, Artificial Sequence
  Description of Artificial Sequence: Synthetic oligonucleotide
gaacgggcgcggggaggcc

SEQ ID NO: 768630 - RNA, 19 nt, Artificial Sequence
  Description of Artificial Sequence: Synthetic oligonucleotide
ggcgugcucugcgcggcgg

SEQ ID NO: 768631 - RNA, 19 nt, Artificial Sequence
  Description of Artificial Sequence: Synthetic oligonucleotide
gguucaccuuauguaugaa

SEQ ID NO: 768632 - RNA, 19 nt, Artificial Sequence
  Description of Artificial Sequence: Synthetic oligonucleotide
cgagacccgagugcguccg

SEQ ID NO: 768633 - RNA, 19 nt, Artificial Sequence
  Description of Artificial Sequence: Synthetic oligonucleotide
aggugcccgcggcgugcuc

SEQ ID NO: 768634 - RNA, 19 nt, Artificial Sequence
  Description of Artificial Sequence: Synthetic oligonucleotide
cccacguugagugacguau

SEQ ID NO: 768635 - RNA, 19 nt, Artificial Sequence
  Description of Artificial Sequence: Synthetic oligonucleotide
ccggguacgcaggggagug

SEQ ID NO: 768636 - RNA, 19 nt, Artificial Sequence
  Description of Artificial Sequence: Synthetic oligonucleotide
ccggcacccuaagaagggc

SEQ ID NO: 768637 - RNA, 19 nt, Artificial Sequence
  Description of Artificial Sequence: Synthetic oligonucleotide
cugccccagcgaucucauc

SEQ ID NO: 768638 - RNA, 19 nt, Artificial Sequence
  Description of Artificial Sequence: Synthetic oligonucleotide
gcgugcucugcgcggcggc

SEQ ID NO: 768639 - RNA, 19 nt, Artificial Sequence
  Description of Artificial Sequence: Synthetic oligonucleotide
cccgcggcgugcucugcgc

SEQ ID NO: 768640 - RNA, 19 nt, Artificial Sequence
  Description of Artificial Sequence: Synthetic oligonucleotide
cccgauaugcccugucccu

SEQ ID NO: 768641 - RNA, 19 nt, Artificial Sequence
  Description of Artificial Sequence: Synthetic oligonucleotide
ccuugucgaagagggagaa

SEQ ID NO: 768642 - RNA, 19 nt, Artificial Sequence
  Description of Artificial Sequence: Synthetic oligonucleotide
gcgaggcaccggguguccg

SEQ ID NO: 768643 - RNA, 19 nt, Artificial Sequence
  Description of Artificial Sequence: Synthetic oligonucleotide
gccauccgggccagaggag

SEQ ID NO: 768644 - RNA, 19 nt, Artificial Sequence
  Description of Artificial Sequence: Synthetic oligonucleotide
ccggagcucgagguuacuc

SEQ ID NO: 768645 - RNA, 19 nt, Artificial Sequence
  Description of Artificial Sequence: Synthetic oligonucleotide
cccgggccuucacuucgcg

SEQ ID NO: 768646 - RNA, 19 nt, Artificial Sequence
  Description of Artificial Sequence: Synthetic oligonucleotide
ccgagugcguccguccguc

SEQ ID NO: 768647 - RNA, 19 nt, Artificial Sequence
  Description of Artificial Sequence: Synthetic oligonucleotide
ccuuuaguuggcccggcau

SEQ ID NO: 768648 - RNA, 19 nt, Artificial Sequence
  Description of Artificial Sequence: Synthetic oligonucleotide
cagcucggcggcacugaua

SEQ ID NO: 768649 - RNA, 19 nt, Artificial Sequence
  Description of Artificial Sequence: Synthetic oligonucleotide
ggcgaggcaccgggugucc

SEQ ID NO: 768650 - RNA, 19 nt, Artificial Sequence
  Description of Artificial Sequence: Synthetic oligonucleotide
cgagaucgcuggagggaug

SEQ ID NO: 768651 - RNA, 19 nt, Artificial Sequence
  Description of Artificial Sequence: Synthetic oligonucleotide
cgcggcgugcucugcgcgg

SEQ ID NO: 768652 - RNA, 19 nt, Artificial Sequence
  Description of Artificial Sequence: Synthetic oligonucleotide
ccgcggcgugcucugcgcg

SEQ ID NO: 768653 - RNA, 19 nt, Artificial Sequence
  Description of Artificial Sequence: Synthetic oligonucleotide
cgggccuucacuucgcggu

SEQ ID NO: 768654 - RNA, 19 nt, Artificial Sequence
  Description of Artificial Sequence: Synthetic oligonucleotide
gcggcgugcucugcgcggc

SEQ ID NO: 768655 - RNA, 19 nt, Artificial Sequence
  Description of Artificial Sequence: Synthetic oligonucleotide
gagacccgagugcguccgu

SEQ ID NO: 768656 - RNA, 19 nt, Artificial Sequence
  Description of Artificial Sequence: Synthetic oligonucleotide
gccucgcuccccuccccac

SEQ ID NO: 768657 - RNA, 19 nt, Artificial Sequence
  Description of Artificial Sequence: Synthetic oligonucleotide
cccuuuaguuggcccggca

SEQ ID NO: 768658 - RNA, 19 nt, Artificial Sequence
  Description of Artificial Sequence: Synthetic oligonucleotide
cggagcucgagguuacucu

SEQ ID NO: 768659 - RNA, 19 nt, Artificial Sequence
  Description of Artificial Sequence: Synthetic oligonucleotide
gcacccuaagaagggccaa

SEQ ID NO: 768660 - RNA, 19 nt, Artificial Sequence
  Description of Artificial Sequence: Synthetic oligonucleotide
cgccgucaaugucagccuc

SEQ ID NO: 768661 - RNA, 19 nt, Artificial Sequence
  Description of Artificial Sequence: Synthetic oligonucleotide
gcgagaucgcuggagggau

SEQ ID NO: 768662 - RNA, 19 nt, Artificial Sequence
  Description of Artificial Sequence: Synthetic oligonucleotide
gcgcggggaggccaaggaa

SEQ ID NO: 768663 - RNA, 19 nt, Artificial Sequence
  Description of Artificial Sequence: Synthetic oligonucleotide
cucugcgcggcggcccaca

SEQ ID NO: 768664 - RNA, 19 nt, Artificial Sequence
  Description of Artificial Sequence: Synthetic oligonucleotide
gccugaccucagaaagcca

SEQ ID NO: 768665 - RNA, 19 nt, Artificial Sequence
  Description of Artificial Sequence: Synthetic oligonucleotide
cgccagcgagacccgagug

SEQ ID NO: 768666 - RNA, 19 nt, Artificial Sequence
  Description of Artificial Sequence: Synthetic oligonucleotide
ggugcccgcggcgugcucu

SEQ ID NO: 768667 - RNA, 19 nt, Artificial Sequence
  Description of Artificial Sequence: Synthetic oligonucleotide
cgagugcguccguccgucc

SEQ ID NO: 768668 - RNA, 19 nt, Artificial Sequence
  Description of Artificial Sequence: Synthetic oligonucleotide
gaggugcccgcggcgugcu

SEQ ID NO: 768669 - RNA, 19 nt, Artificial Sequence
  Description of Artificial Sequence: Synthetic oligonucleotide
cgcgagaucgcuggaggga

SEQ ID NO: 768670 - RNA, 19 nt, Artificial Sequence
  Description of Artificial Sequence: Synthetic oligonucleotide
ccccacccuuuaguuggcc

SEQ ID NO: 768671 - RNA, 19 nt, Artificial Sequence
  Description of Artificial Sequence: Synthetic oligonucleotide
cccuuacccucagcucuug

SEQ ID NO: 768672 - RNA, 19 nt, Artificial Sequence
  Description of Artificial Sequence: Synthetic oligonucleotide
cagcgagacccgagugcgu

SEQ ID NO: 768673 - RNA, 19 nt, Artificial Sequence
  Description of Artificial Sequence: Synthetic oligonucleotide
gcgccagcgagacccgagu

SEQ ID NO: 768674 - RNA, 19 nt, Artificial Sequence
  Description of Artificial Sequence: Synthetic oligonucleotide
ccccagcgaucucaucaca

SEQ ID NO: 768675 - RNA, 19 nt, Artificial Sequence
  Description of Artificial Sequence: Synthetic oligonucleotide
cccggcauguuuggggcaa

SEQ ID NO: 768676 - RNA, 19 nt, Artificial Sequence
  Description of Artificial Sequence: Synthetic oligonucleotide
cggguguccggagcucgag

SEQ ID NO: 768677 - RNA, 19 nt, Artificial Sequence
  Description of Artificial Sequence: Synthetic oligonucleotide
cgcauuacacagaggccau

SEQ ID NO: 768678 - RNA, 19 nt, Artificial Sequence
  Description of Artificial Sequence: Synthetic oligonucleotide
cggcagcgcggccaaugac

SEQ ID NO: 768679 - RNA, 19 nt, Artificial Sequence
  Description of Artificial Sequence: Synthetic oligonucleotide
gccuucacuucgcggucau

SEQ ID NO: 768680 - RNA, 19 nt, Artificial Sequence
  Description of Artificial Sequence: Synthetic oligonucleotide
ccggguguccggagcucga

SEQ ID NO: 768681 - RNA, 19 nt, Artificial Sequence
  Description of Artificial Sequence: Synthetic oligonucleotide
ggggagcggcaugggaugu

SEQ ID NO: 768682 - RNA, 19 nt, Artificial Sequence
  Description of Artificial Sequence: Synthetic oligonucleotide
ccaccccggcacccuaaga

SEQ ID NO: 768683 - RNA, 19 nt, Artificial Sequence
  Description of Artificial Sequence: Synthetic oligonucleotide
cggcgugcucugcgcggcg

SEQ ID NO: 768684 - RNA, 19 nt, Artificial Sequence
  Description of Artificial Sequence: Synthetic oligonucleotide
ccccacguugagugacgua

SEQ ID NO: 768685 - RNA, 19 nt, Artificial Sequence
  Description of Artificial Sequence: Synthetic oligonucleotide
gcucggcggcacugauaua

SEQ ID NO: 768686 - RNA, 19 nt, Artificial Sequence
  Description of Artificial Sequence: Synthetic oligonucleotide
cccgagugcguccguccgu

SEQ ID NO: 768687 - RNA, 19 nt, Artificial Sequence
  Description of Artificial Sequence: Synthetic oligonucleotide
gcucugcgcggcggcccac

SEQ ID NO: 768688 - RNA, 19 nt, Artificial Sequence
  Description of Artificial Sequence: Synthetic oligonucleotide
cgcagcucggcggcacuga

SEQ ID NO: 768689 - RNA, 19 nt, Artificial Sequence
  Description of Artificial Sequence: Synthetic oligonucleotide
gcggcccacagaaguguuu

SEQ ID NO: 768690 - RNA, 19 nt, Artificial Sequence
  Description of Artificial Sequence: Synthetic oligonucleotide
gggagcggcaugggauguu

SEQ ID NO: 768691 - RNA, 19 nt, Artificial Sequence
  Description of Artificial Sequence: Synthetic oligonucleotide
ccggcauguuuggggcaaa

SEQ ID NO: 768692 - RNA, 19 nt, Artificial Sequence
  Description of Artificial Sequence: Synthetic oligonucleotide
cccuagcugcuggguuugu

SEQ ID NO: 768693 - RNA, 19 nt, Artificial Sequence
  Description of Artificial Sequence: Synthetic oligonucleotide
cggguacgcaggggagugu

SEQ ID NO: 768694 - RNA, 19 nt, Artificial Sequence
  Description of Artificial Sequence: Synthetic oligonucleotide
cuaacgaccaugaagaugg

SEQ ID NO: 768695 - RNA, 19 nt, Artificial Sequence
  Description of Artificial Sequence: Synthetic oligonucleotide
guaagauacauccugaagg

SEQ ID NO: 768696 - RNA, 19 nt, Artificial Sequence
  Description of Artificial Sequence: Synthetic oligonucleotide
cuuggaaucaucaucugcc

SEQ ID NO: 768697 - RNA, 19 nt, Artificial Sequence
  Description of Artificial Sequence: Synthetic oligonucleotide
auuacaagaaaggaggagg

SEQ ID NO: 768698 - RNA, 19 nt, Artificial Sequence
  Description of Artificial Sequence: Synthetic oligonucleotide
auugcuuagaaacuuggag

SEQ ID NO: 768699 - RNA, 19 nt, Artificial Sequence
  Description of Artificial Sequence: Synthetic oligonucleotide
uuccuugucacccuggcgg

SEQ ID NO: 768700 - RNA, 19 nt, Artificial Sequence
  Description of Artificial Sequence: Synthetic oligonucleotide
gguauuacaagaaaggagg

SEQ ID NO: 768701 - RNA, 19 nt, Artificial Sequence
  Description of Artificial Sequence: Synthetic oligonucleotide
uugcucguaagauacaucc

SEQ ID NO: 768702 - RNA, 19 nt, Artificial Sequence
  Description of Artificial Sequence: Synthetic oligonucleotide
agugauaggucuaacgacc

SEQ ID NO: 768703 - RNA, 19 nt, Artificial Sequence
  Description of Artificial Sequence: Synthetic oligonucleotide
aguaagggaaacccagacc

SEQ ID NO: 768704 - RNA, 19 nt, Artificial Sequence
  Description of Artificial Sequence: Synthetic oligonucleotide
gauuacaucaggguugggg

SEQ ID NO: 768705 - RNA, 19 nt, Artificial Sequence
  Description of Artificial Sequence: Synthetic oligonucleotide
aaacugauuacaucagggu

SEQ ID NO: 768706 - RNA, 19 nt, Artificial Sequence
  Description of Artificial Sequence: Synthetic oligonucleotide
acauaaucccaauggcucc

SEQ ID NO: 768707 - RNA, 19 nt, Artificial Sequence
  Description of Artificial Sequence: Synthetic oligonucleotide
agagugauaggucuaacga

SEQ ID NO: 768708 - RNA, 19 nt, Artificial Sequence
  Description of Artificial Sequence: Synthetic oligonucleotide
agaccugccagcuaagauc

SEQ ID NO: 768709 - RNA, 19 nt, Artificial Sequence
  Description of Artificial Sequence: Synthetic oligonucleotide
aaccaguccugauggaugg

SEQ ID NO: 768710 - RNA, 19 nt, Artificial Sequence
  Description of Artificial Sequence: Synthetic oligonucleotide
aaggggugggcacagugac

SEQ ID NO: 768711 - RNA, 19 nt, Artificial Sequence
  Description of Artificial Sequence: Synthetic oligonucleotide
agaaaggaggcgaagggcc

SEQ ID NO: 768712 - RNA, 19 nt, Artificial Sequence
  Description of Artificial Sequence: Synthetic oligonucleotide
ugaagauggacuucacgag

SEQ ID NO: 768713 - RNA, 19 nt, Artificial Sequence
  Description of Artificial Sequence: Synthetic oligonucleotide
aggucuaacgaccaugaag

SEQ ID NO: 768714 - RNA, 19 nt, Artificial Sequence
  Description of Artificial Sequence: Synthetic oligonucleotide
auuacaucaggguuggggu

SEQ ID NO: 768715 - RNA, 19 nt, Artificial Sequence
  Description of Artificial Sequence: Synthetic oligonucleotide
uggaggugcgaucacagag

SEQ ID NO: 768716 - RNA, 19 nt, Artificial Sequence
  Description of Artificial Sequence: Synthetic oligonucleotide
gagagagggaguuugcaag

SEQ ID NO: 768717 - RNA, 19 nt, Artificial Sequence
  Description of Artificial Sequence: Synthetic oligonucleotide
gacgggaaucucuuggugg

SEQ ID NO: 768718 - RNA, 19 nt, Artificial Sequence
  Description of Artificial Sequence: Synthetic oligonucleotide
aacacacucccuuggagca

SEQ ID NO: 768719 - RNA, 19 nt, Artificial Sequence
  Description of Artificial Sequence: Synthetic oligonucleotide
uugucaauccuuuccagcu

SEQ ID NO: 768720 - RNA, 19 nt, Artificial Sequence
  Description of Artificial Sequence: Synthetic oligonucleotide
cauagacuucacuugcugg

SEQ ID NO: 768721 - RNA, 19 nt, Artificial Sequence
  Description of Artificial Sequence: Synthetic oligonucleotide
acuucacgagagcagggcc

SEQ ID NO: 768722 - RNA, 19 nt, Artificial Sequence
  Description of Artificial Sequence: Synthetic oligonucleotide
auaggaagccugcaggaag

SEQ ID NO: 768723 - RNA, 19 nt, Artificial Sequence
  Description of Artificial Sequence: Synthetic oligonucleotide
acaucuacaucuaaagaag

SEQ ID NO: 768724 - RNA, 19 nt, Artificial Sequence
  Description of Artificial Sequence: Synthetic oligonucleotide
cauuggucggaugagagcc

SEQ ID NO: 768725 - RNA, 19 nt, Artificial Sequence
  Description of Artificial Sequence: Synthetic oligonucleotide
acagacauuggucggauga

SEQ ID NO: 768726 - RNA, 19 nt, Artificial Sequence
  Description of Artificial Sequence: Synthetic oligonucleotide
cuuggaggcaagaaggaug

SEQ ID NO: 768727 - RNA, 19 nt, Artificial Sequence
  Description of Artificial Sequence: Synthetic oligonucleotide
ucauagacuucacuugcug

SEQ ID NO: 768728 - RNA, 19 nt, Artificial Sequence
  Description of Artificial Sequence: Synthetic oligonucleotide
ucucuaauccagauugcca

SEQ ID NO: 768729 - RNA, 19 nt, Artificial Sequence
  Description of Artificial Sequence: Synthetic oligonucleotide
auagacuucacuugcugga

SEQ ID NO: 768730 - RNA, 19 nt, Artificial Sequence
  Description of Artificial Sequence: Synthetic oligonucleotide
gacauaaucccaauggcuc

SEQ ID NO: 768731 - RNA, 19 nt, Artificial Sequence
  Description of Artificial Sequence: Synthetic oligonucleotide
cagagugauaggucuaacg

SEQ ID NO: 768732 - RNA, 19 nt, Artificial Sequence
  Description of Artificial Sequence: Synthetic oligonucleotide
aauccagauugccauucug

SEQ ID NO: 768733 - RNA, 19 nt, Artificial Sequence
  Description of Artificial Sequence: Synthetic oligonucleotide
gaguuugcaagggaguggg

SEQ ID NO: 768734 - RNA, 19 nt, Artificial Sequence
  Description of Artificial Sequence: Synthetic oligonucleotide
ccucaaagcauuuacagac

SEQ ID NO: 768735 - RNA, 19 nt, Artificial Sequence
  Description of Artificial Sequence: Synthetic oligonucleotide
acugauuacaucaggguug

SEQ ID NO: 768736 - RNA, 19 nt, Artificial Sequence
  Description of Artificial Sequence: Synthetic oligonucleotide
cuuccuauccuguucuggc

SEQ ID NO: 768737 - RNA, 19 nt, Artificial Sequence
  Description of Artificial Sequence: Synthetic oligonucleotide
uauugcuuagaaacuugga

SEQ ID NO: 768738 - RNA, 19 nt, Artificial Sequence
  Description of Artificial Sequence: Synthetic oligonucleotide
gaggcagucaccuggacuc

SEQ ID NO: 768739 - RNA, 19 nt, Artificial Sequence
  Description of Artificial Sequence: Synthetic oligonucleotide
uuggugaugccacuugcug

SEQ ID NO: 768740 - RNA, 19 nt, Artificial Sequence
  Description of Artificial Sequence: Synthetic oligonucleotide
aagauggacuucacgagag

SEQ ID NO: 768741 - RNA, 19 nt, Artificial Sequence
  Description of Artificial Sequence: Synthetic oligonucleotide
aacggcuguggacugacca

SEQ ID NO: 768742 - RNA, 19 nt, Artificial Sequence
  Description of Artificial Sequence: Synthetic oligonucleotide
aauguggaggugcgaucac

SEQ ID NO: 768743 - RNA, 19 nt, Artificial Sequence
  Description of Artificial Sequence: Synthetic oligonucleotide
cugaccacugcuugguugg

SEQ ID NO: 768744 - RNA, 19 nt, Artificial Sequence
  Description of Artificial Sequence: Synthetic oligonucleotide
gauaggucuaacgaccaug

SEQ ID NO: 768745 - RNA, 19 nt, Artificial Sequence
  Description of Artificial Sequence: Synthetic oligonucleotide
gagugauaggucuaacgac

SEQ ID NO: 768746 - RNA, 19 nt, Artificial Sequence
  Description of Artificial Sequence: Synthetic oligonucleotide
caacacacucccuuggagc

SEQ ID NO: 768747 - RNA, 19 nt, Artificial Sequence
  Description of Artificial Sequence: Synthetic oligonucleotide
acgggaaucucuugguggg

SEQ ID NO: 768748 - RNA, 19 nt, Artificial Sequence
  Description of Artificial Sequence: Synthetic oligonucleotide
guauugcuuagaaacuugg

SEQ ID NO: 768749 - RNA, 19 nt, Artificial Sequence
  Description of Artificial Sequence: Synthetic oligonucleotide
uugguuggauggcugaugu

SEQ ID NO: 768750 - RNA, 19 nt, Artificial Sequence
  Description of Artificial Sequence: Synthetic oligonucleotide
augcgguucagagugauag

SEQ ID NO: 768751 - RNA, 19 nt, Artificial Sequence
  Description of Artificial Sequence: Synthetic oligonucleotide
aucucugacccuccccucc

SEQ ID NO: 768752 - RNA, 19 nt, Artificial Sequence
  Description of Artificial Sequence: Synthetic oligonucleotide
ucuaacgaccaugaagaug

SEQ ID NO: 768753 - RNA, 19 nt, Artificial Sequence
  Description of Artificial Sequence: Synthetic oligonucleotide
acaucuaaagaaggcuggc

SEQ ID NO: 768754 - RNA, 19 nt, Artificial Sequence
  Description of Artificial Sequence: Synthetic oligonucleotide
ugcucugcgugcuacagac

SEQ ID NO: 768755 - RNA, 19 nt, Artificial Sequence
  Description of Artificial Sequence: Synthetic oligonucleotide
agcggaaacugauuacauc

SEQ ID NO: 768756 - RNA, 19 nt, Artificial Sequence
  Description of Artificial Sequence: Synthetic oligonucleotide
gguagagcaagugacaagc

SEQ ID NO: 768757 - RNA, 19 nt, Artificial Sequence
  Description of Artificial Sequence: Synthetic oligonucleotide
ugugcucgucuucugcagg

SEQ ID NO: 768758 - RNA, 19 nt, Artificial Sequence
  Description of Artificial Sequence: Synthetic oligonucleotide
gaagauggacuucacgaga

SEQ ID NO: 768759 - RNA, 19 nt, Artificial Sequence
  Description of Artificial Sequence: Synthetic oligonucleotide
caccugaccaggaagggag

SEQ ID NO: 768760 - RNA, 19 nt, Artificial Sequence
  Description of Artificial Sequence: Synthetic oligonucleotide
ucuuccauuagggccuugg

SEQ ID NO: 768761 - RNA, 19 nt, Artificial Sequence
  Description of Artificial Sequence: Synthetic oligonucleotide
aaaugcauggcugggguau

SEQ ID NO: 768762 - RNA, 19 nt, Artificial Sequence
  Description of Artificial Sequence: Synthetic oligonucleotide
gucuccuacaucuacaucu

SEQ ID NO: 768763 - RNA, 19 nt, Artificial Sequence
  Description of Artificial Sequence: Synthetic oligonucleotide
agauggacuucacgagagc

SEQ ID NO: 768764 - RNA, 19 nt, Artificial Sequence
  Description of Artificial Sequence: Synthetic oligonucleotide
gaggaugucccucaccuca

SEQ ID NO: 768765 - RNA, 19 nt, Artificial Sequence
  Description of Artificial Sequence: Synthetic oligonucleotide
ggggauagcucaucaaugg

SEQ ID NO: 768766 - RNA, 19 nt, Artificial Sequence
  Description of Artificial Sequence: Synthetic oligonucleotide
agggaguggggcuaaagca

SEQ ID NO: 768767 - RNA, 19 nt, Artificial Sequence
  Description of Artificial Sequence: Synthetic oligonucleotide
gaagcagaagagauagggc

SEQ ID NO: 768768 - RNA, 19 nt, Artificial Sequence
  Description of Artificial Sequence: Synthetic oligonucleotide
gacauuggucggaugagag

SEQ ID NO: 768769 - RNA, 19 nt, Artificial Sequence
  Description of Artificial Sequence: Synthetic oligonucleotide
uaucucucccacaaccaac

SEQ ID NO: 768770 - RNA, 19 nt, Artificial Sequence
  Description of Artificial Sequence: Synthetic oligonucleotide
uggugaugccacuugcugc

SEQ ID NO: 768771 - RNA, 19 nt, Artificial Sequence
  Description of Artificial Sequence: Synthetic oligonucleotide
ggucuaacgaccaugaaga

SEQ ID NO: 768772 - RNA, 19 nt, Artificial Sequence
  Description of Artificial Sequence: Synthetic oligonucleotide
ugaauguacuugguccagg

SEQ ID NO: 768773 - RNA, 19 nt, Artificial Sequence
  Description of Artificial Sequence: Synthetic oligonucleotide
uggacucggccuuucuugg

SEQ ID NO: 768774 - RNA, 19 nt, Artificial Sequence
  Description of Artificial Sequence: Synthetic oligonucleotide
auccagauugccauucugg

SEQ ID NO: 768775 - RNA, 19 nt, Artificial Sequence
  Description of Artificial Sequence: Synthetic oligonucleotide
cuucacgagagcagggccc

SEQ ID NO: 768776 - RNA, 19 nt, Artificial Sequence
  Description of Artificial Sequence: Synthetic oligonucleotide
cucacauggggauagcuca

SEQ ID NO: 768777 - RNA, 19 nt, Artificial Sequence
  Description of Artificial Sequence: Synthetic oligonucleotide
gacaucugguuggugaugc

SEQ ID NO: 768778 - RNA, 19 nt, Artificial Sequence
  Description of Artificial Sequence: Synthetic oligonucleotide
cugauuacaucaggguugg

SEQ ID NO: 768779 - RNA, 19 nt, Artificial Sequence
  Description of Artificial Sequence: Synthetic oligonucleotide
uuggacucagugaggaccu

SEQ ID NO: 768780 - RNA, 19 nt, Artificial Sequence
  Description of Artificial Sequence: Synthetic oligonucleotide
caagugacaagcuucucga

SEQ ID NO: 768781 - RNA, 19 nt, Artificial Sequence
  Description of Artificial Sequence: Synthetic oligonucleotide
cuuggugagauugauaaaa

SEQ ID NO: 768782 - RNA, 19 nt, Artificial Sequence
  Description of Artificial Sequence: Synthetic oligonucleotide
gucaauccuuuccagcugc

SEQ ID NO: 768783 - RNA, 19 nt, Artificial Sequence
  Description of Artificial Sequence: Synthetic oligonucleotide
acgaccaugaagauggacu

SEQ ID NO: 768784 - RNA, 19 nt, Artificial Sequence
  Description of Artificial Sequence: Synthetic oligonucleotide
auggggauagcucaucaau

SEQ ID NO: 768785 - RNA, 19 nt, Artificial Sequence
  Description of Artificial Sequence: Synthetic oligonucleotide
gaccauuggggaccugugg

SEQ ID NO: 768786 - RNA, 19 nt, Artificial Sequence
  Description of Artificial Sequence: Synthetic oligonucleotide
ucuguuuauucuccugaau

SEQ ID NO: 768787 - RNA, 19 nt, Artificial Sequence
  Description of Artificial Sequence: Synthetic oligonucleotide
augaaaccuaucugggacu

SEQ ID NO: 768788 - RNA, 19 nt, Artificial Sequence
  Description of Artificial Sequence: Synthetic oligonucleotide
gaaacccagaccugccagc

SEQ ID NO: 768789 - RNA, 19 nt, Artificial Sequence
  Description of Artificial Sequence: Synthetic oligonucleotide
gcggaaacugauuacauca

SEQ ID NO: 768790 - RNA, 19 nt, Artificial Sequence
  Description of Artificial Sequence: Synthetic oligonucleotide
auuggggaccugugggugg

SEQ ID NO: 768791 - RNA, 19 nt, Artificial Sequence
  Description of Artificial Sequence: Synthetic oligonucleotide
ggguauuacaagaaaggag

SEQ ID NO: 768792 - RNA, 19 nt, Artificial Sequence
  Description of Artificial Sequence: Synthetic oligonucleotide
agacauaaucccaauggcu

SEQ ID NO: 768793 - RNA, 19 nt, Artificial Sequence
  Description of Artificial Sequence: Synthetic oligonucleotide
ggacuugucaauccuuucc

SEQ ID NO: 768794 - RNA, 19 nt, Artificial Sequence
  Description of Artificial Sequence: Synthetic oligonucleotide
uuugcucguaagauacauc

SEQ ID NO: 768795 - RNA, 19 nt, Artificial Sequence
  Description of Artificial Sequence: Synthetic oligonucleotide
gauggacuucacgagagca

SEQ ID NO: 768796 - RNA, 19 nt, Artificial Sequence
  Description of Artificial Sequence: Synthetic oligonucleotide
gaucacagaguggagagaa

SEQ ID NO: 768797 - RNA, 19 nt, Artificial Sequence
  Description of Artificial Sequence: Synthetic oligonucleotide
cacuugcuggaaauggcag

SEQ ID NO: 768798 - RNA, 19 nt, Artificial Sequence
  Description of Artificial Sequence: Synthetic oligonucleotide
aggaagaggcucugccugg

SEQ ID NO: 768799 - RNA, 19 nt, Artificial Sequence
  Description of Artificial Sequence: Synthetic oligonucleotide
gcucguaagauacauccug

SEQ ID NO: 768800 - RNA, 19 nt, Artificial Sequence
  Description of Artificial Sequence: Synthetic oligonucleotide
acggcuguggacugaccac

SEQ ID NO: 768801 - RNA, 19 nt, Artificial Sequence
  Description of Artificial Sequence: Synthetic oligonucleotide
ugccuuccauccaccaggg

SEQ ID NO: 768802 - RNA, 19 nt, Artificial Sequence
  Description of Artificial Sequence: Synthetic oligonucleotide
uuccuauccuguucuggcc

SEQ ID NO: 768803 - RNA, 19 nt, Artificial Sequence
  Description of Artificial Sequence: Synthetic oligonucleotide
aucugguuggugaugccac

SEQ ID NO: 768804 - RNA, 19 nt, Artificial Sequence
  Description of Artificial Sequence: Synthetic oligonucleotide
caaacucauccuuggugag

SEQ ID NO: 768805 - RNA, 19 nt, Artificial Sequence
  Description of Artificial Sequence: Synthetic oligonucleotide
uaauccagauugccauucu

SEQ ID NO: 768806 - RNA, 19 nt, Artificial Sequence
  Description of Artificial Sequence: Synthetic oligonucleotide
agguagagcaagugacaag

SEQ ID NO: 768807 - RNA, 19 nt, Artificial Sequence
  Description of Artificial Sequence: Synthetic oligonucleotide
ugcgaucacagaguggaga

SEQ ID NO: 768808 - RNA, 19 nt, Artificial Sequence
  Description of Artificial Sequence: Synthetic oligonucleotide
ucguaagauacauccugaa

SEQ ID NO: 768809 - RNA, 19 nt, Artificial Sequence
  Description of Artificial Sequence: Synthetic oligonucleotide
auaggucuaacgaccauga

SEQ ID NO: 768810 - RNA, 19 nt, Artificial Sequence
  Description of Artificial Sequence: Synthetic oligonucleotide
cuacaucuacaucuaaaga

SEQ ID NO: 768811 - RNA, 19 nt, Artificial Sequence
  Description of Artificial Sequence: Synthetic oligonucleotide
uggaaucaucaucugccaa

SEQ ID NO: 768812 - RNA, 19 nt, Artificial Sequence
  Description of Artificial Sequence: Synthetic oligonucleotide
agggccuuggacuugucaa

SEQ ID NO: 768813 - RNA, 19 nt, Artificial Sequence
  Description of Artificial Sequence: Synthetic oligonucleotide
ugaccauuggggaccugug

SEQ ID NO: 768814 - RNA, 19 nt, Artificial Sequence
  Description of Artificial Sequence: Synthetic oligonucleotide
ggugcgaucacagagugga

SEQ ID NO: 768815 - RNA, 19 nt, Artificial Sequence
  Description of Artificial Sequence: Synthetic oligonucleotide
ugcucguaagauacauccu

SEQ ID NO: 768816 - RNA, 19 nt, Artificial Sequence
  Description of Artificial Sequence: Synthetic oligonucleotide
cuaauccagauugccauuc

SEQ ID NO: 768817 - RNA, 19 nt, Artificial Sequence
  Description of Artificial Sequence: Synthetic oligonucleotide
aaacccagaccugccagcu

SEQ ID NO: 768818 - RNA, 19 nt, Artificial Sequence
  Description of Artificial Sequence: Synthetic oligonucleotide
cacagacauaaucccaaug

SEQ ID NO: 768819 - RNA, 19 nt, Artificial Sequence
  Description of Artificial Sequence: Synthetic oligonucleotide
aagaacccauucugugaca

SEQ ID NO: 768820 - RNA, 19 nt, Artificial Sequence
  Description of Artificial Sequence: Synthetic oligonucleotide
aaggcccgaaguucuacaa

SEQ ID NO: 768821 - RNA, 19 nt, Artificial Sequence
  Description of Artificial Sequence: Synthetic oligonucleotide
gacaucgaagacguuggac

SEQ ID NO: 768822 - RNA, 19 nt, Artificial Sequence
  Description of Artificial Sequence: Synthetic oligonucleotide
ucucgagcccagaccagcc

SEQ ID NO: 768823 - RNA, 19 nt, Artificial Sequence
  Description of Artificial Sequence: Synthetic oligonucleotide
uuacaucaggguugggguc

SEQ ID NO: 768824 - RNA, 19 nt, Artificial Sequence
  Description of Artificial Sequence: Synthetic oligonucleotide
caaccaacacacucccuug

SEQ ID NO: 768825 - RNA, 19 nt, Artificial Sequence
  Description of Artificial Sequence: Synthetic oligonucleotide
gacuucacgagagcagggc

SEQ ID NO: 768826 - RNA, 19 nt, Artificial Sequence
  Description of Artificial Sequence: Synthetic oligonucleotide
agggaguccagaggcaagg

SEQ ID NO: 768827 - RNA, 19 nt, Artificial Sequence
  Description of Artificial Sequence: Synthetic oligonucleotide
uggugggccaauucuggga

SEQ ID NO: 768828 - RNA, 19 nt, Artificial Sequence
  Description of Artificial Sequence: Synthetic oligonucleotide
uggggucuccuacaucuac

SEQ ID NO: 768829 - RNA, 19 nt, Artificial Sequence
  Description of Artificial Sequence: Synthetic oligonucleotide
ucccaaguagccaccugac

SEQ ID NO: 768830 - RNA, 19 nt, Artificial Sequence
  Description of Artificial Sequence: Synthetic oligonucleotide
cucguaagauacauccuga

SEQ ID NO: 768831 - RNA, 19 nt, Artificial Sequence
  Description of Artificial Sequence: Synthetic oligonucleotide
caggccauaggaagccugc

SEQ ID NO: 768832 - RNA, 19 nt, Artificial Sequence
  Description of Artificial Sequence: Synthetic oligonucleotide
uuagggccuugguccaacg

SEQ ID NO: 768833 - RNA, 19 nt, Artificial Sequence
  Description of Artificial Sequence: Synthetic oligonucleotide
cuuccucacauggggauag

SEQ ID NO: 768834 - RNA, 19 nt, Artificial Sequence
  Description of Artificial Sequence: Synthetic oligonucleotide
ugcaagucuggggucaaga

SEQ ID NO: 768835 - RNA, 19 nt, Artificial Sequence
  Description of Artificial Sequence: Synthetic oligonucleotide
uucagagugauaggucuaa

SEQ ID NO: 768836 - RNA, 19 nt, Artificial Sequence
  Description of Artificial Sequence: Synthetic oligonucleotide
uggagcggaaacugauuac

SEQ ID NO: 768837 - RNA, 19 nt, Artificial Sequence
  Description of Artificial Sequence: Synthetic oligonucleotide
guggacugaccacugcuug

SEQ ID NO: 768838 - RNA, 19 nt, Artificial Sequence
  Description of Artificial Sequence: Synthetic oligonucleotide
ugagccccuccccaucugc

SEQ ID NO: 768839 - RNA, 19 nt, Artificial Sequence
  Description of Artificial Sequence: Synthetic oligonucleotide
guugugcucgucuucugca

SEQ ID NO: 768840 - RNA, 19 nt, Artificial Sequence
  Description of Artificial Sequence: Synthetic oligonucleotide
gcgaucacagaguggagag

SEQ ID NO: 768841 - RNA, 19 nt, Artificial Sequence
  Description of Artificial Sequence: Synthetic oligonucleotide
gauuccuggguaauaccuc

SEQ ID NO: 768842 - RNA, 19 nt, Artificial Sequence
  Description of Artificial Sequence: Synthetic oligonucleotide
agccaccugaccaggaagg

SEQ ID NO: 768843 - RNA, 19 nt, Artificial Sequence
  Description of Artificial Sequence: Synthetic oligonucleotide
aagcucgccccucccaagu

SEQ ID NO: 768844 - RNA, 19 nt, Artificial Sequence
  Description of Artificial Sequence: Synthetic oligonucleotide
cagccccaaauucuugagg

SEQ ID NO: 768845 - RNA, 19 nt, Artificial Sequence
  Description of Artificial Sequence: Synthetic oligonucleotide
uucucgagcccagaccagc

SEQ ID NO: 768846 - RNA, 19 nt, Artificial Sequence
  Description of Artificial Sequence: Synthetic oligonucleotide
gcaagaaggauggggagag

SEQ ID NO: 768847 - RNA, 19 nt, Artificial Sequence
  Description of Artificial Sequence: Synthetic oligonucleotide
guauuacaagaaaggagga

SEQ ID NO: 768848 - RNA, 19 nt, Artificial Sequence
  Description of Artificial Sequence: Synthetic oligonucleotide
ugguccaacggcuguggac

SEQ ID NO: 768849 - RNA, 19 nt, Artificial Sequence
  Description of Artificial Sequence: Synthetic oligonucleotide
agccuccuaguccccaggg

SEQ ID NO: 768850 - RNA, 19 nt, Artificial Sequence
  Description of Artificial Sequence: Synthetic oligonucleotide
gaauguacuugguccaggu

SEQ ID NO: 768851 - RNA, 19 nt, Artificial Sequence
  Description of Artificial Sequence: Synthetic oligonucleotide
gaaaccuaucugggacugg

SEQ ID NO: 768852 - RNA, 19 nt, Artificial Sequence
  Description of Artificial Sequence: Synthetic oligonucleotide
ugacaucgaagacguugga

SEQ ID NO: 768853 - RNA, 19 nt, Artificial Sequence
  Description of Artificial Sequence: Synthetic oligonucleotide
cccagguagagcaagugac

SEQ ID NO: 768854 - RNA, 19 nt, Artificial Sequence
  Description of Artificial Sequence: Synthetic oligonucleotide
gucugggcauaggagagag

SEQ ID NO: 768855 - RNA, 19 nt, Artificial Sequence
  Description of Artificial Sequence: Synthetic oligonucleotide
ggggcuaaagcagugcaag

SEQ ID NO: 768856 - RNA, 19 nt, Artificial Sequence
  Description of Artificial Sequence: Synthetic oligonucleotide
gcugauguggugauucucc

SEQ ID NO: 768857 - RNA, 19 nt, Artificial Sequence
  Description of Artificial Sequence: Synthetic oligonucleotide
agcugauguggugauucuc

SEQ ID NO: 768858 - RNA, 19 nt, Artificial Sequence
  Description of Artificial Sequence: Synthetic oligonucleotide
ugauaggucuaacgaccau

SEQ ID NO: 768859 - RNA, 19 nt, Artificial Sequence
  Description of Artificial Sequence: Synthetic oligonucleotide
ggcccgaaguucuacaaac

SEQ ID NO: 768860 - RNA, 19 nt, Artificial Sequence
  Description of Artificial Sequence: Synthetic oligonucleotide
agcgcccaguucucuaauc

SEQ ID NO: 768861 - RNA, 19 nt, Artificial Sequence
  Description of Artificial Sequence: Synthetic oligonucleotide
gaagcucgccccucccaag

SEQ ID NO: 768862 - RNA, 19 nt, Artificial Sequence
  Description of Artificial Sequence: Synthetic oligonucleotide
uucacgagagcagggccca

SEQ ID NO: 768863 - RNA, 19 nt, Artificial Sequence
  Description of Artificial Sequence: Synthetic oligonucleotide
gcuucucgagcccagacca

SEQ ID NO: 768864 - RNA, 19 nt, Artificial Sequence
  Description of Artificial Sequence: Synthetic oligonucleotide
aucucucccacaaccaaca

SEQ ID NO: 768865 - RNA, 19 nt, Artificial Sequence
  Description of Artificial Sequence: Synthetic oligonucleotide
uggggcuaaagcagugcaa

SEQ ID NO: 768866 - RNA, 19 nt, Artificial Sequence
  Description of Artificial Sequence: Synthetic oligonucleotide
ugcacuugcucugcgugcu

SEQ ID NO: 768867 - RNA, 19 nt, Artificial Sequence
  Description of Artificial Sequence: Synthetic oligonucleotide
ccuggguaauaccucaccc

SEQ ID NO: 768868 - RNA, 19 nt, Artificial Sequence
  Description of Artificial Sequence: Synthetic oligonucleotide
caggguuggggucuccuac

SEQ ID NO: 768869 - RNA, 19 nt, Artificial Sequence
  Description of Artificial Sequence: Synthetic oligonucleotide
gguucagagugauaggucu

SEQ ID NO: 768870 - RNA, 19 nt, Artificial Sequence
  Description of Artificial Sequence: Synthetic oligonucleotide
cuugcucugcgugcuacag

SEQ ID NO: 768871 - RNA, 19 nt, Artificial Sequence
  Description of Artificial Sequence: Synthetic oligonucleotide
uugaggacccuaggaaagu

SEQ ID NO: 768872 - RNA, 19 nt, Artificial Sequence
  Description of Artificial Sequence: Synthetic oligonucleotide
ggaguuugcaagggagugg

SEQ ID NO: 768873 - RNA, 19 nt, Artificial Sequence
  Description of Artificial Sequence: Synthetic oligonucleotide
gcgugcuacagacaaaaca

SEQ ID NO: 768874 - RNA, 19 nt, Artificial Sequence
  Description of Artificial Sequence: Synthetic oligonucleotide
ucuggcccuuccuugggaa

SEQ ID NO: 768875 - RNA, 19 nt, Artificial Sequence
  Description of Artificial Sequence: Synthetic oligonucleotide
gguuggugaugccacuugc

SEQ ID NO: 768876 - RNA, 19 nt, Artificial Sequence
  Description of Artificial Sequence: Synthetic oligonucleotide
agagccuccuaguccccag

SEQ ID NO: 768877 - RNA, 19 nt, Artificial Sequence
  Description of Artificial Sequence: Synthetic oligonucleotide
agaacccauucugugacaa

SEQ ID NO: 768878 - RNA, 19 nt, Artificial Sequence
  Description of Artificial Sequence: Synthetic oligonucleotide
cuugguuggauggcugaug

SEQ ID NO: 768879 - RNA, 19 nt, Artificial Sequence
  Description of Artificial Sequence: Synthetic oligonucleotide
gguugugcucgucuucugc

SEQ ID NO: 768880 - RNA, 19 nt, Artificial Sequence
  Description of Artificial Sequence: Synthetic oligonucleotide
ucacauggggauagcucau

SEQ ID NO: 768881 - RNA, 19 nt, Artificial Sequence
  Description of Artificial Sequence: Synthetic oligonucleotide
auaaucccaauggcuccuc

SEQ ID NO: 768882 - RNA, 19 nt, Artificial Sequence
  Description of Artificial Sequence: Synthetic oligonucleotide
agauugccauucugguugu

SEQ ID NO: 768883 - RNA, 19 nt, Artificial Sequence
  Description of Artificial Sequence: Synthetic oligonucleotide
gaacccauucugugacaac

SEQ ID NO: 768884 - RNA, 19 nt, Artificial Sequence
  Description of Artificial Sequence: Synthetic oligonucleotide
guggagcggaaacugauua

SEQ ID NO: 768885 - RNA, 19 nt, Artificial Sequence
  Description of Artificial Sequence: Synthetic oligonucleotide
uuacagacauuggucggau

SEQ ID NO: 768886 - RNA, 19 nt, Artificial Sequence
  Description of Artificial Sequence: Synthetic oligonucleotide
aaaacagcccugagccccu

SEQ ID NO: 768887 - RNA, 19 nt, Artificial Sequence
  Description of Artificial Sequence: Synthetic oligonucleotide
agacauuggucggaugaga

SEQ ID NO: 768888 - RNA, 19 nt, Artificial Sequence
  Description of Artificial Sequence: Synthetic oligonucleotide
guggggcuaaagcagugca

SEQ ID NO: 768889 - RNA, 19 nt, Artificial Sequence
  Description of Artificial Sequence: Synthetic oligonucleotide
ugcgugcuacagacaaaac

SEQ ID NO: 768890 - RNA, 19 nt, Artificial Sequence
  Description of Artificial Sequence: Synthetic oligonucleotide
cguaagauacauccugaag

SEQ ID NO: 768891 - RNA, 19 nt, Artificial Sequence
  Description of Artificial Sequence: Synthetic oligonucleotide
ucugcgugcuacagacaaa

SEQ ID NO: 768892 - RNA, 19 nt, Artificial Sequence
  Description of Artificial Sequence: Synthetic oligonucleotide
ggaagguaccugaagggac

SEQ ID NO: 768893 - RNA, 19 nt, Artificial Sequence
  Description of Artificial Sequence: Synthetic oligonucleotide
gggguauuacaagaaagga

SEQ ID NO: 768894 - RNA, 19 nt, Artificial Sequence
  Description of Artificial Sequence: Synthetic oligonucleotide
cauuggggaccugugggug

SEQ ID NO: 768895 - RNA, 19 nt, Artificial Sequence
  Description of Artificial Sequence: Synthetic oligonucleotide
acucggccuuucuugggug

SEQ ID NO: 768896 - RNA, 19 nt, Artificial Sequence
  Description of Artificial Sequence: Synthetic oligonucleotide
gugggcacagugaccauug

SEQ ID NO: 768897 - RNA, 19 nt, Artificial Sequence
  Description of Artificial Sequence: Synthetic oligonucleotide
ucagagugauaggucuaac

SEQ ID NO: 768898 - RNA, 19 nt, Artificial Sequence
  Description of Artificial Sequence: Synthetic oligonucleotide
ugaggacccuaggaaaguc

SEQ ID NO: 768899 - RNA, 19 nt, Artificial Sequence
  Description of Artificial Sequence: Synthetic oligonucleotide
caggugggcuaucucuccc

SEQ ID NO: 768900 - RNA, 19 nt, Artificial Sequence
  Description of Artificial Sequence: Synthetic oligonucleotide
gaccugccagcuaagaucu

SEQ ID NO: 768901 - RNA, 19 nt, Artificial Sequence
  Description of Artificial Sequence: Synthetic oligonucleotide
uugguccaacggcugugga

SEQ ID NO: 768902 - RNA, 19 nt, Artificial Sequence
  Description of Artificial Sequence: Synthetic oligonucleotide
uaggucuaacgaccaugaa

SEQ ID NO: 768903 - RNA, 19 nt, Artificial Sequence
  Description of Artificial Sequence: Synthetic oligonucleotide
cuaucucucccacaaccaa

SEQ ID NO: 768904 - RNA, 19 nt, Artificial Sequence
  Description of Artificial Sequence: Synthetic oligonucleotide
agguaccugaagggacacc

SEQ ID NO: 768905 - RNA, 19 nt, Artificial Sequence
  Description of Artificial Sequence: Synthetic oligonucleotide
ggagcggaaacugauuaca

SEQ ID NO: 768906 - RNA, 19 nt, Artificial Sequence
  Description of Artificial Sequence: Synthetic oligonucleotide
gcuaaagcagugcaagucu

SEQ ID NO: 768907 - RNA, 19 nt, Artificial Sequence
  Description of Artificial Sequence: Synthetic oligonucleotide
ggcuaaagcagugcaaguc

SEQ ID NO: 768908 - RNA, 19 nt, Artificial Sequence
  Description of Artificial Sequence: Synthetic oligonucleotide
uggucggaugagagccucc

SEQ ID NO: 768909 - RNA, 19 nt, Artificial Sequence
  Description of Artificial Sequence: Synthetic oligonucleotide
ccacaaccaacacacuccc

SEQ ID NO: 768910 - RNA, 19 nt, Artificial Sequence
  Description of Artificial Sequence: Synthetic oligonucleotide
gugauaggucuaacgacca

SEQ ID NO: 768911 - RNA, 19 nt, Artificial Sequence
  Description of Artificial Sequence: Synthetic oligonucleotide
cuucucgagcccagaccag

SEQ ID NO: 768912 - RNA, 19 nt, Artificial Sequence
  Description of Artificial Sequence: Synthetic oligonucleotide
aucgaagacguuggacuca

SEQ ID NO: 768913 - RNA, 19 nt, Artificial Sequence
  Description of Artificial Sequence: Synthetic oligonucleotide
ucgccccucccaaguagcc

SEQ ID NO: 768914 - RNA, 19 nt, Artificial Sequence
  Description of Artificial Sequence: Synthetic oligonucleotide
cucgagcccagaccagccc

SEQ ID NO: 768915 - RNA, 19 nt, Artificial Sequence
  Description of Artificial Sequence: Synthetic oligonucleotide
ccgaaguucuacaaacuca

SEQ ID NO: 768916 - RNA, 19 nt, Artificial Sequence
  Description of Artificial Sequence: Synthetic oligonucleotide
ccuccuaguccccagggac

SEQ ID NO: 768917 - RNA, 19 nt, Artificial Sequence
  Description of Artificial Sequence: Synthetic oligonucleotide
agggaguuugcaagggagu

SEQ ID NO: 768918 - RNA, 19 nt, Artificial Sequence
  Description of Artificial Sequence: Synthetic oligonucleotide
ugcccguuccuuccacuuc

SEQ ID NO: 768919 - RNA, 19 nt, Artificial Sequence
  Description of Artificial Sequence: Synthetic oligonucleotide
gcgcccaguucucuaaucc

SEQ ID NO: 768920 - RNA, 19 nt, Artificial Sequence
  Description of Artificial Sequence: Synthetic oligonucleotide
gaagggacaccugcccuuc

SEQ ID NO: 768921 - RNA, 19 nt, Artificial Sequence
  Description of Artificial Sequence: Synthetic oligonucleotide
uaacgaccaugaagaugga

SEQ ID NO: 768922 - RNA, 19 nt, Artificial Sequence
  Description of Artificial Sequence: Synthetic oligonucleotide
gagauagggccuuggacuu

SEQ ID NO: 768923 - RNA, 19 nt, Artificial Sequence
  Description of Artificial Sequence: Synthetic oligonucleotide
gguaauaccucaccccacu

SEQ ID NO: 768924 - RNA, 19 nt, Artificial Sequence
  Description of Artificial Sequence: Synthetic oligonucleotide
ccaccaauguggaggugcg

SEQ ID NO: 768925 - RNA, 19 nt, Artificial Sequence
  Description of Artificial Sequence: Synthetic oligonucleotide
ccaacacacucccuuggag

SEQ ID NO: 768926 - RNA, 19 nt, Artificial Sequence
  Description of Artificial Sequence: Synthetic oligonucleotide
gaagaccucaaagcauuua

SEQ ID NO: 768927 - RNA, 19 nt, Artificial Sequence
  Description of Artificial Sequence: Synthetic oligonucleotide
ccccacuugcaccagggcc

SEQ ID NO: 768928 - RNA, 19 nt, Artificial Sequence
  Description of Artificial Sequence: Synthetic oligonucleotide
ggacgggaaucucuuggug

SEQ ID NO: 768929 - RNA, 19 nt, Artificial Sequence
  Description of Artificial Sequence: Synthetic oligonucleotide
cugcgugcuacagacaaaa

SEQ ID NO: 768930 - RNA, 19 nt, Artificial Sequence
  Description of Artificial Sequence: Synthetic oligonucleotide
uucccaugcagggcuuuga

SEQ ID NO: 768931 - RNA, 19 nt, Artificial Sequence
  Description of Artificial Sequence: Synthetic oligonucleotide
gucacaugcgguucagagu

SEQ ID NO: 768932 - RNA, 19 nt, Artificial Sequence
  Description of Artificial Sequence: Synthetic oligonucleotide
gggaaucucuuggugggcc

SEQ ID NO: 768933 - RNA, 19 nt, Artificial Sequence
  Description of Artificial Sequence: Synthetic oligonucleotide
uuggucggaugagagccuc

SEQ ID NO: 768934 - RNA, 19 nt, Artificial Sequence
  Description of Artificial Sequence: Synthetic oligonucleotide
gaguggggcuaaagcagug

SEQ ID NO: 768935 - RNA, 19 nt, Artificial Sequence
  Description of Artificial Sequence: Synthetic oligonucleotide
aggcccgaaguucuacaaa

SEQ ID NO: 768936 - RNA, 19 nt, Artificial Sequence
  Description of Artificial Sequence: Synthetic oligonucleotide
aguuugcaagggagugggg

SEQ ID NO: 768937 - RNA, 19 nt, Artificial Sequence
  Description of Artificial Sequence: Synthetic oligonucleotide
guagccaccugaccaggaa

SEQ ID NO: 768938 - RNA, 19 nt, Artificial Sequence
  Description of Artificial Sequence: Synthetic oligonucleotide
ccucacauggggauagcuc

SEQ ID NO: 768939 - RNA, 19 nt, Artificial Sequence
  Description of Artificial Sequence: Synthetic oligonucleotide
gacucggccuuucuugggu

SEQ ID NO: 768940 - RNA, 19 nt, Artificial Sequence
  Description of Artificial Sequence: Synthetic oligonucleotide
gcccaguucucuaauccag

SEQ ID NO: 768941 - RNA, 19 nt, Artificial Sequence
  Description of Artificial Sequence: Synthetic oligonucleotide
ggaaauggcaggacauguc

SEQ ID NO: 768942 - RNA, 19 nt, Artificial Sequence
  Description of Artificial Sequence: Synthetic oligonucleotide
uuggggucuccuacaucua

SEQ ID NO: 768943 - RNA, 19 nt, Artificial Sequence
  Description of Artificial Sequence: Synthetic oligonucleotide
uggcuuucaggugggcuau

SEQ ID NO: 768944 - RNA, 19 nt, Artificial Sequence
  Description of Artificial Sequence: Synthetic oligonucleotide
ggcaucucugacccucccc

SEQ ID NO: 768945 - RNA, 19 nt, Artificial Sequence
  Description of Artificial Sequence: Synthetic oligonucleotide
ggacuucacgagagcaggg

SEQ ID NO: 768946 - RNA, 19 nt, Artificial Sequence
  Description of Artificial Sequence: Synthetic oligonucleotide
gauagggccuuggacuugu

SEQ ID NO: 768947 - RNA, 19 nt, Artificial Sequence
  Description of Artificial Sequence: Synthetic oligonucleotide
ucuccuuccuuugcucgua

SEQ ID NO: 768948 - RNA, 19 nt, Artificial Sequence
  Description of Artificial Sequence: Synthetic oligonucleotide
agauagggccuuggacuug

SEQ ID NO: 768949 - RNA, 19 nt, Artificial Sequence
  Description of Artificial Sequence: Synthetic oligonucleotide
acaugcgguucagagugau

SEQ ID NO: 768950 - RNA, 19 nt, Artificial Sequence
  Description of Artificial Sequence: Synthetic oligonucleotide
agguggagcggaaacugau

SEQ ID NO: 768951 - RNA, 19 nt, Artificial Sequence
  Description of Artificial Sequence: Synthetic oligonucleotide
caauggcuccucuccucuc

SEQ ID NO: 768952 - RNA, 19 nt, Artificial Sequence
  Description of Artificial Sequence: Synthetic oligonucleotide
auuggucggaugagagccu

SEQ ID NO: 768953 - RNA, 19 nt, Artificial Sequence
  Description of Artificial Sequence: Synthetic oligonucleotide
ggauuccuggguaauaccu

SEQ ID NO: 768954 - RNA, 19 nt, Artificial Sequence
  Description of Artificial Sequence: Synthetic oligonucleotide
cuuugcucguaagauacau

SEQ ID NO: 768955 - RNA, 19 nt, Artificial Sequence
  Description of Artificial Sequence: Synthetic oligonucleotide
uccaacggcuguggacuga

SEQ ID NO: 768956 - RNA, 19 nt, Artificial Sequence
  Description of Artificial Sequence: Synthetic oligonucleotide
guccaacggcuguggacug

SEQ ID NO: 768957 - RNA, 19 nt, Artificial Sequence
  Description of Artificial Sequence: Synthetic oligonucleotide
uaaugacaucgaagacguu

SEQ ID NO: 768958 - RNA, 19 nt, Artificial Sequence
  Description of Artificial Sequence: Synthetic oligonucleotide
guggaggugcgaucacaga

SEQ ID NO: 768959 - RNA, 19 nt, Artificial Sequence
  Description of Artificial Sequence: Synthetic oligonucleotide
gcuggcaucucugacccuc

SEQ ID NO: 768960 - RNA, 19 nt, Artificial Sequence
  Description of Artificial Sequence: Synthetic oligonucleotide
agaccagccccaaauucuu

SEQ ID NO: 768961 - RNA, 19 nt, Artificial Sequence
  Description of Artificial Sequence: Synthetic oligonucleotide
caacggcuguggacugacc

SEQ ID NO: 768962 - RNA, 19 nt, Artificial Sequence
  Description of Artificial Sequence: Synthetic oligonucleotide
ggugggcuaucucucccac

SEQ ID NO: 768963 - RNA, 19 nt, Artificial Sequence
  Description of Artificial Sequence: Synthetic oligonucleotide
gguccaacggcuguggacu

SEQ ID NO: 768964 - RNA, 19 nt, Artificial Sequence
  Description of Artificial Sequence: Synthetic oligonucleotide
gcaggaagcucgccccucc

SEQ ID NO: 768965 - RNA, 19 nt, Artificial Sequence
  Description of Artificial Sequence: Synthetic oligonucleotide
gugaccauuggggaccugu

SEQ ID NO: 768966 - RNA, 19 nt, Artificial Sequence
  Description of Artificial Sequence: Synthetic oligonucleotide
cucugacccuccccuccag

SEQ ID NO: 768967 - RNA, 19 nt, Artificial Sequence
  Description of Artificial Sequence: Synthetic oligonucleotide
gcucgccccucccaaguag

SEQ ID NO: 768968 - RNA, 19 nt, Artificial Sequence
  Description of Artificial Sequence: Synthetic oligonucleotide
guucagagugauaggucua

SEQ ID NO: 768969 - RNA, 19 nt, Artificial Sequence
  Description of Artificial Sequence: Synthetic oligonucleotide
cucggccuuucuuggguga

SEQ ID NO: 768970 - RNA, 19 nt, Artificial Sequence
  Description of Artificial Sequence: Synthetic oligonucleotide
gggagucacaugcgguuca

SEQ ID NO: 768971 - RNA, 19 nt, Artificial Sequence
  Description of Artificial Sequence: Synthetic oligonucleotide
ugaccacugcuugguugga

SEQ ID NO: 768972 - RNA, 19 nt, Artificial Sequence
  Description of Artificial Sequence: Synthetic oligonucleotide
cauaaucccaauggcuccu

SEQ ID NO: 768973 - RNA, 19 nt, Artificial Sequence
  Description of Artificial Sequence: Synthetic oligonucleotide
ggaagcucgccccucccaa

SEQ ID NO: 768974 - RNA, 19 nt, Artificial Sequence
  Description of Artificial Sequence: Synthetic oligonucleotide
gugggcuaucucucccaca

SEQ ID NO: 768975 - RNA, 19 nt, Artificial Sequence
  Description of Artificial Sequence: Synthetic oligonucleotide
gccccaaauucuugaggac

SEQ ID NO: 768976 - RNA, 19 nt, Artificial Sequence
  Description of Artificial Sequence: Synthetic oligonucleotide
ccaauucugggagaaggga

SEQ ID NO: 768977 - RNA, 19 nt, Artificial Sequence
  Description of Artificial Sequence: Synthetic oligonucleotide
cauggauuccuggguaaua

SEQ ID NO: 768978 - RNA, 19 nt, Artificial Sequence
  Description of Artificial Sequence: Synthetic oligonucleotide
gcuuagaaacuuggaggca

SEQ ID NO: 768979 - RNA, 19 nt, Artificial Sequence
  Description of Artificial Sequence: Synthetic oligonucleotide
guggggagggaccuucccu

SEQ ID NO: 768980 - RNA, 19 nt, Artificial Sequence
  Description of Artificial Sequence: Synthetic oligonucleotide
gagucacaugcgguucaga

SEQ ID NO: 768981 - RNA, 19 nt, Artificial Sequence
  Description of Artificial Sequence: Synthetic oligonucleotide
cuggggucaagaggauguc

SEQ ID NO: 768982 - RNA, 19 nt, Artificial Sequence
  Description of Artificial Sequence: Synthetic oligonucleotide
cccuaggaaagucuuccca

SEQ ID NO: 768983 - RNA, 19 nt, Artificial Sequence
  Description of Artificial Sequence: Synthetic oligonucleotide
gagcggaaacugauuacau

SEQ ID NO: 768984 - RNA, 19 nt, Artificial Sequence
  Description of Artificial Sequence: Synthetic oligonucleotide
guagagcaagugacaagcu

SEQ ID NO: 768985 - RNA, 19 nt, Artificial Sequence
  Description of Artificial Sequence: Synthetic oligonucleotide
cugguugugcucgucuucu

SEQ ID NO: 768986 - RNA, 19 nt, Artificial Sequence
  Description of Artificial Sequence: Synthetic oligonucleotide
guaauaccucaccccacuu

SEQ ID NO: 768987 - RNA, 19 nt, Artificial Sequence
  Description of Artificial Sequence: Synthetic oligonucleotide
ggguaauaccucaccccac

SEQ ID NO: 768988 - RNA, 19 nt, Artificial Sequence
  Description of Artificial Sequence: Synthetic oligonucleotide
cuccuacaucuacaucuaa

SEQ ID NO: 768989 - RNA, 19 nt, Artificial Sequence
  Description of Artificial Sequence: Synthetic oligonucleotide
cugagccccuccccaucug

SEQ ID NO: 768990 - RNA, 19 nt, Artificial Sequence
  Description of Artificial Sequence: Synthetic oligonucleotide
agcucgccccucccaagua

SEQ ID NO: 768991 - RNA, 19 nt, Artificial Sequence
  Description of Artificial Sequence: Synthetic oligonucleotide
ccucaccccacuugcacca

SEQ ID NO: 768992 - RNA, 19 nt, Artificial Sequence
  Description of Artificial Sequence: Synthetic oligonucleotide
ggaggugcgaucacagagu

SEQ ID NO: 768993 - RNA, 19 nt, Artificial Sequence
  Description of Artificial Sequence: Synthetic oligonucleotide
cucaccccacuugcaccag

SEQ ID NO: 768994 - RNA, 19 nt, Artificial Sequence
  Description of Artificial Sequence: Synthetic oligonucleotide
gucuaacgaccaugaagau

SEQ ID NO: 768995 - RNA, 19 nt, Artificial Sequence
  Description of Artificial Sequence: Synthetic oligonucleotide
gcaugaagcagaagagaua

SEQ ID NO: 768996 - RNA, 19 nt, Artificial Sequence
  Description of Artificial Sequence: Synthetic oligonucleotide
accugaccaggaagggagu

SEQ ID NO: 768997 - RNA, 19 nt, Artificial Sequence
  Description of Artificial Sequence: Synthetic oligonucleotide
caagcuucucgagcccaga

SEQ ID NO: 768998 - RNA, 19 nt, Artificial Sequence
  Description of Artificial Sequence: Synthetic oligonucleotide
caugcgguucagagugaua

SEQ ID NO: 768999 - RNA, 19 nt, Artificial Sequence
  Description of Artificial Sequence: Synthetic oligonucleotide
ggccaacaccaucucaaua

SEQ ID NO: 769000 - RNA, 19 nt, Artificial Sequence
  Description of Artificial Sequence: Synthetic oligonucleotide
ccauuagggccuuggucca

SEQ ID NO: 769001 - RNA, 19 nt, Artificial Sequence
  Description of Artificial Sequence: Synthetic oligonucleotide
uccauccaccaggggccca

SEQ ID NO: 769002 - RNA, 19 nt, Artificial Sequence
  Description of Artificial Sequence: Synthetic oligonucleotide
gggacgggaaucucuuggu

SEQ ID NO: 769003 - RNA, 19 nt, Artificial Sequence
  Description of Artificial Sequence: Synthetic oligonucleotide
ccaacggcuguggacugac

SEQ ID NO: 769004 - RNA, 19 nt, Artificial Sequence
  Description of Artificial Sequence: Synthetic oligonucleotide
ggggagggaccuucccuca

SEQ ID NO: 769005 - RNA, 19 nt, Artificial Sequence
  Description of Artificial Sequence: Synthetic oligonucleotide
gcugacuuuuagacuugga

SEQ ID NO: 769006 - RNA, 19 nt, Artificial Sequence
  Description of Artificial Sequence: Synthetic oligonucleotide
gucggaugagagccuccua

SEQ ID NO: 769007 - RNA, 19 nt, Artificial Sequence
  Description of Artificial Sequence: Synthetic oligonucleotide
ucacgagagcagggcccac

SEQ ID NO: 769008 - RNA, 19 nt, Artificial Sequence
  Description of Artificial Sequence: Synthetic oligonucleotide
ggaguggggcuaaagcagu

SEQ ID NO: 769009 - RNA, 19 nt, Artificial Sequence
  Description of Artificial Sequence: Synthetic oligonucleotide
gggccaauucugggagaag

SEQ ID NO: 769010 - RNA, 19 nt, Artificial Sequence
  Description of Artificial Sequence: Synthetic oligonucleotide
gccuccuaguccccaggga

SEQ ID NO: 769011 - RNA, 19 nt, Artificial Sequence
  Description of Artificial Sequence: Synthetic oligonucleotide
cccagaccugccagcuaag

SEQ ID NO: 769012 - RNA, 19 nt, Artificial Sequence
  Description of Artificial Sequence: Synthetic oligonucleotide
caccucauccuaggaaggu

SEQ ID NO: 769013 - RNA, 19 nt, Artificial Sequence
  Description of Artificial Sequence: Synthetic oligonucleotide
gcgccacuggaagcuaggc

SEQ ID NO: 769014 - RNA, 19 nt, Artificial Sequence
  Description of Artificial Sequence: Synthetic oligonucleotide
cguuggacucagugaggac

SEQ ID NO: 769015 - RNA, 19 nt, Artificial Sequence
  Description of Artificial Sequence: Synthetic oligonucleotide
gcauaggagagagggaguu

SEQ ID NO: 769016 - RNA, 19 nt, Artificial Sequence
  Description of Artificial Sequence: Synthetic oligonucleotide
cauuagggccuugguccaa

SEQ ID NO: 769017 - RNA, 19 nt, Artificial Sequence
  Description of Artificial Sequence: Synthetic oligonucleotide
caccaauguggaggugcga

SEQ ID NO: 769018 - RNA, 19 nt, Artificial Sequence
  Description of Artificial Sequence: Synthetic oligonucleotide
cauaggagagagggaguuu

SEQ ID NO: 769019 - RNA, 19 nt, Artificial Sequence
  Description of Artificial Sequence: Synthetic oligonucleotide
gaccacugcuugguuggau

SEQ ID NO: 769020 - RNA, 19 nt, Artificial Sequence
  Description of Artificial Sequence: Synthetic oligonucleotide
ggcauaggagagagggagu

SEQ ID NO: 769021 - RNA, 19 nt, Artificial Sequence
  Description of Artificial Sequence: Synthetic oligonucleotide
gcagggcccacuguacaaa

SEQ ID NO: 769022 - RNA, 19 nt, Artificial Sequence
  Description of Artificial Sequence: Synthetic oligonucleotide
cugcccguuccuuccacuu

SEQ ID NO: 769023 - RNA, 19 nt, Artificial Sequence
  Description of Artificial Sequence: Synthetic oligonucleotide
accugccagcuaagaucug

SEQ ID NO: 769024 - RNA, 19 nt, Artificial Sequence
  Description of Artificial Sequence: Synthetic oligonucleotide
cugccuggcugcacuugcu

SEQ ID NO: 769025 - RNA, 19 nt, Artificial Sequence
  Description of Artificial Sequence: Synthetic oligonucleotide
gguccagguggagcggaaa

SEQ ID NO: 769026 - RNA, 19 nt, Artificial Sequence
  Description of Artificial Sequence: Synthetic oligonucleotide
ccaccugaccaggaaggga

SEQ ID NO: 769027 - RNA, 19 nt, Artificial Sequence
  Description of Artificial Sequence: Synthetic oligonucleotide
cacgagagcagggcccacu

SEQ ID NO: 769028 - RNA, 19 nt, Artificial Sequence
  Description of Artificial Sequence: Synthetic oligonucleotide
cccagggacgggaaucucu

SEQ ID NO: 769029 - RNA, 19 nt, Artificial Sequence
  Description of Artificial Sequence: Synthetic oligonucleotide
gcagaagagauagggccuu

SEQ ID NO: 769030 - RNA, 19 nt, Artificial Sequence
  Description of Artificial Sequence: Synthetic oligonucleotide
caccugcccuucccaugca

SEQ ID NO: 769031 - RNA, 19 nt, Artificial Sequence
  Description of Artificial Sequence: Synthetic oligonucleotide
gccagcgcccaguucucua

SEQ ID NO: 769032 - RNA, 19 nt, Artificial Sequence
  Description of Artificial Sequence: Synthetic oligonucleotide
gguggagcggaaacugauu

SEQ ID NO: 769033 - RNA, 19 nt, Artificial Sequence
  Description of Artificial Sequence: Synthetic oligonucleotide
ccagaccugccagcuaaga

SEQ ID NO: 769034 - RNA, 19 nt, Artificial Sequence
  Description of Artificial Sequence: Synthetic oligonucleotide
cgggaaucucuuggugggc

SEQ ID NO: 769035 - RNA, 19 nt, Artificial Sequence
  Description of Artificial Sequence: Synthetic oligonucleotide
ccccuccccaucugccuuc

SEQ ID NO: 769036 - RNA, 19 nt, Artificial Sequence
  Description of Artificial Sequence: Synthetic oligonucleotide
cccucaccucauccuagga

SEQ ID NO: 769037 - RNA, 19 nt, Artificial Sequence
  Description of Artificial Sequence: Synthetic oligonucleotide
ggugggcacagugaccauu

SEQ ID NO: 769038 - RNA, 19 nt, Artificial Sequence
  Description of Artificial Sequence: Synthetic oligonucleotide
ggaagaccucaaagcauuu

SEQ ID NO: 769039 - RNA, 19 nt, Artificial Sequence
  Description of Artificial Sequence: Synthetic oligonucleotide
ccagggacgggaaucucuu

SEQ ID NO: 769040 - RNA, 19 nt, Artificial Sequence
  Description of Artificial Sequence: Synthetic oligonucleotide
ccacagacauaaucccaau

SEQ ID NO: 769041 - RNA, 19 nt, Artificial Sequence
  Description of Artificial Sequence: Synthetic oligonucleotide
ggccaccaauguggaggug

SEQ ID NO: 769042 - RNA, 19 nt, Artificial Sequence
  Description of Artificial Sequence: Synthetic oligonucleotide
cgaucacagaguggagaga

SEQ ID NO: 769043 - RNA, 19 nt, Artificial Sequence
  Description of Artificial Sequence: Synthetic oligonucleotide
cagcgcccaguucucuaau

SEQ ID NO: 769044 - RNA, 19 nt, Artificial Sequence
  Description of Artificial Sequence: Synthetic oligonucleotide
ccuggacucggccuuucuu

SEQ ID NO: 769045 - RNA, 19 nt, Artificial Sequence
  Description of Artificial Sequence: Synthetic oligonucleotide
gcgaagggccagagaccca

SEQ ID NO: 769046 - RNA, 19 nt, Artificial Sequence
  Description of Artificial Sequence: Synthetic oligonucleotide
ggcuggcaucucugacccu

SEQ ID NO: 769047 - RNA, 19 nt, Artificial Sequence
  Description of Artificial Sequence: Synthetic oligonucleotide
cccucccaaguagccaccu

SEQ ID NO: 769048 - RNA, 19 nt, Artificial Sequence
  Description of Artificial Sequence: Synthetic oligonucleotide
gaaguaguagaccugaggg

SEQ ID NO: 769049 - RNA, 19 nt, Artificial Sequence
  Description of Artificial Sequence: Synthetic oligonucleotide
auuaaggcgauucuauccc

SEQ ID NO: 769050 - RNA, 19 nt, Artificial Sequence
  Description of Artificial Sequence: Synthetic oligonucleotide
auaguuaaugcucucaaag

SEQ ID NO: 769051 - RNA, 19 nt, Artificial Sequence
  Description of Artificial Sequence: Synthetic oligonucleotide
aacucuauggcuucaagga

SEQ ID NO: 769052 - RNA, 19 nt, Artificial Sequence
  Description of Artificial Sequence: Synthetic oligonucleotide
aagccucuaaacucuaugg

SEQ ID NO: 769053 - RNA, 19 nt, Artificial Sequence
  Description of Artificial Sequence: Synthetic oligonucleotide
agcgugucggccuugagcc

SEQ ID NO: 769054 - RNA, 19 nt, Artificial Sequence
  Description of Artificial Sequence: Synthetic oligonucleotide
aguaguagaccugagggac

SEQ ID NO: 769055 - RNA, 19 nt, Artificial Sequence
  Description of Artificial Sequence: Synthetic oligonucleotide
uucacaucgcgguagauga

SEQ ID NO: 769056 - RNA, 19 nt, Artificial Sequence
  Description of Artificial Sequence: Synthetic oligonucleotide
cauuaaggcgauucuaucc

SEQ ID NO: 769057 - RNA, 19 nt, Artificial Sequence
  Description of Artificial Sequence: Synthetic oligonucleotide
uguaaagcaagaacucggc

SEQ ID NO: 769058 - RNA, 19 nt, Artificial Sequence
  Description of Artificial Sequence: Synthetic oligonucleotide
auggcauuguacuuuccgc

SEQ ID NO: 769059 - RNA, 19 nt, Artificial Sequence
  Description of Artificial Sequence: Synthetic oligonucleotide
auaaguucauuucuguaca

SEQ ID NO: 769060 - RNA, 19 nt, Artificial Sequence
  Description of Artificial Sequence: Synthetic oligonucleotide
augcacauacuccaugcgc

SEQ ID NO: 769061 - RNA, 19 nt, Artificial Sequence
  Description of Artificial Sequence: Synthetic oligonucleotide
acacgcaugggucacgggc

SEQ ID NO: 769062 - RNA, 19 nt, Artificial Sequence
  Description of Artificial Sequence: Synthetic oligonucleotide
cauguuguaaagcaagaac

SEQ ID NO: 769063 - RNA, 19 nt, Artificial Sequence
  Description of Artificial Sequence: Synthetic oligonucleotide
uaaagcaagaacucggcuc

SEQ ID NO: 769064 - RNA, 19 nt, Artificial Sequence
  Description of Artificial Sequence: Synthetic oligonucleotide
uucguaugcacauacucca

SEQ ID NO: 769065 - RNA, 19 nt, Artificial Sequence
  Description of Artificial Sequence: Synthetic oligonucleotide
agccucuaaacucuauggc

SEQ ID NO: 769066 - RNA, 19 nt, Artificial Sequence
  Description of Artificial Sequence: Synthetic oligonucleotide
cuucguaugcacauacucc

SEQ ID NO: 769067 - RNA, 19 nt, Artificial Sequence
  Description of Artificial Sequence: Synthetic oligonucleotide
ucccaugugacacccaugc

SEQ ID NO: 769068 - RNA, 19 nt, Artificial Sequence
  Description of Artificial Sequence: Synthetic oligonucleotide
uuaccgacucggaaguugg

SEQ ID NO: 769069 - RNA, 19 nt, Artificial Sequence
  Description of Artificial Sequence: Synthetic oligonucleotide
acagccuaucuucuuaccg

SEQ ID NO: 769070 - RNA, 19 nt, Artificial Sequence
  Description of Artificial Sequence: Synthetic oligonucleotide
uuuggugcagcacuguggu

SEQ ID NO: 769071 - RNA, 19 nt, Artificial Sequence
  Description of Artificial Sequence: Synthetic oligonucleotide
cuucuuaccgacucggaag

SEQ ID NO: 769072 - RNA, 19 nt, Artificial Sequence
  Description of Artificial Sequence: Synthetic oligonucleotide
aaacauaaguucauuucug

SEQ ID NO: 769073 - RNA, 19 nt, Artificial Sequence
  Description of Artificial Sequence: Synthetic oligonucleotide
gaugagacucuucguaugc

SEQ ID NO: 769074 - RNA, 19 nt, Artificial Sequence
  Description of Artificial Sequence: Synthetic oligonucleotide
aauaguuaaugcucucaaa

SEQ ID NO: 769075 - RNA, 19 nt, Artificial Sequence
  Description of Artificial Sequence: Synthetic oligonucleotide
cauuaguggaguucagugc

SEQ ID NO: 769076 - RNA, 19 nt, Artificial Sequence
  Description of Artificial Sequence: Synthetic oligonucleotide
aaguaguagaccugaggga

SEQ ID NO: 769077 - RNA, 19 nt, Artificial Sequence
  Description of Artificial Sequence: Synthetic oligonucleotide
uugauagccacguacucgu

SEQ ID NO: 769078 - RNA, 19 nt, Artificial Sequence
  Description of Artificial Sequence: Synthetic oligonucleotide
aucgcgguagaugagacuc

SEQ ID NO: 769079 - RNA, 19 nt, Artificial Sequence
  Description of Artificial Sequence: Synthetic oligonucleotide
uuagagauuuccgccaaag

SEQ ID NO: 769080 - RNA, 19 nt, Artificial Sequence
  Description of Artificial Sequence: Synthetic oligonucleotide
cauggcauuguacuuuccg

SEQ ID NO: 769081 - RNA, 19 nt, Artificial Sequence
  Description of Artificial Sequence: Synthetic oligonucleotide
aaguucucgggcuucacau

SEQ ID NO: 769082 - RNA, 19 nt, Artificial Sequence
  Description of Artificial Sequence: Synthetic oligonucleotide
uacauagcgcaaauaggug

SEQ ID NO: 769083 - RNA, 19 nt, Artificial Sequence
  Description of Artificial Sequence: Synthetic oligonucleotide
cucguuuguauacagguuc

SEQ ID NO: 769084 - RNA, 19 nt, Artificial Sequence
  Description of Artificial Sequence: Synthetic oligonucleotide
cauagcgcaaauagguggc

SEQ ID NO: 769085 - RNA, 19 nt, Artificial Sequence
  Description of Artificial Sequence: Synthetic oligonucleotide
aacacauagccgcugcggu

SEQ ID NO: 769086 - RNA, 19 nt, Artificial Sequence
  Description of Artificial Sequence: Synthetic oligonucleotide
ggugcggucgcacaggucg

SEQ ID NO: 769087 - RNA, 19 nt, Artificial Sequence
  Description of Artificial Sequence: Synthetic oligonucleotide
agugugaaggugcggucgc

SEQ ID NO: 769088 - RNA, 19 nt, Artificial Sequence
  Description of Artificial Sequence: Synthetic oligonucleotide
cuugauagccacguacucg

SEQ ID NO: 769089 - RNA, 19 nt, Artificial Sequence
  Description of Artificial Sequence: Synthetic oligonucleotide
caaauagguggccaucucc

SEQ ID NO: 769090 - RNA, 19 nt, Artificial Sequence
  Description of Artificial Sequence: Synthetic oligonucleotide
agaacucggcucccgagac

SEQ ID NO: 769091 - RNA, 19 nt, Artificial Sequence
  Description of Artificial Sequence: Synthetic oligonucleotide
uucuuaccgacucggaagu

SEQ ID NO: 769092 - RNA, 19 nt, Artificial Sequence
  Description of Artificial Sequence: Synthetic oligonucleotide
uccuaggcgaagcucuccg

SEQ ID NO: 769093 - RNA, 19 nt, Artificial Sequence
  Description of Artificial Sequence: Synthetic oligonucleotide
auagccacguacucguuug

SEQ ID NO: 769094 - RNA, 19 nt, Artificial Sequence
  Description of Artificial Sequence: Synthetic oligonucleotide
agccuaucuucuuaccgac

SEQ ID NO: 769095 - RNA, 19 nt, Artificial Sequence
  Description of Artificial Sequence: Synthetic oligonucleotide
ucuccauuaguggaguuca

SEQ ID NO: 769096 - RNA, 19 nt, Artificial Sequence
  Description of Artificial Sequence: Synthetic oligonucleotide
gauguggugccugggaggg

SEQ ID NO: 769097 - RNA, 19 nt, Artificial Sequence
  Description of Artificial Sequence: Synthetic oligonucleotide
aagaacucggcucccgaga

SEQ ID NO: 769098 - RNA, 19 nt, Artificial Sequence
  Description of Artificial Sequence: Synthetic oligonucleotide
ugcggugcuaaguugcuug

SEQ ID NO: 769099 - RNA, 19 nt, Artificial Sequence
  Description of Artificial Sequence: Synthetic oligonucleotide
ucuucuuaccgacucggaa

SEQ ID NO: 769100 - RNA, 19 nt, Artificial Sequence
  Description of Artificial Sequence: Synthetic oligonucleotide
aggcgauucuaucccaugg

SEQ ID NO: 769101 - RNA, 19 nt, Artificial Sequence
  Description of Artificial Sequence: Synthetic oligonucleotide
uguggugagcaucccgcgg

SEQ ID NO: 769102 - RNA, 19 nt, Artificial Sequence
  Description of Artificial Sequence: Synthetic oligonucleotide
uggcauuguacuuuccgca

SEQ ID NO: 769103 - RNA, 19 nt, Artificial Sequence
  Description of Artificial Sequence: Synthetic oligonucleotide
ugagauccgagugugaaau

SEQ ID NO: 769104 - RNA, 19 nt, Artificial Sequence
  Description of Artificial Sequence: Synthetic oligonucleotide
guacuuuccgcacgggccg

SEQ ID NO: 769105 - RNA, 19 nt, Artificial Sequence
  Description of Artificial Sequence: Synthetic oligonucleotide
cucucaaaggggacgagac

SEQ ID NO: 769106 - RNA, 19 nt, Artificial Sequence
  Description of Artificial Sequence: Synthetic oligonucleotide
ugcuaaguugcuuguagaa

SEQ ID NO: 769107 - RNA, 19 nt, Artificial Sequence
  Description of Artificial Sequence: Synthetic oligonucleotide
ucuuggacauucuccggcc

SEQ ID NO: 769108 - RNA, 19 nt, Artificial Sequence
  Description of Artificial Sequence: Synthetic oligonucleotide
gucgauguacuccuuggcc

SEQ ID NO: 769109 - RNA, 19 nt, Artificial Sequence
  Description of Artificial Sequence: Synthetic oligonucleotide
ucguuuguauacagguucu

SEQ ID NO: 769110 - RNA, 19 nt, Artificial Sequence
  Description of Artificial Sequence: Synthetic oligonucleotide
agaugagacucuucguaug

SEQ ID NO: 769111 - RNA, 19 nt, Artificial Sequence
  Description of Artificial Sequence: Synthetic oligonucleotide
ugagacucuucguaugcac

SEQ ID NO: 769112 - RNA, 19 nt, Artificial Sequence
  Description of Artificial Sequence: Synthetic oligonucleotide
uccgagugugaaaucugag

SEQ ID NO: 769113 - RNA, 19 nt, Artificial Sequence
  Description of Artificial Sequence: Synthetic oligonucleotide
ucaccgaucuucugguagc

SEQ ID NO: 769114 - RNA, 19 nt, Artificial Sequence
  Description of Artificial Sequence: Synthetic oligonucleotide
cucugcggugcuaaguugc

SEQ ID NO: 769115 - RNA, 19 nt, Artificial Sequence
  Description of Artificial Sequence: Synthetic oligonucleotide
cuaucuucuuaccgacucg

SEQ ID NO: 769116 - RNA, 19 nt, Artificial Sequence
  Description of Artificial Sequence: Synthetic oligonucleotide
aaggcgauucuaucccaug

SEQ ID NO: 769117 - RNA, 19 nt, Artificial Sequence
  Description of Artificial Sequence: Synthetic oligonucleotide
ugauguggauggcaugcug

SEQ ID NO: 769118 - RNA, 19 nt, Artificial Sequence
  Description of Artificial Sequence: Synthetic oligonucleotide
ggugcuaaguugcuuguag

SEQ ID NO: 769119 - RNA, 19 nt, Artificial Sequence
  Description of Artificial Sequence: Synthetic oligonucleotide
uguccugguuuuaaauagu

SEQ ID NO: 769120 - RNA, 19 nt, Artificial Sequence
  Description of Artificial Sequence: Synthetic oligonucleotide
uggacuuuaugagcuaaca

SEQ ID NO: 769121 - RNA, 19 nt, Artificial Sequence
  Description of Artificial Sequence: Synthetic oligonucleotide
gacggugccgauuggaguc

SEQ ID NO: 769122 - RNA, 19 nt, Artificial Sequence
  Description of Artificial Sequence: Synthetic oligonucleotide
guagucgaacacauagccg

SEQ ID NO: 769123 - RNA, 19 nt, Artificial Sequence
  Description of Artificial Sequence: Synthetic oligonucleotide
guagaugagacucuucgua

SEQ ID NO: 769124 - RNA, 19 nt, Artificial Sequence
  Description of Artificial Sequence: Synthetic oligonucleotide
ggaaagcucucacacagug

SEQ ID NO: 769125 - RNA, 19 nt, Artificial Sequence
  Description of Artificial Sequence: Synthetic oligonucleotide
uuaaggcgauucuauccca

SEQ ID NO: 769126 - RNA, 19 nt, Artificial Sequence
  Description of Artificial Sequence: Synthetic oligonucleotide
uaugagcuaacaggggcgc

SEQ ID NO: 769127 - RNA, 19 nt, Artificial Sequence
  Description of Artificial Sequence: Synthetic oligonucleotide
uuggucucggggucgaugu

SEQ ID NO: 769128 - RNA, 19 nt, Artificial Sequence
  Description of Artificial Sequence: Synthetic oligonucleotide
ugagcuaacaggggcgcag

SEQ ID NO: 769129 - RNA, 19 nt, Artificial Sequence
  Description of Artificial Sequence: Synthetic oligonucleotide
cacgcaugggucacgggcg

SEQ ID NO: 769130 - RNA, 19 nt, Artificial Sequence
  Description of Artificial Sequence: Synthetic oligonucleotide
cacauagccgcugcggucg

SEQ ID NO: 769131 - RNA, 19 nt, Artificial Sequence
  Description of Artificial Sequence: Synthetic oligonucleotide
ucguacucguagucgaaca

SEQ ID NO: 769132 - RNA, 19 nt, Artificial Sequence
  Description of Artificial Sequence: Synthetic oligonucleotide
agucuuggacauucuccgg

SEQ ID NO: 769133 - RNA, 19 nt, Artificial Sequence
  Description of Artificial Sequence: Synthetic oligonucleotide
agauccgagugugaaaucu

SEQ ID NO: 769134 - RNA, 19 nt, Artificial Sequence
  Description of Artificial Sequence: Synthetic oligonucleotide
caugcgcgugaucagcugg

SEQ ID NO: 769135 - RNA, 19 nt, Artificial Sequence
  Description of Artificial Sequence: Synthetic oligonucleotide
cacguacucguuuguauac

SEQ ID NO: 769136 - RNA, 19 nt, Artificial Sequence
  Description of Artificial Sequence: Synthetic oligonucleotide
acauaaguucauuucugua

SEQ ID NO: 769137 - RNA, 19 nt, Artificial Sequence
  Description of Artificial Sequence: Synthetic oligonucleotide
ccguacauagcgcaaauag

SEQ ID NO: 769138 - RNA, 19 nt, Artificial Sequence
  Description of Artificial Sequence: Synthetic oligonucleotide
acacauagccgcugcgguc

SEQ ID NO: 769139 - RNA, 19 nt, Artificial Sequence
  Description of Artificial Sequence: Synthetic oligonucleotide
ucgcacaggucgaacaggu

SEQ ID NO: 769140 - RNA, 19 nt, Artificial Sequence
  Description of Artificial Sequence: Synthetic oligonucleotide
ugagcugguccccgagccg

SEQ ID NO: 769141 - RNA, 19 nt, Artificial Sequence
  Description of Artificial Sequence: Synthetic oligonucleotide
auagcgcaaauagguggcc

SEQ ID NO: 769142 - RNA, 19 nt, Artificial Sequence
  Description of Artificial Sequence: Synthetic oligonucleotide
gauggcaugcugacguuug

SEQ ID NO: 769143 - RNA, 19 nt, Artificial Sequence
  Description of Artificial Sequence: Synthetic oligonucleotide
uaguagaccugagggacgc

SEQ ID NO: 769144 - RNA, 19 nt, Artificial Sequence
  Description of Artificial Sequence: Synthetic oligonucleotide
acgagacaggggcuuagag

SEQ ID NO: 769145 - RNA, 19 nt, Artificial Sequence
  Description of Artificial Sequence: Synthetic oligonucleotide
cuuaccgacucggaaguug

SEQ ID NO: 769146 - RNA, 19 nt, Artificial Sequence
  Description of Artificial Sequence: Synthetic oligonucleotide
guguggacggugccgauug

SEQ ID NO: 769147 - RNA, 19 nt, Artificial Sequence
  Description of Artificial Sequence: Synthetic oligonucleotide
cguagucgaacacauagcc

SEQ ID NO: 769148 - RNA, 19 nt, Artificial Sequence
  Description of Artificial Sequence: Synthetic oligonucleotide
guagaagcgguacuccaga

SEQ ID NO: 769149 - RNA, 19 nt, Artificial Sequence
  Description of Artificial Sequence: Synthetic oligonucleotide
ggcgauucuaucccauggg

SEQ ID NO: 769150 - RNA, 19 nt, Artificial Sequence
  Description of Artificial Sequence: Synthetic oligonucleotide
ucuaaacucuauggcuuca

SEQ ID NO: 769151 - RNA, 19 nt, Artificial Sequence
  Description of Artificial Sequence: Synthetic oligonucleotide
uccaugcgcgugaucagcu

SEQ ID NO: 769152 - RNA, 19 nt, Artificial Sequence
  Description of Artificial Sequence: Synthetic oligonucleotide
guaguagaccugagggacg

SEQ ID NO: 769153 - RNA, 19 nt, Artificial Sequence
  Description of Artificial Sequence: Synthetic oligonucleotide
uaaggcgauucuaucccau

SEQ ID NO: 769154 - RNA, 19 nt, Artificial Sequence
  Description of Artificial Sequence: Synthetic oligonucleotide
agugccucaaugggcgugg

SEQ ID NO: 769155 - RNA, 19 nt, Artificial Sequence
  Description of Artificial Sequence: Synthetic oligonucleotide
guacccuggccucuccacg

SEQ ID NO: 769156 - RNA, 19 nt, Artificial Sequence
  Description of Artificial Sequence: Synthetic oligonucleotide
cagugugaaggugcggucg

SEQ ID NO: 769157 - RNA, 19 nt, Artificial Sequence
  Description of Artificial Sequence: Synthetic oligonucleotide
accgacucggaaguugggg

SEQ ID NO: 769158 - RNA, 19 nt, Artificial Sequence
  Description of Artificial Sequence: Synthetic oligonucleotide
gcuaaguugcuuguagaag

SEQ ID NO: 769159 - RNA, 19 nt, Artificial Sequence
  Description of Artificial Sequence: Synthetic oligonucleotide
ugccgugagauccgagugu

SEQ ID NO: 769160 - RNA, 19 nt, Artificial Sequence
  Description of Artificial Sequence: Synthetic oligonucleotide
acgcaugggucacgggcgc

SEQ ID NO: 769161 - RNA, 19 nt, Artificial Sequence
  Description of Artificial Sequence: Synthetic oligonucleotide
gugugaaggaagugacccc

SEQ ID NO: 769162 - RNA, 19 nt, Artificial Sequence
  Description of Artificial Sequence: Synthetic oligonucleotide
aaaauggccuuuggaucga

SEQ ID NO: 769163 - RNA, 19 nt, Artificial Sequence
  Description of Artificial Sequence: Synthetic oligonucleotide
gucucgauguggugccugg

SEQ ID NO: 769164 - RNA, 19 nt, Artificial Sequence
  Description of Artificial Sequence: Synthetic oligonucleotide
ucacaucgcgguagaugag

SEQ ID NO: 769165 - RNA, 19 nt, Artificial Sequence
  Description of Artificial Sequence: Synthetic oligonucleotide
agcuugauagccacguacu

SEQ ID NO: 769166 - RNA, 19 nt, Artificial Sequence
  Description of Artificial Sequence: Synthetic oligonucleotide
gcauuguacuuuccgcacg

SEQ ID NO: 769167 - RNA, 19 nt, Artificial Sequence
  Description of Artificial Sequence: Synthetic oligonucleotide
agaaguccaggcgccguac

SEQ ID NO: 769168 - RNA, 19 nt, Artificial Sequence
  Description of Artificial Sequence: Synthetic oligonucleotide
cuuggacauucuccggccc

SEQ ID NO: 769169 - RNA, 19 nt, Artificial Sequence
  Description of Artificial Sequence: Synthetic oligonucleotide
cuggacuuuaugagcuaac

SEQ ID NO: 769170 - RNA, 19 nt, Artificial Sequence
  Description of Artificial Sequence: Synthetic oligonucleotide
ucugcggugcuaaguugcu

SEQ ID NO: 769171 - RNA, 19 nt, Artificial Sequence
  Description of Artificial Sequence: Synthetic oligonucleotide
gccggagaaacauaaguuc

SEQ ID NO: 769172 - RNA, 19 nt, Artificial Sequence
  Description of Artificial Sequence: Synthetic oligonucleotide
uccuccggaaagcucucac

SEQ ID NO: 769173 - RNA, 19 nt, Artificial Sequence
  Description of Artificial Sequence: Synthetic oligonucleotide
augcucauguagcgcgccg

SEQ ID NO: 769174 - RNA, 19 nt, Artificial Sequence
  Description of Artificial Sequence: Synthetic oligonucleotide
ccgagugugaaaucugagc

SEQ ID NO: 769175 - RNA, 19 nt, Artificial Sequence
  Description of Artificial Sequence: Synthetic oligonucleotide
uaccgacucggaaguuggg

SEQ ID NO: 769176 - RNA, 19 nt, Artificial Sequence
  Description of Artificial Sequence: Synthetic oligonucleotide
ugugcucgcgguacgggau

SEQ ID NO: 769177 - RNA, 19 nt, Artificial Sequence
  Description of Artificial Sequence: Synthetic oligonucleotide
cagccuaucuucuuaccga

SEQ ID NO: 769178 - RNA, 19 nt, Artificial Sequence
  Description of Artificial Sequence: Synthetic oligonucleotide
uguggacggugccgauugg

SEQ ID NO: 769179 - RNA, 19 nt, Artificial Sequence
  Description of Artificial Sequence: Synthetic oligonucleotide
ccugugugaaggaagugac

SEQ ID NO: 769180 - RNA, 19 nt, Artificial Sequence
  Description of Artificial Sequence: Synthetic oligonucleotide
ugcugacguuugcugcccg

SEQ ID NO: 769181 - RNA, 19 nt, Artificial Sequence
  Description of Artificial Sequence: Synthetic oligonucleotide
guauacagguucuuuccua

SEQ ID NO: 769182 - RNA, 19 nt, Artificial Sequence
  Description of Artificial Sequence: Synthetic oligonucleotide
uagaccugagggacgcccu

SEQ ID NO: 769183 - RNA, 19 nt, Artificial Sequence
  Description of Artificial Sequence: Synthetic oligonucleotide
cacagccuaucuucuuacc

SEQ ID NO: 769184 - RNA, 19 nt, Artificial Sequence
  Description of Artificial Sequence: Synthetic oligonucleotide
uuuccgcacgggccgaagu

SEQ ID NO: 769185 - RNA, 19 nt, Artificial Sequence
  Description of Artificial Sequence: Synthetic oligonucleotide
gaagugaccccaaguccug

SEQ ID NO: 769186 - RNA, 19 nt, Artificial Sequence
  Description of Artificial Sequence: Synthetic oligonucleotide
gaugcagcugcggggcccg

SEQ ID NO: 769187 - RNA, 19 nt, Artificial Sequence
  Description of Artificial Sequence: Synthetic oligonucleotide
agcgcaaauagguggccau

SEQ ID NO: 769188 - RNA, 19 nt, Artificial Sequence
  Description of Artificial Sequence: Synthetic oligonucleotide
cuucaaggaagcgccggag

SEQ ID NO: 769189 - RNA, 19 nt, Artificial Sequence
  Description of Artificial Sequence: Synthetic oligonucleotide
uuuccgccaaaguccugug

SEQ ID NO: 769190 - RNA, 19 nt, Artificial Sequence
  Description of Artificial Sequence: Synthetic oligonucleotide
acuccaugcgcgugaucag

SEQ ID NO: 769191 - RNA, 19 nt, Artificial Sequence
  Description of Artificial Sequence: Synthetic oligonucleotide
agaccugagggacgcccuc

SEQ ID NO: 769192 - RNA, 19 nt, Artificial Sequence
  Description of Artificial Sequence: Synthetic oligonucleotide
gcgauucuaucccaugggc

SEQ ID NO: 769193 - RNA, 19 nt, Artificial Sequence
  Description of Artificial Sequence: Synthetic oligonucleotide
acacccaugccccgggccu

SEQ ID NO: 769194 - RNA, 19 nt, Artificial Sequence
  Description of Artificial Sequence: Synthetic oligonucleotide
aagcucuccgaaguuccca

SEQ ID NO: 769195 - RNA, 19 nt, Artificial Sequence
  Description of Artificial Sequence: Synthetic oligonucleotide
agcaagaacucggcucccg

SEQ ID NO: 769196 - RNA, 19 nt, Artificial Sequence
  Description of Artificial Sequence: Synthetic oligonucleotide
aaauggccuuuggaucgag

SEQ ID NO: 769197 - RNA, 19 nt, Artificial Sequence
  Description of Artificial Sequence: Synthetic oligonucleotide
ggcccagucguacucguag

SEQ ID NO: 769198 - RNA, 19 nt, Artificial Sequence
  Description of Artificial Sequence: Synthetic oligonucleotide
ggcauuguacuuuccgcac

SEQ ID NO: 769199 - RNA, 19 nt, Artificial Sequence
  Description of Artificial Sequence: Synthetic oligonucleotide
uccgcacgggccgaaguag

SEQ ID NO: 769200 - RNA, 19 nt, Artificial Sequence
  Description of Artificial Sequence: Synthetic oligonucleotide
uucuaucccaugggccuag

SEQ ID NO: 769201 - RNA, 19 nt, Artificial Sequence
  Description of Artificial Sequence: Synthetic oligonucleotide
accgaucuucugguagcgc

SEQ ID NO: 769202 - RNA, 19 nt, Artificial Sequence
  Description of Artificial Sequence: Synthetic oligonucleotide
ucgcgguacgggaugugcu

SEQ ID NO: 769203 - RNA, 19 nt, Artificial Sequence
  Description of Artificial Sequence: Synthetic oligonucleotide
ggucgcacaggucgaacag

SEQ ID NO: 769204 - RNA, 19 nt, Artificial Sequence
  Description of Artificial Sequence: Synthetic oligonucleotide
ccgaccaggaaguucucgg

SEQ ID NO: 769205 - RNA, 19 nt, Artificial Sequence
  Description of Artificial Sequence: Synthetic oligonucleotide
ugggucacgggcgcccugg

SEQ ID NO: 769206 - RNA, 19 nt, Artificial Sequence
  Description of Artificial Sequence: Synthetic oligonucleotide
ucucgauguggugccuggg

SEQ ID NO: 769207 - RNA, 19 nt, Artificial Sequence
  Description of Artificial Sequence: Synthetic oligonucleotide
augggcguggcgcgcuugg

SEQ ID NO: 769208 - RNA, 19 nt, Artificial Sequence
  Description of Artificial Sequence: Synthetic oligonucleotide
gucgcacaggucgaacagg

SEQ ID NO: 769209 - RNA, 19 nt, Artificial Sequence
  Description of Artificial Sequence: Synthetic oligonucleotide
aagcgccggagaaacauaa

SEQ ID NO: 769210 - RNA, 19 nt, Artificial Sequence
  Description of Artificial Sequence: Synthetic oligonucleotide
ucccgcggugagcaucccg

SEQ ID NO: 769211 - RNA, 19 nt, Artificial Sequence
  Description of Artificial Sequence: Synthetic oligonucleotide
guaaagcaagaacucggcu

SEQ ID NO: 769212 - RNA, 19 nt, Artificial Sequence
  Description of Artificial Sequence: Synthetic oligonucleotide
auagccgcugcggucgaag

SEQ ID NO: 769213 - RNA, 19 nt, Artificial Sequence
  Description of Artificial Sequence: Synthetic oligonucleotide
guacucguagucgaacaca

SEQ ID NO: 769214 - RNA, 19 nt, Artificial Sequence
  Description of Artificial Sequence: Synthetic oligonucleotide
uagcgcaaauagguggcca

SEQ ID NO: 769215 - RNA, 19 nt, Artificial Sequence
  Description of Artificial Sequence: Synthetic oligonucleotide
uuccgccaaaguccugugu

SEQ ID NO: 769216 - RNA, 19 nt, Artificial Sequence
  Description of Artificial Sequence: Synthetic oligonucleotide
uagaagcgguacuccagau

SEQ ID NO: 769217 - RNA, 19 nt, Artificial Sequence
  Description of Artificial Sequence: Synthetic oligonucleotide
ggcuuagagauuuccgcca

SEQ ID NO: 769218 - RNA, 19 nt, Artificial Sequence
  Description of Artificial Sequence: Synthetic oligonucleotide
cgauucuaucccaugggcc

SEQ ID NO: 769219 - RNA, 19 nt, Artificial Sequence
  Description of Artificial Sequence: Synthetic oligonucleotide
cucuugugcucgcgguacg

SEQ ID NO: 769220 - RNA, 19 nt, Artificial Sequence
  Description of Artificial Sequence: Synthetic oligonucleotide
ugagcaucccgcggugagc

SEQ ID NO: 769221 - RNA, 19 nt, Artificial Sequence
  Description of Artificial Sequence: Synthetic oligonucleotide
aguagaccugagggacgcc

SEQ ID NO: 769222 - RNA, 19 nt, Artificial Sequence
  Description of Artificial Sequence: Synthetic oligonucleotide
uuccgcacgggccgaagua

SEQ ID NO: 769223 - RNA, 19 nt, Artificial Sequence
  Description of Artificial Sequence: Synthetic oligonucleotide
guacgggaugugcuucuug

SEQ ID NO: 769224 - RNA, 19 nt, Artificial Sequence
  Description of Artificial Sequence: Synthetic oligonucleotide
cuccaugcgcgugaucagc

SEQ ID NO: 769225 - RNA, 19 nt, Artificial Sequence
  Description of Artificial Sequence: Synthetic oligonucleotide
gaggucggugaagagcuuc

SEQ ID NO: 769226 - RNA, 19 nt, Artificial Sequence
  Description of Artificial Sequence: Synthetic oligonucleotide
gagauccgagugugaaauc

SEQ ID NO: 769227 - RNA, 19 nt, Artificial Sequence
  Description of Artificial Sequence: Synthetic oligonucleotide
ccggagaaacauaaguuca

SEQ ID NO: 769228 - RNA, 19 nt, Artificial Sequence
  Description of Artificial Sequence: Synthetic oligonucleotide
ucgcgguagaugagacucu

SEQ ID NO: 769229 - RNA, 19 nt, Artificial Sequence
  Description of Artificial Sequence: Synthetic oligonucleotide
ucagcgugucggccuugag

SEQ ID NO: 769230 - RNA, 19 nt, Artificial Sequence
  Description of Artificial Sequence: Synthetic oligonucleotide
auccgagugugaaaucuga

SEQ ID NO: 769231 - RNA, 19 nt, Artificial Sequence
  Description of Artificial Sequence: Synthetic oligonucleotide
acggugacucugccgugag

SEQ ID NO: 769232 - RNA, 19 nt, Artificial Sequence
  Description of Artificial Sequence: Synthetic oligonucleotide
augagacucuucguaugca

SEQ ID NO: 769233 - RNA, 19 nt, Artificial Sequence
  Description of Artificial Sequence: Synthetic oligonucleotide
aggcgccguacauagcgca

SEQ ID NO: 769234 - RNA, 19 nt, Artificial Sequence
  Description of Artificial Sequence: Synthetic oligonucleotide
agucggcaggggcuucccg

SEQ ID NO: 769235 - RNA, 19 nt, Artificial Sequence
  Description of Artificial Sequence: Synthetic oligonucleotide
caccgaucuucugguagcg

SEQ ID NO: 769236 - RNA, 19 nt, Artificial Sequence
  Description of Artificial Sequence: Synthetic oligonucleotide
ccgacucggaaguuggggc

SEQ ID NO: 769237 - RNA, 19 nt, Artificial Sequence
  Description of Artificial Sequence: Synthetic oligonucleotide
cucauguagcgcgccgugc

SEQ ID NO: 769238 - RNA, 19 nt, Artificial Sequence
  Description of Artificial Sequence: Synthetic oligonucleotide
aggcucuugugcucgcggu

SEQ ID NO: 769239 - RNA, 19 nt, Artificial Sequence
  Description of Artificial Sequence: Synthetic oligonucleotide
cuaggcgaagcucuccgaa

SEQ ID NO: 769240 - RNA, 19 nt, Artificial Sequence
  Description of Artificial Sequence: Synthetic oligonucleotide
acguacucguuuguauaca

SEQ ID NO: 769241 - RNA, 19 nt, Artificial Sequence
  Description of Artificial Sequence: Synthetic oligonucleotide
gcuaacaggggcgcagcgg

SEQ ID NO: 769242 - RNA, 19 nt, Artificial Sequence
  Description of Artificial Sequence: Synthetic oligonucleotide
uggggaccgccuuuccacu

SEQ ID NO: 769243 - RNA, 19 nt, Artificial Sequence
  Description of Artificial Sequence: Synthetic oligonucleotide
uccggcuggugccagucuu

SEQ ID NO: 769244 - RNA, 19 nt, Artificial Sequence
  Description of Artificial Sequence: Synthetic oligonucleotide
uagccacguacucguuugu

SEQ ID NO: 769245 - RNA, 19 nt, Artificial Sequence
  Description of Artificial Sequence: Synthetic oligonucleotide
cuuccccgucacuugucac

SEQ ID NO: 769246 - RNA, 19 nt, Artificial Sequence
  Description of Artificial Sequence: Synthetic oligonucleotide
uagcgcuccuucagcgugu

SEQ ID NO: 769247 - RNA, 19 nt, Artificial Sequence
  Description of Artificial Sequence: Synthetic oligonucleotide
caggcgccguacauagcgc

SEQ ID NO: 769248 - RNA, 19 nt, Artificial Sequence
  Description of Artificial Sequence: Synthetic oligonucleotide
cguacucguuuguauacag

SEQ ID NO: 769249 - RNA, 19 nt, Artificial Sequence
  Description of Artificial Sequence: Synthetic oligonucleotide
gccucuaaacucuauggcu

SEQ ID NO: 769250 - RNA, 19 nt, Artificial Sequence
  Description of Artificial Sequence: Synthetic oligonucleotide
gauagccacguacucguuu

SEQ ID NO: 769251 - RNA, 19 nt, Artificial Sequence
  Description of Artificial Sequence: Synthetic oligonucleotide
ucacgggcgcccuggcucu

SEQ ID NO: 769252 - RNA, 19 nt, Artificial Sequence
  Description of Artificial Sequence: Synthetic oligonucleotide
gcuuguagaagcgguacuc

SEQ ID NO: 769253 - RNA, 19 nt, Artificial Sequence
  Description of Artificial Sequence: Synthetic oligonucleotide
aaugggcguggcgcgcuug

SEQ ID NO: 769254 - RNA, 19 nt, Artificial Sequence
  Description of Artificial Sequence: Synthetic oligonucleotide
acgggccgaaguaguagac

SEQ ID NO: 769255 - RNA, 19 nt, Artificial Sequence
  Description of Artificial Sequence: Synthetic oligonucleotide
cucgauguggugccuggga

SEQ ID NO: 769256 - RNA, 19 nt, Artificial Sequence
  Description of Artificial Sequence: Synthetic oligonucleotide
agcucuccauuaguggagu

SEQ ID NO: 769257 - RNA, 19 nt, Artificial Sequence
  Description of Artificial Sequence: Synthetic oligonucleotide
cacaucgcgguagaugaga

SEQ ID NO: 769258 - RNA, 19 nt, Artificial Sequence
  Description of Artificial Sequence: Synthetic oligonucleotide
cacgggccgaaguaguaga

SEQ ID NO: 769259 - RNA, 19 nt, Artificial Sequence
  Description of Artificial Sequence: Synthetic oligonucleotide
gugagauccgagugugaaa

SEQ ID NO: 769260 - RNA, 19 nt, Artificial Sequence
  Description of Artificial Sequence: Synthetic oligonucleotide
gucgaacacauagccgcug

SEQ ID NO: 769261 - RNA, 19 nt, Artificial Sequence
  Description of Artificial Sequence: Synthetic oligonucleotide
ggagggcacaucagugugg

SEQ ID NO: 769262 - RNA, 19 nt, Artificial Sequence
  Description of Artificial Sequence: Synthetic oligonucleotide
agggacgcccucugcggug

SEQ ID NO: 769263 - RNA, 19 nt, Artificial Sequence
  Description of Artificial Sequence: Synthetic oligonucleotide
cacauacuccaugcgcgug

SEQ ID NO: 769264 - RNA, 19 nt, Artificial Sequence
  Description of Artificial Sequence: Synthetic oligonucleotide
cagguguguguugaugcuc

SEQ ID NO: 769265 - RNA, 19 nt, Artificial Sequence
  Description of Artificial Sequence: Synthetic oligonucleotide
uucagcgugucggccuuga

SEQ ID NO: 769266 - RNA, 19 nt, Artificial Sequence
  Description of Artificial Sequence: Synthetic oligonucleotide
gcugacguuugcugcccgg

SEQ ID NO: 769267 - RNA, 19 nt, Artificial Sequence
  Description of Artificial Sequence: Synthetic oligonucleotide
cacuugguuucaucugcca

SEQ ID NO: 769268 - RNA, 19 nt, Artificial Sequence
  Description of Artificial Sequence: Synthetic oligonucleotide
ccauaaguuugugguaccc

SEQ ID NO: 769269 - RNA, 19 nt, Artificial Sequence
  Description of Artificial Sequence: Synthetic oligonucleotide
agucgaacacauagccgcu

SEQ ID NO: 769270 - RNA, 19 nt, Artificial Sequence
  Description of Artificial Sequence: Synthetic oligonucleotide
gacggcgggacguuucugu

SEQ ID NO: 769271 - RNA, 19 nt, Artificial Sequence
  Description of Artificial Sequence: Synthetic oligonucleotide
gcuugauagccacguacuc

SEQ ID NO: 769272 - RNA, 19 nt, Artificial Sequence
  Description of Artificial Sequence: Synthetic oligonucleotide
uccgggacgcccgccuggg

SEQ ID NO: 769273 - RNA, 19 nt, Artificial Sequence
  Description of Artificial Sequence: Synthetic oligonucleotide
gggccuucccaugugacac

SEQ ID NO: 769274 - RNA, 19 nt, Artificial Sequence
  Description of Artificial Sequence: Synthetic oligonucleotide
gugucaccgaucuucuggu

SEQ ID NO: 769275 - RNA, 19 nt, Artificial Sequence
  Description of Artificial Sequence: Synthetic oligonucleotide
acucguuuguauacagguu

SEQ ID NO: 769276 - RNA, 19 nt, Artificial Sequence
  Description of Artificial Sequence: Synthetic oligonucleotide
acagugccucaaugggcgu

SEQ ID NO: 769277 - RNA, 19 nt, Artificial Sequence
  Description of Artificial Sequence: Synthetic oligonucleotide
cccgcggugagcaucccgc

SEQ ID NO: 769278 - RNA, 19 nt, Artificial Sequence
  Description of Artificial Sequence: Synthetic oligonucleotide
ugauagccacguacucguu

SEQ ID NO: 769279 - RNA, 19 nt, Artificial Sequence
  Description of Artificial Sequence: Synthetic oligonucleotide
cuucccggcccagucguac

SEQ ID NO: 769280 - RNA, 19 nt, Artificial Sequence
  Description of Artificial Sequence: Synthetic oligonucleotide
cacaggucgaacagguccu

SEQ ID NO: 769281 - RNA, 19 nt, Artificial Sequence
  Description of Artificial Sequence: Synthetic oligonucleotide
guggugagcaucccgcggu

SEQ ID NO: 769282 - RNA, 19 nt, Artificial Sequence
  Description of Artificial Sequence: Synthetic oligonucleotide
ggaccuuccccgucacuug

SEQ ID NO: 769283 - RNA, 19 nt, Artificial Sequence
  Description of Artificial Sequence: Synthetic oligonucleotide
cauaaguuugugguacccu

SEQ ID NO: 769284 - RNA, 19 nt, Artificial Sequence
  Description of Artificial Sequence: Synthetic oligonucleotide
uucccggcccagucguacu

SEQ ID NO: 769285 - RNA, 19 nt, Artificial Sequence
  Description of Artificial Sequence: Synthetic oligonucleotide
gugcucgcgguacgggaug

SEQ ID NO: 769286 - RNA, 19 nt, Artificial Sequence
  Description of Artificial Sequence: Synthetic oligonucleotide
aagcgguacuccagaugca

SEQ ID NO: 769287 - RNA, 19 nt, Artificial Sequence
  Description of Artificial Sequence: Synthetic oligonucleotide
ggcgcgcuuggugucaccg

SEQ ID NO: 769288 - RNA, 19 nt, Artificial Sequence
  Description of Artificial Sequence: Synthetic oligonucleotide
aucgaggggacaagcugga

SEQ ID NO: 769289 - RNA, 19 nt, Artificial Sequence
  Description of Artificial Sequence: Synthetic oligonucleotide
uccccgucacuugucacuu

SEQ ID NO: 769290 - RNA, 19 nt, Artificial Sequence
  Description of Artificial Sequence: Synthetic oligonucleotide
gcaaauagguggccaucuc

SEQ ID NO: 769291 - RNA, 19 nt, Artificial Sequence
  Description of Artificial Sequence: Synthetic oligonucleotide
auucuaucccaugggccua

SEQ ID NO: 769292 - RNA, 19 nt, Artificial Sequence
  Description of Artificial Sequence: Synthetic oligonucleotide
ucuaucccaugggccuagc

SEQ ID NO: 769293 - RNA, 19 nt, Artificial Sequence
  Description of Artificial Sequence: Synthetic oligonucleotide
caucccgcgcuccgccccg

SEQ ID NO: 769294 - RNA, 19 nt, Artificial Sequence
  Description of Artificial Sequence: Synthetic oligonucleotide
gccgugagauccgagugug

SEQ ID NO: 769295 - RNA, 19 nt, Artificial Sequence
  Description of Artificial Sequence: Synthetic oligonucleotide
cgagugugaaaucugagcu

SEQ ID NO: 769296 - RNA, 19 nt, Artificial Sequence
  Description of Artificial Sequence: Synthetic oligonucleotide
gacgagacaggggcuuaga

SEQ ID NO: 769297 - RNA, 19 nt, Artificial Sequence
  Description of Artificial Sequence: Synthetic oligonucleotide
agcgccggagaaacauaag

SEQ ID NO: 769298 - RNA, 19 nt, Artificial Sequence
  Description of Artificial Sequence: Synthetic oligonucleotide
cuggggaccuuccccguca

SEQ ID NO: 769299 - RNA, 19 nt, Artificial Sequence
  Description of Artificial Sequence: Synthetic oligonucleotide
gcuuagagauuuccgccaa

SEQ ID NO: 769300 - RNA, 19 nt, Artificial Sequence
  Description of Artificial Sequence: Synthetic oligonucleotide
gggaccgccuuuccacugc

SEQ ID NO: 769301 - RNA, 19 nt, Artificial Sequence
  Description of Artificial Sequence: Synthetic oligonucleotide
guccccgagccgcggacgc

SEQ ID NO: 769302 - RNA, 19 nt, Artificial Sequence
  Description of Artificial Sequence: Synthetic oligonucleotide
ggugacucugccgugagau

SEQ ID NO: 769303 - RNA, 19 nt, Artificial Sequence
  Description of Artificial Sequence: Synthetic oligonucleotide
cagugccucaaugggcgug

SEQ ID NO: 769304 - RNA, 19 nt, Artificial Sequence
  Description of Artificial Sequence: Synthetic oligonucleotide
uacuuuccgcacgggccga

SEQ ID NO: 769305 - RNA, 19 nt, Artificial Sequence
  Description of Artificial Sequence: Synthetic oligonucleotide
aguccaggcgccguacaua

SEQ ID NO: 769306 - RNA, 19 nt, Artificial Sequence
  Description of Artificial Sequence: Synthetic oligonucleotide
augagcuaacaggggcgca

SEQ ID NO: 769307 - RNA, 19 nt, Artificial Sequence
  Description of Artificial Sequence: Synthetic oligonucleotide
gccuugagcccuugccaag

SEQ ID NO: 769308 - RNA, 19 nt, Artificial Sequence
  Description of Artificial Sequence: Synthetic oligonucleotide
ggcauuaaggcgauucuau

SEQ ID NO: 769309 - RNA, 19 nt, Artificial Sequence
  Description of Artificial Sequence: Synthetic oligonucleotide
acaggggcuuagagauuuc

SEQ ID NO: 769310 - RNA, 19 nt, Artificial Sequence
  Description of Artificial Sequence: Synthetic oligonucleotide
cguacucguagucgaacac

SEQ ID NO: 769311 - RNA, 19 nt, Artificial Sequence
  Description of Artificial Sequence: Synthetic oligonucleotide
gagccgcggacgccguggc

SEQ ID NO: 769312 - RNA, 19 nt, Artificial Sequence
  Description of Artificial Sequence: Synthetic oligonucleotide
ugcucgcgguacgggaugu

SEQ ID NO: 769313 - RNA, 19 nt, Artificial Sequence
  Description of Artificial Sequence: Synthetic oligonucleotide
gcucuugugcucgcgguac

SEQ ID NO: 769314 - RNA, 19 nt, Artificial Sequence
  Description of Artificial Sequence: Synthetic oligonucleotide
ggucgaagaggucggugaa

SEQ ID NO: 769315 - RNA, 19 nt, Artificial Sequence
  Description of Artificial Sequence: Synthetic oligonucleotide
gaagcgccggagaaacaua

SEQ ID NO: 769316 - RNA, 19 nt, Artificial Sequence
  Description of Artificial Sequence: Synthetic oligonucleotide
gcugggcuuugucucgaug

SEQ ID NO: 769317 - RNA, 19 nt, Artificial Sequence
  Description of Artificial Sequence: Synthetic oligonucleotide
ucuuaccgacucggaaguu

SEQ ID NO: 769318 - RNA, 19 nt, Artificial Sequence
  Description of Artificial Sequence: Synthetic oligonucleotide
gcacgggccgaaguaguag

SEQ ID NO: 769319 - RNA, 19 nt, Artificial Sequence
  Description of Artificial Sequence: Synthetic oligonucleotide
ugguuucaucugccaccuc

SEQ ID NO: 769320 - RNA, 19 nt, Artificial Sequence
  Description of Artificial Sequence: Synthetic oligonucleotide
ccgaaguaguagaccugag

SEQ ID NO: 769321 - RNA, 19 nt, Artificial Sequence
  Description of Artificial Sequence: Synthetic oligonucleotide
gugguauggcacaggccuc

SEQ ID NO: 769322 - RNA, 19 nt, Artificial Sequence
  Description of Artificial Sequence: Synthetic oligonucleotide
ggaccgccuuuccacugcc

SEQ ID NO: 769323 - RNA, 19 nt, Artificial Sequence
  Description of Artificial Sequence: Synthetic oligonucleotide
cucuucguaugcacauacu

SEQ ID NO: 769324 - RNA, 19 nt, Artificial Sequence
  Description of Artificial Sequence: Synthetic oligonucleotide
gaccgccuuuccacugccc

SEQ ID NO: 769325 - RNA, 19 nt, Artificial Sequence
  Description of Artificial Sequence: Synthetic oligonucleotide
ggacgagacaggggcuuag

SEQ ID NO: 769326 - RNA, 19 nt, Artificial Sequence
  Description of Artificial Sequence: Synthetic oligonucleotide
acucggaaguuggggccca

SEQ ID NO: 769327 - RNA, 19 nt, Artificial Sequence
  Description of Artificial Sequence: Synthetic oligonucleotide
ucccguggggaccgccuuu

SEQ ID NO: 769328 - RNA, 19 nt, Artificial Sequence
  Description of Artificial Sequence: Synthetic oligonucleotide
gagggacgcccucugcggu

SEQ ID NO: 769329 - RNA, 19 nt, Artificial Sequence
  Description of Artificial Sequence: Synthetic oligonucleotide
cacggugacucugccguga

SEQ ID NO: 769330 - RNA, 19 nt, Artificial Sequence
  Description of Artificial Sequence: Synthetic oligonucleotide
ugcggucgaagaggucggu

SEQ ID NO: 769331 - RNA, 19 nt, Artificial Sequence
  Description of Artificial Sequence: Synthetic oligonucleotide
gcuggacuuuaugagcuaa

SEQ ID NO: 769332 - RNA, 19 nt, Artificial Sequence
  Description of Artificial Sequence: Synthetic oligonucleotide
ccucuaaacucuauggcuu

SEQ ID NO: 769333 - RNA, 19 nt, Artificial Sequence
  Description of Artificial Sequence: Synthetic oligonucleotide
ccucugcggugcuaaguug

SEQ ID NO: 769334 - RNA, 19 nt, Artificial Sequence
  Description of Artificial Sequence: Synthetic oligonucleotide
agccacguacucguuugua

SEQ ID NO: 769335 - RNA, 19 nt, Artificial Sequence
  Description of Artificial Sequence: Synthetic oligonucleotide
gcgaagcucuccgaaguuc

SEQ ID NO: 769336 - RNA, 19 nt, Artificial Sequence
  Description of Artificial Sequence: Synthetic oligonucleotide
ggcgggacguuucuguccu

SEQ ID NO: 769337 - RNA, 19 nt, Artificial Sequence
  Description of Artificial Sequence: Synthetic oligonucleotide
ccgaaguucccacagccua

SEQ ID NO: 769338 - RNA, 19 nt, Artificial Sequence
  Description of Artificial Sequence: Synthetic oligonucleotide
acucugccgugagauccga

SEQ ID NO: 769339 - RNA, 19 nt, Artificial Sequence
  Description of Artificial Sequence: Synthetic oligonucleotide
gguauggcacaggccuccc

SEQ ID NO: 769340 - RNA, 19 nt, Artificial Sequence
  Description of Artificial Sequence: Synthetic oligonucleotide
ggacauucuccggcccucc

SEQ ID NO: 769341 - RNA, 19 nt, Artificial Sequence
  Description of Artificial Sequence: Synthetic oligonucleotide
gcaucccgcgcuccgcccc

SEQ ID NO: 769342 - RNA, 19 nt, Artificial Sequence
  Description of Artificial Sequence: Synthetic oligonucleotide
ggcgaucaucagcacuguc

SEQ ID NO: 769343 - RNA, 19 nt, Artificial Sequence
  Description of Artificial Sequence: Synthetic oligonucleotide
gugugaaaucugagcucga

SEQ ID NO: 769344 - RNA, 19 nt, Artificial Sequence
  Description of Artificial Sequence: Synthetic oligonucleotide
gggacacgcaugggucacg

SEQ ID NO: 769345 - RNA, 19 nt, Artificial Sequence
  Description of Artificial Sequence: Synthetic oligonucleotide
acgcccucugcggugcuaa

SEQ ID NO: 769346 - RNA, 19 nt, Artificial Sequence
  Description of Artificial Sequence: Synthetic oligonucleotide
uggcgcgcuuggugucacc

SEQ ID NO: 769347 - RNA, 19 nt, Artificial Sequence
  Description of Artificial Sequence: Synthetic oligonucleotide
gggcauuaaggcgauucua

SEQ ID NO: 769348 - RNA, 19 nt, Artificial Sequence
  Description of Artificial Sequence: Synthetic oligonucleotide
ccuccggaaagcucucaca

SEQ ID NO: 769349 - RNA, 19 nt, Artificial Sequence
  Description of Artificial Sequence: Synthetic oligonucleotide
gcgugaucagcuggauggc

SEQ ID NO: 769350 - RNA, 19 nt, Artificial Sequence
  Description of Artificial Sequence: Synthetic oligonucleotide
ccaugcgcgugaucagcug

SEQ ID NO: 769351 - RNA, 19 nt, Artificial Sequence
  Description of Artificial Sequence: Synthetic oligonucleotide
aucccgcggugagcauccc

SEQ ID NO: 769352 - RNA, 19 nt, Artificial Sequence
  Description of Artificial Sequence: Synthetic oligonucleotide
ggacggugccgauuggagu

SEQ ID NO: 769353 - RNA, 19 nt, Artificial Sequence
  Description of Artificial Sequence: Synthetic oligonucleotide
acucguagucgaacacaua

SEQ ID NO: 769354 - RNA, 19 nt, Artificial Sequence
  Description of Artificial Sequence: Synthetic oligonucleotide
gccacguacucguuuguau

SEQ ID NO: 769355 - RNA, 19 nt, Artificial Sequence
  Description of Artificial Sequence: Synthetic oligonucleotide
cggucgaagaggucgguga

SEQ ID NO: 769356 - RNA, 19 nt, Artificial Sequence
  Description of Artificial Sequence: Synthetic oligonucleotide
ggcccucccguggggaccg

SEQ ID NO: 769357 - RNA, 19 nt, Artificial Sequence
  Description of Artificial Sequence: Synthetic oligonucleotide
cugcccggccgcccgacca

SEQ ID NO: 769358 - RNA, 19 nt, Artificial Sequence
  Description of Artificial Sequence: Synthetic oligonucleotide
gcacauacuccaugcgcgu

SEQ ID NO: 769359 - RNA, 19 nt, Artificial Sequence
  Description of Artificial Sequence: Synthetic oligonucleotide
agcaucccgcggugagcau

SEQ ID NO: 769360 - RNA, 19 nt, Artificial Sequence
  Description of Artificial Sequence: Synthetic oligonucleotide
gcucuccgaaguucccaca

SEQ ID NO: 769361 - RNA, 19 nt, Artificial Sequence
  Description of Artificial Sequence: Synthetic oligonucleotide
gggacgcccucugcggugc

SEQ ID NO: 769362 - RNA, 19 nt, Artificial Sequence
  Description of Artificial Sequence: Synthetic oligonucleotide
cacccaugccccgggccug

SEQ ID NO: 769363 - RNA, 19 nt, Artificial Sequence
  Description of Artificial Sequence: Synthetic oligonucleotide
gaccugagggacgcccucu

SEQ ID NO: 769364 - RNA, 19 nt, Artificial Sequence
  Description of Artificial Sequence: Synthetic oligonucleotide
gcggucgaagaggucggug

SEQ ID NO: 769365 - RNA, 19 nt, Artificial Sequence
  Description of Artificial Sequence: Synthetic oligonucleotide
ccccucgagaaaauggccu

SEQ ID NO: 769366 - RNA, 19 nt, Artificial Sequence
  Description of Artificial Sequence: Synthetic oligonucleotide
ccggcuggugccagucuug

SEQ ID NO: 769367 - RNA, 19 nt, Artificial Sequence
  Description of Artificial Sequence: Synthetic oligonucleotide
ccgccaaaguccuguguga

SEQ ID NO: 769368 - RNA, 19 nt, Artificial Sequence
  Description of Artificial Sequence: Synthetic oligonucleotide
acuuuccgcacgggccgaa

SEQ ID NO: 769369 - RNA, 19 nt, Artificial Sequence
  Description of Artificial Sequence: Synthetic oligonucleotide
cggcgggacguuucugucc

SEQ ID NO: 769370 - RNA, 19 nt, Artificial Sequence
  Description of Artificial Sequence: Synthetic oligonucleotide
agccgcggacgccguggcu

SEQ ID NO: 769371 - RNA, 19 nt, Artificial Sequence
  Description of Artificial Sequence: Synthetic oligonucleotide
gcaucccgcggugagcauc

SEQ ID NO: 769372 - RNA, 19 nt, Artificial Sequence
  Description of Artificial Sequence: Synthetic oligonucleotide
cucggaaguuggggcccac

SEQ ID NO: 769373 - RNA, 19 nt, Artificial Sequence
  Description of Artificial Sequence: Synthetic oligonucleotide
ggcuucccggcccagucgu

SEQ ID NO: 769374 - RNA, 19 nt, Artificial Sequence
  Description of Artificial Sequence: Synthetic oligonucleotide
cgcgccgugcccgucaggc

SEQ ID NO: 769375 - RNA, 19 nt, Artificial Sequence
  Description of Artificial Sequence: Synthetic oligonucleotide
ggugagcaucccgcgguga

SEQ ID NO: 769376 - RNA, 19 nt, Artificial Sequence
  Description of Artificial Sequence: Synthetic oligonucleotide
ggacguuucuguccugguu

SEQ ID NO: 769377 - RNA, 19 nt, Artificial Sequence
  Description of Artificial Sequence: Synthetic oligonucleotide
gcgguacgggaugugcuuc

SEQ ID NO: 769378 - RNA, 19 nt, Artificial Sequence
  Description of Artificial Sequence: Synthetic oligonucleotide
ccuaggcgaagcucuccga

SEQ ID NO: 769379 - RNA, 19 nt, Artificial Sequence
  Description of Artificial Sequence: Synthetic oligonucleotide
gggaccuuccccgucacuu

SEQ ID NO: 769380 - RNA, 19 nt, Artificial Sequence
  Description of Artificial Sequence: Synthetic oligonucleotide
ggugccgauuggagucggc

SEQ ID NO: 769381 - RNA, 19 nt, Artificial Sequence
  Description of Artificial Sequence: Synthetic oligonucleotide
guggcgcgcuuggugucac

SEQ ID NO: 769382 - RNA, 19 nt, Artificial Sequence
  Description of Artificial Sequence: Synthetic oligonucleotide
gugcggucgcacaggucga

SEQ ID NO: 769383 - RNA, 19 nt, Artificial Sequence
  Description of Artificial Sequence: Synthetic oligonucleotide
ccgggacuugaugggcucc

SEQ ID NO: 769384 - RNA, 19 nt, Artificial Sequence
  Description of Artificial Sequence: Synthetic oligonucleotide
cgagccgcggacgccgugg

SEQ ID NO: 769385 - RNA, 19 nt, Artificial Sequence
  Description of Artificial Sequence: Synthetic oligonucleotide
gggacguuucuguccuggu

SEQ ID NO: 769386 - RNA, 19 nt, Artificial Sequence
  Description of Artificial Sequence: Synthetic oligonucleotide
gcggugcuaaguugcuugu

SEQ ID NO: 769387 - RNA, 19 nt, Artificial Sequence
  Description of Artificial Sequence: Synthetic oligonucleotide
cgcccgaccaggaaguucu

SEQ ID NO: 769388 - RNA, 19 nt, Artificial Sequence
  Description of Artificial Sequence: Synthetic oligonucleotide
cccgucacuugucacuugu

SEQ ID NO: 769389 - RNA, 19 nt, Artificial Sequence
  Description of Artificial Sequence: Synthetic oligonucleotide
gcgcccuggcucuguggug

SEQ ID NO: 769390 - RNA, 19 nt, Artificial Sequence
  Description of Artificial Sequence: Synthetic oligonucleotide
ggggacggcgggacguuuc

SEQ ID NO: 769391 - RNA, 19 nt, Artificial Sequence
  Description of Artificial Sequence: Synthetic oligonucleotide
gggacggcgggacguuucu

SEQ ID NO: 769392 - RNA, 19 nt, Artificial Sequence
  Description of Artificial Sequence: Synthetic oligonucleotide
ccgcugcagggauuuucuc

SEQ ID NO: 769393 - RNA, 19 nt, Artificial Sequence
  Description of Artificial Sequence: Synthetic oligonucleotide
gcccagucguacucguagu

SEQ ID NO: 769394 - RNA, 19 nt, Artificial Sequence
  Description of Artificial Sequence: Synthetic oligonucleotide
gccguacauagcgcaaaua

SEQ ID NO: 769395 - RNA, 19 nt, Artificial Sequence
  Description of Artificial Sequence: Synthetic oligonucleotide
cggacgccguggcugcucc

SEQ ID NO: 769396 - RNA, 19 nt, Artificial Sequence
  Description of Artificial Sequence: Synthetic oligonucleotide
gcgcgcuuggugucaccga

SEQ ID NO: 769397 - RNA, 19 nt, Artificial Sequence
  Description of Artificial Sequence: Synthetic oligonucleotide
ggcgccguacauagcgcaa

SEQ ID NO: 769398 - RNA, 19 nt, Artificial Sequence
  Description of Artificial Sequence: Synthetic oligonucleotide
acgggcgcccuggcucugu

SEQ ID NO: 769399 - RNA, 19 nt, Artificial Sequence
  Description of Artificial Sequence: Synthetic oligonucleotide
gcgccguacauagcgcaaa

SEQ ID NO: 769400 - RNA, 19 nt, Artificial Sequence
  Description of Artificial Sequence: Synthetic oligonucleotide
ggauggcaugcugacguuu

SEQ ID NO: 769401 - RNA, 19 nt, Artificial Sequence
  Description of Artificial Sequence: Synthetic oligonucleotide
ggacgcccgccuggggacc

SEQ ID NO: 769402 - RNA, 19 nt, Artificial Sequence
  Description of Artificial Sequence: Synthetic oligonucleotide
ccguggggaccgccuuucc

SEQ ID NO: 769403 - RNA, 19 nt, Artificial Sequence
  Description of Artificial Sequence: Synthetic oligonucleotide
cccguggggaccgccuuuc

SEQ ID NO: 769404 - RNA, 19 nt, Artificial Sequence
  Description of Artificial Sequence: Synthetic oligonucleotide
ccccgucacuugucacuug

SEQ ID NO: 769405 - RNA, 19 nt, Artificial Sequence
  Description of Artificial Sequence: Synthetic oligonucleotide
cccucugcggugcuaaguu

SEQ ID NO: 769406 - RNA, 19 nt, Artificial Sequence
  Description of Artificial Sequence: Synthetic oligonucleotide
ccgugagauccgaguguga

SEQ ID NO: 769407 - RNA, 19 nt, Artificial Sequence
  Description of Artificial Sequence: Synthetic oligonucleotide
gacgcccgccuggggaccu

SEQ ID NO: 769408 - RNA, 19 nt, Artificial Sequence
  Description of Artificial Sequence: Synthetic oligonucleotide
ggggacgagacaggggcuu

SEQ ID NO: 769409 - RNA, 19 nt, Artificial Sequence
  Description of Artificial Sequence: Synthetic oligonucleotide
ccgcccgaccaggaaguuc

SEQ ID NO: 769410 - RNA, 19 nt, Artificial Sequence
  Description of Artificial Sequence: Synthetic oligonucleotide
cacgggcgcccuggcucug

SEQ ID NO: 769411 - RNA, 19 nt, Artificial Sequence
  Description of Artificial Sequence: Synthetic oligonucleotide
cgggcauuaaggcgauucu

SEQ ID NO: 769412 - RNA, 19 nt, Artificial Sequence
  Description of Artificial Sequence: Synthetic oligonucleotide
caguguggacggugccgau

SEQ ID NO: 769413 - RNA, 19 nt, Artificial Sequence
  Description of Artificial Sequence: Synthetic oligonucleotide
cgcaugggucacgggcgcc

SEQ ID NO: 769414 - RNA, 19 nt, Artificial Sequence
  Description of Artificial Sequence: Synthetic oligonucleotide
cucccguggggaccgccuu

SEQ ID NO: 769415 - RNA, 19 nt, Artificial Sequence
  Description of Artificial Sequence: Synthetic oligonucleotide
gguacgggaugugcuucuu

SEQ ID NO: 769416 - RNA, 19 nt, Artificial Sequence
  Description of Artificial Sequence: Synthetic oligonucleotide
ccgcugcggucgaagaggu

SEQ ID NO: 769417 - RNA, 19 nt, Artificial Sequence
  Description of Artificial Sequence: Synthetic oligonucleotide
cccucccguggggaccgcc

SEQ ID NO: 769418 - RNA, 19 nt, Artificial Sequence
  Description of Artificial Sequence: Synthetic oligonucleotide
cugcggugcuaaguugcuu

SEQ ID NO: 769419 - RNA, 19 nt, Artificial Sequence
  Description of Artificial Sequence: Synthetic oligonucleotide
caaugggcguggcgcgcuu

SEQ ID NO: 769420 - RNA, 19 nt, Artificial Sequence
  Description of Artificial Sequence: Synthetic oligonucleotide
ccucccguggggaccgccu

SEQ ID NO: 769421 - RNA, 19 nt, Artificial Sequence
  Description of Artificial Sequence: Synthetic oligonucleotide
cgcacgggccgaaguagua

SEQ ID NO: 769422 - RNA, 19 nt, Artificial Sequence
  Description of Artificial Sequence: Synthetic oligonucleotide
ccuucagcgugucggccuu

SEQ ID NO: 769423 - RNA, 19 nt, Artificial Sequence
  Description of Artificial Sequence: Synthetic oligonucleotide
cguggcgcgcuugguguca

SEQ ID NO: 769424 - RNA, 19 nt, Artificial Sequence
  Description of Artificial Sequence: Synthetic oligonucleotide
gcugcggggcccgggacuu

SEQ ID NO: 769425 - RNA, 19 nt, Artificial Sequence
  Description of Artificial Sequence: Synthetic oligonucleotide
cggugacucugccgugaga

SEQ ID NO: 769426 - RNA, 19 nt, Artificial Sequence
  Description of Artificial Sequence: Synthetic oligonucleotide
gcgccgugcccgucaggcu

SEQ ID NO: 769427 - RNA, 19 nt, Artificial Sequence
  Description of Artificial Sequence: Synthetic oligonucleotide
cgcgguacgggaugugcuu

SEQ ID NO: 769428 - RNA, 19 nt, Artificial Sequence
  Description of Artificial Sequence: Synthetic oligonucleotide
ccggccgcccgaccaggaa

SEQ ID NO: 769429 - RNA, 19 nt, Artificial Sequence
  Description of Artificial Sequence: Synthetic oligonucleotide
cgccguacauagcgcaaau

SEQ ID NO: 769430 - RNA, 19 nt, Artificial Sequence
  Description of Artificial Sequence: Synthetic oligonucleotide
ggacgcccucugcggugcu

SEQ ID NO: 769431 - RNA, 19 nt, Artificial Sequence
  Description of Artificial Sequence: Synthetic oligonucleotide
cggugcuaaguugcuugua

SEQ ID NO: 769432 - RNA, 19 nt, Artificial Sequence
  Description of Artificial Sequence: Synthetic oligonucleotide
gcgcuccgccccggcuuug

SEQ ID NO: 769433 - RNA, 19 nt, Artificial Sequence
  Description of Artificial Sequence: Synthetic oligonucleotide
cgcgguagaugagacucuu

SEQ ID NO: 769434 - RNA, 19 nt, Artificial Sequence
  Description of Artificial Sequence: Synthetic oligonucleotide
gcccucccguggggaccgc

SEQ ID NO: 769435 - RNA, 19 nt, Artificial Sequence
  Description of Artificial Sequence: Synthetic oligonucleotide
gccgcccgaccaggaaguu

SEQ ID NO: 769436 - RNA, 19 nt, Artificial Sequence
  Description of Artificial Sequence: Synthetic oligonucleotide
cggggacggcgggacguuu

SEQ ID NO: 769437 - RNA, 19 nt, Artificial Sequence
  Description of Artificial Sequence: Synthetic oligonucleotide
aaaauuaacaucuuggugc

SEQ ID NO: 769438 - RNA, 19 nt, Artificial Sequence
  Description of Artificial Sequence: Synthetic oligonucleotide
aauaauaacauacaguaca

SEQ ID NO: 769439 - RNA, 19 nt, Artificial Sequence
  Description of Artificial Sequence: Synthetic oligonucleotide
acaacaaugacaaaggugg

SEQ ID NO: 769440 - RNA, 19 nt, Artificial Sequence
  Description of Artificial Sequence: Synthetic oligonucleotide
agcgauucaauuuagagug

SEQ ID NO: 769441 - RNA, 19 nt, Artificial Sequence
  Description of Artificial Sequence: Synthetic oligonucleotide
ugagugaccacucauagcu

SEQ ID NO: 769442 - RNA, 19 nt, Artificial Sequence
  Description of Artificial Sequence: Synthetic oligonucleotide
agaugaaacguguagguuc

SEQ ID NO: 769443 - RNA, 19 nt, Artificial Sequence
  Description of Artificial Sequence: Synthetic oligonucleotide
cuuacuuaguuuuaguaug

SEQ ID NO: 769444 - RNA, 19 nt, Artificial Sequence
  Description of Artificial Sequence: Synthetic oligonucleotide
gacguuaacauccaagaug

SEQ ID NO: 769445 - RNA, 19 nt, Artificial Sequence
  Description of Artificial Sequence: Synthetic oligonucleotide
agaauggacggacacauuc

SEQ ID NO: 769446 - RNA, 19 nt, Artificial Sequence
  Description of Artificial Sequence: Synthetic oligonucleotide
uuacuuaguuuuaguaugg

SEQ ID NO: 769447 - RNA, 19 nt, Artificial Sequence
  Description of Artificial Sequence: Synthetic oligonucleotide
uuucagaugaaacguguag

SEQ ID NO: 769448 - RNA, 19 nt, Artificial Sequence
  Description of Artificial Sequence: Synthetic oligonucleotide
aaauuaacaucuuggugcu

SEQ ID NO: 769449 - RNA, 19 nt, Artificial Sequence
  Description of Artificial Sequence: Synthetic oligonucleotide
auucaauuuagagugcagc

SEQ ID NO: 769450 - RNA, 19 nt, Artificial Sequence
  Description of Artificial Sequence: Synthetic oligonucleotide
ucgaugaugguugaagugg

SEQ ID NO: 769451 - RNA, 19 nt, Artificial Sequence
  Description of Artificial Sequence: Synthetic oligonucleotide
ucuggaagaacguaggcgu

SEQ ID NO: 769452 - RNA, 19 nt, Artificial Sequence
  Description of Artificial Sequence: Synthetic oligonucleotide
aacaacagauaguagucca

SEQ ID NO: 769453 - RNA, 19 nt, Artificial Sequence
  Description of Artificial Sequence: Synthetic oligonucleotide
auuuuaucgucgucagugc

SEQ ID NO: 769454 - RNA, 19 nt, Artificial Sequence
  Description of Artificial Sequence: Synthetic oligonucleotide
uucagaugaaacguguagg

SEQ ID NO: 769455 - RNA, 19 nt, Artificial Sequence
  Description of Artificial Sequence: Synthetic oligonucleotide
uuaguuuuaguauggcugu

SEQ ID NO: 769456 - RNA, 19 nt, Artificial Sequence
  Description of Artificial Sequence: Synthetic oligonucleotide
uguagggcugguaagcucc

SEQ ID NO: 769457 - RNA, 19 nt, Artificial Sequence
  Description of Artificial Sequence: Synthetic oligonucleotide
uggcaauaauaacauacag

SEQ ID NO: 769458 - RNA, 19 nt, Artificial Sequence
  Description of Artificial Sequence: Synthetic oligonucleotide
ugaugguugaagugguugg

SEQ ID NO: 769459 - RNA, 19 nt, Artificial Sequence
  Description of Artificial Sequence: Synthetic oligonucleotide
caauuuagagugcagcacc

SEQ ID NO: 769460 - RNA, 19 nt, Artificial Sequence
  Description of Artificial Sequence: Synthetic oligonucleotide
aacguaggcguuuaacuga

SEQ ID NO: 769461 - RNA, 19 nt, Artificial Sequence
  Description of Artificial Sequence: Synthetic oligonucleotide
agauaguaguccaagacag

SEQ ID NO: 769462 - RNA, 19 nt, Artificial Sequence
  Description of Artificial Sequence: Synthetic oligonucleotide
uuuacuugcugaguacugg

SEQ ID NO: 769463 - RNA, 19 nt, Artificial Sequence
  Description of Artificial Sequence: Synthetic oligonucleotide
gaugucggaauccaacacc

SEQ ID NO: 769464 - RNA, 19 nt, Artificial Sequence
  Description of Artificial Sequence: Synthetic oligonucleotide
agaacguaggcguuuaacu

SEQ ID NO: 769465 - RNA, 19 nt, Artificial Sequence
  Description of Artificial Sequence: Synthetic oligonucleotide
aagaacguaggcguuuaac

SEQ ID NO: 769466 - RNA, 19 nt, Artificial Sequence
  Description of Artificial Sequence: Synthetic oligonucleotide
uccgagugcaucaaacugc

SEQ ID NO: 769467 - RNA, 19 nt, Artificial Sequence
  Description of Artificial Sequence: Synthetic oligonucleotide
aguuggacuaugcucagug

SEQ ID NO: 769468 - RNA, 19 nt, Artificial Sequence
  Description of Artificial Sequence: Synthetic oligonucleotide
gaacguaggcguuuaacug

SEQ ID NO: 769469 - RNA, 19 nt, Artificial Sequence
  Description of Artificial Sequence: Synthetic oligonucleotide
ugacaugugacaguguuga

SEQ ID NO: 769470 - RNA, 19 nt, Artificial Sequence
  Description of Artificial Sequence: Synthetic oligonucleotide
gacaauuuuaucgucguca

SEQ ID NO: 769471 - RNA, 19 nt, Artificial Sequence
  Description of Artificial Sequence: Synthetic oligonucleotide
gaucaguuggacuaugcuc

SEQ ID NO: 769472 - RNA, 19 nt, Artificial Sequence
  Description of Artificial Sequence: Synthetic oligonucleotide
uuuuacuugcugaguacug

SEQ ID NO: 769473 - RNA, 19 nt, Artificial Sequence
  Description of Artificial Sequence: Synthetic oligonucleotide
cugaguacuggauguaggg

SEQ ID NO: 769474 - RNA, 19 nt, Artificial Sequence
  Description of Artificial Sequence: Synthetic oligonucleotide
uggacggacacauucuuug

SEQ ID NO: 769475 - RNA, 19 nt, Artificial Sequence
  Description of Artificial Sequence: Synthetic oligonucleotide
ugaacauucccuucagccu

SEQ ID NO: 769476 - RNA, 19 nt, Artificial Sequence
  Description of Artificial Sequence: Synthetic oligonucleotide
ugaauaucaggaagucagc

SEQ ID NO: 769477 - RNA, 19 nt, Artificial Sequence
  Description of Artificial Sequence: Synthetic oligonucleotide
uccaaaacgggucgcagac

SEQ ID NO: 769478 - RNA, 19 nt, Artificial Sequence
  Description of Artificial Sequence: Synthetic oligonucleotide
agugaccacucauagcuag

SEQ ID NO: 769479 - RNA, 19 nt, Artificial Sequence
  Description of Artificial Sequence: Synthetic oligonucleotide
uguguaguguggucagugg

SEQ ID NO: 769480 - RNA, 19 nt, Artificial Sequence
  Description of Artificial Sequence: Synthetic oligonucleotide
gagucgacgacugucaggc

SEQ ID NO: 769481 - RNA, 19 nt, Artificial Sequence
  Description of Artificial Sequence: Synthetic oligonucleotide
augucggaauccaacaccc

SEQ ID NO: 769482 - RNA, 19 nt, Artificial Sequence
  Description of Artificial Sequence: Synthetic oligonucleotide
acguuaacauccaagauga

SEQ ID NO: 769483 - RNA, 19 nt, Artificial Sequence
  Description of Artificial Sequence: Synthetic oligonucleotide
ugauucagaaccuccccug

SEQ ID NO: 769484 - RNA, 19 nt, Artificial Sequence
  Description of Artificial Sequence: Synthetic oligonucleotide
aaucagaagucuguguagu

SEQ ID NO: 769485 - RNA, 19 nt, Artificial Sequence
  Description of Artificial Sequence: Synthetic oligonucleotide
acucucgcccuuugcaucc

SEQ ID NO: 769486 - RNA, 19 nt, Artificial Sequence
  Description of Artificial Sequence: Synthetic oligonucleotide
uuugcggaccucuccagag

SEQ ID NO: 769487 - RNA, 19 nt, Artificial Sequence
  Description of Artificial Sequence: Synthetic oligonucleotide
guugaagugguuggcagcg

SEQ ID NO: 769488 - RNA, 19 nt, Artificial Sequence
  Description of Artificial Sequence: Synthetic oligonucleotide
gacgaucucucuucugacg

SEQ ID NO: 769489 - RNA, 19 nt, Artificial Sequence
  Description of Artificial Sequence: Synthetic oligonucleotide
ucagagucgacgacuguca

SEQ ID NO: 769490 - RNA, 19 nt, Artificial Sequence
  Description of Artificial Sequence: Synthetic oligonucleotide
ugagcuuacuuaguuuuag

SEQ ID NO: 769491 - RNA, 19 nt, Artificial Sequence
  Description of Artificial Sequence: Synthetic oligonucleotide
uucagcugacaugugacag

SEQ ID NO: 769492 - RNA, 19 nt, Artificial Sequence
  Description of Artificial Sequence: Synthetic oligonucleotide
ucaauuuagagugcagcac

SEQ ID NO: 769493 - RNA, 19 nt, Artificial Sequence
  Description of Artificial Sequence: Synthetic oligonucleotide
uuuuaucgucgucagugcu

SEQ ID NO: 769494 - RNA, 19 nt, Artificial Sequence
  Description of Artificial Sequence: Synthetic oligonucleotide
aggcguuuaacugaacuuc

SEQ ID NO: 769495 - RNA, 19 nt, Artificial Sequence
  Description of Artificial Sequence: Synthetic oligonucleotide
aguucagcugacaugugac

SEQ ID NO: 769496 - RNA, 19 nt, Artificial Sequence
  Description of Artificial Sequence: Synthetic oligonucleotide
cauagguagcugacuaucc

SEQ ID NO: 769497 - RNA, 19 nt, Artificial Sequence
  Description of Artificial Sequence: Synthetic oligonucleotide
uuuuaguauggcugugucu

SEQ ID NO: 769498 - RNA, 19 nt, Artificial Sequence
  Description of Artificial Sequence: Synthetic oligonucleotide
uuuaucgucgucagugcuc

SEQ ID NO: 769499 - RNA, 19 nt, Artificial Sequence
  Description of Artificial Sequence: Synthetic oligonucleotide
guucuuacgggccugguuc

SEQ ID NO: 769500 - RNA, 19 nt, Artificial Sequence
  Description of Artificial Sequence: Synthetic oligonucleotide
ucugagcgauucaauuuag

SEQ ID NO: 769501 - RNA, 19 nt, Artificial Sequence
  Description of Artificial Sequence: Synthetic oligonucleotide
acgggucgcagacacagcg

SEQ ID NO: 769502 - RNA, 19 nt, Artificial Sequence
  Description of Artificial Sequence: Synthetic oligonucleotide
agggagaucaguuggacua

SEQ ID NO: 769503 - RNA, 19 nt, Artificial Sequence
  Description of Artificial Sequence: Synthetic oligonucleotide
aucgaugaugguugaagug

SEQ ID NO: 769504 - RNA, 19 nt, Artificial Sequence
  Description of Artificial Sequence: Synthetic oligonucleotide
acuugcugaguacuggaug

SEQ ID NO: 769505 - RNA, 19 nt, Artificial Sequence
  Description of Artificial Sequence: Synthetic oligonucleotide
cugacguuaacauccaaga

SEQ ID NO: 769506 - RNA, 19 nt, Artificial Sequence
  Description of Artificial Sequence: Synthetic oligonucleotide
uuacuugcugaguacugga

SEQ ID NO: 769507 - RNA, 19 nt, Artificial Sequence
  Description of Artificial Sequence: Synthetic oligonucleotide
cacucauagcuagugaugc

SEQ ID NO: 769508 - RNA, 19 nt, Artificial Sequence
  Description of Artificial Sequence: Synthetic oligonucleotide
ugaaugagucacaguggcc

SEQ ID NO: 769509 - RNA, 19 nt, Artificial Sequence
  Description of Artificial Sequence: Synthetic oligonucleotide
ugaugucggaauccaacac

SEQ ID NO: 769510 - RNA, 19 nt, Artificial Sequence
  Description of Artificial Sequence: Synthetic oligonucleotide
uuggccaaucagaagucug

SEQ ID NO: 769511 - RNA, 19 nt, Artificial Sequence
  Description of Artificial Sequence: Synthetic oligonucleotide
cucuugcaacaacagauag

SEQ ID NO: 769512 - RNA, 19 nt, Artificial Sequence
  Description of Artificial Sequence: Synthetic oligonucleotide
agggugauggaguucugag

SEQ ID NO: 769513 - RNA, 19 nt, Artificial Sequence
  Description of Artificial Sequence: Synthetic oligonucleotide
uggcggaugaacauucccu

SEQ ID NO: 769514 - RNA, 19 nt, Artificial Sequence
  Description of Artificial Sequence: Synthetic oligonucleotide
agaucaguuggacuaugcu

SEQ ID NO: 769515 - RNA, 19 nt, Artificial Sequence
  Description of Artificial Sequence: Synthetic oligonucleotide
cuugcggugguggaguugg

SEQ ID NO: 769516 - RNA, 19 nt, Artificial Sequence
  Description of Artificial Sequence: Synthetic oligonucleotide
ucucgucucgaguccauag

SEQ ID NO: 769517 - RNA, 19 nt, Artificial Sequence
  Description of Artificial Sequence: Synthetic oligonucleotide
agcuagugaugccaugguc

SEQ ID NO: 769518 - RNA, 19 nt, Artificial Sequence
  Description of Artificial Sequence: Synthetic oligonucleotide
gaugaacauucccuucagc

SEQ ID NO: 769519 - RNA, 19 nt, Artificial Sequence
  Description of Artificial Sequence: Synthetic oligonucleotide
agcuuacuuaguuuuagua

SEQ ID NO: 769520 - RNA, 19 nt, Artificial Sequence
  Description of Artificial Sequence: Synthetic oligonucleotide
agugguacuggacaauuuu

SEQ ID NO: 769521 - RNA, 19 nt, Artificial Sequence
  Description of Artificial Sequence: Synthetic oligonucleotide
ucgucucgaguccauaggu

SEQ ID NO: 769522 - RNA, 19 nt, Artificial Sequence
  Description of Artificial Sequence: Synthetic oligonucleotide
uauccccuugucaucugag

SEQ ID NO: 769523 - RNA, 19 nt, Artificial Sequence
  Description of Artificial Sequence: Synthetic oligonucleotide
agagucgacgacugucagg

SEQ ID NO: 769524 - RNA, 19 nt, Artificial Sequence
  Description of Artificial Sequence: Synthetic oligonucleotide
cuuggugaaugagucacag

SEQ ID NO: 769525 - RNA, 19 nt, Artificial Sequence
  Description of Artificial Sequence: Synthetic oligonucleotide
agcgcuuggugaaugaguc

SEQ ID NO: 769526 - RNA, 19 nt, Artificial Sequence
  Description of Artificial Sequence: Synthetic oligonucleotide
aguccaagacaggauuccc

SEQ ID NO: 769527 - RNA, 19 nt, Artificial Sequence
  Description of Artificial Sequence: Synthetic oligonucleotide
uugccucuugcaacaacag

SEQ ID NO: 769528 - RNA, 19 nt, Artificial Sequence
  Description of Artificial Sequence: Synthetic oligonucleotide
cagauaguaguccaagaca

SEQ ID NO: 769529 - RNA, 19 nt, Artificial Sequence
  Description of Artificial Sequence: Synthetic oligonucleotide
agguggagacacuucacug

SEQ ID NO: 769530 - RNA, 19 nt, Artificial Sequence
  Description of Artificial Sequence: Synthetic oligonucleotide
ucucgaguccauagguagc

SEQ ID NO: 769531 - RNA, 19 nt, Artificial Sequence
  Description of Artificial Sequence: Synthetic oligonucleotide
ugguccguagcauccagga

SEQ ID NO: 769532 - RNA, 19 nt, Artificial Sequence
  Description of Artificial Sequence: Synthetic oligonucleotide
uuaucgucgucagugcucu

SEQ ID NO: 769533 - RNA, 19 nt, Artificial Sequence
  Description of Artificial Sequence: Synthetic oligonucleotide
ugcggaccucuccagaggc

SEQ ID NO: 769534 - RNA, 19 nt, Artificial Sequence
  Description of Artificial Sequence: Synthetic oligonucleotide
ugacguuaacauccaagau

SEQ ID NO: 769535 - RNA, 19 nt, Artificial Sequence
  Description of Artificial Sequence: Synthetic oligonucleotide
ucagaaccuccccugcggc

SEQ ID NO: 769536 - RNA, 19 nt, Artificial Sequence
  Description of Artificial Sequence: Synthetic oligonucleotide
gagugauucagaaccuccc

SEQ ID NO: 769537 - RNA, 19 nt, Artificial Sequence
  Description of Artificial Sequence: Synthetic oligonucleotide
uacacuccauucacaguug

SEQ ID NO: 769538 - RNA, 19 nt, Artificial Sequence
  Description of Artificial Sequence: Synthetic oligonucleotide
ucgacgacugucaggcuga

SEQ ID NO: 769539 - RNA, 19 nt, Artificial Sequence
  Description of Artificial Sequence: Synthetic oligonucleotide
gagcgauucaauuuagagu

SEQ ID NO: 769540 - RNA, 19 nt, Artificial Sequence
  Description of Artificial Sequence: Synthetic oligonucleotide
caacaacagauaguagucc

SEQ ID NO: 769541 - RNA, 19 nt, Artificial Sequence
  Description of Artificial Sequence: Synthetic oligonucleotide
ugguagccccaucagaguc

SEQ ID NO: 769542 - RNA, 19 nt, Artificial Sequence
  Description of Artificial Sequence: Synthetic oligonucleotide
cuccgagugcaucaaacug

SEQ ID NO: 769543 - RNA, 19 nt, Artificial Sequence
  Description of Artificial Sequence: Synthetic oligonucleotide
uugcggaccucuccagagg

SEQ ID NO: 769544 - RNA, 19 nt, Artificial Sequence
  Description of Artificial Sequence: Synthetic oligonucleotide
gcuccggugguucagaaug

SEQ ID NO: 769545 - RNA, 19 nt, Artificial Sequence
  Description of Artificial Sequence: Synthetic oligonucleotide
uaggcguuuaacugaacuu

SEQ ID NO: 769546 - RNA, 19 nt, Artificial Sequence
  Description of Artificial Sequence: Synthetic oligonucleotide
uggcugaaucuucugcaca

SEQ ID NO: 769547 - RNA, 19 nt, Artificial Sequence
  Description of Artificial Sequence: Synthetic oligonucleotide
agguuggacaggaagagga

SEQ ID NO: 769548 - RNA, 19 nt, Artificial Sequence
  Description of Artificial Sequence: Synthetic oligonucleotide
acuccgagugcaucaaacu

SEQ ID NO: 769549 - RNA, 19 nt, Artificial Sequence
  Description of Artificial Sequence: Synthetic oligonucleotide
gaguugguagccccaucag

SEQ ID NO: 769550 - RNA, 19 nt, Artificial Sequence
  Description of Artificial Sequence: Synthetic oligonucleotide
ugcugaguacuggauguag

SEQ ID NO: 769551 - RNA, 19 nt, Artificial Sequence
  Description of Artificial Sequence: Synthetic oligonucleotide
gucgacgacugucaggcug

SEQ ID NO: 769552 - RNA, 19 nt, Artificial Sequence
  Description of Artificial Sequence: Synthetic oligonucleotide
cucgucucgaguccauagg

SEQ ID NO: 769553 - RNA, 19 nt, Artificial Sequence
  Description of Artificial Sequence: Synthetic oligonucleotide
uaguucccggggaugagcu

SEQ ID NO: 769554 - RNA, 19 nt, Artificial Sequence
  Description of Artificial Sequence: Synthetic oligonucleotide
acuuucagaugaaacgugu

SEQ ID NO: 769555 - RNA, 19 nt, Artificial Sequence
  Description of Artificial Sequence: Synthetic oligonucleotide
aguuuuaguauggcugugu

SEQ ID NO: 769556 - RNA, 19 nt, Artificial Sequence
  Description of Artificial Sequence: Synthetic oligonucleotide
uaguaguccaagacaggau

SEQ ID NO: 769557 - RNA, 19 nt, Artificial Sequence
  Description of Artificial Sequence: Synthetic oligonucleotide
gacaaagguggcaauaaua

SEQ ID NO: 769558 - RNA, 19 nt, Artificial Sequence
  Description of Artificial Sequence: Synthetic oligonucleotide
uagcugacuauccccuugu

SEQ ID NO: 769559 - RNA, 19 nt, Artificial Sequence
  Description of Artificial Sequence: Synthetic oligonucleotide
guuggacuaugcucagugc

SEQ ID NO: 769560 - RNA, 19 nt, Artificial Sequence
  Description of Artificial Sequence: Synthetic oligonucleotide
cauccguuacuuucagaug

SEQ ID NO: 769561 - RNA, 19 nt, Artificial Sequence
  Description of Artificial Sequence: Synthetic oligonucleotide
gagaucaguuggacuaugc

SEQ ID NO: 769562 - RNA, 19 nt, Artificial Sequence
  Description of Artificial Sequence: Synthetic oligonucleotide
gagccguccaacucugcug

SEQ ID NO: 769563 - RNA, 19 nt, Artificial Sequence
  Description of Artificial Sequence: Synthetic oligonucleotide
gggccuuucuguuugcugc

SEQ ID NO: 769564 - RNA, 19 nt, Artificial Sequence
  Description of Artificial Sequence: Synthetic oligonucleotide
ugucggaauccaacacccc

SEQ ID NO: 769565 - RNA, 19 nt, Artificial Sequence
  Description of Artificial Sequence: Synthetic oligonucleotide
uagguucccucaaccaggu

SEQ ID NO: 769566 - RNA, 19 nt, Artificial Sequence
  Description of Artificial Sequence: Synthetic oligonucleotide
ugaaacguguagguucccu

SEQ ID NO: 769567 - RNA, 19 nt, Artificial Sequence
  Description of Artificial Sequence: Synthetic oligonucleotide
caggcugaaaguguaguuc

SEQ ID NO: 769568 - RNA, 19 nt, Artificial Sequence
  Description of Artificial Sequence: Synthetic oligonucleotide
uguugauuuccagggcucu

SEQ ID NO: 769569 - RNA, 19 nt, Artificial Sequence
  Description of Artificial Sequence: Synthetic oligonucleotide
aggauaauccacagcuuug

SEQ ID NO: 769570 - RNA, 19 nt, Artificial Sequence
  Description of Artificial Sequence: Synthetic oligonucleotide
gacuccgagugcaucaaac

SEQ ID NO: 769571 - RNA, 19 nt, Artificial Sequence
  Description of Artificial Sequence: Synthetic oligonucleotide
ugucacucucgcccuuugc

SEQ ID NO: 769572 - RNA, 19 nt, Artificial Sequence
  Description of Artificial Sequence: Synthetic oligonucleotide
guaggcguuuaacugaacu

SEQ ID NO: 769573 - RNA, 19 nt, Artificial Sequence
  Description of Artificial Sequence: Synthetic oligonucleotide
ugagggagaucaguuggac

SEQ ID NO: 769574 - RNA, 19 nt, Artificial Sequence
  Description of Artificial Sequence: Synthetic oligonucleotide
uccauagguagcugacuau

SEQ ID NO: 769575 - RNA, 19 nt, Artificial Sequence
  Description of Artificial Sequence: Synthetic oligonucleotide
uucuuacgggccugguucu

SEQ ID NO: 769576 - RNA, 19 nt, Artificial Sequence
  Description of Artificial Sequence: Synthetic oligonucleotide
uuggugaaugagucacagu

SEQ ID NO: 769577 - RNA, 19 nt, Artificial Sequence
  Description of Artificial Sequence: Synthetic oligonucleotide
uuaguauggcugugucuuc

SEQ ID NO: 769578 - RNA, 19 nt, Artificial Sequence
  Description of Artificial Sequence: Synthetic oligonucleotide
cuccggugguucagaaugg

SEQ ID NO: 769579 - RNA, 19 nt, Artificial Sequence
  Description of Artificial Sequence: Synthetic oligonucleotide
ugggacucacagcaccuuc

SEQ ID NO: 769580 - RNA, 19 nt, Artificial Sequence
  Description of Artificial Sequence: Synthetic oligonucleotide
cuggcgguuuguuuauuuc

SEQ ID NO: 769581 - RNA, 19 nt, Artificial Sequence
  Description of Artificial Sequence: Synthetic oligonucleotide
guagggguggcguaguugu

SEQ ID NO: 769582 - RNA, 19 nt, Artificial Sequence
  Description of Artificial Sequence: Synthetic oligonucleotide
cucgucucgucucgagucc

SEQ ID NO: 769583 - RNA, 19 nt, Artificial Sequence
  Description of Artificial Sequence: Synthetic oligonucleotide
ggaguugguagccccauca

SEQ ID NO: 769584 - RNA, 19 nt, Artificial Sequence
  Description of Artificial Sequence: Synthetic oligonucleotide
cugguccguagcauccagg

SEQ ID NO: 769585 - RNA, 19 nt, Artificial Sequence
  Description of Artificial Sequence: Synthetic oligonucleotide
cguuacuuucagaugaaac

SEQ ID NO: 769586 - RNA, 19 nt, Artificial Sequence
  Description of Artificial Sequence: Synthetic oligonucleotide
cuuacgggccugguucugg

SEQ ID NO: 769587 - RNA, 19 nt, Artificial Sequence
  Description of Artificial Sequence: Synthetic oligonucleotide
ugggcugagugaccacuca

SEQ ID NO: 769588 - RNA, 19 nt, Artificial Sequence
  Description of Artificial Sequence: Synthetic oligonucleotide
gucgcagacacagcgcuug

SEQ ID NO: 769589 - RNA, 19 nt, Artificial Sequence
  Description of Artificial Sequence: Synthetic oligonucleotide
cucugagcgauucaauuua

SEQ ID NO: 769590 - RNA, 19 nt, Artificial Sequence
  Description of Artificial Sequence: Synthetic oligonucleotide
cauggucaucaguacucug

SEQ ID NO: 769591 - RNA, 19 nt, Artificial Sequence
  Description of Artificial Sequence: Synthetic oligonucleotide
ugggaucaggcuucacuuc

SEQ ID NO: 769592 - RNA, 19 nt, Artificial Sequence
  Description of Artificial Sequence: Synthetic oligonucleotide
acacuucacugagacgauc

SEQ ID NO: 769593 - RNA, 19 nt, Artificial Sequence
  Description of Artificial Sequence: Synthetic oligonucleotide
caccgcuccagguggagac

SEQ ID NO: 769594 - RNA, 19 nt, Artificial Sequence
  Description of Artificial Sequence: Synthetic oligonucleotide
gccaugugaagauugcauc

SEQ ID NO: 769595 - RNA, 19 nt, Artificial Sequence
  Description of Artificial Sequence: Synthetic oligonucleotide
gguggcguaguuguaggag

SEQ ID NO: 769596 - RNA, 19 nt, Artificial Sequence
  Description of Artificial Sequence: Synthetic oligonucleotide
gcugaguacuggauguagg

SEQ ID NO: 769597 - RNA, 19 nt, Artificial Sequence
  Description of Artificial Sequence: Synthetic oligonucleotide
gaaccuccccugcggcugg

SEQ ID NO: 769598 - RNA, 19 nt, Artificial Sequence
  Description of Artificial Sequence: Synthetic oligonucleotide
acuggcgguuuguuuauuu

SEQ ID NO: 769599 - RNA, 19 nt, Artificial Sequence
  Description of Artificial Sequence: Synthetic oligonucleotide
uggcugacguuaacaucca

SEQ ID NO: 769600 - RNA, 19 nt, Artificial Sequence
  Description of Artificial Sequence: Synthetic oligonucleotide
caguucagcugacauguga

SEQ ID NO: 769601 - RNA, 19 nt, Artificial Sequence
  Description of Artificial Sequence: Synthetic oligonucleotide
gcuacuggcgguuuguuua

SEQ ID NO: 769602 - RNA, 19 nt, Artificial Sequence
  Description of Artificial Sequence: Synthetic oligonucleotide
acagcgcuuggugaaugag

SEQ ID NO: 769603 - RNA, 19 nt, Artificial Sequence
  Description of Artificial Sequence: Synthetic oligonucleotide
cuuucagaugaaacgugua

SEQ ID NO: 769604 - RNA, 19 nt, Artificial Sequence
  Description of Artificial Sequence: Synthetic oligonucleotide
ggaggucggcuucagcucc

SEQ ID NO: 769605 - RNA, 19 nt, Artificial Sequence
  Description of Artificial Sequence: Synthetic oligonucleotide
ggcaauaauaacauacagu

SEQ ID NO: 769606 - RNA, 19 nt, Artificial Sequence
  Description of Artificial Sequence: Synthetic oligonucleotide
ugcauccguuacuuucaga

SEQ ID NO: 769607 - RNA, 19 nt, Artificial Sequence
  Description of Artificial Sequence: Synthetic oligonucleotide
gguagccccaucagagucg

SEQ ID NO: 769608 - RNA, 19 nt, Artificial Sequence
  Description of Artificial Sequence: Synthetic oligonucleotide
guaagcuccggugguucag

SEQ ID NO: 769609 - RNA, 19 nt, Artificial Sequence
  Description of Artificial Sequence: Synthetic oligonucleotide
cagagucgacgacugucag

SEQ ID NO: 769610 - RNA, 19 nt, Artificial Sequence
  Description of Artificial Sequence: Synthetic oligonucleotide
uggccaugugaagauugca

SEQ ID NO: 769611 - RNA, 19 nt, Artificial Sequence
  Description of Artificial Sequence: Synthetic oligonucleotide
uuggcuacuggcgguuugu

SEQ ID NO: 769612 - RNA, 19 nt, Artificial Sequence
  Description of Artificial Sequence: Synthetic oligonucleotide
uaagcuccggugguucaga

SEQ ID NO: 769613 - RNA, 19 nt, Artificial Sequence
  Description of Artificial Sequence: Synthetic oligonucleotide
agauugcaucaucgcuguc

SEQ ID NO: 769614 - RNA, 19 nt, Artificial Sequence
  Description of Artificial Sequence: Synthetic oligonucleotide
gcauccguuacuuucagau

SEQ ID NO: 769615 - RNA, 19 nt, Artificial Sequence
  Description of Artificial Sequence: Synthetic oligonucleotide
uaggcagggugaucuggac

SEQ ID NO: 769616 - RNA, 19 nt, Artificial Sequence
  Description of Artificial Sequence: Synthetic oligonucleotide
uuacgggccugguucuggu

SEQ ID NO: 769617 - RNA, 19 nt, Artificial Sequence
  Description of Artificial Sequence: Synthetic oligonucleotide
ggucagagugauucagaac

SEQ ID NO: 769618 - RNA, 19 nt, Artificial Sequence
  Description of Artificial Sequence: Synthetic oligonucleotide
gugauucagaaccuccccu

SEQ ID NO: 769619 - RNA, 19 nt, Artificial Sequence
  Description of Artificial Sequence: Synthetic oligonucleotide
gcugacuauccccuuguca

SEQ ID NO: 769620 - RNA, 19 nt, Artificial Sequence
  Description of Artificial Sequence: Synthetic oligonucleotide
uccggugguucagaaugga

SEQ ID NO: 769621 - RNA, 19 nt, Artificial Sequence
  Description of Artificial Sequence: Synthetic oligonucleotide
aagcuccggugguucagaa

SEQ ID NO: 769622 - RNA, 19 nt, Artificial Sequence
  Description of Artificial Sequence: Synthetic oligonucleotide
ucgcccuuugcauccguua

SEQ ID NO: 769623 - RNA, 19 nt, Artificial Sequence
  Description of Artificial Sequence: Synthetic oligonucleotide
gagggagaucaguuggacu

SEQ ID NO: 769624 - RNA, 19 nt, Artificial Sequence
  Description of Artificial Sequence: Synthetic oligonucleotide
ggggccgacuggaugaggg

SEQ ID NO: 769625 - RNA, 19 nt, Artificial Sequence
  Description of Artificial Sequence: Synthetic oligonucleotide
uucccggggaugagcuuac

SEQ ID NO: 769626 - RNA, 19 nt, Artificial Sequence
  Description of Artificial Sequence: Synthetic oligonucleotide
uggaguugguagccccauc

SEQ ID NO: 769627 - RNA, 19 nt, Artificial Sequence
  Description of Artificial Sequence: Synthetic oligonucleotide
gaucacuugguuggggccu

SEQ ID NO: 769628 - RNA, 19 nt, Artificial Sequence
  Description of Artificial Sequence: Synthetic oligonucleotide
gcucgucucgucucgaguc

SEQ ID NO: 769629 - RNA, 19 nt, Artificial Sequence
  Description of Artificial Sequence: Synthetic oligonucleotide
ugggaacugugaccgcuuu

SEQ ID NO: 769630 - RNA, 19 nt, Artificial Sequence
  Description of Artificial Sequence: Synthetic oligonucleotide
cacguucccugugaucuug

SEQ ID NO: 769631 - RNA, 19 nt, Artificial Sequence
  Description of Artificial Sequence: Synthetic oligonucleotide
ucgggaggucggcuucagc

SEQ ID NO: 769632 - RNA, 19 nt, Artificial Sequence
  Description of Artificial Sequence: Synthetic oligonucleotide
ucgucucgucucgagucca

SEQ ID NO: 769633 - RNA, 19 nt, Artificial Sequence
  Description of Artificial Sequence: Synthetic oligonucleotide
uggggcguagggguggcgu

SEQ ID NO: 769634 - RNA, 19 nt, Artificial Sequence
  Description of Artificial Sequence: Synthetic oligonucleotide
gccauggucaucaguacuc

SEQ ID NO: 769635 - RNA, 19 nt, Artificial Sequence
  Description of Artificial Sequence: Synthetic oligonucleotide
acacagcgcuuggugaaug

SEQ ID NO: 769636 - RNA, 19 nt, Artificial Sequence
  Description of Artificial Sequence: Synthetic oligonucleotide
ccauagguagcugacuauc

SEQ ID NO: 769637 - RNA, 19 nt, Artificial Sequence
  Description of Artificial Sequence: Synthetic oligonucleotide
ggcguuuaacugaacuuca

SEQ ID NO: 769638 - RNA, 19 nt, Artificial Sequence
  Description of Artificial Sequence: Synthetic oligonucleotide
ggggccuuucuguuugcug

SEQ ID NO: 769639 - RNA, 19 nt, Artificial Sequence
  Description of Artificial Sequence: Synthetic oligonucleotide
gcuuugcggaccucuccag

SEQ ID NO: 769640 - RNA, 19 nt, Artificial Sequence
  Description of Artificial Sequence: Synthetic oligonucleotide
ggacuugggugacacaaua

SEQ ID NO: 769641 - RNA, 19 nt, Artificial Sequence
  Description of Artificial Sequence: Synthetic oligonucleotide
acguaggcguuuaacugaa

SEQ ID NO: 769642 - RNA, 19 nt, Artificial Sequence
  Description of Artificial Sequence: Synthetic oligonucleotide
gcgguuuguuuauuucuuc

SEQ ID NO: 769643 - RNA, 19 nt, Artificial Sequence
  Description of Artificial Sequence: Synthetic oligonucleotide
ggcguaguuguaggagggg

SEQ ID NO: 769644 - RNA, 19 nt, Artificial Sequence
  Description of Artificial Sequence: Synthetic oligonucleotide
guagccccaucagagucga

SEQ ID NO: 769645 - RNA, 19 nt, Artificial Sequence
  Description of Artificial Sequence: Synthetic oligonucleotide
agcuccggugguucagaau

SEQ ID NO: 769646 - RNA, 19 nt, Artificial Sequence
  Description of Artificial Sequence: Synthetic oligonucleotide
ggacacauucuuuggccaa

SEQ ID NO: 769647 - RNA, 19 nt, Artificial Sequence
  Description of Artificial Sequence: Synthetic oligonucleotide
gggaacugugaccgcuuug

SEQ ID NO: 769648 - RNA, 19 nt, Artificial Sequence
  Description of Artificial Sequence: Synthetic oligonucleotide
uugcugaguacuggaugua

SEQ ID NO: 769649 - RNA, 19 nt, Artificial Sequence
  Description of Artificial Sequence: Synthetic oligonucleotide
cugugaccgcuuugcggac

SEQ ID NO: 769650 - RNA, 19 nt, Artificial Sequence
  Description of Artificial Sequence: Synthetic oligonucleotide
gguaagcuccggugguuca

SEQ ID NO: 769651 - RNA, 19 nt, Artificial Sequence
  Description of Artificial Sequence: Synthetic oligonucleotide
acuugcggugguggaguug

SEQ ID NO: 769652 - RNA, 19 nt, Artificial Sequence
  Description of Artificial Sequence: Synthetic oligonucleotide
ggagaucaguuggacuaug

SEQ ID NO: 769653 - RNA, 19 nt, Artificial Sequence
  Description of Artificial Sequence: Synthetic oligonucleotide
cacagcgcuuggugaauga

SEQ ID NO: 769654 - RNA, 19 nt, Artificial Sequence
  Description of Artificial Sequence: Synthetic oligonucleotide
gggaggucggcuucagcuc

SEQ ID NO: 769655 - RNA, 19 nt, Artificial Sequence
  Description of Artificial Sequence: Synthetic oligonucleotide
cagcucgcucuugagcaug

SEQ ID NO: 769656 - RNA, 19 nt, Artificial Sequence
  Description of Artificial Sequence: Synthetic oligonucleotide
uaucgucgucagugcucug

SEQ ID NO: 769657 - RNA, 19 nt, Artificial Sequence
  Description of Artificial Sequence: Synthetic oligonucleotide
gguccggucugugucacuc

SEQ ID NO: 769658 - RNA, 19 nt, Artificial Sequence
  Description of Artificial Sequence: Synthetic oligonucleotide
cucgaguccauagguagcu

SEQ ID NO: 769659 - RNA, 19 nt, Artificial Sequence
  Description of Artificial Sequence: Synthetic oligonucleotide
agucgacgacugucaggcu

SEQ ID NO: 769660 - RNA, 19 nt, Artificial Sequence
  Description of Artificial Sequence: Synthetic oligonucleotide
guuggcagcgagaucuccu

SEQ ID NO: 769661 - RNA, 19 nt, Artificial Sequence
  Description of Artificial Sequence: Synthetic oligonucleotide
gcgauucaauuuagagugc

SEQ ID NO: 769662 - RNA, 19 nt, Artificial Sequence
  Description of Artificial Sequence: Synthetic oligonucleotide
ugguucuuacgggccuggu

SEQ ID NO: 769663 - RNA, 19 nt, Artificial Sequence
  Description of Artificial Sequence: Synthetic oligonucleotide
agccuccggcucuggcauc

SEQ ID NO: 769664 - RNA, 19 nt, Artificial Sequence
  Description of Artificial Sequence: Synthetic oligonucleotide
ccgaucuggcggaugaaca

SEQ ID NO: 769665 - RNA, 19 nt, Artificial Sequence
  Description of Artificial Sequence: Synthetic oligonucleotide
gugguucagaauggacgga

SEQ ID NO: 769666 - RNA, 19 nt, Artificial Sequence
  Description of Artificial Sequence: Synthetic oligonucleotide
aaccuccccugcggcuggg

SEQ ID NO: 769667 - RNA, 19 nt, Artificial Sequence
  Description of Artificial Sequence: Synthetic oligonucleotide
cagcgcuuggugaaugagu

SEQ ID NO: 769668 - RNA, 19 nt, Artificial Sequence
  Description of Artificial Sequence: Synthetic oligonucleotide
cucucgcccuuugcauccg

SEQ ID NO: 769669 - RNA, 19 nt, Artificial Sequence
  Description of Artificial Sequence: Synthetic oligonucleotide
ggaucuuguaucugcuuuu

SEQ ID NO: 769670 - RNA, 19 nt, Artificial Sequence
  Description of Artificial Sequence: Synthetic oligonucleotide
ggaccuggagccguccaac

SEQ ID NO: 769671 - RNA, 19 nt, Artificial Sequence
  Description of Artificial Sequence: Synthetic oligonucleotide
aguucccggggaugagcuu

SEQ ID NO: 769672 - RNA, 19 nt, Artificial Sequence
  Description of Artificial Sequence: Synthetic oligonucleotide
ucuuggcuacuggcgguuu

SEQ ID NO: 769673 - RNA, 19 nt, Artificial Sequence
  Description of Artificial Sequence: Synthetic oligonucleotide
ggucggcuucagcuccagg

SEQ ID NO: 769674 - RNA, 19 nt, Artificial Sequence
  Description of Artificial Sequence: Synthetic oligonucleotide
cacuccauucacaguugcu

SEQ ID NO: 769675 - RNA, 19 nt, Artificial Sequence
  Description of Artificial Sequence: Synthetic oligonucleotide
ccucuugcaacaacagaua

SEQ ID NO: 769676 - RNA, 19 nt, Artificial Sequence
  Description of Artificial Sequence: Synthetic oligonucleotide
ggagccguccaacucugcu

SEQ ID NO: 769677 - RNA, 19 nt, Artificial Sequence
  Description of Artificial Sequence: Synthetic oligonucleotide
uacgggccugguucugguu

SEQ ID NO: 769678 - RNA, 19 nt, Artificial Sequence
  Description of Artificial Sequence: Synthetic oligonucleotide
ugggcucgucucgucucga

SEQ ID NO: 769679 - RNA, 19 nt, Artificial Sequence
  Description of Artificial Sequence: Synthetic oligonucleotide
gggucgcagacacagcgcu

SEQ ID NO: 769680 - RNA, 19 nt, Artificial Sequence
  Description of Artificial Sequence: Synthetic oligonucleotide
gugaccgcuuugcggaccu

SEQ ID NO: 769681 - RNA, 19 nt, Artificial Sequence
  Description of Artificial Sequence: Synthetic oligonucleotide
ugguccggucugugucacu

SEQ ID NO: 769682 - RNA, 19 nt, Artificial Sequence
  Description of Artificial Sequence: Synthetic oligonucleotide
gugguccggucugugucac

SEQ ID NO: 769683 - RNA, 19 nt, Artificial Sequence
  Description of Artificial Sequence: Synthetic oligonucleotide
gggcucgucucgucucgag

SEQ ID NO: 769684 - RNA, 19 nt, Artificial Sequence
  Description of Artificial Sequence: Synthetic oligonucleotide
gguggaguugguagcccca

SEQ ID NO: 769685 - RNA, 19 nt, Artificial Sequence
  Description of Artificial Sequence: Synthetic oligonucleotide
gugcucgugggcaggguaa

SEQ ID NO: 769686 - RNA, 19 nt, Artificial Sequence
  Description of Artificial Sequence: Synthetic oligonucleotide
cuacuggcgguuuguuuau

SEQ ID NO: 769687 - RNA, 19 nt, Artificial Sequence
  Description of Artificial Sequence: Synthetic oligonucleotide
uggcuacuggcgguuuguu

SEQ ID NO: 769688 - RNA, 19 nt, Artificial Sequence
  Description of Artificial Sequence: Synthetic oligonucleotide
cccgaucuggcggaugaac

SEQ ID NO: 769689 - RNA, 19 nt, Artificial Sequence
  Description of Artificial Sequence: Synthetic oligonucleotide
gggcguagggguggcguag

SEQ ID NO: 769690 - RNA, 19 nt, Artificial Sequence
  Description of Artificial Sequence: Synthetic oligonucleotide
ggccaugugaagauugcau

SEQ ID NO: 769691 - RNA, 19 nt, Artificial Sequence
  Description of Artificial Sequence: Synthetic oligonucleotide
cagaugaaacguguagguu

SEQ ID NO: 769692 - RNA, 19 nt, Artificial Sequence
  Description of Artificial Sequence: Synthetic oligonucleotide
gcggaccucuccagaggcg

SEQ ID NO: 769693 - RNA, 19 nt, Artificial Sequence
  Description of Artificial Sequence: Synthetic oligonucleotide
uacuggcgguuuguuuauu

SEQ ID NO: 769694 - RNA, 19 nt, Artificial Sequence
  Description of Artificial Sequence: Synthetic oligonucleotide
gccuggggcguaggggugg

SEQ ID NO: 769695 - RNA, 19 nt, Artificial Sequence
  Description of Artificial Sequence: Synthetic oligonucleotide
gcgcuuggugaaugaguca

SEQ ID NO: 769696 - RNA, 19 nt, Artificial Sequence
  Description of Artificial Sequence: Synthetic oligonucleotide
gugaccacucauagcuagu

SEQ ID NO: 769697 - RNA, 19 nt, Artificial Sequence
  Description of Artificial Sequence: Synthetic oligonucleotide
cagaaccuccccugcggcu

SEQ ID NO: 769698 - RNA, 19 nt, Artificial Sequence
  Description of Artificial Sequence: Synthetic oligonucleotide
ccgagugcaucaaacugcu

SEQ ID NO: 769699 - RNA, 19 nt, Artificial Sequence
  Description of Artificial Sequence: Synthetic oligonucleotide
cccggucuggccaugugaa

SEQ ID NO: 769700 - RNA, 19 nt, Artificial Sequence
  Description of Artificial Sequence: Synthetic oligonucleotide
cgggucgcagacacagcgc

SEQ ID NO: 769701 - RNA, 19 nt, Artificial Sequence
  Description of Artificial Sequence: Synthetic oligonucleotide
gacgacugucaggcugaaa

SEQ ID NO: 769702 - RNA, 19 nt, Artificial Sequence
  Description of Artificial Sequence: Synthetic oligonucleotide
gggccgacuggaugaggga

SEQ ID NO: 769703 - RNA, 19 nt, Artificial Sequence
  Description of Artificial Sequence: Synthetic oligonucleotide
agguucccucaaccagguu

SEQ ID NO: 769704 - RNA, 19 nt, Artificial Sequence
  Description of Artificial Sequence: Synthetic oligonucleotide
ccucugagcgauucaauuu

SEQ ID NO: 769705 - RNA, 19 nt, Artificial Sequence
  Description of Artificial Sequence: Synthetic oligonucleotide
cuggggcguagggguggcg

SEQ ID NO: 769706 - RNA, 19 nt, Artificial Sequence
  Description of Artificial Sequence: Synthetic oligonucleotide
caccgugguccggucugug

SEQ ID NO: 769707 - RNA, 19 nt, Artificial Sequence
  Description of Artificial Sequence: Synthetic oligonucleotide
caucagagucgacgacugu

SEQ ID NO: 769708 - RNA, 19 nt, Artificial Sequence
  Description of Artificial Sequence: Synthetic oligonucleotide
gcucgugggcaggguaacc

SEQ ID NO: 769709 - RNA, 19 nt, Artificial Sequence
  Description of Artificial Sequence: Synthetic oligonucleotide
ccccaucagagucgacgac

SEQ ID NO: 769710 - RNA, 19 nt, Artificial Sequence
  Description of Artificial Sequence: Synthetic oligonucleotide
guccggucugugucacucu

SEQ ID NO: 769711 - RNA, 19 nt, Artificial Sequence
  Description of Artificial Sequence: Synthetic oligonucleotide
cgcuuugcggaccucucca

SEQ ID NO: 769712 - RNA, 19 nt, Artificial Sequence
  Description of Artificial Sequence: Synthetic oligonucleotide
gugcagcaccgcuccaggu

SEQ ID NO: 769713 - RNA, 19 nt, Artificial Sequence
  Description of Artificial Sequence: Synthetic oligonucleotide
gacuugcggugguggaguu

SEQ ID NO: 769714 - RNA, 19 nt, Artificial Sequence
  Description of Artificial Sequence: Synthetic oligonucleotide
gguaaccaccacguucccu

SEQ ID NO: 769715 - RNA, 19 nt, Artificial Sequence
  Description of Artificial Sequence: Synthetic oligonucleotide
ggcucgucucgucucgagu

SEQ ID NO: 769716 - RNA, 19 nt, Artificial Sequence
  Description of Artificial Sequence: Synthetic oligonucleotide
ucccggggaugagcuuacu

SEQ ID NO: 769717 - RNA, 19 nt, Artificial Sequence
  Description of Artificial Sequence: Synthetic oligonucleotide
gucucgucucgaguccaua

SEQ ID NO: 769718 - RNA, 19 nt, Artificial Sequence
  Description of Artificial Sequence: Synthetic oligonucleotide
gccguccaacucugcugug

SEQ ID NO: 769719 - RNA, 19 nt, Artificial Sequence
  Description of Artificial Sequence: Synthetic oligonucleotide
ugaccgcuuugcggaccuc

SEQ ID NO: 769720 - RNA, 19 nt, Artificial Sequence
  Description of Artificial Sequence: Synthetic oligonucleotide
gcugggacucacagcaccu

SEQ ID NO: 769721 - RNA, 19 nt, Artificial Sequence
  Description of Artificial Sequence: Synthetic oligonucleotide
ggggaugagcuuacuuagu

SEQ ID NO: 769722 - RNA, 19 nt, Artificial Sequence
  Description of Artificial Sequence: Synthetic oligonucleotide
cagaauggacggacacauu

SEQ ID NO: 769723 - RNA, 19 nt, Artificial Sequence
  Description of Artificial Sequence: Synthetic oligonucleotide
cgugguccggucuguguca

SEQ ID NO: 769724 - RNA, 19 nt, Artificial Sequence
  Description of Artificial Sequence: Synthetic oligonucleotide
gguccguagcauccaggau

SEQ ID NO: 769725 - RNA, 19 nt, Artificial Sequence
  Description of Artificial Sequence: Synthetic oligonucleotide
cguaggcguuuaacugaac

SEQ ID NO: 769726 - RNA, 19 nt, Artificial Sequence
  Description of Artificial Sequence: Synthetic oligonucleotide
ggcuacuggcgguuuguuu

SEQ ID NO: 769727 - RNA, 19 nt, Artificial Sequence
  Description of Artificial Sequence: Synthetic oligonucleotide
cgagugcaucaaacugcug

SEQ ID NO: 769728 - RNA, 19 nt, Artificial Sequence
  Description of Artificial Sequence: Synthetic oligonucleotide
ggggcguagggguggcgua

SEQ ID NO: 769729 - RNA, 19 nt, Artificial Sequence
  Description of Artificial Sequence: Synthetic oligonucleotide
gggagaucaguuggacuau

SEQ ID NO: 769730 - RNA, 19 nt, Artificial Sequence
  Description of Artificial Sequence: Synthetic oligonucleotide
cgucucgaguccauaggua

SEQ ID NO: 769731 - RNA, 19 nt, Artificial Sequence
  Description of Artificial Sequence: Synthetic oligonucleotide
caguuggacuaugcucagu

SEQ ID NO: 769732 - RNA, 19 nt, Artificial Sequence
  Description of Artificial Sequence: Synthetic oligonucleotide
cucgcccuuugcauccguu

SEQ ID NO: 769733 - RNA, 19 nt, Artificial Sequence
  Description of Artificial Sequence: Synthetic oligonucleotide
gcaccgcuccagguggaga

SEQ ID NO: 769734 - RNA, 19 nt, Artificial Sequence
  Description of Artificial Sequence: Synthetic oligonucleotide
ccguuacuuucagaugaaa

SEQ ID NO: 769735 - RNA, 19 nt, Artificial Sequence
  Description of Artificial Sequence: Synthetic oligonucleotide
cguccaacucugcugugcu

SEQ ID NO: 769736 - RNA, 19 nt, Artificial Sequence
  Description of Artificial Sequence: Synthetic oligonucleotide
gcaggguaaccaccacguu

SEQ ID NO: 769737 - RNA, 19 nt, Artificial Sequence
  Description of Artificial Sequence: Synthetic oligonucleotide
ccgacuccgagugcaucaa

SEQ ID NO: 769738 - RNA, 19 nt, Artificial Sequence
  Description of Artificial Sequence: Synthetic oligonucleotide
ggcguagggguggcguagu

SEQ ID NO: 769739 - RNA, 19 nt, Artificial Sequence
  Description of Artificial Sequence: Synthetic oligonucleotide
ccgacuggaugagggagau

SEQ ID NO: 769740 - RNA, 19 nt, Artificial Sequence
  Description of Artificial Sequence: Synthetic oligonucleotide
ggucgcagacacagcgcuu

SEQ ID NO: 769741 - RNA, 19 nt, Artificial Sequence
  Description of Artificial Sequence: Synthetic oligonucleotide
cgacuccgagugcaucaaa

SEQ ID NO: 769742 - RNA, 19 nt, Artificial Sequence
  Description of Artificial Sequence: Synthetic oligonucleotide
gcguagggguggcguaguu

SEQ ID NO: 769743 - RNA, 19 nt, Artificial Sequence
  Description of Artificial Sequence: Synthetic oligonucleotide
ccacguucccugugaucuu

SEQ ID NO: 769744 - RNA, 19 nt, Artificial Sequence
  Description of Artificial Sequence: Synthetic oligonucleotide
ccccgaucuggcggaugaa

SEQ ID NO: 769745 - RNA, 19 nt, Artificial Sequence
  Description of Artificial Sequence: Synthetic oligonucleotide
ccaccgugguccggucugu

SEQ ID NO: 769746 - RNA, 19 nt, Artificial Sequence
  Description of Artificial Sequence: Synthetic oligonucleotide
aauaucauaauaucgaggc

SEQ ID NO: 769747 - RNA, 19 nt, Artificial Sequence
  Description of Artificial Sequence: Synthetic oligonucleotide
aauuauuacaccauaacgc

SEQ ID NO: 769748 - RNA, 19 nt, Artificial Sequence
  Description of Artificial Sequence: Synthetic oligonucleotide
auauuaauauaauaguccc

SEQ ID NO: 769749 - RNA, 19 nt, Artificial Sequence
  Description of Artificial Sequence: Synthetic oligonucleotide
gaauuauuacaccauaacg

SEQ ID NO: 769750 - RNA, 19 nt, Artificial Sequence
  Description of Artificial Sequence: Synthetic oligonucleotide
ugcaauaaccauuuuagcg

SEQ ID NO: 769751 - RNA, 19 nt, Artificial Sequence
  Description of Artificial Sequence: Synthetic oligonucleotide
uccaucaucauuuaaagca

SEQ ID NO: 769752 - RNA, 19 nt, Artificial Sequence
  Description of Artificial Sequence: Synthetic oligonucleotide
uuaguaaacggauuaaugc

SEQ ID NO: 769753 - RNA, 19 nt, Artificial Sequence
  Description of Artificial Sequence: Synthetic oligonucleotide
aauaucgaggcguaugggg

SEQ ID NO: 769754 - RNA, 19 nt, Artificial Sequence
  Description of Artificial Sequence: Synthetic oligonucleotide
agcacucauaacuauaacc

SEQ ID NO: 769755 - RNA, 19 nt, Artificial Sequence
  Description of Artificial Sequence: Synthetic oligonucleotide
caaaucaucaaccucacgc

SEQ ID NO: 769756 - RNA, 19 nt, Artificial Sequence
  Description of Artificial Sequence: Synthetic oligonucleotide
agaauuauuacaccauaac

SEQ ID NO: 769757 - RNA, 19 nt, Artificial Sequence
  Description of Artificial Sequence: Synthetic oligonucleotide
aaucaaaauguaccaaauc

SEQ ID NO: 769758 - RNA, 19 nt, Artificial Sequence
  Description of Artificial Sequence: Synthetic oligonucleotide
aaaaucucaggauagguau

SEQ ID NO: 769759 - RNA, 19 nt, Artificial Sequence
  Description of Artificial Sequence: Synthetic oligonucleotide
aacaguuguagucacaacu

SEQ ID NO: 769760 - RNA, 19 nt, Artificial Sequence
  Description of Artificial Sequence: Synthetic oligonucleotide
aucagcgacucuuugagcc

SEQ ID NO: 769761 - RNA, 19 nt, Artificial Sequence
  Description of Artificial Sequence: Synthetic oligonucleotide
uaaauuagagcguaaaauc

SEQ ID NO: 769762 - RNA, 19 nt, Artificial Sequence
  Description of Artificial Sequence: Synthetic oligonucleotide
uauuacaccauaacgcucc

SEQ ID NO: 769763 - RNA, 19 nt, Artificial Sequence
  Description of Artificial Sequence: Synthetic oligonucleotide
accauaacgcuccagaagg

SEQ ID NO: 769764 - RNA, 19 nt, Artificial Sequence
  Description of Artificial Sequence: Synthetic oligonucleotide
uguccauaauucuugauag

SEQ ID NO: 769765 - RNA, 19 nt, Artificial Sequence
  Description of Artificial Sequence: Synthetic oligonucleotide
uaccaaaucgucaauacca

SEQ ID NO: 769766 - RNA, 19 nt, Artificial Sequence
  Description of Artificial Sequence: Synthetic oligonucleotide
ugugggacugacaacauag

SEQ ID NO: 769767 - RNA, 19 nt, Artificial Sequence
  Description of Artificial Sequence: Synthetic oligonucleotide
uguugaaugagccgagugg

SEQ ID NO: 769768 - RNA, 19 nt, Artificial Sequence
  Description of Artificial Sequence: Synthetic oligonucleotide
uucaaaacacccaugagaa

SEQ ID NO: 769769 - RNA, 19 nt, Artificial Sequence
  Description of Artificial Sequence: Synthetic oligonucleotide
aauagauaggaccucauua

SEQ ID NO: 769770 - RNA, 19 nt, Artificial Sequence
  Description of Artificial Sequence: Synthetic oligonucleotide
aauacaaccgauccuaaau

SEQ ID NO: 769771 - RNA, 19 nt, Artificial Sequence
  Description of Artificial Sequence: Synthetic oligonucleotide
uguagaauacaauggaaug

SEQ ID NO: 769772 - RNA, 19 nt, Artificial Sequence
  Description of Artificial Sequence: Synthetic oligonucleotide
cauaccgucagucauauac

SEQ ID NO: 769773 - RNA, 19 nt, Artificial Sequence
  Description of Artificial Sequence: Synthetic oligonucleotide
agcacugauaagcauagcg

SEQ ID NO: 769774 - RNA, 19 nt, Artificial Sequence
  Description of Artificial Sequence: Synthetic oligonucleotide
auaauaucgaggcguaugg

SEQ ID NO: 769775 - RNA, 19 nt, Artificial Sequence
  Description of Artificial Sequence: Synthetic oligonucleotide
auuaauauaauagucccug

SEQ ID NO: 769776 - RNA, 19 nt, Artificial Sequence
  Description of Artificial Sequence: Synthetic oligonucleotide
aguucuagagcucucauca

SEQ ID NO: 769777 - RNA, 19 nt, Artificial Sequence
  Description of Artificial Sequence: Synthetic oligonucleotide
aagauaaucucucucuggu

SEQ ID NO: 769778 - RNA, 19 nt, Artificial Sequence
  Description of Artificial Sequence: Synthetic oligonucleotide
caaaucgucaauaccaagc

SEQ ID NO: 769779 - RNA, 19 nt, Artificial Sequence
  Description of Artificial Sequence: Synthetic oligonucleotide
aaauguaccaaaucgucaa

SEQ ID NO: 769780 - RNA, 19 nt, Artificial Sequence
  Description of Artificial Sequence: Synthetic oligonucleotide
aaaucgucaauaccaagcu

SEQ ID NO: 769781 - RNA, 19 nt, Artificial Sequence
  Description of Artificial Sequence: Synthetic oligonucleotide
cuggauaacaguucgaaug

SEQ ID NO: 769782 - RNA, 19 nt, Artificial Sequence
  Description of Artificial Sequence: Synthetic oligonucleotide
aucguucauagcuucacgc

SEQ ID NO: 769783 - RNA, 19 nt, Artificial Sequence
  Description of Artificial Sequence: Synthetic oligonucleotide
agaauaucauaauaucgag

SEQ ID NO: 769784 - RNA, 19 nt, Artificial Sequence
  Description of Artificial Sequence: Synthetic oligonucleotide
agucauauacuuaagaaug

SEQ ID NO: 769785 - RNA, 19 nt, Artificial Sequence
  Description of Artificial Sequence: Synthetic oligonucleotide
aaugaucgcauauacucca

SEQ ID NO: 769786 - RNA, 19 nt, Artificial Sequence
  Description of Artificial Sequence: Synthetic oligonucleotide
aaaucaucaaccucacgcu

SEQ ID NO: 769787 - RNA, 19 nt, Artificial Sequence
  Description of Artificial Sequence: Synthetic oligonucleotide
ucuaacaagaauaucugua

SEQ ID NO: 769788 - RNA, 19 nt, Artificial Sequence
  Description of Artificial Sequence: Synthetic oligonucleotide
aacggauuaaugcacugug

SEQ ID NO: 769789 - RNA, 19 nt, Artificial Sequence
  Description of Artificial Sequence: Synthetic oligonucleotide
uccagggucaaucacaaac

SEQ ID NO: 769790 - RNA, 19 nt, Artificial Sequence
  Description of Artificial Sequence: Synthetic oligonucleotide
acaacuuccuucaaaacac

SEQ ID NO: 769791 - RNA, 19 nt, Artificial Sequence
  Description of Artificial Sequence: Synthetic oligonucleotide
ucaucagcgacucuuugag

SEQ ID NO: 769792 - RNA, 19 nt, Artificial Sequence
  Description of Artificial Sequence: Synthetic oligonucleotide
ugucuaacaagaauaucug

SEQ ID NO: 769793 - RNA, 19 nt, Artificial Sequence
  Description of Artificial Sequence: Synthetic oligonucleotide
uaguaaacggauuaaugca

SEQ ID NO: 769794 - RNA, 19 nt, Artificial Sequence
  Description of Artificial Sequence: Synthetic oligonucleotide
aaauuagagcguaaaaucu

SEQ ID NO: 769795 - RNA, 19 nt, Artificial Sequence
  Description of Artificial Sequence: Synthetic oligonucleotide
gacucuuugagccacacuc

SEQ ID NO: 769796 - RNA, 19 nt, Artificial Sequence
  Description of Artificial Sequence: Synthetic oligonucleotide
uaucauaauaucgaggcgu

SEQ ID NO: 769797 - RNA, 19 nt, Artificial Sequence
  Description of Artificial Sequence: Synthetic oligonucleotide
ucuagagcucucaucagag

SEQ ID NO: 769798 - RNA, 19 nt, Artificial Sequence
  Description of Artificial Sequence: Synthetic oligonucleotide
auaucuguaaaccuauccu

SEQ ID NO: 769799 - RNA, 19 nt, Artificial Sequence
  Description of Artificial Sequence: Synthetic oligonucleotide
gaauaucauaauaucgagg

SEQ ID NO: 769800 - RNA, 19 nt, Artificial Sequence
  Description of Artificial Sequence: Synthetic oligonucleotide
ugucauaacaccacugaac

SEQ ID NO: 769801 - RNA, 19 nt, Artificial Sequence
  Description of Artificial Sequence: Synthetic oligonucleotide
uguugaaugggcagaaugu

SEQ ID NO: 769802 - RNA, 19 nt, Artificial Sequence
  Description of Artificial Sequence: Synthetic oligonucleotide
ucuaugugggcaaaucuca

SEQ ID NO: 769803 - RNA, 19 nt, Artificial Sequence
  Description of Artificial Sequence: Synthetic oligonucleotide
agagcguaaaaucucagga

SEQ ID NO: 769804 - RNA, 19 nt, Artificial Sequence
  Description of Artificial Sequence: Synthetic oligonucleotide
ucuaggauuauauaccuuu

SEQ ID NO: 769805 - RNA, 19 nt, Artificial Sequence
  Description of Artificial Sequence: Synthetic oligonucleotide
aaagccggaagcauuuccc

SEQ ID NO: 769806 - RNA, 19 nt, Artificial Sequence
  Description of Artificial Sequence: Synthetic oligonucleotide
ucaaaguaaaucuggaauu

SEQ ID NO: 769807 - RNA, 19 nt, Artificial Sequence
  Description of Artificial Sequence: Synthetic oligonucleotide
acuucgacgaggcaaauga

SEQ ID NO: 769808 - RNA, 19 nt, Artificial Sequence
  Description of Artificial Sequence: Synthetic oligonucleotide
uauuaauauaauagucccu

SEQ ID NO: 769809 - RNA, 19 nt, Artificial Sequence
  Description of Artificial Sequence: Synthetic oligonucleotide
aguacaaaugacugauguc

SEQ ID NO: 769810 - RNA, 19 nt, Artificial Sequence
  Description of Artificial Sequence: Synthetic oligonucleotide
augucuaacaagaauaucu

SEQ ID NO: 769811 - RNA, 19 nt, Artificial Sequence
  Description of Artificial Sequence: Synthetic oligonucleotide
ucgcauauacuccacacac

SEQ ID NO: 769812 - RNA, 19 nt, Artificial Sequence
  Description of Artificial Sequence: Synthetic oligonucleotide
aaucgaauggaguauccaa

SEQ ID NO: 769813 - RNA, 19 nt, Artificial Sequence
  Description of Artificial Sequence: Synthetic oligonucleotide
aaccucacgcuuuauucuc

SEQ ID NO: 769814 - RNA, 19 nt, Artificial Sequence
  Description of Artificial Sequence: Synthetic oligonucleotide
aagcuuuacuaauugcugu

SEQ ID NO: 769815 - RNA, 19 nt, Artificial Sequence
  Description of Artificial Sequence: Synthetic oligonucleotide
ucuucaaaucgaauggagu

SEQ ID NO: 769816 - RNA, 19 nt, Artificial Sequence
  Description of Artificial Sequence: Synthetic oligonucleotide
aguaaacggauuaaugcac

SEQ ID NO: 769817 - RNA, 19 nt, Artificial Sequence
  Description of Artificial Sequence: Synthetic oligonucleotide
uuuacuaauugcugucacc

SEQ ID NO: 769818 - RNA, 19 nt, Artificial Sequence
  Description of Artificial Sequence: Synthetic oligonucleotide
accgauccuaaauuagagc

SEQ ID NO: 769819 - RNA, 19 nt, Artificial Sequence
  Description of Artificial Sequence: Synthetic oligonucleotide
uccuuguauucccaaacag

SEQ ID NO: 769820 - RNA, 19 nt, Artificial Sequence
  Description of Artificial Sequence: Synthetic oligonucleotide
uguaccaaaucgucaauac

SEQ ID NO: 769821 - RNA, 19 nt, Artificial Sequence
  Description of Artificial Sequence: Synthetic oligonucleotide
uuaauauaauagucccugc

SEQ ID NO: 769822 - RNA, 19 nt, Artificial Sequence
  Description of Artificial Sequence: Synthetic oligonucleotide
aaaucaguacuucgacgag

SEQ ID NO: 769823 - RNA, 19 nt, Artificial Sequence
  Description of Artificial Sequence: Synthetic oligonucleotide
uaaaaucucaggauaggua

SEQ ID NO: 769824 - RNA, 19 nt, Artificial Sequence
  Description of Artificial Sequence: Synthetic oligonucleotide
auuagaacaguuguaguca

SEQ ID NO: 769825 - RNA, 19 nt, Artificial Sequence
  Description of Artificial Sequence: Synthetic oligonucleotide
augguagacauucagcagu

SEQ ID NO: 769826 - RNA, 19 nt, Artificial Sequence
  Description of Artificial Sequence: Synthetic oligonucleotide
auauguaucuggauaacag

SEQ ID NO: 769827 - RNA, 19 nt, Artificial Sequence
  Description of Artificial Sequence: Synthetic oligonucleotide
aaaauguaccaaaucguca

SEQ ID NO: 769828 - RNA, 19 nt, Artificial Sequence
  Description of Artificial Sequence: Synthetic oligonucleotide
accucauuagaacaguugu

SEQ ID NO: 769829 - RNA, 19 nt, Artificial Sequence
  Description of Artificial Sequence: Synthetic oligonucleotide
auaaaauacccaguaacca

SEQ ID NO: 769830 - RNA, 19 nt, Artificial Sequence
  Description of Artificial Sequence: Synthetic oligonucleotide
auucuaggauuauauaccu

SEQ ID NO: 769831 - RNA, 19 nt, Artificial Sequence
  Description of Artificial Sequence: Synthetic oligonucleotide
uguagucacaacuugcaau

SEQ ID NO: 769832 - RNA, 19 nt, Artificial Sequence
  Description of Artificial Sequence: Synthetic oligonucleotide
auaauucaaaaguucuaga

SEQ ID NO: 769833 - RNA, 19 nt, Artificial Sequence
  Description of Artificial Sequence: Synthetic oligonucleotide
uggaguauccaacuuccug

SEQ ID NO: 769834 - RNA, 19 nt, Artificial Sequence
  Description of Artificial Sequence: Synthetic oligonucleotide
aaacagggagcugaagccg

SEQ ID NO: 769835 - RNA, 19 nt, Artificial Sequence
  Description of Artificial Sequence: Synthetic oligonucleotide
ccgauccuaaauuagagcg

SEQ ID NO: 769836 - RNA, 19 nt, Artificial Sequence
  Description of Artificial Sequence: Synthetic oligonucleotide
auaccuuuugcuuugcaaa

SEQ ID NO: 769837 - RNA, 19 nt, Artificial Sequence
  Description of Artificial Sequence: Synthetic oligonucleotide
gaagcuuuacuaauugcug

SEQ ID NO: 769838 - RNA, 19 nt, Artificial Sequence
  Description of Artificial Sequence: Synthetic oligonucleotide
caaugaucgcauauacucc

SEQ ID NO: 769839 - RNA, 19 nt, Artificial Sequence
  Description of Artificial Sequence: Synthetic oligonucleotide
ucugaucucugucuuacaa

SEQ ID NO: 769840 - RNA, 19 nt, Artificial Sequence
  Description of Artificial Sequence: Synthetic oligonucleotide
aucaguacuucgacgaggc

SEQ ID NO: 769841 - RNA, 19 nt, Artificial Sequence
  Description of Artificial Sequence: Synthetic oligonucleotide
uucagggcccaaaucauca

SEQ ID NO: 769842 - RNA, 19 nt, Artificial Sequence
  Description of Artificial Sequence: Synthetic oligonucleotide
aagccguuucuuuagaaua

SEQ ID NO: 769843 - RNA, 19 nt, Artificial Sequence
  Description of Artificial Sequence: Synthetic oligonucleotide
gcgaacaaaacacuguggg

SEQ ID NO: 769844 - RNA, 19 nt, Artificial Sequence
  Description of Artificial Sequence: Synthetic oligonucleotide
acuauaaccuuuaaaucug

SEQ ID NO: 769845 - RNA, 19 nt, Artificial Sequence
  Description of Artificial Sequence: Synthetic oligonucleotide
uauaauagucccugcuugu

SEQ ID NO: 769846 - RNA, 19 nt, Artificial Sequence
  Description of Artificial Sequence: Synthetic oligonucleotide
auaggaccucauuagaaca

SEQ ID NO: 769847 - RNA, 19 nt, Artificial Sequence
  Description of Artificial Sequence: Synthetic oligonucleotide
gucacaacuugcaauaacc

SEQ ID NO: 769848 - RNA, 19 nt, Artificial Sequence
  Description of Artificial Sequence: Synthetic oligonucleotide
caaaagagacucaacucug

SEQ ID NO: 769849 - RNA, 19 nt, Artificial Sequence
  Description of Artificial Sequence: Synthetic oligonucleotide
uaaagccggaagcauuucc

SEQ ID NO: 769850 - RNA, 19 nt, Artificial Sequence
  Description of Artificial Sequence: Synthetic oligonucleotide
ucuuaccagacccagucuc

SEQ ID NO: 769851 - RNA, 19 nt, Artificial Sequence
  Description of Artificial Sequence: Synthetic oligonucleotide
gaugaucuccaucuaugug

SEQ ID NO: 769852 - RNA, 19 nt, Artificial Sequence
  Description of Artificial Sequence: Synthetic oligonucleotide
uuagagcguaaaaucucag

SEQ ID NO: 769853 - RNA, 19 nt, Artificial Sequence
  Description of Artificial Sequence: Synthetic oligonucleotide
auauacuuaagaaugguuu

SEQ ID NO: 769854 - RNA, 19 nt, Artificial Sequence
  Description of Artificial Sequence: Synthetic oligonucleotide
gucauauacuuaagaaugg

SEQ ID NO: 769855 - RNA, 19 nt, Artificial Sequence
  Description of Artificial Sequence: Synthetic oligonucleotide
ugaaugggcagaaugugua

SEQ ID NO: 769856 - RNA, 19 nt, Artificial Sequence
  Description of Artificial Sequence: Synthetic oligonucleotide
uaaaccuauccuuguauuc

SEQ ID NO: 769857 - RNA, 19 nt, Artificial Sequence
  Description of Artificial Sequence: Synthetic oligonucleotide
aucuguguugucuuaccag

SEQ ID NO: 769858 - RNA, 19 nt, Artificial Sequence
  Description of Artificial Sequence: Synthetic oligonucleotide
ucauggaucccaauucagu

SEQ ID NO: 769859 - RNA, 19 nt, Artificial Sequence
  Description of Artificial Sequence: Synthetic oligonucleotide
ucugcaauguuaguugaca

SEQ ID NO: 769860 - RNA, 19 nt, Artificial Sequence
  Description of Artificial Sequence: Synthetic oligonucleotide
uagaauacaauggaaugau

SEQ ID NO: 769861 - RNA, 19 nt, Artificial Sequence
  Description of Artificial Sequence: Synthetic oligonucleotide
uugaaugggcagaaugugu

SEQ ID NO: 769862 - RNA, 19 nt, Artificial Sequence
  Description of Artificial Sequence: Synthetic oligonucleotide
gaucgcauauacuccacac

SEQ ID NO: 769863 - RNA, 19 nt, Artificial Sequence
  Description of Artificial Sequence: Synthetic oligonucleotide
uagauaggaccucauuaga

SEQ ID NO: 769864 - RNA, 19 nt, Artificial Sequence
  Description of Artificial Sequence: Synthetic oligonucleotide
aauaaccauuuuagcgagc

SEQ ID NO: 769865 - RNA, 19 nt, Artificial Sequence
  Description of Artificial Sequence: Synthetic oligonucleotide
uguucggccaggaauaguu

SEQ ID NO: 769866 - RNA, 19 nt, Artificial Sequence
  Description of Artificial Sequence: Synthetic oligonucleotide
guguugaaugggcagaaug

SEQ ID NO: 769867 - RNA, 19 nt, Artificial Sequence
  Description of Artificial Sequence: Synthetic oligonucleotide
uguaaagccggaagcauuu

SEQ ID NO: 769868 - RNA, 19 nt, Artificial Sequence
  Description of Artificial Sequence: Synthetic oligonucleotide
aguauccaacuuccuggcc

SEQ ID NO: 769869 - RNA, 19 nt, Artificial Sequence
  Description of Artificial Sequence: Synthetic oligonucleotide
ucgaauggaguauccaacu

SEQ ID NO: 769870 - RNA, 19 nt, Artificial Sequence
  Description of Artificial Sequence: Synthetic oligonucleotide
aaccgauccuaaauuagag

SEQ ID NO: 769871 - RNA, 19 nt, Artificial Sequence
  Description of Artificial Sequence: Synthetic oligonucleotide
aucgaauggaguauccaac

SEQ ID NO: 769872 - RNA, 19 nt, Artificial Sequence
  Description of Artificial Sequence: Synthetic oligonucleotide
uuuagcgagcuguggaucu

SEQ ID NO: 769873 - RNA, 19 nt, Artificial Sequence
  Description of Artificial Sequence: Synthetic oligonucleotide
ucgacgaggcaaaugaaau

SEQ ID NO: 769874 - RNA, 19 nt, Artificial Sequence
  Description of Artificial Sequence: Synthetic oligonucleotide
acuugcaauaaccauuuua

SEQ ID NO: 769875 - RNA, 19 nt, Artificial Sequence
  Description of Artificial Sequence: Synthetic oligonucleotide
cauaauaucgaggcguaug

SEQ ID NO: 769876 - RNA, 19 nt, Artificial Sequence
  Description of Artificial Sequence: Synthetic oligonucleotide
uaaacggauuaaugcacug

SEQ ID NO: 769877 - RNA, 19 nt, Artificial Sequence
  Description of Artificial Sequence: Synthetic oligonucleotide
auaaccauuuuagcgagcu

SEQ ID NO: 769878 - RNA, 19 nt, Artificial Sequence
  Description of Artificial Sequence: Synthetic oligonucleotide
uuagaacaguuguagucac

SEQ ID NO: 769879 - RNA, 19 nt, Artificial Sequence
  Description of Artificial Sequence: Synthetic oligonucleotide
gaaguugucauaacaccac

SEQ ID NO: 769880 - RNA, 19 nt, Artificial Sequence
  Description of Artificial Sequence: Synthetic oligonucleotide
agcguaaaaucucaggaua

SEQ ID NO: 769881 - RNA, 19 nt, Artificial Sequence
  Description of Artificial Sequence: Synthetic oligonucleotide
uucgacgaggcaaaugaaa

SEQ ID NO: 769882 - RNA, 19 nt, Artificial Sequence
  Description of Artificial Sequence: Synthetic oligonucleotide
uuaaugaaguugucauaac

SEQ ID NO: 769883 - RNA, 19 nt, Artificial Sequence
  Description of Artificial Sequence: Synthetic oligonucleotide
caaaucgaauggaguaucc

SEQ ID NO: 769884 - RNA, 19 nt, Artificial Sequence
  Description of Artificial Sequence: Synthetic oligonucleotide
uggcaaugaucgcauauac

SEQ ID NO: 769885 - RNA, 19 nt, Artificial Sequence
  Description of Artificial Sequence: Synthetic oligonucleotide
aguaauagauaggaccuca

SEQ ID NO: 769886 - RNA, 19 nt, Artificial Sequence
  Description of Artificial Sequence: Synthetic oligonucleotide
gaaugggcagaauguguag

SEQ ID NO: 769887 - RNA, 19 nt, Artificial Sequence
  Description of Artificial Sequence: Synthetic oligonucleotide
ucucccguucucuaucucc

SEQ ID NO: 769888 - RNA, 19 nt, Artificial Sequence
  Description of Artificial Sequence: Synthetic oligonucleotide
guaccaaaucgucaauacc

SEQ ID NO: 769889 - RNA, 19 nt, Artificial Sequence
  Description of Artificial Sequence: Synthetic oligonucleotide
cuucaaaucgaauggagua

SEQ ID NO: 769890 - RNA, 19 nt, Artificial Sequence
  Description of Artificial Sequence: Synthetic oligonucleotide
uccagaaggggaucguuca

SEQ ID NO: 769891 - RNA, 19 nt, Artificial Sequence
  Description of Artificial Sequence: Synthetic oligonucleotide
aaaucgaauggaguaucca

SEQ ID NO: 769892 - RNA, 19 nt, Artificial Sequence
  Description of Artificial Sequence: Synthetic oligonucleotide
agaugaucuccaucuaugu

SEQ ID NO: 769893 - RNA, 19 nt, Artificial Sequence
  Description of Artificial Sequence: Synthetic oligonucleotide
gaaugagccgaguggguug

SEQ ID NO: 769894 - RNA, 19 nt, Artificial Sequence
  Description of Artificial Sequence: Synthetic oligonucleotide
uggggcgaacaaaacacug

SEQ ID NO: 769895 - RNA, 19 nt, Artificial Sequence
  Description of Artificial Sequence: Synthetic oligonucleotide
uaauaucgaggcguauggg

SEQ ID NO: 769896 - RNA, 19 nt, Artificial Sequence
  Description of Artificial Sequence: Synthetic oligonucleotide
cuuuacuaauugcugucac

SEQ ID NO: 769897 - RNA, 19 nt, Artificial Sequence
  Description of Artificial Sequence: Synthetic oligonucleotide
guagaauguguugaaugag

SEQ ID NO: 769898 - RNA, 19 nt, Artificial Sequence
  Description of Artificial Sequence: Synthetic oligonucleotide
gggucaaucacaaacacca

SEQ ID NO: 769899 - RNA, 19 nt, Artificial Sequence
  Description of Artificial Sequence: Synthetic oligonucleotide
aaacggauuaaugcacugu

SEQ ID NO: 769900 - RNA, 19 nt, Artificial Sequence
  Description of Artificial Sequence: Synthetic oligonucleotide
ccuuguauucccaaacagg

SEQ ID NO: 769901 - RNA, 19 nt, Artificial Sequence
  Description of Artificial Sequence: Synthetic oligonucleotide
ucugguacguccagcucgc

SEQ ID NO: 769902 - RNA, 19 nt, Artificial Sequence
  Description of Artificial Sequence: Synthetic oligonucleotide
augagaauaucuguagcca

SEQ ID NO: 769903 - RNA, 19 nt, Artificial Sequence
  Description of Artificial Sequence: Synthetic oligonucleotide
auagcguugguggaagcuc

SEQ ID NO: 769904 - RNA, 19 nt, Artificial Sequence
  Description of Artificial Sequence: Synthetic oligonucleotide
uaauagauaggaccucauu

SEQ ID NO: 769905 - RNA, 19 nt, Artificial Sequence
  Description of Artificial Sequence: Synthetic oligonucleotide
guaguuaaugaaguuguca

SEQ ID NO: 769906 - RNA, 19 nt, Artificial Sequence
  Description of Artificial Sequence: Synthetic oligonucleotide
guagucacaacuugcaaua

SEQ ID NO: 769907 - RNA, 19 nt, Artificial Sequence
  Description of Artificial Sequence: Synthetic oligonucleotide
guugagugagcugaaugag

SEQ ID NO: 769908 - RNA, 19 nt, Artificial Sequence
  Description of Artificial Sequence: Synthetic oligonucleotide
uguaagcuuucucugugua

SEQ ID NO: 769909 - RNA, 19 nt, Artificial Sequence
  Description of Artificial Sequence: Synthetic oligonucleotide
guaaccaaugcuuuucuua

SEQ ID NO: 769910 - RNA, 19 nt, Artificial Sequence
  Description of Artificial Sequence: Synthetic oligonucleotide
auuuuagcgagcuguggau

SEQ ID NO: 769911 - RNA, 19 nt, Artificial Sequence
  Description of Artificial Sequence: Synthetic oligonucleotide
ucggccaggaauaguuaag

SEQ ID NO: 769912 - RNA, 19 nt, Artificial Sequence
  Description of Artificial Sequence: Synthetic oligonucleotide
gauaagcauagcguuggug

SEQ ID NO: 769913 - RNA, 19 nt, Artificial Sequence
  Description of Artificial Sequence: Synthetic oligonucleotide
auggaucccaauucaguca

SEQ ID NO: 769914 - RNA, 19 nt, Artificial Sequence
  Description of Artificial Sequence: Synthetic oligonucleotide
uagguauuauccugcauuu

SEQ ID NO: 769915 - RNA, 19 nt, Artificial Sequence
  Description of Artificial Sequence: Synthetic oligonucleotide
ucaaaucgaauggaguauc

SEQ ID NO: 769916 - RNA, 19 nt, Artificial Sequence
  Description of Artificial Sequence: Synthetic oligonucleotide
aaaagagacucaacucuga

SEQ ID NO: 769917 - RNA, 19 nt, Artificial Sequence
  Description of Artificial Sequence: Synthetic oligonucleotide
accaguacaaaugacugau

SEQ ID NO: 769918 - RNA, 19 nt, Artificial Sequence
  Description of Artificial Sequence: Synthetic oligonucleotide
cuaacauuacauccaucuc

SEQ ID NO: 769919 - RNA, 19 nt, Artificial Sequence
  Description of Artificial Sequence: Synthetic oligonucleotide
uacaaaugacugaugucua

SEQ ID NO: 769920 - RNA, 19 nt, Artificial Sequence
  Description of Artificial Sequence: Synthetic oligonucleotide
cauaacuauaaccuuuaaa

SEQ ID NO: 769921 - RNA, 19 nt, Artificial Sequence
  Description of Artificial Sequence: Synthetic oligonucleotide
uucaaaucgaauggaguau

SEQ ID NO: 769922 - RNA, 19 nt, Artificial Sequence
  Description of Artificial Sequence: Synthetic oligonucleotide
aucgcauauacuccacaca

SEQ ID NO: 769923 - RNA, 19 nt, Artificial Sequence
  Description of Artificial Sequence: Synthetic oligonucleotide
aagagagggcaauuaucaa

SEQ ID NO: 769924 - RNA, 19 nt, Artificial Sequence
  Description of Artificial Sequence: Synthetic oligonucleotide
uauucccaaacagggagcu

SEQ ID NO: 769925 - RNA, 19 nt, Artificial Sequence
  Description of Artificial Sequence: Synthetic oligonucleotide
gagccgaguggguugagug

SEQ ID NO: 769926 - RNA, 19 nt, Artificial Sequence
  Description of Artificial Sequence: Synthetic oligonucleotide
acaaccgauccuaaauuag

SEQ ID NO: 769927 - RNA, 19 nt, Artificial Sequence
  Description of Artificial Sequence: Synthetic oligonucleotide
uggguccauaaaaucaaaa

SEQ ID NO: 769928 - RNA, 19 nt, Artificial Sequence
  Description of Artificial Sequence: Synthetic oligonucleotide
caccauaacgcuccagaag

SEQ ID NO: 769929 - RNA, 19 nt, Artificial Sequence
  Description of Artificial Sequence: Synthetic oligonucleotide
cauccaucucaucagcgac

SEQ ID NO: 769930 - RNA, 19 nt, Artificial Sequence
  Description of Artificial Sequence: Synthetic oligonucleotide
uccuaaauuagagcguaaa

SEQ ID NO: 769931 - RNA, 19 nt, Artificial Sequence
  Description of Artificial Sequence: Synthetic oligonucleotide
uuguagucacaacuugcaa

SEQ ID NO: 769932 - RNA, 19 nt, Artificial Sequence
  Description of Artificial Sequence: Synthetic oligonucleotide
aaucgucaauaccaagcuu

SEQ ID NO: 769933 - RNA, 19 nt, Artificial Sequence
  Description of Artificial Sequence: Synthetic oligonucleotide
ucuggauaacaguucgaau

SEQ ID NO: 769934 - RNA, 19 nt, Artificial Sequence
  Description of Artificial Sequence: Synthetic oligonucleotide
acugauaagcauagcguug

SEQ ID NO: 769935 - RNA, 19 nt, Artificial Sequence
  Description of Artificial Sequence: Synthetic oligonucleotide
gguugagugagcugaauga

SEQ ID NO: 769936 - RNA, 19 nt, Artificial Sequence
  Description of Artificial Sequence: Synthetic oligonucleotide
agcucgcccagcucuuugc

SEQ ID NO: 769937 - RNA, 19 nt, Artificial Sequence
  Description of Artificial Sequence: Synthetic oligonucleotide
gacgaggcaaaugaaaucu

SEQ ID NO: 769938 - RNA, 19 nt, Artificial Sequence
  Description of Artificial Sequence: Synthetic oligonucleotide
auuucccgggucugguacg

SEQ ID NO: 769939 - RNA, 19 nt, Artificial Sequence
  Description of Artificial Sequence: Synthetic oligonucleotide
cuaaauuagagcguaaaau

SEQ ID NO: 769940 - RNA, 19 nt, Artificial Sequence
  Description of Artificial Sequence: Synthetic oligonucleotide
gacucaacucugauucuag

SEQ ID NO: 769941 - RNA, 19 nt, Artificial Sequence
  Description of Artificial Sequence: Synthetic oligonucleotide
guauuauccugcauuucug

SEQ ID NO: 769942 - RNA, 19 nt, Artificial Sequence
  Description of Artificial Sequence: Synthetic oligonucleotide
uaucgaggcguauggggca

SEQ ID NO: 769943 - RNA, 19 nt, Artificial Sequence
  Description of Artificial Sequence: Synthetic oligonucleotide
uuugcacuacugcagucuu

SEQ ID NO: 769944 - RNA, 19 nt, Artificial Sequence
  Description of Artificial Sequence: Synthetic oligonucleotide
gaagcuuuuagaggaggca

SEQ ID NO: 769945 - RNA, 19 nt, Artificial Sequence
  Description of Artificial Sequence: Synthetic oligonucleotide
ucgcccagcucuuugcuga

SEQ ID NO: 769946 - RNA, 19 nt, Artificial Sequence
  Description of Artificial Sequence: Synthetic oligonucleotide
ugguacguccagcucgccc

SEQ ID NO: 769947 - RNA, 19 nt, Artificial Sequence
  Description of Artificial Sequence: Synthetic oligonucleotide
gaugucuaacaagaauauc

SEQ ID NO: 769948 - RNA, 19 nt, Artificial Sequence
  Description of Artificial Sequence: Synthetic oligonucleotide
uguguaaagccggaagcau

SEQ ID NO: 769949 - RNA, 19 nt, Artificial Sequence
  Description of Artificial Sequence: Synthetic oligonucleotide
uucggccaggaauaguuaa

SEQ ID NO: 769950 - RNA, 19 nt, Artificial Sequence
  Description of Artificial Sequence: Synthetic oligonucleotide
agcagcauaccgucaguca

SEQ ID NO: 769951 - RNA, 19 nt, Artificial Sequence
  Description of Artificial Sequence: Synthetic oligonucleotide
uugaaugagccgagugggu

SEQ ID NO: 769952 - RNA, 19 nt, Artificial Sequence
  Description of Artificial Sequence: Synthetic oligonucleotide
uaaccauuuuagcgagcug

SEQ ID NO: 769953 - RNA, 19 nt, Artificial Sequence
  Description of Artificial Sequence: Synthetic oligonucleotide
ggcaaaucucaucuuggcc

SEQ ID NO: 769954 - RNA, 19 nt, Artificial Sequence
  Description of Artificial Sequence: Synthetic oligonucleotide
uagcguugguggaagcucu

SEQ ID NO: 769955 - RNA, 19 nt, Artificial Sequence
  Description of Artificial Sequence: Synthetic oligonucleotide
ugaagccguuucuuuagaa

SEQ ID NO: 769956 - RNA, 19 nt, Artificial Sequence
  Description of Artificial Sequence: Synthetic oligonucleotide
aaugagccgaguggguuga

SEQ ID NO: 769957 - RNA, 19 nt, Artificial Sequence
  Description of Artificial Sequence: Synthetic oligonucleotide
cauauacuccacacaccac

SEQ ID NO: 769958 - RNA, 19 nt, Artificial Sequence
  Description of Artificial Sequence: Synthetic oligonucleotide
agcaucuaggguagcacuc

SEQ ID NO: 769959 - RNA, 19 nt, Artificial Sequence
  Description of Artificial Sequence: Synthetic oligonucleotide
uccucuuuuggguccuggc

SEQ ID NO: 769960 - RNA, 19 nt, Artificial Sequence
  Description of Artificial Sequence: Synthetic oligonucleotide
caaccgauccuaaauuaga

SEQ ID NO: 769961 - RNA, 19 nt, Artificial Sequence
  Description of Artificial Sequence: Synthetic oligonucleotide
aaugcacuguggaagugau

SEQ ID NO: 769962 - RNA, 19 nt, Artificial Sequence
  Description of Artificial Sequence: Synthetic oligonucleotide
gaggcaaaugaaaucuguc

SEQ ID NO: 769963 - RNA, 19 nt, Artificial Sequence
  Description of Artificial Sequence: Synthetic oligonucleotide
ucagcgacucuuugagcca

SEQ ID NO: 769964 - RNA, 19 nt, Artificial Sequence
  Description of Artificial Sequence: Synthetic oligonucleotide
acggauuaaugcacugugg

SEQ ID NO: 769965 - RNA, 19 nt, Artificial Sequence
  Description of Artificial Sequence: Synthetic oligonucleotide
uuuuagcgagcuguggauc

SEQ ID NO: 769966 - RNA, 19 nt, Artificial Sequence
  Description of Artificial Sequence: Synthetic oligonucleotide
aggcguauggggcagguua

SEQ ID NO: 769967 - RNA, 19 nt, Artificial Sequence
  Description of Artificial Sequence: Synthetic oligonucleotide
cacgcagcagcauaccguc

SEQ ID NO: 769968 - RNA, 19 nt, Artificial Sequence
  Description of Artificial Sequence: Synthetic oligonucleotide
ggaucuagaggaaacucug

SEQ ID NO: 769969 - RNA, 19 nt, Artificial Sequence
  Description of Artificial Sequence: Synthetic oligonucleotide
cuguguugucuuaccagac

SEQ ID NO: 769970 - RNA, 19 nt, Artificial Sequence
  Description of Artificial Sequence: Synthetic oligonucleotide
uccuggccuaacauuacau

SEQ ID NO: 769971 - RNA, 19 nt, Artificial Sequence
  Description of Artificial Sequence: Synthetic oligonucleotide
cucauaacuauaaccuuua

SEQ ID NO: 769972 - RNA, 19 nt, Artificial Sequence
  Description of Artificial Sequence: Synthetic oligonucleotide
uuaaugcacuguggaagug

SEQ ID NO: 769973 - RNA, 19 nt, Artificial Sequence
  Description of Artificial Sequence: Synthetic oligonucleotide
gauaacaguucgaauggcu

SEQ ID NO: 769974 - RNA, 19 nt, Artificial Sequence
  Description of Artificial Sequence: Synthetic oligonucleotide
ugcuggcguacauugucug

SEQ ID NO: 769975 - RNA, 19 nt, Artificial Sequence
  Description of Artificial Sequence: Synthetic oligonucleotide
guagcacucauaacuauaa

SEQ ID NO: 769976 - RNA, 19 nt, Artificial Sequence
  Description of Artificial Sequence: Synthetic oligonucleotide
agauaggaccucauuagaa

SEQ ID NO: 769977 - RNA, 19 nt, Artificial Sequence
  Description of Artificial Sequence: Synthetic oligonucleotide
ugauaagcauagcguuggu

SEQ ID NO: 769978 - RNA, 19 nt, Artificial Sequence
  Description of Artificial Sequence: Synthetic oligonucleotide
cauauguaucuggauaaca

SEQ ID NO: 769979 - RNA, 19 nt, Artificial Sequence
  Description of Artificial Sequence: Synthetic oligonucleotide
agaauguguagaauguguu

SEQ ID NO: 769980 - RNA, 19 nt, Artificial Sequence
  Description of Artificial Sequence: Synthetic oligonucleotide
aguacuucgacgaggcaaa

SEQ ID NO: 769981 - RNA, 19 nt, Artificial Sequence
  Description of Artificial Sequence: Synthetic oligonucleotide
gggcgaacaaaacacugug

SEQ ID NO: 769982 - RNA, 19 nt, Artificial Sequence
  Description of Artificial Sequence: Synthetic oligonucleotide
uugacacaaccaccuuucu

SEQ ID NO: 769983 - RNA, 19 nt, Artificial Sequence
  Description of Artificial Sequence: Synthetic oligonucleotide
aguuaagagagggcaauua

SEQ ID NO: 769984 - RNA, 19 nt, Artificial Sequence
  Description of Artificial Sequence: Synthetic oligonucleotide
cagguuaguaaacggauua

SEQ ID NO: 769985 - RNA, 19 nt, Artificial Sequence
  Description of Artificial Sequence: Synthetic oligonucleotide
cugaacagauucaugauuu

SEQ ID NO: 769986 - RNA, 19 nt, Artificial Sequence
  Description of Artificial Sequence: Synthetic oligonucleotide
uucuaggauuauauaccuu

SEQ ID NO: 769987 - RNA, 19 nt, Artificial Sequence
  Description of Artificial Sequence: Synthetic oligonucleotide
auauaccuuuugcuuugca

SEQ ID NO: 769988 - RNA, 19 nt, Artificial Sequence
  Description of Artificial Sequence: Synthetic oligonucleotide
uggcguacauugucugcag

SEQ ID NO: 769989 - RNA, 19 nt, Artificial Sequence
  Description of Artificial Sequence: Synthetic oligonucleotide
ugaaugagccgaguggguu

SEQ ID NO: 769990 - RNA, 19 nt, Artificial Sequence
  Description of Artificial Sequence: Synthetic oligonucleotide
guauucccaaacagggagc

SEQ ID NO: 769991 - RNA, 19 nt, Artificial Sequence
  Description of Artificial Sequence: Synthetic oligonucleotide
aucaaccucacgcuuuauu

SEQ ID NO: 769992 - RNA, 19 nt, Artificial Sequence
  Description of Artificial Sequence: Synthetic oligonucleotide
uugucuuaccagacccagu

SEQ ID NO: 769993 - RNA, 19 nt, Artificial Sequence
  Description of Artificial Sequence: Synthetic oligonucleotide
aaaaugcguugcugcugcu

SEQ ID NO: 769994 - RNA, 19 nt, Artificial Sequence
  Description of Artificial Sequence: Synthetic oligonucleotide
ggaccgguaguuaaugaag

SEQ ID NO: 769995 - RNA, 19 nt, Artificial Sequence
  Description of Artificial Sequence: Synthetic oligonucleotide
ccauaauucuugauagcug

SEQ ID NO: 769996 - RNA, 19 nt, Artificial Sequence
  Description of Artificial Sequence: Synthetic oligonucleotide
acaguuguagucacaacuu

SEQ ID NO: 769997 - RNA, 19 nt, Artificial Sequence
  Description of Artificial Sequence: Synthetic oligonucleotide
cuuaccagacccagucuca

SEQ ID NO: 769998 - RNA, 19 nt, Artificial Sequence
  Description of Artificial Sequence: Synthetic oligonucleotide
uguccugcgugcccagugu

SEQ ID NO: 769999 - RNA, 19 nt, Artificial Sequence
  Description of Artificial Sequence: Synthetic oligonucleotide
cagaauguguagaaugugu

SEQ ID NO: 770000 - RNA, 19 nt, Artificial Sequence
  Description of Artificial Sequence: Synthetic oligonucleotide
cagucauauacuuaagaau

SEQ ID NO: 770001 - RNA, 19 nt, Artificial Sequence
  Description of Artificial Sequence: Synthetic oligonucleotide
guuaagagagggcaauuau

SEQ ID NO: 770002 - RNA, 19 nt, Artificial Sequence
  Description of Artificial Sequence: Synthetic oligonucleotide
gguacguccagcucgccca

SEQ ID NO: 770003 - RNA, 19 nt, Artificial Sequence
  Description of Artificial Sequence: Synthetic oligonucleotide
aguaaccaaugcuuuucuu

SEQ ID NO: 770004 - RNA, 19 nt, Artificial Sequence
  Description of Artificial Sequence: Synthetic oligonucleotide
caucagcgacucuuugagc

SEQ ID NO: 770005 - RNA, 19 nt, Artificial Sequence
  Description of Artificial Sequence: Synthetic oligonucleotide
augaucgcauauacuccac

SEQ ID NO: 770006 - RNA, 19 nt, Artificial Sequence
  Description of Artificial Sequence: Synthetic oligonucleotide
guaaaaucucaggauaggu

SEQ ID NO: 770007 - RNA, 19 nt, Artificial Sequence
  Description of Artificial Sequence: Synthetic oligonucleotide
ccaugagaauaucuguagc

SEQ ID NO: 770008 - RNA, 19 nt, Artificial Sequence
  Description of Artificial Sequence: Synthetic oligonucleotide
auuacaccauaacgcucca

SEQ ID NO: 770009 - RNA, 19 nt, Artificial Sequence
  Description of Artificial Sequence: Synthetic oligonucleotide
guauggggcagguuaguaa

SEQ ID NO: 770010 - RNA, 19 nt, Artificial Sequence
  Description of Artificial Sequence: Synthetic oligonucleotide
gcguaaaaucucaggauag

SEQ ID NO: 770011 - RNA, 19 nt, Artificial Sequence
  Description of Artificial Sequence: Synthetic oligonucleotide
gaagccguuucuuuagaau

SEQ ID NO: 770012 - RNA, 19 nt, Artificial Sequence
  Description of Artificial Sequence: Synthetic oligonucleotide
uacuucgacgaggcaaaug

SEQ ID NO: 770013 - RNA, 19 nt, Artificial Sequence
  Description of Artificial Sequence: Synthetic oligonucleotide
auaccgucagucauauacu

SEQ ID NO: 770014 - RNA, 19 nt, Artificial Sequence
  Description of Artificial Sequence: Synthetic oligonucleotide
guggaaguguagaauacaa

SEQ ID NO: 770015 - RNA, 19 nt, Artificial Sequence
  Description of Artificial Sequence: Synthetic oligonucleotide
cguggggcgaacaaaacac

SEQ ID NO: 770016 - RNA, 19 nt, Artificial Sequence
  Description of Artificial Sequence: Synthetic oligonucleotide
gcacucauaacuauaaccu

SEQ ID NO: 770017 - RNA, 19 nt, Artificial Sequence
  Description of Artificial Sequence: Synthetic oligonucleotide
ggcgaacaaaacacugugg

SEQ ID NO: 770018 - RNA, 19 nt, Artificial Sequence
  Description of Artificial Sequence: Synthetic oligonucleotide
gucuaacaagaauaucugu

SEQ ID NO: 770019 - RNA, 19 nt, Artificial Sequence
  Description of Artificial Sequence: Synthetic oligonucleotide
cauauacuuaagaaugguu

SEQ ID NO: 770020 - RNA, 19 nt, Artificial Sequence
  Description of Artificial Sequence: Synthetic oligonucleotide
uuacaccauaacgcuccag

SEQ ID NO: 770021 - RNA, 19 nt, Artificial Sequence
  Description of Artificial Sequence: Synthetic oligonucleotide
agcuucacgcagcagcaua

SEQ ID NO: 770022 - RNA, 19 nt, Artificial Sequence
  Description of Artificial Sequence: Synthetic oligonucleotide
agggaccgguaguuaauga

SEQ ID NO: 770023 - RNA, 19 nt, Artificial Sequence
  Description of Artificial Sequence: Synthetic oligonucleotide
caguacuucgacgaggcaa

SEQ ID NO: 770024 - RNA, 19 nt, Artificial Sequence
  Description of Artificial Sequence: Synthetic oligonucleotide
accaaaucgucaauaccaa

SEQ ID NO: 770025 - RNA, 19 nt, Artificial Sequence
  Description of Artificial Sequence: Synthetic oligonucleotide
accgguaguuaaugaaguu

SEQ ID NO: 770026 - RNA, 19 nt, Artificial Sequence
  Description of Artificial Sequence: Synthetic oligonucleotide
aucauaauaucgaggcgua

SEQ ID NO: 770027 - RNA, 19 nt, Artificial Sequence
  Description of Artificial Sequence: Synthetic oligonucleotide
agguuaguaaacggauuaa

SEQ ID NO: 770028 - RNA, 19 nt, Artificial Sequence
  Description of Artificial Sequence: Synthetic oligonucleotide
aggaccucauuagaacagu

SEQ ID NO: 770029 - RNA, 19 nt, Artificial Sequence
  Description of Artificial Sequence: Synthetic oligonucleotide
auguguucggccaggaaua

SEQ ID NO: 770030 - RNA, 19 nt, Artificial Sequence
  Description of Artificial Sequence: Synthetic oligonucleotide
agccucaucaagaauuauu

SEQ ID NO: 770031 - RNA, 19 nt, Artificial Sequence
  Description of Artificial Sequence: Synthetic oligonucleotide
caucuaugugggcaaaucu

SEQ ID NO: 770032 - RNA, 19 nt, Artificial Sequence
  Description of Artificial Sequence: Synthetic oligonucleotide
agcauaccgucagucauau

SEQ ID NO: 770033 - RNA, 19 nt, Artificial Sequence
  Description of Artificial Sequence: Synthetic oligonucleotide
caauacaaccgauccuaaa

SEQ ID NO: 770034 - RNA, 19 nt, Artificial Sequence
  Description of Artificial Sequence: Synthetic oligonucleotide
ccaaaucgucaauaccaag

SEQ ID NO: 770035 - RNA, 19 nt, Artificial Sequence
  Description of Artificial Sequence: Synthetic oligonucleotide
uugcacuacugcagucuuc

SEQ ID NO: 770036 - RNA, 19 nt, Artificial Sequence
  Description of Artificial Sequence: Synthetic oligonucleotide
ucauaauaucgaggcguau

SEQ ID NO: 770037 - RNA, 19 nt, Artificial Sequence
  Description of Artificial Sequence: Synthetic oligonucleotide
ccgguaguuaaugaaguug

SEQ ID NO: 770038 - RNA, 19 nt, Artificial Sequence
  Description of Artificial Sequence: Synthetic oligonucleotide
gaggcaauccagcacugau

SEQ ID NO: 770039 - RNA, 19 nt, Artificial Sequence
  Description of Artificial Sequence: Synthetic oligonucleotide
guaaacggauuaaugcacu

SEQ ID NO: 770040 - RNA, 19 nt, Artificial Sequence
  Description of Artificial Sequence: Synthetic oligonucleotide
uaguugacacaaccaccuu

SEQ ID NO: 770041 - RNA, 19 nt, Artificial Sequence
  Description of Artificial Sequence: Synthetic oligonucleotide
caguaauagauaggaccuc

SEQ ID NO: 770042 - RNA, 19 nt, Artificial Sequence
  Description of Artificial Sequence: Synthetic oligonucleotide
cguaaaaucucaggauagg

SEQ ID NO: 770043 - RNA, 19 nt, Artificial Sequence
  Description of Artificial Sequence: Synthetic oligonucleotide
gugggacugacaacauagc

SEQ ID NO: 770044 - RNA, 19 nt, Artificial Sequence
  Description of Artificial Sequence: Synthetic oligonucleotide
cuggcguacauugucugca

SEQ ID NO: 770045 - RNA, 19 nt, Artificial Sequence
  Description of Artificial Sequence: Synthetic oligonucleotide
caguucgaauggcugcuuc

SEQ ID NO: 770046 - RNA, 19 nt, Artificial Sequence
  Description of Artificial Sequence: Synthetic oligonucleotide
agccguuucuuuagaauau

SEQ ID NO: 770047 - RNA, 19 nt, Artificial Sequence
  Description of Artificial Sequence: Synthetic oligonucleotide
gcagaauguguagaaugug

SEQ ID NO: 770048 - RNA, 19 nt, Artificial Sequence
  Description of Artificial Sequence: Synthetic oligonucleotide
cacugauaagcauagcguu

SEQ ID NO: 770049 - RNA, 19 nt, Artificial Sequence
  Description of Artificial Sequence: Synthetic oligonucleotide
acgcuccagaaggggaucg

SEQ ID NO: 770050 - RNA, 19 nt, Artificial Sequence
  Description of Artificial Sequence: Synthetic oligonucleotide
cacaacuugcaauaaccau

SEQ ID NO: 770051 - RNA, 19 nt, Artificial Sequence
  Description of Artificial Sequence: Synthetic oligonucleotide
gauagguauuauccugcau

SEQ ID NO: 770052 - RNA, 19 nt, Artificial Sequence
  Description of Artificial Sequence: Synthetic oligonucleotide
ggauaacaguucgaauggc

SEQ ID NO: 770053 - RNA, 19 nt, Artificial Sequence
  Description of Artificial Sequence: Synthetic oligonucleotide
acgaggcaaaugaaaucug

SEQ ID NO: 770054 - RNA, 19 nt, Artificial Sequence
  Description of Artificial Sequence: Synthetic oligonucleotide
auccaucucaucagcgacu

SEQ ID NO: 770055 - RNA, 19 nt, Artificial Sequence
  Description of Artificial Sequence: Synthetic oligonucleotide
gaccgguaguuaaugaagu

SEQ ID NO: 770056 - RNA, 19 nt, Artificial Sequence
  Description of Artificial Sequence: Synthetic oligonucleotide
agcuuuuagaggaggcaau

SEQ ID NO: 770057 - RNA, 19 nt, Artificial Sequence
  Description of Artificial Sequence: Synthetic oligonucleotide
ccgucagucauauacuuaa

SEQ ID NO: 770058 - RNA, 19 nt, Artificial Sequence
  Description of Artificial Sequence: Synthetic oligonucleotide
agaauacaauggaaugauu

SEQ ID NO: 770059 - RNA, 19 nt, Artificial Sequence
  Description of Artificial Sequence: Synthetic oligonucleotide
gguggaaguguagaauaca

SEQ ID NO: 770060 - RNA, 19 nt, Artificial Sequence
  Description of Artificial Sequence: Synthetic oligonucleotide
aucgaggcguauggggcag

SEQ ID NO: 770061 - RNA, 19 nt, Artificial Sequence
  Description of Artificial Sequence: Synthetic oligonucleotide
ggaucguucauagcuucac

SEQ ID NO: 770062 - RNA, 19 nt, Artificial Sequence
  Description of Artificial Sequence: Synthetic oligonucleotide
caaccucacgcuuuauucu

SEQ ID NO: 770063 - RNA, 19 nt, Artificial Sequence
  Description of Artificial Sequence: Synthetic oligonucleotide
cagggaccgguaguuaaug

SEQ ID NO: 770064 - RNA, 19 nt, Artificial Sequence
  Description of Artificial Sequence: Synthetic oligonucleotide
ugagccgaguggguugagu

SEQ ID NO: 770065 - RNA, 19 nt, Artificial Sequence
  Description of Artificial Sequence: Synthetic oligonucleotide
gacugaugucuaacaagaa

SEQ ID NO: 770066 - RNA, 19 nt, Artificial Sequence
  Description of Artificial Sequence: Synthetic oligonucleotide
gggaccgguaguuaaugaa

SEQ ID NO: 770067 - RNA, 19 nt, Artificial Sequence
  Description of Artificial Sequence: Synthetic oligonucleotide
gcuggcguacauugucugc

SEQ ID NO: 770068 - RNA, 19 nt, Artificial Sequence
  Description of Artificial Sequence: Synthetic oligonucleotide
gcuuuacuaauugcuguca

SEQ ID NO: 770069 - RNA, 19 nt, Artificial Sequence
  Description of Artificial Sequence: Synthetic oligonucleotide
ugcccaguguguguugaau

SEQ ID NO: 770070 - RNA, 19 nt, Artificial Sequence
  Description of Artificial Sequence: Synthetic oligonucleotide
gcuuuuagaggaggcaauc

SEQ ID NO: 770071 - RNA, 19 nt, Artificial Sequence
  Description of Artificial Sequence: Synthetic oligonucleotide
ggggaucguucauagcuuc

SEQ ID NO: 770072 - RNA, 19 nt, Artificial Sequence
  Description of Artificial Sequence: Synthetic oligonucleotide
guccugcgugcccagugug

SEQ ID NO: 770073 - RNA, 19 nt, Artificial Sequence
  Description of Artificial Sequence: Synthetic oligonucleotide
gagacucaacucugauucu

SEQ ID NO: 770074 - RNA, 19 nt, Artificial Sequence
  Description of Artificial Sequence: Synthetic oligonucleotide
auucccaaacagggagcug

SEQ ID NO: 770075 - RNA, 19 nt, Artificial Sequence
  Description of Artificial Sequence: Synthetic oligonucleotide
cuucgacgaggcaaaugaa

SEQ ID NO: 770076 - RNA, 19 nt, Artificial Sequence
  Description of Artificial Sequence: Synthetic oligonucleotide
cugcagucuucaaaucgaa

SEQ ID NO: 770077 - RNA, 19 nt, Artificial Sequence
  Description of Artificial Sequence: Synthetic oligonucleotide
ggcguauggggcagguuag

SEQ ID NO: 770078 - RNA, 19 nt, Artificial Sequence
  Description of Artificial Sequence: Synthetic oligonucleotide
caacucugauucuaggauu

SEQ ID NO: 770079 - RNA, 19 nt, Artificial Sequence
  Description of Artificial Sequence: Synthetic oligonucleotide
cggauuaaugcacugugga

SEQ ID NO: 770080 - RNA, 19 nt, Artificial Sequence
  Description of Artificial Sequence: Synthetic oligonucleotide
guaaagccggaagcauuuc

SEQ ID NO: 770081 - RNA, 19 nt, Artificial Sequence
  Description of Artificial Sequence: Synthetic oligonucleotide
uuagcgagcuguggaucua

SEQ ID NO: 770082 - RNA, 19 nt, Artificial Sequence
  Description of Artificial Sequence: Synthetic oligonucleotide
aucucaggauagguauuau

SEQ ID NO: 770083 - RNA, 19 nt, Artificial Sequence
  Description of Artificial Sequence: Synthetic oligonucleotide
gcacugauaagcauagcgu

SEQ ID NO: 770084 - RNA, 19 nt, Artificial Sequence
  Description of Artificial Sequence: Synthetic oligonucleotide
auggaguauccaacuuccu

SEQ ID NO: 770085 - RNA, 19 nt, Artificial Sequence
  Description of Artificial Sequence: Synthetic oligonucleotide
ucgaggcguauggggcagg

SEQ ID NO: 770086 - RNA, 19 nt, Artificial Sequence
  Description of Artificial Sequence: Synthetic oligonucleotide
accuauccuuguauuccca

SEQ ID NO: 770087 - RNA, 19 nt, Artificial Sequence
  Description of Artificial Sequence: Synthetic oligonucleotide
aggcaauccagcacugaua

SEQ ID NO: 770088 - RNA, 19 nt, Artificial Sequence
  Description of Artificial Sequence: Synthetic oligonucleotide
cagcaucuaggguagcacu

SEQ ID NO: 770089 - RNA, 19 nt, Artificial Sequence
  Description of Artificial Sequence: Synthetic oligonucleotide
gggcagguuaguaaacgga

SEQ ID NO: 770090 - RNA, 19 nt, Artificial Sequence
  Description of Artificial Sequence: Synthetic oligonucleotide
cagcauaccgucagucaua

SEQ ID NO: 770091 - RNA, 19 nt, Artificial Sequence
  Description of Artificial Sequence: Synthetic oligonucleotide
ccaucuaugugggcaaauc

SEQ ID NO: 770092 - RNA, 19 nt, Artificial Sequence
  Description of Artificial Sequence: Synthetic oligonucleotide
gguuaguaaacggauuaau

SEQ ID NO: 770093 - RNA, 19 nt, Artificial Sequence
  Description of Artificial Sequence: Synthetic oligonucleotide
aggggaucguucauagcuu

SEQ ID NO: 770094 - RNA, 19 nt, Artificial Sequence
  Description of Artificial Sequence: Synthetic oligonucleotide
cuaugugggcaaaucucau

SEQ ID NO: 770095 - RNA, 19 nt, Artificial Sequence
  Description of Artificial Sequence: Synthetic oligonucleotide
accgucagucauauacuua

SEQ ID NO: 770096 - RNA, 19 nt, Artificial Sequence
  Description of Artificial Sequence: Synthetic oligonucleotide
cauagcguugguggaagcu

SEQ ID NO: 770097 - RNA, 19 nt, Artificial Sequence
  Description of Artificial Sequence: Synthetic oligonucleotide
guaauagauaggaccucau

SEQ ID NO: 770098 - RNA, 19 nt, Artificial Sequence
  Description of Artificial Sequence: Synthetic oligonucleotide
cagcucgcccagcucuuug

SEQ ID NO: 770099 - RNA, 19 nt, Artificial Sequence
  Description of Artificial Sequence: Synthetic oligonucleotide
auccuaaauuagagcguaa

SEQ ID NO: 770100 - RNA, 19 nt, Artificial Sequence
  Description of Artificial Sequence: Synthetic oligonucleotide
gcagcauaccgucagucau

SEQ ID NO: 770101 - RNA, 19 nt, Artificial Sequence
  Description of Artificial Sequence: Synthetic oligonucleotide
gcaucuaggguagcacuca

SEQ ID NO: 770102 - RNA, 19 nt, Artificial Sequence
  Description of Artificial Sequence: Synthetic oligonucleotide
cgacgaggcaaaugaaauc

SEQ ID NO: 770103 - RNA, 19 nt, Artificial Sequence
  Description of Artificial Sequence: Synthetic oligonucleotide
gcauagcguugguggaagc

SEQ ID NO: 770104 - RNA, 19 nt, Artificial Sequence
  Description of Artificial Sequence: Synthetic oligonucleotide
ggcagguuaguaaacggau

SEQ ID NO: 770105 - RNA, 19 nt, Artificial Sequence
  Description of Artificial Sequence: Synthetic oligonucleotide
ggcguacauugucugcaga

SEQ ID NO: 770106 - RNA, 19 nt, Artificial Sequence
  Description of Artificial Sequence: Synthetic oligonucleotide
gggcccaaaucaucaaccu

SEQ ID NO: 770107 - RNA, 19 nt, Artificial Sequence
  Description of Artificial Sequence: Synthetic oligonucleotide
agcugcuggcguacauugu

SEQ ID NO: 770108 - RNA, 19 nt, Artificial Sequence
  Description of Artificial Sequence: Synthetic oligonucleotide
agcgagcuguggaucuaga

SEQ ID NO: 770109 - RNA, 19 nt, Artificial Sequence
  Description of Artificial Sequence: Synthetic oligonucleotide
gggaucguucauagcuuca

SEQ ID NO: 770110 - RNA, 19 nt, Artificial Sequence
  Description of Artificial Sequence: Synthetic oligonucleotide
guggggcgaacaaaacacu

SEQ ID NO: 770111 - RNA, 19 nt, Artificial Sequence
  Description of Artificial Sequence: Synthetic oligonucleotide
ggggcgaacaaaacacugu

SEQ ID NO: 770112 - RNA, 19 nt, Artificial Sequence
  Description of Artificial Sequence: Synthetic oligonucleotide
gcaauacaaccgauccuaa

SEQ ID NO: 770113 - RNA, 19 nt, Artificial Sequence
  Description of Artificial Sequence: Synthetic oligonucleotide
augagccgaguggguugag

SEQ ID NO: 770114 - RNA, 19 nt, Artificial Sequence
  Description of Artificial Sequence: Synthetic oligonucleotide
cugguacguccagcucgcc

SEQ ID NO: 770115 - RNA, 19 nt, Artificial Sequence
  Description of Artificial Sequence: Synthetic oligonucleotide
caucuaggguagcacucau

SEQ ID NO: 770116 - RNA, 19 nt, Artificial Sequence
  Description of Artificial Sequence: Synthetic oligonucleotide
caucagggaccgguaguua

SEQ ID NO: 770117 - RNA, 19 nt, Artificial Sequence
  Description of Artificial Sequence: Synthetic oligonucleotide
cgauccuaaauuagagcgu

SEQ ID NO: 770118 - RNA, 19 nt, Artificial Sequence
  Description of Artificial Sequence: Synthetic oligonucleotide
guguucggccaggaauagu

SEQ ID NO: 770119 - RNA, 19 nt, Artificial Sequence
  Description of Artificial Sequence: Synthetic oligonucleotide
ccguucucuaucuccucua

SEQ ID NO: 770120 - RNA, 19 nt, Artificial Sequence
  Description of Artificial Sequence: Synthetic oligonucleotide
cugcgugcccagugugugu

SEQ ID NO: 770121 - RNA, 19 nt, Artificial Sequence
  Description of Artificial Sequence: Synthetic oligonucleotide
cccgggucugguacgucca

SEQ ID NO: 770122 - RNA, 19 nt, Artificial Sequence
  Description of Artificial Sequence: Synthetic oligonucleotide
ggaccucauuagaacaguu

SEQ ID NO: 770123 - RNA, 19 nt, Artificial Sequence
  Description of Artificial Sequence: Synthetic oligonucleotide
guacuucgacgaggcaaau

SEQ ID NO: 770124 - RNA, 19 nt, Artificial Sequence
  Description of Artificial Sequence: Synthetic oligonucleotide
gaggcguauggggcagguu

SEQ ID NO: 770125 - RNA, 19 nt, Artificial Sequence
  Description of Artificial Sequence: Synthetic oligonucleotide
cguauggggcagguuagua

SEQ ID NO: 770126 - RNA, 19 nt, Artificial Sequence
  Description of Artificial Sequence: Synthetic oligonucleotide
ccggaagcauuucccgggu

SEQ ID NO: 770127 - RNA, 19 nt, Artificial Sequence
  Description of Artificial Sequence: Synthetic oligonucleotide
gcauaccgucagucauaua

SEQ ID NO: 770128 - RNA, 19 nt, Artificial Sequence
  Description of Artificial Sequence: Synthetic oligonucleotide
gcguauggggcagguuagu

SEQ ID NO: 770129 - RNA, 19 nt, Artificial Sequence
  Description of Artificial Sequence: Synthetic oligonucleotide
cgaggcguauggggcaggu

SEQ ID NO: 770130 - RNA, 19 nt, Artificial Sequence
  Description of Artificial Sequence: Synthetic oligonucleotide
aaaucaaacuaucucuucc

SEQ ID NO: 770131 - RNA, 19 nt, Artificial Sequence
  Description of Artificial Sequence: Synthetic oligonucleotide
ugaacaauagcuuucaucu

SEQ ID NO: 770132 - RNA, 19 nt, Artificial Sequence
  Description of Artificial Sequence: Synthetic oligonucleotide
aauuugacgacucccauag

SEQ ID NO: 770133 - RNA, 19 nt, Artificial Sequence
  Description of Artificial Sequence: Synthetic oligonucleotide
uguaaagcgaagcuuauga

SEQ ID NO: 770134 - RNA, 19 nt, Artificial Sequence
  Description of Artificial Sequence: Synthetic oligonucleotide
uggaucaaguuauagaugc

SEQ ID NO: 770135 - RNA, 19 nt, Artificial Sequence
  Description of Artificial Sequence: Synthetic oligonucleotide
uuggugagaacauaaguag

SEQ ID NO: 770136 - RNA, 19 nt, Artificial Sequence
  Description of Artificial Sequence: Synthetic oligonucleotide
uguguaucuacacacugcc

SEQ ID NO: 770137 - RNA, 19 nt, Artificial Sequence
  Description of Artificial Sequence: Synthetic oligonucleotide
ggaguaaucagauccaugg

SEQ ID NO: 770138 - RNA, 19 nt, Artificial Sequence
  Description of Artificial Sequence: Synthetic oligonucleotide
cugcuuaugaucuuacugg

SEQ ID NO: 770139 - RNA, 19 nt, Artificial Sequence
  Description of Artificial Sequence: Synthetic oligonucleotide
ugagagucaaacauagccc

SEQ ID NO: 770140 - RNA, 19 nt, Artificial Sequence
  Description of Artificial Sequence: Synthetic oligonucleotide
ucuuuaccaagcuuaaacc

SEQ ID NO: 770141 - RNA, 19 nt, Artificial Sequence
  Description of Artificial Sequence: Synthetic oligonucleotide
uuauagaugcccaccauga

SEQ ID NO: 770142 - RNA, 19 nt, Artificial Sequence
  Description of Artificial Sequence: Synthetic oligonucleotide
uuaaagcccauaaggauca

SEQ ID NO: 770143 - RNA, 19 nt, Artificial Sequence
  Description of Artificial Sequence: Synthetic oligonucleotide
cauauccaaagcaagggcc

SEQ ID NO: 770144 - RNA, 19 nt, Artificial Sequence
  Description of Artificial Sequence: Synthetic oligonucleotide
aagcuuaaaccuuaaccug

SEQ ID NO: 770145 - RNA, 19 nt, Artificial Sequence
  Description of Artificial Sequence: Synthetic oligonucleotide
uagacaagcucuuuaaacu

SEQ ID NO: 770146 - RNA, 19 nt, Artificial Sequence
  Description of Artificial Sequence: Synthetic oligonucleotide
uuugacgacucccauaggu

SEQ ID NO: 770147 - RNA, 19 nt, Artificial Sequence
  Description of Artificial Sequence: Synthetic oligonucleotide
aagguguaacuucaucuuc

SEQ ID NO: 770148 - RNA, 19 nt, Artificial Sequence
  Description of Artificial Sequence: Synthetic oligonucleotide
aaacccggcucaucaaacc

SEQ ID NO: 770149 - RNA, 19 nt, Artificial Sequence
  Description of Artificial Sequence: Synthetic oligonucleotide
aaagcgaagcuuaugaaca

SEQ ID NO: 770150 - RNA, 19 nt, Artificial Sequence
  Description of Artificial Sequence: Synthetic oligonucleotide
uucucuagcacaauuugac

SEQ ID NO: 770151 - RNA, 19 nt, Artificial Sequence
  Description of Artificial Sequence: Synthetic oligonucleotide
uucucgguaccauagaaca

SEQ ID NO: 770152 - RNA, 19 nt, Artificial Sequence
  Description of Artificial Sequence: Synthetic oligonucleotide
ugucagaucuaccacuugc

SEQ ID NO: 770153 - RNA, 19 nt, Artificial Sequence
  Description of Artificial Sequence: Synthetic oligonucleotide
uguaucuacacacugccau

SEQ ID NO: 770154 - RNA, 19 nt, Artificial Sequence
  Description of Artificial Sequence: Synthetic oligonucleotide
aagcccauaaggaucaaac

SEQ ID NO: 770155 - RNA, 19 nt, Artificial Sequence
  Description of Artificial Sequence: Synthetic oligonucleotide
cuuaaagcccauaaggauc

SEQ ID NO: 770156 - RNA, 19 nt, Artificial Sequence
  Description of Artificial Sequence: Synthetic oligonucleotide
ucucgauagagccucacug

SEQ ID NO: 770157 - RNA, 19 nt, Artificial Sequence
  Description of Artificial Sequence: Synthetic oligonucleotide
uugugacucaucuugaccu

SEQ ID NO: 770158 - RNA, 19 nt, Artificial Sequence
  Description of Artificial Sequence: Synthetic oligonucleotide
ucacuuaaggaguaaucag

SEQ ID NO: 770159 - RNA, 19 nt, Artificial Sequence
  Description of Artificial Sequence: Synthetic oligonucleotide
uuuucccucaggauuauac

SEQ ID NO: 770160 - RNA, 19 nt, Artificial Sequence
  Description of Artificial Sequence: Synthetic oligonucleotide
uggugagaacauaaguagg

SEQ ID NO: 770161 - RNA, 19 nt, Artificial Sequence
  Description of Artificial Sequence: Synthetic oligonucleotide
agaucuaccacuugcucag

SEQ ID NO: 770162 - RNA, 19 nt, Artificial Sequence
  Description of Artificial Sequence: Synthetic oligonucleotide
agacaagcucuuuaaacuc

SEQ ID NO: 770163 - RNA, 19 nt, Artificial Sequence
  Description of Artificial Sequence: Synthetic oligonucleotide
aguaaagggcaccuuccgc

SEQ ID NO: 770164 - RNA, 19 nt, Artificial Sequence
  Description of Artificial Sequence: Synthetic oligonucleotide
caaacauagcccuggaggc

SEQ ID NO: 770165 - RNA, 19 nt, Artificial Sequence
  Description of Artificial Sequence: Synthetic oligonucleotide
ugacauguugguuugcuca

SEQ ID NO: 770166 - RNA, 19 nt, Artificial Sequence
  Description of Artificial Sequence: Synthetic oligonucleotide
gaagaucccagugucacgg

SEQ ID NO: 770167 - RNA, 19 nt, Artificial Sequence
  Description of Artificial Sequence: Synthetic oligonucleotide
aaguuauagaugcccacca

SEQ ID NO: 770168 - RNA, 19 nt, Artificial Sequence
  Description of Artificial Sequence: Synthetic oligonucleotide
gauaacucuaccuugggcu

SEQ ID NO: 770169 - RNA, 19 nt, Artificial Sequence
  Description of Artificial Sequence: Synthetic oligonucleotide
aacauaaguagguggucug

SEQ ID NO: 770170 - RNA, 19 nt, Artificial Sequence
  Description of Artificial Sequence: Synthetic oligonucleotide
auaaggaucaaacccggcu

SEQ ID NO: 770171 - RNA, 19 nt, Artificial Sequence
  Description of Artificial Sequence: Synthetic oligonucleotide
uacgucuuuaccaagcuua

SEQ ID NO: 770172 - RNA, 19 nt, Artificial Sequence
  Description of Artificial Sequence: Synthetic oligonucleotide
uuauccaacucuuguaaga

SEQ ID NO: 770173 - RNA, 19 nt, Artificial Sequence
  Description of Artificial Sequence: Synthetic oligonucleotide
aacuggucaagcucuagca

SEQ ID NO: 770174 - RNA, 19 nt, Artificial Sequence
  Description of Artificial Sequence: Synthetic oligonucleotide
uccugaauauuuauauucu

SEQ ID NO: 770175 - RNA, 19 nt, Artificial Sequence
  Description of Artificial Sequence: Synthetic oligonucleotide
ucucuagcacaauuugacg

SEQ ID NO: 770176 - RNA, 19 nt, Artificial Sequence
  Description of Artificial Sequence: Synthetic oligonucleotide
agcccauaaggaucaaacc

SEQ ID NO: 770177 - RNA, 19 nt, Artificial Sequence
  Description of Artificial Sequence: Synthetic oligonucleotide
aacccggcucaucaaaccg

SEQ ID NO: 770178 - RNA, 19 nt, Artificial Sequence
  Description of Artificial Sequence: Synthetic oligonucleotide
ugagcucccguuuaccagg

SEQ ID NO: 770179 - RNA, 19 nt, Artificial Sequence
  Description of Artificial Sequence: Synthetic oligonucleotide
cuagcacacguuuagcacc

SEQ ID NO: 770180 - RNA, 19 nt, Artificial Sequence
  Description of Artificial Sequence: Synthetic oligonucleotide
agcacaauuugacgacucc

SEQ ID NO: 770181 - RNA, 19 nt, Artificial Sequence
  Description of Artificial Sequence: Synthetic oligonucleotide
uaaggaguaaucagaucca

SEQ ID NO: 770182 - RNA, 19 nt, Artificial Sequence
  Description of Artificial Sequence: Synthetic oligonucleotide
guuugguaucacuaggcag

SEQ ID NO: 770183 - RNA, 19 nt, Artificial Sequence
  Description of Artificial Sequence: Synthetic oligonucleotide
guuauagaugcccaccaug

SEQ ID NO: 770184 - RNA, 19 nt, Artificial Sequence
  Description of Artificial Sequence: Synthetic oligonucleotide
uggauucucaaaacuguca

SEQ ID NO: 770185 - RNA, 19 nt, Artificial Sequence
  Description of Artificial Sequence: Synthetic oligonucleotide
cuuguuagcuuucuggauc

SEQ ID NO: 770186 - RNA, 19 nt, Artificial Sequence
  Description of Artificial Sequence: Synthetic oligonucleotide
gggcuuaaagcccauaagg

SEQ ID NO: 770187 - RNA, 19 nt, Artificial Sequence
  Description of Artificial Sequence: Synthetic oligonucleotide
uccacucuuaagcccauag

SEQ ID NO: 770188 - RNA, 19 nt, Artificial Sequence
  Description of Artificial Sequence: Synthetic oligonucleotide
uaaggaucaaacccggcuc

SEQ ID NO: 770189 - RNA, 19 nt, Artificial Sequence
  Description of Artificial Sequence: Synthetic oligonucleotide
cucgauagagccucacugg

SEQ ID NO: 770190 - RNA, 19 nt, Artificial Sequence
  Description of Artificial Sequence: Synthetic oligonucleotide
ucuagcacacguuuagcac

SEQ ID NO: 770191 - RNA, 19 nt, Artificial Sequence
  Description of Artificial Sequence: Synthetic oligonucleotide
ccaagcuuaaaccuuaacc

SEQ ID NO: 770192 - RNA, 19 nt, Artificial Sequence
  Description of Artificial Sequence: Synthetic oligonucleotide
caagcuuaaaccuuaaccu

SEQ ID NO: 770193 - RNA, 19 nt, Artificial Sequence
  Description of Artificial Sequence: Synthetic oligonucleotide
agcuuaaaccuuaaccugg

SEQ ID NO: 770194 - RNA, 19 nt, Artificial Sequence
  Description of Artificial Sequence: Synthetic oligonucleotide
uuucccucaggauuauacc

SEQ ID NO: 770195 - RNA, 19 nt, Artificial Sequence
  Description of Artificial Sequence: Synthetic oligonucleotide
aaggaucaaacccggcuca

SEQ ID NO: 770196 - RNA, 19 nt, Artificial Sequence
  Description of Artificial Sequence: Synthetic oligonucleotide
cuugugacucaucuugacc

SEQ ID NO: 770197 - RNA, 19 nt, Artificial Sequence
  Description of Artificial Sequence: Synthetic oligonucleotide
cuguugucccuuaaacugg

SEQ ID NO: 770198 - RNA, 19 nt, Artificial Sequence
  Description of Artificial Sequence: Synthetic oligonucleotide
ugcuacgucuuuaccaagc

SEQ ID NO: 770199 - RNA, 19 nt, Artificial Sequence
  Description of Artificial Sequence: Synthetic oligonucleotide
uuucucgguaccauagaac

SEQ ID NO: 770200 - RNA, 19 nt, Artificial Sequence
  Description of Artificial Sequence: Synthetic oligonucleotide
gaucaaacccggcucauca

SEQ ID NO: 770201 - RNA, 19 nt, Artificial Sequence
  Description of Artificial Sequence: Synthetic oligonucleotide
gagucaaacauagcccugg

SEQ ID NO: 770202 - RNA, 19 nt, Artificial Sequence
  Description of Artificial Sequence: Synthetic oligonucleotide
accguuugguaucacuagg

SEQ ID NO: 770203 - RNA, 19 nt, Artificial Sequence
  Description of Artificial Sequence: Synthetic oligonucleotide
uccuguauguaaagcgaag

SEQ ID NO: 770204 - RNA, 19 nt, Artificial Sequence
  Description of Artificial Sequence: Synthetic oligonucleotide
agcucuagcacacguuuag

SEQ ID NO: 770205 - RNA, 19 nt, Artificial Sequence
  Description of Artificial Sequence: Synthetic oligonucleotide
uucgggauguguaucuaca

SEQ ID NO: 770206 - RNA, 19 nt, Artificial Sequence
  Description of Artificial Sequence: Synthetic oligonucleotide
cucgguaccauagaacacc

SEQ ID NO: 770207 - RNA, 19 nt, Artificial Sequence
  Description of Artificial Sequence: Synthetic oligonucleotide
agugcuacgucuuuaccaa

SEQ ID NO: 770208 - RNA, 19 nt, Artificial Sequence
  Description of Artificial Sequence: Synthetic oligonucleotide
ucgauagagccucacugga

SEQ ID NO: 770209 - RNA, 19 nt, Artificial Sequence
  Description of Artificial Sequence: Synthetic oligonucleotide
uuaccaagcuuaaaccuua

SEQ ID NO: 770210 - RNA, 19 nt, Artificial Sequence
  Description of Artificial Sequence: Synthetic oligonucleotide
uuagcuugcccagugugcc

SEQ ID NO: 770211 - RNA, 19 nt, Artificial Sequence
  Description of Artificial Sequence: Synthetic oligonucleotide
uguuucucgauagagccuc

SEQ ID NO: 770212 - RNA, 19 nt, Artificial Sequence
  Description of Artificial Sequence: Synthetic oligonucleotide
uucgguccacucuuaagcc

SEQ ID NO: 770213 - RNA, 19 nt, Artificial Sequence
  Description of Artificial Sequence: Synthetic oligonucleotide
cccauaaggaucaaacccg

SEQ ID NO: 770214 - RNA, 19 nt, Artificial Sequence
  Description of Artificial Sequence: Synthetic oligonucleotide
ucuuucgggauguguaucu

SEQ ID NO: 770215 - RNA, 19 nt, Artificial Sequence
  Description of Artificial Sequence: Synthetic oligonucleotide
aacaagguugagcucccgu

SEQ ID NO: 770216 - RNA, 19 nt, Artificial Sequence
  Description of Artificial Sequence: Synthetic oligonucleotide
ucucgguugcugcuuauga

SEQ ID NO: 770217 - RNA, 19 nt, Artificial Sequence
  Description of Artificial Sequence: Synthetic oligonucleotide
uauccaacucuuguaagac

SEQ ID NO: 770218 - RNA, 19 nt, Artificial Sequence
  Description of Artificial Sequence: Synthetic oligonucleotide
uguauguaaagcgaagcuu

SEQ ID NO: 770219 - RNA, 19 nt, Artificial Sequence
  Description of Artificial Sequence: Synthetic oligonucleotide
cacacguuuagcaccuggg

SEQ ID NO: 770220 - RNA, 19 nt, Artificial Sequence
  Description of Artificial Sequence: Synthetic oligonucleotide
gacgucacugaagagguug

SEQ ID NO: 770221 - RNA, 19 nt, Artificial Sequence
  Description of Artificial Sequence: Synthetic oligonucleotide
gguuugcucacuuugcagc

SEQ ID NO: 770222 - RNA, 19 nt, Artificial Sequence
  Description of Artificial Sequence: Synthetic oligonucleotide
uucucaaaacugucacucc

SEQ ID NO: 770223 - RNA, 19 nt, Artificial Sequence
  Description of Artificial Sequence: Synthetic oligonucleotide
cuaccacuugcucagacuc

SEQ ID NO: 770224 - RNA, 19 nt, Artificial Sequence
  Description of Artificial Sequence: Synthetic oligonucleotide
ugacgacucccauaggucu

SEQ ID NO: 770225 - RNA, 19 nt, Artificial Sequence
  Description of Artificial Sequence: Synthetic oligonucleotide
gaccguuugguaucacuag

SEQ ID NO: 770226 - RNA, 19 nt, Artificial Sequence
  Description of Artificial Sequence: Synthetic oligonucleotide
gcccauaaggaucaaaccc

SEQ ID NO: 770227 - RNA, 19 nt, Artificial Sequence
  Description of Artificial Sequence: Synthetic oligonucleotide
uugagcucccguuuaccag

SEQ ID NO: 770228 - RNA, 19 nt, Artificial Sequence
  Description of Artificial Sequence: Synthetic oligonucleotide
ugaucuuacugguguacac

SEQ ID NO: 770229 - RNA, 19 nt, Artificial Sequence
  Description of Artificial Sequence: Synthetic oligonucleotide
cucacccucgguuuuguag

SEQ ID NO: 770230 - RNA, 19 nt, Artificial Sequence
  Description of Artificial Sequence: Synthetic oligonucleotide
aucaaaagguguaacuuca

SEQ ID NO: 770231 - RNA, 19 nt, Artificial Sequence
  Description of Artificial Sequence: Synthetic oligonucleotide
agggcuuaaagcccauaag

SEQ ID NO: 770232 - RNA, 19 nt, Artificial Sequence
  Description of Artificial Sequence: Synthetic oligonucleotide
cuuaugaucuuacuggugu

SEQ ID NO: 770233 - RNA, 19 nt, Artificial Sequence
  Description of Artificial Sequence: Synthetic oligonucleotide
ucuucgguccacucuuaag

SEQ ID NO: 770234 - RNA, 19 nt, Artificial Sequence
  Description of Artificial Sequence: Synthetic oligonucleotide
ucgguugcugcuuaugauc

SEQ ID NO: 770235 - RNA, 19 nt, Artificial Sequence
  Description of Artificial Sequence: Synthetic oligonucleotide
acaguuagcuugcccagug

SEQ ID NO: 770236 - RNA, 19 nt, Artificial Sequence
  Description of Artificial Sequence: Synthetic oligonucleotide
uugacgacucccauagguc

SEQ ID NO: 770237 - RNA, 19 nt, Artificial Sequence
  Description of Artificial Sequence: Synthetic oligonucleotide
uaugaucuuacugguguac

SEQ ID NO: 770238 - RNA, 19 nt, Artificial Sequence
  Description of Artificial Sequence: Synthetic oligonucleotide
uaucuacacacugccauga

SEQ ID NO: 770239 - RNA, 19 nt, Artificial Sequence
  Description of Artificial Sequence: Synthetic oligonucleotide
cuuaaccuggacaguacuc

SEQ ID NO: 770240 - RNA, 19 nt, Artificial Sequence
  Description of Artificial Sequence: Synthetic oligonucleotide
accaagcuuaaaccuuaac

SEQ ID NO: 770241 - RNA, 19 nt, Artificial Sequence
  Description of Artificial Sequence: Synthetic oligonucleotide
gggauguguaucuacacac

SEQ ID NO: 770242 - RNA, 19 nt, Artificial Sequence
  Description of Artificial Sequence: Synthetic oligonucleotide
agcacuucacuuaaggagu

SEQ ID NO: 770243 - RNA, 19 nt, Artificial Sequence
  Description of Artificial Sequence: Synthetic oligonucleotide
ucuaccacuugcucagacu

SEQ ID NO: 770244 - RNA, 19 nt, Artificial Sequence
  Description of Artificial Sequence: Synthetic oligonucleotide
gagagucaaacauagcccu

SEQ ID NO: 770245 - RNA, 19 nt, Artificial Sequence
  Description of Artificial Sequence: Synthetic oligonucleotide
uguugucccuuaaacuggu

SEQ ID NO: 770246 - RNA, 19 nt, Artificial Sequence
  Description of Artificial Sequence: Synthetic oligonucleotide
acauaaguagguggucugg

SEQ ID NO: 770247 - RNA, 19 nt, Artificial Sequence
  Description of Artificial Sequence: Synthetic oligonucleotide
caaacuaucucuuccugaa

SEQ ID NO: 770248 - RNA, 19 nt, Artificial Sequence
  Description of Artificial Sequence: Synthetic oligonucleotide
acguuuagcaccuggguua

SEQ ID NO: 770249 - RNA, 19 nt, Artificial Sequence
  Description of Artificial Sequence: Synthetic oligonucleotide
uucacccugagagucaaac

SEQ ID NO: 770250 - RNA, 19 nt, Artificial Sequence
  Description of Artificial Sequence: Synthetic oligonucleotide
guaucuacacacugccaug

SEQ ID NO: 770251 - RNA, 19 nt, Artificial Sequence
  Description of Artificial Sequence: Synthetic oligonucleotide
ugugacucaucuugaccug

SEQ ID NO: 770252 - RNA, 19 nt, Artificial Sequence
  Description of Artificial Sequence: Synthetic oligonucleotide
uaggauucccacccugaca

SEQ ID NO: 770253 - RNA, 19 nt, Artificial Sequence
  Description of Artificial Sequence: Synthetic oligonucleotide
gaaggcgggcaccacgucc

SEQ ID NO: 770254 - RNA, 19 nt, Artificial Sequence
  Description of Artificial Sequence: Synthetic oligonucleotide
cuuaaggaguaaucagauc

SEQ ID NO: 770255 - RNA, 19 nt, Artificial Sequence
  Description of Artificial Sequence: Synthetic oligonucleotide
uaguaggauucccacccug

SEQ ID NO: 770256 - RNA, 19 nt, Artificial Sequence
  Description of Artificial Sequence: Synthetic oligonucleotide
uaaccuggacaguacucgc

SEQ ID NO: 770257 - RNA, 19 nt, Artificial Sequence
  Description of Artificial Sequence: Synthetic oligonucleotide
auuaaaaguccuagucuug

SEQ ID NO: 770258 - RNA, 19 nt, Artificial Sequence
  Description of Artificial Sequence: Synthetic oligonucleotide
cacaauuugacgacuccca

SEQ ID NO: 770259 - RNA, 19 nt, Artificial Sequence
  Description of Artificial Sequence: Synthetic oligonucleotide
cauaaguagguggucuggc

SEQ ID NO: 770260 - RNA, 19 nt, Artificial Sequence
  Description of Artificial Sequence: Synthetic oligonucleotide
ucgguaccauagaacacca

SEQ ID NO: 770261 - RNA, 19 nt, Artificial Sequence
  Description of Artificial Sequence: Synthetic oligonucleotide
ucauuagcuuugguccugg

SEQ ID NO: 770262 - RNA, 19 nt, Artificial Sequence
  Description of Artificial Sequence: Synthetic oligonucleotide
uuguuucucgauagagccu

SEQ ID NO: 770263 - RNA, 19 nt, Artificial Sequence
  Description of Artificial Sequence: Synthetic oligonucleotide
guauguaaagcgaagcuua

SEQ ID NO: 770264 - RNA, 19 nt, Artificial Sequence
  Description of Artificial Sequence: Synthetic oligonucleotide
ucccuuaaacuggucaagc

SEQ ID NO: 770265 - RNA, 19 nt, Artificial Sequence
  Description of Artificial Sequence: Synthetic oligonucleotide
uucucgauagagccucacu

SEQ ID NO: 770266 - RNA, 19 nt, Artificial Sequence
  Description of Artificial Sequence: Synthetic oligonucleotide
cauaaggaucaaacccggc

SEQ ID NO: 770267 - RNA, 19 nt, Artificial Sequence
  Description of Artificial Sequence: Synthetic oligonucleotide
uagcacacguuuagcaccu

SEQ ID NO: 770268 - RNA, 19 nt, Artificial Sequence
  Description of Artificial Sequence: Synthetic oligonucleotide
acacguuuagcaccugggu

SEQ ID NO: 770269 - RNA, 19 nt, Artificial Sequence
  Description of Artificial Sequence: Synthetic oligonucleotide
ucucgguaccauagaacac

SEQ ID NO: 770270 - RNA, 19 nt, Artificial Sequence
  Description of Artificial Sequence: Synthetic oligonucleotide
ugucauugccauguggauc

SEQ ID NO: 770271 - RNA, 19 nt, Artificial Sequence
  Description of Artificial Sequence: Synthetic oligonucleotide
gaucuuacugguguacaca

SEQ ID NO: 770272 - RNA, 19 nt, Artificial Sequence
  Description of Artificial Sequence: Synthetic oligonucleotide
ucgguccacucuuaagccc

SEQ ID NO: 770273 - RNA, 19 nt, Artificial Sequence
  Description of Artificial Sequence: Synthetic oligonucleotide
guaccauagaacaccacuc

SEQ ID NO: 770274 - RNA, 19 nt, Artificial Sequence
  Description of Artificial Sequence: Synthetic oligonucleotide
agcaccuggguuauccaac

SEQ ID NO: 770275 - RNA, 19 nt, Artificial Sequence
  Description of Artificial Sequence: Synthetic oligonucleotide
cauuaaaaguccuagucuu

SEQ ID NO: 770276 - RNA, 19 nt, Artificial Sequence
  Description of Artificial Sequence: Synthetic oligonucleotide
ucuugucuaucugcucggg

SEQ ID NO: 770277 - RNA, 19 nt, Artificial Sequence
  Description of Artificial Sequence: Synthetic oligonucleotide
aagguugagcucccguuua

SEQ ID NO: 770278 - RNA, 19 nt, Artificial Sequence
  Description of Artificial Sequence: Synthetic oligonucleotide
gagaacauaaguagguggu

SEQ ID NO: 770279 - RNA, 19 nt, Artificial Sequence
  Description of Artificial Sequence: Synthetic oligonucleotide
uuugguuuccuuggcgcga

SEQ ID NO: 770280 - RNA, 19 nt, Artificial Sequence
  Description of Artificial Sequence: Synthetic oligonucleotide
ggcacaguuagcuugccca

SEQ ID NO: 770281 - RNA, 19 nt, Artificial Sequence
  Description of Artificial Sequence: Synthetic oligonucleotide
guaaagggcaccuuccgcu

SEQ ID NO: 770282 - RNA, 19 nt, Artificial Sequence
  Description of Artificial Sequence: Synthetic oligonucleotide
acaagguugagcucccguu

SEQ ID NO: 770283 - RNA, 19 nt, Artificial Sequence
  Description of Artificial Sequence: Synthetic oligonucleotide
uagcacaauuugacgacuc

SEQ ID NO: 770284 - RNA, 19 nt, Artificial Sequence
  Description of Artificial Sequence: Synthetic oligonucleotide
guugagcucccguuuacca

SEQ ID NO: 770285 - RNA, 19 nt, Artificial Sequence
  Description of Artificial Sequence: Synthetic oligonucleotide
aguuauagaugcccaccau

SEQ ID NO: 770286 - RNA, 19 nt, Artificial Sequence
  Description of Artificial Sequence: Synthetic oligonucleotide
acggagaucauuagcuuug

SEQ ID NO: 770287 - RNA, 19 nt, Artificial Sequence
  Description of Artificial Sequence: Synthetic oligonucleotide
ucgggauguguaucuacac

SEQ ID NO: 770288 - RNA, 19 nt, Artificial Sequence
  Description of Artificial Sequence: Synthetic oligonucleotide
gguuauccaacucuuguaa

SEQ ID NO: 770289 - RNA, 19 nt, Artificial Sequence
  Description of Artificial Sequence: Synthetic oligonucleotide
aaggaguaaucagauccau

SEQ ID NO: 770290 - RNA, 19 nt, Artificial Sequence
  Description of Artificial Sequence: Synthetic oligonucleotide
uaucacuaggcaggagcag

SEQ ID NO: 770291 - RNA, 19 nt, Artificial Sequence
  Description of Artificial Sequence: Synthetic oligonucleotide
acuccuguauguaaagcga

SEQ ID NO: 770292 - RNA, 19 nt, Artificial Sequence
  Description of Artificial Sequence: Synthetic oligonucleotide
ucuuaagcccauaggccuu

SEQ ID NO: 770293 - RNA, 19 nt, Artificial Sequence
  Description of Artificial Sequence: Synthetic oligonucleotide
guaaagcgaagcuuaugaa

SEQ ID NO: 770294 - RNA, 19 nt, Artificial Sequence
  Description of Artificial Sequence: Synthetic oligonucleotide
acugcccguguuuacauua

SEQ ID NO: 770295 - RNA, 19 nt, Artificial Sequence
  Description of Artificial Sequence: Synthetic oligonucleotide
auuugacgacucccauagg

SEQ ID NO: 770296 - RNA, 19 nt, Artificial Sequence
  Description of Artificial Sequence: Synthetic oligonucleotide
agguguaacuucaucuuca

SEQ ID NO: 770297 - RNA, 19 nt, Artificial Sequence
  Description of Artificial Sequence: Synthetic oligonucleotide
gaacauaaguagguggucu

SEQ ID NO: 770298 - RNA, 19 nt, Artificial Sequence
  Description of Artificial Sequence: Synthetic oligonucleotide
uggcaaaaugggccuucag

SEQ ID NO: 770299 - RNA, 19 nt, Artificial Sequence
  Description of Artificial Sequence: Synthetic oligonucleotide
ggaucaucuucauuuguga

SEQ ID NO: 770300 - RNA, 19 nt, Artificial Sequence
  Description of Artificial Sequence: Synthetic oligonucleotide
gaucauuagcuuugguccu

SEQ ID NO: 770301 - RNA, 19 nt, Artificial Sequence
  Description of Artificial Sequence: Synthetic oligonucleotide
gguaccauagaacaccacu

SEQ ID NO: 770302 - RNA, 19 nt, Artificial Sequence
  Description of Artificial Sequence: Synthetic oligonucleotide
guaggcacaguuagcuugc

SEQ ID NO: 770303 - RNA, 19 nt, Artificial Sequence
  Description of Artificial Sequence: Synthetic oligonucleotide
cucuuaagcccauaggccu

SEQ ID NO: 770304 - RNA, 19 nt, Artificial Sequence
  Description of Artificial Sequence: Synthetic oligonucleotide
augaucuuacugguguaca

SEQ ID NO: 770305 - RNA, 19 nt, Artificial Sequence
  Description of Artificial Sequence: Synthetic oligonucleotide
guaggauucccacccugac

SEQ ID NO: 770306 - RNA, 19 nt, Artificial Sequence
  Description of Artificial Sequence: Synthetic oligonucleotide
gcgaaccuuccuuagcagg

SEQ ID NO: 770307 - RNA, 19 nt, Artificial Sequence
  Description of Artificial Sequence: Synthetic oligonucleotide
gggugugaccuucagucag

SEQ ID NO: 770308 - RNA, 19 nt, Artificial Sequence
  Description of Artificial Sequence: Synthetic oligonucleotide
agucaaacauagcccugga

SEQ ID NO: 770309 - RNA, 19 nt, Artificial Sequence
  Description of Artificial Sequence: Synthetic oligonucleotide
uggccaauugugucuugga

SEQ ID NO: 770310 - RNA, 19 nt, Artificial Sequence
  Description of Artificial Sequence: Synthetic oligonucleotide
gaacaccacucccaagaga

SEQ ID NO: 770311 - RNA, 19 nt, Artificial Sequence
  Description of Artificial Sequence: Synthetic oligonucleotide
gucacggagaucauuagcu

SEQ ID NO: 770312 - RNA, 19 nt, Artificial Sequence
  Description of Artificial Sequence: Synthetic oligonucleotide
caagucaaggaagauccca

SEQ ID NO: 770313 - RNA, 19 nt, Artificial Sequence
  Description of Artificial Sequence: Synthetic oligonucleotide
aagaucccagugucacgga

SEQ ID NO: 770314 - RNA, 19 nt, Artificial Sequence
  Description of Artificial Sequence: Synthetic oligonucleotide
auguaaagcgaagcuuaug

SEQ ID NO: 770315 - RNA, 19 nt, Artificial Sequence
  Description of Artificial Sequence: Synthetic oligonucleotide
uuggugagcagagcacuga

SEQ ID NO: 770316 - RNA, 19 nt, Artificial Sequence
  Description of Artificial Sequence: Synthetic oligonucleotide
ggaagaucccagugucacg

SEQ ID NO: 770317 - RNA, 19 nt, Artificial Sequence
  Description of Artificial Sequence: Synthetic oligonucleotide
ccuguauguaaagcgaagc

SEQ ID NO: 770318 - RNA, 19 nt, Artificial Sequence
  Description of Artificial Sequence: Synthetic oligonucleotide
ccugaauauuuauauucuc

SEQ ID NO: 770319 - RNA, 19 nt, Artificial Sequence
  Description of Artificial Sequence: Synthetic oligonucleotide
uucuucgguccacucuuaa

SEQ ID NO: 770320 - RNA, 19 nt, Artificial Sequence
  Description of Artificial Sequence: Synthetic oligonucleotide
aucauuagcuuugguccug

SEQ ID NO: 770321 - RNA, 19 nt, Artificial Sequence
  Description of Artificial Sequence: Synthetic oligonucleotide
ucacggagaucauuagcuu

SEQ ID NO: 770322 - RNA, 19 nt, Artificial Sequence
  Description of Artificial Sequence: Synthetic oligonucleotide
aguaggauucccacccuga

SEQ ID NO: 770323 - RNA, 19 nt, Artificial Sequence
  Description of Artificial Sequence: Synthetic oligonucleotide
uaaagggcaccuuccgcuu

SEQ ID NO: 770324 - RNA, 19 nt, Artificial Sequence
  Description of Artificial Sequence: Synthetic oligonucleotide
ggcuuaaagcccauaagga

SEQ ID NO: 770325 - RNA, 19 nt, Artificial Sequence
  Description of Artificial Sequence: Synthetic oligonucleotide
caacucuuguaagacauaa

SEQ ID NO: 770326 - RNA, 19 nt, Artificial Sequence
  Description of Artificial Sequence: Synthetic oligonucleotide
aacucuuguaagacauaaa

SEQ ID NO: 770327 - RNA, 19 nt, Artificial Sequence
  Description of Artificial Sequence: Synthetic oligonucleotide
ugaccuucagucaguucuu

SEQ ID NO: 770328 - RNA, 19 nt, Artificial Sequence
  Description of Artificial Sequence: Synthetic oligonucleotide
uucuuucgggauguguauc

SEQ ID NO: 770329 - RNA, 19 nt, Artificial Sequence
  Description of Artificial Sequence: Synthetic oligonucleotide
cacucccaagagaucucgg

SEQ ID NO: 770330 - RNA, 19 nt, Artificial Sequence
  Description of Artificial Sequence: Synthetic oligonucleotide
ccguuugguaucacuaggc

SEQ ID NO: 770331 - RNA, 19 nt, Artificial Sequence
  Description of Artificial Sequence: Synthetic oligonucleotide
caaacagggaaggccucag

SEQ ID NO: 770332 - RNA, 19 nt, Artificial Sequence
  Description of Artificial Sequence: Synthetic oligonucleotide
cuguauguaaagcgaagcu

SEQ ID NO: 770333 - RNA, 19 nt, Artificial Sequence
  Description of Artificial Sequence: Synthetic oligonucleotide
uuggcgcgaaccuuccuua

SEQ ID NO: 770334 - RNA, 19 nt, Artificial Sequence
  Description of Artificial Sequence: Synthetic oligonucleotide
gacgacucccauaggucug

SEQ ID NO: 770335 - RNA, 19 nt, Artificial Sequence
  Description of Artificial Sequence: Synthetic oligonucleotide
guacacaaacagggaaggc

SEQ ID NO: 770336 - RNA, 19 nt, Artificial Sequence
  Description of Artificial Sequence: Synthetic oligonucleotide
gaucccagugucacggaga

SEQ ID NO: 770337 - RNA, 19 nt, Artificial Sequence
  Description of Artificial Sequence: Synthetic oligonucleotide
gcacaauuugacgacuccc

SEQ ID NO: 770338 - RNA, 19 nt, Artificial Sequence
  Description of Artificial Sequence: Synthetic oligonucleotide
agaccguuugguaucacua

SEQ ID NO: 770339 - RNA, 19 nt, Artificial Sequence
  Description of Artificial Sequence: Synthetic oligonucleotide
agagucaaacauagcccug

SEQ ID NO: 770340 - RNA, 19 nt, Artificial Sequence
  Description of Artificial Sequence: Synthetic oligonucleotide
ggcacguucuuucgggaug

SEQ ID NO: 770341 - RNA, 19 nt, Artificial Sequence
  Description of Artificial Sequence: Synthetic oligonucleotide
cuccuguauguaaagcgaa

SEQ ID NO: 770342 - RNA, 19 nt, Artificial Sequence
  Description of Artificial Sequence: Synthetic oligonucleotide
uuggcaaaaugggccuuca

SEQ ID NO: 770343 - RNA, 19 nt, Artificial Sequence
  Description of Artificial Sequence: Synthetic oligonucleotide
gaacaagguugagcucccg

SEQ ID NO: 770344 - RNA, 19 nt, Artificial Sequence
  Description of Artificial Sequence: Synthetic oligonucleotide
cucauaucaaaagguguaa

SEQ ID NO: 770345 - RNA, 19 nt, Artificial Sequence
  Description of Artificial Sequence: Synthetic oligonucleotide
cuuacagaccuccuuuagu

SEQ ID NO: 770346 - RNA, 19 nt, Artificial Sequence
  Description of Artificial Sequence: Synthetic oligonucleotide
uggcgcgaaccuuccuuag

SEQ ID NO: 770347 - RNA, 19 nt, Artificial Sequence
  Description of Artificial Sequence: Synthetic oligonucleotide
uuucucgauagagccucac

SEQ ID NO: 770348 - RNA, 19 nt, Artificial Sequence
  Description of Artificial Sequence: Synthetic oligonucleotide
caauuugacgacucccaua

SEQ ID NO: 770349 - RNA, 19 nt, Artificial Sequence
  Description of Artificial Sequence: Synthetic oligonucleotide
ccacucuuaagcccauagg

SEQ ID NO: 770350 - RNA, 19 nt, Artificial Sequence
  Description of Artificial Sequence: Synthetic oligonucleotide
ucccguuuaccagggacuc

SEQ ID NO: 770351 - RNA, 19 nt, Artificial Sequence
  Description of Artificial Sequence: Synthetic oligonucleotide
ugcccguguuuacauuaaa

SEQ ID NO: 770352 - RNA, 19 nt, Artificial Sequence
  Description of Artificial Sequence: Synthetic oligonucleotide
gagaccguuugguaucacu

SEQ ID NO: 770353 - RNA, 19 nt, Artificial Sequence
  Description of Artificial Sequence: Synthetic oligonucleotide
gaagccugcuggcgucacc

SEQ ID NO: 770354 - RNA, 19 nt, Artificial Sequence
  Description of Artificial Sequence: Synthetic oligonucleotide
gugcuacgucuuuaccaag

SEQ ID NO: 770355 - RNA, 19 nt, Artificial Sequence
  Description of Artificial Sequence: Synthetic oligonucleotide
cccucgguuuuguaguagg

SEQ ID NO: 770356 - RNA, 19 nt, Artificial Sequence
  Description of Artificial Sequence: Synthetic oligonucleotide
ucuugaccuggacgucacu

SEQ ID NO: 770357 - RNA, 19 nt, Artificial Sequence
  Description of Artificial Sequence: Synthetic oligonucleotide
gguagacaagcucuuuaaa

SEQ ID NO: 770358 - RNA, 19 nt, Artificial Sequence
  Description of Artificial Sequence: Synthetic oligonucleotide
cacccugagagucaaacau

SEQ ID NO: 770359 - RNA, 19 nt, Artificial Sequence
  Description of Artificial Sequence: Synthetic oligonucleotide
agaucucgguugcugcuua

SEQ ID NO: 770360 - RNA, 19 nt, Artificial Sequence
  Description of Artificial Sequence: Synthetic oligonucleotide
gcucccguuuaccagggac

SEQ ID NO: 770361 - RNA, 19 nt, Artificial Sequence
  Description of Artificial Sequence: Synthetic oligonucleotide
gcuuaaagcccauaaggau

SEQ ID NO: 770362 - RNA, 19 nt, Artificial Sequence
  Description of Artificial Sequence: Synthetic oligonucleotide
aucucgguugcugcuuaug

SEQ ID NO: 770363 - RNA, 19 nt, Artificial Sequence
  Description of Artificial Sequence: Synthetic oligonucleotide
cuaacuuggugagaacaua

SEQ ID NO: 770364 - RNA, 19 nt, Artificial Sequence
  Description of Artificial Sequence: Synthetic oligonucleotide
acguucuuucgggaugugu

SEQ ID NO: 770365 - RNA, 19 nt, Artificial Sequence
  Description of Artificial Sequence: Synthetic oligonucleotide
aggccuuacagaccuccuu

SEQ ID NO: 770366 - RNA, 19 nt, Artificial Sequence
  Description of Artificial Sequence: Synthetic oligonucleotide
gcuuaugaucuuacuggug

SEQ ID NO: 770367 - RNA, 19 nt, Artificial Sequence
  Description of Artificial Sequence: Synthetic oligonucleotide
ugucuggugagagcaucua

SEQ ID NO: 770368 - RNA, 19 nt, Artificial Sequence
  Description of Artificial Sequence: Synthetic oligonucleotide
gaacaauagcuuucaucuu

SEQ ID NO: 770369 - RNA, 19 nt, Artificial Sequence
  Description of Artificial Sequence: Synthetic oligonucleotide
aagcucuagcacacguuua

SEQ ID NO: 770370 - RNA, 19 nt, Artificial Sequence
  Description of Artificial Sequence: Synthetic oligonucleotide
accccgagauccucauccu

SEQ ID NO: 770371 - RNA, 19 nt, Artificial Sequence
  Description of Artificial Sequence: Synthetic oligonucleotide
gcgcgaaccuuccuuagca

SEQ ID NO: 770372 - RNA, 19 nt, Artificial Sequence
  Description of Artificial Sequence: Synthetic oligonucleotide
gguugagcucccguuuacc

SEQ ID NO: 770373 - RNA, 19 nt, Artificial Sequence
  Description of Artificial Sequence: Synthetic oligonucleotide
cccauaggccuuacagacc

SEQ ID NO: 770374 - RNA, 19 nt, Artificial Sequence
  Description of Artificial Sequence: Synthetic oligonucleotide
ggccaauugugucuuggaa

SEQ ID NO: 770375 - RNA, 19 nt, Artificial Sequence
  Description of Artificial Sequence: Synthetic oligonucleotide
acgucuuuaccaagcuuaa

SEQ ID NO: 770376 - RNA, 19 nt, Artificial Sequence
  Description of Artificial Sequence: Synthetic oligonucleotide
acccucgguuuuguaguag

SEQ ID NO: 770377 - RNA, 19 nt, Artificial Sequence
  Description of Artificial Sequence: Synthetic oligonucleotide
ggcgcgaaccuuccuuagc

SEQ ID NO: 770378 - RNA, 19 nt, Artificial Sequence
  Description of Artificial Sequence: Synthetic oligonucleotide
acgacucccauaggucuga

SEQ ID NO: 770379 - RNA, 19 nt, Artificial Sequence
  Description of Artificial Sequence: Synthetic oligonucleotide
uuaagcccauaggccuuac

SEQ ID NO: 770380 - RNA, 19 nt, Artificial Sequence
  Description of Artificial Sequence: Synthetic oligonucleotide
gcuggcgucaccugaauau

SEQ ID NO: 770381 - RNA, 19 nt, Artificial Sequence
  Description of Artificial Sequence: Synthetic oligonucleotide
cagacugcccguguuuaca

SEQ ID NO: 770382 - RNA, 19 nt, Artificial Sequence
  Description of Artificial Sequence: Synthetic oligonucleotide
uguuagcuuucuggaucaa

SEQ ID NO: 770383 - RNA, 19 nt, Artificial Sequence
  Description of Artificial Sequence: Synthetic oligonucleotide
cccgagauccucauccuca

SEQ ID NO: 770384 - RNA, 19 nt, Artificial Sequence
  Description of Artificial Sequence: Synthetic oligonucleotide
gaaccccgagauccucauc

SEQ ID NO: 770385 - RNA, 19 nt, Artificial Sequence
  Description of Artificial Sequence: Synthetic oligonucleotide
ccgagauccucauccucag

SEQ ID NO: 770386 - RNA, 19 nt, Artificial Sequence
  Description of Artificial Sequence: Synthetic oligonucleotide
uccucacccucgguuuugu

SEQ ID NO: 770387 - RNA, 19 nt, Artificial Sequence
  Description of Artificial Sequence: Synthetic oligonucleotide
acccugagagucaaacaua

SEQ ID NO: 770388 - RNA, 19 nt, Artificial Sequence
  Description of Artificial Sequence: Synthetic oligonucleotide
cacguuuagcaccuggguu

SEQ ID NO: 770389 - RNA, 19 nt, Artificial Sequence
  Description of Artificial Sequence: Synthetic oligonucleotide
cacggagaucauuagcuuu

SEQ ID NO: 770390 - RNA, 19 nt, Artificial Sequence
  Description of Artificial Sequence: Synthetic oligonucleotide
cagaaggcgggcaccacgu

SEQ ID NO: 770391 - RNA, 19 nt, Artificial Sequence
  Description of Artificial Sequence: Synthetic oligonucleotide
caccuggguuauccaacuc

SEQ ID NO: 770392 - RNA, 19 nt, Artificial Sequence
  Description of Artificial Sequence: Synthetic oligonucleotide
gcucuagcacacguuuagc

SEQ ID NO: 770393 - RNA, 19 nt, Artificial Sequence
  Description of Artificial Sequence: Synthetic oligonucleotide
uaaagcccauaaggaucaa

SEQ ID NO: 770394 - RNA, 19 nt, Artificial Sequence
  Description of Artificial Sequence: Synthetic oligonucleotide
guagguggucuggcugcag

SEQ ID NO: 770395 - RNA, 19 nt, Artificial Sequence
  Description of Artificial Sequence: Synthetic oligonucleotide
cuagcacaauuugacgacu

SEQ ID NO: 770396 - RNA, 19 nt, Artificial Sequence
  Description of Artificial Sequence: Synthetic oligonucleotide
ggggugugaccuucaguca

SEQ ID NO: 770397 - RNA, 19 nt, Artificial Sequence
  Description of Artificial Sequence: Synthetic oligonucleotide
ggaaggccucagguagugg

SEQ ID NO: 770398 - RNA, 19 nt, Artificial Sequence
  Description of Artificial Sequence: Synthetic oligonucleotide
gcuacgucuuuaccaagcu

SEQ ID NO: 770399 - RNA, 19 nt, Artificial Sequence
  Description of Artificial Sequence: Synthetic oligonucleotide
ugagaccguuugguaucac

SEQ ID NO: 770400 - RNA, 19 nt, Artificial Sequence
  Description of Artificial Sequence: Synthetic oligonucleotide
cuuggcgcgaaccuuccuu

SEQ ID NO: 770401 - RNA, 19 nt, Artificial Sequence
  Description of Artificial Sequence: Synthetic oligonucleotide
cugucauugccauguggau

SEQ ID NO: 770402 - RNA, 19 nt, Artificial Sequence
  Description of Artificial Sequence: Synthetic oligonucleotide
caagguugagcucccguuu

SEQ ID NO: 770403 - RNA, 19 nt, Artificial Sequence
  Description of Artificial Sequence: Synthetic oligonucleotide
cugcccguguuuacauuaa

SEQ ID NO: 770404 - RNA, 19 nt, Artificial Sequence
  Description of Artificial Sequence: Synthetic oligonucleotide
cucgguugcugcuuaugau

SEQ ID NO: 770405 - RNA, 19 nt, Artificial Sequence
  Description of Artificial Sequence: Synthetic oligonucleotide
ggaaaaggcuuguuagcuu

SEQ ID NO: 770406 - RNA, 19 nt, Artificial Sequence
  Description of Artificial Sequence: Synthetic oligonucleotide
cguuugguaucacuaggca

SEQ ID NO: 770407 - RNA, 19 nt, Artificial Sequence
  Description of Artificial Sequence: Synthetic oligonucleotide
guuucucgauagagccuca

SEQ ID NO: 770408 - RNA, 19 nt, Artificial Sequence
  Description of Artificial Sequence: Synthetic oligonucleotide
ggauguguaucuacacacu

SEQ ID NO: 770409 - RNA, 19 nt, Artificial Sequence
  Description of Artificial Sequence: Synthetic oligonucleotide
cauaggucugagaccguuu

SEQ ID NO: 770410 - RNA, 19 nt, Artificial Sequence
  Description of Artificial Sequence: Synthetic oligonucleotide
cuucuucgguccacucuua

SEQ ID NO: 770411 - RNA, 19 nt, Artificial Sequence
  Description of Artificial Sequence: Synthetic oligonucleotide
ccuagucuugguuuucacu

SEQ ID NO: 770412 - RNA, 19 nt, Artificial Sequence
  Description of Artificial Sequence: Synthetic oligonucleotide
gcccguguuuacauuaaaa

SEQ ID NO: 770413 - RNA, 19 nt, Artificial Sequence
  Description of Artificial Sequence: Synthetic oligonucleotide
ccucgguuuuguaguagga

SEQ ID NO: 770414 - RNA, 19 nt, Artificial Sequence
  Description of Artificial Sequence: Synthetic oligonucleotide
cccagagcacuucacuuaa

SEQ ID NO: 770415 - RNA, 19 nt, Artificial Sequence
  Description of Artificial Sequence: Synthetic oligonucleotide
cgcgaaccuuccuuagcag

SEQ ID NO: 770416 - RNA, 19 nt, Artificial Sequence
  Description of Artificial Sequence: Synthetic oligonucleotide
agcacacguuuagcaccug

SEQ ID NO: 770417 - RNA, 19 nt, Artificial Sequence
  Description of Artificial Sequence: Synthetic oligonucleotide
cauuugugaagagcaugau

SEQ ID NO: 770418 - RNA, 19 nt, Artificial Sequence
  Description of Artificial Sequence: Synthetic oligonucleotide
cuacgucuuuaccaagcuu

SEQ ID NO: 770419 - RNA, 19 nt, Artificial Sequence
  Description of Artificial Sequence: Synthetic oligonucleotide
gaucucgguugcugcuuau

SEQ ID NO: 770420 - RNA, 19 nt, Artificial Sequence
  Description of Artificial Sequence: Synthetic oligonucleotide
gcaccuggguuauccaacu

SEQ ID NO: 770421 - RNA, 19 nt, Artificial Sequence
  Description of Artificial Sequence: Synthetic oligonucleotide
cggagaucauuagcuuugg

SEQ ID NO: 770422 - RNA, 19 nt, Artificial Sequence
  Description of Artificial Sequence: Synthetic oligonucleotide
ggagaucauuagcuuuggu

SEQ ID NO: 770423 - RNA, 19 nt, Artificial Sequence
  Description of Artificial Sequence: Synthetic oligonucleotide
cacguucuuucgggaugug

SEQ ID NO: 770424 - RNA, 19 nt, Artificial Sequence
  Description of Artificial Sequence: Synthetic oligonucleotide
agcgagccaaagggacaga

SEQ ID NO: 770425 - RNA, 19 nt, Artificial Sequence
  Description of Artificial Sequence: Synthetic oligonucleotide
caguuagcuugcccagugu

SEQ ID NO: 770426 - RNA, 19 nt, Artificial Sequence
  Description of Artificial Sequence: Synthetic oligonucleotide
cagcauuaccaagggcuua

SEQ ID NO: 770427 - RNA, 19 nt, Artificial Sequence
  Description of Artificial Sequence: Synthetic oligonucleotide
gacugcccguguuuacauu

SEQ ID NO: 770428 - RNA, 19 nt, Artificial Sequence
  Description of Artificial Sequence: Synthetic oligonucleotide
agguuggcacagacccaga

SEQ ID NO: 770429 - RNA, 19 nt, Artificial Sequence
  Description of Artificial Sequence: Synthetic oligonucleotide
guagcuggggugugaccuu

SEQ ID NO: 770430 - RNA, 19 nt, Artificial Sequence
  Description of Artificial Sequence: Synthetic oligonucleotide
cucgucucuucagaugcau

SEQ ID NO: 770431 - RNA, 19 nt, Artificial Sequence
  Description of Artificial Sequence: Synthetic oligonucleotide
ggugugaccuucagucagu

SEQ ID NO: 770432 - RNA, 19 nt, Artificial Sequence
  Description of Artificial Sequence: Synthetic oligonucleotide
cccguuuaccagggacucc

SEQ ID NO: 770433 - RNA, 19 nt, Artificial Sequence
  Description of Artificial Sequence: Synthetic oligonucleotide
gcacuucacuuaaggagua

SEQ ID NO: 770434 - RNA, 19 nt, Artificial Sequence
  Description of Artificial Sequence: Synthetic oligonucleotide
ccccgagauccucauccuc

SEQ ID NO: 770435 - RNA, 19 nt, Artificial Sequence
  Description of Artificial Sequence: Synthetic oligonucleotide
gcacguucuuucgggaugu

SEQ ID NO: 770436 - RNA, 19 nt, Artificial Sequence
  Description of Artificial Sequence: Synthetic oligonucleotide
ggaagccugcuggcgucac

SEQ ID NO: 770437 - RNA, 19 nt, Artificial Sequence
  Description of Artificial Sequence: Synthetic oligonucleotide
cgguaccauagaacaccac

SEQ ID NO: 770438 - RNA, 19 nt, Artificial Sequence
  Description of Artificial Sequence: Synthetic oligonucleotide
caccacguccacgcgggcu

SEQ ID NO: 770439 - RNA, 19 nt, Artificial Sequence
  Description of Artificial Sequence: Synthetic oligonucleotide
cccggcucaucaaaccgcu

SEQ ID NO: 770440 - RNA, 19 nt, Artificial Sequence
  Description of Artificial Sequence: Synthetic oligonucleotide
gcaccacguccacgcgggc

SEQ ID NO: 770441 - RNA, 19 nt, Artificial Sequence
  Description of Artificial Sequence: Synthetic oligonucleotide
guccacucuuaagcccaua

SEQ ID NO: 770442 - RNA, 19 nt, Artificial Sequence
  Description of Artificial Sequence: Synthetic oligonucleotide
ccauaggucugagaccguu

SEQ ID NO: 770443 - RNA, 19 nt, Artificial Sequence
  Description of Artificial Sequence: Synthetic oligonucleotide
gguccacucuuaagcccau

SEQ ID NO: 770444 - RNA, 19 nt, Artificial Sequence
  Description of Artificial Sequence: Synthetic oligonucleotide
ccucacccucgguuuugua

SEQ ID NO: 770445 - RNA, 19 nt, Artificial Sequence
  Description of Artificial Sequence: Synthetic oligonucleotide
cguuuagcaccuggguuau

SEQ ID NO: 770446 - RNA, 19 nt, Artificial Sequence
  Description of Artificial Sequence: Synthetic oligonucleotide
cccauaggucugagaccgu

SEQ ID NO: 770447 - RNA, 19 nt, Artificial Sequence
  Description of Artificial Sequence: Synthetic oligonucleotide
ccggcucaucaaaccgcuu

SEQ ID NO: 770448 - RNA, 19 nt, Artificial Sequence
  Description of Artificial Sequence: Synthetic oligonucleotide
uguguauuaucccugaggc

SEQ ID NO: 770449 - RNA, 19 nt, Artificial Sequence
  Description of Artificial Sequence: Synthetic oligonucleotide
aaggauaugagcuuuggau

SEQ ID NO: 770450 - RNA, 19 nt, Artificial Sequence
  Description of Artificial Sequence: Synthetic oligonucleotide
acucagauagaguacaggg

SEQ ID NO: 770451 - RNA, 19 nt, Artificial Sequence
  Description of Artificial Sequence: Synthetic oligonucleotide
aaagcgcuggucuagcugg

SEQ ID NO: 770452 - RNA, 19 nt, Artificial Sequence
  Description of Artificial Sequence: Synthetic oligonucleotide
gagguaaagacauugucag

SEQ ID NO: 770453 - RNA, 19 nt, Artificial Sequence
  Description of Artificial Sequence: Synthetic oligonucleotide
uacgaaacggugaacaaag

SEQ ID NO: 770454 - RNA, 19 nt, Artificial Sequence
  Description of Artificial Sequence: Synthetic oligonucleotide
uguagauugcaacacggcc

SEQ ID NO: 770455 - RNA, 19 nt, Artificial Sequence
  Description of Artificial Sequence: Synthetic oligonucleotide
ucagauagaguacagggaa

SEQ ID NO: 770456 - RNA, 19 nt, Artificial Sequence
  Description of Artificial Sequence: Synthetic oligonucleotide
cuaacauaugguuucacug

SEQ ID NO: 770457 - RNA, 19 nt, Artificial Sequence
  Description of Artificial Sequence: Synthetic oligonucleotide
gaaauaguggaugauggag

SEQ ID NO: 770458 - RNA, 19 nt, Artificial Sequence
  Description of Artificial Sequence: Synthetic oligonucleotide
aagugggcugaauucaagg

SEQ ID NO: 770459 - RNA, 19 nt, Artificial Sequence
  Description of Artificial Sequence: Synthetic oligonucleotide
uauagcauguuuuccaccu

SEQ ID NO: 770460 - RNA, 19 nt, Artificial Sequence
  Description of Artificial Sequence: Synthetic oligonucleotide
gagauuuagggacaaaaca

SEQ ID NO: 770461 - RNA, 19 nt, Artificial Sequence
  Description of Artificial Sequence: Synthetic oligonucleotide
ucaggagcgaggaaauggg

SEQ ID NO: 770462 - RNA, 19 nt, Artificial Sequence
  Description of Artificial Sequence: Synthetic oligonucleotide
auauagcauguuuuccacc

SEQ ID NO: 770463 - RNA, 19 nt, Artificial Sequence
  Description of Artificial Sequence: Synthetic oligonucleotide
uaacauaugguuucacugu

SEQ ID NO: 770464 - RNA, 19 nt, Artificial Sequence
  Description of Artificial Sequence: Synthetic oligonucleotide
ugcuaaaacuucgagcccg

SEQ ID NO: 770465 - RNA, 19 nt, Artificial Sequence
  Description of Artificial Sequence: Synthetic oligonucleotide
cugaauucaaggauaugag

SEQ ID NO: 770466 - RNA, 19 nt, Artificial Sequence
  Description of Artificial Sequence: Synthetic oligonucleotide
auuguuacuuuugggaggg

SEQ ID NO: 770467 - RNA, 19 nt, Artificial Sequence
  Description of Artificial Sequence: Synthetic oligonucleotide
guagauugcaacacggccg

SEQ ID NO: 770468 - RNA, 19 nt, Artificial Sequence
  Description of Artificial Sequence: Synthetic oligonucleotide
ugauaucagcagcuggacg

SEQ ID NO: 770469 - RNA, 19 nt, Artificial Sequence
  Description of Artificial Sequence: Synthetic oligonucleotide
ugcaaacgaguccuaaugc

SEQ ID NO: 770470 - RNA, 19 nt, Artificial Sequence
  Description of Artificial Sequence: Synthetic oligonucleotide
agggcggugguucaguggc

SEQ ID NO: 770471 - RNA, 19 nt, Artificial Sequence
  Description of Artificial Sequence: Synthetic oligonucleotide
ucgucauuaaagcuguuuc

SEQ ID NO: 770472 - RNA, 19 nt, Artificial Sequence
  Description of Artificial Sequence: Synthetic oligonucleotide
uaucuggaggggaaagccg

SEQ ID NO: 770473 - RNA, 19 nt, Artificial Sequence
  Description of Artificial Sequence: Synthetic oligonucleotide
uagauugcaacacggccgc

SEQ ID NO: 770474 - RNA, 19 nt, Artificial Sequence
  Description of Artificial Sequence: Synthetic oligonucleotide
cuguguauuaucccugagg

SEQ ID NO: 770475 - RNA, 19 nt, Artificial Sequence
  Description of Artificial Sequence: Synthetic oligonucleotide
acuaacauaugguuucacu

SEQ ID NO: 770476 - RNA, 19 nt, Artificial Sequence
  Description of Artificial Sequence: Synthetic oligonucleotide
gaauaggagaaaaggcagg

SEQ ID NO: 770477 - RNA, 19 nt, Artificial Sequence
  Description of Artificial Sequence: Synthetic oligonucleotide
ugaccguugugacagaauc

SEQ ID NO: 770478 - RNA, 19 nt, Artificial Sequence
  Description of Artificial Sequence: Synthetic oligonucleotide
uugcauucaaguguguagc

SEQ ID NO: 770479 - RNA, 19 nt, Artificial Sequence
  Description of Artificial Sequence: Synthetic oligonucleotide
uuguagauugcaacacggc

SEQ ID NO: 770480 - RNA, 19 nt, Artificial Sequence
  Description of Artificial Sequence: Synthetic oligonucleotide
agauuuagggacaaaacaa

SEQ ID NO: 770481 - RNA, 19 nt, Artificial Sequence
  Description of Artificial Sequence: Synthetic oligonucleotide
augggcaguccauuguuac

SEQ ID NO: 770482 - RNA, 19 nt, Artificial Sequence
  Description of Artificial Sequence: Synthetic oligonucleotide
uuaugguugucacaugaua

SEQ ID NO: 770483 - RNA, 19 nt, Artificial Sequence
  Description of Artificial Sequence: Synthetic oligonucleotide
cagugaauugggcaguagg

SEQ ID NO: 770484 - RNA, 19 nt, Artificial Sequence
  Description of Artificial Sequence: Synthetic oligonucleotide
gguaaagacauugucagac

SEQ ID NO: 770485 - RNA, 19 nt, Artificial Sequence
  Description of Artificial Sequence: Synthetic oligonucleotide
acggauuacauucugccau

SEQ ID NO: 770486 - RNA, 19 nt, Artificial Sequence
  Description of Artificial Sequence: Synthetic oligonucleotide
augaaacagccccuuuugg

SEQ ID NO: 770487 - RNA, 19 nt, Artificial Sequence
  Description of Artificial Sequence: Synthetic oligonucleotide
aucucuacggucucgggca

SEQ ID NO: 770488 - RNA, 19 nt, Artificial Sequence
  Description of Artificial Sequence: Synthetic oligonucleotide
uggucuagcugguuuagca

SEQ ID NO: 770489 - RNA, 19 nt, Artificial Sequence
  Description of Artificial Sequence: Synthetic oligonucleotide
aguaagcaacaccacucuc

SEQ ID NO: 770490 - RNA, 19 nt, Artificial Sequence
  Description of Artificial Sequence: Synthetic oligonucleotide
agaaauugcagcccuggaa

SEQ ID NO: 770491 - RNA, 19 nt, Artificial Sequence
  Description of Artificial Sequence: Synthetic oligonucleotide
cauagcucgucccaccugc

SEQ ID NO: 770492 - RNA, 19 nt, Artificial Sequence
  Description of Artificial Sequence: Synthetic oligonucleotide
auuuucaggagcgaggaaa

SEQ ID NO: 770493 - RNA, 19 nt, Artificial Sequence
  Description of Artificial Sequence: Synthetic oligonucleotide
aggauaugagcuuuggaua

SEQ ID NO: 770494 - RNA, 19 nt, Artificial Sequence
  Description of Artificial Sequence: Synthetic oligonucleotide
agaaauaguggaugaugga

SEQ ID NO: 770495 - RNA, 19 nt, Artificial Sequence
  Description of Artificial Sequence: Synthetic oligonucleotide
gaugcuguucacugagcgc

SEQ ID NO: 770496 - RNA, 19 nt, Artificial Sequence
  Description of Artificial Sequence: Synthetic oligonucleotide
cugcaaacgaguccuaaug

SEQ ID NO: 770497 - RNA, 19 nt, Artificial Sequence
  Description of Artificial Sequence: Synthetic oligonucleotide
ccuuuugggugcuagagcc

SEQ ID NO: 770498 - RNA, 19 nt, Artificial Sequence
  Description of Artificial Sequence: Synthetic oligonucleotide
auaugagcuuuggauauag

SEQ ID NO: 770499 - RNA, 19 nt, Artificial Sequence
  Description of Artificial Sequence: Synthetic oligonucleotide
ggaauaggagaaaaggcag

SEQ ID NO: 770500 - RNA, 19 nt, Artificial Sequence
  Description of Artificial Sequence: Synthetic oligonucleotide
uugcucgcagccauguuca

SEQ ID NO: 770501 - RNA, 19 nt, Artificial Sequence
  Description of Artificial Sequence: Synthetic oligonucleotide
uuggcaucgaggcucucug

SEQ ID NO: 770502 - RNA, 19 nt, Artificial Sequence
  Description of Artificial Sequence: Synthetic oligonucleotide
cugcgauggccauagcucg

SEQ ID NO: 770503 - RNA, 19 nt, Artificial Sequence
  Description of Artificial Sequence: Synthetic oligonucleotide
aggcgaagaaggugguggc

SEQ ID NO: 770504 - RNA, 19 nt, Artificial Sequence
  Description of Artificial Sequence: Synthetic oligonucleotide
uuuuggaagcauguccaug

SEQ ID NO: 770505 - RNA, 19 nt, Artificial Sequence
  Description of Artificial Sequence: Synthetic oligonucleotide
uuuugggagggguucgaga

SEQ ID NO: 770506 - RNA, 19 nt, Artificial Sequence
  Description of Artificial Sequence: Synthetic oligonucleotide
cuugcucgcagccauguuc

SEQ ID NO: 770507 - RNA, 19 nt, Artificial Sequence
  Description of Artificial Sequence: Synthetic oligonucleotide
guuggggacucagauagag

SEQ ID NO: 770508 - RNA, 19 nt, Artificial Sequence
  Description of Artificial Sequence: Synthetic oligonucleotide
uggacgucgggacuaacau

SEQ ID NO: 770509 - RNA, 19 nt, Artificial Sequence
  Description of Artificial Sequence: Synthetic oligonucleotide
ucuacgaaacggugaacaa

SEQ ID NO: 770510 - RNA, 19 nt, Artificial Sequence
  Description of Artificial Sequence: Synthetic oligonucleotide
uguuacuuuugggaggggu

SEQ ID NO: 770511 - RNA, 19 nt, Artificial Sequence
  Description of Artificial Sequence: Synthetic oligonucleotide
aaguguguagcuguguauu

SEQ ID NO: 770512 - RNA, 19 nt, Artificial Sequence
  Description of Artificial Sequence: Synthetic oligonucleotide
gggacuaacauaugguuuc

SEQ ID NO: 770513 - RNA, 19 nt, Artificial Sequence
  Description of Artificial Sequence: Synthetic oligonucleotide
uaugagcuuuggauauagc

SEQ ID NO: 770514 - RNA, 19 nt, Artificial Sequence
  Description of Artificial Sequence: Synthetic oligonucleotide
aaagugggcugaauucaag

SEQ ID NO: 770515 - RNA, 19 nt, Artificial Sequence
  Description of Artificial Sequence: Synthetic oligonucleotide
uuuggacuggccaucucua

SEQ ID NO: 770516 - RNA, 19 nt, Artificial Sequence
  Description of Artificial Sequence: Synthetic oligonucleotide
ucgggcaagucugcaaacg

SEQ ID NO: 770517 - RNA, 19 nt, Artificial Sequence
  Description of Artificial Sequence: Synthetic oligonucleotide
accguugugacagaaucca

SEQ ID NO: 770518 - RNA, 19 nt, Artificial Sequence
  Description of Artificial Sequence: Synthetic oligonucleotide
aguccuaaugcaggggauc

SEQ ID NO: 770519 - RNA, 19 nt, Artificial Sequence
  Description of Artificial Sequence: Synthetic oligonucleotide
agggguucgagaugcucuc

SEQ ID NO: 770520 - RNA, 19 nt, Artificial Sequence
  Description of Artificial Sequence: Synthetic oligonucleotide
caguccauuguuacuuuug

SEQ ID NO: 770521 - RNA, 19 nt, Artificial Sequence
  Description of Artificial Sequence: Synthetic oligonucleotide
ucgggacuaacauaugguu

SEQ ID NO: 770522 - RNA, 19 nt, Artificial Sequence
  Description of Artificial Sequence: Synthetic oligonucleotide
acugcuauggguagaguga

SEQ ID NO: 770523 - RNA, 19 nt, Artificial Sequence
  Description of Artificial Sequence: Synthetic oligonucleotide
ugagcgcccaguguuguag

SEQ ID NO: 770524 - RNA, 19 nt, Artificial Sequence
  Description of Artificial Sequence: Synthetic oligonucleotide
aaaccucacauugguucag

SEQ ID NO: 770525 - RNA, 19 nt, Artificial Sequence
  Description of Artificial Sequence: Synthetic oligonucleotide
agcugcgauggccauagcu

SEQ ID NO: 770526 - RNA, 19 nt, Artificial Sequence
  Description of Artificial Sequence: Synthetic oligonucleotide
aguguuguaguugcauuca

SEQ ID NO: 770527 - RNA, 19 nt, Artificial Sequence
  Description of Artificial Sequence: Synthetic oligonucleotide
cucagauagaguacaggga

SEQ ID NO: 770528 - RNA, 19 nt, Artificial Sequence
  Description of Artificial Sequence: Synthetic oligonucleotide
uacggucucgggcauacau

SEQ ID NO: 770529 - RNA, 19 nt, Artificial Sequence
  Description of Artificial Sequence: Synthetic oligonucleotide
ggcucaaggcauuuucagg

SEQ ID NO: 770530 - RNA, 19 nt, Artificial Sequence
  Description of Artificial Sequence: Synthetic oligonucleotide
uuagugaggcuguuguguu

SEQ ID NO: 770531 - RNA, 19 nt, Artificial Sequence
  Description of Artificial Sequence: Synthetic oligonucleotide
cuucgagcccggcucaagg

SEQ ID NO: 770532 - RNA, 19 nt, Artificial Sequence
  Description of Artificial Sequence: Synthetic oligonucleotide
aauugggcaguaggcagga

SEQ ID NO: 770533 - RNA, 19 nt, Artificial Sequence
  Description of Artificial Sequence: Synthetic oligonucleotide
uuagggcucuauccugggc

SEQ ID NO: 770534 - RNA, 19 nt, Artificial Sequence
  Description of Artificial Sequence: Synthetic oligonucleotide
guggaugauggagauuuag

SEQ ID NO: 770535 - RNA, 19 nt, Artificial Sequence
  Description of Artificial Sequence: Synthetic oligonucleotide
uuggaagcauguccaugca

SEQ ID NO: 770536 - RNA, 19 nt, Artificial Sequence
  Description of Artificial Sequence: Synthetic oligonucleotide
cauauccagagcugcgaug

SEQ ID NO: 770537 - RNA, 19 nt, Artificial Sequence
  Description of Artificial Sequence: Synthetic oligonucleotide
ugcgagucggcggugagcu

SEQ ID NO: 770538 - RNA, 19 nt, Artificial Sequence
  Description of Artificial Sequence: Synthetic oligonucleotide
auagcuccacaguguaucu

SEQ ID NO: 770539 - RNA, 19 nt, Artificial Sequence
  Description of Artificial Sequence: Synthetic oligonucleotide
accuuagggcucuauccug

SEQ ID NO: 770540 - RNA, 19 nt, Artificial Sequence
  Description of Artificial Sequence: Synthetic oligonucleotide
cucuacgaaacggugaaca

SEQ ID NO: 770541 - RNA, 19 nt, Artificial Sequence
  Description of Artificial Sequence: Synthetic oligonucleotide
uucgagcccggcucaaggc

SEQ ID NO: 770542 - RNA, 19 nt, Artificial Sequence
  Description of Artificial Sequence: Synthetic oligonucleotide
auaucagcagcuggacguc

SEQ ID NO: 770543 - RNA, 19 nt, Artificial Sequence
  Description of Artificial Sequence: Synthetic oligonucleotide
gcugguuuagcaaauccug

SEQ ID NO: 770544 - RNA, 19 nt, Artificial Sequence
  Description of Artificial Sequence: Synthetic oligonucleotide
uagcagacuuuucccaauc

SEQ ID NO: 770545 - RNA, 19 nt, Artificial Sequence
  Description of Artificial Sequence: Synthetic oligonucleotide
ggcauuuucaggagcgagg

SEQ ID NO: 770546 - RNA, 19 nt, Artificial Sequence
  Description of Artificial Sequence: Synthetic oligonucleotide
agcuguguauuaucccuga

SEQ ID NO: 770547 - RNA, 19 nt, Artificial Sequence
  Description of Artificial Sequence: Synthetic oligonucleotide
gaccguugugacagaaucc

SEQ ID NO: 770548 - RNA, 19 nt, Artificial Sequence
  Description of Artificial Sequence: Synthetic oligonucleotide
agguaaagacauugucaga

SEQ ID NO: 770549 - RNA, 19 nt, Artificial Sequence
  Description of Artificial Sequence: Synthetic oligonucleotide
ccacauaguaagcaacacc

SEQ ID NO: 770550 - RNA, 19 nt, Artificial Sequence
  Description of Artificial Sequence: Synthetic oligonucleotide
uccuaaugcaggggauccg

SEQ ID NO: 770551 - RNA, 19 nt, Artificial Sequence
  Description of Artificial Sequence: Synthetic oligonucleotide
aaaauccggguuggggacu

SEQ ID NO: 770552 - RNA, 19 nt, Artificial Sequence
  Description of Artificial Sequence: Synthetic oligonucleotide
ucccaccugcucaaauagc

SEQ ID NO: 770553 - RNA, 19 nt, Artificial Sequence
  Description of Artificial Sequence: Synthetic oligonucleotide
uguagcagagugggguccc

SEQ ID NO: 770554 - RNA, 19 nt, Artificial Sequence
  Description of Artificial Sequence: Synthetic oligonucleotide
acgcccauugucauggcag

SEQ ID NO: 770555 - RNA, 19 nt, Artificial Sequence
  Description of Artificial Sequence: Synthetic oligonucleotide
ugaccuuuugggugcuaga

SEQ ID NO: 770556 - RNA, 19 nt, Artificial Sequence
  Description of Artificial Sequence: Synthetic oligonucleotide
guccuaaugcaggggaucc

SEQ ID NO: 770557 - RNA, 19 nt, Artificial Sequence
  Description of Artificial Sequence: Synthetic oligonucleotide
gugaauugggcaguaggca

SEQ ID NO: 770558 - RNA, 19 nt, Artificial Sequence
  Description of Artificial Sequence: Synthetic oligonucleotide
ugcaggggauccgagcacc

SEQ ID NO: 770559 - RNA, 19 nt, Artificial Sequence
  Description of Artificial Sequence: Synthetic oligonucleotide
uggcggaaacucuccucgg

SEQ ID NO: 770560 - RNA, 19 nt, Artificial Sequence
  Description of Artificial Sequence: Synthetic oligonucleotide
gguuucgugaggaggcugg

SEQ ID NO: 770561 - RNA, 19 nt, Artificial Sequence
  Description of Artificial Sequence: Synthetic oligonucleotide
agaccucugcuguugcgca

SEQ ID NO: 770562 - RNA, 19 nt, Artificial Sequence
  Description of Artificial Sequence: Synthetic oligonucleotide
aguguguagcuguguauua

SEQ ID NO: 770563 - RNA, 19 nt, Artificial Sequence
  Description of Artificial Sequence: Synthetic oligonucleotide
gugcuaaaacuucgagccc

SEQ ID NO: 770564 - RNA, 19 nt, Artificial Sequence
  Description of Artificial Sequence: Synthetic oligonucleotide
gaguuaugguugucacaug

SEQ ID NO: 770565 - RNA, 19 nt, Artificial Sequence
  Description of Artificial Sequence: Synthetic oligonucleotide
uucggggccacggauuaca

SEQ ID NO: 770566 - RNA, 19 nt, Artificial Sequence
  Description of Artificial Sequence: Synthetic oligonucleotide
acaaguucggggccacgga

SEQ ID NO: 770567 - RNA, 19 nt, Artificial Sequence
  Description of Artificial Sequence: Synthetic oligonucleotide
agcgaggaaaugggcaguc

SEQ ID NO: 770568 - RNA, 19 nt, Artificial Sequence
  Description of Artificial Sequence: Synthetic oligonucleotide
uugucagacccugggagaa

SEQ ID NO: 770569 - RNA, 19 nt, Artificial Sequence
  Description of Artificial Sequence: Synthetic oligonucleotide
acucuccucgggcaagucu

SEQ ID NO: 770570 - RNA, 19 nt, Artificial Sequence
  Description of Artificial Sequence: Synthetic oligonucleotide
guaagcaacaccacucucu

SEQ ID NO: 770571 - RNA, 19 nt, Artificial Sequence
  Description of Artificial Sequence: Synthetic oligonucleotide
ggauagcacaaacuguguc

SEQ ID NO: 770572 - RNA, 19 nt, Artificial Sequence
  Description of Artificial Sequence: Synthetic oligonucleotide
aucgaggcucucugacagg

SEQ ID NO: 770573 - RNA, 19 nt, Artificial Sequence
  Description of Artificial Sequence: Synthetic oligonucleotide
cugaccuuuugggugcuag

SEQ ID NO: 770574 - RNA, 19 nt, Artificial Sequence
  Description of Artificial Sequence: Synthetic oligonucleotide
aggagcccagguuucguga

SEQ ID NO: 770575 - RNA, 19 nt, Artificial Sequence
  Description of Artificial Sequence: Synthetic oligonucleotide
ccuuagggcucuauccugg

SEQ ID NO: 770576 - RNA, 19 nt, Artificial Sequence
  Description of Artificial Sequence: Synthetic oligonucleotide
cacaugauaucagcagcug

SEQ ID NO: 770577 - RNA, 19 nt, Artificial Sequence
  Description of Artificial Sequence: Synthetic oligonucleotide
gccccuagcagacuuuucc

SEQ ID NO: 770578 - RNA, 19 nt, Artificial Sequence
  Description of Artificial Sequence: Synthetic oligonucleotide
aggagcgaggaaaugggca

SEQ ID NO: 770579 - RNA, 19 nt, Artificial Sequence
  Description of Artificial Sequence: Synthetic oligonucleotide
ugcgcacaugcuuuagcau

SEQ ID NO: 770580 - RNA, 19 nt, Artificial Sequence
  Description of Artificial Sequence: Synthetic oligonucleotide
gguuucacuguguucccac

SEQ ID NO: 770581 - RNA, 19 nt, Artificial Sequence
  Description of Artificial Sequence: Synthetic oligonucleotide
gcuaccaccaccacuugug

SEQ ID NO: 770582 - RNA, 19 nt, Artificial Sequence
  Description of Artificial Sequence: Synthetic oligonucleotide
acgaguccuaaugcagggg

SEQ ID NO: 770583 - RNA, 19 nt, Artificial Sequence
  Description of Artificial Sequence: Synthetic oligonucleotide
aaacucuccucgggcaagu

SEQ ID NO: 770584 - RNA, 19 nt, Artificial Sequence
  Description of Artificial Sequence: Synthetic oligonucleotide
ccgacugccaugaaaagga

SEQ ID NO: 770585 - RNA, 19 nt, Artificial Sequence
  Description of Artificial Sequence: Synthetic oligonucleotide
uggaaagcgcuggucuagc

SEQ ID NO: 770586 - RNA, 19 nt, Artificial Sequence
  Description of Artificial Sequence: Synthetic oligonucleotide
aguugcauucaagugugua

SEQ ID NO: 770587 - RNA, 19 nt, Artificial Sequence
  Description of Artificial Sequence: Synthetic oligonucleotide
caggucacugcuaugggua

SEQ ID NO: 770588 - RNA, 19 nt, Artificial Sequence
  Description of Artificial Sequence: Synthetic oligonucleotide
guagagugauuuucuggaa

SEQ ID NO: 770589 - RNA, 19 nt, Artificial Sequence
  Description of Artificial Sequence: Synthetic oligonucleotide
cacggauuacauucugcca

SEQ ID NO: 770590 - RNA, 19 nt, Artificial Sequence
  Description of Artificial Sequence: Synthetic oligonucleotide
cugguguagcagagugggg

SEQ ID NO: 770591 - RNA, 19 nt, Artificial Sequence
  Description of Artificial Sequence: Synthetic oligonucleotide
uguucacugagcgcccagu

SEQ ID NO: 770592 - RNA, 19 nt, Artificial Sequence
  Description of Artificial Sequence: Synthetic oligonucleotide
gacuaacauaugguuucac

SEQ ID NO: 770593 - RNA, 19 nt, Artificial Sequence
  Description of Artificial Sequence: Synthetic oligonucleotide
acgaaacggugaacaaagg

SEQ ID NO: 770594 - RNA, 19 nt, Artificial Sequence
  Description of Artificial Sequence: Synthetic oligonucleotide
agcuuuggauauagcaugu

SEQ ID NO: 770595 - RNA, 19 nt, Artificial Sequence
  Description of Artificial Sequence: Synthetic oligonucleotide
gccgacugccaugaaaagg

SEQ ID NO: 770596 - RNA, 19 nt, Artificial Sequence
  Description of Artificial Sequence: Synthetic oligonucleotide
aacucuccucgggcaaguc

SEQ ID NO: 770597 - RNA, 19 nt, Artificial Sequence
  Description of Artificial Sequence: Synthetic oligonucleotide
gauggagauuuagggacaa

SEQ ID NO: 770598 - RNA, 19 nt, Artificial Sequence
  Description of Artificial Sequence: Synthetic oligonucleotide
ggaguuaugguugucacau

SEQ ID NO: 770599 - RNA, 19 nt, Artificial Sequence
  Description of Artificial Sequence: Synthetic oligonucleotide
caaagugggcugaauucaa

SEQ ID NO: 770600 - RNA, 19 nt, Artificial Sequence
  Description of Artificial Sequence: Synthetic oligonucleotide
cuggacgucgggacuaaca

SEQ ID NO: 770601 - RNA, 19 nt, Artificial Sequence
  Description of Artificial Sequence: Synthetic oligonucleotide
ucccugaggcuuuguagau

SEQ ID NO: 770602 - RNA, 19 nt, Artificial Sequence
  Description of Artificial Sequence: Synthetic oligonucleotide
guuucgugaggaggcuggg

SEQ ID NO: 770603 - RNA, 19 nt, Artificial Sequence
  Description of Artificial Sequence: Synthetic oligonucleotide
ggcaucgaggcucucugac

SEQ ID NO: 770604 - RNA, 19 nt, Artificial Sequence
  Description of Artificial Sequence: Synthetic oligonucleotide
agacauugucagacccugg

SEQ ID NO: 770605 - RNA, 19 nt, Artificial Sequence
  Description of Artificial Sequence: Synthetic oligonucleotide
cuacgaaacggugaacaaa

SEQ ID NO: 770606 - RNA, 19 nt, Artificial Sequence
  Description of Artificial Sequence: Synthetic oligonucleotide
guagggcggugguucagug

SEQ ID NO: 770607 - RNA, 19 nt, Artificial Sequence
  Description of Artificial Sequence: Synthetic oligonucleotide
uccggcccaaccugggccu

SEQ ID NO: 770608 - RNA, 19 nt, Artificial Sequence
  Description of Artificial Sequence: Synthetic oligonucleotide
cgucgggacuaacauaugg

SEQ ID NO: 770609 - RNA, 19 nt, Artificial Sequence
  Description of Artificial Sequence: Synthetic oligonucleotide
gcuaaaacuucgagcccgg

SEQ ID NO: 770610 - RNA, 19 nt, Artificial Sequence
  Description of Artificial Sequence: Synthetic oligonucleotide
uuguuacuuuugggagggg

SEQ ID NO: 770611 - RNA, 19 nt, Artificial Sequence
  Description of Artificial Sequence: Synthetic oligonucleotide
uaguugcauucaagugugu

SEQ ID NO: 770612 - RNA, 19 nt, Artificial Sequence
  Description of Artificial Sequence: Synthetic oligonucleotide
cacugagcgcccaguguug

SEQ ID NO: 770613 - RNA, 19 nt, Artificial Sequence
  Description of Artificial Sequence: Synthetic oligonucleotide
gacagggccuagcacccga

SEQ ID NO: 770614 - RNA, 19 nt, Artificial Sequence
  Description of Artificial Sequence: Synthetic oligonucleotide
guguagcagaguggggucc

SEQ ID NO: 770615 - RNA, 19 nt, Artificial Sequence
  Description of Artificial Sequence: Synthetic oligonucleotide
gcggaaacucuccucgggc

SEQ ID NO: 770616 - RNA, 19 nt, Artificial Sequence
  Description of Artificial Sequence: Synthetic oligonucleotide
uccccggcccucuacgaaa

SEQ ID NO: 770617 - RNA, 19 nt, Artificial Sequence
  Description of Artificial Sequence: Synthetic oligonucleotide
ugguuucacuguguuccca

SEQ ID NO: 770618 - RNA, 19 nt, Artificial Sequence
  Description of Artificial Sequence: Synthetic oligonucleotide
caucccucugcgagucggc

SEQ ID NO: 770619 - RNA, 19 nt, Artificial Sequence
  Description of Artificial Sequence: Synthetic oligonucleotide
gguguagcagagugggguc

SEQ ID NO: 770620 - RNA, 19 nt, Artificial Sequence
  Description of Artificial Sequence: Synthetic oligonucleotide
gcauucaaguguguagcug

SEQ ID NO: 770621 - RNA, 19 nt, Artificial Sequence
  Description of Artificial Sequence: Synthetic oligonucleotide
cgcacaugcuuuagcaucc

SEQ ID NO: 770622 - RNA, 19 nt, Artificial Sequence
  Description of Artificial Sequence: Synthetic oligonucleotide
ggcuuguccccugaagaag

SEQ ID NO: 770623 - RNA, 19 nt, Artificial Sequence
  Description of Artificial Sequence: Synthetic oligonucleotide
gccgcuucccucuuuggac

SEQ ID NO: 770624 - RNA, 19 nt, Artificial Sequence
  Description of Artificial Sequence: Synthetic oligonucleotide
ugacagggccuagcacccg

SEQ ID NO: 770625 - RNA, 19 nt, Artificial Sequence
  Description of Artificial Sequence: Synthetic oligonucleotide
uggcaucgaggcucucuga

SEQ ID NO: 770626 - RNA, 19 nt, Artificial Sequence
  Description of Artificial Sequence: Synthetic oligonucleotide
aaguucggggccacggauu

SEQ ID NO: 770627 - RNA, 19 nt, Artificial Sequence
  Description of Artificial Sequence: Synthetic oligonucleotide
cuggucuagcugguuuagc

SEQ ID NO: 770628 - RNA, 19 nt, Artificial Sequence
  Description of Artificial Sequence: Synthetic oligonucleotide
cuguucacugagcgcccag

SEQ ID NO: 770629 - RNA, 19 nt, Artificial Sequence
  Description of Artificial Sequence: Synthetic oligonucleotide
ucucuacggucucgggcau

SEQ ID NO: 770630 - RNA, 19 nt, Artificial Sequence
  Description of Artificial Sequence: Synthetic oligonucleotide
cuauccugggcguggaggu

SEQ ID NO: 770631 - RNA, 19 nt, Artificial Sequence
  Description of Artificial Sequence: Synthetic oligonucleotide
gguucgagaugcucucuuc

SEQ ID NO: 770632 - RNA, 19 nt, Artificial Sequence
  Description of Artificial Sequence: Synthetic oligonucleotide
cagguuagugaggcuguug

SEQ ID NO: 770633 - RNA, 19 nt, Artificial Sequence
  Description of Artificial Sequence: Synthetic oligonucleotide
ggucuagcugguuuagcaa

SEQ ID NO: 770634 - RNA, 19 nt, Artificial Sequence
  Description of Artificial Sequence: Synthetic oligonucleotide
ccccuagcagacuuuuccc

SEQ ID NO: 770635 - RNA, 19 nt, Artificial Sequence
  Description of Artificial Sequence: Synthetic oligonucleotide
agcuguuuccauacaugaa

SEQ ID NO: 770636 - RNA, 19 nt, Artificial Sequence
  Description of Artificial Sequence: Synthetic oligonucleotide
guguauuaucccugaggcu

SEQ ID NO: 770637 - RNA, 19 nt, Artificial Sequence
  Description of Artificial Sequence: Synthetic oligonucleotide
ggggauccgagcaccagcc

SEQ ID NO: 770638 - RNA, 19 nt, Artificial Sequence
  Description of Artificial Sequence: Synthetic oligonucleotide
ggcagagcggggccguggg

SEQ ID NO: 770639 - RNA, 19 nt, Artificial Sequence
  Description of Artificial Sequence: Synthetic oligonucleotide
guagcagaguggggucccg

SEQ ID NO: 770640 - RNA, 19 nt, Artificial Sequence
  Description of Artificial Sequence: Synthetic oligonucleotide
ucuugcucgcagccauguu

SEQ ID NO: 770641 - RNA, 19 nt, Artificial Sequence
  Description of Artificial Sequence: Synthetic oligonucleotide
cuggucagaccucugcugu

SEQ ID NO: 770642 - RNA, 19 nt, Artificial Sequence
  Description of Artificial Sequence: Synthetic oligonucleotide
gucgggacuaacauauggu

SEQ ID NO: 770643 - RNA, 19 nt, Artificial Sequence
  Description of Artificial Sequence: Synthetic oligonucleotide
ugguagggcggugguucag

SEQ ID NO: 770644 - RNA, 19 nt, Artificial Sequence
  Description of Artificial Sequence: Synthetic oligonucleotide
cucuauccugggcguggag

SEQ ID NO: 770645 - RNA, 19 nt, Artificial Sequence
  Description of Artificial Sequence: Synthetic oligonucleotide
ggaaacucuccucgggcaa

SEQ ID NO: 770646 - RNA, 19 nt, Artificial Sequence
  Description of Artificial Sequence: Synthetic oligonucleotide
caccuuagggcucuauccu

SEQ ID NO: 770647 - RNA, 19 nt, Artificial Sequence
  Description of Artificial Sequence: Synthetic oligonucleotide
gccgucuucugucuuggca

SEQ ID NO: 770648 - RNA, 19 nt, Artificial Sequence
  Description of Artificial Sequence: Synthetic oligonucleotide
gggcguggcacgcccauug

SEQ ID NO: 770649 - RNA, 19 nt, Artificial Sequence
  Description of Artificial Sequence: Synthetic oligonucleotide
gggaauccgggaccccucc

SEQ ID NO: 770650 - RNA, 19 nt, Artificial Sequence
  Description of Artificial Sequence: Synthetic oligonucleotide
cgcccaguguuguaguugc

SEQ ID NO: 770651 - RNA, 19 nt, Artificial Sequence
  Description of Artificial Sequence: Synthetic oligonucleotide
auaguggaugauggagauu

SEQ ID NO: 770652 - RNA, 19 nt, Artificial Sequence
  Description of Artificial Sequence: Synthetic oligonucleotide
cuagcacccgauggcugac

SEQ ID NO: 770653 - RNA, 19 nt, Artificial Sequence
  Description of Artificial Sequence: Synthetic oligonucleotide
guuaugguugucacaugau

SEQ ID NO: 770654 - RNA, 19 nt, Artificial Sequence
  Description of Artificial Sequence: Synthetic oligonucleotide
ggccgacugccaugaaaag

SEQ ID NO: 770655 - RNA, 19 nt, Artificial Sequence
  Description of Artificial Sequence: Synthetic oligonucleotide
gcgaagaaggugguggcuc

SEQ ID NO: 770656 - RNA, 19 nt, Artificial Sequence
  Description of Artificial Sequence: Synthetic oligonucleotide
ggccacggauuacauucug

SEQ ID NO: 770657 - RNA, 19 nt, Artificial Sequence
  Description of Artificial Sequence: Synthetic oligonucleotide
caggcccgcagguuaguga

SEQ ID NO: 770658 - RNA, 19 nt, Artificial Sequence
  Description of Artificial Sequence: Synthetic oligonucleotide
cugcgagucggcggugagc

SEQ ID NO: 770659 - RNA, 19 nt, Artificial Sequence
  Description of Artificial Sequence: Synthetic oligonucleotide
aacuucgagcccggcucaa

SEQ ID NO: 770660 - RNA, 19 nt, Artificial Sequence
  Description of Artificial Sequence: Synthetic oligonucleotide
caggccgacugccaugaaa

SEQ ID NO: 770661 - RNA, 19 nt, Artificial Sequence
  Description of Artificial Sequence: Synthetic oligonucleotide
gugguagggcggugguuca

SEQ ID NO: 770662 - RNA, 19 nt, Artificial Sequence
  Description of Artificial Sequence: Synthetic oligonucleotide
ggacuaacauaugguuuca

SEQ ID NO: 770663 - RNA, 19 nt, Artificial Sequence
  Description of Artificial Sequence: Synthetic oligonucleotide
ugcucgcagccauguucac

SEQ ID NO: 770664 - RNA, 19 nt, Artificial Sequence
  Description of Artificial Sequence: Synthetic oligonucleotide
cugucucaaggugguguuc

SEQ ID NO: 770665 - RNA, 19 nt, Artificial Sequence
  Description of Artificial Sequence: Synthetic oligonucleotide
gugcuagagcccaggccug

SEQ ID NO: 770666 - RNA, 19 nt, Artificial Sequence
  Description of Artificial Sequence: Synthetic oligonucleotide
agcgcccaguguuguaguu

SEQ ID NO: 770667 - RNA, 19 nt, Artificial Sequence
  Description of Artificial Sequence: Synthetic oligonucleotide
cuuuagcauccaggcccgc

SEQ ID NO: 770668 - RNA, 19 nt, Artificial Sequence
  Description of Artificial Sequence: Synthetic oligonucleotide
gcccgcagguuagugaggc

SEQ ID NO: 770669 - RNA, 19 nt, Artificial Sequence
  Description of Artificial Sequence: Synthetic oligonucleotide
agccccuagcagacuuuuc

SEQ ID NO: 770670 - RNA, 19 nt, Artificial Sequence
  Description of Artificial Sequence: Synthetic oligonucleotide
cacgcccauugucauggca

SEQ ID NO: 770671 - RNA, 19 nt, Artificial Sequence
  Description of Artificial Sequence: Synthetic oligonucleotide
cccggcucaaggcauuuuc

SEQ ID NO: 770672 - RNA, 19 nt, Artificial Sequence
  Description of Artificial Sequence: Synthetic oligonucleotide
ccuagcacccgauggcuga

SEQ ID NO: 770673 - RNA, 19 nt, Artificial Sequence
  Description of Artificial Sequence: Synthetic oligonucleotide
ggcguggagguaaagacau

SEQ ID NO: 770674 - RNA, 19 nt, Artificial Sequence
  Description of Artificial Sequence: Synthetic oligonucleotide
auagcucgucccaccugcu

SEQ ID NO: 770675 - RNA, 19 nt, Artificial Sequence
  Description of Artificial Sequence: Synthetic oligonucleotide
ccggcccucuacgaaacgg

SEQ ID NO: 770676 - RNA, 19 nt, Artificial Sequence
  Description of Artificial Sequence: Synthetic oligonucleotide
auggagauuuagggacaaa

SEQ ID NO: 770677 - RNA, 19 nt, Artificial Sequence
  Description of Artificial Sequence: Synthetic oligonucleotide
cguggcacgcccauuguca

SEQ ID NO: 770678 - RNA, 19 nt, Artificial Sequence
  Description of Artificial Sequence: Synthetic oligonucleotide
ggcccucuacgaaacggug

SEQ ID NO: 770679 - RNA, 19 nt, Artificial Sequence
  Description of Artificial Sequence: Synthetic oligonucleotide
ccuaaugcaggggauccga

SEQ ID NO: 770680 - RNA, 19 nt, Artificial Sequence
  Description of Artificial Sequence: Synthetic oligonucleotide
cgaguccuaaugcagggga

SEQ ID NO: 770681 - RNA, 19 nt, Artificial Sequence
  Description of Artificial Sequence: Synthetic oligonucleotide
ggccgcuucccucuuugga

SEQ ID NO: 770682 - RNA, 19 nt, Artificial Sequence
  Description of Artificial Sequence: Synthetic oligonucleotide
cccucuacgaaacggugaa

SEQ ID NO: 770683 - RNA, 19 nt, Artificial Sequence
  Description of Artificial Sequence: Synthetic oligonucleotide
ggcggugguucaguggcug

SEQ ID NO: 770684 - RNA, 19 nt, Artificial Sequence
  Description of Artificial Sequence: Synthetic oligonucleotide
gggauccgagcaccagccc

SEQ ID NO: 770685 - RNA, 19 nt, Artificial Sequence
  Description of Artificial Sequence: Synthetic oligonucleotide
caaguucggggccacggau

SEQ ID NO: 770686 - RNA, 19 nt, Artificial Sequence
  Description of Artificial Sequence: Synthetic oligonucleotide
ccguugugacagaauccac

SEQ ID NO: 770687 - RNA, 19 nt, Artificial Sequence
  Description of Artificial Sequence: Synthetic oligonucleotide
cucgucauuaaagcuguuu

SEQ ID NO: 770688 - RNA, 19 nt, Artificial Sequence
  Description of Artificial Sequence: Synthetic oligonucleotide
aggugaccguugugacaga

SEQ ID NO: 770689 - RNA, 19 nt, Artificial Sequence
  Description of Artificial Sequence: Synthetic oligonucleotide
gaguccuaaugcaggggau

SEQ ID NO: 770690 - RNA, 19 nt, Artificial Sequence
  Description of Artificial Sequence: Synthetic oligonucleotide
agauugcaacacggccgcu

SEQ ID NO: 770691 - RNA, 19 nt, Artificial Sequence
  Description of Artificial Sequence: Synthetic oligonucleotide
cuauggguagagugauuuu

SEQ ID NO: 770692 - RNA, 19 nt, Artificial Sequence
  Description of Artificial Sequence: Synthetic oligonucleotide
gcggugguucaguggcugc

SEQ ID NO: 770693 - RNA, 19 nt, Artificial Sequence
  Description of Artificial Sequence: Synthetic oligonucleotide
ggacgucgggacuaacaua

SEQ ID NO: 770694 - RNA, 19 nt, Artificial Sequence
  Description of Artificial Sequence: Synthetic oligonucleotide
gagcgcccaguguuguagu

SEQ ID NO: 770695 - RNA, 19 nt, Artificial Sequence
  Description of Artificial Sequence: Synthetic oligonucleotide
acgucgggacuaacauaug

SEQ ID NO: 770696 - RNA, 19 nt, Artificial Sequence
  Description of Artificial Sequence: Synthetic oligonucleotide
gcgcccaguguuguaguug

SEQ ID NO: 770697 - RNA, 19 nt, Artificial Sequence
  Description of Artificial Sequence: Synthetic oligonucleotide
cuggggaauccgggacccc

SEQ ID NO: 770698 - RNA, 19 nt, Artificial Sequence
  Description of Artificial Sequence: Synthetic oligonucleotide
ccgggaccccuccuggcgg

SEQ ID NO: 770699 - RNA, 19 nt, Artificial Sequence
  Description of Artificial Sequence: Synthetic oligonucleotide
gcgaggaaaugggcagucc

SEQ ID NO: 770700 - RNA, 19 nt, Artificial Sequence
  Description of Artificial Sequence: Synthetic oligonucleotide
ggugaccguugugacagaa

SEQ ID NO: 770701 - RNA, 19 nt, Artificial Sequence
  Description of Artificial Sequence: Synthetic oligonucleotide
ccggcucaaggcauuuuca

SEQ ID NO: 770702 - RNA, 19 nt, Artificial Sequence
  Description of Artificial Sequence: Synthetic oligonucleotide
gcccucuacgaaacgguga

SEQ ID NO: 770703 - RNA, 19 nt, Artificial Sequence
  Description of Artificial Sequence: Synthetic oligonucleotide
ugccgccgucuucugucuu

SEQ ID NO: 770704 - RNA, 19 nt, Artificial Sequence
  Description of Artificial Sequence: Synthetic oligonucleotide
ggaaagcgcuggucuagcu

SEQ ID NO: 770705 - RNA, 19 nt, Artificial Sequence
  Description of Artificial Sequence: Synthetic oligonucleotide
accccuccuggcggaaacu

SEQ ID NO: 770706 - RNA, 19 nt, Artificial Sequence
  Description of Artificial Sequence: Synthetic oligonucleotide
cggaaacucuccucgggca

SEQ ID NO: 770707 - RNA, 19 nt, Artificial Sequence
  Description of Artificial Sequence: Synthetic oligonucleotide
ccugauaagcucagugaau

SEQ ID NO: 770708 - RNA, 19 nt, Artificial Sequence
  Description of Artificial Sequence: Synthetic oligonucleotide
ggccuagccuggggaaucc

SEQ ID NO: 770709 - RNA, 19 nt, Artificial Sequence
  Description of Artificial Sequence: Synthetic oligonucleotide
guucggggccacggauuac

SEQ ID NO: 770710 - RNA, 19 nt, Artificial Sequence
  Description of Artificial Sequence: Synthetic oligonucleotide
cucugcgagucggcgguga

SEQ ID NO: 770711 - RNA, 19 nt, Artificial Sequence
  Description of Artificial Sequence: Synthetic oligonucleotide
gcguggcacgcccauuguc

SEQ ID NO: 770712 - RNA, 19 nt, Artificial Sequence
  Description of Artificial Sequence: Synthetic oligonucleotide
cauugguucaggggccccu

SEQ ID NO: 770713 - RNA, 19 nt, Artificial Sequence
  Description of Artificial Sequence: Synthetic oligonucleotide
gccuagcacccgauggcug

SEQ ID NO: 770714 - RNA, 19 nt, Artificial Sequence
  Description of Artificial Sequence: Synthetic oligonucleotide
agcuggacgucgggacuaa

SEQ ID NO: 770715 - RNA, 19 nt, Artificial Sequence
  Description of Artificial Sequence: Synthetic oligonucleotide
gccuagccuggggaauccg

SEQ ID NO: 770716 - RNA, 19 nt, Artificial Sequence
  Description of Artificial Sequence: Synthetic oligonucleotide
cuccccggcccucuacgaa

SEQ ID NO: 770717 - RNA, 19 nt, Artificial Sequence
  Description of Artificial Sequence: Synthetic oligonucleotide
cgauggccauagcucgucc

SEQ ID NO: 770718 - RNA, 19 nt, Artificial Sequence
  Description of Artificial Sequence: Synthetic oligonucleotide
ccgccgucuucugucuugg

SEQ ID NO: 770719 - RNA, 19 nt, Artificial Sequence
  Description of Artificial Sequence: Synthetic oligonucleotide
ggcccgcagguuagugagg

SEQ ID NO: 770720 - RNA, 19 nt, Artificial Sequence
  Description of Artificial Sequence: Synthetic oligonucleotide
gugaccguugugacagaau

SEQ ID NO: 770721 - RNA, 19 nt, Artificial Sequence
  Description of Artificial Sequence: Synthetic oligonucleotide
gcagcuggacgucgggacu

SEQ ID NO: 770722 - RNA, 19 nt, Artificial Sequence
  Description of Artificial Sequence: Synthetic oligonucleotide
cagcuggacgucgggacua

SEQ ID NO: 770723 - RNA, 19 nt, Artificial Sequence
  Description of Artificial Sequence: Synthetic oligonucleotide
ccccggcccucuacgaaac

SEQ ID NO: 770724 - RNA, 19 nt, Artificial Sequence
  Description of Artificial Sequence: Synthetic oligonucleotide
ccucuacgaaacggugaac

SEQ ID NO: 770725 - RNA, 19 nt, Artificial Sequence
  Description of Artificial Sequence: Synthetic oligonucleotide
gccccuuuuggaagcaugu

SEQ ID NO: 770726 - RNA, 19 nt, Artificial Sequence
  Description of Artificial Sequence: Synthetic oligonucleotide
gguuggggacucagauaga

SEQ ID NO: 770727 - RNA, 19 nt, Artificial Sequence
  Description of Artificial Sequence: Synthetic oligonucleotide
gguagggcggugguucagu

SEQ ID NO: 770728 - RNA, 19 nt, Artificial Sequence
  Description of Artificial Sequence: Synthetic oligonucleotide
ggguucgagaugcucucuu

SEQ ID NO: 770729 - RNA, 19 nt, Artificial Sequence
  Description of Artificial Sequence: Synthetic oligonucleotide
cggucucgggcauacaugu

SEQ ID NO: 770730 - RNA, 19 nt, Artificial Sequence
  Description of Artificial Sequence: Synthetic oligonucleotide
cccggcccucuacgaaacg

SEQ ID NO: 770731 - RNA, 19 nt, Artificial Sequence
  Description of Artificial Sequence: Synthetic oligonucleotide
guccccugaagaagagaau

SEQ ID NO: 770732 - RNA, 19 nt, Artificial Sequence
  Description of Artificial Sequence: Synthetic oligonucleotide
ggccuagcacccgauggcu

SEQ ID NO: 770733 - RNA, 19 nt, Artificial Sequence
  Description of Artificial Sequence: Synthetic oligonucleotide
cgucccaccugcucaaaua

SEQ ID NO: 770734 - RNA, 19 nt, Artificial Sequence
  Description of Artificial Sequence: Synthetic oligonucleotide
ccauauccagagcugcgau

SEQ ID NO: 770735 - RNA, 19 nt, Artificial Sequence
  Description of Artificial Sequence: Synthetic oligonucleotide
ccaggcccgcagguuagug

SEQ ID NO: 770736 - RNA, 19 nt, Artificial Sequence
  Description of Artificial Sequence: Synthetic oligonucleotide
gcaaauccuggcagucacu

SEQ ID NO: 770737 - RNA, 19 nt, Artificial Sequence
  Description of Artificial Sequence: Synthetic oligonucleotide
ccgcuucccucuuuggacu

SEQ ID NO: 770738 - RNA, 19 nt, Artificial Sequence
  Description of Artificial Sequence: Synthetic oligonucleotide
cuacggucucgggcauaca

SEQ ID NO: 770739 - RNA, 19 nt, Artificial Sequence
  Description of Artificial Sequence: Synthetic oligonucleotide
cgggacuaacauaugguuu

SEQ ID NO: 770740 - RNA, 19 nt, Artificial Sequence
  Description of Artificial Sequence: Synthetic oligonucleotide
cccucugcgagucggcggu

SEQ ID NO: 770741 - RNA, 19 nt, Artificial Sequence
  Description of Artificial Sequence: Synthetic oligonucleotide
gcuggacgucgggacuaac

SEQ ID NO: 770742 - RNA, 19 nt, Artificial Sequence
  Description of Artificial Sequence: Synthetic oligonucleotide
cggccgcuucccucuuugg

SEQ ID NO: 770743 - RNA, 19 nt, Artificial Sequence
  Description of Artificial Sequence: Synthetic oligonucleotide
cucuacggucucgggcaua

SEQ ID NO: 770744 - RNA, 19 nt, Artificial Sequence
  Description of Artificial Sequence: Synthetic oligonucleotide
gcgcuggucuagcugguuu

SEQ ID NO: 770745 - RNA, 19 nt, Artificial Sequence
  Description of Artificial Sequence: Synthetic oligonucleotide
ggcguggcacgcccauugu

SEQ ID NO: 770746 - RNA, 19 nt, Artificial Sequence
  Description of Artificial Sequence: Synthetic oligonucleotide
cccaguguuguaguugcau

SEQ ID NO: 770747 - RNA, 19 nt, Artificial Sequence
  Description of Artificial Sequence: Synthetic oligonucleotide
gggccacggauuacauucu

SEQ ID NO: 770748 - RNA, 19 nt, Artificial Sequence
  Description of Artificial Sequence: Synthetic oligonucleotide
cagccccuagcagacuuuu

SEQ ID NO: 770749 - RNA, 19 nt, Artificial Sequence
  Description of Artificial Sequence: Synthetic oligonucleotide
gggguucgagaugcucucu

SEQ ID NO: 770750 - RNA, 19 nt, Artificial Sequence
  Description of Artificial Sequence: Synthetic oligonucleotide
gcgagucggcggugagcuc

SEQ ID NO: 770751 - RNA, 19 nt, Artificial Sequence
  Description of Artificial Sequence: Synthetic oligonucleotide
cgccgucuucugucuuggc

SEQ ID NO: 770752 - RNA, 19 nt, Artificial Sequence
  Description of Artificial Sequence: Synthetic oligonucleotide
cggcccucuacgaaacggu

SEQ ID NO: 770753 - RNA, 19 nt, Artificial Sequence
  Description of Artificial Sequence: Synthetic oligonucleotide
ccucugcgagucggcggug

SEQ ID NO: 770754 - RNA, 19 nt, Artificial Sequence
  Description of Artificial Sequence: Synthetic oligonucleotide
gcucccugauaagcucagu

SEQ ID NO: 770755 - RNA, 19 nt, Artificial Sequence
  Description of Artificial Sequence: Synthetic oligonucleotide
ggucucgggcauacauguu

SEQ ID NO: 770756 - RNA, 19 nt, Artificial Sequence
  Description of Artificial Sequence: Synthetic oligonucleotide
gcugaccuuuugggugcua

SEQ ID NO: 770757 - RNA, 19 nt, Artificial Sequence
  Description of Artificial Sequence: Synthetic oligonucleotide
gcacccgauggcugaccuu

SEQ ID NO: 770758 - RNA, 19 nt, Artificial Sequence
  Description of Artificial Sequence: Synthetic oligonucleotide
cggcccaaccugggccuag

SEQ ID NO: 770759 - RNA, 19 nt, Artificial Sequence
  Description of Artificial Sequence: Synthetic oligonucleotide
gggcggugguucaguggcu

SEQ ID NO: 770760 - RNA, 19 nt, Artificial Sequence
  Description of Artificial Sequence: Synthetic oligonucleotide
cacggccgcuucccucuuu

SEQ ID NO: 770761 - RNA, 19 nt, Artificial Sequence
  Description of Artificial Sequence: Synthetic oligonucleotide
gcagcccuccaggccgacu

SEQ ID NO: 770762 - RNA, 19 nt, Artificial Sequence
  Description of Artificial Sequence: Synthetic oligonucleotide
gcguggagguaaagacauu

SEQ ID NO: 770763 - RNA, 19 nt, Artificial Sequence
  Description of Artificial Sequence: Synthetic oligonucleotide
ccacaccuuagggcucuau

SEQ ID NO: 770764 - RNA, 19 nt, Artificial Sequence
  Description of Artificial Sequence: Synthetic oligonucleotide
cggggccacggauuacauu

SEQ ID NO: 770765 - RNA, 19 nt, Artificial Sequence
  Description of Artificial Sequence: Synthetic oligonucleotide
ccggcccaaccugggccua

SEQ ID NO: 770766 - RNA, 19 nt, Artificial Sequence
  Description of Artificial Sequence: Synthetic oligonucleotide
aagaugaucacccuccucc

SEQ ID NO: 770767 - RNA, 19 nt, Artificial Sequence
  Description of Artificial Sequence: Synthetic oligonucleotide
aacucugcgauucucaugc

SEQ ID NO: 770768 - RNA, 19 nt, Artificial Sequence
  Description of Artificial Sequence: Synthetic oligonucleotide
aacaaucaagcgaagaucc

SEQ ID NO: 770769 - RNA, 19 nt, Artificial Sequence
  Description of Artificial Sequence: Synthetic oligonucleotide
uuguagguaaaauauaucc

SEQ ID NO: 770770 - RNA, 19 nt, Artificial Sequence
  Description of Artificial Sequence: Synthetic oligonucleotide
aagagcguagaguaacucc

SEQ ID NO: 770771 - RNA, 19 nt, Artificial Sequence
  Description of Artificial Sequence: Synthetic oligonucleotide
aaagugcggagccagcucc

SEQ ID NO: 770772 - RNA, 19 nt, Artificial Sequence
  Description of Artificial Sequence: Synthetic oligonucleotide
aaucccgaaauuucucugc

SEQ ID NO: 770773 - RNA, 19 nt, Artificial Sequence
  Description of Artificial Sequence: Synthetic oligonucleotide
agcuacacaaguuuagggc

SEQ ID NO: 770774 - RNA, 19 nt, Artificial Sequence
  Description of Artificial Sequence: Synthetic oligonucleotide
uacacauuaagcaugguaa

SEQ ID NO: 770775 - RNA, 19 nt, Artificial Sequence
  Description of Artificial Sequence: Synthetic oligonucleotide
agcaaagcggcccaggugc

SEQ ID NO: 770776 - RNA, 19 nt, Artificial Sequence
  Description of Artificial Sequence: Synthetic oligonucleotide
caugguaagaugaucaccc

SEQ ID NO: 770777 - RNA, 19 nt, Artificial Sequence
  Description of Artificial Sequence: Synthetic oligonucleotide
aauggaucaaccaucaucu

SEQ ID NO: 770778 - RNA, 19 nt, Artificial Sequence
  Description of Artificial Sequence: Synthetic oligonucleotide
ugucugaugaauuuucacc

SEQ ID NO: 770779 - RNA, 19 nt, Artificial Sequence
  Description of Artificial Sequence: Synthetic oligonucleotide
aaaccuuuaagcuacgcuu

SEQ ID NO: 770780 - RNA, 19 nt, Artificial Sequence
  Description of Artificial Sequence: Synthetic oligonucleotide
aagaaucccgacacgaugc

SEQ ID NO: 770781 - RNA, 19 nt, Artificial Sequence
  Description of Artificial Sequence: Synthetic oligonucleotide
gaaccauugacugugcugg

SEQ ID NO: 770782 - RNA, 19 nt, Artificial Sequence
  Description of Artificial Sequence: Synthetic oligonucleotide
uugauaaaagugcggagcc

SEQ ID NO: 770783 - RNA, 19 nt, Artificial Sequence
  Description of Artificial Sequence: Synthetic oligonucleotide
guagguaaaauauauccac

SEQ ID NO: 770784 - RNA, 19 nt, Artificial Sequence
  Description of Artificial Sequence: Synthetic oligonucleotide
ugaugaauuuucaccacag

SEQ ID NO: 770785 - RNA, 19 nt, Artificial Sequence
  Description of Artificial Sequence: Synthetic oligonucleotide
uuguaauucaggaaaugcu

SEQ ID NO: 770786 - RNA, 19 nt, Artificial Sequence
  Description of Artificial Sequence: Synthetic oligonucleotide
aaguggcuaagaaugaugg

SEQ ID NO: 770787 - RNA, 19 nt, Artificial Sequence
  Description of Artificial Sequence: Synthetic oligonucleotide
ucucgcauguaauacuugg

SEQ ID NO: 770788 - RNA, 19 nt, Artificial Sequence
  Description of Artificial Sequence: Synthetic oligonucleotide
guaaauaacccauaugcuc

SEQ ID NO: 770789 - RNA, 19 nt, Artificial Sequence
  Description of Artificial Sequence: Synthetic oligonucleotide
aaucccgacacgaugcacc

SEQ ID NO: 770790 - RNA, 19 nt, Artificial Sequence
  Description of Artificial Sequence: Synthetic oligonucleotide
  modified_base (5)..(5): a, c, u, g, unknown or other
uuucnccucacauuuauaa

SEQ ID NO: 770791 - RNA, 19 nt, Artificial Sequence
  Description of Artificial Sequence: Synthetic oligonucleotide
agugcagcggaacacuggc

SEQ ID NO: 770792 - RNA, 19 nt, Artificial Sequence
  Description of Artificial Sequence: Synthetic oligonucleotide
ugauaaaugcuucguacac

SEQ ID NO: 770793 - RNA, 19 nt, Artificial Sequence
  Description of Artificial Sequence: Synthetic oligonucleotide
uucguacacauuaagcaug

SEQ ID NO: 770794 - RNA, 19 nt, Artificial Sequence
  Description of Artificial Sequence: Synthetic oligonucleotide
uaagcuacgcuuuuaaaua

SEQ ID NO: 770795 - RNA, 19 nt, Artificial Sequence
  Description of Artificial Sequence: Synthetic oligonucleotide
uugauaaaugcuucguaca

SEQ ID NO: 770796 - RNA, 19 nt, Artificial Sequence
  Description of Artificial Sequence: Synthetic oligonucleotide
uaaaccuuuaagcuacgcu

SEQ ID NO: 770797 - RNA, 19 nt, Artificial Sequence
  Description of Artificial Sequence: Synthetic oligonucleotide
acaagaguuauauuccuga

SEQ ID NO: 770798 - RNA, 19 nt, Artificial Sequence
  Description of Artificial Sequence: Synthetic oligonucleotide
auggcacuaagucuccugc

SEQ ID NO: 770799 - RNA, 19 nt, Artificial Sequence
  Description of Artificial Sequence: Synthetic oligonucleotide
ugugucauggugcucugag

SEQ ID NO: 770800 - RNA, 19 nt, Artificial Sequence
  Description of Artificial Sequence: Synthetic oligonucleotide
uguagugaauuccuguuaa

SEQ ID NO: 770801 - RNA, 19 nt, Artificial Sequence
  Description of Artificial Sequence: Synthetic oligonucleotide
ucguacacauuaagcaugg

SEQ ID NO: 770802 - RNA, 19 nt, Artificial Sequence
  Description of Artificial Sequence: Synthetic oligonucleotide
  modified_base (3)..(3): a, c, u, g, unknown or other
ucnccucacauuuauaaaa

SEQ ID NO: 770803 - RNA, 19 nt, Artificial Sequence
  Description of Artificial Sequence: Synthetic oligonucleotide
guggcuaagaaugaugggg

SEQ ID NO: 770804 - RNA, 19 nt, Artificial Sequence
  Description of Artificial Sequence: Synthetic oligonucleotide
aggguuaaugcccaggaug

SEQ ID NO: 770805 - RNA, 19 nt, Artificial Sequence
  Description of Artificial Sequence: Synthetic oligonucleotide
acccauaugcuccagagga

SEQ ID NO: 770806 - RNA, 19 nt, Artificial Sequence
  Description of Artificial Sequence: Synthetic oligonucleotide
cacuguaagggucacacag

SEQ ID NO: 770807 - RNA, 19 nt, Artificial Sequence
  Description of Artificial Sequence: Synthetic oligonucleotide
cuuguugauaaaagugcgg

SEQ ID NO: 770808 - RNA, 19 nt, Artificial Sequence
  Description of Artificial Sequence: Synthetic oligonucleotide
aaaagugcggagccagcuc

SEQ ID NO: 770809 - RNA, 19 nt, Artificial Sequence
  Description of Artificial Sequence: Synthetic oligonucleotide
ugacacuauauuuuguuaa

SEQ ID NO: 770810 - RNA, 19 nt, Artificial Sequence
  Description of Artificial Sequence: Synthetic oligonucleotide
ucacucucgcagcaaagcg

SEQ ID NO: 770811 - RNA, 19 nt, Artificial Sequence
  Description of Artificial Sequence: Synthetic oligonucleotide
gaagagaggguuaaugccc

SEQ ID NO: 770812 - RNA, 19 nt, Artificial Sequence
  Description of Artificial Sequence: Synthetic oligonucleotide
ucaagguugaugaacuuua

SEQ ID NO: 770813 - RNA, 19 nt, Artificial Sequence
  Description of Artificial Sequence: Synthetic oligonucleotide
uguugauaaaagugcggag

SEQ ID NO: 770814 - RNA, 19 nt, Artificial Sequence
  Description of Artificial Sequence: Synthetic oligonucleotide
gagcuacacaaguuuaggg

SEQ ID NO: 770815 - RNA, 19 nt, Artificial Sequence
  Description of Artificial Sequence: Synthetic oligonucleotide
ugccgaguggcucaguuag

SEQ ID NO: 770816 - RNA, 19 nt, Artificial Sequence
  Description of Artificial Sequence: Synthetic oligonucleotide
uuguugauaaaagugcgga

SEQ ID NO: 770817 - RNA, 19 nt, Artificial Sequence
  Description of Artificial Sequence: Synthetic oligonucleotide
uuaaugcccaggaugcagc

SEQ ID NO: 770818 - RNA, 19 nt, Artificial Sequence
  Description of Artificial Sequence: Synthetic oligonucleotide
gaagaaucccgacacgaug

SEQ ID NO: 770819 - RNA, 19 nt, Artificial Sequence
  Description of Artificial Sequence: Synthetic oligonucleotide
acuauauuuuguuaacaau

SEQ ID NO: 770820 - RNA, 19 nt, Artificial Sequence
  Description of Artificial Sequence: Synthetic oligonucleotide
aaaacaguaaggggaggag

SEQ ID NO: 770821 - RNA, 19 nt, Artificial Sequence
  Description of Artificial Sequence: Synthetic oligonucleotide
caauggaucaaccaucauc

SEQ ID NO: 770822 - RNA, 19 nt, Artificial Sequence
  Description of Artificial Sequence: Synthetic oligonucleotide
agaaacaacucgaaggcag

SEQ ID NO: 770823 - RNA, 19 nt, Artificial Sequence
  Description of Artificial Sequence: Synthetic oligonucleotide
uggcaaaugcugaugggag

SEQ ID NO: 770824 - RNA, 19 nt, Artificial Sequence
  Description of Artificial Sequence: Synthetic oligonucleotide
ucugcgauucucaugccga

SEQ ID NO: 770825 - RNA, 19 nt, Artificial Sequence
  Description of Artificial Sequence: Synthetic oligonucleotide
ugagcuacacaaguuuagg

SEQ ID NO: 770826 - RNA, 19 nt, Artificial Sequence
  Description of Artificial Sequence: Synthetic oligonucleotide
gacacuauauuuuguuaac

SEQ ID NO: 770827 - RNA, 19 nt, Artificial Sequence
  Description of Artificial Sequence: Synthetic oligonucleotide
uucaaacuaaaaccaagua

SEQ ID NO: 770828 - RNA, 19 nt, Artificial Sequence
  Description of Artificial Sequence: Synthetic oligonucleotide
aacccauaugcuccagagg

SEQ ID NO: 770829 - RNA, 19 nt, Artificial Sequence
  Description of Artificial Sequence: Synthetic oligonucleotide
uguaauacuuggaggucug

SEQ ID NO: 770830 - RNA, 19 nt, Artificial Sequence
  Description of Artificial Sequence: Synthetic oligonucleotide
aagcaugguaagaugauca

SEQ ID NO: 770831 - RNA, 19 nt, Artificial Sequence
  Description of Artificial Sequence: Synthetic oligonucleotide
gcaauguccguguacaagg

SEQ ID NO: 770832 - RNA, 19 nt, Artificial Sequence
  Description of Artificial Sequence: Synthetic oligonucleotide
agcaugguaagaugaucac

SEQ ID NO: 770833 - RNA, 19 nt, Artificial Sequence
  Description of Artificial Sequence: Synthetic oligonucleotide
aaggcuugaaccauugacu

SEQ ID NO: 770834 - RNA, 19 nt, Artificial Sequence
  Description of Artificial Sequence: Synthetic oligonucleotide
aagaaaucccgaaauuucu

SEQ ID NO: 770835 - RNA, 19 nt, Artificial Sequence
  Description of Artificial Sequence: Synthetic oligonucleotide
acgcuuuuaaauaaacauc

SEQ ID NO: 770836 - RNA, 19 nt, Artificial Sequence
  Description of Artificial Sequence: Synthetic oligonucleotide
ugccaaaccaucccugcag

SEQ ID NO: 770837 - RNA, 19 nt, Artificial Sequence
  Description of Artificial Sequence: Synthetic oligonucleotide
aguaaggaaggcuaguaua

SEQ ID NO: 770838 - RNA, 19 nt, Artificial Sequence
  Description of Artificial Sequence: Synthetic oligonucleotide
aggaaaugcuccugacacc

SEQ ID NO: 770839 - RNA, 19 nt, Artificial Sequence
  Description of Artificial Sequence: Synthetic oligonucleotide
acccuuguaauucaggaaa

SEQ ID NO: 770840 - RNA, 19 nt, Artificial Sequence
  Description of Artificial Sequence: Synthetic oligonucleotide
gacacgaugcaccucagga

SEQ ID NO: 770841 - RNA, 19 nt, Artificial Sequence
  Description of Artificial Sequence: Synthetic oligonucleotide
ucuguauaacuucauugua

SEQ ID NO: 770842 - RNA, 19 nt, Artificial Sequence
  Description of Artificial Sequence: Synthetic oligonucleotide
aacaucauuaaaacaguaa

SEQ ID NO: 770843 - RNA, 19 nt, Artificial Sequence
  Description of Artificial Sequence: Synthetic oligonucleotide
agccaagccgacucuaugg

SEQ ID NO: 770844 - RNA, 19 nt, Artificial Sequence
  Description of Artificial Sequence: Synthetic oligonucleotide
uguacaagguccucucgug

SEQ ID NO: 770845 - RNA, 19 nt, Artificial Sequence
  Description of Artificial Sequence: Synthetic oligonucleotide
acacgaugcaccucaggac

SEQ ID NO: 770846 - RNA, 19 nt, Artificial Sequence
  Description of Artificial Sequence: Synthetic oligonucleotide
gguaccuggaacuugacga

SEQ ID NO: 770847 - RNA, 19 nt, Artificial Sequence
  Description of Artificial Sequence: Synthetic oligonucleotide
gauggcaaaugcugauggg

SEQ ID NO: 770848 - RNA, 19 nt, Artificial Sequence
  Description of Artificial Sequence: Synthetic oligonucleotide
cuccagaggagugaaaccg

SEQ ID NO: 770849 - RNA, 19 nt, Artificial Sequence
  Description of Artificial Sequence: Synthetic oligonucleotide
aggcuugaaccauugacug

SEQ ID NO: 770850 - RNA, 19 nt, Artificial Sequence
  Description of Artificial Sequence: Synthetic oligonucleotide
aacuuuaucuggcgcccag

SEQ ID NO: 770851 - RNA, 19 nt, Artificial Sequence
  Description of Artificial Sequence: Synthetic oligonucleotide
gaugccaaaccaucccugc

SEQ ID NO: 770852 - RNA, 19 nt, Artificial Sequence
  Description of Artificial Sequence: Synthetic oligonucleotide
aucacucucgcagcaaagc

SEQ ID NO: 770853 - RNA, 19 nt, Artificial Sequence
  Description of Artificial Sequence: Synthetic oligonucleotide
aaauuuccggugcacucga

SEQ ID NO: 770854 - RNA, 19 nt, Artificial Sequence
  Description of Artificial Sequence: Synthetic oligonucleotide
agacaugaaguggaacgcc

SEQ ID NO: 770855 - RNA, 19 nt, Artificial Sequence
  Description of Artificial Sequence: Synthetic oligonucleotide
uuaggcgacagucuuuguc

SEQ ID NO: 770856 - RNA, 19 nt, Artificial Sequence
  Description of Artificial Sequence: Synthetic oligonucleotide
aguaggcacauucaaacua

SEQ ID NO: 770857 - RNA, 19 nt, Artificial Sequence
  Description of Artificial Sequence: Synthetic oligonucleotide
aaacucugcgauucucaug

SEQ ID NO: 770858 - RNA, 19 nt, Artificial Sequence
  Description of Artificial Sequence: Synthetic oligonucleotide
aagggucacacaggugucc

SEQ ID NO: 770859 - RNA, 19 nt, Artificial Sequence
  Description of Artificial Sequence: Synthetic oligonucleotide
agcaugaugacacuauauu

SEQ ID NO: 770860 - RNA, 19 nt, Artificial Sequence
  Description of Artificial Sequence: Synthetic oligonucleotide
auaaaccuuuaagcuacgc

SEQ ID NO: 770861 - RNA, 19 nt, Artificial Sequence
  Description of Artificial Sequence: Synthetic oligonucleotide
caagaguuauauuccugag

SEQ ID NO: 770862 - RNA, 19 nt, Artificial Sequence
  Description of Artificial Sequence: Synthetic oligonucleotide
ugaacuuuaucuggcgccc

SEQ ID NO: 770863 - RNA, 19 nt, Artificial Sequence
  Description of Artificial Sequence: Synthetic oligonucleotide
uuaaaacaguaaggggagg

SEQ ID NO: 770864 - RNA, 19 nt, Artificial Sequence
  Description of Artificial Sequence: Synthetic oligonucleotide
aagcuacgcuuuuaaauaa

SEQ ID NO: 770865 - RNA, 19 nt, Artificial Sequence
  Description of Artificial Sequence: Synthetic oligonucleotide
agaggagugaaaccgcgcu

SEQ ID NO: 770866 - RNA, 19 nt, Artificial Sequence
  Description of Artificial Sequence: Synthetic oligonucleotide
gauacaacaguuucuacuu

SEQ ID NO: 770867 - RNA, 19 nt, Artificial Sequence
  Description of Artificial Sequence: Synthetic oligonucleotide
cuguuaaagaggagucccg

SEQ ID NO: 770868 - RNA, 19 nt, Artificial Sequence
  Description of Artificial Sequence: Synthetic oligonucleotide
aaugcuaagcccacuugca

SEQ ID NO: 770869 - RNA, 19 nt, Artificial Sequence
  Description of Artificial Sequence: Synthetic oligonucleotide
auagauacaacaguuucua

SEQ ID NO: 770870 - RNA, 19 nt, Artificial Sequence
  Description of Artificial Sequence: Synthetic oligonucleotide
uuauauuccugagcuacac

SEQ ID NO: 770871 - RNA, 19 nt, Artificial Sequence
  Description of Artificial Sequence: Synthetic oligonucleotide
agggcaucuaaacuguagu

SEQ ID NO: 770872 - RNA, 19 nt, Artificial Sequence
  Description of Artificial Sequence: Synthetic oligonucleotide
ucuaaacuguagugaauuc

SEQ ID NO: 770873 - RNA, 19 nt, Artificial Sequence
  Description of Artificial Sequence: Synthetic oligonucleotide
cacucucgcagcaaagcgg

SEQ ID NO: 770874 - RNA, 19 nt, Artificial Sequence
  Description of Artificial Sequence: Synthetic oligonucleotide
cacagcaaauuuccggugc

SEQ ID NO: 770875 - RNA, 19 nt, Artificial Sequence
  Description of Artificial Sequence: Synthetic oligonucleotide
aaucaagcgaagauccccu

SEQ ID NO: 770876 - RNA, 19 nt, Artificial Sequence
  Description of Artificial Sequence: Synthetic oligonucleotide
acauuaagcaugguaagau

SEQ ID NO: 770877 - RNA, 19 nt, Artificial Sequence
  Description of Artificial Sequence: Synthetic oligonucleotide
  modified_base (4)..(4): a, c, u, g, unknown or other
uucnccucacauuuauaaa

SEQ ID NO: 770878 - RNA, 19 nt, Artificial Sequence
  Description of Artificial Sequence: Synthetic oligonucleotide
uuggaggucuguauaacuu

SEQ ID NO: 770879 - RNA, 19 nt, Artificial Sequence
  Description of Artificial Sequence: Synthetic oligonucleotide
agugaaaccgcgcugcguu

SEQ ID NO: 770880 - RNA, 19 nt, Artificial Sequence
  Description of Artificial Sequence: Synthetic oligonucleotide
uccaaggcuugaaccauug

SEQ ID NO: 770881 - RNA, 19 nt, Artificial Sequence
  Description of Artificial Sequence: Synthetic oligonucleotide
acaucucgcauguaauacu

SEQ ID NO: 770882 - RNA, 19 nt, Artificial Sequence
  Description of Artificial Sequence: Synthetic oligonucleotide
ugccgugugcugaagugcc

SEQ ID NO: 770883 - RNA, 19 nt, Artificial Sequence
  Description of Artificial Sequence: Synthetic oligonucleotide
guaacuccaaggcuugaac

SEQ ID NO: 770884 - RNA, 19 nt, Artificial Sequence
  Description of Artificial Sequence: Synthetic oligonucleotide
gauacuggcaccagaaugu

SEQ ID NO: 770885 - RNA, 19 nt, Artificial Sequence
  Description of Artificial Sequence: Synthetic oligonucleotide
uaaaagugcggagccagcu

SEQ ID NO: 770886 - RNA, 19 nt, Artificial Sequence
  Description of Artificial Sequence: Synthetic oligonucleotide
guaccuggaacuugacgag

SEQ ID NO: 770887 - RNA, 19 nt, Artificial Sequence
  Description of Artificial Sequence: Synthetic oligonucleotide
aaugugucauggugcucug

SEQ ID NO: 770888 - RNA, 19 nt, Artificial Sequence
  Description of Artificial Sequence: Synthetic oligonucleotide
caacaaucaagcgaagauc

SEQ ID NO: 770889 - RNA, 19 nt, Artificial Sequence
  Description of Artificial Sequence: Synthetic oligonucleotide
uguaagggucacacaggug

SEQ ID NO: 770890 - RNA, 19 nt, Artificial Sequence
  Description of Artificial Sequence: Synthetic oligonucleotide
ucaccuucacuggacaucu

SEQ ID NO: 770891 - RNA, 19 nt, Artificial Sequence
  Description of Artificial Sequence: Synthetic oligonucleotide
cacucacugguccuggacc

SEQ ID NO: 770892 - RNA, 19 nt, Artificial Sequence
  Description of Artificial Sequence: Synthetic oligonucleotide
ugaaaccgcgcugcguucg

SEQ ID NO: 770893 - RNA, 19 nt, Artificial Sequence
  Description of Artificial Sequence: Synthetic oligonucleotide
uggaggucuguauaacuuc

SEQ ID NO: 770894 - RNA, 19 nt, Artificial Sequence
  Description of Artificial Sequence: Synthetic oligonucleotide
aaugcuccugacaccacug

SEQ ID NO: 770895 - RNA, 19 nt, Artificial Sequence
  Description of Artificial Sequence: Synthetic oligonucleotide
ugcuaagcccacuugcaaa

SEQ ID NO: 770896 - RNA, 19 nt, Artificial Sequence
  Description of Artificial Sequence: Synthetic oligonucleotide
ccuugauauaaucuggaac

SEQ ID NO: 770897 - RNA, 19 nt, Artificial Sequence
  Description of Artificial Sequence: Synthetic oligonucleotide
acuuggaggucuguauaac

SEQ ID NO: 770898 - RNA, 19 nt, Artificial Sequence
  Description of Artificial Sequence: Synthetic oligonucleotide
ucucaugccgaguggcuca

SEQ ID NO: 770899 - RNA, 19 nt, Artificial Sequence
  Description of Artificial Sequence: Synthetic oligonucleotide
agagcguagaguaacucca

SEQ ID NO: 770900 - RNA, 19 nt, Artificial Sequence
  Description of Artificial Sequence: Synthetic oligonucleotide
aacgccugcucaaucagca

SEQ ID NO: 770901 - RNA, 19 nt, Artificial Sequence
  Description of Artificial Sequence: Synthetic oligonucleotide
acuguaagggucacacagg

SEQ ID NO: 770902 - RNA, 19 nt, Artificial Sequence
  Description of Artificial Sequence: Synthetic oligonucleotide
cuugccgugugcugaagug

SEQ ID NO: 770903 - RNA, 19 nt, Artificial Sequence
  Description of Artificial Sequence: Synthetic oligonucleotide
cucugcgauucucaugccg

SEQ ID NO: 770904 - RNA, 19 nt, Artificial Sequence
  Description of Artificial Sequence: Synthetic oligonucleotide
auauauccacuggaaaugu

SEQ ID NO: 770905 - RNA, 19 nt, Artificial Sequence
  Description of Artificial Sequence: Synthetic oligonucleotide
gccaaaaguaggcacauuc

SEQ ID NO: 770906 - RNA, 19 nt, Artificial Sequence
  Description of Artificial Sequence: Synthetic oligonucleotide
cguagaguaacuccaaggc

SEQ ID NO: 770907 - RNA, 19 nt, Artificial Sequence
  Description of Artificial Sequence: Synthetic oligonucleotide
guacacauuaagcauggua

SEQ ID NO: 770908 - RNA, 19 nt, Artificial Sequence
  Description of Artificial Sequence: Synthetic oligonucleotide
aaugcuucguacacauuaa

SEQ ID NO: 770909 - RNA, 19 nt, Artificial Sequence
  Description of Artificial Sequence: Synthetic oligonucleotide
cacucgaguugccugagac

SEQ ID NO: 770910 - RNA, 19 nt, Artificial Sequence
  Description of Artificial Sequence: Synthetic oligonucleotide
auuuccggugcacucgagu

SEQ ID NO: 770911 - RNA, 19 nt, Artificial Sequence
  Description of Artificial Sequence: Synthetic oligonucleotide
aggaugccaaaccaucccu

SEQ ID NO: 770912 - RNA, 19 nt, Artificial Sequence
  Description of Artificial Sequence: Synthetic oligonucleotide
uguccguguacaagguccu

SEQ ID NO: 770913 - RNA, 19 nt, Artificial Sequence
  Description of Artificial Sequence: Synthetic oligonucleotide
aucaagcgaagauccccuc

SEQ ID NO: 770914 - RNA, 19 nt, Artificial Sequence
  Description of Artificial Sequence: Synthetic oligonucleotide
auaacccauaugcuccaga

SEQ ID NO: 770915 - RNA, 19 nt, Artificial Sequence
  Description of Artificial Sequence: Synthetic oligonucleotide
ucuuguuguguuugauaaa

SEQ ID NO: 770916 - RNA, 19 nt, Artificial Sequence
  Description of Artificial Sequence: Synthetic oligonucleotide
uaagaugaucacccuccuc

SEQ ID NO: 770917 - RNA, 19 nt, Artificial Sequence
  Description of Artificial Sequence: Synthetic oligonucleotide
uccggugcacucgaguugc

SEQ ID NO: 770918 - RNA, 19 nt, Artificial Sequence
  Description of Artificial Sequence: Synthetic oligonucleotide
acaggacuuuuguagguaa

SEQ ID NO: 770919 - RNA, 19 nt, Artificial Sequence
  Description of Artificial Sequence: Synthetic oligonucleotide
cacgaugcaccucaggaca

SEQ ID NO: 770920 - RNA, 19 nt, Artificial Sequence
  Description of Artificial Sequence: Synthetic oligonucleotide
cauagauacaacaguuucu

SEQ ID NO: 770921 - RNA, 19 nt, Artificial Sequence
  Description of Artificial Sequence: Synthetic oligonucleotide
gaggagugaaaccgcgcug

SEQ ID NO: 770922 - RNA, 19 nt, Artificial Sequence
  Description of Artificial Sequence: Synthetic oligonucleotide
cauggcacuaagucuccug

SEQ ID NO: 770923 - RNA, 19 nt, Artificial Sequence
  Description of Artificial Sequence: Synthetic oligonucleotide
  modified_base (6)..(6): a, c, u, g, unknown or other
uuuucnccucacauuuaua

SEQ ID NO: 770924 - RNA, 19 nt, Artificial Sequence
  Description of Artificial Sequence: Synthetic oligonucleotide
aaccuuuaagcuacgcuuu

SEQ ID NO: 770925 - RNA, 19 nt, Artificial Sequence
  Description of Artificial Sequence: Synthetic oligonucleotide
ccuguuaaagaggaguccc

SEQ ID NO: 770926 - RNA, 19 nt, Artificial Sequence
  Description of Artificial Sequence: Synthetic oligonucleotide
ccgaaauuucucugcaucc

SEQ ID NO: 770927 - RNA, 19 nt, Artificial Sequence
  Description of Artificial Sequence: Synthetic oligonucleotide
ggcagcgaugcucaggacc

SEQ ID NO: 770928 - RNA, 19 nt, Artificial Sequence
  Description of Artificial Sequence: Synthetic oligonucleotide
aacaacucgaaggcaggaa

SEQ ID NO: 770929 - RNA, 19 nt, Artificial Sequence
  Description of Artificial Sequence: Synthetic oligonucleotide
uuuaucuggcgcccagaua

SEQ ID NO: 770930 - RNA, 19 nt, Artificial Sequence
  Description of Artificial Sequence: Synthetic oligonucleotide
cugcguucgcgaagaaucc

SEQ ID NO: 770931 - RNA, 19 nt, Artificial Sequence
  Description of Artificial Sequence: Synthetic oligonucleotide
gacucuauggcagucacau

SEQ ID NO: 770932 - RNA, 19 nt, Artificial Sequence
  Description of Artificial Sequence: Synthetic oligonucleotide
uccgcccuuccacuguaag

SEQ ID NO: 770933 - RNA, 19 nt, Artificial Sequence
  Description of Artificial Sequence: Synthetic oligonucleotide
aagcgaagauccccucgcu

SEQ ID NO: 770934 - RNA, 19 nt, Artificial Sequence
  Description of Artificial Sequence: Synthetic oligonucleotide
gaugaucacccuccuccac

SEQ ID NO: 770935 - RNA, 19 nt, Artificial Sequence
  Description of Artificial Sequence: Synthetic oligonucleotide
guuuggcgccaaaaguagg

SEQ ID NO: 770936 - RNA, 19 nt, Artificial Sequence
  Description of Artificial Sequence: Synthetic oligonucleotide
augguaagaugaucacccu

SEQ ID NO: 770937 - RNA, 19 nt, Artificial Sequence
  Description of Artificial Sequence: Synthetic oligonucleotide
aacaggacuuuuguaggua

SEQ ID NO: 770938 - RNA, 19 nt, Artificial Sequence
  Description of Artificial Sequence: Synthetic oligonucleotide
acucgaguugccugagacu

SEQ ID NO: 770939 - RNA, 19 nt, Artificial Sequence
  Description of Artificial Sequence: Synthetic oligonucleotide
agaaucccgacacgaugca

SEQ ID NO: 770940 - RNA, 19 nt, Artificial Sequence
  Description of Artificial Sequence: Synthetic oligonucleotide
uugccgugugcugaagugc

SEQ ID NO: 770941 - RNA, 19 nt, Artificial Sequence
  Description of Artificial Sequence: Synthetic oligonucleotide
cagaggagugaaaccgcgc

SEQ ID NO: 770942 - RNA, 19 nt, Artificial Sequence
  Description of Artificial Sequence: Synthetic oligonucleotide
guagaguaacuccaaggcu

SEQ ID NO: 770943 - RNA, 19 nt, Artificial Sequence
  Description of Artificial Sequence: Synthetic oligonucleotide
uccguguacaagguccucu

SEQ ID NO: 770944 - RNA, 19 nt, Artificial Sequence
  Description of Artificial Sequence: Synthetic oligonucleotide
ugguuuugaggggaacaca

SEQ ID NO: 770945 - RNA, 19 nt, Artificial Sequence
  Description of Artificial Sequence: Synthetic oligonucleotide
cgcauguaauacuuggagg

SEQ ID NO: 770946 - RNA, 19 nt, Artificial Sequence
  Description of Artificial Sequence: Synthetic oligonucleotide
uggcgccaaaaguaggcac

SEQ ID NO: 770947 - RNA, 19 nt, Artificial Sequence
  Description of Artificial Sequence: Synthetic oligonucleotide
ggcacuaagucuccugcug

SEQ ID NO: 770948 - RNA, 19 nt, Artificial Sequence
  Description of Artificial Sequence: Synthetic oligonucleotide
caggccuccaagagcguag

SEQ ID NO: 770949 - RNA, 19 nt, Artificial Sequence
  Description of Artificial Sequence: Synthetic oligonucleotide
gggcaucuaaacuguagug

SEQ ID NO: 770950 - RNA, 19 nt, Artificial Sequence
  Description of Artificial Sequence: Synthetic oligonucleotide
ccauugacugugcuggcgg

SEQ ID NO: 770951 - RNA, 19 nt, Artificial Sequence
  Description of Artificial Sequence: Synthetic oligonucleotide
ggugcacucgaguugccug

SEQ ID NO: 770952 - RNA, 19 nt, Artificial Sequence
  Description of Artificial Sequence: Synthetic oligonucleotide
augcuaagcccacuugcaa

SEQ ID NO: 770953 - RNA, 19 nt, Artificial Sequence
  Description of Artificial Sequence: Synthetic oligonucleotide
guaggcacauucaaacuaa

SEQ ID NO: 770954 - RNA, 19 nt, Artificial Sequence
  Description of Artificial Sequence: Synthetic oligonucleotide
ggcaaaugcugaugggagc

SEQ ID NO: 770955 - RNA, 19 nt, Artificial Sequence
  Description of Artificial Sequence: Synthetic oligonucleotide
cacauuaagcaugguaaga

SEQ ID NO: 770956 - RNA, 19 nt, Artificial Sequence
  Description of Artificial Sequence: Synthetic oligonucleotide
uggcacuaagucuccugcu

SEQ ID NO: 770957 - RNA, 19 nt, Artificial Sequence
  Description of Artificial Sequence: Synthetic oligonucleotide
augccaaaccaucccugca

SEQ ID NO: 770958 - RNA, 19 nt, Artificial Sequence
  Description of Artificial Sequence: Synthetic oligonucleotide
cuucguacacauuaagcau

SEQ ID NO: 770959 - RNA, 19 nt, Artificial Sequence
  Description of Artificial Sequence: Synthetic oligonucleotide
gaacaggacuuuuguaggu

SEQ ID NO: 770960 - RNA, 19 nt, Artificial Sequence
  Description of Artificial Sequence: Synthetic oligonucleotide
ugcguucgcgaagaauccc

SEQ ID NO: 770961 - RNA, 19 nt, Artificial Sequence
  Description of Artificial Sequence: Synthetic oligonucleotide
cucgcauguaauacuugga

SEQ ID NO: 770962 - RNA, 19 nt, Artificial Sequence
  Description of Artificial Sequence: Synthetic oligonucleotide
agagaggguuaaugcccag

SEQ ID NO: 770963 - RNA, 19 nt, Artificial Sequence
  Description of Artificial Sequence: Synthetic oligonucleotide
gcacuaagucuccugcugc

SEQ ID NO: 770964 - RNA, 19 nt, Artificial Sequence
  Description of Artificial Sequence: Synthetic oligonucleotide
aucccgacacgaugcaccu

SEQ ID NO: 770965 - RNA, 19 nt, Artificial Sequence
  Description of Artificial Sequence: Synthetic oligonucleotide
uuagggcaucuaaacugua

SEQ ID NO: 770966 - RNA, 19 nt, Artificial Sequence
  Description of Artificial Sequence: Synthetic oligonucleotide
ggaccuuggcccuuuuggc

SEQ ID NO: 770967 - RNA, 19 nt, Artificial Sequence
  Description of Artificial Sequence: Synthetic oligonucleotide
uaucuggcgcccagauacu

SEQ ID NO: 770968 - RNA, 19 nt, Artificial Sequence
  Description of Artificial Sequence: Synthetic oligonucleotide
cugcgauucucaugccgag

SEQ ID NO: 770969 - RNA, 19 nt, Artificial Sequence
  Description of Artificial Sequence: Synthetic oligonucleotide
guaaggaaggcuaguauau

SEQ ID NO: 770970 - RNA, 19 nt, Artificial Sequence
  Description of Artificial Sequence: Synthetic oligonucleotide
auacuggcaccagaaugug

SEQ ID NO: 770971 - RNA, 19 nt, Artificial Sequence
  Description of Artificial Sequence: Synthetic oligonucleotide
gugccaucacucucgcagc

SEQ ID NO: 770972 - RNA, 19 nt, Artificial Sequence
  Description of Artificial Sequence: Synthetic oligonucleotide
acaguaaggggaggagucu

SEQ ID NO: 770973 - RNA, 19 nt, Artificial Sequence
  Description of Artificial Sequence: Synthetic oligonucleotide
gaaaccgcgcugcguucgc

SEQ ID NO: 770974 - RNA, 19 nt, Artificial Sequence
  Description of Artificial Sequence: Synthetic oligonucleotide
aaaccgcgcugcguucgcg

SEQ ID NO: 770975 - RNA, 19 nt, Artificial Sequence
  Description of Artificial Sequence: Synthetic oligonucleotide
agcucugacaagacccuug

SEQ ID NO: 770976 - RNA, 19 nt, Artificial Sequence
  Description of Artificial Sequence: Synthetic oligonucleotide
gguuuugaggggaacacaa

SEQ ID NO: 770977 - RNA, 19 nt, Artificial Sequence
  Description of Artificial Sequence: Synthetic oligonucleotide
caagagcguagaguaacuc

SEQ ID NO: 770978 - RNA, 19 nt, Artificial Sequence
  Description of Artificial Sequence: Synthetic oligonucleotide
gcaugguaagaugaucacc

SEQ ID NO: 770979 - RNA, 19 nt, Artificial Sequence
  Description of Artificial Sequence: Synthetic oligonucleotide
aauuuccggugcacucgag

SEQ ID NO: 770980 - RNA, 19 nt, Artificial Sequence
  Description of Artificial Sequence: Synthetic oligonucleotide
gcuacgcuuuuaaauaaac

SEQ ID NO: 770981 - RNA, 19 nt, Artificial Sequence
  Description of Artificial Sequence: Synthetic oligonucleotide
cccgaaauuucucugcauc

SEQ ID NO: 770982 - RNA, 19 nt, Artificial Sequence
  Description of Artificial Sequence: Synthetic oligonucleotide
aacuugacgaggagcuuuu

SEQ ID NO: 770983 - RNA, 19 nt, Artificial Sequence
  Description of Artificial Sequence: Synthetic oligonucleotide
uacacaaguuuagggcauc

SEQ ID NO: 770984 - RNA, 19 nt, Artificial Sequence
  Description of Artificial Sequence: Synthetic oligonucleotide
gaugcaccucaggacagga

SEQ ID NO: 770985 - RNA, 19 nt, Artificial Sequence
  Description of Artificial Sequence: Synthetic oligonucleotide
ggagugaaaccgcgcugcg

SEQ ID NO: 770986 - RNA, 19 nt, Artificial Sequence
  Description of Artificial Sequence: Synthetic oligonucleotide
gacaugaaguggaacgccu

SEQ ID NO: 770987 - RNA, 19 nt, Artificial Sequence
  Description of Artificial Sequence: Synthetic oligonucleotide
agcgccacucacugguccu

SEQ ID NO: 770988 - RNA, 19 nt, Artificial Sequence
  Description of Artificial Sequence: Synthetic oligonucleotide
guucgcgaagaaucccgac

SEQ ID NO: 770989 - RNA, 19 nt, Artificial Sequence
  Description of Artificial Sequence: Synthetic oligonucleotide
gaguuauauuccugagcua

SEQ ID NO: 770990 - RNA, 19 nt, Artificial Sequence
  Description of Artificial Sequence: Synthetic oligonucleotide
gccaauggcaauguccgug

SEQ ID NO: 770991 - RNA, 19 nt, Artificial Sequence
  Description of Artificial Sequence: Synthetic oligonucleotide
ugcacucgaguugccugag

SEQ ID NO: 770992 - RNA, 19 nt, Artificial Sequence
  Description of Artificial Sequence: Synthetic oligonucleotide
acaauggaucaaccaucau

SEQ ID NO: 770993 - RNA, 19 nt, Artificial Sequence
  Description of Artificial Sequence: Synthetic oligonucleotide
ucgaguugccugagacuuc

SEQ ID NO: 770994 - RNA, 19 nt, Artificial Sequence
  Description of Artificial Sequence: Synthetic oligonucleotide
gccaagccgacucuauggc

SEQ ID NO: 770995 - RNA, 19 nt, Artificial Sequence
  Description of Artificial Sequence: Synthetic oligonucleotide
aggugcauuccuuguugau

SEQ ID NO: 770996 - RNA, 19 nt, Artificial Sequence
  Description of Artificial Sequence: Synthetic oligonucleotide
gcgacagucuuuguccagg

SEQ ID NO: 770997 - RNA, 19 nt, Artificial Sequence
  Description of Artificial Sequence: Synthetic oligonucleotide
gugugcugaagugccauca

SEQ ID NO: 770998 - RNA, 19 nt, Artificial Sequence
  Description of Artificial Sequence: Synthetic oligonucleotide
acacaaguuuagggcaucu

SEQ ID NO: 770999 - RNA, 19 nt, Artificial Sequence
  Description of Artificial Sequence: Synthetic oligonucleotide
agcgaagauccccucgcuu

SEQ ID NO: 771000 - RNA, 19 nt, Artificial Sequence
  Description of Artificial Sequence: Synthetic oligonucleotide
ugcgauucucaugccgagu

SEQ ID NO: 771001 - RNA, 19 nt, Artificial Sequence
  Description of Artificial Sequence: Synthetic oligonucleotide
gaaucccgacacgaugcac

SEQ ID NO: 771002 - RNA, 19 nt, Artificial Sequence
  Description of Artificial Sequence: Synthetic oligonucleotide
ucuuggguaccuggaacuu

SEQ ID NO: 771003 - RNA, 19 nt, Artificial Sequence
  Description of Artificial Sequence: Synthetic oligonucleotide
cuguagugaauuccuguua

SEQ ID NO: 771004 - RNA, 19 nt, Artificial Sequence
  Description of Artificial Sequence: Synthetic oligonucleotide
gcguucgcgaagaaucccg

SEQ ID NO: 771005 - RNA, 19 nt, Artificial Sequence
  Description of Artificial Sequence: Synthetic oligonucleotide
acgaugcaccucaggacag

SEQ ID NO: 771006 - RNA, 19 nt, Artificial Sequence
  Description of Artificial Sequence: Synthetic oligonucleotide
cucaguuaggcgacagucu

SEQ ID NO: 771007 - RNA, 19 nt, Artificial Sequence
  Description of Artificial Sequence: Synthetic oligonucleotide
ggaggucuguauaacuuca

SEQ ID NO: 771008 - RNA, 19 nt, Artificial Sequence
  Description of Artificial Sequence: Synthetic oligonucleotide
  modified_base (2)..(2): a, c, u, g, unknown or other
cnccucacauuuauaaaau

SEQ ID NO: 771009 - RNA, 19 nt, Artificial Sequence
  Description of Artificial Sequence: Synthetic oligonucleotide
ggacauggacagaggaaag

SEQ ID NO: 771010 - RNA, 19 nt, Artificial Sequence
  Description of Artificial Sequence: Synthetic oligonucleotide
agcggaacacuggccaugu

SEQ ID NO: 771011 - RNA, 19 nt, Artificial Sequence
  Description of Artificial Sequence: Synthetic oligonucleotide
cagaaacaacucgaaggca

SEQ ID NO: 771012 - RNA, 19 nt, Artificial Sequence
  Description of Artificial Sequence: Synthetic oligonucleotide
cugcagcuaagcagggaca

SEQ ID NO: 771013 - RNA, 19 nt, Artificial Sequence
  Description of Artificial Sequence: Synthetic oligonucleotide
ggcaacaaucaagcgaaga

SEQ ID NO: 771014 - RNA, 19 nt, Artificial Sequence
  Description of Artificial Sequence: Synthetic oligonucleotide
gaacuuuaucuggcgccca

SEQ ID NO: 771015 - RNA, 19 nt, Artificial Sequence
  Description of Artificial Sequence: Synthetic oligonucleotide
uggggucaagguugaugaa

SEQ ID NO: 771016 - RNA, 19 nt, Artificial Sequence
  Description of Artificial Sequence: Synthetic oligonucleotide
agcuacgcuuuuaaauaaa

SEQ ID NO: 771017 - RNA, 19 nt, Artificial Sequence
  Description of Artificial Sequence: Synthetic oligonucleotide
gcgaagaaucccgacacga

SEQ ID NO: 771018 - RNA, 19 nt, Artificial Sequence
  Description of Artificial Sequence: Synthetic oligonucleotide
ggcgcccagauacuggcac

SEQ ID NO: 771019 - RNA, 19 nt, Artificial Sequence
  Description of Artificial Sequence: Synthetic oligonucleotide
guuuugaggggaacacaaa

SEQ ID NO: 771020 - RNA, 19 nt, Artificial Sequence
  Description of Artificial Sequence: Synthetic oligonucleotide
guggaacgccugcucaauc

SEQ ID NO: 771021 - RNA, 19 nt, Artificial Sequence
  Description of Artificial Sequence: Synthetic oligonucleotide
caucucgcauguaauacuu

SEQ ID NO: 771022 - RNA, 19 nt, Artificial Sequence
  Description of Artificial Sequence: Synthetic oligonucleotide
gauccggaucaccuucacu

SEQ ID NO: 771023 - RNA, 19 nt, Artificial Sequence
  Description of Artificial Sequence: Synthetic oligonucleotide
caggacuuuuguagguaaa

SEQ ID NO: 771024 - RNA, 19 nt, Artificial Sequence
  Description of Artificial Sequence: Synthetic oligonucleotide
aagugcggagccagcucca

SEQ ID NO: 771025 - RNA, 19 nt, Artificial Sequence
  Description of Artificial Sequence: Synthetic oligonucleotide
gugaaaccgcgcugcguuc

SEQ ID NO: 771026 - RNA, 19 nt, Artificial Sequence
  Description of Artificial Sequence: Synthetic oligonucleotide
cuacacaaguuuagggcau

SEQ ID NO: 771027 - RNA, 19 nt, Artificial Sequence
  Description of Artificial Sequence: Synthetic oligonucleotide
cucgaguugccugagacuu

SEQ ID NO: 771028 - RNA, 19 nt, Artificial Sequence
  Description of Artificial Sequence: Synthetic oligonucleotide
augccgaguggcucaguua

SEQ ID NO: 771029 - RNA, 19 nt, Artificial Sequence
  Description of Artificial Sequence: Synthetic oligonucleotide
ggcgccaaaaguaggcaca

SEQ ID NO: 771030 - RNA, 19 nt, Artificial Sequence
  Description of Artificial Sequence: Synthetic oligonucleotide
ccgcccuuccacuguaagg

SEQ ID NO: 771031 - RNA, 19 nt, Artificial Sequence
  Description of Artificial Sequence: Synthetic oligonucleotide
cucaugccgaguggcucag

SEQ ID NO: 771032 - RNA, 19 nt, Artificial Sequence
  Description of Artificial Sequence: Synthetic oligonucleotide
gccuugauauaaucuggaa

SEQ ID NO: 771033 - RNA, 19 nt, Artificial Sequence
  Description of Artificial Sequence: Synthetic oligonucleotide
aggauccggaucaccuuca

SEQ ID NO: 771034 - RNA, 19 nt, Artificial Sequence
  Description of Artificial Sequence: Synthetic oligonucleotide
caaagcggcccaggugcag

SEQ ID NO: 771035 - RNA, 19 nt, Artificial Sequence
  Description of Artificial Sequence: Synthetic oligonucleotide
gucaagguugaugaacuuu

SEQ ID NO: 771036 - RNA, 19 nt, Artificial Sequence
  Description of Artificial Sequence: Synthetic oligonucleotide
caauguccguguacaaggu

SEQ ID NO: 771037 - RNA, 19 nt, Artificial Sequence
  Description of Artificial Sequence: Synthetic oligonucleotide
gagcguagaguaacuccaa

SEQ ID NO: 771038 - RNA, 19 nt, Artificial Sequence
  Description of Artificial Sequence: Synthetic oligonucleotide
cagugacugccuguuccac

SEQ ID NO: 771039 - RNA, 19 nt, Artificial Sequence
  Description of Artificial Sequence: Synthetic oligonucleotide
cccgacacgaugcaccuca

SEQ ID NO: 771040 - RNA, 19 nt, Artificial Sequence
  Description of Artificial Sequence: Synthetic oligonucleotide
ggugcucugagagaaugcu

SEQ ID NO: 771041 - RNA, 19 nt, Artificial Sequence
  Description of Artificial Sequence: Synthetic oligonucleotide
cgauucucaugccgagugg

SEQ ID NO: 771042 - RNA, 19 nt, Artificial Sequence
  Description of Artificial Sequence: Synthetic oligonucleotide
ccguguacaagguccucuc

SEQ ID NO: 771043 - RNA, 19 nt, Artificial Sequence
  Description of Artificial Sequence: Synthetic oligonucleotide
cucaggacaggauccggau

SEQ ID NO: 771044 - RNA, 19 nt, Artificial Sequence
  Description of Artificial Sequence: Synthetic oligonucleotide
gggaggagucugucuugcc

SEQ ID NO: 771045 - RNA, 19 nt, Artificial Sequence
  Description of Artificial Sequence: Synthetic oligonucleotide
cccuuccacuguaaggguc

SEQ ID NO: 771046 - RNA, 19 nt, Artificial Sequence
  Description of Artificial Sequence: Synthetic oligonucleotide
aggcaacaaucaagcgaag

SEQ ID NO: 771047 - RNA, 19 nt, Artificial Sequence
  Description of Artificial Sequence: Synthetic oligonucleotide
augugucauggugcucuga

SEQ ID NO: 771048 - RNA, 19 nt, Artificial Sequence
  Description of Artificial Sequence: Synthetic oligonucleotide
ggauccggaucaccuucac

SEQ ID NO: 771049 - RNA, 19 nt, Artificial Sequence
  Description of Artificial Sequence: Synthetic oligonucleotide
ggacaggauccggaucacc

SEQ ID NO: 771050 - RNA, 19 nt, Artificial Sequence
  Description of Artificial Sequence: Synthetic oligonucleotide
gagugaaaccgcgcugcgu

SEQ ID NO: 771051 - RNA, 19 nt, Artificial Sequence
  Description of Artificial Sequence: Synthetic oligonucleotide
gcgcccagauacuggcacc

SEQ ID NO: 771052 - RNA, 19 nt, Artificial Sequence
  Description of Artificial Sequence: Synthetic oligonucleotide
cacaaguuuagggcaucua

SEQ ID NO: 771053 - RNA, 19 nt, Artificial Sequence
  Description of Artificial Sequence: Synthetic oligonucleotide
ccugagacuucugguuuug

SEQ ID NO: 771054 - RNA, 19 nt, Artificial Sequence
  Description of Artificial Sequence: Synthetic oligonucleotide
gaggucuguauaacuucau

SEQ ID NO: 771055 - RNA, 19 nt, Artificial Sequence
  Description of Artificial Sequence: Synthetic oligonucleotide
ggcuugaaccauugacugu

SEQ ID NO: 771056 - RNA, 19 nt, Artificial Sequence
  Description of Artificial Sequence: Synthetic oligonucleotide
gcgaagauccccucgcuuu

SEQ ID NO: 771057 - RNA, 19 nt, Artificial Sequence
  Description of Artificial Sequence: Synthetic oligonucleotide
cgcgaagaaucccgacacg

SEQ ID NO: 771058 - RNA, 19 nt, Artificial Sequence
  Description of Artificial Sequence: Synthetic oligonucleotide
caugccgaguggcucaguu

SEQ ID NO: 771059 - RNA, 19 nt, Artificial Sequence
  Description of Artificial Sequence: Synthetic oligonucleotide
cccuuuuggcuuucaggga

SEQ ID NO: 771060 - RNA, 19 nt, Artificial Sequence
  Description of Artificial Sequence: Synthetic oligonucleotide
ggaaguggcuaagaaugau

SEQ ID NO: 771061 - RNA, 19 nt, Artificial Sequence
  Description of Artificial Sequence: Synthetic oligonucleotide
guuaggcgacagucuuugu

SEQ ID NO: 771062 - RNA, 19 nt, Artificial Sequence
  Description of Artificial Sequence: Synthetic oligonucleotide
ccaguaaggaaggcuagua

SEQ ID NO: 771063 - RNA, 19 nt, Artificial Sequence
  Description of Artificial Sequence: Synthetic oligonucleotide
gccgaguggcucaguuagg

SEQ ID NO: 771064 - RNA, 19 nt, Artificial Sequence
  Description of Artificial Sequence: Synthetic oligonucleotide
cgacacgaugcaccucagg

SEQ ID NO: 771065 - RNA, 19 nt, Artificial Sequence
  Description of Artificial Sequence: Synthetic oligonucleotide
ccgugccugcagugcagcg

SEQ ID NO: 771066 - RNA, 19 nt, Artificial Sequence
  Description of Artificial Sequence: Synthetic oligonucleotide
ucccgacacgaugcaccuc

SEQ ID NO: 771067 - RNA, 19 nt, Artificial Sequence
  Description of Artificial Sequence: Synthetic oligonucleotide
ccggaucaccuucacugga

SEQ ID NO: 771068 - RNA, 19 nt, Artificial Sequence
  Description of Artificial Sequence: Synthetic oligonucleotide
ccaagagcguagaguaacu

SEQ ID NO: 771069 - RNA, 19 nt, Artificial Sequence
  Description of Artificial Sequence: Synthetic oligonucleotide
ggcucaguuaggcgacagu

SEQ ID NO: 771070 - RNA, 19 nt, Artificial Sequence
  Description of Artificial Sequence: Synthetic oligonucleotide
cguucgcgaagaaucccga

SEQ ID NO: 771071 - RNA, 19 nt, Artificial Sequence
  Description of Artificial Sequence: Synthetic oligonucleotide
gcacucgaguugccugaga

SEQ ID NO: 771072 - RNA, 19 nt, Artificial Sequence
  Description of Artificial Sequence: Synthetic oligonucleotide
cagcgaugcucaggaccuc

SEQ ID NO: 771073 - RNA, 19 nt, Artificial Sequence
  Description of Artificial Sequence: Synthetic oligonucleotide
caguguccacaguugccuu

SEQ ID NO: 771074 - RNA, 19 nt, Artificial Sequence
  Description of Artificial Sequence: Synthetic oligonucleotide
gcgccacucacugguccug

SEQ ID NO: 771075 - RNA, 19 nt, Artificial Sequence
  Description of Artificial Sequence: Synthetic oligonucleotide
ccgcgcugcguucgcgaag

SEQ ID NO: 771076 - RNA, 19 nt, Artificial Sequence
  Description of Artificial Sequence: Synthetic oligonucleotide
cagcagccaagccgacucu

SEQ ID NO: 771077 - RNA, 19 nt, Artificial Sequence
  Description of Artificial Sequence: Synthetic oligonucleotide
ccggugcacucgaguugcc

SEQ ID NO: 771078 - RNA, 19 nt, Artificial Sequence
  Description of Artificial Sequence: Synthetic oligonucleotide
cgaagaaucccgacacgau

SEQ ID NO: 771079 - RNA, 19 nt, Artificial Sequence
  Description of Artificial Sequence: Synthetic oligonucleotide
cgacucuauggcagucaca

SEQ ID NO: 771080 - RNA, 19 nt, Artificial Sequence
  Description of Artificial Sequence: Synthetic oligonucleotide
ggagucccguggggucaag

SEQ ID NO: 771081 - RNA, 19 nt, Artificial Sequence
  Description of Artificial Sequence: Synthetic oligonucleotide
gcgccaaaaguaggcacau

SEQ ID NO: 771082 - RNA, 19 nt, Artificial Sequence
  Description of Artificial Sequence: Synthetic oligonucleotide
cgaguugccugagacuucu

SEQ ID NO: 771083 - RNA, 19 nt, Artificial Sequence
  Description of Artificial Sequence: Synthetic oligonucleotide
cgcgcugcguucgcgaaga

SEQ ID NO: 771084 - RNA, 19 nt, Artificial Sequence
  Description of Artificial Sequence: Synthetic oligonucleotide
guccgcccuuccacuguaa

SEQ ID NO: 771085 - RNA, 19 nt, Artificial Sequence
  Description of Artificial Sequence: Synthetic oligonucleotide
cgcccagauacuggcacca

SEQ ID NO: 771086 - RNA, 19 nt, Artificial Sequence
  Description of Artificial Sequence: Synthetic oligonucleotide
cgaagauccccucgcuuuu

SEQ ID NO: 771087 - RNA, 19 nt, Artificial Sequence
  Description of Artificial Sequence: Synthetic oligonucleotide
ccgugugcugaagugccau

SEQ ID NO: 771088 - RNA, 19 nt, Artificial Sequence
  Description of Artificial Sequence: Synthetic oligonucleotide
gcgcugcguucgcgaagaa

SEQ ID NO: 771089 - RNA, 19 nt, Artificial Sequence
  Description of Artificial Sequence: Synthetic oligonucleotide
gcggaacacuggccauguu

SEQ ID NO: 771090 - RNA, 19 nt, Artificial Sequence
  Description of Artificial Sequence: Synthetic oligonucleotide
cggugcacucgaguugccu

SEQ ID NO: 771091 - RNA, 19 nt, Artificial Sequence
  Description of Artificial Sequence: Synthetic oligonucleotide
cgccaaaaguaggcacauu

SEQ ID NO: 771092 - RNA, 19 nt, Artificial Sequence
  Description of Artificial Sequence: Synthetic oligonucleotide
  modified_base (1)..(1): a, c, u, g, unknown or other
nccucacauuuauaaaaug

SEQ ID NO: 771093 - RNA, 19 nt, Artificial Sequence
  Description of Artificial Sequence: Synthetic oligonucleotide
acauauauauauuauauac

SEQ ID NO: 771094 - RNA, 19 nt, Artificial Sequence
  Description of Artificial Sequence: Synthetic oligonucleotide
auauauauauuauauacag

SEQ ID NO: 771095 - RNA, 19 nt, Artificial Sequence
  Description of Artificial Sequence: Synthetic oligonucleotide
aacauuggaaaacaguggg

SEQ ID NO: 771096 - RNA, 19 nt, Artificial Sequence
  Description of Artificial Sequence: Synthetic oligonucleotide
aauaugggcccucuggucc

SEQ ID NO: 771097 - RNA, 19 nt, Artificial Sequence
  Description of Artificial Sequence: Synthetic oligonucleotide
aaaacauuggaaaacagug

SEQ ID NO: 771098 - RNA, 19 nt, Artificial Sequence
  Description of Artificial Sequence: Synthetic oligonucleotide
ugagaucuuauccagaagc

SEQ ID NO: 771099 - RNA, 19 nt, Artificial Sequence
  Description of Artificial Sequence: Synthetic oligonucleotide
uguaauaugggcccucugg

SEQ ID NO: 771100 - RNA, 19 nt, Artificial Sequence
  Description of Artificial Sequence: Synthetic oligonucleotide
agaaucucaagucaagagg

SEQ ID NO: 771101 - RNA, 19 nt, Artificial Sequence
  Description of Artificial Sequence: Synthetic oligonucleotide
ugcuaguucaaacaccucg

SEQ ID NO: 771102 - RNA, 19 nt, Artificial Sequence
  Description of Artificial Sequence: Synthetic oligonucleotide
aaaaggauagaacaggguu

SEQ ID NO: 771103 - RNA, 19 nt, Artificial Sequence
  Description of Artificial Sequence: Synthetic oligonucleotide
auuauauacagagacgggg

SEQ ID NO: 771104 - RNA, 19 nt, Artificial Sequence
  Description of Artificial Sequence: Synthetic oligonucleotide
aacaaugauagggaggagg

SEQ ID NO: 771105 - RNA, 19 nt, Artificial Sequence
  Description of Artificial Sequence: Synthetic oligonucleotide
aagucuggcaguuuggucu

SEQ ID NO: 771106 - RNA, 19 nt, Artificial Sequence
  Description of Artificial Sequence: Synthetic oligonucleotide
uguaaagucuggcaguuug

SEQ ID NO: 771107 - RNA, 19 nt, Artificial Sequence
  Description of Artificial Sequence: Synthetic oligonucleotide
uuuacaggggucuaggaga

SEQ ID NO: 771108 - RNA, 19 nt, Artificial Sequence
  Description of Artificial Sequence: Synthetic oligonucleotide
accaaggaaaccugaaccc

SEQ ID NO: 771109 - RNA, 19 nt, Artificial Sequence
  Description of Artificial Sequence: Synthetic oligonucleotide
uuaaaguggggaaacugag

SEQ ID NO: 771110 - RNA, 19 nt, Artificial Sequence
  Description of Artificial Sequence: Synthetic oligonucleotide
gaauuggaauuccucaggg

SEQ ID NO: 771111 - RNA, 19 nt, Artificial Sequence
  Description of Artificial Sequence: Synthetic oligonucleotide
uugaugguaauacaaggcu

SEQ ID NO: 771112 - RNA, 19 nt, Artificial Sequence
  Description of Artificial Sequence: Synthetic oligonucleotide
uauauauauuauauacaga

SEQ ID NO: 771113 - RNA, 19 nt, Artificial Sequence
  Description of Artificial Sequence: Synthetic oligonucleotide
aaagcggccuguaauaugg

SEQ ID NO: 771114 - RNA, 19 nt, Artificial Sequence
  Description of Artificial Sequence: Synthetic oligonucleotide
aaguacaucgaagacccac

SEQ ID NO: 771115 - RNA, 19 nt, Artificial Sequence
  Description of Artificial Sequence: Synthetic oligonucleotide
uaauacaaggcuuccaggu

SEQ ID NO: 771116 - RNA, 19 nt, Artificial Sequence
  Description of Artificial Sequence: Synthetic oligonucleotide
uauuauuguccagucaagg

SEQ ID NO: 771117 - RNA, 19 nt, Artificial Sequence
  Description of Artificial Sequence: Synthetic oligonucleotide
aaaccgaacagaaaccuag

SEQ ID NO: 771118 - RNA, 19 nt, Artificial Sequence
  Description of Artificial Sequence: Synthetic oligonucleotide
agaauuggaauuccucagg

SEQ ID NO: 771119 - RNA, 19 nt, Artificial Sequence
  Description of Artificial Sequence: Synthetic oligonucleotide
gagaaucucaagucaagag

SEQ ID NO: 771120 - RNA, 19 nt, Artificial Sequence
  Description of Artificial Sequence: Synthetic oligonucleotide
uuucacuuagaaagcaggc

SEQ ID NO: 771121 - RNA, 19 nt, Artificial Sequence
  Description of Artificial Sequence: Synthetic oligonucleotide
aauacugauugaugguaug

SEQ ID NO: 771122 - RNA, 19 nt, Artificial Sequence
  Description of Artificial Sequence: Synthetic oligonucleotide
ugggaggggauuauuauug

SEQ ID NO: 771123 - RNA, 19 nt, Artificial Sequence
  Description of Artificial Sequence: Synthetic oligonucleotide
uuaaguagaauuggaauuc

SEQ ID NO: 771124 - RNA, 19 nt, Artificial Sequence
  Description of Artificial Sequence: Synthetic oligonucleotide
uuauuauuguccagucaag

SEQ ID NO: 771125 - RNA, 19 nt, Artificial Sequence
  Description of Artificial Sequence: Synthetic oligonucleotide
cauauauauauuauauaca

SEQ ID NO: 771126 - RNA, 19 nt, Artificial Sequence
  Description of Artificial Sequence: Synthetic oligonucleotide
guaugguccguacaaaacc

SEQ ID NO: 771127 - RNA, 19 nt, Artificial Sequence
  Description of Artificial Sequence: Synthetic oligonucleotide
acugauugaugguaugguc

SEQ ID NO: 771128 - RNA, 19 nt, Artificial Sequence
  Description of Artificial Sequence: Synthetic oligonucleotide
aagucaagaggcccagggg

SEQ ID NO: 771129 - RNA, 19 nt, Artificial Sequence
  Description of Artificial Sequence: Synthetic oligonucleotide
uaugguccguacaaaacca

SEQ ID NO: 771130 - RNA, 19 nt, Artificial Sequence
  Description of Artificial Sequence: Synthetic oligonucleotide
auauacagagacggggucc

SEQ ID NO: 771131 - RNA, 19 nt, Artificial Sequence
  Description of Artificial Sequence: Synthetic oligonucleotide
uccagugaaaacauuggaa

SEQ ID NO: 771132 - RNA, 19 nt, Artificial Sequence
  Description of Artificial Sequence: Synthetic oligonucleotide
gaggggauuauuauugucc

SEQ ID NO: 771133 - RNA, 19 nt, Artificial Sequence
  Description of Artificial Sequence: Synthetic oligonucleotide
auacauauauauauuauau

SEQ ID NO: 771134 - RNA, 19 nt, Artificial Sequence
  Description of Artificial Sequence: Synthetic oligonucleotide
cagaaccggaaguacaucg

SEQ ID NO: 771135 - RNA, 19 nt, Artificial Sequence
  Description of Artificial Sequence: Synthetic oligonucleotide
agucguuuggccuugcugu

SEQ ID NO: 771136 - RNA, 19 nt, Artificial Sequence
  Description of Artificial Sequence: Synthetic oligonucleotide
accgaacagaaaccuaggc

SEQ ID NO: 771137 - RNA, 19 nt, Artificial Sequence
  Description of Artificial Sequence: Synthetic oligonucleotide
gguaauacaaggcuuccag

SEQ ID NO: 771138 - RNA, 19 nt, Artificial Sequence
  Description of Artificial Sequence: Synthetic oligonucleotide
guaauacaaggcuuccagg

SEQ ID NO: 771139 - RNA, 19 nt, Artificial Sequence
  Description of Artificial Sequence: Synthetic oligonucleotide
agaaauacugauugauggu

SEQ ID NO: 771140 - RNA, 19 nt, Artificial Sequence
  Description of Artificial Sequence: Synthetic oligonucleotide
uacauauauauauuauaua

SEQ ID NO: 771141 - RNA, 19 nt, Artificial Sequence
  Description of Artificial Sequence: Synthetic oligonucleotide
uuguaccucagccccauag

SEQ ID NO: 771142 - RNA, 19 nt, Artificial Sequence
  Description of Artificial Sequence: Synthetic oligonucleotide
cuaggaaaggggaaaucag

SEQ ID NO: 771143 - RNA, 19 nt, Artificial Sequence
  Description of Artificial Sequence: Synthetic oligonucleotide
aucucaagucaagaggccc

SEQ ID NO: 771144 - RNA, 19 nt, Artificial Sequence
  Description of Artificial Sequence: Synthetic oligonucleotide
gauagaacaggguuguuua

SEQ ID NO: 771145 - RNA, 19 nt, Artificial Sequence
  Description of Artificial Sequence: Synthetic oligonucleotide
uggauuuccgcuucaguga

SEQ ID NO: 771146 - RNA, 19 nt, Artificial Sequence
  Description of Artificial Sequence: Synthetic oligonucleotide
aaaccuaggcuugggaaag

SEQ ID NO: 771147 - RNA, 19 nt, Artificial Sequence
  Description of Artificial Sequence: Synthetic oligonucleotide
aguacaucgaagacccacc

SEQ ID NO: 771148 - RNA, 19 nt, Artificial Sequence
  Description of Artificial Sequence: Synthetic oligonucleotide
ugguccguacaaaaccagg

SEQ ID NO: 771149 - RNA, 19 nt, Artificial Sequence
  Description of Artificial Sequence: Synthetic oligonucleotide
uaguucaaacaccucgaug

SEQ ID NO: 771150 - RNA, 19 nt, Artificial Sequence
  Description of Artificial Sequence: Synthetic oligonucleotide
cauagaacaaggaggccac

SEQ ID NO: 771151 - RNA, 19 nt, Artificial Sequence
  Description of Artificial Sequence: Synthetic oligonucleotide
aaagagaaucucaagucaa

SEQ ID NO: 771152 - RNA, 19 nt, Artificial Sequence
  Description of Artificial Sequence: Synthetic oligonucleotide
gaugguaauacaaggcuuc

SEQ ID NO: 771153 - RNA, 19 nt, Artificial Sequence
  Description of Artificial Sequence: Synthetic oligonucleotide
uauauacagagacgggguc

SEQ ID NO: 771154 - RNA, 19 nt, Artificial Sequence
  Description of Artificial Sequence: Synthetic oligonucleotide
accggaaguacaucgaaga

SEQ ID NO: 771155 - RNA, 19 nt, Artificial Sequence
  Description of Artificial Sequence: Synthetic oligonucleotide
gggacgaccugacagaggg

SEQ ID NO: 771156 - RNA, 19 nt, Artificial Sequence
  Description of Artificial Sequence: Synthetic oligonucleotide
guacuugcguuccagggcc

SEQ ID NO: 771157 - RNA, 19 nt, Artificial Sequence
  Description of Artificial Sequence: Synthetic oligonucleotide
ugguccaagccccaauuug

SEQ ID NO: 771158 - RNA, 19 nt, Artificial Sequence
  Description of Artificial Sequence: Synthetic oligonucleotide
gauccuguuaaguagaauu

SEQ ID NO: 771159 - RNA, 19 nt, Artificial Sequence
  Description of Artificial Sequence: Synthetic oligonucleotide
uuuuaaaggggaggguacc

SEQ ID NO: 771160 - RNA, 19 nt, Artificial Sequence
  Description of Artificial Sequence: Synthetic oligonucleotide
aagagaaucucaagucaag

SEQ ID NO: 771161 - RNA, 19 nt, Artificial Sequence
  Description of Artificial Sequence: Synthetic oligonucleotide
ugaugguaauacaaggcuu

SEQ ID NO: 771162 - RNA, 19 nt, Artificial Sequence
  Description of Artificial Sequence: Synthetic oligonucleotide
auaugggcccucugguccc

SEQ ID NO: 771163 - RNA, 19 nt, Artificial Sequence
  Description of Artificial Sequence: Synthetic oligonucleotide
uguaccucagccccauaga

SEQ ID NO: 771164 - RNA, 19 nt, Artificial Sequence
  Description of Artificial Sequence: Synthetic oligonucleotide
uggggagugggaaacgcug

SEQ ID NO: 771165 - RNA, 19 nt, Artificial Sequence
  Description of Artificial Sequence: Synthetic oligonucleotide
uuuucaggaacucgaucuc

SEQ ID NO: 771166 - RNA, 19 nt, Artificial Sequence
  Description of Artificial Sequence: Synthetic oligonucleotide
augguaauacaaggcuucc

SEQ ID NO: 771167 - RNA, 19 nt, Artificial Sequence
  Description of Artificial Sequence: Synthetic oligonucleotide
uucacuuagaaagcaggcu

SEQ ID NO: 771168 - RNA, 19 nt, Artificial Sequence
  Description of Artificial Sequence: Synthetic oligonucleotide
aauuugugcaccagcuucu

SEQ ID NO: 771169 - RNA, 19 nt, Artificial Sequence
  Description of Artificial Sequence: Synthetic oligonucleotide
ucgaagacccacccacccg

SEQ ID NO: 771170 - RNA, 19 nt, Artificial Sequence
  Description of Artificial Sequence: Synthetic oligonucleotide
accaucuaagcugaccuuc

SEQ ID NO: 771171 - RNA, 19 nt, Artificial Sequence
  Description of Artificial Sequence: Synthetic oligonucleotide
uuuauggggacgaccugac

SEQ ID NO: 771172 - RNA, 19 nt, Artificial Sequence
  Description of Artificial Sequence: Synthetic oligonucleotide
ucagugacagcaugcuuga

SEQ ID NO: 771173 - RNA, 19 nt, Artificial Sequence
  Description of Artificial Sequence: Synthetic oligonucleotide
cuagcuccgacucuuccag

SEQ ID NO: 771174 - RNA, 19 nt, Artificial Sequence
  Description of Artificial Sequence: Synthetic oligonucleotide
gagguuguaaagucuggca

SEQ ID NO: 771175 - RNA, 19 nt, Artificial Sequence
  Description of Artificial Sequence: Synthetic oligonucleotide
ugauugaugguauggucua

SEQ ID NO: 771176 - RNA, 19 nt, Artificial Sequence
  Description of Artificial Sequence: Synthetic oligonucleotide
aagggugggcucuaucccu

SEQ ID NO: 771177 - RNA, 19 nt, Artificial Sequence
  Description of Artificial Sequence: Synthetic oligonucleotide
uaaagcggccuguaauaug

SEQ ID NO: 771178 - RNA, 19 nt, Artificial Sequence
  Description of Artificial Sequence: Synthetic oligonucleotide
aggggcaagaaauacugau

SEQ ID NO: 771179 - RNA, 19 nt, Artificial Sequence
  Description of Artificial Sequence: Synthetic oligonucleotide
uggucuauuuacagggguc

SEQ ID NO: 771180 - RNA, 19 nt, Artificial Sequence
  Description of Artificial Sequence: Synthetic oligonucleotide
aucugccuaggugaagugc

SEQ ID NO: 771181 - RNA, 19 nt, Artificial Sequence
  Description of Artificial Sequence: Synthetic oligonucleotide
cuauuuggcaccugggaga

SEQ ID NO: 771182 - RNA, 19 nt, Artificial Sequence
  Description of Artificial Sequence: Synthetic oligonucleotide
auggucuauuuacaggggu

SEQ ID NO: 771183 - RNA, 19 nt, Artificial Sequence
  Description of Artificial Sequence: Synthetic oligonucleotide
uggcuauuuggcaccuggg

SEQ ID NO: 771184 - RNA, 19 nt, Artificial Sequence
  Description of Artificial Sequence: Synthetic oligonucleotide
aaccgaacagaaaccuagg

SEQ ID NO: 771185 - RNA, 19 nt, Artificial Sequence
  Description of Artificial Sequence: Synthetic oligonucleotide
cucccuugguccaagcccc

SEQ ID NO: 771186 - RNA, 19 nt, Artificial Sequence
  Description of Artificial Sequence: Synthetic oligonucleotide
ucuaucccuccugggaugg

SEQ ID NO: 771187 - RNA, 19 nt, Artificial Sequence
  Description of Artificial Sequence: Synthetic oligonucleotide
acuuagaaagcaggcugac

SEQ ID NO: 771188 - RNA, 19 nt, Artificial Sequence
  Description of Artificial Sequence: Synthetic oligonucleotide
caacuuccguuucagcugc

SEQ ID NO: 771189 - RNA, 19 nt, Artificial Sequence
  Description of Artificial Sequence: Synthetic oligonucleotide
ucaaggagcgauccuguua

SEQ ID NO: 771190 - RNA, 19 nt, Artificial Sequence
  Description of Artificial Sequence: Synthetic oligonucleotide
cugagucaauuucacuuag

SEQ ID NO: 771191 - RNA, 19 nt, Artificial Sequence
  Description of Artificial Sequence: Synthetic oligonucleotide
gagucguuuggccuugcug

SEQ ID NO: 771192 - RNA, 19 nt, Artificial Sequence
  Description of Artificial Sequence: Synthetic oligonucleotide
acauuggaaaacagugggg

SEQ ID NO: 771193 - RNA, 19 nt, Artificial Sequence
  Description of Artificial Sequence: Synthetic oligonucleotide
uauacagagacgggguccu

SEQ ID NO: 771194 - RNA, 19 nt, Artificial Sequence
  Description of Artificial Sequence: Synthetic oligonucleotide
uucucggcccgccagcgcc

SEQ ID NO: 771195 - RNA, 19 nt, Artificial Sequence
  Description of Artificial Sequence: Synthetic oligonucleotide
uuacaggggucuaggagaa

SEQ ID NO: 771196 - RNA, 19 nt, Artificial Sequence
  Description of Artificial Sequence: Synthetic oligonucleotide
uccgacucuuccaguaccc

SEQ ID NO: 771197 - RNA, 19 nt, Artificial Sequence
  Description of Artificial Sequence: Synthetic oligonucleotide
cuaagcugaccuuccuccc

SEQ ID NO: 771198 - RNA, 19 nt, Artificial Sequence
  Description of Artificial Sequence: Synthetic oligonucleotide
gaagucggggcaccugucc

SEQ ID NO: 771199 - RNA, 19 nt, Artificial Sequence
  Description of Artificial Sequence: Synthetic oligonucleotide
agagaaucucaagucaaga

SEQ ID NO: 771200 - RNA, 19 nt, Artificial Sequence
  Description of Artificial Sequence: Synthetic oligonucleotide
aaccggaaguacaucgaag

SEQ ID NO: 771201 - RNA, 19 nt, Artificial Sequence
  Description of Artificial Sequence: Synthetic oligonucleotide
uaauaugggcccucugguc

SEQ ID NO: 771202 - RNA, 19 nt, Artificial Sequence
  Description of Artificial Sequence: Synthetic oligonucleotide
gaggcaaccccuccaagca

SEQ ID NO: 771203 - RNA, 19 nt, Artificial Sequence
  Description of Artificial Sequence: Synthetic oligonucleotide
uguccagucaaggagcgau

SEQ ID NO: 771204 - RNA, 19 nt, Artificial Sequence
  Description of Artificial Sequence: Synthetic oligonucleotide
uacaaggcuuccaggugug

SEQ ID NO: 771205 - RNA, 19 nt, Artificial Sequence
  Description of Artificial Sequence: Synthetic oligonucleotide
uccuagcuagcuccgacuc

SEQ ID NO: 771206 - RNA, 19 nt, Artificial Sequence
  Description of Artificial Sequence: Synthetic oligonucleotide
guacaucgaagacccaccc

SEQ ID NO: 771207 - RNA, 19 nt, Artificial Sequence
  Description of Artificial Sequence: Synthetic oligonucleotide
gaggguaugguccguacaa

SEQ ID NO: 771208 - RNA, 19 nt, Artificial Sequence
  Description of Artificial Sequence: Synthetic oligonucleotide
ugaucuggagcuccuugaa

SEQ ID NO: 771209 - RNA, 19 nt, Artificial Sequence
  Description of Artificial Sequence: Synthetic oligonucleotide
gacaggggugaagauaaug

SEQ ID NO: 771210 - RNA, 19 nt, Artificial Sequence
  Description of Artificial Sequence: Synthetic oligonucleotide
caagggugggcucuauccc

SEQ ID NO: 771211 - RNA, 19 nt, Artificial Sequence
  Description of Artificial Sequence: Synthetic oligonucleotide
cacguggugagaugcuggg

SEQ ID NO: 771212 - RNA, 19 nt, Artificial Sequence
  Description of Artificial Sequence: Synthetic oligonucleotide
aaguagaauuggaauuccu

SEQ ID NO: 771213 - RNA, 19 nt, Artificial Sequence
  Description of Artificial Sequence: Synthetic oligonucleotide
uagaacaggguuguuuaaa

SEQ ID NO: 771214 - RNA, 19 nt, Artificial Sequence
  Description of Artificial Sequence: Synthetic oligonucleotide
uuccagcuaccauugucug

SEQ ID NO: 771215 - RNA, 19 nt, Artificial Sequence
  Description of Artificial Sequence: Synthetic oligonucleotide
uccagcuaccauugucugc

SEQ ID NO: 771216 - RNA, 19 nt, Artificial Sequence
  Description of Artificial Sequence: Synthetic oligonucleotide
aagugcgucuucauucucu

SEQ ID NO: 771217 - RNA, 19 nt, Artificial Sequence
  Description of Artificial Sequence: Synthetic oligonucleotide
gguccaagccccaauuugg

SEQ ID NO: 771218 - RNA, 19 nt, Artificial Sequence
  Description of Artificial Sequence: Synthetic oligonucleotide
gagcucugcaggcacacca

SEQ ID NO: 771219 - RNA, 19 nt, Artificial Sequence
  Description of Artificial Sequence: Synthetic oligonucleotide
gguuaaaguggggaaacug

SEQ ID NO: 771220 - RNA, 19 nt, Artificial Sequence
  Description of Artificial Sequence: Synthetic oligonucleotide
gcuauggcuauuuggcacc

SEQ ID NO: 771221 - RNA, 19 nt, Artificial Sequence
  Description of Artificial Sequence: Synthetic oligonucleotide
ggauuauuauuguccaguc

SEQ ID NO: 771222 - RNA, 19 nt, Artificial Sequence
  Description of Artificial Sequence: Synthetic oligonucleotide
gcaagccuaggcuagacca

SEQ ID NO: 771223 - RNA, 19 nt, Artificial Sequence
  Description of Artificial Sequence: Synthetic oligonucleotide
uuccuagcuagcuccgacu

SEQ ID NO: 771224 - RNA, 19 nt, Artificial Sequence
  Description of Artificial Sequence: Synthetic oligonucleotide
uuuugcugguaguccuuga

SEQ ID NO: 771225 - RNA, 19 nt, Artificial Sequence
  Description of Artificial Sequence: Synthetic oligonucleotide
gggagcagccuccacgugg

SEQ ID NO: 771226 - RNA, 19 nt, Artificial Sequence
  Description of Artificial Sequence: Synthetic oligonucleotide
cuuccuagcuagcuccgac

SEQ ID NO: 771227 - RNA, 19 nt, Artificial Sequence
  Description of Artificial Sequence: Synthetic oligonucleotide
caccucgauggccaucucg

SEQ ID NO: 771228 - RNA, 19 nt, Artificial Sequence
  Description of Artificial Sequence: Synthetic oligonucleotide
ggaaacugagucaauuuca

SEQ ID NO: 771229 - RNA, 19 nt, Artificial Sequence
  Description of Artificial Sequence: Synthetic oligonucleotide
aaaaccgaacagaaaccua

SEQ ID NO: 771230 - RNA, 19 nt, Artificial Sequence
  Description of Artificial Sequence: Synthetic oligonucleotide
ggcuauggcuauuuggcac

SEQ ID NO: 771231 - RNA, 19 nt, Artificial Sequence
  Description of Artificial Sequence: Synthetic oligonucleotide
guaauaugggcccucuggu

SEQ ID NO: 771232 - RNA, 19 nt, Artificial Sequence
  Description of Artificial Sequence: Synthetic oligonucleotide
uggcugaaucuguuugaug

SEQ ID NO: 771233 - RNA, 19 nt, Artificial Sequence
  Description of Artificial Sequence: Synthetic oligonucleotide
aagcaggggugggagaugu

SEQ ID NO: 771234 - RNA, 19 nt, Artificial Sequence
  Description of Artificial Sequence: Synthetic oligonucleotide
auagaacaggguuguuuaa

SEQ ID NO: 771235 - RNA, 19 nt, Artificial Sequence
  Description of Artificial Sequence: Synthetic oligonucleotide
cuuccaguacccgacgcug

SEQ ID NO: 771236 - RNA, 19 nt, Artificial Sequence
  Description of Artificial Sequence: Synthetic oligonucleotide
cuagaccaaggaaaccuga

SEQ ID NO: 771237 - RNA, 19 nt, Artificial Sequence
  Description of Artificial Sequence: Synthetic oligonucleotide
gaaccggaaguacaucgaa

SEQ ID NO: 771238 - RNA, 19 nt, Artificial Sequence
  Description of Artificial Sequence: Synthetic oligonucleotide
aaccuaggcuugggaaagg

SEQ ID NO: 771239 - RNA, 19 nt, Artificial Sequence
  Description of Artificial Sequence: Synthetic oligonucleotide
augggaggggauuauuauu

SEQ ID NO: 771240 - RNA, 19 nt, Artificial Sequence
  Description of Artificial Sequence: Synthetic oligonucleotide
ugggguuaaaguggggaaa

SEQ ID NO: 771241 - RNA, 19 nt, Artificial Sequence
  Description of Artificial Sequence: Synthetic oligonucleotide
accuaggcuugggaaaggg

SEQ ID NO: 771242 - RNA, 19 nt, Artificial Sequence
  Description of Artificial Sequence: Synthetic oligonucleotide
gaugagucguuuggccuug

SEQ ID NO: 771243 - RNA, 19 nt, Artificial Sequence
  Description of Artificial Sequence: Synthetic oligonucleotide
cucuaucccuccugggaug

SEQ ID NO: 771244 - RNA, 19 nt, Artificial Sequence
  Description of Artificial Sequence: Synthetic oligonucleotide
uggggacgaccugacagag

SEQ ID NO: 771245 - RNA, 19 nt, Artificial Sequence
  Description of Artificial Sequence: Synthetic oligonucleotide
uccuggcaagccuaggcua

SEQ ID NO: 771246 - RNA, 19 nt, Artificial Sequence
  Description of Artificial Sequence: Synthetic oligonucleotide
ggauuuccgcuucagugac

SEQ ID NO: 771247 - RNA, 19 nt, Artificial Sequence
  Description of Artificial Sequence: Synthetic oligonucleotide
aguacccgacgcugggcag

SEQ ID NO: 771248 - RNA, 19 nt, Artificial Sequence
  Description of Artificial Sequence: Synthetic oligonucleotide
acaggggaagugcgucuuc

SEQ ID NO: 771249 - RNA, 19 nt, Artificial Sequence
  Description of Artificial Sequence: Synthetic oligonucleotide
augguauggucuauuuaca

SEQ ID NO: 771250 - RNA, 19 nt, Artificial Sequence
  Description of Artificial Sequence: Synthetic oligonucleotide
uccgcuucagugacagcau

SEQ ID NO: 771251 - RNA, 19 nt, Artificial Sequence
  Description of Artificial Sequence: Synthetic oligonucleotide
ccguacaaaaccaggaaca

SEQ ID NO: 771252 - RNA, 19 nt, Artificial Sequence
  Description of Artificial Sequence: Synthetic oligonucleotide
aagacccacccacccggcu

SEQ ID NO: 771253 - RNA, 19 nt, Artificial Sequence
  Description of Artificial Sequence: Synthetic oligonucleotide
agcgauccuguuaaguaga

SEQ ID NO: 771254 - RNA, 19 nt, Artificial Sequence
  Description of Artificial Sequence: Synthetic oligonucleotide
aggcaaccccuccaagcag

SEQ ID NO: 771255 - RNA, 19 nt, Artificial Sequence
  Description of Artificial Sequence: Synthetic oligonucleotide
cauccaccacccagguccg

SEQ ID NO: 771256 - RNA, 19 nt, Artificial Sequence
  Description of Artificial Sequence: Synthetic oligonucleotide
gguaugguccguacaaaac

SEQ ID NO: 771257 - RNA, 19 nt, Artificial Sequence
  Description of Artificial Sequence: Synthetic oligonucleotide
gggccauugcccuuccuag

SEQ ID NO: 771258 - RNA, 19 nt, Artificial Sequence
  Description of Artificial Sequence: Synthetic oligonucleotide
guagcccuccagcuucucc

SEQ ID NO: 771259 - RNA, 19 nt, Artificial Sequence
  Description of Artificial Sequence: Synthetic oligonucleotide
cucaagucaagaggcccag

SEQ ID NO: 771260 - RNA, 19 nt, Artificial Sequence
  Description of Artificial Sequence: Synthetic oligonucleotide
uaucccuccugggauggga

SEQ ID NO: 771261 - RNA, 19 nt, Artificial Sequence
  Description of Artificial Sequence: Synthetic oligonucleotide
gacgaccugacagagggua

SEQ ID NO: 771262 - RNA, 19 nt, Artificial Sequence
  Description of Artificial Sequence: Synthetic oligonucleotide
agggccauugcccuuccua

SEQ ID NO: 771263 - RNA, 19 nt, Artificial Sequence
  Description of Artificial Sequence: Synthetic oligonucleotide
aagagcacugccggucaga

SEQ ID NO: 771264 - RNA, 19 nt, Artificial Sequence
  Description of Artificial Sequence: Synthetic oligonucleotide
ggagcgauccuguuaagua

SEQ ID NO: 771265 - RNA, 19 nt, Artificial Sequence
  Description of Artificial Sequence: Synthetic oligonucleotide
ugagucguuuggccuugcu

SEQ ID NO: 771266 - RNA, 19 nt, Artificial Sequence
  Description of Artificial Sequence: Synthetic oligonucleotide
agaaccggaaguacaucga

SEQ ID NO: 771267 - RNA, 19 nt, Artificial Sequence
  Description of Artificial Sequence: Synthetic oligonucleotide
aggagcgauccuguuaagu

SEQ ID NO: 771268 - RNA, 19 nt, Artificial Sequence
  Description of Artificial Sequence: Synthetic oligonucleotide
uuccuaggaaaggggaaau

SEQ ID NO: 771269 - RNA, 19 nt, Artificial Sequence
  Description of Artificial Sequence: Synthetic oligonucleotide
ccaucuaagcugaccuucc

SEQ ID NO: 771270 - RNA, 19 nt, Artificial Sequence
  Description of Artificial Sequence: Synthetic oligonucleotide
ggggauuauuauuguccag

SEQ ID NO: 771271 - RNA, 19 nt, Artificial Sequence
  Description of Artificial Sequence: Synthetic oligonucleotide
augguccguacaaaaccag

SEQ ID NO: 771272 - RNA, 19 nt, Artificial Sequence
  Description of Artificial Sequence: Synthetic oligonucleotide
cagaggguaugguccguac

SEQ ID NO: 771273 - RNA, 19 nt, Artificial Sequence
  Description of Artificial Sequence: Synthetic oligonucleotide
gaaagggauuguggaggug

SEQ ID NO: 771274 - RNA, 19 nt, Artificial Sequence
  Description of Artificial Sequence: Synthetic oligonucleotide
cacuccgguccagagacac

SEQ ID NO: 771275 - RNA, 19 nt, Artificial Sequence
  Description of Artificial Sequence: Synthetic oligonucleotide
aagcggccuguaauauggg

SEQ ID NO: 771276 - RNA, 19 nt, Artificial Sequence
  Description of Artificial Sequence: Synthetic oligonucleotide
gcggggauugaggacaggg

SEQ ID NO: 771277 - RNA, 19 nt, Artificial Sequence
  Description of Artificial Sequence: Synthetic oligonucleotide
agucaaggagcgauccugu

SEQ ID NO: 771278 - RNA, 19 nt, Artificial Sequence
  Description of Artificial Sequence: Synthetic oligonucleotide
ggcaaccccuccaagcagg

SEQ ID NO: 771279 - RNA, 19 nt, Artificial Sequence
  Description of Artificial Sequence: Synthetic oligonucleotide
caucugccuaggugaagug

SEQ ID NO: 771280 - RNA, 19 nt, Artificial Sequence
  Description of Artificial Sequence: Synthetic oligonucleotide
uccuaggaaaggggaaauc

SEQ ID NO: 771281 - RNA, 19 nt, Artificial Sequence
  Description of Artificial Sequence: Synthetic oligonucleotide
ggcuggagguuguaaaguc

SEQ ID NO: 771282 - RNA, 19 nt, Artificial Sequence
  Description of Artificial Sequence: Synthetic oligonucleotide
gaagugcaggagccgggca

SEQ ID NO: 771283 - RNA, 19 nt, Artificial Sequence
  Description of Artificial Sequence: Synthetic oligonucleotide
ucuggcaguuuggucugca

SEQ ID NO: 771284 - RNA, 19 nt, Artificial Sequence
  Description of Artificial Sequence: Synthetic oligonucleotide
uccaucugccuaggugaag

SEQ ID NO: 771285 - RNA, 19 nt, Artificial Sequence
  Description of Artificial Sequence: Synthetic oligonucleotide
ggaggggauuauuauuguc

SEQ ID NO: 771286 - RNA, 19 nt, Artificial Sequence
  Description of Artificial Sequence: Synthetic oligonucleotide
cggaaguacaucgaagacc

SEQ ID NO: 771287 - RNA, 19 nt, Artificial Sequence
  Description of Artificial Sequence: Synthetic oligonucleotide
gaagauaaugggaggggau

SEQ ID NO: 771288 - RNA, 19 nt, Artificial Sequence
  Description of Artificial Sequence: Synthetic oligonucleotide
cacaaggacccugugggca

SEQ ID NO: 771289 - RNA, 19 nt, Artificial Sequence
  Description of Artificial Sequence: Synthetic oligonucleotide
ggccauugcccuuccuagg

SEQ ID NO: 771290 - RNA, 19 nt, Artificial Sequence
  Description of Artificial Sequence: Synthetic oligonucleotide
cuguaauaugggcccucug

SEQ ID NO: 771291 - RNA, 19 nt, Artificial Sequence
  Description of Artificial Sequence: Synthetic oligonucleotide
ccauagaacaaggaggcca

SEQ ID NO: 771292 - RNA, 19 nt, Artificial Sequence
  Description of Artificial Sequence: Synthetic oligonucleotide
cuuagaaagcaggcugaca

SEQ ID NO: 771293 - RNA, 19 nt, Artificial Sequence
  Description of Artificial Sequence: Synthetic oligonucleotide
cauugcccuuccuaggaaa

SEQ ID NO: 771294 - RNA, 19 nt, Artificial Sequence
  Description of Artificial Sequence: Synthetic oligonucleotide
cuccagacucugcaacuuc

SEQ ID NO: 771295 - RNA, 19 nt, Artificial Sequence
  Description of Artificial Sequence: Synthetic oligonucleotide
gcuaguucaaacaccucga

SEQ ID NO: 771296 - RNA, 19 nt, Artificial Sequence
  Description of Artificial Sequence: Synthetic oligonucleotide
gaggacaggggugaagaua

SEQ ID NO: 771297 - RNA, 19 nt, Artificial Sequence
  Description of Artificial Sequence: Synthetic oligonucleotide
ggagguggcaaaaugagau

SEQ ID NO: 771298 - RNA, 19 nt, Artificial Sequence
  Description of Artificial Sequence: Synthetic oligonucleotide
cgaagacccacccacccgg

SEQ ID NO: 771299 - RNA, 19 nt, Artificial Sequence
  Description of Artificial Sequence: Synthetic oligonucleotide
gguccguacaaaaccagga

SEQ ID NO: 771300 - RNA, 19 nt, Artificial Sequence
  Description of Artificial Sequence: Synthetic oligonucleotide
auaaugggaggggauuauu

SEQ ID NO: 771301 - RNA, 19 nt, Artificial Sequence
  Description of Artificial Sequence: Synthetic oligonucleotide
cagguccgcuuucaguuuc

SEQ ID NO: 771302 - RNA, 19 nt, Artificial Sequence
  Description of Artificial Sequence: Synthetic oligonucleotide
ggauugaggacagggguga

SEQ ID NO: 771303 - RNA, 19 nt, Artificial Sequence
  Description of Artificial Sequence: Synthetic oligonucleotide
aaccccagaguggccucag

SEQ ID NO: 771304 - RNA, 19 nt, Artificial Sequence
  Description of Artificial Sequence: Synthetic oligonucleotide
gaaaucagugcaggaccaa

SEQ ID NO: 771305 - RNA, 19 nt, Artificial Sequence
  Description of Artificial Sequence: Synthetic oligonucleotide
caagagcacugccggucag

SEQ ID NO: 771306 - RNA, 19 nt, Artificial Sequence
  Description of Artificial Sequence: Synthetic oligonucleotide
ggggccacccuaaagcggc

SEQ ID NO: 771307 - RNA, 19 nt, Artificial Sequence
  Description of Artificial Sequence: Synthetic oligonucleotide
gagaggggcaagaaauacu

SEQ ID NO: 771308 - RNA, 19 nt, Artificial Sequence
  Description of Artificial Sequence: Synthetic oligonucleotide
uauggcuauuuggcaccug

SEQ ID NO: 771309 - RNA, 19 nt, Artificial Sequence
  Description of Artificial Sequence: Synthetic oligonucleotide
agagcacugccggucagaa

SEQ ID NO: 771310 - RNA, 19 nt, Artificial Sequence
  Description of Artificial Sequence: Synthetic oligonucleotide
cucaagggugggcucuauc

SEQ ID NO: 771311 - RNA, 19 nt, Artificial Sequence
  Description of Artificial Sequence: Synthetic oligonucleotide
gaagacccacccacccggc

SEQ ID NO: 771312 - RNA, 19 nt, Artificial Sequence
  Description of Artificial Sequence: Synthetic oligonucleotide
ggaggccagaaugcaacag

SEQ ID NO: 771313 - RNA, 19 nt, Artificial Sequence
  Description of Artificial Sequence: Synthetic oligonucleotide
gaacaaggaggccacucuu

SEQ ID NO: 771314 - RNA, 19 nt, Artificial Sequence
  Description of Artificial Sequence: Synthetic oligonucleotide
ggguaugguccguacaaaa

SEQ ID NO: 771315 - RNA, 19 nt, Artificial Sequence
  Description of Artificial Sequence: Synthetic oligonucleotide
ggcuagaccaaggaaaccu

SEQ ID NO: 771316 - RNA, 19 nt, Artificial Sequence
  Description of Artificial Sequence: Synthetic oligonucleotide
ucaccucccuugguccaag

SEQ ID NO: 771317 - RNA, 19 nt, Artificial Sequence
  Description of Artificial Sequence: Synthetic oligonucleotide
augagucguuuggccuugc

SEQ ID NO: 771318 - RNA, 19 nt, Artificial Sequence
  Description of Artificial Sequence: Synthetic oligonucleotide
agcggggcggggauugagg

SEQ ID NO: 771319 - RNA, 19 nt, Artificial Sequence
  Description of Artificial Sequence: Synthetic oligonucleotide
cugcuaguucaaacaccuc

SEQ ID NO: 771320 - RNA, 19 nt, Artificial Sequence
  Description of Artificial Sequence: Synthetic oligonucleotide
auagaacaaggaggccacu

SEQ ID NO: 771321 - RNA, 19 nt, Artificial Sequence
  Description of Artificial Sequence: Synthetic oligonucleotide
ccuaaagcggccuguaaua

SEQ ID NO: 771322 - RNA, 19 nt, Artificial Sequence
  Description of Artificial Sequence: Synthetic oligonucleotide
ccggaaguacaucgaagac

SEQ ID NO: 771323 - RNA, 19 nt, Artificial Sequence
  Description of Artificial Sequence: Synthetic oligonucleotide
acccuaaagcggccuguaa

SEQ ID NO: 771324 - RNA, 19 nt, Artificial Sequence
  Description of Artificial Sequence: Synthetic oligonucleotide
ccuccacguggugagaugc

SEQ ID NO: 771325 - RNA, 19 nt, Artificial Sequence
  Description of Artificial Sequence: Synthetic oligonucleotide
uuguaaagucuggcaguuu

SEQ ID NO: 771326 - RNA, 19 nt, Artificial Sequence
  Description of Artificial Sequence: Synthetic oligonucleotide
guaguccuugaugagucgu

SEQ ID NO: 771327 - RNA, 19 nt, Artificial Sequence
  Description of Artificial Sequence: Synthetic oligonucleotide
acuugcguuccagggccug

SEQ ID NO: 771328 - RNA, 19 nt, Artificial Sequence
  Description of Artificial Sequence: Synthetic oligonucleotide
uccaagcaggaggccagaa

SEQ ID NO: 771329 - RNA, 19 nt, Artificial Sequence
  Description of Artificial Sequence: Synthetic oligonucleotide
ggucuauuuacaggggucu

SEQ ID NO: 771330 - RNA, 19 nt, Artificial Sequence
  Description of Artificial Sequence: Synthetic oligonucleotide
gucagaaccggaaguacau

SEQ ID NO: 771331 - RNA, 19 nt, Artificial Sequence
  Description of Artificial Sequence: Synthetic oligonucleotide
auacagagacgggguccuc

SEQ ID NO: 771332 - RNA, 19 nt, Artificial Sequence
  Description of Artificial Sequence: Synthetic oligonucleotide
aggguaugguccguacaaa

SEQ ID NO: 771333 - RNA, 19 nt, Artificial Sequence
  Description of Artificial Sequence: Synthetic oligonucleotide
cuucucggcccgccagcgc

SEQ ID NO: 771334 - RNA, 19 nt, Artificial Sequence
  Description of Artificial Sequence: Synthetic oligonucleotide
ggaaagggauuguggaggu

SEQ ID NO: 771335 - RNA, 19 nt, Artificial Sequence
  Description of Artificial Sequence: Synthetic oligonucleotide
ccccaauuugggguuaaag

SEQ ID NO: 771336 - RNA, 19 nt, Artificial Sequence
  Description of Artificial Sequence: Synthetic oligonucleotide
cacccacccggcuccgccc

SEQ ID NO: 771337 - RNA, 19 nt, Artificial Sequence
  Description of Artificial Sequence: Synthetic oligonucleotide
ggauuguggagguggcaaa

SEQ ID NO: 771338 - RNA, 19 nt, Artificial Sequence
  Description of Artificial Sequence: Synthetic oligonucleotide
aguagcccuccagcuucuc

SEQ ID NO: 771339 - RNA, 19 nt, Artificial Sequence
  Description of Artificial Sequence: Synthetic oligonucleotide
cuaguucaaacaccucgau

SEQ ID NO: 771340 - RNA, 19 nt, Artificial Sequence
  Description of Artificial Sequence: Synthetic oligonucleotide
cuaucccuccugggauggg

SEQ ID NO: 771341 - RNA, 19 nt, Artificial Sequence
  Description of Artificial Sequence: Synthetic oligonucleotide
acagaggguaugguccgua

SEQ ID NO: 771342 - RNA, 19 nt, Artificial Sequence
  Description of Artificial Sequence: Synthetic oligonucleotide
cagggagcagccuccacgu

SEQ ID NO: 771343 - RNA, 19 nt, Artificial Sequence
  Description of Artificial Sequence: Synthetic oligonucleotide
gaaguacaucgaagaccca

SEQ ID NO: 771344 - RNA, 19 nt, Artificial Sequence
  Description of Artificial Sequence: Synthetic oligonucleotide
caggcacaccaucuaagcu

SEQ ID NO: 771345 - RNA, 19 nt, Artificial Sequence
  Description of Artificial Sequence: Synthetic oligonucleotide
gagcggggcggggauugag

SEQ ID NO: 771346 - RNA, 19 nt, Artificial Sequence
  Description of Artificial Sequence: Synthetic oligonucleotide
ggcccucuggucccugaag

SEQ ID NO: 771347 - RNA, 19 nt, Artificial Sequence
  Description of Artificial Sequence: Synthetic oligonucleotide
ccgaacagaaaccuaggcu

SEQ ID NO: 771348 - RNA, 19 nt, Artificial Sequence
  Description of Artificial Sequence: Synthetic oligonucleotide
gaaccccagaguggccuca

SEQ ID NO: 771349 - RNA, 19 nt, Artificial Sequence
  Description of Artificial Sequence: Synthetic oligonucleotide
acguggugagaugcuggga

SEQ ID NO: 771350 - RNA, 19 nt, Artificial Sequence
  Description of Artificial Sequence: Synthetic oligonucleotide
cuaaagcggccuguaauau

SEQ ID NO: 771351 - RNA, 19 nt, Artificial Sequence
  Description of Artificial Sequence: Synthetic oligonucleotide
cccuuccuaggaaagggga

SEQ ID NO: 771352 - RNA, 19 nt, Artificial Sequence
  Description of Artificial Sequence: Synthetic oligonucleotide
gauugaggacaggggugaa

SEQ ID NO: 771353 - RNA, 19 nt, Artificial Sequence
  Description of Artificial Sequence: Synthetic oligonucleotide
uuccucccuccuggcaagc

SEQ ID NO: 771354 - RNA, 19 nt, Artificial Sequence
  Description of Artificial Sequence: Synthetic oligonucleotide
gucuauuuacaggggucua

SEQ ID NO: 771355 - RNA, 19 nt, Artificial Sequence
  Description of Artificial Sequence: Synthetic oligonucleotide
agcucugcaggcacaccau

SEQ ID NO: 771356 - RNA, 19 nt, Artificial Sequence
  Description of Artificial Sequence: Synthetic oligonucleotide
ccuaggcuagaccaaggaa

SEQ ID NO: 771357 - RNA, 19 nt, Artificial Sequence
  Description of Artificial Sequence: Synthetic oligonucleotide
guccagucaaggagcgauc

SEQ ID NO: 771358 - RNA, 19 nt, Artificial Sequence
  Description of Artificial Sequence: Synthetic oligonucleotide
ccucuggucccugaagcug

SEQ ID NO: 771359 - RNA, 19 nt, Artificial Sequence
  Description of Artificial Sequence: Synthetic oligonucleotide
ggaccaagcccagccugag

SEQ ID NO: 771360 - RNA, 19 nt, Artificial Sequence
  Description of Artificial Sequence: Synthetic oligonucleotide
caaccccuccaagcaggag

SEQ ID NO: 771361 - RNA, 19 nt, Artificial Sequence
  Description of Artificial Sequence: Synthetic oligonucleotide
gccacccuaaagcggccug

SEQ ID NO: 771362 - RNA, 19 nt, Artificial Sequence
  Description of Artificial Sequence: Synthetic oligonucleotide
gcacugccggucagaaccg

SEQ ID NO: 771363 - RNA, 19 nt, Artificial Sequence
  Description of Artificial Sequence: Synthetic oligonucleotide
caucuaagcugaccuuccu

SEQ ID NO: 771364 - RNA, 19 nt, Artificial Sequence
  Description of Artificial Sequence: Synthetic oligonucleotide
ucggggcaccuguccccag

SEQ ID NO: 771365 - RNA, 19 nt, Artificial Sequence
  Description of Artificial Sequence: Synthetic oligonucleotide
cuugcguuccagggccuga

SEQ ID NO: 771366 - RNA, 19 nt, Artificial Sequence
  Description of Artificial Sequence: Synthetic oligonucleotide
ggggacgaccugacagagg

SEQ ID NO: 771367 - RNA, 19 nt, Artificial Sequence
  Description of Artificial Sequence: Synthetic oligonucleotide
ccgacucuuccaguacccg

SEQ ID NO: 771368 - RNA, 19 nt, Artificial Sequence
  Description of Artificial Sequence: Synthetic oligonucleotide
gggugggcucuaucccucc

SEQ ID NO: 771369 - RNA, 19 nt, Artificial Sequence
  Description of Artificial Sequence: Synthetic oligonucleotide
ggucuaggagaagccaaaa

SEQ ID NO: 771370 - RNA, 19 nt, Artificial Sequence
  Description of Artificial Sequence: Synthetic oligonucleotide
gaggaggcuauggcuauuu

SEQ ID NO: 771371 - RNA, 19 nt, Artificial Sequence
  Description of Artificial Sequence: Synthetic oligonucleotide
guggcugaaucuguuugau

SEQ ID NO: 771372 - RNA, 19 nt, Artificial Sequence
  Description of Artificial Sequence: Synthetic oligonucleotide
agguccgcuuucaguuucu

SEQ ID NO: 771373 - RNA, 19 nt, Artificial Sequence
  Description of Artificial Sequence: Synthetic oligonucleotide
gccuccacguggugagaug

SEQ ID NO: 771374 - RNA, 19 nt, Artificial Sequence
  Description of Artificial Sequence: Synthetic oligonucleotide
gcggggcggggauugagga

SEQ ID NO: 771375 - RNA, 19 nt, Artificial Sequence
  Description of Artificial Sequence: Synthetic oligonucleotide
acuccgguccagagacaca

SEQ ID NO: 771376 - RNA, 19 nt, Artificial Sequence
  Description of Artificial Sequence: Synthetic oligonucleotide
cacaggcuggagguuguaa

SEQ ID NO: 771377 - RNA, 19 nt, Artificial Sequence
  Description of Artificial Sequence: Synthetic oligonucleotide
gcuggagguuguaaagucu

SEQ ID NO: 771378 - RNA, 19 nt, Artificial Sequence
  Description of Artificial Sequence: Synthetic oligonucleotide
gucggggcaccugucccca

SEQ ID NO: 771379 - RNA, 19 nt, Artificial Sequence
  Description of Artificial Sequence: Synthetic oligonucleotide
ccacccacccggcuccgcc

SEQ ID NO: 771380 - RNA, 19 nt, Artificial Sequence
  Description of Artificial Sequence: Synthetic oligonucleotide
aggauagaacaggguuguu

SEQ ID NO: 771381 - RNA, 19 nt, Artificial Sequence
  Description of Artificial Sequence: Synthetic oligonucleotide
ccgcuucagugacagcaug

SEQ ID NO: 771382 - RNA, 19 nt, Artificial Sequence
  Description of Artificial Sequence: Synthetic oligonucleotide
gucuggcaguuuggucugc

SEQ ID NO: 771383 - RNA, 19 nt, Artificial Sequence
  Description of Artificial Sequence: Synthetic oligonucleotide
cguacaaaaccaggaacaa

SEQ ID NO: 771384 - RNA, 19 nt, Artificial Sequence
  Description of Artificial Sequence: Synthetic oligonucleotide
cuauggcuauuuggcaccu

SEQ ID NO: 771385 - RNA, 19 nt, Artificial Sequence
  Description of Artificial Sequence: Synthetic oligonucleotide
gucaaggagcgauccuguu

SEQ ID NO: 771386 - RNA, 19 nt, Artificial Sequence
  Description of Artificial Sequence: Synthetic oligonucleotide
agccccaauuugggguuaa

SEQ ID NO: 771387 - RNA, 19 nt, Artificial Sequence
  Description of Artificial Sequence: Synthetic oligonucleotide
cccagguccgcuuucaguu

SEQ ID NO: 771388 - RNA, 19 nt, Artificial Sequence
  Description of Artificial Sequence: Synthetic oligonucleotide
ggggcaagaaauacugauu

SEQ ID NO: 771389 - RNA, 19 nt, Artificial Sequence
  Description of Artificial Sequence: Synthetic oligonucleotide
cccgacgcugggcagucuc

SEQ ID NO: 771390 - RNA, 19 nt, Artificial Sequence
  Description of Artificial Sequence: Synthetic oligonucleotide
cgacucuuccaguacccga

SEQ ID NO: 771391 - RNA, 19 nt, Artificial Sequence
  Description of Artificial Sequence: Synthetic oligonucleotide
cuccacguggugagaugcu

SEQ ID NO: 771392 - RNA, 19 nt, Artificial Sequence
  Description of Artificial Sequence: Synthetic oligonucleotide
caguuccaggaggaggcua

SEQ ID NO: 771393 - RNA, 19 nt, Artificial Sequence
  Description of Artificial Sequence: Synthetic oligonucleotide
cccuaaagcggccuguaau

SEQ ID NO: 771394 - RNA, 19 nt, Artificial Sequence
  Description of Artificial Sequence: Synthetic oligonucleotide
guacccgacgcugggcagu

SEQ ID NO: 771395 - RNA, 19 nt, Artificial Sequence
  Description of Artificial Sequence: Synthetic oligonucleotide
caccaucuaagcugaccuu

SEQ ID NO: 771396 - RNA, 19 nt, Artificial Sequence
  Description of Artificial Sequence: Synthetic oligonucleotide
cucaccucccuugguccaa

SEQ ID NO: 771397 - RNA, 19 nt, Artificial Sequence
  Description of Artificial Sequence: Synthetic oligonucleotide
cuccaagcaggaggccaga

SEQ ID NO: 771398 - RNA, 19 nt, Artificial Sequence
  Description of Artificial Sequence: Synthetic oligonucleotide
uaggagcggggcggggauu

SEQ ID NO: 771399 - RNA, 19 nt, Artificial Sequence
  Description of Artificial Sequence: Synthetic oligonucleotide
ggggcggaagagaggggca

SEQ ID NO: 771400 - RNA, 19 nt, Artificial Sequence
  Description of Artificial Sequence: Synthetic oligonucleotide
cuuguaccucagccccaua

SEQ ID NO: 771401 - RNA, 19 nt, Artificial Sequence
  Description of Artificial Sequence: Synthetic oligonucleotide
gcgauccuguuaaguagaa

SEQ ID NO: 771402 - RNA, 19 nt, Artificial Sequence
  Description of Artificial Sequence: Synthetic oligonucleotide
ggcggggauugaggacagg

SEQ ID NO: 771403 - RNA, 19 nt, Artificial Sequence
  Description of Artificial Sequence: Synthetic oligonucleotide
ccauugcccuuccuaggaa

SEQ ID NO: 771404 - RNA, 19 nt, Artificial Sequence
  Description of Artificial Sequence: Synthetic oligonucleotide
ggugggcucuaucccuccu

SEQ ID NO: 771405 - RNA, 19 nt, Artificial Sequence
  Description of Artificial Sequence: Synthetic oligonucleotide
ccggucagaaccggaagua

SEQ ID NO: 771406 - RNA, 19 nt, Artificial Sequence
  Description of Artificial Sequence: Synthetic oligonucleotide
ccagcuccacuccggucca

SEQ ID NO: 771407 - RNA, 19 nt, Artificial Sequence
  Description of Artificial Sequence: Synthetic oligonucleotide
ccuagcuagcuccgacucu

SEQ ID NO: 771408 - RNA, 19 nt, Artificial Sequence
  Description of Artificial Sequence: Synthetic oligonucleotide
ggccugauacugggccuga

SEQ ID NO: 771409 - RNA, 19 nt, Artificial Sequence
  Description of Artificial Sequence: Synthetic oligonucleotide
ccaagcaggaggccagaau

SEQ ID NO: 771410 - RNA, 19 nt, Artificial Sequence
  Description of Artificial Sequence: Synthetic oligonucleotide
cguuccagggccugauacu

SEQ ID NO: 771411 - RNA, 19 nt, Artificial Sequence
  Description of Artificial Sequence: Synthetic oligonucleotide
gggcaagagcacugccggu

SEQ ID NO: 771412 - RNA, 19 nt, Artificial Sequence
  Description of Artificial Sequence: Synthetic oligonucleotide
gggcccucuggucccugaa

SEQ ID NO: 771413 - RNA, 19 nt, Artificial Sequence
  Description of Artificial Sequence: Synthetic oligonucleotide
cccucuggucccugaagcu

SEQ ID NO: 771414 - RNA, 19 nt, Artificial Sequence
  Description of Artificial Sequence: Synthetic oligonucleotide
gucucccgcagguguucau

SEQ ID NO: 771415 - RNA, 19 nt, Artificial Sequence
  Description of Artificial Sequence: Synthetic oligonucleotide
ccagucaaggagcgauccu

SEQ ID NO: 771416 - RNA, 19 nt, Artificial Sequence
  Description of Artificial Sequence: Synthetic oligonucleotide
accuguccccaggcuggua

SEQ ID NO: 771417 - RNA, 19 nt, Artificial Sequence
  Description of Artificial Sequence: Synthetic oligonucleotide
ggccuguaauaugggcccu

SEQ ID NO: 771418 - RNA, 19 nt, Artificial Sequence
  Description of Artificial Sequence: Synthetic oligonucleotide
ccuugguccaagccccaau

SEQ ID NO: 771419 - RNA, 19 nt, Artificial Sequence
  Description of Artificial Sequence: Synthetic oligonucleotide
ccacuccgguccagagaca

SEQ ID NO: 771420 - RNA, 19 nt, Artificial Sequence
  Description of Artificial Sequence: Synthetic oligonucleotide
cccaguagcccuccagcuu

SEQ ID NO: 771421 - RNA, 19 nt, Artificial Sequence
  Description of Artificial Sequence: Synthetic oligonucleotide
ggccacccuaaagcggccu

SEQ ID NO: 771422 - RNA, 19 nt, Artificial Sequence
  Description of Artificial Sequence: Synthetic oligonucleotide
ggagcggggcggggauuga

SEQ ID NO: 771423 - RNA, 19 nt, Artificial Sequence
  Description of Artificial Sequence: Synthetic oligonucleotide
ggacgaccugacagagggu

SEQ ID NO: 771424 - RNA, 19 nt, Artificial Sequence
  Description of Artificial Sequence: Synthetic oligonucleotide
gccccaauuugggguuaaa

SEQ ID NO: 771425 - RNA, 19 nt, Artificial Sequence
  Description of Artificial Sequence: Synthetic oligonucleotide
ccagguccgcuuucaguuu

SEQ ID NO: 771426 - RNA, 19 nt, Artificial Sequence
  Description of Artificial Sequence: Synthetic oligonucleotide
ccgacgcugggcagucucu

SEQ ID NO: 771427 - RNA, 19 nt, Artificial Sequence
  Description of Artificial Sequence: Synthetic oligonucleotide
ccacccuaaagcggccugu

SEQ ID NO: 771428 - RNA, 19 nt, Artificial Sequence
  Description of Artificial Sequence: Synthetic oligonucleotide
ggacaggggugaagauaau

SEQ ID NO: 771429 - RNA, 19 nt, Artificial Sequence
  Description of Artificial Sequence: Synthetic oligonucleotide
cccuugguccaagccccaa

SEQ ID NO: 771430 - RNA, 19 nt, Artificial Sequence
  Description of Artificial Sequence: Synthetic oligonucleotide
cgauccuguuaaguagaau

SEQ ID NO: 771431 - RNA, 19 nt, Artificial Sequence
  Description of Artificial Sequence: Synthetic oligonucleotide
ggcccgccagcgcccuuuu

SEQ ID NO: 771432 - RNA, 19 nt, Artificial Sequence
  Description of Artificial Sequence: Synthetic oligonucleotide
cggcccgccagcgcccuuu

SEQ ID NO: 771433 - RNA, 19 nt, Artificial Sequence
  Description of Artificial Sequence: Synthetic oligonucleotide
auagcgauuccuuagaagc

SEQ ID NO: 771434 - RNA, 19 nt, Artificial Sequence
  Description of Artificial Sequence: Synthetic oligonucleotide
gaagucagcacacagaccc

SEQ ID NO: 771435 - RNA, 19 nt, Artificial Sequence
  Description of Artificial Sequence: Synthetic oligonucleotide
aaauucccauccuuggacc

SEQ ID NO: 771436 - RNA, 19 nt, Artificial Sequence
  Description of Artificial Sequence: Synthetic oligonucleotide
agcggcuagacuuaguacc

SEQ ID NO: 771437 - RNA, 19 nt, Artificial Sequence
  Description of Artificial Sequence: Synthetic oligonucleotide
aaugcauucuucgugguuc

SEQ ID NO: 771438 - RNA, 19 nt, Artificial Sequence
  Description of Artificial Sequence: Synthetic oligonucleotide
aagccuagcacacaggugu

SEQ ID NO: 771439 - RNA, 19 nt, Artificial Sequence
  Description of Artificial Sequence: Synthetic oligonucleotide
acaccauacacguggaagc

SEQ ID NO: 771440 - RNA, 19 nt, Artificial Sequence
  Description of Artificial Sequence: Synthetic oligonucleotide
cauacaucugccaaagcgg

SEQ ID NO: 771441 - RNA, 19 nt, Artificial Sequence
  Description of Artificial Sequence: Synthetic oligonucleotide
cuuaguaccacaacuggag

SEQ ID NO: 771442 - RNA, 19 nt, Artificial Sequence
  Description of Artificial Sequence: Synthetic oligonucleotide
aaucauccaccacacaaag

SEQ ID NO: 771443 - RNA, 19 nt, Artificial Sequence
  Description of Artificial Sequence: Synthetic oligonucleotide
ugaaccacaggcuguaagg

SEQ ID NO: 771444 - RNA, 19 nt, Artificial Sequence
  Description of Artificial Sequence: Synthetic oligonucleotide
gaauguacugaaaucaaag

SEQ ID NO: 771445 - RNA, 19 nt, Artificial Sequence
  Description of Artificial Sequence: Synthetic oligonucleotide
uagacuuaguaccacaacu

SEQ ID NO: 771446 - RNA, 19 nt, Artificial Sequence
  Description of Artificial Sequence: Synthetic oligonucleotide
uaucgugugugcaaugggg

SEQ ID NO: 771447 - RNA, 19 nt, Artificial Sequence
  Description of Artificial Sequence: Synthetic oligonucleotide
aaaacacccuguuuccggg

SEQ ID NO: 771448 - RNA, 19 nt, Artificial Sequence
  Description of Artificial Sequence: Synthetic oligonucleotide
uguacuuugcagaagucgu

SEQ ID NO: 771449 - RNA, 19 nt, Artificial Sequence
  Description of Artificial Sequence: Synthetic oligonucleotide
aacaugagauuuuccacug

SEQ ID NO: 771450 - RNA, 19 nt, Artificial Sequence
  Description of Artificial Sequence: Synthetic oligonucleotide
gacuuaguaccacaacugg

SEQ ID NO: 771451 - RNA, 19 nt, Artificial Sequence
  Description of Artificial Sequence: Synthetic oligonucleotide
ugugcaauggggcgguucg

SEQ ID NO: 771452 - RNA, 19 nt, Artificial Sequence
  Description of Artificial Sequence: Synthetic oligonucleotide
gauaaaacuggaguguccc

SEQ ID NO: 771453 - RNA, 19 nt, Artificial Sequence
  Description of Artificial Sequence: Synthetic oligonucleotide
acgcuauagauguagauca

SEQ ID NO: 771454 - RNA, 19 nt, Artificial Sequence
  Description of Artificial Sequence: Synthetic oligonucleotide
uggaagucagcacacagac

SEQ ID NO: 771455 - RNA, 19 nt, Artificial Sequence
  Description of Artificial Sequence: Synthetic oligonucleotide
ucaucacacguccagggag

SEQ ID NO: 771456 - RNA, 19 nt, Artificial Sequence
  Description of Artificial Sequence: Synthetic oligonucleotide
aacccaucugggcuguacc

SEQ ID NO: 771457 - RNA, 19 nt, Artificial Sequence
  Description of Artificial Sequence: Synthetic oligonucleotide
aaaaccauccagcauucau

SEQ ID NO: 771458 - RNA, 19 nt, Artificial Sequence
  Description of Artificial Sequence: Synthetic oligonucleotide
ugggaauguacugaaauca

SEQ ID NO: 771459 - RNA, 19 nt, Artificial Sequence
  Description of Artificial Sequence: Synthetic oligonucleotide
ucucauagcgauuccuuag

SEQ ID NO: 771460 - RNA, 19 nt, Artificial Sequence
  Description of Artificial Sequence: Synthetic oligonucleotide
uccagcauucaucacacgu

SEQ ID NO: 771461 - RNA, 19 nt, Artificial Sequence
  Description of Artificial Sequence: Synthetic oligonucleotide
uuaucgugugugcaauggg

SEQ ID NO: 771462 - RNA, 19 nt, Artificial Sequence
  Description of Artificial Sequence: Synthetic oligonucleotide
aaaugcgcaacugggaaug

SEQ ID NO: 771463 - RNA, 19 nt, Artificial Sequence
  Description of Artificial Sequence: Synthetic oligonucleotide
uccuacaaccacaacugcc

SEQ ID NO: 771464 - RNA, 19 nt, Artificial Sequence
  Description of Artificial Sequence: Synthetic oligonucleotide
ugauaaaacuggagugucc

SEQ ID NO: 771465 - RNA, 19 nt, Artificial Sequence
  Description of Artificial Sequence: Synthetic oligonucleotide
caugggaaccaauagccag

SEQ ID NO: 771466 - RNA, 19 nt, Artificial Sequence
  Description of Artificial Sequence: Synthetic oligonucleotide
ugcacuugguccuaggggu

SEQ ID NO: 771467 - RNA, 19 nt, Artificial Sequence
  Description of Artificial Sequence: Synthetic oligonucleotide
accaccacuaagcacgguc

SEQ ID NO: 771468 - RNA, 19 nt, Artificial Sequence
  Description of Artificial Sequence: Synthetic oligonucleotide
uaccggacaacugagagcu

SEQ ID NO: 771469 - RNA, 19 nt, Artificial Sequence
  Description of Artificial Sequence: Synthetic oligonucleotide
ucuagaaggcgugacagga

SEQ ID NO: 771470 - RNA, 19 nt, Artificial Sequence
  Description of Artificial Sequence: Synthetic oligonucleotide
uguucaguccuacaaccac

SEQ ID NO: 771471 - RNA, 19 nt, Artificial Sequence
  Description of Artificial Sequence: Synthetic oligonucleotide
cagagggacaaaaccaucc

SEQ ID NO: 771472 - RNA, 19 nt, Artificial Sequence
  Description of Artificial Sequence: Synthetic oligonucleotide
guagaucauguugucaugg

SEQ ID NO: 771473 - RNA, 19 nt, Artificial Sequence
  Description of Artificial Sequence: Synthetic oligonucleotide
cacacguucauugugggag

SEQ ID NO: 771474 - RNA, 19 nt, Artificial Sequence
  Description of Artificial Sequence: Synthetic oligonucleotide
guacauacggcuuggcgcc

SEQ ID NO: 771475 - RNA, 19 nt, Artificial Sequence
  Description of Artificial Sequence: Synthetic oligonucleotide
guuucuguguccaaaacca

SEQ ID NO: 771476 - RNA, 19 nt, Artificial Sequence
  Description of Artificial Sequence: Synthetic oligonucleotide
acacguggaagccuagcac

SEQ ID NO: 771477 - RNA, 19 nt, Artificial Sequence
  Description of Artificial Sequence: Synthetic oligonucleotide
uguucuggaaucucagccu

SEQ ID NO: 771478 - RNA, 19 nt, Artificial Sequence
  Description of Artificial Sequence: Synthetic oligonucleotide
gauacuggcguccuugcca

SEQ ID NO: 771479 - RNA, 19 nt, Artificial Sequence
  Description of Artificial Sequence: Synthetic oligonucleotide
auacuggcguccuugccac

SEQ ID NO: 771480 - RNA, 19 nt, Artificial Sequence
  Description of Artificial Sequence: Synthetic oligonucleotide
gaagcucggagccaagccc

SEQ ID NO: 771481 - RNA, 19 nt, Artificial Sequence
  Description of Artificial Sequence: Synthetic oligonucleotide
aaggcacccaguccaaucu

SEQ ID NO: 771482 - RNA, 19 nt, Artificial Sequence
  Description of Artificial Sequence: Synthetic oligonucleotide
guuaucgugugugcaaugg

SEQ ID NO: 771483 - RNA, 19 nt, Artificial Sequence
  Description of Artificial Sequence: Synthetic oligonucleotide
acugccguggccugaguac

SEQ ID NO: 771484 - RNA, 19 nt, Artificial Sequence
  Description of Artificial Sequence: Synthetic oligonucleotide
aaaaugcgcaacugggaau

SEQ ID NO: 771485 - RNA, 19 nt, Artificial Sequence
  Description of Artificial Sequence: Synthetic oligonucleotide
uaagcacggucccaucccg

SEQ ID NO: 771486 - RNA, 19 nt, Artificial Sequence
  Description of Artificial Sequence: Synthetic oligonucleotide
aauucccauccuuggacca

SEQ ID NO: 771487 - RNA, 19 nt, Artificial Sequence
  Description of Artificial Sequence: Synthetic oligonucleotide
aguccuacaaccacaacug

SEQ ID NO: 771488 - RNA, 19 nt, Artificial Sequence
  Description of Artificial Sequence: Synthetic oligonucleotide
agguguacuuugcagaagu

SEQ ID NO: 771489 - RNA, 19 nt, Artificial Sequence
  Description of Artificial Sequence: Synthetic oligonucleotide
acuggagugucccauacau

SEQ ID NO: 771490 - RNA, 19 nt, Artificial Sequence
  Description of Artificial Sequence: Synthetic oligonucleotide
uacacguggaagccuagca

SEQ ID NO: 771491 - RNA, 19 nt, Artificial Sequence
  Description of Artificial Sequence: Synthetic oligonucleotide
cauagcgauuccuuagaag

SEQ ID NO: 771492 - RNA, 19 nt, Artificial Sequence
  Description of Artificial Sequence: Synthetic oligonucleotide
gagguaugagucgucaugc

SEQ ID NO: 771493 - RNA, 19 nt, Artificial Sequence
  Description of Artificial Sequence: Synthetic oligonucleotide
gacugagucauuuuguacu

SEQ ID NO: 771494 - RNA, 19 nt, Artificial Sequence
  Description of Artificial Sequence: Synthetic oligonucleotide
uucuagaaggcgugacagg

SEQ ID NO: 771495 - RNA, 19 nt, Artificial Sequence
  Description of Artificial Sequence: Synthetic oligonucleotide
ucauuggaaucauccacca

SEQ ID NO: 771496 - RNA, 19 nt, Artificial Sequence
  Description of Artificial Sequence: Synthetic oligonucleotide
ugcgcaacugggaauguac

SEQ ID NO: 771497 - RNA, 19 nt, Artificial Sequence
  Description of Artificial Sequence: Synthetic oligonucleotide
ugcagaagucgucugcuac

SEQ ID NO: 771498 - RNA, 19 nt, Artificial Sequence
  Description of Artificial Sequence: Synthetic oligonucleotide
uguagaucauguugucaug

SEQ ID NO: 771499 - RNA, 19 nt, Artificial Sequence
  Description of Artificial Sequence: Synthetic oligonucleotide
ugagucccagaugugaacc

SEQ ID NO: 771500 - RNA, 19 nt, Artificial Sequence
  Description of Artificial Sequence: Synthetic oligonucleotide
acgcuagucacgugacugc

SEQ ID NO: 771501 - RNA, 19 nt, Artificial Sequence
  Description of Artificial Sequence: Synthetic oligonucleotide
gaacaugagauuuuccacu

SEQ ID NO: 771502 - RNA, 19 nt, Artificial Sequence
  Description of Artificial Sequence: Synthetic oligonucleotide
gacgcuauagauguagauc

SEQ ID NO: 771503 - RNA, 19 nt, Artificial Sequence
  Description of Artificial Sequence: Synthetic oligonucleotide
cagcauucaucacacgucc

SEQ ID NO: 771504 - RNA, 19 nt, Artificial Sequence
  Description of Artificial Sequence: Synthetic oligonucleotide
cauccagcauucaucacac

SEQ ID NO: 771505 - RNA, 19 nt, Artificial Sequence
  Description of Artificial Sequence: Synthetic oligonucleotide
acaacuggagacgcuauag

SEQ ID NO: 771506 - RNA, 19 nt, Artificial Sequence
  Description of Artificial Sequence: Synthetic oligonucleotide
guaugagucgucaugcgug

SEQ ID NO: 771507 - RNA, 19 nt, Artificial Sequence
  Description of Artificial Sequence: Synthetic oligonucleotide
caucacacguccagggagg

SEQ ID NO: 771508 - RNA, 19 nt, Artificial Sequence
  Description of Artificial Sequence: Synthetic oligonucleotide
agaaaagcacccuggucca

SEQ ID NO: 771509 - RNA, 19 nt, Artificial Sequence
  Description of Artificial Sequence: Synthetic oligonucleotide
uaugagucgucaugcguga

SEQ ID NO: 771510 - RNA, 19 nt, Artificial Sequence
  Description of Artificial Sequence: Synthetic oligonucleotide
agggauguguacacagucc

SEQ ID NO: 771511 - RNA, 19 nt, Artificial Sequence
  Description of Artificial Sequence: Synthetic oligonucleotide
agacuuaguaccacaacug

SEQ ID NO: 771512 - RNA, 19 nt, Artificial Sequence
  Description of Artificial Sequence: Synthetic oligonucleotide
gacgcuagucacgugacug

SEQ ID NO: 771513 - RNA, 19 nt, Artificial Sequence
  Description of Artificial Sequence: Synthetic oligonucleotide
cacaccauacacguggaag

SEQ ID NO: 771514 - RNA, 19 nt, Artificial Sequence
  Description of Artificial Sequence: Synthetic oligonucleotide
gagggauguguacacaguc

SEQ ID NO: 771515 - RNA, 19 nt, Artificial Sequence
  Description of Artificial Sequence: Synthetic oligonucleotide
cccuucaugagcaugggcc

SEQ ID NO: 771516 - RNA, 19 nt, Artificial Sequence
  Description of Artificial Sequence: Synthetic oligonucleotide
aacacucgccacugaaaga

SEQ ID NO: 771517 - RNA, 19 nt, Artificial Sequence
  Description of Artificial Sequence: Synthetic oligonucleotide
uuauugccccucaccaggc

SEQ ID NO: 771518 - RNA, 19 nt, Artificial Sequence
  Description of Artificial Sequence: Synthetic oligonucleotide
gagucgucaugcgugaacc

SEQ ID NO: 771519 - RNA, 19 nt, Artificial Sequence
  Description of Artificial Sequence: Synthetic oligonucleotide
gaaggcgugacaggagagg

SEQ ID NO: 771520 - RNA, 19 nt, Artificial Sequence
  Description of Artificial Sequence: Synthetic oligonucleotide
cuauagauguagaucaugu

SEQ ID NO: 771521 - RNA, 19 nt, Artificial Sequence
  Description of Artificial Sequence: Synthetic oligonucleotide
agagggacaaaaccaucca

SEQ ID NO: 771522 - RNA, 19 nt, Artificial Sequence
  Description of Artificial Sequence: Synthetic oligonucleotide
uagcgauuccuuagaagcu

SEQ ID NO: 771523 - RNA, 19 nt, Artificial Sequence
  Description of Artificial Sequence: Synthetic oligonucleotide
ugagucgucaugcgugaac

SEQ ID NO: 771524 - RNA, 19 nt, Artificial Sequence
  Description of Artificial Sequence: Synthetic oligonucleotide
ugacaauacagcugcuguc

SEQ ID NO: 771525 - RNA, 19 nt, Artificial Sequence
  Description of Artificial Sequence: Synthetic oligonucleotide
accacacguucauuguggg

SEQ ID NO: 771526 - RNA, 19 nt, Artificial Sequence
  Description of Artificial Sequence: Synthetic oligonucleotide
agauuuuccacuggugaca

SEQ ID NO: 771527 - RNA, 19 nt, Artificial Sequence
  Description of Artificial Sequence: Synthetic oligonucleotide
agguaugagucgucaugcg

SEQ ID NO: 771528 - RNA, 19 nt, Artificial Sequence
  Description of Artificial Sequence: Synthetic oligonucleotide
ucauagcgauuccuuagaa

SEQ ID NO: 771529 - RNA, 19 nt, Artificial Sequence
  Description of Artificial Sequence: Synthetic oligonucleotide
acaacugccccacuuggau

SEQ ID NO: 771530 - RNA, 19 nt, Artificial Sequence
  Description of Artificial Sequence: Synthetic oligonucleotide
acucgccacugaaagauac

SEQ ID NO: 771531 - RNA, 19 nt, Artificial Sequence
  Description of Artificial Sequence: Synthetic oligonucleotide
cacgucccaguaaagaauc

SEQ ID NO: 771532 - RNA, 19 nt, Artificial Sequence
  Description of Artificial Sequence: Synthetic oligonucleotide
ucgucaugcgugaaccgga

SEQ ID NO: 771533 - RNA, 19 nt, Artificial Sequence
  Description of Artificial Sequence: Synthetic oligonucleotide
acccuucaugagcaugggc

SEQ ID NO: 771534 - RNA, 19 nt, Artificial Sequence
  Description of Artificial Sequence: Synthetic oligonucleotide
acggauacuggaaaaggug

SEQ ID NO: 771535 - RNA, 19 nt, Artificial Sequence
  Description of Artificial Sequence: Synthetic oligonucleotide
cagggaggaacacaaagca

SEQ ID NO: 771536 - RNA, 19 nt, Artificial Sequence
  Description of Artificial Sequence: Synthetic oligonucleotide
ugaaagauacuggcguccu

SEQ ID NO: 771537 - RNA, 19 nt, Artificial Sequence
  Description of Artificial Sequence: Synthetic oligonucleotide
ucgagcgcacggauacugg

SEQ ID NO: 771538 - RNA, 19 nt, Artificial Sequence
  Description of Artificial Sequence: Synthetic oligonucleotide
auaaaacuggaguguccca

SEQ ID NO: 771539 - RNA, 19 nt, Artificial Sequence
  Description of Artificial Sequence: Synthetic oligonucleotide
auacacguggaagccuagc

SEQ ID NO: 771540 - RNA, 19 nt, Artificial Sequence
  Description of Artificial Sequence: Synthetic oligonucleotide
cuggagacgcuauagaugu

SEQ ID NO: 771541 - RNA, 19 nt, Artificial Sequence
  Description of Artificial Sequence: Synthetic oligonucleotide
gagucguuaucgugugugc

SEQ ID NO: 771542 - RNA, 19 nt, Artificial Sequence
  Description of Artificial Sequence: Synthetic oligonucleotide
ucccaguaaagaaucucau

SEQ ID NO: 771543 - RNA, 19 nt, Artificial Sequence
  Description of Artificial Sequence: Synthetic oligonucleotide
agguguagguagcccacuc

SEQ ID NO: 771544 - RNA, 19 nt, Artificial Sequence
  Description of Artificial Sequence: Synthetic oligonucleotide
caucccgucggagacacag

SEQ ID NO: 771545 - RNA, 19 nt, Artificial Sequence
  Description of Artificial Sequence: Synthetic oligonucleotide
agucgucaugcgugaaccg

SEQ ID NO: 771546 - RNA, 19 nt, Artificial Sequence
  Description of Artificial Sequence: Synthetic oligonucleotide
guacaacccaucugggcug

SEQ ID NO: 771547 - RNA, 19 nt, Artificial Sequence
  Description of Artificial Sequence: Synthetic oligonucleotide
gucgucaugcgugaaccgg

SEQ ID NO: 771548 - RNA, 19 nt, Artificial Sequence
  Description of Artificial Sequence: Synthetic oligonucleotide
ugccccacuuggauggaag

SEQ ID NO: 771549 - RNA, 19 nt, Artificial Sequence
  Description of Artificial Sequence: Synthetic oligonucleotide
ugguucagccagcgagucg

SEQ ID NO: 771550 - RNA, 19 nt, Artificial Sequence
  Description of Artificial Sequence: Synthetic oligonucleotide
guaccggacaacugagagc

SEQ ID NO: 771551 - RNA, 19 nt, Artificial Sequence
  Description of Artificial Sequence: Synthetic oligonucleotide
acacucgccacugaaagau

SEQ ID NO: 771552 - RNA, 19 nt, Artificial Sequence
  Description of Artificial Sequence: Synthetic oligonucleotide
uucauugugggagcggcaa

SEQ ID NO: 771553 - RNA, 19 nt, Artificial Sequence
  Description of Artificial Sequence: Synthetic oligonucleotide
ggaccagucaaggugagug

SEQ ID NO: 771554 - RNA, 19 nt, Artificial Sequence
  Description of Artificial Sequence: Synthetic oligonucleotide
ugggcuguaccggacaacu

SEQ ID NO: 771555 - RNA, 19 nt, Artificial Sequence
  Description of Artificial Sequence: Synthetic oligonucleotide
ggagacgcuauagauguag

SEQ ID NO: 771556 - RNA, 19 nt, Artificial Sequence
  Description of Artificial Sequence: Synthetic oligonucleotide
gacccgucuccuuuaaguc

SEQ ID NO: 771557 - RNA, 19 nt, Artificial Sequence
  Description of Artificial Sequence: Synthetic oligonucleotide
cuacaaccacaacugcccc

SEQ ID NO: 771558 - RNA, 19 nt, Artificial Sequence
  Description of Artificial Sequence: Synthetic oligonucleotide
cauugugggagcggcaaag

SEQ ID NO: 771559 - RNA, 19 nt, Artificial Sequence
  Description of Artificial Sequence: Synthetic oligonucleotide
aauggggcgguucgccccu

SEQ ID NO: 771560 - RNA, 19 nt, Artificial Sequence
  Description of Artificial Sequence: Synthetic oligonucleotide
aaacacccuguuuccgggu

SEQ ID NO: 771561 - RNA, 19 nt, Artificial Sequence
  Description of Artificial Sequence: Synthetic oligonucleotide
acuuaguaccacaacugga

SEQ ID NO: 771562 - RNA, 19 nt, Artificial Sequence
  Description of Artificial Sequence: Synthetic oligonucleotide
gccugguucagccagcgag

SEQ ID NO: 771563 - RNA, 19 nt, Artificial Sequence
  Description of Artificial Sequence: Synthetic oligonucleotide
agcacggucccaucccguc

SEQ ID NO: 771564 - RNA, 19 nt, Artificial Sequence
  Description of Artificial Sequence: Synthetic oligonucleotide
gcccugaauaacuggagag

SEQ ID NO: 771565 - RNA, 19 nt, Artificial Sequence
  Description of Artificial Sequence: Synthetic oligonucleotide
cugaguacauacggcuugg

SEQ ID NO: 771566 - RNA, 19 nt, Artificial Sequence
  Description of Artificial Sequence: Synthetic oligonucleotide
auacuggaaaagguguacu

SEQ ID NO: 771567 - RNA, 19 nt, Artificial Sequence
  Description of Artificial Sequence: Synthetic oligonucleotide
uaaugcauucuucgugguu

SEQ ID NO: 771568 - RNA, 19 nt, Artificial Sequence
  Description of Artificial Sequence: Synthetic oligonucleotide
uggcgccuuggcucgagcg

SEQ ID NO: 771569 - RNA, 19 nt, Artificial Sequence
  Description of Artificial Sequence: Synthetic oligonucleotide
gagucauuuuguacucuug

SEQ ID NO: 771570 - RNA, 19 nt, Artificial Sequence
  Description of Artificial Sequence: Synthetic oligonucleotide
agcgagucguuaucgugug

SEQ ID NO: 771571 - RNA, 19 nt, Artificial Sequence
  Description of Artificial Sequence: Synthetic oligonucleotide
gaaccggacgcuagucacg

SEQ ID NO: 771572 - RNA, 19 nt, Artificial Sequence
  Description of Artificial Sequence: Synthetic oligonucleotide
ugcaauggggcgguucgcc

SEQ ID NO: 771573 - RNA, 19 nt, Artificial Sequence
  Description of Artificial Sequence: Synthetic oligonucleotide
uacaucugccaaagcggcu

SEQ ID NO: 771574 - RNA, 19 nt, Artificial Sequence
  Description of Artificial Sequence: Synthetic oligonucleotide
caauggggcgguucgcccc

SEQ ID NO: 771575 - RNA, 19 nt, Artificial Sequence
  Description of Artificial Sequence: Synthetic oligonucleotide
gguacaacccaucugggcu

SEQ ID NO: 771576 - RNA, 19 nt, Artificial Sequence
  Description of Artificial Sequence: Synthetic oligonucleotide
caguccuacaaccacaacu

SEQ ID NO: 771577 - RNA, 19 nt, Artificial Sequence
  Description of Artificial Sequence: Synthetic oligonucleotide
agguagcccacucccgguc

SEQ ID NO: 771578 - RNA, 19 nt, Artificial Sequence
  Description of Artificial Sequence: Synthetic oligonucleotide
uacggcuuggcgccuuggc

SEQ ID NO: 771579 - RNA, 19 nt, Artificial Sequence
  Description of Artificial Sequence: Synthetic oligonucleotide
aaccggacgcuagucacgu

SEQ ID NO: 771580 - RNA, 19 nt, Artificial Sequence
  Description of Artificial Sequence: Synthetic oligonucleotide
ugugcucauuggaaucauc

SEQ ID NO: 771581 - RNA, 19 nt, Artificial Sequence
  Description of Artificial Sequence: Synthetic oligonucleotide
guccuagggguuuuggcca

SEQ ID NO: 771582 - RNA, 19 nt, Artificial Sequence
  Description of Artificial Sequence: Synthetic oligonucleotide
uccuagggguuuuggccag

SEQ ID NO: 771583 - RNA, 19 nt, Artificial Sequence
  Description of Artificial Sequence: Synthetic oligonucleotide
gucccaguaaagaaucuca

SEQ ID NO: 771584 - RNA, 19 nt, Artificial Sequence
  Description of Artificial Sequence: Synthetic oligonucleotide
cugagucccagaugugaac

SEQ ID NO: 771585 - RNA, 19 nt, Artificial Sequence
  Description of Artificial Sequence: Synthetic oligonucleotide
cucauagcgauuccuuaga

SEQ ID NO: 771586 - RNA, 19 nt, Artificial Sequence
  Description of Artificial Sequence: Synthetic oligonucleotide
uagggagacgagguaugag

SEQ ID NO: 771587 - RNA, 19 nt, Artificial Sequence
  Description of Artificial Sequence: Synthetic oligonucleotide
agccagcccaggaaaaggg

SEQ ID NO: 771588 - RNA, 19 nt, Artificial Sequence
  Description of Artificial Sequence: Synthetic oligonucleotide
ucucugagucccagaugug

SEQ ID NO: 771589 - RNA, 19 nt, Artificial Sequence
  Description of Artificial Sequence: Synthetic oligonucleotide
cacagguguagguagccca

SEQ ID NO: 771590 - RNA, 19 nt, Artificial Sequence
  Description of Artificial Sequence: Synthetic oligonucleotide
caccauacacguggaagcc

SEQ ID NO: 771591 - RNA, 19 nt, Artificial Sequence
  Description of Artificial Sequence: Synthetic oligonucleotide
agcaagcuucacuccccgg

SEQ ID NO: 771592 - RNA, 19 nt, Artificial Sequence
  Description of Artificial Sequence: Synthetic oligonucleotide
uugccaccuagggagacga

SEQ ID NO: 771593 - RNA, 19 nt, Artificial Sequence
  Description of Artificial Sequence: Synthetic oligonucleotide
agggaguucuagaaggcgu

SEQ ID NO: 771594 - RNA, 19 nt, Artificial Sequence
  Description of Artificial Sequence: Synthetic oligonucleotide
gucaugcgugaaccggacg

SEQ ID NO: 771595 - RNA, 19 nt, Artificial Sequence
  Description of Artificial Sequence: Synthetic oligonucleotide
agcgcacggauacuggaaa

SEQ ID NO: 771596 - RNA, 19 nt, Artificial Sequence
  Description of Artificial Sequence: Synthetic oligonucleotide
uauugccccucaccaggca

SEQ ID NO: 771597 - RNA, 19 nt, Artificial Sequence
  Description of Artificial Sequence: Synthetic oligonucleotide
cauacacguggaagccuag

SEQ ID NO: 771598 - RNA, 19 nt, Artificial Sequence
  Description of Artificial Sequence: Synthetic oligonucleotide
caaaguguucuggaaucuc

SEQ ID NO: 771599 - RNA, 19 nt, Artificial Sequence
  Description of Artificial Sequence: Synthetic oligonucleotide
gucguuaucgugugugcaa

SEQ ID NO: 771600 - RNA, 19 nt, Artificial Sequence
  Description of Artificial Sequence: Synthetic oligonucleotide
agucguuaucgugugugca

SEQ ID NO: 771601 - RNA, 19 nt, Artificial Sequence
  Description of Artificial Sequence: Synthetic oligonucleotide
aggcacccaguccaaucuc

SEQ ID NO: 771602 - RNA, 19 nt, Artificial Sequence
  Description of Artificial Sequence: Synthetic oligonucleotide
caccacuaagcacgguccc

SEQ ID NO: 771603 - RNA, 19 nt, Artificial Sequence
  Description of Artificial Sequence: Synthetic oligonucleotide
ucauugugggagcggcaaa

SEQ ID NO: 771604 - RNA, 19 nt, Artificial Sequence
  Description of Artificial Sequence: Synthetic oligonucleotide
cagcaagcuucacuccccg

SEQ ID NO: 771605 - RNA, 19 nt, Artificial Sequence
  Description of Artificial Sequence: Synthetic oligonucleotide
gguguagguagcccacucc

SEQ ID NO: 771606 - RNA, 19 nt, Artificial Sequence
  Description of Artificial Sequence: Synthetic oligonucleotide
aaccaauagccagguacaa

SEQ ID NO: 771607 - RNA, 19 nt, Artificial Sequence
  Description of Artificial Sequence: Synthetic oligonucleotide
gaccagucaaggugaguga

SEQ ID NO: 771608 - RNA, 19 nt, Artificial Sequence
  Description of Artificial Sequence: Synthetic oligonucleotide
gcuauagauguagaucaug

SEQ ID NO: 771609 - RNA, 19 nt, Artificial Sequence
  Description of Artificial Sequence: Synthetic oligonucleotide
ggacugagucauuuuguac

SEQ ID NO: 771610 - RNA, 19 nt, Artificial Sequence
  Description of Artificial Sequence: Synthetic oligonucleotide
auugccccucaccaggcaa

SEQ ID NO: 771611 - RNA, 19 nt, Artificial Sequence
  Description of Artificial Sequence: Synthetic oligonucleotide
gacgagguaugagucguca

SEQ ID NO: 771612 - RNA, 19 nt, Artificial Sequence
  Description of Artificial Sequence: Synthetic oligonucleotide
ggcuguaccggacaacuga

SEQ ID NO: 771613 - RNA, 19 nt, Artificial Sequence
  Description of Artificial Sequence: Synthetic oligonucleotide
acuccccggcugcaauccc

SEQ ID NO: 771614 - RNA, 19 nt, Artificial Sequence
  Description of Artificial Sequence: Synthetic oligonucleotide
caagugagaauguuccccu

SEQ ID NO: 771615 - RNA, 19 nt, Artificial Sequence
  Description of Artificial Sequence: Synthetic oligonucleotide
ucguuaucgugugugcaau

SEQ ID NO: 771616 - RNA, 19 nt, Artificial Sequence
  Description of Artificial Sequence: Synthetic oligonucleotide
ucggagacacagggcaaag

SEQ ID NO: 771617 - RNA, 19 nt, Artificial Sequence
  Description of Artificial Sequence: Synthetic oligonucleotide
uuggcucgagcgcacggau

SEQ ID NO: 771618 - RNA, 19 nt, Artificial Sequence
  Description of Artificial Sequence: Synthetic oligonucleotide
ugaguacauacggcuuggc

SEQ ID NO: 771619 - RNA, 19 nt, Artificial Sequence
  Description of Artificial Sequence: Synthetic oligonucleotide
ccaccacuaagcacggucc

SEQ ID NO: 771620 - RNA, 19 nt, Artificial Sequence
  Description of Artificial Sequence: Synthetic oligonucleotide
ggcgugacaggagagggcc

SEQ ID NO: 771621 - RNA, 19 nt, Artificial Sequence
  Description of Artificial Sequence: Synthetic oligonucleotide
ccugaguacauacggcuug

SEQ ID NO: 771622 - RNA, 19 nt, Artificial Sequence
  Description of Artificial Sequence: Synthetic oligonucleotide
cacguucauugugggagcg

SEQ ID NO: 771623 - RNA, 19 nt, Artificial Sequence
  Description of Artificial Sequence: Synthetic oligonucleotide
agcgcccaacacucgccac

SEQ ID NO: 771624 - RNA, 19 nt, Artificial Sequence
  Description of Artificial Sequence: Synthetic oligonucleotide
ggcucgagcgcacggauac

SEQ ID NO: 771625 - RNA, 19 nt, Artificial Sequence
  Description of Artificial Sequence: Synthetic oligonucleotide
aaugcgcaacugggaaugu

SEQ ID NO: 771626 - RNA, 19 nt, Artificial Sequence
  Description of Artificial Sequence: Synthetic oligonucleotide
cuacagccaccacacguuc

SEQ ID NO: 771627 - RNA, 19 nt, Artificial Sequence
  Description of Artificial Sequence: Synthetic oligonucleotide
gucggucccucccaccacc

SEQ ID NO: 771628 - RNA, 19 nt, Artificial Sequence
  Description of Artificial Sequence: Synthetic oligonucleotide
cucgagcgcacggauacug

SEQ ID NO: 771629 - RNA, 19 nt, Artificial Sequence
  Description of Artificial Sequence: Synthetic oligonucleotide
agccacgucccaguaaaga

SEQ ID NO: 771630 - RNA, 19 nt, Artificial Sequence
  Description of Artificial Sequence: Synthetic oligonucleotide
gcaacugggaauguacuga

SEQ ID NO: 771631 - RNA, 19 nt, Artificial Sequence
  Description of Artificial Sequence: Synthetic oligonucleotide
gccacgauuguguaggucu

SEQ ID NO: 771632 - RNA, 19 nt, Artificial Sequence
  Description of Artificial Sequence: Synthetic oligonucleotide
agcgauuccuuagaagcuu

SEQ ID NO: 771633 - RNA, 19 nt, Artificial Sequence
  Description of Artificial Sequence: Synthetic oligonucleotide
acguucauugugggagcgg

SEQ ID NO: 771634 - RNA, 19 nt, Artificial Sequence
  Description of Artificial Sequence: Synthetic oligonucleotide
ggcgguucgccccuccagg

SEQ ID NO: 771635 - RNA, 19 nt, Artificial Sequence
  Description of Artificial Sequence: Synthetic oligonucleotide
gagacgagguaugagucgu

SEQ ID NO: 771636 - RNA, 19 nt, Artificial Sequence
  Description of Artificial Sequence: Synthetic oligonucleotide
guacuuugcagaagucguc

SEQ ID NO: 771637 - RNA, 19 nt, Artificial Sequence
  Description of Artificial Sequence: Synthetic oligonucleotide
cuucaugagcaugggccug

SEQ ID NO: 771638 - RNA, 19 nt, Artificial Sequence
  Description of Artificial Sequence: Synthetic oligonucleotide
gagacgcuauagauguaga

SEQ ID NO: 771639 - RNA, 19 nt, Artificial Sequence
  Description of Artificial Sequence: Synthetic oligonucleotide
gccaccuagggagacgagg

SEQ ID NO: 771640 - RNA, 19 nt, Artificial Sequence
  Description of Artificial Sequence: Synthetic oligonucleotide
acaguccccacagcucauc

SEQ ID NO: 771641 - RNA, 19 nt, Artificial Sequence
  Description of Artificial Sequence: Synthetic oligonucleotide
cacggauacuggaaaaggu

SEQ ID NO: 771642 - RNA, 19 nt, Artificial Sequence
  Description of Artificial Sequence: Synthetic oligonucleotide
gucacgugacugccguggc

SEQ ID NO: 771643 - RNA, 19 nt, Artificial Sequence
  Description of Artificial Sequence: Synthetic oligonucleotide
cucccgugagaaugucccc

SEQ ID NO: 771644 - RNA, 19 nt, Artificial Sequence
  Description of Artificial Sequence: Synthetic oligonucleotide
ccacaacugccccacuugg

SEQ ID NO: 771645 - RNA, 19 nt, Artificial Sequence
  Description of Artificial Sequence: Synthetic oligonucleotide
acgagguaugagucgucau

SEQ ID NO: 771646 - RNA, 19 nt, Artificial Sequence
  Description of Artificial Sequence: Synthetic oligonucleotide
gcuguaccggacaacugag

SEQ ID NO: 771647 - RNA, 19 nt, Artificial Sequence
  Description of Artificial Sequence: Synthetic oligonucleotide
cacccaguccaaucuccug

SEQ ID NO: 771648 - RNA, 19 nt, Artificial Sequence
  Description of Artificial Sequence: Synthetic oligonucleotide
auguuccccucggagucuc

SEQ ID NO: 771649 - RNA, 19 nt, Artificial Sequence
  Description of Artificial Sequence: Synthetic oligonucleotide
gggaguucuagaaggcgug

SEQ ID NO: 771650 - RNA, 19 nt, Artificial Sequence
  Description of Artificial Sequence: Synthetic oligonucleotide
ccacuuggauggaagucag

SEQ ID NO: 771651 - RNA, 19 nt, Artificial Sequence
  Description of Artificial Sequence: Synthetic oligonucleotide
ugccggucauggccacagg

SEQ ID NO: 771652 - RNA, 19 nt, Artificial Sequence
  Description of Artificial Sequence: Synthetic oligonucleotide
agucucccgugagaauguc

SEQ ID NO: 771653 - RNA, 19 nt, Artificial Sequence
  Description of Artificial Sequence: Synthetic oligonucleotide
ccuagggagacgagguaug

SEQ ID NO: 771654 - RNA, 19 nt, Artificial Sequence
  Description of Artificial Sequence: Synthetic oligonucleotide
ugggguugccugguucagc

SEQ ID NO: 771655 - RNA, 19 nt, Artificial Sequence
  Description of Artificial Sequence: Synthetic oligonucleotide
cgagguaugagucgucaug

SEQ ID NO: 771656 - RNA, 19 nt, Artificial Sequence
  Description of Artificial Sequence: Synthetic oligonucleotide
cacaacugccccacuugga

SEQ ID NO: 771657 - RNA, 19 nt, Artificial Sequence
  Description of Artificial Sequence: Synthetic oligonucleotide
ccagcgagucguuaucgug

SEQ ID NO: 771658 - RNA, 19 nt, Artificial Sequence
  Description of Artificial Sequence: Synthetic oligonucleotide
uuggcgccuuggcucgagc

SEQ ID NO: 771659 - RNA, 19 nt, Artificial Sequence
  Description of Artificial Sequence: Synthetic oligonucleotide
ugccaccuagggagacgag

SEQ ID NO: 771660 - RNA, 19 nt, Artificial Sequence
  Description of Artificial Sequence: Synthetic oligonucleotide
cacacaccauacacgugga

SEQ ID NO: 771661 - RNA, 19 nt, Artificial Sequence
  Description of Artificial Sequence: Synthetic oligonucleotide
guaaugcauucuucguggu

SEQ ID NO: 771662 - RNA, 19 nt, Artificial Sequence
  Description of Artificial Sequence: Synthetic oligonucleotide
acacaccauacacguggaa

SEQ ID NO: 771663 - RNA, 19 nt, Artificial Sequence
  Description of Artificial Sequence: Synthetic oligonucleotide
gccacgucccaguaaagaa

SEQ ID NO: 771664 - RNA, 19 nt, Artificial Sequence
  Description of Artificial Sequence: Synthetic oligonucleotide
ucgccccuccaggaaaaug

SEQ ID NO: 771665 - RNA, 19 nt, Artificial Sequence
  Description of Artificial Sequence: Synthetic oligonucleotide
cagcgagucguuaucgugu

SEQ ID NO: 771666 - RNA, 19 nt, Artificial Sequence
  Description of Artificial Sequence: Synthetic oligonucleotide
gcuagucacgugacugccg

SEQ ID NO: 771667 - RNA, 19 nt, Artificial Sequence
  Description of Artificial Sequence: Synthetic oligonucleotide
gacugccguggccugagua

SEQ ID NO: 771668 - RNA, 19 nt, Artificial Sequence
  Description of Artificial Sequence: Synthetic oligonucleotide
gcaauggggcgguucgccc

SEQ ID NO: 771669 - RNA, 19 nt, Artificial Sequence
  Description of Artificial Sequence: Synthetic oligonucleotide
cuguaccggacaacugaga

SEQ ID NO: 771670 - RNA, 19 nt, Artificial Sequence
  Description of Artificial Sequence: Synthetic oligonucleotide
cugcuacagccaccacacg

SEQ ID NO: 771671 - RNA, 19 nt, Artificial Sequence
  Description of Artificial Sequence: Synthetic oligonucleotide
cauacggcuuggcgccuug

SEQ ID NO: 771672 - RNA, 19 nt, Artificial Sequence
  Description of Artificial Sequence: Synthetic oligonucleotide
auacggcuuggcgccuugg

SEQ ID NO: 771673 - RNA, 19 nt, Artificial Sequence
  Description of Artificial Sequence: Synthetic oligonucleotide
cuagggagacgagguauga

SEQ ID NO: 771674 - RNA, 19 nt, Artificial Sequence
  Description of Artificial Sequence: Synthetic oligonucleotide
acgagggcugaagccaaca

SEQ ID NO: 771675 - RNA, 19 nt, Artificial Sequence
  Description of Artificial Sequence: Synthetic oligonucleotide
ugugaaccacaggcuguaa

SEQ ID NO: 771676 - RNA, 19 nt, Artificial Sequence
  Description of Artificial Sequence: Synthetic oligonucleotide
ggccugaguacauacggcu

SEQ ID NO: 771677 - RNA, 19 nt, Artificial Sequence
  Description of Artificial Sequence: Synthetic oligonucleotide
gcuagacuuaguaccacaa

SEQ ID NO: 771678 - RNA, 19 nt, Artificial Sequence
  Description of Artificial Sequence: Synthetic oligonucleotide
aucacacguccagggagga

SEQ ID NO: 771679 - RNA, 19 nt, Artificial Sequence
  Description of Artificial Sequence: Synthetic oligonucleotide
cagccagcgagucguuauc

SEQ ID NO: 771680 - RNA, 19 nt, Artificial Sequence
  Description of Artificial Sequence: Synthetic oligonucleotide
cacccuguuuccgggugag

SEQ ID NO: 771681 - RNA, 19 nt, Artificial Sequence
  Description of Artificial Sequence: Synthetic oligonucleotide
uggagacgcuauagaugua

SEQ ID NO: 771682 - RNA, 19 nt, Artificial Sequence
  Description of Artificial Sequence: Synthetic oligonucleotide
cucggagucucccgugaga

SEQ ID NO: 771683 - RNA, 19 nt, Artificial Sequence
  Description of Artificial Sequence: Synthetic oligonucleotide
uggcucgagcgcacggaua

SEQ ID NO: 771684 - RNA, 19 nt, Artificial Sequence
  Description of Artificial Sequence: Synthetic oligonucleotide
cgagucguuaucgugugug

SEQ ID NO: 771685 - RNA, 19 nt, Artificial Sequence
  Description of Artificial Sequence: Synthetic oligonucleotide
ggagugucccauacaucug

SEQ ID NO: 771686 - RNA, 19 nt, Artificial Sequence
  Description of Artificial Sequence: Synthetic oligonucleotide
cuuggcucgagcgcacgga

SEQ ID NO: 771687 - RNA, 19 nt, Artificial Sequence
  Description of Artificial Sequence: Synthetic oligonucleotide
guucauugugggagcggca

SEQ ID NO: 771688 - RNA, 19 nt, Artificial Sequence
  Description of Artificial Sequence: Synthetic oligonucleotide
gcgauuccuuagaagcuug

SEQ ID NO: 771689 - RNA, 19 nt, Artificial Sequence
  Description of Artificial Sequence: Synthetic oligonucleotide
caagcuucacuccccggcu

SEQ ID NO: 771690 - RNA, 19 nt, Artificial Sequence
  Description of Artificial Sequence: Synthetic oligonucleotide
uacuggcguccuugccacc

SEQ ID NO: 771691 - RNA, 19 nt, Artificial Sequence
  Description of Artificial Sequence: Synthetic oligonucleotide
gagcgcacggauacuggaa

SEQ ID NO: 771692 - RNA, 19 nt, Artificial Sequence
  Description of Artificial Sequence: Synthetic oligonucleotide
uuccgggugagggucccau

SEQ ID NO: 771693 - RNA, 19 nt, Artificial Sequence
  Description of Artificial Sequence: Synthetic oligonucleotide
gguucgccccuccaggaaa

SEQ ID NO: 771694 - RNA, 19 nt, Artificial Sequence
  Description of Artificial Sequence: Synthetic oligonucleotide
guagcccacucccggucuc

SEQ ID NO: 771695 - RNA, 19 nt, Artificial Sequence
  Description of Artificial Sequence: Synthetic oligonucleotide
gccccuccaggaaaaugcg

SEQ ID NO: 771696 - RNA, 19 nt, Artificial Sequence
  Description of Artificial Sequence: Synthetic oligonucleotide
ccagcgcccaacacucgcc

SEQ ID NO: 771697 - RNA, 19 nt, Artificial Sequence
  Description of Artificial Sequence: Synthetic oligonucleotide
ccagccacgucccaguaaa

SEQ ID NO: 771698 - RNA, 19 nt, Artificial Sequence
  Description of Artificial Sequence: Synthetic oligonucleotide
gugugcaauggggcgguuc

SEQ ID NO: 771699 - RNA, 19 nt, Artificial Sequence
  Description of Artificial Sequence: Synthetic oligonucleotide
gaaagauacuggcguccuu

SEQ ID NO: 771700 - RNA, 19 nt, Artificial Sequence
  Description of Artificial Sequence: Synthetic oligonucleotide
ggcuguaagggcuucccau

SEQ ID NO: 771701 - RNA, 19 nt, Artificial Sequence
  Description of Artificial Sequence: Synthetic oligonucleotide
ccacgauuguguaggucuc

SEQ ID NO: 771702 - RNA, 19 nt, Artificial Sequence
  Description of Artificial Sequence: Synthetic oligonucleotide
acgucccaguaaagaaucu

SEQ ID NO: 771703 - RNA, 19 nt, Artificial Sequence
  Description of Artificial Sequence: Synthetic oligonucleotide
cuuggcgccuuggcucgag

SEQ ID NO: 771704 - RNA, 19 nt, Artificial Sequence
  Description of Artificial Sequence: Synthetic oligonucleotide
ccuuggcucgagcgcacgg

SEQ ID NO: 771705 - RNA, 19 nt, Artificial Sequence
  Description of Artificial Sequence: Synthetic oligonucleotide
acgcucaaaggcacccagu

SEQ ID NO: 771706 - RNA, 19 nt, Artificial Sequence
  Description of Artificial Sequence: Synthetic oligonucleotide
cagcugcugucacgagggc

SEQ ID NO: 771707 - RNA, 19 nt, Artificial Sequence
  Description of Artificial Sequence: Synthetic oligonucleotide
ggaguucuagaaggcguga

SEQ ID NO: 771708 - RNA, 19 nt, Artificial Sequence
  Description of Artificial Sequence: Synthetic oligonucleotide
ccguggccugaguacauac

SEQ ID NO: 771709 - RNA, 19 nt, Artificial Sequence
  Description of Artificial Sequence: Synthetic oligonucleotide
ccggacgcuagucacguga

SEQ ID NO: 771710 - RNA, 19 nt, Artificial Sequence
  Description of Artificial Sequence: Synthetic oligonucleotide
uagcccacucccggucucu

SEQ ID NO: 771711 - RNA, 19 nt, Artificial Sequence
  Description of Artificial Sequence: Synthetic oligonucleotide
gucagcacacagacccguc

SEQ ID NO: 771712 - RNA, 19 nt, Artificial Sequence
  Description of Artificial Sequence: Synthetic oligonucleotide
gcggcuagacuuaguacca

SEQ ID NO: 771713 - RNA, 19 nt, Artificial Sequence
  Description of Artificial Sequence: Synthetic oligonucleotide
ccauacacguggaagccua

SEQ ID NO: 771714 - RNA, 19 nt, Artificial Sequence
  Description of Artificial Sequence: Synthetic oligonucleotide
gggcgguucgccccuccag

SEQ ID NO: 771715 - RNA, 19 nt, Artificial Sequence
  Description of Artificial Sequence: Synthetic oligonucleotide
gugcaauggggcgguucgc

SEQ ID NO: 771716 - RNA, 19 nt, Artificial Sequence
  Description of Artificial Sequence: Synthetic oligonucleotide
cucgccacugaaagauacu

SEQ ID NO: 771717 - RNA, 19 nt, Artificial Sequence
  Description of Artificial Sequence: Synthetic oligonucleotide
ccaaagcggcuagacuuag

SEQ ID NO: 771718 - RNA, 19 nt, Artificial Sequence
  Description of Artificial Sequence: Synthetic oligonucleotide
accggacgcuagucacgug

SEQ ID NO: 771719 - RNA, 19 nt, Artificial Sequence
  Description of Artificial Sequence: Synthetic oligonucleotide
ccaacacucgccacugaaa

SEQ ID NO: 771720 - RNA, 19 nt, Artificial Sequence
  Description of Artificial Sequence: Synthetic oligonucleotide
cgcacggauacuggaaaag

SEQ ID NO: 771721 - RNA, 19 nt, Artificial Sequence
  Description of Artificial Sequence: Synthetic oligonucleotide
cccgucggagacacagggc

SEQ ID NO: 771722 - RNA, 19 nt, Artificial Sequence
  Description of Artificial Sequence: Synthetic oligonucleotide
cccauacaucugccaaagc

SEQ ID NO: 771723 - RNA, 19 nt, Artificial Sequence
  Description of Artificial Sequence: Synthetic oligonucleotide
augcgugaaccggacgcua

SEQ ID NO: 771724 - RNA, 19 nt, Artificial Sequence
  Description of Artificial Sequence: Synthetic oligonucleotide
cguuaucgugugugcaaug

SEQ ID NO: 771725 - RNA, 19 nt, Artificial Sequence
  Description of Artificial Sequence: Synthetic oligonucleotide
augcgcaacugggaaugua

SEQ ID NO: 771726 - RNA, 19 nt, Artificial Sequence
  Description of Artificial Sequence: Synthetic oligonucleotide
uccgggugagggucccauu

SEQ ID NO: 771727 - RNA, 19 nt, Artificial Sequence
  Description of Artificial Sequence: Synthetic oligonucleotide
augagucgucaugcgugaa

SEQ ID NO: 771728 - RNA, 19 nt, Artificial Sequence
  Description of Artificial Sequence: Synthetic oligonucleotide
guucgccccuccaggaaaa

SEQ ID NO: 771729 - RNA, 19 nt, Artificial Sequence
  Description of Artificial Sequence: Synthetic oligonucleotide
ggucccucccaccaccacu

SEQ ID NO: 771730 - RNA, 19 nt, Artificial Sequence
  Description of Artificial Sequence: Synthetic oligonucleotide
cacaaucucucugguuucu

SEQ ID NO: 771731 - RNA, 19 nt, Artificial Sequence
  Description of Artificial Sequence: Synthetic oligonucleotide
agcggcaaagggaguugau

SEQ ID NO: 771732 - RNA, 19 nt, Artificial Sequence
  Description of Artificial Sequence: Synthetic oligonucleotide
cgucaugcgugaaccggac

SEQ ID NO: 771733 - RNA, 19 nt, Artificial Sequence
  Description of Artificial Sequence: Synthetic oligonucleotide
uucgccccuccaggaaaau

SEQ ID NO: 771734 - RNA, 19 nt, Artificial Sequence
  Description of Artificial Sequence: Synthetic oligonucleotide
caugcgugaaccggacgcu

SEQ ID NO: 771735 - RNA, 19 nt, Artificial Sequence
  Description of Artificial Sequence: Synthetic oligonucleotide
gccagugcguggccuuccc

SEQ ID NO: 771736 - RNA, 19 nt, Artificial Sequence
  Description of Artificial Sequence: Synthetic oligonucleotide
caccaggcaaagggaguca

SEQ ID NO: 771737 - RNA, 19 nt, Artificial Sequence
  Description of Artificial Sequence: Synthetic oligonucleotide
cgucccaguaaagaaucuc

SEQ ID NO: 771738 - RNA, 19 nt, Artificial Sequence
  Description of Artificial Sequence: Synthetic oligonucleotide
ccucggagucucccgugag

SEQ ID NO: 771739 - RNA, 19 nt, Artificial Sequence
  Description of Artificial Sequence: Synthetic oligonucleotide
cacucgccacugaaagaua

SEQ ID NO: 771740 - RNA, 19 nt, Artificial Sequence
  Description of Artificial Sequence: Synthetic oligonucleotide
cgcuagucacgugacugcc

SEQ ID NO: 771741 - RNA, 19 nt, Artificial Sequence
  Description of Artificial Sequence: Synthetic oligonucleotide
cggacgcuagucacgugac

SEQ ID NO: 771742 - RNA, 19 nt, Artificial Sequence
  Description of Artificial Sequence: Synthetic oligonucleotide
gcgcacggauacuggaaaa

SEQ ID NO: 771743 - RNA, 19 nt, Artificial Sequence
  Description of Artificial Sequence: Synthetic oligonucleotide
gggcuguaccggacaacug

SEQ ID NO: 771744 - RNA, 19 nt, Artificial Sequence
  Description of Artificial Sequence: Synthetic oligonucleotide
ggagggauguguacacagu

SEQ ID NO: 771745 - RNA, 19 nt, Artificial Sequence
  Description of Artificial Sequence: Synthetic oligonucleotide
gcgguucgccccuccagga

SEQ ID NO: 771746 - RNA, 19 nt, Artificial Sequence
  Description of Artificial Sequence: Synthetic oligonucleotide
cacgauuguguaggucucu

SEQ ID NO: 771747 - RNA, 19 nt, Artificial Sequence
  Description of Artificial Sequence: Synthetic oligonucleotide
ccugguucagccagcgagu

SEQ ID NO: 771748 - RNA, 19 nt, Artificial Sequence
  Description of Artificial Sequence: Synthetic oligonucleotide
ccagucaaggugagugaua

SEQ ID NO: 771749 - RNA, 19 nt, Artificial Sequence
  Description of Artificial Sequence: Synthetic oligonucleotide
ccuagggguuuuggccagg

SEQ ID NO: 771750 - RNA, 19 nt, Artificial Sequence
  Description of Artificial Sequence: Synthetic oligonucleotide
ccacgucccaguaaagaau

SEQ ID NO: 771751 - RNA, 19 nt, Artificial Sequence
  Description of Artificial Sequence: Synthetic oligonucleotide
ccgucggucccucccacca

SEQ ID NO: 771752 - RNA, 19 nt, Artificial Sequence
  Description of Artificial Sequence: Synthetic oligonucleotide
ugugugcaauggggcgguu

SEQ ID NO: 771753 - RNA, 19 nt, Artificial Sequence
  Description of Artificial Sequence: Synthetic oligonucleotide
ccccacuguaccagccguc

SEQ ID NO: 771754 - RNA, 19 nt, Artificial Sequence
  Description of Artificial Sequence: Synthetic oligonucleotide
cgugaaccggacgcuaguc

SEQ ID NO: 771755 - RNA, 19 nt, Artificial Sequence
  Description of Artificial Sequence: Synthetic oligonucleotide
cggcugcaaucccacacug

SEQ ID NO: 771756 - RNA, 19 nt, Artificial Sequence
  Description of Artificial Sequence: Synthetic oligonucleotide
guaccagccgucggucccu

SEQ ID NO: 771757 - RNA, 19 nt, Artificial Sequence
  Description of Artificial Sequence: Synthetic oligonucleotide
cgagcgcacggauacugga

SEQ ID NO: 771758 - RNA, 19 nt, Artificial Sequence
  Description of Artificial Sequence: Synthetic oligonucleotide
cacacagacccgucuccuu

SEQ ID NO: 771759 - RNA, 19 nt, Artificial Sequence
  Description of Artificial Sequence: Synthetic oligonucleotide
gcgugacaggagagggccc

SEQ ID NO: 771760 - RNA, 19 nt, Artificial Sequence
  Description of Artificial Sequence: Synthetic oligonucleotide
ccgugagaauguccccauc

SEQ ID NO: 771761 - RNA, 19 nt, Artificial Sequence
  Description of Artificial Sequence: Synthetic oligonucleotide
ggacgcuagucacgugacu

SEQ ID NO: 771762 - RNA, 19 nt, Artificial Sequence
  Description of Artificial Sequence: Synthetic oligonucleotide
gcgcccaacacucgccacu

SEQ ID NO: 771763 - RNA, 19 nt, Artificial Sequence
  Description of Artificial Sequence: Synthetic oligonucleotide
cagguguagguagcccacu

SEQ ID NO: 771764 - RNA, 19 nt, Artificial Sequence
  Description of Artificial Sequence: Synthetic oligonucleotide
ccggacaacugagagcugu

SEQ ID NO: 771765 - RNA, 19 nt, Artificial Sequence
  Description of Artificial Sequence: Synthetic oligonucleotide
ccccucggagucucccgug

SEQ ID NO: 771766 - RNA, 19 nt, Artificial Sequence
  Description of Artificial Sequence: Synthetic oligonucleotide
agcucggagccaagcccuu

SEQ ID NO: 771767 - RNA, 19 nt, Artificial Sequence
  Description of Artificial Sequence: Synthetic oligonucleotide
cuggcguccuugccaccua

SEQ ID NO: 771768 - RNA, 19 nt, Artificial Sequence
  Description of Artificial Sequence: Synthetic oligonucleotide
gcgugaaccggacgcuagu

SEQ ID NO: 771769 - RNA, 19 nt, Artificial Sequence
  Description of Artificial Sequence: Synthetic oligonucleotide
cccucggagucucccguga

SEQ ID NO: 771770 - RNA, 19 nt, Artificial Sequence
  Description of Artificial Sequence: Synthetic oligonucleotide
cacuugguccuagggguuu

SEQ ID NO: 771771 - RNA, 19 nt, Artificial Sequence
  Description of Artificial Sequence: Synthetic oligonucleotide
ggacagagagggaguucua

SEQ ID NO: 771772 - RNA, 19 nt, Artificial Sequence
  Description of Artificial Sequence: Synthetic oligonucleotide
gcacccaguccaaucuccu

SEQ ID NO: 771773 - RNA, 19 nt, Artificial Sequence
  Description of Artificial Sequence: Synthetic oligonucleotide
cggcuagacuuaguaccac

SEQ ID NO: 771774 - RNA, 19 nt, Artificial Sequence
  Description of Artificial Sequence: Synthetic oligonucleotide
gccugaguacauacggcuu

SEQ ID NO: 771775 - RNA, 19 nt, Artificial Sequence
  Description of Artificial Sequence: Synthetic oligonucleotide
ccccacagcucaucagugu

SEQ ID NO: 771776 - RNA, 19 nt, Artificial Sequence
  Description of Artificial Sequence: Synthetic oligonucleotide
cgucggucccucccaccac

SEQ ID NO: 771777 - RNA, 19 nt, Artificial Sequence
  Description of Artificial Sequence: Synthetic oligonucleotide
gcgagucguuaucgugugu

SEQ ID NO: 771778 - RNA, 19 nt, Artificial Sequence
  Description of Artificial Sequence: Synthetic oligonucleotide
cccgugagaauguccccau

SEQ ID NO: 771779 - RNA, 19 nt, Artificial Sequence
  Description of Artificial Sequence: Synthetic oligonucleotide
cgcuauagauguagaucau

SEQ ID NO: 771780 - RNA, 19 nt, Artificial Sequence
  Description of Artificial Sequence: Synthetic oligonucleotide
gcacuugguccuagggguu

SEQ ID NO: 771781 - RNA, 19 nt, Artificial Sequence
  Description of Artificial Sequence: Synthetic oligonucleotide
caugggccugggccacgau

SEQ ID NO: 771782 - RNA, 19 nt, Artificial Sequence
  Description of Artificial Sequence: Synthetic oligonucleotide
gcucgagcgcacggauacu

SEQ ID NO: 771783 - RNA, 19 nt, Artificial Sequence
  Description of Artificial Sequence: Synthetic oligonucleotide
cgguucgccccuccaggaa

SEQ ID NO: 771784 - RNA, 19 nt, Artificial Sequence
  Description of Artificial Sequence: Synthetic oligonucleotide
gcuuggcgccuuggcucga

SEQ ID NO: 771785 - RNA, 19 nt, Artificial Sequence
  Description of Artificial Sequence: Synthetic oligonucleotide
ccccggcugcaaucccaca

SEQ ID NO: 771786 - RNA, 19 nt, Artificial Sequence
  Description of Artificial Sequence: Synthetic oligonucleotide
aaaagcaaugucuugccgg

SEQ ID NO: 771787 - RNA, 19 nt, Artificial Sequence
  Description of Artificial Sequence: Synthetic oligonucleotide
aauucuuguacaucgguag

SEQ ID NO: 771788 - RNA, 19 nt, Artificial Sequence
  Description of Artificial Sequence: Synthetic oligonucleotide
aagaccauacaguugaaag

SEQ ID NO: 771789 - RNA, 19 nt, Artificial Sequence
  Description of Artificial Sequence: Synthetic oligonucleotide
aauaagugcaccaacauga

SEQ ID NO: 771790 - RNA, 19 nt, Artificial Sequence
  Description of Artificial Sequence: Synthetic oligonucleotide
uuugaaaaguuucaagggc

SEQ ID NO: 771791 - RNA, 19 nt, Artificial Sequence
  Description of Artificial Sequence: Synthetic oligonucleotide
aacaccguagagaagaagc

SEQ ID NO: 771792 - RNA, 19 nt, Artificial Sequence
  Description of Artificial Sequence: Synthetic oligonucleotide
acuuucggagaccugagcc

SEQ ID NO: 771793 - RNA, 19 nt, Artificial Sequence
  Description of Artificial Sequence: Synthetic oligonucleotide
uaagacaggagcaacuaag

SEQ ID NO: 771794 - RNA, 19 nt, Artificial Sequence
  Description of Artificial Sequence: Synthetic oligonucleotide
agaccauacaguugaaagc

SEQ ID NO: 771795 - RNA, 19 nt, Artificial Sequence
  Description of Artificial Sequence: Synthetic oligonucleotide
uccaggaucaacacugugg

SEQ ID NO: 771796 - RNA, 19 nt, Artificial Sequence
  Description of Artificial Sequence: Synthetic oligonucleotide
gguauuguagcccucaggg

SEQ ID NO: 771797 - RNA, 19 nt, Artificial Sequence
  Description of Artificial Sequence: Synthetic oligonucleotide
augacgacgaugcaguggg

SEQ ID NO: 771798 - RNA, 19 nt, Artificial Sequence
  Description of Artificial Sequence: Synthetic oligonucleotide
uuggccauuggccaugacg

SEQ ID NO: 771799 - RNA, 19 nt, Artificial Sequence
  Description of Artificial Sequence: Synthetic oligonucleotide
augauuaacacggugcgac

SEQ ID NO: 771800 - RNA, 19 nt, Artificial Sequence
  Description of Artificial Sequence: Synthetic oligonucleotide
aaucggauauucuccauga

SEQ ID NO: 771801 - RNA, 19 nt, Artificial Sequence
  Description of Artificial Sequence: Synthetic oligonucleotide
uacaucgguagucaagcgg

SEQ ID NO: 771802 - RNA, 19 nt, Artificial Sequence
  Description of Artificial Sequence: Synthetic oligonucleotide
ugagacucagacaugaaau

SEQ ID NO: 771803 - RNA, 19 nt, Artificial Sequence
  Description of Artificial Sequence: Synthetic oligonucleotide
cuaccaaucaccugugugc

SEQ ID NO: 771804 - RNA, 19 nt, Artificial Sequence
  Description of Artificial Sequence: Synthetic oligonucleotide
aguuucaagggcucugucg

SEQ ID NO: 771805 - RNA, 19 nt, Artificial Sequence
  Description of Artificial Sequence: Synthetic oligonucleotide
gacaugaaauuccccaagg

SEQ ID NO: 771806 - RNA, 19 nt, Artificial Sequence
  Description of Artificial Sequence: Synthetic oligonucleotide
aagacaggagcaacuaagc

SEQ ID NO: 771807 - RNA, 19 nt, Artificial Sequence
  Description of Artificial Sequence: Synthetic oligonucleotide
agagaggcuggccauagac

SEQ ID NO: 771808 - RNA, 19 nt, Artificial Sequence
  Description of Artificial Sequence: Synthetic oligonucleotide
uguacaucgguagucaagc

SEQ ID NO: 771809 - RNA, 19 nt, Artificial Sequence
  Description of Artificial Sequence: Synthetic oligonucleotide
cuggaaacggacuaccccg

SEQ ID NO: 771810 - RNA, 19 nt, Artificial Sequence
  Description of Artificial Sequence: Synthetic oligonucleotide
aaagcaaugucuugccgga

SEQ ID NO: 771811 - RNA, 19 nt, Artificial Sequence
  Description of Artificial Sequence: Synthetic oligonucleotide
uccuguacuacccucucag

SEQ ID NO: 771812 - RNA, 19 nt, Artificial Sequence
  Description of Artificial Sequence: Synthetic oligonucleotide
agcacuagguauccaaagg

SEQ ID NO: 771813 - RNA, 19 nt, Artificial Sequence
  Description of Artificial Sequence: Synthetic oligonucleotide
aacuuucggagaccugagc

SEQ ID NO: 771814 - RNA, 19 nt, Artificial Sequence
  Description of Artificial Sequence: Synthetic oligonucleotide
aauuccccaaggugagccc

SEQ ID NO: 771815 - RNA, 19 nt, Artificial Sequence
  Description of Artificial Sequence: Synthetic oligonucleotide
caugaaauuccccaaggug

SEQ ID NO: 771816 - RNA, 19 nt, Artificial Sequence
  Description of Artificial Sequence: Synthetic oligonucleotide
cuuuguaccgucugggaag

SEQ ID NO: 771817 - RNA, 19 nt, Artificial Sequence
  Description of Artificial Sequence: Synthetic oligonucleotide
gcugaugaaaccuaugacc

SEQ ID NO: 771818 - RNA, 19 nt, Artificial Sequence
  Description of Artificial Sequence: Synthetic oligonucleotide
gaagcuugagccgagccgg

SEQ ID NO: 771819 - RNA, 19 nt, Artificial Sequence
  Description of Artificial Sequence: Synthetic oligonucleotide
acaucgguagucaagcggc

SEQ ID NO: 771820 - RNA, 19 nt, Artificial Sequence
  Description of Artificial Sequence: Synthetic oligonucleotide
acuaccccgaauuccgacc

SEQ ID NO: 771821 - RNA, 19 nt, Artificial Sequence
  Description of Artificial Sequence: Synthetic oligonucleotide
caguugaaagcgauguugg

SEQ ID NO: 771822 - RNA, 19 nt, Artificial Sequence
  Description of Artificial Sequence: Synthetic oligonucleotide
aagucaguggggcauccag

SEQ ID NO: 771823 - RNA, 19 nt, Artificial Sequence
  Description of Artificial Sequence: Synthetic oligonucleotide
aacacggugcgaccagcgc

SEQ ID NO: 771824 - RNA, 19 nt, Artificial Sequence
  Description of Artificial Sequence: Synthetic oligonucleotide
uuguacaucgguagucaag

SEQ ID NO: 771825 - RNA, 19 nt, Artificial Sequence
  Description of Artificial Sequence: Synthetic oligonucleotide
acuaccaaucaccugugug

SEQ ID NO: 771826 - RNA, 19 nt, Artificial Sequence
  Description of Artificial Sequence: Synthetic oligonucleotide
uuguacugagccuaugaga

SEQ ID NO: 771827 - RNA, 19 nt, Artificial Sequence
  Description of Artificial Sequence: Synthetic oligonucleotide
aaacggacuaccccgaauu

SEQ ID NO: 771828 - RNA, 19 nt, Artificial Sequence
  Description of Artificial Sequence: Synthetic oligonucleotide
aaaaguuucaagggcucug

SEQ ID NO: 771829 - RNA, 19 nt, Artificial Sequence
  Description of Artificial Sequence: Synthetic oligonucleotide
gaauagggugcccaagacc

SEQ ID NO: 771830 - RNA, 19 nt, Artificial Sequence
  Description of Artificial Sequence: Synthetic oligonucleotide
ucggacaguacugagccgg

SEQ ID NO: 771831 - RNA, 19 nt, Artificial Sequence
  Description of Artificial Sequence: Synthetic oligonucleotide
gugggcaaugauuaacacg

SEQ ID NO: 771832 - RNA, 19 nt, Artificial Sequence
  Description of Artificial Sequence: Synthetic oligonucleotide
aaccacgguauuguagccc

SEQ ID NO: 771833 - RNA, 19 nt, Artificial Sequence
  Description of Artificial Sequence: Synthetic oligonucleotide
auauucuccaugaugguug

SEQ ID NO: 771834 - RNA, 19 nt, Artificial Sequence
  Description of Artificial Sequence: Synthetic oligonucleotide
guugaaagcgauguuggag

SEQ ID NO: 771835 - RNA, 19 nt, Artificial Sequence
  Description of Artificial Sequence: Synthetic oligonucleotide
guuguacugagccuaugag

SEQ ID NO: 771836 - RNA, 19 nt, Artificial Sequence
  Description of Artificial Sequence: Synthetic oligonucleotide
acgugcgauggcuaggcgc

SEQ ID NO: 771837 - RNA, 19 nt, Artificial Sequence
  Description of Artificial Sequence: Synthetic oligonucleotide
ugaaaaguuucaagggcuc

SEQ ID NO: 771838 - RNA, 19 nt, Artificial Sequence
  Description of Artificial Sequence: Synthetic oligonucleotide
aacggacuaccccgaauuc

SEQ ID NO: 771839 - RNA, 19 nt, Artificial Sequence
  Description of Artificial Sequence: Synthetic oligonucleotide
agacucagacaugaaauuc

SEQ ID NO: 771840 - RNA, 19 nt, Artificial Sequence
  Description of Artificial Sequence: Synthetic oligonucleotide
uccaguuucccgaaucgga

SEQ ID NO: 771841 - RNA, 19 nt, Artificial Sequence
  Description of Artificial Sequence: Synthetic oligonucleotide
aggaagcuugagccgagcc

SEQ ID NO: 771842 - RNA, 19 nt, Artificial Sequence
  Description of Artificial Sequence: Synthetic oligonucleotide
uccaaaggucaucaauccc

SEQ ID NO: 771843 - RNA, 19 nt, Artificial Sequence
  Description of Artificial Sequence: Synthetic oligonucleotide
acaccagacuaccaaucac

SEQ ID NO: 771844 - RNA, 19 nt, Artificial Sequence
  Description of Artificial Sequence: Synthetic oligonucleotide
uccgacccgaaauaagugc

SEQ ID NO: 771845 - RNA, 19 nt, Artificial Sequence
  Description of Artificial Sequence: Synthetic oligonucleotide
cuuucggagaccugagccc

SEQ ID NO: 771846 - RNA, 19 nt, Artificial Sequence
  Description of Artificial Sequence: Synthetic oligonucleotide
acaacuuucggagaccuga

SEQ ID NO: 771847 - RNA, 19 nt, Artificial Sequence
  Description of Artificial Sequence: Synthetic oligonucleotide
ccgaacauugccuagggcc

SEQ ID NO: 771848 - RNA, 19 nt, Artificial Sequence
  Description of Artificial Sequence: Synthetic oligonucleotide
aauuccgacccgaaauaag

SEQ ID NO: 771849 - RNA, 19 nt, Artificial Sequence
  Description of Artificial Sequence: Synthetic oligonucleotide
ucuuguacaucgguaguca

SEQ ID NO: 771850 - RNA, 19 nt, Artificial Sequence
  Description of Artificial Sequence: Synthetic oligonucleotide
cuagggaugcagcagccgc

SEQ ID NO: 771851 - RNA, 19 nt, Artificial Sequence
  Description of Artificial Sequence: Synthetic oligonucleotide
ugguuguuccaaauaggac

SEQ ID NO: 771852 - RNA, 19 nt, Artificial Sequence
  Description of Artificial Sequence: Synthetic oligonucleotide
cauacaguugaaagcgaug

SEQ ID NO: 771853 - RNA, 19 nt, Artificial Sequence
  Description of Artificial Sequence: Synthetic oligonucleotide
acaagcuugaaggaugacu

SEQ ID NO: 771854 - RNA, 19 nt, Artificial Sequence
  Description of Artificial Sequence: Synthetic oligonucleotide
cugaacaccguagagaaga

SEQ ID NO: 771855 - RNA, 19 nt, Artificial Sequence
  Description of Artificial Sequence: Synthetic oligonucleotide
aagcuugaaggaugacuug

SEQ ID NO: 771856 - RNA, 19 nt, Artificial Sequence
  Description of Artificial Sequence: Synthetic oligonucleotide
ugauuaacacggugcgacc

SEQ ID NO: 771857 - RNA, 19 nt, Artificial Sequence
  Description of Artificial Sequence: Synthetic oligonucleotide
aaugauuaacacggugcga

SEQ ID NO: 771858 - RNA, 19 nt, Artificial Sequence
  Description of Artificial Sequence: Synthetic oligonucleotide
ggugauggagccacgaagg

SEQ ID NO: 771859 - RNA, 19 nt, Artificial Sequence
  Description of Artificial Sequence: Synthetic oligonucleotide
ucgguagucaagcggcuca

SEQ ID NO: 771860 - RNA, 19 nt, Artificial Sequence
  Description of Artificial Sequence: Synthetic oligonucleotide
augagacucagacaugaaa

SEQ ID NO: 771861 - RNA, 19 nt, Artificial Sequence
  Description of Artificial Sequence: Synthetic oligonucleotide
ucaugcccauccaauguca

SEQ ID NO: 771862 - RNA, 19 nt, Artificial Sequence
  Description of Artificial Sequence: Synthetic oligonucleotide
agcauagacagggacacca

SEQ ID NO: 771863 - RNA, 19 nt, Artificial Sequence
  Description of Artificial Sequence: Synthetic oligonucleotide
ugaaaccuaugaccuggcc

SEQ ID NO: 771864 - RNA, 19 nt, Artificial Sequence
  Description of Artificial Sequence: Synthetic oligonucleotide
acggacuaccccgaauucc

SEQ ID NO: 771865 - RNA, 19 nt, Artificial Sequence
  Description of Artificial Sequence: Synthetic oligonucleotide
uuccgacccgaaauaagug

SEQ ID NO: 771866 - RNA, 19 nt, Artificial Sequence
  Description of Artificial Sequence: Synthetic oligonucleotide
agguccuugcuagggaugc

SEQ ID NO: 771867 - RNA, 19 nt, Artificial Sequence
  Description of Artificial Sequence: Synthetic oligonucleotide
ugcucggacaguacugagc

SEQ ID NO: 771868 - RNA, 19 nt, Artificial Sequence
  Description of Artificial Sequence: Synthetic oligonucleotide
agugcaccaacaugaugag

SEQ ID NO: 771869 - RNA, 19 nt, Artificial Sequence
  Description of Artificial Sequence: Synthetic oligonucleotide
ucccgaaucggauauucuc

SEQ ID NO: 771870 - RNA, 19 nt, Artificial Sequence
  Description of Artificial Sequence: Synthetic oligonucleotide
aguuucccgaaucggauau

SEQ ID NO: 771871 - RNA, 19 nt, Artificial Sequence
  Description of Artificial Sequence: Synthetic oligonucleotide
cacuagguauccaaagguc

SEQ ID NO: 771872 - RNA, 19 nt, Artificial Sequence
  Description of Artificial Sequence: Synthetic oligonucleotide
ccaaccacgguauuguagc

SEQ ID NO: 771873 - RNA, 19 nt, Artificial Sequence
  Description of Artificial Sequence: Synthetic oligonucleotide
gacaccagacuaccaauca

SEQ ID NO: 771874 - RNA, 19 nt, Artificial Sequence
  Description of Artificial Sequence: Synthetic oligonucleotide
uguugcccuggcaaucugc

SEQ ID NO: 771875 - RNA, 19 nt, Artificial Sequence
  Description of Artificial Sequence: Synthetic oligonucleotide
ggaagcuugagccgagccg

SEQ ID NO: 771876 - RNA, 19 nt, Artificial Sequence
  Description of Artificial Sequence: Synthetic oligonucleotide
gaagcguuccagcagggaa

SEQ ID NO: 771877 - RNA, 19 nt, Artificial Sequence
  Description of Artificial Sequence: Synthetic oligonucleotide
accacgguauuguagcccu

SEQ ID NO: 771878 - RNA, 19 nt, Artificial Sequence
  Description of Artificial Sequence: Synthetic oligonucleotide
uuuguaccgucugggaagc

SEQ ID NO: 771879 - RNA, 19 nt, Artificial Sequence
  Description of Artificial Sequence: Synthetic oligonucleotide
acaaggcgaugccucugcc

SEQ ID NO: 771880 - RNA, 19 nt, Artificial Sequence
  Description of Artificial Sequence: Synthetic oligonucleotide
aagagggcuuuccgcaugu

SEQ ID NO: 771881 - RNA, 19 nt, Artificial Sequence
  Description of Artificial Sequence: Synthetic oligonucleotide
cagacuaccaaucaccugu

SEQ ID NO: 771882 - RNA, 19 nt, Artificial Sequence
  Description of Artificial Sequence: Synthetic oligonucleotide
gcucggacaguacugagcc

SEQ ID NO: 771883 - RNA, 19 nt, Artificial Sequence
  Description of Artificial Sequence: Synthetic oligonucleotide
ugcccaagaccauacaguu

SEQ ID NO: 771884 - RNA, 19 nt, Artificial Sequence
  Description of Artificial Sequence: Synthetic oligonucleotide
caccugaccaaacaggaca

SEQ ID NO: 771885 - RNA, 19 nt, Artificial Sequence
  Description of Artificial Sequence: Synthetic oligonucleotide
ucuccggauaagcucugca

SEQ ID NO: 771886 - RNA, 19 nt, Artificial Sequence
  Description of Artificial Sequence: Synthetic oligonucleotide
accguggucuuuccucccc

SEQ ID NO: 771887 - RNA, 19 nt, Artificial Sequence
  Description of Artificial Sequence: Synthetic oligonucleotide
auuccgacccgaaauaagu

SEQ ID NO: 771888 - RNA, 19 nt, Artificial Sequence
  Description of Artificial Sequence: Synthetic oligonucleotide
aggagcaacuaagcaacgg

SEQ ID NO: 771889 - RNA, 19 nt, Artificial Sequence
  Description of Artificial Sequence: Synthetic oligonucleotide
caugacgacgaugcagugg

SEQ ID NO: 771890 - RNA, 19 nt, Artificial Sequence
  Description of Artificial Sequence: Synthetic oligonucleotide
caaagacacgggcaccugc

SEQ ID NO: 771891 - RNA, 19 nt, Artificial Sequence
  Description of Artificial Sequence: Synthetic oligonucleotide
agccccgaugaauagggug

SEQ ID NO: 771892 - RNA, 19 nt, Artificial Sequence
  Description of Artificial Sequence: Synthetic oligonucleotide
cuaccccgaauuccgaccc

SEQ ID NO: 771893 - RNA, 19 nt, Artificial Sequence
  Description of Artificial Sequence: Synthetic oligonucleotide
cagcacuagguauccaaag

SEQ ID NO: 771894 - RNA, 19 nt, Artificial Sequence
  Description of Artificial Sequence: Synthetic oligonucleotide
ucgggcagcuguauacacc

SEQ ID NO: 771895 - RNA, 19 nt, Artificial Sequence
  Description of Artificial Sequence: Synthetic oligonucleotide
ggccauagaccuuuguacc

SEQ ID NO: 771896 - RNA, 19 nt, Artificial Sequence
  Description of Artificial Sequence: Synthetic oligonucleotide
acgaagguccuugcuaggg

SEQ ID NO: 771897 - RNA, 19 nt, Artificial Sequence
  Description of Artificial Sequence: Synthetic oligonucleotide
cuaugagacucagacauga

SEQ ID NO: 771898 - RNA, 19 nt, Artificial Sequence
  Description of Artificial Sequence: Synthetic oligonucleotide
aggucaugcccauccaaug

SEQ ID NO: 771899 - RNA, 19 nt, Artificial Sequence
  Description of Artificial Sequence: Synthetic oligonucleotide
aguugaaagcgauguugga

SEQ ID NO: 771900 - RNA, 19 nt, Artificial Sequence
  Description of Artificial Sequence: Synthetic oligonucleotide
uguaccgucugggaagcca

SEQ ID NO: 771901 - RNA, 19 nt, Artificial Sequence
  Description of Artificial Sequence: Synthetic oligonucleotide
guacaucgguagucaagcg

SEQ ID NO: 771902 - RNA, 19 nt, Artificial Sequence
  Description of Artificial Sequence: Synthetic oligonucleotide
ugugccccguucaccaacc

SEQ ID NO: 771903 - RNA, 19 nt, Artificial Sequence
  Description of Artificial Sequence: Synthetic oligonucleotide
uuucccgaaucggauauuc

SEQ ID NO: 771904 - RNA, 19 nt, Artificial Sequence
  Description of Artificial Sequence: Synthetic oligonucleotide
augagggcacgugcgaugg

SEQ ID NO: 771905 - RNA, 19 nt, Artificial Sequence
  Description of Artificial Sequence: Synthetic oligonucleotide
gccauagaccuuuguaccg

SEQ ID NO: 771906 - RNA, 19 nt, Artificial Sequence
  Description of Artificial Sequence: Synthetic oligonucleotide
uggaaacggacuaccccga

SEQ ID NO: 771907 - RNA, 19 nt, Artificial Sequence
  Description of Artificial Sequence: Synthetic oligonucleotide
guccgaacauugccuaggg

SEQ ID NO: 771908 - RNA, 19 nt, Artificial Sequence
  Description of Artificial Sequence: Synthetic oligonucleotide
uuucaagggcucugucgcc

SEQ ID NO: 771909 - RNA, 19 nt, Artificial Sequence
  Description of Artificial Sequence: Synthetic oligonucleotide
ggcaaucugcuccugacac

SEQ ID NO: 771910 - RNA, 19 nt, Artificial Sequence
  Description of Artificial Sequence: Synthetic oligonucleotide
acccgaaauaagugcacca

SEQ ID NO: 771911 - RNA, 19 nt, Artificial Sequence
  Description of Artificial Sequence: Synthetic oligonucleotide
caccggacaaggcugugcc

SEQ ID NO: 771912 - RNA, 19 nt, Artificial Sequence
  Description of Artificial Sequence: Synthetic oligonucleotide
augaaaccuaugaccuggc

SEQ ID NO: 771913 - RNA, 19 nt, Artificial Sequence
  Description of Artificial Sequence: Synthetic oligonucleotide
gacccgaaauaagugcacc

SEQ ID NO: 771914 - RNA, 19 nt, Artificial Sequence
  Description of Artificial Sequence: Synthetic oligonucleotide
uccgaacauugccuagggc

SEQ ID NO: 771915 - RNA, 19 nt, Artificial Sequence
  Description of Artificial Sequence: Synthetic oligonucleotide
acacggugcgaccagcgcu

SEQ ID NO: 771916 - RNA, 19 nt, Artificial Sequence
  Description of Artificial Sequence: Synthetic oligonucleotide
caggggauugcagcgaccc

SEQ ID NO: 771917 - RNA, 19 nt, Artificial Sequence
  Description of Artificial Sequence: Synthetic oligonucleotide
caaggcgaugccucugccc

SEQ ID NO: 771918 - RNA, 19 nt, Artificial Sequence
  Description of Artificial Sequence: Synthetic oligonucleotide
agcgauguuggagagcccu

SEQ ID NO: 771919 - RNA, 19 nt, Artificial Sequence
  Description of Artificial Sequence: Synthetic oligonucleotide
uuaacacggugcgaccagc

SEQ ID NO: 771920 - RNA, 19 nt, Artificial Sequence
  Description of Artificial Sequence: Synthetic oligonucleotide
ugagccuaugagacucaga

SEQ ID NO: 771921 - RNA, 19 nt, Artificial Sequence
  Description of Artificial Sequence: Synthetic oligonucleotide
cugcacucaguccacggac

SEQ ID NO: 771922 - RNA, 19 nt, Artificial Sequence
  Description of Artificial Sequence: Synthetic oligonucleotide
ugaacaccguagagaagaa

SEQ ID NO: 771923 - RNA, 19 nt, Artificial Sequence
  Description of Artificial Sequence: Synthetic oligonucleotide
ucaaucccugaacaccgua

SEQ ID NO: 771924 - RNA, 19 nt, Artificial Sequence
  Description of Artificial Sequence: Synthetic oligonucleotide
gaacaccguagagaagaag

SEQ ID NO: 771925 - RNA, 19 nt, Artificial Sequence
  Description of Artificial Sequence: Synthetic oligonucleotide
accggacaaggcugugccc

SEQ ID NO: 771926 - RNA, 19 nt, Artificial Sequence
  Description of Artificial Sequence: Synthetic oligonucleotide
agacaacuuucggagaccu

SEQ ID NO: 771927 - RNA, 19 nt, Artificial Sequence
  Description of Artificial Sequence: Synthetic oligonucleotide
gacuaccccgaauuccgac

SEQ ID NO: 771928 - RNA, 19 nt, Artificial Sequence
  Description of Artificial Sequence: Synthetic oligonucleotide
uucccgaaucggauauucu

SEQ ID NO: 771929 - RNA, 19 nt, Artificial Sequence
  Description of Artificial Sequence: Synthetic oligonucleotide
cacaagggagccccgauga

SEQ ID NO: 771930 - RNA, 19 nt, Artificial Sequence
  Description of Artificial Sequence: Synthetic oligonucleotide
caaccacgguauuguagcc

SEQ ID NO: 771931 - RNA, 19 nt, Artificial Sequence
  Description of Artificial Sequence: Synthetic oligonucleotide
guauuguagcccucaggga

SEQ ID NO: 771932 - RNA, 19 nt, Artificial Sequence
  Description of Artificial Sequence: Synthetic oligonucleotide
ugagccgagccggucaucu

SEQ ID NO: 771933 - RNA, 19 nt, Artificial Sequence
  Description of Artificial Sequence: Synthetic oligonucleotide
uagcguuccucuucccucu

SEQ ID NO: 771934 - RNA, 19 nt, Artificial Sequence
  Description of Artificial Sequence: Synthetic oligonucleotide
agacugaugcuuggcagug

SEQ ID NO: 771935 - RNA, 19 nt, Artificial Sequence
  Description of Artificial Sequence: Synthetic oligonucleotide
gauagcguuccucuucccu

SEQ ID NO: 771936 - RNA, 19 nt, Artificial Sequence
  Description of Artificial Sequence: Synthetic oligonucleotide
agccuaugagacucagaca

SEQ ID NO: 771937 - RNA, 19 nt, Artificial Sequence
  Description of Artificial Sequence: Synthetic oligonucleotide
caggagcaacuaagcaacg

SEQ ID NO: 771938 - RNA, 19 nt, Artificial Sequence
  Description of Artificial Sequence: Synthetic oligonucleotide
aaggaugacuugaauucuu

SEQ ID NO: 771939 - RNA, 19 nt, Artificial Sequence
  Description of Artificial Sequence: Synthetic oligonucleotide
caugcccauccaaugucac

SEQ ID NO: 771940 - RNA, 19 nt, Artificial Sequence
  Description of Artificial Sequence: Synthetic oligonucleotide
aaccuaugaccuggccccg

SEQ ID NO: 771941 - RNA, 19 nt, Artificial Sequence
  Description of Artificial Sequence: Synthetic oligonucleotide
ggcugaugaaaccuaugac

SEQ ID NO: 771942 - RNA, 19 nt, Artificial Sequence
  Description of Artificial Sequence: Synthetic oligonucleotide
cauagaccuuuguaccguc

SEQ ID NO: 771943 - RNA, 19 nt, Artificial Sequence
  Description of Artificial Sequence: Synthetic oligonucleotide
acgguauuguagcccucag

SEQ ID NO: 771944 - RNA, 19 nt, Artificial Sequence
  Description of Artificial Sequence: Synthetic oligonucleotide
ccuggaaacggacuacccc

SEQ ID NO: 771945 - RNA, 19 nt, Artificial Sequence
  Description of Artificial Sequence: Synthetic oligonucleotide
agccgagccggucaucuga

SEQ ID NO: 771946 - RNA, 19 nt, Artificial Sequence
  Description of Artificial Sequence: Synthetic oligonucleotide
gagaacgucugggagcgca

SEQ ID NO: 771947 - RNA, 19 nt, Artificial Sequence
  Description of Artificial Sequence: Synthetic oligonucleotide
acuacccucucagacucug

SEQ ID NO: 771948 - RNA, 19 nt, Artificial Sequence
  Description of Artificial Sequence: Synthetic oligonucleotide
accagacuaccaaucaccu

SEQ ID NO: 771949 - RNA, 19 nt, Artificial Sequence
  Description of Artificial Sequence: Synthetic oligonucleotide
cacggugcgaccagcgcug

SEQ ID NO: 771950 - RNA, 19 nt, Artificial Sequence
  Description of Artificial Sequence: Synthetic oligonucleotide
augcgcucaccaauguggg

SEQ ID NO: 771951 - RNA, 19 nt, Artificial Sequence
  Description of Artificial Sequence: Synthetic oligonucleotide
aucgguagucaagcggcuc

SEQ ID NO: 771952 - RNA, 19 nt, Artificial Sequence
  Description of Artificial Sequence: Synthetic oligonucleotide
caaugugggacagcagcac

SEQ ID NO: 771953 - RNA, 19 nt, Artificial Sequence
  Description of Artificial Sequence: Synthetic oligonucleotide
gaucgcagcugggccaccg

SEQ ID NO: 771954 - RNA, 19 nt, Artificial Sequence
  Description of Artificial Sequence: Synthetic oligonucleotide
gaauuccgacccgaaauaa

SEQ ID NO: 771955 - RNA, 19 nt, Artificial Sequence
  Description of Artificial Sequence: Synthetic oligonucleotide
caguccacggaccaccuga

SEQ ID NO: 771956 - RNA, 19 nt, Artificial Sequence
  Description of Artificial Sequence: Synthetic oligonucleotide
guagucaagcggcucacua

SEQ ID NO: 771957 - RNA, 19 nt, Artificial Sequence
  Description of Artificial Sequence: Synthetic oligonucleotide
gccccguucaccaaccacg

SEQ ID NO: 771958 - RNA, 19 nt, Artificial Sequence
  Description of Artificial Sequence: Synthetic oligonucleotide
agggugcccaagaccauac

SEQ ID NO: 771959 - RNA, 19 nt, Artificial Sequence
  Description of Artificial Sequence: Synthetic oligonucleotide
ugccggagcagggagcuga

SEQ ID NO: 771960 - RNA, 19 nt, Artificial Sequence
  Description of Artificial Sequence: Synthetic oligonucleotide
ugccccguucaccaaccac

SEQ ID NO: 771961 - RNA, 19 nt, Artificial Sequence
  Description of Artificial Sequence: Synthetic oligonucleotide
ccggauaagcucugcauac

SEQ ID NO: 771962 - RNA, 19 nt, Artificial Sequence
  Description of Artificial Sequence: Synthetic oligonucleotide
ugcgcagucccugggaaau

SEQ ID NO: 771963 - RNA, 19 nt, Artificial Sequence
  Description of Artificial Sequence: Synthetic oligonucleotide
cucgggcagcuguauacac

SEQ ID NO: 771964 - RNA, 19 nt, Artificial Sequence
  Description of Artificial Sequence: Synthetic oligonucleotide
cucggacaguacugagccg

SEQ ID NO: 771965 - RNA, 19 nt, Artificial Sequence
  Description of Artificial Sequence: Synthetic oligonucleotide
cgaaauaagugcaccaaca

SEQ ID NO: 771966 - RNA, 19 nt, Artificial Sequence
  Description of Artificial Sequence: Synthetic oligonucleotide
cggacuaccccgaauuccg

SEQ ID NO: 771967 - RNA, 19 nt, Artificial Sequence
  Description of Artificial Sequence: Synthetic oligonucleotide
uggggucauagaagcguuc

SEQ ID NO: 771968 - RNA, 19 nt, Artificial Sequence
  Description of Artificial Sequence: Synthetic oligonucleotide
aguccacggaccaccugac

SEQ ID NO: 771969 - RNA, 19 nt, Artificial Sequence
  Description of Artificial Sequence: Synthetic oligonucleotide
gcaccguccgaacauugcc

SEQ ID NO: 771970 - RNA, 19 nt, Artificial Sequence
  Description of Artificial Sequence: Synthetic oligonucleotide
uaccgucugggaagccacc

SEQ ID NO: 771971 - RNA, 19 nt, Artificial Sequence
  Description of Artificial Sequence: Synthetic oligonucleotide
ggugggcaaugauuaacac

SEQ ID NO: 771972 - RNA, 19 nt, Artificial Sequence
  Description of Artificial Sequence: Synthetic oligonucleotide
ccgaaauaagugcaccaac

SEQ ID NO: 771973 - RNA, 19 nt, Artificial Sequence
  Description of Artificial Sequence: Synthetic oligonucleotide
cuacccucucagacucugc

SEQ ID NO: 771974 - RNA, 19 nt, Artificial Sequence
  Description of Artificial Sequence: Synthetic oligonucleotide
cuggccauagaccuuugua

SEQ ID NO: 771975 - RNA, 19 nt, Artificial Sequence
  Description of Artificial Sequence: Synthetic oligonucleotide
accguccgaacauugccua

SEQ ID NO: 771976 - RNA, 19 nt, Artificial Sequence
  Description of Artificial Sequence: Synthetic oligonucleotide
cugcucggacaguacugag

SEQ ID NO: 771977 - RNA, 19 nt, Artificial Sequence
  Description of Artificial Sequence: Synthetic oligonucleotide
cuagggccucgucugcuac

SEQ ID NO: 771978 - RNA, 19 nt, Artificial Sequence
  Description of Artificial Sequence: Synthetic oligonucleotide
cugacacuggcgagacaac

SEQ ID NO: 771979 - RNA, 19 nt, Artificial Sequence
  Description of Artificial Sequence: Synthetic oligonucleotide
cuuguacaucgguagucaa

SEQ ID NO: 771980 - RNA, 19 nt, Artificial Sequence
  Description of Artificial Sequence: Synthetic oligonucleotide
cuagguauccaaaggucau

SEQ ID NO: 771981 - RNA, 19 nt, Artificial Sequence
  Description of Artificial Sequence: Synthetic oligonucleotide
cgagacaacuuucggagac

SEQ ID NO: 771982 - RNA, 19 nt, Artificial Sequence
  Description of Artificial Sequence: Synthetic oligonucleotide
ugcgcucaccaauguggga

SEQ ID NO: 771983 - RNA, 19 nt, Artificial Sequence
  Description of Artificial Sequence: Synthetic oligonucleotide
gacaacuuucggagaccug

SEQ ID NO: 771984 - RNA, 19 nt, Artificial Sequence
  Description of Artificial Sequence: Synthetic oligonucleotide
guaccgucugggaagccac

SEQ ID NO: 771985 - RNA, 19 nt, Artificial Sequence
  Description of Artificial Sequence: Synthetic oligonucleotide
ccgccugucaaugggaugc

SEQ ID NO: 771986 - RNA, 19 nt, Artificial Sequence
  Description of Artificial Sequence: Synthetic oligonucleotide
aagggcucugucgccugug

SEQ ID NO: 771987 - RNA, 19 nt, Artificial Sequence
  Description of Artificial Sequence: Synthetic oligonucleotide
ugacgacgaugcagugggc

SEQ ID NO: 771988 - RNA, 19 nt, Artificial Sequence
  Description of Artificial Sequence: Synthetic oligonucleotide
gggcauuggcuucucgggc

SEQ ID NO: 771989 - RNA, 19 nt, Artificial Sequence
  Description of Artificial Sequence: Synthetic oligonucleotide
gcacuagguauccaaaggu

SEQ ID NO: 771990 - RNA, 19 nt, Artificial Sequence
  Description of Artificial Sequence: Synthetic oligonucleotide
cugagccuaugagacucag

SEQ ID NO: 771991 - RNA, 19 nt, Artificial Sequence
  Description of Artificial Sequence: Synthetic oligonucleotide
acuagcugcccugucuuuu

SEQ ID NO: 771992 - RNA, 19 nt, Artificial Sequence
  Description of Artificial Sequence: Synthetic oligonucleotide
cagcgugaggcguggggac

SEQ ID NO: 771993 - RNA, 19 nt, Artificial Sequence
  Description of Artificial Sequence: Synthetic oligonucleotide
uacuacccucucagacucu

SEQ ID NO: 771994 - RNA, 19 nt, Artificial Sequence
  Description of Artificial Sequence: Synthetic oligonucleotide
gaggaagcuugagccgagc

SEQ ID NO: 771995 - RNA, 19 nt, Artificial Sequence
  Description of Artificial Sequence: Synthetic oligonucleotide
uagggccucgucugcuacu

SEQ ID NO: 771996 - RNA, 19 nt, Artificial Sequence
  Description of Artificial Sequence: Synthetic oligonucleotide
gaaacggacuaccccgaau

SEQ ID NO: 771997 - RNA, 19 nt, Artificial Sequence
  Description of Artificial Sequence: Synthetic oligonucleotide
acaagggagccccgaugaa

SEQ ID NO: 771998 - RNA, 19 nt, Artificial Sequence
  Description of Artificial Sequence: Synthetic oligonucleotide
ccaccguggucuuuccucc

SEQ ID NO: 771999 - RNA, 19 nt, Artificial Sequence
  Description of Artificial Sequence: Synthetic oligonucleotide
uggcggccgagaacgucug

SEQ ID NO: 772000 - RNA, 19 nt, Artificial Sequence
  Description of Artificial Sequence: Synthetic oligonucleotide
acccagccuggaaacggac

SEQ ID NO: 772001 - RNA, 19 nt, Artificial Sequence
  Description of Artificial Sequence: Synthetic oligonucleotide
gacaagcuugaaggaugac

SEQ ID NO: 772002 - RNA, 19 nt, Artificial Sequence
  Description of Artificial Sequence: Synthetic oligonucleotide
agcuugagccgagccgguc

SEQ ID NO: 772003 - RNA, 19 nt, Artificial Sequence
  Description of Artificial Sequence: Synthetic oligonucleotide
cugucgccuguggagcucc

SEQ ID NO: 772004 - RNA, 19 nt, Artificial Sequence
  Description of Artificial Sequence: Synthetic oligonucleotide
gguguggcgacagccagca

SEQ ID NO: 772005 - RNA, 19 nt, Artificial Sequence
  Description of Artificial Sequence: Synthetic oligonucleotide
caccguggucuuuccuccc

SEQ ID NO: 772006 - RNA, 19 nt, Artificial Sequence
  Description of Artificial Sequence: Synthetic oligonucleotide
ccggacaaggcugugcccc

SEQ ID NO: 772007 - RNA, 19 nt, Artificial Sequence
  Description of Artificial Sequence: Synthetic oligonucleotide
cugcauacagcccaccuuu

SEQ ID NO: 772008 - RNA, 19 nt, Artificial Sequence
  Description of Artificial Sequence: Synthetic oligonucleotide
cacgugcgauggcuaggcg

SEQ ID NO: 772009 - RNA, 19 nt, Artificial Sequence
  Description of Artificial Sequence: Synthetic oligonucleotide
accgucugggaagccacca

SEQ ID NO: 772010 - RNA, 19 nt, Artificial Sequence
  Description of Artificial Sequence: Synthetic oligonucleotide
ccccguucaccaaccacgg

SEQ ID NO: 772011 - RNA, 19 nt, Artificial Sequence
  Description of Artificial Sequence: Synthetic oligonucleotide
gcuagggaugcagcagccg

SEQ ID NO: 772012 - RNA, 19 nt, Artificial Sequence
  Description of Artificial Sequence: Synthetic oligonucleotide
gugaucgcagcugggccac

SEQ ID NO: 772013 - RNA, 19 nt, Artificial Sequence
  Description of Artificial Sequence: Synthetic oligonucleotide
ggucaugcccauccaaugu

SEQ ID NO: 772014 - RNA, 19 nt, Artificial Sequence
  Description of Artificial Sequence: Synthetic oligonucleotide
gggagccccgaugaauagg

SEQ ID NO: 772015 - RNA, 19 nt, Artificial Sequence
  Description of Artificial Sequence: Synthetic oligonucleotide
agcguuccucuucccucug

SEQ ID NO: 772016 - RNA, 19 nt, Artificial Sequence
  Description of Artificial Sequence: Synthetic oligonucleotide
cucaaagacacgggcaccu

SEQ ID NO: 772017 - RNA, 19 nt, Artificial Sequence
  Description of Artificial Sequence: Synthetic oligonucleotide
guccacggaccaccugacc

SEQ ID NO: 772018 - RNA, 19 nt, Artificial Sequence
  Description of Artificial Sequence: Synthetic oligonucleotide
gcucugucgccuguggagc

SEQ ID NO: 772019 - RNA, 19 nt, Artificial Sequence
  Description of Artificial Sequence: Synthetic oligonucleotide
gcggccgagaacgucuggg

SEQ ID NO: 772020 - RNA, 19 nt, Artificial Sequence
  Description of Artificial Sequence: Synthetic oligonucleotide
cugggagcgcaggggauug

SEQ ID NO: 772021 - RNA, 19 nt, Artificial Sequence
  Description of Artificial Sequence: Synthetic oligonucleotide
cuacuccuguugcccuggc

SEQ ID NO: 772022 - RNA, 19 nt, Artificial Sequence
  Description of Artificial Sequence: Synthetic oligonucleotide
uccugacacuggcgagaca

SEQ ID NO: 772023 - RNA, 19 nt, Artificial Sequence
  Description of Artificial Sequence: Synthetic oligonucleotide
ccgacccgaaauaagugca

SEQ ID NO: 772024 - RNA, 19 nt, Artificial Sequence
  Description of Artificial Sequence: Synthetic oligonucleotide
ccagacuaccaaucaccug

SEQ ID NO: 772025 - RNA, 19 nt, Artificial Sequence
  Description of Artificial Sequence: Synthetic oligonucleotide
caguuucccgaaucggaua

SEQ ID NO: 772026 - RNA, 19 nt, Artificial Sequence
  Description of Artificial Sequence: Synthetic oligonucleotide
accccgaauuccgacccga

SEQ ID NO: 772027 - RNA, 19 nt, Artificial Sequence
  Description of Artificial Sequence: Synthetic oligonucleotide
ugcgaccagcgcuggcccu

SEQ ID NO: 772028 - RNA, 19 nt, Artificial Sequence
  Description of Artificial Sequence: Synthetic oligonucleotide
ccgaaucggauauucucca

SEQ ID NO: 772029 - RNA, 19 nt, Artificial Sequence
  Description of Artificial Sequence: Synthetic oligonucleotide
ugcagcgacccagccugga

SEQ ID NO: 772030 - RNA, 19 nt, Artificial Sequence
  Description of Artificial Sequence: Synthetic oligonucleotide
gcacgugcgauggcuaggc

SEQ ID NO: 772031 - RNA, 19 nt, Artificial Sequence
  Description of Artificial Sequence: Synthetic oligonucleotide
gguauccaaaggucaucaa

SEQ ID NO: 772032 - RNA, 19 nt, Artificial Sequence
  Description of Artificial Sequence: Synthetic oligonucleotide
aagcuugagccgagccggu

SEQ ID NO: 772033 - RNA, 19 nt, Artificial Sequence
  Description of Artificial Sequence: Synthetic oligonucleotide
acugagccuaugagacuca

SEQ ID NO: 772034 - RNA, 19 nt, Artificial Sequence
  Description of Artificial Sequence: Synthetic oligonucleotide
cgguauuguagcccucagg

SEQ ID NO: 772035 - RNA, 19 nt, Artificial Sequence
  Description of Artificial Sequence: Synthetic oligonucleotide
cuggcggccgagaacgucu

SEQ ID NO: 772036 - RNA, 19 nt, Artificial Sequence
  Description of Artificial Sequence: Synthetic oligonucleotide
guacugagccggugggcaa

SEQ ID NO: 772037 - RNA, 19 nt, Artificial Sequence
  Description of Artificial Sequence: Synthetic oligonucleotide
ggcacgugcgauggcuagg

SEQ ID NO: 772038 - RNA, 19 nt, Artificial Sequence
  Description of Artificial Sequence: Synthetic oligonucleotide
gcaugauuccagcucuucu

SEQ ID NO: 772039 - RNA, 19 nt, Artificial Sequence
  Description of Artificial Sequence: Synthetic oligonucleotide
ugucgccuguggagcucca

SEQ ID NO: 772040 - RNA, 19 nt, Artificial Sequence
  Description of Artificial Sequence: Synthetic oligonucleotide
ucggagaccugagcccauc

SEQ ID NO: 772041 - RNA, 19 nt, Artificial Sequence
  Description of Artificial Sequence: Synthetic oligonucleotide
ggccaugcgcucaccaaug

SEQ ID NO: 772042 - RNA, 19 nt, Artificial Sequence
  Description of Artificial Sequence: Synthetic oligonucleotide
uuguaccgucugggaagcc

SEQ ID NO: 772043 - RNA, 19 nt, Artificial Sequence
  Description of Artificial Sequence: Synthetic oligonucleotide
cguccgaacauugccuagg

SEQ ID NO: 772044 - RNA, 19 nt, Artificial Sequence
  Description of Artificial Sequence: Synthetic oligonucleotide
gccaugacgacgaugcagu

SEQ ID NO: 772045 - RNA, 19 nt, Artificial Sequence
  Description of Artificial Sequence: Synthetic oligonucleotide
caccguccgaacauugccu

SEQ ID NO: 772046 - RNA, 19 nt, Artificial Sequence
  Description of Artificial Sequence: Synthetic oligonucleotide
ccguucaccaaccacggua

SEQ ID NO: 772047 - RNA, 19 nt, Artificial Sequence
  Description of Artificial Sequence: Synthetic oligonucleotide
ucucacagacuuggccauu

SEQ ID NO: 772048 - RNA, 19 nt, Artificial Sequence
  Description of Artificial Sequence: Synthetic oligonucleotide
gcguggggacagcauagac

SEQ ID NO: 772049 - RNA, 19 nt, Artificial Sequence
  Description of Artificial Sequence: Synthetic oligonucleotide
cgucugcuacuccuguugc

SEQ ID NO: 772050 - RNA, 19 nt, Artificial Sequence
  Description of Artificial Sequence: Synthetic oligonucleotide
cagggacaccagacuacca

SEQ ID NO: 772051 - RNA, 19 nt, Artificial Sequence
  Description of Artificial Sequence: Synthetic oligonucleotide
ccggugggcaaugauuaac

SEQ ID NO: 772052 - RNA, 19 nt, Artificial Sequence
  Description of Artificial Sequence: Synthetic oligonucleotide
gccuggaaacggacuaccc

SEQ ID NO: 772053 - RNA, 19 nt, Artificial Sequence
  Description of Artificial Sequence: Synthetic oligonucleotide
gcgagacaacuuucggaga

SEQ ID NO: 772054 - RNA, 19 nt, Artificial Sequence
  Description of Artificial Sequence: Synthetic oligonucleotide
ugggagcgcaggggauugc

SEQ ID NO: 772055 - RNA, 19 nt, Artificial Sequence
  Description of Artificial Sequence: Synthetic oligonucleotide
cugcaucuagugcacuggu

SEQ ID NO: 772056 - RNA, 19 nt, Artificial Sequence
  Description of Artificial Sequence: Synthetic oligonucleotide
cccagacugaugcuuggca

SEQ ID NO: 772057 - RNA, 19 nt, Artificial Sequence
  Description of Artificial Sequence: Synthetic oligonucleotide
gucgccuguggagcuccag

SEQ ID NO: 772058 - RNA, 19 nt, Artificial Sequence
  Description of Artificial Sequence: Synthetic oligonucleotide
gcucaccaaugugggacag

SEQ ID NO: 772059 - RNA, 19 nt, Artificial Sequence
  Description of Artificial Sequence: Synthetic oligonucleotide
cgacccagccuggaaacgg

SEQ ID NO: 772060 - RNA, 19 nt, Artificial Sequence
  Description of Artificial Sequence: Synthetic oligonucleotide
ccgaauuccgacccgaaau

SEQ ID NO: 772061 - RNA, 19 nt, Artificial Sequence
  Description of Artificial Sequence: Synthetic oligonucleotide
ggaaacggacuaccccgaa

SEQ ID NO: 772062 - RNA, 19 nt, Artificial Sequence
  Description of Artificial Sequence: Synthetic oligonucleotide
cgcaccguccgaacauugc

SEQ ID NO: 772063 - RNA, 19 nt, Artificial Sequence
  Description of Artificial Sequence: Synthetic oligonucleotide
gcagcacuagguauccaaa

SEQ ID NO: 772064 - RNA, 19 nt, Artificial Sequence
  Description of Artificial Sequence: Synthetic oligonucleotide
ugaucgcagcugggccacc

SEQ ID NO: 772065 - RNA, 19 nt, Artificial Sequence
  Description of Artificial Sequence: Synthetic oligonucleotide
ccguccgaacauugccuag

SEQ ID NO: 772066 - RNA, 19 nt, Artificial Sequence
  Description of Artificial Sequence: Synthetic oligonucleotide
acgggcaccugcacucagu

SEQ ID NO: 772067 - RNA, 19 nt, Artificial Sequence
  Description of Artificial Sequence: Synthetic oligonucleotide
ccaugacgacgaugcagug

SEQ ID NO: 772068 - RNA, 19 nt, Artificial Sequence
  Description of Artificial Sequence: Synthetic oligonucleotide
caucgguagucaagcggcu

SEQ ID NO: 772069 - RNA, 19 nt, Artificial Sequence
  Description of Artificial Sequence: Synthetic oligonucleotide
gccgccugucaaugggaug

SEQ ID NO: 772070 - RNA, 19 nt, Artificial Sequence
  Description of Artificial Sequence: Synthetic oligonucleotide
gcgacccagccuggaaacg

SEQ ID NO: 772071 - RNA, 19 nt, Artificial Sequence
  Description of Artificial Sequence: Synthetic oligonucleotide
gcugcgcagucccugggaa

SEQ ID NO: 772072 - RNA, 19 nt, Artificial Sequence
  Description of Artificial Sequence: Synthetic oligonucleotide
caaugucaccaugccagcu

SEQ ID NO: 772073 - RNA, 19 nt, Artificial Sequence
  Description of Artificial Sequence: Synthetic oligonucleotide
cugcuacuccuguugcccu

SEQ ID NO: 772074 - RNA, 19 nt, Artificial Sequence
  Description of Artificial Sequence: Synthetic oligonucleotide
ccauacaguugaaagcgau

SEQ ID NO: 772075 - RNA, 19 nt, Artificial Sequence
  Description of Artificial Sequence: Synthetic oligonucleotide
acauugccuagggccucgu

SEQ ID NO: 772076 - RNA, 19 nt, Artificial Sequence
  Description of Artificial Sequence: Synthetic oligonucleotide
ccgucugggaagccaccag

SEQ ID NO: 772077 - RNA, 19 nt, Artificial Sequence
  Description of Artificial Sequence: Synthetic oligonucleotide
cgaacauugccuagggccu

SEQ ID NO: 772078 - RNA, 19 nt, Artificial Sequence
  Description of Artificial Sequence: Synthetic oligonucleotide
gacgaugcagugggcugcu

SEQ ID NO: 772079 - RNA, 19 nt, Artificial Sequence
  Description of Artificial Sequence: Synthetic oligonucleotide
cccgaaauaagugcaccaa

SEQ ID NO: 772080 - RNA, 19 nt, Artificial Sequence
  Description of Artificial Sequence: Synthetic oligonucleotide
gccgagccggucaucugag

SEQ ID NO: 772081 - RNA, 19 nt, Artificial Sequence
  Description of Artificial Sequence: Synthetic oligonucleotide
ggcggccgagaacgucugg

SEQ ID NO: 772082 - RNA, 19 nt, Artificial Sequence
  Description of Artificial Sequence: Synthetic oligonucleotide
ccccgaugaauagggugcc

SEQ ID NO: 772083 - RNA, 19 nt, Artificial Sequence
  Description of Artificial Sequence: Synthetic oligonucleotide
cagagaggcuggccauaga

SEQ ID NO: 772084 - RNA, 19 nt, Artificial Sequence
  Description of Artificial Sequence: Synthetic oligonucleotide
guguggcgacagccagcag

SEQ ID NO: 772085 - RNA, 19 nt, Artificial Sequence
  Description of Artificial Sequence: Synthetic oligonucleotide
gcgugaggcguggggacag

SEQ ID NO: 772086 - RNA, 19 nt, Artificial Sequence
  Description of Artificial Sequence: Synthetic oligonucleotide
ccaaggugagcccggagcu

SEQ ID NO: 772087 - RNA, 19 nt, Artificial Sequence
  Description of Artificial Sequence: Synthetic oligonucleotide
uugccggagcagggagcug

SEQ ID NO: 772088 - RNA, 19 nt, Artificial Sequence
  Description of Artificial Sequence: Synthetic oligonucleotide
cgaauuccgacccgaaaua

SEQ ID NO: 772089 - RNA, 19 nt, Artificial Sequence
  Description of Artificial Sequence: Synthetic oligonucleotide
ccaugaugguuguuccaaa

SEQ ID NO: 772090 - RNA, 19 nt, Artificial Sequence
  Description of Artificial Sequence: Synthetic oligonucleotide
ccaguuucccgaaucggau

SEQ ID NO: 772091 - RNA, 19 nt, Artificial Sequence
  Description of Artificial Sequence: Synthetic oligonucleotide
gggagcgcaggggauugca

SEQ ID NO: 772092 - RNA, 19 nt, Artificial Sequence
  Description of Artificial Sequence: Synthetic oligonucleotide
agggcacgugcgauggcua

SEQ ID NO: 772093 - RNA, 19 nt, Artificial Sequence
  Description of Artificial Sequence: Synthetic oligonucleotide
gugccccguucaccaacca

SEQ ID NO: 772094 - RNA, 19 nt, Artificial Sequence
  Description of Artificial Sequence: Synthetic oligonucleotide
gugcgauggcuaggcgcug

SEQ ID NO: 772095 - RNA, 19 nt, Artificial Sequence
  Description of Artificial Sequence: Synthetic oligonucleotide
gcucugcauacagcccacc

SEQ ID NO: 772096 - RNA, 19 nt, Artificial Sequence
  Description of Artificial Sequence: Synthetic oligonucleotide
ccgcaccguccgaacauug

SEQ ID NO: 772097 - RNA, 19 nt, Artificial Sequence
  Description of Artificial Sequence: Synthetic oligonucleotide
cccgaugaauagggugccc

SEQ ID NO: 772098 - RNA, 19 nt, Artificial Sequence
  Description of Artificial Sequence: Synthetic oligonucleotide
gcgaccagcgcuggcccug

SEQ ID NO: 772099 - RNA, 19 nt, Artificial Sequence
  Description of Artificial Sequence: Synthetic oligonucleotide
ggacuaccccgaauuccga

SEQ ID NO: 772100 - RNA, 19 nt, Artificial Sequence
  Description of Artificial Sequence: Synthetic oligonucleotide
cgaugaauagggugcccaa

SEQ ID NO: 772101 - RNA, 19 nt, Artificial Sequence
  Description of Artificial Sequence: Synthetic oligonucleotide
cccgaauuccgacccgaaa

SEQ ID NO: 772102 - RNA, 19 nt, Artificial Sequence
  Description of Artificial Sequence: Synthetic oligonucleotide
cguucaccaaccacgguau

SEQ ID NO: 772103 - RNA, 19 nt, Artificial Sequence
  Description of Artificial Sequence: Synthetic oligonucleotide
ccauagaccuuuguaccgu

SEQ ID NO: 772104 - RNA, 19 nt, Artificial Sequence
  Description of Artificial Sequence: Synthetic oligonucleotide
ccuggcugaugaaaccuau

SEQ ID NO: 772105 - RNA, 19 nt, Artificial Sequence
  Description of Artificial Sequence: Synthetic oligonucleotide
gccggugggcaaugauuaa

SEQ ID NO: 772106 - RNA, 19 nt, Artificial Sequence
  Description of Artificial Sequence: Synthetic oligonucleotide
cugagccggugggcaauga

SEQ ID NO: 772107 - RNA, 19 nt, Artificial Sequence
  Description of Artificial Sequence: Synthetic oligonucleotide
gcuggccauagaccuuugu

SEQ ID NO: 772108 - RNA, 19 nt, Artificial Sequence
  Description of Artificial Sequence: Synthetic oligonucleotide
gagccccgaugaauagggu

SEQ ID NO: 772109 - RNA, 19 nt, Artificial Sequence
  Description of Artificial Sequence: Synthetic oligonucleotide
gcgcagucccugggaaaug

SEQ ID NO: 772110 - RNA, 19 nt, Artificial Sequence
  Description of Artificial Sequence: Synthetic oligonucleotide
ccugaccaaacaggacaga

SEQ ID NO: 772111 - RNA, 19 nt, Artificial Sequence
  Description of Artificial Sequence: Synthetic oligonucleotide
ccuggcggccgagaacguc

SEQ ID NO: 772112 - RNA, 19 nt, Artificial Sequence
  Description of Artificial Sequence: Synthetic oligonucleotide
guuucccgaaucggauauu

SEQ ID NO: 772113 - RNA, 19 nt, Artificial Sequence
  Description of Artificial Sequence: Synthetic oligonucleotide
cggauaagcucugcauaca

SEQ ID NO: 772114 - RNA, 19 nt, Artificial Sequence
  Description of Artificial Sequence: Synthetic oligonucleotide
ccgcauguccauggccaug

SEQ ID NO: 772115 - RNA, 19 nt, Artificial Sequence
  Description of Artificial Sequence: Synthetic oligonucleotide
accuggcggccgagaacgu

SEQ ID NO: 772116 - RNA, 19 nt, Artificial Sequence
  Description of Artificial Sequence: Synthetic oligonucleotide
cagcaugauuccagcucuu

SEQ ID NO: 772117 - RNA, 19 nt, Artificial Sequence
  Description of Artificial Sequence: Synthetic oligonucleotide
cccuuggaacaaggcgaug

SEQ ID NO: 772118 - RNA, 19 nt, Artificial Sequence
  Description of Artificial Sequence: Synthetic oligonucleotide
gcgcaggggauugcagcga

SEQ ID NO: 772119 - RNA, 19 nt, Artificial Sequence
  Description of Artificial Sequence: Synthetic oligonucleotide
gggcaaugauuaacacggu

SEQ ID NO: 772120 - RNA, 19 nt, Artificial Sequence
  Description of Artificial Sequence: Synthetic oligonucleotide
ccgccuggaggaagcuuga

SEQ ID NO: 772121 - RNA, 19 nt, Artificial Sequence
  Description of Artificial Sequence: Synthetic oligonucleotide
gcccgcaccguccgaacau

SEQ ID NO: 772122 - RNA, 19 nt, Artificial Sequence
  Description of Artificial Sequence: Synthetic oligonucleotide
gcccuuggaacaaggcgau

SEQ ID NO: 772123 - RNA, 19 nt, Artificial Sequence
  Description of Artificial Sequence: Synthetic oligonucleotide
gcgauggcuaggcgcugcu

SEQ ID NO: 772124 - RNA, 19 nt, Artificial Sequence
  Description of Artificial Sequence: Synthetic oligonucleotide
cggagaccugagcccauca

SEQ ID NO: 772125 - RNA, 19 nt, Artificial Sequence
  Description of Artificial Sequence: Synthetic oligonucleotide
ccccgaauuccgacccgaa

SEQ ID NO: 772126 - RNA, 19 nt, Artificial Sequence
  Description of Artificial Sequence: Synthetic oligonucleotide
cgugaggcguggggacagc

SEQ ID NO: 772127 - RNA, 19 nt, Artificial Sequence
  Description of Artificial Sequence: Synthetic oligonucleotide
gcgauguuggagagcccuu

SEQ ID NO: 772128 - RNA, 19 nt, Artificial Sequence
  Description of Artificial Sequence: Synthetic oligonucleotide
cgagaacgucugggagcgc

SEQ ID NO: 772129 - RNA, 19 nt, Artificial Sequence
  Description of Artificial Sequence: Synthetic oligonucleotide
cccgcaccguccgaacauu

SEQ ID NO: 772130 - RNA, 19 nt, Artificial Sequence
  Description of Artificial Sequence: Synthetic oligonucleotide
aagaugugaacguauaugc

SEQ ID NO: 772131 - RNA, 19 nt, Artificial Sequence
  Description of Artificial Sequence: Synthetic oligonucleotide
ucuaaaguaaaguaaaucu

SEQ ID NO: 772132 - RNA, 19 nt, Artificial Sequence
  Description of Artificial Sequence: Synthetic oligonucleotide
aaugauucauaaucgaauc

SEQ ID NO: 772133 - RNA, 19 nt, Artificial Sequence
  Description of Artificial Sequence: Synthetic oligonucleotide
aauuguaggauuugucacc

SEQ ID NO: 772134 - RNA, 19 nt, Artificial Sequence
  Description of Artificial Sequence: Synthetic oligonucleotide
auaaccaucgcaucaaagg

SEQ ID NO: 772135 - RNA, 19 nt, Artificial Sequence
  Description of Artificial Sequence: Synthetic oligonucleotide
uaaguaaccaaccagacuu

SEQ ID NO: 772136 - RNA, 19 nt, Artificial Sequence
  Description of Artificial Sequence: Synthetic oligonucleotide
aacauaaugggcaauguuc

SEQ ID NO: 772137 - RNA, 19 nt, Artificial Sequence
  Description of Artificial Sequence: Synthetic oligonucleotide
aucaagaccaaucagauau

SEQ ID NO: 772138 - RNA, 19 nt, Artificial Sequence
  Description of Artificial Sequence: Synthetic oligonucleotide
uuuugaaucagucuccgga

SEQ ID NO: 772139 - RNA, 19 nt, Artificial Sequence
  Description of Artificial Sequence: Synthetic oligonucleotide
ucugccucgacacagcacg

SEQ ID NO: 772140 - RNA, 19 nt, Artificial Sequence
  Description of Artificial Sequence: Synthetic oligonucleotide
aaaguucacauacagcugu

SEQ ID NO: 772141 - RNA, 19 nt, Artificial Sequence
  Description of Artificial Sequence: Synthetic oligonucleotide
agguaggcgacauuaagcc

SEQ ID NO: 772142 - RNA, 19 nt, Artificial Sequence
  Description of Artificial Sequence: Synthetic oligonucleotide
uaaccaucgcaucaaaggg

SEQ ID NO: 772143 - RNA, 19 nt, Artificial Sequence
  Description of Artificial Sequence: Synthetic oligonucleotide
cauauuaccaucuacucuc

SEQ ID NO: 772144 - RNA, 19 nt, Artificial Sequence
  Description of Artificial Sequence: Synthetic oligonucleotide
ugucauagcuguuucauag

SEQ ID NO: 772145 - RNA, 19 nt, Artificial Sequence
  Description of Artificial Sequence: Synthetic oligonucleotide
aacagcagccaaauaaucc

SEQ ID NO: 772146 - RNA, 19 nt, Artificial Sequence
  Description of Artificial Sequence: Synthetic oligonucleotide
ugaucaaacauccuucaug

SEQ ID NO: 772147 - RNA, 19 nt, Artificial Sequence
  Description of Artificial Sequence: Synthetic oligonucleotide
ucauaaucgaaucucuagc

SEQ ID NO: 772148 - RNA, 19 nt, Artificial Sequence
  Description of Artificial Sequence: Synthetic oligonucleotide
ugucauauuaccaucuacu

SEQ ID NO: 772149 - RNA, 19 nt, Artificial Sequence
  Description of Artificial Sequence: Synthetic oligonucleotide
aaaguaaaucuagagagca

SEQ ID NO: 772150 - RNA, 19 nt, Artificial Sequence
  Description of Artificial Sequence: Synthetic oligonucleotide
uucauaaucgaaucucuag

SEQ ID NO: 772151 - RNA, 19 nt, Artificial Sequence
  Description of Artificial Sequence: Synthetic oligonucleotide
uaauccauuagcaaaggaa

SEQ ID NO: 772152 - RNA, 19 nt, Artificial Sequence
  Description of Artificial Sequence: Synthetic oligonucleotide
uauaagucaacauuccuuc

SEQ ID NO: 772153 - RNA, 19 nt, Artificial Sequence
  Description of Artificial Sequence: Synthetic oligonucleotide
aauaugcgagcugaagugc

SEQ ID NO: 772154 - RNA, 19 nt, Artificial Sequence
  Description of Artificial Sequence: Synthetic oligonucleotide
aagucaaguucucuggauc

SEQ ID NO: 772155 - RNA, 19 nt, Artificial Sequence
  Description of Artificial Sequence: Synthetic oligonucleotide
uaaccaaccagacuuguug

SEQ ID NO: 772156 - RNA, 19 nt, Artificial Sequence
  Description of Artificial Sequence: Synthetic oligonucleotide
aacccuuuuccauuugaac

SEQ ID NO: 772157 - RNA, 19 nt, Artificial Sequence
  Description of Artificial Sequence: Synthetic oligonucleotide
ugagaggauaaaauucccg

SEQ ID NO: 772158 - RNA, 19 nt, Artificial Sequence
  Description of Artificial Sequence: Synthetic oligonucleotide
uguaacaucuuuuggugcc

SEQ ID NO: 772159 - RNA, 19 nt, Artificial Sequence
  Description of Artificial Sequence: Synthetic oligonucleotide
uaaaauucccgccuccucc

SEQ ID NO: 772160 - RNA, 19 nt, Artificial Sequence
  Description of Artificial Sequence: Synthetic oligonucleotide
augguuuacugauucaagg

SEQ ID NO: 772161 - RNA, 19 nt, Artificial Sequence
  Description of Artificial Sequence: Synthetic oligonucleotide
uaauaugcgagcugaagug

SEQ ID NO: 772162 - RNA, 19 nt, Artificial Sequence
  Description of Artificial Sequence: Synthetic oligonucleotide
gaaggaacaggcaaugacg

SEQ ID NO: 772163 - RNA, 19 nt, Artificial Sequence
  Description of Artificial Sequence: Synthetic oligonucleotide
uggaauacgcacauccagg

SEQ ID NO: 772164 - RNA, 19 nt, Artificial Sequence
  Description of Artificial Sequence: Synthetic oligonucleotide
gaaucuugcagguagaaaa

SEQ ID NO: 772165 - RNA, 19 nt, Artificial Sequence
  Description of Artificial Sequence: Synthetic oligonucleotide
uuugcaaaugguuuacuga

SEQ ID NO: 772166 - RNA, 19 nt, Artificial Sequence
  Description of Artificial Sequence: Synthetic oligonucleotide
uuaacaagucuccuauaag

SEQ ID NO: 772167 - RNA, 19 nt, Artificial Sequence
  Description of Artificial Sequence: Synthetic oligonucleotide
ugcuaugagcaaaagaccu

SEQ ID NO: 772168 - RNA, 19 nt, Artificial Sequence
  Description of Artificial Sequence: Synthetic oligonucleotide
ucguaaguaaccaaccaga

SEQ ID NO: 772169 - RNA, 19 nt, Artificial Sequence
  Description of Artificial Sequence: Synthetic oligonucleotide
uuucgaagaucucagaaua

SEQ ID NO: 772170 - RNA, 19 nt, Artificial Sequence
  Description of Artificial Sequence: Synthetic oligonucleotide
uucucaaaagcuuguaaca

SEQ ID NO: 772171 - RNA, 19 nt, Artificial Sequence
  Description of Artificial Sequence: Synthetic oligonucleotide
ugcagcauaucauggaaag

SEQ ID NO: 772172 - RNA, 19 nt, Artificial Sequence
  Description of Artificial Sequence: Synthetic oligonucleotide
uuuugcuaugagcaaaaga

SEQ ID NO: 772173 - RNA, 19 nt, Artificial Sequence
  Description of Artificial Sequence: Synthetic oligonucleotide
cuucucaaaagcuuguaac

SEQ ID NO: 772174 - RNA, 19 nt, Artificial Sequence
  Description of Artificial Sequence: Synthetic oligonucleotide
auaaugggcaauguucacc

SEQ ID NO: 772175 - RNA, 19 nt, Artificial Sequence
  Description of Artificial Sequence: Synthetic oligonucleotide
aacugagugccuuccauug

SEQ ID NO: 772176 - RNA, 19 nt, Artificial Sequence
  Description of Artificial Sequence: Synthetic oligonucleotide
aaaugauucauaaucgaau

SEQ ID NO: 772177 - RNA, 19 nt, Artificial Sequence
  Description of Artificial Sequence: Synthetic oligonucleotide
uguagauauaugucaguug

SEQ ID NO: 772178 - RNA, 19 nt, Artificial Sequence
  Description of Artificial Sequence: Synthetic oligonucleotide
aaucuugcagguagaaaac

SEQ ID NO: 772179 - RNA, 19 nt, Artificial Sequence
  Description of Artificial Sequence: Synthetic oligonucleotide
ugaagugcaagcugaauaa

SEQ ID NO: 772180 - RNA, 19 nt, Artificial Sequence
  Description of Artificial Sequence: Synthetic oligonucleotide
ggaauacacaaauaaacug

SEQ ID NO: 772181 - RNA, 19 nt, Artificial Sequence
  Description of Artificial Sequence: Synthetic oligonucleotide
ucaugcacuacaucaaaga

SEQ ID NO: 772182 - RNA, 19 nt, Artificial Sequence
  Description of Artificial Sequence: Synthetic oligonucleotide
aagacugguagagggauuc

SEQ ID NO: 772183 - RNA, 19 nt, Artificial Sequence
  Description of Artificial Sequence: Synthetic oligonucleotide
agcaagaagcauuucgaag

SEQ ID NO: 772184 - RNA, 19 nt, Artificial Sequence
  Description of Artificial Sequence: Synthetic oligonucleotide
ucagauauucccuagccuu

SEQ ID NO: 772185 - RNA, 19 nt, Artificial Sequence
  Description of Artificial Sequence: Synthetic oligonucleotide
agcgguguucaucaacugc

SEQ ID NO: 772186 - RNA, 19 nt, Artificial Sequence
  Description of Artificial Sequence: Synthetic oligonucleotide
auauucccuagccuuugcc

SEQ ID NO: 772187 - RNA, 19 nt, Artificial Sequence
  Description of Artificial Sequence: Synthetic oligonucleotide
auuguguaccaugggaacc

SEQ ID NO: 772188 - RNA, 19 nt, Artificial Sequence
  Description of Artificial Sequence: Synthetic oligonucleotide
gauauaugucaguugucug

SEQ ID NO: 772189 - RNA, 19 nt, Artificial Sequence
  Description of Artificial Sequence: Synthetic oligonucleotide
uauaugucaguugucugag

SEQ ID NO: 772190 - RNA, 19 nt, Artificial Sequence
  Description of Artificial Sequence: Synthetic oligonucleotide
gaucagaugccccuuugag

SEQ ID NO: 772191 - RNA, 19 nt, Artificial Sequence
  Description of Artificial Sequence: Synthetic oligonucleotide
uccuauaagucaacauucc

SEQ ID NO: 772192 - RNA, 19 nt, Artificial Sequence
  Description of Artificial Sequence: Synthetic oligonucleotide
uuugccaaaagaugugaac

SEQ ID NO: 772193 - RNA, 19 nt, Artificial Sequence
  Description of Artificial Sequence: Synthetic oligonucleotide
agaagcauuucgaagaucu

SEQ ID NO: 772194 - RNA, 19 nt, Artificial Sequence
  Description of Artificial Sequence: Synthetic oligonucleotide
uuugaaucagucuccggac

SEQ ID NO: 772195 - RNA, 19 nt, Artificial Sequence
  Description of Artificial Sequence: Synthetic oligonucleotide
aaugguuuacugauucaag

SEQ ID NO: 772196 - RNA, 19 nt, Artificial Sequence
  Description of Artificial Sequence: Synthetic oligonucleotide
ucggaacugguucaugucc

SEQ ID NO: 772197 - RNA, 19 nt, Artificial Sequence
  Description of Artificial Sequence: Synthetic oligonucleotide
ugcaacgccuccuucuugg

SEQ ID NO: 772198 - RNA, 19 nt, Artificial Sequence
  Description of Artificial Sequence: Synthetic oligonucleotide
uauucccuagccuuugccc

SEQ ID NO: 772199 - RNA, 19 nt, Artificial Sequence
  Description of Artificial Sequence: Synthetic oligonucleotide
aucuguagaucagaugccc

SEQ ID NO: 772200 - RNA, 19 nt, Artificial Sequence
  Description of Artificial Sequence: Synthetic oligonucleotide
uacaugagcgaacagucuc

SEQ ID NO: 772201 - RNA, 19 nt, Artificial Sequence
  Description of Artificial Sequence: Synthetic oligonucleotide
aacguauaugcugcgaucu

SEQ ID NO: 772202 - RNA, 19 nt, Artificial Sequence
  Description of Artificial Sequence: Synthetic oligonucleotide
agauauaugucaguugucu

SEQ ID NO: 772203 - RNA, 19 nt, Artificial Sequence
  Description of Artificial Sequence: Synthetic oligonucleotide
auaaaauucccgccuccuc

SEQ ID NO: 772204 - RNA, 19 nt, Artificial Sequence
  Description of Artificial Sequence: Synthetic oligonucleotide
ugacggaagagaacccugg

SEQ ID NO: 772205 - RNA, 19 nt, Artificial Sequence
  Description of Artificial Sequence: Synthetic oligonucleotide
aaagucaucugaacuagcu

SEQ ID NO: 772206 - RNA, 19 nt, Artificial Sequence
  Description of Artificial Sequence: Synthetic oligonucleotide
ugagcgaacagucucuguc

SEQ ID NO: 772207 - RNA, 19 nt, Artificial Sequence
  Description of Artificial Sequence: Synthetic oligonucleotide
agaaggugacggucaaacc

SEQ ID NO: 772208 - RNA, 19 nt, Artificial Sequence
  Description of Artificial Sequence: Synthetic oligonucleotide
aaaugguuuacugauucaa

SEQ ID NO: 772209 - RNA, 19 nt, Artificial Sequence
  Description of Artificial Sequence: Synthetic oligonucleotide
acagcugugauggaauacg

SEQ ID NO: 772210 - RNA, 19 nt, Artificial Sequence
  Description of Artificial Sequence: Synthetic oligonucleotide
uuuggcuugguagauguca

SEQ ID NO: 772211 - RNA, 19 nt, Artificial Sequence
  Description of Artificial Sequence: Synthetic oligonucleotide
guagauauaugucaguugu

SEQ ID NO: 772212 - RNA, 19 nt, Artificial Sequence
  Description of Artificial Sequence: Synthetic oligonucleotide
aagcauuucgaagaucuca

SEQ ID NO: 772213 - RNA, 19 nt, Artificial Sequence
  Description of Artificial Sequence: Synthetic oligonucleotide
caaaagaccuagaagguga

SEQ ID NO: 772214 - RNA, 19 nt, Artificial Sequence
  Description of Artificial Sequence: Synthetic oligonucleotide
aaaauucccgccuccucca

SEQ ID NO: 772215 - RNA, 19 nt, Artificial Sequence
  Description of Artificial Sequence: Synthetic oligonucleotide
acaagucuccuauaaguca

SEQ ID NO: 772216 - RNA, 19 nt, Artificial Sequence
  Description of Artificial Sequence: Synthetic oligonucleotide
ucuagcaauuccuggaauc

SEQ ID NO: 772217 - RNA, 19 nt, Artificial Sequence
  Description of Artificial Sequence: Synthetic oligonucleotide
guaaaucuagagagcaugg

SEQ ID NO: 772218 - RNA, 19 nt, Artificial Sequence
  Description of Artificial Sequence: Synthetic oligonucleotide
ugguagaugucauuuagua

SEQ ID NO: 772219 - RNA, 19 nt, Artificial Sequence
  Description of Artificial Sequence: Synthetic oligonucleotide
cucguaaguaaccaaccag

SEQ ID NO: 772220 - RNA, 19 nt, Artificial Sequence
  Description of Artificial Sequence: Synthetic oligonucleotide
agaugagcgguguucauca

SEQ ID NO: 772221 - RNA, 19 nt, Artificial Sequence
  Description of Artificial Sequence: Synthetic oligonucleotide
auuucgaagaucucagaau

SEQ ID NO: 772222 - RNA, 19 nt, Artificial Sequence
  Description of Artificial Sequence: Synthetic oligonucleotide
ucgaaucucuagcaauucc

SEQ ID NO: 772223 - RNA, 19 nt, Artificial Sequence
  Description of Artificial Sequence: Synthetic oligonucleotide
ucucuaaagaugagcggug

SEQ ID NO: 772224 - RNA, 19 nt, Artificial Sequence
  Description of Artificial Sequence: Synthetic oligonucleotide
aagaugagcgguguucauc

SEQ ID NO: 772225 - RNA, 19 nt, Artificial Sequence
  Description of Artificial Sequence: Synthetic oligonucleotide
ugaacguauaugcugcgau

SEQ ID NO: 772226 - RNA, 19 nt, Artificial Sequence
  Description of Artificial Sequence: Synthetic oligonucleotide
aaccaaccagacuuguuga

SEQ ID NO: 772227 - RNA, 19 nt, Artificial Sequence
  Description of Artificial Sequence: Synthetic oligonucleotide
ggcaauguucaccauaacc

SEQ ID NO: 772228 - RNA, 19 nt, Artificial Sequence
  Description of Artificial Sequence: Synthetic oligonucleotide
ucaaguaauuucugaugca

SEQ ID NO: 772229 - RNA, 19 nt, Artificial Sequence
  Description of Artificial Sequence: Synthetic oligonucleotide
agucaaguucucuggauca

SEQ ID NO: 772230 - RNA, 19 nt, Artificial Sequence
  Description of Artificial Sequence: Synthetic oligonucleotide
cagggagugguauaucccg

SEQ ID NO: 772231 - RNA, 19 nt, Artificial Sequence
  Description of Artificial Sequence: Synthetic oligonucleotide
cgaucuguagaucagaugc

SEQ ID NO: 772232 - RNA, 19 nt, Artificial Sequence
  Description of Artificial Sequence: Synthetic oligonucleotide
uaaagaugagcgguguuca

SEQ ID NO: 772233 - RNA, 19 nt, Artificial Sequence
  Description of Artificial Sequence: Synthetic oligonucleotide
uuugucaccccaucguacu

SEQ ID NO: 772234 - RNA, 19 nt, Artificial Sequence
  Description of Artificial Sequence: Synthetic oligonucleotide
cauaaucgaaucucuagca

SEQ ID NO: 772235 - RNA, 19 nt, Artificial Sequence
  Description of Artificial Sequence: Synthetic oligonucleotide
cucuguaccaaguugaucu

SEQ ID NO: 772236 - RNA, 19 nt, Artificial Sequence
  Description of Artificial Sequence: Synthetic oligonucleotide
cauuaagccaccacucuuc

SEQ ID NO: 772237 - RNA, 19 nt, Artificial Sequence
  Description of Artificial Sequence: Synthetic oligonucleotide
agaauuauacuuccucuuu

SEQ ID NO: 772238 - RNA, 19 nt, Artificial Sequence
  Description of Artificial Sequence: Synthetic oligonucleotide
ugugaacguauaugcugcg

SEQ ID NO: 772239 - RNA, 19 nt, Artificial Sequence
  Description of Artificial Sequence: Synthetic oligonucleotide
cauaaccaucgcaucaaag

SEQ ID NO: 772240 - RNA, 19 nt, Artificial Sequence
  Description of Artificial Sequence: Synthetic oligonucleotide
gcaaugacggaagagaacc

SEQ ID NO: 772241 - RNA, 19 nt, Artificial Sequence
  Description of Artificial Sequence: Synthetic oligonucleotide
augauuccuuaagugaagg

SEQ ID NO: 772242 - RNA, 19 nt, Artificial Sequence
  Description of Artificial Sequence: Synthetic oligonucleotide
accacgacucccuggacuc

SEQ ID NO: 772243 - RNA, 19 nt, Artificial Sequence
  Description of Artificial Sequence: Synthetic oligonucleotide
ucaucaacauaaugggcaa

SEQ ID NO: 772244 - RNA, 19 nt, Artificial Sequence
  Description of Artificial Sequence: Synthetic oligonucleotide
gguacugaaauguucguuc

SEQ ID NO: 772245 - RNA, 19 nt, Artificial Sequence
  Description of Artificial Sequence: Synthetic oligonucleotide
auaaucgaaucucuagcaa

SEQ ID NO: 772246 - RNA, 19 nt, Artificial Sequence
  Description of Artificial Sequence: Synthetic oligonucleotide
uugaaucagucuccggaca

SEQ ID NO: 772247 - RNA, 19 nt, Artificial Sequence
  Description of Artificial Sequence: Synthetic oligonucleotide
ugcugcgaucuguagauca

SEQ ID NO: 772248 - RNA, 19 nt, Artificial Sequence
  Description of Artificial Sequence: Synthetic oligonucleotide
ugcccaucgaguucgcucc

SEQ ID NO: 772249 - RNA, 19 nt, Artificial Sequence
  Description of Artificial Sequence: Synthetic oligonucleotide
caguguucaaaauggggac

SEQ ID NO: 772250 - RNA, 19 nt, Artificial Sequence
  Description of Artificial Sequence: Synthetic oligonucleotide
gggacuugggcccacaaag

SEQ ID NO: 772251 - RNA, 19 nt, Artificial Sequence
  Description of Artificial Sequence: Synthetic oligonucleotide
cauuguguaccaugggaac

SEQ ID NO: 772252 - RNA, 19 nt, Artificial Sequence
  Description of Artificial Sequence: Synthetic oligonucleotide
agcaguguucaaaaugggg

SEQ ID NO: 772253 - RNA, 19 nt, Artificial Sequence
  Description of Artificial Sequence: Synthetic oligonucleotide
agcgaacagucucuguccg

SEQ ID NO: 772254 - RNA, 19 nt, Artificial Sequence
  Description of Artificial Sequence: Synthetic oligonucleotide
gagcgaacagucucugucc

SEQ ID NO: 772255 - RNA, 19 nt, Artificial Sequence
  Description of Artificial Sequence: Synthetic oligonucleotide
caauugauuuugccaauug

SEQ ID NO: 772256 - RNA, 19 nt, Artificial Sequence
  Description of Artificial Sequence: Synthetic oligonucleotide
agacgaaagcucugccucg

SEQ ID NO: 772257 - RNA, 19 nt, Artificial Sequence
  Description of Artificial Sequence: Synthetic oligonucleotide
aucagauauucccuagccu

SEQ ID NO: 772258 - RNA, 19 nt, Artificial Sequence
  Description of Artificial Sequence: Synthetic oligonucleotide
ugaaucagucuccggacau

SEQ ID NO: 772259 - RNA, 19 nt, Artificial Sequence
  Description of Artificial Sequence: Synthetic oligonucleotide
aaauucccgccuccuccac

SEQ ID NO: 772260 - RNA, 19 nt, Artificial Sequence
  Description of Artificial Sequence: Synthetic oligonucleotide
ucaguccuaaaaugauuca

SEQ ID NO: 772261 - RNA, 19 nt, Artificial Sequence
  Description of Artificial Sequence: Synthetic oligonucleotide
uuguagauauaugucaguu

SEQ ID NO: 772262 - RNA, 19 nt, Artificial Sequence
  Description of Artificial Sequence: Synthetic oligonucleotide
acucguaaguaaccaacca

SEQ ID NO: 772263 - RNA, 19 nt, Artificial Sequence
  Description of Artificial Sequence: Synthetic oligonucleotide
guaggcgacauuaagccac

SEQ ID NO: 772264 - RNA, 19 nt, Artificial Sequence
  Description of Artificial Sequence: Synthetic oligonucleotide
aaacaacauucggaacugg

SEQ ID NO: 772265 - RNA, 19 nt, Artificial Sequence
  Description of Artificial Sequence: Synthetic oligonucleotide
gaaaucaaauuguaggauu

SEQ ID NO: 772266 - RNA, 19 nt, Artificial Sequence
  Description of Artificial Sequence: Synthetic oligonucleotide
uguccggccaugguaaaag

SEQ ID NO: 772267 - RNA, 19 nt, Artificial Sequence
  Description of Artificial Sequence: Synthetic oligonucleotide
gacucguaaguaaccaacc

SEQ ID NO: 772268 - RNA, 19 nt, Artificial Sequence
  Description of Artificial Sequence: Synthetic oligonucleotide
ucgaguucgcuccucacua

SEQ ID NO: 772269 - RNA, 19 nt, Artificial Sequence
  Description of Artificial Sequence: Synthetic oligonucleotide
uuuagcccuuucaaguaau

SEQ ID NO: 772270 - RNA, 19 nt, Artificial Sequence
  Description of Artificial Sequence: Synthetic oligonucleotide
ucuaacugagugccuucca

SEQ ID NO: 772271 - RNA, 19 nt, Artificial Sequence
  Description of Artificial Sequence: Synthetic oligonucleotide
acuaguuaaugcugcuaca

SEQ ID NO: 772272 - RNA, 19 nt, Artificial Sequence
  Description of Artificial Sequence: Synthetic oligonucleotide
agaaaaguggguccucaaa

SEQ ID NO: 772273 - RNA, 19 nt, Artificial Sequence
  Description of Artificial Sequence: Synthetic oligonucleotide
aguugugccaaagaauuau

SEQ ID NO: 772274 - RNA, 19 nt, Artificial Sequence
  Description of Artificial Sequence: Synthetic oligonucleotide
uuguguaccaugggaacca

SEQ ID NO: 772275 - RNA, 19 nt, Artificial Sequence
  Description of Artificial Sequence: Synthetic oligonucleotide
caaagacgaaagcucugcc

SEQ ID NO: 772276 - RNA, 19 nt, Artificial Sequence
  Description of Artificial Sequence: Synthetic oligonucleotide
uagauauaugucaguuguc

SEQ ID NO: 772277 - RNA, 19 nt, Artificial Sequence
  Description of Artificial Sequence: Synthetic oligonucleotide
gaucuguagaucagaugcc

SEQ ID NO: 772278 - RNA, 19 nt, Artificial Sequence
  Description of Artificial Sequence: Synthetic oligonucleotide
gaacguauaugcugcgauc

SEQ ID NO: 772279 - RNA, 19 nt, Artificial Sequence
  Description of Artificial Sequence: Synthetic oligonucleotide
gcaaaugguuuacugauuc

SEQ ID NO: 772280 - RNA, 19 nt, Artificial Sequence
  Description of Artificial Sequence: Synthetic oligonucleotide
aaccaucgcaucaaaggga

SEQ ID NO: 772281 - RNA, 19 nt, Artificial Sequence
  Description of Artificial Sequence: Synthetic oligonucleotide
cagauuuauguacaggcaa

SEQ ID NO: 772282 - RNA, 19 nt, Artificial Sequence
  Description of Artificial Sequence: Synthetic oligonucleotide
accaucgcaucaaagggag

SEQ ID NO: 772283 - RNA, 19 nt, Artificial Sequence
  Description of Artificial Sequence: Synthetic oligonucleotide
aagagaacccugguacuga

SEQ ID NO: 772284 - RNA, 19 nt, Artificial Sequence
  Description of Artificial Sequence: Synthetic oligonucleotide
ugguauaucccggacuuuc

SEQ ID NO: 772285 - RNA, 19 nt, Artificial Sequence
  Description of Artificial Sequence: Synthetic oligonucleotide
aucgaaucucuagcaauuc

SEQ ID NO: 772286 - RNA, 19 nt, Artificial Sequence
  Description of Artificial Sequence: Synthetic oligonucleotide
cauaaugggcaauguucac

SEQ ID NO: 772287 - RNA, 19 nt, Artificial Sequence
  Description of Artificial Sequence: Synthetic oligonucleotide
ugcgaucuguagaucagau

SEQ ID NO: 772288 - RNA, 19 nt, Artificial Sequence
  Description of Artificial Sequence: Synthetic oligonucleotide
guaacaucuuuuggugccg

SEQ ID NO: 772289 - RNA, 19 nt, Artificial Sequence
  Description of Artificial Sequence: Synthetic oligonucleotide
aguugaucuguguggcucu

SEQ ID NO: 772290 - RNA, 19 nt, Artificial Sequence
  Description of Artificial Sequence: Synthetic oligonucleotide
ucucuguccggccauggua

SEQ ID NO: 772291 - RNA, 19 nt, Artificial Sequence
  Description of Artificial Sequence: Synthetic oligonucleotide
aucgaguucgcuccucacu

SEQ ID NO: 772292 - RNA, 19 nt, Artificial Sequence
  Description of Artificial Sequence: Synthetic oligonucleotide
acuugggcccacaaaguuc

SEQ ID NO: 772293 - RNA, 19 nt, Artificial Sequence
  Description of Artificial Sequence: Synthetic oligonucleotide
uucgcuccucacuaguuaa

SEQ ID NO: 772294 - RNA, 19 nt, Artificial Sequence
  Description of Artificial Sequence: Synthetic oligonucleotide
agaucagaugccccuuuga

SEQ ID NO: 772295 - RNA, 19 nt, Artificial Sequence
  Description of Artificial Sequence: Synthetic oligonucleotide
cuuguugagaggauaaaau

SEQ ID NO: 772296 - RNA, 19 nt, Artificial Sequence
  Description of Artificial Sequence: Synthetic oligonucleotide
ucuaaagaugagcgguguu

SEQ ID NO: 772297 - RNA, 19 nt, Artificial Sequence
  Description of Artificial Sequence: Synthetic oligonucleotide
acaaauaaacugguuugaa

SEQ ID NO: 772298 - RNA, 19 nt, Artificial Sequence
  Description of Artificial Sequence: Synthetic oligonucleotide
ugacggucaaacccuuuuc

SEQ ID NO: 772299 - RNA, 19 nt, Artificial Sequence
  Description of Artificial Sequence: Synthetic oligonucleotide
accaaucagauauucccua

SEQ ID NO: 772300 - RNA, 19 nt, Artificial Sequence
  Description of Artificial Sequence: Synthetic oligonucleotide
cugaagugcaagcugaaua

SEQ ID NO: 772301 - RNA, 19 nt, Artificial Sequence
  Description of Artificial Sequence: Synthetic oligonucleotide
gauuugucaccccaucgua

SEQ ID NO: 772302 - RNA, 19 nt, Artificial Sequence
  Description of Artificial Sequence: Synthetic oligonucleotide
ugcuacaccggcucccaca

SEQ ID NO: 772303 - RNA, 19 nt, Artificial Sequence
  Description of Artificial Sequence: Synthetic oligonucleotide
cuccaagacucucucauca

SEQ ID NO: 772304 - RNA, 19 nt, Artificial Sequence
  Description of Artificial Sequence: Synthetic oligonucleotide
uugcccaucgaguucgcuc

SEQ ID NO: 772305 - RNA, 19 nt, Artificial Sequence
  Description of Artificial Sequence: Synthetic oligonucleotide
ugccccuuugagguguugg

SEQ ID NO: 772306 - RNA, 19 nt, Artificial Sequence
  Description of Artificial Sequence: Synthetic oligonucleotide
ucaccauaaccaucgcauc

SEQ ID NO: 772307 - RNA, 19 nt, Artificial Sequence
  Description of Artificial Sequence: Synthetic oligonucleotide
acggcaauguggguuggac

SEQ ID NO: 772308 - RNA, 19 nt, Artificial Sequence
  Description of Artificial Sequence: Synthetic oligonucleotide
ccuuaagugaaggaacagg

SEQ ID NO: 772309 - RNA, 19 nt, Artificial Sequence
  Description of Artificial Sequence: Synthetic oligonucleotide
uucggaacugguucauguc

SEQ ID NO: 772310 - RNA, 19 nt, Artificial Sequence
  Description of Artificial Sequence: Synthetic oligonucleotide
ugcaaaugguuuacugauu

SEQ ID NO: 772311 - RNA, 19 nt, Artificial Sequence
  Description of Artificial Sequence: Synthetic oligonucleotide
cagcugugauggaauacgc

SEQ ID NO: 772312 - RNA, 19 nt, Artificial Sequence
  Description of Artificial Sequence: Synthetic oligonucleotide
caucgcaucaaagggagca

SEQ ID NO: 772313 - RNA, 19 nt, Artificial Sequence
  Description of Artificial Sequence: Synthetic oligonucleotide
ggauaaaauucccgccucc

SEQ ID NO: 772314 - RNA, 19 nt, Artificial Sequence
  Description of Artificial Sequence: Synthetic oligonucleotide
caaaagaugugaacguaua

SEQ ID NO: 772315 - RNA, 19 nt, Artificial Sequence
  Description of Artificial Sequence: Synthetic oligonucleotide
caaguaauuucugaugcaa

SEQ ID NO: 772316 - RNA, 19 nt, Artificial Sequence
  Description of Artificial Sequence: Synthetic oligonucleotide
cuauaagucaacauuccuu

SEQ ID NO: 772317 - RNA, 19 nt, Artificial Sequence
  Description of Artificial Sequence: Synthetic oligonucleotide
uaacugagugccuuccauu

SEQ ID NO: 772318 - RNA, 19 nt, Artificial Sequence
  Description of Artificial Sequence: Synthetic oligonucleotide
uaugcgagcugaagugcaa

SEQ ID NO: 772319 - RNA, 19 nt, Artificial Sequence
  Description of Artificial Sequence: Synthetic oligonucleotide
guucaaguugugccaaaga

SEQ ID NO: 772320 - RNA, 19 nt, Artificial Sequence
  Description of Artificial Sequence: Synthetic oligonucleotide
uggacucguaaguaaccaa

SEQ ID NO: 772321 - RNA, 19 nt, Artificial Sequence
  Description of Artificial Sequence: Synthetic oligonucleotide
gaggaguauuuccagauuu

SEQ ID NO: 772322 - RNA, 19 nt, Artificial Sequence
  Description of Artificial Sequence: Synthetic oligonucleotide
ugucaccccaucguacugc

SEQ ID NO: 772323 - RNA, 19 nt, Artificial Sequence
  Description of Artificial Sequence: Synthetic oligonucleotide
uugucaccccaucguacug

SEQ ID NO: 772324 - RNA, 19 nt, Artificial Sequence
  Description of Artificial Sequence: Synthetic oligonucleotide
uuccuggaaucuugcaggu

SEQ ID NO: 772325 - RNA, 19 nt, Artificial Sequence
  Description of Artificial Sequence: Synthetic oligonucleotide
gcaguguucaaaaugggga

SEQ ID NO: 772326 - RNA, 19 nt, Artificial Sequence
  Description of Artificial Sequence: Synthetic oligonucleotide
ggcaauguggguuggacaa

SEQ ID NO: 772327 - RNA, 19 nt, Artificial Sequence
  Description of Artificial Sequence: Synthetic oligonucleotide
agauauucccuagccuuug

SEQ ID NO: 772328 - RNA, 19 nt, Artificial Sequence
  Description of Artificial Sequence: Synthetic oligonucleotide
uguucaaaauggggacuug

SEQ ID NO: 772329 - RNA, 19 nt, Artificial Sequence
  Description of Artificial Sequence: Synthetic oligonucleotide
aguccuaaaaugauucaua

SEQ ID NO: 772330 - RNA, 19 nt, Artificial Sequence
  Description of Artificial Sequence: Synthetic oligonucleotide
caauguggguuggacaaug

SEQ ID NO: 772331 - RNA, 19 nt, Artificial Sequence
  Description of Artificial Sequence: Synthetic oligonucleotide
auacgcacauccagguagg

SEQ ID NO: 772332 - RNA, 19 nt, Artificial Sequence
  Description of Artificial Sequence: Synthetic oligonucleotide
acguauaugcugcgaucug

SEQ ID NO: 772333 - RNA, 19 nt, Artificial Sequence
  Description of Artificial Sequence: Synthetic oligonucleotide
agaugugaacguauaugcu

SEQ ID NO: 772334 - RNA, 19 nt, Artificial Sequence
  Description of Artificial Sequence: Synthetic oligonucleotide
ccucuuucuaacugagugc

SEQ ID NO: 772335 - RNA, 19 nt, Artificial Sequence
  Description of Artificial Sequence: Synthetic oligonucleotide
ggugaucaaacauccuuca

SEQ ID NO: 772336 - RNA, 19 nt, Artificial Sequence
  Description of Artificial Sequence: Synthetic oligonucleotide
caaaugguuuacugauuca

SEQ ID NO: 772337 - RNA, 19 nt, Artificial Sequence
  Description of Artificial Sequence: Synthetic oligonucleotide
guaaguaaccaaccagacu

SEQ ID NO: 772338 - RNA, 19 nt, Artificial Sequence
  Description of Artificial Sequence: Synthetic oligonucleotide
agggcguccaugaagucug

SEQ ID NO: 772339 - RNA, 19 nt, Artificial Sequence
  Description of Artificial Sequence: Synthetic oligonucleotide
gaaucagucuccggacaug

SEQ ID NO: 772340 - RNA, 19 nt, Artificial Sequence
  Description of Artificial Sequence: Synthetic oligonucleotide
caccauaaccaucgcauca

SEQ ID NO: 772341 - RNA, 19 nt, Artificial Sequence
  Description of Artificial Sequence: Synthetic oligonucleotide
gucucuaaagaugagcggu

SEQ ID NO: 772342 - RNA, 19 nt, Artificial Sequence
  Description of Artificial Sequence: Synthetic oligonucleotide
ugagaagcucugguggggu

SEQ ID NO: 772343 - RNA, 19 nt, Artificial Sequence
  Description of Artificial Sequence: Synthetic oligonucleotide
uacugaaauguucguucuu

SEQ ID NO: 772344 - RNA, 19 nt, Artificial Sequence
  Description of Artificial Sequence: Synthetic oligonucleotide
acgaaagcucugccucgac

SEQ ID NO: 772345 - RNA, 19 nt, Artificial Sequence
  Description of Artificial Sequence: Synthetic oligonucleotide
auuuauguacaggcaacuu

SEQ ID NO: 772346 - RNA, 19 nt, Artificial Sequence
  Description of Artificial Sequence: Synthetic oligonucleotide
ucgcaucaaagggagcaug

SEQ ID NO: 772347 - RNA, 19 nt, Artificial Sequence
  Description of Artificial Sequence: Synthetic oligonucleotide
uccagguaggcgacauuaa

SEQ ID NO: 772348 - RNA, 19 nt, Artificial Sequence
  Description of Artificial Sequence: Synthetic oligonucleotide
agaggaguauuuccagauu

SEQ ID NO: 772349 - RNA, 19 nt, Artificial Sequence
  Description of Artificial Sequence: Synthetic oligonucleotide
accauaaccaucgcaucaa

SEQ ID NO: 772350 - RNA, 19 nt, Artificial Sequence
  Description of Artificial Sequence: Synthetic oligonucleotide
uuguaggauuugucacccc

SEQ ID NO: 772351 - RNA, 19 nt, Artificial Sequence
  Description of Artificial Sequence: Synthetic oligonucleotide
agacuuguugagaggauaa

SEQ ID NO: 772352 - RNA, 19 nt, Artificial Sequence
  Description of Artificial Sequence: Synthetic oligonucleotide
aacaucuuuuggugccguu

SEQ ID NO: 772353 - RNA, 19 nt, Artificial Sequence
  Description of Artificial Sequence: Synthetic oligonucleotide
auaugcgagcugaagugca

SEQ ID NO: 772354 - RNA, 19 nt, Artificial Sequence
  Description of Artificial Sequence: Synthetic oligonucleotide
uuugagguguugggcuuug

SEQ ID NO: 772355 - RNA, 19 nt, Artificial Sequence
  Description of Artificial Sequence: Synthetic oligonucleotide
acaacauucggaacugguu

SEQ ID NO: 772356 - RNA, 19 nt, Artificial Sequence
  Description of Artificial Sequence: Synthetic oligonucleotide
cugaugcaauuucucacca

SEQ ID NO: 772357 - RNA, 19 nt, Artificial Sequence
  Description of Artificial Sequence: Synthetic oligonucleotide
agggagugguauaucccgg

SEQ ID NO: 772358 - RNA, 19 nt, Artificial Sequence
  Description of Artificial Sequence: Synthetic oligonucleotide
gaccuagaaggugacgguc

SEQ ID NO: 772359 - RNA, 19 nt, Artificial Sequence
  Description of Artificial Sequence: Synthetic oligonucleotide
ccuuugcccaucgaguucg

SEQ ID NO: 772360 - RNA, 19 nt, Artificial Sequence
  Description of Artificial Sequence: Synthetic oligonucleotide
acggaagagaacccuggua

SEQ ID NO: 772361 - RNA, 19 nt, Artificial Sequence
  Description of Artificial Sequence: Synthetic oligonucleotide
ugguacugaaauguucguu

SEQ ID NO: 772362 - RNA, 19 nt, Artificial Sequence
  Description of Artificial Sequence: Synthetic oligonucleotide
aguucacauacagcuguga

SEQ ID NO: 772363 - RNA, 19 nt, Artificial Sequence
  Description of Artificial Sequence: Synthetic oligonucleotide
gcuacaccggcucccacag

SEQ ID NO: 772364 - RNA, 19 nt, Artificial Sequence
  Description of Artificial Sequence: Synthetic oligonucleotide
guacugaaauguucguucu

SEQ ID NO: 772365 - RNA, 19 nt, Artificial Sequence
  Description of Artificial Sequence: Synthetic oligonucleotide
ucucuguaccaaguugauc

SEQ ID NO: 772366 - RNA, 19 nt, Artificial Sequence
  Description of Artificial Sequence: Synthetic oligonucleotide
gagcgguguucaucaacug

SEQ ID NO: 772367 - RNA, 19 nt, Artificial Sequence
  Description of Artificial Sequence: Synthetic oligonucleotide
cauggacuggcaccagcug

SEQ ID NO: 772368 - RNA, 19 nt, Artificial Sequence
  Description of Artificial Sequence: Synthetic oligonucleotide
ccaaguugaucuguguggc

SEQ ID NO: 772369 - RNA, 19 nt, Artificial Sequence
  Description of Artificial Sequence: Synthetic oligonucleotide
uaacaucuuuuggugccgu

SEQ ID NO: 772370 - RNA, 19 nt, Artificial Sequence
  Description of Artificial Sequence: Synthetic oligonucleotide
agaugccccuuugaggugu

SEQ ID NO: 772371 - RNA, 19 nt, Artificial Sequence
  Description of Artificial Sequence: Synthetic oligonucleotide
gagugguauaucccggacu

SEQ ID NO: 772372 - RNA, 19 nt, Artificial Sequence
  Description of Artificial Sequence: Synthetic oligonucleotide
cguaaguaaccaaccagac

SEQ ID NO: 772373 - RNA, 19 nt, Artificial Sequence
  Description of Artificial Sequence: Synthetic oligonucleotide
uggggugaucaaacauccu

SEQ ID NO: 772374 - RNA, 19 nt, Artificial Sequence
  Description of Artificial Sequence: Synthetic oligonucleotide
cucuguccggccaugguaa

SEQ ID NO: 772375 - RNA, 19 nt, Artificial Sequence
  Description of Artificial Sequence: Synthetic oligonucleotide
guaccaugggaaccacgac

SEQ ID NO: 772376 - RNA, 19 nt, Artificial Sequence
  Description of Artificial Sequence: Synthetic oligonucleotide
augcgagcugaagugcaag

SEQ ID NO: 772377 - RNA, 19 nt, Artificial Sequence
  Description of Artificial Sequence: Synthetic oligonucleotide
uccgagcccuuccaccuuc

SEQ ID NO: 772378 - RNA, 19 nt, Artificial Sequence
  Description of Artificial Sequence: Synthetic oligonucleotide
augagcgaacagucucugu

SEQ ID NO: 772379 - RNA, 19 nt, Artificial Sequence
  Description of Artificial Sequence: Synthetic oligonucleotide
guaguucaaguugugccaa

SEQ ID NO: 772380 - RNA, 19 nt, Artificial Sequence
  Description of Artificial Sequence: Synthetic oligonucleotide
gcgacauuaagccaccacu

SEQ ID NO: 772381 - RNA, 19 nt, Artificial Sequence
  Description of Artificial Sequence: Synthetic oligonucleotide
gggaaccacgacucccugg

SEQ ID NO: 772382 - RNA, 19 nt, Artificial Sequence
  Description of Artificial Sequence: Synthetic oligonucleotide
gggugaucaaacauccuuc

SEQ ID NO: 772383 - RNA, 19 nt, Artificial Sequence
  Description of Artificial Sequence: Synthetic oligonucleotide
ccaagacucucucaucaac

SEQ ID NO: 772384 - RNA, 19 nt, Artificial Sequence
  Description of Artificial Sequence: Synthetic oligonucleotide
ugggcccacaaaguucaca

SEQ ID NO: 772385 - RNA, 19 nt, Artificial Sequence
  Description of Artificial Sequence: Synthetic oligonucleotide
agcugugauggaauacgca

SEQ ID NO: 772386 - RNA, 19 nt, Artificial Sequence
  Description of Artificial Sequence: Synthetic oligonucleotide
uucccuagccuuugcccau

SEQ ID NO: 772387 - RNA, 19 nt, Artificial Sequence
  Description of Artificial Sequence: Synthetic oligonucleotide
gucuccggacaugaccucc

SEQ ID NO: 772388 - RNA, 19 nt, Artificial Sequence
  Description of Artificial Sequence: Synthetic oligonucleotide
cugccucgacacagcacgg

SEQ ID NO: 772389 - RNA, 19 nt, Artificial Sequence
  Description of Artificial Sequence: Synthetic oligonucleotide
uguguaccaugggaaccac

SEQ ID NO: 772390 - RNA, 19 nt, Artificial Sequence
  Description of Artificial Sequence: Synthetic oligonucleotide
ggauuugucaccccaucgu

SEQ ID NO: 772391 - RNA, 19 nt, Artificial Sequence
  Description of Artificial Sequence: Synthetic oligonucleotide
ccagauuuauguacaggca

SEQ ID NO: 772392 - RNA, 19 nt, Artificial Sequence
  Description of Artificial Sequence: Synthetic oligonucleotide
ggagugguauaucccggac

SEQ ID NO: 772393 - RNA, 19 nt, Artificial Sequence
  Description of Artificial Sequence: Synthetic oligonucleotide
cagaggaguauuuccagau

SEQ ID NO: 772394 - RNA, 19 nt, Artificial Sequence
  Description of Artificial Sequence: Synthetic oligonucleotide
gcuucucaaaagcuuguaa

SEQ ID NO: 772395 - RNA, 19 nt, Artificial Sequence
  Description of Artificial Sequence: Synthetic oligonucleotide
gacgaaagcucugccucga

SEQ ID NO: 772396 - RNA, 19 nt, Artificial Sequence
  Description of Artificial Sequence: Synthetic oligonucleotide
guucgcuccucacuaguua

SEQ ID NO: 772397 - RNA, 19 nt, Artificial Sequence
  Description of Artificial Sequence: Synthetic oligonucleotide
ucgcuccucacuaguuaau

SEQ ID NO: 772398 - RNA, 19 nt, Artificial Sequence
  Description of Artificial Sequence: Synthetic oligonucleotide
guauaugcugcgaucugua

SEQ ID NO: 772399 - RNA, 19 nt, Artificial Sequence
  Description of Artificial Sequence: Synthetic oligonucleotide
ccaguaguucaaguugugc

SEQ ID NO: 772400 - RNA, 19 nt, Artificial Sequence
  Description of Artificial Sequence: Synthetic oligonucleotide
ucgacacagcacggcaaug

SEQ ID NO: 772401 - RNA, 19 nt, Artificial Sequence
  Description of Artificial Sequence: Synthetic oligonucleotide
gguaggcgacauuaagcca

SEQ ID NO: 772402 - RNA, 19 nt, Artificial Sequence
  Description of Artificial Sequence: Synthetic oligonucleotide
ugccucgacacagcacggc

SEQ ID NO: 772403 - RNA, 19 nt, Artificial Sequence
  Description of Artificial Sequence: Synthetic oligonucleotide
gacuuguugagaggauaaa

SEQ ID NO: 772404 - RNA, 19 nt, Artificial Sequence
  Description of Artificial Sequence: Synthetic oligonucleotide
ggcgacauuaagccaccac

SEQ ID NO: 772405 - RNA, 19 nt, Artificial Sequence
  Description of Artificial Sequence: Synthetic oligonucleotide
uacgcacauccagguaggc

SEQ ID NO: 772406 - RNA, 19 nt, Artificial Sequence
  Description of Artificial Sequence: Synthetic oligonucleotide
gacuugggcccacaaaguu

SEQ ID NO: 772407 - RNA, 19 nt, Artificial Sequence
  Description of Artificial Sequence: Synthetic oligonucleotide
gugaacguauaugcugcga

SEQ ID NO: 772408 - RNA, 19 nt, Artificial Sequence
  Description of Artificial Sequence: Synthetic oligonucleotide
cuuugcccaucgaguucgc

SEQ ID NO: 772409 - RNA, 19 nt, Artificial Sequence
  Description of Artificial Sequence: Synthetic oligonucleotide
ucuguccggccaugguaaa

SEQ ID NO: 772410 - RNA, 19 nt, Artificial Sequence
  Description of Artificial Sequence: Synthetic oligonucleotide
guugugccaaagaauuaua

SEQ ID NO: 772411 - RNA, 19 nt, Artificial Sequence
  Description of Artificial Sequence: Synthetic oligonucleotide
gaguucgcuccucacuagu

SEQ ID NO: 772412 - RNA, 19 nt, Artificial Sequence
  Description of Artificial Sequence: Synthetic oligonucleotide
gcgaacagucucuguccgg

SEQ ID NO: 772413 - RNA, 19 nt, Artificial Sequence
  Description of Artificial Sequence: Synthetic oligonucleotide
gcugcgaucuguagaucag

SEQ ID NO: 772414 - RNA, 19 nt, Artificial Sequence
  Description of Artificial Sequence: Synthetic oligonucleotide
aucgcaucaaagggagcau

SEQ ID NO: 772415 - RNA, 19 nt, Artificial Sequence
  Description of Artificial Sequence: Synthetic oligonucleotide
caagaagcauuucgaagau

SEQ ID NO: 772416 - RNA, 19 nt, Artificial Sequence
  Description of Artificial Sequence: Synthetic oligonucleotide
gcguccaugaagucuguaa

SEQ ID NO: 772417 - RNA, 19 nt, Artificial Sequence
  Description of Artificial Sequence: Synthetic oligonucleotide
uggugccguuccagaagac

SEQ ID NO: 772418 - RNA, 19 nt, Artificial Sequence
  Description of Artificial Sequence: Synthetic oligonucleotide
gaugagcgguguucaucaa

SEQ ID NO: 772419 - RNA, 19 nt, Artificial Sequence
  Description of Artificial Sequence: Synthetic oligonucleotide
cgaacagucucuguccggc

SEQ ID NO: 772420 - RNA, 19 nt, Artificial Sequence
  Description of Artificial Sequence: Synthetic oligonucleotide
caccaacuccauuuucaaa

SEQ ID NO: 772421 - RNA, 19 nt, Artificial Sequence
  Description of Artificial Sequence: Synthetic oligonucleotide
cuccggacaugaccuccag

SEQ ID NO: 772422 - RNA, 19 nt, Artificial Sequence
  Description of Artificial Sequence: Synthetic oligonucleotide
gggagugguauaucccgga

SEQ ID NO: 772423 - RNA, 19 nt, Artificial Sequence
  Description of Artificial Sequence: Synthetic oligonucleotide
augcugcgaucuguagauc

SEQ ID NO: 772424 - RNA, 19 nt, Artificial Sequence
  Description of Artificial Sequence: Synthetic oligonucleotide
agacugguagagggauucu

SEQ ID NO: 772425 - RNA, 19 nt, Artificial Sequence
  Description of Artificial Sequence: Synthetic oligonucleotide
cuacaccggcucccacagg

SEQ ID NO: 772426 - RNA, 19 nt, Artificial Sequence
  Description of Artificial Sequence: Synthetic oligonucleotide
gguucacuugagcauuucu

SEQ ID NO: 772427 - RNA, 19 nt, Artificial Sequence
  Description of Artificial Sequence: Synthetic oligonucleotide
gugacggucaaacccuuuu

SEQ ID NO: 772428 - RNA, 19 nt, Artificial Sequence
  Description of Artificial Sequence: Synthetic oligonucleotide
aguucgcuccucacuaguu

SEQ ID NO: 772429 - RNA, 19 nt, Artificial Sequence
  Description of Artificial Sequence: Synthetic oligonucleotide
cccggacuuucuccgagcc

SEQ ID NO: 772430 - RNA, 19 nt, Artificial Sequence
  Description of Artificial Sequence: Synthetic oligonucleotide
gcuaaucaccacacuuaac

SEQ ID NO: 772431 - RNA, 19 nt, Artificial Sequence
  Description of Artificial Sequence: Synthetic oligonucleotide
cccaucguacugcuggauc

SEQ ID NO: 772432 - RNA, 19 nt, Artificial Sequence
  Description of Artificial Sequence: Synthetic oligonucleotide
caguccuaaaaugauucau

SEQ ID NO: 772433 - RNA, 19 nt, Artificial Sequence
  Description of Artificial Sequence: Synthetic oligonucleotide
cugguacugaaauguucgu

SEQ ID NO: 772434 - RNA, 19 nt, Artificial Sequence
  Description of Artificial Sequence: Synthetic oligonucleotide
ggcagaccuuccucuuuug

SEQ ID NO: 772435 - RNA, 19 nt, Artificial Sequence
  Description of Artificial Sequence: Synthetic oligonucleotide
cagauauucccuagccuuu

SEQ ID NO: 772436 - RNA, 19 nt, Artificial Sequence
  Description of Artificial Sequence: Synthetic oligonucleotide
cugcgaucuguagaucaga

SEQ ID NO: 772437 - RNA, 19 nt, Artificial Sequence
  Description of Artificial Sequence: Synthetic oligonucleotide
ccaaaagaugugaacguau

SEQ ID NO: 772438 - RNA, 19 nt, Artificial Sequence
  Description of Artificial Sequence: Synthetic oligonucleotide
cucuaaagaugagcggugu

SEQ ID NO: 772439 - RNA, 19 nt, Artificial Sequence
  Description of Artificial Sequence: Synthetic oligonucleotide
ccuauaagucaacauuccu

SEQ ID NO: 772440 - RNA, 19 nt, Artificial Sequence
  Description of Artificial Sequence: Synthetic oligonucleotide
gccucgacacagcacggca

SEQ ID NO: 772441 - RNA, 19 nt, Artificial Sequence
  Description of Artificial Sequence: Synthetic oligonucleotide
accacucuuccagccaguu

SEQ ID NO: 772442 - RNA, 19 nt, Artificial Sequence
  Description of Artificial Sequence: Synthetic oligonucleotide
caucuacucucuguaccaa

SEQ ID NO: 772443 - RNA, 19 nt, Artificial Sequence
  Description of Artificial Sequence: Synthetic oligonucleotide
guagaucagaugccccuuu

SEQ ID NO: 772444 - RNA, 19 nt, Artificial Sequence
  Description of Artificial Sequence: Synthetic oligonucleotide
guaggauuugucaccccau

SEQ ID NO: 772445 - RNA, 19 nt, Artificial Sequence
  Description of Artificial Sequence: Synthetic oligonucleotide
ggacaaugcccuucacucu

SEQ ID NO: 772446 - RNA, 19 nt, Artificial Sequence
  Description of Artificial Sequence: Synthetic oligonucleotide
gccaaaagaugugaacgua

SEQ ID NO: 772447 - RNA, 19 nt, Artificial Sequence
  Description of Artificial Sequence: Synthetic oligonucleotide
cacauacagcugugaugga

SEQ ID NO: 772448 - RNA, 19 nt, Artificial Sequence
  Description of Artificial Sequence: Synthetic oligonucleotide
gccuuugcccaucgaguuc

SEQ ID NO: 772449 - RNA, 19 nt, Artificial Sequence
  Description of Artificial Sequence: Synthetic oligonucleotide
ccaucguacugcuggaucu

SEQ ID NO: 772450 - RNA, 19 nt, Artificial Sequence
  Description of Artificial Sequence: Synthetic oligonucleotide
cucgacacagcacggcaau

SEQ ID NO: 772451 - RNA, 19 nt, Artificial Sequence
  Description of Artificial Sequence: Synthetic oligonucleotide
ucccuagccuuugcccauc

SEQ ID NO: 772452 - RNA, 19 nt, Artificial Sequence
  Description of Artificial Sequence: Synthetic oligonucleotide
gugucagggugcaacgccu

SEQ ID NO: 772453 - RNA, 19 nt, Artificial Sequence
  Description of Artificial Sequence: Synthetic oligonucleotide
ccaucgcaucaaagggagc

SEQ ID NO: 772454 - RNA, 19 nt, Artificial Sequence
  Description of Artificial Sequence: Synthetic oligonucleotide
gggugcaacgccuccuucu

SEQ ID NO: 772455 - RNA, 19 nt, Artificial Sequence
  Description of Artificial Sequence: Synthetic oligonucleotide
cuacucucuguaccaaguu

SEQ ID NO: 772456 - RNA, 19 nt, Artificial Sequence
  Description of Artificial Sequence: Synthetic oligonucleotide
cgcaucaaagggagcauga

SEQ ID NO: 772457 - RNA, 19 nt, Artificial Sequence
  Description of Artificial Sequence: Synthetic oligonucleotide
caggccgaacaugccacca

SEQ ID NO: 772458 - RNA, 19 nt, Artificial Sequence
  Description of Artificial Sequence: Synthetic oligonucleotide
cugcuacaccggcucccac

SEQ ID NO: 772459 - RNA, 19 nt, Artificial Sequence
  Description of Artificial Sequence: Synthetic oligonucleotide
ccggccaugguaaaaguau

SEQ ID NO: 772460 - RNA, 19 nt, Artificial Sequence
  Description of Artificial Sequence: Synthetic oligonucleotide
ccggacuuucuccgagccc

SEQ ID NO: 772461 - RNA, 19 nt, Artificial Sequence
  Description of Artificial Sequence: Synthetic oligonucleotide
cgaguucgcuccucacuag

SEQ ID NO: 772462 - RNA, 19 nt, Artificial Sequence
  Description of Artificial Sequence: Synthetic oligonucleotide
cccuagccuuugcccaucg

SEQ ID NO: 772463 - RNA, 19 nt, Artificial Sequence
  Description of Artificial Sequence: Synthetic oligonucleotide
guccggccaugguaaaagu

SEQ ID NO: 772464 - RNA, 19 nt, Artificial Sequence
  Description of Artificial Sequence: Synthetic oligonucleotide
aggcgacauuaagccacca

SEQ ID NO: 772465 - RNA, 19 nt, Artificial Sequence
  Description of Artificial Sequence: Synthetic oligonucleotide
ccuagaaggugacggucaa

SEQ ID NO: 772466 - RNA, 19 nt, Artificial Sequence
  Description of Artificial Sequence: Synthetic oligonucleotide
cgcuccucacuaguuaaug

SEQ ID NO: 772467 - RNA, 19 nt, Artificial Sequence
  Description of Artificial Sequence: Synthetic oligonucleotide
gcauggacuggcaccagcu

SEQ ID NO: 772468 - RNA, 19 nt, Artificial Sequence
  Description of Artificial Sequence: Synthetic oligonucleotide
cgaaagcucugccucgaca

SEQ ID NO: 772469 - RNA, 19 nt, Artificial Sequence
  Description of Artificial Sequence: Synthetic oligonucleotide
aggugacggucaaacccuu

SEQ ID NO: 772470 - RNA, 19 nt, Artificial Sequence
  Description of Artificial Sequence: Synthetic oligonucleotide
ggacuugggcccacaaagu

SEQ ID NO: 772471 - RNA, 19 nt, Artificial Sequence
  Description of Artificial Sequence: Synthetic oligonucleotide
caucaacauaaugggcaau

SEQ ID NO: 772472 - RNA, 19 nt, Artificial Sequence
  Description of Artificial Sequence: Synthetic oligonucleotide
cuguccggccaugguaaaa

SEQ ID NO: 772473 - RNA, 19 nt, Artificial Sequence
  Description of Artificial Sequence: Synthetic oligonucleotide
ccauaaccaucgcaucaaa

SEQ ID NO: 772474 - RNA, 19 nt, Artificial Sequence
  Description of Artificial Sequence: Synthetic oligonucleotide
ccucgacacagcacggcaa

SEQ ID NO: 772475 - RNA, 19 nt, Artificial Sequence
  Description of Artificial Sequence: Synthetic oligonucleotide
cuuugagguguugggcuuu

SEQ ID NO: 772476 - RNA, 19 nt, Artificial Sequence
  Description of Artificial Sequence: Synthetic oligonucleotide
cggcaauguggguuggaca

SEQ ID NO: 772477 - RNA, 19 nt, Artificial Sequence
  Description of Artificial Sequence: Synthetic oligonucleotide
cguauaugcugcgaucugu

SEQ ID NO: 772478 - RNA, 19 nt, Artificial Sequence
  Description of Artificial Sequence: Synthetic oligonucleotide
cagggugcaacgccuccuu

SEQ ID NO: 772479 - RNA, 19 nt, Artificial Sequence
  Description of Artificial Sequence: Synthetic oligonucleotide
acgacucccuggacucgua

SEQ ID NO: 772480 - RNA, 19 nt, Artificial Sequence
  Description of Artificial Sequence: Synthetic oligonucleotide
gugguauaucccggacuuu

SEQ ID NO: 772481 - RNA, 19 nt, Artificial Sequence
  Description of Artificial Sequence: Synthetic oligonucleotide
gccguuccagaagacuggu

SEQ ID NO: 772482 - RNA, 19 nt, Artificial Sequence
  Description of Artificial Sequence: Synthetic oligonucleotide
ccuagccuuugcccaucga

SEQ ID NO: 772483 - RNA, 19 nt, Artificial Sequence
  Description of Artificial Sequence: Synthetic oligonucleotide
ccagacuuguugagaggau

SEQ ID NO: 772484 - RNA, 19 nt, Artificial Sequence
  Description of Artificial Sequence: Synthetic oligonucleotide
cccaucgaguucgcuccuc

SEQ ID NO: 772485 - RNA, 19 nt, Artificial Sequence
  Description of Artificial Sequence: Synthetic oligonucleotide
cuccgagcccuuccaccuu

SEQ ID NO: 772486 - RNA, 19 nt, Artificial Sequence
  Description of Artificial Sequence: Synthetic oligonucleotide
ggugacggucaaacccuuu

SEQ ID NO: 772487 - RNA, 19 nt, Artificial Sequence
  Description of Artificial Sequence: Synthetic oligonucleotide
gcccaucgaguucgcuccu

SEQ ID NO: 772488 - RNA, 19 nt, Artificial Sequence
  Description of Artificial Sequence: Synthetic oligonucleotide
ccacucuuccagccaguuu

SEQ ID NO: 772489 - RNA, 19 nt, Artificial Sequence
  Description of Artificial Sequence: Synthetic oligonucleotide
ccccaucguacugcuggau

SEQ ID NO: 772490 - RNA, 19 nt, Artificial Sequence
  Description of Artificial Sequence: Synthetic oligonucleotide
uuaaccaccacucauagcc

SEQ ID NO: 772491 - RNA, 19 nt, Artificial Sequence
  Description of Artificial Sequence: Synthetic oligonucleotide
  modified_base (4)..(4): a, c, u, g, unknown or other
aaunuaaucaauguccagg

SEQ ID NO: 772492 - RNA, 19 nt, Artificial Sequence
  Description of Artificial Sequence: Synthetic oligonucleotide
aaugaagucucuccgacgg

SEQ ID NO: 772493 - RNA, 19 nt, Artificial Sequence
  Description of Artificial Sequence: Synthetic oligonucleotide
aaauacgccagucugauca

SEQ ID NO: 772494 - RNA, 19 nt, Artificial Sequence
  Description of Artificial Sequence: Synthetic oligonucleotide
uguauagucauguuggucc

SEQ ID NO: 772495 - RNA, 19 nt, Artificial Sequence
  Description of Artificial Sequence: Synthetic oligonucleotide
ucgccuauaaugcugaugg

SEQ ID NO: 772496 - RNA, 19 nt, Artificial Sequence
  Description of Artificial Sequence: Synthetic oligonucleotide
aauaugguagauauggccg

SEQ ID NO: 772497 - RNA, 19 nt, Artificial Sequence
  Description of Artificial Sequence: Synthetic oligonucleotide
aauuguggaggucauauug

SEQ ID NO: 772498 - RNA, 19 nt, Artificial Sequence
  Description of Artificial Sequence: Synthetic oligonucleotide
uaagccgucagucagagcu

SEQ ID NO: 772499 - RNA, 19 nt, Artificial Sequence
  Description of Artificial Sequence: Synthetic oligonucleotide
cuaucuacucuucauaucg

SEQ ID NO: 772500 - RNA, 19 nt, Artificial Sequence
  Description of Artificial Sequence: Synthetic oligonucleotide
uugauugagaacuuggcgc

SEQ ID NO: 772501 - RNA, 19 nt, Artificial Sequence
  Description of Artificial Sequence: Synthetic oligonucleotide
aacugcgcaaacucgaagg

SEQ ID NO: 772502 - RNA, 19 nt, Artificial Sequence
  Description of Artificial Sequence: Synthetic oligonucleotide
uuuacauaaggccaacuga

SEQ ID NO: 772503 - RNA, 19 nt, Artificial Sequence
  Description of Artificial Sequence: Synthetic oligonucleotide
uaauaugguagauauggcc

SEQ ID NO: 772504 - RNA, 19 nt, Artificial Sequence
  Description of Artificial Sequence: Synthetic oligonucleotide
gugguaaucgccuauaaug

SEQ ID NO: 772505 - RNA, 19 nt, Artificial Sequence
  Description of Artificial Sequence: Synthetic oligonucleotide
agguguaugugauccaucc

SEQ ID NO: 772506 - RNA, 19 nt, Artificial Sequence
  Description of Artificial Sequence: Synthetic oligonucleotide
uaucguuagccucaaaggc

SEQ ID NO: 772507 - RNA, 19 nt, Artificial Sequence
  Description of Artificial Sequence: Synthetic oligonucleotide
aguauaauaucaggguucc

SEQ ID NO: 772508 - RNA, 19 nt, Artificial Sequence
  Description of Artificial Sequence: Synthetic oligonucleotide
  modified_base (7)..(7): a, c, u, g, unknown or other
cccaaunuaaucaaugucc

SEQ ID NO: 772509 - RNA, 19 nt, Artificial Sequence
  Description of Artificial Sequence: Synthetic oligonucleotide
ugagacauuauaauauggu

SEQ ID NO: 772510 - RNA, 19 nt, Artificial Sequence
  Description of Artificial Sequence: Synthetic oligonucleotide
ucagguaauaccagccugg

SEQ ID NO: 772511 - RNA, 19 nt, Artificial Sequence
  Description of Artificial Sequence: Synthetic oligonucleotide
uuugagacauuauaauaug

SEQ ID NO: 772512 - RNA, 19 nt, Artificial Sequence
  Description of Artificial Sequence: Synthetic oligonucleotide
cauaucguuagccucaaag

SEQ ID NO: 772513 - RNA, 19 nt, Artificial Sequence
  Description of Artificial Sequence: Synthetic oligonucleotide
cauagaauguuuauggcuc

SEQ ID NO: 772514 - RNA, 19 nt, Artificial Sequence
  Description of Artificial Sequence: Synthetic oligonucleotide
ugguaaucgccuauaaugc

SEQ ID NO: 772515 - RNA, 19 nt, Artificial Sequence
  Description of Artificial Sequence: Synthetic oligonucleotide
aaaugaagucucuccgacg

SEQ ID NO: 772516 - RNA, 19 nt, Artificial Sequence
  Description of Artificial Sequence: Synthetic oligonucleotide
uguaguacucaaauacgcc

SEQ ID NO: 772517 - RNA, 19 nt, Artificial Sequence
  Description of Artificial Sequence: Synthetic oligonucleotide
uguaccauguucccuaucu

SEQ ID NO: 772518 - RNA, 19 nt, Artificial Sequence
  Description of Artificial Sequence: Synthetic oligonucleotide
uuacauaaggccaacugaa

SEQ ID NO: 772519 - RNA, 19 nt, Artificial Sequence
  Description of Artificial Sequence: Synthetic oligonucleotide
uuaaggugaguguauacca

SEQ ID NO: 772520 - RNA, 19 nt, Artificial Sequence
  Description of Artificial Sequence: Synthetic oligonucleotide
  modified_base (3)..(3): a, c, u, g, unknown or other
aunuaaucaauguccaggu

SEQ ID NO: 772521 - RNA, 19 nt, Artificial Sequence
  Description of Artificial Sequence: Synthetic oligonucleotide
aguacuaacgagccgcuuc

SEQ ID NO: 772522 - RNA, 19 nt, Artificial Sequence
  Description of Artificial Sequence: Synthetic oligonucleotide
gguaauaggucguugauug

SEQ ID NO: 772523 - RNA, 19 nt, Artificial Sequence
  Description of Artificial Sequence: Synthetic oligonucleotide
aaauagugucucgaugccc

SEQ ID NO: 772524 - RNA, 19 nt, Artificial Sequence
  Description of Artificial Sequence: Synthetic oligonucleotide
ucguugauugagaacuugg

SEQ ID NO: 772525 - RNA, 19 nt, Artificial Sequence
  Description of Artificial Sequence: Synthetic oligonucleotide
guaacuagccaccaaauuc

SEQ ID NO: 772526 - RNA, 19 nt, Artificial Sequence
  Description of Artificial Sequence: Synthetic oligonucleotide
augaguauaauaucagggu

SEQ ID NO: 772527 - RNA, 19 nt, Artificial Sequence
  Description of Artificial Sequence: Synthetic oligonucleotide
acauagaauguuuauggcu

SEQ ID NO: 772528 - RNA, 19 nt, Artificial Sequence
  Description of Artificial Sequence: Synthetic oligonucleotide
ucgacaaugauggugaggu

SEQ ID NO: 772529 - RNA, 19 nt, Artificial Sequence
  Description of Artificial Sequence: Synthetic oligonucleotide
aggguaguugccuuugcgc

SEQ ID NO: 772530 - RNA, 19 nt, Artificial Sequence
  Description of Artificial Sequence: Synthetic oligonucleotide
ggcgaaauaacccuuaaug

SEQ ID NO: 772531 - RNA, 19 nt, Artificial Sequence
  Description of Artificial Sequence: Synthetic oligonucleotide
gagauuaucgcuugcuaug

SEQ ID NO: 772532 - RNA, 19 nt, Artificial Sequence
  Description of Artificial Sequence: Synthetic oligonucleotide
auaugggaaaucaacauug

SEQ ID NO: 772533 - RNA, 19 nt, Artificial Sequence
  Description of Artificial Sequence: Synthetic oligonucleotide
aaaugguggaucauaagga

SEQ ID NO: 772534 - RNA, 19 nt, Artificial Sequence
  Description of Artificial Sequence: Synthetic oligonucleotide
gccgaauacacauagaaug

SEQ ID NO: 772535 - RNA, 19 nt, Artificial Sequence
  Description of Artificial Sequence: Synthetic oligonucleotide
acucaaauacgccagucug

SEQ ID NO: 772536 - RNA, 19 nt, Artificial Sequence
  Description of Artificial Sequence: Synthetic oligonucleotide
uaauaggucguugauugag

SEQ ID NO: 772537 - RNA, 19 nt, Artificial Sequence
  Description of Artificial Sequence: Synthetic oligonucleotide
ugaguauaauaucaggguu

SEQ ID NO: 772538 - RNA, 19 nt, Artificial Sequence
  Description of Artificial Sequence: Synthetic oligonucleotide
ugauugagaacuuggcgca

SEQ ID NO: 772539 - RNA, 19 nt, Artificial Sequence
  Description of Artificial Sequence: Synthetic oligonucleotide
gcuccuaugacaucaacgg

SEQ ID NO: 772540 - RNA, 19 nt, Artificial Sequence
  Description of Artificial Sequence: Synthetic oligonucleotide
cuuaaggugaguguauacc

SEQ ID NO: 772541 - RNA, 19 nt, Artificial Sequence
  Description of Artificial Sequence: Synthetic oligonucleotide
ucaacggccuuccagagau

SEQ ID NO: 772542 - RNA, 19 nt, Artificial Sequence
  Description of Artificial Sequence: Synthetic oligonucleotide
uucagguaauaccagccug

SEQ ID NO: 772543 - RNA, 19 nt, Artificial Sequence
  Description of Artificial Sequence: Synthetic oligonucleotide
auaguaacuagccaccaaa

SEQ ID NO: 772544 - RNA, 19 nt, Artificial Sequence
  Description of Artificial Sequence: Synthetic oligonucleotide
cucaagauggccaacuguc

SEQ ID NO: 772545 - RNA, 19 nt, Artificial Sequence
  Description of Artificial Sequence: Synthetic oligonucleotide
agauaggagcuucuacuac

SEQ ID NO: 772546 - RNA, 19 nt, Artificial Sequence
  Description of Artificial Sequence: Synthetic oligonucleotide
uuacaauauaguaggcagu

SEQ ID NO: 772547 - RNA, 19 nt, Artificial Sequence
  Description of Artificial Sequence: Synthetic oligonucleotide
gaucuugccguucaacaug

SEQ ID NO: 772548 - RNA, 19 nt, Artificial Sequence
  Description of Artificial Sequence: Synthetic oligonucleotide
gacaucaacggccuuccag

SEQ ID NO: 772549 - RNA, 19 nt, Artificial Sequence
  Description of Artificial Sequence: Synthetic oligonucleotide
acacuguauagucauguug

SEQ ID NO: 772550 - RNA, 19 nt, Artificial Sequence
  Description of Artificial Sequence: Synthetic oligonucleotide
aacucgaaggugugcguuc

SEQ ID NO: 772551 - RNA, 19 nt, Artificial Sequence
  Description of Artificial Sequence: Synthetic oligonucleotide
auuaaccaccacucauagc

SEQ ID NO: 772552 - RNA, 19 nt, Artificial Sequence
  Description of Artificial Sequence: Synthetic oligonucleotide
ugaaaucuucugacgacca

SEQ ID NO: 772553 - RNA, 19 nt, Artificial Sequence
  Description of Artificial Sequence: Synthetic oligonucleotide
gauaggagcuucuacuaca

SEQ ID NO: 772554 - RNA, 19 nt, Artificial Sequence
  Description of Artificial Sequence: Synthetic oligonucleotide
uucccuggguacuucacgg

SEQ ID NO: 772555 - RNA, 19 nt, Artificial Sequence
  Description of Artificial Sequence: Synthetic oligonucleotide
uaaucgccuauaaugcuga

SEQ ID NO: 772556 - RNA, 19 nt, Artificial Sequence
  Description of Artificial Sequence: Synthetic oligonucleotide
aaccuuugcccagccaucc

SEQ ID NO: 772557 - RNA, 19 nt, Artificial Sequence
  Description of Artificial Sequence: Synthetic oligonucleotide
  modified_base (9)..(9): a, c, u, g, unknown or other
aucccaaunuaaucaaugu

SEQ ID NO: 772558 - RNA, 19 nt, Artificial Sequence
  Description of Artificial Sequence: Synthetic oligonucleotide
aaacugcgcaaacucgaag

SEQ ID NO: 772559 - RNA, 19 nt, Artificial Sequence
  Description of Artificial Sequence: Synthetic oligonucleotide
ucauuaaccaccacucaua

SEQ ID NO: 772560 - RNA, 19 nt, Artificial Sequence
  Description of Artificial Sequence: Synthetic oligonucleotide
  modified_base (8)..(8): a, c, u, g, unknown or other
ucccaaunuaaucaauguc

SEQ ID NO: 772561 - RNA, 19 nt, Artificial Sequence
  Description of Artificial Sequence: Synthetic oligonucleotide
agguccaucaaaacuggcc

SEQ ID NO: 772562 - RNA, 19 nt, Artificial Sequence
  Description of Artificial Sequence: Synthetic oligonucleotide
uacaauauaguaggcaguc

SEQ ID NO: 772563 - RNA, 19 nt, Artificial Sequence
  Description of Artificial Sequence: Synthetic oligonucleotide
cauuaaccaccacucauag

SEQ ID NO: 772564 - RNA, 19 nt, Artificial Sequence
  Description of Artificial Sequence: Synthetic oligonucleotide
uacucaaauacgccagucu

SEQ ID NO: 772565 - RNA, 19 nt, Artificial Sequence
  Description of Artificial Sequence: Synthetic oligonucleotide
ccuauaaugcugauggugc

SEQ ID NO: 772566 - RNA, 19 nt, Artificial Sequence
  Description of Artificial Sequence: Synthetic oligonucleotide
acugguuugagacauuaua

SEQ ID NO: 772567 - RNA, 19 nt, Artificial Sequence
  Description of Artificial Sequence: Synthetic oligonucleotide
acuggcguaaauccagaag

SEQ ID NO: 772568 - RNA, 19 nt, Artificial Sequence
  Description of Artificial Sequence: Synthetic oligonucleotide
agagugguuagugugacca

SEQ ID NO: 772569 - RNA, 19 nt, Artificial Sequence
  Description of Artificial Sequence: Synthetic oligonucleotide
  modified_base (19)..(19): a, c, u, g, unknown or other
uucauuccaaaucccaaun

SEQ ID NO: 772570 - RNA, 19 nt, Artificial Sequence
  Description of Artificial Sequence: Synthetic oligonucleotide
gaguauaauaucaggguuc

SEQ ID NO: 772571 - RNA, 19 nt, Artificial Sequence
  Description of Artificial Sequence: Synthetic oligonucleotide
aauacgccagucugaucag

SEQ ID NO: 772572 - RNA, 19 nt, Artificial Sequence
  Description of Artificial Sequence: Synthetic oligonucleotide
aauaggcucccagagauua

SEQ ID NO: 772573 - RNA, 19 nt, Artificial Sequence
  Description of Artificial Sequence: Synthetic oligonucleotide
agagauuaucgcuugcuau

SEQ ID NO: 772574 - RNA, 19 nt, Artificial Sequence
  Description of Artificial Sequence: Synthetic oligonucleotide
cuggcguaaauccagaaga

SEQ ID NO: 772575 - RNA, 19 nt, Artificial Sequence
  Description of Artificial Sequence: Synthetic oligonucleotide
gcgaaauaacccuuaaugc

SEQ ID NO: 772576 - RNA, 19 nt, Artificial Sequence
  Description of Artificial Sequence: Synthetic oligonucleotide
augacaucaacggccuucc

SEQ ID NO: 772577 - RNA, 19 nt, Artificial Sequence
  Description of Artificial Sequence: Synthetic oligonucleotide
ucccuaagccgucagucag

SEQ ID NO: 772578 - RNA, 19 nt, Artificial Sequence
  Description of Artificial Sequence: Synthetic oligonucleotide
uucguuauuuguguaguac

SEQ ID NO: 772579 - RNA, 19 nt, Artificial Sequence
  Description of Artificial Sequence: Synthetic oligonucleotide
ucccuuuagaguugaaggu

SEQ ID NO: 772580 - RNA, 19 nt, Artificial Sequence
  Description of Artificial Sequence: Synthetic oligonucleotide
ucuccgacgguccuccaag

SEQ ID NO: 772581 - RNA, 19 nt, Artificial Sequence
  Description of Artificial Sequence: Synthetic oligonucleotide
acuaacgagccgcuuccac

SEQ ID NO: 772582 - RNA, 19 nt, Artificial Sequence
  Description of Artificial Sequence: Synthetic oligonucleotide
uuaucgcuugcuaugucaa

SEQ ID NO: 772583 - RNA, 19 nt, Artificial Sequence
  Description of Artificial Sequence: Synthetic oligonucleotide
uggccaacugucuucaggu

SEQ ID NO: 772584 - RNA, 19 nt, Artificial Sequence
  Description of Artificial Sequence: Synthetic oligonucleotide
uuuguguaguacucaaaua

SEQ ID NO: 772585 - RNA, 19 nt, Artificial Sequence
  Description of Artificial Sequence: Synthetic oligonucleotide
ggugagguucccuaagccg

SEQ ID NO: 772586 - RNA, 19 nt, Artificial Sequence
  Description of Artificial Sequence: Synthetic oligonucleotide
uguagcgaugcuguccggg

SEQ ID NO: 772587 - RNA, 19 nt, Artificial Sequence
  Description of Artificial Sequence: Synthetic oligonucleotide
uccagauaggagcuucuac

SEQ ID NO: 772588 - RNA, 19 nt, Artificial Sequence
  Description of Artificial Sequence: Synthetic oligonucleotide
guaugugauccauccaccc

SEQ ID NO: 772589 - RNA, 19 nt, Artificial Sequence
  Description of Artificial Sequence: Synthetic oligonucleotide
ucuucguuauuuguguagu

SEQ ID NO: 772590 - RNA, 19 nt, Artificial Sequence
  Description of Artificial Sequence: Synthetic oligonucleotide
acuucacggggacauuuuc

SEQ ID NO: 772591 - RNA, 19 nt, Artificial Sequence
  Description of Artificial Sequence: Synthetic oligonucleotide
uauuuguguaguacucaaa

SEQ ID NO: 772592 - RNA, 19 nt, Artificial Sequence
  Description of Artificial Sequence: Synthetic oligonucleotide
guacuaacgagccgcuucc

SEQ ID NO: 772593 - RNA, 19 nt, Artificial Sequence
  Description of Artificial Sequence: Synthetic oligonucleotide
acauaaugcccacuccaug

SEQ ID NO: 772594 - RNA, 19 nt, Artificial Sequence
  Description of Artificial Sequence: Synthetic oligonucleotide
guaaucgccuauaaugcug

SEQ ID NO: 772595 - RNA, 19 nt, Artificial Sequence
  Description of Artificial Sequence: Synthetic oligonucleotide
cucccggcgaugaacaagc

SEQ ID NO: 772596 - RNA, 19 nt, Artificial Sequence
  Description of Artificial Sequence: Synthetic oligonucleotide
ggucucuauauacacauca

SEQ ID NO: 772597 - RNA, 19 nt, Artificial Sequence
  Description of Artificial Sequence: Synthetic oligonucleotide
cuuggcgcaguguguagcg

SEQ ID NO: 772598 - RNA, 19 nt, Artificial Sequence
  Description of Artificial Sequence: Synthetic oligonucleotide
gucaaacugcgcaaacucg

SEQ ID NO: 772599 - RNA, 19 nt, Artificial Sequence
  Description of Artificial Sequence: Synthetic oligonucleotide
gaggggucucuauauacac

SEQ ID NO: 772600 - RNA, 19 nt, Artificial Sequence
  Description of Artificial Sequence: Synthetic oligonucleotide
ucaaauacgccagucugau

SEQ ID NO: 772601 - RNA, 19 nt, Artificial Sequence
  Description of Artificial Sequence: Synthetic oligonucleotide
agcucuaauuaaaucuuuc

SEQ ID NO: 772602 - RNA, 19 nt, Artificial Sequence
  Description of Artificial Sequence: Synthetic oligonucleotide
uacauaaggccaacugaaa

SEQ ID NO: 772603 - RNA, 19 nt, Artificial Sequence
  Description of Artificial Sequence: Synthetic oligonucleotide
aauaggucguugauugaga

SEQ ID NO: 772604 - RNA, 19 nt, Artificial Sequence
  Description of Artificial Sequence: Synthetic oligonucleotide
uaucuacucuucauaucgu

SEQ ID NO: 772605 - RNA, 19 nt, Artificial Sequence
  Description of Artificial Sequence: Synthetic oligonucleotide
cugguuugagacauuauaa

SEQ ID NO: 772606 - RNA, 19 nt, Artificial Sequence
  Description of Artificial Sequence: Synthetic oligonucleotide
uaguaacuagccaccaaau

SEQ ID NO: 772607 - RNA, 19 nt, Artificial Sequence
  Description of Artificial Sequence: Synthetic oligonucleotide
guagcgaugcuguccgggg

SEQ ID NO: 772608 - RNA, 19 nt, Artificial Sequence
  Description of Artificial Sequence: Synthetic oligonucleotide
ucguuagccucaaaggcua

SEQ ID NO: 772609 - RNA, 19 nt, Artificial Sequence
  Description of Artificial Sequence: Synthetic oligonucleotide
uccuguagcgguucucacc

SEQ ID NO: 772610 - RNA, 19 nt, Artificial Sequence
  Description of Artificial Sequence: Synthetic oligonucleotide
caagcaauuguggagguca

SEQ ID NO: 772611 - RNA, 19 nt, Artificial Sequence
  Description of Artificial Sequence: Synthetic oligonucleotide
ugccuuugcgcccuguggu

SEQ ID NO: 772612 - RNA, 19 nt, Artificial Sequence
  Description of Artificial Sequence: Synthetic oligonucleotide
gggaaaucaacauugaaau

SEQ ID NO: 772613 - RNA, 19 nt, Artificial Sequence
  Description of Artificial Sequence: Synthetic oligonucleotide
aguaacuagccaccaaauu

SEQ ID NO: 772614 - RNA, 19 nt, Artificial Sequence
  Description of Artificial Sequence: Synthetic oligonucleotide
ugugcguuccgauggcggc

SEQ ID NO: 772615 - RNA, 19 nt, Artificial Sequence
  Description of Artificial Sequence: Synthetic oligonucleotide
ucgcuugcuaugucaaaug

SEQ ID NO: 772616 - RNA, 19 nt, Artificial Sequence
  Description of Artificial Sequence: Synthetic oligonucleotide
auaggucguugauugagaa

SEQ ID NO: 772617 - RNA, 19 nt, Artificial Sequence
  Description of Artificial Sequence: Synthetic oligonucleotide
acucgaaggugugcguucc

SEQ ID NO: 772618 - RNA, 19 nt, Artificial Sequence
  Description of Artificial Sequence: Synthetic oligonucleotide
ucaugguuucgacaaugau

SEQ ID NO: 772619 - RNA, 19 nt, Artificial Sequence
  Description of Artificial Sequence: Synthetic oligonucleotide
aucaaaacuggcccugaau

SEQ ID NO: 772620 - RNA, 19 nt, Artificial Sequence
  Description of Artificial Sequence: Synthetic oligonucleotide
caaaacuggcccugaauca

SEQ ID NO: 772621 - RNA, 19 nt, Artificial Sequence
  Description of Artificial Sequence: Synthetic oligonucleotide
agugguaaucgccuauaau

SEQ ID NO: 772622 - RNA, 19 nt, Artificial Sequence
  Description of Artificial Sequence: Synthetic oligonucleotide
ugcgacuucggggaaggag

SEQ ID NO: 772623 - RNA, 19 nt, Artificial Sequence
  Description of Artificial Sequence: Synthetic oligonucleotide
acuguauagucauguuggu

SEQ ID NO: 772624 - RNA, 19 nt, Artificial Sequence
  Description of Artificial Sequence: Synthetic oligonucleotide
uggcguaaauccagaagaa

SEQ ID NO: 772625 - RNA, 19 nt, Artificial Sequence
  Description of Artificial Sequence: Synthetic oligonucleotide
ggauaaugagcuccuauga

SEQ ID NO: 772626 - RNA, 19 nt, Artificial Sequence
  Description of Artificial Sequence: Synthetic oligonucleotide
ucccuaucuacucuucaua

SEQ ID NO: 772627 - RNA, 19 nt, Artificial Sequence
  Description of Artificial Sequence: Synthetic oligonucleotide
aauaacccuuaaugcuuaa

SEQ ID NO: 772628 - RNA, 19 nt, Artificial Sequence
  Description of Artificial Sequence: Synthetic oligonucleotide
aaggcuacauacaggucca

SEQ ID NO: 772629 - RNA, 19 nt, Artificial Sequence
  Description of Artificial Sequence: Synthetic oligonucleotide
aucguuagccucaaaggcu

SEQ ID NO: 772630 - RNA, 19 nt, Artificial Sequence
  Description of Artificial Sequence: Synthetic oligonucleotide
agauuaucgcuugcuaugu

SEQ ID NO: 772631 - RNA, 19 nt, Artificial Sequence
  Description of Artificial Sequence: Synthetic oligonucleotide
uucccuaagccgucaguca

SEQ ID NO: 772632 - RNA, 19 nt, Artificial Sequence
  Description of Artificial Sequence: Synthetic oligonucleotide
accacggcaaccccaugag

SEQ ID NO: 772633 - RNA, 19 nt, Artificial Sequence
  Description of Artificial Sequence: Synthetic oligonucleotide
agauuuuacauaaggccaa

SEQ ID NO: 772634 - RNA, 19 nt, Artificial Sequence
  Description of Artificial Sequence: Synthetic oligonucleotide
cuccuaugacaucaacggc

SEQ ID NO: 772635 - RNA, 19 nt, Artificial Sequence
  Description of Artificial Sequence: Synthetic oligonucleotide
auaacccuuaaugcuuaag

SEQ ID NO: 772636 - RNA, 19 nt, Artificial Sequence
  Description of Artificial Sequence: Synthetic oligonucleotide
uucugacgaccaaagcuuc

SEQ ID NO: 772637 - RNA, 19 nt, Artificial Sequence
  Description of Artificial Sequence: Synthetic oligonucleotide
augggaaaucaacauugaa

SEQ ID NO: 772638 - RNA, 19 nt, Artificial Sequence
  Description of Artificial Sequence: Synthetic oligonucleotide
ucagcguguccugaggugu

SEQ ID NO: 772639 - RNA, 19 nt, Artificial Sequence
  Description of Artificial Sequence: Synthetic oligonucleotide
uaaccaccacucauagccu

SEQ ID NO: 772640 - RNA, 19 nt, Artificial Sequence
  Description of Artificial Sequence: Synthetic oligonucleotide
ggaaugaccacggcaaccc

SEQ ID NO: 772641 - RNA, 19 nt, Artificial Sequence
  Description of Artificial Sequence: Synthetic oligonucleotide
uccgcagcccagguaauag

SEQ ID NO: 772642 - RNA, 19 nt, Artificial Sequence
  Description of Artificial Sequence: Synthetic oligonucleotide
uaacgagccgcuuccacuu

SEQ ID NO: 772643 - RNA, 19 nt, Artificial Sequence
  Description of Artificial Sequence: Synthetic oligonucleotide
gaagucucuccgacggucc

SEQ ID NO: 772644 - RNA, 19 nt, Artificial Sequence
  Description of Artificial Sequence: Synthetic oligonucleotide
gagugguuagugugaccag

SEQ ID NO: 772645 - RNA, 19 nt, Artificial Sequence
  Description of Artificial Sequence: Synthetic oligonucleotide
ugccguucaacaugccaga

SEQ ID NO: 772646 - RNA, 19 nt, Artificial Sequence
  Description of Artificial Sequence: Synthetic oligonucleotide
uguucccuaucuacucuuc

SEQ ID NO: 772647 - RNA, 19 nt, Artificial Sequence
  Description of Artificial Sequence: Synthetic oligonucleotide
uugaguaaacugaguugua

SEQ ID NO: 772648 - RNA, 19 nt, Artificial Sequence
  Description of Artificial Sequence: Synthetic oligonucleotide
  modified_base (6)..(6): a, c, u, g, unknown or other
ccaaunuaaucaaugucca

SEQ ID NO: 772649 - RNA, 19 nt, Artificial Sequence
  Description of Artificial Sequence: Synthetic oligonucleotide
ucucccggcgaugaacaag

SEQ ID NO: 772650 - RNA, 19 nt, Artificial Sequence
  Description of Artificial Sequence: Synthetic oligonucleotide
gaaugaccacggcaacccc

SEQ ID NO: 772651 - RNA, 19 nt, Artificial Sequence
  Description of Artificial Sequence: Synthetic oligonucleotide
gauugagaacuuggcgcag

SEQ ID NO: 772652 - RNA, 19 nt, Artificial Sequence
  Description of Artificial Sequence: Synthetic oligonucleotide
uuauggcucaugguuucga

SEQ ID NO: 772653 - RNA, 19 nt, Artificial Sequence
  Description of Artificial Sequence: Synthetic oligonucleotide
aaacucgaaggugugcguu

SEQ ID NO: 772654 - RNA, 19 nt, Artificial Sequence
  Description of Artificial Sequence: Synthetic oligonucleotide
gauuaucgcuugcuauguc

SEQ ID NO: 772655 - RNA, 19 nt, Artificial Sequence
  Description of Artificial Sequence: Synthetic oligonucleotide
cuucggggaaggaggguag

SEQ ID NO: 772656 - RNA, 19 nt, Artificial Sequence
  Description of Artificial Sequence: Synthetic oligonucleotide
uccaagcaauuguggaggu

SEQ ID NO: 772657 - RNA, 19 nt, Artificial Sequence
  Description of Artificial Sequence: Synthetic oligonucleotide
accacucauagccucggaa

SEQ ID NO: 772658 - RNA, 19 nt, Artificial Sequence
  Description of Artificial Sequence: Synthetic oligonucleotide
cccaugaguauaauaucag

SEQ ID NO: 772659 - RNA, 19 nt, Artificial Sequence
  Description of Artificial Sequence: Synthetic oligonucleotide
gcgacuucggggaaggagg

SEQ ID NO: 772660 - RNA, 19 nt, Artificial Sequence
  Description of Artificial Sequence: Synthetic oligonucleotide
gccuauaaugcugauggug

SEQ ID NO: 772661 - RNA, 19 nt, Artificial Sequence
  Description of Artificial Sequence: Synthetic oligonucleotide
aucgcuugcuaugucaaau

SEQ ID NO: 772662 - RNA, 19 nt, Artificial Sequence
  Description of Artificial Sequence: Synthetic oligonucleotide
cacggcaaccccaugagua

SEQ ID NO: 772663 - RNA, 19 nt, Artificial Sequence
  Description of Artificial Sequence: Synthetic oligonucleotide
aucgccuauaaugcugaug

SEQ ID NO: 772664 - RNA, 19 nt, Artificial Sequence
  Description of Artificial Sequence: Synthetic oligonucleotide
guaauaggucguugauuga

SEQ ID NO: 772665 - RNA, 19 nt, Artificial Sequence
  Description of Artificial Sequence: Synthetic oligonucleotide
cuguggugagagugguuag

SEQ ID NO: 772666 - RNA, 19 nt, Artificial Sequence
  Description of Artificial Sequence: Synthetic oligonucleotide
cuucccugucauccuugcg

SEQ ID NO: 772667 - RNA, 19 nt, Artificial Sequence
  Description of Artificial Sequence: Synthetic oligonucleotide
ugcuuaaggugaguguaua

SEQ ID NO: 772668 - RNA, 19 nt, Artificial Sequence
  Description of Artificial Sequence: Synthetic oligonucleotide
cagauaggagcuucuacua

SEQ ID NO: 772669 - RNA, 19 nt, Artificial Sequence
  Description of Artificial Sequence: Synthetic oligonucleotide
auguucccuaucuacucuu

SEQ ID NO: 772670 - RNA, 19 nt, Artificial Sequence
  Description of Artificial Sequence: Synthetic oligonucleotide
cugauucaauaugcgcccc

SEQ ID NO: 772671 - RNA, 19 nt, Artificial Sequence
  Description of Artificial Sequence: Synthetic oligonucleotide
gugugcguuccgauggcgg

SEQ ID NO: 772672 - RNA, 19 nt, Artificial Sequence
  Description of Artificial Sequence: Synthetic oligonucleotide
aggcgaaauaacccuuaau

SEQ ID NO: 772673 - RNA, 19 nt, Artificial Sequence
  Description of Artificial Sequence: Synthetic oligonucleotide
uacuucacggggacauuuu

SEQ ID NO: 772674 - RNA, 19 nt, Artificial Sequence
  Description of Artificial Sequence: Synthetic oligonucleotide
uuccgauggcggcccagcc

SEQ ID NO: 772675 - RNA, 19 nt, Artificial Sequence
  Description of Artificial Sequence: Synthetic oligonucleotide
aaucgccuauaaugcugau

SEQ ID NO: 772676 - RNA, 19 nt, Artificial Sequence
  Description of Artificial Sequence: Synthetic oligonucleotide
cuacauacagguccaucaa

SEQ ID NO: 772677 - RNA, 19 nt, Artificial Sequence
  Description of Artificial Sequence: Synthetic oligonucleotide
acggcaaccccaugaguau

SEQ ID NO: 772678 - RNA, 19 nt, Artificial Sequence
  Description of Artificial Sequence: Synthetic oligonucleotide
ugaguuguaugagcugaua

SEQ ID NO: 772679 - RNA, 19 nt, Artificial Sequence
  Description of Artificial Sequence: Synthetic oligonucleotide
ugaugucagcguguccuga

SEQ ID NO: 772680 - RNA, 19 nt, Artificial Sequence
  Description of Artificial Sequence: Synthetic oligonucleotide
cacuucgcccauaaggcaa

SEQ ID NO: 772681 - RNA, 19 nt, Artificial Sequence
  Description of Artificial Sequence: Synthetic oligonucleotide
ucccugucauccuugcguu

SEQ ID NO: 772682 - RNA, 19 nt, Artificial Sequence
  Description of Artificial Sequence: Synthetic oligonucleotide
ccggaaauagcucuaauua

SEQ ID NO: 772683 - RNA, 19 nt, Artificial Sequence
  Description of Artificial Sequence: Synthetic oligonucleotide
guacucaaauacgccaguc

SEQ ID NO: 772684 - RNA, 19 nt, Artificial Sequence
  Description of Artificial Sequence: Synthetic oligonucleotide
agguaauaggucguugauu

SEQ ID NO: 772685 - RNA, 19 nt, Artificial Sequence
  Description of Artificial Sequence: Synthetic oligonucleotide
cguuauuuguguaguacuc

SEQ ID NO: 772686 - RNA, 19 nt, Artificial Sequence
  Description of Artificial Sequence: Synthetic oligonucleotide
acuucgcccauaaggcaag

SEQ ID NO: 772687 - RNA, 19 nt, Artificial Sequence
  Description of Artificial Sequence: Synthetic oligonucleotide
ccccaugaguauaauauca

SEQ ID NO: 772688 - RNA, 19 nt, Artificial Sequence
  Description of Artificial Sequence: Synthetic oligonucleotide
cauaguaacuagccaccaa

SEQ ID NO: 772689 - RNA, 19 nt, Artificial Sequence
  Description of Artificial Sequence: Synthetic oligonucleotide
gaggcgaaauaacccuuaa

SEQ ID NO: 772690 - RNA, 19 nt, Artificial Sequence
  Description of Artificial Sequence: Synthetic oligonucleotide
uccggggucuucguuauuu

SEQ ID NO: 772691 - RNA, 19 nt, Artificial Sequence
  Description of Artificial Sequence: Synthetic oligonucleotide
augaagucucuccgacggu

SEQ ID NO: 772692 - RNA, 19 nt, Artificial Sequence
  Description of Artificial Sequence: Synthetic oligonucleotide
uggcgcaguguguagcgau

SEQ ID NO: 772693 - RNA, 19 nt, Artificial Sequence
  Description of Artificial Sequence: Synthetic oligonucleotide
ugcguuccgauggcggccc

SEQ ID NO: 772694 - RNA, 19 nt, Artificial Sequence
  Description of Artificial Sequence: Synthetic oligonucleotide
cuaacgagccgcuuccacu

SEQ ID NO: 772695 - RNA, 19 nt, Artificial Sequence
  Description of Artificial Sequence: Synthetic oligonucleotide
cucgaaggugugcguuccg

SEQ ID NO: 772696 - RNA, 19 nt, Artificial Sequence
  Description of Artificial Sequence: Synthetic oligonucleotide
caaauacgccagucugauc

SEQ ID NO: 772697 - RNA, 19 nt, Artificial Sequence
  Description of Artificial Sequence: Synthetic oligonucleotide
uccugagguguaugugauc

SEQ ID NO: 772698 - RNA, 19 nt, Artificial Sequence
  Description of Artificial Sequence: Synthetic oligonucleotide
uugcgcccuguggugagag

SEQ ID NO: 772699 - RNA, 19 nt, Artificial Sequence
  Description of Artificial Sequence: Synthetic oligonucleotide
augagcugauauccagaua

SEQ ID NO: 772700 - RNA, 19 nt, Artificial Sequence
  Description of Artificial Sequence: Synthetic oligonucleotide
ccagguaauaggucguuga

SEQ ID NO: 772701 - RNA, 19 nt, Artificial Sequence
  Description of Artificial Sequence: Synthetic oligonucleotide
gaaaauuccuguagcgguu

SEQ ID NO: 772702 - RNA, 19 nt, Artificial Sequence
  Description of Artificial Sequence: Synthetic oligonucleotide
cagagauuaucgcuugcua

SEQ ID NO: 772703 - RNA, 19 nt, Artificial Sequence
  Description of Artificial Sequence: Synthetic oligonucleotide
cuccgacgguccuccaagc

SEQ ID NO: 772704 - RNA, 19 nt, Artificial Sequence
  Description of Artificial Sequence: Synthetic oligonucleotide
cuaagccgucagucagagc

SEQ ID NO: 772705 - RNA, 19 nt, Artificial Sequence
  Description of Artificial Sequence: Synthetic oligonucleotide
gguaaucgccuauaaugcu

SEQ ID NO: 772706 - RNA, 19 nt, Artificial Sequence
  Description of Artificial Sequence: Synthetic oligonucleotide
agguaauaccagccugguu

SEQ ID NO: 772707 - RNA, 19 nt, Artificial Sequence
  Description of Artificial Sequence: Synthetic oligonucleotide
aggggucucuauauacaca

SEQ ID NO: 772708 - RNA, 19 nt, Artificial Sequence
  Description of Artificial Sequence: Synthetic oligonucleotide
auccauccacccagguccg

SEQ ID NO: 772709 - RNA, 19 nt, Artificial Sequence
  Description of Artificial Sequence: Synthetic oligonucleotide
guuccgauggcggcccagc

SEQ ID NO: 772710 - RNA, 19 nt, Artificial Sequence
  Description of Artificial Sequence: Synthetic oligonucleotide
uacuaacgagccgcuucca

SEQ ID NO: 772711 - RNA, 19 nt, Artificial Sequence
  Description of Artificial Sequence: Synthetic oligonucleotide
agaggcgaaauaacccuua

SEQ ID NO: 772712 - RNA, 19 nt, Artificial Sequence
  Description of Artificial Sequence: Synthetic oligonucleotide
uucgcccauaaggcaaguc

SEQ ID NO: 772713 - RNA, 19 nt, Artificial Sequence
  Description of Artificial Sequence: Synthetic oligonucleotide
guguagcgaugcuguccgg

SEQ ID NO: 772714 - RNA, 19 nt, Artificial Sequence
  Description of Artificial Sequence: Synthetic oligonucleotide
ccuaagccgucagucagag

SEQ ID NO: 772715 - RNA, 19 nt, Artificial Sequence
  Description of Artificial Sequence: Synthetic oligonucleotide
ggugugcguuccgauggcg

SEQ ID NO: 772716 - RNA, 19 nt, Artificial Sequence
  Description of Artificial Sequence: Synthetic oligonucleotide
cuguccggggucuucguua

SEQ ID NO: 772717 - RNA, 19 nt, Artificial Sequence
  Description of Artificial Sequence: Synthetic oligonucleotide
uuggcgcaguguguagcga

SEQ ID NO: 772718 - RNA, 19 nt, Artificial Sequence
  Description of Artificial Sequence: Synthetic oligonucleotide
gugcguuccgauggcggcc

SEQ ID NO: 772719 - RNA, 19 nt, Artificial Sequence
  Description of Artificial Sequence: Synthetic oligonucleotide
ccgaauacacauagaaugu

SEQ ID NO: 772720 - RNA, 19 nt, Artificial Sequence
  Description of Artificial Sequence: Synthetic oligonucleotide
ccacucauagccucggaaa

SEQ ID NO: 772721 - RNA, 19 nt, Artificial Sequence
  Description of Artificial Sequence: Synthetic oligonucleotide
cucccagagauuaucgcuu

SEQ ID NO: 772722 - RNA, 19 nt, Artificial Sequence
  Description of Artificial Sequence: Synthetic oligonucleotide
agcauccgcagcccaggua

SEQ ID NO: 772723 - RNA, 19 nt, Artificial Sequence
  Description of Artificial Sequence: Synthetic oligonucleotide
cgacgguccuccaagcuug

SEQ ID NO: 772724 - RNA, 19 nt, Artificial Sequence
  Description of Artificial Sequence: Synthetic oligonucleotide
acuagccaccaaauuccaa

SEQ ID NO: 772725 - RNA, 19 nt, Artificial Sequence
  Description of Artificial Sequence: Synthetic oligonucleotide
ggcguaaauccagaagaaa

SEQ ID NO: 772726 - RNA, 19 nt, Artificial Sequence
  Description of Artificial Sequence: Synthetic oligonucleotide
gccucaaaggcuacauaca

SEQ ID NO: 772727 - RNA, 19 nt, Artificial Sequence
  Description of Artificial Sequence: Synthetic oligonucleotide
auggccgaauacacauaga

SEQ ID NO: 772728 - RNA, 19 nt, Artificial Sequence
  Description of Artificial Sequence: Synthetic oligonucleotide
aagccgucagucagagcua

SEQ ID NO: 772729 - RNA, 19 nt, Artificial Sequence
  Description of Artificial Sequence: Synthetic oligonucleotide
caaacucgaaggugugcgu

SEQ ID NO: 772730 - RNA, 19 nt, Artificial Sequence
  Description of Artificial Sequence: Synthetic oligonucleotide
auauggccgaauacacaua

SEQ ID NO: 772731 - RNA, 19 nt, Artificial Sequence
  Description of Artificial Sequence: Synthetic oligonucleotide
cacuggcguaaauccagaa

SEQ ID NO: 772732 - RNA, 19 nt, Artificial Sequence
  Description of Artificial Sequence: Synthetic oligonucleotide
ccagaggcgaaauaacccu

SEQ ID NO: 772733 - RNA, 19 nt, Artificial Sequence
  Description of Artificial Sequence: Synthetic oligonucleotide
cagguaauaggucguugau

SEQ ID NO: 772734 - RNA, 19 nt, Artificial Sequence
  Description of Artificial Sequence: Synthetic oligonucleotide
ccgcagcccagguaauagg

SEQ ID NO: 772735 - RNA, 19 nt, Artificial Sequence
  Description of Artificial Sequence: Synthetic oligonucleotide
cggccuuccagagaucacg

SEQ ID NO: 772736 - RNA, 19 nt, Artificial Sequence
  Description of Artificial Sequence: Synthetic oligonucleotide
gcgcccuguggugagagug

SEQ ID NO: 772737 - RNA, 19 nt, Artificial Sequence
  Description of Artificial Sequence: Synthetic oligonucleotide
ugcgcccuguggugagagu

SEQ ID NO: 772738 - RNA, 19 nt, Artificial Sequence
  Description of Artificial Sequence: Synthetic oligonucleotide
auaggcucccagagauuau

SEQ ID NO: 772739 - RNA, 19 nt, Artificial Sequence
  Description of Artificial Sequence: Synthetic oligonucleotide
cagucugaucagcaaaauu

SEQ ID NO: 772740 - RNA, 19 nt, Artificial Sequence
  Description of Artificial Sequence: Synthetic oligonucleotide
gcgcaguguguagcgaugc

SEQ ID NO: 772741 - RNA, 19 nt, Artificial Sequence
  Description of Artificial Sequence: Synthetic oligonucleotide
ggcgcaguguguagcgaug

SEQ ID NO: 772742 - RNA, 19 nt, Artificial Sequence
  Description of Artificial Sequence: Synthetic oligonucleotide
guccagugguaaucgccua

SEQ ID NO: 772743 - RNA, 19 nt, Artificial Sequence
  Description of Artificial Sequence: Synthetic oligonucleotide
guacuucacggggacauuu

SEQ ID NO: 772744 - RNA, 19 nt, Artificial Sequence
  Description of Artificial Sequence: Synthetic oligonucleotide
cacacuguauagucauguu

SEQ ID NO: 772745 - RNA, 19 nt, Artificial Sequence
  Description of Artificial Sequence: Synthetic oligonucleotide
cucuccgacgguccuccaa

SEQ ID NO: 772746 - RNA, 19 nt, Artificial Sequence
  Description of Artificial Sequence: Synthetic oligonucleotide
cagaggcgaaauaacccuu

SEQ ID NO: 772747 - RNA, 19 nt, Artificial Sequence
  Description of Artificial Sequence: Synthetic oligonucleotide
caacggccuuccagagauc

SEQ ID NO: 772748 - RNA, 19 nt, Artificial Sequence
  Description of Artificial Sequence: Synthetic oligonucleotide
cccuaucuacucuucauau

SEQ ID NO: 772749 - RNA, 19 nt, Artificial Sequence
  Description of Artificial Sequence: Synthetic oligonucleotide
guauaauaucaggguuccu

SEQ ID NO: 772750 - RNA, 19 nt, Artificial Sequence
  Description of Artificial Sequence: Synthetic oligonucleotide
cccagguaauaggucguug

SEQ ID NO: 772751 - RNA, 19 nt, Artificial Sequence
  Description of Artificial Sequence: Synthetic oligonucleotide
cagguaauaccagccuggu

SEQ ID NO: 772752 - RNA, 19 nt, Artificial Sequence
  Description of Artificial Sequence: Synthetic oligonucleotide
ggccgaauacacauagaau

SEQ ID NO: 772753 - RNA, 19 nt, Artificial Sequence
  Description of Artificial Sequence: Synthetic oligonucleotide
cuacuacauaaugcccacu

SEQ ID NO: 772754 - RNA, 19 nt, Artificial Sequence
  Description of Artificial Sequence: Synthetic oligonucleotide
cagcguguccugaggugua

SEQ ID NO: 772755 - RNA, 19 nt, Artificial Sequence
  Description of Artificial Sequence: Synthetic oligonucleotide
cccuaagccgucagucaga

SEQ ID NO: 772756 - RNA, 19 nt, Artificial Sequence
  Description of Artificial Sequence: Synthetic oligonucleotide
agaucccuuuagaguugaa

SEQ ID NO: 772757 - RNA, 19 nt, Artificial Sequence
  Description of Artificial Sequence: Synthetic oligonucleotide
ccagagauuaucgcuugcu

SEQ ID NO: 772758 - RNA, 19 nt, Artificial Sequence
  Description of Artificial Sequence: Synthetic oligonucleotide
cguuagccucaaaggcuac

SEQ ID NO: 772759 - RNA, 19 nt, Artificial Sequence
  Description of Artificial Sequence: Synthetic oligonucleotide
gcguguccugagguguaug

SEQ ID NO: 772760 - RNA, 19 nt, Artificial Sequence
  Description of Artificial Sequence: Synthetic oligonucleotide
gaguacuaacgagccgcuu

SEQ ID NO: 772761 - RNA, 19 nt, Artificial Sequence
  Description of Artificial Sequence: Synthetic oligonucleotide
ccagguccgcuguaacucu

SEQ ID NO: 772762 - RNA, 19 nt, Artificial Sequence
  Description of Artificial Sequence: Synthetic oligonucleotide
cuucgcccauaaggcaagu

SEQ ID NO: 772763 - RNA, 19 nt, Artificial Sequence
  Description of Artificial Sequence: Synthetic oligonucleotide
ccgacgguccuccaagcuu

SEQ ID NO: 772764 - RNA, 19 nt, Artificial Sequence
  Description of Artificial Sequence: Synthetic oligonucleotide
gcuguccggggucuucguu

SEQ ID NO: 772765 - RNA, 19 nt, Artificial Sequence
  Description of Artificial Sequence: Synthetic oligonucleotide
gccgucagucagagcuaca

SEQ ID NO: 772766 - RNA, 19 nt, Artificial Sequence
  Description of Artificial Sequence: Synthetic oligonucleotide
ccauccacccagguccgcu

SEQ ID NO: 772767 - RNA, 19 nt, Artificial Sequence
  Description of Artificial Sequence: Synthetic oligonucleotide
ccacggcaaccccaugagu

SEQ ID NO: 772768 - RNA, 19 nt, Artificial Sequence
  Description of Artificial Sequence: Synthetic oligonucleotide
cgccuauaaugcugauggu

SEQ ID NO: 772769 - RNA, 19 nt, Artificial Sequence
  Description of Artificial Sequence: Synthetic oligonucleotide
gcccagguaauaggucguu

SEQ ID NO: 772770 - RNA, 19 nt, Artificial Sequence
  Description of Artificial Sequence: Synthetic oligonucleotide
cggcaaccccaugaguaua

SEQ ID NO: 772771 - RNA, 19 nt, Artificial Sequence
  Description of Artificial Sequence: Synthetic oligonucleotide
aacugaguauaacugagcc

SEQ ID NO: 772772 - RNA, 19 nt, Artificial Sequence
  Description of Artificial Sequence: Synthetic oligonucleotide
aacgacacugcccagaauc

SEQ ID NO: 772773 - RNA, 19 nt, Artificial Sequence
  Description of Artificial Sequence: Synthetic oligonucleotide
aaaucgacaagacaacaag

SEQ ID NO: 772774 - RNA, 19 nt, Artificial Sequence
  Description of Artificial Sequence: Synthetic oligonucleotide
aucaaucccacucauaggg

SEQ ID NO: 772775 - RNA, 19 nt, Artificial Sequence
  Description of Artificial Sequence: Synthetic oligonucleotide
ucucuuguagaucuggagg

SEQ ID NO: 772776 - RNA, 19 nt, Artificial Sequence
  Description of Artificial Sequence: Synthetic oligonucleotide
aacuguaccguacuuggcg

SEQ ID NO: 772777 - RNA, 19 nt, Artificial Sequence
  Description of Artificial Sequence: Synthetic oligonucleotide
acaacaagaucccuugacc

SEQ ID NO: 772778 - RNA, 19 nt, Artificial Sequence
  Description of Artificial Sequence: Synthetic oligonucleotide
agauuaucaaaggagcugc

SEQ ID NO: 772779 - RNA, 19 nt, Artificial Sequence
  Description of Artificial Sequence: Synthetic oligonucleotide
guaacuguaccguacuugg

SEQ ID NO: 772780 - RNA, 19 nt, Artificial Sequence
  Description of Artificial Sequence: Synthetic oligonucleotide
aacagauugaaccguucag

SEQ ID NO: 772781 - RNA, 19 nt, Artificial Sequence
  Description of Artificial Sequence: Synthetic oligonucleotide
cauggaaugaccgugauuc

SEQ ID NO: 772782 - RNA, 19 nt, Artificial Sequence
  Description of Artificial Sequence: Synthetic oligonucleotide
aacgguaaggguauccagc

SEQ ID NO: 772783 - RNA, 19 nt, Artificial Sequence
  Description of Artificial Sequence: Synthetic oligonucleotide
uugucucucacuguaaggg

SEQ ID NO: 772784 - RNA, 19 nt, Artificial Sequence
  Description of Artificial Sequence: Synthetic oligonucleotide
uuaucaaaggagcugcacu

SEQ ID NO: 772785 - RNA, 19 nt, Artificial Sequence
  Description of Artificial Sequence: Synthetic oligonucleotide
aggauuauagccaacagca

SEQ ID NO: 772786 - RNA, 19 nt, Artificial Sequence
  Description of Artificial Sequence: Synthetic oligonucleotide
gauacuguuguagauggcc

SEQ ID NO: 772787 - RNA, 19 nt, Artificial Sequence
  Description of Artificial Sequence: Synthetic oligonucleotide
auauucauguuccuuuaag

SEQ ID NO: 772788 - RNA, 19 nt, Artificial Sequence
  Description of Artificial Sequence: Synthetic oligonucleotide
acagaaaucgacaagacaa

SEQ ID NO: 772789 - RNA, 19 nt, Artificial Sequence
  Description of Artificial Sequence: Synthetic oligonucleotide
aguccaagaaaaucccuac

SEQ ID NO: 772790 - RNA, 19 nt, Artificial Sequence
  Description of Artificial Sequence: Synthetic oligonucleotide
ucccgaguaacuuaggcug

SEQ ID NO: 772791 - RNA, 19 nt, Artificial Sequence
  Description of Artificial Sequence: Synthetic oligonucleotide
uacuuggcgaagauuauca

SEQ ID NO: 772792 - RNA, 19 nt, Artificial Sequence
  Description of Artificial Sequence: Synthetic oligonucleotide
acaucucacaaucugcaag

SEQ ID NO: 772793 - RNA, 19 nt, Artificial Sequence
  Description of Artificial Sequence: Synthetic oligonucleotide
uucucauuacaucucacaa

SEQ ID NO: 772794 - RNA, 19 nt, Artificial Sequence
  Description of Artificial Sequence: Synthetic oligonucleotide
ugaagagggguccgaaggg

SEQ ID NO: 772795 - RNA, 19 nt, Artificial Sequence
  Description of Artificial Sequence: Synthetic oligonucleotide
ugggguaggauuauagcca

SEQ ID NO: 772796 - RNA, 19 nt, Artificial Sequence
  Description of Artificial Sequence: Synthetic oligonucleotide
uugauggacagaaaucgac

SEQ ID NO: 772797 - RNA, 19 nt, Artificial Sequence
  Description of Artificial Sequence: Synthetic oligonucleotide
guaguagagaccaugaaca

SEQ ID NO: 772798 - RNA, 19 nt, Artificial Sequence
  Description of Artificial Sequence: Synthetic oligonucleotide
ugauggacagaaaucgaca

SEQ ID NO: 772799 - RNA, 19 nt, Artificial Sequence
  Description of Artificial Sequence: Synthetic oligonucleotide
agacacacggggcaggugg

SEQ ID NO: 772800 - RNA, 19 nt, Artificial Sequence
  Description of Artificial Sequence: Synthetic oligonucleotide
cugaguauaacugagccuc

SEQ ID NO: 772801 - RNA, 19 nt, Artificial Sequence
  Description of Artificial Sequence: Synthetic oligonucleotide
aggggaacagauugaaccg

SEQ ID NO: 772802 - RNA, 19 nt, Artificial Sequence
  Description of Artificial Sequence: Synthetic oligonucleotide
aaucccuacccgcugaaga

SEQ ID NO: 772803 - RNA, 19 nt, Artificial Sequence
  Description of Artificial Sequence: Synthetic oligonucleotide
aagguagcgugagagaaag

SEQ ID NO: 772804 - RNA, 19 nt, Artificial Sequence
  Description of Artificial Sequence: Synthetic oligonucleotide
accacaacgacacugccca

SEQ ID NO: 772805 - RNA, 19 nt, Artificial Sequence
  Description of Artificial Sequence: Synthetic oligonucleotide
uauaacugagccucucuca

SEQ ID NO: 772806 - RNA, 19 nt, Artificial Sequence
  Description of Artificial Sequence: Synthetic oligonucleotide
gacacguuagucuccgcgg

SEQ ID NO: 772807 - RNA, 19 nt, Artificial Sequence
  Description of Artificial Sequence: Synthetic oligonucleotide
cauuacaucucacaaucug

SEQ ID NO: 772808 - RNA, 19 nt, Artificial Sequence
  Description of Artificial Sequence: Synthetic oligonucleotide
acagauugaaccguucagg

SEQ ID NO: 772809 - RNA, 19 nt, Artificial Sequence
  Description of Artificial Sequence: Synthetic oligonucleotide
uuucccauaccacaacgac

SEQ ID NO: 772810 - RNA, 19 nt, Artificial Sequence
  Description of Artificial Sequence: Synthetic oligonucleotide
gauguuguggccgcagucg

SEQ ID NO: 772811 - RNA, 19 nt, Artificial Sequence
  Description of Artificial Sequence: Synthetic oligonucleotide
cacgaaguacugaagacac

SEQ ID NO: 772812 - RNA, 19 nt, Artificial Sequence
  Description of Artificial Sequence: Synthetic oligonucleotide
ugggucaggcucaagagcu

SEQ ID NO: 772813 - RNA, 19 nt, Artificial Sequence
  Description of Artificial Sequence: Synthetic oligonucleotide
cucaaggcgagcuaacaag

SEQ ID NO: 772814 - RNA, 19 nt, Artificial Sequence
  Description of Artificial Sequence: Synthetic oligonucleotide
uuugauggacagaaaucga

SEQ ID NO: 772815 - RNA, 19 nt, Artificial Sequence
  Description of Artificial Sequence: Synthetic oligonucleotide
uuccuuuaaggagugauac

SEQ ID NO: 772816 - RNA, 19 nt, Artificial Sequence
  Description of Artificial Sequence: Synthetic oligonucleotide
ucauuggggagguaagagc

SEQ ID NO: 772817 - RNA, 19 nt, Artificial Sequence
  Description of Artificial Sequence: Synthetic oligonucleotide
augaccgugauucccaaca

SEQ ID NO: 772818 - RNA, 19 nt, Artificial Sequence
  Description of Artificial Sequence: Synthetic oligonucleotide
gagcuaacaagcgauauuc

SEQ ID NO: 772819 - RNA, 19 nt, Artificial Sequence
  Description of Artificial Sequence: Synthetic oligonucleotide
acuguaagggcauggaaaa

SEQ ID NO: 772820 - RNA, 19 nt, Artificial Sequence
  Description of Artificial Sequence: Synthetic oligonucleotide
aaugaccgugauucccaac

SEQ ID NO: 772821 - RNA, 19 nt, Artificial Sequence
  Description of Artificial Sequence: Synthetic oligonucleotide
agguaagagcccaauauuc

SEQ ID NO: 772822 - RNA, 19 nt, Artificial Sequence
  Description of Artificial Sequence: Synthetic oligonucleotide
guaagaguucccugguggg

SEQ ID NO: 772823 - RNA, 19 nt, Artificial Sequence
  Description of Artificial Sequence: Synthetic oligonucleotide
aaccguucaggguugucug

SEQ ID NO: 772824 - RNA, 19 nt, Artificial Sequence
  Description of Artificial Sequence: Synthetic oligonucleotide
acacguuagucuccgcggc

SEQ ID NO: 772825 - RNA, 19 nt, Artificial Sequence
  Description of Artificial Sequence: Synthetic oligonucleotide
ugaacaucuugucucucac

SEQ ID NO: 772826 - RNA, 19 nt, Artificial Sequence
  Description of Artificial Sequence: Synthetic oligonucleotide
agcgcaacagauguugugg

SEQ ID NO: 772827 - RNA, 19 nt, Artificial Sequence
  Description of Artificial Sequence: Synthetic oligonucleotide
aacccaucaaucccacuca

SEQ ID NO: 772828 - RNA, 19 nt, Artificial Sequence
  Description of Artificial Sequence: Synthetic oligonucleotide
aagaaaaucccuacccgcu

SEQ ID NO: 772829 - RNA, 19 nt, Artificial Sequence
  Description of Artificial Sequence: Synthetic oligonucleotide
cacucuucuuagauggucc

SEQ ID NO: 772830 - RNA, 19 nt, Artificial Sequence
  Description of Artificial Sequence: Synthetic oligonucleotide
uagcgugagagaaaguaaa

SEQ ID NO: 772831 - RNA, 19 nt, Artificial Sequence
  Description of Artificial Sequence: Synthetic oligonucleotide
aaucgacaagacaacaaga

SEQ ID NO: 772832 - RNA, 19 nt, Artificial Sequence
  Description of Artificial Sequence: Synthetic oligonucleotide
ucgacaagacaacaagauc

SEQ ID NO: 772833 - RNA, 19 nt, Artificial Sequence
  Description of Artificial Sequence: Synthetic oligonucleotide
aaggcgagcuaacaagcga

SEQ ID NO: 772834 - RNA, 19 nt, Artificial Sequence
  Description of Artificial Sequence: Synthetic oligonucleotide
ucugggaaauagcaauacu

SEQ ID NO: 772835 - RNA, 19 nt, Artificial Sequence
  Description of Artificial Sequence: Synthetic oligonucleotide
guggucuaaguucacuucc

SEQ ID NO: 772836 - RNA, 19 nt, Artificial Sequence
  Description of Artificial Sequence: Synthetic oligonucleotide
ggcgaagauuaucagaaag

SEQ ID NO: 772837 - RNA, 19 nt, Artificial Sequence
  Description of Artificial Sequence: Synthetic oligonucleotide
cacggagagcccaagacac

SEQ ID NO: 772838 - RNA, 19 nt, Artificial Sequence
  Description of Artificial Sequence: Synthetic oligonucleotide
gagaaaguaaagguaugac

SEQ ID NO: 772839 - RNA, 19 nt, Artificial Sequence
  Description of Artificial Sequence: Synthetic oligonucleotide
ucuagcggagcccggcgcg

SEQ ID NO: 772840 - RNA, 19 nt, Artificial Sequence
  Description of Artificial Sequence: Synthetic oligonucleotide
acuuaggcugaaguagggc

SEQ ID NO: 772841 - RNA, 19 nt, Artificial Sequence
  Description of Artificial Sequence: Synthetic oligonucleotide
guaagggcauggaaaacgg

SEQ ID NO: 772842 - RNA, 19 nt, Artificial Sequence
  Description of Artificial Sequence: Synthetic oligonucleotide
aguauaacugagccucucu

SEQ ID NO: 772843 - RNA, 19 nt, Artificial Sequence
  Description of Artificial Sequence: Synthetic oligonucleotide
auuuguuccuuaaagcccu

SEQ ID NO: 772844 - RNA, 19 nt, Artificial Sequence
  Description of Artificial Sequence: Synthetic oligonucleotide
gaaaacgguaaggguaucc

SEQ ID NO: 772845 - RNA, 19 nt, Artificial Sequence
  Description of Artificial Sequence: Synthetic oligonucleotide
acugaguauaacugagccu

SEQ ID NO: 772846 - RNA, 19 nt, Artificial Sequence
  Description of Artificial Sequence: Synthetic oligonucleotide
aggcaagcgcaacagaugu

SEQ ID NO: 772847 - RNA, 19 nt, Artificial Sequence
  Description of Artificial Sequence: Synthetic oligonucleotide
agaaaaucccuacccgcug

SEQ ID NO: 772848 - RNA, 19 nt, Artificial Sequence
  Description of Artificial Sequence: Synthetic oligonucleotide
accguugauacuguuguag

SEQ ID NO: 772849 - RNA, 19 nt, Artificial Sequence
  Description of Artificial Sequence: Synthetic oligonucleotide
aagcgcaacagauguugug

SEQ ID NO: 772850 - RNA, 19 nt, Artificial Sequence
  Description of Artificial Sequence: Synthetic oligonucleotide
cucccagcgaugaaacacg

SEQ ID NO: 772851 - RNA, 19 nt, Artificial Sequence
  Description of Artificial Sequence: Synthetic oligonucleotide
ucuccauggaaugaccgug

SEQ ID NO: 772852 - RNA, 19 nt, Artificial Sequence
  Description of Artificial Sequence: Synthetic oligonucleotide
ugucucucacuguaagggc

SEQ ID NO: 772853 - RNA, 19 nt, Artificial Sequence
  Description of Artificial Sequence: Synthetic oligonucleotide
cagaaaucgacaagacaac

SEQ ID NO: 772854 - RNA, 19 nt, Artificial Sequence
  Description of Artificial Sequence: Synthetic oligonucleotide
ucucccagcgaugaaacac

SEQ ID NO: 772855 - RNA, 19 nt, Artificial Sequence
  Description of Artificial Sequence: Synthetic oligonucleotide
uguuccuuuaaggagugau

SEQ ID NO: 772856 - RNA, 19 nt, Artificial Sequence
  Description of Artificial Sequence: Synthetic oligonucleotide
uguggucuaaguucacuuc

SEQ ID NO: 772857 - RNA, 19 nt, Artificial Sequence
  Description of Artificial Sequence: Synthetic oligonucleotide
gaagagggguccgaagggg

SEQ ID NO: 772858 - RNA, 19 nt, Artificial Sequence
  Description of Artificial Sequence: Synthetic oligonucleotide
caaggcgagcuaacaagcg

SEQ ID NO: 772859 - RNA, 19 nt, Artificial Sequence
  Description of Artificial Sequence: Synthetic oligonucleotide
cagauuaucaaaggagcug

SEQ ID NO: 772860 - RNA, 19 nt, Artificial Sequence
  Description of Artificial Sequence: Synthetic oligonucleotide
uggaaugaccgugauuccc

SEQ ID NO: 772861 - RNA, 19 nt, Artificial Sequence
  Description of Artificial Sequence: Synthetic oligonucleotide
agcccaauauucuuuccca

SEQ ID NO: 772862 - RNA, 19 nt, Artificial Sequence
  Description of Artificial Sequence: Synthetic oligonucleotide
acgguaaggguauccagcu

SEQ ID NO: 772863 - RNA, 19 nt, Artificial Sequence
  Description of Artificial Sequence: Synthetic oligonucleotide
gcgaagauuaucagaaagg

SEQ ID NO: 772864 - RNA, 19 nt, Artificial Sequence
  Description of Artificial Sequence: Synthetic oligonucleotide
agauugaaccguucagggu

SEQ ID NO: 772865 - RNA, 19 nt, Artificial Sequence
  Description of Artificial Sequence: Synthetic oligonucleotide
ucccucccgaguaacuuag

SEQ ID NO: 772866 - RNA, 19 nt, Artificial Sequence
  Description of Artificial Sequence: Synthetic oligonucleotide
uccauaucugacugcauuu

SEQ ID NO: 772867 - RNA, 19 nt, Artificial Sequence
  Description of Artificial Sequence: Synthetic oligonucleotide
guauaacugagccucucuc

SEQ ID NO: 772868 - RNA, 19 nt, Artificial Sequence
  Description of Artificial Sequence: Synthetic oligonucleotide
uggucuaaguucacuuccu

SEQ ID NO: 772869 - RNA, 19 nt, Artificial Sequence
  Description of Artificial Sequence: Synthetic oligonucleotide
acugagccucucucaauuc

SEQ ID NO: 772870 - RNA, 19 nt, Artificial Sequence
  Description of Artificial Sequence: Synthetic oligonucleotide
ucccagcgaugaaacacgg

SEQ ID NO: 772871 - RNA, 19 nt, Artificial Sequence
  Description of Artificial Sequence: Synthetic oligonucleotide
aaucccacucauagggcag

SEQ ID NO: 772872 - RNA, 19 nt, Artificial Sequence
  Description of Artificial Sequence: Synthetic oligonucleotide
acuguaccguacuuggcga

SEQ ID NO: 772873 - RNA, 19 nt, Artificial Sequence
  Description of Artificial Sequence: Synthetic oligonucleotide
agucgagcaucaugggcuc

SEQ ID NO: 772874 - RNA, 19 nt, Artificial Sequence
  Description of Artificial Sequence: Synthetic oligonucleotide
ucacuguaagggcauggaa

SEQ ID NO: 772875 - RNA, 19 nt, Artificial Sequence
  Description of Artificial Sequence: Synthetic oligonucleotide
aguguaguagagaccauga

SEQ ID NO: 772876 - RNA, 19 nt, Artificial Sequence
  Description of Artificial Sequence: Synthetic oligonucleotide
aucgacaagacaacaagau

SEQ ID NO: 772877 - RNA, 19 nt, Artificial Sequence
  Description of Artificial Sequence: Synthetic oligonucleotide
aaaaucccuacccgcugaa

SEQ ID NO: 772878 - RNA, 19 nt, Artificial Sequence
  Description of Artificial Sequence: Synthetic oligonucleotide
gaucccuugaccuggggua

SEQ ID NO: 772879 - RNA, 19 nt, Artificial Sequence
  Description of Artificial Sequence: Synthetic oligonucleotide
ugaguauaacugagccucu

SEQ ID NO: 772880 - RNA, 19 nt, Artificial Sequence
  Description of Artificial Sequence: Synthetic oligonucleotide
ugauacuguuguagauggc

SEQ ID NO: 772881 - RNA, 19 nt, Artificial Sequence
  Description of Artificial Sequence: Synthetic oligonucleotide
ugaaacacggagagcccaa

SEQ ID NO: 772882 - RNA, 19 nt, Artificial Sequence
  Description of Artificial Sequence: Synthetic oligonucleotide
gcaacagauguuguggccg

SEQ ID NO: 772883 - RNA, 19 nt, Artificial Sequence
  Description of Artificial Sequence: Synthetic oligonucleotide
gacaccuaugguccacuug

SEQ ID NO: 772884 - RNA, 19 nt, Artificial Sequence
  Description of Artificial Sequence: Synthetic oligonucleotide
ccgauucuggauuuguucc

SEQ ID NO: 772885 - RNA, 19 nt, Artificial Sequence
  Description of Artificial Sequence: Synthetic oligonucleotide
caacagauguuguggccgc

SEQ ID NO: 772886 - RNA, 19 nt, Artificial Sequence
  Description of Artificial Sequence: Synthetic oligonucleotide
gucacaucaacugaguaua

SEQ ID NO: 772887 - RNA, 19 nt, Artificial Sequence
  Description of Artificial Sequence: Synthetic oligonucleotide
uuaaagcccuccaccgccu

SEQ ID NO: 772888 - RNA, 19 nt, Artificial Sequence
  Description of Artificial Sequence: Synthetic oligonucleotide
guaaagguaugacaucucu

SEQ ID NO: 772889 - RNA, 19 nt, Artificial Sequence
  Description of Artificial Sequence: Synthetic oligonucleotide
uguaccguacuuggcgaag

SEQ ID NO: 772890 - RNA, 19 nt, Artificial Sequence
  Description of Artificial Sequence: Synthetic oligonucleotide
auccccgcacagcugcacc

SEQ ID NO: 772891 - RNA, 19 nt, Artificial Sequence
  Description of Artificial Sequence: Synthetic oligonucleotide
uaguagagaccaugaacau

SEQ ID NO: 772892 - RNA, 19 nt, Artificial Sequence
  Description of Artificial Sequence: Synthetic oligonucleotide
cacgcagaugggcaucugg

SEQ ID NO: 772893 - RNA, 19 nt, Artificial Sequence
  Description of Artificial Sequence: Synthetic oligonucleotide
guauccagcuuugauggac

SEQ ID NO: 772894 - RNA, 19 nt, Artificial Sequence
  Description of Artificial Sequence: Synthetic oligonucleotide
uacaucucacaaucugcaa

SEQ ID NO: 772895 - RNA, 19 nt, Artificial Sequence
  Description of Artificial Sequence: Synthetic oligonucleotide
acuuccuuaaggggagguc

SEQ ID NO: 772896 - RNA, 19 nt, Artificial Sequence
  Description of Artificial Sequence: Synthetic oligonucleotide
gaccgugauucccaacaug

SEQ ID NO: 772897 - RNA, 19 nt, Artificial Sequence
  Description of Artificial Sequence: Synthetic oligonucleotide
aauccccgcacagcugcac

SEQ ID NO: 772898 - RNA, 19 nt, Artificial Sequence
  Description of Artificial Sequence: Synthetic oligonucleotide
aaaucccuacccgcugaag

SEQ ID NO: 772899 - RNA, 19 nt, Artificial Sequence
  Description of Artificial Sequence: Synthetic oligonucleotide
gugcuucucgcacacgccc

SEQ ID NO: 772900 - RNA, 19 nt, Artificial Sequence
  Description of Artificial Sequence: Synthetic oligonucleotide
ccgcagucgagcaucaugg

SEQ ID NO: 772901 - RNA, 19 nt, Artificial Sequence
  Description of Artificial Sequence: Synthetic oligonucleotide
caaucccacucauagggca

SEQ ID NO: 772902 - RNA, 19 nt, Artificial Sequence
  Description of Artificial Sequence: Synthetic oligonucleotide
cuuucccauaccacaacga

SEQ ID NO: 772903 - RNA, 19 nt, Artificial Sequence
  Description of Artificial Sequence: Synthetic oligonucleotide
gggauccugauucuuucag

SEQ ID NO: 772904 - RNA, 19 nt, Artificial Sequence
  Description of Artificial Sequence: Synthetic oligonucleotide
agcgugagagaaaguaaag

SEQ ID NO: 772905 - RNA, 19 nt, Artificial Sequence
  Description of Artificial Sequence: Synthetic oligonucleotide
augaaacacggagagccca

SEQ ID NO: 772906 - RNA, 19 nt, Artificial Sequence
  Description of Artificial Sequence: Synthetic oligonucleotide
agcuucagaggcucgcggu

SEQ ID NO: 772907 - RNA, 19 nt, Artificial Sequence
  Description of Artificial Sequence: Synthetic oligonucleotide
caacaagaucccuugaccu

SEQ ID NO: 772908 - RNA, 19 nt, Artificial Sequence
  Description of Artificial Sequence: Synthetic oligonucleotide
aggcacucggccacgcucc

SEQ ID NO: 772909 - RNA, 19 nt, Artificial Sequence
  Description of Artificial Sequence: Synthetic oligonucleotide
cacgacacguuagucuccg

SEQ ID NO: 772910 - RNA, 19 nt, Artificial Sequence
  Description of Artificial Sequence: Synthetic oligonucleotide
ggagugauacagcugcuca

SEQ ID NO: 772911 - RNA, 19 nt, Artificial Sequence
  Description of Artificial Sequence: Synthetic oligonucleotide
cugggaaauagcaauacuu

SEQ ID NO: 772912 - RNA, 19 nt, Artificial Sequence
  Description of Artificial Sequence: Synthetic oligonucleotide
guagauggccaagucuagc

SEQ ID NO: 772913 - RNA, 19 nt, Artificial Sequence
  Description of Artificial Sequence: Synthetic oligonucleotide
ggauccugauucuuucagc

SEQ ID NO: 772914 - RNA, 19 nt, Artificial Sequence
  Description of Artificial Sequence: Synthetic oligonucleotide
caagaucccuugaccuggg

SEQ ID NO: 772915 - RNA, 19 nt, Artificial Sequence
  Description of Artificial Sequence: Synthetic oligonucleotide
gaaacacggagagcccaag

SEQ ID NO: 772916 - RNA, 19 nt, Artificial Sequence
  Description of Artificial Sequence: Synthetic oligonucleotide
gcaagcgcaacagauguug

SEQ ID NO: 772917 - RNA, 19 nt, Artificial Sequence
  Description of Artificial Sequence: Synthetic oligonucleotide
ggcacgacacguuagucuc

SEQ ID NO: 772918 - RNA, 19 nt, Artificial Sequence
  Description of Artificial Sequence: Synthetic oligonucleotide
uucuccgcuccggagcggg

SEQ ID NO: 772919 - RNA, 19 nt, Artificial Sequence
  Description of Artificial Sequence: Synthetic oligonucleotide
aggcucgcggugcuucucg

SEQ ID NO: 772920 - RNA, 19 nt, Artificial Sequence
  Description of Artificial Sequence: Synthetic oligonucleotide
ggaaaguguaguagagacc

SEQ ID NO: 772921 - RNA, 19 nt, Artificial Sequence
  Description of Artificial Sequence: Synthetic oligonucleotide
aucaaaggagcugcacucu

SEQ ID NO: 772922 - RNA, 19 nt, Artificial Sequence
  Description of Artificial Sequence: Synthetic oligonucleotide
cagucgagcaucaugggcu

SEQ ID NO: 772923 - RNA, 19 nt, Artificial Sequence
  Description of Artificial Sequence: Synthetic oligonucleotide
gauuaucaaaggagcugca

SEQ ID NO: 772924 - RNA, 19 nt, Artificial Sequence
  Description of Artificial Sequence: Synthetic oligonucleotide
auggcgcgggcccacuggg

SEQ ID NO: 772925 - RNA, 19 nt, Artificial Sequence
  Description of Artificial Sequence: Synthetic oligonucleotide
ugaccgugauucccaacau

SEQ ID NO: 772926 - RNA, 19 nt, Artificial Sequence
  Description of Artificial Sequence: Synthetic oligonucleotide
cuguaagaguucccuggug

SEQ ID NO: 772927 - RNA, 19 nt, Artificial Sequence
  Description of Artificial Sequence: Synthetic oligonucleotide
auugaaccguucaggguug

SEQ ID NO: 772928 - RNA, 19 nt, Artificial Sequence
  Description of Artificial Sequence: Synthetic oligonucleotide
uccuuaaggggaggucucc

SEQ ID NO: 772929 - RNA, 19 nt, Artificial Sequence
  Description of Artificial Sequence: Synthetic oligonucleotide
acccgcugaagaggggucc

SEQ ID NO: 772930 - RNA, 19 nt, Artificial Sequence
  Description of Artificial Sequence: Synthetic oligonucleotide
uccauggaaugaccgugau

SEQ ID NO: 772931 - RNA, 19 nt, Artificial Sequence
  Description of Artificial Sequence: Synthetic oligonucleotide
uggagguaacuguaccgua

SEQ ID NO: 772932 - RNA, 19 nt, Artificial Sequence
  Description of Artificial Sequence: Synthetic oligonucleotide
agggauccugauucuuuca

SEQ ID NO: 772933 - RNA, 19 nt, Artificial Sequence
  Description of Artificial Sequence: Synthetic oligonucleotide
acgccaauccccgcacagc

SEQ ID NO: 772934 - RNA, 19 nt, Artificial Sequence
  Description of Artificial Sequence: Synthetic oligonucleotide
gguagcgugagagaaagua

SEQ ID NO: 772935 - RNA, 19 nt, Artificial Sequence
  Description of Artificial Sequence: Synthetic oligonucleotide
uuagucuccgcggcacccc

SEQ ID NO: 772936 - RNA, 19 nt, Artificial Sequence
  Description of Artificial Sequence: Synthetic oligonucleotide
gucuaaguucacuuccuua

SEQ ID NO: 772937 - RNA, 19 nt, Artificial Sequence
  Description of Artificial Sequence: Synthetic oligonucleotide
aacaagcgauauucauguu

SEQ ID NO: 772938 - RNA, 19 nt, Artificial Sequence
  Description of Artificial Sequence: Synthetic oligonucleotide
ucaccccaccuuuucugca

SEQ ID NO: 772939 - RNA, 19 nt, Artificial Sequence
  Description of Artificial Sequence: Synthetic oligonucleotide
ucggcuucuccgcuccgga

SEQ ID NO: 772940 - RNA, 19 nt, Artificial Sequence
  Description of Artificial Sequence: Synthetic oligonucleotide
guuagucuccgcggcaccc

SEQ ID NO: 772941 - RNA, 19 nt, Artificial Sequence
  Description of Artificial Sequence: Synthetic oligonucleotide
cauggcgcgggcccacugg

SEQ ID NO: 772942 - RNA, 19 nt, Artificial Sequence
  Description of Artificial Sequence: Synthetic oligonucleotide
cacgccaauccccgcacag

SEQ ID NO: 772943 - RNA, 19 nt, Artificial Sequence
  Description of Artificial Sequence: Synthetic oligonucleotide
gcagucgagcaucaugggc

SEQ ID NO: 772944 - RNA, 19 nt, Artificial Sequence
  Description of Artificial Sequence: Synthetic oligonucleotide
ggagguaagagcccaauau

SEQ ID NO: 772945 - RNA, 19 nt, Artificial Sequence
  Description of Artificial Sequence: Synthetic oligonucleotide
gcuucuccgcuccggagcg

SEQ ID NO: 772946 - RNA, 19 nt, Artificial Sequence
  Description of Artificial Sequence: Synthetic oligonucleotide
uccccgcacagcugcaccc

SEQ ID NO: 772947 - RNA, 19 nt, Artificial Sequence
  Description of Artificial Sequence: Synthetic oligonucleotide
gucucucacuguaagggca

SEQ ID NO: 772948 - RNA, 19 nt, Artificial Sequence
  Description of Artificial Sequence: Synthetic oligonucleotide
cacggagccgagcucuagc

SEQ ID NO: 772949 - RNA, 19 nt, Artificial Sequence
  Description of Artificial Sequence: Synthetic oligonucleotide
gggaaauagcaauacuucu

SEQ ID NO: 772950 - RNA, 19 nt, Artificial Sequence
  Description of Artificial Sequence: Synthetic oligonucleotide
acgcgugcggagcucucgg

SEQ ID NO: 772951 - RNA, 19 nt, Artificial Sequence
  Description of Artificial Sequence: Synthetic oligonucleotide
ucacuuccuuaaggggagg

SEQ ID NO: 772952 - RNA, 19 nt, Artificial Sequence
  Description of Artificial Sequence: Synthetic oligonucleotide
ucacguuggccaggugccg

SEQ ID NO: 772953 - RNA, 19 nt, Artificial Sequence
  Description of Artificial Sequence: Synthetic oligonucleotide
agcgauauucauguuccuu

SEQ ID NO: 772954 - RNA, 19 nt, Artificial Sequence
  Description of Artificial Sequence: Synthetic oligonucleotide
guagcgugagagaaaguaa

SEQ ID NO: 772955 - RNA, 19 nt, Artificial Sequence
  Description of Artificial Sequence: Synthetic oligonucleotide
gaguauaacugagccucuc

SEQ ID NO: 772956 - RNA, 19 nt, Artificial Sequence
  Description of Artificial Sequence: Synthetic oligonucleotide
gccgauucuggauuuguuc

SEQ ID NO: 772957 - RNA, 19 nt, Artificial Sequence
  Description of Artificial Sequence: Synthetic oligonucleotide
acgacacguuagucuccgc

SEQ ID NO: 772958 - RNA, 19 nt, Artificial Sequence
  Description of Artificial Sequence: Synthetic oligonucleotide
gaaccguucaggguugucu

SEQ ID NO: 772959 - RNA, 19 nt, Artificial Sequence
  Description of Artificial Sequence: Synthetic oligonucleotide
ugguccacuuggcuuuauc

SEQ ID NO: 772960 - RNA, 19 nt, Artificial Sequence
  Description of Artificial Sequence: Synthetic oligonucleotide
ucuccauaucugacugcau

SEQ ID NO: 772961 - RNA, 19 nt, Artificial Sequence
  Description of Artificial Sequence: Synthetic oligonucleotide
agcagcgggccaggcaagc

SEQ ID NO: 772962 - RNA, 19 nt, Artificial Sequence
  Description of Artificial Sequence: Synthetic oligonucleotide
gacgcgugcggagcucucg

SEQ ID NO: 772963 - RNA, 19 nt, Artificial Sequence
  Description of Artificial Sequence: Synthetic oligonucleotide
uaccguacuuggcgaagau

SEQ ID NO: 772964 - RNA, 19 nt, Artificial Sequence
  Description of Artificial Sequence: Synthetic oligonucleotide
ggagguaacuguaccguac

SEQ ID NO: 772965 - RNA, 19 nt, Artificial Sequence
  Description of Artificial Sequence: Synthetic oligonucleotide
gaaugaccgugauucccaa

SEQ ID NO: 772966 - RNA, 19 nt, Artificial Sequence
  Description of Artificial Sequence: Synthetic oligonucleotide
gugugauccagggcucagg

SEQ ID NO: 772967 - RNA, 19 nt, Artificial Sequence
  Description of Artificial Sequence: Synthetic oligonucleotide
cucuagcggagcccggcgc

SEQ ID NO: 772968 - RNA, 19 nt, Artificial Sequence
  Description of Artificial Sequence: Synthetic oligonucleotide
ggcaaucaggccacugagg

SEQ ID NO: 772969 - RNA, 19 nt, Artificial Sequence
  Description of Artificial Sequence: Synthetic oligonucleotide
ggagccgagcucuagcgga

SEQ ID NO: 772970 - RNA, 19 nt, Artificial Sequence
  Description of Artificial Sequence: Synthetic oligonucleotide
gaagguagcgugagagaaa

SEQ ID NO: 772971 - RNA, 19 nt, Artificial Sequence
  Description of Artificial Sequence: Synthetic oligonucleotide
cuccauggaaugaccguga

SEQ ID NO: 772972 - RNA, 19 nt, Artificial Sequence
  Description of Artificial Sequence: Synthetic oligonucleotide
guguaguagagaccaugaa

SEQ ID NO: 772973 - RNA, 19 nt, Artificial Sequence
  Description of Artificial Sequence: Synthetic oligonucleotide
ccauaccacaacgacacug

SEQ ID NO: 772974 - RNA, 19 nt, Artificial Sequence
  Description of Artificial Sequence: Synthetic oligonucleotide
ggaaugaccgugauuccca

SEQ ID NO: 772975 - RNA, 19 nt, Artificial Sequence
  Description of Artificial Sequence: Synthetic oligonucleotide
guugucuggcagguccugc

SEQ ID NO: 772976 - RNA, 19 nt, Artificial Sequence
  Description of Artificial Sequence: Synthetic oligonucleotide
cuguaagggcauggaaaac

SEQ ID NO: 772977 - RNA, 19 nt, Artificial Sequence
  Description of Artificial Sequence: Synthetic oligonucleotide
cacguuggccaggugccgg

SEQ ID NO: 772978 - RNA, 19 nt, Artificial Sequence
  Description of Artificial Sequence: Synthetic oligonucleotide
ccuuaaagcccuccaccgc

SEQ ID NO: 772979 - RNA, 19 nt, Artificial Sequence
  Description of Artificial Sequence: Synthetic oligonucleotide
aggcgagcuaacaagcgau

SEQ ID NO: 772980 - RNA, 19 nt, Artificial Sequence
  Description of Artificial Sequence: Synthetic oligonucleotide
gagcgggcgggccuccgag

SEQ ID NO: 772981 - RNA, 19 nt, Artificial Sequence
  Description of Artificial Sequence: Synthetic oligonucleotide
cccuacccgcugaagaggg

SEQ ID NO: 772982 - RNA, 19 nt, Artificial Sequence
  Description of Artificial Sequence: Synthetic oligonucleotide
cgacacguuagucuccgcg

SEQ ID NO: 772983 - RNA, 19 nt, Artificial Sequence
  Description of Artificial Sequence: Synthetic oligonucleotide
ggauuauagccaacagcac

SEQ ID NO: 772984 - RNA, 19 nt, Artificial Sequence
  Description of Artificial Sequence: Synthetic oligonucleotide
cucccgaguaacuuaggcu

SEQ ID NO: 772985 - RNA, 19 nt, Artificial Sequence
  Description of Artificial Sequence: Synthetic oligonucleotide
gcaccguugauacuguugu

SEQ ID NO: 772986 - RNA, 19 nt, Artificial Sequence
  Description of Artificial Sequence: Synthetic oligonucleotide
ucuccgcggcaccccagca

SEQ ID NO: 772987 - RNA, 19 nt, Artificial Sequence
  Description of Artificial Sequence: Synthetic oligonucleotide
agccgagcucuagcggagc

SEQ ID NO: 772988 - RNA, 19 nt, Artificial Sequence
  Description of Artificial Sequence: Synthetic oligonucleotide
caugaacaucuugucucuc

SEQ ID NO: 772989 - RNA, 19 nt, Artificial Sequence
  Description of Artificial Sequence: Synthetic oligonucleotide
ggcaccguugauacuguug

SEQ ID NO: 772990 - RNA, 19 nt, Artificial Sequence
  Description of Artificial Sequence: Synthetic oligonucleotide
gcuaacaagcgauauucau

SEQ ID NO: 772991 - RNA, 19 nt, Artificial Sequence
  Description of Artificial Sequence: Synthetic oligonucleotide
guugggccgcauguggcgc

SEQ ID NO: 772992 - RNA, 19 nt, Artificial Sequence
  Description of Artificial Sequence: Synthetic oligonucleotide
cucggcuucuccgcuccgg

SEQ ID NO: 772993 - RNA, 19 nt, Artificial Sequence
  Description of Artificial Sequence: Synthetic oligonucleotide
gauccagggcucagggauc

SEQ ID NO: 772994 - RNA, 19 nt, Artificial Sequence
  Description of Artificial Sequence: Synthetic oligonucleotide
accccaccuuuucugcaca

SEQ ID NO: 772995 - RNA, 19 nt, Artificial Sequence
  Description of Artificial Sequence: Synthetic oligonucleotide
cacaacgacacugcccaga

SEQ ID NO: 772996 - RNA, 19 nt, Artificial Sequence
  Description of Artificial Sequence: Synthetic oligonucleotide
gggguaggauuauagccaa

SEQ ID NO: 772997 - RNA, 19 nt, Artificial Sequence
  Description of Artificial Sequence: Synthetic oligonucleotide
cuccgcggcaccccagcag

SEQ ID NO: 772998 - RNA, 19 nt, Artificial Sequence
  Description of Artificial Sequence: Synthetic oligonucleotide
gucuccauggaaugaccgu

SEQ ID NO: 772999 - RNA, 19 nt, Artificial Sequence
  Description of Artificial Sequence: Synthetic oligonucleotide
guaccguacuuggcgaaga

SEQ ID NO: 773000 - RNA, 19 nt, Artificial Sequence
  Description of Artificial Sequence: Synthetic oligonucleotide
cugucacauuguagaagga

SEQ ID NO: 773001 - RNA, 19 nt, Artificial Sequence
  Description of Artificial Sequence: Synthetic oligonucleotide
cagcaucauaguccaagaa

SEQ ID NO: 773002 - RNA, 19 nt, Artificial Sequence
  Description of Artificial Sequence: Synthetic oligonucleotide
caucucgccgccgggcccc

SEQ ID NO: 773003 - RNA, 19 nt, Artificial Sequence
  Description of Artificial Sequence: Synthetic oligonucleotide
ccaaggucacaucaacuga

SEQ ID NO: 773004 - RNA, 19 nt, Artificial Sequence
  Description of Artificial Sequence: Synthetic oligonucleotide
gcgauauucauguuccuuu

SEQ ID NO: 773005 - RNA, 19 nt, Artificial Sequence
  Description of Artificial Sequence: Synthetic oligonucleotide
ccgugauucccaacauggc

SEQ ID NO: 773006 - RNA, 19 nt, Artificial Sequence
  Description of Artificial Sequence: Synthetic oligonucleotide
cucuucccucccgaguaac

SEQ ID NO: 773007 - RNA, 19 nt, Artificial Sequence
  Description of Artificial Sequence: Synthetic oligonucleotide
ggaacagauugaaccguuc

SEQ ID NO: 773008 - RNA, 19 nt, Artificial Sequence
  Description of Artificial Sequence: Synthetic oligonucleotide
auguggcgcugcgggaagg

SEQ ID NO: 773009 - RNA, 19 nt, Artificial Sequence
  Description of Artificial Sequence: Synthetic oligonucleotide
gcggucgcacaccacgcag

SEQ ID NO: 773010 - RNA, 19 nt, Artificial Sequence
  Description of Artificial Sequence: Synthetic oligonucleotide
cugagccucucucaauucu

SEQ ID NO: 773011 - RNA, 19 nt, Artificial Sequence
  Description of Artificial Sequence: Synthetic oligonucleotide
ugaccugggguaggauuau

SEQ ID NO: 773012 - RNA, 19 nt, Artificial Sequence
  Description of Artificial Sequence: Synthetic oligonucleotide
cacguuagucuccgcggca

SEQ ID NO: 773013 - RNA, 19 nt, Artificial Sequence
  Description of Artificial Sequence: Synthetic oligonucleotide
ugaaccguucaggguuguc

SEQ ID NO: 773014 - RNA, 19 nt, Artificial Sequence
  Description of Artificial Sequence: Synthetic oligonucleotide
uugaaccguucaggguugu

SEQ ID NO: 773015 - RNA, 19 nt, Artificial Sequence
  Description of Artificial Sequence: Synthetic oligonucleotide
gacacugcccagaauccau

SEQ ID NO: 773016 - RNA, 19 nt, Artificial Sequence
  Description of Artificial Sequence: Synthetic oligonucleotide
gagcacggagccgagcucu

SEQ ID NO: 773017 - RNA, 19 nt, Artificial Sequence
  Description of Artificial Sequence: Synthetic oligonucleotide
ccgacggccgcuccgugcg

SEQ ID NO: 773018 - RNA, 19 nt, Artificial Sequence
  Description of Artificial Sequence: Synthetic oligonucleotide
guagggccggacuggccca

SEQ ID NO: 773019 - RNA, 19 nt, Artificial Sequence
  Description of Artificial Sequence: Synthetic oligonucleotide
gccacggugcucccgcgag

SEQ ID NO: 773020 - RNA, 19 nt, Artificial Sequence
  Description of Artificial Sequence: Synthetic oligonucleotide
acggugcucccgcgagcgg

SEQ ID NO: 773021 - RNA, 19 nt, Artificial Sequence
  Description of Artificial Sequence: Synthetic oligonucleotide
cuagcggagcccggcgcgc

SEQ ID NO: 773022 - RNA, 19 nt, Artificial Sequence
  Description of Artificial Sequence: Synthetic oligonucleotide
ccacgaaguacugaagaca

SEQ ID NO: 773023 - RNA, 19 nt, Artificial Sequence
  Description of Artificial Sequence: Synthetic oligonucleotide
cuuaaggggaggucuccau

SEQ ID NO: 773024 - RNA, 19 nt, Artificial Sequence
  Description of Artificial Sequence: Synthetic oligonucleotide
gcggccacgccaauccccg

SEQ ID NO: 773025 - RNA, 19 nt, Artificial Sequence
  Description of Artificial Sequence: Synthetic oligonucleotide
ggugugauccagggcucag

SEQ ID NO: 773026 - RNA, 19 nt, Artificial Sequence
  Description of Artificial Sequence: Synthetic oligonucleotide
cuguaccguacuuggcgaa

SEQ ID NO: 773027 - RNA, 19 nt, Artificial Sequence
  Description of Artificial Sequence: Synthetic oligonucleotide
gccggacuggcccacagaa

SEQ ID NO: 773028 - RNA, 19 nt, Artificial Sequence
  Description of Artificial Sequence: Synthetic oligonucleotide
cgagcucuagcggagcccg

SEQ ID NO: 773029 - RNA, 19 nt, Artificial Sequence
  Description of Artificial Sequence: Synthetic oligonucleotide
agacacaggggaacagauu

SEQ ID NO: 773030 - RNA, 19 nt, Artificial Sequence
  Description of Artificial Sequence: Synthetic oligonucleotide
gcgugcggagcucucgggc

SEQ ID NO: 773031 - RNA, 19 nt, Artificial Sequence
  Description of Artificial Sequence: Synthetic oligonucleotide
cuuagaugguccagccgau

SEQ ID NO: 773032 - RNA, 19 nt, Artificial Sequence
  Description of Artificial Sequence: Synthetic oligonucleotide
gcugaaguagggccggacu

SEQ ID NO: 773033 - RNA, 19 nt, Artificial Sequence
  Description of Artificial Sequence: Synthetic oligonucleotide
cacggggcagguggucucc

SEQ ID NO: 773034 - RNA, 19 nt, Artificial Sequence
  Description of Artificial Sequence: Synthetic oligonucleotide
ucccgcgagcggucgcaca

SEQ ID NO: 773035 - RNA, 19 nt, Artificial Sequence
  Description of Artificial Sequence: Synthetic oligonucleotide
cccaauauucuuucccaua

SEQ ID NO: 773036 - RNA, 19 nt, Artificial Sequence
  Description of Artificial Sequence: Synthetic oligonucleotide
acggagagcccaagacaca

SEQ ID NO: 773037 - RNA, 19 nt, Artificial Sequence
  Description of Artificial Sequence: Synthetic oligonucleotide
cuacccgcugaagaggggu

SEQ ID NO: 773038 - RNA, 19 nt, Artificial Sequence
  Description of Artificial Sequence: Synthetic oligonucleotide
gggagguaagagcccaaua

SEQ ID NO: 773039 - RNA, 19 nt, Artificial Sequence
  Description of Artificial Sequence: Synthetic oligonucleotide
ggccuccgaggccggaucc

SEQ ID NO: 773040 - RNA, 19 nt, Artificial Sequence
  Description of Artificial Sequence: Synthetic oligonucleotide
ccuacccgcugaagagggg

SEQ ID NO: 773041 - RNA, 19 nt, Artificial Sequence
  Description of Artificial Sequence: Synthetic oligonucleotide
cuucuccgcuccggagcgg

SEQ ID NO: 773042 - RNA, 19 nt, Artificial Sequence
  Description of Artificial Sequence: Synthetic oligonucleotide
agccgauucuggauuuguu

SEQ ID NO: 773043 - RNA, 19 nt, Artificial Sequence
  Description of Artificial Sequence: Synthetic oligonucleotide
cugugcccggcgucucuuc

SEQ ID NO: 773044 - RNA, 19 nt, Artificial Sequence
  Description of Artificial Sequence: Synthetic oligonucleotide
aguucccuggugggcugcu

SEQ ID NO: 773045 - RNA, 19 nt, Artificial Sequence
  Description of Artificial Sequence: Synthetic oligonucleotide
cuucucgcacacgcccauc

SEQ ID NO: 773046 - RNA, 19 nt, Artificial Sequence
  Description of Artificial Sequence: Synthetic oligonucleotide
ggccgcauguggcgcugcg

SEQ ID NO: 773047 - RNA, 19 nt, Artificial Sequence
  Description of Artificial Sequence: Synthetic oligonucleotide
ccucaaggcgagcuaacaa

SEQ ID NO: 773048 - RNA, 19 nt, Artificial Sequence
  Description of Artificial Sequence: Synthetic oligonucleotide
acugcgggcacgacacguu

SEQ ID NO: 773049 - RNA, 19 nt, Artificial Sequence
  Description of Artificial Sequence: Synthetic oligonucleotide
ccggcgucucuucuucaag

SEQ ID NO: 773050 - RNA, 19 nt, Artificial Sequence
  Description of Artificial Sequence: Synthetic oligonucleotide
cgcagucgagcaucauggg

SEQ ID NO: 773051 - RNA, 19 nt, Artificial Sequence
  Description of Artificial Sequence: Synthetic oligonucleotide
agacgcgugcggagcucuc

SEQ ID NO: 773052 - RNA, 19 nt, Artificial Sequence
  Description of Artificial Sequence: Synthetic oligonucleotide
gugcucccgcgagcggucg

SEQ ID NO: 773053 - RNA, 19 nt, Artificial Sequence
  Description of Artificial Sequence: Synthetic oligonucleotide
uccggagcgggcgggccuc

SEQ ID NO: 773054 - RNA, 19 nt, Artificial Sequence
  Description of Artificial Sequence: Synthetic oligonucleotide
ccggacuggcccacagaag

SEQ ID NO: 773055 - RNA, 19 nt, Artificial Sequence
  Description of Artificial Sequence: Synthetic oligonucleotide
aggccggaucccagacgcg

SEQ ID NO: 773056 - RNA, 19 nt, Artificial Sequence
  Description of Artificial Sequence: Synthetic oligonucleotide
gccacgccaauccccgcac

SEQ ID NO: 773057 - RNA, 19 nt, Artificial Sequence
  Description of Artificial Sequence: Synthetic oligonucleotide
cccgcgagcggucgcacac

SEQ ID NO: 773058 - RNA, 19 nt, Artificial Sequence
  Description of Artificial Sequence: Synthetic oligonucleotide
ggaaaacgguaaggguauc

SEQ ID NO: 773059 - RNA, 19 nt, Artificial Sequence
  Description of Artificial Sequence: Synthetic oligonucleotide
cccgaguaacuuaggcuga

SEQ ID NO: 773060 - RNA, 19 nt, Artificial Sequence
  Description of Artificial Sequence: Synthetic oligonucleotide
agucuccgcggcaccccag

SEQ ID NO: 773061 - RNA, 19 nt, Artificial Sequence
  Description of Artificial Sequence: Synthetic oligonucleotide
ggcaccccagcagcgggcc

SEQ ID NO: 773062 - RNA, 19 nt, Artificial Sequence
  Description of Artificial Sequence: Synthetic oligonucleotide
agguagcgugagagaaagu

SEQ ID NO: 773063 - RNA, 19 nt, Artificial Sequence
  Description of Artificial Sequence: Synthetic oligonucleotide
gcacgacacguuagucucc

SEQ ID NO: 773064 - RNA, 19 nt, Artificial Sequence
  Description of Artificial Sequence: Synthetic oligonucleotide
cgauauucauguuccuuua

SEQ ID NO: 773065 - RNA, 19 nt, Artificial Sequence
  Description of Artificial Sequence: Synthetic oligonucleotide
gacacacggggcagguggu

SEQ ID NO: 773066 - RNA, 19 nt, Artificial Sequence
  Description of Artificial Sequence: Synthetic oligonucleotide
ggggaacagauugaaccgu

SEQ ID NO: 773067 - RNA, 19 nt, Artificial Sequence
  Description of Artificial Sequence: Synthetic oligonucleotide
gccgcauguggcgcugcgg

SEQ ID NO: 773068 - RNA, 19 nt, Artificial Sequence
  Description of Artificial Sequence: Synthetic oligonucleotide
cguuagucuccgcggcacc

SEQ ID NO: 773069 - RNA, 19 nt, Artificial Sequence
  Description of Artificial Sequence: Synthetic oligonucleotide
cccgcugaagagggguccg

SEQ ID NO: 773070 - RNA, 19 nt, Artificial Sequence
  Description of Artificial Sequence: Synthetic oligonucleotide
gcgcgggcccacugggccg

SEQ ID NO: 773071 - RNA, 19 nt, Artificial Sequence
  Description of Artificial Sequence: Synthetic oligonucleotide
cccucccgaguaacuuagg

SEQ ID NO: 773072 - RNA, 19 nt, Artificial Sequence
  Description of Artificial Sequence: Synthetic oligonucleotide
cugcgggcacgacacguua

SEQ ID NO: 773073 - RNA, 19 nt, Artificial Sequence
  Description of Artificial Sequence: Synthetic oligonucleotide
cggagccgagcucuagcgg

SEQ ID NO: 773074 - RNA, 19 nt, Artificial Sequence
  Description of Artificial Sequence: Synthetic oligonucleotide
cccgacggccgcuccgugc

SEQ ID NO: 773075 - RNA, 19 nt, Artificial Sequence
  Description of Artificial Sequence: Synthetic oligonucleotide
cgaggccggaucccagacg

SEQ ID NO: 773076 - RNA, 19 nt, Artificial Sequence
  Description of Artificial Sequence: Synthetic oligonucleotide
ccuguaagaguucccuggu

SEQ ID NO: 773077 - RNA, 19 nt, Artificial Sequence
  Description of Artificial Sequence: Synthetic oligonucleotide
cuucccucccgaguaacuu

SEQ ID NO: 773078 - RNA, 19 nt, Artificial Sequence
  Description of Artificial Sequence: Synthetic oligonucleotide
gcccaauauucuuucccau

SEQ ID NO: 773079 - RNA, 19 nt, Artificial Sequence
  Description of Artificial Sequence: Synthetic oligonucleotide
gcccugcucagugugucuc

SEQ ID NO: 773080 - RNA, 19 nt, Artificial Sequence
  Description of Artificial Sequence: Synthetic oligonucleotide
ggucgcacaccacgcagau

SEQ ID NO: 773081 - RNA, 19 nt, Artificial Sequence
  Description of Artificial Sequence: Synthetic oligonucleotide
gcucggcuucuccgcuccg

SEQ ID NO: 773082 - RNA, 19 nt, Artificial Sequence
  Description of Artificial Sequence: Synthetic oligonucleotide
ccuuaaggggaggucucca

SEQ ID NO: 773083 - RNA, 19 nt, Artificial Sequence
  Description of Artificial Sequence: Synthetic oligonucleotide
caacagcacuuguggucua

SEQ ID NO: 773084 - RNA, 19 nt, Artificial Sequence
  Description of Artificial Sequence: Synthetic oligonucleotide
ccacaacgacacugcccag

SEQ ID NO: 773085 - RNA, 19 nt, Artificial Sequence
  Description of Artificial Sequence: Synthetic oligonucleotide
cugggccgcagggcaugag

SEQ ID NO: 773086 - RNA, 19 nt, Artificial Sequence
  Description of Artificial Sequence: Synthetic oligonucleotide
cagccgauucuggauuugu

SEQ ID NO: 773087 - RNA, 19 nt, Artificial Sequence
  Description of Artificial Sequence: Synthetic oligonucleotide
cucgcucggcuucuccgcu

SEQ ID NO: 773088 - RNA, 19 nt, Artificial Sequence
  Description of Artificial Sequence: Synthetic oligonucleotide
gggcggccacgccaauccc

SEQ ID NO: 773089 - RNA, 19 nt, Artificial Sequence
  Description of Artificial Sequence: Synthetic oligonucleotide
gcacggagccgagcucuag

SEQ ID NO: 773090 - RNA, 19 nt, Artificial Sequence
  Description of Artificial Sequence: Synthetic oligonucleotide
ggcgagcuaacaagcgaua

SEQ ID NO: 773091 - RNA, 19 nt, Artificial Sequence
  Description of Artificial Sequence: Synthetic oligonucleotide
gcccaucucgccgccgggc

SEQ ID NO: 773092 - RNA, 19 nt, Artificial Sequence
  Description of Artificial Sequence: Synthetic oligonucleotide
ggugcucccgcgagcgguc

SEQ ID NO: 773093 - RNA, 19 nt, Artificial Sequence
  Description of Artificial Sequence: Synthetic oligonucleotide
gggucaggcucaagagcuc

SEQ ID NO: 773094 - RNA, 19 nt, Artificial Sequence
  Description of Artificial Sequence: Synthetic oligonucleotide
cccagcgaugaaacacgga

SEQ ID NO: 773095 - RNA, 19 nt, Artificial Sequence
  Description of Artificial Sequence: Synthetic oligonucleotide
gggaacagauugaaccguu

SEQ ID NO: 773096 - RNA, 19 nt, Artificial Sequence
  Description of Artificial Sequence: Synthetic oligonucleotide
ccagccgauucuggauuug

SEQ ID NO: 773097 - RNA, 19 nt, Artificial Sequence
  Description of Artificial Sequence: Synthetic oligonucleotide
gcgagcuaacaagcgauau

SEQ ID NO: 773098 - RNA, 19 nt, Artificial Sequence
  Description of Artificial Sequence: Synthetic oligonucleotide
gcgggcacgacacguuagu

SEQ ID NO: 773099 - RNA, 19 nt, Artificial Sequence
  Description of Artificial Sequence: Synthetic oligonucleotide
cgcgugcggagcucucggg

SEQ ID NO: 773100 - RNA, 19 nt, Artificial Sequence
  Description of Artificial Sequence: Synthetic oligonucleotide
ggccggaucccagacgcgu

SEQ ID NO: 773101 - RNA, 19 nt, Artificial Sequence
  Description of Artificial Sequence: Synthetic oligonucleotide
ggagcgggcgggccuccga

SEQ ID NO: 773102 - RNA, 19 nt, Artificial Sequence
  Description of Artificial Sequence: Synthetic oligonucleotide
cagacgcgugcggagcucu

SEQ ID NO: 773103 - RNA, 19 nt, Artificial Sequence
  Description of Artificial Sequence: Synthetic oligonucleotide
gcuucucgcacacgcccau

SEQ ID NO: 773104 - RNA, 19 nt, Artificial Sequence
  Description of Artificial Sequence: Synthetic oligonucleotide
ccgaguaacuuaggcugaa

SEQ ID NO: 773105 - RNA, 19 nt, Artificial Sequence
  Description of Artificial Sequence: Synthetic oligonucleotide
cggucgcacaccacgcaga

SEQ ID NO: 773106 - RNA, 19 nt, Artificial Sequence
  Description of Artificial Sequence: Synthetic oligonucleotide
gcucccgcgagcggucgca

SEQ ID NO: 773107 - RNA, 19 nt, Artificial Sequence
  Description of Artificial Sequence: Synthetic oligonucleotide
caacgacacugcccagaau

SEQ ID NO: 773108 - RNA, 19 nt, Artificial Sequence
  Description of Artificial Sequence: Synthetic oligonucleotide
ggccacgcucccggaggcc

SEQ ID NO: 773109 - RNA, 19 nt, Artificial Sequence
  Description of Artificial Sequence: Synthetic oligonucleotide
cggccacgcucccggaggc

SEQ ID NO: 773110 - RNA, 19 nt, Artificial Sequence
  Description of Artificial Sequence: Synthetic oligonucleotide
gugcccggcgucucuucuu

SEQ ID NO: 773111 - RNA, 19 nt, Artificial Sequence
  Description of Artificial Sequence: Synthetic oligonucleotide
cgagcuaacaagcgauauu

SEQ ID NO: 773112 - RNA, 19 nt, Artificial Sequence
  Description of Artificial Sequence: Synthetic oligonucleotide
ccgcgagcggucgcacacc

SEQ ID NO: 773113 - RNA, 19 nt, Artificial Sequence
  Description of Artificial Sequence: Synthetic oligonucleotide
gcccggcgucucuucuuca

SEQ ID NO: 773114 - RNA, 19 nt, Artificial Sequence
  Description of Artificial Sequence: Synthetic oligonucleotide
cgggcacgacacguuaguc

SEQ ID NO: 773115 - RNA, 19 nt, Artificial Sequence
  Description of Artificial Sequence: Synthetic oligonucleotide
cgcgagcggucgcacacca

SEQ ID NO: 773116 - RNA, 19 nt, Artificial Sequence
  Description of Artificial Sequence: Synthetic oligonucleotide
ccacgcagaugggcaucug

SEQ ID NO: 773117 - RNA, 19 nt, Artificial Sequence
  Description of Artificial Sequence: Synthetic oligonucleotide
gcgagcggucgcacaccac

SEQ ID NO: 773118 - RNA, 19 nt, Artificial Sequence
  Description of Artificial Sequence: Synthetic oligonucleotide
ggcaagcgcaacagauguu

SEQ ID NO: 773119 - RNA, 19 nt, Artificial Sequence
  Description of Artificial Sequence: Synthetic oligonucleotide
cccggcgcgcucgcucggc

SEQ ID NO: 773120 - RNA, 19 nt, Artificial Sequence
  Description of Artificial Sequence: Synthetic oligonucleotide
cggccacgccaauccccgc

SEQ ID NO: 773121 - RNA, 19 nt, Artificial Sequence
  Description of Artificial Sequence: Synthetic oligonucleotide
ccgcugaagagggguccga

SEQ ID NO: 773122 - RNA, 19 nt, Artificial Sequence
  Description of Artificial Sequence: Synthetic oligonucleotide
cgacggccgcuccgugcgc

SEQ ID NO: 773123 - RNA, 19 nt, Artificial Sequence
  Description of Artificial Sequence: Synthetic oligonucleotide
ccggagcgggcgggccucc

SEQ ID NO: 773124 - RNA, 19 nt, Artificial Sequence
  Description of Artificial Sequence: Synthetic oligonucleotide
ccggcacugcgggcacgac

SEQ ID NO: 773125 - RNA, 19 nt, Artificial Sequence
  Description of Artificial Sequence: Synthetic oligonucleotide
cccugugcccggcgucucu

SEQ ID NO: 773126 - RNA, 19 nt, Artificial Sequence
  Description of Artificial Sequence: Synthetic oligonucleotide
ggugccgguugggccgcau

SEQ ID NO: 773127 - RNA, 19 nt, Artificial Sequence
  Description of Artificial Sequence: Synthetic oligonucleotide
aaguaaaucgcucccaugc

SEQ ID NO: 773128 - RNA, 19 nt, Artificial Sequence
  Description of Artificial Sequence: Synthetic oligonucleotide
aaaacacacggauaggcac

SEQ ID NO: 773129 - RNA, 19 nt, Artificial Sequence
  Description of Artificial Sequence: Synthetic oligonucleotide
uuagguaacaaucuugaca

SEQ ID NO: 773130 - RNA, 19 nt, Artificial Sequence
  Description of Artificial Sequence: Synthetic oligonucleotide
auaggcaagagagagaagc

SEQ ID NO: 773131 - RNA, 19 nt, Artificial Sequence
  Description of Artificial Sequence: Synthetic oligonucleotide
aucuaauauaauuaugcuc

SEQ ID NO: 773132 - RNA, 19 nt, Artificial Sequence
  Description of Artificial Sequence: Synthetic oligonucleotide
aagauauugacacucugga

SEQ ID NO: 773133 - RNA, 19 nt, Artificial Sequence
  Description of Artificial Sequence: Synthetic oligonucleotide
aaggugcuauguuuaaccc

SEQ ID NO: 773134 - RNA, 19 nt, Artificial Sequence
  Description of Artificial Sequence: Synthetic oligonucleotide
ucagccaaaacucaagugu

SEQ ID NO: 773135 - RNA, 19 nt, Artificial Sequence
  Description of Artificial Sequence: Synthetic oligonucleotide
agauucauccucuauaugu

SEQ ID NO: 773136 - RNA, 19 nt, Artificial Sequence
  Description of Artificial Sequence: Synthetic oligonucleotide
aauuaugcuccacaauuug

SEQ ID NO: 773137 - RNA, 19 nt, Artificial Sequence
  Description of Artificial Sequence: Synthetic oligonucleotide
uggauaaacggccuguucc

SEQ ID NO: 773138 - RNA, 19 nt, Artificial Sequence
  Description of Artificial Sequence: Synthetic oligonucleotide
ucuuagguaacaaucuuga

SEQ ID NO: 773139 - RNA, 19 nt, Artificial Sequence
  Description of Artificial Sequence: Synthetic oligonucleotide
ucuacacaagaguaggccg

SEQ ID NO: 773140 - RNA, 19 nt, Artificial Sequence
  Description of Artificial Sequence: Synthetic oligonucleotide
agacacauccaacacauag

SEQ ID NO: 773141 - RNA, 19 nt, Artificial Sequence
  Description of Artificial Sequence: Synthetic oligonucleotide
gcaauuauaggcaagagag

SEQ ID NO: 773142 - RNA, 19 nt, Artificial Sequence
  Description of Artificial Sequence: Synthetic oligonucleotide
aauauggagucaucagauc

SEQ ID NO: 773143 - RNA, 19 nt, Artificial Sequence
  Description of Artificial Sequence: Synthetic oligonucleotide
ucuauaucaagugacuuca

SEQ ID NO: 773144 - RNA, 19 nt, Artificial Sequence
  Description of Artificial Sequence: Synthetic oligonucleotide
uauaacaacacuugcuggu

SEQ ID NO: 773145 - RNA, 19 nt, Artificial Sequence
  Description of Artificial Sequence: Synthetic oligonucleotide
caagauauugacacucugg

SEQ ID NO: 773146 - RNA, 19 nt, Artificial Sequence
  Description of Artificial Sequence: Synthetic oligonucleotide
uauguaggagcuuaauccc

SEQ ID NO: 773147 - RNA, 19 nt, Artificial Sequence
  Description of Artificial Sequence: Synthetic oligonucleotide
gauaugagguccaaaagug

SEQ ID NO: 773148 - RNA, 19 nt, Artificial Sequence
  Description of Artificial Sequence: Synthetic oligonucleotide
auaugucucagccaaaacu

SEQ ID NO: 773149 - RNA, 19 nt, Artificial Sequence
  Description of Artificial Sequence: Synthetic oligonucleotide
auauaacaacacuugcugg

SEQ ID NO: 773150 - RNA, 19 nt, Artificial Sequence
  Description of Artificial Sequence: Synthetic oligonucleotide
uuuacuucucuaucggaag

SEQ ID NO: 773151 - RNA, 19 nt, Artificial Sequence
  Description of Artificial Sequence: Synthetic oligonucleotide
uauccaguagucugcaagg

SEQ ID NO: 773152 - RNA, 19 nt, Artificial Sequence
  Description of Artificial Sequence: Synthetic oligonucleotide
uguuauugagcaaagcaau

SEQ ID NO: 773153 - RNA, 19 nt, Artificial Sequence
  Description of Artificial Sequence: Synthetic oligonucleotide
ucagauaugagguccaaaa

SEQ ID NO: 773154 - RNA, 19 nt, Artificial Sequence
  Description of Artificial Sequence: Synthetic oligonucleotide
cagacuguguucaucaucc

SEQ ID NO: 773155 - RNA, 19 nt, Artificial Sequence
  Description of Artificial Sequence: Synthetic oligonucleotide
gaagacaauaccuuccuca

SEQ ID NO: 773156 - RNA, 19 nt, Artificial Sequence
  Description of Artificial Sequence: Synthetic oligonucleotide
cugacagugaguauccacg

SEQ ID NO: 773157 - RNA, 19 nt, Artificial Sequence
  Description of Artificial Sequence: Synthetic oligonucleotide
agugauuggcuucagauau

SEQ ID NO: 773158 - RNA, 19 nt, Artificial Sequence
  Description of Artificial Sequence: Synthetic oligonucleotide
uuugcuggcaaauggacac

SEQ ID NO: 773159 - RNA, 19 nt, Artificial Sequence
  Description of Artificial Sequence: Synthetic oligonucleotide
auauggagucaucagaucu

SEQ ID NO: 773160 - RNA, 19 nt, Artificial Sequence
  Description of Artificial Sequence: Synthetic oligonucleotide
uccagauugcaauaaacac

SEQ ID NO: 773161 - RNA, 19 nt, Artificial Sequence
  Description of Artificial Sequence: Synthetic oligonucleotide
aaaugcggaccuuuacuuc

SEQ ID NO: 773162 - RNA, 19 nt, Artificial Sequence
  Description of Artificial Sequence: Synthetic oligonucleotide
gaccuuuacuucucuaucg

SEQ ID NO: 773163 - RNA, 19 nt, Artificial Sequence
  Description of Artificial Sequence: Synthetic oligonucleotide
aguuguguaaggcucaacu

SEQ ID NO: 773164 - RNA, 19 nt, Artificial Sequence
  Description of Artificial Sequence: Synthetic oligonucleotide
caggcaaguucauacaugg

SEQ ID NO: 773165 - RNA, 19 nt, Artificial Sequence
  Description of Artificial Sequence: Synthetic oligonucleotide
gauaugggauguuauugag

SEQ ID NO: 773166 - RNA, 19 nt, Artificial Sequence
  Description of Artificial Sequence: Synthetic oligonucleotide
uuauaggcaagagagagaa

SEQ ID NO: 773167 - RNA, 19 nt, Artificial Sequence
  Description of Artificial Sequence: Synthetic oligonucleotide
aagaguuccacuggcuggc

SEQ ID NO: 773168 - RNA, 19 nt, Artificial Sequence
  Description of Artificial Sequence: Synthetic oligonucleotide
aaacacacggauaggcacc

SEQ ID NO: 773169 - RNA, 19 nt, Artificial Sequence
  Description of Artificial Sequence: Synthetic oligonucleotide
uuuucaguuguguaaggcu

SEQ ID NO: 773170 - RNA, 19 nt, Artificial Sequence
  Description of Artificial Sequence: Synthetic oligonucleotide
agguugcagaaguaaaucg

SEQ ID NO: 773171 - RNA, 19 nt, Artificial Sequence
  Description of Artificial Sequence: Synthetic oligonucleotide
guuaauaaaaggugcuaug

SEQ ID NO: 773172 - RNA, 19 nt, Artificial Sequence
  Description of Artificial Sequence: Synthetic oligonucleotide
ugguauaacuuucccauac

SEQ ID NO: 773173 - RNA, 19 nt, Artificial Sequence
  Description of Artificial Sequence: Synthetic oligonucleotide
uuucaguuguguaaggcuc

SEQ ID NO: 773174 - RNA, 19 nt, Artificial Sequence
  Description of Artificial Sequence: Synthetic oligonucleotide
cacaauuugucugauuugg

SEQ ID NO: 773175 - RNA, 19 nt, Artificial Sequence
  Description of Artificial Sequence: Synthetic oligonucleotide
acuagggacacucuuucag

SEQ ID NO: 773176 - RNA, 19 nt, Artificial Sequence
  Description of Artificial Sequence: Synthetic oligonucleotide
ugcaauaaacaccuggaua

SEQ ID NO: 773177 - RNA, 19 nt, Artificial Sequence
  Description of Artificial Sequence: Synthetic oligonucleotide
gaggcaaguacccuccagg

SEQ ID NO: 773178 - RNA, 19 nt, Artificial Sequence
  Description of Artificial Sequence: Synthetic oligonucleotide
ucuacuggucugaagauua

SEQ ID NO: 773179 - RNA, 19 nt, Artificial Sequence
  Description of Artificial Sequence: Synthetic oligonucleotide
uguuuaacccaagagugug

SEQ ID NO: 773180 - RNA, 19 nt, Artificial Sequence
  Description of Artificial Sequence: Synthetic oligonucleotide
uuuaauuccugaagacugu

SEQ ID NO: 773181 - RNA, 19 nt, Artificial Sequence
  Description of Artificial Sequence: Synthetic oligonucleotide
agagcucaucucaauaucc

SEQ ID NO: 773182 - RNA, 19 nt, Artificial Sequence
  Description of Artificial Sequence: Synthetic oligonucleotide
uucuauaucaagugacuuc

SEQ ID NO: 773183 - RNA, 19 nt, Artificial Sequence
  Description of Artificial Sequence: Synthetic oligonucleotide
uccacgagcaucccaaaca

SEQ ID NO: 773184 - RNA, 19 nt, Artificial Sequence
  Description of Artificial Sequence: Synthetic oligonucleotide
uuugucuuagguugcagaa

SEQ ID NO: 773185 - RNA, 19 nt, Artificial Sequence
  Description of Artificial Sequence: Synthetic oligonucleotide
uaaaucgcucccaugcaug

SEQ ID NO: 773186 - RNA, 19 nt, Artificial Sequence
  Description of Artificial Sequence: Synthetic oligonucleotide
ugagcaaagcaauuucugu

SEQ ID NO: 773187 - RNA, 19 nt, Artificial Sequence
  Description of Artificial Sequence: Synthetic oligonucleotide
cuuaaagggacacauggca

SEQ ID NO: 773188 - RNA, 19 nt, Artificial Sequence
  Description of Artificial Sequence: Synthetic oligonucleotide
auauaauuaugcuccacaa

SEQ ID NO: 773189 - RNA, 19 nt, Artificial Sequence
  Description of Artificial Sequence: Synthetic oligonucleotide
uaacaaucuugacaagaug

SEQ ID NO: 773190 - RNA, 19 nt, Artificial Sequence
  Description of Artificial Sequence: Synthetic oligonucleotide
gauauugacacucuggauu

SEQ ID NO: 773191 - RNA, 19 nt, Artificial Sequence
  Description of Artificial Sequence: Synthetic oligonucleotide
cuuggauaauucacaggcg

SEQ ID NO: 773192 - RNA, 19 nt, Artificial Sequence
  Description of Artificial Sequence: Synthetic oligonucleotide
acaaaugcggaccuuuacu

SEQ ID NO: 773193 - RNA, 19 nt, Artificial Sequence
  Description of Artificial Sequence: Synthetic oligonucleotide
ucggaaguguucaaauaug

SEQ ID NO: 773194 - RNA, 19 nt, Artificial Sequence
  Description of Artificial Sequence: Synthetic oligonucleotide
agaucuaaccuuaagaguu

SEQ ID NO: 773195 - RNA, 19 nt, Artificial Sequence
  Description of Artificial Sequence: Synthetic oligonucleotide
aucggaaguguucaaauau

SEQ ID NO: 773196 - RNA, 19 nt, Artificial Sequence
  Description of Artificial Sequence: Synthetic oligonucleotide
uaacccaagaguguguucu

SEQ ID NO: 773197 - RNA, 19 nt, Artificial Sequence
  Description of Artificial Sequence: Synthetic oligonucleotide
cauauguaggagcuuaauc

SEQ ID NO: 773198 - RNA, 19 nt, Artificial Sequence
  Description of Artificial Sequence: Synthetic oligonucleotide
uucucuaucggaaguguuc

SEQ ID NO: 773199 - RNA, 19 nt, Artificial Sequence
  Description of Artificial Sequence: Synthetic oligonucleotide
uuaacaucaccaaguguuc

SEQ ID NO: 773200 - RNA, 19 nt, Artificial Sequence
  Description of Artificial Sequence: Synthetic oligonucleotide
uuaaucccaucuuccaucu

SEQ ID NO: 773201 - RNA, 19 nt, Artificial Sequence
  Description of Artificial Sequence: Synthetic oligonucleotide
aggugcucggugcaguacc

SEQ ID NO: 773202 - RNA, 19 nt, Artificial Sequence
  Description of Artificial Sequence: Synthetic oligonucleotide
gcuauguuuaacccaagag

SEQ ID NO: 773203 - RNA, 19 nt, Artificial Sequence
  Description of Artificial Sequence: Synthetic oligonucleotide
ccagauugcaauaaacacc

SEQ ID NO: 773204 - RNA, 19 nt, Artificial Sequence
  Description of Artificial Sequence: Synthetic oligonucleotide
uaauuaugcuccacaauuu

SEQ ID NO: 773205 - RNA, 19 nt, Artificial Sequence
  Description of Artificial Sequence: Synthetic oligonucleotide
guuguguaaggcucaacug

SEQ ID NO: 773206 - RNA, 19 nt, Artificial Sequence
  Description of Artificial Sequence: Synthetic oligonucleotide
aguauccacgggcuggcac

SEQ ID NO: 773207 - RNA, 19 nt, Artificial Sequence
  Description of Artificial Sequence: Synthetic oligonucleotide
ugucacucggucuccaggc

SEQ ID NO: 773208 - RNA, 19 nt, Artificial Sequence
  Description of Artificial Sequence: Synthetic oligonucleotide
uuacuucucuaucggaagu

SEQ ID NO: 773209 - RNA, 19 nt, Artificial Sequence
  Description of Artificial Sequence: Synthetic oligonucleotide
ugcaugaauuaaacucucc

SEQ ID NO: 773210 - RNA, 19 nt, Artificial Sequence
  Description of Artificial Sequence: Synthetic oligonucleotide
auccuacucaucuuuucag

SEQ ID NO: 773211 - RNA, 19 nt, Artificial Sequence
  Description of Artificial Sequence: Synthetic oligonucleotide
gugucuacacaagaguagg

SEQ ID NO: 773212 - RNA, 19 nt, Artificial Sequence
  Description of Artificial Sequence: Synthetic oligonucleotide
gcuuuugugaugcugaaca

SEQ ID NO: 773213 - RNA, 19 nt, Artificial Sequence
  Description of Artificial Sequence: Synthetic oligonucleotide
uucaguuguguaaggcuca

SEQ ID NO: 773214 - RNA, 19 nt, Artificial Sequence
  Description of Artificial Sequence: Synthetic oligonucleotide
cugcacuggauaaacggcc

SEQ ID NO: 773215 - RNA, 19 nt, Artificial Sequence
  Description of Artificial Sequence: Synthetic oligonucleotide
uuuugugaugcugaacacu

SEQ ID NO: 773216 - RNA, 19 nt, Artificial Sequence
  Description of Artificial Sequence: Synthetic oligonucleotide
acacuaagaggacaaggcu

SEQ ID NO: 773217 - RNA, 19 nt, Artificial Sequence
  Description of Artificial Sequence: Synthetic oligonucleotide
cuaaccuuaagaguuccac

SEQ ID NO: 773218 - RNA, 19 nt, Artificial Sequence
  Description of Artificial Sequence: Synthetic oligonucleotide
uauaugucucagccaaaac

SEQ ID NO: 773219 - RNA, 19 nt, Artificial Sequence
  Description of Artificial Sequence: Synthetic oligonucleotide
gauccuacucaucuuuuca

SEQ ID NO: 773220 - RNA, 19 nt, Artificial Sequence
  Description of Artificial Sequence: Synthetic oligonucleotide
cugcaagacucuuuaauuc

SEQ ID NO: 773221 - RNA, 19 nt, Artificial Sequence
  Description of Artificial Sequence: Synthetic oligonucleotide
cuacucaucuuuucaguug

SEQ ID NO: 773222 - RNA, 19 nt, Artificial Sequence
  Description of Artificial Sequence: Synthetic oligonucleotide
uaggagcuuaaucccaucu

SEQ ID NO: 773223 - RNA, 19 nt, Artificial Sequence
  Description of Artificial Sequence: Synthetic oligonucleotide
ucaugauaugggauguuau

SEQ ID NO: 773224 - RNA, 19 nt, Artificial Sequence
  Description of Artificial Sequence: Synthetic oligonucleotide
uucacaggcguauacugaa

SEQ ID NO: 773225 - RNA, 19 nt, Artificial Sequence
  Description of Artificial Sequence: Synthetic oligonucleotide
ugucuacacaagaguaggc

SEQ ID NO: 773226 - RNA, 19 nt, Artificial Sequence
  Description of Artificial Sequence: Synthetic oligonucleotide
augaaaccaaaaugggaca

SEQ ID NO: 773227 - RNA, 19 nt, Artificial Sequence
  Description of Artificial Sequence: Synthetic oligonucleotide
ucccaugcaugaauuaaac

SEQ ID NO: 773228 - RNA, 19 nt, Artificial Sequence
  Description of Artificial Sequence: Synthetic oligonucleotide
acugccaucccaaauauaa

SEQ ID NO: 773229 - RNA, 19 nt, Artificial Sequence
  Description of Artificial Sequence: Synthetic oligonucleotide
cuauguuuaacccaagagu

SEQ ID NO: 773230 - RNA, 19 nt, Artificial Sequence
  Description of Artificial Sequence: Synthetic oligonucleotide
cagauaugagguccaaaag

SEQ ID NO: 773231 - RNA, 19 nt, Artificial Sequence
  Description of Artificial Sequence: Synthetic oligonucleotide
ugcuccacaauuugucuga

SEQ ID NO: 773232 - RNA, 19 nt, Artificial Sequence
  Description of Artificial Sequence: Synthetic oligonucleotide
gacagugaguauccacggg

SEQ ID NO: 773233 - RNA, 19 nt, Artificial Sequence
  Description of Artificial Sequence: Synthetic oligonucleotide
gaagugauuggcuucagau

SEQ ID NO: 773234 - RNA, 19 nt, Artificial Sequence
  Description of Artificial Sequence: Synthetic oligonucleotide
uccagcaauuauaggcaag

SEQ ID NO: 773235 - RNA, 19 nt, Artificial Sequence
  Description of Artificial Sequence: Synthetic oligonucleotide
gaaguaaaucgcucccaug

SEQ ID NO: 773236 - RNA, 19 nt, Artificial Sequence
  Description of Artificial Sequence: Synthetic oligonucleotide
ucucuaucggaaguguuca

SEQ ID NO: 773237 - RNA, 19 nt, Artificial Sequence
  Description of Artificial Sequence: Synthetic oligonucleotide
ucguccagaucuacaaaug

SEQ ID NO: 773238 - RNA, 19 nt, Artificial Sequence
  Description of Artificial Sequence: Synthetic oligonucleotide
uacaaaugcggaccuuuac

SEQ ID NO: 773239 - RNA, 19 nt, Artificial Sequence
  Description of Artificial Sequence: Synthetic oligonucleotide
cagauugcaauaaacaccu

SEQ ID NO: 773240 - RNA, 19 nt, Artificial Sequence
  Description of Artificial Sequence: Synthetic oligonucleotide
ugauuggcuucagauauga

SEQ ID NO: 773241 - RNA, 19 nt, Artificial Sequence
  Description of Artificial Sequence: Synthetic oligonucleotide
aauaccuuccucauugcua

SEQ ID NO: 773242 - RNA, 19 nt, Artificial Sequence
  Description of Artificial Sequence: Synthetic oligonucleotide
uuauugagcaaagcaauuu

SEQ ID NO: 773243 - RNA, 19 nt, Artificial Sequence
  Description of Artificial Sequence: Synthetic oligonucleotide
agacuguuaaaauccacuu

SEQ ID NO: 773244 - RNA, 19 nt, Artificial Sequence
  Description of Artificial Sequence: Synthetic oligonucleotide
cuccagauugcaauaaaca

SEQ ID NO: 773245 - RNA, 19 nt, Artificial Sequence
  Description of Artificial Sequence: Synthetic oligonucleotide
agugucuacacaagaguag

SEQ ID NO: 773246 - RNA, 19 nt, Artificial Sequence
  Description of Artificial Sequence: Synthetic oligonucleotide
auaaacggccuguucccag

SEQ ID NO: 773247 - RNA, 19 nt, Artificial Sequence
  Description of Artificial Sequence: Synthetic oligonucleotide
aguaaaucgcucccaugca

SEQ ID NO: 773248 - RNA, 19 nt, Artificial Sequence
  Description of Artificial Sequence: Synthetic oligonucleotide
gucuacacaagaguaggcc

SEQ ID NO: 773249 - RNA, 19 nt, Artificial Sequence
  Description of Artificial Sequence: Synthetic oligonucleotide
caugcaugaauuaaacucu

SEQ ID NO: 773250 - RNA, 19 nt, Artificial Sequence
  Description of Artificial Sequence: Synthetic oligonucleotide
uguaggagcuuaaucccau

SEQ ID NO: 773251 - RNA, 19 nt, Artificial Sequence
  Description of Artificial Sequence: Synthetic oligonucleotide
aaguguuccagcaauuaua

SEQ ID NO: 773252 - RNA, 19 nt, Artificial Sequence
  Description of Artificial Sequence: Synthetic oligonucleotide
uccuacucaucuuuucagu

SEQ ID NO: 773253 - RNA, 19 nt, Artificial Sequence
  Description of Artificial Sequence: Synthetic oligonucleotide
cacuacagagcucagccuc

SEQ ID NO: 773254 - RNA, 19 nt, Artificial Sequence
  Description of Artificial Sequence: Synthetic oligonucleotide
ggucuuggauaauucacag

SEQ ID NO: 773255 - RNA, 19 nt, Artificial Sequence
  Description of Artificial Sequence: Synthetic oligonucleotide
cuuuugugaugcugaacac

SEQ ID NO: 773256 - RNA, 19 nt, Artificial Sequence
  Description of Artificial Sequence: Synthetic oligonucleotide
cucagccaaaacucaagug

SEQ ID NO: 773257 - RNA, 19 nt, Artificial Sequence
  Description of Artificial Sequence: Synthetic oligonucleotide
acaggcguauacugaaugu

SEQ ID NO: 773258 - RNA, 19 nt, Artificial Sequence
  Description of Artificial Sequence: Synthetic oligonucleotide
cugaaugaguccagauggc

SEQ ID NO: 773259 - RNA, 19 nt, Artificial Sequence
  Description of Artificial Sequence: Synthetic oligonucleotide
ugcaucgacaguuucuguu

SEQ ID NO: 773260 - RNA, 19 nt, Artificial Sequence
  Description of Artificial Sequence: Synthetic oligonucleotide
uuuccaaugggagccuuca

SEQ ID NO: 773261 - RNA, 19 nt, Artificial Sequence
  Description of Artificial Sequence: Synthetic oligonucleotide
ugcacuggauaaacggccu

SEQ ID NO: 773262 - RNA, 19 nt, Artificial Sequence
  Description of Artificial Sequence: Synthetic oligonucleotide
gugaguauccacgggcugg

SEQ ID NO: 773263 - RNA, 19 nt, Artificial Sequence
  Description of Artificial Sequence: Synthetic oligonucleotide
caaagcacucugucagagg

SEQ ID NO: 773264 - RNA, 19 nt, Artificial Sequence
  Description of Artificial Sequence: Synthetic oligonucleotide
ugaaugugcaccagccuuu

SEQ ID NO: 773265 - RNA, 19 nt, Artificial Sequence
  Description of Artificial Sequence: Synthetic oligonucleotide
aacuagggacacucuuuca

SEQ ID NO: 773266 - RNA, 19 nt, Artificial Sequence
  Description of Artificial Sequence: Synthetic oligonucleotide
uggauaauucacaggcgua

SEQ ID NO: 773267 - RNA, 19 nt, Artificial Sequence
  Description of Artificial Sequence: Synthetic oligonucleotide
ucuucguaucucugcacac

SEQ ID NO: 773268 - RNA, 19 nt, Artificial Sequence
  Description of Artificial Sequence: Synthetic oligonucleotide
cucaauggaacaucuaaua

SEQ ID NO: 773269 - RNA, 19 nt, Artificial Sequence
  Description of Artificial Sequence: Synthetic oligonucleotide
caucagaucuaaccuuaag

SEQ ID NO: 773270 - RNA, 19 nt, Artificial Sequence
  Description of Artificial Sequence: Synthetic oligonucleotide
acuugcugguauaacuuuc

SEQ ID NO: 773271 - RNA, 19 nt, Artificial Sequence
  Description of Artificial Sequence: Synthetic oligonucleotide
ucgacaguuucuguuacaa

SEQ ID NO: 773272 - RNA, 19 nt, Artificial Sequence
  Description of Artificial Sequence: Synthetic oligonucleotide
ucuaucggaaguguucaaa

SEQ ID NO: 773273 - RNA, 19 nt, Artificial Sequence
  Description of Artificial Sequence: Synthetic oligonucleotide
agauauugacacucuggau

SEQ ID NO: 773274 - RNA, 19 nt, Artificial Sequence
  Description of Artificial Sequence: Synthetic oligonucleotide
uacuucucuaucggaagug

SEQ ID NO: 773275 - RNA, 19 nt, Artificial Sequence
  Description of Artificial Sequence: Synthetic oligonucleotide
uucauauguaggagcuuaa

SEQ ID NO: 773276 - RNA, 19 nt, Artificial Sequence
  Description of Artificial Sequence: Synthetic oligonucleotide
uugacaagaugcuuccauu

SEQ ID NO: 773277 - RNA, 19 nt, Artificial Sequence
  Description of Artificial Sequence: Synthetic oligonucleotide
uucaugauaugggauguua

SEQ ID NO: 773278 - RNA, 19 nt, Artificial Sequence
  Description of Artificial Sequence: Synthetic oligonucleotide
uaucggaaguguucaaaua

SEQ ID NO: 773279 - RNA, 19 nt, Artificial Sequence
  Description of Artificial Sequence: Synthetic oligonucleotide
ggauaaacggccuguuccc

SEQ ID NO: 773280 - RNA, 19 nt, Artificial Sequence
  Description of Artificial Sequence: Synthetic oligonucleotide
gguugcagaaguaaaucgc

SEQ ID NO: 773281 - RNA, 19 nt, Artificial Sequence
  Description of Artificial Sequence: Synthetic oligonucleotide
agauuagccagggcacuac

SEQ ID NO: 773282 - RNA, 19 nt, Artificial Sequence
  Description of Artificial Sequence: Synthetic oligonucleotide
ugaagacaauaccuuccuc

SEQ ID NO: 773283 - RNA, 19 nt, Artificial Sequence
  Description of Artificial Sequence: Synthetic oligonucleotide
aucuuaaagccuucaugau

SEQ ID NO: 773284 - RNA, 19 nt, Artificial Sequence
  Description of Artificial Sequence: Synthetic oligonucleotide
uuuaacccaagaguguguu

SEQ ID NO: 773285 - RNA, 19 nt, Artificial Sequence
  Description of Artificial Sequence: Synthetic oligonucleotide
augcaugaauuaaacucuc

SEQ ID NO: 773286 - RNA, 19 nt, Artificial Sequence
  Description of Artificial Sequence: Synthetic oligonucleotide
gauggcucaauggaacauc

SEQ ID NO: 773287 - RNA, 19 nt, Artificial Sequence
  Description of Artificial Sequence: Synthetic oligonucleotide
ggagcuuaaucccaucuuc

SEQ ID NO: 773288 - RNA, 19 nt, Artificial Sequence
  Description of Artificial Sequence: Synthetic oligonucleotide
caucuaauauaauuaugcu

SEQ ID NO: 773289 - RNA, 19 nt, Artificial Sequence
  Description of Artificial Sequence: Synthetic oligonucleotide
gucagaggcaaguacccuc

SEQ ID NO: 773290 - RNA, 19 nt, Artificial Sequence
  Description of Artificial Sequence: Synthetic oligonucleotide
gucuucguaucucugcaca

SEQ ID NO: 773291 - RNA, 19 nt, Artificial Sequence
  Description of Artificial Sequence: Synthetic oligonucleotide
ugguuaauaaaaggugcua

SEQ ID NO: 773292 - RNA, 19 nt, Artificial Sequence
  Description of Artificial Sequence: Synthetic oligonucleotide
aacacacggauaggcaccu

SEQ ID NO: 773293 - RNA, 19 nt, Artificial Sequence
  Description of Artificial Sequence: Synthetic oligonucleotide
auccaguagucugcaaggg

SEQ ID NO: 773294 - RNA, 19 nt, Artificial Sequence
  Description of Artificial Sequence: Synthetic oligonucleotide
gaucuaaccuuaagaguuc

SEQ ID NO: 773295 - RNA, 19 nt, Artificial Sequence
  Description of Artificial Sequence: Synthetic oligonucleotide
aaacggccuguucccagca

SEQ ID NO: 773296 - RNA, 19 nt, Artificial Sequence
  Description of Artificial Sequence: Synthetic oligonucleotide
gaucuugccuccagauugc

SEQ ID NO: 773297 - RNA, 19 nt, Artificial Sequence
  Description of Artificial Sequence: Synthetic oligonucleotide
agcgcucucuucuaccagu

SEQ ID NO: 773298 - RNA, 19 nt, Artificial Sequence
  Description of Artificial Sequence: Synthetic oligonucleotide
auuugcuggcaaauggaca

SEQ ID NO: 773299 - RNA, 19 nt, Artificial Sequence
  Description of Artificial Sequence: Synthetic oligonucleotide
guagggcuuaacaucacca

SEQ ID NO: 773300 - RNA, 19 nt, Artificial Sequence
  Description of Artificial Sequence: Synthetic oligonucleotide
uacccggaugggacuaucc

SEQ ID NO: 773301 - RNA, 19 nt, Artificial Sequence
  Description of Artificial Sequence: Synthetic oligonucleotide
agggauccuacucaucuuu

SEQ ID NO: 773302 - RNA, 19 nt, Artificial Sequence
  Description of Artificial Sequence: Synthetic oligonucleotide
aaccugaccucaucaucaa

SEQ ID NO: 773303 - RNA, 19 nt, Artificial Sequence
  Description of Artificial Sequence: Synthetic oligonucleotide
accuggauauugcagcuuu

SEQ ID NO: 773304 - RNA, 19 nt, Artificial Sequence
  Description of Artificial Sequence: Synthetic oligonucleotide
agguuuccuccccaggacu

SEQ ID NO: 773305 - RNA, 19 nt, Artificial Sequence
  Description of Artificial Sequence: Synthetic oligonucleotide
ccuaugaugucuucguauc

SEQ ID NO: 773306 - RNA, 19 nt, Artificial Sequence
  Description of Artificial Sequence: Synthetic oligonucleotide
caucgacaguuucuguuac

SEQ ID NO: 773307 - RNA, 19 nt, Artificial Sequence
  Description of Artificial Sequence: Synthetic oligonucleotide
cuacuggucugaagauuag

SEQ ID NO: 773308 - RNA, 19 nt, Artificial Sequence
  Description of Artificial Sequence: Synthetic oligonucleotide
ucauauguaggagcuuaau

SEQ ID NO: 773309 - RNA, 19 nt, Artificial Sequence
  Description of Artificial Sequence: Synthetic oligonucleotide
gaagaucuugccuccagau

SEQ ID NO: 773310 - RNA, 19 nt, Artificial Sequence
  Description of Artificial Sequence: Synthetic oligonucleotide
caggcguauacugaaugug

SEQ ID NO: 773311 - RNA, 19 nt, Artificial Sequence
  Description of Artificial Sequence: Synthetic oligonucleotide
caaacacaccugcaucgac

SEQ ID NO: 773312 - RNA, 19 nt, Artificial Sequence
  Description of Artificial Sequence: Synthetic oligonucleotide
gauuagccagggcacuaca

SEQ ID NO: 773313 - RNA, 19 nt, Artificial Sequence
  Description of Artificial Sequence: Synthetic oligonucleotide
aacggccuguucccagcag

SEQ ID NO: 773314 - RNA, 19 nt, Artificial Sequence
  Description of Artificial Sequence: Synthetic oligonucleotide
cugccaucccaaauauaac

SEQ ID NO: 773315 - RNA, 19 nt, Artificial Sequence
  Description of Artificial Sequence: Synthetic oligonucleotide
ggauaggcaccugaaacug

SEQ ID NO: 773316 - RNA, 19 nt, Artificial Sequence
  Description of Artificial Sequence: Synthetic oligonucleotide
cccgcuuguacccggaugg

SEQ ID NO: 773317 - RNA, 19 nt, Artificial Sequence
  Description of Artificial Sequence: Synthetic oligonucleotide
auguuuaacccaagagugu

SEQ ID NO: 773318 - RNA, 19 nt, Artificial Sequence
  Description of Artificial Sequence: Synthetic oligonucleotide
gaaagggucagaggugcuc

SEQ ID NO: 773319 - RNA, 19 nt, Artificial Sequence
  Description of Artificial Sequence: Synthetic oligonucleotide
ucccgcuuguacccggaug

SEQ ID NO: 773320 - RNA, 19 nt, Artificial Sequence
  Description of Artificial Sequence: Synthetic oligonucleotide
ccugcacuggauaaacggc

SEQ ID NO: 773321 - RNA, 19 nt, Artificial Sequence
  Description of Artificial Sequence: Synthetic oligonucleotide
cagugucuacacaagagua

SEQ ID NO: 773322 - RNA, 19 nt, Artificial Sequence
  Description of Artificial Sequence: Synthetic oligonucleotide
gcaagauauugacacucug

SEQ ID NO: 773323 - RNA, 19 nt, Artificial Sequence
  Description of Artificial Sequence: Synthetic oligonucleotide
aggagcuuaaucccaucuu

SEQ ID NO: 773324 - RNA, 19 nt, Artificial Sequence
  Description of Artificial Sequence: Synthetic oligonucleotide
auaacaacacuugcuggua

SEQ ID NO: 773325 - RNA, 19 nt, Artificial Sequence
  Description of Artificial Sequence: Synthetic oligonucleotide
cugguuaauaaaaggugcu

SEQ ID NO: 773326 - RNA, 19 nt, Artificial Sequence
  Description of Artificial Sequence: Synthetic oligonucleotide
aggcaagagagagaagccu

SEQ ID NO: 773327 - RNA, 19 nt, Artificial Sequence
  Description of Artificial Sequence: Synthetic oligonucleotide
ccaaaaugggacagcaguc

SEQ ID NO: 773328 - RNA, 19 nt, Artificial Sequence
  Description of Artificial Sequence: Synthetic oligonucleotide
aucgacaguuucuguuaca

SEQ ID NO: 773329 - RNA, 19 nt, Artificial Sequence
  Description of Artificial Sequence: Synthetic oligonucleotide
acccggaugggacuaucca

SEQ ID NO: 773330 - RNA, 19 nt, Artificial Sequence
  Description of Artificial Sequence: Synthetic oligonucleotide
acaacacuugcugguauaa

SEQ ID NO: 773331 - RNA, 19 nt, Artificial Sequence
  Description of Artificial Sequence: Synthetic oligonucleotide
cacucuacugccaucccaa

SEQ ID NO: 773332 - RNA, 19 nt, Artificial Sequence
  Description of Artificial Sequence: Synthetic oligonucleotide
gauaaacggccuguuccca

SEQ ID NO: 773333 - RNA, 19 nt, Artificial Sequence
  Description of Artificial Sequence: Synthetic oligonucleotide
acacaagaguaggccgggc

SEQ ID NO: 773334 - RNA, 19 nt, Artificial Sequence
  Description of Artificial Sequence: Synthetic oligonucleotide
guugcagaaguaaaucgcu

SEQ ID NO: 773335 - RNA, 19 nt, Artificial Sequence
  Description of Artificial Sequence: Synthetic oligonucleotide
guaacaaucuugacaagau

SEQ ID NO: 773336 - RNA, 19 nt, Artificial Sequence
  Description of Artificial Sequence: Synthetic oligonucleotide
cagcaauuauaggcaagag

SEQ ID NO: 773337 - RNA, 19 nt, Artificial Sequence
  Description of Artificial Sequence: Synthetic oligonucleotide
ccuccagauugcaauaaac

SEQ ID NO: 773338 - RNA, 19 nt, Artificial Sequence
  Description of Artificial Sequence: Synthetic oligonucleotide
acaacuagggacacucuuu

SEQ ID NO: 773339 - RNA, 19 nt, Artificial Sequence
  Description of Artificial Sequence: Synthetic oligonucleotide
cuuagggaagugauuggcu

SEQ ID NO: 773340 - RNA, 19 nt, Artificial Sequence
  Description of Artificial Sequence: Synthetic oligonucleotide
uggacagacuguguucauc

SEQ ID NO: 773341 - RNA, 19 nt, Artificial Sequence
  Description of Artificial Sequence: Synthetic oligonucleotide
cauugcuaucuuaaagccu

SEQ ID NO: 773342 - RNA, 19 nt, Artificial Sequence
  Description of Artificial Sequence: Synthetic oligonucleotide
cuuaagaguuccacuggcu

SEQ ID NO: 773343 - RNA, 19 nt, Artificial Sequence
  Description of Artificial Sequence: Synthetic oligonucleotide
ugcggaccuuuacuucucu

SEQ ID NO: 773344 - RNA, 19 nt, Artificial Sequence
  Description of Artificial Sequence: Synthetic oligonucleotide
cuugacaagaugcuuccau

SEQ ID NO: 773345 - RNA, 19 nt, Artificial Sequence
  Description of Artificial Sequence: Synthetic oligonucleotide
cuaucggaaguguucaaau

SEQ ID NO: 773346 - RNA, 19 nt, Artificial Sequence
  Description of Artificial Sequence: Synthetic oligonucleotide
ggauguuauugagcaaagc

SEQ ID NO: 773347 - RNA, 19 nt, Artificial Sequence
  Description of Artificial Sequence: Synthetic oligonucleotide
cuccacgagcaucccaaac

SEQ ID NO: 773348 - RNA, 19 nt, Artificial Sequence
  Description of Artificial Sequence: Synthetic oligonucleotide
acuacagagcucagccuca

SEQ ID NO: 773349 - RNA, 19 nt, Artificial Sequence
  Description of Artificial Sequence: Synthetic oligonucleotide
agauggcucaauggaacau

SEQ ID NO: 773350 - RNA, 19 nt, Artificial Sequence
  Description of Artificial Sequence: Synthetic oligonucleotide
agacuguguucaucaucca

SEQ ID NO: 773351 - RNA, 19 nt, Artificial Sequence
  Description of Artificial Sequence: Synthetic oligonucleotide
guuuccuuagggaagugau

SEQ ID NO: 773352 - RNA, 19 nt, Artificial Sequence
  Description of Artificial Sequence: Synthetic oligonucleotide
caaaugcggaccuuuacuu

SEQ ID NO: 773353 - RNA, 19 nt, Artificial Sequence
  Description of Artificial Sequence: Synthetic oligonucleotide
acuacaucacaggcaaguu

SEQ ID NO: 773354 - RNA, 19 nt, Artificial Sequence
  Description of Artificial Sequence: Synthetic oligonucleotide
ccaagaguguguucuguuc

SEQ ID NO: 773355 - RNA, 19 nt, Artificial Sequence
  Description of Artificial Sequence: Synthetic oligonucleotide
cucucccgcuuguacccgg

SEQ ID NO: 773356 - RNA, 19 nt, Artificial Sequence
  Description of Artificial Sequence: Synthetic oligonucleotide
ucgcucccaugcaugaauu

SEQ ID NO: 773357 - RNA, 19 nt, Artificial Sequence
  Description of Artificial Sequence: Synthetic oligonucleotide
gcaaguacccuccagggau

SEQ ID NO: 773358 - RNA, 19 nt, Artificial Sequence
  Description of Artificial Sequence: Synthetic oligonucleotide
ggauccuacucaucuuuuc

SEQ ID NO: 773359 - RNA, 19 nt, Artificial Sequence
  Description of Artificial Sequence: Synthetic oligonucleotide
ggaacacuaagaggacaag

SEQ ID NO: 773360 - RNA, 19 nt, Artificial Sequence
  Description of Artificial Sequence: Synthetic oligonucleotide
gaagauuagccagggcacu

SEQ ID NO: 773361 - RNA, 19 nt, Artificial Sequence
  Description of Artificial Sequence: Synthetic oligonucleotide
gcuuguacccggaugggac

SEQ ID NO: 773362 - RNA, 19 nt, Artificial Sequence
  Description of Artificial Sequence: Synthetic oligonucleotide
gguuaauaaaaggugcuau

SEQ ID NO: 773363 - RNA, 19 nt, Artificial Sequence
  Description of Artificial Sequence: Synthetic oligonucleotide
ucucccgcuuguacccgga

SEQ ID NO: 773364 - RNA, 19 nt, Artificial Sequence
  Description of Artificial Sequence: Synthetic oligonucleotide
aguaggccgggcucugaaa

SEQ ID NO: 773365 - RNA, 19 nt, Artificial Sequence
  Description of Artificial Sequence: Synthetic oligonucleotide
gugauuggcuucagauaug

SEQ ID NO: 773366 - RNA, 19 nt, Artificial Sequence
  Description of Artificial Sequence: Synthetic oligonucleotide
ggcaccugaaacugguuaa

SEQ ID NO: 773367 - RNA, 19 nt, Artificial Sequence
  Description of Artificial Sequence: Synthetic oligonucleotide
ccugcaucgacaguuucug

SEQ ID NO: 773368 - RNA, 19 nt, Artificial Sequence
  Description of Artificial Sequence: Synthetic oligonucleotide
augggauguuauugagcaa

SEQ ID NO: 773369 - RNA, 19 nt, Artificial Sequence
  Description of Artificial Sequence: Synthetic oligonucleotide
cacgagcaucccaaacauc

SEQ ID NO: 773370 - RNA, 19 nt, Artificial Sequence
  Description of Artificial Sequence: Synthetic oligonucleotide
aaucgcucccaugcaugaa

SEQ ID NO: 773371 - RNA, 19 nt, Artificial Sequence
  Description of Artificial Sequence: Synthetic oligonucleotide
cuguuacaacuagggacac

SEQ ID NO: 773372 - RNA, 19 nt, Artificial Sequence
  Description of Artificial Sequence: Synthetic oligonucleotide
cugagguguccaaccugac

SEQ ID NO: 773373 - RNA, 19 nt, Artificial Sequence
  Description of Artificial Sequence: Synthetic oligonucleotide
cucacccuaugaugucuuc

SEQ ID NO: 773374 - RNA, 19 nt, Artificial Sequence
  Description of Artificial Sequence: Synthetic oligonucleotide
cugugacuccacgagcauc

SEQ ID NO: 773375 - RNA, 19 nt, Artificial Sequence
  Description of Artificial Sequence: Synthetic oligonucleotide
gggucagaggugcucggug

SEQ ID NO: 773376 - RNA, 19 nt, Artificial Sequence
  Description of Artificial Sequence: Synthetic oligonucleotide
gguauaacuuucccauacu

SEQ ID NO: 773377 - RNA, 19 nt, Artificial Sequence
  Description of Artificial Sequence: Synthetic oligonucleotide
augggacuauccagaacca

SEQ ID NO: 773378 - RNA, 19 nt, Artificial Sequence
  Description of Artificial Sequence: Synthetic oligonucleotide
ccaaccugaccucaucauc

SEQ ID NO: 773379 - RNA, 19 nt, Artificial Sequence
  Description of Artificial Sequence: Synthetic oligonucleotide
acucuacugccaucccaaa

SEQ ID NO: 773380 - RNA, 19 nt, Artificial Sequence
  Description of Artificial Sequence: Synthetic oligonucleotide
uuguacccggaugggacua

SEQ ID NO: 773381 - RNA, 19 nt, Artificial Sequence
  Description of Artificial Sequence: Synthetic oligonucleotide
acccuaugaugucuucgua

SEQ ID NO: 773382 - RNA, 19 nt, Artificial Sequence
  Description of Artificial Sequence: Synthetic oligonucleotide
gcaucgacaguuucuguua

SEQ ID NO: 773383 - RNA, 19 nt, Artificial Sequence
  Description of Artificial Sequence: Synthetic oligonucleotide
cuggauucuuagguaacaa

SEQ ID NO: 773384 - RNA, 19 nt, Artificial Sequence
  Description of Artificial Sequence: Synthetic oligonucleotide
guuauugagcaaagcaauu

SEQ ID NO: 773385 - RNA, 19 nt, Artificial Sequence
  Description of Artificial Sequence: Synthetic oligonucleotide
cacccuaugaugucuucgu

SEQ ID NO: 773386 - RNA, 19 nt, Artificial Sequence
  Description of Artificial Sequence: Synthetic oligonucleotide
ccagcaauuauaggcaaga

SEQ ID NO: 773387 - RNA, 19 nt, Artificial Sequence
  Description of Artificial Sequence: Synthetic oligonucleotide
cagcgcucucuucuaccag

SEQ ID NO: 773388 - RNA, 19 nt, Artificial Sequence
  Description of Artificial Sequence: Synthetic oligonucleotide
acuuguggacagacugugu

SEQ ID NO: 773389 - RNA, 19 nt, Artificial Sequence
  Description of Artificial Sequence: Synthetic oligonucleotide
cugguauaacuuucccaua

SEQ ID NO: 773390 - RNA, 19 nt, Artificial Sequence
  Description of Artificial Sequence: Synthetic oligonucleotide
cagugaguauccacgggcu

SEQ ID NO: 773391 - RNA, 19 nt, Artificial Sequence
  Description of Artificial Sequence: Synthetic oligonucleotide
uguuuccaaugggagccuu

SEQ ID NO: 773392 - RNA, 19 nt, Artificial Sequence
  Description of Artificial Sequence: Synthetic oligonucleotide
agauugcaauaaacaccug

SEQ ID NO: 773393 - RNA, 19 nt, Artificial Sequence
  Description of Artificial Sequence: Synthetic oligonucleotide
gggcuuaacaucaccaagu

SEQ ID NO: 773394 - RNA, 19 nt, Artificial Sequence
  Description of Artificial Sequence: Synthetic oligonucleotide
cuuguacccggaugggacu

SEQ ID NO: 773395 - RNA, 19 nt, Artificial Sequence
  Description of Artificial Sequence: Synthetic oligonucleotide
gcuggagaacaaaccacac

SEQ ID NO: 773396 - RNA, 19 nt, Artificial Sequence
  Description of Artificial Sequence: Synthetic oligonucleotide
cacaagaguaggccgggcu

SEQ ID NO: 773397 - RNA, 19 nt, Artificial Sequence
  Description of Artificial Sequence: Synthetic oligonucleotide
cauuuccuagagagagcaa

SEQ ID NO: 773398 - RNA, 19 nt, Artificial Sequence
  Description of Artificial Sequence: Synthetic oligonucleotide
acaaggcucuuuagcugca

SEQ ID NO: 773399 - RNA, 19 nt, Artificial Sequence
  Description of Artificial Sequence: Synthetic oligonucleotide
ccgggcucugaaaugucac

SEQ ID NO: 773400 - RNA, 19 nt, Artificial Sequence
  Description of Artificial Sequence: Synthetic oligonucleotide
cuucguaucucugcacacu

SEQ ID NO: 773401 - RNA, 19 nt, Artificial Sequence
  Description of Artificial Sequence: Synthetic oligonucleotide
uguacccggaugggacuau

SEQ ID NO: 773402 - RNA, 19 nt, Artificial Sequence
  Description of Artificial Sequence: Synthetic oligonucleotide
caguuguguaaggcucaac

SEQ ID NO: 773403 - RNA, 19 nt, Artificial Sequence
  Description of Artificial Sequence: Synthetic oligonucleotide
accaaguguuccagcaauu

SEQ ID NO: 773404 - RNA, 19 nt, Artificial Sequence
  Description of Artificial Sequence: Synthetic oligonucleotide
gcuuaacaucaccaagugu

SEQ ID NO: 773405 - RNA, 19 nt, Artificial Sequence
  Description of Artificial Sequence: Synthetic oligonucleotide
cucuaucggaaguguucaa

SEQ ID NO: 773406 - RNA, 19 nt, Artificial Sequence
  Description of Artificial Sequence: Synthetic oligonucleotide
ggccugcacuggauaaacg

SEQ ID NO: 773407 - RNA, 19 nt, Artificial Sequence
  Description of Artificial Sequence: Synthetic oligonucleotide
guacccuccagggauccua

SEQ ID NO: 773408 - RNA, 19 nt, Artificial Sequence
  Description of Artificial Sequence: Synthetic oligonucleotide
ccagugucuacacaagagu

SEQ ID NO: 773409 - RNA, 19 nt, Artificial Sequence
  Description of Artificial Sequence: Synthetic oligonucleotide
caucuuguuugcagccacu

SEQ ID NO: 773410 - RNA, 19 nt, Artificial Sequence
  Description of Artificial Sequence: Synthetic oligonucleotide
cuauaucaagugacuucau

SEQ ID NO: 773411 - RNA, 19 nt, Artificial Sequence
  Description of Artificial Sequence: Synthetic oligonucleotide
cuucucuaucggaaguguu

SEQ ID NO: 773412 - RNA, 19 nt, Artificial Sequence
  Description of Artificial Sequence: Synthetic oligonucleotide
ccacaauuccuucuccaaa

SEQ ID NO: 773413 - RNA, 19 nt, Artificial Sequence
  Description of Artificial Sequence: Synthetic oligonucleotide
ggcuggcuuaaagggacac

SEQ ID NO: 773414 - RNA, 19 nt, Artificial Sequence
  Description of Artificial Sequence: Synthetic oligonucleotide
cagccucauuuccuagaga

SEQ ID NO: 773415 - RNA, 19 nt, Artificial Sequence
  Description of Artificial Sequence: Synthetic oligonucleotide
aguacccuccagggauccu

SEQ ID NO: 773416 - RNA, 19 nt, Artificial Sequence
  Description of Artificial Sequence: Synthetic oligonucleotide
cucuacugccaucccaaau

SEQ ID NO: 773417 - RNA, 19 nt, Artificial Sequence
  Description of Artificial Sequence: Synthetic oligonucleotide
gggacagcagucacucguc

SEQ ID NO: 773418 - RNA, 19 nt, Artificial Sequence
  Description of Artificial Sequence: Synthetic oligonucleotide
gucuuagguugcagaagua

SEQ ID NO: 773419 - RNA, 19 nt, Artificial Sequence
  Description of Artificial Sequence: Synthetic oligonucleotide
gucacucggucuccaggcu

SEQ ID NO: 773420 - RNA, 19 nt, Artificial Sequence
  Description of Artificial Sequence: Synthetic oligonucleotide
gguccaaaagugauacaau

SEQ ID NO: 773421 - RNA, 19 nt, Artificial Sequence
  Description of Artificial Sequence: Synthetic oligonucleotide
guacccggaugggacuauc

SEQ ID NO: 773422 - RNA, 19 nt, Artificial Sequence
  Description of Artificial Sequence: Synthetic oligonucleotide
gugcucggugcaguaccac

SEQ ID NO: 773423 - RNA, 19 nt, Artificial Sequence
  Description of Artificial Sequence: Synthetic oligonucleotide
ccacuacaucacaggcaag

SEQ ID NO: 773424 - RNA, 19 nt, Artificial Sequence
  Description of Artificial Sequence: Synthetic oligonucleotide
cccuaugaugucuucguau

SEQ ID NO: 773425 - RNA, 19 nt, Artificial Sequence
  Description of Artificial Sequence: Synthetic oligonucleotide
cccaugcaugaauuaaacu

SEQ ID NO: 773426 - RNA, 19 nt, Artificial Sequence
  Description of Artificial Sequence: Synthetic oligonucleotide
ggugcucggugcaguacca

SEQ ID NO: 773427 - RNA, 19 nt, Artificial Sequence
  Description of Artificial Sequence: Synthetic oligonucleotide
cucuacuggucugaagauu

SEQ ID NO: 773428 - RNA, 19 nt, Artificial Sequence
  Description of Artificial Sequence: Synthetic oligonucleotide
cugcaucgacaguuucugu

SEQ ID NO: 773429 - RNA, 19 nt, Artificial Sequence
  Description of Artificial Sequence: Synthetic oligonucleotide
ggagaacaaaccacaccau

SEQ ID NO: 773430 - RNA, 19 nt, Artificial Sequence
  Description of Artificial Sequence: Synthetic oligonucleotide
gccgggcucugaaauguca

SEQ ID NO: 773431 - RNA, 19 nt, Artificial Sequence
  Description of Artificial Sequence: Synthetic oligonucleotide
ccgcuuguacccggauggg

SEQ ID NO: 773432 - RNA, 19 nt, Artificial Sequence
  Description of Artificial Sequence: Synthetic oligonucleotide
gcggaccuuuacuucucua

SEQ ID NO: 773433 - RNA, 19 nt, Artificial Sequence
  Description of Artificial Sequence: Synthetic oligonucleotide
gcaccugaaacugguuaau

SEQ ID NO: 773434 - RNA, 19 nt, Artificial Sequence
  Description of Artificial Sequence: Synthetic oligonucleotide
cggaugggacuauccagaa

SEQ ID NO: 773435 - RNA, 19 nt, Artificial Sequence
  Description of Artificial Sequence: Synthetic oligonucleotide
gggauccuacucaucuuuu

SEQ ID NO: 773436 - RNA, 19 nt, Artificial Sequence
  Description of Artificial Sequence: Synthetic oligonucleotide
ggccgggcucugaaauguc

SEQ ID NO: 773437 - RNA, 19 nt, Artificial Sequence
  Description of Artificial Sequence: Synthetic oligonucleotide
ccuuugcaacacagcagau

SEQ ID NO: 773438 - RNA, 19 nt, Artificial Sequence
  Description of Artificial Sequence: Synthetic oligonucleotide
caccuggauauugcagcuu

SEQ ID NO: 773439 - RNA, 19 nt, Artificial Sequence
  Description of Artificial Sequence: Synthetic oligonucleotide
cgcuuguacccggauggga

SEQ ID NO: 773440 - RNA, 19 nt, Artificial Sequence
  Description of Artificial Sequence: Synthetic oligonucleotide
cggugcaguaccacucugu

SEQ ID NO: 773441 - RNA, 19 nt, Artificial Sequence
  Description of Artificial Sequence: Synthetic oligonucleotide
cucccgcuuguacccggau

SEQ ID NO: 773442 - RNA, 19 nt, Artificial Sequence
  Description of Artificial Sequence: Synthetic oligonucleotide
cgcucccaugcaugaauua

SEQ ID NO: 773443 - RNA, 19 nt, Artificial Sequence
  Description of Artificial Sequence: Synthetic oligonucleotide
cucggucuccaggcuuuau

SEQ ID NO: 773444 - RNA, 19 nt, Artificial Sequence
  Description of Artificial Sequence: Synthetic oligonucleotide
aauucaaaucauuuguuac

SEQ ID NO: 773445 - RNA, 19 nt, Artificial Sequence
  Description of Artificial Sequence: Synthetic oligonucleotide
aauaaaucuguacacuggg

SEQ ID NO: 773446 - RNA, 19 nt, Artificial Sequence
  Description of Artificial Sequence: Synthetic oligonucleotide
aguuauaggcuccacaucc

SEQ ID NO: 773447 - RNA, 19 nt, Artificial Sequence
  Description of Artificial Sequence: Synthetic oligonucleotide
uuuaaguucaauaucagau

SEQ ID NO: 773448 - RNA, 19 nt, Artificial Sequence
  Description of Artificial Sequence: Synthetic oligonucleotide
auagguacaauauaauuuc

SEQ ID NO: 773449 - RNA, 19 nt, Artificial Sequence
  Description of Artificial Sequence: Synthetic oligonucleotide
auauauguggugcagcugc

SEQ ID NO: 773450 - RNA, 19 nt, Artificial Sequence
  Description of Artificial Sequence: Synthetic oligonucleotide
agaagaaucaccguguagc

SEQ ID NO: 773451 - RNA, 19 nt, Artificial Sequence
  Description of Artificial Sequence: Synthetic oligonucleotide
uacagugucaaauuaauca

SEQ ID NO: 773452 - RNA, 19 nt, Artificial Sequence
  Description of Artificial Sequence: Synthetic oligonucleotide
uuagagaugaccuuuucag

SEQ ID NO: 773453 - RNA, 19 nt, Artificial Sequence
  Description of Artificial Sequence: Synthetic oligonucleotide
  modified_base (5)..(5): a, c, u, g, unknown or other
cauunaaaacuuuauaaac

SEQ ID NO: 773454 - RNA, 19 nt, Artificial Sequence
  Description of Artificial Sequence: Synthetic oligonucleotide
uuuugcaagaaauagucug

SEQ ID NO: 773455 - RNA, 19 nt, Artificial Sequence
  Description of Artificial Sequence: Synthetic oligonucleotide
auaggaaucaauuauugca

SEQ ID NO: 773456 - RNA, 19 nt, Artificial Sequence
  Description of Artificial Sequence: Synthetic oligonucleotide
aaugacggacuuuacaaag

SEQ ID NO: 773457 - RNA, 19 nt, Artificial Sequence
  Description of Artificial Sequence: Synthetic oligonucleotide
  modified_base (3)..(3): a, c, u, g, unknown or other
uunaaaacuuuauaaacuc

SEQ ID NO: 773458 - RNA, 19 nt, Artificial Sequence
  Description of Artificial Sequence: Synthetic oligonucleotide
uuagugaauauauauauau

SEQ ID NO: 773459 - RNA, 19 nt, Artificial Sequence
  Description of Artificial Sequence: Synthetic oligonucleotide
aauuauugcaacuuuguuu

SEQ ID NO: 773460 - RNA, 19 nt, Artificial Sequence
  Description of Artificial Sequence: Synthetic oligonucleotide
aauauauauauauuacuua

SEQ ID NO: 773461 - RNA, 19 nt, Artificial Sequence
  Description of Artificial Sequence: Synthetic oligonucleotide
aguaaaugaaaggugacac

SEQ ID NO: 773462 - RNA, 19 nt, Artificial Sequence
  Description of Artificial Sequence: Synthetic oligonucleotide
uugcauguagaaaaugugg

SEQ ID NO: 773463 - RNA, 19 nt, Artificial Sequence
  Description of Artificial Sequence: Synthetic oligonucleotide
uccuuuaaguucaauauca

SEQ ID NO: 773464 - RNA, 19 nt, Artificial Sequence
  Description of Artificial Sequence: Synthetic oligonucleotide
ugaauauauauauauuacu

SEQ ID NO: 773465 - RNA, 19 nt, Artificial Sequence
  Description of Artificial Sequence: Synthetic oligonucleotide
ucaaagauugcuccauugg

SEQ ID NO: 773466 - RNA, 19 nt, Artificial Sequence
  Description of Artificial Sequence: Synthetic oligonucleotide
aaagcaacaaacaucacga

SEQ ID NO: 773467 - RNA, 19 nt, Artificial Sequence
  Description of Artificial Sequence: Synthetic oligonucleotide
aaagauugcuccauugggc

SEQ ID NO: 773468 - RNA, 19 nt, Artificial Sequence
  Description of Artificial Sequence: Synthetic oligonucleotide
auauauauauauuacuuau

SEQ ID NO: 773469 - RNA, 19 nt, Artificial Sequence
  Description of Artificial Sequence: Synthetic oligonucleotide
uuuguuacuaccuuuggaa

SEQ ID NO: 773470 - RNA, 19 nt, Artificial Sequence
  Description of Artificial Sequence: Synthetic oligonucleotide
ucuuguuuggaacauagaa

SEQ ID NO: 773471 - RNA, 19 nt, Artificial Sequence
  Description of Artificial Sequence: Synthetic oligonucleotide
  modified_base (2)..(2): a, c, u, g, unknown or other
unaaaacuuuauaaacucc

SEQ ID NO: 773472 - RNA, 19 nt, Artificial Sequence
  Description of Artificial Sequence: Synthetic oligonucleotide
uucauuuggauuuaagccu

SEQ ID NO: 773473 - RNA, 19 nt, Artificial Sequence
  Description of Artificial Sequence: Synthetic oligonucleotide
agugaauauauauauauua

SEQ ID NO: 773474 - RNA, 19 nt, Artificial Sequence
  Description of Artificial Sequence: Synthetic oligonucleotide
cauaaaagcaacaaacauc

SEQ ID NO: 773475 - RNA, 19 nt, Artificial Sequence
  Description of Artificial Sequence: Synthetic oligonucleotide
ugaguuauauucuccuugg

SEQ ID NO: 773476 - RNA, 19 nt, Artificial Sequence
  Description of Artificial Sequence: Synthetic oligonucleotide
uuaaucaugucacaauaac

SEQ ID NO: 773477 - RNA, 19 nt, Artificial Sequence
  Description of Artificial Sequence: Synthetic oligonucleotide
ugcaguaaaugaaagguga

SEQ ID NO: 773478 - RNA, 19 nt, Artificial Sequence
  Description of Artificial Sequence: Synthetic oligonucleotide
aguuuugcaagaaauaguc

SEQ ID NO: 773479 - RNA, 19 nt, Artificial Sequence
  Description of Artificial Sequence: Synthetic oligonucleotide
aagugaauugagcacaacu

SEQ ID NO: 773480 - RNA, 19 nt, Artificial Sequence
  Description of Artificial Sequence: Synthetic oligonucleotide
ucaguuuugcaagaaauag

SEQ ID NO: 773481 - RNA, 19 nt, Artificial Sequence
  Description of Artificial Sequence: Synthetic oligonucleotide
uugagaauugugaaggugu

SEQ ID NO: 773482 - RNA, 19 nt, Artificial Sequence
  Description of Artificial Sequence: Synthetic oligonucleotide
  modified_base (4)..(4): a, c, u, g, unknown or other
auunaaaacuuuauaaacu

SEQ ID NO: 773483 - RNA, 19 nt, Artificial Sequence
  Description of Artificial Sequence: Synthetic oligonucleotide
uugauuuugcuacuguuca

SEQ ID NO: 773484 - RNA, 19 nt, Artificial Sequence
  Description of Artificial Sequence: Synthetic oligonucleotide
uuaaucauuuugaaauaug

SEQ ID NO: 773485 - RNA, 19 nt, Artificial Sequence
  Description of Artificial Sequence: Synthetic oligonucleotide
uaaauugcaaucaguuuug

SEQ ID NO: 773486 - RNA, 19 nt, Artificial Sequence
  Description of Artificial Sequence: Synthetic oligonucleotide
auugagcacaacuugaaca

SEQ ID NO: 773487 - RNA, 19 nt, Artificial Sequence
  Description of Artificial Sequence: Synthetic oligonucleotide
uaugauguacaguuauuag

SEQ ID NO: 773488 - RNA, 19 nt, Artificial Sequence
  Description of Artificial Sequence: Synthetic oligonucleotide
aaacugucuguacacagug

SEQ ID NO: 773489 - RNA, 19 nt, Artificial Sequence
  Description of Artificial Sequence: Synthetic oligonucleotide
aacaauucucucaaaguuc

SEQ ID NO: 773490 - RNA, 19 nt, Artificial Sequence
  Description of Artificial Sequence: Synthetic oligonucleotide
ucaauuauugcaacuuugu

SEQ ID NO: 773491 - RNA, 19 nt, Artificial Sequence
  Description of Artificial Sequence: Synthetic oligonucleotide
gauggaucugcaaaugucg

SEQ ID NO: 773492 - RNA, 19 nt, Artificial Sequence
  Description of Artificial Sequence: Synthetic oligonucleotide
agucacuugauuucugaac

SEQ ID NO: 773493 - RNA, 19 nt, Artificial Sequence
  Description of Artificial Sequence: Synthetic oligonucleotide
aagcuuuacuuuuccaguc

SEQ ID NO: 773494 - RNA, 19 nt, Artificial Sequence
  Description of Artificial Sequence: Synthetic oligonucleotide
ugcaguguaaggauaaaac

SEQ ID NO: 773495 - RNA, 19 nt, Artificial Sequence
  Description of Artificial Sequence: Synthetic oligonucleotide
auaacuuucccaauaggac

SEQ ID NO: 773496 - RNA, 19 nt, Artificial Sequence
  Description of Artificial Sequence: Synthetic oligonucleotide
auuacaguguuuucuaugu

SEQ ID NO: 773497 - RNA, 19 nt, Artificial Sequence
  Description of Artificial Sequence: Synthetic oligonucleotide
uucccaauaggacaaauuc

SEQ ID NO: 773498 - RNA, 19 nt, Artificial Sequence
  Description of Artificial Sequence: Synthetic oligonucleotide
ugaauugagcacaacuuga

SEQ ID NO: 773499 - RNA, 19 nt, Artificial Sequence
  Description of Artificial Sequence: Synthetic oligonucleotide
auuaagccaaaguauaggu

SEQ ID NO: 773500 - RNA, 19 nt, Artificial Sequence
  Description of Artificial Sequence: Synthetic oligonucleotide
aguguaaggauaaaacaac

SEQ ID NO: 773501 - RNA, 19 nt, Artificial Sequence
  Description of Artificial Sequence: Synthetic oligonucleotide
uaggauauggaaccaaacu

SEQ ID NO: 773502 - RNA, 19 nt, Artificial Sequence
  Description of Artificial Sequence: Synthetic oligonucleotide
ucaaagauccaaaacuguc

SEQ ID NO: 773503 - RNA, 19 nt, Artificial Sequence
  Description of Artificial Sequence: Synthetic oligonucleotide
ugauuucugaacauuucug

SEQ ID NO: 773504 - RNA, 19 nt, Artificial Sequence
  Description of Artificial Sequence: Synthetic oligonucleotide
uguaaagugaauccaguua

SEQ ID NO: 773505 - RNA, 19 nt, Artificial Sequence
  Description of Artificial Sequence: Synthetic oligonucleotide
aagaccauuucuaccagac

SEQ ID NO: 773506 - RNA, 19 nt, Artificial Sequence
  Description of Artificial Sequence: Synthetic oligonucleotide
uucuaaagaaauugaaguc

SEQ ID NO: 773507 - RNA, 19 nt, Artificial Sequence
  Description of Artificial Sequence: Synthetic oligonucleotide
aaagcagcugguaagaaga

SEQ ID NO: 773508 - RNA, 19 nt, Artificial Sequence
  Description of Artificial Sequence: Synthetic oligonucleotide
gaacauagaagacuuggac

SEQ ID NO: 773509 - RNA, 19 nt, Artificial Sequence
  Description of Artificial Sequence: Synthetic oligonucleotide
aaaacaacaccaacuguag

SEQ ID NO: 773510 - RNA, 19 nt, Artificial Sequence
  Description of Artificial Sequence: Synthetic oligonucleotide
agcaagaccauuucuacca

SEQ ID NO: 773511 - RNA, 19 nt, Artificial Sequence
  Description of Artificial Sequence: Synthetic oligonucleotide
auuucuaccagaccaagaa

SEQ ID NO: 773512 - RNA, 19 nt, Artificial Sequence
  Description of Artificial Sequence: Synthetic oligonucleotide
aaaguauagguacaauaua

SEQ ID NO: 773513 - RNA, 19 nt, Artificial Sequence
  Description of Artificial Sequence: Synthetic oligonucleotide
caugucacaauaacuuucc

SEQ ID NO: 773514 - RNA, 19 nt, Artificial Sequence
  Description of Artificial Sequence: Synthetic oligonucleotide
ugucuagcacaccauauga

SEQ ID NO: 773515 - RNA, 19 nt, Artificial Sequence
  Description of Artificial Sequence: Synthetic oligonucleotide
augauguacaguuauuaga

SEQ ID NO: 773516 - RNA, 19 nt, Artificial Sequence
  Description of Artificial Sequence: Synthetic oligonucleotide
uguacaucaaagauccaaa

SEQ ID NO: 773517 - RNA, 19 nt, Artificial Sequence
  Description of Artificial Sequence: Synthetic oligonucleotide
aucgccaauaguuccaguc

SEQ ID NO: 773518 - RNA, 19 nt, Artificial Sequence
  Description of Artificial Sequence: Synthetic oligonucleotide
uggauuuaagccuucaaua

SEQ ID NO: 773519 - RNA, 19 nt, Artificial Sequence
  Description of Artificial Sequence: Synthetic oligonucleotide
guucuaaagaaauugaagu

SEQ ID NO: 773520 - RNA, 19 nt, Artificial Sequence
  Description of Artificial Sequence: Synthetic oligonucleotide
agaaucaccguguagcgcu

SEQ ID NO: 773521 - RNA, 19 nt, Artificial Sequence
  Description of Artificial Sequence: Synthetic oligonucleotide
ugucacaauaacuuuccca

SEQ ID NO: 773522 - RNA, 19 nt, Artificial Sequence
  Description of Artificial Sequence: Synthetic oligonucleotide
aaguauagguacaauauaa

SEQ ID NO: 773523 - RNA, 19 nt, Artificial Sequence
  Description of Artificial Sequence: Synthetic oligonucleotide
gauaagugaauugagcaca

SEQ ID NO: 773524 - RNA, 19 nt, Artificial Sequence
  Description of Artificial Sequence: Synthetic oligonucleotide
aauaugcuuuggcuuagug

SEQ ID NO: 773525 - RNA, 19 nt, Artificial Sequence
  Description of Artificial Sequence: Synthetic oligonucleotide
guuuaugucauccuuucca

SEQ ID NO: 773526 - RNA, 19 nt, Artificial Sequence
  Description of Artificial Sequence: Synthetic oligonucleotide
gaagucguuuugcaaauug

SEQ ID NO: 773527 - RNA, 19 nt, Artificial Sequence
  Description of Artificial Sequence: Synthetic oligonucleotide
uuguuacuaccuuuggaag

SEQ ID NO: 773528 - RNA, 19 nt, Artificial Sequence
  Description of Artificial Sequence: Synthetic oligonucleotide
guuauauucuccuuggucu

SEQ ID NO: 773529 - RNA, 19 nt, Artificial Sequence
  Description of Artificial Sequence: Synthetic oligonucleotide
ucacuaauuucagaaagca

SEQ ID NO: 773530 - RNA, 19 nt, Artificial Sequence
  Description of Artificial Sequence: Synthetic oligonucleotide
ucaugucacaauaacuuuc

SEQ ID NO: 773531 - RNA, 19 nt, Artificial Sequence
  Description of Artificial Sequence: Synthetic oligonucleotide
uuucuaccagaccaagaag

SEQ ID NO: 773532 - RNA, 19 nt, Artificial Sequence
  Description of Artificial Sequence: Synthetic oligonucleotide
uugcaguaaaugaaaggug

SEQ ID NO: 773533 - RNA, 19 nt, Artificial Sequence
  Description of Artificial Sequence: Synthetic oligonucleotide
  modified_base (4)..(4): a, c, u, g, unknown or other
uggnguuuucccacaaaug

SEQ ID NO: 773534 - RNA, 19 nt, Artificial Sequence
  Description of Artificial Sequence: Synthetic oligonucleotide
uugagcacaacuugaacaa

SEQ ID NO: 773535 - RNA, 19 nt, Artificial Sequence
  Description of Artificial Sequence: Synthetic oligonucleotide
uguaaccccacaacaauuc

SEQ ID NO: 773536 - RNA, 19 nt, Artificial Sequence
  Description of Artificial Sequence: Synthetic oligonucleotide
aguuccagucucauuaagc

SEQ ID NO: 773537 - RNA, 19 nt, Artificial Sequence
  Description of Artificial Sequence: Synthetic oligonucleotide
uaagaagagaaaguccuca

SEQ ID NO: 773538 - RNA, 19 nt, Artificial Sequence
  Description of Artificial Sequence: Synthetic oligonucleotide
ucacagcccauuuuccucg

SEQ ID NO: 773539 - RNA, 19 nt, Artificial Sequence
  Description of Artificial Sequence: Synthetic oligonucleotide
aaggugucauucucaguuc

SEQ ID NO: 773540 - RNA, 19 nt, Artificial Sequence
  Description of Artificial Sequence: Synthetic oligonucleotide
aagaaucaccguguagcgc

SEQ ID NO: 773541 - RNA, 19 nt, Artificial Sequence
  Description of Artificial Sequence: Synthetic oligonucleotide
aggugucauucucaguucc

SEQ ID NO: 773542 - RNA, 19 nt, Artificial Sequence
  Description of Artificial Sequence: Synthetic oligonucleotide
gugaauauauauauauuac

SEQ ID NO: 773543 - RNA, 19 nt, Artificial Sequence
  Description of Artificial Sequence: Synthetic oligonucleotide
ugcuucuuauucaugaaua

SEQ ID NO: 773544 - RNA, 19 nt, Artificial Sequence
  Description of Artificial Sequence: Synthetic oligonucleotide
acaaaugacggacuuuaca

SEQ ID NO: 773545 - RNA, 19 nt, Artificial Sequence
  Description of Artificial Sequence: Synthetic oligonucleotide
auaugcuuuggcuuaguga

SEQ ID NO: 773546 - RNA, 19 nt, Artificial Sequence
  Description of Artificial Sequence: Synthetic oligonucleotide
guaaaugaaaggugacacc

SEQ ID NO: 773547 - RNA, 19 nt, Artificial Sequence
  Description of Artificial Sequence: Synthetic oligonucleotide
agcaacaaacaucacgacu

SEQ ID NO: 773548 - RNA, 19 nt, Artificial Sequence
  Description of Artificial Sequence: Synthetic oligonucleotide
acagugucaaauuaaucau

SEQ ID NO: 773549 - RNA, 19 nt, Artificial Sequence
  Description of Artificial Sequence: Synthetic oligonucleotide
acagcguagauggaucugc

SEQ ID NO: 773550 - RNA, 19 nt, Artificial Sequence
  Description of Artificial Sequence: Synthetic oligonucleotide
aaaucuguacacugggauu

SEQ ID NO: 773551 - RNA, 19 nt, Artificial Sequence
  Description of Artificial Sequence: Synthetic oligonucleotide
aaaugacggacuuuacaaa

SEQ ID NO: 773552 - RNA, 19 nt, Artificial Sequence
  Description of Artificial Sequence: Synthetic oligonucleotide
gucacuugauuucugaaca

SEQ ID NO: 773553 - RNA, 19 nt, Artificial Sequence
  Description of Artificial Sequence: Synthetic oligonucleotide
uggcuuagugaauauauau

SEQ ID NO: 773554 - RNA, 19 nt, Artificial Sequence
  Description of Artificial Sequence: Synthetic oligonucleotide
  modified_base (8)..(8): a, c, u, g, unknown or other
uuccauunaaaacuuuaua

SEQ ID NO: 773555 - RNA, 19 nt, Artificial Sequence
  Description of Artificial Sequence: Synthetic oligonucleotide
auuuguuacuaccuuugga

SEQ ID NO: 773556 - RNA, 19 nt, Artificial Sequence
  Description of Artificial Sequence: Synthetic oligonucleotide
ucuaccagaccaagaagcu

SEQ ID NO: 773557 - RNA, 19 nt, Artificial Sequence
  Description of Artificial Sequence: Synthetic oligonucleotide
  modified_base (10)..(10): a, c, u, g, unknown or other
acaugauggnguuuuccca

SEQ ID NO: 773558 - RNA, 19 nt, Artificial Sequence
  Description of Artificial Sequence: Synthetic oligonucleotide
  modified_base (9)..(9): a, c, u, g, unknown or other
caugauggnguuuucccac

SEQ ID NO: 773559 - RNA, 19 nt, Artificial Sequence
  Description of Artificial Sequence: Synthetic oligonucleotide
aucacagcccauuuuccuc

SEQ ID NO: 773560 - RNA, 19 nt, Artificial Sequence
  Description of Artificial Sequence: Synthetic oligonucleotide
ugaggcucagaaagaauca

SEQ ID NO: 773561 - RNA, 19 nt, Artificial Sequence
  Description of Artificial Sequence: Synthetic oligonucleotide
uucccacaaaugaagaaaa

SEQ ID NO: 773562 - RNA, 19 nt, Artificial Sequence
  Description of Artificial Sequence: Synthetic oligonucleotide
caaaugacggacuuuacaa

SEQ ID NO: 773563 - RNA, 19 nt, Artificial Sequence
  Description of Artificial Sequence: Synthetic oligonucleotide
  modified_base (3)..(3): a, c, u, g, unknown or other
ggnguuuucccacaaauga

SEQ ID NO: 773564 - RNA, 19 nt, Artificial Sequence
  Description of Artificial Sequence: Synthetic oligonucleotide
uuaagccuucaauagguuc

SEQ ID NO: 773565 - RNA, 19 nt, Artificial Sequence
  Description of Artificial Sequence: Synthetic oligonucleotide
aacacagcguagauggauc

SEQ ID NO: 773566 - RNA, 19 nt, Artificial Sequence
  Description of Artificial Sequence: Synthetic oligonucleotide
agaccauuucuaccagacc

SEQ ID NO: 773567 - RNA, 19 nt, Artificial Sequence
  Description of Artificial Sequence: Synthetic oligonucleotide
ugucuguacacagugguac

SEQ ID NO: 773568 - RNA, 19 nt, Artificial Sequence
  Description of Artificial Sequence: Synthetic oligonucleotide
ucucaucgccaauaguucc

SEQ ID NO: 773569 - RNA, 19 nt, Artificial Sequence
  Description of Artificial Sequence: Synthetic oligonucleotide
acuucucaacaaaaggugg

SEQ ID NO: 773570 - RNA, 19 nt, Artificial Sequence
  Description of Artificial Sequence: Synthetic oligonucleotide
uccuucuucaaggacaacu

SEQ ID NO: 773571 - RNA, 19 nt, Artificial Sequence
  Description of Artificial Sequence: Synthetic oligonucleotide
acaucacgacuccaagccc

SEQ ID NO: 773572 - RNA, 19 nt, Artificial Sequence
  Description of Artificial Sequence: Synthetic oligonucleotide
uuaagccaaaguauaggua

SEQ ID NO: 773573 - RNA, 19 nt, Artificial Sequence
  Description of Artificial Sequence: Synthetic oligonucleotide
agauagcgaacucuguaug

SEQ ID NO: 773574 - RNA, 19 nt, Artificial Sequence
  Description of Artificial Sequence: Synthetic oligonucleotide
agcugguaagaagagaaag

SEQ ID NO: 773575 - RNA, 19 nt, Artificial Sequence
  Description of Artificial Sequence: Synthetic oligonucleotide
agucucauuaagccaaagu

SEQ ID NO: 773576 - RNA, 19 nt, Artificial Sequence
  Description of Artificial Sequence: Synthetic oligonucleotide
uccaguuauaggcuccaca

SEQ ID NO: 773577 - RNA, 19 nt, Artificial Sequence
  Description of Artificial Sequence: Synthetic oligonucleotide
ucauuuggauuuaagccuu

SEQ ID NO: 773578 - RNA, 19 nt, Artificial Sequence
  Description of Artificial Sequence: Synthetic oligonucleotide
uguuuggaacauagaagac

SEQ ID NO: 773579 - RNA, 19 nt, Artificial Sequence
  Description of Artificial Sequence: Synthetic oligonucleotide
gaauauauauauauuacuu

SEQ ID NO: 773580 - RNA, 19 nt, Artificial Sequence
  Description of Artificial Sequence: Synthetic oligonucleotide
auaggauauggaaccaaac

SEQ ID NO: 773581 - RNA, 19 nt, Artificial Sequence
  Description of Artificial Sequence: Synthetic oligonucleotide
aacagugauugucuggguu

SEQ ID NO: 773582 - RNA, 19 nt, Artificial Sequence
  Description of Artificial Sequence: Synthetic oligonucleotide
cuuggaucugcaagcacag

SEQ ID NO: 773583 - RNA, 19 nt, Artificial Sequence
  Description of Artificial Sequence: Synthetic oligonucleotide
uagauagcgaacucuguau

SEQ ID NO: 773584 - RNA, 19 nt, Artificial Sequence
  Description of Artificial Sequence: Synthetic oligonucleotide
agcgcuuguuucucaacac

SEQ ID NO: 773585 - RNA, 19 nt, Artificial Sequence
  Description of Artificial Sequence: Synthetic oligonucleotide
agacagggaaggcucaaag

SEQ ID NO: 773586 - RNA, 19 nt, Artificial Sequence
  Description of Artificial Sequence: Synthetic oligonucleotide
uggaaccaaacucaagaau

SEQ ID NO: 773587 - RNA, 19 nt, Artificial Sequence
  Description of Artificial Sequence: Synthetic oligonucleotide
ucucuguuuaacuuugauu

SEQ ID NO: 773588 - RNA, 19 nt, Artificial Sequence
  Description of Artificial Sequence: Synthetic oligonucleotide
uagugaauauauauauauu

SEQ ID NO: 773589 - RNA, 19 nt, Artificial Sequence
  Description of Artificial Sequence: Synthetic oligonucleotide
ucgugcaggagaagaauca

SEQ ID NO: 773590 - RNA, 19 nt, Artificial Sequence
  Description of Artificial Sequence: Synthetic oligonucleotide
aauaggauauggaaccaaa

SEQ ID NO: 773591 - RNA, 19 nt, Artificial Sequence
  Description of Artificial Sequence: Synthetic oligonucleotide
uucucaucgccaauaguuc

SEQ ID NO: 773592 - RNA, 19 nt, Artificial Sequence
  Description of Artificial Sequence: Synthetic oligonucleotide
uaaagaaauugaaguccac

SEQ ID NO: 773593 - RNA, 19 nt, Artificial Sequence
  Description of Artificial Sequence: Synthetic oligonucleotide
ccaaguauguccuauguuc

SEQ ID NO: 773594 - RNA, 19 nt, Artificial Sequence
  Description of Artificial Sequence: Synthetic oligonucleotide
ugagaauugugaagguguc

SEQ ID NO: 773595 - RNA, 19 nt, Artificial Sequence
  Description of Artificial Sequence: Synthetic oligonucleotide
uagguacaauauaauuucu

SEQ ID NO: 773596 - RNA, 19 nt, Artificial Sequence
  Description of Artificial Sequence: Synthetic oligonucleotide
gagaagaaucaccguguag

SEQ ID NO: 773597 - RNA, 19 nt, Artificial Sequence
  Description of Artificial Sequence: Synthetic oligonucleotide
ucugcaagcacaguaugaa

SEQ ID NO: 773598 - RNA, 19 nt, Artificial Sequence
  Description of Artificial Sequence: Synthetic oligonucleotide
caaacaucacgacuccaag

SEQ ID NO: 773599 - RNA, 19 nt, Artificial Sequence
  Description of Artificial Sequence: Synthetic oligonucleotide
aauauaggcuacaguguca

SEQ ID NO: 773600 - RNA, 19 nt, Artificial Sequence
  Description of Artificial Sequence: Synthetic oligonucleotide
guaaagugaauccaguuau

SEQ ID NO: 773601 - RNA, 19 nt, Artificial Sequence
  Description of Artificial Sequence: Synthetic oligonucleotide
ucuagauagcgaacucugu

SEQ ID NO: 773602 - RNA, 19 nt, Artificial Sequence
  Description of Artificial Sequence: Synthetic oligonucleotide
ucgccaauaguuccagucu

SEQ ID NO: 773603 - RNA, 19 nt, Artificial Sequence
  Description of Artificial Sequence: Synthetic oligonucleotide
gaucugcaagcacaguaug

SEQ ID NO: 773604 - RNA, 19 nt, Artificial Sequence
  Description of Artificial Sequence: Synthetic oligonucleotide
uguauguguaaggaccucu

SEQ ID NO: 773605 - RNA, 19 nt, Artificial Sequence
  Description of Artificial Sequence: Synthetic oligonucleotide
ugcaagaaauagucuggug

SEQ ID NO: 773606 - RNA, 19 nt, Artificial Sequence
  Description of Artificial Sequence: Synthetic oligonucleotide
aggcuacagaaccauccac

SEQ ID NO: 773607 - RNA, 19 nt, Artificial Sequence
  Description of Artificial Sequence: Synthetic oligonucleotide
ugcauuugcugaugucuag

SEQ ID NO: 773608 - RNA, 19 nt, Artificial Sequence
  Description of Artificial Sequence: Synthetic oligonucleotide
aaacucaagaauggauccu

SEQ ID NO: 773609 - RNA, 19 nt, Artificial Sequence
  Description of Artificial Sequence: Synthetic oligonucleotide
gaagggaaauguacacagg

SEQ ID NO: 773610 - RNA, 19 nt, Artificial Sequence
  Description of Artificial Sequence: Synthetic oligonucleotide
acggacuuuacaaaguacu

SEQ ID NO: 773611 - RNA, 19 nt, Artificial Sequence
  Description of Artificial Sequence: Synthetic oligonucleotide
ugacggacuuuacaaagua

SEQ ID NO: 773612 - RNA, 19 nt, Artificial Sequence
  Description of Artificial Sequence: Synthetic oligonucleotide
aguuauuagagaugaccuu

SEQ ID NO: 773613 - RNA, 19 nt, Artificial Sequence
  Description of Artificial Sequence: Synthetic oligonucleotide
cauuaaucaugucacaaua

SEQ ID NO: 773614 - RNA, 19 nt, Artificial Sequence
  Description of Artificial Sequence: Synthetic oligonucleotide
gcaaugagcccacaguucc

SEQ ID NO: 773615 - RNA, 19 nt, Artificial Sequence
  Description of Artificial Sequence: Synthetic oligonucleotide
uuauaggcuccacauccaa

SEQ ID NO: 773616 - RNA, 19 nt, Artificial Sequence
  Description of Artificial Sequence: Synthetic oligonucleotide
uauauauguggugcagcug

SEQ ID NO: 773617 - RNA, 19 nt, Artificial Sequence
  Description of Artificial Sequence: Synthetic oligonucleotide
aucugcaaaugucggagga

SEQ ID NO: 773618 - RNA, 19 nt, Artificial Sequence
  Description of Artificial Sequence: Synthetic oligonucleotide
gagcccacaguuccgauca

SEQ ID NO: 773619 - RNA, 19 nt, Artificial Sequence
  Description of Artificial Sequence: Synthetic oligonucleotide
gauccaaacacagcguaga

SEQ ID NO: 773620 - RNA, 19 nt, Artificial Sequence
  Description of Artificial Sequence: Synthetic oligonucleotide
uguacacugggauuccuuu

SEQ ID NO: 773621 - RNA, 19 nt, Artificial Sequence
  Description of Artificial Sequence: Synthetic oligonucleotide
aacugucuguacacagugg

SEQ ID NO: 773622 - RNA, 19 nt, Artificial Sequence
  Description of Artificial Sequence: Synthetic oligonucleotide
gucuagauagcgaacucug

SEQ ID NO: 773623 - RNA, 19 nt, Artificial Sequence
  Description of Artificial Sequence: Synthetic oligonucleotide
ugauuuugcuacuguucac

SEQ ID NO: 773624 - RNA, 19 nt, Artificial Sequence
  Description of Artificial Sequence: Synthetic oligonucleotide
auggaaccaaacucaagaa

SEQ ID NO: 773625 - RNA, 19 nt, Artificial Sequence
  Description of Artificial Sequence: Synthetic oligonucleotide
auagcgaacucuguaugug

SEQ ID NO: 773626 - RNA, 19 nt, Artificial Sequence
  Description of Artificial Sequence: Synthetic oligonucleotide
  modified_base (7)..(7): a, c, u, g, unknown or other
ugauggnguuuucccacaa

SEQ ID NO: 773627 - RNA, 19 nt, Artificial Sequence
  Description of Artificial Sequence: Synthetic oligonucleotide
guaaggaccucucuguuua

SEQ ID NO: 773628 - RNA, 19 nt, Artificial Sequence
  Description of Artificial Sequence: Synthetic oligonucleotide
uaggcuacagugucaaauu

SEQ ID NO: 773629 - RNA, 19 nt, Artificial Sequence
  Description of Artificial Sequence: Synthetic oligonucleotide
gcaguguaaggauaaaaca

SEQ ID NO: 773630 - RNA, 19 nt, Artificial Sequence
  Description of Artificial Sequence: Synthetic oligonucleotide
uuggaacauagaagacuug

SEQ ID NO: 773631 - RNA, 19 nt, Artificial Sequence
  Description of Artificial Sequence: Synthetic oligonucleotide
uuggcuuagugaauauaua

SEQ ID NO: 773632 - RNA, 19 nt, Artificial Sequence
  Description of Artificial Sequence: Synthetic oligonucleotide
caguuauuagagaugaccu

SEQ ID NO: 773633 - RNA, 19 nt, Artificial Sequence
  Description of Artificial Sequence: Synthetic oligonucleotide
uuuaagccuucaauagguu

SEQ ID NO: 773634 - RNA, 19 nt, Artificial Sequence
  Description of Artificial Sequence: Synthetic oligonucleotide
aaggaaauuuguguauaua

SEQ ID NO: 773635 - RNA, 19 nt, Artificial Sequence
  Description of Artificial Sequence: Synthetic oligonucleotide
aaguauguccuauguucuu

SEQ ID NO: 773636 - RNA, 19 nt, Artificial Sequence
  Description of Artificial Sequence: Synthetic oligonucleotide
gugauugucuggguucugg

SEQ ID NO: 773637 - RNA, 19 nt, Artificial Sequence
  Description of Artificial Sequence: Synthetic oligonucleotide
guagaaaauguggaaggga

SEQ ID NO: 773638 - RNA, 19 nt, Artificial Sequence
  Description of Artificial Sequence: Synthetic oligonucleotide
uccaaguauguccuauguu

SEQ ID NO: 773639 - RNA, 19 nt, Artificial Sequence
  Description of Artificial Sequence: Synthetic oligonucleotide
uagcgaacucuguaugugu

SEQ ID NO: 773640 - RNA, 19 nt, Artificial Sequence
  Description of Artificial Sequence: Synthetic oligonucleotide
uugcaagaaauagucuggu

SEQ ID NO: 773641 - RNA, 19 nt, Artificial Sequence
  Description of Artificial Sequence: Synthetic oligonucleotide
cucgugcaggagaagaauc

SEQ ID NO: 773642 - RNA, 19 nt, Artificial Sequence
  Description of Artificial Sequence: Synthetic oligonucleotide
auauaggcuacagugucaa

SEQ ID NO: 773643 - RNA, 19 nt, Artificial Sequence
  Description of Artificial Sequence: Synthetic oligonucleotide
cauugggcuguacaaaaga

SEQ ID NO: 773644 - RNA, 19 nt, Artificial Sequence
  Description of Artificial Sequence: Synthetic oligonucleotide
aacaaacaucacgacucca

SEQ ID NO: 773645 - RNA, 19 nt, Artificial Sequence
  Description of Artificial Sequence: Synthetic oligonucleotide
uuccagguaugauuacagu

SEQ ID NO: 773646 - RNA, 19 nt, Artificial Sequence
  Description of Artificial Sequence: Synthetic oligonucleotide
cauuugcugaugucuagca

SEQ ID NO: 773647 - RNA, 19 nt, Artificial Sequence
  Description of Artificial Sequence: Synthetic oligonucleotide
guguauauauguggugcag

SEQ ID NO: 773648 - RNA, 19 nt, Artificial Sequence
  Description of Artificial Sequence: Synthetic oligonucleotide
gauagcgaacucuguaugu

SEQ ID NO: 773649 - RNA, 19 nt, Artificial Sequence
  Description of Artificial Sequence: Synthetic oligonucleotide
gucuguacacagugguacc

SEQ ID NO: 773650 - RNA, 19 nt, Artificial Sequence
  Description of Artificial Sequence: Synthetic oligonucleotide
guacaucaaagauccaaaa

SEQ ID NO: 773651 - RNA, 19 nt, Artificial Sequence
  Description of Artificial Sequence: Synthetic oligonucleotide
gacuggugaugcaaaggcc

SEQ ID NO: 773652 - RNA, 19 nt, Artificial Sequence
  Description of Artificial Sequence: Synthetic oligonucleotide
gcuuagugaauauauauau

SEQ ID NO: 773653 - RNA, 19 nt, Artificial Sequence
  Description of Artificial Sequence: Synthetic oligonucleotide
ucacuugauuucugaacau

SEQ ID NO: 773654 - RNA, 19 nt, Artificial Sequence
  Description of Artificial Sequence: Synthetic oligonucleotide
caucacgacuccaagccca

SEQ ID NO: 773655 - RNA, 19 nt, Artificial Sequence
  Description of Artificial Sequence: Synthetic oligonucleotide
acacagcguagauggaucu

SEQ ID NO: 773656 - RNA, 19 nt, Artificial Sequence
  Description of Artificial Sequence: Synthetic oligonucleotide
cuagauagcgaacucugua

SEQ ID NO: 773657 - RNA, 19 nt, Artificial Sequence
  Description of Artificial Sequence: Synthetic oligonucleotide
  modified_base (18)..(18): a, c, u, g, unknown or other
caccccauacaugauggng

SEQ ID NO: 773658 - RNA, 19 nt, Artificial Sequence
  Description of Artificial Sequence: Synthetic oligonucleotide
auaaaucuguacacuggga

SEQ ID NO: 773659 - RNA, 19 nt, Artificial Sequence
  Description of Artificial Sequence: Synthetic oligonucleotide
  modified_base (8)..(8): a, c, u, g, unknown or other
augauggnguuuucccaca

SEQ ID NO: 773660 - RNA, 19 nt, Artificial Sequence
  Description of Artificial Sequence: Synthetic oligonucleotide
  modified_base (2)..(2): a, c, u, g, unknown or other
gnguuuucccacaaaugaa

SEQ ID NO: 773661 - RNA, 19 nt, Artificial Sequence
  Description of Artificial Sequence: Synthetic oligonucleotide
accaaacucaagaauggau

SEQ ID NO: 773662 - RNA, 19 nt, Artificial Sequence
  Description of Artificial Sequence: Synthetic oligonucleotide
ccaacuggcaugagaauac

SEQ ID NO: 773663 - RNA, 19 nt, Artificial Sequence
  Description of Artificial Sequence: Synthetic oligonucleotide
ggagugcaacaauaaauca

SEQ ID NO: 773664 - RNA, 19 nt, Artificial Sequence
  Description of Artificial Sequence: Synthetic oligonucleotide
uccucgugcaggagaagaa

SEQ ID NO: 773665 - RNA, 19 nt, Artificial Sequence
  Description of Artificial Sequence: Synthetic oligonucleotide
ggcuacagaaccauccacc

SEQ ID NO: 773666 - RNA, 19 nt, Artificial Sequence
  Description of Artificial Sequence: Synthetic oligonucleotide
ggugaugcaaaggccuugg

SEQ ID NO: 773667 - RNA, 19 nt, Artificial Sequence
  Description of Artificial Sequence: Synthetic oligonucleotide
uggaaggcuacagaaccau

SEQ ID NO: 773668 - RNA, 19 nt, Artificial Sequence
  Description of Artificial Sequence: Synthetic oligonucleotide
caacuguaguaggaauagg

SEQ ID NO: 773669 - RNA, 19 nt, Artificial Sequence
  Description of Artificial Sequence: Synthetic oligonucleotide
gaauaggauauggaaccaa

SEQ ID NO: 773670 - RNA, 19 nt, Artificial Sequence
  Description of Artificial Sequence: Synthetic oligonucleotide
acguuccagguaugauuac

SEQ ID NO: 773671 - RNA, 19 nt, Artificial Sequence
  Description of Artificial Sequence: Synthetic oligonucleotide
ugagcccacaguuccgauc

SEQ ID NO: 773672 - RNA, 19 nt, Artificial Sequence
  Description of Artificial Sequence: Synthetic oligonucleotide
caaguauguccuauguucu

SEQ ID NO: 773673 - RNA, 19 nt, Artificial Sequence
  Description of Artificial Sequence: Synthetic oligonucleotide
uccaacagacagggaaggc

SEQ ID NO: 773674 - RNA, 19 nt, Artificial Sequence
  Description of Artificial Sequence: Synthetic oligonucleotide
cucaucgccaauaguucca

SEQ ID NO: 773675 - RNA, 19 nt, Artificial Sequence
  Description of Artificial Sequence: Synthetic oligonucleotide
gagaauugugaagguguca

SEQ ID NO: 773676 - RNA, 19 nt, Artificial Sequence
  Description of Artificial Sequence: Synthetic oligonucleotide
gcgcuuguuucucaacacg

SEQ ID NO: 773677 - RNA, 19 nt, Artificial Sequence
  Description of Artificial Sequence: Synthetic oligonucleotide
aucauggagugcaacaaua

SEQ ID NO: 773678 - RNA, 19 nt, Artificial Sequence
  Description of Artificial Sequence: Synthetic oligonucleotide
aguccacucaagguuacaa

SEQ ID NO: 773679 - RNA, 19 nt, Artificial Sequence
  Description of Artificial Sequence: Synthetic oligonucleotide
caguuauaggcuccacauc

SEQ ID NO: 773680 - RNA, 19 nt, Artificial Sequence
  Description of Artificial Sequence: Synthetic oligonucleotide
cauggagugcaacaauaaa

SEQ ID NO: 773681 - RNA, 19 nt, Artificial Sequence
  Description of Artificial Sequence: Synthetic oligonucleotide
  modified_base (6)..(6): a, c, u, g, unknown or other
gauggnguuuucccacaaa

SEQ ID NO: 773682 - RNA, 19 nt, Artificial Sequence
  Description of Artificial Sequence: Synthetic oligonucleotide
ucucaacacguuccaggua

SEQ ID NO: 773683 - RNA, 19 nt, Artificial Sequence
  Description of Artificial Sequence: Synthetic oligonucleotide
augacggacuuuacaaagu

SEQ ID NO: 773684 - RNA, 19 nt, Artificial Sequence
  Description of Artificial Sequence: Synthetic oligonucleotide
caggauguucaccugaagu

SEQ ID NO: 773685 - RNA, 19 nt, Artificial Sequence
  Description of Artificial Sequence: Synthetic oligonucleotide
auaagugaauugagcacaa

SEQ ID NO: 773686 - RNA, 19 nt, Artificial Sequence
  Description of Artificial Sequence: Synthetic oligonucleotide
ccacucaagguuacaaaug

SEQ ID NO: 773687 - RNA, 19 nt, Artificial Sequence
  Description of Artificial Sequence: Synthetic oligonucleotide
guauguguaaggaccucuc

SEQ ID NO: 773688 - RNA, 19 nt, Artificial Sequence
  Description of Artificial Sequence: Synthetic oligonucleotide
cugccacagccaaauugag

SEQ ID NO: 773689 - RNA, 19 nt, Artificial Sequence
  Description of Artificial Sequence: Synthetic oligonucleotide
ccaaaguauagguacaaua

SEQ ID NO: 773690 - RNA, 19 nt, Artificial Sequence
  Description of Artificial Sequence: Synthetic oligonucleotide
cauuuggauuuaagccuuc

SEQ ID NO: 773691 - RNA, 19 nt, Artificial Sequence
  Description of Artificial Sequence: Synthetic oligonucleotide
acuuuacaaaguacuggau

SEQ ID NO: 773692 - RNA, 19 nt, Artificial Sequence
  Description of Artificial Sequence: Synthetic oligonucleotide
guuauaggcuccacaucca

SEQ ID NO: 773693 - RNA, 19 nt, Artificial Sequence
  Description of Artificial Sequence: Synthetic oligonucleotide
aaucaccguguagcgcuug

SEQ ID NO: 773694 - RNA, 19 nt, Artificial Sequence
  Description of Artificial Sequence: Synthetic oligonucleotide
guagcgcuuguuucucaac

SEQ ID NO: 773695 - RNA, 19 nt, Artificial Sequence
  Description of Artificial Sequence: Synthetic oligonucleotide
gguaugauuacaguguuuu

SEQ ID NO: 773696 - RNA, 19 nt, Artificial Sequence
  Description of Artificial Sequence: Synthetic oligonucleotide
ccgaucacagcccauuuuc

SEQ ID NO: 773697 - RNA, 19 nt, Artificial Sequence
  Description of Artificial Sequence: Synthetic oligonucleotide
uauguccuauguucuucuu

SEQ ID NO: 773698 - RNA, 19 nt, Artificial Sequence
  Description of Artificial Sequence: Synthetic oligonucleotide
caagaccauuucuaccaga

SEQ ID NO: 773699 - RNA, 19 nt, Artificial Sequence
  Description of Artificial Sequence: Synthetic oligonucleotide
agcguagauggaucugcaa

SEQ ID NO: 773700 - RNA, 19 nt, Artificial Sequence
  Description of Artificial Sequence: Synthetic oligonucleotide
ggaacauagaagacuugga

SEQ ID NO: 773701 - RNA, 19 nt, Artificial Sequence
  Description of Artificial Sequence: Synthetic oligonucleotide
ucugcaguguaaggauaaa

SEQ ID NO: 773702 - RNA, 19 nt, Artificial Sequence
  Description of Artificial Sequence: Synthetic oligonucleotide
cccaauaggacaaauuccu

SEQ ID NO: 773703 - RNA, 19 nt, Artificial Sequence
  Description of Artificial Sequence: Synthetic oligonucleotide
guccacucaagguuacaaa

SEQ ID NO: 773704 - RNA, 19 nt, Artificial Sequence
  Description of Artificial Sequence: Synthetic oligonucleotide
cugcaaaugucggaggaaa

SEQ ID NO: 773705 - RNA, 19 nt, Artificial Sequence
  Description of Artificial Sequence: Synthetic oligonucleotide
uaaggaccucucuguuuaa

SEQ ID NO: 773706 - RNA, 19 nt, Artificial Sequence
  Description of Artificial Sequence: Synthetic oligonucleotide
uuuccucgugcaggagaag

SEQ ID NO: 773707 - RNA, 19 nt, Artificial Sequence
  Description of Artificial Sequence: Synthetic oligonucleotide
guuuugcaagaaauagucu

SEQ ID NO: 773708 - RNA, 19 nt, Artificial Sequence
  Description of Artificial Sequence: Synthetic oligonucleotide
cuaugugacuugcuucuua

SEQ ID NO: 773709 - RNA, 19 nt, Artificial Sequence
  Description of Artificial Sequence: Synthetic oligonucleotide
cagucacuugauuucugaa

SEQ ID NO: 773710 - RNA, 19 nt, Artificial Sequence
  Description of Artificial Sequence: Synthetic oligonucleotide
ggcuuagugaauauauaua

SEQ ID NO: 773711 - RNA, 19 nt, Artificial Sequence
  Description of Artificial Sequence: Synthetic oligonucleotide
cggacuuuacaaaguacug

SEQ ID NO: 773712 - RNA, 19 nt, Artificial Sequence
  Description of Artificial Sequence: Synthetic oligonucleotide
gccauuaaucaugucacaa

SEQ ID NO: 773713 - RNA, 19 nt, Artificial Sequence
  Description of Artificial Sequence: Synthetic oligonucleotide
cuccaagcccaagcaagac

SEQ ID NO: 773714 - RNA, 19 nt, Artificial Sequence
  Description of Artificial Sequence: Synthetic oligonucleotide
uccaccggguccugaguua

SEQ ID NO: 773715 - RNA, 19 nt, Artificial Sequence
  Description of Artificial Sequence: Synthetic oligonucleotide
ugaagucguuuugcaaauu

SEQ ID NO: 773716 - RNA, 19 nt, Artificial Sequence
  Description of Artificial Sequence: Synthetic oligonucleotide
ggaauaggauauggaacca

SEQ ID NO: 773717 - RNA, 19 nt, Artificial Sequence
  Description of Artificial Sequence: Synthetic oligonucleotide
accggguccugaguuauau

SEQ ID NO: 773718 - RNA, 19 nt, Artificial Sequence
  Description of Artificial Sequence: Synthetic oligonucleotide
cagucucauuaagccaaag

SEQ ID NO: 773719 - RNA, 19 nt, Artificial Sequence
  Description of Artificial Sequence: Synthetic oligonucleotide
agcccacaguuccgaucac

SEQ ID NO: 773720 - RNA, 19 nt, Artificial Sequence
  Description of Artificial Sequence: Synthetic oligonucleotide
cacagcguagauggaucug

SEQ ID NO: 773721 - RNA, 19 nt, Artificial Sequence
  Description of Artificial Sequence: Synthetic oligonucleotide
cagaaccauccaccaguug

SEQ ID NO: 773722 - RNA, 19 nt, Artificial Sequence
  Description of Artificial Sequence: Synthetic oligonucleotide
accauaugauguacaguua

SEQ ID NO: 773723 - RNA, 19 nt, Artificial Sequence
  Description of Artificial Sequence: Synthetic oligonucleotide
guacacaggccuuccuugu

SEQ ID NO: 773724 - RNA, 19 nt, Artificial Sequence
  Description of Artificial Sequence: Synthetic oligonucleotide
ggauccuuguaaccccaca

SEQ ID NO: 773725 - RNA, 19 nt, Artificial Sequence
  Description of Artificial Sequence: Synthetic oligonucleotide
gaauugugaaggugucauu

SEQ ID NO: 773726 - RNA, 19 nt, Artificial Sequence
  Description of Artificial Sequence: Synthetic oligonucleotide
cagcguagauggaucugca

SEQ ID NO: 773727 - RNA, 19 nt, Artificial Sequence
  Description of Artificial Sequence: Synthetic oligonucleotide
ccauuucuaccagaccaag

SEQ ID NO: 773728 - RNA, 19 nt, Artificial Sequence
  Description of Artificial Sequence: Synthetic oligonucleotide
ggagaagaaucaccgugua

SEQ ID NO: 773729 - RNA, 19 nt, Artificial Sequence
  Description of Artificial Sequence: Synthetic oligonucleotide
gcugguaagaagagaaagu

SEQ ID NO: 773730 - RNA, 19 nt, Artificial Sequence
  Description of Artificial Sequence: Synthetic oligonucleotide
ccaguuauaggcuccacau

SEQ ID NO: 773731 - RNA, 19 nt, Artificial Sequence
  Description of Artificial Sequence: Synthetic oligonucleotide
cagcugguaagaagagaaa

SEQ ID NO: 773732 - RNA, 19 nt, Artificial Sequence
  Description of Artificial Sequence: Synthetic oligonucleotide
gguuacaaaugacggacuu

SEQ ID NO: 773733 - RNA, 19 nt, Artificial Sequence
  Description of Artificial Sequence: Synthetic oligonucleotide
augagcccacaguuccgau

SEQ ID NO: 773734 - RNA, 19 nt, Artificial Sequence
  Description of Artificial Sequence: Synthetic oligonucleotide
ggucuagauagcgaacucu

SEQ ID NO: 773735 - RNA, 19 nt, Artificial Sequence
  Description of Artificial Sequence: Synthetic oligonucleotide
agguaugauuacaguguuu

SEQ ID NO: 773736 - RNA, 19 nt, Artificial Sequence
  Description of Artificial Sequence: Synthetic oligonucleotide
ggugucauucucaguucca

SEQ ID NO: 773737 - RNA, 19 nt, Artificial Sequence
  Description of Artificial Sequence: Synthetic oligonucleotide
gccaauaguuccagucuca

SEQ ID NO: 773738 - RNA, 19 nt, Artificial Sequence
  Description of Artificial Sequence: Synthetic oligonucleotide
aucacgacuccaagcccaa

SEQ ID NO: 773739 - RNA, 19 nt, Artificial Sequence
  Description of Artificial Sequence: Synthetic oligonucleotide
gucuagcacaccauaugau

SEQ ID NO: 773740 - RNA, 19 nt, Artificial Sequence
  Description of Artificial Sequence: Synthetic oligonucleotide
ggaaggcuacagaaccauc

SEQ ID NO: 773741 - RNA, 19 nt, Artificial Sequence
  Description of Artificial Sequence: Synthetic oligonucleotide
guuccgaucacagcccauu

SEQ ID NO: 773742 - RNA, 19 nt, Artificial Sequence
  Description of Artificial Sequence: Synthetic oligonucleotide
cuaccacuucaucuggguu

SEQ ID NO: 773743 - RNA, 19 nt, Artificial Sequence
  Description of Artificial Sequence: Synthetic oligonucleotide
ggccuuggcuggaagaaua

SEQ ID NO: 773744 - RNA, 19 nt, Artificial Sequence
  Description of Artificial Sequence: Synthetic oligonucleotide
augucaggacuugcaugua

SEQ ID NO: 773745 - RNA, 19 nt, Artificial Sequence
  Description of Artificial Sequence: Synthetic oligonucleotide
caccguguagcgcuuguuu

SEQ ID NO: 773746 - RNA, 19 nt, Artificial Sequence
  Description of Artificial Sequence: Synthetic oligonucleotide
cauagaagacuuggacuuu

SEQ ID NO: 773747 - RNA, 19 nt, Artificial Sequence
  Description of Artificial Sequence: Synthetic oligonucleotide
guccuauguucuucuucau

SEQ ID NO: 773748 - RNA, 19 nt, Artificial Sequence
  Description of Artificial Sequence: Synthetic oligonucleotide
cuaccagaccaagaagcuu

SEQ ID NO: 773749 - RNA, 19 nt, Artificial Sequence
  Description of Artificial Sequence: Synthetic oligonucleotide
caucgccaauaguuccagu

SEQ ID NO: 773750 - RNA, 19 nt, Artificial Sequence
  Description of Artificial Sequence: Synthetic oligonucleotide
ccggcaaugagcccacagu

SEQ ID NO: 773751 - RNA, 19 nt, Artificial Sequence
  Description of Artificial Sequence: Synthetic oligonucleotide
  modified_base (16)..(16): a, c, u, g, unknown or other
ccccauacaugauggnguu

SEQ ID NO: 773752 - RNA, 19 nt, Artificial Sequence
  Description of Artificial Sequence: Synthetic oligonucleotide
ccaauaggacaaauuccuu

SEQ ID NO: 773753 - RNA, 19 nt, Artificial Sequence
  Description of Artificial Sequence: Synthetic oligonucleotide
ccaauaguuccagucucau

SEQ ID NO: 773754 - RNA, 19 nt, Artificial Sequence
  Description of Artificial Sequence: Synthetic oligonucleotide
ccgcaguacccgagacuuc

SEQ ID NO: 773755 - RNA, 19 nt, Artificial Sequence
  Description of Artificial Sequence: Synthetic oligonucleotide
caccggguccugaguuaua

SEQ ID NO: 773756 - RNA, 19 nt, Artificial Sequence
  Description of Artificial Sequence: Synthetic oligonucleotide
cgacuccaagcccaagcaa

SEQ ID NO: 773757 - RNA, 19 nt, Artificial Sequence
  Description of Artificial Sequence: Synthetic oligonucleotide
ccaccggguccugaguuau

SEQ ID NO: 773758 - RNA, 19 nt, Artificial Sequence
  Description of Artificial Sequence: Synthetic oligonucleotide
ccggguccugaguuauauu

SEQ ID NO: 773759 - RNA, 19 nt, Artificial Sequence
  Description of Artificial Sequence: Synthetic oligonucleotide
uuaaguacugguaacaugg

SEQ ID NO: 773760 - RNA, 19 nt, Artificial Sequence
  Description of Artificial Sequence: Synthetic oligonucleotide
aauacgaauacuguaaagc

SEQ ID NO: 773761 - RNA, 19 nt, Artificial Sequence
  Description of Artificial Sequence: Synthetic oligonucleotide
uauaacauauaacacaggc

SEQ ID NO: 773762 - RNA, 19 nt, Artificial Sequence
  Description of Artificial Sequence: Synthetic oligonucleotide
auauauucaaaauugggag

SEQ ID NO: 773763 - RNA, 19 nt, Artificial Sequence
  Description of Artificial Sequence: Synthetic oligonucleotide
aaucaggcaaauaagauuc

SEQ ID NO: 773764 - RNA, 19 nt, Artificial Sequence
  Description of Artificial Sequence: Synthetic oligonucleotide
aacaacucagacucguucc

SEQ ID NO: 773765 - RNA, 19 nt, Artificial Sequence
  Description of Artificial Sequence: Synthetic oligonucleotide
auacgaauacuguaaagcc

SEQ ID NO: 773766 - RNA, 19 nt, Artificial Sequence
  Description of Artificial Sequence: Synthetic oligonucleotide
aaauuguauguacaguagg

SEQ ID NO: 773767 - RNA, 19 nt, Artificial Sequence
  Description of Artificial Sequence: Synthetic oligonucleotide
uuagcugccaugaaaacag

SEQ ID NO: 773768 - RNA, 19 nt, Artificial Sequence
  Description of Artificial Sequence: Synthetic oligonucleotide
aauaagacgaaugaagcug

SEQ ID NO: 773769 - RNA, 19 nt, Artificial Sequence
  Description of Artificial Sequence: Synthetic oligonucleotide
uugauugaagagcacaagg

SEQ ID NO: 773770 - RNA, 19 nt, Artificial Sequence
  Description of Artificial Sequence: Synthetic oligonucleotide
uauauucaaaauugggagg

SEQ ID NO: 773771 - RNA, 19 nt, Artificial Sequence
  Description of Artificial Sequence: Synthetic oligonucleotide
caccuaagaaacaugaugg

SEQ ID NO: 773772 - RNA, 19 nt, Artificial Sequence
  Description of Artificial Sequence: Synthetic oligonucleotide
cuaagaaacaugaugguug

SEQ ID NO: 773773 - RNA, 19 nt, Artificial Sequence
  Description of Artificial Sequence: Synthetic oligonucleotide
uauguaaacacaccaaagu

SEQ ID NO: 773774 - RNA, 19 nt, Artificial Sequence
  Description of Artificial Sequence: Synthetic oligonucleotide
gaaugcaucaauaagacga

SEQ ID NO: 773775 - RNA, 19 nt, Artificial Sequence
  Description of Artificial Sequence: Synthetic oligonucleotide
uguaaccuaauccuaagca

SEQ ID NO: 773776 - RNA, 19 nt, Artificial Sequence
  Description of Artificial Sequence: Synthetic oligonucleotide
aagacuaacacuuguggca

SEQ ID NO: 773777 - RNA, 19 nt, Artificial Sequence
  Description of Artificial Sequence: Synthetic oligonucleotide
aaacaacucagacucguuc

SEQ ID NO: 773778 - RNA, 19 nt, Artificial Sequence
  Description of Artificial Sequence: Synthetic oligonucleotide
gacugucacacauauauag

SEQ ID NO: 773779 - RNA, 19 nt, Artificial Sequence
  Description of Artificial Sequence: Synthetic oligonucleotide
agaagacuaacacuugugg

SEQ ID NO: 773780 - RNA, 19 nt, Artificial Sequence
  Description of Artificial Sequence: Synthetic oligonucleotide
uguauguacaguaggauaa

SEQ ID NO: 773781 - RNA, 19 nt, Artificial Sequence
  Description of Artificial Sequence: Synthetic oligonucleotide
uacuuaaugugcauguugc

SEQ ID NO: 773782 - RNA, 19 nt, Artificial Sequence
  Description of Artificial Sequence: Synthetic oligonucleotide
cauugcugaacuuaagucc

SEQ ID NO: 773783 - RNA, 19 nt, Artificial Sequence
  Description of Artificial Sequence: Synthetic oligonucleotide
ucaagauuaacagugguac

SEQ ID NO: 773784 - RNA, 19 nt, Artificial Sequence
  Description of Artificial Sequence: Synthetic oligonucleotide
uuaacagagaagacuaaca

SEQ ID NO: 773785 - RNA, 19 nt, Artificial Sequence
  Description of Artificial Sequence: Synthetic oligonucleotide
uauacacauacuuaaugug

SEQ ID NO: 773786 - RNA, 19 nt, Artificial Sequence
  Description of Artificial Sequence: Synthetic oligonucleotide
ucuuuagagaagauggaca

SEQ ID NO: 773787 - RNA, 19 nt, Artificial Sequence
  Description of Artificial Sequence: Synthetic oligonucleotide
ugcucaaauacaaacagau

SEQ ID NO: 773788 - RNA, 19 nt, Artificial Sequence
  Description of Artificial Sequence: Synthetic oligonucleotide
auaacauauaacacaggcc

SEQ ID NO: 773789 - RNA, 19 nt, Artificial Sequence
  Description of Artificial Sequence: Synthetic oligonucleotide
uugaaugcaucaauaagac

SEQ ID NO: 773790 - RNA, 19 nt, Artificial Sequence
  Description of Artificial Sequence: Synthetic oligonucleotide
ugauugaagagcacaagga

SEQ ID NO: 773791 - RNA, 19 nt, Artificial Sequence
  Description of Artificial Sequence: Synthetic oligonucleotide
uuagagaagauggacagca

SEQ ID NO: 773792 - RNA, 19 nt, Artificial Sequence
  Description of Artificial Sequence: Synthetic oligonucleotide
augaguaugaguuugccau

SEQ ID NO: 773793 - RNA, 19 nt, Artificial Sequence
  Description of Artificial Sequence: Synthetic oligonucleotide
ucauaagcaguaauuguca

SEQ ID NO: 773794 - RNA, 19 nt, Artificial Sequence
  Description of Artificial Sequence: Synthetic oligonucleotide
ugcaucaauaagacgaaug

SEQ ID NO: 773795 - RNA, 19 nt, Artificial Sequence
  Description of Artificial Sequence: Synthetic oligonucleotide
uuuaaguggacacgcacac

SEQ ID NO: 773796 - RNA, 19 nt, Artificial Sequence
  Description of Artificial Sequence: Synthetic oligonucleotide
aguaaaugaagccucgagu

SEQ ID NO: 773797 - RNA, 19 nt, Artificial Sequence
  Description of Artificial Sequence: Synthetic oligonucleotide
gaagacuaacacuuguggc

SEQ ID NO: 773798 - RNA, 19 nt, Artificial Sequence
  Description of Artificial Sequence: Synthetic oligonucleotide
aaugaguaugaguuugcca

SEQ ID NO: 773799 - RNA, 19 nt, Artificial Sequence
  Description of Artificial Sequence: Synthetic oligonucleotide
auacuguaaagccuccugg

SEQ ID NO: 773800 - RNA, 19 nt, Artificial Sequence
  Description of Artificial Sequence: Synthetic oligonucleotide
guaaccuaauccuaagcag

SEQ ID NO: 773801 - RNA, 19 nt, Artificial Sequence
  Description of Artificial Sequence: Synthetic oligonucleotide
uaaccuaauccuaagcagu

SEQ ID NO: 773802 - RNA, 19 nt, Artificial Sequence
  Description of Artificial Sequence: Synthetic oligonucleotide
uuuaaguacugguaacaug

SEQ ID NO: 773803 - RNA, 19 nt, Artificial Sequence
  Description of Artificial Sequence: Synthetic oligonucleotide
agcaaaguaauucuuuaga

SEQ ID NO: 773804 - RNA, 19 nt, Artificial Sequence
  Description of Artificial Sequence: Synthetic oligonucleotide
ugaaucugcagcaccaaga

SEQ ID NO: 773805 - RNA, 19 nt, Artificial Sequence
  Description of Artificial Sequence: Synthetic oligonucleotide
cuauguaaacacaccaaag

SEQ ID NO: 773806 - RNA, 19 nt, Artificial Sequence
  Description of Artificial Sequence: Synthetic oligonucleotide
auaagacgaaugaagcugc

SEQ ID NO: 773807 - RNA, 19 nt, Artificial Sequence
  Description of Artificial Sequence: Synthetic oligonucleotide
cuuguggcaaacacuaccc

SEQ ID NO: 773808 - RNA, 19 nt, Artificial Sequence
  Description of Artificial Sequence: Synthetic oligonucleotide
aauuguauguacaguagga

SEQ ID NO: 773809 - RNA, 19 nt, Artificial Sequence
  Description of Artificial Sequence: Synthetic oligonucleotide
cuaagguuaacagagaaga

SEQ ID NO: 773810 - RNA, 19 nt, Artificial Sequence
  Description of Artificial Sequence: Synthetic oligonucleotide
aguaggauaacaacuaugu

SEQ ID NO: 773811 - RNA, 19 nt, Artificial Sequence
  Description of Artificial Sequence: Synthetic oligonucleotide
acaauacuggcccacagga

SEQ ID NO: 773812 - RNA, 19 nt, Artificial Sequence
  Description of Artificial Sequence: Synthetic oligonucleotide
auucaaaauugggaggggc

SEQ ID NO: 773813 - RNA, 19 nt, Artificial Sequence
  Description of Artificial Sequence: Synthetic oligonucleotide
acacuagaagcucugcuuc

SEQ ID NO: 773814 - RNA, 19 nt, Artificial Sequence
  Description of Artificial Sequence: Synthetic oligonucleotide
gaauacgaauacuguaaag

SEQ ID NO: 773815 - RNA, 19 nt, Artificial Sequence
  Description of Artificial Sequence: Synthetic oligonucleotide
acauacuuaaugugcaugu

SEQ ID NO: 773816 - RNA, 19 nt, Artificial Sequence
  Description of Artificial Sequence: Synthetic oligonucleotide
uucuaauacuguagagagg

SEQ ID NO: 773817 - RNA, 19 nt, Artificial Sequence
  Description of Artificial Sequence: Synthetic oligonucleotide
ucauugcugaacuuaaguc

SEQ ID NO: 773818 - RNA, 19 nt, Artificial Sequence
  Description of Artificial Sequence: Synthetic oligonucleotide
gaagccucgaguguaacag

SEQ ID NO: 773819 - RNA, 19 nt, Artificial Sequence
  Description of Artificial Sequence: Synthetic oligonucleotide
gaaucuggaguaaaugaag

SEQ ID NO: 773820 - RNA, 19 nt, Artificial Sequence
  Description of Artificial Sequence: Synthetic oligonucleotide
acuauguaaacacaccaaa

SEQ ID NO: 773821 - RNA, 19 nt, Artificial Sequence
  Description of Artificial Sequence: Synthetic oligonucleotide
gaguaaaugaagccucgag

SEQ ID NO: 773822 - RNA, 19 nt, Artificial Sequence
  Description of Artificial Sequence: Synthetic oligonucleotide
uguaaagccuccuggcaag

SEQ ID NO: 773823 - RNA, 19 nt, Artificial Sequence
  Description of Artificial Sequence: Synthetic oligonucleotide
gugcauguugcacaaaugc

SEQ ID NO: 773824 - RNA, 19 nt, Artificial Sequence
  Description of Artificial Sequence: Synthetic oligonucleotide
aucauugcugaacuuaagu

SEQ ID NO: 773825 - RNA, 19 nt, Artificial Sequence
  Description of Artificial Sequence: Synthetic oligonucleotide
caaagggagacccaguaac

SEQ ID NO: 773826 - RNA, 19 nt, Artificial Sequence
  Description of Artificial Sequence: Synthetic oligonucleotide
aacacuagaagcucugcuu

SEQ ID NO: 773827 - RNA, 19 nt, Artificial Sequence
  Description of Artificial Sequence: Synthetic oligonucleotide
cacaaguccgaucauacug

SEQ ID NO: 773828 - RNA, 19 nt, Artificial Sequence
  Description of Artificial Sequence: Synthetic oligonucleotide
uucaaaauugggaggggcu

SEQ ID NO: 773829 - RNA, 19 nt, Artificial Sequence
  Description of Artificial Sequence: Synthetic oligonucleotide
ugucagcugucacauacag

SEQ ID NO: 773830 - RNA, 19 nt, Artificial Sequence
  Description of Artificial Sequence: Synthetic oligonucleotide
acuuaaguccuguccacuc

SEQ ID NO: 773831 - RNA, 19 nt, Artificial Sequence
  Description of Artificial Sequence: Synthetic oligonucleotide
gguucuagcacccuguccc

SEQ ID NO: 773832 - RNA, 19 nt, Artificial Sequence
  Description of Artificial Sequence: Synthetic oligonucleotide
aauaaacuacuaccuugcu

SEQ ID NO: 773833 - RNA, 19 nt, Artificial Sequence
  Description of Artificial Sequence: Synthetic oligonucleotide
ugacuauguacacaauuuc

SEQ ID NO: 773834 - RNA, 19 nt, Artificial Sequence
  Description of Artificial Sequence: Synthetic oligonucleotide
uucaagccaagcucgguag

SEQ ID NO: 773835 - RNA, 19 nt, Artificial Sequence
  Description of Artificial Sequence: Synthetic oligonucleotide
uugcuguuagcauaacccc

SEQ ID NO: 773836 - RNA, 19 nt, Artificial Sequence
  Description of Artificial Sequence: Synthetic oligonucleotide
aaacagguaauuggacccg

SEQ ID NO: 773837 - RNA, 19 nt, Artificial Sequence
  Description of Artificial Sequence: Synthetic oligonucleotide
agucuaugcacagagauau

SEQ ID NO: 773838 - RNA, 19 nt, Artificial Sequence
  Description of Artificial Sequence: Synthetic oligonucleotide
caauuacaaagggagaccc

SEQ ID NO: 773839 - RNA, 19 nt, Artificial Sequence
  Description of Artificial Sequence: Synthetic oligonucleotide
uuggguggcaaacugguuc

SEQ ID NO: 773840 - RNA, 19 nt, Artificial Sequence
  Description of Artificial Sequence: Synthetic oligonucleotide
acuacuaccuugcuuuugu

SEQ ID NO: 773841 - RNA, 19 nt, Artificial Sequence
  Description of Artificial Sequence: Synthetic oligonucleotide
gaucaagggucauauauaa

SEQ ID NO: 773842 - RNA, 19 nt, Artificial Sequence
  Description of Artificial Sequence: Synthetic oligonucleotide
uccaggcauauacacauac

SEQ ID NO: 773843 - RNA, 19 nt, Artificial Sequence
  Description of Artificial Sequence: Synthetic oligonucleotide
agacgaaugaagcugccgu

SEQ ID NO: 773844 - RNA, 19 nt, Artificial Sequence
  Description of Artificial Sequence: Synthetic oligonucleotide
ucgaguguaacagucuuug

SEQ ID NO: 773845 - RNA, 19 nt, Artificial Sequence
  Description of Artificial Sequence: Synthetic oligonucleotide
aaccuaauccuaagcaguc

SEQ ID NO: 773846 - RNA, 19 nt, Artificial Sequence
  Description of Artificial Sequence: Synthetic oligonucleotide
acuguaaccuaauccuaag

SEQ ID NO: 773847 - RNA, 19 nt, Artificial Sequence
  Description of Artificial Sequence: Synthetic oligonucleotide
uuguauguacaguaggaua

SEQ ID NO: 773848 - RNA, 19 nt, Artificial Sequence
  Description of Artificial Sequence: Synthetic oligonucleotide
ucaaggcucuuacuuagcu

SEQ ID NO: 773849 - RNA, 19 nt, Artificial Sequence
  Description of Artificial Sequence: Synthetic oligonucleotide
auguggaaagguguucucc

SEQ ID NO: 773850 - RNA, 19 nt, Artificial Sequence
  Description of Artificial Sequence: Synthetic oligonucleotide
cauuuaaguggacacgcac

SEQ ID NO: 773851 - RNA, 19 nt, Artificial Sequence
  Description of Artificial Sequence: Synthetic oligonucleotide
ggcauaaucaggcaaauaa

SEQ ID NO: 773852 - RNA, 19 nt, Artificial Sequence
  Description of Artificial Sequence: Synthetic oligonucleotide
aggauaacaacuauguaaa

SEQ ID NO: 773853 - RNA, 19 nt, Artificial Sequence
  Description of Artificial Sequence: Synthetic oligonucleotide
aagacgaaugaagcugccg

SEQ ID NO: 773854 - RNA, 19 nt, Artificial Sequence
  Description of Artificial Sequence: Synthetic oligonucleotide
cauaagcaguaauugucag

SEQ ID NO: 773855 - RNA, 19 nt, Artificial Sequence
  Description of Artificial Sequence: Synthetic oligonucleotide
uucacguugucucccuaag

SEQ ID NO: 773856 - RNA, 19 nt, Artificial Sequence
  Description of Artificial Sequence: Synthetic oligonucleotide
uaagguuaacagagaagac

SEQ ID NO: 773857 - RNA, 19 nt, Artificial Sequence
  Description of Artificial Sequence: Synthetic oligonucleotide
uugucccauucuuugaccc

SEQ ID NO: 773858 - RNA, 19 nt, Artificial Sequence
  Description of Artificial Sequence: Synthetic oligonucleotide
gugacugucacacauauau

SEQ ID NO: 773859 - RNA, 19 nt, Artificial Sequence
  Description of Artificial Sequence: Synthetic oligonucleotide
aacggggaauaauuuauua

SEQ ID NO: 773860 - RNA, 19 nt, Artificial Sequence
  Description of Artificial Sequence: Synthetic oligonucleotide
ugcuguuagcauaacccca

SEQ ID NO: 773861 - RNA, 19 nt, Artificial Sequence
  Description of Artificial Sequence: Synthetic oligonucleotide
ugugaaacaaugccacaau

SEQ ID NO: 773862 - RNA, 19 nt, Artificial Sequence
  Description of Artificial Sequence: Synthetic oligonucleotide
ugugcauguugcacaaaug

SEQ ID NO: 773863 - RNA, 19 nt, Artificial Sequence
  Description of Artificial Sequence: Synthetic oligonucleotide
acccaguaacaagacaugc

SEQ ID NO: 773864 - RNA, 19 nt, Artificial Sequence
  Description of Artificial Sequence: Synthetic oligonucleotide
cagaauuuaccugcuaccc

SEQ ID NO: 773865 - RNA, 19 nt, Artificial Sequence
  Description of Artificial Sequence: Synthetic oligonucleotide
cauacagaaaguucugaca

SEQ ID NO: 773866 - RNA, 19 nt, Artificial Sequence
  Description of Artificial Sequence: Synthetic oligonucleotide
ucacguugucucccuaagg

SEQ ID NO: 773867 - RNA, 19 nt, Artificial Sequence
  Description of Artificial Sequence: Synthetic oligonucleotide
uaaguacugguaacauggc

SEQ ID NO: 773868 - RNA, 19 nt, Artificial Sequence
  Description of Artificial Sequence: Synthetic oligonucleotide
aacucagacucguuccaca

SEQ ID NO: 773869 - RNA, 19 nt, Artificial Sequence
  Description of Artificial Sequence: Synthetic oligonucleotide
caaucauaauaaauuguga

SEQ ID NO: 773870 - RNA, 19 nt, Artificial Sequence
  Description of Artificial Sequence: Synthetic oligonucleotide
auugcugaacuuaaguccu

SEQ ID NO: 773871 - RNA, 19 nt, Artificial Sequence
  Description of Artificial Sequence: Synthetic oligonucleotide
uugugaaacaaugccacaa

SEQ ID NO: 773872 - RNA, 19 nt, Artificial Sequence
  Description of Artificial Sequence: Synthetic oligonucleotide
auaaacuacuaccuugcuu

SEQ ID NO: 773873 - RNA, 19 nt, Artificial Sequence
  Description of Artificial Sequence: Synthetic oligonucleotide
guuaacagagaagacuaac

SEQ ID NO: 773874 - RNA, 19 nt, Artificial Sequence
  Description of Artificial Sequence: Synthetic oligonucleotide
acuacccacaaauagucuu

SEQ ID NO: 773875 - RNA, 19 nt, Artificial Sequence
  Description of Artificial Sequence: Synthetic oligonucleotide
ucaagggcccacuguaacc

SEQ ID NO: 773876 - RNA, 19 nt, Artificial Sequence
  Description of Artificial Sequence: Synthetic oligonucleotide
caguaggauaacaacuaug

SEQ ID NO: 773877 - RNA, 19 nt, Artificial Sequence
  Description of Artificial Sequence: Synthetic oligonucleotide
gucucccuaagguuaacag

SEQ ID NO: 773878 - RNA, 19 nt, Artificial Sequence
  Description of Artificial Sequence: Synthetic oligonucleotide
cacaauacuggcccacagg

SEQ ID NO: 773879 - RNA, 19 nt, Artificial Sequence
  Description of Artificial Sequence: Synthetic oligonucleotide
ugcccuagcaucuccaauc

SEQ ID NO: 773880 - RNA, 19 nt, Artificial Sequence
  Description of Artificial Sequence: Synthetic oligonucleotide
agcauaaccccaaaugugu

SEQ ID NO: 773881 - RNA, 19 nt, Artificial Sequence
  Description of Artificial Sequence: Synthetic oligonucleotide
auacuguagagagggcccc

SEQ ID NO: 773882 - RNA, 19 nt, Artificial Sequence
  Description of Artificial Sequence: Synthetic oligonucleotide
cuguaaccuaauccuaagc

SEQ ID NO: 773883 - RNA, 19 nt, Artificial Sequence
  Description of Artificial Sequence: Synthetic oligonucleotide
ggcauauacacauacuuaa

SEQ ID NO: 773884 - RNA, 19 nt, Artificial Sequence
  Description of Artificial Sequence: Synthetic oligonucleotide
aaugcaucaauaagacgaa

SEQ ID NO: 773885 - RNA, 19 nt, Artificial Sequence
  Description of Artificial Sequence: Synthetic oligonucleotide
auuuaaguggacacgcaca

SEQ ID NO: 773886 - RNA, 19 nt, Artificial Sequence
  Description of Artificial Sequence: Synthetic oligonucleotide
guaagagcuggggaagugg

SEQ ID NO: 773887 - RNA, 19 nt, Artificial Sequence
  Description of Artificial Sequence: Synthetic oligonucleotide
agacccaguaacaagacau

SEQ ID NO: 773888 - RNA, 19 nt, Artificial Sequence
  Description of Artificial Sequence: Synthetic oligonucleotide
aggaauacgaauacuguaa

SEQ ID NO: 773889 - RNA, 19 nt, Artificial Sequence
  Description of Artificial Sequence: Synthetic oligonucleotide
gauaucuagaggaacauuu

SEQ ID NO: 773890 - RNA, 19 nt, Artificial Sequence
  Description of Artificial Sequence: Synthetic oligonucleotide
uacacaauuucuggugggc

SEQ ID NO: 773891 - RNA, 19 nt, Artificial Sequence
  Description of Artificial Sequence: Synthetic oligonucleotide
aagguauaugaagacuuau

SEQ ID NO: 773892 - RNA, 19 nt, Artificial Sequence
  Description of Artificial Sequence: Synthetic oligonucleotide
acggggaauaauuuauuaa

SEQ ID NO: 773893 - RNA, 19 nt, Artificial Sequence
  Description of Artificial Sequence: Synthetic oligonucleotide
agggagacccaguaacaag

SEQ ID NO: 773894 - RNA, 19 nt, Artificial Sequence
  Description of Artificial Sequence: Synthetic oligonucleotide
auauaacauauaacacagg

SEQ ID NO: 773895 - RNA, 19 nt, Artificial Sequence
  Description of Artificial Sequence: Synthetic oligonucleotide
uuggcaccuaagaaacaug

SEQ ID NO: 773896 - RNA, 19 nt, Artificial Sequence
  Description of Artificial Sequence: Synthetic oligonucleotide
uuacaacggggaauaauuu

SEQ ID NO: 773897 - RNA, 19 nt, Artificial Sequence
  Description of Artificial Sequence: Synthetic oligonucleotide
cuuuggaaggcgcucagca

SEQ ID NO: 773898 - RNA, 19 nt, Artificial Sequence
  Description of Artificial Sequence: Synthetic oligonucleotide
accuaagaaacaugauggu

SEQ ID NO: 773899 - RNA, 19 nt, Artificial Sequence
  Description of Artificial Sequence: Synthetic oligonucleotide
cauucuuugaccccaaggu

SEQ ID NO: 773900 - RNA, 19 nt, Artificial Sequence
  Description of Artificial Sequence: Synthetic oligonucleotide
acccguguguuuaccaucc

SEQ ID NO: 773901 - RNA, 19 nt, Artificial Sequence
  Description of Artificial Sequence: Synthetic oligonucleotide
aguggacacgcacacugug

SEQ ID NO: 773902 - RNA, 19 nt, Artificial Sequence
  Description of Artificial Sequence: Synthetic oligonucleotide
auuguauguacaguaggau

SEQ ID NO: 773903 - RNA, 19 nt, Artificial Sequence
  Description of Artificial Sequence: Synthetic oligonucleotide
acuuaaugugcauguugca

SEQ ID NO: 773904 - RNA, 19 nt, Artificial Sequence
  Description of Artificial Sequence: Synthetic oligonucleotide
ucguuccacaauacuggcc

SEQ ID NO: 773905 - RNA, 19 nt, Artificial Sequence
  Description of Artificial Sequence: Synthetic oligonucleotide
ugaagccucgaguguaaca

SEQ ID NO: 773906 - RNA, 19 nt, Artificial Sequence
  Description of Artificial Sequence: Synthetic oligonucleotide
uuacaaagggagacccagu

SEQ ID NO: 773907 - RNA, 19 nt, Artificial Sequence
  Description of Artificial Sequence: Synthetic oligonucleotide
ugugcaucaccacacccuu

SEQ ID NO: 773908 - RNA, 19 nt, Artificial Sequence
  Description of Artificial Sequence: Synthetic oligonucleotide
aacuuaaguccuguccacu

SEQ ID NO: 773909 - RNA, 19 nt, Artificial Sequence
  Description of Artificial Sequence: Synthetic oligonucleotide
auucuuugaccccaaggua

SEQ ID NO: 773910 - RNA, 19 nt, Artificial Sequence
  Description of Artificial Sequence: Synthetic oligonucleotide
cacacugugcucaaauaca

SEQ ID NO: 773911 - RNA, 19 nt, Artificial Sequence
  Description of Artificial Sequence: Synthetic oligonucleotide
acaacucagacucguucca

SEQ ID NO: 773912 - RNA, 19 nt, Artificial Sequence
  Description of Artificial Sequence: Synthetic oligonucleotide
cuaauacuguagagagggc

SEQ ID NO: 773913 - RNA, 19 nt, Artificial Sequence
  Description of Artificial Sequence: Synthetic oligonucleotide
auuggacccguguguuuac

SEQ ID NO: 773914 - RNA, 19 nt, Artificial Sequence
  Description of Artificial Sequence: Synthetic oligonucleotide
gguugugaaacaaugccac

SEQ ID NO: 773915 - RNA, 19 nt, Artificial Sequence
  Description of Artificial Sequence: Synthetic oligonucleotide
ugucaguuacaacggggaa

SEQ ID NO: 773916 - RNA, 19 nt, Artificial Sequence
  Description of Artificial Sequence: Synthetic oligonucleotide
ugucccauucuuugacccc

SEQ ID NO: 773917 - RNA, 19 nt, Artificial Sequence
  Description of Artificial Sequence: Synthetic oligonucleotide
uggguaagagcuggggaag

SEQ ID NO: 773918 - RNA, 19 nt, Artificial Sequence
  Description of Artificial Sequence: Synthetic oligonucleotide
acaacggggaauaauuuau

SEQ ID NO: 773919 - RNA, 19 nt, Artificial Sequence
  Description of Artificial Sequence: Synthetic oligonucleotide
ugaguaugaguuugccauc

SEQ ID NO: 773920 - RNA, 19 nt, Artificial Sequence
  Description of Artificial Sequence: Synthetic oligonucleotide
uguccacucacaaguccga

SEQ ID NO: 773921 - RNA, 19 nt, Artificial Sequence
  Description of Artificial Sequence: Synthetic oligonucleotide
uuuggaaggcgcucagcaa

SEQ ID NO: 773922 - RNA, 19 nt, Artificial Sequence
  Description of Artificial Sequence: Synthetic oligonucleotide
gcauaaucaggcaaauaag

SEQ ID NO: 773923 - RNA, 19 nt, Artificial Sequence
  Description of Artificial Sequence: Synthetic oligonucleotide
caucauugcugaacuuaag

SEQ ID NO: 773924 - RNA, 19 nt, Artificial Sequence
  Description of Artificial Sequence: Synthetic oligonucleotide
aacuacuaccuugcuuuug

SEQ ID NO: 773925 - RNA, 19 nt, Artificial Sequence
  Description of Artificial Sequence: Synthetic oligonucleotide
ggcugcuaaaccuuucagc

SEQ ID NO: 773926 - RNA, 19 nt, Artificial Sequence
  Description of Artificial Sequence: Synthetic oligonucleotide
acacuuguggcaaacacua

SEQ ID NO: 773927 - RNA, 19 nt, Artificial Sequence
  Description of Artificial Sequence: Synthetic oligonucleotide
ucacaaguccgaucauacu

SEQ ID NO: 773928 - RNA, 19 nt, Artificial Sequence
  Description of Artificial Sequence: Synthetic oligonucleotide
agacucguuccacaauacu

SEQ ID NO: 773929 - RNA, 19 nt, Artificial Sequence
  Description of Artificial Sequence: Synthetic oligonucleotide
uaaacaacucagacucguu

SEQ ID NO: 773930 - RNA, 19 nt, Artificial Sequence
  Description of Artificial Sequence: Synthetic oligonucleotide
ugccguugguggaaaugag

SEQ ID NO: 773931 - RNA, 19 nt, Artificial Sequence
  Description of Artificial Sequence: Synthetic oligonucleotide
aggcugcuaaaccuuucag

SEQ ID NO: 773932 - RNA, 19 nt, Artificial Sequence
  Description of Artificial Sequence: Synthetic oligonucleotide
gaguaugaguuugccauca

SEQ ID NO: 773933 - RNA, 19 nt, Artificial Sequence
  Description of Artificial Sequence: Synthetic oligonucleotide
aggagucaccucaaggcuc

SEQ ID NO: 773934 - RNA, 19 nt, Artificial Sequence
  Description of Artificial Sequence: Synthetic oligonucleotide
aaacuacuaccuugcuuuu

SEQ ID NO: 773935 - RNA, 19 nt, Artificial Sequence
  Description of Artificial Sequence: Synthetic oligonucleotide
acugucacacauauauaga

SEQ ID NO: 773936 - RNA, 19 nt, Artificial Sequence
  Description of Artificial Sequence: Synthetic oligonucleotide
cucaagggcccacuguaac

SEQ ID NO: 773937 - RNA, 19 nt, Artificial Sequence
  Description of Artificial Sequence: Synthetic oligonucleotide
uuuauaccacucucuccau

SEQ ID NO: 773938 - RNA, 19 nt, Artificial Sequence
  Description of Artificial Sequence: Synthetic oligonucleotide
ugacugucacacauauaua

SEQ ID NO: 773939 - RNA, 19 nt, Artificial Sequence
  Description of Artificial Sequence: Synthetic oligonucleotide
agacuaacacuuguggcaa

SEQ ID NO: 773940 - RNA, 19 nt, Artificial Sequence
  Description of Artificial Sequence: Synthetic oligonucleotide
agccucgaguguaacaguc

SEQ ID NO: 773941 - RNA, 19 nt, Artificial Sequence
  Description of Artificial Sequence: Synthetic oligonucleotide
caauaagacgaaugaagcu

SEQ ID NO: 773942 - RNA, 19 nt, Artificial Sequence
  Description of Artificial Sequence: Synthetic oligonucleotide
gggaauugcaccaggcugc

SEQ ID NO: 773943 - RNA, 19 nt, Artificial Sequence
  Description of Artificial Sequence: Synthetic oligonucleotide
aucaagauuaacaguggua

SEQ ID NO: 773944 - RNA, 19 nt, Artificial Sequence
  Description of Artificial Sequence: Synthetic oligonucleotide
ggcaaauaagauucuaaua

SEQ ID NO: 773945 - RNA, 19 nt, Artificial Sequence
  Description of Artificial Sequence: Synthetic oligonucleotide
gcccacuguaaccuaaucc

SEQ ID NO: 773946 - RNA, 19 nt, Artificial Sequence
  Description of Artificial Sequence: Synthetic oligonucleotide
aaaauugggaggggcucaa

SEQ ID NO: 773947 - RNA, 19 nt, Artificial Sequence
  Description of Artificial Sequence: Synthetic oligonucleotide
guuacaacggggaauaauu

SEQ ID NO: 773948 - RNA, 19 nt, Artificial Sequence
  Description of Artificial Sequence: Synthetic oligonucleotide
acucagacucguuccacaa

SEQ ID NO: 773949 - RNA, 19 nt, Artificial Sequence
  Description of Artificial Sequence: Synthetic oligonucleotide
auugugaaucuggaguaaa

SEQ ID NO: 773950 - RNA, 19 nt, Artificial Sequence
  Description of Artificial Sequence: Synthetic oligonucleotide
uccacucacaaguccgauc

SEQ ID NO: 773951 - RNA, 19 nt, Artificial Sequence
  Description of Artificial Sequence: Synthetic oligonucleotide
uggacccguguguuuacca

SEQ ID NO: 773952 - RNA, 19 nt, Artificial Sequence
  Description of Artificial Sequence: Synthetic oligonucleotide
cagacucguuccacaauac

SEQ ID NO: 773953 - RNA, 19 nt, Artificial Sequence
  Description of Artificial Sequence: Synthetic oligonucleotide
ugucucccuaagguuaaca

SEQ ID NO: 773954 - RNA, 19 nt, Artificial Sequence
  Description of Artificial Sequence: Synthetic oligonucleotide
acuggcccacaggaaaacg

SEQ ID NO: 773955 - RNA, 19 nt, Artificial Sequence
  Description of Artificial Sequence: Synthetic oligonucleotide
aaauugggaggggcucaag

SEQ ID NO: 773956 - RNA, 19 nt, Artificial Sequence
  Description of Artificial Sequence: Synthetic oligonucleotide
cugacuauguacacaauuu

SEQ ID NO: 773957 - RNA, 19 nt, Artificial Sequence
  Description of Artificial Sequence: Synthetic oligonucleotide
cauguggaaagguguucuc

SEQ ID NO: 773958 - RNA, 19 nt, Artificial Sequence
  Description of Artificial Sequence: Synthetic oligonucleotide
uuaaguggacacgcacacu

SEQ ID NO: 773959 - RNA, 19 nt, Artificial Sequence
  Description of Artificial Sequence: Synthetic oligonucleotide
gacccguguguuuaccauc

SEQ ID NO: 773960 - RNA, 19 nt, Artificial Sequence
  Description of Artificial Sequence: Synthetic oligonucleotide
agaucaagggucauauaua

SEQ ID NO: 773961 - RNA, 19 nt, Artificial Sequence
  Description of Artificial Sequence: Synthetic oligonucleotide
ggaauacgaauacuguaaa

SEQ ID NO: 773962 - RNA, 19 nt, Artificial Sequence
  Description of Artificial Sequence: Synthetic oligonucleotide
caccuacacaggaauacga

SEQ ID NO: 773963 - RNA, 19 nt, Artificial Sequence
  Description of Artificial Sequence: Synthetic oligonucleotide
cugucacacauauauagau

SEQ ID NO: 773964 - RNA, 19 nt, Artificial Sequence
  Description of Artificial Sequence: Synthetic oligonucleotide
caguccagucaaacuuggg

SEQ ID NO: 773965 - RNA, 19 nt, Artificial Sequence
  Description of Artificial Sequence: Synthetic oligonucleotide
guagagagggccccuaagu

SEQ ID NO: 773966 - RNA, 19 nt, Artificial Sequence
  Description of Artificial Sequence: Synthetic oligonucleotide
guaggauaacaacuaugua

SEQ ID NO: 773967 - RNA, 19 nt, Artificial Sequence
  Description of Artificial Sequence: Synthetic oligonucleotide
gguaauuggacccgugugu

SEQ ID NO: 773968 - RNA, 19 nt, Artificial Sequence
  Description of Artificial Sequence: Synthetic oligonucleotide
augaagccucgaguguaac

SEQ ID NO: 773969 - RNA, 19 nt, Artificial Sequence
  Description of Artificial Sequence: Synthetic oligonucleotide
cagggcauaaucaggcaaa

SEQ ID NO: 773970 - RNA, 19 nt, Artificial Sequence
  Description of Artificial Sequence: Synthetic oligonucleotide
cucuccaggcauauacaca

SEQ ID NO: 773971 - RNA, 19 nt, Artificial Sequence
  Description of Artificial Sequence: Synthetic oligonucleotide
uuccacaauacuggcccac

SEQ ID NO: 773972 - RNA, 19 nt, Artificial Sequence
  Description of Artificial Sequence: Synthetic oligonucleotide
ggaaaacgugaugugacuc

SEQ ID NO: 773973 - RNA, 19 nt, Artificial Sequence
  Description of Artificial Sequence: Synthetic oligonucleotide
cacguugucucccuaaggu

SEQ ID NO: 773974 - RNA, 19 nt, Artificial Sequence
  Description of Artificial Sequence: Synthetic oligonucleotide
aguaugaguuugccaucau

SEQ ID NO: 773975 - RNA, 19 nt, Artificial Sequence
  Description of Artificial Sequence: Synthetic oligonucleotide
aaguggacacgcacacugu

SEQ ID NO: 773976 - RNA, 19 nt, Artificial Sequence
  Description of Artificial Sequence: Synthetic oligonucleotide
ggggaauaauuuauuaaaa

SEQ ID NO: 773977 - RNA, 19 nt, Artificial Sequence
  Description of Artificial Sequence: Synthetic oligonucleotide
uccccaaauuuuccuucau

SEQ ID NO: 773978 - RNA, 19 nt, Artificial Sequence
  Description of Artificial Sequence: Synthetic oligonucleotide
accuaauccuaagcaguca

SEQ ID NO: 773979 - RNA, 19 nt, Artificial Sequence
  Description of Artificial Sequence: Synthetic oligonucleotide
cacuuguggcaaacacuac

SEQ ID NO: 773980 - RNA, 19 nt, Artificial Sequence
  Description of Artificial Sequence: Synthetic oligonucleotide
acuggugacuucacuggcu

SEQ ID NO: 773981 - RNA, 19 nt, Artificial Sequence
  Description of Artificial Sequence: Synthetic oligonucleotide
gcuuuuguucaagccaagc

SEQ ID NO: 773982 - RNA, 19 nt, Artificial Sequence
  Description of Artificial Sequence: Synthetic oligonucleotide
caucaagauuaacaguggu

SEQ ID NO: 773983 - RNA, 19 nt, Artificial Sequence
  Description of Artificial Sequence: Synthetic oligonucleotide
auugcaccaggcugcuaaa

SEQ ID NO: 773984 - RNA, 19 nt, Artificial Sequence
  Description of Artificial Sequence: Synthetic oligonucleotide
accuacacaggaauacgaa

SEQ ID NO: 773985 - RNA, 19 nt, Artificial Sequence
  Description of Artificial Sequence: Synthetic oligonucleotide
cuuacuuagcugccaugaa

SEQ ID NO: 773986 - RNA, 19 nt, Artificial Sequence
  Description of Artificial Sequence: Synthetic oligonucleotide
uggcuugauugaagagcac

SEQ ID NO: 773987 - RNA, 19 nt, Artificial Sequence
  Description of Artificial Sequence: Synthetic oligonucleotide
uacuggcccacaggaaaac

SEQ ID NO: 773988 - RNA, 19 nt, Artificial Sequence
  Description of Artificial Sequence: Synthetic oligonucleotide
cugccguugguggaaauga

SEQ ID NO: 773989 - RNA, 19 nt, Artificial Sequence
  Description of Artificial Sequence: Synthetic oligonucleotide
uccuggcaagcaagguccu

SEQ ID NO: 773990 - RNA, 19 nt, Artificial Sequence
  Description of Artificial Sequence: Synthetic oligonucleotide
cccacuguaaccuaauccu

SEQ ID NO: 773991 - RNA, 19 nt, Artificial Sequence
  Description of Artificial Sequence: Synthetic oligonucleotide
caacucagacucguuccac

SEQ ID NO: 773992 - RNA, 19 nt, Artificial Sequence
  Description of Artificial Sequence: Synthetic oligonucleotide
uucuagcacccugucccca

SEQ ID NO: 773993 - RNA, 19 nt, Artificial Sequence
  Description of Artificial Sequence: Synthetic oligonucleotide
ugcugacuauguacacaau

SEQ ID NO: 773994 - RNA, 19 nt, Artificial Sequence
  Description of Artificial Sequence: Synthetic oligonucleotide
cccugggaaggccaugugg

SEQ ID NO: 773995 - RNA, 19 nt, Artificial Sequence
  Description of Artificial Sequence: Synthetic oligonucleotide
gccuagagccagcuccugg

SEQ ID NO: 773996 - RNA, 19 nt, Artificial Sequence
  Description of Artificial Sequence: Synthetic oligonucleotide
gcccuagcaucuccaaucc

SEQ ID NO: 773997 - RNA, 19 nt, Artificial Sequence
  Description of Artificial Sequence: Synthetic oligonucleotide
agcccaagaccugccucac

SEQ ID NO: 773998 - RNA, 19 nt, Artificial Sequence
  Description of Artificial Sequence: Synthetic oligonucleotide
cauguugcacaaaugcauu

SEQ ID NO: 773999 - RNA, 19 nt, Artificial Sequence
  Description of Artificial Sequence: Synthetic oligonucleotide
cgaaugaagcugccguugg

SEQ ID NO: 774000 - RNA, 19 nt, Artificial Sequence
  Description of Artificial Sequence: Synthetic oligonucleotide
gugaaacaaugccacaauu

SEQ ID NO: 774001 - RNA, 19 nt, Artificial Sequence
  Description of Artificial Sequence: Synthetic oligonucleotide
caauacuggcccacaggaa

SEQ ID NO: 774002 - RNA, 19 nt, Artificial Sequence
  Description of Artificial Sequence: Synthetic oligonucleotide
ucuuugcuguuagcauaac

SEQ ID NO: 774003 - RNA, 19 nt, Artificial Sequence
  Description of Artificial Sequence: Synthetic oligonucleotide
gguaagagcuggggaagug

SEQ ID NO: 774004 - RNA, 19 nt, Artificial Sequence
  Description of Artificial Sequence: Synthetic oligonucleotide
auacuggcccacaggaaaa

SEQ ID NO: 774005 - RNA, 19 nt, Artificial Sequence
  Description of Artificial Sequence: Synthetic oligonucleotide
acgugaugugacucaggua

SEQ ID NO: 774006 - RNA, 19 nt, Artificial Sequence
  Description of Artificial Sequence: Synthetic oligonucleotide
aagggcccacuguaaccua

SEQ ID NO: 774007 - RNA, 19 nt, Artificial Sequence
  Description of Artificial Sequence: Synthetic oligonucleotide
guugucucccuaagguuaa

SEQ ID NO: 774008 - RNA, 19 nt, Artificial Sequence
  Description of Artificial Sequence: Synthetic oligonucleotide
gcauaaccccaaaugugug

SEQ ID NO: 774009 - RNA, 19 nt, Artificial Sequence
  Description of Artificial Sequence: Synthetic oligonucleotide
agggcauaaucaggcaaau

SEQ ID NO: 774010 - RNA, 19 nt, Artificial Sequence
  Description of Artificial Sequence: Synthetic oligonucleotide
gacuaacacuuguggcaaa

SEQ ID NO: 774011 - RNA, 19 nt, Artificial Sequence
  Description of Artificial Sequence: Synthetic oligonucleotide
gccaagcucgguaggaccc

SEQ ID NO: 774012 - RNA, 19 nt, Artificial Sequence
  Description of Artificial Sequence: Synthetic oligonucleotide
gacgaaugaagcugccguu

SEQ ID NO: 774013 - RNA, 19 nt, Artificial Sequence
  Description of Artificial Sequence: Synthetic oligonucleotide
aggcuaaauauaacauaua

SEQ ID NO: 774014 - RNA, 19 nt, Artificial Sequence
  Description of Artificial Sequence: Synthetic oligonucleotide
augcaucaauaagacgaau

SEQ ID NO: 774015 - RNA, 19 nt, Artificial Sequence
  Description of Artificial Sequence: Synthetic oligonucleotide
gguaccauuuggguggcaa

SEQ ID NO: 774016 - RNA, 19 nt, Artificial Sequence
  Description of Artificial Sequence: Synthetic oligonucleotide
cuggcccacaggaaaacgu

SEQ ID NO: 774017 - RNA, 19 nt, Artificial Sequence
  Description of Artificial Sequence: Synthetic oligonucleotide
cuacccacaaauagucuuu

SEQ ID NO: 774018 - RNA, 19 nt, Artificial Sequence
  Description of Artificial Sequence: Synthetic oligonucleotide
gcuguuagcauaaccccaa

SEQ ID NO: 774019 - RNA, 19 nt, Artificial Sequence
  Description of Artificial Sequence: Synthetic oligonucleotide
ccacaauacuggcccacag

SEQ ID NO: 774020 - RNA, 19 nt, Artificial Sequence
  Description of Artificial Sequence: Synthetic oligonucleotide
guaauuggacccguguguu

SEQ ID NO: 774021 - RNA, 19 nt, Artificial Sequence
  Description of Artificial Sequence: Synthetic oligonucleotide
ccguugguggaaaugagua

SEQ ID NO: 774022 - RNA, 19 nt, Artificial Sequence
  Description of Artificial Sequence: Synthetic oligonucleotide
gcauguugcacaaaugcau

SEQ ID NO: 774023 - RNA, 19 nt, Artificial Sequence
  Description of Artificial Sequence: Synthetic oligonucleotide
ggaguaaaugaagccucga

SEQ ID NO: 774024 - RNA, 19 nt, Artificial Sequence
  Description of Artificial Sequence: Synthetic oligonucleotide
gcugccguugguggaaaug

SEQ ID NO: 774025 - RNA, 19 nt, Artificial Sequence
  Description of Artificial Sequence: Synthetic oligonucleotide
ggccccuaaguguggcuug

SEQ ID NO: 774026 - RNA, 19 nt, Artificial Sequence
  Description of Artificial Sequence: Synthetic oligonucleotide
cgaguguaacagucuuugc

SEQ ID NO: 774027 - RNA, 19 nt, Artificial Sequence
  Description of Artificial Sequence: Synthetic oligonucleotide
gguuaacagagaagacuaa

SEQ ID NO: 774028 - RNA, 19 nt, Artificial Sequence
  Description of Artificial Sequence: Synthetic oligonucleotide
ggccuuuugcuagccaaca

SEQ ID NO: 774029 - RNA, 19 nt, Artificial Sequence
  Description of Artificial Sequence: Synthetic oligonucleotide
caacggggaauaauuuauu

SEQ ID NO: 774030 - RNA, 19 nt, Artificial Sequence
  Description of Artificial Sequence: Synthetic oligonucleotide
ggacacgcacacugugcuc

SEQ ID NO: 774031 - RNA, 19 nt, Artificial Sequence
  Description of Artificial Sequence: Synthetic oligonucleotide
agggcccacuguaaccuaa

SEQ ID NO: 774032 - RNA, 19 nt, Artificial Sequence
  Description of Artificial Sequence: Synthetic oligonucleotide
ccuacacaggaauacgaau

SEQ ID NO: 774033 - RNA, 19 nt, Artificial Sequence
  Description of Artificial Sequence: Synthetic oligonucleotide
cucgaguguaacagucuuu

SEQ ID NO: 774034 - RNA, 19 nt, Artificial Sequence
  Description of Artificial Sequence: Synthetic oligonucleotide
ccaagcucgguaggacccc

SEQ ID NO: 774035 - RNA, 19 nt, Artificial Sequence
  Description of Artificial Sequence: Synthetic oligonucleotide
cccauucuuugaccccaag

SEQ ID NO: 774036 - RNA, 19 nt, Artificial Sequence
  Description of Artificial Sequence: Synthetic oligonucleotide
gcucuuacuuagcugccau

SEQ ID NO: 774037 - RNA, 19 nt, Artificial Sequence
  Description of Artificial Sequence: Synthetic oligonucleotide
acccaccuacacaggaaua

SEQ ID NO: 774038 - RNA, 19 nt, Artificial Sequence
  Description of Artificial Sequence: Synthetic oligonucleotide
ugguaccauuuggguggca

SEQ ID NO: 774039 - RNA, 19 nt, Artificial Sequence
  Description of Artificial Sequence: Synthetic oligonucleotide
cccacaaauagucuuucuu

SEQ ID NO: 774040 - RNA, 19 nt, Artificial Sequence
  Description of Artificial Sequence: Synthetic oligonucleotide
ggacccguguguuuaccau

SEQ ID NO: 774041 - RNA, 19 nt, Artificial Sequence
  Description of Artificial Sequence: Synthetic oligonucleotide
ccguguguuuaccauccaa

SEQ ID NO: 774042 - RNA, 19 nt, Artificial Sequence
  Description of Artificial Sequence: Synthetic oligonucleotide
gcuaaaccuuucagcucuc

SEQ ID NO: 774043 - RNA, 19 nt, Artificial Sequence
  Description of Artificial Sequence: Synthetic oligonucleotide
ccuaagcagucaccucuga

SEQ ID NO: 774044 - RNA, 19 nt, Artificial Sequence
  Description of Artificial Sequence: Synthetic oligonucleotide
gccguugguggaaaugagu

SEQ ID NO: 774045 - RNA, 19 nt, Artificial Sequence
  Description of Artificial Sequence: Synthetic oligonucleotide
gggcauaaucaggcaaaua

SEQ ID NO: 774046 - RNA, 19 nt, Artificial Sequence
  Description of Artificial Sequence: Synthetic oligonucleotide
gcacaaggagucaccucaa

SEQ ID NO: 774047 - RNA, 19 nt, Artificial Sequence
  Description of Artificial Sequence: Synthetic oligonucleotide
ggccuagagccagcuccug

SEQ ID NO: 774048 - RNA, 19 nt, Artificial Sequence
  Description of Artificial Sequence: Synthetic oligonucleotide
guccacucacaaguccgau

SEQ ID NO: 774049 - RNA, 19 nt, Artificial Sequence
  Description of Artificial Sequence: Synthetic oligonucleotide
gcuucacguugucucccua

SEQ ID NO: 774050 - RNA, 19 nt, Artificial Sequence
  Description of Artificial Sequence: Synthetic oligonucleotide
gccccuaaguguggcuuga

SEQ ID NO: 774051 - RNA, 19 nt, Artificial Sequence
  Description of Artificial Sequence: Synthetic oligonucleotide
gcccacaggaaaacgugau

SEQ ID NO: 774052 - RNA, 19 nt, Artificial Sequence
  Description of Artificial Sequence: Synthetic oligonucleotide
gaccugccucacccaccua

SEQ ID NO: 774053 - RNA, 19 nt, Artificial Sequence
  Description of Artificial Sequence: Synthetic oligonucleotide
cccguguguuuaccaucca

SEQ ID NO: 774054 - RNA, 19 nt, Artificial Sequence
  Description of Artificial Sequence: Synthetic oligonucleotide
gggccccuaaguguggcuu

SEQ ID NO: 774055 - RNA, 19 nt, Artificial Sequence
  Description of Artificial Sequence: Synthetic oligonucleotide
ggcgcucagcaaaguaauu

SEQ ID NO: 774056 - RNA, 19 nt, Artificial Sequence
  Description of Artificial Sequence: Synthetic oligonucleotide
aaguaugcuucccagaacc

SEQ ID NO: 774057 - RNA, 19 nt, Artificial Sequence
  Description of Artificial Sequence: Synthetic oligonucleotide
gaaacgauuacucagcuug

SEQ ID NO: 774058 - RNA, 19 nt, Artificial Sequence
  Description of Artificial Sequence: Synthetic oligonucleotide
uauugaugcauucagaccu

SEQ ID NO: 774059 - RNA, 19 nt, Artificial Sequence
  Description of Artificial Sequence: Synthetic oligonucleotide
ugcugaugcagaaugaccg

SEQ ID NO: 774060 - RNA, 19 nt, Artificial Sequence
  Description of Artificial Sequence: Synthetic oligonucleotide
aguucuaacccucagaggu

SEQ ID NO: 774061 - RNA, 19 nt, Artificial Sequence
  Description of Artificial Sequence: Synthetic oligonucleotide
uguaacacaucacucagca

SEQ ID NO: 774062 - RNA, 19 nt, Artificial Sequence
  Description of Artificial Sequence: Synthetic oligonucleotide
aauaauaucaaaacgccaa

SEQ ID NO: 774063 - RNA, 19 nt, Artificial Sequence
  Description of Artificial Sequence: Synthetic oligonucleotide
aauauaggagucugcaaug

SEQ ID NO: 774064 - RNA, 19 nt, Artificial Sequence
  Description of Artificial Sequence: Synthetic oligonucleotide
ucaucauacgggaagaaac

SEQ ID NO: 774065 - RNA, 19 nt, Artificial Sequence
  Description of Artificial Sequence: Synthetic oligonucleotide
uguaacguuggccaccagg

SEQ ID NO: 774066 - RNA, 19 nt, Artificial Sequence
  Description of Artificial Sequence: Synthetic oligonucleotide
uaauaauaucaaaacgcca

SEQ ID NO: 774067 - RNA, 19 nt, Artificial Sequence
  Description of Artificial Sequence: Synthetic oligonucleotide
uaccaugugagucuggucu

SEQ ID NO: 774068 - RNA, 19 nt, Artificial Sequence
  Description of Artificial Sequence: Synthetic oligonucleotide
uucugauuguuccacacca

SEQ ID NO: 774069 - RNA, 19 nt, Artificial Sequence
  Description of Artificial Sequence: Synthetic oligonucleotide
cuucaaucugccuuugugg

SEQ ID NO: 774070 - RNA, 19 nt, Artificial Sequence
  Description of Artificial Sequence: Synthetic oligonucleotide
aucuguagcacguuuuagg

SEQ ID NO: 774071 - RNA, 19 nt, Artificial Sequence
  Description of Artificial Sequence: Synthetic oligonucleotide
ugcagaaugaccgaaugcc

SEQ ID NO: 774072 - RNA, 19 nt, Artificial Sequence
  Description of Artificial Sequence: Synthetic oligonucleotide
acacuaguccacuucacgg

SEQ ID NO: 774073 - RNA, 19 nt, Artificial Sequence
  Description of Artificial Sequence: Synthetic oligonucleotide
aacgccaaaacaaagaguu

SEQ ID NO: 774074 - RNA, 19 nt, Artificial Sequence
  Description of Artificial Sequence: Synthetic oligonucleotide
aagagaggguugcucacac

SEQ ID NO: 774075 - RNA, 19 nt, Artificial Sequence
  Description of Artificial Sequence: Synthetic oligonucleotide
caucauacgggaagaaacg

SEQ ID NO: 774076 - RNA, 19 nt, Artificial Sequence
  Description of Artificial Sequence: Synthetic oligonucleotide
cuugaggguaaucaaagac

SEQ ID NO: 774077 - RNA, 19 nt, Artificial Sequence
  Description of Artificial Sequence: Synthetic oligonucleotide
acaacuuucaagggaacac

SEQ ID NO: 774078 - RNA, 19 nt, Artificial Sequence
  Description of Artificial Sequence: Synthetic oligonucleotide
uuaauggacuggaaguaug

SEQ ID NO: 774079 - RNA, 19 nt, Artificial Sequence
  Description of Artificial Sequence: Synthetic oligonucleotide
auacuugugauagaaagcu

SEQ ID NO: 774080 - RNA, 19 nt, Artificial Sequence
  Description of Artificial Sequence: Synthetic oligonucleotide
aaugaccgaaugccucugc

SEQ ID NO: 774081 - RNA, 19 nt, Artificial Sequence
  Description of Artificial Sequence: Synthetic oligonucleotide
uggaguuaccuuaaugaca

SEQ ID NO: 774082 - RNA, 19 nt, Artificial Sequence
  Description of Artificial Sequence: Synthetic oligonucleotide
ucggugaugacccggaaga

SEQ ID NO: 774083 - RNA, 19 nt, Artificial Sequence
  Description of Artificial Sequence: Synthetic oligonucleotide
auaaccaaacugcagcuca

SEQ ID NO: 774084 - RNA, 19 nt, Artificial Sequence
  Description of Artificial Sequence: Synthetic oligonucleotide
aacuggacaggcaagcuuc

SEQ ID NO: 774085 - RNA, 19 nt, Artificial Sequence
  Description of Artificial Sequence: Synthetic oligonucleotide
aaaggacacccuccgagag

SEQ ID NO: 774086 - RNA, 19 nt, Artificial Sequence
  Description of Artificial Sequence: Synthetic oligonucleotide
gaagaaacgauuacucagc

SEQ ID NO: 774087 - RNA, 19 nt, Artificial Sequence
  Description of Artificial Sequence: Synthetic oligonucleotide
aaagcugcacccgugagca

SEQ ID NO: 774088 - RNA, 19 nt, Artificial Sequence
  Description of Artificial Sequence: Synthetic oligonucleotide
ucuaggaccaacaccgacu

SEQ ID NO: 774089 - RNA, 19 nt, Artificial Sequence
  Description of Artificial Sequence: Synthetic oligonucleotide
acaaccgggacacagccag

SEQ ID NO: 774090 - RNA, 19 nt, Artificial Sequence
  Description of Artificial Sequence: Synthetic oligonucleotide
uuuugggccagagagauuc

SEQ ID NO: 774091 - RNA, 19 nt, Artificial Sequence
  Description of Artificial Sequence: Synthetic oligonucleotide
augcagaaugaccgaaugc

SEQ ID NO: 774092 - RNA, 19 nt, Artificial Sequence
  Description of Artificial Sequence: Synthetic oligonucleotide
ugcaggaugcuguacaugu

SEQ ID NO: 774093 - RNA, 19 nt, Artificial Sequence
  Description of Artificial Sequence: Synthetic oligonucleotide
gugauuuguuccucgaucc

SEQ ID NO: 774094 - RNA, 19 nt, Artificial Sequence
  Description of Artificial Sequence: Synthetic oligonucleotide
cacguuuuaggcuuggcug

SEQ ID NO: 774095 - RNA, 19 nt, Artificial Sequence
  Description of Artificial Sequence: Synthetic oligonucleotide
aagaaacgauuacucagcu

SEQ ID NO: 774096 - RNA, 19 nt, Artificial Sequence
  Description of Artificial Sequence: Synthetic oligonucleotide
uucaugugagcauccaccc

SEQ ID NO: 774097 - RNA, 19 nt, Artificial Sequence
  Description of Artificial Sequence: Synthetic oligonucleotide
gaugcagaaugaccgaaug

SEQ ID NO: 774098 - RNA, 19 nt, Artificial Sequence
  Description of Artificial Sequence: Synthetic oligonucleotide
uguagcacguuuuaggcuu

SEQ ID NO: 774099 - RNA, 19 nt, Artificial Sequence
  Description of Artificial Sequence: Synthetic oligonucleotide
auauggauagauccuguca

SEQ ID NO: 774100 - RNA, 19 nt, Artificial Sequence
  Description of Artificial Sequence: Synthetic oligonucleotide
uguucagggacugucagga

SEQ ID NO: 774101 - RNA, 19 nt, Artificial Sequence
  Description of Artificial Sequence: Synthetic oligonucleotide
gugauagaaagcugcaccc

SEQ ID NO: 774102 - RNA, 19 nt, Artificial Sequence
  Description of Artificial Sequence: Synthetic oligonucleotide
uuucaagggaacacgaauu

SEQ ID NO: 774103 - RNA, 19 nt, Artificial Sequence
  Description of Artificial Sequence: Synthetic oligonucleotide
uuggaguuaccuuaaugac

SEQ ID NO: 774104 - RNA, 19 nt, Artificial Sequence
  Description of Artificial Sequence: Synthetic oligonucleotide
cuuacaacuuucaagggaa

SEQ ID NO: 774105 - RNA, 19 nt, Artificial Sequence
  Description of Artificial Sequence: Synthetic oligonucleotide
uuuuaggcuuggcuguucc

SEQ ID NO: 774106 - RNA, 19 nt, Artificial Sequence
  Description of Artificial Sequence: Synthetic oligonucleotide
ggaguuaccuuaaugacag

SEQ ID NO: 774107 - RNA, 19 nt, Artificial Sequence
  Description of Artificial Sequence: Synthetic oligonucleotide
ugacaaccgggacacagcc

SEQ ID NO: 774108 - RNA, 19 nt, Artificial Sequence
  Description of Artificial Sequence: Synthetic oligonucleotide
ucuagugagagcccaucga

SEQ ID NO: 774109 - RNA, 19 nt, Artificial Sequence
  Description of Artificial Sequence: Synthetic oligonucleotide
gggaacacgaauuuugggc

SEQ ID NO: 774110 - RNA, 19 nt, Artificial Sequence
  Description of Artificial Sequence: Synthetic oligonucleotide
uacagguaauuaaaauacu

SEQ ID NO: 774111 - RNA, 19 nt, Artificial Sequence
  Description of Artificial Sequence: Synthetic oligonucleotide
ugauagaaagcugcacccg

SEQ ID NO: 774112 - RNA, 19 nt, Artificial Sequence
  Description of Artificial Sequence: Synthetic oligonucleotide
uggauggccaucugagagg

SEQ ID NO: 774113 - RNA, 19 nt, Artificial Sequence
  Description of Artificial Sequence: Synthetic oligonucleotide
aacaacgcccugucucugg

SEQ ID NO: 774114 - RNA, 19 nt, Artificial Sequence
  Description of Artificial Sequence: Synthetic oligonucleotide
cuugcggacagaaaggaca

SEQ ID NO: 774115 - RNA, 19 nt, Artificial Sequence
  Description of Artificial Sequence: Synthetic oligonucleotide
gaauauaggagucugcaau

SEQ ID NO: 774116 - RNA, 19 nt, Artificial Sequence
  Description of Artificial Sequence: Synthetic oligonucleotide
cacucagacucauacuucc

SEQ ID NO: 774117 - RNA, 19 nt, Artificial Sequence
  Description of Artificial Sequence: Synthetic oligonucleotide
aguuaccuuaaugacagcu

SEQ ID NO: 774118 - RNA, 19 nt, Artificial Sequence
  Description of Artificial Sequence: Synthetic oligonucleotide
aggaccaacaccgacucuc

SEQ ID NO: 774119 - RNA, 19 nt, Artificial Sequence
  Description of Artificial Sequence: Synthetic oligonucleotide
ugccgguaaguccaaguag

SEQ ID NO: 774120 - RNA, 19 nt, Artificial Sequence
  Description of Artificial Sequence: Synthetic oligonucleotide
cacgguaggaggaucauuc

SEQ ID NO: 774121 - RNA, 19 nt, Artificial Sequence
  Description of Artificial Sequence: Synthetic oligonucleotide
gguauugagaucuguagca

SEQ ID NO: 774122 - RNA, 19 nt, Artificial Sequence
  Description of Artificial Sequence: Synthetic oligonucleotide
agaaccaucgugccugucu

SEQ ID NO: 774123 - RNA, 19 nt, Artificial Sequence
  Description of Artificial Sequence: Synthetic oligonucleotide
ugauuuguuccucgauccc

SEQ ID NO: 774124 - RNA, 19 nt, Artificial Sequence
  Description of Artificial Sequence: Synthetic oligonucleotide
aguagaaaagccgccaccu

SEQ ID NO: 774125 - RNA, 19 nt, Artificial Sequence
  Description of Artificial Sequence: Synthetic oligonucleotide
uguuccucgaucccaccug

SEQ ID NO: 774126 - RNA, 19 nt, Artificial Sequence
  Description of Artificial Sequence: Synthetic oligonucleotide
agggaacacgaauuuuggg

SEQ ID NO: 774127 - RNA, 19 nt, Artificial Sequence
  Description of Artificial Sequence: Synthetic oligonucleotide
cacacuaguccacuucacg

SEQ ID NO: 774128 - RNA, 19 nt, Artificial Sequence
  Description of Artificial Sequence: Synthetic oligonucleotide
gguaaucaaagacuuggug

SEQ ID NO: 774129 - RNA, 19 nt, Artificial Sequence
  Description of Artificial Sequence: Synthetic oligonucleotide
aaagaguuguucagggacu

SEQ ID NO: 774130 - RNA, 19 nt, Artificial Sequence
  Description of Artificial Sequence: Synthetic oligonucleotide
accgccggggaccuggugc

SEQ ID NO: 774131 - RNA, 19 nt, Artificial Sequence
  Description of Artificial Sequence: Synthetic oligonucleotide
guaaguccaaguagaaaag

SEQ ID NO: 774132 - RNA, 19 nt, Artificial Sequence
  Description of Artificial Sequence: Synthetic oligonucleotide
uucaagggaacacgaauuu

SEQ ID NO: 774133 - RNA, 19 nt, Artificial Sequence
  Description of Artificial Sequence: Synthetic oligonucleotide
aucagcgggaggaagagag

SEQ ID NO: 774134 - RNA, 19 nt, Artificial Sequence
  Description of Artificial Sequence: Synthetic oligonucleotide
acgguaggaggaucauucc

SEQ ID NO: 774135 - RNA, 19 nt, Artificial Sequence
  Description of Artificial Sequence: Synthetic oligonucleotide
ucauacgggaagaaacgau

SEQ ID NO: 774136 - RNA, 19 nt, Artificial Sequence
  Description of Artificial Sequence: Synthetic oligonucleotide
cagggcaauggcuuuaaug

SEQ ID NO: 774137 - RNA, 19 nt, Artificial Sequence
  Description of Artificial Sequence: Synthetic oligonucleotide
uagugagagcccaucgaug

SEQ ID NO: 774138 - RNA, 19 nt, Artificial Sequence
  Description of Artificial Sequence: Synthetic oligonucleotide
uuuaauggacuggaaguau

SEQ ID NO: 774139 - RNA, 19 nt, Artificial Sequence
  Description of Artificial Sequence: Synthetic oligonucleotide
uuugugggauguucugcag

SEQ ID NO: 774140 - RNA, 19 nt, Artificial Sequence
  Description of Artificial Sequence: Synthetic oligonucleotide
uacgggaagaaacgauuac

SEQ ID NO: 774141 - RNA, 19 nt, Artificial Sequence
  Description of Artificial Sequence: Synthetic oligonucleotide
gucuagugagagcccaucg

SEQ ID NO: 774142 - RNA, 19 nt, Artificial Sequence
  Description of Artificial Sequence: Synthetic oligonucleotide
uacaacuuucaagggaaca

SEQ ID NO: 774143 - RNA, 19 nt, Artificial Sequence
  Description of Artificial Sequence: Synthetic oligonucleotide
gaugcauucagaccuuucu

SEQ ID NO: 774144 - RNA, 19 nt, Artificial Sequence
  Description of Artificial Sequence: Synthetic oligonucleotide
auuggugcacuugucuagg

SEQ ID NO: 774145 - RNA, 19 nt, Artificial Sequence
  Description of Artificial Sequence: Synthetic oligonucleotide
aagaguuguucagggacug

SEQ ID NO: 774146 - RNA, 19 nt, Artificial Sequence
  Description of Artificial Sequence: Synthetic oligonucleotide
acguuuuaggcuuggcugu

SEQ ID NO: 774147 - RNA, 19 nt, Artificial Sequence
  Description of Artificial Sequence: Synthetic oligonucleotide
aauggacuggaaguaugcu

SEQ ID NO: 774148 - RNA, 19 nt, Artificial Sequence
  Description of Artificial Sequence: Synthetic oligonucleotide
gaaaggacacccuccgaga

SEQ ID NO: 774149 - RNA, 19 nt, Artificial Sequence
  Description of Artificial Sequence: Synthetic oligonucleotide
gucugcaaugacaaccggg

SEQ ID NO: 774150 - RNA, 19 nt, Artificial Sequence
  Description of Artificial Sequence: Synthetic oligonucleotide
caucacucagcacugccug

SEQ ID NO: 774151 - RNA, 19 nt, Artificial Sequence
  Description of Artificial Sequence: Synthetic oligonucleotide
cauauggauagauccuguc

SEQ ID NO: 774152 - RNA, 19 nt, Artificial Sequence
  Description of Artificial Sequence: Synthetic oligonucleotide
gaaguaugcuucccagaac

SEQ ID NO: 774153 - RNA, 19 nt, Artificial Sequence
  Description of Artificial Sequence: Synthetic oligonucleotide
acccgugagcaccauggac

SEQ ID NO: 774154 - RNA, 19 nt, Artificial Sequence
  Description of Artificial Sequence: Synthetic oligonucleotide
gacagcgggcugaagacag

SEQ ID NO: 774155 - RNA, 19 nt, Artificial Sequence
  Description of Artificial Sequence: Synthetic oligonucleotide
cuaggaccaacaccgacuc

SEQ ID NO: 774156 - RNA, 19 nt, Artificial Sequence
  Description of Artificial Sequence: Synthetic oligonucleotide
ugaccgaaugccucugcug

SEQ ID NO: 774157 - RNA, 19 nt, Artificial Sequence
  Description of Artificial Sequence: Synthetic oligonucleotide
uuacaacuuucaagggaac

SEQ ID NO: 774158 - RNA, 19 nt, Artificial Sequence
  Description of Artificial Sequence: Synthetic oligonucleotide
ugucaggacgcaucuuggc

SEQ ID NO: 774159 - RNA, 19 nt, Artificial Sequence
  Description of Artificial Sequence: Synthetic oligonucleotide
ugagaucuguagcacguuu

SEQ ID NO: 774160 - RNA, 19 nt, Artificial Sequence
  Description of Artificial Sequence: Synthetic oligonucleotide
uuguuccucgaucccaccu

SEQ ID NO: 774161 - RNA, 19 nt, Artificial Sequence
  Description of Artificial Sequence: Synthetic oligonucleotide
guucuucugcuauguaccc

SEQ ID NO: 774162 - RNA, 19 nt, Artificial Sequence
  Description of Artificial Sequence: Synthetic oligonucleotide
ugaugcagaaugaccgaau

SEQ ID NO: 774163 - RNA, 19 nt, Artificial Sequence
  Description of Artificial Sequence: Synthetic oligonucleotide
augugagucuggucuagug

SEQ ID NO: 774164 - RNA, 19 nt, Artificial Sequence
  Description of Artificial Sequence: Synthetic oligonucleotide
ucaugugagcauccaccca

SEQ ID NO: 774165 - RNA, 19 nt, Artificial Sequence
  Description of Artificial Sequence: Synthetic oligonucleotide
agauuggugcacuugucua

SEQ ID NO: 774166 - RNA, 19 nt, Artificial Sequence
  Description of Artificial Sequence: Synthetic oligonucleotide
uagcccacuagccggucag

SEQ ID NO: 774167 - RNA, 19 nt, Artificial Sequence
  Description of Artificial Sequence: Synthetic oligonucleotide
agguauacagguaauuaaa

SEQ ID NO: 774168 - RNA, 19 nt, Artificial Sequence
  Description of Artificial Sequence: Synthetic oligonucleotide
gaaccaucgugccugucuc

SEQ ID NO: 774169 - RNA, 19 nt, Artificial Sequence
  Description of Artificial Sequence: Synthetic oligonucleotide
ugagagcccaucgauggcu

SEQ ID NO: 774170 - RNA, 19 nt, Artificial Sequence
  Description of Artificial Sequence: Synthetic oligonucleotide
gauagaaagcugcacccgu

SEQ ID NO: 774171 - RNA, 19 nt, Artificial Sequence
  Description of Artificial Sequence: Synthetic oligonucleotide
uggcggugaagccuuguga

SEQ ID NO: 774172 - RNA, 19 nt, Artificial Sequence
  Description of Artificial Sequence: Synthetic oligonucleotide
gacgcaucuuggcagccug

SEQ ID NO: 774173 - RNA, 19 nt, Artificial Sequence
  Description of Artificial Sequence: Synthetic oligonucleotide
ucgauggcugugcacucug

SEQ ID NO: 774174 - RNA, 19 nt, Artificial Sequence
  Description of Artificial Sequence: Synthetic oligonucleotide
gcaguguuauaaucugggg

SEQ ID NO: 774175 - RNA, 19 nt, Artificial Sequence
  Description of Artificial Sequence: Synthetic oligonucleotide
uguagguauacagguaauu

SEQ ID NO: 774176 - RNA, 19 nt, Artificial Sequence
  Description of Artificial Sequence: Synthetic oligonucleotide
gggagagccaccucgguug

SEQ ID NO: 774177 - RNA, 19 nt, Artificial Sequence
  Description of Artificial Sequence: Synthetic oligonucleotide
acgggaagaaacgauuacu

SEQ ID NO: 774178 - RNA, 19 nt, Artificial Sequence
  Description of Artificial Sequence: Synthetic oligonucleotide
acgaauuuugggccagaga

SEQ ID NO: 774179 - RNA, 19 nt, Artificial Sequence
  Description of Artificial Sequence: Synthetic oligonucleotide
gaagacggaagcaaacuua

SEQ ID NO: 774180 - RNA, 19 nt, Artificial Sequence
  Description of Artificial Sequence: Synthetic oligonucleotide
ggaaguaugcuucccagaa

SEQ ID NO: 774181 - RNA, 19 nt, Artificial Sequence
  Description of Artificial Sequence: Synthetic oligonucleotide
agaucuguagcacguuuua

SEQ ID NO: 774182 - RNA, 19 nt, Artificial Sequence
  Description of Artificial Sequence: Synthetic oligonucleotide
aaacgauuacucagcuugu

SEQ ID NO: 774183 - RNA, 19 nt, Artificial Sequence
  Description of Artificial Sequence: Synthetic oligonucleotide
guauugagaucuguagcac

SEQ ID NO: 774184 - RNA, 19 nt, Artificial Sequence
  Description of Artificial Sequence: Synthetic oligonucleotide
aucauacgggaagaaacga

SEQ ID NO: 774185 - RNA, 19 nt, Artificial Sequence
  Description of Artificial Sequence: Synthetic oligonucleotide
gaauuuugggccagagaga

SEQ ID NO: 774186 - RNA, 19 nt, Artificial Sequence
  Description of Artificial Sequence: Synthetic oligonucleotide
guagguauacagguaauua

SEQ ID NO: 774187 - RNA, 19 nt, Artificial Sequence
  Description of Artificial Sequence: Synthetic oligonucleotide
ucacacuaguccacuucac

SEQ ID NO: 774188 - RNA, 19 nt, Artificial Sequence
  Description of Artificial Sequence: Synthetic oligonucleotide
cacacggucauaggugagg

SEQ ID NO: 774189 - RNA, 19 nt, Artificial Sequence
  Description of Artificial Sequence: Synthetic oligonucleotide
uacucgggauggauggcca

SEQ ID NO: 774190 - RNA, 19 nt, Artificial Sequence
  Description of Artificial Sequence: Synthetic oligonucleotide
gacucauacuuccacuugu

SEQ ID NO: 774191 - RNA, 19 nt, Artificial Sequence
  Description of Artificial Sequence: Synthetic oligonucleotide
gcaaugacaaccgggacac

SEQ ID NO: 774192 - RNA, 19 nt, Artificial Sequence
  Description of Artificial Sequence: Synthetic oligonucleotide
ugggccagagagauucuuc

SEQ ID NO: 774193 - RNA, 19 nt, Artificial Sequence
  Description of Artificial Sequence: Synthetic oligonucleotide
cucggugaugacccggaag

SEQ ID NO: 774194 - RNA, 19 nt, Artificial Sequence
  Description of Artificial Sequence: Synthetic oligonucleotide
uucuaacccucagagguau

SEQ ID NO: 774195 - RNA, 19 nt, Artificial Sequence
  Description of Artificial Sequence: Synthetic oligonucleotide
acgauuacucagcuuguuu

SEQ ID NO: 774196 - RNA, 19 nt, Artificial Sequence
  Description of Artificial Sequence: Synthetic oligonucleotide
acuaguccacuucacggua

SEQ ID NO: 774197 - RNA, 19 nt, Artificial Sequence
  Description of Artificial Sequence: Synthetic oligonucleotide
gaugcgaagcgggcuuugg

SEQ ID NO: 774198 - RNA, 19 nt, Artificial Sequence
  Description of Artificial Sequence: Synthetic oligonucleotide
augcuguacaugucugaca

SEQ ID NO: 774199 - RNA, 19 nt, Artificial Sequence
  Description of Artificial Sequence: Synthetic oligonucleotide
uccucgaucccaccuggaa

SEQ ID NO: 774200 - RNA, 19 nt, Artificial Sequence
  Description of Artificial Sequence: Synthetic oligonucleotide
uuuaggcuuggcuguuccu

SEQ ID NO: 774201 - RNA, 19 nt, Artificial Sequence
  Description of Artificial Sequence: Synthetic oligonucleotide
ugcgaagcgggcuuugguu

SEQ ID NO: 774202 - RNA, 19 nt, Artificial Sequence
  Description of Artificial Sequence: Synthetic oligonucleotide
cuucacgguaggaggauca

SEQ ID NO: 774203 - RNA, 19 nt, Artificial Sequence
  Description of Artificial Sequence: Synthetic oligonucleotide
auagaaagcugcacccgug

SEQ ID NO: 774204 - RNA, 19 nt, Artificial Sequence
  Description of Artificial Sequence: Synthetic oligonucleotide
agcucaucggaggucagca

SEQ ID NO: 774205 - RNA, 19 nt, Artificial Sequence
  Description of Artificial Sequence: Synthetic oligonucleotide
ggcggugaagccuugugac

SEQ ID NO: 774206 - RNA, 19 nt, Artificial Sequence
  Description of Artificial Sequence: Synthetic oligonucleotide
auggcggugaagccuugug

SEQ ID NO: 774207 - RNA, 19 nt, Artificial Sequence
  Description of Artificial Sequence: Synthetic oligonucleotide
cuucugcuauguacccagg

SEQ ID NO: 774208 - RNA, 19 nt, Artificial Sequence
  Description of Artificial Sequence: Synthetic oligonucleotide
agaaacgauuacucagcuu

SEQ ID NO: 774209 - RNA, 19 nt, Artificial Sequence
  Description of Artificial Sequence: Synthetic oligonucleotide
gugacucggguccaagcac

SEQ ID NO: 774210 - RNA, 19 nt, Artificial Sequence
  Description of Artificial Sequence: Synthetic oligonucleotide
aaccaucgugccugucucu

SEQ ID NO: 774211 - RNA, 19 nt, Artificial Sequence
  Description of Artificial Sequence: Synthetic oligonucleotide
uacccaggauugugacucg

SEQ ID NO: 774212 - RNA, 19 nt, Artificial Sequence
  Description of Artificial Sequence: Synthetic oligonucleotide
acuucacgguaggaggauc

SEQ ID NO: 774213 - RNA, 19 nt, Artificial Sequence
  Description of Artificial Sequence: Synthetic oligonucleotide
cacuagccggucaggaaac

SEQ ID NO: 774214 - RNA, 19 nt, Artificial Sequence
  Description of Artificial Sequence: Synthetic oligonucleotide
guaacacaucacucagcac

SEQ ID NO: 774215 - RNA, 19 nt, Artificial Sequence
  Description of Artificial Sequence: Synthetic oligonucleotide
agcacguuuuaggcuuggc

SEQ ID NO: 774216 - RNA, 19 nt, Artificial Sequence
  Description of Artificial Sequence: Synthetic oligonucleotide
ucaagggaacacgaauuuu

SEQ ID NO: 774217 - RNA, 19 nt, Artificial Sequence
  Description of Artificial Sequence: Synthetic oligonucleotide
cuuucaagggaacacgaau

SEQ ID NO: 774218 - RNA, 19 nt, Artificial Sequence
  Description of Artificial Sequence: Synthetic oligonucleotide
gccaacaacgcccugucuc

SEQ ID NO: 774219 - RNA, 19 nt, Artificial Sequence
  Description of Artificial Sequence: Synthetic oligonucleotide
gaaugaccgaaugccucug

SEQ ID NO: 774220 - RNA, 19 nt, Artificial Sequence
  Description of Artificial Sequence: Synthetic oligonucleotide
ucggguccaagcacaguuc

SEQ ID NO: 774221 - RNA, 19 nt, Artificial Sequence
  Description of Artificial Sequence: Synthetic oligonucleotide
agagguauugagaucugua

SEQ ID NO: 774222 - RNA, 19 nt, Artificial Sequence
  Description of Artificial Sequence: Synthetic oligonucleotide
ucgggauggauggccaucu

SEQ ID NO: 774223 - RNA, 19 nt, Artificial Sequence
  Description of Artificial Sequence: Synthetic oligonucleotide
aacgauuacucagcuuguu

SEQ ID NO: 774224 - RNA, 19 nt, Artificial Sequence
  Description of Artificial Sequence: Synthetic oligonucleotide
guugcucacacuaguccac

SEQ ID NO: 774225 - RNA, 19 nt, Artificial Sequence
  Description of Artificial Sequence: Synthetic oligonucleotide
cccgccagaccucauaacc

SEQ ID NO: 774226 - RNA, 19 nt, Artificial Sequence
  Description of Artificial Sequence: Synthetic oligonucleotide
gggaccuccaggcaacaug

SEQ ID NO: 774227 - RNA, 19 nt, Artificial Sequence
  Description of Artificial Sequence: Synthetic oligonucleotide
aggugauuuguuccucgau

SEQ ID NO: 774228 - RNA, 19 nt, Artificial Sequence
  Description of Artificial Sequence: Synthetic oligonucleotide
gguauacagguaauuaaaa

SEQ ID NO: 774229 - RNA, 19 nt, Artificial Sequence
  Description of Artificial Sequence: Synthetic oligonucleotide
aagcgggcuuugguucagc

SEQ ID NO: 774230 - RNA, 19 nt, Artificial Sequence
  Description of Artificial Sequence: Synthetic oligonucleotide
aaucagcgggaggaagaga

SEQ ID NO: 774231 - RNA, 19 nt, Artificial Sequence
  Description of Artificial Sequence: Synthetic oligonucleotide
uuugggccagagagauucu

SEQ ID NO: 774232 - RNA, 19 nt, Artificial Sequence
  Description of Artificial Sequence: Synthetic oligonucleotide
cacgaauuuugggccagag

SEQ ID NO: 774233 - RNA, 19 nt, Artificial Sequence
  Description of Artificial Sequence: Synthetic oligonucleotide
ucgugccugucucugcauc

SEQ ID NO: 774234 - RNA, 19 nt, Artificial Sequence
  Description of Artificial Sequence: Synthetic oligonucleotide
cagggcaguguuauaaucu

SEQ ID NO: 774235 - RNA, 19 nt, Artificial Sequence
  Description of Artificial Sequence: Synthetic oligonucleotide
ccuuacaacuuucaaggga

SEQ ID NO: 774236 - RNA, 19 nt, Artificial Sequence
  Description of Artificial Sequence: Synthetic oligonucleotide
augcgaagcgggcuuuggu

SEQ ID NO: 774237 - RNA, 19 nt, Artificial Sequence
  Description of Artificial Sequence: Synthetic oligonucleotide
auacgggaagaaacgauua

SEQ ID NO: 774238 - RNA, 19 nt, Artificial Sequence
  Description of Artificial Sequence: Synthetic oligonucleotide
cuaccaugugagucugguc

SEQ ID NO: 774239 - RNA, 19 nt, Artificial Sequence
  Description of Artificial Sequence: Synthetic oligonucleotide
caccucgguugacagcggg

SEQ ID NO: 774240 - RNA, 19 nt, Artificial Sequence
  Description of Artificial Sequence: Synthetic oligonucleotide
aggacgcaucuuggcagcc

SEQ ID NO: 774241 - RNA, 19 nt, Artificial Sequence
  Description of Artificial Sequence: Synthetic oligonucleotide
cauacgggaagaaacgauu

SEQ ID NO: 774242 - RNA, 19 nt, Artificial Sequence
  Description of Artificial Sequence: Synthetic oligonucleotide
gacgcccucuuccagucaa

SEQ ID NO: 774243 - RNA, 19 nt, Artificial Sequence
  Description of Artificial Sequence: Synthetic oligonucleotide
uagcacguuuuaggcuugg

SEQ ID NO: 774244 - RNA, 19 nt, Artificial Sequence
  Description of Artificial Sequence: Synthetic oligonucleotide
gaccaacaccgacucucug

SEQ ID NO: 774245 - RNA, 19 nt, Artificial Sequence
  Description of Artificial Sequence: Synthetic oligonucleotide
cucuguguuuggccuggag

SEQ ID NO: 774246 - RNA, 19 nt, Artificial Sequence
  Description of Artificial Sequence: Synthetic oligonucleotide
ccgagcuccucgaaggacc

SEQ ID NO: 774247 - RNA, 19 nt, Artificial Sequence
  Description of Artificial Sequence: Synthetic oligonucleotide
gaggguugcucacacuagu

SEQ ID NO: 774248 - RNA, 19 nt, Artificial Sequence
  Description of Artificial Sequence: Synthetic oligonucleotide
agcgggcuuugguucagca

SEQ ID NO: 774249 - RNA, 19 nt, Artificial Sequence
  Description of Artificial Sequence: Synthetic oligonucleotide
gagagcccaucgauggcug

SEQ ID NO: 774250 - RNA, 19 nt, Artificial Sequence
  Description of Artificial Sequence: Synthetic oligonucleotide
gagcccaucgauggcugug

SEQ ID NO: 774251 - RNA, 19 nt, Artificial Sequence
  Description of Artificial Sequence: Synthetic oligonucleotide
uuccucgaucccaccugga

SEQ ID NO: 774252 - RNA, 19 nt, Artificial Sequence
  Description of Artificial Sequence: Synthetic oligonucleotide
uggucuagugagagcccau

SEQ ID NO: 774253 - RNA, 19 nt, Artificial Sequence
  Description of Artificial Sequence: Synthetic oligonucleotide
caacgcccugucucugggg

SEQ ID NO: 774254 - RNA, 19 nt, Artificial Sequence
  Description of Artificial Sequence: Synthetic oligonucleotide
caucgugccugucucugca

SEQ ID NO: 774255 - RNA, 19 nt, Artificial Sequence
  Description of Artificial Sequence: Synthetic oligonucleotide
ugccaacaacgcccugucu

SEQ ID NO: 774256 - RNA, 19 nt, Artificial Sequence
  Description of Artificial Sequence: Synthetic oligonucleotide
ugaugcgaagcgggcuuug

SEQ ID NO: 774257 - RNA, 19 nt, Artificial Sequence
  Description of Artificial Sequence: Synthetic oligonucleotide
gcagaauauaggagucugc

SEQ ID NO: 774258 - RNA, 19 nt, Artificial Sequence
  Description of Artificial Sequence: Synthetic oligonucleotide
uaggaccaacaccgacucu

SEQ ID NO: 774259 - RNA, 19 nt, Artificial Sequence
  Description of Artificial Sequence: Synthetic oligonucleotide
cauaggagauggcugcaua

SEQ ID NO: 774260 - RNA, 19 nt, Artificial Sequence
  Description of Artificial Sequence: Synthetic oligonucleotide
caggugauuuguuccucga

SEQ ID NO: 774261 - RNA, 19 nt, Artificial Sequence
  Description of Artificial Sequence: Synthetic oligonucleotide
cuccgggaccaccacggac

SEQ ID NO: 774262 - RNA, 19 nt, Artificial Sequence
  Description of Artificial Sequence: Synthetic oligonucleotide
gccgguaaguccaaguaga

SEQ ID NO: 774263 - RNA, 19 nt, Artificial Sequence
  Description of Artificial Sequence: Synthetic oligonucleotide
cacuaguccacuucacggu

SEQ ID NO: 774264 - RNA, 19 nt, Artificial Sequence
  Description of Artificial Sequence: Synthetic oligonucleotide
gguccaagcacaguucuaa

SEQ ID NO: 774265 - RNA, 19 nt, Artificial Sequence
  Description of Artificial Sequence: Synthetic oligonucleotide
gccaccugccaacaacgcc

SEQ ID NO: 774266 - RNA, 19 nt, Artificial Sequence
  Description of Artificial Sequence: Synthetic oligonucleotide
ccgccaccugccaacaacg

SEQ ID NO: 774267 - RNA, 19 nt, Artificial Sequence
  Description of Artificial Sequence: Synthetic oligonucleotide
cacggucauaggugaggac

SEQ ID NO: 774268 - RNA, 19 nt, Artificial Sequence
  Description of Artificial Sequence: Synthetic oligonucleotide
uccugucauugaugaucug

SEQ ID NO: 774269 - RNA, 19 nt, Artificial Sequence
  Description of Artificial Sequence: Synthetic oligonucleotide
uucacgguaggaggaucau

SEQ ID NO: 774270 - RNA, 19 nt, Artificial Sequence
  Description of Artificial Sequence: Synthetic oligonucleotide
aucgauggcugugcacucu

SEQ ID NO: 774271 - RNA, 19 nt, Artificial Sequence
  Description of Artificial Sequence: Synthetic oligonucleotide
ucccgccagaccucauaac

SEQ ID NO: 774272 - RNA, 19 nt, Artificial Sequence
  Description of Artificial Sequence: Synthetic oligonucleotide
gcgaagcgggcuuugguuc

SEQ ID NO: 774273 - RNA, 19 nt, Artificial Sequence
  Description of Artificial Sequence: Synthetic oligonucleotide
cccgaagacggaagcaaac

SEQ ID NO: 774274 - RNA, 19 nt, Artificial Sequence
  Description of Artificial Sequence: Synthetic oligonucleotide
cugccgguaaguccaagua

SEQ ID NO: 774275 - RNA, 19 nt, Artificial Sequence
  Description of Artificial Sequence: Synthetic oligonucleotide
ccagggcaguguuauaauc

SEQ ID NO: 774276 - RNA, 19 nt, Artificial Sequence
  Description of Artificial Sequence: Synthetic oligonucleotide
caaccgggacacagccagc

SEQ ID NO: 774277 - RNA, 19 nt, Artificial Sequence
  Description of Artificial Sequence: Synthetic oligonucleotide
cuguagcacguuuuaggcu

SEQ ID NO: 774278 - RNA, 19 nt, Artificial Sequence
  Description of Artificial Sequence: Synthetic oligonucleotide
cugaugcagaaugaccgaa

SEQ ID NO: 774279 - RNA, 19 nt, Artificial Sequence
  Description of Artificial Sequence: Synthetic oligonucleotide
aucugccuuugugggaugu

SEQ ID NO: 774280 - RNA, 19 nt, Artificial Sequence
  Description of Artificial Sequence: Synthetic oligonucleotide
cacggacgcccucuuccag

SEQ ID NO: 774281 - RNA, 19 nt, Artificial Sequence
  Description of Artificial Sequence: Synthetic oligonucleotide
cugcuauguacccaggauu

SEQ ID NO: 774282 - RNA, 19 nt, Artificial Sequence
  Description of Artificial Sequence: Synthetic oligonucleotide
guagcccacuagccgguca

SEQ ID NO: 774283 - RNA, 19 nt, Artificial Sequence
  Description of Artificial Sequence: Synthetic oligonucleotide
cagacucauacuuccacuu

SEQ ID NO: 774284 - RNA, 19 nt, Artificial Sequence
  Description of Artificial Sequence: Synthetic oligonucleotide
guagcacuugaggguaauc

SEQ ID NO: 774285 - RNA, 19 nt, Artificial Sequence
  Description of Artificial Sequence: Synthetic oligonucleotide
ccacucagacucauacuuc

SEQ ID NO: 774286 - RNA, 19 nt, Artificial Sequence
  Description of Artificial Sequence: Synthetic oligonucleotide
auggcugcauauggauaga

SEQ ID NO: 774287 - RNA, 19 nt, Artificial Sequence
  Description of Artificial Sequence: Synthetic oligonucleotide
ucucuguacucgggaugga

SEQ ID NO: 774288 - RNA, 19 nt, Artificial Sequence
  Description of Artificial Sequence: Synthetic oligonucleotide
gacaaccgggacacagcca

SEQ ID NO: 774289 - RNA, 19 nt, Artificial Sequence
  Description of Artificial Sequence: Synthetic oligonucleotide
cucgggauggauggccauc

SEQ ID NO: 774290 - RNA, 19 nt, Artificial Sequence
  Description of Artificial Sequence: Synthetic oligonucleotide
cucggguccaagcacaguu

SEQ ID NO: 774291 - RNA, 19 nt, Artificial Sequence
  Description of Artificial Sequence: Synthetic oligonucleotide
acgauggcggugaagccuu

SEQ ID NO: 774292 - RNA, 19 nt, Artificial Sequence
  Description of Artificial Sequence: Synthetic oligonucleotide
guucuaacccucagaggua

SEQ ID NO: 774293 - RNA, 19 nt, Artificial Sequence
  Description of Artificial Sequence: Synthetic oligonucleotide
uugaugcgaagcgggcuuu

SEQ ID NO: 774294 - RNA, 19 nt, Artificial Sequence
  Description of Artificial Sequence: Synthetic oligonucleotide
gccgccaccugccaacaac

SEQ ID NO: 774295 - RNA, 19 nt, Artificial Sequence
  Description of Artificial Sequence: Synthetic oligonucleotide
gcacguuuuaggcuuggcu

SEQ ID NO: 774296 - RNA, 19 nt, Artificial Sequence
  Description of Artificial Sequence: Synthetic oligonucleotide
ggcuuggcuguuccuccag

SEQ ID NO: 774297 - RNA, 19 nt, Artificial Sequence
  Description of Artificial Sequence: Synthetic oligonucleotide
guugaacagcaggugauuu

SEQ ID NO: 774298 - RNA, 19 nt, Artificial Sequence
  Description of Artificial Sequence: Synthetic oligonucleotide
ggucuagugagagcccauc

SEQ ID NO: 774299 - RNA, 19 nt, Artificial Sequence
  Description of Artificial Sequence: Synthetic oligonucleotide
ccacuagccggucaggaaa

SEQ ID NO: 774300 - RNA, 19 nt, Artificial Sequence
  Description of Artificial Sequence: Synthetic oligonucleotide
ccucagagguauugagauc

SEQ ID NO: 774301 - RNA, 19 nt, Artificial Sequence
  Description of Artificial Sequence: Synthetic oligonucleotide
gacaccucauugguccacu

SEQ ID NO: 774302 - RNA, 19 nt, Artificial Sequence
  Description of Artificial Sequence: Synthetic oligonucleotide
caguucaugugagcaucca

SEQ ID NO: 774303 - RNA, 19 nt, Artificial Sequence
  Description of Artificial Sequence: Synthetic oligonucleotide
ggaccuccaggcaacaugu

SEQ ID NO: 774304 - RNA, 19 nt, Artificial Sequence
  Description of Artificial Sequence: Synthetic oligonucleotide
uaccgccggggaccuggug

SEQ ID NO: 774305 - RNA, 19 nt, Artificial Sequence
  Description of Artificial Sequence: Synthetic oligonucleotide
ccaucgugccugucucugc

SEQ ID NO: 774306 - RNA, 19 nt, Artificial Sequence
  Description of Artificial Sequence: Synthetic oligonucleotide
cagcgggcugaagacagga

SEQ ID NO: 774307 - RNA, 19 nt, Artificial Sequence
  Description of Artificial Sequence: Synthetic oligonucleotide
agcugccgauguugggaaa

SEQ ID NO: 774308 - RNA, 19 nt, Artificial Sequence
  Description of Artificial Sequence: Synthetic oligonucleotide
ccuccgagagauuggugca

SEQ ID NO: 774309 - RNA, 19 nt, Artificial Sequence
  Description of Artificial Sequence: Synthetic oligonucleotide
ccaugugagucuggucuag

SEQ ID NO: 774310 - RNA, 19 nt, Artificial Sequence
  Description of Artificial Sequence: Synthetic oligonucleotide
gaaguaccgccggggaccu

SEQ ID NO: 774311 - RNA, 19 nt, Artificial Sequence
  Description of Artificial Sequence: Synthetic oligonucleotide
cuguaacguuggccaccag

SEQ ID NO: 774312 - RNA, 19 nt, Artificial Sequence
  Description of Artificial Sequence: Synthetic oligonucleotide
ccgccagaccucauaacca

SEQ ID NO: 774313 - RNA, 19 nt, Artificial Sequence
  Description of Artificial Sequence: Synthetic oligonucleotide
gcagaaugaccgaaugccu

SEQ ID NO: 774314 - RNA, 19 nt, Artificial Sequence
  Description of Artificial Sequence: Synthetic oligonucleotide
ccaacaacgcccugucucu

SEQ ID NO: 774315 - RNA, 19 nt, Artificial Sequence
  Description of Artificial Sequence: Synthetic oligonucleotide
ccucgaucccaccuggaaa

SEQ ID NO: 774316 - RNA, 19 nt, Artificial Sequence
  Description of Artificial Sequence: Synthetic oligonucleotide
ugauguccccaggcauuuu

SEQ ID NO: 774317 - RNA, 19 nt, Artificial Sequence
  Description of Artificial Sequence: Synthetic oligonucleotide
cacccgugagcaccaugga

SEQ ID NO: 774318 - RNA, 19 nt, Artificial Sequence
  Description of Artificial Sequence: Synthetic oligonucleotide
acgcccucuuccagucaag

SEQ ID NO: 774319 - RNA, 19 nt, Artificial Sequence
  Description of Artificial Sequence: Synthetic oligonucleotide
acccuccgagagauuggug

SEQ ID NO: 774320 - RNA, 19 nt, Artificial Sequence
  Description of Artificial Sequence: Synthetic oligonucleotide
ccuguaacguuggccacca

SEQ ID NO: 774321 - RNA, 19 nt, Artificial Sequence
  Description of Artificial Sequence: Synthetic oligonucleotide
acgcaucuuggcagccugu

SEQ ID NO: 774322 - RNA, 19 nt, Artificial Sequence
  Description of Artificial Sequence: Synthetic oligonucleotide
cgauuacucagcuuguuuu

SEQ ID NO: 774323 - RNA, 19 nt, Artificial Sequence
  Description of Artificial Sequence: Synthetic oligonucleotide
ggaucagcucggugcucca

SEQ ID NO: 774324 - RNA, 19 nt, Artificial Sequence
  Description of Artificial Sequence: Synthetic oligonucleotide
ccgguaaguccaaguagaa

SEQ ID NO: 774325 - RNA, 19 nt, Artificial Sequence
  Description of Artificial Sequence: Synthetic oligonucleotide
aaguaccgccggggaccug

SEQ ID NO: 774326 - RNA, 19 nt, Artificial Sequence
  Description of Artificial Sequence: Synthetic oligonucleotide
ccgggaccaccacggacgc

SEQ ID NO: 774327 - RNA, 19 nt, Artificial Sequence
  Description of Artificial Sequence: Synthetic oligonucleotide
gccgagcuccucgaaggac

SEQ ID NO: 774328 - RNA, 19 nt, Artificial Sequence
  Description of Artificial Sequence: Synthetic oligonucleotide
caugugagucuggucuagu

SEQ ID NO: 774329 - RNA, 19 nt, Artificial Sequence
  Description of Artificial Sequence: Synthetic oligonucleotide
cucuguacucgggauggau

SEQ ID NO: 774330 - RNA, 19 nt, Artificial Sequence
  Description of Artificial Sequence: Synthetic oligonucleotide
gguugacagcgggcugaag

SEQ ID NO: 774331 - RNA, 19 nt, Artificial Sequence
  Description of Artificial Sequence: Synthetic oligonucleotide
ccaccucgguugacagcgg

SEQ ID NO: 774332 - RNA, 19 nt, Artificial Sequence
  Description of Artificial Sequence: Synthetic oligonucleotide
cagaaccaucgugccuguc

SEQ ID NO: 774333 - RNA, 19 nt, Artificial Sequence
  Description of Artificial Sequence: Synthetic oligonucleotide
gcggugaagccuugugacu

SEQ ID NO: 774334 - RNA, 19 nt, Artificial Sequence
  Description of Artificial Sequence: Synthetic oligonucleotide
cagcgcuugcggacagaaa

SEQ ID NO: 774335 - RNA, 19 nt, Artificial Sequence
  Description of Artificial Sequence: Synthetic oligonucleotide
aacucccgccagaccucau

SEQ ID NO: 774336 - RNA, 19 nt, Artificial Sequence
  Description of Artificial Sequence: Synthetic oligonucleotide
ccugccgguaaguccaagu

SEQ ID NO: 774337 - RNA, 19 nt, Artificial Sequence
  Description of Artificial Sequence: Synthetic oligonucleotide
ggaccaacaccgacucucu

SEQ ID NO: 774338 - RNA, 19 nt, Artificial Sequence
  Description of Artificial Sequence: Synthetic oligonucleotide
ccgaagacggaagcaaacu

SEQ ID NO: 774339 - RNA, 19 nt, Artificial Sequence
  Description of Artificial Sequence: Synthetic oligonucleotide
cggacgcccucuuccaguc

SEQ ID NO: 774340 - RNA, 19 nt, Artificial Sequence
  Description of Artificial Sequence: Synthetic oligonucleotide
cacuucacgguaggaggau

SEQ ID NO: 774341 - RNA, 19 nt, Artificial Sequence
  Description of Artificial Sequence: Synthetic oligonucleotide
gcauggucccgaagacgga

SEQ ID NO: 774342 - RNA, 19 nt, Artificial Sequence
  Description of Artificial Sequence: Synthetic oligonucleotide
gacugucaggacgcaucuu

SEQ ID NO: 774343 - RNA, 19 nt, Artificial Sequence
  Description of Artificial Sequence: Synthetic oligonucleotide
ggguccaagcacaguucua

SEQ ID NO: 774344 - RNA, 19 nt, Artificial Sequence
  Description of Artificial Sequence: Synthetic oligonucleotide
gcucaucggaggucagcau

SEQ ID NO: 774345 - RNA, 19 nt, Artificial Sequence
  Description of Artificial Sequence: Synthetic oligonucleotide
ggacgcaucuuggcagccu

SEQ ID NO: 774346 - RNA, 19 nt, Artificial Sequence
  Description of Artificial Sequence: Synthetic oligonucleotide
ccccaggcauuuuguaggu

SEQ ID NO: 774347 - RNA, 19 nt, Artificial Sequence
  Description of Artificial Sequence: Synthetic oligonucleotide
caucggaggucagcaugau

SEQ ID NO: 774348 - RNA, 19 nt, Artificial Sequence
  Description of Artificial Sequence: Synthetic oligonucleotide
guaccgccggggaccuggu

SEQ ID NO: 774349 - RNA, 19 nt, Artificial Sequence
  Description of Artificial Sequence: Synthetic oligonucleotide
ccgccggggaccuggugcu

SEQ ID NO: 774350 - RNA, 19 nt, Artificial Sequence
  Description of Artificial Sequence: Synthetic oligonucleotide
cgaucccaccuggaaagcu

SEQ ID NO: 774351 - RNA, 19 nt, Artificial Sequence
  Description of Artificial Sequence: Synthetic oligonucleotide
ccgagagauuggugcacuu

SEQ ID NO: 774352 - RNA, 19 nt, Artificial Sequence
  Description of Artificial Sequence: Synthetic oligonucleotide
gcccugccgguaaguccaa

SEQ ID NO: 774353 - RNA, 19 nt, Artificial Sequence
  Description of Artificial Sequence: Synthetic oligonucleotide
cugcacccgugagcaccau

SEQ ID NO: 774354 - RNA, 19 nt, Artificial Sequence
  Description of Artificial Sequence: Synthetic oligonucleotide
ccaccacggacgcccucuu

SEQ ID NO: 774355 - RNA, 19 nt, Artificial Sequence
  Description of Artificial Sequence: Synthetic oligonucleotide
aauaguuggaaccuuuagc

SEQ ID NO: 774356 - RNA, 19 nt, Artificial Sequence
  Description of Artificial Sequence: Synthetic oligonucleotide
aacacgacaguauaaaggg

SEQ ID NO: 774357 - RNA, 19 nt, Artificial Sequence
  Description of Artificial Sequence: Synthetic oligonucleotide
uuagagaaaauuuaacagg

SEQ ID NO: 774358 - RNA, 19 nt, Artificial Sequence
  Description of Artificial Sequence: Synthetic oligonucleotide
uagauaguuaauaaaauca

SEQ ID NO: 774359 - RNA, 19 nt, Artificial Sequence
  Description of Artificial Sequence: Synthetic oligonucleotide
uuuaacaggauucagagua

SEQ ID NO: 774360 - RNA, 19 nt, Artificial Sequence
  Description of Artificial Sequence: Synthetic oligonucleotide
aauaaagugauccccucuc

SEQ ID NO: 774361 - RNA, 19 nt, Artificial Sequence
  Description of Artificial Sequence: Synthetic oligonucleotide
aacucgacuagcaugaggc

SEQ ID NO: 774362 - RNA, 19 nt, Artificial Sequence
  Description of Artificial Sequence: Synthetic oligonucleotide
aucuuuaucacuaaugaac

SEQ ID NO: 774363 - RNA, 19 nt, Artificial Sequence
  Description of Artificial Sequence: Synthetic oligonucleotide
uauuuuaaggguuggguag

SEQ ID NO: 774364 - RNA, 19 nt, Artificial Sequence
  Description of Artificial Sequence: Synthetic oligonucleotide
uuguagauaguuaauaaaa

SEQ ID NO: 774365 - RNA, 19 nt, Artificial Sequence
  Description of Artificial Sequence: Synthetic oligonucleotide
uuuacggcuagcuacagca

SEQ ID NO: 774366 - RNA, 19 nt, Artificial Sequence
  Description of Artificial Sequence: Synthetic oligonucleotide
aaacacgacaguauaaagg

SEQ ID NO: 774367 - RNA, 19 nt, Artificial Sequence
  Description of Artificial Sequence: Synthetic oligonucleotide
auaguuggaaccuuuagca

SEQ ID NO: 774368 - RNA, 19 nt, Artificial Sequence
  Description of Artificial Sequence: Synthetic oligonucleotide
aguauauccauucuguccu

SEQ ID NO: 774369 - RNA, 19 nt, Artificial Sequence
  Description of Artificial Sequence: Synthetic oligonucleotide
uuugacuucauauggagaa

SEQ ID NO: 774370 - RNA, 19 nt, Artificial Sequence
  Description of Artificial Sequence: Synthetic oligonucleotide
guaguuaucucucaaguug

SEQ ID NO: 774371 - RNA, 19 nt, Artificial Sequence
  Description of Artificial Sequence: Synthetic oligonucleotide
ugugaaggacgaaauaaag

SEQ ID NO: 774372 - RNA, 19 nt, Artificial Sequence
  Description of Artificial Sequence: Synthetic oligonucleotide
ucaaccuuugcuaauggga

SEQ ID NO: 774373 - RNA, 19 nt, Artificial Sequence
  Description of Artificial Sequence: Synthetic oligonucleotide
auucagaguauauccauuc

SEQ ID NO: 774374 - RNA, 19 nt, Artificial Sequence
  Description of Artificial Sequence: Synthetic oligonucleotide
acgaaauaaagugaucccc

SEQ ID NO: 774375 - RNA, 19 nt, Artificial Sequence
  Description of Artificial Sequence: Synthetic oligonucleotide
acucucgaaguuuucgucc

SEQ ID NO: 774376 - RNA, 19 nt, Artificial Sequence
  Description of Artificial Sequence: Synthetic oligonucleotide
aaccuugacaggcccaucg

SEQ ID NO: 774377 - RNA, 19 nt, Artificial Sequence
  Description of Artificial Sequence: Synthetic oligonucleotide
uguagauaguuaauaaaau

SEQ ID NO: 774378 - RNA, 19 nt, Artificial Sequence
  Description of Artificial Sequence: Synthetic oligonucleotide
auagucaacaucauaguag

SEQ ID NO: 774379 - RNA, 19 nt, Artificial Sequence
  Description of Artificial Sequence: Synthetic oligonucleotide
aaaguggcgcauuuggcug

SEQ ID NO: 774380 - RNA, 19 nt, Artificial Sequence
  Description of Artificial Sequence: Synthetic oligonucleotide
gucauaugaggacagauac

SEQ ID NO: 774381 - RNA, 19 nt, Artificial Sequence
  Description of Artificial Sequence: Synthetic oligonucleotide
aaguagaugguaggaaaac

SEQ ID NO: 774382 - RNA, 19 nt, Artificial Sequence
  Description of Artificial Sequence: Synthetic oligonucleotide
aguagaugguaggaaaacc

SEQ ID NO: 774383 - RNA, 19 nt, Artificial Sequence
  Description of Artificial Sequence: Synthetic oligonucleotide
cuucaaacuuguuagcaag

SEQ ID NO: 774384 - RNA, 19 nt, Artificial Sequence
  Description of Artificial Sequence: Synthetic oligonucleotide
uguuagcaagaugugaagg

SEQ ID NO: 774385 - RNA, 19 nt, Artificial Sequence
  Description of Artificial Sequence: Synthetic oligonucleotide
guagauaguuaauaaaauc

SEQ ID NO: 774386 - RNA, 19 nt, Artificial Sequence
  Description of Artificial Sequence: Synthetic oligonucleotide
aaugggacuauuccuuuca

SEQ ID NO: 774387 - RNA, 19 nt, Artificial Sequence
  Description of Artificial Sequence: Synthetic oligonucleotide
gauugcuacaacaggaacc

SEQ ID NO: 774388 - RNA, 19 nt, Artificial Sequence
  Description of Artificial Sequence: Synthetic oligonucleotide
uggauuuagcuucuuguug

SEQ ID NO: 774389 - RNA, 19 nt, Artificial Sequence
  Description of Artificial Sequence: Synthetic oligonucleotide
ggauuuagcuucuuguugg

SEQ ID NO: 774390 - RNA, 19 nt, Artificial Sequence
  Description of Artificial Sequence: Synthetic oligonucleotide
uuuagagguccucuugugc

SEQ ID NO: 774391 - RNA, 19 nt, Artificial Sequence
  Description of Artificial Sequence: Synthetic oligonucleotide
acuaaugaacuucuuaaau

SEQ ID NO: 774392 - RNA, 19 nt, Artificial Sequence
  Description of Artificial Sequence: Synthetic oligonucleotide
uuaucuucauuauucacua

SEQ ID NO: 774393 - RNA, 19 nt, Artificial Sequence
  Description of Artificial Sequence: Synthetic oligonucleotide
uguaaguaaguccuugcuc

SEQ ID NO: 774394 - RNA, 19 nt, Artificial Sequence
  Description of Artificial Sequence: Synthetic oligonucleotide
gacgaaauaaagugauccc

SEQ ID NO: 774395 - RNA, 19 nt, Artificial Sequence
  Description of Artificial Sequence: Synthetic oligonucleotide
gugaaaaguagaugguagg

SEQ ID NO: 774396 - RNA, 19 nt, Artificial Sequence
  Description of Artificial Sequence: Synthetic oligonucleotide
agcgcuaggcggcugaagc

SEQ ID NO: 774397 - RNA, 19 nt, Artificial Sequence
  Description of Artificial Sequence: Synthetic oligonucleotide
ucaaguggcugacaauucc

SEQ ID NO: 774398 - RNA, 19 nt, Artificial Sequence
  Description of Artificial Sequence: Synthetic oligonucleotide
caguucuuuauauuugggc

SEQ ID NO: 774399 - RNA, 19 nt, Artificial Sequence
  Description of Artificial Sequence: Synthetic oligonucleotide
ucuucugucauaugaggac

SEQ ID NO: 774400 - RNA, 19 nt, Artificial Sequence
  Description of Artificial Sequence: Synthetic oligonucleotide
auuuuaaggguuggguagc

SEQ ID NO: 774401 - RNA, 19 nt, Artificial Sequence
  Description of Artificial Sequence: Synthetic oligonucleotide
aaagguuuuacggcuagcu

SEQ ID NO: 774402 - RNA, 19 nt, Artificial Sequence
  Description of Artificial Sequence: Synthetic oligonucleotide
cauggcuaaagguuuuacg

SEQ ID NO: 774403 - RNA, 19 nt, Artificial Sequence
  Description of Artificial Sequence: Synthetic oligonucleotide
agaguauauccauucuguc

SEQ ID NO: 774404 - RNA, 19 nt, Artificial Sequence
  Description of Artificial Sequence: Synthetic oligonucleotide
uguagcuucucguuguaga

SEQ ID NO: 774405 - RNA, 19 nt, Artificial Sequence
  Description of Artificial Sequence: Synthetic oligonucleotide
aagaacucgacuagcauga

SEQ ID NO: 774406 - RNA, 19 nt, Artificial Sequence
  Description of Artificial Sequence: Synthetic oligonucleotide
ucaaucuaguugcugcagc

SEQ ID NO: 774407 - RNA, 19 nt, Artificial Sequence
  Description of Artificial Sequence: Synthetic oligonucleotide
ugaaaaguagaugguagga

SEQ ID NO: 774408 - RNA, 19 nt, Artificial Sequence
  Description of Artificial Sequence: Synthetic oligonucleotide
ucucguuguagauaguuaa

SEQ ID NO: 774409 - RNA, 19 nt, Artificial Sequence
  Description of Artificial Sequence: Synthetic oligonucleotide
uucauauggagaaggcaca

SEQ ID NO: 774410 - RNA, 19 nt, Artificial Sequence
  Description of Artificial Sequence: Synthetic oligonucleotide
uccuaggcccaucauaagc

SEQ ID NO: 774411 - RNA, 19 nt, Artificial Sequence
  Description of Artificial Sequence: Synthetic oligonucleotide
uuucauaaacagugcagcu

SEQ ID NO: 774412 - RNA, 19 nt, Artificial Sequence
  Description of Artificial Sequence: Synthetic oligonucleotide
uuuaggaauucagagugac

SEQ ID NO: 774413 - RNA, 19 nt, Artificial Sequence
  Description of Artificial Sequence: Synthetic oligonucleotide
uuccacgagggaaaacacg

SEQ ID NO: 774414 - RNA, 19 nt, Artificial Sequence
  Description of Artificial Sequence: Synthetic oligonucleotide
auuuaauucacggccaccu

SEQ ID NO: 774415 - RNA, 19 nt, Artificial Sequence
  Description of Artificial Sequence: Synthetic oligonucleotide
uuaaggguuggguagccac

SEQ ID NO: 774416 - RNA, 19 nt, Artificial Sequence
  Description of Artificial Sequence: Synthetic oligonucleotide
caucauaguaggcuguaag

SEQ ID NO: 774417 - RNA, 19 nt, Artificial Sequence
  Description of Artificial Sequence: Synthetic oligonucleotide
guaggcuguaaguaagucc

SEQ ID NO: 774418 - RNA, 19 nt, Artificial Sequence
  Description of Artificial Sequence: Synthetic oligonucleotide
uucaaacuuguuagcaaga

SEQ ID NO: 774419 - RNA, 19 nt, Artificial Sequence
  Description of Artificial Sequence: Synthetic oligonucleotide
caaccuuugcuaaugggac

SEQ ID NO: 774420 - RNA, 19 nt, Artificial Sequence
  Description of Artificial Sequence: Synthetic oligonucleotide
gaugguaggaaaaccuuug

SEQ ID NO: 774421 - RNA, 19 nt, Artificial Sequence
  Description of Artificial Sequence: Synthetic oligonucleotide
aucaaccuuugcuaauggg

SEQ ID NO: 774422 - RNA, 19 nt, Artificial Sequence
  Description of Artificial Sequence: Synthetic oligonucleotide
caccccacaacauucuucc

SEQ ID NO: 774423 - RNA, 19 nt, Artificial Sequence
  Description of Artificial Sequence: Synthetic oligonucleotide
uuaggaauucagagugacc

SEQ ID NO: 774424 - RNA, 19 nt, Artificial Sequence
  Description of Artificial Sequence: Synthetic oligonucleotide
aacauaaacugguccuggu

SEQ ID NO: 774425 - RNA, 19 nt, Artificial Sequence
  Description of Artificial Sequence: Synthetic oligonucleotide
guuagcaagaugugaagga

SEQ ID NO: 774426 - RNA, 19 nt, Artificial Sequence
  Description of Artificial Sequence: Synthetic oligonucleotide
uccaucggcaguccuaggc

SEQ ID NO: 774427 - RNA, 19 nt, Artificial Sequence
  Description of Artificial Sequence: Synthetic oligonucleotide
ugauugcuacaacaggaac

SEQ ID NO: 774428 - RNA, 19 nt, Artificial Sequence
  Description of Artificial Sequence: Synthetic oligonucleotide
guaaguaaguccuugcucu

SEQ ID NO: 774429 - RNA, 19 nt, Artificial Sequence
  Description of Artificial Sequence: Synthetic oligonucleotide
acuagcaugaggcccgcag

SEQ ID NO: 774430 - RNA, 19 nt, Artificial Sequence
  Description of Artificial Sequence: Synthetic oligonucleotide
ugucauaugaggacagaua

SEQ ID NO: 774431 - RNA, 19 nt, Artificial Sequence
  Description of Artificial Sequence: Synthetic oligonucleotide
ggacgaaauaaagugaucc

SEQ ID NO: 774432 - RNA, 19 nt, Artificial Sequence
  Description of Artificial Sequence: Synthetic oligonucleotide
ucauuuaauucacggccac

SEQ ID NO: 774433 - RNA, 19 nt, Artificial Sequence
  Description of Artificial Sequence: Synthetic oligonucleotide
guuguagauaguuaauaaa

SEQ ID NO: 774434 - RNA, 19 nt, Artificial Sequence
  Description of Artificial Sequence: Synthetic oligonucleotide
uuauuacagguguuugugu

SEQ ID NO: 774435 - RNA, 19 nt, Artificial Sequence
  Description of Artificial Sequence: Synthetic oligonucleotide
gaacucgacuagcaugagg

SEQ ID NO: 774436 - RNA, 19 nt, Artificial Sequence
  Description of Artificial Sequence: Synthetic oligonucleotide
ugacucuccauuccacgag

SEQ ID NO: 774437 - RNA, 19 nt, Artificial Sequence
  Description of Artificial Sequence: Synthetic oligonucleotide
uuagcaagaugugaaggac

SEQ ID NO: 774438 - RNA, 19 nt, Artificial Sequence
  Description of Artificial Sequence: Synthetic oligonucleotide
ucuaagccaaagucggaca

SEQ ID NO: 774439 - RNA, 19 nt, Artificial Sequence
  Description of Artificial Sequence: Synthetic oligonucleotide
auugagaaaggagcgcccg

SEQ ID NO: 774440 - RNA, 19 nt, Artificial Sequence
  Description of Artificial Sequence: Synthetic oligonucleotide
ucguccgugaguuccagca

SEQ ID NO: 774441 - RNA, 19 nt, Artificial Sequence
  Description of Artificial Sequence: Synthetic oligonucleotide
cuaagccaaagucggacag

SEQ ID NO: 774442 - RNA, 19 nt, Artificial Sequence
  Description of Artificial Sequence: Synthetic oligonucleotide
uuuuaucuugccacugguc

SEQ ID NO: 774443 - RNA, 19 nt, Artificial Sequence
  Description of Artificial Sequence: Synthetic oligonucleotide
ugcuuuagagguccucuug

SEQ ID NO: 774444 - RNA, 19 nt, Artificial Sequence
  Description of Artificial Sequence: Synthetic oligonucleotide
agugcuuucuaagccaaag

SEQ ID NO: 774445 - RNA, 19 nt, Artificial Sequence
  Description of Artificial Sequence: Synthetic oligonucleotide
ucaccaucucuaaauauuu

SEQ ID NO: 774446 - RNA, 19 nt, Artificial Sequence
  Description of Artificial Sequence: Synthetic oligonucleotide
aaguuuucguccgugaguu

SEQ ID NO: 774447 - RNA, 19 nt, Artificial Sequence
  Description of Artificial Sequence: Synthetic oligonucleotide
agauaguuaauaaaaucau

SEQ ID NO: 774448 - RNA, 19 nt, Artificial Sequence
  Description of Artificial Sequence: Synthetic oligonucleotide
gacucuccauuccacgagg

SEQ ID NO: 774449 - RNA, 19 nt, Artificial Sequence
  Description of Artificial Sequence: Synthetic oligonucleotide
caccgaagcaucuuuauca

SEQ ID NO: 774450 - RNA, 19 nt, Artificial Sequence
  Description of Artificial Sequence: Synthetic oligonucleotide
uguaguuaucucucaaguu

SEQ ID NO: 774451 - RNA, 19 nt, Artificial Sequence
  Description of Artificial Sequence: Synthetic oligonucleotide
ugacuccauacuuauuaca

SEQ ID NO: 774452 - RNA, 19 nt, Artificial Sequence
  Description of Artificial Sequence: Synthetic oligonucleotide
auaguaggcuguaaguaag

SEQ ID NO: 774453 - RNA, 19 nt, Artificial Sequence
  Description of Artificial Sequence: Synthetic oligonucleotide
guuuucguccgugaguucc

SEQ ID NO: 774454 - RNA, 19 nt, Artificial Sequence
  Description of Artificial Sequence: Synthetic oligonucleotide
uucuaagccaaagucggac

SEQ ID NO: 774455 - RNA, 19 nt, Artificial Sequence
  Description of Artificial Sequence: Synthetic oligonucleotide
uuuuacggcuagcuacagc

SEQ ID NO: 774456 - RNA, 19 nt, Artificial Sequence
  Description of Artificial Sequence: Synthetic oligonucleotide
acucgacuagcaugaggcc

SEQ ID NO: 774457 - RNA, 19 nt, Artificial Sequence
  Description of Artificial Sequence: Synthetic oligonucleotide
gggacuauuccuuucaauc

SEQ ID NO: 774458 - RNA, 19 nt, Artificial Sequence
  Description of Artificial Sequence: Synthetic oligonucleotide
aaccuuugcuaaugggacu

SEQ ID NO: 774459 - RNA, 19 nt, Artificial Sequence
  Description of Artificial Sequence: Synthetic oligonucleotide
ugcuaccacaaccuugaca

SEQ ID NO: 774460 - RNA, 19 nt, Artificial Sequence
  Description of Artificial Sequence: Synthetic oligonucleotide
acaaaguggcgcauuuggc

SEQ ID NO: 774461 - RNA, 19 nt, Artificial Sequence
  Description of Artificial Sequence: Synthetic oligonucleotide
auuuaacaggauucagagu

SEQ ID NO: 774462 - RNA, 19 nt, Artificial Sequence
  Description of Artificial Sequence: Synthetic oligonucleotide
uuauugucuucugucauau

SEQ ID NO: 774463 - RNA, 19 nt, Artificial Sequence
  Description of Artificial Sequence: Synthetic oligonucleotide
uuggcagugcaaucaaccu

SEQ ID NO: 774464 - RNA, 19 nt, Artificial Sequence
  Description of Artificial Sequence: Synthetic oligonucleotide
cucuaaauauuuuaagggu

SEQ ID NO: 774465 - RNA, 19 nt, Artificial Sequence
  Description of Artificial Sequence: Synthetic oligonucleotide
uucaaucuaguugcugcag

SEQ ID NO: 774466 - RNA, 19 nt, Artificial Sequence
  Description of Artificial Sequence: Synthetic oligonucleotide
ugguguaagaguccuuuua

SEQ ID NO: 774467 - RNA, 19 nt, Artificial Sequence
  Description of Artificial Sequence: Synthetic oligonucleotide
guuggguagccacugacuc

SEQ ID NO: 774468 - RNA, 19 nt, Artificial Sequence
  Description of Artificial Sequence: Synthetic oligonucleotide
auaaacagugcagcuaaga

SEQ ID NO: 774469 - RNA, 19 nt, Artificial Sequence
  Description of Artificial Sequence: Synthetic oligonucleotide
agagccuucccgucccucg

SEQ ID NO: 774470 - RNA, 19 nt, Artificial Sequence
  Description of Artificial Sequence: Synthetic oligonucleotide
guccgugaguuccagcacg

SEQ ID NO: 774471 - RNA, 19 nt, Artificial Sequence
  Description of Artificial Sequence: Synthetic oligonucleotide
uucauaaacagugcagcua

SEQ ID NO: 774472 - RNA, 19 nt, Artificial Sequence
  Description of Artificial Sequence: Synthetic oligonucleotide
cauaguaggcuguaaguaa

SEQ ID NO: 774473 - RNA, 19 nt, Artificial Sequence
  Description of Artificial Sequence: Synthetic oligonucleotide
uuucuaagccaaagucgga

SEQ ID NO: 774474 - RNA, 19 nt, Artificial Sequence
  Description of Artificial Sequence: Synthetic oligonucleotide
uaaagacccugacucucca

SEQ ID NO: 774475 - RNA, 19 nt, Artificial Sequence
  Description of Artificial Sequence: Synthetic oligonucleotide
aaaggagcgcccgcaaucu

SEQ ID NO: 774476 - RNA, 19 nt, Artificial Sequence
  Description of Artificial Sequence: Synthetic oligonucleotide
caaucaaccuuugcuaaug

SEQ ID NO: 774477 - RNA, 19 nt, Artificial Sequence
  Description of Artificial Sequence: Synthetic oligonucleotide
acuuguuagcaagauguga

SEQ ID NO: 774478 - RNA, 19 nt, Artificial Sequence
  Description of Artificial Sequence: Synthetic oligonucleotide
acuauuccuuucaaucuag

SEQ ID NO: 774479 - RNA, 19 nt, Artificial Sequence
  Description of Artificial Sequence: Synthetic oligonucleotide
guuggugugugcaaaucug

SEQ ID NO: 774480 - RNA, 19 nt, Artificial Sequence
  Description of Artificial Sequence: Synthetic oligonucleotide
auuccaucggcaguccuag

SEQ ID NO: 774481 - RNA, 19 nt, Artificial Sequence
  Description of Artificial Sequence: Synthetic oligonucleotide
uccaauaguuggaaccuuu

SEQ ID NO: 774482 - RNA, 19 nt, Artificial Sequence
  Description of Artificial Sequence: Synthetic oligonucleotide
cauuccacgagggaaaaca

SEQ ID NO: 774483 - RNA, 19 nt, Artificial Sequence
  Description of Artificial Sequence: Synthetic oligonucleotide
ucaaguugcuggcugcuuu

SEQ ID NO: 774484 - RNA, 19 nt, Artificial Sequence
  Description of Artificial Sequence: Synthetic oligonucleotide
gguaggaaaaccuuugacu

SEQ ID NO: 774485 - RNA, 19 nt, Artificial Sequence
  Description of Artificial Sequence: Synthetic oligonucleotide
acuggucauuuucuguuca

SEQ ID NO: 774486 - RNA, 19 nt, Artificial Sequence
  Description of Artificial Sequence: Synthetic oligonucleotide
uuggguagccacugacucc

SEQ ID NO: 774487 - RNA, 19 nt, Artificial Sequence
  Description of Artificial Sequence: Synthetic oligonucleotide
uuuucguccgugaguucca

SEQ ID NO: 774488 - RNA, 19 nt, Artificial Sequence
  Description of Artificial Sequence: Synthetic oligonucleotide
gauugagaaaggagcgccc

SEQ ID NO: 774489 - RNA, 19 nt, Artificial Sequence
  Description of Artificial Sequence: Synthetic oligonucleotide
ucguuguagauaguuaaua

SEQ ID NO: 774490 - RNA, 19 nt, Artificial Sequence
  Description of Artificial Sequence: Synthetic oligonucleotide
aucauuuaauucacggcca

SEQ ID NO: 774491 - RNA, 19 nt, Artificial Sequence
  Description of Artificial Sequence: Synthetic oligonucleotide
uaguaggcuguaaguaagu

SEQ ID NO: 774492 - RNA, 19 nt, Artificial Sequence
  Description of Artificial Sequence: Synthetic oligonucleotide
cuucccaacacaaauaauu

SEQ ID NO: 774493 - RNA, 19 nt, Artificial Sequence
  Description of Artificial Sequence: Synthetic oligonucleotide
ucauacucaggggcaagcc

SEQ ID NO: 774494 - RNA, 19 nt, Artificial Sequence
  Description of Artificial Sequence: Synthetic oligonucleotide
uacggcuagcuacagcaaa

SEQ ID NO: 774495 - RNA, 19 nt, Artificial Sequence
  Description of Artificial Sequence: Synthetic oligonucleotide
cuuggcuauaacaauauuu

SEQ ID NO: 774496 - RNA, 19 nt, Artificial Sequence
  Description of Artificial Sequence: Synthetic oligonucleotide
auuccacgagggaaaacac

SEQ ID NO: 774497 - RNA, 19 nt, Artificial Sequence
  Description of Artificial Sequence: Synthetic oligonucleotide
gacucucgaaguuuucguc

SEQ ID NO: 774498 - RNA, 19 nt, Artificial Sequence
  Description of Artificial Sequence: Synthetic oligonucleotide
agcuaagaaacaguuuaga

SEQ ID NO: 774499 - RNA, 19 nt, Artificial Sequence
  Description of Artificial Sequence: Synthetic oligonucleotide
aacguuggugugugcaaau

SEQ ID NO: 774500 - RNA, 19 nt, Artificial Sequence
  Description of Artificial Sequence: Synthetic oligonucleotide
ugugugcaaaucuguaguu

SEQ ID NO: 774501 - RNA, 19 nt, Artificial Sequence
  Description of Artificial Sequence: Synthetic oligonucleotide
aaguggcgcauuuggcugu

SEQ ID NO: 774502 - RNA, 19 nt, Artificial Sequence
  Description of Artificial Sequence: Synthetic oligonucleotide
ggauugagaaaggagcgcc

SEQ ID NO: 774503 - RNA, 19 nt, Artificial Sequence
  Description of Artificial Sequence: Synthetic oligonucleotide
auucacuaugucaucaaaa

SEQ ID NO: 774504 - RNA, 19 nt, Artificial Sequence
  Description of Artificial Sequence: Synthetic oligonucleotide
caucggcaguccuaggccc

SEQ ID NO: 774505 - RNA, 19 nt, Artificial Sequence
  Description of Artificial Sequence: Synthetic oligonucleotide
uaguuggaaccuuuagcau

SEQ ID NO: 774506 - RNA, 19 nt, Artificial Sequence
  Description of Artificial Sequence: Synthetic oligonucleotide
gguccugguauuuucauaa

SEQ ID NO: 774507 - RNA, 19 nt, Artificial Sequence
  Description of Artificial Sequence: Synthetic oligonucleotide
aucagcacauccuuaucuu

SEQ ID NO: 774508 - RNA, 19 nt, Artificial Sequence
  Description of Artificial Sequence: Synthetic oligonucleotide
uucccgucccucgagaacu

SEQ ID NO: 774509 - RNA, 19 nt, Artificial Sequence
  Description of Artificial Sequence: Synthetic oligonucleotide
acauaaacugguccuggua

SEQ ID NO: 774510 - RNA, 19 nt, Artificial Sequence
  Description of Artificial Sequence: Synthetic oligonucleotide
gacucaacguuggugugug

SEQ ID NO: 774511 - RNA, 19 nt, Artificial Sequence
  Description of Artificial Sequence: Synthetic oligonucleotide
aguccuaggcccaucauaa

SEQ ID NO: 774512 - RNA, 19 nt, Artificial Sequence
  Description of Artificial Sequence: Synthetic oligonucleotide
auaaacugguccugguauu

SEQ ID NO: 774513 - RNA, 19 nt, Artificial Sequence
  Description of Artificial Sequence: Synthetic oligonucleotide
cauagucaacaucauagua

SEQ ID NO: 774514 - RNA, 19 nt, Artificial Sequence
  Description of Artificial Sequence: Synthetic oligonucleotide
cagugcagcuaagaaacag

SEQ ID NO: 774515 - RNA, 19 nt, Artificial Sequence
  Description of Artificial Sequence: Synthetic oligonucleotide
aggaauucagagugaccgu

SEQ ID NO: 774516 - RNA, 19 nt, Artificial Sequence
  Description of Artificial Sequence: Synthetic oligonucleotide
agugcagcuaagaaacagu

SEQ ID NO: 774517 - RNA, 19 nt, Artificial Sequence
  Description of Artificial Sequence: Synthetic oligonucleotide
aggagcgcccgcaaucugc

SEQ ID NO: 774518 - RNA, 19 nt, Artificial Sequence
  Description of Artificial Sequence: Synthetic oligonucleotide
cuaggcccaucauaagcac

SEQ ID NO: 774519 - RNA, 19 nt, Artificial Sequence
  Description of Artificial Sequence: Synthetic oligonucleotide
ucggagacgcgacucucga

SEQ ID NO: 774520 - RNA, 19 nt, Artificial Sequence
  Description of Artificial Sequence: Synthetic oligonucleotide
gcuguaaguaaguccuugc

SEQ ID NO: 774521 - RNA, 19 nt, Artificial Sequence
  Description of Artificial Sequence: Synthetic oligonucleotide
guagaugguaggaaaaccu

SEQ ID NO: 774522 - RNA, 19 nt, Artificial Sequence
  Description of Artificial Sequence: Synthetic oligonucleotide
aacaucauaguaggcugua

SEQ ID NO: 774523 - RNA, 19 nt, Artificial Sequence
  Description of Artificial Sequence: Synthetic oligonucleotide
aggauucagaguauaucca

SEQ ID NO: 774524 - RNA, 19 nt, Artificial Sequence
  Description of Artificial Sequence: Synthetic oligonucleotide
gaauucagagugaccguca

SEQ ID NO: 774525 - RNA, 19 nt, Artificial Sequence
  Description of Artificial Sequence: Synthetic oligonucleotide
aaagacccugacucuccau

SEQ ID NO: 774526 - RNA, 19 nt, Artificial Sequence
  Description of Artificial Sequence: Synthetic oligonucleotide
ucauauggagaaggcacau

SEQ ID NO: 774527 - RNA, 19 nt, Artificial Sequence
  Description of Artificial Sequence: Synthetic oligonucleotide
acacgacaguauaaagggg

SEQ ID NO: 774528 - RNA, 19 nt, Artificial Sequence
  Description of Artificial Sequence: Synthetic oligonucleotide
uccgugaguuccagcacgu

SEQ ID NO: 774529 - RNA, 19 nt, Artificial Sequence
  Description of Artificial Sequence: Synthetic oligonucleotide
ugggacuauuccuuucaau

SEQ ID NO: 774530 - RNA, 19 nt, Artificial Sequence
  Description of Artificial Sequence: Synthetic oligonucleotide
ucagagugaccgucacuga

SEQ ID NO: 774531 - RNA, 19 nt, Artificial Sequence
  Description of Artificial Sequence: Synthetic oligonucleotide
aggacgaaauaaagugauc

SEQ ID NO: 774532 - RNA, 19 nt, Artificial Sequence
  Description of Artificial Sequence: Synthetic oligonucleotide
cugauugcuacaacaggaa

SEQ ID NO: 774533 - RNA, 19 nt, Artificial Sequence
  Description of Artificial Sequence: Synthetic oligonucleotide
aguuuucguccgugaguuc

SEQ ID NO: 774534 - RNA, 19 nt, Artificial Sequence
  Description of Artificial Sequence: Synthetic oligonucleotide
gagcccgugucggagacgc

SEQ ID NO: 774535 - RNA, 19 nt, Artificial Sequence
  Description of Artificial Sequence: Synthetic oligonucleotide
cauaaacugguccugguau

SEQ ID NO: 774536 - RNA, 19 nt, Artificial Sequence
  Description of Artificial Sequence: Synthetic oligonucleotide
caaaguggcgcauuuggcu

SEQ ID NO: 774537 - RNA, 19 nt, Artificial Sequence
  Description of Artificial Sequence: Synthetic oligonucleotide
cuguaguuaucucucaagu

SEQ ID NO: 774538 - RNA, 19 nt, Artificial Sequence
  Description of Artificial Sequence: Synthetic oligonucleotide
acucaacguuggugugugc

SEQ ID NO: 774539 - RNA, 19 nt, Artificial Sequence
  Description of Artificial Sequence: Synthetic oligonucleotide
acggcuagcuacagcaaag

SEQ ID NO: 774540 - RNA, 19 nt, Artificial Sequence
  Description of Artificial Sequence: Synthetic oligonucleotide
aggggcgaagaacucgacu

SEQ ID NO: 774541 - RNA, 19 nt, Artificial Sequence
  Description of Artificial Sequence: Synthetic oligonucleotide
uuguguuggcagugcaauc

SEQ ID NO: 774542 - RNA, 19 nt, Artificial Sequence
  Description of Artificial Sequence: Synthetic oligonucleotide
ucccucgagaacucuuccu

SEQ ID NO: 774543 - RNA, 19 nt, Artificial Sequence
  Description of Artificial Sequence: Synthetic oligonucleotide
caaggggcgaagaacucga

SEQ ID NO: 774544 - RNA, 19 nt, Artificial Sequence
  Description of Artificial Sequence: Synthetic oligonucleotide
aaggagcgcccgcaaucug

SEQ ID NO: 774545 - RNA, 19 nt, Artificial Sequence
  Description of Artificial Sequence: Synthetic oligonucleotide
gaaccgaagcugguccugc

SEQ ID NO: 774546 - RNA, 19 nt, Artificial Sequence
  Description of Artificial Sequence: Synthetic oligonucleotide
aucuuggcuauaacaauau

SEQ ID NO: 774547 - RNA, 19 nt, Artificial Sequence
  Description of Artificial Sequence: Synthetic oligonucleotide
acguuggugugugcaaauc

SEQ ID NO: 774548 - RNA, 19 nt, Artificial Sequence
  Description of Artificial Sequence: Synthetic oligonucleotide
cucgagaacucuuccugca

SEQ ID NO: 774549 - RNA, 19 nt, Artificial Sequence
  Description of Artificial Sequence: Synthetic oligonucleotide
uucuuguuggcuggugaaa

SEQ ID NO: 774550 - RNA, 19 nt, Artificial Sequence
  Description of Artificial Sequence: Synthetic oligonucleotide
aggaaccgaagcugguccu

SEQ ID NO: 774551 - RNA, 19 nt, Artificial Sequence
  Description of Artificial Sequence: Synthetic oligonucleotide
gugaaggacgaaauaaagu

SEQ ID NO: 774552 - RNA, 19 nt, Artificial Sequence
  Description of Artificial Sequence: Synthetic oligonucleotide
agaugguaggaaaaccuuu

SEQ ID NO: 774553 - RNA, 19 nt, Artificial Sequence
  Description of Artificial Sequence: Synthetic oligonucleotide
ugauccccucuccauuauc

SEQ ID NO: 774554 - RNA, 19 nt, Artificial Sequence
  Description of Artificial Sequence: Synthetic oligonucleotide
cucaacguuggugugugca

SEQ ID NO: 774555 - RNA, 19 nt, Artificial Sequence
  Description of Artificial Sequence: Synthetic oligonucleotide
acucuccauuccacgaggg

SEQ ID NO: 774556 - RNA, 19 nt, Artificial Sequence
  Description of Artificial Sequence: Synthetic oligonucleotide
gagugaccgucacugaaua

SEQ ID NO: 774557 - RNA, 19 nt, Artificial Sequence
  Description of Artificial Sequence: Synthetic oligonucleotide
aaggggcgaagaacucgac

SEQ ID NO: 774558 - RNA, 19 nt, Artificial Sequence
  Description of Artificial Sequence: Synthetic oligonucleotide
agacucaacguuggugugu

SEQ ID NO: 774559 - RNA, 19 nt, Artificial Sequence
  Description of Artificial Sequence: Synthetic oligonucleotide
ugccaucucugguguaaga

SEQ ID NO: 774560 - RNA, 19 nt, Artificial Sequence
  Description of Artificial Sequence: Synthetic oligonucleotide
uugcuuuagagguccucuu

SEQ ID NO: 774561 - RNA, 19 nt, Artificial Sequence
  Description of Artificial Sequence: Synthetic oligonucleotide
acaaccuugacaggcccau

SEQ ID NO: 774562 - RNA, 19 nt, Artificial Sequence
  Description of Artificial Sequence: Synthetic oligonucleotide
uuucguccgugaguuccag

SEQ ID NO: 774563 - RNA, 19 nt, Artificial Sequence
  Description of Artificial Sequence: Synthetic oligonucleotide
cuagcaugaggcccgcaga

SEQ ID NO: 774564 - RNA, 19 nt, Artificial Sequence
  Description of Artificial Sequence: Synthetic oligonucleotide
gucggagacgcgacucucg

SEQ ID NO: 774565 - RNA, 19 nt, Artificial Sequence
  Description of Artificial Sequence: Synthetic oligonucleotide
ggggcgaagaacucgacua

SEQ ID NO: 774566 - RNA, 19 nt, Artificial Sequence
  Description of Artificial Sequence: Synthetic oligonucleotide
guuuuacggcuagcuacag

SEQ ID NO: 774567 - RNA, 19 nt, Artificial Sequence
  Description of Artificial Sequence: Synthetic oligonucleotide
cauauggagaaggcacauc

SEQ ID NO: 774568 - RNA, 19 nt, Artificial Sequence
  Description of Artificial Sequence: Synthetic oligonucleotide
gcgacucucgaaguuuucg

SEQ ID NO: 774569 - RNA, 19 nt, Artificial Sequence
  Description of Artificial Sequence: Synthetic oligonucleotide
guaauccugcaggaaccgc

SEQ ID NO: 774570 - RNA, 19 nt, Artificial Sequence
  Description of Artificial Sequence: Synthetic oligonucleotide
uguguccagcauccaggaa

SEQ ID NO: 774571 - RNA, 19 nt, Artificial Sequence
  Description of Artificial Sequence: Synthetic oligonucleotide
agagugaccgucacugaau

SEQ ID NO: 774572 - RNA, 19 nt, Artificial Sequence
  Description of Artificial Sequence: Synthetic oligonucleotide
caaucuaguugcugcagcu

SEQ ID NO: 774573 - RNA, 19 nt, Artificial Sequence
  Description of Artificial Sequence: Synthetic oligonucleotide
gguuuuacggcuagcuaca

SEQ ID NO: 774574 - RNA, 19 nt, Artificial Sequence
  Description of Artificial Sequence: Synthetic oligonucleotide
uucguccgugaguuccagc

SEQ ID NO: 774575 - RNA, 19 nt, Artificial Sequence
  Description of Artificial Sequence: Synthetic oligonucleotide
ccuaggcccaucauaagca

SEQ ID NO: 774576 - RNA, 19 nt, Artificial Sequence
  Description of Artificial Sequence: Synthetic oligonucleotide
uuccaucggcaguccuagg

SEQ ID NO: 774577 - RNA, 19 nt, Artificial Sequence
  Description of Artificial Sequence: Synthetic oligonucleotide
augggacuauuccuuucaa

SEQ ID NO: 774578 - RNA, 19 nt, Artificial Sequence
  Description of Artificial Sequence: Synthetic oligonucleotide
agugaccgucacugaauaa

SEQ ID NO: 774579 - RNA, 19 nt, Artificial Sequence
  Description of Artificial Sequence: Synthetic oligonucleotide
caccaaggggcgaagaacu

SEQ ID NO: 774580 - RNA, 19 nt, Artificial Sequence
  Description of Artificial Sequence: Synthetic oligonucleotide
cuguaaguaaguccuugcu

SEQ ID NO: 774581 - RNA, 19 nt, Artificial Sequence
  Description of Artificial Sequence: Synthetic oligonucleotide
uggaaccuuuagcauucuu

SEQ ID NO: 774582 - RNA, 19 nt, Artificial Sequence
  Description of Artificial Sequence: Synthetic oligonucleotide
guccuaggcccaucauaag

SEQ ID NO: 774583 - RNA, 19 nt, Artificial Sequence
  Description of Artificial Sequence: Synthetic oligonucleotide
ccucgagaacucuuccugc

SEQ ID NO: 774584 - RNA, 19 nt, Artificial Sequence
  Description of Artificial Sequence: Synthetic oligonucleotide
accaaggggcgaagaacuc

SEQ ID NO: 774585 - RNA, 19 nt, Artificial Sequence
  Description of Artificial Sequence: Synthetic oligonucleotide
cagagugaccgucacugaa

SEQ ID NO: 774586 - RNA, 19 nt, Artificial Sequence
  Description of Artificial Sequence: Synthetic oligonucleotide
agaacucgacuagcaugag

SEQ ID NO: 774587 - RNA, 19 nt, Artificial Sequence
  Description of Artificial Sequence: Synthetic oligonucleotide
ccaaggggcgaagaacucg

SEQ ID NO: 774588 - RNA, 19 nt, Artificial Sequence
  Description of Artificial Sequence: Synthetic oligonucleotide
guucaguauauaccacagu

SEQ ID NO: 774589 - RNA, 19 nt, Artificial Sequence
  Description of Artificial Sequence: Synthetic oligonucleotide
gcugacaauuccaucggca

SEQ ID NO: 774590 - RNA, 19 nt, Artificial Sequence
  Description of Artificial Sequence: Synthetic oligonucleotide
cccucgagaacucuuccug

SEQ ID NO: 774591 - RNA, 19 nt, Artificial Sequence
  Description of Artificial Sequence: Synthetic oligonucleotide
ggauucagaguauauccau

SEQ ID NO: 774592 - RNA, 19 nt, Artificial Sequence
  Description of Artificial Sequence: Synthetic oligonucleotide
agacgcgacucucgaaguu

SEQ ID NO: 774593 - RNA, 19 nt, Artificial Sequence
  Description of Artificial Sequence: Synthetic oligonucleotide
agccuucccgucccucgag

SEQ ID NO: 774594 - RNA, 19 nt, Artificial Sequence
  Description of Artificial Sequence: Synthetic oligonucleotide
ugucggagacgcgacucuc

SEQ ID NO: 774595 - RNA, 19 nt, Artificial Sequence
  Description of Artificial Sequence: Synthetic oligonucleotide
ggcgaagaacucgacuagc

SEQ ID NO: 774596 - RNA, 19 nt, Artificial Sequence
  Description of Artificial Sequence: Synthetic oligonucleotide
ccauacuuauuacaggugu

SEQ ID NO: 774597 - RNA, 19 nt, Artificial Sequence
  Description of Artificial Sequence: Synthetic oligonucleotide
cacaaccuugacaggccca

SEQ ID NO: 774598 - RNA, 19 nt, Artificial Sequence
  Description of Artificial Sequence: Synthetic oligonucleotide
ucgcacgucuggcccgggc

SEQ ID NO: 774599 - RNA, 19 nt, Artificial Sequence
  Description of Artificial Sequence: Synthetic oligonucleotide
acgucuggcccgggcagac

SEQ ID NO: 774600 - RNA, 19 nt, Artificial Sequence
  Description of Artificial Sequence: Synthetic oligonucleotide
gagacgcgacucucgaagu

SEQ ID NO: 774601 - RNA, 19 nt, Artificial Sequence
  Description of Artificial Sequence: Synthetic oligonucleotide
caguccuaggcccaucaua

SEQ ID NO: 774602 - RNA, 19 nt, Artificial Sequence
  Description of Artificial Sequence: Synthetic oligonucleotide
cucuccauuccacgaggga

SEQ ID NO: 774603 - RNA, 19 nt, Artificial Sequence
  Description of Artificial Sequence: Synthetic oligonucleotide
auaugaggacagauaccaa

SEQ ID NO: 774604 - RNA, 19 nt, Artificial Sequence
  Description of Artificial Sequence: Synthetic oligonucleotide
guaucucuucagguugcca

SEQ ID NO: 774605 - RNA, 19 nt, Artificial Sequence
  Description of Artificial Sequence: Synthetic oligonucleotide
aggcccaucguuggucucu

SEQ ID NO: 774606 - RNA, 19 nt, Artificial Sequence
  Description of Artificial Sequence: Synthetic oligonucleotide
cacauuuauugucacuguu

SEQ ID NO: 774607 - RNA, 19 nt, Artificial Sequence
  Description of Artificial Sequence: Synthetic oligonucleotide
cuaaugggacuauuccuuu

SEQ ID NO: 774608 - RNA, 19 nt, Artificial Sequence
  Description of Artificial Sequence: Synthetic oligonucleotide
cucguuguagauaguuaau

SEQ ID NO: 774609 - RNA, 19 nt, Artificial Sequence
  Description of Artificial Sequence: Synthetic oligonucleotide
ggaaccuuuagcauucuuu

SEQ ID NO: 774610 - RNA, 19 nt, Artificial Sequence
  Description of Artificial Sequence: Synthetic oligonucleotide
ggauagguucagacuugag

SEQ ID NO: 774611 - RNA, 19 nt, Artificial Sequence
  Description of Artificial Sequence: Synthetic oligonucleotide
agguugccaucaaaguaau

SEQ ID NO: 774612 - RNA, 19 nt, Artificial Sequence
  Description of Artificial Sequence: Synthetic oligonucleotide
agagcccgugucggagacg

SEQ ID NO: 774613 - RNA, 19 nt, Artificial Sequence
  Description of Artificial Sequence: Synthetic oligonucleotide
ggaaccgaagcugguccug

SEQ ID NO: 774614 - RNA, 19 nt, Artificial Sequence
  Description of Artificial Sequence: Synthetic oligonucleotide
gagcgcccgcaaucugcag

SEQ ID NO: 774615 - RNA, 19 nt, Artificial Sequence
  Description of Artificial Sequence: Synthetic oligonucleotide
gcuaaugggacuauuccuu

SEQ ID NO: 774616 - RNA, 19 nt, Artificial Sequence
  Description of Artificial Sequence: Synthetic oligonucleotide
gcccgcagagcccgugucg

SEQ ID NO: 774617 - RNA, 19 nt, Artificial Sequence
  Description of Artificial Sequence: Synthetic oligonucleotide
caacguuggugugugcaaa

SEQ ID NO: 774618 - RNA, 19 nt, Artificial Sequence
  Description of Artificial Sequence: Synthetic oligonucleotide
ucccgucccucgagaacuc

SEQ ID NO: 774619 - RNA, 19 nt, Artificial Sequence
  Description of Artificial Sequence: Synthetic oligonucleotide
cagaccugagaggaaccga

SEQ ID NO: 774620 - RNA, 19 nt, Artificial Sequence
  Description of Artificial Sequence: Synthetic oligonucleotide
aucggcaguccuaggccca

SEQ ID NO: 774621 - RNA, 19 nt, Artificial Sequence
  Description of Artificial Sequence: Synthetic oligonucleotide
uugcuacaacaggaaccuc

SEQ ID NO: 774622 - RNA, 19 nt, Artificial Sequence
  Description of Artificial Sequence: Synthetic oligonucleotide
cgugaguuccagcacguca

SEQ ID NO: 774623 - RNA, 19 nt, Artificial Sequence
  Description of Artificial Sequence: Synthetic oligonucleotide
ccaauaguuggaaccuuua

SEQ ID NO: 774624 - RNA, 19 nt, Artificial Sequence
  Description of Artificial Sequence: Synthetic oligonucleotide
cugcuaccacaaccuugac

SEQ ID NO: 774625 - RNA, 19 nt, Artificial Sequence
  Description of Artificial Sequence: Synthetic oligonucleotide
gacgcgacucucgaaguuu

SEQ ID NO: 774626 - RNA, 19 nt, Artificial Sequence
  Description of Artificial Sequence: Synthetic oligonucleotide
gcgcucgcacgucuggccc

SEQ ID NO: 774627 - RNA, 19 nt, Artificial Sequence
  Description of Artificial Sequence: Synthetic oligonucleotide
gcuaaagguuuuacggcua

SEQ ID NO: 774628 - RNA, 19 nt, Artificial Sequence
  Description of Artificial Sequence: Synthetic oligonucleotide
gcaaucaaccuuugcuaau

SEQ ID NO: 774629 - RNA, 19 nt, Artificial Sequence
  Description of Artificial Sequence: Synthetic oligonucleotide
gugucggagacgcgacucu

SEQ ID NO: 774630 - RNA, 19 nt, Artificial Sequence
  Description of Artificial Sequence: Synthetic oligonucleotide
ggcggucggagggucgggg

SEQ ID NO: 774631 - RNA, 19 nt, Artificial Sequence
  Description of Artificial Sequence: Synthetic oligonucleotide
ucggcaguccuaggcccau

SEQ ID NO: 774632 - RNA, 19 nt, Artificial Sequence
  Description of Artificial Sequence: Synthetic oligonucleotide
acgcgacucucgaaguuuu

SEQ ID NO: 774633 - RNA, 19 nt, Artificial Sequence
  Description of Artificial Sequence: Synthetic oligonucleotide
ccaucucugguguaagagu

SEQ ID NO: 774634 - RNA, 19 nt, Artificial Sequence
  Description of Artificial Sequence: Synthetic oligonucleotide
gucggacagcucauggcua

SEQ ID NO: 774635 - RNA, 19 nt, Artificial Sequence
  Description of Artificial Sequence: Synthetic oligonucleotide
cagcgcuaggcggcugaag

SEQ ID NO: 774636 - RNA, 19 nt, Artificial Sequence
  Description of Artificial Sequence: Synthetic oligonucleotide
caggcccaucguuggucuc

SEQ ID NO: 774637 - RNA, 19 nt, Artificial Sequence
  Description of Artificial Sequence: Synthetic oligonucleotide
gaagcgcauggcggcgaga

SEQ ID NO: 774638 - RNA, 19 nt, Artificial Sequence
  Description of Artificial Sequence: Synthetic oligonucleotide
cgucccucgagaacucuuc

SEQ ID NO: 774639 - RNA, 19 nt, Artificial Sequence
  Description of Artificial Sequence: Synthetic oligonucleotide
gcacgucagaggcggcggc

SEQ ID NO: 774640 - RNA, 19 nt, Artificial Sequence
  Description of Artificial Sequence: Synthetic oligonucleotide
ggcgcauuuggcuguugcu

SEQ ID NO: 774641 - RNA, 19 nt, Artificial Sequence
  Description of Artificial Sequence: Synthetic oligonucleotide
gcugaguuucucucccagu

SEQ ID NO: 774642 - RNA, 19 nt, Artificial Sequence
  Description of Artificial Sequence: Synthetic oligonucleotide
ggagcgcccgcaaucugca

SEQ ID NO: 774643 - RNA, 19 nt, Artificial Sequence
  Description of Artificial Sequence: Synthetic oligonucleotide
gcggucggagggucggggc

SEQ ID NO: 774644 - RNA, 19 nt, Artificial Sequence
  Description of Artificial Sequence: Synthetic oligonucleotide
cccgugucggagacgcgac

SEQ ID NO: 774645 - RNA, 19 nt, Artificial Sequence
  Description of Artificial Sequence: Synthetic oligonucleotide
cagagccuucccgucccuc

SEQ ID NO: 774646 - RNA, 19 nt, Artificial Sequence
  Description of Artificial Sequence: Synthetic oligonucleotide
gaaccgcuccagagccuuc

SEQ ID NO: 774647 - RNA, 19 nt, Artificial Sequence
  Description of Artificial Sequence: Synthetic oligonucleotide
cccgggcagaccugcugcc

SEQ ID NO: 774648 - RNA, 19 nt, Artificial Sequence
  Description of Artificial Sequence: Synthetic oligonucleotide
gcccgugucggagacgcga

SEQ ID NO: 774649 - RNA, 19 nt, Artificial Sequence
  Description of Artificial Sequence: Synthetic oligonucleotide
aggcuguaaguaaguccuu

SEQ ID NO: 774650 - RNA, 19 nt, Artificial Sequence
  Description of Artificial Sequence: Synthetic oligonucleotide
gugauccccucuccauuau

SEQ ID NO: 774651 - RNA, 19 nt, Artificial Sequence
  Description of Artificial Sequence: Synthetic oligonucleotide
ggcccaucguuggucucug

SEQ ID NO: 774652 - RNA, 19 nt, Artificial Sequence
  Description of Artificial Sequence: Synthetic oligonucleotide
cgugucggagacgcgacuc

SEQ ID NO: 774653 - RNA, 19 nt, Artificial Sequence
  Description of Artificial Sequence: Synthetic oligonucleotide
gcccaucguuggucucugg

SEQ ID NO: 774654 - RNA, 19 nt, Artificial Sequence
  Description of Artificial Sequence: Synthetic oligonucleotide
cugccugcgcucgcacguc

SEQ ID NO: 774655 - RNA, 19 nt, Artificial Sequence
  Description of Artificial Sequence: Synthetic oligonucleotide
cguccgugaguuccagcac

SEQ ID NO: 774656 - RNA, 19 nt, Artificial Sequence
  Description of Artificial Sequence: Synthetic oligonucleotide
cgcucgcacgucuggcccg

SEQ ID NO: 774657 - RNA, 19 nt, Artificial Sequence
  Description of Artificial Sequence: Synthetic oligonucleotide
agcccgugucggagacgcg

SEQ ID NO: 774658 - RNA, 19 nt, Artificial Sequence
  Description of Artificial Sequence: Synthetic oligonucleotide
cggucggagggucggggcc

SEQ ID NO: 774659 - RNA, 19 nt, Artificial Sequence
  Description of Artificial Sequence: Synthetic oligonucleotide
gcaagaugugaaggacgaa

SEQ ID NO: 774660 - RNA, 19 nt, Artificial Sequence
  Description of Artificial Sequence: Synthetic oligonucleotide
cucgcacgucuggcccggg

SEQ ID NO: 774661 - RNA, 19 nt, Artificial Sequence
  Description of Artificial Sequence: Synthetic oligonucleotide
gcgcauuuggcuguugcuu

SEQ ID NO: 774662 - RNA, 19 nt, Artificial Sequence
  Description of Artificial Sequence: Synthetic oligonucleotide
cuccaauaguuggaaccuu

SEQ ID NO: 774663 - RNA, 19 nt, Artificial Sequence
  Description of Artificial Sequence: Synthetic oligonucleotide
cgacucucgaaguuuucgu

SEQ ID NO: 774664 - RNA, 19 nt, Artificial Sequence
  Description of Artificial Sequence: Synthetic oligonucleotide
gcgaggcgggccgaggcga

SEQ ID NO: 774665 - RNA, 19 nt, Artificial Sequence
  Description of Artificial Sequence: Synthetic oligonucleotide
cucaaguugcuggcugcuu

SEQ ID NO: 774666 - RNA, 19 nt, Artificial Sequence
  Description of Artificial Sequence: Synthetic oligonucleotide
cgagggaaaacacgacagu

SEQ ID NO: 774667 - RNA, 19 nt, Artificial Sequence
  Description of Artificial Sequence: Synthetic oligonucleotide
cgcgacucucgaaguuuuc

SEQ ID NO: 774668 - RNA, 19 nt, Artificial Sequence
  Description of Artificial Sequence: Synthetic oligonucleotide
cgaggcgggccgaggcgag

SEQ ID NO: 774669 - RNA, 19 nt, Artificial Sequence
  Description of Artificial Sequence: Synthetic oligonucleotide
gcaguccuaggcccaucau

SEQ ID NO: 774670 - RNA, 19 nt, Artificial Sequence
  Description of Artificial Sequence: Synthetic oligonucleotide
ccgugaguuccagcacguc

SEQ ID NO: 774671 - RNA, 19 nt, Artificial Sequence
  Description of Artificial Sequence: Synthetic oligonucleotide
ccccaccccacaacauucu

SEQ ID NO: 774672 - RNA, 19 nt, Artificial Sequence
  Description of Artificial Sequence: Synthetic oligonucleotide
gcagcgcuaggcggcugaa

SEQ ID NO: 774673 - RNA, 19 nt, Artificial Sequence
  Description of Artificial Sequence: Synthetic oligonucleotide
cggagacgcgacucucgaa

SEQ ID NO: 774674 - RNA, 19 nt, Artificial Sequence
  Description of Artificial Sequence: Synthetic oligonucleotide
cggcuagcuacagcaaagu

SEQ ID NO: 774675 - RNA, 19 nt, Artificial Sequence
  Description of Artificial Sequence: Synthetic oligonucleotide
ccgucccucgagaacucuu

SEQ ID NO: 774676 - RNA, 19 nt, Artificial Sequence
  Description of Artificial Sequence: Synthetic oligonucleotide
ccgugucggagacgcgacu

SEQ ID NO: 774677 - RNA, 19 nt, Artificial Sequence
  Description of Artificial Sequence: Synthetic oligonucleotide
cggcaguccuaggcccauc

SEQ ID NO: 774678 - RNA, 19 nt, Artificial Sequence
  Description of Artificial Sequence: Synthetic oligonucleotide
ucuacauuuccucauaagg

SEQ ID NO: 774679 - RNA, 19 nt, Artificial Sequence
  Description of Artificial Sequence: Synthetic oligonucleotide
auuucuaaggugcuggugc

SEQ ID NO: 774680 - RNA, 19 nt, Artificial Sequence
  Description of Artificial Sequence: Synthetic oligonucleotide
ucaacuaggcuucauagag

SEQ ID NO: 774681 - RNA, 19 nt, Artificial Sequence
  Description of Artificial Sequence: Synthetic oligonucleotide
aacuaggcuucauagagac

SEQ ID NO: 774682 - RNA, 19 nt, Artificial Sequence
  Description of Artificial Sequence: Synthetic oligonucleotide
uuuucuaggguguugcugg

SEQ ID NO: 774683 - RNA, 19 nt, Artificial Sequence
  Description of Artificial Sequence: Synthetic oligonucleotide
aauaaauccuucaacuagg

SEQ ID NO: 774684 - RNA, 19 nt, Artificial Sequence
  Description of Artificial Sequence: Synthetic oligonucleotide
ggaauuuauacauacacag

SEQ ID NO: 774685 - RNA, 19 nt, Artificial Sequence
  Description of Artificial Sequence: Synthetic oligonucleotide
uuuccuaaggcauugauau

SEQ ID NO: 774686 - RNA, 19 nt, Artificial Sequence
  Description of Artificial Sequence: Synthetic oligonucleotide
agguucacugauuuuaccc

SEQ ID NO: 774687 - RNA, 19 nt, Artificial Sequence
  Description of Artificial Sequence: Synthetic oligonucleotide
uuugcaauugagcaggcca

SEQ ID NO: 774688 - RNA, 19 nt, Artificial Sequence
  Description of Artificial Sequence: Synthetic oligonucleotide
ugaacaauggccgagagaa

SEQ ID NO: 774689 - RNA, 19 nt, Artificial Sequence
  Description of Artificial Sequence: Synthetic oligonucleotide
ucgaauaaauccuucaacu

SEQ ID NO: 774690 - RNA, 19 nt, Artificial Sequence
  Description of Artificial Sequence: Synthetic oligonucleotide
uguaagauaaccuggcaac

SEQ ID NO: 774691 - RNA, 19 nt, Artificial Sequence
  Description of Artificial Sequence: Synthetic oligonucleotide
auuaauuccucucuguugu

SEQ ID NO: 774692 - RNA, 19 nt, Artificial Sequence
  Description of Artificial Sequence: Synthetic oligonucleotide
aguaagguuccacuguagc

SEQ ID NO: 774693 - RNA, 19 nt, Artificial Sequence
  Description of Artificial Sequence: Synthetic oligonucleotide
uacuguuugcaauugagca

SEQ ID NO: 774694 - RNA, 19 nt, Artificial Sequence
  Description of Artificial Sequence: Synthetic oligonucleotide
auuuccacugcccauugac

SEQ ID NO: 774695 - RNA, 19 nt, Artificial Sequence
  Description of Artificial Sequence: Synthetic oligonucleotide
uacauuuccucauaagggc

SEQ ID NO: 774696 - RNA, 19 nt, Artificial Sequence
  Description of Artificial Sequence: Synthetic oligonucleotide
cacaugagaucuuugaagc

SEQ ID NO: 774697 - RNA, 19 nt, Artificial Sequence
  Description of Artificial Sequence: Synthetic oligonucleotide
aacuguaagauaaccuggc

SEQ ID NO: 774698 - RNA, 19 nt, Artificial Sequence
  Description of Artificial Sequence: Synthetic oligonucleotide
aagguuccacuguagcugc

SEQ ID NO: 774699 - RNA, 19 nt, Artificial Sequence
  Description of Artificial Sequence: Synthetic oligonucleotide
uguccauaguucaucaugc

SEQ ID NO: 774700 - RNA, 19 nt, Artificial Sequence
  Description of Artificial Sequence: Synthetic oligonucleotide
gauauccagacuucggucc

SEQ ID NO: 774701 - RNA, 19 nt, Artificial Sequence
  Description of Artificial Sequence: Synthetic oligonucleotide
aacaauggccgagagaaag

SEQ ID NO: 774702 - RNA, 19 nt, Artificial Sequence
  Description of Artificial Sequence: Synthetic oligonucleotide
cuaucaaugagauggcaag

SEQ ID NO: 774703 - RNA, 19 nt, Artificial Sequence
  Description of Artificial Sequence: Synthetic oligonucleotide
aucuagauccuuuucuagg

SEQ ID NO: 774704 - RNA, 19 nt, Artificial Sequence
  Description of Artificial Sequence: Synthetic oligonucleotide
gagauggcaaguuuuaaac

SEQ ID NO: 774705 - RNA, 19 nt, Artificial Sequence
  Description of Artificial Sequence: Synthetic oligonucleotide
uaagcugugggauaugcca

SEQ ID NO: 774706 - RNA, 19 nt, Artificial Sequence
  Description of Artificial Sequence: Synthetic oligonucleotide
acacaugagaucuuugaag

SEQ ID NO: 774707 - RNA, 19 nt, Artificial Sequence
  Description of Artificial Sequence: Synthetic oligonucleotide
ucaaguggggugaacaaug

SEQ ID NO: 774708 - RNA, 19 nt, Artificial Sequence
  Description of Artificial Sequence: Synthetic oligonucleotide
cuaaaccaaacagagagag

SEQ ID NO: 774709 - RNA, 19 nt, Artificial Sequence
  Description of Artificial Sequence: Synthetic oligonucleotide
uccucauaagggcuggucg

SEQ ID NO: 774710 - RNA, 19 nt, Artificial Sequence
  Description of Artificial Sequence: Synthetic oligonucleotide
uucgaauaaauccuucaac

SEQ ID NO: 774711 - RNA, 19 nt, Artificial Sequence
  Description of Artificial Sequence: Synthetic oligonucleotide
ugacuuaugugcaacuucu

SEQ ID NO: 774712 - RNA, 19 nt, Artificial Sequence
  Description of Artificial Sequence: Synthetic oligonucleotide
aguggggugaacaauggcc

SEQ ID NO: 774713 - RNA, 19 nt, Artificial Sequence
  Description of Artificial Sequence: Synthetic oligonucleotide
cuuacuguuugcaauugag

SEQ ID NO: 774714 - RNA, 19 nt, Artificial Sequence
  Description of Artificial Sequence: Synthetic oligonucleotide
uauauguaccccgagauuc

SEQ ID NO: 774715 - RNA, 19 nt, Artificial Sequence
  Description of Artificial Sequence: Synthetic oligonucleotide
gaugugaccaacacaaagc

SEQ ID NO: 774716 - RNA, 19 nt, Artificial Sequence
  Description of Artificial Sequence: Synthetic oligonucleotide
acuguuaggugguguaacc

SEQ ID NO: 774717 - RNA, 19 nt, Artificial Sequence
  Description of Artificial Sequence: Synthetic oligonucleotide
aaucccagaugacuuaugu

SEQ ID NO: 774718 - RNA, 19 nt, Artificial Sequence
  Description of Artificial Sequence: Synthetic oligonucleotide
aaauuaauuccucucuguu

SEQ ID NO: 774719 - RNA, 19 nt, Artificial Sequence
  Description of Artificial Sequence: Synthetic oligonucleotide
uguugagucaucaucccgu

SEQ ID NO: 774720 - RNA, 19 nt, Artificial Sequence
  Description of Artificial Sequence: Synthetic oligonucleotide
auuucggggagcuuuuccg

SEQ ID NO: 774721 - RNA, 19 nt, Artificial Sequence
  Description of Artificial Sequence: Synthetic oligonucleotide
gauccauacagugagagga

SEQ ID NO: 774722 - RNA, 19 nt, Artificial Sequence
  Description of Artificial Sequence: Synthetic oligonucleotide
cuucaacuaggcuucauag

SEQ ID NO: 774723 - RNA, 19 nt, Artificial Sequence
  Description of Artificial Sequence: Synthetic oligonucleotide
uugauauccagacuucggu

SEQ ID NO: 774724 - RNA, 19 nt, Artificial Sequence
  Description of Artificial Sequence: Synthetic oligonucleotide
augacuuaugugcaacuuc

SEQ ID NO: 774725 - RNA, 19 nt, Artificial Sequence
  Description of Artificial Sequence: Synthetic oligonucleotide
uaagguuccacuguagcug

SEQ ID NO: 774726 - RNA, 19 nt, Artificial Sequence
  Description of Artificial Sequence: Synthetic oligonucleotide
uguuaggugguguaacccc

SEQ ID NO: 774727 - RNA, 19 nt, Artificial Sequence
  Description of Artificial Sequence: Synthetic oligonucleotide
cucguuuccacuuaucguc

SEQ ID NO: 774728 - RNA, 19 nt, Artificial Sequence
  Description of Artificial Sequence: Synthetic oligonucleotide
uggggaggaaaucaggaca

SEQ ID NO: 774729 - RNA, 19 nt, Artificial Sequence
  Description of Artificial Sequence: Synthetic oligonucleotide
uucacugauuuuacccugg

SEQ ID NO: 774730 - RNA, 19 nt, Artificial Sequence
  Description of Artificial Sequence: Synthetic oligonucleotide
aagauaaccuggcaacagu

SEQ ID NO: 774731 - RNA, 19 nt, Artificial Sequence
  Description of Artificial Sequence: Synthetic oligonucleotide
uuuuaaacuguaagauaac

SEQ ID NO: 774732 - RNA, 19 nt, Artificial Sequence
  Description of Artificial Sequence: Synthetic oligonucleotide
gagccaugaacauugcuug

SEQ ID NO: 774733 - RNA, 19 nt, Artificial Sequence
  Description of Artificial Sequence: Synthetic oligonucleotide
uccauaguucaucaugcca

SEQ ID NO: 774734 - RNA, 19 nt, Artificial Sequence
  Description of Artificial Sequence: Synthetic oligonucleotide
uuuccgagguagcugugcg

SEQ ID NO: 774735 - RNA, 19 nt, Artificial Sequence
  Description of Artificial Sequence: Synthetic oligonucleotide
uuguaaaccuagaacuaga

SEQ ID NO: 774736 - RNA, 19 nt, Artificial Sequence
  Description of Artificial Sequence: Synthetic oligonucleotide
uguaaaccuagaacuagaa

SEQ ID NO: 774737 - RNA, 19 nt, Artificial Sequence
  Description of Artificial Sequence: Synthetic oligonucleotide
ugccaauaauuucuaaggu

SEQ ID NO: 774738 - RNA, 19 nt, Artificial Sequence
  Description of Artificial Sequence: Synthetic oligonucleotide
auaaauccuucaacuaggc

SEQ ID NO: 774739 - RNA, 19 nt, Artificial Sequence
  Description of Artificial Sequence: Synthetic oligonucleotide
gaaagcaagggcugaugag

SEQ ID NO: 774740 - RNA, 19 nt, Artificial Sequence
  Description of Artificial Sequence: Synthetic oligonucleotide
aucaugcuccccaugauac

SEQ ID NO: 774741 - RNA, 19 nt, Artificial Sequence
  Description of Artificial Sequence: Synthetic oligonucleotide
uaagcucuacauuuccuca

SEQ ID NO: 774742 - RNA, 19 nt, Artificial Sequence
  Description of Artificial Sequence: Synthetic oligonucleotide
ucuaggguguugcuggucu

SEQ ID NO: 774743 - RNA, 19 nt, Artificial Sequence
  Description of Artificial Sequence: Synthetic oligonucleotide
uaagauaaccuggcaacag

SEQ ID NO: 774744 - RNA, 19 nt, Artificial Sequence
  Description of Artificial Sequence: Synthetic oligonucleotide
agagaucuagauccuuuuc

SEQ ID NO: 774745 - RNA, 19 nt, Artificial Sequence
  Description of Artificial Sequence: Synthetic oligonucleotide
guuguaaaccuagaacuag

SEQ ID NO: 774746 - RNA, 19 nt, Artificial Sequence
  Description of Artificial Sequence: Synthetic oligonucleotide
auuugaggcgucugggauc

SEQ ID NO: 774747 - RNA, 19 nt, Artificial Sequence
  Description of Artificial Sequence: Synthetic oligonucleotide
caucugaggacugagaguc

SEQ ID NO: 774748 - RNA, 19 nt, Artificial Sequence
  Description of Artificial Sequence: Synthetic oligonucleotide
augugaccaacacaaagca

SEQ ID NO: 774749 - RNA, 19 nt, Artificial Sequence
  Description of Artificial Sequence: Synthetic oligonucleotide
ugggauaugccaucugagc

SEQ ID NO: 774750 - RNA, 19 nt, Artificial Sequence
  Description of Artificial Sequence: Synthetic oligonucleotide
uccguagaaguucauccca

SEQ ID NO: 774751 - RNA, 19 nt, Artificial Sequence
  Description of Artificial Sequence: Synthetic oligonucleotide
gagaaagcuguccaggcuc

SEQ ID NO: 774752 - RNA, 19 nt, Artificial Sequence
  Description of Artificial Sequence: Synthetic oligonucleotide
aggucuaugaguuggggaa

SEQ ID NO: 774753 - RNA, 19 nt, Artificial Sequence
  Description of Artificial Sequence: Synthetic oligonucleotide
gaaaucaggacaguuggga

SEQ ID NO: 774754 - RNA, 19 nt, Artificial Sequence
  Description of Artificial Sequence: Synthetic oligonucleotide
gagauaggaagaagaagag

SEQ ID NO: 774755 - RNA, 19 nt, Artificial Sequence
  Description of Artificial Sequence: Synthetic oligonucleotide
ggcugaaccccauacauag

SEQ ID NO: 774756 - RNA, 19 nt, Artificial Sequence
  Description of Artificial Sequence: Synthetic oligonucleotide
cuaccaugccuacuggugg

SEQ ID NO: 774757 - RNA, 19 nt, Artificial Sequence
  Description of Artificial Sequence: Synthetic oligonucleotide
uuaucguccuucucuuucc

SEQ ID NO: 774758 - RNA, 19 nt, Artificial Sequence
  Description of Artificial Sequence: Synthetic oligonucleotide
uucaacuaggcuucauaga

SEQ ID NO: 774759 - RNA, 19 nt, Artificial Sequence
  Description of Artificial Sequence: Synthetic oligonucleotide
ugaccaacacaaagcaaca

SEQ ID NO: 774760 - RNA, 19 nt, Artificial Sequence
  Description of Artificial Sequence: Synthetic oligonucleotide
ucaucaugccauuggcucc

SEQ ID NO: 774761 - RNA, 19 nt, Artificial Sequence
  Description of Artificial Sequence: Synthetic oligonucleotide
gaggaaaucaggacaguug

SEQ ID NO: 774762 - RNA, 19 nt, Artificial Sequence
  Description of Artificial Sequence: Synthetic oligonucleotide
cuguccauaguucaucaug

SEQ ID NO: 774763 - RNA, 19 nt, Artificial Sequence
  Description of Artificial Sequence: Synthetic oligonucleotide
uaccccgagauuccugugg

SEQ ID NO: 774764 - RNA, 19 nt, Artificial Sequence
  Description of Artificial Sequence: Synthetic oligonucleotide
uuucuaaggugcuggugcc

SEQ ID NO: 774765 - RNA, 19 nt, Artificial Sequence
  Description of Artificial Sequence: Synthetic oligonucleotide
uuugaggcgucugggaucc

SEQ ID NO: 774766 - RNA, 19 nt, Artificial Sequence
  Description of Artificial Sequence: Synthetic oligonucleotide
aacggguucacucccucgu

SEQ ID NO: 774767 - RNA, 19 nt, Artificial Sequence
  Description of Artificial Sequence: Synthetic oligonucleotide
gacaguugggaugugacca

SEQ ID NO: 774768 - RNA, 19 nt, Artificial Sequence
  Description of Artificial Sequence: Synthetic oligonucleotide
uuuacccuggauauaugua

SEQ ID NO: 774769 - RNA, 19 nt, Artificial Sequence
  Description of Artificial Sequence: Synthetic oligonucleotide
cuuacaccuggaaaaggug

SEQ ID NO: 774770 - RNA, 19 nt, Artificial Sequence
  Description of Artificial Sequence: Synthetic oligonucleotide
aacagacgccaagagaucu

SEQ ID NO: 774771 - RNA, 19 nt, Artificial Sequence
  Description of Artificial Sequence: Synthetic oligonucleotide
ugggcaaacagcacucaga

SEQ ID NO: 774772 - RNA, 19 nt, Artificial Sequence
  Description of Artificial Sequence: Synthetic oligonucleotide
ugaguaagguuccacugua

SEQ ID NO: 774773 - RNA, 19 nt, Artificial Sequence
  Description of Artificial Sequence: Synthetic oligonucleotide
ugccaugcuugccauguag

SEQ ID NO: 774774 - RNA, 19 nt, Artificial Sequence
  Description of Artificial Sequence: Synthetic oligonucleotide
gagacgguuugccuuuccg

SEQ ID NO: 774775 - RNA, 19 nt, Artificial Sequence
  Description of Artificial Sequence: Synthetic oligonucleotide
gauuucggggagcuuuucc

SEQ ID NO: 774776 - RNA, 19 nt, Artificial Sequence
  Description of Artificial Sequence: Synthetic oligonucleotide
ugauauccagacuucgguc

SEQ ID NO: 774777 - RNA, 19 nt, Artificial Sequence
  Description of Artificial Sequence: Synthetic oligonucleotide
cugaaccccauacauaguc

SEQ ID NO: 774778 - RNA, 19 nt, Artificial Sequence
  Description of Artificial Sequence: Synthetic oligonucleotide
acgccaagagaucuagauc

SEQ ID NO: 774779 - RNA, 19 nt, Artificial Sequence
  Description of Artificial Sequence: Synthetic oligonucleotide
auauguaccccgagauucc

SEQ ID NO: 774780 - RNA, 19 nt, Artificial Sequence
  Description of Artificial Sequence: Synthetic oligonucleotide
uguaccccgagauuccugu

SEQ ID NO: 774781 - RNA, 19 nt, Artificial Sequence
  Description of Artificial Sequence: Synthetic oligonucleotide
ugaaccccauacauagucu

SEQ ID NO: 774782 - RNA, 19 nt, Artificial Sequence
  Description of Artificial Sequence: Synthetic oligonucleotide
gaaauuaauuccucucugu

SEQ ID NO: 774783 - RNA, 19 nt, Artificial Sequence
  Description of Artificial Sequence: Synthetic oligonucleotide
ucguuuccacuuaucgucc

SEQ ID NO: 774784 - RNA, 19 nt, Artificial Sequence
  Description of Artificial Sequence: Synthetic oligonucleotide
gagggaacuaucaaugaga

SEQ ID NO: 774785 - RNA, 19 nt, Artificial Sequence
  Description of Artificial Sequence: Synthetic oligonucleotide
uuugcucccuggcucagga

SEQ ID NO: 774786 - RNA, 19 nt, Artificial Sequence
  Description of Artificial Sequence: Synthetic oligonucleotide
caaguggggugaacaaugg

SEQ ID NO: 774787 - RNA, 19 nt, Artificial Sequence
  Description of Artificial Sequence: Synthetic oligonucleotide
aggugguguaaccccaggg

SEQ ID NO: 774788 - RNA, 19 nt, Artificial Sequence
  Description of Artificial Sequence: Synthetic oligonucleotide
ugguugagcuaccaugccu

SEQ ID NO: 774789 - RNA, 19 nt, Artificial Sequence
  Description of Artificial Sequence: Synthetic oligonucleotide
uuaggugguguaaccccag

SEQ ID NO: 774790 - RNA, 19 nt, Artificial Sequence
  Description of Artificial Sequence: Synthetic oligonucleotide
agaucuagauccuuuucua

SEQ ID NO: 774791 - RNA, 19 nt, Artificial Sequence
  Description of Artificial Sequence: Synthetic oligonucleotide
cucuacauuuccucauaag

SEQ ID NO: 774792 - RNA, 19 nt, Artificial Sequence
  Description of Artificial Sequence: Synthetic oligonucleotide
cgccaagagaucuagaucc

SEQ ID NO: 774793 - RNA, 19 nt, Artificial Sequence
  Description of Artificial Sequence: Synthetic oligonucleotide
cuccguagaaguucauccc

SEQ ID NO: 774794 - RNA, 19 nt, Artificial Sequence
  Description of Artificial Sequence: Synthetic oligonucleotide
ucgagguucacugauuuua

SEQ ID NO: 774795 - RNA, 19 nt, Artificial Sequence
  Description of Artificial Sequence: Synthetic oligonucleotide
ucuugaguccacuggucga

SEQ ID NO: 774796 - RNA, 19 nt, Artificial Sequence
  Description of Artificial Sequence: Synthetic oligonucleotide
ucaagcagagugauauuuu

SEQ ID NO: 774797 - RNA, 19 nt, Artificial Sequence
  Description of Artificial Sequence: Synthetic oligonucleotide
caacagagaggucuaugag

SEQ ID NO: 774798 - RNA, 19 nt, Artificial Sequence
  Description of Artificial Sequence: Synthetic oligonucleotide
acuucgguccauauauuuc

SEQ ID NO: 774799 - RNA, 19 nt, Artificial Sequence
  Description of Artificial Sequence: Synthetic oligonucleotide
guagcuggccuguugaguc

SEQ ID NO: 774800 - RNA, 19 nt, Artificial Sequence
  Description of Artificial Sequence: Synthetic oligonucleotide
cuguugagucaucaucccg

SEQ ID NO: 774801 - RNA, 19 nt, Artificial Sequence
  Description of Artificial Sequence: Synthetic oligonucleotide
uggggcauagcugccaugc

SEQ ID NO: 774802 - RNA, 19 nt, Artificial Sequence
  Description of Artificial Sequence: Synthetic oligonucleotide
gguguugcuggucuuacug

SEQ ID NO: 774803 - RNA, 19 nt, Artificial Sequence
  Description of Artificial Sequence: Synthetic oligonucleotide
acuguaagauaaccuggca

SEQ ID NO: 774804 - RNA, 19 nt, Artificial Sequence
  Description of Artificial Sequence: Synthetic oligonucleotide
auacacaggagaaaggcaa

SEQ ID NO: 774805 - RNA, 19 nt, Artificial Sequence
  Description of Artificial Sequence: Synthetic oligonucleotide
aaccccauacauagucugg

SEQ ID NO: 774806 - RNA, 19 nt, Artificial Sequence
  Description of Artificial Sequence: Synthetic oligonucleotide
gauggaacagacgccaaga

SEQ ID NO: 774807 - RNA, 19 nt, Artificial Sequence
  Description of Artificial Sequence: Synthetic oligonucleotide
cacuggucgagguucacug

SEQ ID NO: 774808 - RNA, 19 nt, Artificial Sequence
  Description of Artificial Sequence: Synthetic oligonucleotide
cauugacuguccauaguuc

SEQ ID NO: 774809 - RNA, 19 nt, Artificial Sequence
  Description of Artificial Sequence: Synthetic oligonucleotide
caauugagcaggccacagg

SEQ ID NO: 774810 - RNA, 19 nt, Artificial Sequence
  Description of Artificial Sequence: Synthetic oligonucleotide
guugggaugugaccaacac

SEQ ID NO: 774811 - RNA, 19 nt, Artificial Sequence
  Description of Artificial Sequence: Synthetic oligonucleotide
caucccguugggcacaccc

SEQ ID NO: 774812 - RNA, 19 nt, Artificial Sequence
  Description of Artificial Sequence: Synthetic oligonucleotide
ugugaccaacacaaagcaa

SEQ ID NO: 774813 - RNA, 19 nt, Artificial Sequence
  Description of Artificial Sequence: Synthetic oligonucleotide
aacuaucaaugagauggca

SEQ ID NO: 774814 - RNA, 19 nt, Artificial Sequence
  Description of Artificial Sequence: Synthetic oligonucleotide
ggagggaacuaucaaugag

SEQ ID NO: 774815 - RNA, 19 nt, Artificial Sequence
  Description of Artificial Sequence: Synthetic oligonucleotide
ugggucaucugaguaaggu

SEQ ID NO: 774816 - RNA, 19 nt, Artificial Sequence
  Description of Artificial Sequence: Synthetic oligonucleotide
cucucagagucaagcagag

SEQ ID NO: 774817 - RNA, 19 nt, Artificial Sequence
  Description of Artificial Sequence: Synthetic oligonucleotide
gcgucugggauccauacag

SEQ ID NO: 774818 - RNA, 19 nt, Artificial Sequence
  Description of Artificial Sequence: Synthetic oligonucleotide
gaacggguucacucccucg

SEQ ID NO: 774819 - RNA, 19 nt, Artificial Sequence
  Description of Artificial Sequence: Synthetic oligonucleotide
uggaucuguucuugagucc

SEQ ID NO: 774820 - RNA, 19 nt, Artificial Sequence
  Description of Artificial Sequence: Synthetic oligonucleotide
uggccauuuccacugccca

SEQ ID NO: 774821 - RNA, 19 nt, Artificial Sequence
  Description of Artificial Sequence: Synthetic oligonucleotide
ugguguaaccccagggaaa

SEQ ID NO: 774822 - RNA, 19 nt, Artificial Sequence
  Description of Artificial Sequence: Synthetic oligonucleotide
gauuuuacccuggauauau

SEQ ID NO: 774823 - RNA, 19 nt, Artificial Sequence
  Description of Artificial Sequence: Synthetic oligonucleotide
gaggucuaugaguugggga

SEQ ID NO: 774824 - RNA, 19 nt, Artificial Sequence
  Description of Artificial Sequence: Synthetic oligonucleotide
aucccagaugacuuaugug

SEQ ID NO: 774825 - RNA, 19 nt, Artificial Sequence
  Description of Artificial Sequence: Synthetic oligonucleotide
agacacgagggcaucagag

SEQ ID NO: 774826 - RNA, 19 nt, Artificial Sequence
  Description of Artificial Sequence: Synthetic oligonucleotide
uuuuccgagguagcugugc

SEQ ID NO: 774827 - RNA, 19 nt, Artificial Sequence
  Description of Artificial Sequence: Synthetic oligonucleotide
agagacgguuugccuuucc

SEQ ID NO: 774828 - RNA, 19 nt, Artificial Sequence
  Description of Artificial Sequence: Synthetic oligonucleotide
gacuguccauaguucauca

SEQ ID NO: 774829 - RNA, 19 nt, Artificial Sequence
  Description of Artificial Sequence: Synthetic oligonucleotide
auauccagacuucggucca

SEQ ID NO: 774830 - RNA, 19 nt, Artificial Sequence
  Description of Artificial Sequence: Synthetic oligonucleotide
ucggggagcuuuuccgagg

SEQ ID NO: 774831 - RNA, 19 nt, Artificial Sequence
  Description of Artificial Sequence: Synthetic oligonucleotide
auagagacgguuugccuuu

SEQ ID NO: 774832 - RNA, 19 nt, Artificial Sequence
  Description of Artificial Sequence: Synthetic oligonucleotide
ucacugauuuuacccugga

SEQ ID NO: 774833 - RNA, 19 nt, Artificial Sequence
  Description of Artificial Sequence: Synthetic oligonucleotide
agacgguuugccuuuccgu

SEQ ID NO: 774834 - RNA, 19 nt, Artificial Sequence
  Description of Artificial Sequence: Synthetic oligonucleotide
cuggccauuuccacugccc

SEQ ID NO: 774835 - RNA, 19 nt, Artificial Sequence
  Description of Artificial Sequence: Synthetic oligonucleotide
auauauguaccccgagauu

SEQ ID NO: 774836 - RNA, 19 nt, Artificial Sequence
  Description of Artificial Sequence: Synthetic oligonucleotide
caucaugccauuggcuccg

SEQ ID NO: 774837 - RNA, 19 nt, Artificial Sequence
  Description of Artificial Sequence: Synthetic oligonucleotide
gggauaugccaucugagca

SEQ ID NO: 774838 - RNA, 19 nt, Artificial Sequence
  Description of Artificial Sequence: Synthetic oligonucleotide
aggagggaacuaucaauga

SEQ ID NO: 774839 - RNA, 19 nt, Artificial Sequence
  Description of Artificial Sequence: Synthetic oligonucleotide
acacauacagcggugcaca

SEQ ID NO: 774840 - RNA, 19 nt, Artificial Sequence
  Description of Artificial Sequence: Synthetic oligonucleotide
agaaaggcaaccaggcgcu

SEQ ID NO: 774841 - RNA, 19 nt, Artificial Sequence
  Description of Artificial Sequence: Synthetic oligonucleotide
cuguaagauaaccuggcaa

SEQ ID NO: 774842 - RNA, 19 nt, Artificial Sequence
  Description of Artificial Sequence: Synthetic oligonucleotide
cuguuaggugguguaaccc

SEQ ID NO: 774843 - RNA, 19 nt, Artificial Sequence
  Description of Artificial Sequence: Synthetic oligonucleotide
cuugaguccacuggucgag

SEQ ID NO: 774844 - RNA, 19 nt, Artificial Sequence
  Description of Artificial Sequence: Synthetic oligonucleotide
gacacgagggcaucagaga

SEQ ID NO: 774845 - RNA, 19 nt, Artificial Sequence
  Description of Artificial Sequence: Synthetic oligonucleotide
agaggucuaugaguugggg

SEQ ID NO: 774846 - RNA, 19 nt, Artificial Sequence
  Description of Artificial Sequence: Synthetic oligonucleotide
guaaccccagggaaacugg

SEQ ID NO: 774847 - RNA, 19 nt, Artificial Sequence
  Description of Artificial Sequence: Synthetic oligonucleotide
acauacagcggugcacacg

SEQ ID NO: 774848 - RNA, 19 nt, Artificial Sequence
  Description of Artificial Sequence: Synthetic oligonucleotide
cuucgaauaaauccuucaa

SEQ ID NO: 774849 - RNA, 19 nt, Artificial Sequence
  Description of Artificial Sequence: Synthetic oligonucleotide
aucuucgaauaaauccuuc

SEQ ID NO: 774850 - RNA, 19 nt, Artificial Sequence
  Description of Artificial Sequence: Synthetic oligonucleotide
uuuccacaucugaggacug

SEQ ID NO: 774851 - RNA, 19 nt, Artificial Sequence
  Description of Artificial Sequence: Synthetic oligonucleotide
aaagcuguccaggcucucu

SEQ ID NO: 774852 - RNA, 19 nt, Artificial Sequence
  Description of Artificial Sequence: Synthetic oligonucleotide
auggccgagagaaagcugu

SEQ ID NO: 774853 - RNA, 19 nt, Artificial Sequence
  Description of Artificial Sequence: Synthetic oligonucleotide
agcggugcacacgcuaagc

SEQ ID NO: 774854 - RNA, 19 nt, Artificial Sequence
  Description of Artificial Sequence: Synthetic oligonucleotide
caguuuuagacuguugaga

SEQ ID NO: 774855 - RNA, 19 nt, Artificial Sequence
  Description of Artificial Sequence: Synthetic oligonucleotide
cugauuuuacccuggauau

SEQ ID NO: 774856 - RNA, 19 nt, Artificial Sequence
  Description of Artificial Sequence: Synthetic oligonucleotide
ggcgucaaggcccaacaag

SEQ ID NO: 774857 - RNA, 19 nt, Artificial Sequence
  Description of Artificial Sequence: Synthetic oligonucleotide
ugauacuguuagguggugu

SEQ ID NO: 774858 - RNA, 19 nt, Artificial Sequence
  Description of Artificial Sequence: Synthetic oligonucleotide
acaaaacagccagagcaga

SEQ ID NO: 774859 - RNA, 19 nt, Artificial Sequence
  Description of Artificial Sequence: Synthetic oligonucleotide
uccccaugauacuguuagg

SEQ ID NO: 774860 - RNA, 19 nt, Artificial Sequence
  Description of Artificial Sequence: Synthetic oligonucleotide
uggcaaguuuuaaacugua

SEQ ID NO: 774861 - RNA, 19 nt, Artificial Sequence
  Description of Artificial Sequence: Synthetic oligonucleotide
ucuuucccugcaauauuua

SEQ ID NO: 774862 - RNA, 19 nt, Artificial Sequence
  Description of Artificial Sequence: Synthetic oligonucleotide
uguagcuggccuguugagu

SEQ ID NO: 774863 - RNA, 19 nt, Artificial Sequence
  Description of Artificial Sequence: Synthetic oligonucleotide
uaucguccuucucuuuccu

SEQ ID NO: 774864 - RNA, 19 nt, Artificial Sequence
  Description of Artificial Sequence: Synthetic oligonucleotide
aaaggcaaccaggcgcugu

SEQ ID NO: 774865 - RNA, 19 nt, Artificial Sequence
  Description of Artificial Sequence: Synthetic oligonucleotide
guaagauaaccuggcaaca

SEQ ID NO: 774866 - RNA, 19 nt, Artificial Sequence
  Description of Artificial Sequence: Synthetic oligonucleotide
cuucgguccauauauuucu

SEQ ID NO: 774867 - RNA, 19 nt, Artificial Sequence
  Description of Artificial Sequence: Synthetic oligonucleotide
gucaucugaguaagguucc

SEQ ID NO: 774868 - RNA, 19 nt, Artificial Sequence
  Description of Artificial Sequence: Synthetic oligonucleotide
guccauaguucaucaugcc

SEQ ID NO: 774869 - RNA, 19 nt, Artificial Sequence
  Description of Artificial Sequence: Synthetic oligonucleotide
uucaaguggggugaacaau

SEQ ID NO: 774870 - RNA, 19 nt, Artificial Sequence
  Description of Artificial Sequence: Synthetic oligonucleotide
gacgccaagagaucuagau

SEQ ID NO: 774871 - RNA, 19 nt, Artificial Sequence
  Description of Artificial Sequence: Synthetic oligonucleotide
cuggaacggguucacuccc

SEQ ID NO: 774872 - RNA, 19 nt, Artificial Sequence
  Description of Artificial Sequence: Synthetic oligonucleotide
ugacuguccauaguucauc

SEQ ID NO: 774873 - RNA, 19 nt, Artificial Sequence
  Description of Artificial Sequence: Synthetic oligonucleotide
guaagguuccacuguagcu

SEQ ID NO: 774874 - RNA, 19 nt, Artificial Sequence
  Description of Artificial Sequence: Synthetic oligonucleotide
gaguaagguuccacuguag

SEQ ID NO: 774875 - RNA, 19 nt, Artificial Sequence
  Description of Artificial Sequence: Synthetic oligonucleotide
cagacuucgguccauauau

SEQ ID NO: 774876 - RNA, 19 nt, Artificial Sequence
  Description of Artificial Sequence: Synthetic oligonucleotide
auaguucaucaugccauug

SEQ ID NO: 774877 - RNA, 19 nt, Artificial Sequence
  Description of Artificial Sequence: Synthetic oligonucleotide
uaccaugccuacugguggu

SEQ ID NO: 774878 - RNA, 19 nt, Artificial Sequence
  Description of Artificial Sequence: Synthetic oligonucleotide
agauccuuuucuagggugu

SEQ ID NO: 774879 - RNA, 19 nt, Artificial Sequence
  Description of Artificial Sequence: Synthetic oligonucleotide
gaagaggagagggcuagga

SEQ ID NO: 774880 - RNA, 19 nt, Artificial Sequence
  Description of Artificial Sequence: Synthetic oligonucleotide
cccucguuuccacuuaucg

SEQ ID NO: 774881 - RNA, 19 nt, Artificial Sequence
  Description of Artificial Sequence: Synthetic oligonucleotide
gccuguugagucaucaucc

SEQ ID NO: 774882 - RNA, 19 nt, Artificial Sequence
  Description of Artificial Sequence: Synthetic oligonucleotide
agcuaccaugccuacuggu

SEQ ID NO: 774883 - RNA, 19 nt, Artificial Sequence
  Description of Artificial Sequence: Synthetic oligonucleotide
uugaguccacuggucgagg

SEQ ID NO: 774884 - RNA, 19 nt, Artificial Sequence
  Description of Artificial Sequence: Synthetic oligonucleotide
acauagucuggggcauagc

SEQ ID NO: 774885 - RNA, 19 nt, Artificial Sequence
  Description of Artificial Sequence: Synthetic oligonucleotide
ccgagauuccuguggaucc

SEQ ID NO: 774886 - RNA, 19 nt, Artificial Sequence
  Description of Artificial Sequence: Synthetic oligonucleotide
cuaaggugcuggugccagg

SEQ ID NO: 774887 - RNA, 19 nt, Artificial Sequence
  Description of Artificial Sequence: Synthetic oligonucleotide
agcaacagagaggucuaug

SEQ ID NO: 774888 - RNA, 19 nt, Artificial Sequence
  Description of Artificial Sequence: Synthetic oligonucleotide
cuggaaaaggugggcaaac

SEQ ID NO: 774889 - RNA, 19 nt, Artificial Sequence
  Description of Artificial Sequence: Synthetic oligonucleotide
cauagucuggggcauagcu

SEQ ID NO: 774890 - RNA, 19 nt, Artificial Sequence
  Description of Artificial Sequence: Synthetic oligonucleotide
gccaugaacauugcuuggg

SEQ ID NO: 774891 - RNA, 19 nt, Artificial Sequence
  Description of Artificial Sequence: Synthetic oligonucleotide
cugguugagcuaccaugcc

SEQ ID NO: 774892 - RNA, 19 nt, Artificial Sequence
  Description of Artificial Sequence: Synthetic oligonucleotide
uauguaccccgagauuccu

SEQ ID NO: 774893 - RNA, 19 nt, Artificial Sequence
  Description of Artificial Sequence: Synthetic oligonucleotide
auauaggagcuuugcuuuu

SEQ ID NO: 774894 - RNA, 19 nt, Artificial Sequence
  Description of Artificial Sequence: Synthetic oligonucleotide
caaccaggcgcugugguuc

SEQ ID NO: 774895 - RNA, 19 nt, Artificial Sequence
  Description of Artificial Sequence: Synthetic oligonucleotide
uggggugaacaauggccga

SEQ ID NO: 774896 - RNA, 19 nt, Artificial Sequence
  Description of Artificial Sequence: Synthetic oligonucleotide
uaggcuucauagagacggu

SEQ ID NO: 774897 - RNA, 19 nt, Artificial Sequence
  Description of Artificial Sequence: Synthetic oligonucleotide
cucuguuguaaaccuagaa

SEQ ID NO: 774898 - RNA, 19 nt, Artificial Sequence
  Description of Artificial Sequence: Synthetic oligonucleotide
cagacgccaagagaucuag

SEQ ID NO: 774899 - RNA, 19 nt, Artificial Sequence
  Description of Artificial Sequence: Synthetic oligonucleotide
uuaauuccucucuguugua

SEQ ID NO: 774900 - RNA, 19 nt, Artificial Sequence
  Description of Artificial Sequence: Synthetic oligonucleotide
cacacaugagaucuuugaa

SEQ ID NO: 774901 - RNA, 19 nt, Artificial Sequence
  Description of Artificial Sequence: Synthetic oligonucleotide
ggaaaucaggacaguuggg

SEQ ID NO: 774902 - RNA, 19 nt, Artificial Sequence
  Description of Artificial Sequence: Synthetic oligonucleotide
uggcugaaccccauacaua

SEQ ID NO: 774903 - RNA, 19 nt, Artificial Sequence
  Description of Artificial Sequence: Synthetic oligonucleotide
guuaggugguguaacccca

SEQ ID NO: 774904 - RNA, 19 nt, Artificial Sequence
  Description of Artificial Sequence: Synthetic oligonucleotide
uuccuaaggcauugauauc

SEQ ID NO: 774905 - RNA, 19 nt, Artificial Sequence
  Description of Artificial Sequence: Synthetic oligonucleotide
acaguugggaugugaccaa

SEQ ID NO: 774906 - RNA, 19 nt, Artificial Sequence
  Description of Artificial Sequence: Synthetic oligonucleotide
gucuuacuguuugcaauug

SEQ ID NO: 774907 - RNA, 19 nt, Artificial Sequence
  Description of Artificial Sequence: Synthetic oligonucleotide
ucccguugggcacacccau

SEQ ID NO: 774908 - RNA, 19 nt, Artificial Sequence
  Description of Artificial Sequence: Synthetic oligonucleotide
ccaaacagagagagauagg

SEQ ID NO: 774909 - RNA, 19 nt, Artificial Sequence
  Description of Artificial Sequence: Synthetic oligonucleotide
acacgcuaagcucuacauu

SEQ ID NO: 774910 - RNA, 19 nt, Artificial Sequence
  Description of Artificial Sequence: Synthetic oligonucleotide
acuggucgagguucacuga

SEQ ID NO: 774911 - RNA, 19 nt, Artificial Sequence
  Description of Artificial Sequence: Synthetic oligonucleotide
gugaacaauggccgagaga

SEQ ID NO: 774912 - RNA, 19 nt, Artificial Sequence
  Description of Artificial Sequence: Synthetic oligonucleotide
agcucuacauuuccucaua

SEQ ID NO: 774913 - RNA, 19 nt, Artificial Sequence
  Description of Artificial Sequence: Synthetic oligonucleotide
cauaagggcuggucguuca

SEQ ID NO: 774914 - RNA, 19 nt, Artificial Sequence
  Description of Artificial Sequence: Synthetic oligonucleotide
guuugcaauugagcaggcc

SEQ ID NO: 774915 - RNA, 19 nt, Artificial Sequence
  Description of Artificial Sequence: Synthetic oligonucleotide
uggaacggguucacucccu

SEQ ID NO: 774916 - RNA, 19 nt, Artificial Sequence
  Description of Artificial Sequence: Synthetic oligonucleotide
guugagcuaccaugccuac

SEQ ID NO: 774917 - RNA, 19 nt, Artificial Sequence
  Description of Artificial Sequence: Synthetic oligonucleotide
ucauaagggcuggucguuc

SEQ ID NO: 774918 - RNA, 19 nt, Artificial Sequence
  Description of Artificial Sequence: Synthetic oligonucleotide
cagccuuucuggaaacuga

SEQ ID NO: 774919 - RNA, 19 nt, Artificial Sequence
  Description of Artificial Sequence: Synthetic oligonucleotide
acuaggcuucauagagacg

SEQ ID NO: 774920 - RNA, 19 nt, Artificial Sequence
  Description of Artificial Sequence: Synthetic oligonucleotide
cccaugauacuguuaggug

SEQ ID NO: 774921 - RNA, 19 nt, Artificial Sequence
  Description of Artificial Sequence: Synthetic oligonucleotide
uucuaaggugcuggugcca

SEQ ID NO: 774922 - RNA, 19 nt, Artificial Sequence
  Description of Artificial Sequence: Synthetic oligonucleotide
gcuaccaugccuacuggug

SEQ ID NO: 774923 - RNA, 19 nt, Artificial Sequence
  Description of Artificial Sequence: Synthetic oligonucleotide
ggaucuguucuugagucca

SEQ ID NO: 774924 - RNA, 19 nt, Artificial Sequence
  Description of Artificial Sequence: Synthetic oligonucleotide
uguacccucuucugccaau

SEQ ID NO: 774925 - RNA, 19 nt, Artificial Sequence
  Description of Artificial Sequence: Synthetic oligonucleotide
agauuucggggagcuuuuc

SEQ ID NO: 774926 - RNA, 19 nt, Artificial Sequence
  Description of Artificial Sequence: Synthetic oligonucleotide
gacuucgguccauauauuu

SEQ ID NO: 774927 - RNA, 19 nt, Artificial Sequence
  Description of Artificial Sequence: Synthetic oligonucleotide
ucccugcaauauuuauuaa

SEQ ID NO: 774928 - RNA, 19 nt, Artificial Sequence
  Description of Artificial Sequence: Synthetic oligonucleotide
gggccaccauuccagaggc

SEQ ID NO: 774929 - RNA, 19 nt, Artificial Sequence
  Description of Artificial Sequence: Synthetic oligonucleotide
cagccauauaggagcuuug

SEQ ID NO: 774930 - RNA, 19 nt, Artificial Sequence
  Description of Artificial Sequence: Synthetic oligonucleotide
auacuguuaggugguguaa

SEQ ID NO: 774931 - RNA, 19 nt, Artificial Sequence
  Description of Artificial Sequence: Synthetic oligonucleotide
uccagacuucgguccauau

SEQ ID NO: 774932 - RNA, 19 nt, Artificial Sequence
  Description of Artificial Sequence: Synthetic oligonucleotide
gggcaguucauguacccuc

SEQ ID NO: 774933 - RNA, 19 nt, Artificial Sequence
  Description of Artificial Sequence: Synthetic oligonucleotide
cacauacagcggugcacac

SEQ ID NO: 774934 - RNA, 19 nt, Artificial Sequence
  Description of Artificial Sequence: Synthetic oligonucleotide
aguugggaugugaccaaca

SEQ ID NO: 774935 - RNA, 19 nt, Artificial Sequence
  Description of Artificial Sequence: Synthetic oligonucleotide
ggaaacugggguaagcugu

SEQ ID NO: 774936 - RNA, 19 nt, Artificial Sequence
  Description of Artificial Sequence: Synthetic oligonucleotide
cauccacacauacagcggu

SEQ ID NO: 774937 - RNA, 19 nt, Artificial Sequence
  Description of Artificial Sequence: Synthetic oligonucleotide
gguggggaggaaaucagga

SEQ ID NO: 774938 - RNA, 19 nt, Artificial Sequence
  Description of Artificial Sequence: Synthetic oligonucleotide
uggucgagguucacugauu

SEQ ID NO: 774939 - RNA, 19 nt, Artificial Sequence
  Description of Artificial Sequence: Synthetic oligonucleotide
gccgagagaaagcugucca

SEQ ID NO: 774940 - RNA, 19 nt, Artificial Sequence
  Description of Artificial Sequence: Synthetic oligonucleotide
gggaacuaucaaugagaug

SEQ ID NO: 774941 - RNA, 19 nt, Artificial Sequence
  Description of Artificial Sequence: Synthetic oligonucleotide
aggggcgucaaggcccaac

SEQ ID NO: 774942 - RNA, 19 nt, Artificial Sequence
  Description of Artificial Sequence: Synthetic oligonucleotide
gaugacuuaugugcaacuu

SEQ ID NO: 774943 - RNA, 19 nt, Artificial Sequence
  Description of Artificial Sequence: Synthetic oligonucleotide
augauacuguuagguggug

SEQ ID NO: 774944 - RNA, 19 nt, Artificial Sequence
  Description of Artificial Sequence: Synthetic oligonucleotide
ucacucccucguuuccacu

SEQ ID NO: 774945 - RNA, 19 nt, Artificial Sequence
  Description of Artificial Sequence: Synthetic oligonucleotide
ggcuggguugggcaggaug

SEQ ID NO: 774946 - RNA, 19 nt, Artificial Sequence
  Description of Artificial Sequence: Synthetic oligonucleotide
ggcugcagauuucggggag

SEQ ID NO: 774947 - RNA, 19 nt, Artificial Sequence
  Description of Artificial Sequence: Synthetic oligonucleotide
ggagcuuuuccgagguagc

SEQ ID NO: 774948 - RNA, 19 nt, Artificial Sequence
  Description of Artificial Sequence: Synthetic oligonucleotide
aucaucccguugggcacac

SEQ ID NO: 774949 - RNA, 19 nt, Artificial Sequence
  Description of Artificial Sequence: Synthetic oligonucleotide
uggccgagagaaagcuguc

SEQ ID NO: 774950 - RNA, 19 nt, Artificial Sequence
  Description of Artificial Sequence: Synthetic oligonucleotide
ccccauacauagucugggg

SEQ ID NO: 774951 - RNA, 19 nt, Artificial Sequence
  Description of Artificial Sequence: Synthetic oligonucleotide
gguugagcuaccaugccua

SEQ ID NO: 774952 - RNA, 19 nt, Artificial Sequence
  Description of Artificial Sequence: Synthetic oligonucleotide
ccgagagaaagcuguccag

SEQ ID NO: 774953 - RNA, 19 nt, Artificial Sequence
  Description of Artificial Sequence: Synthetic oligonucleotide
cugugggauaugccaucug

SEQ ID NO: 774954 - RNA, 19 nt, Artificial Sequence
  Description of Artificial Sequence: Synthetic oligonucleotide
uaggguguugcuggucuua

SEQ ID NO: 774955 - RNA, 19 nt, Artificial Sequence
  Description of Artificial Sequence: Synthetic oligonucleotide
gcauuugaggcgucuggga

SEQ ID NO: 774956 - RNA, 19 nt, Artificial Sequence
  Description of Artificial Sequence: Synthetic oligonucleotide
ugaggcgucugggauccau

SEQ ID NO: 774957 - RNA, 19 nt, Artificial Sequence
  Description of Artificial Sequence: Synthetic oligonucleotide
ggggugaacaauggccgag

SEQ ID NO: 774958 - RNA, 19 nt, Artificial Sequence
  Description of Artificial Sequence: Synthetic oligonucleotide
guaccccgagauuccugug

SEQ ID NO: 774959 - RNA, 19 nt, Artificial Sequence
  Description of Artificial Sequence: Synthetic oligonucleotide
auccauacagugagaggau

SEQ ID NO: 774960 - RNA, 19 nt, Artificial Sequence
  Description of Artificial Sequence: Synthetic oligonucleotide
uucuaggguguugcugguc

SEQ ID NO: 774961 - RNA, 19 nt, Artificial Sequence
  Description of Artificial Sequence: Synthetic oligonucleotide
uguagccugcaggcauggc

SEQ ID NO: 774962 - RNA, 19 nt, Artificial Sequence
  Description of Artificial Sequence: Synthetic oligonucleotide
cagcggugcacacgcuaag

SEQ ID NO: 774963 - RNA, 19 nt, Artificial Sequence
  Description of Artificial Sequence: Synthetic oligonucleotide
ggguucacucccucguuuc

SEQ ID NO: 774964 - RNA, 19 nt, Artificial Sequence
  Description of Artificial Sequence: Synthetic oligonucleotide
cacacccaucauggaagcc

SEQ ID NO: 774965 - RNA, 19 nt, Artificial Sequence
  Description of Artificial Sequence: Synthetic oligonucleotide
caguugggaugugaccaac

SEQ ID NO: 774966 - RNA, 19 nt, Artificial Sequence
  Description of Artificial Sequence: Synthetic oligonucleotide
acagcggugcacacgcuaa

SEQ ID NO: 774967 - RNA, 19 nt, Artificial Sequence
  Description of Artificial Sequence: Synthetic oligonucleotide
ggugcacacgcuaagcucu

SEQ ID NO: 774968 - RNA, 19 nt, Artificial Sequence
  Description of Artificial Sequence: Synthetic oligonucleotide
ggagccaugaacauugcuu

SEQ ID NO: 774969 - RNA, 19 nt, Artificial Sequence
  Description of Artificial Sequence: Synthetic oligonucleotide
cacacgcuaagcucuacau

SEQ ID NO: 774970 - RNA, 19 nt, Artificial Sequence
  Description of Artificial Sequence: Synthetic oligonucleotide
gaugagaguggcagccaua

SEQ ID NO: 774971 - RNA, 19 nt, Artificial Sequence
  Description of Artificial Sequence: Synthetic oligonucleotide
gcauugauauccagacuuc

SEQ ID NO: 774972 - RNA, 19 nt, Artificial Sequence
  Description of Artificial Sequence: Synthetic oligonucleotide
accaugccuacugguggug

SEQ ID NO: 774973 - RNA, 19 nt, Artificial Sequence
  Description of Artificial Sequence: Synthetic oligonucleotide
accuggcaacaguuuuaga

SEQ ID NO: 774974 - RNA, 19 nt, Artificial Sequence
  Description of Artificial Sequence: Synthetic oligonucleotide
cgcuaagcucuacauuucc

SEQ ID NO: 774975 - RNA, 19 nt, Artificial Sequence
  Description of Artificial Sequence: Synthetic oligonucleotide
gacuuaugugcaacuucua

SEQ ID NO: 774976 - RNA, 19 nt, Artificial Sequence
  Description of Artificial Sequence: Synthetic oligonucleotide
ggucuuacuguuugcaauu

SEQ ID NO: 774977 - RNA, 19 nt, Artificial Sequence
  Description of Artificial Sequence: Synthetic oligonucleotide
caauggccgagagaaagcu

SEQ ID NO: 774978 - RNA, 19 nt, Artificial Sequence
  Description of Artificial Sequence: Synthetic oligonucleotide
ugccuacuggugguggcau

SEQ ID NO: 774979 - RNA, 19 nt, Artificial Sequence
  Description of Artificial Sequence: Synthetic oligonucleotide
auguaccccgagauuccug

SEQ ID NO: 774980 - RNA, 19 nt, Artificial Sequence
  Description of Artificial Sequence: Synthetic oligonucleotide
ccacuuaucguccuucucu

SEQ ID NO: 774981 - RNA, 19 nt, Artificial Sequence
  Description of Artificial Sequence: Synthetic oligonucleotide
gagcuuuuccgagguagcu

SEQ ID NO: 774982 - RNA, 19 nt, Artificial Sequence
  Description of Artificial Sequence: Synthetic oligonucleotide
gccuuucuggaaacugaag

SEQ ID NO: 774983 - RNA, 19 nt, Artificial Sequence
  Description of Artificial Sequence: Synthetic oligonucleotide
ggaacggguucacucccuc

SEQ ID NO: 774984 - RNA, 19 nt, Artificial Sequence
  Description of Artificial Sequence: Synthetic oligonucleotide
ugcacacgcuaagcucuac

SEQ ID NO: 774985 - RNA, 19 nt, Artificial Sequence
  Description of Artificial Sequence: Synthetic oligonucleotide
gaacaauggccgagagaaa

SEQ ID NO: 774986 - RNA, 19 nt, Artificial Sequence
  Description of Artificial Sequence: Synthetic oligonucleotide
uccuucaacuaggcuucau

SEQ ID NO: 774987 - RNA, 19 nt, Artificial Sequence
  Description of Artificial Sequence: Synthetic oligonucleotide
ucaugccauuggcuccgua

SEQ ID NO: 774988 - RNA, 19 nt, Artificial Sequence
  Description of Artificial Sequence: Synthetic oligonucleotide
cauuuccacugcccauuga

SEQ ID NO: 774989 - RNA, 19 nt, Artificial Sequence
  Description of Artificial Sequence: Synthetic oligonucleotide
acggguucacucccucguu

SEQ ID NO: 774990 - RNA, 19 nt, Artificial Sequence
  Description of Artificial Sequence: Synthetic oligonucleotide
cagacacgagggcaucaga

SEQ ID NO: 774991 - RNA, 19 nt, Artificial Sequence
  Description of Artificial Sequence: Synthetic oligonucleotide
guugagucaucaucccguu

SEQ ID NO: 774992 - RNA, 19 nt, Artificial Sequence
  Description of Artificial Sequence: Synthetic oligonucleotide
agggccggauccugcucca

SEQ ID NO: 774993 - RNA, 19 nt, Artificial Sequence
  Description of Artificial Sequence: Synthetic oligonucleotide
aggcuucauagagacgguu

SEQ ID NO: 774994 - RNA, 19 nt, Artificial Sequence
  Description of Artificial Sequence: Synthetic oligonucleotide
cccgagauuccuguggauc

SEQ ID NO: 774995 - RNA, 19 nt, Artificial Sequence
  Description of Artificial Sequence: Synthetic oligonucleotide
aucccguugggcacaccca

SEQ ID NO: 774996 - RNA, 19 nt, Artificial Sequence
  Description of Artificial Sequence: Synthetic oligonucleotide
ggcaaguuuuaaacuguaa

SEQ ID NO: 774997 - RNA, 19 nt, Artificial Sequence
  Description of Artificial Sequence: Synthetic oligonucleotide
gcacacgcuaagcucuaca

SEQ ID NO: 774998 - RNA, 19 nt, Artificial Sequence
  Description of Artificial Sequence: Synthetic oligonucleotide
gccauauaggagcuuugcu

SEQ ID NO: 774999 - RNA, 19 nt, Artificial Sequence
  Description of Artificial Sequence: Synthetic oligonucleotide
agagucaagcagagugaua

SEQ ID NO: 775000 - RNA, 19 nt, Artificial Sequence
  Description of Artificial Sequence: Synthetic oligonucleotide
uagagacgguuugccuuuc

SEQ ID NO: 775001 - RNA, 19 nt, Artificial Sequence
  Description of Artificial Sequence: Synthetic oligonucleotide
ggagagggcuaggaaagaa

SEQ ID NO: 775002 - RNA, 19 nt, Artificial Sequence
  Description of Artificial Sequence: Synthetic oligonucleotide
acagacgccaagagaucua

SEQ ID NO: 775003 - RNA, 19 nt, Artificial Sequence
  Description of Artificial Sequence: Synthetic oligonucleotide
uccacuggucgagguucac

SEQ ID NO: 775004 - RNA, 19 nt, Artificial Sequence
  Description of Artificial Sequence: Synthetic oligonucleotide
caucaucccguugggcaca

SEQ ID NO: 775005 - RNA, 19 nt, Artificial Sequence
  Description of Artificial Sequence: Synthetic oligonucleotide
ccaugccuacugguggugg

SEQ ID NO: 775006 - RNA, 19 nt, Artificial Sequence
  Description of Artificial Sequence: Synthetic oligonucleotide
cuggucgagguucacugau

SEQ ID NO: 775007 - RNA, 19 nt, Artificial Sequence
  Description of Artificial Sequence: Synthetic oligonucleotide
ccuggccauuuccacugcc

SEQ ID NO: 775008 - RNA, 19 nt, Artificial Sequence
  Description of Artificial Sequence: Synthetic oligonucleotide
ggcuccguagaaguucauc

SEQ ID NO: 775009 - RNA, 19 nt, Artificial Sequence
  Description of Artificial Sequence: Synthetic oligonucleotide
auaugccaucugagcagga

SEQ ID NO: 775010 - RNA, 19 nt, Artificial Sequence
  Description of Artificial Sequence: Synthetic oligonucleotide
gcgucaaggcccaacaagu

SEQ ID NO: 775011 - RNA, 19 nt, Artificial Sequence
  Description of Artificial Sequence: Synthetic oligonucleotide
ggucgagguucacugauuu

SEQ ID NO: 775012 - RNA, 19 nt, Artificial Sequence
  Description of Artificial Sequence: Synthetic oligonucleotide
ccauugacuguccauaguu

SEQ ID NO: 775013 - RNA, 19 nt, Artificial Sequence
  Description of Artificial Sequence: Synthetic oligonucleotide
agacgccaagagaucuaga

SEQ ID NO: 775014 - RNA, 19 nt, Artificial Sequence
  Description of Artificial Sequence: Synthetic oligonucleotide
agacuucgguccauauauu

SEQ ID NO: 775015 - RNA, 19 nt, Artificial Sequence
  Description of Artificial Sequence: Synthetic oligonucleotide
ugcagauuucggggagcuu

SEQ ID NO: 775016 - RNA, 19 nt, Artificial Sequence
  Description of Artificial Sequence: Synthetic oligonucleotide
cgucaaggcccaacaaguc

SEQ ID NO: 775017 - RNA, 19 nt, Artificial Sequence
  Description of Artificial Sequence: Synthetic oligonucleotide
guuuccacuuaucguccuu

SEQ ID NO: 775018 - RNA, 19 nt, Artificial Sequence
  Description of Artificial Sequence: Synthetic oligonucleotide
ccagaugacuuaugugcaa

SEQ ID NO: 775019 - RNA, 19 nt, Artificial Sequence
  Description of Artificial Sequence: Synthetic oligonucleotide
uggcuccguagaaguucau

SEQ ID NO: 775020 - RNA, 19 nt, Artificial Sequence
  Description of Artificial Sequence: Synthetic oligonucleotide
gggucaucugaguaagguu

SEQ ID NO: 775021 - RNA, 19 nt, Artificial Sequence
  Description of Artificial Sequence: Synthetic oligonucleotide
gcuaagcucuacauuuccu

SEQ ID NO: 775022 - RNA, 19 nt, Artificial Sequence
  Description of Artificial Sequence: Synthetic oligonucleotide
ccucguuuccacuuaucgu

SEQ ID NO: 775023 - RNA, 19 nt, Artificial Sequence
  Description of Artificial Sequence: Synthetic oligonucleotide
cagauuucggggagcuuuu

SEQ ID NO: 775024 - RNA, 19 nt, Artificial Sequence
  Description of Artificial Sequence: Synthetic oligonucleotide
ucaucccguugggcacacc

SEQ ID NO: 775025 - RNA, 19 nt, Artificial Sequence
  Description of Artificial Sequence: Synthetic oligonucleotide
gcggugcacacgcuaagcu

SEQ ID NO: 775026 - RNA, 19 nt, Artificial Sequence
  Description of Artificial Sequence: Synthetic oligonucleotide
gucgagguucacugauuuu

SEQ ID NO: 775027 - RNA, 19 nt, Artificial Sequence
  Description of Artificial Sequence: Synthetic oligonucleotide
auacagcggugcacacgcu

SEQ ID NO: 775028 - RNA, 19 nt, Artificial Sequence
  Description of Artificial Sequence: Synthetic oligonucleotide
aucaugccauuggcuccgu

SEQ ID NO: 775029 - RNA, 19 nt, Artificial Sequence
  Description of Artificial Sequence: Synthetic oligonucleotide
gcagccauauaggagcuuu

SEQ ID NO: 775030 - RNA, 19 nt, Artificial Sequence
  Description of Artificial Sequence: Synthetic oligonucleotide
ggcaaccaggcgcuguggu

SEQ ID NO: 775031 - RNA, 19 nt, Artificial Sequence
  Description of Artificial Sequence: Synthetic oligonucleotide
ccccaugauacuguuaggu

SEQ ID NO: 775032 - RNA, 19 nt, Artificial Sequence
  Description of Artificial Sequence: Synthetic oligonucleotide
ccagggaaacugggguaag

SEQ ID NO: 775033 - RNA, 19 nt, Artificial Sequence
  Description of Artificial Sequence: Synthetic oligonucleotide
ccagacuucgguccauaua

SEQ ID NO: 775034 - RNA, 19 nt, Artificial Sequence
  Description of Artificial Sequence: Synthetic oligonucleotide
cacucccugcaguuggcau

SEQ ID NO: 775035 - RNA, 19 nt, Artificial Sequence
  Description of Artificial Sequence: Synthetic oligonucleotide
cucauaagggcuggucguu

SEQ ID NO: 775036 - RNA, 19 nt, Artificial Sequence
  Description of Artificial Sequence: Synthetic oligonucleotide
gccuacuggugguggcauc

SEQ ID NO: 775037 - RNA, 19 nt, Artificial Sequence
  Description of Artificial Sequence: Synthetic oligonucleotide
gggaugugaccaacacaaa

SEQ ID NO: 775038 - RNA, 19 nt, Artificial Sequence
  Description of Artificial Sequence: Synthetic oligonucleotide
ccucucuguuguaaaccua

SEQ ID NO: 775039 - RNA, 19 nt, Artificial Sequence
  Description of Artificial Sequence: Synthetic oligonucleotide
ggccauuuccacugcccau

SEQ ID NO: 775040 - RNA, 19 nt, Artificial Sequence
  Description of Artificial Sequence: Synthetic oligonucleotide
uugaggcgucugggaucca

SEQ ID NO: 775041 - RNA, 19 nt, Artificial Sequence
  Description of Artificial Sequence: Synthetic oligonucleotide
gugcacacgcuaagcucua

SEQ ID NO: 775042 - RNA, 19 nt, Artificial Sequence
  Description of Artificial Sequence: Synthetic oligonucleotide
gggcaggcauuugaggcgu

SEQ ID NO: 775043 - RNA, 19 nt, Artificial Sequence
  Description of Artificial Sequence: Synthetic oligonucleotide
cucccucguuuccacuuau

SEQ ID NO: 775044 - RNA, 19 nt, Artificial Sequence
  Description of Artificial Sequence: Synthetic oligonucleotide
gcaggcauuugaggcgucu

SEQ ID NO: 775045 - RNA, 19 nt, Artificial Sequence
  Description of Artificial Sequence: Synthetic oligonucleotide
ccacuggucgagguucacu

SEQ ID NO: 775046 - RNA, 19 nt, Artificial Sequence
  Description of Artificial Sequence: Synthetic oligonucleotide
gugagaggauggaguccuu

SEQ ID NO: 775047 - RNA, 19 nt, Artificial Sequence
  Description of Artificial Sequence: Synthetic oligonucleotide
cggguucacucccucguuu

SEQ ID NO: 775048 - RNA, 19 nt, Artificial Sequence
  Description of Artificial Sequence: Synthetic oligonucleotide
ccccgagauuccuguggau

SEQ ID NO: 775049 - RNA, 19 nt, Artificial Sequence
  Description of Artificial Sequence: Synthetic oligonucleotide
caggggcgucaaggcccaa

SEQ ID NO: 775050 - RNA, 19 nt, Artificial Sequence
  Description of Artificial Sequence: Synthetic oligonucleotide
uucaguaggccccagauac

SEQ ID NO: 775051 - RNA, 19 nt, Artificial Sequence
  Description of Artificial Sequence: Synthetic oligonucleotide
acaucggugaucuuggcac

SEQ ID NO: 775052 - RNA, 19 nt, Artificial Sequence
  Description of Artificial Sequence: Synthetic oligonucleotide
gaucucaguaucuauucgg

SEQ ID NO: 775053 - RNA, 19 nt, Artificial Sequence
  Description of Artificial Sequence: Synthetic oligonucleotide
gugguagucacauacacgc

SEQ ID NO: 775054 - RNA, 19 nt, Artificial Sequence
  Description of Artificial Sequence: Synthetic oligonucleotide
cuuuacacuccucaguugg

SEQ ID NO: 775055 - RNA, 19 nt, Artificial Sequence
  Description of Artificial Sequence: Synthetic oligonucleotide
agaacuggguuucacuggc

SEQ ID NO: 775056 - RNA, 19 nt, Artificial Sequence
  Description of Artificial Sequence: Synthetic oligonucleotide
cuuugaaguguacagcugg

SEQ ID NO: 775057 - RNA, 19 nt, Artificial Sequence
  Description of Artificial Sequence: Synthetic oligonucleotide
ugacaguuugcauagugag

SEQ ID NO: 775058 - RNA, 19 nt, Artificial Sequence
  Description of Artificial Sequence: Synthetic oligonucleotide
aucuauucggcacuucucg

SEQ ID NO: 775059 - RNA, 19 nt, Artificial Sequence
  Description of Artificial Sequence: Synthetic oligonucleotide
agcugcauagcuuugaagu

SEQ ID NO: 775060 - RNA, 19 nt, Artificial Sequence
  Description of Artificial Sequence: Synthetic oligonucleotide
uggguaagcgcccaggugc

SEQ ID NO: 775061 - RNA, 19 nt, Artificial Sequence
  Description of Artificial Sequence: Synthetic oligonucleotide
ugaaguguacagcugggcc

SEQ ID NO: 775062 - RNA, 19 nt, Artificial Sequence
  Description of Artificial Sequence: Synthetic oligonucleotide
caccgcaugaacaaggagg

SEQ ID NO: 775063 - RNA, 19 nt, Artificial Sequence
  Description of Artificial Sequence: Synthetic oligonucleotide
ucgauguaccauuugcacg

SEQ ID NO: 775064 - RNA, 19 nt, Artificial Sequence
  Description of Artificial Sequence: Synthetic oligonucleotide
uuugugaguagccggaaga

SEQ ID NO: 775065 - RNA, 19 nt, Artificial Sequence
  Description of Artificial Sequence: Synthetic oligonucleotide
uuugaaguguacagcuggg

SEQ ID NO: 775066 - RNA, 19 nt, Artificial Sequence
  Description of Artificial Sequence: Synthetic oligonucleotide
uguugcuuggcagaguagg

SEQ ID NO: 775067 - RNA, 19 nt, Artificial Sequence
  Description of Artificial Sequence: Synthetic oligonucleotide
gagaguaccugcugcaggg

SEQ ID NO: 775068 - RNA, 19 nt, Artificial Sequence
  Description of Artificial Sequence: Synthetic oligonucleotide
aacaggaugucccaccagu

SEQ ID NO: 775069 - RNA, 19 nt, Artificial Sequence
  Description of Artificial Sequence: Synthetic oligonucleotide
acggcuguugccuuguugg

SEQ ID NO: 775070 - RNA, 19 nt, Artificial Sequence
  Description of Artificial Sequence: Synthetic oligonucleotide
aucaugggcuguuugucgc

SEQ ID NO: 775071 - RNA, 19 nt, Artificial Sequence
  Description of Artificial Sequence: Synthetic oligonucleotide
caugcaguacuccagcagg

SEQ ID NO: 775072 - RNA, 19 nt, Artificial Sequence
  Description of Artificial Sequence: Synthetic oligonucleotide
acaaccaucaacucucgca

SEQ ID NO: 775073 - RNA, 19 nt, Artificial Sequence
  Description of Artificial Sequence: Synthetic oligonucleotide
ugaacuguagaaagccgcc

SEQ ID NO: 775074 - RNA, 19 nt, Artificial Sequence
  Description of Artificial Sequence: Synthetic oligonucleotide
auagugaggccuucauggc

SEQ ID NO: 775075 - RNA, 19 nt, Artificial Sequence
  Description of Artificial Sequence: Synthetic oligonucleotide
acauacacgcgccacagug

SEQ ID NO: 775076 - RNA, 19 nt, Artificial Sequence
  Description of Artificial Sequence: Synthetic oligonucleotide
auucgcagcaugcugagcu

SEQ ID NO: 775077 - RNA, 19 nt, Artificial Sequence
  Description of Artificial Sequence: Synthetic oligonucleotide
uuuacacuccucaguuggg

SEQ ID NO: 775078 - RNA, 19 nt, Artificial Sequence
  Description of Artificial Sequence: Synthetic oligonucleotide
acagcacucauccaccaag

SEQ ID NO: 775079 - RNA, 19 nt, Artificial Sequence
  Description of Artificial Sequence: Synthetic oligonucleotide
uguaauggccaugaggaac

SEQ ID NO: 775080 - RNA, 19 nt, Artificial Sequence
  Description of Artificial Sequence: Synthetic oligonucleotide
gaucuuuuggcuguaacuc

SEQ ID NO: 775081 - RNA, 19 nt, Artificial Sequence
  Description of Artificial Sequence: Synthetic oligonucleotide
cacaggagagaucugcugg

SEQ ID NO: 775082 - RNA, 19 nt, Artificial Sequence
  Description of Artificial Sequence: Synthetic oligonucleotide
gaaccuguccuuucgguug

SEQ ID NO: 775083 - RNA, 19 nt, Artificial Sequence
  Description of Artificial Sequence: Synthetic oligonucleotide
ucaguaucuauucggcacu

SEQ ID NO: 775084 - RNA, 19 nt, Artificial Sequence
  Description of Artificial Sequence: Synthetic oligonucleotide
uuucgguuggggucggugg

SEQ ID NO: 775085 - RNA, 19 nt, Artificial Sequence
  Description of Artificial Sequence: Synthetic oligonucleotide
gguaccaucucgcaggaag

SEQ ID NO: 775086 - RNA, 19 nt, Artificial Sequence
  Description of Artificial Sequence: Synthetic oligonucleotide
agggugacaguuugcauag

SEQ ID NO: 775087 - RNA, 19 nt, Artificial Sequence
  Description of Artificial Sequence: Synthetic oligonucleotide
aucucaguaucuauucggc

SEQ ID NO: 775088 - RNA, 19 nt, Artificial Sequence
  Description of Artificial Sequence: Synthetic oligonucleotide
uguugcagugccugcagag

SEQ ID NO: 775089 - RNA, 19 nt, Artificial Sequence
  Description of Artificial Sequence: Synthetic oligonucleotide
cuugauccaccguuguucc

SEQ ID NO: 775090 - RNA, 19 nt, Artificial Sequence
  Description of Artificial Sequence: Synthetic oligonucleotide
agagugaucuuuuggcugu

SEQ ID NO: 775091 - RNA, 19 nt, Artificial Sequence
  Description of Artificial Sequence: Synthetic oligonucleotide
caagccgaggccaggauag

SEQ ID NO: 775092 - RNA, 19 nt, Artificial Sequence
  Description of Artificial Sequence: Synthetic oligonucleotide
agaguguucauguccagaa

SEQ ID NO: 775093 - RNA, 19 nt, Artificial Sequence
  Description of Artificial Sequence: Synthetic oligonucleotide
agagauucgcagcaugcug

SEQ ID NO: 775094 - RNA, 19 nt, Artificial Sequence
  Description of Artificial Sequence: Synthetic oligonucleotide
cauaggagcaccugcucag

SEQ ID NO: 775095 - RNA, 19 nt, Artificial Sequence
  Description of Artificial Sequence: Synthetic oligonucleotide
cagucgauguaccauuugc

SEQ ID NO: 775096 - RNA, 19 nt, Artificial Sequence
  Description of Artificial Sequence: Synthetic oligonucleotide
uggugacacagccacaccu

SEQ ID NO: 775097 - RNA, 19 nt, Artificial Sequence
  Description of Artificial Sequence: Synthetic oligonucleotide
uguaacucagggacagcug

SEQ ID NO: 775098 - RNA, 19 nt, Artificial Sequence
  Description of Artificial Sequence: Synthetic oligonucleotide
caugucucgggccaggaac

SEQ ID NO: 775099 - RNA, 19 nt, Artificial Sequence
  Description of Artificial Sequence: Synthetic oligonucleotide
aacuguagaaagccgccau

SEQ ID NO: 775100 - RNA, 19 nt, Artificial Sequence
  Description of Artificial Sequence: Synthetic oligonucleotide
gacuucagcauggugacac

SEQ ID NO: 775101 - RNA, 19 nt, Artificial Sequence
  Description of Artificial Sequence: Synthetic oligonucleotide
ucauagccggucaccaugc

SEQ ID NO: 775102 - RNA, 19 nt, Artificial Sequence
  Description of Artificial Sequence: Synthetic oligonucleotide
uuuggcuguaacucaggga

SEQ ID NO: 775103 - RNA, 19 nt, Artificial Sequence
  Description of Artificial Sequence: Synthetic oligonucleotide
uucagcauggugacacagc

SEQ ID NO: 775104 - RNA, 19 nt, Artificial Sequence
  Description of Artificial Sequence: Synthetic oligonucleotide
gaggguagauguaauggcc

SEQ ID NO: 775105 - RNA, 19 nt, Artificial Sequence
  Description of Artificial Sequence: Synthetic oligonucleotide
agggcaggaucucaguauc

SEQ ID NO: 775106 - RNA, 19 nt, Artificial Sequence
  Description of Artificial Sequence: Synthetic oligonucleotide
auacggaugacaaccauca

SEQ ID NO: 775107 - RNA, 19 nt, Artificial Sequence
  Description of Artificial Sequence: Synthetic oligonucleotide
accgcaugaacaaggaggg

SEQ ID NO: 775108 - RNA, 19 nt, Artificial Sequence
  Description of Artificial Sequence: Synthetic oligonucleotide
uccaccaagcccucaucgg

SEQ ID NO: 775109 - RNA, 19 nt, Artificial Sequence
  Description of Artificial Sequence: Synthetic oligonucleotide
agaugggaaguuugggcag

SEQ ID NO: 775110 - RNA, 19 nt, Artificial Sequence
  Description of Artificial Sequence: Synthetic oligonucleotide
ugguagucacauacacgcg

SEQ ID NO: 775111 - RNA, 19 nt, Artificial Sequence
  Description of Artificial Sequence: Synthetic oligonucleotide
guugaacuguagaaagccg

SEQ ID NO: 775112 - RNA, 19 nt, Artificial Sequence
  Description of Artificial Sequence: Synthetic oligonucleotide
ucuauucggcacuucucgc

SEQ ID NO: 775113 - RNA, 19 nt, Artificial Sequence
  Description of Artificial Sequence: Synthetic oligonucleotide
gucgauguaccauuugcac

SEQ ID NO: 775114 - RNA, 19 nt, Artificial Sequence
  Description of Artificial Sequence: Synthetic oligonucleotide
gaguaccugcugcagggcg

SEQ ID NO: 775115 - RNA, 19 nt, Artificial Sequence
  Description of Artificial Sequence: Synthetic oligonucleotide
gguagucacauacacgcgc

SEQ ID NO: 775116 - RNA, 19 nt, Artificial Sequence
  Description of Artificial Sequence: Synthetic oligonucleotide
uaucuauucggcacuucuc

SEQ ID NO: 775117 - RNA, 19 nt, Artificial Sequence
  Description of Artificial Sequence: Synthetic oligonucleotide
ccagauacggaugacaacc

SEQ ID NO: 775118 - RNA, 19 nt, Artificial Sequence
  Description of Artificial Sequence: Synthetic oligonucleotide
ugacaaccaucaacucucg

SEQ ID NO: 775119 - RNA, 19 nt, Artificial Sequence
  Description of Artificial Sequence: Synthetic oligonucleotide
ucgaucuuuggcuggccag

SEQ ID NO: 775120 - RNA, 19 nt, Artificial Sequence
  Description of Artificial Sequence: Synthetic oligonucleotide
acauaggagcaccugcuca

SEQ ID NO: 775121 - RNA, 19 nt, Artificial Sequence
  Description of Artificial Sequence: Synthetic oligonucleotide
agguggucgaucuuuggcu

SEQ ID NO: 775122 - RNA, 19 nt, Artificial Sequence
  Description of Artificial Sequence: Synthetic oligonucleotide
guagauguaauggccauga

SEQ ID NO: 775123 - RNA, 19 nt, Artificial Sequence
  Description of Artificial Sequence: Synthetic oligonucleotide
ucuguguuggugagugaga

SEQ ID NO: 775124 - RNA, 19 nt, Artificial Sequence
  Description of Artificial Sequence: Synthetic oligonucleotide
cuguagaaagccgccauag

SEQ ID NO: 775125 - RNA, 19 nt, Artificial Sequence
  Description of Artificial Sequence: Synthetic oligonucleotide
ucucgcaggaagcuguguc

SEQ ID NO: 775126 - RNA, 19 nt, Artificial Sequence
  Description of Artificial Sequence: Synthetic oligonucleotide
aguggggagcccugguugg

SEQ ID NO: 775127 - RNA, 19 nt, Artificial Sequence
  Description of Artificial Sequence: Synthetic oligonucleotide
uuccgcagggaccagcacu

SEQ ID NO: 775128 - RNA, 19 nt, Artificial Sequence
  Description of Artificial Sequence: Synthetic oligonucleotide
cauacacgcgccacagugc

SEQ ID NO: 775129 - RNA, 19 nt, Artificial Sequence
  Description of Artificial Sequence: Synthetic oligonucleotide
aucacggcagcagauccac

SEQ ID NO: 775130 - RNA, 19 nt, Artificial Sequence
  Description of Artificial Sequence: Synthetic oligonucleotide
uacacgguccaggucauug

SEQ ID NO: 775131 - RNA, 19 nt, Artificial Sequence
  Description of Artificial Sequence: Synthetic oligonucleotide
gaugucccaccagucauag

SEQ ID NO: 775132 - RNA, 19 nt, Artificial Sequence
  Description of Artificial Sequence: Synthetic oligonucleotide
cuucagggcgggcucaucc

SEQ ID NO: 775133 - RNA, 19 nt, Artificial Sequence
  Description of Artificial Sequence: Synthetic oligonucleotide
auagccggucaccaugcag

SEQ ID NO: 775134 - RNA, 19 nt, Artificial Sequence
  Description of Artificial Sequence: Synthetic oligonucleotide
cucgcaggaagcugugucc

SEQ ID NO: 775135 - RNA, 19 nt, Artificial Sequence
  Description of Artificial Sequence: Synthetic oligonucleotide
auacacgcgccacagugca

SEQ ID NO: 775136 - RNA, 19 nt, Artificial Sequence
  Description of Artificial Sequence: Synthetic oligonucleotide
uuugcacgcugccauccug

SEQ ID NO: 775137 - RNA, 19 nt, Artificial Sequence
  Description of Artificial Sequence: Synthetic oligonucleotide
ucucgcagcgugcccagag

SEQ ID NO: 775138 - RNA, 19 nt, Artificial Sequence
  Description of Artificial Sequence: Synthetic oligonucleotide
ucgcagcgugcccagagag

SEQ ID NO: 775139 - RNA, 19 nt, Artificial Sequence
  Description of Artificial Sequence: Synthetic oligonucleotide
auggugacacagccacacc

SEQ ID NO: 775140 - RNA, 19 nt, Artificial Sequence
  Description of Artificial Sequence: Synthetic oligonucleotide
ugugaguagccggaagagc

SEQ ID NO: 775141 - RNA, 19 nt, Artificial Sequence
  Description of Artificial Sequence: Synthetic oligonucleotide
agucacauacacgcgccac

SEQ ID NO: 775142 - RNA, 19 nt, Artificial Sequence
  Description of Artificial Sequence: Synthetic oligonucleotide
agaguaggugcccugccga

SEQ ID NO: 775143 - RNA, 19 nt, Artificial Sequence
  Description of Artificial Sequence: Synthetic oligonucleotide
uuggguaagcgcccaggug

SEQ ID NO: 775144 - RNA, 19 nt, Artificial Sequence
  Description of Artificial Sequence: Synthetic oligonucleotide
agauucgcagcaugcugag

SEQ ID NO: 775145 - RNA, 19 nt, Artificial Sequence
  Description of Artificial Sequence: Synthetic oligonucleotide
ggaucucaguaucuauucg

SEQ ID NO: 775146 - RNA, 19 nt, Artificial Sequence
  Description of Artificial Sequence: Synthetic oligonucleotide
caugccgggcugcacaugc

SEQ ID NO: 775147 - RNA, 19 nt, Artificial Sequence
  Description of Artificial Sequence: Synthetic oligonucleotide
ugcauagcuuugaagugua

SEQ ID NO: 775148 - RNA, 19 nt, Artificial Sequence
  Description of Artificial Sequence: Synthetic oligonucleotide
agcgugcccagagagguac

SEQ ID NO: 775149 - RNA, 19 nt, Artificial Sequence
  Description of Artificial Sequence: Synthetic oligonucleotide
uagauguaauggccaugag

SEQ ID NO: 775150 - RNA, 19 nt, Artificial Sequence
  Description of Artificial Sequence: Synthetic oligonucleotide
accagucauagccggucac

SEQ ID NO: 775151 - RNA, 19 nt, Artificial Sequence
  Description of Artificial Sequence: Synthetic oligonucleotide
cuuugugaguagccggaag

SEQ ID NO: 775152 - RNA, 19 nt, Artificial Sequence
  Description of Artificial Sequence: Synthetic oligonucleotide
ggucauugguggcugacag

SEQ ID NO: 775153 - RNA, 19 nt, Artificial Sequence
  Description of Artificial Sequence: Synthetic oligonucleotide
ccucaguuggguaagcgcc

SEQ ID NO: 775154 - RNA, 19 nt, Artificial Sequence
  Description of Artificial Sequence: Synthetic oligonucleotide
ugaguguccgagguggcug

SEQ ID NO: 775155 - RNA, 19 nt, Artificial Sequence
  Description of Artificial Sequence: Synthetic oligonucleotide
cgauguaccauuugcacgc

SEQ ID NO: 775156 - RNA, 19 nt, Artificial Sequence
  Description of Artificial Sequence: Synthetic oligonucleotide
gagauucgcagcaugcuga

SEQ ID NO: 775157 - RNA, 19 nt, Artificial Sequence
  Description of Artificial Sequence: Synthetic oligonucleotide
aguagugacuugaggguag

SEQ ID NO: 775158 - RNA, 19 nt, Artificial Sequence
  Description of Artificial Sequence: Synthetic oligonucleotide
guagucacauacacgcgcc

SEQ ID NO: 775159 - RNA, 19 nt, Artificial Sequence
  Description of Artificial Sequence: Synthetic oligonucleotide
ggagagaucugcuggaaga

SEQ ID NO: 775160 - RNA, 19 nt, Artificial Sequence
  Description of Artificial Sequence: Synthetic oligonucleotide
aggagguacagcacgaagu

SEQ ID NO: 775161 - RNA, 19 nt, Artificial Sequence
  Description of Artificial Sequence: Synthetic oligonucleotide
agagagguaccaucucgca

SEQ ID NO: 775162 - RNA, 19 nt, Artificial Sequence
  Description of Artificial Sequence: Synthetic oligonucleotide
uccgagguggcuguguaga

SEQ ID NO: 775163 - RNA, 19 nt, Artificial Sequence
  Description of Artificial Sequence: Synthetic oligonucleotide
ugggguugaacuguagaaa

SEQ ID NO: 775164 - RNA, 19 nt, Artificial Sequence
  Description of Artificial Sequence: Synthetic oligonucleotide
acacgcgccacagugcagg

SEQ ID NO: 775165 - RNA, 19 nt, Artificial Sequence
  Description of Artificial Sequence: Synthetic oligonucleotide
ggagaguaccugcugcagg

SEQ ID NO: 775166 - RNA, 19 nt, Artificial Sequence
  Description of Artificial Sequence: Synthetic oligonucleotide
guucccacugcuucacggc

SEQ ID NO: 775167 - RNA, 19 nt, Artificial Sequence
  Description of Artificial Sequence: Synthetic oligonucleotide
gguggagaguaccugcugc

SEQ ID NO: 775168 - RNA, 19 nt, Artificial Sequence
  Description of Artificial Sequence: Synthetic oligonucleotide
ugugauggcggggaaccug

SEQ ID NO: 775169 - RNA, 19 nt, Artificial Sequence
  Description of Artificial Sequence: Synthetic oligonucleotide
gucgcuggcaggaagccag

SEQ ID NO: 775170 - RNA, 19 nt, Artificial Sequence
  Description of Artificial Sequence: Synthetic oligonucleotide
aucaacucucgcagcgugc

SEQ ID NO: 775171 - RNA, 19 nt, Artificial Sequence
  Description of Artificial Sequence: Synthetic oligonucleotide
caucaacucucgcagcgug

SEQ ID NO: 775172 - RNA, 19 nt, Artificial Sequence
  Description of Artificial Sequence: Synthetic oligonucleotide
guccuuucgguuggggucg

SEQ ID NO: 775173 - RNA, 19 nt, Artificial Sequence
  Description of Artificial Sequence: Synthetic oligonucleotide
uucgguuggggucgguggu

SEQ ID NO: 775174 - RNA, 19 nt, Artificial Sequence
  Description of Artificial Sequence: Synthetic oligonucleotide
aguucuugauccaccguug

SEQ ID NO: 775175 - RNA, 19 nt, Artificial Sequence
  Description of Artificial Sequence: Synthetic oligonucleotide
ggaagauguuguucacagg

SEQ ID NO: 775176 - RNA, 19 nt, Artificial Sequence
  Description of Artificial Sequence: Synthetic oligonucleotide
uaggugcccugccgaagcg

SEQ ID NO: 775177 - RNA, 19 nt, Artificial Sequence
  Description of Artificial Sequence: Synthetic oligonucleotide
agaguaccugcugcagggc

SEQ ID NO: 775178 - RNA, 19 nt, Artificial Sequence
  Description of Artificial Sequence: Synthetic oligonucleotide
ugaacaaggagggcaggau

SEQ ID NO: 775179 - RNA, 19 nt, Artificial Sequence
  Description of Artificial Sequence: Synthetic oligonucleotide
uggagaguaccugcugcag

SEQ ID NO: 775180 - RNA, 19 nt, Artificial Sequence
  Description of Artificial Sequence: Synthetic oligonucleotide
agucgauguaccauuugca

SEQ ID NO: 775181 - RNA, 19 nt, Artificial Sequence
  Description of Artificial Sequence: Synthetic oligonucleotide
uagucacauacacgcgcca

SEQ ID NO: 775182 - RNA, 19 nt, Artificial Sequence
  Description of Artificial Sequence: Synthetic oligonucleotide
gacaaccaucaacucucgc

SEQ ID NO: 775183 - RNA, 19 nt, Artificial Sequence
  Description of Artificial Sequence: Synthetic oligonucleotide
gcguggacgcuucagggcg

SEQ ID NO: 775184 - RNA, 19 nt, Artificial Sequence
  Description of Artificial Sequence: Synthetic oligonucleotide
uguucauguccagaacaaa

SEQ ID NO: 775185 - RNA, 19 nt, Artificial Sequence
  Description of Artificial Sequence: Synthetic oligonucleotide
ggagguacagcacgaaguc

SEQ ID NO: 775186 - RNA, 19 nt, Artificial Sequence
  Description of Artificial Sequence: Synthetic oligonucleotide
cagggauggagagauucgc

SEQ ID NO: 775187 - RNA, 19 nt, Artificial Sequence
  Description of Artificial Sequence: Synthetic oligonucleotide
caugcaacaggauguccca

SEQ ID NO: 775188 - RNA, 19 nt, Artificial Sequence
  Description of Artificial Sequence: Synthetic oligonucleotide
aguaucuauucggcacuuc

SEQ ID NO: 775189 - RNA, 19 nt, Artificial Sequence
  Description of Artificial Sequence: Synthetic oligonucleotide
guugcaggcggcugaccag

SEQ ID NO: 775190 - RNA, 19 nt, Artificial Sequence
  Description of Artificial Sequence: Synthetic oligonucleotide
agauacggaugacaaccau

SEQ ID NO: 775191 - RNA, 19 nt, Artificial Sequence
  Description of Artificial Sequence: Synthetic oligonucleotide
uucagggcgggcucaucca

SEQ ID NO: 775192 - RNA, 19 nt, Artificial Sequence
  Description of Artificial Sequence: Synthetic oligonucleotide
acaggauccgccacuugag

SEQ ID NO: 775193 - RNA, 19 nt, Artificial Sequence
  Description of Artificial Sequence: Synthetic oligonucleotide
ugacuugaggguagaugua

SEQ ID NO: 775194 - RNA, 19 nt, Artificial Sequence
  Description of Artificial Sequence: Synthetic oligonucleotide
guaccaucucgcaggaagc

SEQ ID NO: 775195 - RNA, 19 nt, Artificial Sequence
  Description of Artificial Sequence: Synthetic oligonucleotide
ggaccagcacuccaccagg

SEQ ID NO: 775196 - RNA, 19 nt, Artificial Sequence
  Description of Artificial Sequence: Synthetic oligonucleotide
gucacauacacgcgccaca

SEQ ID NO: 775197 - RNA, 19 nt, Artificial Sequence
  Description of Artificial Sequence: Synthetic oligonucleotide
cgccacuugaggaucaugg

SEQ ID NO: 775198 - RNA, 19 nt, Artificial Sequence
  Description of Artificial Sequence: Synthetic oligonucleotide
agugugggcgcaguaguga

SEQ ID NO: 775199 - RNA, 19 nt, Artificial Sequence
  Description of Artificial Sequence: Synthetic oligonucleotide
auuugcacgcugccauccu

SEQ ID NO: 775200 - RNA, 19 nt, Artificial Sequence
  Description of Artificial Sequence: Synthetic oligonucleotide
augucccaccagucauagc

SEQ ID NO: 775201 - RNA, 19 nt, Artificial Sequence
  Description of Artificial Sequence: Synthetic oligonucleotide
ggaagugugggcgcaguag

SEQ ID NO: 775202 - RNA, 19 nt, Artificial Sequence
  Description of Artificial Sequence: Synthetic oligonucleotide
guuugucgccaaccacagg

SEQ ID NO: 775203 - RNA, 19 nt, Artificial Sequence
  Description of Artificial Sequence: Synthetic oligonucleotide
ugaggggcacucuccgcca

SEQ ID NO: 775204 - RNA, 19 nt, Artificial Sequence
  Description of Artificial Sequence: Synthetic oligonucleotide
gccgccauagucugcagug

SEQ ID NO: 775205 - RNA, 19 nt, Artificial Sequence
  Description of Artificial Sequence: Synthetic oligonucleotide
cuggcgaguguauuccuca

SEQ ID NO: 775206 - RNA, 19 nt, Artificial Sequence
  Description of Artificial Sequence: Synthetic oligonucleotide
guggagaguaccugcugca

SEQ ID NO: 775207 - RNA, 19 nt, Artificial Sequence
  Description of Artificial Sequence: Synthetic oligonucleotide
ugcccugccgaagcgcagg

SEQ ID NO: 775208 - RNA, 19 nt, Artificial Sequence
  Description of Artificial Sequence: Synthetic oligonucleotide
uaccaucucgcaggaagcu

SEQ ID NO: 775209 - RNA, 19 nt, Artificial Sequence
  Description of Artificial Sequence: Synthetic oligonucleotide
agggguguugaggaagugu

SEQ ID NO: 775210 - RNA, 19 nt, Artificial Sequence
  Description of Artificial Sequence: Synthetic oligonucleotide
uggucgaucuuuggcuggc

SEQ ID NO: 775211 - RNA, 19 nt, Artificial Sequence
  Description of Artificial Sequence: Synthetic oligonucleotide
cagauacggaugacaacca

SEQ ID NO: 775212 - RNA, 19 nt, Artificial Sequence
  Description of Artificial Sequence: Synthetic oligonucleotide
gauccaccguuguucccac

SEQ ID NO: 775213 - RNA, 19 nt, Artificial Sequence
  Description of Artificial Sequence: Synthetic oligonucleotide
cuuucgguuggggucggug

SEQ ID NO: 775214 - RNA, 19 nt, Artificial Sequence
  Description of Artificial Sequence: Synthetic oligonucleotide
uacggaugacaaccaucaa

SEQ ID NO: 775215 - RNA, 19 nt, Artificial Sequence
  Description of Artificial Sequence: Synthetic oligonucleotide
uacacgcgccacagugcag

SEQ ID NO: 775216 - RNA, 19 nt, Artificial Sequence
  Description of Artificial Sequence: Synthetic oligonucleotide
gguggugcaccgcaugaac

SEQ ID NO: 775217 - RNA, 19 nt, Artificial Sequence
  Description of Artificial Sequence: Synthetic oligonucleotide
guaagcgcccaggugcagc

SEQ ID NO: 775218 - RNA, 19 nt, Artificial Sequence
  Description of Artificial Sequence: Synthetic oligonucleotide
caacaucggugaucuuggc

SEQ ID NO: 775219 - RNA, 19 nt, Artificial Sequence
  Description of Artificial Sequence: Synthetic oligonucleotide
aggugcccugccgaagcgc

SEQ ID NO: 775220 - RNA, 19 nt, Artificial Sequence
  Description of Artificial Sequence: Synthetic oligonucleotide
cuucacggcuguugccuug

SEQ ID NO: 775221 - RNA, 19 nt, Artificial Sequence
  Description of Artificial Sequence: Synthetic oligonucleotide
cugauacacgguccagguc

SEQ ID NO: 775222 - RNA, 19 nt, Artificial Sequence
  Description of Artificial Sequence: Synthetic oligonucleotide
accaucucgcaggaagcug

SEQ ID NO: 775223 - RNA, 19 nt, Artificial Sequence
  Description of Artificial Sequence: Synthetic oligonucleotide
ugagcuucccaugguuguc

SEQ ID NO: 775224 - RNA, 19 nt, Artificial Sequence
  Description of Artificial Sequence: Synthetic oligonucleotide
aagccgccauagucugcag

SEQ ID NO: 775225 - RNA, 19 nt, Artificial Sequence
  Description of Artificial Sequence: Synthetic oligonucleotide
cacuccucaguuggguaag

SEQ ID NO: 775226 - RNA, 19 nt, Artificial Sequence
  Description of Artificial Sequence: Synthetic oligonucleotide
ugcacgcugccauccugga

SEQ ID NO: 775227 - RNA, 19 nt, Artificial Sequence
  Description of Artificial Sequence: Synthetic oligonucleotide
gucgguggugcaccgcaug

SEQ ID NO: 775228 - RNA, 19 nt, Artificial Sequence
  Description of Artificial Sequence: Synthetic oligonucleotide
gcuucuggcgaguguauuc

SEQ ID NO: 775229 - RNA, 19 nt, Artificial Sequence
  Description of Artificial Sequence: Synthetic oligonucleotide
gauucgcagcaugcugagc

SEQ ID NO: 775230 - RNA, 19 nt, Artificial Sequence
  Description of Artificial Sequence: Synthetic oligonucleotide
gauccgccacuugaggauc

SEQ ID NO: 775231 - RNA, 19 nt, Artificial Sequence
  Description of Artificial Sequence: Synthetic oligonucleotide
cccucaucggguucacugg

SEQ ID NO: 775232 - RNA, 19 nt, Artificial Sequence
  Description of Artificial Sequence: Synthetic oligonucleotide
uggugcguggacgcuucag

SEQ ID NO: 775233 - RNA, 19 nt, Artificial Sequence
  Description of Artificial Sequence: Synthetic oligonucleotide
cacggcuguugccuuguug

SEQ ID NO: 775234 - RNA, 19 nt, Artificial Sequence
  Description of Artificial Sequence: Synthetic oligonucleotide
uguugccuuguugggugac

SEQ ID NO: 775235 - RNA, 19 nt, Artificial Sequence
  Description of Artificial Sequence: Synthetic oligonucleotide
cauccagugagcguggggu

SEQ ID NO: 775236 - RNA, 19 nt, Artificial Sequence
  Description of Artificial Sequence: Synthetic oligonucleotide
cagccuccggagguggucg

SEQ ID NO: 775237 - RNA, 19 nt, Artificial Sequence
  Description of Artificial Sequence: Synthetic oligonucleotide
guuggguaagcgcccaggu

SEQ ID NO: 775238 - RNA, 19 nt, Artificial Sequence
  Description of Artificial Sequence: Synthetic oligonucleotide
gagagauucgcagcaugcu

SEQ ID NO: 775239 - RNA, 19 nt, Artificial Sequence
  Description of Artificial Sequence: Synthetic oligonucleotide
gcgcaguagugacuugagg

SEQ ID NO: 775240 - RNA, 19 nt, Artificial Sequence
  Description of Artificial Sequence: Synthetic oligonucleotide
ggaugacaaccaucaacuc

SEQ ID NO: 775241 - RNA, 19 nt, Artificial Sequence
  Description of Artificial Sequence: Synthetic oligonucleotide
caucacggcagcagaucca

SEQ ID NO: 775242 - RNA, 19 nt, Artificial Sequence
  Description of Artificial Sequence: Synthetic oligonucleotide
gcugagcuucccaugguug

SEQ ID NO: 775243 - RNA, 19 nt, Artificial Sequence
  Description of Artificial Sequence: Synthetic oligonucleotide
guggugcaccgcaugaaca

SEQ ID NO: 775244 - RNA, 19 nt, Artificial Sequence
  Description of Artificial Sequence: Synthetic oligonucleotide
ucggugaucuuggcacaga

SEQ ID NO: 775245 - RNA, 19 nt, Artificial Sequence
  Description of Artificial Sequence: Synthetic oligonucleotide
caucggugaucuuggcaca

SEQ ID NO: 775246 - RNA, 19 nt, Artificial Sequence
  Description of Artificial Sequence: Synthetic oligonucleotide
ccacacccggcccagagug

SEQ ID NO: 775247 - RNA, 19 nt, Artificial Sequence
  Description of Artificial Sequence: Synthetic oligonucleotide
ucgguuggggucgguggug

SEQ ID NO: 775248 - RNA, 19 nt, Artificial Sequence
  Description of Artificial Sequence: Synthetic oligonucleotide
guucuugauccaccguugu

SEQ ID NO: 775249 - RNA, 19 nt, Artificial Sequence
  Description of Artificial Sequence: Synthetic oligonucleotide
guccugaguguccgaggug

SEQ ID NO: 775250 - RNA, 19 nt, Artificial Sequence
  Description of Artificial Sequence: Synthetic oligonucleotide
cacgcgccacagugcaggg

SEQ ID NO: 775251 - RNA, 19 nt, Artificial Sequence
  Description of Artificial Sequence: Synthetic oligonucleotide
accaugccgggcugcacau

SEQ ID NO: 775252 - RNA, 19 nt, Artificial Sequence
  Description of Artificial Sequence: Synthetic oligonucleotide
caguucuugauccaccguu

SEQ ID NO: 775253 - RNA, 19 nt, Artificial Sequence
  Description of Artificial Sequence: Synthetic oligonucleotide
aggaagugugggcgcagua

SEQ ID NO: 775254 - RNA, 19 nt, Artificial Sequence
  Description of Artificial Sequence: Synthetic oligonucleotide
cggaugacaaccaucaacu

SEQ ID NO: 775255 - RNA, 19 nt, Artificial Sequence
  Description of Artificial Sequence: Synthetic oligonucleotide
guguugcuuggcagaguag

SEQ ID NO: 775256 - RNA, 19 nt, Artificial Sequence
  Description of Artificial Sequence: Synthetic oligonucleotide
gaugggaaguuugggcagu

SEQ ID NO: 775257 - RNA, 19 nt, Artificial Sequence
  Description of Artificial Sequence: Synthetic oligonucleotide
ggcuuuacacuccucaguu

SEQ ID NO: 775258 - RNA, 19 nt, Artificial Sequence
  Description of Artificial Sequence: Synthetic oligonucleotide
cugcauagcuuugaagugu

SEQ ID NO: 775259 - RNA, 19 nt, Artificial Sequence
  Description of Artificial Sequence: Synthetic oligonucleotide
gcaccgcaugaacaaggag

SEQ ID NO: 775260 - RNA, 19 nt, Artificial Sequence
  Description of Artificial Sequence: Synthetic oligonucleotide
gcugauacacgguccaggu

SEQ ID NO: 775261 - RNA, 19 nt, Artificial Sequence
  Description of Artificial Sequence: Synthetic oligonucleotide
ggugugguagucacauaca

SEQ ID NO: 775262 - RNA, 19 nt, Artificial Sequence
  Description of Artificial Sequence: Synthetic oligonucleotide
ccguuguucccacugcuuc

SEQ ID NO: 775263 - RNA, 19 nt, Artificial Sequence
  Description of Artificial Sequence: Synthetic oligonucleotide
uuggugugguagucacaua

SEQ ID NO: 775264 - RNA, 19 nt, Artificial Sequence
  Description of Artificial Sequence: Synthetic oligonucleotide
gccuguggugcguggacgc

SEQ ID NO: 775265 - RNA, 19 nt, Artificial Sequence
  Description of Artificial Sequence: Synthetic oligonucleotide
aggauagaacuggguuuca

SEQ ID NO: 775266 - RNA, 19 nt, Artificial Sequence
  Description of Artificial Sequence: Synthetic oligonucleotide
aagcgcaggcgcaggggcu

SEQ ID NO: 775267 - RNA, 19 nt, Artificial Sequence
  Description of Artificial Sequence: Synthetic oligonucleotide
gacaugucucgggccagga

SEQ ID NO: 775268 - RNA, 19 nt, Artificial Sequence
  Description of Artificial Sequence: Synthetic oligonucleotide
cccagggauggagagauuc

SEQ ID NO: 775269 - RNA, 19 nt, Artificial Sequence
  Description of Artificial Sequence: Synthetic oligonucleotide
cccagauacggaugacaac

SEQ ID NO: 775270 - RNA, 19 nt, Artificial Sequence
  Description of Artificial Sequence: Synthetic oligonucleotide
ggcgcaguagugacuugag

SEQ ID NO: 775271 - RNA, 19 nt, Artificial Sequence
  Description of Artificial Sequence: Synthetic oligonucleotide
agcgcaggcgcaggggcug

SEQ ID NO: 775272 - RNA, 19 nt, Artificial Sequence
  Description of Artificial Sequence: Synthetic oligonucleotide
cuuccgcagggaccagcac

SEQ ID NO: 775273 - RNA, 19 nt, Artificial Sequence
  Description of Artificial Sequence: Synthetic oligonucleotide
cagcugauacacgguccag

SEQ ID NO: 775274 - RNA, 19 nt, Artificial Sequence
  Description of Artificial Sequence: Synthetic oligonucleotide
ggccuguggugcguggacg

SEQ ID NO: 775275 - RNA, 19 nt, Artificial Sequence
  Description of Artificial Sequence: Synthetic oligonucleotide
aggggcacucuccgccaca

SEQ ID NO: 775276 - RNA, 19 nt, Artificial Sequence
  Description of Artificial Sequence: Synthetic oligonucleotide
cugguugggcaggcugacc

SEQ ID NO: 775277 - RNA, 19 nt, Artificial Sequence
  Description of Artificial Sequence: Synthetic oligonucleotide
guugcagugccugcagagu

SEQ ID NO: 775278 - RNA, 19 nt, Artificial Sequence
  Description of Artificial Sequence: Synthetic oligonucleotide
gagcgugggguugaacugu

SEQ ID NO: 775279 - RNA, 19 nt, Artificial Sequence
  Description of Artificial Sequence: Synthetic oligonucleotide
ccaccguuguucccacugc

SEQ ID NO: 775280 - RNA, 19 nt, Artificial Sequence
  Description of Artificial Sequence: Synthetic oligonucleotide
ugggcuccaguggguggcc

SEQ ID NO: 775281 - RNA, 19 nt, Artificial Sequence
  Description of Artificial Sequence: Synthetic oligonucleotide
cugccgaagcgcaggcgca

SEQ ID NO: 775282 - RNA, 19 nt, Artificial Sequence
  Description of Artificial Sequence: Synthetic oligonucleotide
ccccagauacggaugacaa

SEQ ID NO: 775283 - RNA, 19 nt, Artificial Sequence
  Description of Artificial Sequence: Synthetic oligonucleotide
gcccucaucacggcagcag

SEQ ID NO: 775284 - RNA, 19 nt, Artificial Sequence
  Description of Artificial Sequence: Synthetic oligonucleotide
uccggagguggucgaucuu

SEQ ID NO: 775285 - RNA, 19 nt, Artificial Sequence
  Description of Artificial Sequence: Synthetic oligonucleotide
cucgcagcgugcccagaga

SEQ ID NO: 775286 - RNA, 19 nt, Artificial Sequence
  Description of Artificial Sequence: Synthetic oligonucleotide
ggauccgccacuugaggau

SEQ ID NO: 775287 - RNA, 19 nt, Artificial Sequence
  Description of Artificial Sequence: Synthetic oligonucleotide
guuugcauagugaggccuu

SEQ ID NO: 775288 - RNA, 19 nt, Artificial Sequence
  Description of Artificial Sequence: Synthetic oligonucleotide
cauagccggucaccaugca

SEQ ID NO: 775289 - RNA, 19 nt, Artificial Sequence
  Description of Artificial Sequence: Synthetic oligonucleotide
ccacagcuuugugaguagc

SEQ ID NO: 775290 - RNA, 19 nt, Artificial Sequence
  Description of Artificial Sequence: Synthetic oligonucleotide
cuccggagguggucgaucu

SEQ ID NO: 775291 - RNA, 19 nt, Artificial Sequence
  Description of Artificial Sequence: Synthetic oligonucleotide
gccgucgcuggcaggaagc

SEQ ID NO: 775292 - RNA, 19 nt, Artificial Sequence
  Description of Artificial Sequence: Synthetic oligonucleotide
ggaaccuguccuuucgguu

SEQ ID NO: 775293 - RNA, 19 nt, Artificial Sequence
  Description of Artificial Sequence: Synthetic oligonucleotide
ggccgucgcuggcaggaag

SEQ ID NO: 775294 - RNA, 19 nt, Artificial Sequence
  Description of Artificial Sequence: Synthetic oligonucleotide
ggugcccugccgaagcgca

SEQ ID NO: 775295 - RNA, 19 nt, Artificial Sequence
  Description of Artificial Sequence: Synthetic oligonucleotide
gggcgcaguagugacuuga

SEQ ID NO: 775296 - RNA, 19 nt, Artificial Sequence
  Description of Artificial Sequence: Synthetic oligonucleotide
gacagucgauguaccauuu

SEQ ID NO: 775297 - RNA, 19 nt, Artificial Sequence
  Description of Artificial Sequence: Synthetic oligonucleotide
gccauagucugcagugaca

SEQ ID NO: 775298 - RNA, 19 nt, Artificial Sequence
  Description of Artificial Sequence: Synthetic oligonucleotide
agccuccggagguggucga

SEQ ID NO: 775299 - RNA, 19 nt, Artificial Sequence
  Description of Artificial Sequence: Synthetic oligonucleotide
gaggcacauaggagcaccu

SEQ ID NO: 775300 - RNA, 19 nt, Artificial Sequence
  Description of Artificial Sequence: Synthetic oligonucleotide
auccgccacuugaggauca

SEQ ID NO: 775301 - RNA, 19 nt, Artificial Sequence
  Description of Artificial Sequence: Synthetic oligonucleotide
ccgggcugcacaugcaaca

SEQ ID NO: 775302 - RNA, 19 nt, Artificial Sequence
  Description of Artificial Sequence: Synthetic oligonucleotide
ccaccagucauagccgguc

SEQ ID NO: 775303 - RNA, 19 nt, Artificial Sequence
  Description of Artificial Sequence: Synthetic oligonucleotide
ggcuucaguaggccccaga

SEQ ID NO: 775304 - RNA, 19 nt, Artificial Sequence
  Description of Artificial Sequence: Synthetic oligonucleotide
ccuuccgcagggaccagca

SEQ ID NO: 775305 - RNA, 19 nt, Artificial Sequence
  Description of Artificial Sequence: Synthetic oligonucleotide
cgcagcgugcccagagagg

SEQ ID NO: 775306 - RNA, 19 nt, Artificial Sequence
  Description of Artificial Sequence: Synthetic oligonucleotide
ccggucaccaugcaguacu

SEQ ID NO: 775307 - RNA, 19 nt, Artificial Sequence
  Description of Artificial Sequence: Synthetic oligonucleotide
uggacgcuucagggcgggc

SEQ ID NO: 775308 - RNA, 19 nt, Artificial Sequence
  Description of Artificial Sequence: Synthetic oligonucleotide
uccgccacuugaggaucau

SEQ ID NO: 775309 - RNA, 19 nt, Artificial Sequence
  Description of Artificial Sequence: Synthetic oligonucleotide
gccccagauacggaugaca

SEQ ID NO: 775310 - RNA, 19 nt, Artificial Sequence
  Description of Artificial Sequence: Synthetic oligonucleotide
ggucgaucuuuggcuggcc

SEQ ID NO: 775311 - RNA, 19 nt, Artificial Sequence
  Description of Artificial Sequence: Synthetic oligonucleotide
gagugaucuuuuggcugua

SEQ ID NO: 775312 - RNA, 19 nt, Artificial Sequence
  Description of Artificial Sequence: Synthetic oligonucleotide
guugccuuguugggugacu

SEQ ID NO: 775313 - RNA, 19 nt, Artificial Sequence
  Description of Artificial Sequence: Synthetic oligonucleotide
gcugggcccucaucacggc

SEQ ID NO: 775314 - RNA, 19 nt, Artificial Sequence
  Description of Artificial Sequence: Synthetic oligonucleotide
caccuggugcaggcuuuac

SEQ ID NO: 775315 - RNA, 19 nt, Artificial Sequence
  Description of Artificial Sequence: Synthetic oligonucleotide
aggcggcugaccaggccgu

SEQ ID NO: 775316 - RNA, 19 nt, Artificial Sequence
  Description of Artificial Sequence: Synthetic oligonucleotide
gugcccugccgaagcgcag

SEQ ID NO: 775317 - RNA, 19 nt, Artificial Sequence
  Description of Artificial Sequence: Synthetic oligonucleotide
gccgaagcgcaggcgcagg

SEQ ID NO: 775318 - RNA, 19 nt, Artificial Sequence
  Description of Artificial Sequence: Synthetic oligonucleotide
ggaugucccaccagucaua

SEQ ID NO: 775319 - RNA, 19 nt, Artificial Sequence
  Description of Artificial Sequence: Synthetic oligonucleotide
ccugguugggcaggcugac

SEQ ID NO: 775320 - RNA, 19 nt, Artificial Sequence
  Description of Artificial Sequence: Synthetic oligonucleotide
cugaguguccgagguggcu

SEQ ID NO: 775321 - RNA, 19 nt, Artificial Sequence
  Description of Artificial Sequence: Synthetic oligonucleotide
gcccugccgaagcgcaggc

SEQ ID NO: 775322 - RNA, 19 nt, Artificial Sequence
  Description of Artificial Sequence: Synthetic oligonucleotide
cacauacacgcgccacagu

SEQ ID NO: 775323 - RNA, 19 nt, Artificial Sequence
  Description of Artificial Sequence: Synthetic oligonucleotide
acgcgccacagugcagggu

SEQ ID NO: 775324 - RNA, 19 nt, Artificial Sequence
  Description of Artificial Sequence: Synthetic oligonucleotide
cauugguggcugacaggau

SEQ ID NO: 775325 - RNA, 19 nt, Artificial Sequence
  Description of Artificial Sequence: Synthetic oligonucleotide
guggugcguggacgcuuca

SEQ ID NO: 775326 - RNA, 19 nt, Artificial Sequence
  Description of Artificial Sequence: Synthetic oligonucleotide
augccgggcugcacaugca

SEQ ID NO: 775327 - RNA, 19 nt, Artificial Sequence
  Description of Artificial Sequence: Synthetic oligonucleotide
agguaccaucucgcaggaa

SEQ ID NO: 775328 - RNA, 19 nt, Artificial Sequence
  Description of Artificial Sequence: Synthetic oligonucleotide
ggacgcuucagggcgggcu

SEQ ID NO: 775329 - RNA, 19 nt, Artificial Sequence
  Description of Artificial Sequence: Synthetic oligonucleotide
auacacgguccaggucauu

SEQ ID NO: 775330 - RNA, 19 nt, Artificial Sequence
  Description of Artificial Sequence: Synthetic oligonucleotide
cagugcagggugacaguuu

SEQ ID NO: 775331 - RNA, 19 nt, Artificial Sequence
  Description of Artificial Sequence: Synthetic oligonucleotide
gcgccaccacacccggccc

SEQ ID NO: 775332 - RNA, 19 nt, Artificial Sequence
  Description of Artificial Sequence: Synthetic oligonucleotide
ccgcaugaacaaggagggc

SEQ ID NO: 775333 - RNA, 19 nt, Artificial Sequence
  Description of Artificial Sequence: Synthetic oligonucleotide
cagggcgggcucauccagu

SEQ ID NO: 775334 - RNA, 19 nt, Artificial Sequence
  Description of Artificial Sequence: Synthetic oligonucleotide
gcgugggguugaacuguag

SEQ ID NO: 775335 - RNA, 19 nt, Artificial Sequence
  Description of Artificial Sequence: Synthetic oligonucleotide
gcauggugacacagccaca

SEQ ID NO: 775336 - RNA, 19 nt, Artificial Sequence
  Description of Artificial Sequence: Synthetic oligonucleotide
ggcgggcuucuggcgagug

SEQ ID NO: 775337 - RNA, 19 nt, Artificial Sequence
  Description of Artificial Sequence: Synthetic oligonucleotide
caguaucuauucggcacuu

SEQ ID NO: 775338 - RNA, 19 nt, Artificial Sequence
  Description of Artificial Sequence: Synthetic oligonucleotide
cccugccgaagcgcaggcg

SEQ ID NO: 775339 - RNA, 19 nt, Artificial Sequence
  Description of Artificial Sequence: Synthetic oligonucleotide
ggggucgguggugcaccgc

SEQ ID NO: 775340 - RNA, 19 nt, Artificial Sequence
  Description of Artificial Sequence: Synthetic oligonucleotide
gggcgggcucauccaguga

SEQ ID NO: 775341 - RNA, 19 nt, Artificial Sequence
  Description of Artificial Sequence: Synthetic oligonucleotide
ggccccagauacggaugac

SEQ ID NO: 775342 - RNA, 19 nt, Artificial Sequence
  Description of Artificial Sequence: Synthetic oligonucleotide
aggccgucgcuggcaggaa

SEQ ID NO: 775343 - RNA, 19 nt, Artificial Sequence
  Description of Artificial Sequence: Synthetic oligonucleotide
gcgugcccagagagguacc

SEQ ID NO: 775344 - RNA, 19 nt, Artificial Sequence
  Description of Artificial Sequence: Synthetic oligonucleotide
ccgccacuugaggaucaug

SEQ ID NO: 775345 - RNA, 19 nt, Artificial Sequence
  Description of Artificial Sequence: Synthetic oligonucleotide
cuguggugcguggacgcuu

SEQ ID NO: 775346 - RNA, 19 nt, Artificial Sequence
  Description of Artificial Sequence: Synthetic oligonucleotide
ccgccauagucugcaguga

SEQ ID NO: 775347 - RNA, 19 nt, Artificial Sequence
  Description of Artificial Sequence: Synthetic oligonucleotide
ccgcagggaccagcacucc

SEQ ID NO: 775348 - RNA, 19 nt, Artificial Sequence
  Description of Artificial Sequence: Synthetic oligonucleotide
ccaucaacucucgcagcgu

SEQ ID NO: 775349 - RNA, 19 nt, Artificial Sequence
  Description of Artificial Sequence: Synthetic oligonucleotide
cggguggagaguaccugcu

SEQ ID NO: 775350 - RNA, 19 nt, Artificial Sequence
  Description of Artificial Sequence: Synthetic oligonucleotide
ggcggcugaccaggccguc

SEQ ID NO: 775351 - RNA, 19 nt, Artificial Sequence
  Description of Artificial Sequence: Synthetic oligonucleotide
ccggagguggucgaucuuu

SEQ ID NO: 775352 - RNA, 19 nt, Artificial Sequence
  Description of Artificial Sequence: Synthetic oligonucleotide
ccuugaggucuguguuggu

SEQ ID NO: 775353 - RNA, 19 nt, Artificial Sequence
  Description of Artificial Sequence: Synthetic oligonucleotide
cgucgcuggcaggaagcca

SEQ ID NO: 775354 - RNA, 19 nt, Artificial Sequence
  Description of Artificial Sequence: Synthetic oligonucleotide
cgguggugcaccgcaugaa

SEQ ID NO: 775355 - RNA, 19 nt, Artificial Sequence
  Description of Artificial Sequence: Synthetic oligonucleotide
gcaggcgcaggggcuguuu

SEQ ID NO: 775356 - RNA, 19 nt, Artificial Sequence
  Description of Artificial Sequence: Synthetic oligonucleotide
gggcgggcuucuggcgagu

SEQ ID NO: 775357 - RNA, 19 nt, Artificial Sequence
  Description of Artificial Sequence: Synthetic oligonucleotide
gcgcaggcgcaggggcugu

SEQ ID NO: 775358 - RNA, 19 nt, Artificial Sequence
  Description of Artificial Sequence: Synthetic oligonucleotide
ccuuucgguuggggucggu

SEQ ID NO: 775359 - RNA, 19 nt, Artificial Sequence
  Description of Artificial Sequence: Synthetic oligonucleotide
ggcggucuccagggcucuu

SEQ ID NO: 775360 - RNA, 19 nt, Artificial Sequence
  Description of Artificial Sequence: Synthetic oligonucleotide
gcccagggauggagagauu

SEQ ID NO: 775361 - RNA, 19 nt, Artificial Sequence
  Description of Artificial Sequence: Synthetic oligonucleotide
uaagauauagaucuagccc

SEQ ID NO: 775362 - RNA, 19 nt, Artificial Sequence
  Description of Artificial Sequence: Synthetic oligonucleotide
aagauauagaucuagcccu

SEQ ID NO: 775363 - RNA, 19 nt, Artificial Sequence
  Description of Artificial Sequence: Synthetic oligonucleotide
uauagaucuagcccuaugg

SEQ ID NO: 775364 - RNA, 19 nt, Artificial Sequence
  Description of Artificial Sequence: Synthetic oligonucleotide
aacaacuacggaaagaacg

SEQ ID NO: 775365 - RNA, 19 nt, Artificial Sequence
  Description of Artificial Sequence: Synthetic oligonucleotide
auacuaaccaaacagaacu

SEQ ID NO: 775366 - RNA, 19 nt, Artificial Sequence
  Description of Artificial Sequence: Synthetic oligonucleotide
aacuaugccaauacuaacc

SEQ ID NO: 775367 - RNA, 19 nt, Artificial Sequence
  Description of Artificial Sequence: Synthetic oligonucleotide
cauuauaccauauaaacca

SEQ ID NO: 775368 - RNA, 19 nt, Artificial Sequence
  Description of Artificial Sequence: Synthetic oligonucleotide
aaguggaucaauuugguaa

SEQ ID NO: 775369 - RNA, 19 nt, Artificial Sequence
  Description of Artificial Sequence: Synthetic oligonucleotide
agguagaacaaguuguggc

SEQ ID NO: 775370 - RNA, 19 nt, Artificial Sequence
  Description of Artificial Sequence: Synthetic oligonucleotide
uuaguuaaacuacaugaca

SEQ ID NO: 775371 - RNA, 19 nt, Artificial Sequence
  Description of Artificial Sequence: Synthetic oligonucleotide
ucaauuugguaaauuagca

SEQ ID NO: 775372 - RNA, 19 nt, Artificial Sequence
  Description of Artificial Sequence: Synthetic oligonucleotide
aaacuaugccaauacuaac

SEQ ID NO: 775373 - RNA, 19 nt, Artificial Sequence
  Description of Artificial Sequence: Synthetic oligonucleotide
cuaagauauagaucuagcc

SEQ ID NO: 775374 - RNA, 19 nt, Artificial Sequence
  Description of Artificial Sequence: Synthetic oligonucleotide
aauacuaaccaaacagaac

SEQ ID NO: 775375 - RNA, 19 nt, Artificial Sequence
  Description of Artificial Sequence: Synthetic oligonucleotide
aaaacaacuacggaaagaa

SEQ ID NO: 775376 - RNA, 19 nt, Artificial Sequence
  Description of Artificial Sequence: Synthetic oligonucleotide
aacuacaugacaaagugga

SEQ ID NO: 775377 - RNA, 19 nt, Artificial Sequence
  Description of Artificial Sequence: Synthetic oligonucleotide
ucguugauuagguagcagg

SEQ ID NO: 775378 - RNA, 19 nt, Artificial Sequence
  Description of Artificial Sequence: Synthetic oligonucleotide
uguaaucccacacugggcu

SEQ ID NO: 775379 - RNA, 19 nt, Artificial Sequence
  Description of Artificial Sequence: Synthetic oligonucleotide
uagcuuuaagagauaaggg

SEQ ID NO: 775380 - RNA, 19 nt, Artificial Sequence
  Description of Artificial Sequence: Synthetic oligonucleotide
aaaacagaccccuuauacu

SEQ ID NO: 775381 - RNA, 19 nt, Artificial Sequence
  Description of Artificial Sequence: Synthetic oligonucleotide
uaguuaaacuacaugacaa

SEQ ID NO: 775382 - RNA, 19 nt, Artificial Sequence
  Description of Artificial Sequence: Synthetic oligonucleotide
ugagucuuaguuaaacuac

SEQ ID NO: 775383 - RNA, 19 nt, Artificial Sequence
  Description of Artificial Sequence: Synthetic oligonucleotide
caugagaugacgcuugggg

SEQ ID NO: 775384 - RNA, 19 nt, Artificial Sequence
  Description of Artificial Sequence: Synthetic oligonucleotide
cuuuaagagauaagggacc

SEQ ID NO: 775385 - RNA, 19 nt, Artificial Sequence
  Description of Artificial Sequence: Synthetic oligonucleotide
acuacacuaagauauagau

SEQ ID NO: 775386 - RNA, 19 nt, Artificial Sequence
  Description of Artificial Sequence: Synthetic oligonucleotide
agcuuuaagagauaaggga

SEQ ID NO: 775387 - RNA, 19 nt, Artificial Sequence
  Description of Artificial Sequence: Synthetic oligonucleotide
aaaagaggacuucacgugu

SEQ ID NO: 775388 - RNA, 19 nt, Artificial Sequence
  Description of Artificial Sequence: Synthetic oligonucleotide
aacauguagguguaugugu

SEQ ID NO: 775389 - RNA, 19 nt, Artificial Sequence
  Description of Artificial Sequence: Synthetic oligonucleotide
uaagcggucaucccaaagc

SEQ ID NO: 775390 - RNA, 19 nt, Artificial Sequence
  Description of Artificial Sequence: Synthetic oligonucleotide
aaacagaccccuuauacuu

SEQ ID NO: 775391 - RNA, 19 nt, Artificial Sequence
  Description of Artificial Sequence: Synthetic oligonucleotide
acagucgucagaugaagcg

SEQ ID NO: 775392 - RNA, 19 nt, Artificial Sequence
  Description of Artificial Sequence: Synthetic oligonucleotide
auagaucuagcccuauggg

SEQ ID NO: 775393 - RNA, 19 nt, Artificial Sequence
  Description of Artificial Sequence: Synthetic oligonucleotide
uuagguguaaaguucucca

SEQ ID NO: 775394 - RNA, 19 nt, Artificial Sequence
  Description of Artificial Sequence: Synthetic oligonucleotide
gauaaggugucagaaagug

SEQ ID NO: 775395 - RNA, 19 nt, Artificial Sequence
  Description of Artificial Sequence: Synthetic oligonucleotide
ugguaaauuagcacaguca

SEQ ID NO: 775396 - RNA, 19 nt, Artificial Sequence
  Description of Artificial Sequence: Synthetic oligonucleotide
aaaacuaugccaauacuaa

SEQ ID NO: 775397 - RNA, 19 nt, Artificial Sequence
  Description of Artificial Sequence: Synthetic oligonucleotide
guugcagcagucgagaccg

SEQ ID NO: 775398 - RNA, 19 nt, Artificial Sequence
  Description of Artificial Sequence: Synthetic oligonucleotide
cuacuuauuccucuugucc

SEQ ID NO: 775399 - RNA, 19 nt, Artificial Sequence
  Description of Artificial Sequence: Synthetic oligonucleotide
gccaauacuaaccaaacag

SEQ ID NO: 775400 - RNA, 19 nt, Artificial Sequence
  Description of Artificial Sequence: Synthetic oligonucleotide
ugagaugacgcuuggggag

SEQ ID NO: 775401 - RNA, 19 nt, Artificial Sequence
  Description of Artificial Sequence: Synthetic oligonucleotide
cauauagcaggauaaggug

SEQ ID NO: 775402 - RNA, 19 nt, Artificial Sequence
  Description of Artificial Sequence: Synthetic oligonucleotide
acuaagauauagaucuagc

SEQ ID NO: 775403 - RNA, 19 nt, Artificial Sequence
  Description of Artificial Sequence: Synthetic oligonucleotide
gacauauagcaggauaagg

SEQ ID NO: 775404 - RNA, 19 nt, Artificial Sequence
  Description of Artificial Sequence: Synthetic oligonucleotide
uacuuauuccucuugucca

SEQ ID NO: 775405 - RNA, 19 nt, Artificial Sequence
  Description of Artificial Sequence: Synthetic oligonucleotide
aacuacuuauuccucuugu

SEQ ID NO: 775406 - RNA, 19 nt, Artificial Sequence
  Description of Artificial Sequence: Synthetic oligonucleotide
uauacuuucuggagcacac

SEQ ID NO: 775407 - RNA, 19 nt, Artificial Sequence
  Description of Artificial Sequence: Synthetic oligonucleotide
aaugaaugguggguuuggc

SEQ ID NO: 775408 - RNA, 19 nt, Artificial Sequence
  Description of Artificial Sequence: Synthetic oligonucleotide
uaugguguugagcuuguca

SEQ ID NO: 775409 - RNA, 19 nt, Artificial Sequence
  Description of Artificial Sequence: Synthetic oligonucleotide
aacaaguuguggccucucg

SEQ ID NO: 775410 - RNA, 19 nt, Artificial Sequence
  Description of Artificial Sequence: Synthetic oligonucleotide
uugagucuuaguuaaacua

SEQ ID NO: 775411 - RNA, 19 nt, Artificial Sequence
  Description of Artificial Sequence: Synthetic oligonucleotide
uauaaaccaauagaaggcu

SEQ ID NO: 775412 - RNA, 19 nt, Artificial Sequence
  Description of Artificial Sequence: Synthetic oligonucleotide
cugaucaucuuucaacccc

SEQ ID NO: 775413 - RNA, 19 nt, Artificial Sequence
  Description of Artificial Sequence: Synthetic oligonucleotide
cuuacacaaacuugcuggg

SEQ ID NO: 775414 - RNA, 19 nt, Artificial Sequence
  Description of Artificial Sequence: Synthetic oligonucleotide
uauggguauauauaugcau

SEQ ID NO: 775415 - RNA, 19 nt, Artificial Sequence
  Description of Artificial Sequence: Synthetic oligonucleotide
aaccccauucuauguaguc

SEQ ID NO: 775416 - RNA, 19 nt, Artificial Sequence
  Description of Artificial Sequence: Synthetic oligonucleotide
accaauagaaggcugacuu

SEQ ID NO: 775417 - RNA, 19 nt, Artificial Sequence
  Description of Artificial Sequence: Synthetic oligonucleotide
caaaagaggacuucacgug

SEQ ID NO: 775418 - RNA, 19 nt, Artificial Sequence
  Description of Artificial Sequence: Synthetic oligonucleotide
acuaugccaauacuaacca

SEQ ID NO: 775419 - RNA, 19 nt, Artificial Sequence
  Description of Artificial Sequence: Synthetic oligonucleotide
uacgucucaaacuacuuuc

SEQ ID NO: 775420 - RNA, 19 nt, Artificial Sequence
  Description of Artificial Sequence: Synthetic oligonucleotide
cauccuuugauuaauccca

SEQ ID NO: 775421 - RNA, 19 nt, Artificial Sequence
  Description of Artificial Sequence: Synthetic oligonucleotide
uuuaagagauaagggacca

SEQ ID NO: 775422 - RNA, 19 nt, Artificial Sequence
  Description of Artificial Sequence: Synthetic oligonucleotide
agcuauguuagguguaaag

SEQ ID NO: 775423 - RNA, 19 nt, Artificial Sequence
  Description of Artificial Sequence: Synthetic oligonucleotide
uugaagcuacaucugaaaa

SEQ ID NO: 775424 - RNA, 19 nt, Artificial Sequence
  Description of Artificial Sequence: Synthetic oligonucleotide
guaacuaaguugcccaggc

SEQ ID NO: 775425 - RNA, 19 nt, Artificial Sequence
  Description of Artificial Sequence: Synthetic oligonucleotide
agucaguacucccaaagcu

SEQ ID NO: 775426 - RNA, 19 nt, Artificial Sequence
  Description of Artificial Sequence: Synthetic oligonucleotide
uugguaaauuagcacaguc

SEQ ID NO: 775427 - RNA, 19 nt, Artificial Sequence
  Description of Artificial Sequence: Synthetic oligonucleotide
uggagauugcuccgguugg

SEQ ID NO: 775428 - RNA, 19 nt, Artificial Sequence
  Description of Artificial Sequence: Synthetic oligonucleotide
ucaacauguagguguaugu

SEQ ID NO: 775429 - RNA, 19 nt, Artificial Sequence
  Description of Artificial Sequence: Synthetic oligonucleotide
aacagucgucagaugaagc

SEQ ID NO: 775430 - RNA, 19 nt, Artificial Sequence
  Description of Artificial Sequence: Synthetic oligonucleotide
auuggcuugggguuacuag

SEQ ID NO: 775431 - RNA, 19 nt, Artificial Sequence
  Description of Artificial Sequence: Synthetic oligonucleotide
ucagaugauucuucacuag

SEQ ID NO: 775432 - RNA, 19 nt, Artificial Sequence
  Description of Artificial Sequence: Synthetic oligonucleotide
gaccccuuauacuuucugg

SEQ ID NO: 775433 - RNA, 19 nt, Artificial Sequence
  Description of Artificial Sequence: Synthetic oligonucleotide
acauauagcaggauaaggu

SEQ ID NO: 775434 - RNA, 19 nt, Artificial Sequence
  Description of Artificial Sequence: Synthetic oligonucleotide
ccuauggguauauauaugc

SEQ ID NO: 775435 - RNA, 19 nt, Artificial Sequence
  Description of Artificial Sequence: Synthetic oligonucleotide
ugccgaaaguugcucacgg

SEQ ID NO: 775436 - RNA, 19 nt, Artificial Sequence
  Description of Artificial Sequence: Synthetic oligonucleotide
auaucuugagucuuaguua

SEQ ID NO: 775437 - RNA, 19 nt, Artificial Sequence
  Description of Artificial Sequence: Synthetic oligonucleotide
cugauuaggccuuucaaca

SEQ ID NO: 775438 - RNA, 19 nt, Artificial Sequence
  Description of Artificial Sequence: Synthetic oligonucleotide
uccauccuuugauuaaucc

SEQ ID NO: 775439 - RNA, 19 nt, Artificial Sequence
  Description of Artificial Sequence: Synthetic oligonucleotide
gguagaacaaguuguggcc

SEQ ID NO: 775440 - RNA, 19 nt, Artificial Sequence
  Description of Artificial Sequence: Synthetic oligonucleotide
uagaucuagcccuaugggu

SEQ ID NO: 775441 - RNA, 19 nt, Artificial Sequence
  Description of Artificial Sequence: Synthetic oligonucleotide
aagcggucaucccaaagcu

SEQ ID NO: 775442 - RNA, 19 nt, Artificial Sequence
  Description of Artificial Sequence: Synthetic oligonucleotide
ucuucauacaacagucguc

SEQ ID NO: 775443 - RNA, 19 nt, Artificial Sequence
  Description of Artificial Sequence: Synthetic oligonucleotide
acguagguagaacaaguug

SEQ ID NO: 775444 - RNA, 19 nt, Artificial Sequence
  Description of Artificial Sequence: Synthetic oligonucleotide
aaucucucccaucucugcu

SEQ ID NO: 775445 - RNA, 19 nt, Artificial Sequence
  Description of Artificial Sequence: Synthetic oligonucleotide
aaacaacuacggaaagaac

SEQ ID NO: 775446 - RNA, 19 nt, Artificial Sequence
  Description of Artificial Sequence: Synthetic oligonucleotide
ucaaaacuacuuauuccuc

SEQ ID NO: 775447 - RNA, 19 nt, Artificial Sequence
  Description of Artificial Sequence: Synthetic oligonucleotide
uugcaaaugcccucguuga

SEQ ID NO: 775448 - RNA, 19 nt, Artificial Sequence
  Description of Artificial Sequence: Synthetic oligonucleotide
guuacuagacccaugcaac

SEQ ID NO: 775449 - RNA, 19 nt, Artificial Sequence
  Description of Artificial Sequence: Synthetic oligonucleotide
uguauacaucacuacacua

SEQ ID NO: 775450 - RNA, 19 nt, Artificial Sequence
  Description of Artificial Sequence: Synthetic oligonucleotide
uggguuuggcauucaaaag

SEQ ID NO: 775451 - RNA, 19 nt, Artificial Sequence
  Description of Artificial Sequence: Synthetic oligonucleotide
cuucacgugucuucagugg

SEQ ID NO: 775452 - RNA, 19 nt, Artificial Sequence
  Description of Artificial Sequence: Synthetic oligonucleotide
aguuaaacuacaugacaaa

SEQ ID NO: 775453 - RNA, 19 nt, Artificial Sequence
  Description of Artificial Sequence: Synthetic oligonucleotide
uuggcuugggguuacuaga

SEQ ID NO: 775454 - RNA, 19 nt, Artificial Sequence
  Description of Artificial Sequence: Synthetic oligonucleotide
uucaacauguagguguaug

SEQ ID NO: 775455 - RNA, 19 nt, Artificial Sequence
  Description of Artificial Sequence: Synthetic oligonucleotide
auaagggaccagucaguac

SEQ ID NO: 775456 - RNA, 19 nt, Artificial Sequence
  Description of Artificial Sequence: Synthetic oligonucleotide
uucacgugucuucagugga

SEQ ID NO: 775457 - RNA, 19 nt, Artificial Sequence
  Description of Artificial Sequence: Synthetic oligonucleotide
ggugucagaaaguggaaag

SEQ ID NO: 775458 - RNA, 19 nt, Artificial Sequence
  Description of Artificial Sequence: Synthetic oligonucleotide
gauuagguagcaggggucc

SEQ ID NO: 775459 - RNA, 19 nt, Artificial Sequence
  Description of Artificial Sequence: Synthetic oligonucleotide
aaagaggacuucacguguc

SEQ ID NO: 775460 - RNA, 19 nt, Artificial Sequence
  Description of Artificial Sequence: Synthetic oligonucleotide
auguugcgguugcaaaugc

SEQ ID NO: 775461 - RNA, 19 nt, Artificial Sequence
  Description of Artificial Sequence: Synthetic oligonucleotide
acucccaaagcugauuagg

SEQ ID NO: 775462 - RNA, 19 nt, Artificial Sequence
  Description of Artificial Sequence: Synthetic oligonucleotide
uagguagaacaaguugugg

SEQ ID NO: 775463 - RNA, 19 nt, Artificial Sequence
  Description of Artificial Sequence: Synthetic oligonucleotide
cuucauacaacagucguca

SEQ ID NO: 775464 - RNA, 19 nt, Artificial Sequence
  Description of Artificial Sequence: Synthetic oligonucleotide
cauuaugguguugagcuug

SEQ ID NO: 775465 - RNA, 19 nt, Artificial Sequence
  Description of Artificial Sequence: Synthetic oligonucleotide
uccguggccgcauugugag

SEQ ID NO: 775466 - RNA, 19 nt, Artificial Sequence
  Description of Artificial Sequence: Synthetic oligonucleotide
caauacuaaccaaacagaa

SEQ ID NO: 775467 - RNA, 19 nt, Artificial Sequence
  Description of Artificial Sequence: Synthetic oligonucleotide
ggaucaaaacuacuuauuc

SEQ ID NO: 775468 - RNA, 19 nt, Artificial Sequence
  Description of Artificial Sequence: Synthetic oligonucleotide
acuagacccaugcaacuca

SEQ ID NO: 775469 - RNA, 19 nt, Artificial Sequence
  Description of Artificial Sequence: Synthetic oligonucleotide
acuucacgugucuucagug

SEQ ID NO: 775470 - RNA, 19 nt, Artificial Sequence
  Description of Artificial Sequence: Synthetic oligonucleotide
aaaguggaucaauuuggua

SEQ ID NO: 775471 - RNA, 19 nt, Artificial Sequence
  Description of Artificial Sequence: Synthetic oligonucleotide
aaguccaagcugaucaucu

SEQ ID NO: 775472 - RNA, 19 nt, Artificial Sequence
  Description of Artificial Sequence: Synthetic oligonucleotide
uuauugaaauuugaagcua

SEQ ID NO: 775473 - RNA, 19 nt, Artificial Sequence
  Description of Artificial Sequence: Synthetic oligonucleotide
cacuaagauauagaucuag

SEQ ID NO: 775474 - RNA, 19 nt, Artificial Sequence
  Description of Artificial Sequence: Synthetic oligonucleotide
ugccaauacuaaccaaaca

SEQ ID NO: 775475 - RNA, 19 nt, Artificial Sequence
  Description of Artificial Sequence: Synthetic oligonucleotide
cuugguacaucucuuggca

SEQ ID NO: 775476 - RNA, 19 nt, Artificial Sequence
  Description of Artificial Sequence: Synthetic oligonucleotide
ggaaagcauggucuggucg

SEQ ID NO: 775477 - RNA, 19 nt, Artificial Sequence
  Description of Artificial Sequence: Synthetic oligonucleotide
uuacuagacccaugcaacu

SEQ ID NO: 775478 - RNA, 19 nt, Artificial Sequence
  Description of Artificial Sequence: Synthetic oligonucleotide
cucccucauaucuugaguc

SEQ ID NO: 775479 - RNA, 19 nt, Artificial Sequence
  Description of Artificial Sequence: Synthetic oligonucleotide
caugcaacucaguuuccag

SEQ ID NO: 775480 - RNA, 19 nt, Artificial Sequence
  Description of Artificial Sequence: Synthetic oligonucleotide
ccaccuuacacaaacuugc

SEQ ID NO: 775481 - RNA, 19 nt, Artificial Sequence
  Description of Artificial Sequence: Synthetic oligonucleotide
guuagguguaaaguucucc

SEQ ID NO: 775482 - RNA, 19 nt, Artificial Sequence
  Description of Artificial Sequence: Synthetic oligonucleotide
ugauuagguagcagggguc

SEQ ID NO: 775483 - RNA, 19 nt, Artificial Sequence
  Description of Artificial Sequence: Synthetic oligonucleotide
ucaggggucugucacugga

SEQ ID NO: 775484 - RNA, 19 nt, Artificial Sequence
  Description of Artificial Sequence: Synthetic oligonucleotide
ugcagagccgaccgagggg

SEQ ID NO: 775485 - RNA, 19 nt, Artificial Sequence
  Description of Artificial Sequence: Synthetic oligonucleotide
uguagucagcaccaaugaa

SEQ ID NO: 775486 - RNA, 19 nt, Artificial Sequence
  Description of Artificial Sequence: Synthetic oligonucleotide
acaacuacggaaagaacgu

SEQ ID NO: 775487 - RNA, 19 nt, Artificial Sequence
  Description of Artificial Sequence: Synthetic oligonucleotide
ccuuugauuaaucccaaag

SEQ ID NO: 775488 - RNA, 19 nt, Artificial Sequence
  Description of Artificial Sequence: Synthetic oligonucleotide
guugcgguugcaaaugccc

SEQ ID NO: 775489 - RNA, 19 nt, Artificial Sequence
  Description of Artificial Sequence: Synthetic oligonucleotide
gcuuuaagagauaagggac

SEQ ID NO: 775490 - RNA, 19 nt, Artificial Sequence
  Description of Artificial Sequence: Synthetic oligonucleotide
accuuacacaaacuugcug

SEQ ID NO: 775491 - RNA, 19 nt, Artificial Sequence
  Description of Artificial Sequence: Synthetic oligonucleotide
agucgagaccgacagguga

SEQ ID NO: 775492 - RNA, 19 nt, Artificial Sequence
  Description of Artificial Sequence: Synthetic oligonucleotide
agacauauagcaggauaag

SEQ ID NO: 775493 - RNA, 19 nt, Artificial Sequence
  Description of Artificial Sequence: Synthetic oligonucleotide
uucaaccccauucuaugua

SEQ ID NO: 775494 - RNA, 19 nt, Artificial Sequence
  Description of Artificial Sequence: Synthetic oligonucleotide
gucaguacucccaaagcug

SEQ ID NO: 775495 - RNA, 19 nt, Artificial Sequence
  Description of Artificial Sequence: Synthetic oligonucleotide
guagguagaacaaguugug

SEQ ID NO: 775496 - RNA, 19 nt, Artificial Sequence
  Description of Artificial Sequence: Synthetic oligonucleotide
gggguuacuagacccaugc

SEQ ID NO: 775497 - RNA, 19 nt, Artificial Sequence
  Description of Artificial Sequence: Synthetic oligonucleotide
ggguuuggcauucaaaaga

SEQ ID NO: 775498 - RNA, 19 nt, Artificial Sequence
  Description of Artificial Sequence: Synthetic oligonucleotide
aaaguugcucacggucggg

SEQ ID NO: 775499 - RNA, 19 nt, Artificial Sequence
  Description of Artificial Sequence: Synthetic oligonucleotide
cauaucuugagucuuaguu

SEQ ID NO: 775500 - RNA, 19 nt, Artificial Sequence
  Description of Artificial Sequence: Synthetic oligonucleotide
cuguaaucccacacugggc

SEQ ID NO: 775501 - RNA, 19 nt, Artificial Sequence
  Description of Artificial Sequence: Synthetic oligonucleotide
cucacggucgggcugcccg

SEQ ID NO: 775502 - RNA, 19 nt, Artificial Sequence
  Description of Artificial Sequence: Synthetic oligonucleotide
uuaagagauaagggaccag

SEQ ID NO: 775503 - RNA, 19 nt, Artificial Sequence
  Description of Artificial Sequence: Synthetic oligonucleotide
ccacuuacacugcagagcc

SEQ ID NO: 775504 - RNA, 19 nt, Artificial Sequence
  Description of Artificial Sequence: Synthetic oligonucleotide
gcugauuaggccuuucaac

SEQ ID NO: 775505 - RNA, 19 nt, Artificial Sequence
  Description of Artificial Sequence: Synthetic oligonucleotide
uucauacaacagucgucag

SEQ ID NO: 775506 - RNA, 19 nt, Artificial Sequence
  Description of Artificial Sequence: Synthetic oligonucleotide
auaaaccaauagaaggcug

SEQ ID NO: 775507 - RNA, 19 nt, Artificial Sequence
  Description of Artificial Sequence: Synthetic oligonucleotide
auauaugcauuuauggcua

SEQ ID NO: 775508 - RNA, 19 nt, Artificial Sequence
  Description of Artificial Sequence: Synthetic oligonucleotide
uacuaaccaaacagaacuu

SEQ ID NO: 775509 - RNA, 19 nt, Artificial Sequence
  Description of Artificial Sequence: Synthetic oligonucleotide
ucgucagaugaagcggugg

SEQ ID NO: 775510 - RNA, 19 nt, Artificial Sequence
  Description of Artificial Sequence: Synthetic oligonucleotide
auuagguagcagggguccc

SEQ ID NO: 775511 - RNA, 19 nt, Artificial Sequence
  Description of Artificial Sequence: Synthetic oligonucleotide
caaugaaugguggguuugg

SEQ ID NO: 775512 - RNA, 19 nt, Artificial Sequence
  Description of Artificial Sequence: Synthetic oligonucleotide
cuauggguauauauaugca

SEQ ID NO: 775513 - RNA, 19 nt, Artificial Sequence
  Description of Artificial Sequence: Synthetic oligonucleotide
cagcagucgagaccgacag

SEQ ID NO: 775514 - RNA, 19 nt, Artificial Sequence
  Description of Artificial Sequence: Synthetic oligonucleotide
accacgcuggcuccggagg

SEQ ID NO: 775515 - RNA, 19 nt, Artificial Sequence
  Description of Artificial Sequence: Synthetic oligonucleotide
uacucccaaagcugauuag

SEQ ID NO: 775516 - RNA, 19 nt, Artificial Sequence
  Description of Artificial Sequence: Synthetic oligonucleotide
agcaggauaaggugucaga

SEQ ID NO: 775517 - RNA, 19 nt, Artificial Sequence
  Description of Artificial Sequence: Synthetic oligonucleotide
uugcgguugcaaaugcccu

SEQ ID NO: 775518 - RNA, 19 nt, Artificial Sequence
  Description of Artificial Sequence: Synthetic oligonucleotide
cagucgucagaugaagcgg

SEQ ID NO: 775519 - RNA, 19 nt, Artificial Sequence
  Description of Artificial Sequence: Synthetic oligonucleotide
aaaugcccucguugauuag

SEQ ID NO: 775520 - RNA, 19 nt, Artificial Sequence
  Description of Artificial Sequence: Synthetic oligonucleotide
uguuagguguaaaguucuc

SEQ ID NO: 775521 - RNA, 19 nt, Artificial Sequence
  Description of Artificial Sequence: Synthetic oligonucleotide
ggcauuacgucucaaacua

SEQ ID NO: 775522 - RNA, 19 nt, Artificial Sequence
  Description of Artificial Sequence: Synthetic oligonucleotide
auguuagguguaaaguucu

SEQ ID NO: 775523 - RNA, 19 nt, Artificial Sequence
  Description of Artificial Sequence: Synthetic oligonucleotide
auuaggccuuucaacaugu

SEQ ID NO: 775524 - RNA, 19 nt, Artificial Sequence
  Description of Artificial Sequence: Synthetic oligonucleotide
agaucuagcccuaugggua

SEQ ID NO: 775525 - RNA, 19 nt, Artificial Sequence
  Description of Artificial Sequence: Synthetic oligonucleotide
agaccccuuauacuuucug

SEQ ID NO: 775526 - RNA, 19 nt, Artificial Sequence
  Description of Artificial Sequence: Synthetic oligonucleotide
cucgaagaucagcuucucc

SEQ ID NO: 775527 - RNA, 19 nt, Artificial Sequence
  Description of Artificial Sequence: Synthetic oligonucleotide
cgaaaguugcucacggucg

SEQ ID NO: 775528 - RNA, 19 nt, Artificial Sequence
  Description of Artificial Sequence: Synthetic oligonucleotide
cguugauuagguagcaggg

SEQ ID NO: 775529 - RNA, 19 nt, Artificial Sequence
  Description of Artificial Sequence: Synthetic oligonucleotide
acuaaccaaacagaacuuu

SEQ ID NO: 775530 - RNA, 19 nt, Artificial Sequence
  Description of Artificial Sequence: Synthetic oligonucleotide
caacagucgucagaugaag

SEQ ID NO: 775531 - RNA, 19 nt, Artificial Sequence
  Description of Artificial Sequence: Synthetic oligonucleotide
agcguacaucagaugauuc

SEQ ID NO: 775532 - RNA, 19 nt, Artificial Sequence
  Description of Artificial Sequence: Synthetic oligonucleotide
ucgcccacccugaggacag

SEQ ID NO: 775533 - RNA, 19 nt, Artificial Sequence
  Description of Artificial Sequence: Synthetic oligonucleotide
accacaagacuccauccuu

SEQ ID NO: 775534 - RNA, 19 nt, Artificial Sequence
  Description of Artificial Sequence: Synthetic oligonucleotide
aacguagguagaacaaguu

SEQ ID NO: 775535 - RNA, 19 nt, Artificial Sequence
  Description of Artificial Sequence: Synthetic oligonucleotide
gauaagggaccagucagua

SEQ ID NO: 775536 - RNA, 19 nt, Artificial Sequence
  Description of Artificial Sequence: Synthetic oligonucleotide
cgcauugugaggcuggucc

SEQ ID NO: 775537 - RNA, 19 nt, Artificial Sequence
  Description of Artificial Sequence: Synthetic oligonucleotide
uacuagacccaugcaacuc

SEQ ID NO: 775538 - RNA, 19 nt, Artificial Sequence
  Description of Artificial Sequence: Synthetic oligonucleotide
ccaauacuaaccaaacaga

SEQ ID NO: 775539 - RNA, 19 nt, Artificial Sequence
  Description of Artificial Sequence: Synthetic oligonucleotide
uccacaugagaugacgcuu

SEQ ID NO: 775540 - RNA, 19 nt, Artificial Sequence
  Description of Artificial Sequence: Synthetic oligonucleotide
cauuacgucucaaacuacu

SEQ ID NO: 775541 - RNA, 19 nt, Artificial Sequence
  Description of Artificial Sequence: Synthetic oligonucleotide
gucgagaccgacaggugag

SEQ ID NO: 775542 - RNA, 19 nt, Artificial Sequence
  Description of Artificial Sequence: Synthetic oligonucleotide
guugcucacggucgggcug

SEQ ID NO: 775543 - RNA, 19 nt, Artificial Sequence
  Description of Artificial Sequence: Synthetic oligonucleotide
acuaaguugcccaggcccu

SEQ ID NO: 775544 - RNA, 19 nt, Artificial Sequence
  Description of Artificial Sequence: Synthetic oligonucleotide
ugcaaaugcccucguugau

SEQ ID NO: 775545 - RNA, 19 nt, Artificial Sequence
  Description of Artificial Sequence: Synthetic oligonucleotide
gacaggugagcggcagucg

SEQ ID NO: 775546 - RNA, 19 nt, Artificial Sequence
  Description of Artificial Sequence: Synthetic oligonucleotide
acaugagaugacgcuuggg

SEQ ID NO: 775547 - RNA, 19 nt, Artificial Sequence
  Description of Artificial Sequence: Synthetic oligonucleotide
ccccauucuauguagucag

SEQ ID NO: 775548 - RNA, 19 nt, Artificial Sequence
  Description of Artificial Sequence: Synthetic oligonucleotide
cuugggguuacuagaccca

SEQ ID NO: 775549 - RNA, 19 nt, Artificial Sequence
  Description of Artificial Sequence: Synthetic oligonucleotide
cuugagucuuaguuaaacu

SEQ ID NO: 775550 - RNA, 19 nt, Artificial Sequence
  Description of Artificial Sequence: Synthetic oligonucleotide
gggaguucuucucuaccag

SEQ ID NO: 775551 - RNA, 19 nt, Artificial Sequence
  Description of Artificial Sequence: Synthetic oligonucleotide
acgugucuucaguggacag

SEQ ID NO: 775552 - RNA, 19 nt, Artificial Sequence
  Description of Artificial Sequence: Synthetic oligonucleotide
gaaguccaagcugaucauc

SEQ ID NO: 775553 - RNA, 19 nt, Artificial Sequence
  Description of Artificial Sequence: Synthetic oligonucleotide
uguugucuagggccaccac

SEQ ID NO: 775554 - RNA, 19 nt, Artificial Sequence
  Description of Artificial Sequence: Synthetic oligonucleotide
ucacggucgggcugcccgg

SEQ ID NO: 775555 - RNA, 19 nt, Artificial Sequence
  Description of Artificial Sequence: Synthetic oligonucleotide
cacaaagccaugcauuaua

SEQ ID NO: 775556 - RNA, 19 nt, Artificial Sequence
  Description of Artificial Sequence: Synthetic oligonucleotide
ucauuaugguguugagcuu

SEQ ID NO: 775557 - RNA, 19 nt, Artificial Sequence
  Description of Artificial Sequence: Synthetic oligonucleotide
accaaugaaugguggguuu

SEQ ID NO: 775558 - RNA, 19 nt, Artificial Sequence
  Description of Artificial Sequence: Synthetic oligonucleotide
accccauucuauguaguca

SEQ ID NO: 775559 - RNA, 19 nt, Artificial Sequence
  Description of Artificial Sequence: Synthetic oligonucleotide
gcugaucaucuuucaaccc

SEQ ID NO: 775560 - RNA, 19 nt, Artificial Sequence
  Description of Artificial Sequence: Synthetic oligonucleotide
ugcccgguuuguucucccg

SEQ ID NO: 775561 - RNA, 19 nt, Artificial Sequence
  Description of Artificial Sequence: Synthetic oligonucleotide
agcagucgagaccgacagg

SEQ ID NO: 775562 - RNA, 19 nt, Artificial Sequence
  Description of Artificial Sequence: Synthetic oligonucleotide
gucuagggccaccacgcug

SEQ ID NO: 775563 - RNA, 19 nt, Artificial Sequence
  Description of Artificial Sequence: Synthetic oligonucleotide
agucgucagaugaagcggu

SEQ ID NO: 775564 - RNA, 19 nt, Artificial Sequence
  Description of Artificial Sequence: Synthetic oligonucleotide
agccaugcauuauaccaua

SEQ ID NO: 775565 - RNA, 19 nt, Artificial Sequence
  Description of Artificial Sequence: Synthetic oligonucleotide
aggugagcggcagucgguc

SEQ ID NO: 775566 - RNA, 19 nt, Artificial Sequence
  Description of Artificial Sequence: Synthetic oligonucleotide
uccuuugauuaaucccaaa

SEQ ID NO: 775567 - RNA, 19 nt, Artificial Sequence
  Description of Artificial Sequence: Synthetic oligonucleotide
cacuuacacugcagagccg

SEQ ID NO: 775568 - RNA, 19 nt, Artificial Sequence
  Description of Artificial Sequence: Synthetic oligonucleotide
gguagcaggggucccgcag

SEQ ID NO: 775569 - RNA, 19 nt, Artificial Sequence
  Description of Artificial Sequence: Synthetic oligonucleotide
agucuuaguuaaacuacau

SEQ ID NO: 775570 - RNA, 19 nt, Artificial Sequence
  Description of Artificial Sequence: Synthetic oligonucleotide
ccgaaaguugcucacgguc

SEQ ID NO: 775571 - RNA, 19 nt, Artificial Sequence
  Description of Artificial Sequence: Synthetic oligonucleotide
caggauaaggugucagaaa

SEQ ID NO: 775572 - RNA, 19 nt, Artificial Sequence
  Description of Artificial Sequence: Synthetic oligonucleotide
auuaugguguugagcuugu

SEQ ID NO: 775573 - RNA, 19 nt, Artificial Sequence
  Description of Artificial Sequence: Synthetic oligonucleotide
gcaccagcuauguuaggug

SEQ ID NO: 775574 - RNA, 19 nt, Artificial Sequence
  Description of Artificial Sequence: Synthetic oligonucleotide
auuacgucucaaacuacuu

SEQ ID NO: 775575 - RNA, 19 nt, Artificial Sequence
  Description of Artificial Sequence: Synthetic oligonucleotide
gacuucacgugucuucagu

SEQ ID NO: 775576 - RNA, 19 nt, Artificial Sequence
  Description of Artificial Sequence: Synthetic oligonucleotide
uguaagcggucaucccaaa

SEQ ID NO: 775577 - RNA, 19 nt, Artificial Sequence
  Description of Artificial Sequence: Synthetic oligonucleotide
cugccgaaaguugcucacg

SEQ ID NO: 775578 - RNA, 19 nt, Artificial Sequence
  Description of Artificial Sequence: Synthetic oligonucleotide
gagaugacgcuuggggaga

SEQ ID NO: 775579 - RNA, 19 nt, Artificial Sequence
  Description of Artificial Sequence: Synthetic oligonucleotide
uccgggcuugccagggucu

SEQ ID NO: 775580 - RNA, 19 nt, Artificial Sequence
  Description of Artificial Sequence: Synthetic oligonucleotide
gauucuucacuagauccau

SEQ ID NO: 775581 - RNA, 19 nt, Artificial Sequence
  Description of Artificial Sequence: Synthetic oligonucleotide
cagucggucuuggacuggg

SEQ ID NO: 775582 - RNA, 19 nt, Artificial Sequence
  Description of Artificial Sequence: Synthetic oligonucleotide
ccacaugagaugacgcuug

SEQ ID NO: 775583 - RNA, 19 nt, Artificial Sequence
  Description of Artificial Sequence: Synthetic oligonucleotide
acgucucaaacuacuuucu

SEQ ID NO: 775584 - RNA, 19 nt, Artificial Sequence
  Description of Artificial Sequence: Synthetic oligonucleotide
agcccuauggguauauaua

SEQ ID NO: 775585 - RNA, 19 nt, Artificial Sequence
  Description of Artificial Sequence: Synthetic oligonucleotide
auagcaggauaagguguca

SEQ ID NO: 775586 - RNA, 19 nt, Artificial Sequence
  Description of Artificial Sequence: Synthetic oligonucleotide
aguacucccaaagcugauu

SEQ ID NO: 775587 - RNA, 19 nt, Artificial Sequence
  Description of Artificial Sequence: Synthetic oligonucleotide
ucgagaccgacaggugagc

SEQ ID NO: 775588 - RNA, 19 nt, Artificial Sequence
  Description of Artificial Sequence: Synthetic oligonucleotide
guagaacaaguuguggccu

SEQ ID NO: 775589 - RNA, 19 nt, Artificial Sequence
  Description of Artificial Sequence: Synthetic oligonucleotide
ccucauuaugguguugagc

SEQ ID NO: 775590 - RNA, 19 nt, Artificial Sequence
  Description of Artificial Sequence: Synthetic oligonucleotide
uuaggccuuucaacaugua

SEQ ID NO: 775591 - RNA, 19 nt, Artificial Sequence
  Description of Artificial Sequence: Synthetic oligonucleotide
agauauagaucuagcccua

SEQ ID NO: 775592 - RNA, 19 nt, Artificial Sequence
  Description of Artificial Sequence: Synthetic oligonucleotide
gaucuagcccuauggguau

SEQ ID NO: 775593 - RNA, 19 nt, Artificial Sequence
  Description of Artificial Sequence: Synthetic oligonucleotide
ucuagcccuauggguauau

SEQ ID NO: 775594 - RNA, 19 nt, Artificial Sequence
  Description of Artificial Sequence: Synthetic oligonucleotide
agcgguggaagauguccau

SEQ ID NO: 775595 - RNA, 19 nt, Artificial Sequence
  Description of Artificial Sequence: Synthetic oligonucleotide
gucaggggucugucacugg

SEQ ID NO: 775596 - RNA, 19 nt, Artificial Sequence
  Description of Artificial Sequence: Synthetic oligonucleotide
acagcguacaucagaugau

SEQ ID NO: 775597 - RNA, 19 nt, Artificial Sequence
  Description of Artificial Sequence: Synthetic oligonucleotide
cuaugccaauacuaaccaa

SEQ ID NO: 775598 - RNA, 19 nt, Artificial Sequence
  Description of Artificial Sequence: Synthetic oligonucleotide
gcgguugcaaaugcccucg

SEQ ID NO: 775599 - RNA, 19 nt, Artificial Sequence
  Description of Artificial Sequence: Synthetic oligonucleotide
gacgcuuggggagaccaaa

SEQ ID NO: 775600 - RNA, 19 nt, Artificial Sequence
  Description of Artificial Sequence: Synthetic oligonucleotide
cuaaguugcccaggcccug

SEQ ID NO: 775601 - RNA, 19 nt, Artificial Sequence
  Description of Artificial Sequence: Synthetic oligonucleotide
cagucgagaccgacaggug

SEQ ID NO: 775602 - RNA, 19 nt, Artificial Sequence
  Description of Artificial Sequence: Synthetic oligonucleotide
cacggggcuccaaggaauc

SEQ ID NO: 775603 - RNA, 19 nt, Artificial Sequence
  Description of Artificial Sequence: Synthetic oligonucleotide
cguagguagaacaaguugu

SEQ ID NO: 775604 - RNA, 19 nt, Artificial Sequence
  Description of Artificial Sequence: Synthetic oligonucleotide
gcggcagucggucuuggac

SEQ ID NO: 775605 - RNA, 19 nt, Artificial Sequence
  Description of Artificial Sequence: Synthetic oligonucleotide
cccuauggguauauauaug

SEQ ID NO: 775606 - RNA, 19 nt, Artificial Sequence
  Description of Artificial Sequence: Synthetic oligonucleotide
gaacuuuguaagcggucau

SEQ ID NO: 775607 - RNA, 19 nt, Artificial Sequence
  Description of Artificial Sequence: Synthetic oligonucleotide
cugccucggcaagacagag

SEQ ID NO: 775608 - RNA, 19 nt, Artificial Sequence
  Description of Artificial Sequence: Synthetic oligonucleotide
gcaggauaaggugucagaa

SEQ ID NO: 775609 - RNA, 19 nt, Artificial Sequence
  Description of Artificial Sequence: Synthetic oligonucleotide
gaacaaguuguggccucuc

SEQ ID NO: 775610 - RNA, 19 nt, Artificial Sequence
  Description of Artificial Sequence: Synthetic oligonucleotide
cuccacaugagaugacgcu

SEQ ID NO: 775611 - RNA, 19 nt, Artificial Sequence
  Description of Artificial Sequence: Synthetic oligonucleotide
agcggucaucccaaagcug

SEQ ID NO: 775612 - RNA, 19 nt, Artificial Sequence
  Description of Artificial Sequence: Synthetic oligonucleotide
gccucauuaugguguugag

SEQ ID NO: 775613 - RNA, 19 nt, Artificial Sequence
  Description of Artificial Sequence: Synthetic oligonucleotide
caccagcuauguuaggugu

SEQ ID NO: 775614 - RNA, 19 nt, Artificial Sequence
  Description of Artificial Sequence: Synthetic oligonucleotide
gugucagaaaguggaaagu

SEQ ID NO: 775615 - RNA, 19 nt, Artificial Sequence
  Description of Artificial Sequence: Synthetic oligonucleotide
gucgucagaugaagcggug

SEQ ID NO: 775616 - RNA, 19 nt, Artificial Sequence
  Description of Artificial Sequence: Synthetic oligonucleotide
cacgugucuucaguggaca

SEQ ID NO: 775617 - RNA, 19 nt, Artificial Sequence
  Description of Artificial Sequence: Synthetic oligonucleotide
gcagucgagaccgacaggu

SEQ ID NO: 775618 - RNA, 19 nt, Artificial Sequence
  Description of Artificial Sequence: Synthetic oligonucleotide
auccguggccgcauuguga

SEQ ID NO: 775619 - RNA, 19 nt, Artificial Sequence
  Description of Artificial Sequence: Synthetic oligonucleotide
uuaugguguugagcuuguc

SEQ ID NO: 775620 - RNA, 19 nt, Artificial Sequence
  Description of Artificial Sequence: Synthetic oligonucleotide
gauauagaucuagcccuau

SEQ ID NO: 775621 - RNA, 19 nt, Artificial Sequence
  Description of Artificial Sequence: Synthetic oligonucleotide
cccauucuauguagucagc

SEQ ID NO: 775622 - RNA, 19 nt, Artificial Sequence
  Description of Artificial Sequence: Synthetic oligonucleotide
gcccuauggguauauauau

SEQ ID NO: 775623 - RNA, 19 nt, Artificial Sequence
  Description of Artificial Sequence: Synthetic oligonucleotide
uggccgcauugugaggcug

SEQ ID NO: 775624 - RNA, 19 nt, Artificial Sequence
  Description of Artificial Sequence: Synthetic oligonucleotide
caccacaagacuccauccu

SEQ ID NO: 775625 - RNA, 19 nt, Artificial Sequence
  Description of Artificial Sequence: Synthetic oligonucleotide
ccgggacuggaacuuuucc

SEQ ID NO: 775626 - RNA, 19 nt, Artificial Sequence
  Description of Artificial Sequence: Synthetic oligonucleotide
cucugucaggggucuguca

SEQ ID NO: 775627 - RNA, 19 nt, Artificial Sequence
  Description of Artificial Sequence: Synthetic oligonucleotide
ccauucuauguagucagca

SEQ ID NO: 775628 - RNA, 19 nt, Artificial Sequence
  Description of Artificial Sequence: Synthetic oligonucleotide
agaggacuucacgugucuu

SEQ ID NO: 775629 - RNA, 19 nt, Artificial Sequence
  Description of Artificial Sequence: Synthetic oligonucleotide
gcuccggaggcacugugga

SEQ ID NO: 775630 - RNA, 19 nt, Artificial Sequence
  Description of Artificial Sequence: Synthetic oligonucleotide
gagguugccucugcuuaaa

SEQ ID NO: 775631 - RNA, 19 nt, Artificial Sequence
  Description of Artificial Sequence: Synthetic oligonucleotide
cuauguagucagcaccaau

SEQ ID NO: 775632 - RNA, 19 nt, Artificial Sequence
  Description of Artificial Sequence: Synthetic oligonucleotide
cguggccgcauugugaggc

SEQ ID NO: 775633 - RNA, 19 nt, Artificial Sequence
  Description of Artificial Sequence: Synthetic oligonucleotide
ccgaccgaggggcuucugg

SEQ ID NO: 775634 - RNA, 19 nt, Artificial Sequence
  Description of Artificial Sequence: Synthetic oligonucleotide
acacuaagauauagaucua

SEQ ID NO: 775635 - RNA, 19 nt, Artificial Sequence
  Description of Artificial Sequence: Synthetic oligonucleotide
gguggguuuggcauucaaa

SEQ ID NO: 775636 - RNA, 19 nt, Artificial Sequence
  Description of Artificial Sequence: Synthetic oligonucleotide
accagcuauguuaggugua

SEQ ID NO: 775637 - RNA, 19 nt, Artificial Sequence
  Description of Artificial Sequence: Synthetic oligonucleotide
gcccgguuuguucucccgc

SEQ ID NO: 775638 - RNA, 19 nt, Artificial Sequence
  Description of Artificial Sequence: Synthetic oligonucleotide
agguagcaggggucccgca

SEQ ID NO: 775639 - RNA, 19 nt, Artificial Sequence
  Description of Artificial Sequence: Synthetic oligonucleotide
cucgcccacccugaggaca

SEQ ID NO: 775640 - RNA, 19 nt, Artificial Sequence
  Description of Artificial Sequence: Synthetic oligonucleotide
gcauuacgucucaaacuac

SEQ ID NO: 775641 - RNA, 19 nt, Artificial Sequence
  Description of Artificial Sequence: Synthetic oligonucleotide
uugcagcagucgagaccga

SEQ ID NO: 775642 - RNA, 19 nt, Artificial Sequence
  Description of Artificial Sequence: Synthetic oligonucleotide
gcggucaucccaaagcugu

SEQ ID NO: 775643 - RNA, 19 nt, Artificial Sequence
  Description of Artificial Sequence: Synthetic oligonucleotide
ucauuggcuugggguuacu

SEQ ID NO: 775644 - RNA, 19 nt, Artificial Sequence
  Description of Artificial Sequence: Synthetic oligonucleotide
ggcauccguggccgcauug

SEQ ID NO: 775645 - RNA, 19 nt, Artificial Sequence
  Description of Artificial Sequence: Synthetic oligonucleotide
caacuacggaaagaacgua

SEQ ID NO: 775646 - RNA, 19 nt, Artificial Sequence
  Description of Artificial Sequence: Synthetic oligonucleotide
gagccgaccgaggggcuuc

SEQ ID NO: 775647 - RNA, 19 nt, Artificial Sequence
  Description of Artificial Sequence: Synthetic oligonucleotide
caaccccauucuauguagu

SEQ ID NO: 775648 - RNA, 19 nt, Artificial Sequence
  Description of Artificial Sequence: Synthetic oligonucleotide
gcgguggaagauguccaug

SEQ ID NO: 775649 - RNA, 19 nt, Artificial Sequence
  Description of Artificial Sequence: Synthetic oligonucleotide
gcaccaaugaauggugggu

SEQ ID NO: 775650 - RNA, 19 nt, Artificial Sequence
  Description of Artificial Sequence: Synthetic oligonucleotide
gggaucaaaacuacuuauu

SEQ ID NO: 775651 - RNA, 19 nt, Artificial Sequence
  Description of Artificial Sequence: Synthetic oligonucleotide
acgcuuggggagaccaaaa

SEQ ID NO: 775652 - RNA, 19 nt, Artificial Sequence
  Description of Artificial Sequence: Synthetic oligonucleotide
ccaugcauuauaccauaua

SEQ ID NO: 775653 - RNA, 19 nt, Artificial Sequence
  Description of Artificial Sequence: Synthetic oligonucleotide
cauuggcuugggguuacua

SEQ ID NO: 775654 - RNA, 19 nt, Artificial Sequence
  Description of Artificial Sequence: Synthetic oligonucleotide
cgucagaugaagcggugga

SEQ ID NO: 775655 - RNA, 19 nt, Artificial Sequence
  Description of Artificial Sequence: Synthetic oligonucleotide
ccucauaucuugagucuua

SEQ ID NO: 775656 - RNA, 19 nt, Artificial Sequence
  Description of Artificial Sequence: Synthetic oligonucleotide
ccaugcaacucaguuucca

SEQ ID NO: 775657 - RNA, 19 nt, Artificial Sequence
  Description of Artificial Sequence: Synthetic oligonucleotide
agagccgaccgaggggcuu

SEQ ID NO: 775658 - RNA, 19 nt, Artificial Sequence
  Description of Artificial Sequence: Synthetic oligonucleotide
ccgguuuguucucccgcug

SEQ ID NO: 775659 - RNA, 19 nt, Artificial Sequence
  Description of Artificial Sequence: Synthetic oligonucleotide
cuccggaggcacuguggaa

SEQ ID NO: 775660 - RNA, 19 nt, Artificial Sequence
  Description of Artificial Sequence: Synthetic oligonucleotide
gcaaggcauccguggccgc

SEQ ID NO: 775661 - RNA, 19 nt, Artificial Sequence
  Description of Artificial Sequence: Synthetic oligonucleotide
ccaagggaucaaaacuacu

SEQ ID NO: 775662 - RNA, 19 nt, Artificial Sequence
  Description of Artificial Sequence: Synthetic oligonucleotide
gugagcggcagucggucuu

SEQ ID NO: 775663 - RNA, 19 nt, Artificial Sequence
  Description of Artificial Sequence: Synthetic oligonucleotide
aucuagcccuauggguaua

SEQ ID NO: 775664 - RNA, 19 nt, Artificial Sequence
  Description of Artificial Sequence: Synthetic oligonucleotide
caguuuccagagaccugcu

SEQ ID NO: 775665 - RNA, 19 nt, Artificial Sequence
  Description of Artificial Sequence: Synthetic oligonucleotide
cagcguacaucagaugauu

SEQ ID NO: 775666 - RNA, 19 nt, Artificial Sequence
  Description of Artificial Sequence: Synthetic oligonucleotide
ucgggcugcccgguuuguu

SEQ ID NO: 775667 - RNA, 19 nt, Artificial Sequence
  Description of Artificial Sequence: Synthetic oligonucleotide
uugcuccgguuggccaggu

SEQ ID NO: 775668 - RNA, 19 nt, Artificial Sequence
  Description of Artificial Sequence: Synthetic oligonucleotide
gaccgacaggugagcggca

SEQ ID NO: 775669 - RNA, 19 nt, Artificial Sequence
  Description of Artificial Sequence: Synthetic oligonucleotide
cgggcugcccgguuuguuc

SEQ ID NO: 775670 - RNA, 19 nt, Artificial Sequence
  Description of Artificial Sequence: Synthetic oligonucleotide
cuagcccuauggguauaua

SEQ ID NO: 775671 - RNA, 19 nt, Artificial Sequence
  Description of Artificial Sequence: Synthetic oligonucleotide
gguugcaaaugcccucguu

SEQ ID NO: 775672 - RNA, 19 nt, Artificial Sequence
  Description of Artificial Sequence: Synthetic oligonucleotide
ccguggccgcauugugagg

SEQ ID NO: 775673 - RNA, 19 nt, Artificial Sequence
  Description of Artificial Sequence: Synthetic oligonucleotide
gccgaaaguugcucacggu

SEQ ID NO: 775674 - RNA, 19 nt, Artificial Sequence
  Description of Artificial Sequence: Synthetic oligonucleotide
ggugagcggcagucggucu

SEQ ID NO: 775675 - RNA, 19 nt, Artificial Sequence
  Description of Artificial Sequence: Synthetic oligonucleotide
ccucccucauaucuugagu

SEQ ID NO: 775676 - RNA, 19 nt, Artificial Sequence
  Description of Artificial Sequence: Synthetic oligonucleotide
guagcaugagaggcucauu

SEQ ID NO: 775677 - RNA, 19 nt, Artificial Sequence
  Description of Artificial Sequence: Synthetic oligonucleotide
ggcugcccgguuuguucuc

SEQ ID NO: 775678 - RNA, 19 nt, Artificial Sequence
  Description of Artificial Sequence: Synthetic oligonucleotide
ccacaagacuccauccuuu

SEQ ID NO: 775679 - RNA, 19 nt, Artificial Sequence
  Description of Artificial Sequence: Synthetic oligonucleotide
gcauccguggccgcauugu

SEQ ID NO: 775680 - RNA, 19 nt, Artificial Sequence
  Description of Artificial Sequence: Synthetic oligonucleotide
cccgguuuguucucccgcu

SEQ ID NO: 775681 - RNA, 19 nt, Artificial Sequence
  Description of Artificial Sequence: Synthetic oligonucleotide
cagagccgaccgaggggcu

SEQ ID NO: 775682 - RNA, 19 nt, Artificial Sequence
  Description of Artificial Sequence: Synthetic oligonucleotide
gccaugcauuauaccauau

SEQ ID NO: 775683 - RNA, 19 nt, Artificial Sequence
  Description of Artificial Sequence: Synthetic oligonucleotide
ccgcauugugaggcugguc

SEQ ID NO: 775684 - RNA, 19 nt, Artificial Sequence
  Description of Artificial Sequence: Synthetic oligonucleotide
gccgcauugugaggcuggu

SEQ ID NO: 775685 - RNA, 19 nt, Artificial Sequence
  Description of Artificial Sequence: Synthetic oligonucleotide
ccucucucacagcguacau

SEQ ID NO: 775686 - RNA, 19 nt, Artificial Sequence
  Description of Artificial Sequence: Synthetic oligonucleotide
cacggucgggcugcccggu

SEQ ID NO: 775687 - RNA, 19 nt, Artificial Sequence
  Description of Artificial Sequence: Synthetic oligonucleotide
gccgaccgaggggcuucug

SEQ ID NO: 775688 - RNA, 19 nt, Artificial Sequence
  Description of Artificial Sequence: Synthetic oligonucleotide
cgguugcaaaugcccucgu

SEQ ID NO: 775689 - RNA, 19 nt, Artificial Sequence
  Description of Artificial Sequence: Synthetic oligonucleotide
ccgggcuugccagggucuu

SEQ ID NO: 775690 - RNA, 19 nt, Artificial Sequence
  Description of Artificial Sequence: Synthetic oligonucleotide
cggucgggcugcccgguuu

SEQ ID NO: 775691 - RNA, 19 nt, Artificial Sequence
  Description of Artificial Sequence: Synthetic oligonucleotide
ugaguuauuaaacauauac

SEQ ID NO: 775692 - RNA, 19 nt, Artificial Sequence
  Description of Artificial Sequence: Synthetic oligonucleotide
acauauacagucuacauuc

SEQ ID NO: 775693 - RNA, 19 nt, Artificial Sequence
  Description of Artificial Sequence: Synthetic oligonucleotide
aauuaggcucuucagaagg

SEQ ID NO: 775694 - RNA, 19 nt, Artificial Sequence
  Description of Artificial Sequence: Synthetic oligonucleotide
aaugacuauaucaggaucc

SEQ ID NO: 775695 - RNA, 19 nt, Artificial Sequence
  Description of Artificial Sequence: Synthetic oligonucleotide
auuggaaugacucaucauc

SEQ ID NO: 775696 - RNA, 19 nt, Artificial Sequence
  Description of Artificial Sequence: Synthetic oligonucleotide
auauacgaaaccuauuugg

SEQ ID NO: 775697 - RNA, 19 nt, Artificial Sequence
  Description of Artificial Sequence: Synthetic oligonucleotide
aaaacaagaugcuagggga

SEQ ID NO: 775698 - RNA, 19 nt, Artificial Sequence
  Description of Artificial Sequence: Synthetic oligonucleotide
uuaauugccaaccaggguc

SEQ ID NO: 775699 - RNA, 19 nt, Artificial Sequence
  Description of Artificial Sequence: Synthetic oligonucleotide
acacacaacacacacacac

SEQ ID NO: 775700 - RNA, 19 nt, Artificial Sequence
  Description of Artificial Sequence: Synthetic oligonucleotide
aaacccacuucauaacugc

SEQ ID NO: 775701 - RNA, 19 nt, Artificial Sequence
  Description of Artificial Sequence: Synthetic oligonucleotide
ucugguuuuagccuggucc

SEQ ID NO: 775702 - RNA, 19 nt, Artificial Sequence
  Description of Artificial Sequence: Synthetic oligonucleotide
acacacacaacacacacac

SEQ ID NO: 775703 - RNA, 19 nt, Artificial Sequence
  Description of Artificial Sequence: Synthetic oligonucleotide
aaggcacacacacacacac

SEQ ID NO: 775704 - RNA, 19 nt, Artificial Sequence
  Description of Artificial Sequence: Synthetic oligonucleotide
aauauagaaagugcucccc

SEQ ID NO: 775705 - RNA, 19 nt, Artificial Sequence
  Description of Artificial Sequence: Synthetic oligonucleotide
gauaccaagauguuacugc

SEQ ID NO: 775706 - RNA, 19 nt, Artificial Sequence
  Description of Artificial Sequence: Synthetic oligonucleotide
aacacacacacacacucac

SEQ ID NO: 775707 - RNA, 19 nt, Artificial Sequence
  Description of Artificial Sequence: Synthetic oligonucleotide
aaugggaauauagaaagug

SEQ ID NO: 775708 - RNA, 19 nt, Artificial Sequence
  Description of Artificial Sequence: Synthetic oligonucleotide
aaguagugucuccagaggg

SEQ ID NO: 775709 - RNA, 19 nt, Artificial Sequence
  Description of Artificial Sequence: Synthetic oligonucleotide
ugacucaucaucaggacag

SEQ ID NO: 775710 - RNA, 19 nt, Artificial Sequence
  Description of Artificial Sequence: Synthetic oligonucleotide
aauauacgaaaccuauuug

SEQ ID NO: 775711 - RNA, 19 nt, Artificial Sequence
  Description of Artificial Sequence: Synthetic oligonucleotide
uuuggaacuagcaucuaag

SEQ ID NO: 775712 - RNA, 19 nt, Artificial Sequence
  Description of Artificial Sequence: Synthetic oligonucleotide
uaagacaaguuuaauugcc

SEQ ID NO: 775713 - RNA, 19 nt, Artificial Sequence
  Description of Artificial Sequence: Synthetic oligonucleotide
acaacacacacacacacuc

SEQ ID NO: 775714 - RNA, 19 nt, Artificial Sequence
  Description of Artificial Sequence: Synthetic oligonucleotide
acaucacaaacuuuggagg

SEQ ID NO: 775715 - RNA, 19 nt, Artificial Sequence
  Description of Artificial Sequence: Synthetic oligonucleotide
gaacuagcaucuaagaagg

SEQ ID NO: 775716 - RNA, 19 nt, Artificial Sequence
  Description of Artificial Sequence: Synthetic oligonucleotide
accaagauguuacugcccc

SEQ ID NO: 775717 - RNA, 19 nt, Artificial Sequence
  Description of Artificial Sequence: Synthetic oligonucleotide
gguauggaaagcuugaucc

SEQ ID NO: 775718 - RNA, 19 nt, Artificial Sequence
  Description of Artificial Sequence: Synthetic oligonucleotide
agaaggcacacacacacac

SEQ ID NO: 775719 - RNA, 19 nt, Artificial Sequence
  Description of Artificial Sequence: Synthetic oligonucleotide
acagaaauggaauggaacu

SEQ ID NO: 775720 - RNA, 19 nt, Artificial Sequence
  Description of Artificial Sequence: Synthetic oligonucleotide
ggaacuagcaucuaagaag

SEQ ID NO: 775721 - RNA, 19 nt, Artificial Sequence
  Description of Artificial Sequence: Synthetic oligonucleotide
aaauuggaaugacucauca

SEQ ID NO: 775722 - RNA, 19 nt, Artificial Sequence
  Description of Artificial Sequence: Synthetic oligonucleotide
agagaugauaccaagaugu

SEQ ID NO: 775723 - RNA, 19 nt, Artificial Sequence
  Description of Artificial Sequence: Synthetic oligonucleotide
acacaacacacacacacac

SEQ ID NO: 775724 - RNA, 19 nt, Artificial Sequence
  Description of Artificial Sequence: Synthetic oligonucleotide
uauacgaaaccuauuugga

SEQ ID NO: 775725 - RNA, 19 nt, Artificial Sequence
  Description of Artificial Sequence: Synthetic oligonucleotide
gagagguuauggcugaugg

SEQ ID NO: 775726 - RNA, 19 nt, Artificial Sequence
  Description of Artificial Sequence: Synthetic oligonucleotide
uaggugaaugggaauauag

SEQ ID NO: 775727 - RNA, 19 nt, Artificial Sequence
  Description of Artificial Sequence: Synthetic oligonucleotide
gacuauaucaggauccagg

SEQ ID NO: 775728 - RNA, 19 nt, Artificial Sequence
  Description of Artificial Sequence: Synthetic oligonucleotide
gucaauggggccuagguag

SEQ ID NO: 775729 - RNA, 19 nt, Artificial Sequence
  Description of Artificial Sequence: Synthetic oligonucleotide
aagggauagggguaaacug

SEQ ID NO: 775730 - RNA, 19 nt, Artificial Sequence
  Description of Artificial Sequence: Synthetic oligonucleotide
aguuuaauugccaaccagg

SEQ ID NO: 775731 - RNA, 19 nt, Artificial Sequence
  Description of Artificial Sequence: Synthetic oligonucleotide
acacacacacaacacacac

SEQ ID NO: 775732 - RNA, 19 nt, Artificial Sequence
  Description of Artificial Sequence: Synthetic oligonucleotide
aggggauuuacagaaaugg

SEQ ID NO: 775733 - RNA, 19 nt, Artificial Sequence
  Description of Artificial Sequence: Synthetic oligonucleotide
ugggaauauagaaagugcu

SEQ ID NO: 775734 - RNA, 19 nt, Artificial Sequence
  Description of Artificial Sequence: Synthetic oligonucleotide
cugaauguaccaauugcgg

SEQ ID NO: 775735 - RNA, 19 nt, Artificial Sequence
  Description of Artificial Sequence: Synthetic oligonucleotide
auuucggcagcguucauag

SEQ ID NO: 775736 - RNA, 19 nt, Artificial Sequence
  Description of Artificial Sequence: Synthetic oligonucleotide
uugcccaugauuccagugg

SEQ ID NO: 775737 - RNA, 19 nt, Artificial Sequence
  Description of Artificial Sequence: Synthetic oligonucleotide
acugcaaugacuauaucag

SEQ ID NO: 775738 - RNA, 19 nt, Artificial Sequence
  Description of Artificial Sequence: Synthetic oligonucleotide
cuagcaucuaagaaggcac

SEQ ID NO: 775739 - RNA, 19 nt, Artificial Sequence
  Description of Artificial Sequence: Synthetic oligonucleotide
accugcaauauacgaaacc

SEQ ID NO: 775740 - RNA, 19 nt, Artificial Sequence
  Description of Artificial Sequence: Synthetic oligonucleotide
aguaaauuggaaugacuca

SEQ ID NO: 775741 - RNA, 19 nt, Artificial Sequence
  Description of Artificial Sequence: Synthetic oligonucleotide
aaggugaguuauuaaacau

SEQ ID NO: 775742 - RNA, 19 nt, Artificial Sequence
  Description of Artificial Sequence: Synthetic oligonucleotide
augggaauauagaaagugc

SEQ ID NO: 775743 - RNA, 19 nt, Artificial Sequence
  Description of Artificial Sequence: Synthetic oligonucleotide
cuucagaagguuuccaaag

SEQ ID NO: 775744 - RNA, 19 nt, Artificial Sequence
  Description of Artificial Sequence: Synthetic oligonucleotide
acuauaucaggauccaggu

SEQ ID NO: 775745 - RNA, 19 nt, Artificial Sequence
  Description of Artificial Sequence: Synthetic oligonucleotide
ugguagucugguuuuagcc

SEQ ID NO: 775746 - RNA, 19 nt, Artificial Sequence
  Description of Artificial Sequence: Synthetic oligonucleotide
aacccaaugguggggaugg

SEQ ID NO: 775747 - RNA, 19 nt, Artificial Sequence
  Description of Artificial Sequence: Synthetic oligonucleotide
uucacugcaaugacuauau

SEQ ID NO: 775748 - RNA, 19 nt, Artificial Sequence
  Description of Artificial Sequence: Synthetic oligonucleotide
uagagaugauaccaagaug

SEQ ID NO: 775749 - RNA, 19 nt, Artificial Sequence
  Description of Artificial Sequence: Synthetic oligonucleotide
cacacacucacacacacac

SEQ ID NO: 775750 - RNA, 19 nt, Artificial Sequence
  Description of Artificial Sequence: Synthetic oligonucleotide
uuuaauugccaaccagggu

SEQ ID NO: 775751 - RNA, 19 nt, Artificial Sequence
  Description of Artificial Sequence: Synthetic oligonucleotide
guagacaugacacccagga

SEQ ID NO: 775752 - RNA, 19 nt, Artificial Sequence
  Description of Artificial Sequence: Synthetic oligonucleotide
uaacaucacaaacuuugga

SEQ ID NO: 775753 - RNA, 19 nt, Artificial Sequence
  Description of Artificial Sequence: Synthetic oligonucleotide
cucacacacacacacacac

SEQ ID NO: 775754 - RNA, 19 nt, Artificial Sequence
  Description of Artificial Sequence: Synthetic oligonucleotide
cacacacacacucacacac

SEQ ID NO: 775755 - RNA, 19 nt, Artificial Sequence
  Description of Artificial Sequence: Synthetic oligonucleotide
cacacucacacacacacac

SEQ ID NO: 775756 - RNA, 19 nt, Artificial Sequence
  Description of Artificial Sequence: Synthetic oligonucleotide
ggaauauagaaagugcucc

SEQ ID NO: 775757 - RNA, 19 nt, Artificial Sequence
  Description of Artificial Sequence: Synthetic oligonucleotide
acacacacacacaacacac

SEQ ID NO: 775758 - RNA, 19 nt, Artificial Sequence
  Description of Artificial Sequence: Synthetic oligonucleotide
gucaaccacaaauaucaag

SEQ ID NO: 775759 - RNA, 19 nt, Artificial Sequence
  Description of Artificial Sequence: Synthetic oligonucleotide
gacgugaucgugucagagg

SEQ ID NO: 775760 - RNA, 19 nt, Artificial Sequence
  Description of Artificial Sequence: Synthetic oligonucleotide
uuuugagcugauuggccag

SEQ ID NO: 775761 - RNA, 19 nt, Artificial Sequence
  Description of Artificial Sequence: Synthetic oligonucleotide
agaaagugcuccccucccc

SEQ ID NO: 775762 - RNA, 19 nt, Artificial Sequence
  Description of Artificial Sequence: Synthetic oligonucleotide
uaauugccaaccaggguca

SEQ ID NO: 775763 - RNA, 19 nt, Artificial Sequence
  Description of Artificial Sequence: Synthetic oligonucleotide
aacaaccugugcaggaugg

SEQ ID NO: 775764 - RNA, 19 nt, Artificial Sequence
  Description of Artificial Sequence: Synthetic oligonucleotide
cacacacacacacacacac

SEQ ID NO: 775765 - RNA, 19 nt, Artificial Sequence
  Description of Artificial Sequence: Synthetic oligonucleotide
cugguuuuagccugguccc

SEQ ID NO: 775766 - RNA, 19 nt, Artificial Sequence
  Description of Artificial Sequence: Synthetic oligonucleotide
aaaacccacuucauaacug

SEQ ID NO: 775767 - RNA, 19 nt, Artificial Sequence
  Description of Artificial Sequence: Synthetic oligonucleotide
gaugcuaggggagugggug

SEQ ID NO: 775768 - RNA, 19 nt, Artificial Sequence
  Description of Artificial Sequence: Synthetic oligonucleotide
aauguaccaauugcgguga

SEQ ID NO: 775769 - RNA, 19 nt, Artificial Sequence
  Description of Artificial Sequence: Synthetic oligonucleotide
ugcggugacgcagagaaug

SEQ ID NO: 775770 - RNA, 19 nt, Artificial Sequence
  Description of Artificial Sequence: Synthetic oligonucleotide
ucgugucagaggacgaggg

SEQ ID NO: 775771 - RNA, 19 nt, Artificial Sequence
  Description of Artificial Sequence: Synthetic oligonucleotide
aauuggaaugacucaucau

SEQ ID NO: 775772 - RNA, 19 nt, Artificial Sequence
  Description of Artificial Sequence: Synthetic oligonucleotide
auauagaaagugcuccccu

SEQ ID NO: 775773 - RNA, 19 nt, Artificial Sequence
  Description of Artificial Sequence: Synthetic oligonucleotide
gaagaucacugucccagag

SEQ ID NO: 775774 - RNA, 19 nt, Artificial Sequence
  Description of Artificial Sequence: Synthetic oligonucleotide
ucaauggggccuagguagg

SEQ ID NO: 775775 - RNA, 19 nt, Artificial Sequence
  Description of Artificial Sequence: Synthetic oligonucleotide
cuuggcagagagguuaugg

SEQ ID NO: 775776 - RNA, 19 nt, Artificial Sequence
  Description of Artificial Sequence: Synthetic oligonucleotide
uuggaacuagcaucuaaga

SEQ ID NO: 775777 - RNA, 19 nt, Artificial Sequence
  Description of Artificial Sequence: Synthetic oligonucleotide
guagucugguuuuagccug

SEQ ID NO: 775778 - RNA, 19 nt, Artificial Sequence
  Description of Artificial Sequence: Synthetic oligonucleotide
agaaaagcaggagagggga

SEQ ID NO: 775779 - RNA, 19 nt, Artificial Sequence
  Description of Artificial Sequence: Synthetic oligonucleotide
cacugcaaugacuauauca

SEQ ID NO: 775780 - RNA, 19 nt, Artificial Sequence
  Description of Artificial Sequence: Synthetic oligonucleotide
ccuauuuggaacuagcauc

SEQ ID NO: 775781 - RNA, 19 nt, Artificial Sequence
  Description of Artificial Sequence: Synthetic oligonucleotide
uggggaacugacuugccug

SEQ ID NO: 775782 - RNA, 19 nt, Artificial Sequence
  Description of Artificial Sequence: Synthetic oligonucleotide
guaccaauugcggugacgc

SEQ ID NO: 775783 - RNA, 19 nt, Artificial Sequence
  Description of Artificial Sequence: Synthetic oligonucleotide
acgugaucgugucagagga

SEQ ID NO: 775784 - RNA, 19 nt, Artificial Sequence
  Description of Artificial Sequence: Synthetic oligonucleotide
acgucccauacugugaagc

SEQ ID NO: 775785 - RNA, 19 nt, Artificial Sequence
  Description of Artificial Sequence: Synthetic oligonucleotide
cauacugugaagcugauau

SEQ ID NO: 775786 - RNA, 19 nt, Artificial Sequence
  Description of Artificial Sequence: Synthetic oligonucleotide
cacacacacacacucacac

SEQ ID NO: 775787 - RNA, 19 nt, Artificial Sequence
  Description of Artificial Sequence: Synthetic oligonucleotide
gugaucgugucagaggacg

SEQ ID NO: 775788 - RNA, 19 nt, Artificial Sequence
  Description of Artificial Sequence: Synthetic oligonucleotide
cacacacacacacacacuc

SEQ ID NO: 775789 - RNA, 19 nt, Artificial Sequence
  Description of Artificial Sequence: Synthetic oligonucleotide
gauaccacuauaacaucac

SEQ ID NO: 775790 - RNA, 19 nt, Artificial Sequence
  Description of Artificial Sequence: Synthetic oligonucleotide
uuagccuggucccugguau

SEQ ID NO: 775791 - RNA, 19 nt, Artificial Sequence
  Description of Artificial Sequence: Synthetic oligonucleotide
agauagggcugccuggcuc

SEQ ID NO: 775792 - RNA, 19 nt, Artificial Sequence
  Description of Artificial Sequence: Synthetic oligonucleotide
cacucacacacacacacac

SEQ ID NO: 775793 - RNA, 19 nt, Artificial Sequence
  Description of Artificial Sequence: Synthetic oligonucleotide
acuagcaucuaagaaggca

SEQ ID NO: 775794 - RNA, 19 nt, Artificial Sequence
  Description of Artificial Sequence: Synthetic oligonucleotide
uuaaacccaauggugggga

SEQ ID NO: 775795 - RNA, 19 nt, Artificial Sequence
  Description of Artificial Sequence: Synthetic oligonucleotide
aagaguggaaggaaaccug

SEQ ID NO: 775796 - RNA, 19 nt, Artificial Sequence
  Description of Artificial Sequence: Synthetic oligonucleotide
aagacaaguuuaauugcca

SEQ ID NO: 775797 - RNA, 19 nt, Artificial Sequence
  Description of Artificial Sequence: Synthetic oligonucleotide
cugcaaugacuauaucagg

SEQ ID NO: 775798 - RNA, 19 nt, Artificial Sequence
  Description of Artificial Sequence: Synthetic oligonucleotide
uauagaaagugcuccccuc

SEQ ID NO: 775799 - RNA, 19 nt, Artificial Sequence
  Description of Artificial Sequence: Synthetic oligonucleotide
gauauugcccaugauucca

SEQ ID NO: 775800 - RNA, 19 nt, Artificial Sequence
  Description of Artificial Sequence: Synthetic oligonucleotide
ugcccaugauuccaguggc

SEQ ID NO: 775801 - RNA, 19 nt, Artificial Sequence
  Description of Artificial Sequence: Synthetic oligonucleotide
gaccuguuaggugaauggg

SEQ ID NO: 775802 - RNA, 19 nt, Artificial Sequence
  Description of Artificial Sequence: Synthetic oligonucleotide
augacucaucaucaggaca

SEQ ID NO: 775803 - RNA, 19 nt, Artificial Sequence
  Description of Artificial Sequence: Synthetic oligonucleotide
caaugacuauaucaggauc

SEQ ID NO: 775804 - RNA, 19 nt, Artificial Sequence
  Description of Artificial Sequence: Synthetic oligonucleotide
cagucuacauuccagagaa

SEQ ID NO: 775805 - RNA, 19 nt, Artificial Sequence
  Description of Artificial Sequence: Synthetic oligonucleotide
aacaagaugcuaggggagu

SEQ ID NO: 775806 - RNA, 19 nt, Artificial Sequence
  Description of Artificial Sequence: Synthetic oligonucleotide
ucccagaguaaauuggaau

SEQ ID NO: 775807 - RNA, 19 nt, Artificial Sequence
  Description of Artificial Sequence: Synthetic oligonucleotide
agaggggucgaaucuuguc

SEQ ID NO: 775808 - RNA, 19 nt, Artificial Sequence
  Description of Artificial Sequence: Synthetic oligonucleotide
agaggggauuuacagaaau

SEQ ID NO: 775809 - RNA, 19 nt, Artificial Sequence
  Description of Artificial Sequence: Synthetic oligonucleotide
auuuggaacuagcaucuaa

SEQ ID NO: 775810 - RNA, 19 nt, Artificial Sequence
  Description of Artificial Sequence: Synthetic oligonucleotide
ggugaaugggaauauagaa

SEQ ID NO: 775811 - RNA, 19 nt, Artificial Sequence
  Description of Artificial Sequence: Synthetic oligonucleotide
cacacacacacacacaaca

SEQ ID NO: 775812 - RNA, 19 nt, Artificial Sequence
  Description of Artificial Sequence: Synthetic oligonucleotide
uucaagaggaagggauagg

SEQ ID NO: 775813 - RNA, 19 nt, Artificial Sequence
  Description of Artificial Sequence: Synthetic oligonucleotide
uguaccaauugcggugacg

SEQ ID NO: 775814 - RNA, 19 nt, Artificial Sequence
  Description of Artificial Sequence: Synthetic oligonucleotide
caauuaggcucuucagaag

SEQ ID NO: 775815 - RNA, 19 nt, Artificial Sequence
  Description of Artificial Sequence: Synthetic oligonucleotide
accuacgucccauacugug

SEQ ID NO: 775816 - RNA, 19 nt, Artificial Sequence
  Description of Artificial Sequence: Synthetic oligonucleotide
aauggggccuagguagggg

SEQ ID NO: 775817 - RNA, 19 nt, Artificial Sequence
  Description of Artificial Sequence: Synthetic oligonucleotide
gaccacacuuucaagagga

SEQ ID NO: 775818 - RNA, 19 nt, Artificial Sequence
  Description of Artificial Sequence: Synthetic oligonucleotide
agcaucuaagaaggcacac

SEQ ID NO: 775819 - RNA, 19 nt, Artificial Sequence
  Description of Artificial Sequence: Synthetic oligonucleotide
gaacaaccugugcaggaug

SEQ ID NO: 775820 - RNA, 19 nt, Artificial Sequence
  Description of Artificial Sequence: Synthetic oligonucleotide
aaccugcaauauacgaaac

SEQ ID NO: 775821 - RNA, 19 nt, Artificial Sequence
  Description of Artificial Sequence: Synthetic oligonucleotide
auugcccaugauuccagug

SEQ ID NO: 775822 - RNA, 19 nt, Artificial Sequence
  Description of Artificial Sequence: Synthetic oligonucleotide
acucguucccggucauugc

SEQ ID NO: 775823 - RNA, 19 nt, Artificial Sequence
  Description of Artificial Sequence: Synthetic oligonucleotide
uggucccugguauggaaag

SEQ ID NO: 775824 - RNA, 19 nt, Artificial Sequence
  Description of Artificial Sequence: Synthetic oligonucleotide
ucagauagggcugccuggc

SEQ ID NO: 775825 - RNA, 19 nt, Artificial Sequence
  Description of Artificial Sequence: Synthetic oligonucleotide
cacacacacacacacucac

SEQ ID NO: 775826 - RNA, 19 nt, Artificial Sequence
  Description of Artificial Sequence: Synthetic oligonucleotide
cuauuuggaacuagcaucu

SEQ ID NO: 775827 - RNA, 19 nt, Artificial Sequence
  Description of Artificial Sequence: Synthetic oligonucleotide
accacaaauaucaagccuu

SEQ ID NO: 775828 - RNA, 19 nt, Artificial Sequence
  Description of Artificial Sequence: Synthetic oligonucleotide
auucacacgguagggcugg

SEQ ID NO: 775829 - RNA, 19 nt, Artificial Sequence
  Description of Artificial Sequence: Synthetic oligonucleotide
guuuuagccuggucccugg

SEQ ID NO: 775830 - RNA, 19 nt, Artificial Sequence
  Description of Artificial Sequence: Synthetic oligonucleotide
acacacacacacacaacac

SEQ ID NO: 775831 - RNA, 19 nt, Artificial Sequence
  Description of Artificial Sequence: Synthetic oligonucleotide
uacucguucccggucauug

SEQ ID NO: 775832 - RNA, 19 nt, Artificial Sequence
  Description of Artificial Sequence: Synthetic oligonucleotide
cacacacacucacacacac

SEQ ID NO: 775833 - RNA, 19 nt, Artificial Sequence
  Description of Artificial Sequence: Synthetic oligonucleotide
aacugcagauaccacuaua

SEQ ID NO: 775834 - RNA, 19 nt, Artificial Sequence
  Description of Artificial Sequence: Synthetic oligonucleotide
cccagaguaaauuggaaug

SEQ ID NO: 775835 - RNA, 19 nt, Artificial Sequence
  Description of Artificial Sequence: Synthetic oligonucleotide
agcguucauagcauucggc

SEQ ID NO: 775836 - RNA, 19 nt, Artificial Sequence
  Description of Artificial Sequence: Synthetic oligonucleotide
ucauaacugcagauaccac

SEQ ID NO: 775837 - RNA, 19 nt, Artificial Sequence
  Description of Artificial Sequence: Synthetic oligonucleotide
cauaacugcagauaccacu

SEQ ID NO: 775838 - RNA, 19 nt, Artificial Sequence
  Description of Artificial Sequence: Synthetic oligonucleotide
auaccacuauaacaucaca

SEQ ID NO: 775839 - RNA, 19 nt, Artificial Sequence
  Description of Artificial Sequence: Synthetic oligonucleotide
ugggguagucagauagggc

SEQ ID NO: 775840 - RNA, 19 nt, Artificial Sequence
  Description of Artificial Sequence: Synthetic oligonucleotide
ucacacacacacacacaca

SEQ ID NO: 775841 - RNA, 19 nt, Artificial Sequence
  Description of Artificial Sequence: Synthetic oligonucleotide
ggcacacacacacacacac

SEQ ID NO: 775842 - RNA, 19 nt, Artificial Sequence
  Description of Artificial Sequence: Synthetic oligonucleotide
agaguaaauuggaaugacu

SEQ ID NO: 775843 - RNA, 19 nt, Artificial Sequence
  Description of Artificial Sequence: Synthetic oligonucleotide
acugcagauaccacuauaa

SEQ ID NO: 775844 - RNA, 19 nt, Artificial Sequence
  Description of Artificial Sequence: Synthetic oligonucleotide
uccgcuuggcucucgggcc

SEQ ID NO: 775845 - RNA, 19 nt, Artificial Sequence
  Description of Artificial Sequence: Synthetic oligonucleotide
ucucgggccucauuuacuc

SEQ ID NO: 775846 - RNA, 19 nt, Artificial Sequence
  Description of Artificial Sequence: Synthetic oligonucleotide
ggaaaccugcaauauacga

SEQ ID NO: 775847 - RNA, 19 nt, Artificial Sequence
  Description of Artificial Sequence: Synthetic oligonucleotide
guggcggcgacgcuggucc

SEQ ID NO: 775848 - RNA, 19 nt, Artificial Sequence
  Description of Artificial Sequence: Synthetic oligonucleotide
ugaucgugucagaggacga

SEQ ID NO: 775849 - RNA, 19 nt, Artificial Sequence
  Description of Artificial Sequence: Synthetic oligonucleotide
caauauacgaaaccuauuu

SEQ ID NO: 775850 - RNA, 19 nt, Artificial Sequence
  Description of Artificial Sequence: Synthetic oligonucleotide
cacacacacacacacacaa

SEQ ID NO: 775851 - RNA, 19 nt, Artificial Sequence
  Description of Artificial Sequence: Synthetic oligonucleotide
gugaaugggaauauagaaa

SEQ ID NO: 775852 - RNA, 19 nt, Artificial Sequence
  Description of Artificial Sequence: Synthetic oligonucleotide
gugguagucugguuuuagc

SEQ ID NO: 775853 - RNA, 19 nt, Artificial Sequence
  Description of Artificial Sequence: Synthetic oligonucleotide
gacgcagagaaugcagccc

SEQ ID NO: 775854 - RNA, 19 nt, Artificial Sequence
  Description of Artificial Sequence: Synthetic oligonucleotide
augcuaggggagugggugg

SEQ ID NO: 775855 - RNA, 19 nt, Artificial Sequence
  Description of Artificial Sequence: Synthetic oligonucleotide
gucccgucagccaugcugg

SEQ ID NO: 775856 - RNA, 19 nt, Artificial Sequence
  Description of Artificial Sequence: Synthetic oligonucleotide
gagggagacaacagguaug

SEQ ID NO: 775857 - RNA, 19 nt, Artificial Sequence
  Description of Artificial Sequence: Synthetic oligonucleotide
cuccgcuuggcucucgggc

SEQ ID NO: 775858 - RNA, 19 nt, Artificial Sequence
  Description of Artificial Sequence: Synthetic oligonucleotide
gagcucagaacagcccugg

SEQ ID NO: 775859 - RNA, 19 nt, Artificial Sequence
  Description of Artificial Sequence: Synthetic oligonucleotide
acaaacuuuggaggcggag

SEQ ID NO: 775860 - RNA, 19 nt, Artificial Sequence
  Description of Artificial Sequence: Synthetic oligonucleotide
guaaauuggaaugacucau

SEQ ID NO: 775861 - RNA, 19 nt, Artificial Sequence
  Description of Artificial Sequence: Synthetic oligonucleotide
aggcacaggagggcaaggc

SEQ ID NO: 775862 - RNA, 19 nt, Artificial Sequence
  Description of Artificial Sequence: Synthetic oligonucleotide
ggagacaacagguaugugu

SEQ ID NO: 775863 - RNA, 19 nt, Artificial Sequence
  Description of Artificial Sequence: Synthetic oligonucleotide
ggucccgucagccaugcug

SEQ ID NO: 775864 - RNA, 19 nt, Artificial Sequence
  Description of Artificial Sequence: Synthetic oligonucleotide
cacacacacacacaacaca

SEQ ID NO: 775865 - RNA, 19 nt, Artificial Sequence
  Description of Artificial Sequence: Synthetic oligonucleotide
aggugaaugggaauauaga

SEQ ID NO: 775866 - RNA, 19 nt, Artificial Sequence
  Description of Artificial Sequence: Synthetic oligonucleotide
ccugcuguacacaaagcug

SEQ ID NO: 775867 - RNA, 19 nt, Artificial Sequence
  Description of Artificial Sequence: Synthetic oligonucleotide
augacuauaucaggaucca

SEQ ID NO: 775868 - RNA, 19 nt, Artificial Sequence
  Description of Artificial Sequence: Synthetic oligonucleotide
cuaagaaggcacacacaca

SEQ ID NO: 775869 - RNA, 19 nt, Artificial Sequence
  Description of Artificial Sequence: Synthetic oligonucleotide
cauuuacucguucccgguc

SEQ ID NO: 775870 - RNA, 19 nt, Artificial Sequence
  Description of Artificial Sequence: Synthetic oligonucleotide
acacacacacacucacaca

SEQ ID NO: 775871 - RNA, 19 nt, Artificial Sequence
  Description of Artificial Sequence: Synthetic oligonucleotide
cagcguucauagcauucgg

SEQ ID NO: 775872 - RNA, 19 nt, Artificial Sequence
  Description of Artificial Sequence: Synthetic oligonucleotide
ugcauaagacaaguuuaau

SEQ ID NO: 775873 - RNA, 19 nt, Artificial Sequence
  Description of Artificial Sequence: Synthetic oligonucleotide
gcgguuggggacgugaucg

SEQ ID NO: 775874 - RNA, 19 nt, Artificial Sequence
  Description of Artificial Sequence: Synthetic oligonucleotide
gggauuuacagaaauggaa

SEQ ID NO: 775875 - RNA, 19 nt, Artificial Sequence
  Description of Artificial Sequence: Synthetic oligonucleotide
acaagaugcuaggggagug

SEQ ID NO: 775876 - RNA, 19 nt, Artificial Sequence
  Description of Artificial Sequence: Synthetic oligonucleotide
agaugauaccaagauguua

SEQ ID NO: 775877 - RNA, 19 nt, Artificial Sequence
  Description of Artificial Sequence: Synthetic oligonucleotide
gacucaucaucaggacagg

SEQ ID NO: 775878 - RNA, 19 nt, Artificial Sequence
  Description of Artificial Sequence: Synthetic oligonucleotide
ccaccuacgucccauacug

SEQ ID NO: 775879 - RNA, 19 nt, Artificial Sequence
  Description of Artificial Sequence: Synthetic oligonucleotide
gggguagucagauagggcu

SEQ ID NO: 775880 - RNA, 19 nt, Artificial Sequence
  Description of Artificial Sequence: Synthetic oligonucleotide
ugccugcuguacacaaagc

SEQ ID NO: 775881 - RNA, 19 nt, Artificial Sequence
  Description of Artificial Sequence: Synthetic oligonucleotide
cuuucaagaggaagggaua

SEQ ID NO: 775882 - RNA, 19 nt, Artificial Sequence
  Description of Artificial Sequence: Synthetic oligonucleotide
gcuugauccuguuccugcg

SEQ ID NO: 775883 - RNA, 19 nt, Artificial Sequence
  Description of Artificial Sequence: Synthetic oligonucleotide
acacacacacacacacaac

SEQ ID NO: 775884 - RNA, 19 nt, Artificial Sequence
  Description of Artificial Sequence: Synthetic oligonucleotide
ucggcagcguucauagcau

SEQ ID NO: 775885 - RNA, 19 nt, Artificial Sequence
  Description of Artificial Sequence: Synthetic oligonucleotide
caaccugugcaggauggag

SEQ ID NO: 775886 - RNA, 19 nt, Artificial Sequence
  Description of Artificial Sequence: Synthetic oligonucleotide
uuuuagccuggucccuggu

SEQ ID NO: 775887 - RNA, 19 nt, Artificial Sequence
  Description of Artificial Sequence: Synthetic oligonucleotide
aucaggacaggcgguuggg

SEQ ID NO: 775888 - RNA, 19 nt, Artificial Sequence
  Description of Artificial Sequence: Synthetic oligonucleotide
ccaauuaggcucuucagaa

SEQ ID NO: 775889 - RNA, 19 nt, Artificial Sequence
  Description of Artificial Sequence: Synthetic oligonucleotide
caucucuggagcagcacca

SEQ ID NO: 775890 - RNA, 19 nt, Artificial Sequence
  Description of Artificial Sequence: Synthetic oligonucleotide
gcguucauagcauucggca

SEQ ID NO: 775891 - RNA, 19 nt, Artificial Sequence
  Description of Artificial Sequence: Synthetic oligonucleotide
uuccccgagccgaccgugg

SEQ ID NO: 775892 - RNA, 19 nt, Artificial Sequence
  Description of Artificial Sequence: Synthetic oligonucleotide
uaacugcagauaccacuau

SEQ ID NO: 775893 - RNA, 19 nt, Artificial Sequence
  Description of Artificial Sequence: Synthetic oligonucleotide
cacacaacacacacacaca

SEQ ID NO: 775894 - RNA, 19 nt, Artificial Sequence
  Description of Artificial Sequence: Synthetic oligonucleotide
accuguuaggugaauggga

SEQ ID NO: 775895 - RNA, 19 nt, Artificial Sequence
  Description of Artificial Sequence: Synthetic oligonucleotide
aagaaggcacacacacaca

SEQ ID NO: 775896 - RNA, 19 nt, Artificial Sequence
  Description of Artificial Sequence: Synthetic oligonucleotide
agguuauggcugaugguug

SEQ ID NO: 775897 - RNA, 19 nt, Artificial Sequence
  Description of Artificial Sequence: Synthetic oligonucleotide
cucgggccucauuuacucg

SEQ ID NO: 775898 - RNA, 19 nt, Artificial Sequence
  Description of Artificial Sequence: Synthetic oligonucleotide
aggugaguuauuaaacaua

SEQ ID NO: 775899 - RNA, 19 nt, Artificial Sequence
  Description of Artificial Sequence: Synthetic oligonucleotide
auguaccaauugcggugac

SEQ ID NO: 775900 - RNA, 19 nt, Artificial Sequence
  Description of Artificial Sequence: Synthetic oligonucleotide
ggggacgugaucgugucag

SEQ ID NO: 775901 - RNA, 19 nt, Artificial Sequence
  Description of Artificial Sequence: Synthetic oligonucleotide
auuaggcucuucagaaggu

SEQ ID NO: 775902 - RNA, 19 nt, Artificial Sequence
  Description of Artificial Sequence: Synthetic oligonucleotide
gggaauauagaaagugcuc

SEQ ID NO: 775903 - RNA, 19 nt, Artificial Sequence
  Description of Artificial Sequence: Synthetic oligonucleotide
uaccaauugcggugacgca

SEQ ID NO: 775904 - RNA, 19 nt, Artificial Sequence
  Description of Artificial Sequence: Synthetic oligonucleotide
agcaccugaacaaccugug

SEQ ID NO: 775905 - RNA, 19 nt, Artificial Sequence
  Description of Artificial Sequence: Synthetic oligonucleotide
caacacacacacacacuca

SEQ ID NO: 775906 - RNA, 19 nt, Artificial Sequence
  Description of Artificial Sequence: Synthetic oligonucleotide
uggcucucacuucuuguuu

SEQ ID NO: 775907 - RNA, 19 nt, Artificial Sequence
  Description of Artificial Sequence: Synthetic oligonucleotide
guauggaaagcuugauccu

SEQ ID NO: 775908 - RNA, 19 nt, Artificial Sequence
  Description of Artificial Sequence: Synthetic oligonucleotide
cacacacacacaacacaca

SEQ ID NO: 775909 - RNA, 19 nt, Artificial Sequence
  Description of Artificial Sequence: Synthetic oligonucleotide
cacacacacaacacacaca

SEQ ID NO: 775910 - RNA, 19 nt, Artificial Sequence
  Description of Artificial Sequence: Synthetic oligonucleotide
gaaggggucccgucagcca

SEQ ID NO: 775911 - RNA, 19 nt, Artificial Sequence
  Description of Artificial Sequence: Synthetic oligonucleotide
ggauuuacagaaauggaau

SEQ ID NO: 775912 - RNA, 19 nt, Artificial Sequence
  Description of Artificial Sequence: Synthetic oligonucleotide
gaaggcacacacacacaca

SEQ ID NO: 775913 - RNA, 19 nt, Artificial Sequence
  Description of Artificial Sequence: Synthetic oligonucleotide
ccucauuuacucguucccg

SEQ ID NO: 775914 - RNA, 19 nt, Artificial Sequence
  Description of Artificial Sequence: Synthetic oligonucleotide
cuuucugggcauguagaca

SEQ ID NO: 775915 - RNA, 19 nt, Artificial Sequence
  Description of Artificial Sequence: Synthetic oligonucleotide
gguagucagauagggcugc

SEQ ID NO: 775916 - RNA, 19 nt, Artificial Sequence
  Description of Artificial Sequence: Synthetic oligonucleotide
ccacaaauaucaagccuug

SEQ ID NO: 775917 - RNA, 19 nt, Artificial Sequence
  Description of Artificial Sequence: Synthetic oligonucleotide
acgcugguccgcuggcccg

SEQ ID NO: 775918 - RNA, 19 nt, Artificial Sequence
  Description of Artificial Sequence: Synthetic oligonucleotide
ggaacugacuugccugcug

SEQ ID NO: 775919 - RNA, 19 nt, Artificial Sequence
  Description of Artificial Sequence: Synthetic oligonucleotide
cacgguagggcuggggaac

SEQ ID NO: 775920 - RNA, 19 nt, Artificial Sequence
  Description of Artificial Sequence: Synthetic oligonucleotide
acacgguagggcuggggaa

SEQ ID NO: 775921 - RNA, 19 nt, Artificial Sequence
  Description of Artificial Sequence: Synthetic oligonucleotide
cuucacugcaaugacuaua

SEQ ID NO: 775922 - RNA, 19 nt, Artificial Sequence
  Description of Artificial Sequence: Synthetic oligonucleotide
auacagcccguccccgcug

SEQ ID NO: 775923 - RNA, 19 nt, Artificial Sequence
  Description of Artificial Sequence: Synthetic oligonucleotide
uccccgagccgaccguggc

SEQ ID NO: 775924 - RNA, 19 nt, Artificial Sequence
  Description of Artificial Sequence: Synthetic oligonucleotide
ugguuuuagccuggucccu

SEQ ID NO: 775925 - RNA, 19 nt, Artificial Sequence
  Description of Artificial Sequence: Synthetic oligonucleotide
acacacacacacacacuca

SEQ ID NO: 775926 - RNA, 19 nt, Artificial Sequence
  Description of Artificial Sequence: Synthetic oligonucleotide
caauugcggugacgcagag

SEQ ID NO: 775927 - RNA, 19 nt, Artificial Sequence
  Description of Artificial Sequence: Synthetic oligonucleotide
cuagguaggggcaguggua

SEQ ID NO: 775928 - RNA, 19 nt, Artificial Sequence
  Description of Artificial Sequence: Synthetic oligonucleotide
cacuucauaacugcagaua

SEQ ID NO: 775929 - RNA, 19 nt, Artificial Sequence
  Description of Artificial Sequence: Synthetic oligonucleotide
aagccuucauacagcccgu

SEQ ID NO: 775930 - RNA, 19 nt, Artificial Sequence
  Description of Artificial Sequence: Synthetic oligonucleotide
gaccguggcggcgacgcug

SEQ ID NO: 775931 - RNA, 19 nt, Artificial Sequence
  Description of Artificial Sequence: Synthetic oligonucleotide
guggaagaguggaaggaaa

SEQ ID NO: 775932 - RNA, 19 nt, Artificial Sequence
  Description of Artificial Sequence: Synthetic oligonucleotide
agcucguccucugccagca

SEQ ID NO: 775933 - RNA, 19 nt, Artificial Sequence
  Description of Artificial Sequence: Synthetic oligonucleotide
cccaauuaggcucuucaga

SEQ ID NO: 775934 - RNA, 19 nt, Artificial Sequence
  Description of Artificial Sequence: Synthetic oligonucleotide
gcaaggcucuuucugggca

SEQ ID NO: 775935 - RNA, 19 nt, Artificial Sequence
  Description of Artificial Sequence: Synthetic oligonucleotide
acucacacacacacacaca

SEQ ID NO: 775936 - RNA, 19 nt, Artificial Sequence
  Description of Artificial Sequence: Synthetic oligonucleotide
ggggauuuacagaaaugga

SEQ ID NO: 775937 - RNA, 19 nt, Artificial Sequence
  Description of Artificial Sequence: Synthetic oligonucleotide
ugacacccaggaccucgac

SEQ ID NO: 775938 - RNA, 19 nt, Artificial Sequence
  Description of Artificial Sequence: Synthetic oligonucleotide
gguuuuagccuggucccug

SEQ ID NO: 775939 - RNA, 19 nt, Artificial Sequence
  Description of Artificial Sequence: Synthetic oligonucleotide
uauuuggaacuagcaucua

SEQ ID NO: 775940 - RNA, 19 nt, Artificial Sequence
  Description of Artificial Sequence: Synthetic oligonucleotide
ccugaacaaccugugcagg

SEQ ID NO: 775941 - RNA, 19 nt, Artificial Sequence
  Description of Artificial Sequence: Synthetic oligonucleotide
acacacacacacacucaca

SEQ ID NO: 775942 - RNA, 19 nt, Artificial Sequence
  Description of Artificial Sequence: Synthetic oligonucleotide
acacacacacacacacaca

SEQ ID NO: 775943 - RNA, 19 nt, Artificial Sequence
  Description of Artificial Sequence: Synthetic oligonucleotide
acacacacacacacacacu

SEQ ID NO: 775944 - RNA, 19 nt, Artificial Sequence
  Description of Artificial Sequence: Synthetic oligonucleotide
gcccugaagaucacugucc

SEQ ID NO: 775945 - RNA, 19 nt, Artificial Sequence
  Description of Artificial Sequence: Synthetic oligonucleotide
acacacacacucacacaca

SEQ ID NO: 775946 - RNA, 19 nt, Artificial Sequence
  Description of Artificial Sequence: Synthetic oligonucleotide
gcaccugaacaaccugugc

SEQ ID NO: 775947 - RNA, 19 nt, Artificial Sequence
  Description of Artificial Sequence: Synthetic oligonucleotide
agcucagaacagcccugga

SEQ ID NO: 775948 - RNA, 19 nt, Artificial Sequence
  Description of Artificial Sequence: Synthetic oligonucleotide
aggaccucgaccacacuuu

SEQ ID NO: 775949 - RNA, 19 nt, Artificial Sequence
  Description of Artificial Sequence: Synthetic oligonucleotide
guagucagauagggcugcc

SEQ ID NO: 775950 - RNA, 19 nt, Artificial Sequence
  Description of Artificial Sequence: Synthetic oligonucleotide
guagugucuccagaggggu

SEQ ID NO: 775951 - RNA, 19 nt, Artificial Sequence
  Description of Artificial Sequence: Synthetic oligonucleotide
ggguagucagauagggcug

SEQ ID NO: 775952 - RNA, 19 nt, Artificial Sequence
  Description of Artificial Sequence: Synthetic oligonucleotide
gcaaugacuauaucaggau

SEQ ID NO: 775953 - RNA, 19 nt, Artificial Sequence
  Description of Artificial Sequence: Synthetic oligonucleotide
acacucacacacacacaca

SEQ ID NO: 775954 - RNA, 19 nt, Artificial Sequence
  Description of Artificial Sequence: Synthetic oligonucleotide
guaugugucaggagugggu

SEQ ID NO: 775955 - RNA, 19 nt, Artificial Sequence
  Description of Artificial Sequence: Synthetic oligonucleotide
ggacaggcgguuggggacg

SEQ ID NO: 775956 - RNA, 19 nt, Artificial Sequence
  Description of Artificial Sequence: Synthetic oligonucleotide
agccuucauacagcccguc

SEQ ID NO: 775957 - RNA, 19 nt, Artificial Sequence
  Description of Artificial Sequence: Synthetic oligonucleotide
ccugcaauauacgaaaccu

SEQ ID NO: 775958 - RNA, 19 nt, Artificial Sequence
  Description of Artificial Sequence: Synthetic oligonucleotide
cccaugauuccaguggcug

SEQ ID NO: 775959 - RNA, 19 nt, Artificial Sequence
  Description of Artificial Sequence: Synthetic oligonucleotide
cacaacacacacacacacu

SEQ ID NO: 775960 - RNA, 19 nt, Artificial Sequence
  Description of Artificial Sequence: Synthetic oligonucleotide
gcgcagccagcacacacag

SEQ ID NO: 775961 - RNA, 19 nt, Artificial Sequence
  Description of Artificial Sequence: Synthetic oligonucleotide
guuaggugaaugggaauau

SEQ ID NO: 775962 - RNA, 19 nt, Artificial Sequence
  Description of Artificial Sequence: Synthetic oligonucleotide
uucacacgguagggcuggg

SEQ ID NO: 775963 - RNA, 19 nt, Artificial Sequence
  Description of Artificial Sequence: Synthetic oligonucleotide
ggagggagacaacagguau

SEQ ID NO: 775964 - RNA, 19 nt, Artificial Sequence
  Description of Artificial Sequence: Synthetic oligonucleotide
cagcaccugaacaaccugu

SEQ ID NO: 775965 - RNA, 19 nt, Artificial Sequence
  Description of Artificial Sequence: Synthetic oligonucleotide
acacacacucacacacaca

SEQ ID NO: 775966 - RNA, 19 nt, Artificial Sequence
  Description of Artificial Sequence: Synthetic oligonucleotide
cacacacaacacacacaca

SEQ ID NO: 775967 - RNA, 19 nt, Artificial Sequence
  Description of Artificial Sequence: Synthetic oligonucleotide
cacacacacucacacacau

SEQ ID NO: 775968 - RNA, 19 nt, Artificial Sequence
  Description of Artificial Sequence: Synthetic oligonucleotide
agguaggggcagugguagu

SEQ ID NO: 775969 - RNA, 19 nt, Artificial Sequence
  Description of Artificial Sequence: Synthetic oligonucleotide
ggucaauggggccuaggua

SEQ ID NO: 775970 - RNA, 19 nt, Artificial Sequence
  Description of Artificial Sequence: Synthetic oligonucleotide
acacacucacacacacaca

SEQ ID NO: 775971 - RNA, 19 nt, Artificial Sequence
  Description of Artificial Sequence: Synthetic oligonucleotide
ggaggcacaggagggcaag

SEQ ID NO: 775972 - RNA, 19 nt, Artificial Sequence
  Description of Artificial Sequence: Synthetic oligonucleotide
guccccgcugguagcacag

SEQ ID NO: 775973 - RNA, 19 nt, Artificial Sequence
  Description of Artificial Sequence: Synthetic oligonucleotide
ccuacgucccauacuguga

SEQ ID NO: 775974 - RNA, 19 nt, Artificial Sequence
  Description of Artificial Sequence: Synthetic oligonucleotide
cacaaacuuuggaggcgga

SEQ ID NO: 775975 - RNA, 19 nt, Artificial Sequence
  Description of Artificial Sequence: Synthetic oligonucleotide
ccaauugcggugacgcaga

SEQ ID NO: 775976 - RNA, 19 nt, Artificial Sequence
  Description of Artificial Sequence: Synthetic oligonucleotide
cuuccccgagccgaccgug

SEQ ID NO: 775977 - RNA, 19 nt, Artificial Sequence
  Description of Artificial Sequence: Synthetic oligonucleotide
cucguucccggucauugcu

SEQ ID NO: 775978 - RNA, 19 nt, Artificial Sequence
  Description of Artificial Sequence: Synthetic oligonucleotide
agucugguuuuagccuggu

SEQ ID NO: 775979 - RNA, 19 nt, Artificial Sequence
  Description of Artificial Sequence: Synthetic oligonucleotide
ccucccgcuuccccgagcc

SEQ ID NO: 775980 - RNA, 19 nt, Artificial Sequence
  Description of Artificial Sequence: Synthetic oligonucleotide
gagaugauaccaagauguu

SEQ ID NO: 775981 - RNA, 19 nt, Artificial Sequence
  Description of Artificial Sequence: Synthetic oligonucleotide
uugcggugacgcagagaau

SEQ ID NO: 775982 - RNA, 19 nt, Artificial Sequence
  Description of Artificial Sequence: Synthetic oligonucleotide
ggaccucgaccacacuuuc

SEQ ID NO: 775983 - RNA, 19 nt, Artificial Sequence
  Description of Artificial Sequence: Synthetic oligonucleotide
aggcacacacacacacaca

SEQ ID NO: 775984 - RNA, 19 nt, Artificial Sequence
  Description of Artificial Sequence: Synthetic oligonucleotide
cagaaauggaauggaacuu

SEQ ID NO: 775985 - RNA, 19 nt, Artificial Sequence
  Description of Artificial Sequence: Synthetic oligonucleotide
ggucccugguauggaaagc

SEQ ID NO: 775986 - RNA, 19 nt, Artificial Sequence
  Description of Artificial Sequence: Synthetic oligonucleotide
ggcagcguucauagcauuc

SEQ ID NO: 775987 - RNA, 19 nt, Artificial Sequence
  Description of Artificial Sequence: Synthetic oligonucleotide
ccucgaccacacuuucaag

SEQ ID NO: 775988 - RNA, 19 nt, Artificial Sequence
  Description of Artificial Sequence: Synthetic oligonucleotide
cauacagcccguccccgcu

SEQ ID NO: 775989 - RNA, 19 nt, Artificial Sequence
  Description of Artificial Sequence: Synthetic oligonucleotide
gcuccgcuuggcucucggg

SEQ ID NO: 775990 - RNA, 19 nt, Artificial Sequence
  Description of Artificial Sequence: Synthetic oligonucleotide
cccgcugguagcacaggug

SEQ ID NO: 775991 - RNA, 19 nt, Artificial Sequence
  Description of Artificial Sequence: Synthetic oligonucleotide
cagcuucacugcaaugacu

SEQ ID NO: 775992 - RNA, 19 nt, Artificial Sequence
  Description of Artificial Sequence: Synthetic oligonucleotide
gcuguacacaaagcuggca

SEQ ID NO: 775993 - RNA, 19 nt, Artificial Sequence
  Description of Artificial Sequence: Synthetic oligonucleotide
guaggggcagugguagucu

SEQ ID NO: 775994 - RNA, 19 nt, Artificial Sequence
  Description of Artificial Sequence: Synthetic oligonucleotide
cccgagccgaccguggcgg

SEQ ID NO: 775995 - RNA, 19 nt, Artificial Sequence
  Description of Artificial Sequence: Synthetic oligonucleotide
caggaccucgaccacacuu

SEQ ID NO: 775996 - RNA, 19 nt, Artificial Sequence
  Description of Artificial Sequence: Synthetic oligonucleotide
agccgaccguggcggcgac

SEQ ID NO: 775997 - RNA, 19 nt, Artificial Sequence
  Description of Artificial Sequence: Synthetic oligonucleotide
gcggugacgcagagaaugc

SEQ ID NO: 775998 - RNA, 19 nt, Artificial Sequence
  Description of Artificial Sequence: Synthetic oligonucleotide
gagccgaccguggcggcga

SEQ ID NO: 775999 - RNA, 19 nt, Artificial Sequence
  Description of Artificial Sequence: Synthetic oligonucleotide
uuacucguucccggucauu

SEQ ID NO: 776000 - RNA, 19 nt, Artificial Sequence
  Description of Artificial Sequence: Synthetic oligonucleotide
accuuggcagagagguuau

SEQ ID NO: 776001 - RNA, 19 nt, Artificial Sequence
  Description of Artificial Sequence: Synthetic oligonucleotide
cacccaggaccucgaccac

SEQ ID NO: 776002 - RNA, 19 nt, Artificial Sequence
  Description of Artificial Sequence: Synthetic oligonucleotide
acagcaucccggagcucgu

SEQ ID NO: 776003 - RNA, 19 nt, Artificial Sequence
  Description of Artificial Sequence: Synthetic oligonucleotide
ccgaccguggcggcgacgc

SEQ ID NO: 776004 - RNA, 19 nt, Artificial Sequence
  Description of Artificial Sequence: Synthetic oligonucleotide
acacacacucacacacauu

SEQ ID NO: 776005 - RNA, 19 nt, Artificial Sequence
  Description of Artificial Sequence: Synthetic oligonucleotide
caaggcucuuucugggcau

SEQ ID NO: 776006 - RNA, 19 nt, Artificial Sequence
  Description of Artificial Sequence: Synthetic oligonucleotide
ccaggaaguagagaugaua

SEQ ID NO: 776007 - RNA, 19 nt, Artificial Sequence
  Description of Artificial Sequence: Synthetic oligonucleotide
gcacacacacacacacaca

SEQ ID NO: 776008 - RNA, 19 nt, Artificial Sequence
  Description of Artificial Sequence: Synthetic oligonucleotide
cagaggggucgaaucuugu

SEQ ID NO: 776009 - RNA, 19 nt, Artificial Sequence
  Description of Artificial Sequence: Synthetic oligonucleotide
gcaauauacgaaaccuauu

SEQ ID NO: 776010 - RNA, 19 nt, Artificial Sequence
  Description of Artificial Sequence: Synthetic oligonucleotide
gggacgugaucgugucaga

SEQ ID NO: 776011 - RNA, 19 nt, Artificial Sequence
  Description of Artificial Sequence: Synthetic oligonucleotide
gcgacgcugguccgcuggc

SEQ ID NO: 776012 - RNA, 19 nt, Artificial Sequence
  Description of Artificial Sequence: Synthetic oligonucleotide
aggcgguuggggacgugau

SEQ ID NO: 776013 - RNA, 19 nt, Artificial Sequence
  Description of Artificial Sequence: Synthetic oligonucleotide
gccaccuacgucccauacu

SEQ ID NO: 776014 - RNA, 19 nt, Artificial Sequence
  Description of Artificial Sequence: Synthetic oligonucleotide
ccucaggaacaagcacccc

SEQ ID NO: 776015 - RNA, 19 nt, Artificial Sequence
  Description of Artificial Sequence: Synthetic oligonucleotide
acccaaugguggggauggu

SEQ ID NO: 776016 - RNA, 19 nt, Artificial Sequence
  Description of Artificial Sequence: Synthetic oligonucleotide
caccuacgucccauacugu

SEQ ID NO: 776017 - RNA, 19 nt, Artificial Sequence
  Description of Artificial Sequence: Synthetic oligonucleotide
acaggagggcaaggcucuu

SEQ ID NO: 776018 - RNA, 19 nt, Artificial Sequence
  Description of Artificial Sequence: Synthetic oligonucleotide
cagugguagucugguuuua

SEQ ID NO: 776019 - RNA, 19 nt, Artificial Sequence
  Description of Artificial Sequence: Synthetic oligonucleotide
ggggaguggguggaagagu

SEQ ID NO: 776020 - RNA, 19 nt, Artificial Sequence
  Description of Artificial Sequence: Synthetic oligonucleotide
cgagccgaccguggcggcg

SEQ ID NO: 776021 - RNA, 19 nt, Artificial Sequence
  Description of Artificial Sequence: Synthetic oligonucleotide
ccgagccgaccguggcggc

SEQ ID NO: 776022 - RNA, 19 nt, Artificial Sequence
  Description of Artificial Sequence: Synthetic oligonucleotide
gcuaggggaguggguggaa

SEQ ID NO: 776023 - RNA, 19 nt, Artificial Sequence
  Description of Artificial Sequence: Synthetic oligonucleotide
gccgaccguggcggcgacg

SEQ ID NO: 776024 - RNA, 19 nt, Artificial Sequence
  Description of Artificial Sequence: Synthetic oligonucleotide
ccgcuuccccgagccgacc

SEQ ID NO: 776025 - RNA, 19 nt, Artificial Sequence
  Description of Artificial Sequence: Synthetic oligonucleotide
cggcgacgcugguccgcug

SEQ ID NO: 776026 - RNA, 19 nt, Artificial Sequence
  Description of Artificial Sequence: Synthetic oligonucleotide
cggcagcguucauagcauu

SEQ ID NO: 776027 - RNA, 19 nt, Artificial Sequence
  Description of Artificial Sequence: Synthetic oligonucleotide
cgaccguggcggcgacgcu

SEQ ID NO: 776028 - RNA, 19 nt, Artificial Sequence
  Description of Artificial Sequence: Synthetic oligonucleotide
ccguggcggcgacgcuggu

SEQ ID NO: 776029 - RNA, 19 nt, Artificial Sequence
  Description of Artificial Sequence: Synthetic oligonucleotide
aauacuuaaggucgcgcgc

SEQ ID NO: 776030 - RNA, 19 nt, Artificial Sequence
  Description of Artificial Sequence: Synthetic oligonucleotide
acuuacauggcaccgauac

SEQ ID NO: 776031 - RNA, 19 nt, Artificial Sequence
  Description of Artificial Sequence: Synthetic oligonucleotide
uauuuguauaccaacuuug

SEQ ID NO: 776032 - RNA, 19 nt, Artificial Sequence
  Description of Artificial Sequence: Synthetic oligonucleotide
aacuuuggcucccagcggc

SEQ ID NO: 776033 - RNA, 19 nt, Artificial Sequence
  Description of Artificial Sequence: Synthetic oligonucleotide
guugcucggacuuacaugg

SEQ ID NO: 776034 - RNA, 19 nt, Artificial Sequence
  Description of Artificial Sequence: Synthetic oligonucleotide
ugauccauuucccugcugg

SEQ ID NO: 776035 - RNA, 19 nt, Artificial Sequence
  Description of Artificial Sequence: Synthetic oligonucleotide
gaauacuuaaggucgcgcg

SEQ ID NO: 776036 - RNA, 19 nt, Artificial Sequence
  Description of Artificial Sequence: Synthetic oligonucleotide
ucagauaagguuucuagga

SEQ ID NO: 776037 - RNA, 19 nt, Artificial Sequence
  Description of Artificial Sequence: Synthetic oligonucleotide
aguaggguccuuucaaggc

SEQ ID NO: 776038 - RNA, 19 nt, Artificial Sequence
  Description of Artificial Sequence: Synthetic oligonucleotide
aacacacuagguucauagc

SEQ ID NO: 776039 - RNA, 19 nt, Artificial Sequence
  Description of Artificial Sequence: Synthetic oligonucleotide
aagcuaccaaaccaguagg

SEQ ID NO: 776040 - RNA, 19 nt, Artificial Sequence
  Description of Artificial Sequence: Synthetic oligonucleotide
auagacgugaacuugcgca

SEQ ID NO: 776041 - RNA, 19 nt, Artificial Sequence
  Description of Artificial Sequence: Synthetic oligonucleotide
gauaagguuucuaggaggg

SEQ ID NO: 776042 - RNA, 19 nt, Artificial Sequence
  Description of Artificial Sequence: Synthetic oligonucleotide
uuuuaggcccaaaacaacu

SEQ ID NO: 776043 - RNA, 19 nt, Artificial Sequence
  Description of Artificial Sequence: Synthetic oligonucleotide
ucgggugacauucaaauaa

SEQ ID NO: 776044 - RNA, 19 nt, Artificial Sequence
  Description of Artificial Sequence: Synthetic oligonucleotide
agggacauaggucagauaa

SEQ ID NO: 776045 - RNA, 19 nt, Artificial Sequence
  Description of Artificial Sequence: Synthetic oligonucleotide
agcugaauacuuaaggucg

SEQ ID NO: 776046 - RNA, 19 nt, Artificial Sequence
  Description of Artificial Sequence: Synthetic oligonucleotide
cauauuugcuuggagauag

SEQ ID NO: 776047 - RNA, 19 nt, Artificial Sequence
  Description of Artificial Sequence: Synthetic oligonucleotide
aaggaugugccauucuuca

SEQ ID NO: 776048 - RNA, 19 nt, Artificial Sequence
  Description of Artificial Sequence: Synthetic oligonucleotide
uguugucucuaucaaacac

SEQ ID NO: 776049 - RNA, 19 nt, Artificial Sequence
  Description of Artificial Sequence: Synthetic oligonucleotide
gucagauaagguuucuagg

SEQ ID NO: 776050 - RNA, 19 nt, Artificial Sequence
  Description of Artificial Sequence: Synthetic oligonucleotide
gaucucaccauaguacugg

SEQ ID NO: 776051 - RNA, 19 nt, Artificial Sequence
  Description of Artificial Sequence: Synthetic oligonucleotide
agaggcacugcuccaaugg

SEQ ID NO: 776052 - RNA, 19 nt, Artificial Sequence
  Description of Artificial Sequence: Synthetic oligonucleotide
acuguaaaacacugugggg

SEQ ID NO: 776053 - RNA, 19 nt, Artificial Sequence
  Description of Artificial Sequence: Synthetic oligonucleotide
uguugcaucagguugucaa

SEQ ID NO: 776054 - RNA, 19 nt, Artificial Sequence
  Description of Artificial Sequence: Synthetic oligonucleotide
uuuaggcccaaaacaacug

SEQ ID NO: 776055 - RNA, 19 nt, Artificial Sequence
  Description of Artificial Sequence: Synthetic oligonucleotide
uuucgggugacauucaaau

SEQ ID NO: 776056 - RNA, 19 nt, Artificial Sequence
  Description of Artificial Sequence: Synthetic oligonucleotide
aaggucgcgcgcuuauagc

SEQ ID NO: 776057 - RNA, 19 nt, Artificial Sequence
  Description of Artificial Sequence: Synthetic oligonucleotide
aaaccaguaggguccuuuc

SEQ ID NO: 776058 - RNA, 19 nt, Artificial Sequence
  Description of Artificial Sequence: Synthetic oligonucleotide
acacacuagguucauagcu

SEQ ID NO: 776059 - RNA, 19 nt, Artificial Sequence
  Description of Artificial Sequence: Synthetic oligonucleotide
caagggcucaguaaugccg

SEQ ID NO: 776060 - RNA, 19 nt, Artificial Sequence
  Description of Artificial Sequence: Synthetic oligonucleotide
ucuaggagggaucccaaga

SEQ ID NO: 776061 - RNA, 19 nt, Artificial Sequence
  Description of Artificial Sequence: Synthetic oligonucleotide
aggucgcgcgcuuauagcc

SEQ ID NO: 776062 - RNA, 19 nt, Artificial Sequence
  Description of Artificial Sequence: Synthetic oligonucleotide
uaaggucgcgcgcuuauag

SEQ ID NO: 776063 - RNA, 19 nt, Artificial Sequence
  Description of Artificial Sequence: Synthetic oligonucleotide
uugagcaacucugacacug

SEQ ID NO: 776064 - RNA, 19 nt, Artificial Sequence
  Description of Artificial Sequence: Synthetic oligonucleotide
uagucuuugccuccuagcu

SEQ ID NO: 776065 - RNA, 19 nt, Artificial Sequence
  Description of Artificial Sequence: Synthetic oligonucleotide
uggagauaguucauagucu

SEQ ID NO: 776066 - RNA, 19 nt, Artificial Sequence
  Description of Artificial Sequence: Synthetic oligonucleotide
cuugagaccuccugguugc

SEQ ID NO: 776067 - RNA, 19 nt, Artificial Sequence
  Description of Artificial Sequence: Synthetic oligonucleotide
uaacagcggaggcagacgc

SEQ ID NO: 776068 - RNA, 19 nt, Artificial Sequence
  Description of Artificial Sequence: Synthetic oligonucleotide
uuggaguacuugguuaugg

SEQ ID NO: 776069 - RNA, 19 nt, Artificial Sequence
  Description of Artificial Sequence: Synthetic oligonucleotide
agcaaucugaacccaagga

SEQ ID NO: 776070 - RNA, 19 nt, Artificial Sequence
  Description of Artificial Sequence: Synthetic oligonucleotide
aguaaugccgugagugugc

SEQ ID NO: 776071 - RNA, 19 nt, Artificial Sequence
  Description of Artificial Sequence: Synthetic oligonucleotide
uccugugucuacgauagcc

SEQ ID NO: 776072 - RNA, 19 nt, Artificial Sequence
  Description of Artificial Sequence: Synthetic oligonucleotide
ucugauaacagcggaggca

SEQ ID NO: 776073 - RNA, 19 nt, Artificial Sequence
  Description of Artificial Sequence: Synthetic oligonucleotide
ugguccgacggauagacgu

SEQ ID NO: 776074 - RNA, 19 nt, Artificial Sequence
  Description of Artificial Sequence: Synthetic oligonucleotide
ugagccauaguggauguca

SEQ ID NO: 776075 - RNA, 19 nt, Artificial Sequence
  Description of Artificial Sequence: Synthetic oligonucleotide
uagacgugaacuugcgcag

SEQ ID NO: 776076 - RNA, 19 nt, Artificial Sequence
  Description of Artificial Sequence: Synthetic oligonucleotide
aagccgacccuauuguugu

SEQ ID NO: 776077 - RNA, 19 nt, Artificial Sequence
  Description of Artificial Sequence: Synthetic oligonucleotide
ugagcaacucugacacugg

SEQ ID NO: 776078 - RNA, 19 nt, Artificial Sequence
  Description of Artificial Sequence: Synthetic oligonucleotide
ggucagauaagguuucuag

SEQ ID NO: 776079 - RNA, 19 nt, Artificial Sequence
  Description of Artificial Sequence: Synthetic oligonucleotide
gauacagaccgugggacag

SEQ ID NO: 776080 - RNA, 19 nt, Artificial Sequence
  Description of Artificial Sequence: Synthetic oligonucleotide
uuguacuuguggugaaucc

SEQ ID NO: 776081 - RNA, 19 nt, Artificial Sequence
  Description of Artificial Sequence: Synthetic oligonucleotide
cagauaagguuucuaggag

SEQ ID NO: 776082 - RNA, 19 nt, Artificial Sequence
  Description of Artificial Sequence: Synthetic oligonucleotide
cugauaacagcggaggcag

SEQ ID NO: 776083 - RNA, 19 nt, Artificial Sequence
  Description of Artificial Sequence: Synthetic oligonucleotide
cuaccaaaccaguaggguc

SEQ ID NO: 776084 - RNA, 19 nt, Artificial Sequence
  Description of Artificial Sequence: Synthetic oligonucleotide
aggauacagaccgugggac

SEQ ID NO: 776085 - RNA, 19 nt, Artificial Sequence
  Description of Artificial Sequence: Synthetic oligonucleotide
uguacuuguggugaaucca

SEQ ID NO: 776086 - RNA, 19 nt, Artificial Sequence
  Description of Artificial Sequence: Synthetic oligonucleotide
accgauacaguguccugac

SEQ ID NO: 776087 - RNA, 19 nt, Artificial Sequence
  Description of Artificial Sequence: Synthetic oligonucleotide
uucugauaacagcggaggc

SEQ ID NO: 776088 - RNA, 19 nt, Artificial Sequence
  Description of Artificial Sequence: Synthetic oligonucleotide
uauuguugucucuaucaaa

SEQ ID NO: 776089 - RNA, 19 nt, Artificial Sequence
  Description of Artificial Sequence: Synthetic oligonucleotide
uaucgaagaccacuguaaa

SEQ ID NO: 776090 - RNA, 19 nt, Artificial Sequence
  Description of Artificial Sequence: Synthetic oligonucleotide
ccaacuuuggcucccagcg

SEQ ID NO: 776091 - RNA, 19 nt, Artificial Sequence
  Description of Artificial Sequence: Synthetic oligonucleotide
cagagauacuuggauaucc

SEQ ID NO: 776092 - RNA, 19 nt, Artificial Sequence
  Description of Artificial Sequence: Synthetic oligonucleotide
uuucaaggcagcccuugca

SEQ ID NO: 776093 - RNA, 19 nt, Artificial Sequence
  Description of Artificial Sequence: Synthetic oligonucleotide
ucugucaugguccgacgga

SEQ ID NO: 776094 - RNA, 19 nt, Artificial Sequence
  Description of Artificial Sequence: Synthetic oligonucleotide
cauaguggaugucaaagga

SEQ ID NO: 776095 - RNA, 19 nt, Artificial Sequence
  Description of Artificial Sequence: Synthetic oligonucleotide
ugaauacuuaaggucgcgc

SEQ ID NO: 776096 - RNA, 19 nt, Artificial Sequence
  Description of Artificial Sequence: Synthetic oligonucleotide
gacaaggcaagcuaccaaa

SEQ ID NO: 776097 - RNA, 19 nt, Artificial Sequence
  Description of Artificial Sequence: Synthetic oligonucleotide
uucucacaagggaucaugu

SEQ ID NO: 776098 - RNA, 19 nt, Artificial Sequence
  Description of Artificial Sequence: Synthetic oligonucleotide
caguaggguccuuucaagg

SEQ ID NO: 776099 - RNA, 19 nt, Artificial Sequence
  Description of Artificial Sequence: Synthetic oligonucleotide
gauagacgugaacuugcgc

SEQ ID NO: 776100 - RNA, 19 nt, Artificial Sequence
  Description of Artificial Sequence: Synthetic oligonucleotide
uccaccuugagaccuccug

SEQ ID NO: 776101 - RNA, 19 nt, Artificial Sequence
  Description of Artificial Sequence: Synthetic oligonucleotide
agaguggcccacugggugg

SEQ ID NO: 776102 - RNA, 19 nt, Artificial Sequence
  Description of Artificial Sequence: Synthetic oligonucleotide
gacgugaacuugcgcaggg

SEQ ID NO: 776103 - RNA, 19 nt, Artificial Sequence
  Description of Artificial Sequence: Synthetic oligonucleotide
gcugcgaugaaugugauuc

SEQ ID NO: 776104 - RNA, 19 nt, Artificial Sequence
  Description of Artificial Sequence: Synthetic oligonucleotide
uacuuggauaucccaugcc

SEQ ID NO: 776105 - RNA, 19 nt, Artificial Sequence
  Description of Artificial Sequence: Synthetic oligonucleotide
aagagcgaagcugaauacu

SEQ ID NO: 776106 - RNA, 19 nt, Artificial Sequence
  Description of Artificial Sequence: Synthetic oligonucleotide
guaguaggugccaaugaag

SEQ ID NO: 776107 - RNA, 19 nt, Artificial Sequence
  Description of Artificial Sequence: Synthetic oligonucleotide
gucaugguccgacggauag

SEQ ID NO: 776108 - RNA, 19 nt, Artificial Sequence
  Description of Artificial Sequence: Synthetic oligonucleotide
cuuggagucaauuccgcca

SEQ ID NO: 776109 - RNA, 19 nt, Artificial Sequence
  Description of Artificial Sequence: Synthetic oligonucleotide
agucaauuccgccaagcau

SEQ ID NO: 776110 - RNA, 19 nt, Artificial Sequence
  Description of Artificial Sequence: Synthetic oligonucleotide
aguaucgaagaccacugua

SEQ ID NO: 776111 - RNA, 19 nt, Artificial Sequence
  Description of Artificial Sequence: Synthetic oligonucleotide
uuugccuccuagcuucaga

SEQ ID NO: 776112 - RNA, 19 nt, Artificial Sequence
  Description of Artificial Sequence: Synthetic oligonucleotide
gacagagauacuuggauau

SEQ ID NO: 776113 - RNA, 19 nt, Artificial Sequence
  Description of Artificial Sequence: Synthetic oligonucleotide
aguguaguaggugccaaug

SEQ ID NO: 776114 - RNA, 19 nt, Artificial Sequence
  Description of Artificial Sequence: Synthetic oligonucleotide
ucaauuccgccaagcauaa

SEQ ID NO: 776115 - RNA, 19 nt, Artificial Sequence
  Description of Artificial Sequence: Synthetic oligonucleotide
uauaccaacuuuggcuccc

SEQ ID NO: 776116 - RNA, 19 nt, Artificial Sequence
  Description of Artificial Sequence: Synthetic oligonucleotide
ucggacuuacauggcaccg

SEQ ID NO: 776117 - RNA, 19 nt, Artificial Sequence
  Description of Artificial Sequence: Synthetic oligonucleotide
gaugccgaucucaccauag

SEQ ID NO: 776118 - RNA, 19 nt, Artificial Sequence
  Description of Artificial Sequence: Synthetic oligonucleotide
guugucucuaucaaacaca

SEQ ID NO: 776119 - RNA, 19 nt, Artificial Sequence
  Description of Artificial Sequence: Synthetic oligonucleotide
gaggcuaccugagccauag

SEQ ID NO: 776120 - RNA, 19 nt, Artificial Sequence
  Description of Artificial Sequence: Synthetic oligonucleotide
guacuuguggugaauccag

SEQ ID NO: 776121 - RNA, 19 nt, Artificial Sequence
  Description of Artificial Sequence: Synthetic oligonucleotide
auaggucagauaagguuuc

SEQ ID NO: 776122 - RNA, 19 nt, Artificial Sequence
  Description of Artificial Sequence: Synthetic oligonucleotide
cuccccuccagguugcccg

SEQ ID NO: 776123 - RNA, 19 nt, Artificial Sequence
  Description of Artificial Sequence: Synthetic oligonucleotide
agcauaagcuccccuccag

SEQ ID NO: 776124 - RNA, 19 nt, Artificial Sequence
  Description of Artificial Sequence: Synthetic oligonucleotide
uacuuguggugaauccagc

SEQ ID NO: 776125 - RNA, 19 nt, Artificial Sequence
  Description of Artificial Sequence: Synthetic oligonucleotide
caagagcgaagcugaauac

SEQ ID NO: 776126 - RNA, 19 nt, Artificial Sequence
  Description of Artificial Sequence: Synthetic oligonucleotide
agcgaagcugaauacuuaa

SEQ ID NO: 776127 - RNA, 19 nt, Artificial Sequence
  Description of Artificial Sequence: Synthetic oligonucleotide
agaucgucuuuccacccug

SEQ ID NO: 776128 - RNA, 19 nt, Artificial Sequence
  Description of Artificial Sequence: Synthetic oligonucleotide
uucuaggagggaucccaag

SEQ ID NO: 776129 - RNA, 19 nt, Artificial Sequence
  Description of Artificial Sequence: Synthetic oligonucleotide
ucucaccauaguacugggc

SEQ ID NO: 776130 - RNA, 19 nt, Artificial Sequence
  Description of Artificial Sequence: Synthetic oligonucleotide
aucgucuuuccacccugcg

SEQ ID NO: 776131 - RNA, 19 nt, Artificial Sequence
  Description of Artificial Sequence: Synthetic oligonucleotide
gagccaguaucgaagacca

SEQ ID NO: 776132 - RNA, 19 nt, Artificial Sequence
  Description of Artificial Sequence: Synthetic oligonucleotide
caugguccgacggauagac

SEQ ID NO: 776133 - RNA, 19 nt, Artificial Sequence
  Description of Artificial Sequence: Synthetic oligonucleotide
gcuuauagccggaaugacg

SEQ ID NO: 776134 - RNA, 19 nt, Artificial Sequence
  Description of Artificial Sequence: Synthetic oligonucleotide
ugcgaugaaugugauucca

SEQ ID NO: 776135 - RNA, 19 nt, Artificial Sequence
  Description of Artificial Sequence: Synthetic oligonucleotide
gacaucacccaggauccag

SEQ ID NO: 776136 - RNA, 19 nt, Artificial Sequence
  Description of Artificial Sequence: Synthetic oligonucleotide
cugccaguaggccuuucgg

SEQ ID NO: 776137 - RNA, 19 nt, Artificial Sequence
  Description of Artificial Sequence: Synthetic oligonucleotide
ggcuaccugagccauagug

SEQ ID NO: 776138 - RNA, 19 nt, Artificial Sequence
  Description of Artificial Sequence: Synthetic oligonucleotide
caggacaaggcaagcuacc

SEQ ID NO: 776139 - RNA, 19 nt, Artificial Sequence
  Description of Artificial Sequence: Synthetic oligonucleotide
agacccauaugccugcuuu

SEQ ID NO: 776140 - RNA, 19 nt, Artificial Sequence
  Description of Artificial Sequence: Synthetic oligonucleotide
guauaccaacuuuggcucc

SEQ ID NO: 776141 - RNA, 19 nt, Artificial Sequence
  Description of Artificial Sequence: Synthetic oligonucleotide
cugacucagguacccagag

SEQ ID NO: 776142 - RNA, 19 nt, Artificial Sequence
  Description of Artificial Sequence: Synthetic oligonucleotide
ggcaaagccgacccuauug

SEQ ID NO: 776143 - RNA, 19 nt, Artificial Sequence
  Description of Artificial Sequence: Synthetic oligonucleotide
auacuuaaggucgcgcgcu

SEQ ID NO: 776144 - RNA, 19 nt, Artificial Sequence
  Description of Artificial Sequence: Synthetic oligonucleotide
caccuugaguacauauuug

SEQ ID NO: 776145 - RNA, 19 nt, Artificial Sequence
  Description of Artificial Sequence: Synthetic oligonucleotide
agcuaccaaaccaguaggg

SEQ ID NO: 776146 - RNA, 19 nt, Artificial Sequence
  Description of Artificial Sequence: Synthetic oligonucleotide
agacguuccugugucuacg

SEQ ID NO: 776147 - RNA, 19 nt, Artificial Sequence
  Description of Artificial Sequence: Synthetic oligonucleotide
acccauaugccugcuuugg

SEQ ID NO: 776148 - RNA, 19 nt, Artificial Sequence
  Description of Artificial Sequence: Synthetic oligonucleotide
cuuaaggaucaggucuucc

SEQ ID NO: 776149 - RNA, 19 nt, Artificial Sequence
  Description of Artificial Sequence: Synthetic oligonucleotide
uagaggagccaguaucgaa

SEQ ID NO: 776150 - RNA, 19 nt, Artificial Sequence
  Description of Artificial Sequence: Synthetic oligonucleotide
ccuauuguugucucuauca

SEQ ID NO: 776151 - RNA, 19 nt, Artificial Sequence
  Description of Artificial Sequence: Synthetic oligonucleotide
uccacccugcgacaccuug

SEQ ID NO: 776152 - RNA, 19 nt, Artificial Sequence
  Description of Artificial Sequence: Synthetic oligonucleotide
ugccgaucucaccauagua

SEQ ID NO: 776153 - RNA, 19 nt, Artificial Sequence
  Description of Artificial Sequence: Synthetic oligonucleotide
guaucgaagaccacuguaa

SEQ ID NO: 776154 - RNA, 19 nt, Artificial Sequence
  Description of Artificial Sequence: Synthetic oligonucleotide
ugguugcucggacuuacau

SEQ ID NO: 776155 - RNA, 19 nt, Artificial Sequence
  Description of Artificial Sequence: Synthetic oligonucleotide
uuagaggagccaguaucga

SEQ ID NO: 776156 - RNA, 19 nt, Artificial Sequence
  Description of Artificial Sequence: Synthetic oligonucleotide
gacccauaugccugcuuug

SEQ ID NO: 776157 - RNA, 19 nt, Artificial Sequence
  Description of Artificial Sequence: Synthetic oligonucleotide
agccuuggcaaagccgacc

SEQ ID NO: 776158 - RNA, 19 nt, Artificial Sequence
  Description of Artificial Sequence: Synthetic oligonucleotide
ggcagaucgucuuuccacc

SEQ ID NO: 776159 - RNA, 19 nt, Artificial Sequence
  Description of Artificial Sequence: Synthetic oligonucleotide
ccccaaguaacacacuagg

SEQ ID NO: 776160 - RNA, 19 nt, Artificial Sequence
  Description of Artificial Sequence: Synthetic oligonucleotide
gccuccuagcuucagagug

SEQ ID NO: 776161 - RNA, 19 nt, Artificial Sequence
  Description of Artificial Sequence: Synthetic oligonucleotide
ucaccauaguacugggcau

SEQ ID NO: 776162 - RNA, 19 nt, Artificial Sequence
  Description of Artificial Sequence: Synthetic oligonucleotide
auuccgccaagcauaagcu

SEQ ID NO: 776163 - RNA, 19 nt, Artificial Sequence
  Description of Artificial Sequence: Synthetic oligonucleotide
gguugcucggacuuacaug

SEQ ID NO: 776164 - RNA, 19 nt, Artificial Sequence
  Description of Artificial Sequence: Synthetic oligonucleotide
auaguggaugucaaaggau

SEQ ID NO: 776165 - RNA, 19 nt, Artificial Sequence
  Description of Artificial Sequence: Synthetic oligonucleotide
uggauaucccaugcccaag

SEQ ID NO: 776166 - RNA, 19 nt, Artificial Sequence
  Description of Artificial Sequence: Synthetic oligonucleotide
gagacguuccugugucuac

SEQ ID NO: 776167 - RNA, 19 nt, Artificial Sequence
  Description of Artificial Sequence: Synthetic oligonucleotide
aacagcggaggcagacgcg

SEQ ID NO: 776168 - RNA, 19 nt, Artificial Sequence
  Description of Artificial Sequence: Synthetic oligonucleotide
ggcucaguaaugccgugag

SEQ ID NO: 776169 - RNA, 19 nt, Artificial Sequence
  Description of Artificial Sequence: Synthetic oligonucleotide
ugcgacaccuugaguacau

SEQ ID NO: 776170 - RNA, 19 nt, Artificial Sequence
  Description of Artificial Sequence: Synthetic oligonucleotide
gucgcgcgcuuauagccgg

SEQ ID NO: 776171 - RNA, 19 nt, Artificial Sequence
  Description of Artificial Sequence: Synthetic oligonucleotide
caguaaugccgugagugug

SEQ ID NO: 776172 - RNA, 19 nt, Artificial Sequence
  Description of Artificial Sequence: Synthetic oligonucleotide
ggaguacuugguuauggga

SEQ ID NO: 776173 - RNA, 19 nt, Artificial Sequence
  Description of Artificial Sequence: Synthetic oligonucleotide
acuagagcguggcagccuu

SEQ ID NO: 776174 - RNA, 19 nt, Artificial Sequence
  Description of Artificial Sequence: Synthetic oligonucleotide
ccaguaucgaagaccacug

SEQ ID NO: 776175 - RNA, 19 nt, Artificial Sequence
  Description of Artificial Sequence: Synthetic oligonucleotide
gcaagagcgaagcugaaua

SEQ ID NO: 776176 - RNA, 19 nt, Artificial Sequence
  Description of Artificial Sequence: Synthetic oligonucleotide
uucgggugacauucaaaua

SEQ ID NO: 776177 - RNA, 19 nt, Artificial Sequence
  Description of Artificial Sequence: Synthetic oligonucleotide
agucuuugccuccuagcuu

SEQ ID NO: 776178 - RNA, 19 nt, Artificial Sequence
  Description of Artificial Sequence: Synthetic oligonucleotide
agacgugaacuugcgcagg

SEQ ID NO: 776179 - RNA, 19 nt, Artificial Sequence
  Description of Artificial Sequence: Synthetic oligonucleotide
uacagaccgugggacagug

SEQ ID NO: 776180 - RNA, 19 nt, Artificial Sequence
  Description of Artificial Sequence: Synthetic oligonucleotide
gccagccaaaaccagucag

SEQ ID NO: 776181 - RNA, 19 nt, Artificial Sequence
  Description of Artificial Sequence: Synthetic oligonucleotide
cuugccgcuguuguacuug

SEQ ID NO: 776182 - RNA, 19 nt, Artificial Sequence
  Description of Artificial Sequence: Synthetic oligonucleotide
agagcgaagcugaauacuu

SEQ ID NO: 776183 - RNA, 19 nt, Artificial Sequence
  Description of Artificial Sequence: Synthetic oligonucleotide
cacaaaagugcuggacuug

SEQ ID NO: 776184 - RNA, 19 nt, Artificial Sequence
  Description of Artificial Sequence: Synthetic oligonucleotide
ggauucugauaacagcgga

SEQ ID NO: 776185 - RNA, 19 nt, Artificial Sequence
  Description of Artificial Sequence: Synthetic oligonucleotide
ggauagacgugaacuugcg

SEQ ID NO: 776186 - RNA, 19 nt, Artificial Sequence
  Description of Artificial Sequence: Synthetic oligonucleotide
aggacaaggcaagcuacca

SEQ ID NO: 776187 - RNA, 19 nt, Artificial Sequence
  Description of Artificial Sequence: Synthetic oligonucleotide
gugucuacgauagccucac

SEQ ID NO: 776188 - RNA, 19 nt, Artificial Sequence
  Description of Artificial Sequence: Synthetic oligonucleotide
cuagcuucagagugacaga

SEQ ID NO: 776189 - RNA, 19 nt, Artificial Sequence
  Description of Artificial Sequence: Synthetic oligonucleotide
cacuagguucauagcuuug

SEQ ID NO: 776190 - RNA, 19 nt, Artificial Sequence
  Description of Artificial Sequence: Synthetic oligonucleotide
cccaagacccauaugccug

SEQ ID NO: 776191 - RNA, 19 nt, Artificial Sequence
  Description of Artificial Sequence: Synthetic oligonucleotide
ccaagcauaagcuccccuc

SEQ ID NO: 776192 - RNA, 19 nt, Artificial Sequence
  Description of Artificial Sequence: Synthetic oligonucleotide
uuccgccaagcauaagcuc

SEQ ID NO: 776193 - RNA, 19 nt, Artificial Sequence
  Description of Artificial Sequence: Synthetic oligonucleotide
gcuguuguacuugugguga

SEQ ID NO: 776194 - RNA, 19 nt, Artificial Sequence
  Description of Artificial Sequence: Synthetic oligonucleotide
caggauacagaccguggga

SEQ ID NO: 776195 - RNA, 19 nt, Artificial Sequence
  Description of Artificial Sequence: Synthetic oligonucleotide
augccgaucucaccauagu

SEQ ID NO: 776196 - RNA, 19 nt, Artificial Sequence
  Description of Artificial Sequence: Synthetic oligonucleotide
ccaccuugagaccuccugg

SEQ ID NO: 776197 - RNA, 19 nt, Artificial Sequence
  Description of Artificial Sequence: Synthetic oligonucleotide
aucacccaggauccagagu

SEQ ID NO: 776198 - RNA, 19 nt, Artificial Sequence
  Description of Artificial Sequence: Synthetic oligonucleotide
ugucaugguccgacggaua

SEQ ID NO: 776199 - RNA, 19 nt, Artificial Sequence
  Description of Artificial Sequence: Synthetic oligonucleotide
gaucgucuuuccacccugc

SEQ ID NO: 776200 - RNA, 19 nt, Artificial Sequence
  Description of Artificial Sequence: Synthetic oligonucleotide
gccgaucucaccauaguac

SEQ ID NO: 776201 - RNA, 19 nt, Artificial Sequence
  Description of Artificial Sequence: Synthetic oligonucleotide
auaagguuucuaggaggga

SEQ ID NO: 776202 - RNA, 19 nt, Artificial Sequence
  Description of Artificial Sequence: Synthetic oligonucleotide
augccgugagugugcaugu

SEQ ID NO: 776203 - RNA, 19 nt, Artificial Sequence
  Description of Artificial Sequence: Synthetic oligonucleotide
aagacccauaugccugcuu

SEQ ID NO: 776204 - RNA, 19 nt, Artificial Sequence
  Description of Artificial Sequence: Synthetic oligonucleotide
gguccuuucaaggcagccc

SEQ ID NO: 776205 - RNA, 19 nt, Artificial Sequence
  Description of Artificial Sequence: Synthetic oligonucleotide
acauauuugcuuggagaua

SEQ ID NO: 776206 - RNA, 19 nt, Artificial Sequence
  Description of Artificial Sequence: Synthetic oligonucleotide
auagccucacagccucccu

SEQ ID NO: 776207 - RNA, 19 nt, Artificial Sequence
  Description of Artificial Sequence: Synthetic oligonucleotide
ggagucaauuccgccaagc

SEQ ID NO: 776208 - RNA, 19 nt, Artificial Sequence
  Description of Artificial Sequence: Synthetic oligonucleotide
caccauaguacugggcauc

SEQ ID NO: 776209 - RNA, 19 nt, Artificial Sequence
  Description of Artificial Sequence: Synthetic oligonucleotide
ugccuccuagcuucagagu

SEQ ID NO: 776210 - RNA, 19 nt, Artificial Sequence
  Description of Artificial Sequence: Synthetic oligonucleotide
ccaguaggguccuuucaag

SEQ ID NO: 776211 - RNA, 19 nt, Artificial Sequence
  Description of Artificial Sequence: Synthetic oligonucleotide
acgugaacuugcgcagggg

SEQ ID NO: 776212 - RNA, 19 nt, Artificial Sequence
  Description of Artificial Sequence: Synthetic oligonucleotide
agagacguuccugugucua

SEQ ID NO: 776213 - RNA, 19 nt, Artificial Sequence
  Description of Artificial Sequence: Synthetic oligonucleotide
ggacuugccgcuguuguac

SEQ ID NO: 776214 - RNA, 19 nt, Artificial Sequence
  Description of Artificial Sequence: Synthetic oligonucleotide
gacggauagacgugaacuu

SEQ ID NO: 776215 - RNA, 19 nt, Artificial Sequence
  Description of Artificial Sequence: Synthetic oligonucleotide
uccccuccagguugcccgg

SEQ ID NO: 776216 - RNA, 19 nt, Artificial Sequence
  Description of Artificial Sequence: Synthetic oligonucleotide
ggagauaguucauagucuu

SEQ ID NO: 776217 - RNA, 19 nt, Artificial Sequence
  Description of Artificial Sequence: Synthetic oligonucleotide
gacauaggucagauaaggu

SEQ ID NO: 776218 - RNA, 19 nt, Artificial Sequence
  Description of Artificial Sequence: Synthetic oligonucleotide
uacuuaaggucgcgcgcuu

SEQ ID NO: 776219 - RNA, 19 nt, Artificial Sequence
  Description of Artificial Sequence: Synthetic oligonucleotide
uuccugugucuacgauagc

SEQ ID NO: 776220 - RNA, 19 nt, Artificial Sequence
  Description of Artificial Sequence: Synthetic oligonucleotide
aggcccaaaacaacuguau

SEQ ID NO: 776221 - RNA, 19 nt, Artificial Sequence
  Description of Artificial Sequence: Synthetic oligonucleotide
ucccgaugccgaucucacc

SEQ ID NO: 776222 - RNA, 19 nt, Artificial Sequence
  Description of Artificial Sequence: Synthetic oligonucleotide
gcagaucgucuuuccaccc

SEQ ID NO: 776223 - RNA, 19 nt, Artificial Sequence
  Description of Artificial Sequence: Synthetic oligonucleotide
aguaggccuuucgggugac

SEQ ID NO: 776224 - RNA, 19 nt, Artificial Sequence
  Description of Artificial Sequence: Synthetic oligonucleotide
uccgacggauagacgugaa

SEQ ID NO: 776225 - RNA, 19 nt, Artificial Sequence
  Description of Artificial Sequence: Synthetic oligonucleotide
uacuugguuaugggacccu

SEQ ID NO: 776226 - RNA, 19 nt, Artificial Sequence
  Description of Artificial Sequence: Synthetic oligonucleotide
ccaccagaagagacguucc

SEQ ID NO: 776227 - RNA, 19 nt, Artificial Sequence
  Description of Artificial Sequence: Synthetic oligonucleotide
gcagcccuugcacugggug

SEQ ID NO: 776228 - RNA, 19 nt, Artificial Sequence
  Description of Artificial Sequence: Synthetic oligonucleotide
ccaagggcucaguaaugcc

SEQ ID NO: 776229 - RNA, 19 nt, Artificial Sequence
  Description of Artificial Sequence: Synthetic oligonucleotide
ccugcgacaccuugaguac

SEQ ID NO: 776230 - RNA, 19 nt, Artificial Sequence
  Description of Artificial Sequence: Synthetic oligonucleotide
gauaucccaugcccaagau

SEQ ID NO: 776231 - RNA, 19 nt, Artificial Sequence
  Description of Artificial Sequence: Synthetic oligonucleotide
acaguguaguaggugccaa

SEQ ID NO: 776232 - RNA, 19 nt, Artificial Sequence
  Description of Artificial Sequence: Synthetic oligonucleotide
ccugccaguaggccuuucg

SEQ ID NO: 776233 - RNA, 19 nt, Artificial Sequence
  Description of Artificial Sequence: Synthetic oligonucleotide
caccgauacaguguccuga

SEQ ID NO: 776234 - RNA, 19 nt, Artificial Sequence
  Description of Artificial Sequence: Synthetic oligonucleotide
guaaugccgugagugugca

SEQ ID NO: 776235 - RNA, 19 nt, Artificial Sequence
  Description of Artificial Sequence: Synthetic oligonucleotide
ggucgcgcgcuuauagccg

SEQ ID NO: 776236 - RNA, 19 nt, Artificial Sequence
  Description of Artificial Sequence: Synthetic oligonucleotide
agccgacccuauuguuguc

SEQ ID NO: 776237 - RNA, 19 nt, Artificial Sequence
  Description of Artificial Sequence: Synthetic oligonucleotide
uuaaggucgcgcgcuuaua

SEQ ID NO: 776238 - RNA, 19 nt, Artificial Sequence
  Description of Artificial Sequence: Synthetic oligonucleotide
gcgaagcugaauacuuaag

SEQ ID NO: 776239 - RNA, 19 nt, Artificial Sequence
  Description of Artificial Sequence: Synthetic oligonucleotide
cuagagcguggcagccuug

SEQ ID NO: 776240 - RNA, 19 nt, Artificial Sequence
  Description of Artificial Sequence: Synthetic oligonucleotide
cccgaugccgaucucacca

SEQ ID NO: 776241 - RNA, 19 nt, Artificial Sequence
  Description of Artificial Sequence: Synthetic oligonucleotide
gcccaagaugccaucaaac

SEQ ID NO: 776242 - RNA, 19 nt, Artificial Sequence
  Description of Artificial Sequence: Synthetic oligonucleotide
acaguggagccuggugucu

SEQ ID NO: 776243 - RNA, 19 nt, Artificial Sequence
  Description of Artificial Sequence: Synthetic oligonucleotide
cccagagaggcuaccugag

SEQ ID NO: 776244 - RNA, 19 nt, Artificial Sequence
  Description of Artificial Sequence: Synthetic oligonucleotide
caguaggccuuucggguga

SEQ ID NO: 776245 - RNA, 19 nt, Artificial Sequence
  Description of Artificial Sequence: Synthetic oligonucleotide
cgcgcuuauagccggaaug

SEQ ID NO: 776246 - RNA, 19 nt, Artificial Sequence
  Description of Artificial Sequence: Synthetic oligonucleotide
acguuccugugucuacgau

SEQ ID NO: 776247 - RNA, 19 nt, Artificial Sequence
  Description of Artificial Sequence: Synthetic oligonucleotide
auacagaccgugggacagu

SEQ ID NO: 776248 - RNA, 19 nt, Artificial Sequence
  Description of Artificial Sequence: Synthetic oligonucleotide
accaaaccaguaggguccu

SEQ ID NO: 776249 - RNA, 19 nt, Artificial Sequence
  Description of Artificial Sequence: Synthetic oligonucleotide
cccugcgacaccuugagua

SEQ ID NO: 776250 - RNA, 19 nt, Artificial Sequence
  Description of Artificial Sequence: Synthetic oligonucleotide
gucuuuccacccugcgaca

SEQ ID NO: 776251 - RNA, 19 nt, Artificial Sequence
  Description of Artificial Sequence: Synthetic oligonucleotide
uccuuucaaggcagcccuu

SEQ ID NO: 776252 - RNA, 19 nt, Artificial Sequence
  Description of Artificial Sequence: Synthetic oligonucleotide
cauuauugacagagauacu

SEQ ID NO: 776253 - RNA, 19 nt, Artificial Sequence
  Description of Artificial Sequence: Synthetic oligonucleotide
ccggcaagagcgaagcuga

SEQ ID NO: 776254 - RNA, 19 nt, Artificial Sequence
  Description of Artificial Sequence: Synthetic oligonucleotide
auaccaacuuuggcuccca

SEQ ID NO: 776255 - RNA, 19 nt, Artificial Sequence
  Description of Artificial Sequence: Synthetic oligonucleotide
ggucucagcaggugacuga

SEQ ID NO: 776256 - RNA, 19 nt, Artificial Sequence
  Description of Artificial Sequence: Synthetic oligonucleotide
gucccgaugccgaucucac

SEQ ID NO: 776257 - RNA, 19 nt, Artificial Sequence
  Description of Artificial Sequence: Synthetic oligonucleotide
ggacaaggcaagcuaccaa

SEQ ID NO: 776258 - RNA, 19 nt, Artificial Sequence
  Description of Artificial Sequence: Synthetic oligonucleotide
gcgcuuauagccggaauga

SEQ ID NO: 776259 - RNA, 19 nt, Artificial Sequence
  Description of Artificial Sequence: Synthetic oligonucleotide
gagcgaagcugaauacuua

SEQ ID NO: 776260 - RNA, 19 nt, Artificial Sequence
  Description of Artificial Sequence: Synthetic oligonucleotide
augguccgacggauagacg

SEQ ID NO: 776261 - RNA, 19 nt, Artificial Sequence
  Description of Artificial Sequence: Synthetic oligonucleotide
gcucggacuuacauggcac

SEQ ID NO: 776262 - RNA, 19 nt, Artificial Sequence
  Description of Artificial Sequence: Synthetic oligonucleotide
ccgccaagcauaagcuccc

SEQ ID NO: 776263 - RNA, 19 nt, Artificial Sequence
  Description of Artificial Sequence: Synthetic oligonucleotide
ggaucccaagacccauaug

SEQ ID NO: 776264 - RNA, 19 nt, Artificial Sequence
  Description of Artificial Sequence: Synthetic oligonucleotide
cagccuuggcaaagccgac

SEQ ID NO: 776265 - RNA, 19 nt, Artificial Sequence
  Description of Artificial Sequence: Synthetic oligonucleotide
gccaguaucgaagaccacu

SEQ ID NO: 776266 - RNA, 19 nt, Artificial Sequence
  Description of Artificial Sequence: Synthetic oligonucleotide
ccgcccacuucugucaugg

SEQ ID NO: 776267 - RNA, 19 nt, Artificial Sequence
  Description of Artificial Sequence: Synthetic oligonucleotide
aggccuuucgggugacauu

SEQ ID NO: 776268 - RNA, 19 nt, Artificial Sequence
  Description of Artificial Sequence: Synthetic oligonucleotide
cuuaaggucgcgcgcuuau

SEQ ID NO: 776269 - RNA, 19 nt, Artificial Sequence
  Description of Artificial Sequence: Synthetic oligonucleotide
agccaguaucgaagaccac

SEQ ID NO: 776270 - RNA, 19 nt, Artificial Sequence
  Description of Artificial Sequence: Synthetic oligonucleotide
ggugaauccagcaggcuau

SEQ ID NO: 776271 - RNA, 19 nt, Artificial Sequence
  Description of Artificial Sequence: Synthetic oligonucleotide
gacuugccgcuguuguacu

SEQ ID NO: 776272 - RNA, 19 nt, Artificial Sequence
  Description of Artificial Sequence: Synthetic oligonucleotide
gguccgacggauagacgug

SEQ ID NO: 776273 - RNA, 19 nt, Artificial Sequence
  Description of Artificial Sequence: Synthetic oligonucleotide
aggccgacagcgagcagca

SEQ ID NO: 776274 - RNA, 19 nt, Artificial Sequence
  Description of Artificial Sequence: Synthetic oligonucleotide
guccgacggauagacguga

SEQ ID NO: 776275 - RNA, 19 nt, Artificial Sequence
  Description of Artificial Sequence: Synthetic oligonucleotide
acuuuggcucccagcggca

SEQ ID NO: 776276 - RNA, 19 nt, Artificial Sequence
  Description of Artificial Sequence: Synthetic oligonucleotide
cccggcaagagcgaagcug

SEQ ID NO: 776277 - RNA, 19 nt, Artificial Sequence
  Description of Artificial Sequence: Synthetic oligonucleotide
cagguuagaggagccagua

SEQ ID NO: 776278 - RNA, 19 nt, Artificial Sequence
  Description of Artificial Sequence: Synthetic oligonucleotide
uaaugccgugagugugcau

SEQ ID NO: 776279 - RNA, 19 nt, Artificial Sequence
  Description of Artificial Sequence: Synthetic oligonucleotide
acuuaaggucgcgcgcuua

SEQ ID NO: 776280 - RNA, 19 nt, Artificial Sequence
  Description of Artificial Sequence: Synthetic oligonucleotide
ccacauuauugacagagau

SEQ ID NO: 776281 - RNA, 19 nt, Artificial Sequence
  Description of Artificial Sequence: Synthetic oligonucleotide
gcaccgauacaguguccug

SEQ ID NO: 776282 - RNA, 19 nt, Artificial Sequence
  Description of Artificial Sequence: Synthetic oligonucleotide
ucccagcggcauagcccag

SEQ ID NO: 776283 - RNA, 19 nt, Artificial Sequence
  Description of Artificial Sequence: Synthetic oligonucleotide
ucgcgcgcuuauagccgga

SEQ ID NO: 776284 - RNA, 19 nt, Artificial Sequence
  Description of Artificial Sequence: Synthetic oligonucleotide
cgaucucaccauaguacug

SEQ ID NO: 776285 - RNA, 19 nt, Artificial Sequence
  Description of Artificial Sequence: Synthetic oligonucleotide
gcuaccaaaccaguagggu

SEQ ID NO: 776286 - RNA, 19 nt, Artificial Sequence
  Description of Artificial Sequence: Synthetic oligonucleotide
caauuccgccaagcauaag

SEQ ID NO: 776287 - RNA, 19 nt, Artificial Sequence
  Description of Artificial Sequence: Synthetic oligonucleotide
agacaucacccaggaucca

SEQ ID NO: 776288 - RNA, 19 nt, Artificial Sequence
  Description of Artificial Sequence: Synthetic oligonucleotide
uccugguugcucggacuua

SEQ ID NO: 776289 - RNA, 19 nt, Artificial Sequence
  Description of Artificial Sequence: Synthetic oligonucleotide
ccuccuagcuucagaguga

SEQ ID NO: 776290 - RNA, 19 nt, Artificial Sequence
  Description of Artificial Sequence: Synthetic oligonucleotide
ccgaucucaccauaguacu

SEQ ID NO: 776291 - RNA, 19 nt, Artificial Sequence
  Description of Artificial Sequence: Synthetic oligonucleotide
gguagcggcggcccggcaa

SEQ ID NO: 776292 - RNA, 19 nt, Artificial Sequence
  Description of Artificial Sequence: Synthetic oligonucleotide
cagaucgucuuuccacccu

SEQ ID NO: 776293 - RNA, 19 nt, Artificial Sequence
  Description of Artificial Sequence: Synthetic oligonucleotide
ggcaccgauacaguguccu

SEQ ID NO: 776294 - RNA, 19 nt, Artificial Sequence
  Description of Artificial Sequence: Synthetic oligonucleotide
cugcgacaccuugaguaca

SEQ ID NO: 776295 - RNA, 19 nt, Artificial Sequence
  Description of Artificial Sequence: Synthetic oligonucleotide
gacuuacauggcaccgaua

SEQ ID NO: 776296 - RNA, 19 nt, Artificial Sequence
  Description of Artificial Sequence: Synthetic oligonucleotide
ccgacccuauuguugucuc

SEQ ID NO: 776297 - RNA, 19 nt, Artificial Sequence
  Description of Artificial Sequence: Synthetic oligonucleotide
ccgacggauagacgugaac

SEQ ID NO: 776298 - RNA, 19 nt, Artificial Sequence
  Description of Artificial Sequence: Synthetic oligonucleotide
caguaucgaagaccacugu

SEQ ID NO: 776299 - RNA, 19 nt, Artificial Sequence
  Description of Artificial Sequence: Synthetic oligonucleotide
ugguagcggcggcccggca

SEQ ID NO: 776300 - RNA, 19 nt, Artificial Sequence
  Description of Artificial Sequence: Synthetic oligonucleotide
caguguaguaggugccaau

SEQ ID NO: 776301 - RNA, 19 nt, Artificial Sequence
  Description of Artificial Sequence: Synthetic oligonucleotide
cugucaugguccgacggau

SEQ ID NO: 776302 - RNA, 19 nt, Artificial Sequence
  Description of Artificial Sequence: Synthetic oligonucleotide
cuccugguugcucggacuu

SEQ ID NO: 776303 - RNA, 19 nt, Artificial Sequence
  Description of Artificial Sequence: Synthetic oligonucleotide
gcggcggcccggcaagagc

SEQ ID NO: 776304 - RNA, 19 nt, Artificial Sequence
  Description of Artificial Sequence: Synthetic oligonucleotide
ggggucccgaugccgaucu

SEQ ID NO: 776305 - RNA, 19 nt, Artificial Sequence
  Description of Artificial Sequence: Synthetic oligonucleotide
cccauaugccugcuuugga

SEQ ID NO: 776306 - RNA, 19 nt, Artificial Sequence
  Description of Artificial Sequence: Synthetic oligonucleotide
cguuccugugucuacgaua

SEQ ID NO: 776307 - RNA, 19 nt, Artificial Sequence
  Description of Artificial Sequence: Synthetic oligonucleotide
cccagcggcauagcccagg

SEQ ID NO: 776308 - RNA, 19 nt, Artificial Sequence
  Description of Artificial Sequence: Synthetic oligonucleotide
cgacggauagacgugaacu

SEQ ID NO: 776309 - RNA, 19 nt, Artificial Sequence
  Description of Artificial Sequence: Synthetic oligonucleotide
cgcuuauagccggaaugac

SEQ ID NO: 776310 - RNA, 19 nt, Artificial Sequence
  Description of Artificial Sequence: Synthetic oligonucleotide
agaggcuaccugagccaua

SEQ ID NO: 776311 - RNA, 19 nt, Artificial Sequence
  Description of Artificial Sequence: Synthetic oligonucleotide
ccacccugcgacaccuuga

SEQ ID NO: 776312 - RNA, 19 nt, Artificial Sequence
  Description of Artificial Sequence: Synthetic oligonucleotide
gcucaguaaugccgugagu

SEQ ID NO: 776313 - RNA, 19 nt, Artificial Sequence
  Description of Artificial Sequence: Synthetic oligonucleotide
ccagcggcauagcccagga

SEQ ID NO: 776314 - RNA, 19 nt, Artificial Sequence
  Description of Artificial Sequence: Synthetic oligonucleotide
ccacucaggcagaucgucu

SEQ ID NO: 776315 - RNA, 19 nt, Artificial Sequence
  Description of Artificial Sequence: Synthetic oligonucleotide
cggacuuacauggcaccga

SEQ ID NO: 776316 - RNA, 19 nt, Artificial Sequence
  Description of Artificial Sequence: Synthetic oligonucleotide
gccuuucgggugacauuca

SEQ ID NO: 776317 - RNA, 19 nt, Artificial Sequence
  Description of Artificial Sequence: Synthetic oligonucleotide
gggguauguccauccccau

SEQ ID NO: 776318 - RNA, 19 nt, Artificial Sequence
  Description of Artificial Sequence: Synthetic oligonucleotide
ggcugcgaugaaugugauu

SEQ ID NO: 776319 - RNA, 19 nt, Artificial Sequence
  Description of Artificial Sequence: Synthetic oligonucleotide
gcgcgcuuauagccggaau

SEQ ID NO: 776320 - RNA, 19 nt, Artificial Sequence
  Description of Artificial Sequence: Synthetic oligonucleotide
gcgacaccuugaguacaua

SEQ ID NO: 776321 - RNA, 19 nt, Artificial Sequence
  Description of Artificial Sequence: Synthetic oligonucleotide
cagcggcauagcccaggau

SEQ ID NO: 776322 - RNA, 19 nt, Artificial Sequence
  Description of Artificial Sequence: Synthetic oligonucleotide
ccgaugccgaucucaccau

SEQ ID NO: 776323 - RNA, 19 nt, Artificial Sequence
  Description of Artificial Sequence: Synthetic oligonucleotide
cgaugccgaucucaccaua

SEQ ID NO: 776324 - RNA, 19 nt, Artificial Sequence
  Description of Artificial Sequence: Synthetic oligonucleotide
cgacccuauuguugucucu

SEQ ID NO: 776325 - RNA, 19 nt, Artificial Sequence
  Description of Artificial Sequence: Synthetic oligonucleotide
ccuucucacaagggaucau

SEQ ID NO: 776326 - RNA, 19 nt, Artificial Sequence
  Description of Artificial Sequence: Synthetic oligonucleotide
cgcgcgcuuauagccggaa

SEQ ID NO: 776327 - RNA, 19 nt, Artificial Sequence
  Description of Artificial Sequence: Synthetic oligonucleotide
gcccgguggggucccuguu

SEQ ID NO: 776328 - RNA, 19 nt, Artificial Sequence
  Description of Artificial Sequence: Synthetic oligonucleotide
ccaaaccaguaggguccuu

SEQ ID NO: 776329 - RNA, 19 nt, Artificial Sequence
  Description of Artificial Sequence: Synthetic oligonucleotide
ugagagaacacccaguggg

SEQ ID NO: 776330 - RNA, 19 nt, Artificial Sequence
  Description of Artificial Sequence: Synthetic oligonucleotide
uauucuaccacuuaugugu

SEQ ID NO: 776331 - RNA, 19 nt, Artificial Sequence
  Description of Artificial Sequence: Synthetic oligonucleotide
uagaauuacaaccacagac

SEQ ID NO: 776332 - RNA, 19 nt, Artificial Sequence
  Description of Artificial Sequence: Synthetic oligonucleotide
aauguauuccaacaaagcu

SEQ ID NO: 776333 - RNA, 19 nt, Artificial Sequence
  Description of Artificial Sequence: Synthetic oligonucleotide
aagucuaucuugcagaugu

SEQ ID NO: 776334 - RNA, 19 nt, Artificial Sequence
  Description of Artificial Sequence: Synthetic oligonucleotide
uguuaaaacagacaacaug

SEQ ID NO: 776335 - RNA, 19 nt, Artificial Sequence
  Description of Artificial Sequence: Synthetic oligonucleotide
aaacacaccauuaggauac

SEQ ID NO: 776336 - RNA, 19 nt, Artificial Sequence
  Description of Artificial Sequence: Synthetic oligonucleotide
aaaauaaagacguggaguu

SEQ ID NO: 776337 - RNA, 19 nt, Artificial Sequence
  Description of Artificial Sequence: Synthetic oligonucleotide
uuaacuagugaacagugca

SEQ ID NO: 776338 - RNA, 19 nt, Artificial Sequence
  Description of Artificial Sequence: Synthetic oligonucleotide
aagcgaucaagccaucugc

SEQ ID NO: 776339 - RNA, 19 nt, Artificial Sequence
  Description of Artificial Sequence: Synthetic oligonucleotide
aagaacacuaucuauacuu

SEQ ID NO: 776340 - RNA, 19 nt, Artificial Sequence
  Description of Artificial Sequence: Synthetic oligonucleotide
cacauauuggaacugaggg

SEQ ID NO: 776341 - RNA, 19 nt, Artificial Sequence
  Description of Artificial Sequence: Synthetic oligonucleotide
uuaguagcaucuuuuacag

SEQ ID NO: 776342 - RNA, 19 nt, Artificial Sequence
  Description of Artificial Sequence: Synthetic oligonucleotide
uuauuuagaaaauggacuc

SEQ ID NO: 776343 - RNA, 19 nt, Artificial Sequence
  Description of Artificial Sequence: Synthetic oligonucleotide
cuaucuauacuuuagcgac

SEQ ID NO: 776344 - RNA, 19 nt, Artificial Sequence
  Description of Artificial Sequence: Synthetic oligonucleotide
aaucaauuauucuaccacu

SEQ ID NO: 776345 - RNA, 19 nt, Artificial Sequence
  Description of Artificial Sequence: Synthetic oligonucleotide
aacuagugaacagugcagc

SEQ ID NO: 776346 - RNA, 19 nt, Artificial Sequence
  Description of Artificial Sequence: Synthetic oligonucleotide
uccauuuagauuacggaug

SEQ ID NO: 776347 - RNA, 19 nt, Artificial Sequence
  Description of Artificial Sequence: Synthetic oligonucleotide
uuuaauagucaucuccucu

SEQ ID NO: 776348 - RNA, 19 nt, Artificial Sequence
  Description of Artificial Sequence: Synthetic oligonucleotide
acuaguuuaauagucaucu

SEQ ID NO: 776349 - RNA, 19 nt, Artificial Sequence
  Description of Artificial Sequence: Synthetic oligonucleotide
acuguuaaaacagacaaca

SEQ ID NO: 776350 - RNA, 19 nt, Artificial Sequence
  Description of Artificial Sequence: Synthetic oligonucleotide
uccaaaagcaucucuuagg

SEQ ID NO: 776351 - RNA, 19 nt, Artificial Sequence
  Description of Artificial Sequence: Synthetic oligonucleotide
ucuuaacuagugaacagug

SEQ ID NO: 776352 - RNA, 19 nt, Artificial Sequence
  Description of Artificial Sequence: Synthetic oligonucleotide
agaacagucuuccaacuuc

SEQ ID NO: 776353 - RNA, 19 nt, Artificial Sequence
  Description of Artificial Sequence: Synthetic oligonucleotide
auuauucuaccacuuaugu

SEQ ID NO: 776354 - RNA, 19 nt, Artificial Sequence
  Description of Artificial Sequence: Synthetic oligonucleotide
uuuacagcuuuuaauaaua

SEQ ID NO: 776355 - RNA, 19 nt, Artificial Sequence
  Description of Artificial Sequence: Synthetic oligonucleotide
aaugguauguucaaacugu

SEQ ID NO: 776356 - RNA, 19 nt, Artificial Sequence
  Description of Artificial Sequence: Synthetic oligonucleotide
gaaugguauguucaaacug

SEQ ID NO: 776357 - RNA, 19 nt, Artificial Sequence
  Description of Artificial Sequence: Synthetic oligonucleotide
acuaucuauacuuuagcga

SEQ ID NO: 776358 - RNA, 19 nt, Artificial Sequence
  Description of Artificial Sequence: Synthetic oligonucleotide
guaaggaauucuuaacuag

SEQ ID NO: 776359 - RNA, 19 nt, Artificial Sequence
  Description of Artificial Sequence: Synthetic oligonucleotide
acuuauguguguuccaaag

SEQ ID NO: 776360 - RNA, 19 nt, Artificial Sequence
  Description of Artificial Sequence: Synthetic oligonucleotide
ucuguuugaaccuuugguc

SEQ ID NO: 776361 - RNA, 19 nt, Artificial Sequence
  Description of Artificial Sequence: Synthetic oligonucleotide
uauaaggcccaaucgaaug

SEQ ID NO: 776362 - RNA, 19 nt, Artificial Sequence
  Description of Artificial Sequence: Synthetic oligonucleotide
agcacaaucaauuauucua

SEQ ID NO: 776363 - RNA, 19 nt, Artificial Sequence
  Description of Artificial Sequence: Synthetic oligonucleotide
ugcuaucucauccacugag

SEQ ID NO: 776364 - RNA, 19 nt, Artificial Sequence
  Description of Artificial Sequence: Synthetic oligonucleotide
cacuaucuauacuuuagcg

SEQ ID NO: 776365 - RNA, 19 nt, Artificial Sequence
  Description of Artificial Sequence: Synthetic oligonucleotide
ucuaacuugucgaugugcu

SEQ ID NO: 776366 - RNA, 19 nt, Artificial Sequence
  Description of Artificial Sequence: Synthetic oligonucleotide
uccuauaaggcccaaucga

SEQ ID NO: 776367 - RNA, 19 nt, Artificial Sequence
  Description of Artificial Sequence: Synthetic oligonucleotide
uugggaaacacaccauuag

SEQ ID NO: 776368 - RNA, 19 nt, Artificial Sequence
  Description of Artificial Sequence: Synthetic oligonucleotide
gguauguucaaacugugcc

SEQ ID NO: 776369 - RNA, 19 nt, Artificial Sequence
  Description of Artificial Sequence: Synthetic oligonucleotide
cuguuugaaccuuuggucc

SEQ ID NO: 776370 - RNA, 19 nt, Artificial Sequence
  Description of Artificial Sequence: Synthetic oligonucleotide
aacccauucucuuuuauua

SEQ ID NO: 776371 - RNA, 19 nt, Artificial Sequence
  Description of Artificial Sequence: Synthetic oligonucleotide
uggauaaagguauuacaca

SEQ ID NO: 776372 - RNA, 19 nt, Artificial Sequence
  Description of Artificial Sequence: Synthetic oligonucleotide
uguaaugugcagcacaguu

SEQ ID NO: 776373 - RNA, 19 nt, Artificial Sequence
  Description of Artificial Sequence: Synthetic oligonucleotide
guuucaauggcauacaccu

SEQ ID NO: 776374 - RNA, 19 nt, Artificial Sequence
  Description of Artificial Sequence: Synthetic oligonucleotide
uuuucgagaacagucuucc

SEQ ID NO: 776375 - RNA, 19 nt, Artificial Sequence
  Description of Artificial Sequence: Synthetic oligonucleotide
gagacacuuaacauuaaag

SEQ ID NO: 776376 - RNA, 19 nt, Artificial Sequence
  Description of Artificial Sequence: Synthetic oligonucleotide
ucucuuuuauuaguuuucg

SEQ ID NO: 776377 - RNA, 19 nt, Artificial Sequence
  Description of Artificial Sequence: Synthetic oligonucleotide
acuguaagacuguuguguc

SEQ ID NO: 776378 - RNA, 19 nt, Artificial Sequence
  Description of Artificial Sequence: Synthetic oligonucleotide
uguugcacugcugacacag

SEQ ID NO: 776379 - RNA, 19 nt, Artificial Sequence
  Description of Artificial Sequence: Synthetic oligonucleotide
uuggacuaguuuaauaguc

SEQ ID NO: 776380 - RNA, 19 nt, Artificial Sequence
  Description of Artificial Sequence: Synthetic oligonucleotide
ugaacgacaccuuuuccug

SEQ ID NO: 776381 - RNA, 19 nt, Artificial Sequence
  Description of Artificial Sequence: Synthetic oligonucleotide
uguccauuuagauuacgga

SEQ ID NO: 776382 - RNA, 19 nt, Artificial Sequence
  Description of Artificial Sequence: Synthetic oligonucleotide
ugauccuuuaaugucacac

SEQ ID NO: 776383 - RNA, 19 nt, Artificial Sequence
  Description of Artificial Sequence: Synthetic oligonucleotide
uuauucuaccacuuaugug

SEQ ID NO: 776384 - RNA, 19 nt, Artificial Sequence
  Description of Artificial Sequence: Synthetic oligonucleotide
uuuauuaguuuucgagaac

SEQ ID NO: 776385 - RNA, 19 nt, Artificial Sequence
  Description of Artificial Sequence: Synthetic oligonucleotide
guugagagaacacccagug

SEQ ID NO: 776386 - RNA, 19 nt, Artificial Sequence
  Description of Artificial Sequence: Synthetic oligonucleotide
uuuuacagcuuuuaauaau

SEQ ID NO: 776387 - RNA, 19 nt, Artificial Sequence
  Description of Artificial Sequence: Synthetic oligonucleotide
uggacuaguuuaauaguca

SEQ ID NO: 776388 - RNA, 19 nt, Artificial Sequence
  Description of Artificial Sequence: Synthetic oligonucleotide
uguaaggaauucuuaacua

SEQ ID NO: 776389 - RNA, 19 nt, Artificial Sequence
  Description of Artificial Sequence: Synthetic oligonucleotide
uacuguaagacuguugugu

SEQ ID NO: 776390 - RNA, 19 nt, Artificial Sequence
  Description of Artificial Sequence: Synthetic oligonucleotide
acaaucaauuauucuacca

SEQ ID NO: 776391 - RNA, 19 nt, Artificial Sequence
  Description of Artificial Sequence: Synthetic oligonucleotide
gauccuauaaggcccaauc

SEQ ID NO: 776392 - RNA, 19 nt, Artificial Sequence
  Description of Artificial Sequence: Synthetic oligonucleotide
auucagagcauucaaggaa

SEQ ID NO: 776393 - RNA, 19 nt, Artificial Sequence
  Description of Artificial Sequence: Synthetic oligonucleotide
uuuagauuacggauggguu

SEQ ID NO: 776394 - RNA, 19 nt, Artificial Sequence
  Description of Artificial Sequence: Synthetic oligonucleotide
ugaucuaaugcuuucuuuu

SEQ ID NO: 776395 - RNA, 19 nt, Artificial Sequence
  Description of Artificial Sequence: Synthetic oligonucleotide
cagaaugguauguucaaac

SEQ ID NO: 776396 - RNA, 19 nt, Artificial Sequence
  Description of Artificial Sequence: Synthetic oligonucleotide
caaucgaauguccauuuag

SEQ ID NO: 776397 - RNA, 19 nt, Artificial Sequence
  Description of Artificial Sequence: Synthetic oligonucleotide
uggauaugggucuacuaug

SEQ ID NO: 776398 - RNA, 19 nt, Artificial Sequence
  Description of Artificial Sequence: Synthetic oligonucleotide
augaacgacaccuuuuccu

SEQ ID NO: 776399 - RNA, 19 nt, Artificial Sequence
  Description of Artificial Sequence: Synthetic oligonucleotide
ucggaagucauuccaaauc

SEQ ID NO: 776400 - RNA, 19 nt, Artificial Sequence
  Description of Artificial Sequence: Synthetic oligonucleotide
uaguuuucgagaacagucu

SEQ ID NO: 776401 - RNA, 19 nt, Artificial Sequence
  Description of Artificial Sequence: Synthetic oligonucleotide
auuuagauuacggaugggu

SEQ ID NO: 776402 - RNA, 19 nt, Artificial Sequence
  Description of Artificial Sequence: Synthetic oligonucleotide
acuuuagcgacucucugcu

SEQ ID NO: 776403 - RNA, 19 nt, Artificial Sequence
  Description of Artificial Sequence: Synthetic oligonucleotide
cuuaacuagugaacagugc

SEQ ID NO: 776404 - RNA, 19 nt, Artificial Sequence
  Description of Artificial Sequence: Synthetic oligonucleotide
aucccagcacacuuuauuc

SEQ ID NO: 776405 - RNA, 19 nt, Artificial Sequence
  Description of Artificial Sequence: Synthetic oligonucleotide
uucgagaacagucuuccaa

SEQ ID NO: 776406 - RNA, 19 nt, Artificial Sequence
  Description of Artificial Sequence: Synthetic oligonucleotide
agaaugguauguucaaacu

SEQ ID NO: 776407 - RNA, 19 nt, Artificial Sequence
  Description of Artificial Sequence: Synthetic oligonucleotide
ugguauaauguauuccaac

SEQ ID NO: 776408 - RNA, 19 nt, Artificial Sequence
  Description of Artificial Sequence: Synthetic oligonucleotide
aacagaaugguauguucaa

SEQ ID NO: 776409 - RNA, 19 nt, Artificial Sequence
  Description of Artificial Sequence: Synthetic oligonucleotide
uugagagaacacccagugg

SEQ ID NO: 776410 - RNA, 19 nt, Artificial Sequence
  Description of Artificial Sequence: Synthetic oligonucleotide
uacuuuagcgacucucugc

SEQ ID NO: 776411 - RNA, 19 nt, Artificial Sequence
  Description of Artificial Sequence: Synthetic oligonucleotide
acuagccugaucuaaugcu

SEQ ID NO: 776412 - RNA, 19 nt, Artificial Sequence
  Description of Artificial Sequence: Synthetic oligonucleotide
uuaaugucacacaguggug

SEQ ID NO: 776413 - RNA, 19 nt, Artificial Sequence
  Description of Artificial Sequence: Synthetic oligonucleotide
uuagauuacggauggguuu

SEQ ID NO: 776414 - RNA, 19 nt, Artificial Sequence
  Description of Artificial Sequence: Synthetic oligonucleotide
cugacgacuucuuuacagg

SEQ ID NO: 776415 - RNA, 19 nt, Artificial Sequence
  Description of Artificial Sequence: Synthetic oligonucleotide
aaucgaauguccauuuaga

SEQ ID NO: 776416 - RNA, 19 nt, Artificial Sequence
  Description of Artificial Sequence: Synthetic oligonucleotide
ucgagaacagucuuccaac

SEQ ID NO: 776417 - RNA, 19 nt, Artificial Sequence
  Description of Artificial Sequence: Synthetic oligonucleotide
acugugccguguaugaucc

SEQ ID NO: 776418 - RNA, 19 nt, Artificial Sequence
  Description of Artificial Sequence: Synthetic oligonucleotide
uuacggauggguuucacuu

SEQ ID NO: 776419 - RNA, 19 nt, Artificial Sequence
  Description of Artificial Sequence: Synthetic oligonucleotide
uguggguggguauucacac

SEQ ID NO: 776420 - RNA, 19 nt, Artificial Sequence
  Description of Artificial Sequence: Synthetic oligonucleotide
uucuuaacuagugaacagu

SEQ ID NO: 776421 - RNA, 19 nt, Artificial Sequence
  Description of Artificial Sequence: Synthetic oligonucleotide
ucaauuauucuaccacuua

SEQ ID NO: 776422 - RNA, 19 nt, Artificial Sequence
  Description of Artificial Sequence: Synthetic oligonucleotide
acagguccacuguuaaaac

SEQ ID NO: 776423 - RNA, 19 nt, Artificial Sequence
  Description of Artificial Sequence: Synthetic oligonucleotide
aucuauacuuuagcgacuc

SEQ ID NO: 776424 - RNA, 19 nt, Artificial Sequence
  Description of Artificial Sequence: Synthetic oligonucleotide
ugcaaauuacuugugguau

SEQ ID NO: 776425 - RNA, 19 nt, Artificial Sequence
  Description of Artificial Sequence: Synthetic oligonucleotide
acgggagagacacuuaaca

SEQ ID NO: 776426 - RNA, 19 nt, Artificial Sequence
  Description of Artificial Sequence: Synthetic oligonucleotide
uuacauggagacaguuugc

SEQ ID NO: 776427 - RNA, 19 nt, Artificial Sequence
  Description of Artificial Sequence: Synthetic oligonucleotide
auguguaaggaauucuuaa

SEQ ID NO: 776428 - RNA, 19 nt, Artificial Sequence
  Description of Artificial Sequence: Synthetic oligonucleotide
aacacccagugggaaacgc

SEQ ID NO: 776429 - RNA, 19 nt, Artificial Sequence
  Description of Artificial Sequence: Synthetic oligonucleotide
gacgcaacagaaugguaug

SEQ ID NO: 776430 - RNA, 19 nt, Artificial Sequence
  Description of Artificial Sequence: Synthetic oligonucleotide
cauugggcguguaaugugc

SEQ ID NO: 776431 - RNA, 19 nt, Artificial Sequence
  Description of Artificial Sequence: Synthetic oligonucleotide
uccuagacgggagagacac

SEQ ID NO: 776432 - RNA, 19 nt, Artificial Sequence
  Description of Artificial Sequence: Synthetic oligonucleotide
auuaaaguccugaaagccu

SEQ ID NO: 776433 - RNA, 19 nt, Artificial Sequence
  Description of Artificial Sequence: Synthetic oligonucleotide
cagcguggauccuauaagg

SEQ ID NO: 776434 - RNA, 19 nt, Artificial Sequence
  Description of Artificial Sequence: Synthetic oligonucleotide
uguuugaaccuuugguccu

SEQ ID NO: 776435 - RNA, 19 nt, Artificial Sequence
  Description of Artificial Sequence: Synthetic oligonucleotide
acuucguaggauuccauaa

SEQ ID NO: 776436 - RNA, 19 nt, Artificial Sequence
  Description of Artificial Sequence: Synthetic oligonucleotide
cuugugguauaauguauuc

SEQ ID NO: 776437 - RNA, 19 nt, Artificial Sequence
  Description of Artificial Sequence: Synthetic oligonucleotide
gguuggacgcaacagaaug

SEQ ID NO: 776438 - RNA, 19 nt, Artificial Sequence
  Description of Artificial Sequence: Synthetic oligonucleotide
uugugguauaauguauucc

SEQ ID NO: 776439 - RNA, 19 nt, Artificial Sequence
  Description of Artificial Sequence: Synthetic oligonucleotide
gauaugggucuacuaugcc

SEQ ID NO: 776440 - RNA, 19 nt, Artificial Sequence
  Description of Artificial Sequence: Synthetic oligonucleotide
auaaggcccaaucgaaugu

SEQ ID NO: 776441 - RNA, 19 nt, Artificial Sequence
  Description of Artificial Sequence: Synthetic oligonucleotide
uugcaaauuacuuguggua

SEQ ID NO: 776442 - RNA, 19 nt, Artificial Sequence
  Description of Artificial Sequence: Synthetic oligonucleotide
gucgaugugcuucugcggc

SEQ ID NO: 776443 - RNA, 19 nt, Artificial Sequence
  Description of Artificial Sequence: Synthetic oligonucleotide
uaucuauacuuuagcgacu

SEQ ID NO: 776444 - RNA, 19 nt, Artificial Sequence
  Description of Artificial Sequence: Synthetic oligonucleotide
uucuaacuugucgaugugc

SEQ ID NO: 776445 - RNA, 19 nt, Artificial Sequence
  Description of Artificial Sequence: Synthetic oligonucleotide
ucccaagcgaucaagccau

SEQ ID NO: 776446 - RNA, 19 nt, Artificial Sequence
  Description of Artificial Sequence: Synthetic oligonucleotide
ucauguagugugagcauuc

SEQ ID NO: 776447 - RNA, 19 nt, Artificial Sequence
  Description of Artificial Sequence: Synthetic oligonucleotide
ugcuuagaauuacaaccac

SEQ ID NO: 776448 - RNA, 19 nt, Artificial Sequence
  Description of Artificial Sequence: Synthetic oligonucleotide
uacuugugguauaauguau

SEQ ID NO: 776449 - RNA, 19 nt, Artificial Sequence
  Description of Artificial Sequence: Synthetic oligonucleotide
uuccugugcuaccaaaggu

SEQ ID NO: 776450 - RNA, 19 nt, Artificial Sequence
  Description of Artificial Sequence: Synthetic oligonucleotide
uacagguuggacgcaacag

SEQ ID NO: 776451 - RNA, 19 nt, Artificial Sequence
  Description of Artificial Sequence: Synthetic oligonucleotide
aaggcccaaucgaaugucc

SEQ ID NO: 776452 - RNA, 19 nt, Artificial Sequence
  Description of Artificial Sequence: Synthetic oligonucleotide
uccgaucugaaaaugucuu

SEQ ID NO: 776453 - RNA, 19 nt, Artificial Sequence
  Description of Artificial Sequence: Synthetic oligonucleotide
guauaauguauuccaacaa

SEQ ID NO: 776454 - RNA, 19 nt, Artificial Sequence
  Description of Artificial Sequence: Synthetic oligonucleotide
uuagcgacucucugcuuag

SEQ ID NO: 776455 - RNA, 19 nt, Artificial Sequence
  Description of Artificial Sequence: Synthetic oligonucleotide
uucucccaagcgaucaagc

SEQ ID NO: 776456 - RNA, 19 nt, Artificial Sequence
  Description of Artificial Sequence: Synthetic oligonucleotide
uccagcguggauccuauaa

SEQ ID NO: 776457 - RNA, 19 nt, Artificial Sequence
  Description of Artificial Sequence: Synthetic oligonucleotide
ugacgacuucuuuacaggu

SEQ ID NO: 776458 - RNA, 19 nt, Artificial Sequence
  Description of Artificial Sequence: Synthetic oligonucleotide
ucccagcacacuuuauucc

SEQ ID NO: 776459 - RNA, 19 nt, Artificial Sequence
  Description of Artificial Sequence: Synthetic oligonucleotide
guagugugagcauuccaug

SEQ ID NO: 776460 - RNA, 19 nt, Artificial Sequence
  Description of Artificial Sequence: Synthetic oligonucleotide
uccugugcuaccaaagguu

SEQ ID NO: 776461 - RNA, 19 nt, Artificial Sequence
  Description of Artificial Sequence: Synthetic oligonucleotide
gagcgacggagugagagcg

SEQ ID NO: 776462 - RNA, 19 nt, Artificial Sequence
  Description of Artificial Sequence: Synthetic oligonucleotide
gaucaagccaucugcggca

SEQ ID NO: 776463 - RNA, 19 nt, Artificial Sequence
  Description of Artificial Sequence: Synthetic oligonucleotide
guauuacacagguccacug

SEQ ID NO: 776464 - RNA, 19 nt, Artificial Sequence
  Description of Artificial Sequence: Synthetic oligonucleotide
cugcuuagaauuacaacca

SEQ ID NO: 776465 - RNA, 19 nt, Artificial Sequence
  Description of Artificial Sequence: Synthetic oligonucleotide
agaucucuaucauugucau

SEQ ID NO: 776466 - RNA, 19 nt, Artificial Sequence
  Description of Artificial Sequence: Synthetic oligonucleotide
cuauacuuuagcgacucuc

SEQ ID NO: 776467 - RNA, 19 nt, Artificial Sequence
  Description of Artificial Sequence: Synthetic oligonucleotide
uccacgcccgccauguugc

SEQ ID NO: 776468 - RNA, 19 nt, Artificial Sequence
  Description of Artificial Sequence: Synthetic oligonucleotide
acuagugaacagugcagca

SEQ ID NO: 776469 - RNA, 19 nt, Artificial Sequence
  Description of Artificial Sequence: Synthetic oligonucleotide
ucgaggucgccauucaggu

SEQ ID NO: 776470 - RNA, 19 nt, Artificial Sequence
  Description of Artificial Sequence: Synthetic oligonucleotide
cuugguaagucuucccauc

SEQ ID NO: 776471 - RNA, 19 nt, Artificial Sequence
  Description of Artificial Sequence: Synthetic oligonucleotide
guuggacgcaacagaaugg

SEQ ID NO: 776472 - RNA, 19 nt, Artificial Sequence
  Description of Artificial Sequence: Synthetic oligonucleotide
cacuuguaguucuccaagc

SEQ ID NO: 776473 - RNA, 19 nt, Artificial Sequence
  Description of Artificial Sequence: Synthetic oligonucleotide
auuacggauggguuucacu

SEQ ID NO: 776474 - RNA, 19 nt, Artificial Sequence
  Description of Artificial Sequence: Synthetic oligonucleotide
ccauuuagauuacggaugg

SEQ ID NO: 776475 - RNA, 19 nt, Artificial Sequence
  Description of Artificial Sequence: Synthetic oligonucleotide
ugauccagcucauaacaua

SEQ ID NO: 776476 - RNA, 19 nt, Artificial Sequence
  Description of Artificial Sequence: Synthetic oligonucleotide
auaaagacguggaguuggc

SEQ ID NO: 776477 - RNA, 19 nt, Artificial Sequence
  Description of Artificial Sequence: Synthetic oligonucleotide
cacuuuauuccaguauuag

SEQ ID NO: 776478 - RNA, 19 nt, Artificial Sequence
  Description of Artificial Sequence: Synthetic oligonucleotide
uacacagguccacuguuaa

SEQ ID NO: 776479 - RNA, 19 nt, Artificial Sequence
  Description of Artificial Sequence: Synthetic oligonucleotide
uucacuagccugaucuaau

SEQ ID NO: 776480 - RNA, 19 nt, Artificial Sequence
  Description of Artificial Sequence: Synthetic oligonucleotide
cuagugaacagugcagcag

SEQ ID NO: 776481 - RNA, 19 nt, Artificial Sequence
  Description of Artificial Sequence: Synthetic oligonucleotide
agguauuacacagguccac

SEQ ID NO: 776482 - RNA, 19 nt, Artificial Sequence
  Description of Artificial Sequence: Synthetic oligonucleotide
uagauuacggauggguuuc

SEQ ID NO: 776483 - RNA, 19 nt, Artificial Sequence
  Description of Artificial Sequence: Synthetic oligonucleotide
uggcauacaccucuccuuc

SEQ ID NO: 776484 - RNA, 19 nt, Artificial Sequence
  Description of Artificial Sequence: Synthetic oligonucleotide
gcugacgacuucuuuacag

SEQ ID NO: 776485 - RNA, 19 nt, Artificial Sequence
  Description of Artificial Sequence: Synthetic oligonucleotide
uccaugucgucaugaacga

SEQ ID NO: 776486 - RNA, 19 nt, Artificial Sequence
  Description of Artificial Sequence: Synthetic oligonucleotide
cauugaugacauuuaacaa

SEQ ID NO: 776487 - RNA, 19 nt, Artificial Sequence
  Description of Artificial Sequence: Synthetic oligonucleotide
auuaggauacaggucacau

SEQ ID NO: 776488 - RNA, 19 nt, Artificial Sequence
  Description of Artificial Sequence: Synthetic oligonucleotide
uuccaacaaagcuuagaaa

SEQ ID NO: 776489 - RNA, 19 nt, Artificial Sequence
  Description of Artificial Sequence: Synthetic oligonucleotide
gucuacuaugcccaaguca

SEQ ID NO: 776490 - RNA, 19 nt, Artificial Sequence
  Description of Artificial Sequence: Synthetic oligonucleotide
aucgaggucgccauucagg

SEQ ID NO: 776491 - RNA, 19 nt, Artificial Sequence
  Description of Artificial Sequence: Synthetic oligonucleotide
uacuaugcccaagucacac

SEQ ID NO: 776492 - RNA, 19 nt, Artificial Sequence
  Description of Artificial Sequence: Synthetic oligonucleotide
ucaaucccagcacacuuua

SEQ ID NO: 776493 - RNA, 19 nt, Artificial Sequence
  Description of Artificial Sequence: Synthetic oligonucleotide
cacuagccugaucuaaugc

SEQ ID NO: 776494 - RNA, 19 nt, Artificial Sequence
  Description of Artificial Sequence: Synthetic oligonucleotide
guugcaaauuacuuguggu

SEQ ID NO: 776495 - RNA, 19 nt, Artificial Sequence
  Description of Artificial Sequence: Synthetic oligonucleotide
cuccuugaaacauggauaa

SEQ ID NO: 776496 - RNA, 19 nt, Artificial Sequence
  Description of Artificial Sequence: Synthetic oligonucleotide
uuaacccauucucuuuuau

SEQ ID NO: 776497 - RNA, 19 nt, Artificial Sequence
  Description of Artificial Sequence: Synthetic oligonucleotide
gacuguugugucuccagca

SEQ ID NO: 776498 - RNA, 19 nt, Artificial Sequence
  Description of Artificial Sequence: Synthetic oligonucleotide
caagcgaucaagccaucug

SEQ ID NO: 776499 - RNA, 19 nt, Artificial Sequence
  Description of Artificial Sequence: Synthetic oligonucleotide
cuggauguagucauucaga

SEQ ID NO: 776500 - RNA, 19 nt, Artificial Sequence
  Description of Artificial Sequence: Synthetic oligonucleotide
uuaggauacaggucacaua

SEQ ID NO: 776501 - RNA, 19 nt, Artificial Sequence
  Description of Artificial Sequence: Synthetic oligonucleotide
caugaacgacaccuuuucc

SEQ ID NO: 776502 - RNA, 19 nt, Artificial Sequence
  Description of Artificial Sequence: Synthetic oligonucleotide
augcccaagucacacagau

SEQ ID NO: 776503 - RNA, 19 nt, Artificial Sequence
  Description of Artificial Sequence: Synthetic oligonucleotide
aagguauuacacaggucca

SEQ ID NO: 776504 - RNA, 19 nt, Artificial Sequence
  Description of Artificial Sequence: Synthetic oligonucleotide
aaagucuaucuugcagaug

SEQ ID NO: 776505 - RNA, 19 nt, Artificial Sequence
  Description of Artificial Sequence: Synthetic oligonucleotide
augucgucaugaacgacac

SEQ ID NO: 776506 - RNA, 19 nt, Artificial Sequence
  Description of Artificial Sequence: Synthetic oligonucleotide
ugucaucccaggcuugauc

SEQ ID NO: 776507 - RNA, 19 nt, Artificial Sequence
  Description of Artificial Sequence: Synthetic oligonucleotide
aucaaacuccuugaaacau

SEQ ID NO: 776508 - RNA, 19 nt, Artificial Sequence
  Description of Artificial Sequence: Synthetic oligonucleotide
acgcccgccauguugcccg

SEQ ID NO: 776509 - RNA, 19 nt, Artificial Sequence
  Description of Artificial Sequence: Synthetic oligonucleotide
gucguccggaucgaggucg

SEQ ID NO: 776510 - RNA, 19 nt, Artificial Sequence
  Description of Artificial Sequence: Synthetic oligonucleotide
uacuucguaggauuccaua

SEQ ID NO: 776511 - RNA, 19 nt, Artificial Sequence
  Description of Artificial Sequence: Synthetic oligonucleotide
gaucgaggucgccauucag

SEQ ID NO: 776512 - RNA, 19 nt, Artificial Sequence
  Description of Artificial Sequence: Synthetic oligonucleotide
ucguaggauuccauaacuu

SEQ ID NO: 776513 - RNA, 19 nt, Artificial Sequence
  Description of Artificial Sequence: Synthetic oligonucleotide
cgaauguccauuuagauua

SEQ ID NO: 776514 - RNA, 19 nt, Artificial Sequence
  Description of Artificial Sequence: Synthetic oligonucleotide
ugggcguguaaugugcagc

SEQ ID NO: 776515 - RNA, 19 nt, Artificial Sequence
  Description of Artificial Sequence: Synthetic oligonucleotide
aaggacgcugccuccucca

SEQ ID NO: 776516 - RNA, 19 nt, Artificial Sequence
  Description of Artificial Sequence: Synthetic oligonucleotide
caaaagcaucucuuagguc

SEQ ID NO: 776517 - RNA, 19 nt, Artificial Sequence
  Description of Artificial Sequence: Synthetic oligonucleotide
agcauugggcguguaaugu

SEQ ID NO: 776518 - RNA, 19 nt, Artificial Sequence
  Description of Artificial Sequence: Synthetic oligonucleotide
agacgggagagacacuuaa

SEQ ID NO: 776519 - RNA, 19 nt, Artificial Sequence
  Description of Artificial Sequence: Synthetic oligonucleotide
ucagccgugcuggacgucc

SEQ ID NO: 776520 - RNA, 19 nt, Artificial Sequence
  Description of Artificial Sequence: Synthetic oligonucleotide
uaguagcaucuuuuacagc

SEQ ID NO: 776521 - RNA, 19 nt, Artificial Sequence
  Description of Artificial Sequence: Synthetic oligonucleotide
ggauaugggucuacuaugc

SEQ ID NO: 776522 - RNA, 19 nt, Artificial Sequence
  Description of Artificial Sequence: Synthetic oligonucleotide
ucuauacuuuagcgacucu

SEQ ID NO: 776523 - RNA, 19 nt, Artificial Sequence
  Description of Artificial Sequence: Synthetic oligonucleotide
uaugcccaagucacacaga

SEQ ID NO: 776524 - RNA, 19 nt, Artificial Sequence
  Description of Artificial Sequence: Synthetic oligonucleotide
aggcgccugacucuuuauc

SEQ ID NO: 776525 - RNA, 19 nt, Artificial Sequence
  Description of Artificial Sequence: Synthetic oligonucleotide
uugggcguguaaugugcag

SEQ ID NO: 776526 - RNA, 19 nt, Artificial Sequence
  Description of Artificial Sequence: Synthetic oligonucleotide
agcucauaacauauuuucu

SEQ ID NO: 776527 - RNA, 19 nt, Artificial Sequence
  Description of Artificial Sequence: Synthetic oligonucleotide
gguuucaauggcauacacc

SEQ ID NO: 776528 - RNA, 19 nt, Artificial Sequence
  Description of Artificial Sequence: Synthetic oligonucleotide
ugcugacacagccccuuug

SEQ ID NO: 776529 - RNA, 19 nt, Artificial Sequence
  Description of Artificial Sequence: Synthetic oligonucleotide
uuauuggcacaugucccac

SEQ ID NO: 776530 - RNA, 19 nt, Artificial Sequence
  Description of Artificial Sequence: Synthetic oligonucleotide
agcucuccgaucugaaaau

SEQ ID NO: 776531 - RNA, 19 nt, Artificial Sequence
  Description of Artificial Sequence: Synthetic oligonucleotide
caacauguugcaaauuacu

SEQ ID NO: 776532 - RNA, 19 nt, Artificial Sequence
  Description of Artificial Sequence: Synthetic oligonucleotide
uuuccagcguggauccuau

SEQ ID NO: 776533 - RNA, 19 nt, Artificial Sequence
  Description of Artificial Sequence: Synthetic oligonucleotide
aucaauuauucuaccacuu

SEQ ID NO: 776534 - RNA, 19 nt, Artificial Sequence
  Description of Artificial Sequence: Synthetic oligonucleotide
guaggauuccauaacuucu

SEQ ID NO: 776535 - RNA, 19 nt, Artificial Sequence
  Description of Artificial Sequence: Synthetic oligonucleotide
uccaacuguccugcuaucu

SEQ ID NO: 776536 - RNA, 19 nt, Artificial Sequence
  Description of Artificial Sequence: Synthetic oligonucleotide
agcaacaccagagggcgca

SEQ ID NO: 776537 - RNA, 19 nt, Artificial Sequence
  Description of Artificial Sequence: Synthetic oligonucleotide
ucucuucuucuucuucuuu

SEQ ID NO: 776538 - RNA, 19 nt, Artificial Sequence
  Description of Artificial Sequence: Synthetic oligonucleotide
agguggcucccaaaggacg

SEQ ID NO: 776539 - RNA, 19 nt, Artificial Sequence
  Description of Artificial Sequence: Synthetic oligonucleotide
gagccauuaaguauuuacu

SEQ ID NO: 776540 - RNA, 19 nt, Artificial Sequence
  Description of Artificial Sequence: Synthetic oligonucleotide
acuugugguauaauguauu

SEQ ID NO: 776541 - RNA, 19 nt, Artificial Sequence
  Description of Artificial Sequence: Synthetic oligonucleotide
uaaggcccaaucgaauguc

SEQ ID NO: 776542 - RNA, 19 nt, Artificial Sequence
  Description of Artificial Sequence: Synthetic oligonucleotide
cauuuagauuacggauggg

SEQ ID NO: 776543 - RNA, 19 nt, Artificial Sequence
  Description of Artificial Sequence: Synthetic oligonucleotide
cagcauugggcguguaaug

SEQ ID NO: 776544 - RNA, 19 nt, Artificial Sequence
  Description of Artificial Sequence: Synthetic oligonucleotide
gagaacacccagugggaaa

SEQ ID NO: 776545 - RNA, 19 nt, Artificial Sequence
  Description of Artificial Sequence: Synthetic oligonucleotide
ggagagacacuuaacauua

SEQ ID NO: 776546 - RNA, 19 nt, Artificial Sequence
  Description of Artificial Sequence: Synthetic oligonucleotide
uuccuagacgggagagaca

SEQ ID NO: 776547 - RNA, 19 nt, Artificial Sequence
  Description of Artificial Sequence: Synthetic oligonucleotide
uacuuucucccaagcgauc

SEQ ID NO: 776548 - RNA, 19 nt, Artificial Sequence
  Description of Artificial Sequence: Synthetic oligonucleotide
agaacacuaucuauacuuu

SEQ ID NO: 776549 - RNA, 19 nt, Artificial Sequence
  Description of Artificial Sequence: Synthetic oligonucleotide
ugcugacgacuucuuuaca

SEQ ID NO: 776550 - RNA, 19 nt, Artificial Sequence
  Description of Artificial Sequence: Synthetic oligonucleotide
ucgaugugcuucugcggcu

SEQ ID NO: 776551 - RNA, 19 nt, Artificial Sequence
  Description of Artificial Sequence: Synthetic oligonucleotide
gcgaucaagccaucugcgg

SEQ ID NO: 776552 - RNA, 19 nt, Artificial Sequence
  Description of Artificial Sequence: Synthetic oligonucleotide
gaacacccagugggaaacg

SEQ ID NO: 776553 - RNA, 19 nt, Artificial Sequence
  Description of Artificial Sequence: Synthetic oligonucleotide
gagagaacacccaguggga

SEQ ID NO: 776554 - RNA, 19 nt, Artificial Sequence
  Description of Artificial Sequence: Synthetic oligonucleotide
ggugcagaacuggauguag

SEQ ID NO: 776555 - RNA, 19 nt, Artificial Sequence
  Description of Artificial Sequence: Synthetic oligonucleotide
uccggaucgaggucgccau

SEQ ID NO: 776556 - RNA, 19 nt, Artificial Sequence
  Description of Artificial Sequence: Synthetic oligonucleotide
ugugccguguaugauccuu

SEQ ID NO: 776557 - RNA, 19 nt, Artificial Sequence
  Description of Artificial Sequence: Synthetic oligonucleotide
gaaccuuugguccucucuu

SEQ ID NO: 776558 - RNA, 19 nt, Artificial Sequence
  Description of Artificial Sequence: Synthetic oligonucleotide
cguaggauuccauaacuuc

SEQ ID NO: 776559 - RNA, 19 nt, Artificial Sequence
  Description of Artificial Sequence: Synthetic oligonucleotide
acagaaugguauguucaaa

SEQ ID NO: 776560 - RNA, 19 nt, Artificial Sequence
  Description of Artificial Sequence: Synthetic oligonucleotide
gacuucuuuacagguugga

SEQ ID NO: 776561 - RNA, 19 nt, Artificial Sequence
  Description of Artificial Sequence: Synthetic oligonucleotide
gaagccuuauuggcacaug

SEQ ID NO: 776562 - RNA, 19 nt, Artificial Sequence
  Description of Artificial Sequence: Synthetic oligonucleotide
ugggaaacgccaggccugc

SEQ ID NO: 776563 - RNA, 19 nt, Artificial Sequence
  Description of Artificial Sequence: Synthetic oligonucleotide
aguuccuagacgggagaga

SEQ ID NO: 776564 - RNA, 19 nt, Artificial Sequence
  Description of Artificial Sequence: Synthetic oligonucleotide
caguuccuagacgggagag

SEQ ID NO: 776565 - RNA, 19 nt, Artificial Sequence
  Description of Artificial Sequence: Synthetic oligonucleotide
gauuacggauggguuucac

SEQ ID NO: 776566 - RNA, 19 nt, Artificial Sequence
  Description of Artificial Sequence: Synthetic oligonucleotide
aucaagccaucugcggcag

SEQ ID NO: 776567 - RNA, 19 nt, Artificial Sequence
  Description of Artificial Sequence: Synthetic oligonucleotide
uggacgcaacagaauggua

SEQ ID NO: 776568 - RNA, 19 nt, Artificial Sequence
  Description of Artificial Sequence: Synthetic oligonucleotide
ccuccauucuuguagccuc

SEQ ID NO: 776569 - RNA, 19 nt, Artificial Sequence
  Description of Artificial Sequence: Synthetic oligonucleotide
gacgggagagacacuuaac

SEQ ID NO: 776570 - RNA, 19 nt, Artificial Sequence
  Description of Artificial Sequence: Synthetic oligonucleotide
agucuaucuugcagauguc

SEQ ID NO: 776571 - RNA, 19 nt, Artificial Sequence
  Description of Artificial Sequence: Synthetic oligonucleotide
cuuguguggguggguauuc

SEQ ID NO: 776572 - RNA, 19 nt, Artificial Sequence
  Description of Artificial Sequence: Synthetic oligonucleotide
aucuuguguggguggguau

SEQ ID NO: 776573 - RNA, 19 nt, Artificial Sequence
  Description of Artificial Sequence: Synthetic oligonucleotide
uagacgggagagacacuua

SEQ ID NO: 776574 - RNA, 19 nt, Artificial Sequence
  Description of Artificial Sequence: Synthetic oligonucleotide
ccuauaaggcccaaucgaa

SEQ ID NO: 776575 - RNA, 19 nt, Artificial Sequence
  Description of Artificial Sequence: Synthetic oligonucleotide
aacacaccauuaggauaca

SEQ ID NO: 776576 - RNA, 19 nt, Artificial Sequence
  Description of Artificial Sequence: Synthetic oligonucleotide
ccugucguccggaucgagg

SEQ ID NO: 776577 - RNA, 19 nt, Artificial Sequence
  Description of Artificial Sequence: Synthetic oligonucleotide
ugucguccggaucgagguc

SEQ ID NO: 776578 - RNA, 19 nt, Artificial Sequence
  Description of Artificial Sequence: Synthetic oligonucleotide
gcgagcgacggagugagag

SEQ ID NO: 776579 - RNA, 19 nt, Artificial Sequence
  Description of Artificial Sequence: Synthetic oligonucleotide
caaagucuaucuugcagau

SEQ ID NO: 776580 - RNA, 19 nt, Artificial Sequence
  Description of Artificial Sequence: Synthetic oligonucleotide
acgcaacagaaugguaugu

SEQ ID NO: 776581 - RNA, 19 nt, Artificial Sequence
  Description of Artificial Sequence: Synthetic oligonucleotide
caaagguuucaauggcaua

SEQ ID NO: 776582 - RNA, 19 nt, Artificial Sequence
  Description of Artificial Sequence: Synthetic oligonucleotide
guauuccaacaaagcuuag

SEQ ID NO: 776583 - RNA, 19 nt, Artificial Sequence
  Description of Artificial Sequence: Synthetic oligonucleotide
ucguccggaucgaggucgc

SEQ ID NO: 776584 - RNA, 19 nt, Artificial Sequence
  Description of Artificial Sequence: Synthetic oligonucleotide
cuauaaggcccaaucgaau

SEQ ID NO: 776585 - RNA, 19 nt, Artificial Sequence
  Description of Artificial Sequence: Synthetic oligonucleotide
auugggcguguaaugugca

SEQ ID NO: 776586 - RNA, 19 nt, Artificial Sequence
  Description of Artificial Sequence: Synthetic oligonucleotide
gcggcagaaggcaagggug

SEQ ID NO: 776587 - RNA, 19 nt, Artificial Sequence
  Description of Artificial Sequence: Synthetic oligonucleotide
ggauuaaaagugacaguaa

SEQ ID NO: 776588 - RNA, 19 nt, Artificial Sequence
  Description of Artificial Sequence: Synthetic oligonucleotide
ggcauacaccucuccuucc

SEQ ID NO: 776589 - RNA, 19 nt, Artificial Sequence
  Description of Artificial Sequence: Synthetic oligonucleotide
caaaggacgcugccuccuc

SEQ ID NO: 776590 - RNA, 19 nt, Artificial Sequence
  Description of Artificial Sequence: Synthetic oligonucleotide
ggucacauauuggaacuga

SEQ ID NO: 776591 - RNA, 19 nt, Artificial Sequence
  Description of Artificial Sequence: Synthetic oligonucleotide
cguggaguuggcuuuggac

SEQ ID NO: 776592 - RNA, 19 nt, Artificial Sequence
  Description of Artificial Sequence: Synthetic oligonucleotide
uccuugaaacauggauaaa

SEQ ID NO: 776593 - RNA, 19 nt, Artificial Sequence
  Description of Artificial Sequence: Synthetic oligonucleotide
cucuccgaucugaaaaugu

SEQ ID NO: 776594 - RNA, 19 nt, Artificial Sequence
  Description of Artificial Sequence: Synthetic oligonucleotide
gagaacagucuuccaacuu

SEQ ID NO: 776595 - RNA, 19 nt, Artificial Sequence
  Description of Artificial Sequence: Synthetic oligonucleotide
cauuaggauacaggucaca

SEQ ID NO: 776596 - RNA, 19 nt, Artificial Sequence
  Description of Artificial Sequence: Synthetic oligonucleotide
cugucguccggaucgaggu

SEQ ID NO: 776597 - RNA, 19 nt, Artificial Sequence
  Description of Artificial Sequence: Synthetic oligonucleotide
gggagagacacuuaacauu

SEQ ID NO: 776598 - RNA, 19 nt, Artificial Sequence
  Description of Artificial Sequence: Synthetic oligonucleotide
gcaaauuacuugugguaua

SEQ ID NO: 776599 - RNA, 19 nt, Artificial Sequence
  Description of Artificial Sequence: Synthetic oligonucleotide
agagggcgcaggugcagaa

SEQ ID NO: 776600 - RNA, 19 nt, Artificial Sequence
  Description of Artificial Sequence: Synthetic oligonucleotide
uggcucccaaaggacgcug

SEQ ID NO: 776601 - RNA, 19 nt, Artificial Sequence
  Description of Artificial Sequence: Synthetic oligonucleotide
aacgccaggccugcauuua

SEQ ID NO: 776602 - RNA, 19 nt, Artificial Sequence
  Description of Artificial Sequence: Synthetic oligonucleotide
caacaccagagggcgcagg

SEQ ID NO: 776603 - RNA, 19 nt, Artificial Sequence
  Description of Artificial Sequence: Synthetic oligonucleotide
gaaacgccaggccugcauu

SEQ ID NO: 776604 - RNA, 19 nt, Artificial Sequence
  Description of Artificial Sequence: Synthetic oligonucleotide
cuguaagacuguugugucu

SEQ ID NO: 776605 - RNA, 19 nt, Artificial Sequence
  Description of Artificial Sequence: Synthetic oligonucleotide
agccuccccuccuuucaca

SEQ ID NO: 776606 - RNA, 19 nt, Artificial Sequence
  Description of Artificial Sequence: Synthetic oligonucleotide
acugaggcgccugacucuu

SEQ ID NO: 776607 - RNA, 19 nt, Artificial Sequence
  Description of Artificial Sequence: Synthetic oligonucleotide
ggucuacuaugcccaaguc

SEQ ID NO: 776608 - RNA, 19 nt, Artificial Sequence
  Description of Artificial Sequence: Synthetic oligonucleotide
ccauuaggauacaggucac

SEQ ID NO: 776609 - RNA, 19 nt, Artificial Sequence
  Description of Artificial Sequence: Synthetic oligonucleotide
aggcccaaucgaaugucca

SEQ ID NO: 776610 - RNA, 19 nt, Artificial Sequence
  Description of Artificial Sequence: Synthetic oligonucleotide
guggauccuauaaggccca

SEQ ID NO: 776611 - RNA, 19 nt, Artificial Sequence
  Description of Artificial Sequence: Synthetic oligonucleotide
ggaguuggcuuuggacuag

SEQ ID NO: 776612 - RNA, 19 nt, Artificial Sequence
  Description of Artificial Sequence: Synthetic oligonucleotide
gggucuacuaugcccaagu

SEQ ID NO: 776613 - RNA, 19 nt, Artificial Sequence
  Description of Artificial Sequence: Synthetic oligonucleotide
augggucuacuaugcccaa

SEQ ID NO: 776614 - RNA, 19 nt, Artificial Sequence
  Description of Artificial Sequence: Synthetic oligonucleotide
cuagacgggagagacacuu

SEQ ID NO: 776615 - RNA, 19 nt, Artificial Sequence
  Description of Artificial Sequence: Synthetic oligonucleotide
cgccugacucuuuaucagg

SEQ ID NO: 776616 - RNA, 19 nt, Artificial Sequence
  Description of Artificial Sequence: Synthetic oligonucleotide
gguauuacacagguccacu

SEQ ID NO: 776617 - RNA, 19 nt, Artificial Sequence
  Description of Artificial Sequence: Synthetic oligonucleotide
acgccaggccugcauuuaa

SEQ ID NO: 776618 - RNA, 19 nt, Artificial Sequence
  Description of Artificial Sequence: Synthetic oligonucleotide
ccauucuuguagccucccc

SEQ ID NO: 776619 - RNA, 19 nt, Artificial Sequence
  Description of Artificial Sequence: Synthetic oligonucleotide
cagccgugcuggacguccc

SEQ ID NO: 776620 - RNA, 19 nt, Artificial Sequence
  Description of Artificial Sequence: Synthetic oligonucleotide
guccggaucgaggucgcca

SEQ ID NO: 776621 - RNA, 19 nt, Artificial Sequence
  Description of Artificial Sequence: Synthetic oligonucleotide
gcgacggagugagagcgag

SEQ ID NO: 776622 - RNA, 19 nt, Artificial Sequence
  Description of Artificial Sequence: Synthetic oligonucleotide
uugucaucccaggcuugau

SEQ ID NO: 776623 - RNA, 19 nt, Artificial Sequence
  Description of Artificial Sequence: Synthetic oligonucleotide
agugguggauaugggucua

SEQ ID NO: 776624 - RNA, 19 nt, Artificial Sequence
  Description of Artificial Sequence: Synthetic oligonucleotide
agguuggacgcaacagaau

SEQ ID NO: 776625 - RNA, 19 nt, Artificial Sequence
  Description of Artificial Sequence: Synthetic oligonucleotide
gcucuccgaucugaaaaug

SEQ ID NO: 776626 - RNA, 19 nt, Artificial Sequence
  Description of Artificial Sequence: Synthetic oligonucleotide
ggaucgaggucgccauuca

SEQ ID NO: 776627 - RNA, 19 nt, Artificial Sequence
  Description of Artificial Sequence: Synthetic oligonucleotide
uagcgacucucugcuuaga

SEQ ID NO: 776628 - RNA, 19 nt, Artificial Sequence
  Description of Artificial Sequence: Synthetic oligonucleotide
cccaucuuguguggguggg

SEQ ID NO: 776629 - RNA, 19 nt, Artificial Sequence
  Description of Artificial Sequence: Synthetic oligonucleotide
gacgacuucuuuacagguu

SEQ ID NO: 776630 - RNA, 19 nt, Artificial Sequence
  Description of Artificial Sequence: Synthetic oligonucleotide
ccgagagagcgagcgacgg

SEQ ID NO: 776631 - RNA, 19 nt, Artificial Sequence
  Description of Artificial Sequence: Synthetic oligonucleotide
ccaucugcggcagaaggca

SEQ ID NO: 776632 - RNA, 19 nt, Artificial Sequence
  Description of Artificial Sequence: Synthetic oligonucleotide
ccaaagguuucaauggcau

SEQ ID NO: 776633 - RNA, 19 nt, Artificial Sequence
  Description of Artificial Sequence: Synthetic oligonucleotide
cgagcgacggagugagagc

SEQ ID NO: 776634 - RNA, 19 nt, Artificial Sequence
  Description of Artificial Sequence: Synthetic oligonucleotide
cacgcccgccauguugccc

SEQ ID NO: 776635 - RNA, 19 nt, Artificial Sequence
  Description of Artificial Sequence: Synthetic oligonucleotide
cuaacuugucgaugugcuu

SEQ ID NO: 776636 - RNA, 19 nt, Artificial Sequence
  Description of Artificial Sequence: Synthetic oligonucleotide
aggauacaggucacauauu

SEQ ID NO: 776637 - RNA, 19 nt, Artificial Sequence
  Description of Artificial Sequence: Synthetic oligonucleotide
uggauccuauaaggcccaa

SEQ ID NO: 776638 - RNA, 19 nt, Artificial Sequence
  Description of Artificial Sequence: Synthetic oligonucleotide
ccguguaugauccuuuaau

SEQ ID NO: 776639 - RNA, 19 nt, Artificial Sequence
  Description of Artificial Sequence: Synthetic oligonucleotide
ucccugucguccggaucga

SEQ ID NO: 776640 - RNA, 19 nt, Artificial Sequence
  Description of Artificial Sequence: Synthetic oligonucleotide
cucucuucuucuucuucuu

SEQ ID NO: 776641 - RNA, 19 nt, Artificial Sequence
  Description of Artificial Sequence: Synthetic oligonucleotide
gcaagggugccaaaguuuu

SEQ ID NO: 776642 - RNA, 19 nt, Artificial Sequence
  Description of Artificial Sequence: Synthetic oligonucleotide
uuccagcguggauccuaua

SEQ ID NO: 776643 - RNA, 19 nt, Artificial Sequence
  Description of Artificial Sequence: Synthetic oligonucleotide
cuacuucguaggauuccau

SEQ ID NO: 776644 - RNA, 19 nt, Artificial Sequence
  Description of Artificial Sequence: Synthetic oligonucleotide
cgaucugaaaaugucuuua

SEQ ID NO: 776645 - RNA, 19 nt, Artificial Sequence
  Description of Artificial Sequence: Synthetic oligonucleotide
agcgacggagugagagcga

SEQ ID NO: 776646 - RNA, 19 nt, Artificial Sequence
  Description of Artificial Sequence: Synthetic oligonucleotide
gccguguaugauccuuuaa

SEQ ID NO: 776647 - RNA, 19 nt, Artificial Sequence
  Description of Artificial Sequence: Synthetic oligonucleotide
gaguuggcuuuggacuagu

SEQ ID NO: 776648 - RNA, 19 nt, Artificial Sequence
  Description of Artificial Sequence: Synthetic oligonucleotide
gcgacucucugcuuagaau

SEQ ID NO: 776649 - RNA, 19 nt, Artificial Sequence
  Description of Artificial Sequence: Synthetic oligonucleotide
ggcccaaucgaauguccau

SEQ ID NO: 776650 - RNA, 19 nt, Artificial Sequence
  Description of Artificial Sequence: Synthetic oligonucleotide
gaggcgccugacucuuuau

SEQ ID NO: 776651 - RNA, 19 nt, Artificial Sequence
  Description of Artificial Sequence: Synthetic oligonucleotide
ggcaagggugccaaaguuu

SEQ ID NO: 776652 - RNA, 19 nt, Artificial Sequence
  Description of Artificial Sequence: Synthetic oligonucleotide
ccugugcuaccaaagguuu

SEQ ID NO: 776653 - RNA, 19 nt, Artificial Sequence
  Description of Artificial Sequence: Synthetic oligonucleotide
ccaugucgucaugaacgac

SEQ ID NO: 776654 - RNA, 19 nt, Artificial Sequence
  Description of Artificial Sequence: Synthetic oligonucleotide
caagcagcuguucgcccau

SEQ ID NO: 776655 - RNA, 19 nt, Artificial Sequence
  Description of Artificial Sequence: Synthetic oligonucleotide
ccagcucauaacauauuuu

SEQ ID NO: 776656 - RNA, 19 nt, Artificial Sequence
  Description of Artificial Sequence: Synthetic oligonucleotide
cgaggucgccauucaggug

SEQ ID NO: 776657 - RNA, 19 nt, Artificial Sequence
  Description of Artificial Sequence: Synthetic oligonucleotide
cgccaggccugcauuuaac

SEQ ID NO: 776658 - RNA, 19 nt, Artificial Sequence
  Description of Artificial Sequence: Synthetic oligonucleotide
cucagccgugcuggacguc

SEQ ID NO: 776659 - RNA, 19 nt, Artificial Sequence
  Description of Artificial Sequence: Synthetic oligonucleotide
guggcucccaaaggacgcu

SEQ ID NO: 776660 - RNA, 19 nt, Artificial Sequence
  Description of Artificial Sequence: Synthetic oligonucleotide
cugcggcuucucggaaguc

SEQ ID NO: 776661 - RNA, 19 nt, Artificial Sequence
  Description of Artificial Sequence: Synthetic oligonucleotide
cacugcugacacagccccu

SEQ ID NO: 776662 - RNA, 19 nt, Artificial Sequence
  Description of Artificial Sequence: Synthetic oligonucleotide
gugccguguaugauccuuu

SEQ ID NO: 776663 - RNA, 19 nt, Artificial Sequence
  Description of Artificial Sequence: Synthetic oligonucleotide
gcccaaucgaauguccauu

SEQ ID NO: 776664 - RNA, 19 nt, Artificial Sequence
  Description of Artificial Sequence: Synthetic oligonucleotide
cccaagcgaucaagccauc

SEQ ID NO: 776665 - RNA, 19 nt, Artificial Sequence
  Description of Artificial Sequence: Synthetic oligonucleotide
ggauccuauaaggcccaau

SEQ ID NO: 776666 - RNA, 19 nt, Artificial Sequence
  Description of Artificial Sequence: Synthetic oligonucleotide
ggcuuuggacuaguuuaau

SEQ ID NO: 776667 - RNA, 19 nt, Artificial Sequence
  Description of Artificial Sequence: Synthetic oligonucleotide
ccgaucugaaaaugucuuu

SEQ ID NO: 776668 - RNA, 19 nt, Artificial Sequence
  Description of Artificial Sequence: Synthetic oligonucleotide
ccaaaggacgcugccuccu

SEQ ID NO: 776669 - RNA, 19 nt, Artificial Sequence
  Description of Artificial Sequence: Synthetic oligonucleotide
cgagagagcgagcgacgga

SEQ ID NO: 776670 - RNA, 19 nt, Artificial Sequence
  Description of Artificial Sequence: Synthetic oligonucleotide
ccaagcgaucaagccaucu

SEQ ID NO: 776671 - RNA, 19 nt, Artificial Sequence
  Description of Artificial Sequence: Synthetic oligonucleotide
cugugccguguaugauccu

SEQ ID NO: 776672 - RNA, 19 nt, Artificial Sequence
  Description of Artificial Sequence: Synthetic oligonucleotide
cccugucguccggaucgag

SEQ ID NO: 776673 - RNA, 19 nt, Artificial Sequence
  Description of Artificial Sequence: Synthetic oligonucleotide
cgucaugaacgacaccuuu

SEQ ID NO: 776674 - RNA, 19 nt, Artificial Sequence
  Description of Artificial Sequence: Synthetic oligonucleotide
ccucagccgugcuggacgu

SEQ ID NO: 776675 - RNA, 19 nt, Artificial Sequence
  Description of Artificial Sequence: Synthetic oligonucleotide
ccuagacgggagagacacu

SEQ ID NO: 776676 - RNA, 19 nt, Artificial Sequence
  Description of Artificial Sequence: Synthetic oligonucleotide
gcccgccauguugcccgag

SEQ ID NO: 776677 - RNA, 19 nt, Artificial Sequence
  Description of Artificial Sequence: Synthetic oligonucleotide
cugaggcgccugacucuuu

SEQ ID NO: 776678 - RNA, 19 nt, Artificial Sequence
  Description of Artificial Sequence: Synthetic oligonucleotide
cguccggaucgaggucgcc

SEQ ID NO: 776679 - RNA, 19 nt, Artificial Sequence
  Description of Artificial Sequence: Synthetic oligonucleotide
ccggaucgaggucgccauu

SEQ ID NO: 776680 - RNA, 19 nt, Artificial Sequence
  Description of Artificial Sequence: Synthetic oligonucleotide
cgcccgccauguugcccga

SEQ ID NO: 776681 - RNA, 19 nt, Artificial Sequence
  Description of Artificial Sequence: Synthetic oligonucleotide
aauugaauuccuauuaucc

SEQ ID NO: 776682 - RNA, 19 nt, Artificial Sequence
  Description of Artificial Sequence: Synthetic oligonucleotide
auaacuacgaaauacaaaa

SEQ ID NO: 776683 - RNA, 19 nt, Artificial Sequence
  Description of Artificial Sequence: Synthetic oligonucleotide
aaaaugugaauuuaacuga

SEQ ID NO: 776684 - RNA, 19 nt, Artificial Sequence
  Description of Artificial Sequence: Synthetic oligonucleotide
ugucuuaaugcccagaucu

SEQ ID NO: 776685 - RNA, 19 nt, Artificial Sequence
  Description of Artificial Sequence: Synthetic oligonucleotide
uccuauuauccaaagauag

SEQ ID NO: 776686 - RNA, 19 nt, Artificial Sequence
  Description of Artificial Sequence: Synthetic oligonucleotide
aaugucgggucugagaacc

SEQ ID NO: 776687 - RNA, 19 nt, Artificial Sequence
  Description of Artificial Sequence: Synthetic oligonucleotide
uguugauccacacagacaa

SEQ ID NO: 776688 - RNA, 19 nt, Artificial Sequence
  Description of Artificial Sequence: Synthetic oligonucleotide
gaacauuucaccaagugcc

SEQ ID NO: 776689 - RNA, 19 nt, Artificial Sequence
  Description of Artificial Sequence: Synthetic oligonucleotide
uguuguacaauucuguuuc

SEQ ID NO: 776690 - RNA, 19 nt, Artificial Sequence
  Description of Artificial Sequence: Synthetic oligonucleotide
ucuggcagaguuuaaaugc

SEQ ID NO: 776691 - RNA, 19 nt, Artificial Sequence
  Description of Artificial Sequence: Synthetic oligonucleotide
auuauccaaagauagacca

SEQ ID NO: 776692 - RNA, 19 nt, Artificial Sequence
  Description of Artificial Sequence: Synthetic oligonucleotide
acaacgacaguguugacuc

SEQ ID NO: 776693 - RNA, 19 nt, Artificial Sequence
  Description of Artificial Sequence: Synthetic oligonucleotide
aguagauuaaaacaaaaua

SEQ ID NO: 776694 - RNA, 19 nt, Artificial Sequence
  Description of Artificial Sequence: Synthetic oligonucleotide
uucaucuagaacuucagga

SEQ ID NO: 776695 - RNA, 19 nt, Artificial Sequence
  Description of Artificial Sequence: Synthetic oligonucleotide
uagggaauuaucaauuuug

SEQ ID NO: 776696 - RNA, 19 nt, Artificial Sequence
  Description of Artificial Sequence: Synthetic oligonucleotide
aauauauuggguggugucg

SEQ ID NO: 776697 - RNA, 19 nt, Artificial Sequence
  Description of Artificial Sequence: Synthetic oligonucleotide
uggauaauucugaagaaga

SEQ ID NO: 776698 - RNA, 19 nt, Artificial Sequence
  Description of Artificial Sequence: Synthetic oligonucleotide
uuaaugucgggucugagaa

SEQ ID NO: 776699 - RNA, 19 nt, Artificial Sequence
  Description of Artificial Sequence: Synthetic oligonucleotide
uaagaaucaaagcaaucca

SEQ ID NO: 776700 - RNA, 19 nt, Artificial Sequence
  Description of Artificial Sequence: Synthetic oligonucleotide
gggucuuuaaaauuaaggg

SEQ ID NO: 776701 - RNA, 19 nt, Artificial Sequence
  Description of Artificial Sequence: Synthetic oligonucleotide
uccacuauaccauugcuca

SEQ ID NO: 776702 - RNA, 19 nt, Artificial Sequence
  Description of Artificial Sequence: Synthetic oligonucleotide
aauuaaggguaacagugca

SEQ ID NO: 776703 - RNA, 19 nt, Artificial Sequence
  Description of Artificial Sequence: Synthetic oligonucleotide
auuccuaauguucgcaucg

SEQ ID NO: 776704 - RNA, 19 nt, Artificial Sequence
  Description of Artificial Sequence: Synthetic oligonucleotide
auugggaacaacaucauag

SEQ ID NO: 776705 - RNA, 19 nt, Artificial Sequence
  Description of Artificial Sequence: Synthetic oligonucleotide
aacaacaucauagaauggu

SEQ ID NO: 776706 - RNA, 19 nt, Artificial Sequence
  Description of Artificial Sequence: Synthetic oligonucleotide
agaguuuaaaugcacauaa

SEQ ID NO: 776707 - RNA, 19 nt, Artificial Sequence
  Description of Artificial Sequence: Synthetic oligonucleotide
aauuccuaauguucgcauc

SEQ ID NO: 776708 - RNA, 19 nt, Artificial Sequence
  Description of Artificial Sequence: Synthetic oligonucleotide
agacccgugaaagauaugc

SEQ ID NO: 776709 - RNA, 19 nt, Artificial Sequence
  Description of Artificial Sequence: Synthetic oligonucleotide
uuaacauaugcaugaagca

SEQ ID NO: 776710 - RNA, 19 nt, Artificial Sequence
  Description of Artificial Sequence: Synthetic oligonucleotide
guaaugacuaaauacguuc

SEQ ID NO: 776711 - RNA, 19 nt, Artificial Sequence
  Description of Artificial Sequence: Synthetic oligonucleotide
ugucguauggguaaugacu

SEQ ID NO: 776712 - RNA, 19 nt, Artificial Sequence
  Description of Artificial Sequence: Synthetic oligonucleotide
cacauaauggauaauucug

SEQ ID NO: 776713 - RNA, 19 nt, Artificial Sequence
  Description of Artificial Sequence: Synthetic oligonucleotide
aaggcccaaauacucgacc

SEQ ID NO: 776714 - RNA, 19 nt, Artificial Sequence
  Description of Artificial Sequence: Synthetic oligonucleotide
uuaaggguaacagugcaag

SEQ ID NO: 776715 - RNA, 19 nt, Artificial Sequence
  Description of Artificial Sequence: Synthetic oligonucleotide
auucuacugaaaucuuugc

SEQ ID NO: 776716 - RNA, 19 nt, Artificial Sequence
  Description of Artificial Sequence: Synthetic oligonucleotide
aauucuacugaaaucuuug

SEQ ID NO: 776717 - RNA, 19 nt, Artificial Sequence
  Description of Artificial Sequence: Synthetic oligonucleotide
uccuagugcaacaaagaag

SEQ ID NO: 776718 - RNA, 19 nt, Artificial Sequence
  Description of Artificial Sequence: Synthetic oligonucleotide
ugcugauuaagaauucacc

SEQ ID NO: 776719 - RNA, 19 nt, Artificial Sequence
  Description of Artificial Sequence: Synthetic oligonucleotide
ugcaaaguuguguauaaac

SEQ ID NO: 776720 - RNA, 19 nt, Artificial Sequence
  Description of Artificial Sequence: Synthetic oligonucleotide
aaauacguucugcauacga

SEQ ID NO: 776721 - RNA, 19 nt, Artificial Sequence
  Description of Artificial Sequence: Synthetic oligonucleotide
ucgguaauaaaaucauaag

SEQ ID NO: 776722 - RNA, 19 nt, Artificial Sequence
  Description of Artificial Sequence: Synthetic oligonucleotide
aaccuaaaauauuuucaug

SEQ ID NO: 776723 - RNA, 19 nt, Artificial Sequence
  Description of Artificial Sequence: Synthetic oligonucleotide
uaacauaugcaugaagcag

SEQ ID NO: 776724 - RNA, 19 nt, Artificial Sequence
  Description of Artificial Sequence: Synthetic oligonucleotide
augacuaaauacguucugc

SEQ ID NO: 776725 - RNA, 19 nt, Artificial Sequence
  Description of Artificial Sequence: Synthetic oligonucleotide
aguagugcagccaauauug

SEQ ID NO: 776726 - RNA, 19 nt, Artificial Sequence
  Description of Artificial Sequence: Synthetic oligonucleotide
ugcucuuuagaucucggug

SEQ ID NO: 776727 - RNA, 19 nt, Artificial Sequence
  Description of Artificial Sequence: Synthetic oligonucleotide
auacgaacugaaaagaaag

SEQ ID NO: 776728 - RNA, 19 nt, Artificial Sequence
  Description of Artificial Sequence: Synthetic oligonucleotide
uaaugacuaaauacguucu

SEQ ID NO: 776729 - RNA, 19 nt, Artificial Sequence
  Description of Artificial Sequence: Synthetic oligonucleotide
aaagauagaccaguggagu

SEQ ID NO: 776730 - RNA, 19 nt, Artificial Sequence
  Description of Artificial Sequence: Synthetic oligonucleotide
acauuucgguaauaaaauc

SEQ ID NO: 776731 - RNA, 19 nt, Artificial Sequence
  Description of Artificial Sequence: Synthetic oligonucleotide
ugaaccaugacuucucauc

SEQ ID NO: 776732 - RNA, 19 nt, Artificial Sequence
  Description of Artificial Sequence: Synthetic oligonucleotide
aauuccuauuauccaaaga

SEQ ID NO: 776733 - RNA, 19 nt, Artificial Sequence
  Description of Artificial Sequence: Synthetic oligonucleotide
uaaugugugauuagccaca

SEQ ID NO: 776734 - RNA, 19 nt, Artificial Sequence
  Description of Artificial Sequence: Synthetic oligonucleotide
caaagauagaccaguggag

SEQ ID NO: 776735 - RNA, 19 nt, Artificial Sequence
  Description of Artificial Sequence: Synthetic oligonucleotide
auaugcaugaagcaguuuu

SEQ ID NO: 776736 - RNA, 19 nt, Artificial Sequence
  Description of Artificial Sequence: Synthetic oligonucleotide
augugaauuuaacugauaa

SEQ ID NO: 776737 - RNA, 19 nt, Artificial Sequence
  Description of Artificial Sequence: Synthetic oligonucleotide
uuuugauacgcagagcugu

SEQ ID NO: 776738 - RNA, 19 nt, Artificial Sequence
  Description of Artificial Sequence: Synthetic oligonucleotide
ugacuaaauacguucugca

SEQ ID NO: 776739 - RNA, 19 nt, Artificial Sequence
  Description of Artificial Sequence: Synthetic oligonucleotide
aucauaagaccacauaaaa

SEQ ID NO: 776740 - RNA, 19 nt, Artificial Sequence
  Description of Artificial Sequence: Synthetic oligonucleotide
cauuucgguaauaaaauca

SEQ ID NO: 776741 - RNA, 19 nt, Artificial Sequence
  Description of Artificial Sequence: Synthetic oligonucleotide
cugcauacgaacugaaaag

SEQ ID NO: 776742 - RNA, 19 nt, Artificial Sequence
  Description of Artificial Sequence: Synthetic oligonucleotide
aggcccaaauacucgaccc

SEQ ID NO: 776743 - RNA, 19 nt, Artificial Sequence
  Description of Artificial Sequence: Synthetic oligonucleotide
uucuacugaaaucuuugcu

SEQ ID NO: 776744 - RNA, 19 nt, Artificial Sequence
  Description of Artificial Sequence: Synthetic oligonucleotide
uggacaacgacaguguuga

SEQ ID NO: 776745 - RNA, 19 nt, Artificial Sequence
  Description of Artificial Sequence: Synthetic oligonucleotide
uccucauaucuucaaaacu

SEQ ID NO: 776746 - RNA, 19 nt, Artificial Sequence
  Description of Artificial Sequence: Synthetic oligonucleotide
aucguuguaaacaucagca

SEQ ID NO: 776747 - RNA, 19 nt, Artificial Sequence
  Description of Artificial Sequence: Synthetic oligonucleotide
auaccauugcucaccaucc

SEQ ID NO: 776748 - RNA, 19 nt, Artificial Sequence
  Description of Artificial Sequence: Synthetic oligonucleotide
cugagaaccaucuguuggg

SEQ ID NO: 776749 - RNA, 19 nt, Artificial Sequence
  Description of Artificial Sequence: Synthetic oligonucleotide
ucucggugggcaauggccg

SEQ ID NO: 776750 - RNA, 19 nt, Artificial Sequence
  Description of Artificial Sequence: Synthetic oligonucleotide
uccacaccucuccauaccg

SEQ ID NO: 776751 - RNA, 19 nt, Artificial Sequence
  Description of Artificial Sequence: Synthetic oligonucleotide
guauguuuggccucuguug

SEQ ID NO: 776752 - RNA, 19 nt, Artificial Sequence
  Description of Artificial Sequence: Synthetic oligonucleotide
cuauggacagcacuauccg

SEQ ID NO: 776753 - RNA, 19 nt, Artificial Sequence
  Description of Artificial Sequence: Synthetic oligonucleotide
aucugaagcaaugaaaccu

SEQ ID NO: 776754 - RNA, 19 nt, Artificial Sequence
  Description of Artificial Sequence: Synthetic oligonucleotide
uacucgacccucuuguaag

SEQ ID NO: 776755 - RNA, 19 nt, Artificial Sequence
  Description of Artificial Sequence: Synthetic oligonucleotide
aauaacuacgaaauacaaa

SEQ ID NO: 776756 - RNA, 19 nt, Artificial Sequence
  Description of Artificial Sequence: Synthetic oligonucleotide
uuuugagcgagguuagggu

SEQ ID NO: 776757 - RNA, 19 nt, Artificial Sequence
  Description of Artificial Sequence: Synthetic oligonucleotide
accgugaaaaugucaacag

SEQ ID NO: 776758 - RNA, 19 nt, Artificial Sequence
  Description of Artificial Sequence: Synthetic oligonucleotide
uaaucguacaacgauccca

SEQ ID NO: 776759 - RNA, 19 nt, Artificial Sequence
  Description of Artificial Sequence: Synthetic oligonucleotide
uaauauauugggugguguc

SEQ ID NO: 776760 - RNA, 19 nt, Artificial Sequence
  Description of Artificial Sequence: Synthetic oligonucleotide
uaaaaucauaagaccacau

SEQ ID NO: 776761 - RNA, 19 nt, Artificial Sequence
  Description of Artificial Sequence: Synthetic oligonucleotide
uauccaaagauagaccagu

SEQ ID NO: 776762 - RNA, 19 nt, Artificial Sequence
  Description of Artificial Sequence: Synthetic oligonucleotide
auacgcagagcugugaguc

SEQ ID NO: 776763 - RNA, 19 nt, Artificial Sequence
  Description of Artificial Sequence: Synthetic oligonucleotide
cuuuaacauaugcaugaag

SEQ ID NO: 776764 - RNA, 19 nt, Artificial Sequence
  Description of Artificial Sequence: Synthetic oligonucleotide
accaguggaguacgcagcc

SEQ ID NO: 776765 - RNA, 19 nt, Artificial Sequence
  Description of Artificial Sequence: Synthetic oligonucleotide
ugugaauuuaacugauaau

SEQ ID NO: 776766 - RNA, 19 nt, Artificial Sequence
  Description of Artificial Sequence: Synthetic oligonucleotide
agauagaccaguggaguac

SEQ ID NO: 776767 - RNA, 19 nt, Artificial Sequence
  Description of Artificial Sequence: Synthetic oligonucleotide
uugggaacaacaucauaga

SEQ ID NO: 776768 - RNA, 19 nt, Artificial Sequence
  Description of Artificial Sequence: Synthetic oligonucleotide
ucccacgucaagcugguug

SEQ ID NO: 776769 - RNA, 19 nt, Artificial Sequence
  Description of Artificial Sequence: Synthetic oligonucleotide
uuccuagugcaacaaagaa

SEQ ID NO: 776770 - RNA, 19 nt, Artificial Sequence
  Description of Artificial Sequence: Synthetic oligonucleotide
cagcacguguguaaaaugc

SEQ ID NO: 776771 - RNA, 19 nt, Artificial Sequence
  Description of Artificial Sequence: Synthetic oligonucleotide
ggaacauuucaccaagugc

SEQ ID NO: 776772 - RNA, 19 nt, Artificial Sequence
  Description of Artificial Sequence: Synthetic oligonucleotide
auggauaauucugaagaag

SEQ ID NO: 776773 - RNA, 19 nt, Artificial Sequence
  Description of Artificial Sequence: Synthetic oligonucleotide
gauagaccaguggaguacg

SEQ ID NO: 776774 - RNA, 19 nt, Artificial Sequence
  Description of Artificial Sequence: Synthetic oligonucleotide
ugcauacgaacugaaaaga

SEQ ID NO: 776775 - RNA, 19 nt, Artificial Sequence
  Description of Artificial Sequence: Synthetic oligonucleotide
ugucuagaugucauaucug

SEQ ID NO: 776776 - RNA, 19 nt, Artificial Sequence
  Description of Artificial Sequence: Synthetic oligonucleotide
acguguguaaaaugcagca

SEQ ID NO: 776777 - RNA, 19 nt, Artificial Sequence
  Description of Artificial Sequence: Synthetic oligonucleotide
agaaccaucuguuggguau

SEQ ID NO: 776778 - RNA, 19 nt, Artificial Sequence
  Description of Artificial Sequence: Synthetic oligonucleotide
uuugauacgcagagcugug

SEQ ID NO: 776779 - RNA, 19 nt, Artificial Sequence
  Description of Artificial Sequence: Synthetic oligonucleotide
agaagaguagugcagccaa

SEQ ID NO: 776780 - RNA, 19 nt, Artificial Sequence
  Description of Artificial Sequence: Synthetic oligonucleotide
uggaguacgcagccgaugu

SEQ ID NO: 776781 - RNA, 19 nt, Artificial Sequence
  Description of Artificial Sequence: Synthetic oligonucleotide
aguuacagucuacacacau

SEQ ID NO: 776782 - RNA, 19 nt, Artificial Sequence
  Description of Artificial Sequence: Synthetic oligonucleotide
uaucaauuuuggucaaagu

SEQ ID NO: 776783 - RNA, 19 nt, Artificial Sequence
  Description of Artificial Sequence: Synthetic oligonucleotide
aaaugugaauuuaacugau

SEQ ID NO: 776784 - RNA, 19 nt, Artificial Sequence
  Description of Artificial Sequence: Synthetic oligonucleotide
aaauaucucuaugugcaaa

SEQ ID NO: 776785 - RNA, 19 nt, Artificial Sequence
  Description of Artificial Sequence: Synthetic oligonucleotide
agcguuugggacuaaaauu

SEQ ID NO: 776786 - RNA, 19 nt, Artificial Sequence
  Description of Artificial Sequence: Synthetic oligonucleotide
agcacuauccgaaggcagc

SEQ ID NO: 776787 - RNA, 19 nt, Artificial Sequence
  Description of Artificial Sequence: Synthetic oligonucleotide
uguaaacaucagcacgugu

SEQ ID NO: 776788 - RNA, 19 nt, Artificial Sequence
  Description of Artificial Sequence: Synthetic oligonucleotide
uuccacuauaccauugcuc

SEQ ID NO: 776789 - RNA, 19 nt, Artificial Sequence
  Description of Artificial Sequence: Synthetic oligonucleotide
aauacguucugcauacgaa

SEQ ID NO: 776790 - RNA, 19 nt, Artificial Sequence
  Description of Artificial Sequence: Synthetic oligonucleotide
uacgcagccgauguuuugg

SEQ ID NO: 776791 - RNA, 19 nt, Artificial Sequence
  Description of Artificial Sequence: Synthetic oligonucleotide
aauuugucuagggaauuau

SEQ ID NO: 776792 - RNA, 19 nt, Artificial Sequence
  Description of Artificial Sequence: Synthetic oligonucleotide
ucccuugagucccaaauau

SEQ ID NO: 776793 - RNA, 19 nt, Artificial Sequence
  Description of Artificial Sequence: Synthetic oligonucleotide
guuucccacgucaagcugg

SEQ ID NO: 776794 - RNA, 19 nt, Artificial Sequence
  Description of Artificial Sequence: Synthetic oligonucleotide
aauguucgcaucguuguaa

SEQ ID NO: 776795 - RNA, 19 nt, Artificial Sequence
  Description of Artificial Sequence: Synthetic oligonucleotide
aagauagaccaguggagua

SEQ ID NO: 776796 - RNA, 19 nt, Artificial Sequence
  Description of Artificial Sequence: Synthetic oligonucleotide
ucagcacguguguaaaaug

SEQ ID NO: 776797 - RNA, 19 nt, Artificial Sequence
  Description of Artificial Sequence: Synthetic oligonucleotide
auaagcuucgccagggaag

SEQ ID NO: 776798 - RNA, 19 nt, Artificial Sequence
  Description of Artificial Sequence: Synthetic oligonucleotide
aguguugacucuuccuucu

SEQ ID NO: 776799 - RNA, 19 nt, Artificial Sequence
  Description of Artificial Sequence: Synthetic oligonucleotide
aaucguacaacgaucccau

SEQ ID NO: 776800 - RNA, 19 nt, Artificial Sequence
  Description of Artificial Sequence: Synthetic oligonucleotide
aucucuaugugcaaaugug

SEQ ID NO: 776801 - RNA, 19 nt, Artificial Sequence
  Description of Artificial Sequence: Synthetic oligonucleotide
uauugcugauuaagaauuc

SEQ ID NO: 776802 - RNA, 19 nt, Artificial Sequence
  Description of Artificial Sequence: Synthetic oligonucleotide
ugugagucuugcagauggg

SEQ ID NO: 776803 - RNA, 19 nt, Artificial Sequence
  Description of Artificial Sequence: Synthetic oligonucleotide
gugggaacauuucaccaag

SEQ ID NO: 776804 - RNA, 19 nt, Artificial Sequence
  Description of Artificial Sequence: Synthetic oligonucleotide
ugggaacaacaucauagaa

SEQ ID NO: 776805 - RNA, 19 nt, Artificial Sequence
  Description of Artificial Sequence: Synthetic oligonucleotide
uauuggguggugucguaug

SEQ ID NO: 776806 - RNA, 19 nt, Artificial Sequence
  Description of Artificial Sequence: Synthetic oligonucleotide
gguaaucguacaacgaucc

SEQ ID NO: 776807 - RNA, 19 nt, Artificial Sequence
  Description of Artificial Sequence: Synthetic oligonucleotide
ucguacaacgaucccauuu

SEQ ID NO: 776808 - RNA, 19 nt, Artificial Sequence
  Description of Artificial Sequence: Synthetic oligonucleotide
aaaggcccaaauacucgac

SEQ ID NO: 776809 - RNA, 19 nt, Artificial Sequence
  Description of Artificial Sequence: Synthetic oligonucleotide
ucguuguaaacaucagcac

SEQ ID NO: 776810 - RNA, 19 nt, Artificial Sequence
  Description of Artificial Sequence: Synthetic oligonucleotide
uaagugcacaaguaauaaa

SEQ ID NO: 776811 - RNA, 19 nt, Artificial Sequence
  Description of Artificial Sequence: Synthetic oligonucleotide
cacuauaccauugcucacc

SEQ ID NO: 776812 - RNA, 19 nt, Artificial Sequence
  Description of Artificial Sequence: Synthetic oligonucleotide
uucgccagggaaguuaaug

SEQ ID NO: 776813 - RNA, 19 nt, Artificial Sequence
  Description of Artificial Sequence: Synthetic oligonucleotide
ucgggucugagaaccaucu

SEQ ID NO: 776814 - RNA, 19 nt, Artificial Sequence
  Description of Artificial Sequence: Synthetic oligonucleotide
gaaguuaaugucgggucug

SEQ ID NO: 776815 - RNA, 19 nt, Artificial Sequence
  Description of Artificial Sequence: Synthetic oligonucleotide
auuucgguaauaaaaucau

SEQ ID NO: 776816 - RNA, 19 nt, Artificial Sequence
  Description of Artificial Sequence: Synthetic oligonucleotide
acaccgugaaaaugucaac

SEQ ID NO: 776817 - RNA, 19 nt, Artificial Sequence
  Description of Artificial Sequence: Synthetic oligonucleotide
ugcccagaucucuugcagg

SEQ ID NO: 776818 - RNA, 19 nt, Artificial Sequence
  Description of Artificial Sequence: Synthetic oligonucleotide
cauacgaacugaaaagaaa

SEQ ID NO: 776819 - RNA, 19 nt, Artificial Sequence
  Description of Artificial Sequence: Synthetic oligonucleotide
ucgccagggaaguuaaugu

SEQ ID NO: 776820 - RNA, 19 nt, Artificial Sequence
  Description of Artificial Sequence: Synthetic oligonucleotide
gauaccagcauucuuucau

SEQ ID NO: 776821 - RNA, 19 nt, Artificial Sequence
  Description of Artificial Sequence: Synthetic oligonucleotide
gguaaugugugauuagcca

SEQ ID NO: 776822 - RNA, 19 nt, Artificial Sequence
  Description of Artificial Sequence: Synthetic oligonucleotide
cgauguuuuggcaaguugg

SEQ ID NO: 776823 - RNA, 19 nt, Artificial Sequence
  Description of Artificial Sequence: Synthetic oligonucleotide
aagaagaguagugcagcca

SEQ ID NO: 776824 - RNA, 19 nt, Artificial Sequence
  Description of Artificial Sequence: Synthetic oligonucleotide
agguaaucguacaacgauc

SEQ ID NO: 776825 - RNA, 19 nt, Artificial Sequence
  Description of Artificial Sequence: Synthetic oligonucleotide
ucaugguaaugugugauua

SEQ ID NO: 776826 - RNA, 19 nt, Artificial Sequence
  Description of Artificial Sequence: Synthetic oligonucleotide
ucuagggaauuaucaauuu

SEQ ID NO: 776827 - RNA, 19 nt, Artificial Sequence
  Description of Artificial Sequence: Synthetic oligonucleotide
uguuucccacgucaagcug

SEQ ID NO: 776828 - RNA, 19 nt, Artificial Sequence
  Description of Artificial Sequence: Synthetic oligonucleotide
ugagucuugcagauggguu

SEQ ID NO: 776829 - RNA, 19 nt, Artificial Sequence
  Description of Artificial Sequence: Synthetic oligonucleotide
cugcuaugcagcacugucc

SEQ ID NO: 776830 - RNA, 19 nt, Artificial Sequence
  Description of Artificial Sequence: Synthetic oligonucleotide
gacugcuaggcccaaaucu

SEQ ID NO: 776831 - RNA, 19 nt, Artificial Sequence
  Description of Artificial Sequence: Synthetic oligonucleotide
cuugagucccaaauaucuc

SEQ ID NO: 776832 - RNA, 19 nt, Artificial Sequence
  Description of Artificial Sequence: Synthetic oligonucleotide
agcuauggacagcacuauc

SEQ ID NO: 776833 - RNA, 19 nt, Artificial Sequence
  Description of Artificial Sequence: Synthetic oligonucleotide
ucugacuacuggucaggcc

SEQ ID NO: 776834 - RNA, 19 nt, Artificial Sequence
  Description of Artificial Sequence: Synthetic oligonucleotide
aggcccaaaucugcuaugc

SEQ ID NO: 776835 - RNA, 19 nt, Artificial Sequence
  Description of Artificial Sequence: Synthetic oligonucleotide
auugcugauuaagaauuca

SEQ ID NO: 776836 - RNA, 19 nt, Artificial Sequence
  Description of Artificial Sequence: Synthetic oligonucleotide
agcguggugagcugaaggu

SEQ ID NO: 776837 - RNA, 19 nt, Artificial Sequence
  Description of Artificial Sequence: Synthetic oligonucleotide
gacaccgugaaaaugucaa

SEQ ID NO: 776838 - RNA, 19 nt, Artificial Sequence
  Description of Artificial Sequence: Synthetic oligonucleotide
guucgcaucguuguaaaca

SEQ ID NO: 776839 - RNA, 19 nt, Artificial Sequence
  Description of Artificial Sequence: Synthetic oligonucleotide
ugacaccgugaaaauguca

SEQ ID NO: 776840 - RNA, 19 nt, Artificial Sequence
  Description of Artificial Sequence: Synthetic oligonucleotide
cuggacaacgacaguguug

SEQ ID NO: 776841 - RNA, 19 nt, Artificial Sequence
  Description of Artificial Sequence: Synthetic oligonucleotide
cccaaauaucucuaugugc

SEQ ID NO: 776842 - RNA, 19 nt, Artificial Sequence
  Description of Artificial Sequence: Synthetic oligonucleotide
auauauuggguggugucgu

SEQ ID NO: 776843 - RNA, 19 nt, Artificial Sequence
  Description of Artificial Sequence: Synthetic oligonucleotide
auagaaugguggcuuguaa

SEQ ID NO: 776844 - RNA, 19 nt, Artificial Sequence
  Description of Artificial Sequence: Synthetic oligonucleotide
acugcuaggcccaaaucug

SEQ ID NO: 776845 - RNA, 19 nt, Artificial Sequence
  Description of Artificial Sequence: Synthetic oligonucleotide
ugauuagccacagcugggu

SEQ ID NO: 776846 - RNA, 19 nt, Artificial Sequence
  Description of Artificial Sequence: Synthetic oligonucleotide
acuauccgaaggcagcuaa

SEQ ID NO: 776847 - RNA, 19 nt, Artificial Sequence
  Description of Artificial Sequence: Synthetic oligonucleotide
augcacauaauggauaauu

SEQ ID NO: 776848 - RNA, 19 nt, Artificial Sequence
  Description of Artificial Sequence: Synthetic oligonucleotide
guaaucguacaacgauccc

SEQ ID NO: 776849 - RNA, 19 nt, Artificial Sequence
  Description of Artificial Sequence: Synthetic oligonucleotide
gcuauggacagcacuaucc

SEQ ID NO: 776850 - RNA, 19 nt, Artificial Sequence
  Description of Artificial Sequence: Synthetic oligonucleotide
gaccgcuagcuauggacag

SEQ ID NO: 776851 - RNA, 19 nt, Artificial Sequence
  Description of Artificial Sequence: Synthetic oligonucleotide
uaggagacccgugaaagau

SEQ ID NO: 776852 - RNA, 19 nt, Artificial Sequence
  Description of Artificial Sequence: Synthetic oligonucleotide
acccgugaaagauaugcaa

SEQ ID NO: 776853 - RNA, 19 nt, Artificial Sequence
  Description of Artificial Sequence: Synthetic oligonucleotide
uaaggguaacagugcaagu

SEQ ID NO: 776854 - RNA, 19 nt, Artificial Sequence
  Description of Artificial Sequence: Synthetic oligonucleotide
agggaaguuaaugucgggu

SEQ ID NO: 776855 - RNA, 19 nt, Artificial Sequence
  Description of Artificial Sequence: Synthetic oligonucleotide
ggugauuucggugucuccc

SEQ ID NO: 776856 - RNA, 19 nt, Artificial Sequence
  Description of Artificial Sequence: Synthetic oligonucleotide
acaauuccuaauguucgca

SEQ ID NO: 776857 - RNA, 19 nt, Artificial Sequence
  Description of Artificial Sequence: Synthetic oligonucleotide
uccauaccggcccuuccca

SEQ ID NO: 776858 - RNA, 19 nt, Artificial Sequence
  Description of Artificial Sequence: Synthetic oligonucleotide
cuuuagaucucggugggca

SEQ ID NO: 776859 - RNA, 19 nt, Artificial Sequence
  Description of Artificial Sequence: Synthetic oligonucleotide
acaucauagaaugguggcu

SEQ ID NO: 776860 - RNA, 19 nt, Artificial Sequence
  Description of Artificial Sequence: Synthetic oligonucleotide
ccuaauguucgcaucguug

SEQ ID NO: 776861 - RNA, 19 nt, Artificial Sequence
  Description of Artificial Sequence: Synthetic oligonucleotide
acgcagccgauguuuuggc

SEQ ID NO: 776862 - RNA, 19 nt, Artificial Sequence
  Description of Artificial Sequence: Synthetic oligonucleotide
agacaacuuuccucauauc

SEQ ID NO: 776863 - RNA, 19 nt, Artificial Sequence
  Description of Artificial Sequence: Synthetic oligonucleotide
uuguaaacaucagcacgug

SEQ ID NO: 776864 - RNA, 19 nt, Artificial Sequence
  Description of Artificial Sequence: Synthetic oligonucleotide
ucucaucucuggaggagaa

SEQ ID NO: 776865 - RNA, 19 nt, Artificial Sequence
  Description of Artificial Sequence: Synthetic oligonucleotide
auccgaaggcagcuaacug

SEQ ID NO: 776866 - RNA, 19 nt, Artificial Sequence
  Description of Artificial Sequence: Synthetic oligonucleotide
uugacaccgugaaaauguc

SEQ ID NO: 776867 - RNA, 19 nt, Artificial Sequence
  Description of Artificial Sequence: Synthetic oligonucleotide
cagcguggugagcugaagg

SEQ ID NO: 776868 - RNA, 19 nt, Artificial Sequence
  Description of Artificial Sequence: Synthetic oligonucleotide
augacugcuaggcccaaau

SEQ ID NO: 776869 - RNA, 19 nt, Artificial Sequence
  Description of Artificial Sequence: Synthetic oligonucleotide
agcugaagguaaucguaca

SEQ ID NO: 776870 - RNA, 19 nt, Artificial Sequence
  Description of Artificial Sequence: Synthetic oligonucleotide
uugcucuuuagaucucggu

SEQ ID NO: 776871 - RNA, 19 nt, Artificial Sequence
  Description of Artificial Sequence: Synthetic oligonucleotide
auacucgacccucuuguaa

SEQ ID NO: 776872 - RNA, 19 nt, Artificial Sequence
  Description of Artificial Sequence: Synthetic oligonucleotide
uugcaaccguaucugccca

SEQ ID NO: 776873 - RNA, 19 nt, Artificial Sequence
  Description of Artificial Sequence: Synthetic oligonucleotide
ccaaaggcccaaauacucg

SEQ ID NO: 776874 - RNA, 19 nt, Artificial Sequence
  Description of Artificial Sequence: Synthetic oligonucleotide
aaccguaucugcccaccau

SEQ ID NO: 776875 - RNA, 19 nt, Artificial Sequence
  Description of Artificial Sequence: Synthetic oligonucleotide
aaguuaaugucgggucuga

SEQ ID NO: 776876 - RNA, 19 nt, Artificial Sequence
  Description of Artificial Sequence: Synthetic oligonucleotide
uaauguucgcaucguugua

SEQ ID NO: 776877 - RNA, 19 nt, Artificial Sequence
  Description of Artificial Sequence: Synthetic oligonucleotide
gauuaagaauucaccaccu

SEQ ID NO: 776878 - RNA, 19 nt, Artificial Sequence
  Description of Artificial Sequence: Synthetic oligonucleotide
ccgugaaagauaugcaaag

SEQ ID NO: 776879 - RNA, 19 nt, Artificial Sequence
  Description of Artificial Sequence: Synthetic oligonucleotide
ccaccauuagucucugugg

SEQ ID NO: 776880 - RNA, 19 nt, Artificial Sequence
  Description of Artificial Sequence: Synthetic oligonucleotide
uuagggugauuucgguguc

SEQ ID NO: 776881 - RNA, 19 nt, Artificial Sequence
  Description of Artificial Sequence: Synthetic oligonucleotide
gguuagggugauuucggug

SEQ ID NO: 776882 - RNA, 19 nt, Artificial Sequence
  Description of Artificial Sequence: Synthetic oligonucleotide
cagcacuauccgaaggcag

SEQ ID NO: 776883 - RNA, 19 nt, Artificial Sequence
  Description of Artificial Sequence: Synthetic oligonucleotide
cuccauaccggcccuuccc

SEQ ID NO: 776884 - RNA, 19 nt, Artificial Sequence
  Description of Artificial Sequence: Synthetic oligonucleotide
gggaaguuaaugucggguc

SEQ ID NO: 776885 - RNA, 19 nt, Artificial Sequence
  Description of Artificial Sequence: Synthetic oligonucleotide
gcguuugggacuaaaauuc

SEQ ID NO: 776886 - RNA, 19 nt, Artificial Sequence
  Description of Artificial Sequence: Synthetic oligonucleotide
caguguugacucuuccuuc

SEQ ID NO: 776887 - RNA, 19 nt, Artificial Sequence
  Description of Artificial Sequence: Synthetic oligonucleotide
cagccgauguuuuggcaag

SEQ ID NO: 776888 - RNA, 19 nt, Artificial Sequence
  Description of Artificial Sequence: Synthetic oligonucleotide
uaaugucgggucugagaac

SEQ ID NO: 776889 - RNA, 19 nt, Artificial Sequence
  Description of Artificial Sequence: Synthetic oligonucleotide
agggugauuucggugucuc

SEQ ID NO: 776890 - RNA, 19 nt, Artificial Sequence
  Description of Artificial Sequence: Synthetic oligonucleotide
ugggaacauuucaccaagu

SEQ ID NO: 776891 - RNA, 19 nt, Artificial Sequence
  Description of Artificial Sequence: Synthetic oligonucleotide
auaccagcauucuuucaua

SEQ ID NO: 776892 - RNA, 19 nt, Artificial Sequence
  Description of Artificial Sequence: Synthetic oligonucleotide
uagaccaguggaguacgca

SEQ ID NO: 776893 - RNA, 19 nt, Artificial Sequence
  Description of Artificial Sequence: Synthetic oligonucleotide
gcuugguccccacacgggg

SEQ ID NO: 776894 - RNA, 19 nt, Artificial Sequence
  Description of Artificial Sequence: Synthetic oligonucleotide
ugacugcuaggcccaaauc

SEQ ID NO: 776895 - RNA, 19 nt, Artificial Sequence
  Description of Artificial Sequence: Synthetic oligonucleotide
gacuaaauacguucugcau

SEQ ID NO: 776896 - RNA, 19 nt, Artificial Sequence
  Description of Artificial Sequence: Synthetic oligonucleotide
cuauccgaaggcagcuaac

SEQ ID NO: 776897 - RNA, 19 nt, Artificial Sequence
  Description of Artificial Sequence: Synthetic oligonucleotide
accgcuagcuauggacagc

SEQ ID NO: 776898 - RNA, 19 nt, Artificial Sequence
  Description of Artificial Sequence: Synthetic oligonucleotide
ucgccuugccagcugcccc

SEQ ID NO: 776899 - RNA, 19 nt, Artificial Sequence
  Description of Artificial Sequence: Synthetic oligonucleotide
cagggaaguuaaugucggg

SEQ ID NO: 776900 - RNA, 19 nt, Artificial Sequence
  Description of Artificial Sequence: Synthetic oligonucleotide
gaaccaucuguuggguaug

SEQ ID NO: 776901 - RNA, 19 nt, Artificial Sequence
  Description of Artificial Sequence: Synthetic oligonucleotide
gugucguauggguaaugac

SEQ ID NO: 776902 - RNA, 19 nt, Artificial Sequence
  Description of Artificial Sequence: Synthetic oligonucleotide
auagaccaguggaguacgc

SEQ ID NO: 776903 - RNA, 19 nt, Artificial Sequence
  Description of Artificial Sequence: Synthetic oligonucleotide
uguucgcaucguuguaaac

SEQ ID NO: 776904 - RNA, 19 nt, Artificial Sequence
  Description of Artificial Sequence: Synthetic oligonucleotide
gacaacgacaguguugacu

SEQ ID NO: 776905 - RNA, 19 nt, Artificial Sequence
  Description of Artificial Sequence: Synthetic oligonucleotide
agcgagguuagggugauuu

SEQ ID NO: 776906 - RNA, 19 nt, Artificial Sequence
  Description of Artificial Sequence: Synthetic oligonucleotide
caccgugaaaaugucaaca

SEQ ID NO: 776907 - RNA, 19 nt, Artificial Sequence
  Description of Artificial Sequence: Synthetic oligonucleotide
auguucgcaucguuguaaa

SEQ ID NO: 776908 - RNA, 19 nt, Artificial Sequence
  Description of Artificial Sequence: Synthetic oligonucleotide
acagcacuauccgaaggca

SEQ ID NO: 776909 - RNA, 19 nt, Artificial Sequence
  Description of Artificial Sequence: Synthetic oligonucleotide
ucuuuagaucucggugggc

SEQ ID NO: 776910 - RNA, 19 nt, Artificial Sequence
  Description of Artificial Sequence: Synthetic oligonucleotide
cuccacaccucuccauacc

SEQ ID NO: 776911 - RNA, 19 nt, Artificial Sequence
  Description of Artificial Sequence: Synthetic oligonucleotide
uugauacgcagagcuguga

SEQ ID NO: 776912 - RNA, 19 nt, Artificial Sequence
  Description of Artificial Sequence: Synthetic oligonucleotide
acugcuaagugcacaagua

SEQ ID NO: 776913 - RNA, 19 nt, Artificial Sequence
  Description of Artificial Sequence: Synthetic oligonucleotide
uuuggccucuguugaucca

SEQ ID NO: 776914 - RNA, 19 nt, Artificial Sequence
  Description of Artificial Sequence: Synthetic oligonucleotide
cuguauccagcguggugag

SEQ ID NO: 776915 - RNA, 19 nt, Artificial Sequence
  Description of Artificial Sequence: Synthetic oligonucleotide
gucguauggguaaugacua

SEQ ID NO: 776916 - RNA, 19 nt, Artificial Sequence
  Description of Artificial Sequence: Synthetic oligonucleotide
uuggccucuguugauccac

SEQ ID NO: 776917 - RNA, 19 nt, Artificial Sequence
  Description of Artificial Sequence: Synthetic oligonucleotide
caaguugggucuuuaaaau

SEQ ID NO: 776918 - RNA, 19 nt, Artificial Sequence
  Description of Artificial Sequence: Synthetic oligonucleotide
agugcacaaguaauaaaua

SEQ ID NO: 776919 - RNA, 19 nt, Artificial Sequence
  Description of Artificial Sequence: Synthetic oligonucleotide
aauggccgacuucccuuga

SEQ ID NO: 776920 - RNA, 19 nt, Artificial Sequence
  Description of Artificial Sequence: Synthetic oligonucleotide
aguuaaugucgggucugag

SEQ ID NO: 776921 - RNA, 19 nt, Artificial Sequence
  Description of Artificial Sequence: Synthetic oligonucleotide
uuagaucucggugggcaau

SEQ ID NO: 776922 - RNA, 19 nt, Artificial Sequence
  Description of Artificial Sequence: Synthetic oligonucleotide
uauauuggguggugucgua

SEQ ID NO: 776923 - RNA, 19 nt, Artificial Sequence
  Description of Artificial Sequence: Synthetic oligonucleotide
guacaacgaucccauuuca

SEQ ID NO: 776924 - RNA, 19 nt, Artificial Sequence
  Description of Artificial Sequence: Synthetic oligonucleotide
ucgacccucuuguaagaau

SEQ ID NO: 776925 - RNA, 19 nt, Artificial Sequence
  Description of Artificial Sequence: Synthetic oligonucleotide
ggcagcuaacuguauccag

SEQ ID NO: 776926 - RNA, 19 nt, Artificial Sequence
  Description of Artificial Sequence: Synthetic oligonucleotide
gaaugguggcuuguaaucu

SEQ ID NO: 776927 - RNA, 19 nt, Artificial Sequence
  Description of Artificial Sequence: Synthetic oligonucleotide
gguggugucguauggguaa

SEQ ID NO: 776928 - RNA, 19 nt, Artificial Sequence
  Description of Artificial Sequence: Synthetic oligonucleotide
guaucugcccaccauuagu

SEQ ID NO: 776929 - RNA, 19 nt, Artificial Sequence
  Description of Artificial Sequence: Synthetic oligonucleotide
uuccuaauguucgcaucgu

SEQ ID NO: 776930 - RNA, 19 nt, Artificial Sequence
  Description of Artificial Sequence: Synthetic oligonucleotide
guagugcagccaauauugc

SEQ ID NO: 776931 - RNA, 19 nt, Artificial Sequence
  Description of Artificial Sequence: Synthetic oligonucleotide
ucguauggguaaugacuaa

SEQ ID NO: 776932 - RNA, 19 nt, Artificial Sequence
  Description of Artificial Sequence: Synthetic oligonucleotide
acucgacccucuuguaaga

SEQ ID NO: 776933 - RNA, 19 nt, Artificial Sequence
  Description of Artificial Sequence: Synthetic oligonucleotide
cugcuaagugcacaaguaa

SEQ ID NO: 776934 - RNA, 19 nt, Artificial Sequence
  Description of Artificial Sequence: Synthetic oligonucleotide
auggccgacuucccuugag

SEQ ID NO: 776935 - RNA, 19 nt, Artificial Sequence
  Description of Artificial Sequence: Synthetic oligonucleotide
gauacgcagagcugugagu

SEQ ID NO: 776936 - RNA, 19 nt, Artificial Sequence
  Description of Artificial Sequence: Synthetic oligonucleotide
aaccaucuguuggguaugu

SEQ ID NO: 776937 - RNA, 19 nt, Artificial Sequence
  Description of Artificial Sequence: Synthetic oligonucleotide
guaauauauuggguggugu

SEQ ID NO: 776938 - RNA, 19 nt, Artificial Sequence
  Description of Artificial Sequence: Synthetic oligonucleotide
acgacaguguugacucuuc

SEQ ID NO: 776939 - RNA, 19 nt, Artificial Sequence
  Description of Artificial Sequence: Synthetic oligonucleotide
auauuggguggugucguau

SEQ ID NO: 776940 - RNA, 19 nt, Artificial Sequence
  Description of Artificial Sequence: Synthetic oligonucleotide
ccuauuauccaaagauaga

SEQ ID NO: 776941 - RNA, 19 nt, Artificial Sequence
  Description of Artificial Sequence: Synthetic oligonucleotide
cguacaacgaucccauuuc

SEQ ID NO: 776942 - RNA, 19 nt, Artificial Sequence
  Description of Artificial Sequence: Synthetic oligonucleotide
gaguuucccguggggagug

SEQ ID NO: 776943 - RNA, 19 nt, Artificial Sequence
  Description of Artificial Sequence: Synthetic oligonucleotide
gaguagugcagccaauauu

SEQ ID NO: 776944 - RNA, 19 nt, Artificial Sequence
  Description of Artificial Sequence: Synthetic oligonucleotide
gauuagccacagcugggua

SEQ ID NO: 776945 - RNA, 19 nt, Artificial Sequence
  Description of Artificial Sequence: Synthetic oligonucleotide
guacgcagccgauguuuug

SEQ ID NO: 776946 - RNA, 19 nt, Artificial Sequence
  Description of Artificial Sequence: Synthetic oligonucleotide
gccgacuucccuugagucc

SEQ ID NO: 776947 - RNA, 19 nt, Artificial Sequence
  Description of Artificial Sequence: Synthetic oligonucleotide
gcgcuugguccccacacgg

SEQ ID NO: 776948 - RNA, 19 nt, Artificial Sequence
  Description of Artificial Sequence: Synthetic oligonucleotide
ggaaguuaaugucgggucu

SEQ ID NO: 776949 - RNA, 19 nt, Artificial Sequence
  Description of Artificial Sequence: Synthetic oligonucleotide
ccgacuucccuugaguccc

SEQ ID NO: 776950 - RNA, 19 nt, Artificial Sequence
  Description of Artificial Sequence: Synthetic oligonucleotide
cugaagcaaugaaaccuaa

SEQ ID NO: 776951 - RNA, 19 nt, Artificial Sequence
  Description of Artificial Sequence: Synthetic oligonucleotide
agugucuaggagacccgug

SEQ ID NO: 776952 - RNA, 19 nt, Artificial Sequence
  Description of Artificial Sequence: Synthetic oligonucleotide
guguuguacaauucuguuu

SEQ ID NO: 776953 - RNA, 19 nt, Artificial Sequence
  Description of Artificial Sequence: Synthetic oligonucleotide
aggcagcuaacuguaucca

SEQ ID NO: 776954 - RNA, 19 nt, Artificial Sequence
  Description of Artificial Sequence: Synthetic oligonucleotide
agccaauauugcugauuaa

SEQ ID NO: 776955 - RNA, 19 nt, Artificial Sequence
  Description of Artificial Sequence: Synthetic oligonucleotide
cagaguuuaaaugcacaua

SEQ ID NO: 776956 - RNA, 19 nt, Artificial Sequence
  Description of Artificial Sequence: Synthetic oligonucleotide
cgugaaagauaugcaaagc

SEQ ID NO: 776957 - RNA, 19 nt, Artificial Sequence
  Description of Artificial Sequence: Synthetic oligonucleotide
ggugucguauggguaauga

SEQ ID NO: 776958 - RNA, 19 nt, Artificial Sequence
  Description of Artificial Sequence: Synthetic oligonucleotide
uagggugauuucggugucu

SEQ ID NO: 776959 - RNA, 19 nt, Artificial Sequence
  Description of Artificial Sequence: Synthetic oligonucleotide
gucuagggaauuaucaauu

SEQ ID NO: 776960 - RNA, 19 nt, Artificial Sequence
  Description of Artificial Sequence: Synthetic oligonucleotide
guggaguacgcagccgaug

SEQ ID NO: 776961 - RNA, 19 nt, Artificial Sequence
  Description of Artificial Sequence: Synthetic oligonucleotide
ugucgggucugagaaccau

SEQ ID NO: 776962 - RNA, 19 nt, Artificial Sequence
  Description of Artificial Sequence: Synthetic oligonucleotide
uggugagcugaagguaauc

SEQ ID NO: 776963 - RNA, 19 nt, Artificial Sequence
  Description of Artificial Sequence: Synthetic oligonucleotide
gggaacaacaucauagaau

SEQ ID NO: 776964 - RNA, 19 nt, Artificial Sequence
  Description of Artificial Sequence: Synthetic oligonucleotide
gcuaagugcacaaguaaua

SEQ ID NO: 776965 - RNA, 19 nt, Artificial Sequence
  Description of Artificial Sequence: Synthetic oligonucleotide
caauuccuaauguucgcau

SEQ ID NO: 776966 - RNA, 19 nt, Artificial Sequence
  Description of Artificial Sequence: Synthetic oligonucleotide
ccuugaguuucccgugggg

SEQ ID NO: 776967 - RNA, 19 nt, Artificial Sequence
  Description of Artificial Sequence: Synthetic oligonucleotide
gcaagaccgcuagcuaugg

SEQ ID NO: 776968 - RNA, 19 nt, Artificial Sequence
  Description of Artificial Sequence: Synthetic oligonucleotide
uggugucguauggguaaug

SEQ ID NO: 776969 - RNA, 19 nt, Artificial Sequence
  Description of Artificial Sequence: Synthetic oligonucleotide
ugagcgagguuagggugau

SEQ ID NO: 776970 - RNA, 19 nt, Artificial Sequence
  Description of Artificial Sequence: Synthetic oligonucleotide
caucauagaaugguggcuu

SEQ ID NO: 776971 - RNA, 19 nt, Artificial Sequence
  Description of Artificial Sequence: Synthetic oligonucleotide
ccacaccucuccauaccgg

SEQ ID NO: 776972 - RNA, 19 nt, Artificial Sequence
  Description of Artificial Sequence: Synthetic oligonucleotide
cagcguuugggacuaaaau

SEQ ID NO: 776973 - RNA, 19 nt, Artificial Sequence
  Description of Artificial Sequence: Synthetic oligonucleotide
gcauacgaacugaaaagaa

SEQ ID NO: 776974 - RNA, 19 nt, Artificial Sequence
  Description of Artificial Sequence: Synthetic oligonucleotide
cccgugaaagauaugcaaa

SEQ ID NO: 776975 - RNA, 19 nt, Artificial Sequence
  Description of Artificial Sequence: Synthetic oligonucleotide
gccaaauugaauuccuauu

SEQ ID NO: 776976 - RNA, 19 nt, Artificial Sequence
  Description of Artificial Sequence: Synthetic oligonucleotide
ggguaaugacuaaauacgu

SEQ ID NO: 776977 - RNA, 19 nt, Artificial Sequence
  Description of Artificial Sequence: Synthetic oligonucleotide
aguacgcagccgauguuuu

SEQ ID NO: 776978 - RNA, 19 nt, Artificial Sequence
  Description of Artificial Sequence: Synthetic oligonucleotide
gaguacgcagccgauguuu

SEQ ID NO: 776979 - RNA, 19 nt, Artificial Sequence
  Description of Artificial Sequence: Synthetic oligonucleotide
cugcccaccauuagucucu

SEQ ID NO: 776980 - RNA, 19 nt, Artificial Sequence
  Description of Artificial Sequence: Synthetic oligonucleotide
gggugauuucggugucucc

SEQ ID NO: 776981 - RNA, 19 nt, Artificial Sequence
  Description of Artificial Sequence: Synthetic oligonucleotide
gcaaccguaucugcccacc

SEQ ID NO: 776982 - RNA, 19 nt, Artificial Sequence
  Description of Artificial Sequence: Synthetic oligonucleotide
uucccguggggagugucua

SEQ ID NO: 776983 - RNA, 19 nt, Artificial Sequence
  Description of Artificial Sequence: Synthetic oligonucleotide
accggcccuucccaacaca

SEQ ID NO: 776984 - RNA, 19 nt, Artificial Sequence
  Description of Artificial Sequence: Synthetic oligonucleotide
caguaauauauuggguggu

SEQ ID NO: 776985 - RNA, 19 nt, Artificial Sequence
  Description of Artificial Sequence: Synthetic oligonucleotide
gguauguuuggccucuguu

SEQ ID NO: 776986 - RNA, 19 nt, Artificial Sequence
  Description of Artificial Sequence: Synthetic oligonucleotide
cccuugagucccaaauauc

SEQ ID NO: 776987 - RNA, 19 nt, Artificial Sequence
  Description of Artificial Sequence: Synthetic oligonucleotide
gucgggucugagaaccauc

SEQ ID NO: 776988 - RNA, 19 nt, Artificial Sequence
  Description of Artificial Sequence: Synthetic oligonucleotide
ccacuauaccauugcucac

SEQ ID NO: 776989 - RNA, 19 nt, Artificial Sequence
  Description of Artificial Sequence: Synthetic oligonucleotide
gguaaugacuaaauacguu

SEQ ID NO: 776990 - RNA, 19 nt, Artificial Sequence
  Description of Artificial Sequence: Synthetic oligonucleotide
caaccguaucugcccacca

SEQ ID NO: 776991 - RNA, 19 nt, Artificial Sequence
  Description of Artificial Sequence: Synthetic oligonucleotide
gagacccgugaaagauaug

SEQ ID NO: 776992 - RNA, 19 nt, Artificial Sequence
  Description of Artificial Sequence: Synthetic oligonucleotide
aguggaguacgcagccgau

SEQ ID NO: 776993 - RNA, 19 nt, Artificial Sequence
  Description of Artificial Sequence: Synthetic oligonucleotide
aucguacaacgaucccauu

SEQ ID NO: 776994 - RNA, 19 nt, Artificial Sequence
  Description of Artificial Sequence: Synthetic oligonucleotide
acgcagagcugugagucuu

SEQ ID NO: 776995 - RNA, 19 nt, Artificial Sequence
  Description of Artificial Sequence: Synthetic oligonucleotide
cucggugggcaauggccga

SEQ ID NO: 776996 - RNA, 19 nt, Artificial Sequence
  Description of Artificial Sequence: Synthetic oligonucleotide
ggagugucuagaugucaua

SEQ ID NO: 776997 - RNA, 19 nt, Artificial Sequence
  Description of Artificial Sequence: Synthetic oligonucleotide
aggagacccgugaaagaua

SEQ ID NO: 776998 - RNA, 19 nt, Artificial Sequence
  Description of Artificial Sequence: Synthetic oligonucleotide
cguaucugcccaccauuag

SEQ ID NO: 776999 - RNA, 19 nt, Artificial Sequence
  Description of Artificial Sequence: Synthetic oligonucleotide
gcuuuaacauaugcaugaa

SEQ ID NO: 777000 - RNA, 19 nt, Artificial Sequence
  Description of Artificial Sequence: Synthetic oligonucleotide
ccggcccuucccaacacac

SEQ ID NO: 777001 - RNA, 19 nt, Artificial Sequence
  Description of Artificial Sequence: Synthetic oligonucleotide
caagaccgcuagcuaugga

SEQ ID NO: 777002 - RNA, 19 nt, Artificial Sequence
  Description of Artificial Sequence: Synthetic oligonucleotide
ccauuucagagucuagugu

SEQ ID NO: 777003 - RNA, 19 nt, Artificial Sequence
  Description of Artificial Sequence: Synthetic oligonucleotide
ggcccaaaucugcuaugca

SEQ ID NO: 777004 - RNA, 19 nt, Artificial Sequence
  Description of Artificial Sequence: Synthetic oligonucleotide
ggagacccgugaaagauau

SEQ ID NO: 777005 - RNA, 19 nt, Artificial Sequence
  Description of Artificial Sequence: Synthetic oligonucleotide
gcgagguuagggugauuuc

SEQ ID NO: 777006 - RNA, 19 nt, Artificial Sequence
  Description of Artificial Sequence: Synthetic oligonucleotide
gcuuguaaucuuccacuau

SEQ ID NO: 777007 - RNA, 19 nt, Artificial Sequence
  Description of Artificial Sequence: Synthetic oligonucleotide
cucgacccucuuguaagaa

SEQ ID NO: 777008 - RNA, 19 nt, Artificial Sequence
  Description of Artificial Sequence: Synthetic oligonucleotide
augucgggucugagaacca

SEQ ID NO: 777009 - RNA, 19 nt, Artificial Sequence
  Description of Artificial Sequence: Synthetic oligonucleotide
ggcccaaauacucgacccu

SEQ ID NO: 777010 - RNA, 19 nt, Artificial Sequence
  Description of Artificial Sequence: Synthetic oligonucleotide
cauuuucgccuugccagcu

SEQ ID NO: 777011 - RNA, 19 nt, Artificial Sequence
  Description of Artificial Sequence: Synthetic oligonucleotide
aagcuucgccagggaaguu

SEQ ID NO: 777012 - RNA, 19 nt, Artificial Sequence
  Description of Artificial Sequence: Synthetic oligonucleotide
aguuucccguggggagugu

SEQ ID NO: 777013 - RNA, 19 nt, Artificial Sequence
  Description of Artificial Sequence: Synthetic oligonucleotide
ccgcuagcuauggacagca

SEQ ID NO: 777014 - RNA, 19 nt, Artificial Sequence
  Description of Artificial Sequence: Synthetic oligonucleotide
ccgugaaaaugucaacagu

SEQ ID NO: 777015 - RNA, 19 nt, Artificial Sequence
  Description of Artificial Sequence: Synthetic oligonucleotide
ggacaacgacaguguugac

SEQ ID NO: 777016 - RNA, 19 nt, Artificial Sequence
  Description of Artificial Sequence: Synthetic oligonucleotide
ccguaucugcccaccauua

SEQ ID NO: 777017 - RNA, 19 nt, Artificial Sequence
  Description of Artificial Sequence: Synthetic oligonucleotide
gcacuauccgaaggcagcu

SEQ ID NO: 777018 - RNA, 19 nt, Artificial Sequence
  Description of Artificial Sequence: Synthetic oligonucleotide
cacagacaacuuuccucau

SEQ ID NO: 777019 - RNA, 19 nt, Artificial Sequence
  Description of Artificial Sequence: Synthetic oligonucleotide
cuauaccauugcucaccau

SEQ ID NO: 777020 - RNA, 19 nt, Artificial Sequence
  Description of Artificial Sequence: Synthetic oligonucleotide
cacuauccgaaggcagcua

SEQ ID NO: 777021 - RNA, 19 nt, Artificial Sequence
  Description of Artificial Sequence: Synthetic oligonucleotide
cccaaauacucgacccucu

SEQ ID NO: 777022 - RNA, 19 nt, Artificial Sequence
  Description of Artificial Sequence: Synthetic oligonucleotide
gcguggugagcugaaggua

SEQ ID NO: 777023 - RNA, 19 nt, Artificial Sequence
  Description of Artificial Sequence: Synthetic oligonucleotide
cauaugcaugaagcaguuu

SEQ ID NO: 777024 - RNA, 19 nt, Artificial Sequence
  Description of Artificial Sequence: Synthetic oligonucleotide
ccguggggagugucuagga

SEQ ID NO: 777025 - RNA, 19 nt, Artificial Sequence
  Description of Artificial Sequence: Synthetic oligonucleotide
guggugucguauggguaau

SEQ ID NO: 777026 - RNA, 19 nt, Artificial Sequence
  Description of Artificial Sequence: Synthetic oligonucleotide
cgggucugagaaccaucug

SEQ ID NO: 777027 - RNA, 19 nt, Artificial Sequence
  Description of Artificial Sequence: Synthetic oligonucleotide
uucccacgucaagcugguu

SEQ ID NO: 777028 - RNA, 19 nt, Artificial Sequence
  Description of Artificial Sequence: Synthetic oligonucleotide
ccucccuuugcaaccguau

SEQ ID NO: 777029 - RNA, 19 nt, Artificial Sequence
  Description of Artificial Sequence: Synthetic oligonucleotide
accauccgccuggccacuu

SEQ ID NO: 777030 - RNA, 19 nt, Artificial Sequence
  Description of Artificial Sequence: Synthetic oligonucleotide
ccauaccggcccuucccaa

SEQ ID NO: 777031 - RNA, 19 nt, Artificial Sequence
  Description of Artificial Sequence: Synthetic oligonucleotide
ggaguacgcagccgauguu

SEQ ID NO: 777032 - RNA, 19 nt, Artificial Sequence
  Description of Artificial Sequence: Synthetic oligonucleotide
cccucccuuugcaaccgua

SEQ ID NO: 777033 - RNA, 19 nt, Artificial Sequence
  Description of Artificial Sequence: Synthetic oligonucleotide
caccauccgccuggccacu

SEQ ID NO: 777034 - RNA, 19 nt, Artificial Sequence
  Description of Artificial Sequence: Synthetic oligonucleotide
gagcgagguuagggugauu

SEQ ID NO: 777035 - RNA, 19 nt, Artificial Sequence
  Description of Artificial Sequence: Synthetic oligonucleotide
ccacagcguuugggacuaa

SEQ ID NO: 777036 - RNA, 19 nt, Artificial Sequence
  Description of Artificial Sequence: Synthetic oligonucleotide
aaauuguacaaauuaaguc

SEQ ID NO: 777037 - RNA, 19 nt, Artificial Sequence
  Description of Artificial Sequence: Synthetic oligonucleotide
aauaugaacacugauugac

SEQ ID NO: 777038 - RNA, 19 nt, Artificial Sequence
  Description of Artificial Sequence: Synthetic oligonucleotide
ugaaucuacaacuuggagg

SEQ ID NO: 777039 - RNA, 19 nt, Artificial Sequence
  Description of Artificial Sequence: Synthetic oligonucleotide
uuggccauaaauaugaaca

SEQ ID NO: 777040 - RNA, 19 nt, Artificial Sequence
  Description of Artificial Sequence: Synthetic oligonucleotide
uauacgggaauucugaucu

SEQ ID NO: 777041 - RNA, 19 nt, Artificial Sequence
  Description of Artificial Sequence: Synthetic oligonucleotide
aagguaguggcucuagagc

SEQ ID NO: 777042 - RNA, 19 nt, Artificial Sequence
  Description of Artificial Sequence: Synthetic oligonucleotide
aauauccaagguuguaccc

SEQ ID NO: 777043 - RNA, 19 nt, Artificial Sequence
  Description of Artificial Sequence: Synthetic oligonucleotide
uguagauaaagggaguugg

SEQ ID NO: 777044 - RNA, 19 nt, Artificial Sequence
  Description of Artificial Sequence: Synthetic oligonucleotide
uguccacucagauauacgg

SEQ ID NO: 777045 - RNA, 19 nt, Artificial Sequence
  Description of Artificial Sequence: Synthetic oligonucleotide
aaaacagaaguucaccccu

SEQ ID NO: 777046 - RNA, 19 nt, Artificial Sequence
  Description of Artificial Sequence: Synthetic oligonucleotide
ucuagaaauguccacucag

SEQ ID NO: 777047 - RNA, 19 nt, Artificial Sequence
  Description of Artificial Sequence: Synthetic oligonucleotide
uguaacacccacaguauag

SEQ ID NO: 777048 - RNA, 19 nt, Artificial Sequence
  Description of Artificial Sequence: Synthetic oligonucleotide
ucgacugucucacagauaa

SEQ ID NO: 777049 - RNA, 19 nt, Artificial Sequence
  Description of Artificial Sequence: Synthetic oligonucleotide
auuaucucgcaccaggaag

SEQ ID NO: 777050 - RNA, 19 nt, Artificial Sequence
  Description of Artificial Sequence: Synthetic oligonucleotide
aauagcacccaugugucuc

SEQ ID NO: 777051 - RNA, 19 nt, Artificial Sequence
  Description of Artificial Sequence: Synthetic oligonucleotide
aacagaaguucaccccugc

SEQ ID NO: 777052 - RNA, 19 nt, Artificial Sequence
  Description of Artificial Sequence: Synthetic oligonucleotide
uaugaacacugauugacug

SEQ ID NO: 777053 - RNA, 19 nt, Artificial Sequence
  Description of Artificial Sequence: Synthetic oligonucleotide
guugauuuuggaguguucg

SEQ ID NO: 777054 - RNA, 19 nt, Artificial Sequence
  Description of Artificial Sequence: Synthetic oligonucleotide
acaugcgugauaaaucugc

SEQ ID NO: 777055 - RNA, 19 nt, Artificial Sequence
  Description of Artificial Sequence: Synthetic oligonucleotide
cugauuaucucgcaccagg

SEQ ID NO: 777056 - RNA, 19 nt, Artificial Sequence
  Description of Artificial Sequence: Synthetic oligonucleotide
auauccaagguuguacccc

SEQ ID NO: 777057 - RNA, 19 nt, Artificial Sequence
  Description of Artificial Sequence: Synthetic oligonucleotide
uugaaucuacaacuuggag

SEQ ID NO: 777058 - RNA, 19 nt, Artificial Sequence
  Description of Artificial Sequence: Synthetic oligonucleotide
gauuuuggaguguucgcag

SEQ ID NO: 777059 - RNA, 19 nt, Artificial Sequence
  Description of Artificial Sequence: Synthetic oligonucleotide
auauacgggaauucugauc

SEQ ID NO: 777060 - RNA, 19 nt, Artificial Sequence
  Description of Artificial Sequence: Synthetic oligonucleotide
augcacgaagucuucagcg

SEQ ID NO: 777061 - RNA, 19 nt, Artificial Sequence
  Description of Artificial Sequence: Synthetic oligonucleotide
agacaugcgugauaaaucu

SEQ ID NO: 777062 - RNA, 19 nt, Artificial Sequence
  Description of Artificial Sequence: Synthetic oligonucleotide
gagcgagucaccaugaagc

SEQ ID NO: 777063 - RNA, 19 nt, Artificial Sequence
  Description of Artificial Sequence: Synthetic oligonucleotide
gcaacaaaggcucaugucc

SEQ ID NO: 777064 - RNA, 19 nt, Artificial Sequence
  Description of Artificial Sequence: Synthetic oligonucleotide
uuuuguagauaaagggagu

SEQ ID NO: 777065 - RNA, 19 nt, Artificial Sequence
  Description of Artificial Sequence: Synthetic oligonucleotide
cuuuaccucccaaugacac

SEQ ID NO: 777066 - RNA, 19 nt, Artificial Sequence
  Description of Artificial Sequence: Synthetic oligonucleotide
guuguagugcuguuuacug

SEQ ID NO: 777067 - RNA, 19 nt, Artificial Sequence
  Description of Artificial Sequence: Synthetic oligonucleotide
auaggagcgagucaccaug

SEQ ID NO: 777068 - RNA, 19 nt, Artificial Sequence
  Description of Artificial Sequence: Synthetic oligonucleotide
uccacucagauauacggga

SEQ ID NO: 777069 - RNA, 19 nt, Artificial Sequence
  Description of Artificial Sequence: Synthetic oligonucleotide
gaauuuaucuagaaauguc

SEQ ID NO: 777070 - RNA, 19 nt, Artificial Sequence
  Description of Artificial Sequence: Synthetic oligonucleotide
acgguuauccaccaucuug

SEQ ID NO: 777071 - RNA, 19 nt, Artificial Sequence
  Description of Artificial Sequence: Synthetic oligonucleotide
cacauugcgagcaguagag

SEQ ID NO: 777072 - RNA, 19 nt, Artificial Sequence
  Description of Artificial Sequence: Synthetic oligonucleotide
ucacauugcgagcaguaga

SEQ ID NO: 777073 - RNA, 19 nt, Artificial Sequence
  Description of Artificial Sequence: Synthetic oligonucleotide
ucuacaacuuggagggcag

SEQ ID NO: 777074 - RNA, 19 nt, Artificial Sequence
  Description of Artificial Sequence: Synthetic oligonucleotide
ucuacaacucaucucgcau

SEQ ID NO: 777075 - RNA, 19 nt, Artificial Sequence
  Description of Artificial Sequence: Synthetic oligonucleotide
uagaguuacugagggagcg

SEQ ID NO: 777076 - RNA, 19 nt, Artificial Sequence
  Description of Artificial Sequence: Synthetic oligonucleotide
uacaacucaucucgcaucu

SEQ ID NO: 777077 - RNA, 19 nt, Artificial Sequence
  Description of Artificial Sequence: Synthetic oligonucleotide
ccaaugaacagcaacgagc

SEQ ID NO: 777078 - RNA, 19 nt, Artificial Sequence
  Description of Artificial Sequence: Synthetic oligonucleotide
ucagauauacgggaauucu

SEQ ID NO: 777079 - RNA, 19 nt, Artificial Sequence
  Description of Artificial Sequence: Synthetic oligonucleotide
uuucucaucccaguguggc

SEQ ID NO: 777080 - RNA, 19 nt, Artificial Sequence
  Description of Artificial Sequence: Synthetic oligonucleotide
uaucuagaaauguccacuc

SEQ ID NO: 777081 - RNA, 19 nt, Artificial Sequence
  Description of Artificial Sequence: Synthetic oligonucleotide
ugauuaucucgcaccagga

SEQ ID NO: 777082 - RNA, 19 nt, Artificial Sequence
  Description of Artificial Sequence: Synthetic oligonucleotide
ugaucaaagggguugccau

SEQ ID NO: 777083 - RNA, 19 nt, Artificial Sequence
  Description of Artificial Sequence: Synthetic oligonucleotide
acaaagagggcugcccugc

SEQ ID NO: 777084 - RNA, 19 nt, Artificial Sequence
  Description of Artificial Sequence: Synthetic oligonucleotide
aguaucugggccccauauc

SEQ ID NO: 777085 - RNA, 19 nt, Artificial Sequence
  Description of Artificial Sequence: Synthetic oligonucleotide
agauauacgggaauucuga

SEQ ID NO: 777086 - RNA, 19 nt, Artificial Sequence
  Description of Artificial Sequence: Synthetic oligonucleotide
agccgcucugauuaucucg

SEQ ID NO: 777087 - RNA, 19 nt, Artificial Sequence
  Description of Artificial Sequence: Synthetic oligonucleotide
uuuacaagcagugccccgu

SEQ ID NO: 777088 - RNA, 19 nt, Artificial Sequence
  Description of Artificial Sequence: Synthetic oligonucleotide
caugccaugcccacucagg

SEQ ID NO: 777089 - RNA, 19 nt, Artificial Sequence
  Description of Artificial Sequence: Synthetic oligonucleotide
caguauaggagcgagucac

SEQ ID NO: 777090 - RNA, 19 nt, Artificial Sequence
  Description of Artificial Sequence: Synthetic oligonucleotide
ggcguuuacaagcagugcc

SEQ ID NO: 777091 - RNA, 19 nt, Artificial Sequence
  Description of Artificial Sequence: Synthetic oligonucleotide
uuuuaaggguggccagucc

SEQ ID NO: 777092 - RNA, 19 nt, Artificial Sequence
  Description of Artificial Sequence: Synthetic oligonucleotide
cagauauacgggaauucug

SEQ ID NO: 777093 - RNA, 19 nt, Artificial Sequence
  Description of Artificial Sequence: Synthetic oligonucleotide
cauauccuaguacggcugg

SEQ ID NO: 777094 - RNA, 19 nt, Artificial Sequence
  Description of Artificial Sequence: Synthetic oligonucleotide
cugauugacugugaggcag

SEQ ID NO: 777095 - RNA, 19 nt, Artificial Sequence
  Description of Artificial Sequence: Synthetic oligonucleotide
gacugucucacagauaaga

SEQ ID NO: 777096 - RNA, 19 nt, Artificial Sequence
  Description of Artificial Sequence: Synthetic oligonucleotide
caugcgugauaaaucugcc

SEQ ID NO: 777097 - RNA, 19 nt, Artificial Sequence
  Description of Artificial Sequence: Synthetic oligonucleotide
ggccccauauccuaguacg

SEQ ID NO: 777098 - RNA, 19 nt, Artificial Sequence
  Description of Artificial Sequence: Synthetic oligonucleotide
guagauaaagggaguuggg

SEQ ID NO: 777099 - RNA, 19 nt, Artificial Sequence
  Description of Artificial Sequence: Synthetic oligonucleotide
gagaacgcauggcugggag

SEQ ID NO: 777100 - RNA, 19 nt, Artificial Sequence
  Description of Artificial Sequence: Synthetic oligonucleotide
agaaauguccacucagaua

SEQ ID NO: 777101 - RNA, 19 nt, Artificial Sequence
  Description of Artificial Sequence: Synthetic oligonucleotide
agcaguagaguuacugagg

SEQ ID NO: 777102 - RNA, 19 nt, Artificial Sequence
  Description of Artificial Sequence: Synthetic oligonucleotide
uguuuacugcuaugcacga

SEQ ID NO: 777103 - RNA, 19 nt, Artificial Sequence
  Description of Artificial Sequence: Synthetic oligonucleotide
aaucuacaacuuggagggc

SEQ ID NO: 777104 - RNA, 19 nt, Artificial Sequence
  Description of Artificial Sequence: Synthetic oligonucleotide
guuacugagggagcgcagg

SEQ ID NO: 777105 - RNA, 19 nt, Artificial Sequence
  Description of Artificial Sequence: Synthetic oligonucleotide
uggcuuuaccucccaauga

SEQ ID NO: 777106 - RNA, 19 nt, Artificial Sequence
  Description of Artificial Sequence: Synthetic oligonucleotide
gccauaaauaugaacacug

SEQ ID NO: 777107 - RNA, 19 nt, Artificial Sequence
  Description of Artificial Sequence: Synthetic oligonucleotide
acucaggggcucuacaacu

SEQ ID NO: 777108 - RNA, 19 nt, Artificial Sequence
  Description of Artificial Sequence: Synthetic oligonucleotide
ggcaagggucauuuuaagg

SEQ ID NO: 777109 - RNA, 19 nt, Artificial Sequence
  Description of Artificial Sequence: Synthetic oligonucleotide
gcagauugaaucuacaacu

SEQ ID NO: 777110 - RNA, 19 nt, Artificial Sequence
  Description of Artificial Sequence: Synthetic oligonucleotide
uccggugcaucauuguaac

SEQ ID NO: 777111 - RNA, 19 nt, Artificial Sequence
  Description of Artificial Sequence: Synthetic oligonucleotide
uugccugcgaugcuguggu

SEQ ID NO: 777112 - RNA, 19 nt, Artificial Sequence
  Description of Artificial Sequence: Synthetic oligonucleotide
auaaagggaguugggagcu

SEQ ID NO: 777113 - RNA, 19 nt, Artificial Sequence
  Description of Artificial Sequence: Synthetic oligonucleotide
uaacacccacaguauagga

SEQ ID NO: 777114 - RNA, 19 nt, Artificial Sequence
  Description of Artificial Sequence: Synthetic oligonucleotide
ugauugacugugaggcaga

SEQ ID NO: 777115 - RNA, 19 nt, Artificial Sequence
  Description of Artificial Sequence: Synthetic oligonucleotide
acagcaacgagccgcucug

SEQ ID NO: 777116 - RNA, 19 nt, Artificial Sequence
  Description of Artificial Sequence: Synthetic oligonucleotide
aguauaggagcgagucacc

SEQ ID NO: 777117 - RNA, 19 nt, Artificial Sequence
  Description of Artificial Sequence: Synthetic oligonucleotide
caguguggcuuaaagaaca

SEQ ID NO: 777118 - RNA, 19 nt, Artificial Sequence
  Description of Artificial Sequence: Synthetic oligonucleotide
agaacgcauggcugggagg

SEQ ID NO: 777119 - RNA, 19 nt, Artificial Sequence
  Description of Artificial Sequence: Synthetic oligonucleotide
aagggucauuuuaagggug

SEQ ID NO: 777120 - RNA, 19 nt, Artificial Sequence
  Description of Artificial Sequence: Synthetic oligonucleotide
caacucgacugucucacag

SEQ ID NO: 777121 - RNA, 19 nt, Artificial Sequence
  Description of Artificial Sequence: Synthetic oligonucleotide
uguagagaccuguccggug

SEQ ID NO: 777122 - RNA, 19 nt, Artificial Sequence
  Description of Artificial Sequence: Synthetic oligonucleotide
ugagaggcccacucguuga

SEQ ID NO: 777123 - RNA, 19 nt, Artificial Sequence
  Description of Artificial Sequence: Synthetic oligonucleotide
uuacugagggagcgcagga

SEQ ID NO: 777124 - RNA, 19 nt, Artificial Sequence
  Description of Artificial Sequence: Synthetic oligonucleotide
accucugguagcuugccgu

SEQ ID NO: 777125 - RNA, 19 nt, Artificial Sequence
  Description of Artificial Sequence: Synthetic oligonucleotide
uacgggaauucugaucugc

SEQ ID NO: 777126 - RNA, 19 nt, Artificial Sequence
  Description of Artificial Sequence: Synthetic oligonucleotide
ucccaguguggcuuaaaga

SEQ ID NO: 777127 - RNA, 19 nt, Artificial Sequence
  Description of Artificial Sequence: Synthetic oligonucleotide
uucgcaguuguagugcugu

SEQ ID NO: 777128 - RNA, 19 nt, Artificial Sequence
  Description of Artificial Sequence: Synthetic oligonucleotide
uccucacgcccguagaugu

SEQ ID NO: 777129 - RNA, 19 nt, Artificial Sequence
  Description of Artificial Sequence: Synthetic oligonucleotide
gaaggagagaacgcauggc

SEQ ID NO: 777130 - RNA, 19 nt, Artificial Sequence
  Description of Artificial Sequence: Synthetic oligonucleotide
augucuugaucaaaggggu

SEQ ID NO: 777131 - RNA, 19 nt, Artificial Sequence
  Description of Artificial Sequence: Synthetic oligonucleotide
uuguaacacccacaguaua

SEQ ID NO: 777132 - RNA, 19 nt, Artificial Sequence
  Description of Artificial Sequence: Synthetic oligonucleotide
gcucugauuaucucgcacc

SEQ ID NO: 777133 - RNA, 19 nt, Artificial Sequence
  Description of Artificial Sequence: Synthetic oligonucleotide
gcuguuuacugcuaugcac

SEQ ID NO: 777134 - RNA, 19 nt, Artificial Sequence
  Description of Artificial Sequence: Synthetic oligonucleotide
acagccuuugccugcgaug

SEQ ID NO: 777135 - RNA, 19 nt, Artificial Sequence
  Description of Artificial Sequence: Synthetic oligonucleotide
acugcgcuugucucggaag

SEQ ID NO: 777136 - RNA, 19 nt, Artificial Sequence
  Description of Artificial Sequence: Synthetic oligonucleotide
ggaauauccaagguuguac

SEQ ID NO: 777137 - RNA, 19 nt, Artificial Sequence
  Description of Artificial Sequence: Synthetic oligonucleotide
uccuaugcugucucccagc

SEQ ID NO: 777138 - RNA, 19 nt, Artificial Sequence
  Description of Artificial Sequence: Synthetic oligonucleotide
gauuaucucgcaccaggaa

SEQ ID NO: 777139 - RNA, 19 nt, Artificial Sequence
  Description of Artificial Sequence: Synthetic oligonucleotide
cauagaacagcuuggggcu

SEQ ID NO: 777140 - RNA, 19 nt, Artificial Sequence
  Description of Artificial Sequence: Synthetic oligonucleotide
aacacacuggcuagguaca

SEQ ID NO: 777141 - RNA, 19 nt, Artificial Sequence
  Description of Artificial Sequence: Synthetic oligonucleotide
auaugaacacugauugacu

SEQ ID NO: 777142 - RNA, 19 nt, Artificial Sequence
  Description of Artificial Sequence: Synthetic oligonucleotide
gguagcuugccgucagugg

SEQ ID NO: 777143 - RNA, 19 nt, Artificial Sequence
  Description of Artificial Sequence: Synthetic oligonucleotide
uccuaguacggcuggaauu

SEQ ID NO: 777144 - RNA, 19 nt, Artificial Sequence
  Description of Artificial Sequence: Synthetic oligonucleotide
aaacagaaguucaccccug

SEQ ID NO: 777145 - RNA, 19 nt, Artificial Sequence
  Description of Artificial Sequence: Synthetic oligonucleotide
cuugggccggaccaggcgc

SEQ ID NO: 777146 - RNA, 19 nt, Artificial Sequence
  Description of Artificial Sequence: Synthetic oligonucleotide
uuguacaaauuaaguccuc

SEQ ID NO: 777147 - RNA, 19 nt, Artificial Sequence
  Description of Artificial Sequence: Synthetic oligonucleotide
cacgaagucuucagcgaag

SEQ ID NO: 777148 - RNA, 19 nt, Artificial Sequence
  Description of Artificial Sequence: Synthetic oligonucleotide
uaucugggccccauauccu

SEQ ID NO: 777149 - RNA, 19 nt, Artificial Sequence
  Description of Artificial Sequence: Synthetic oligonucleotide
ggaguguucgcaguuguag

SEQ ID NO: 777150 - RNA, 19 nt, Artificial Sequence
  Description of Artificial Sequence: Synthetic oligonucleotide
guuucugcaggucaugggu

SEQ ID NO: 777151 - RNA, 19 nt, Artificial Sequence
  Description of Artificial Sequence: Synthetic oligonucleotide
uaggagcgagucaccauga

SEQ ID NO: 777152 - RNA, 19 nt, Artificial Sequence
  Description of Artificial Sequence: Synthetic oligonucleotide
caccuaguuuuguagauaa

SEQ ID NO: 777153 - RNA, 19 nt, Artificial Sequence
  Description of Artificial Sequence: Synthetic oligonucleotide
acugauugacugugaggca

SEQ ID NO: 777154 - RNA, 19 nt, Artificial Sequence
  Description of Artificial Sequence: Synthetic oligonucleotide
ggcuuuaccucccaaugac

SEQ ID NO: 777155 - RNA, 19 nt, Artificial Sequence
  Description of Artificial Sequence: Synthetic oligonucleotide
uugcgagcaguagaguuac

SEQ ID NO: 777156 - RNA, 19 nt, Artificial Sequence
  Description of Artificial Sequence: Synthetic oligonucleotide
augcgugauaaaucugccu

SEQ ID NO: 777157 - RNA, 19 nt, Artificial Sequence
  Description of Artificial Sequence: Synthetic oligonucleotide
accgccuggucuuuggcca

SEQ ID NO: 777158 - RNA, 19 nt, Artificial Sequence
  Description of Artificial Sequence: Synthetic oligonucleotide
cauagccugauacaggcua

SEQ ID NO: 777159 - RNA, 19 nt, Artificial Sequence
  Description of Artificial Sequence: Synthetic oligonucleotide
gaugacugagacaccccug

SEQ ID NO: 777160 - RNA, 19 nt, Artificial Sequence
  Description of Artificial Sequence: Synthetic oligonucleotide
gaccucugguagcuugccg

SEQ ID NO: 777161 - RNA, 19 nt, Artificial Sequence
  Description of Artificial Sequence: Synthetic oligonucleotide
caucucgcaucuugucucc

SEQ ID NO: 777162 - RNA, 19 nt, Artificial Sequence
  Description of Artificial Sequence: Synthetic oligonucleotide
auagcacccaugugucuca

SEQ ID NO: 777163 - RNA, 19 nt, Artificial Sequence
  Description of Artificial Sequence: Synthetic oligonucleotide
gccgucaguggucugagag

SEQ ID NO: 777164 - RNA, 19 nt, Artificial Sequence
  Description of Artificial Sequence: Synthetic oligonucleotide
cucagauauacgggaauuc

SEQ ID NO: 777165 - RNA, 19 nt, Artificial Sequence
  Description of Artificial Sequence: Synthetic oligonucleotide
caacgagccgcucugauua

SEQ ID NO: 777166 - RNA, 19 nt, Artificial Sequence
  Description of Artificial Sequence: Synthetic oligonucleotide
ugguagcuugccgucagug

SEQ ID NO: 777167 - RNA, 19 nt, Artificial Sequence
  Description of Artificial Sequence: Synthetic oligonucleotide
guagaguuacugagggagc

SEQ ID NO: 777168 - RNA, 19 nt, Artificial Sequence
  Description of Artificial Sequence: Synthetic oligonucleotide
ggagcgagucaccaugaag

SEQ ID NO: 777169 - RNA, 19 nt, Artificial Sequence
  Description of Artificial Sequence: Synthetic oligonucleotide
auacaggcggcugcccagc

SEQ ID NO: 777170 - RNA, 19 nt, Artificial Sequence
  Description of Artificial Sequence: Synthetic oligonucleotide
gucacauugcgagcaguag

SEQ ID NO: 777171 - RNA, 19 nt, Artificial Sequence
  Description of Artificial Sequence: Synthetic oligonucleotide
cucggcgcuuagcacagcc

SEQ ID NO: 777172 - RNA, 19 nt, Artificial Sequence
  Description of Artificial Sequence: Synthetic oligonucleotide
auguccacucagauauacg

SEQ ID NO: 777173 - RNA, 19 nt, Artificial Sequence
  Description of Artificial Sequence: Synthetic oligonucleotide
guguucgcaguuguagugc

SEQ ID NO: 777174 - RNA, 19 nt, Artificial Sequence
  Description of Artificial Sequence: Synthetic oligonucleotide
ggcaucagaguaucugggc

SEQ ID NO: 777175 - RNA, 19 nt, Artificial Sequence
  Description of Artificial Sequence: Synthetic oligonucleotide
gugcaucauuguaacaccc

SEQ ID NO: 777176 - RNA, 19 nt, Artificial Sequence
  Description of Artificial Sequence: Synthetic oligonucleotide
auggaacacacuggcuagg

SEQ ID NO: 777177 - RNA, 19 nt, Artificial Sequence
  Description of Artificial Sequence: Synthetic oligonucleotide
gaguuacugagggagcgca

SEQ ID NO: 777178 - RNA, 19 nt, Artificial Sequence
  Description of Artificial Sequence: Synthetic oligonucleotide
uaguacggcuggaauuuau

SEQ ID NO: 777179 - RNA, 19 nt, Artificial Sequence
  Description of Artificial Sequence: Synthetic oligonucleotide
uauccuaguacggcuggaa

SEQ ID NO: 777180 - RNA, 19 nt, Artificial Sequence
  Description of Artificial Sequence: Synthetic oligonucleotide
gacaugcgugauaaaucug

SEQ ID NO: 777181 - RNA, 19 nt, Artificial Sequence
  Description of Artificial Sequence: Synthetic oligonucleotide
accaugaagccacgguuau

SEQ ID NO: 777182 - RNA, 19 nt, Artificial Sequence
  Description of Artificial Sequence: Synthetic oligonucleotide
uuacaagcagugccccguc

SEQ ID NO: 777183 - RNA, 19 nt, Artificial Sequence
  Description of Artificial Sequence: Synthetic oligonucleotide
ccgugucccacucaaaggc

SEQ ID NO: 777184 - RNA, 19 nt, Artificial Sequence
  Description of Artificial Sequence: Synthetic oligonucleotide
uggcucuagagcaggguuu

SEQ ID NO: 777185 - RNA, 19 nt, Artificial Sequence
  Description of Artificial Sequence: Synthetic oligonucleotide
caggcuaaaggccaggccu

SEQ ID NO: 777186 - RNA, 19 nt, Artificial Sequence
  Description of Artificial Sequence: Synthetic oligonucleotide
gauauacgggaauucugau

SEQ ID NO: 777187 - RNA, 19 nt, Artificial Sequence
  Description of Artificial Sequence: Synthetic oligonucleotide
ggaauuuaucuagaaaugu

SEQ ID NO: 777188 - RNA, 19 nt, Artificial Sequence
  Description of Artificial Sequence: Synthetic oligonucleotide
auccuaguacggcuggaau

SEQ ID NO: 777189 - RNA, 19 nt, Artificial Sequence
  Description of Artificial Sequence: Synthetic oligonucleotide
uacaagcagugccccgucu

SEQ ID NO: 777190 - RNA, 19 nt, Artificial Sequence
  Description of Artificial Sequence: Synthetic oligonucleotide
acucagauauacgggaauu

SEQ ID NO: 777191 - RNA, 19 nt, Artificial Sequence
  Description of Artificial Sequence: Synthetic oligonucleotide
gcuuagcacagccuuugcc

SEQ ID NO: 777192 - RNA, 19 nt, Artificial Sequence
  Description of Artificial Sequence: Synthetic oligonucleotide
cuacagguuucuucaccuc

SEQ ID NO: 777193 - RNA, 19 nt, Artificial Sequence
  Description of Artificial Sequence: Synthetic oligonucleotide
auugcgagcaguagaguua

SEQ ID NO: 777194 - RNA, 19 nt, Artificial Sequence
  Description of Artificial Sequence: Synthetic oligonucleotide
ugucucggaaguugauuuu

SEQ ID NO: 777195 - RNA, 19 nt, Artificial Sequence
  Description of Artificial Sequence: Synthetic oligonucleotide
cccguagaugucuugauca

SEQ ID NO: 777196 - RNA, 19 nt, Artificial Sequence
  Description of Artificial Sequence: Synthetic oligonucleotide
caccgccuggucuuuggcc

SEQ ID NO: 777197 - RNA, 19 nt, Artificial Sequence
  Description of Artificial Sequence: Synthetic oligonucleotide
uggcguuuacaagcagugc

SEQ ID NO: 777198 - RNA, 19 nt, Artificial Sequence
  Description of Artificial Sequence: Synthetic oligonucleotide
caccccauggaauauccaa

SEQ ID NO: 777199 - RNA, 19 nt, Artificial Sequence
  Description of Artificial Sequence: Synthetic oligonucleotide
auacgggaauucugaucug

SEQ ID NO: 777200 - RNA, 19 nt, Artificial Sequence
  Description of Artificial Sequence: Synthetic oligonucleotide
ccagggaacccuccuaugc

SEQ ID NO: 777201 - RNA, 19 nt, Artificial Sequence
  Description of Artificial Sequence: Synthetic oligonucleotide
caguuguagugcuguuuac

SEQ ID NO: 777202 - RNA, 19 nt, Artificial Sequence
  Description of Artificial Sequence: Synthetic oligonucleotide
aucucgcaucuugucuccc

SEQ ID NO: 777203 - RNA, 19 nt, Artificial Sequence
  Description of Artificial Sequence: Synthetic oligonucleotide
agaaaggacuuggccauaa

SEQ ID NO: 777204 - RNA, 19 nt, Artificial Sequence
  Description of Artificial Sequence: Synthetic oligonucleotide
gaacgcauggcugggaggu

SEQ ID NO: 777205 - RNA, 19 nt, Artificial Sequence
  Description of Artificial Sequence: Synthetic oligonucleotide
agccugauacaggcuaaag

SEQ ID NO: 777206 - RNA, 19 nt, Artificial Sequence
  Description of Artificial Sequence: Synthetic oligonucleotide
cucggaaguugauuuugga

SEQ ID NO: 777207 - RNA, 19 nt, Artificial Sequence
  Description of Artificial Sequence: Synthetic oligonucleotide
gcgugauaaaucugccuug

SEQ ID NO: 777208 - RNA, 19 nt, Artificial Sequence
  Description of Artificial Sequence: Synthetic oligonucleotide
auggaauauccaagguugu

SEQ ID NO: 777209 - RNA, 19 nt, Artificial Sequence
  Description of Artificial Sequence: Synthetic oligonucleotide
ucggcgcuuagcacagccu

SEQ ID NO: 777210 - RNA, 19 nt, Artificial Sequence
  Description of Artificial Sequence: Synthetic oligonucleotide
uugccgucaguggucugag

SEQ ID NO: 777211 - RNA, 19 nt, Artificial Sequence
  Description of Artificial Sequence: Synthetic oligonucleotide
cuacaacuuggagggcagg

SEQ ID NO: 777212 - RNA, 19 nt, Artificial Sequence
  Description of Artificial Sequence: Synthetic oligonucleotide
ccauauccuaguacggcug

SEQ ID NO: 777213 - RNA, 19 nt, Artificial Sequence
  Description of Artificial Sequence: Synthetic oligonucleotide
cacucguugauggacugca

SEQ ID NO: 777214 - RNA, 19 nt, Artificial Sequence
  Description of Artificial Sequence: Synthetic oligonucleotide
agcaacgagccgcucugau

SEQ ID NO: 777215 - RNA, 19 nt, Artificial Sequence
  Description of Artificial Sequence: Synthetic oligonucleotide
aacgagccgcucugauuau

SEQ ID NO: 777216 - RNA, 19 nt, Artificial Sequence
  Description of Artificial Sequence: Synthetic oligonucleotide
caugggugaccuccaccac

SEQ ID NO: 777217 - RNA, 19 nt, Artificial Sequence
  Description of Artificial Sequence: Synthetic oligonucleotide
cauugcgagcaguagaguu

SEQ ID NO: 777218 - RNA, 19 nt, Artificial Sequence
  Description of Artificial Sequence: Synthetic oligonucleotide
ugccauccgugucccacuc

SEQ ID NO: 777219 - RNA, 19 nt, Artificial Sequence
  Description of Artificial Sequence: Synthetic oligonucleotide
cacggagcugggcccauac

SEQ ID NO: 777220 - RNA, 19 nt, Artificial Sequence
  Description of Artificial Sequence: Synthetic oligonucleotide
ccgucaguggucugagagg

SEQ ID NO: 777221 - RNA, 19 nt, Artificial Sequence
  Description of Artificial Sequence: Synthetic oligonucleotide
auauccuaguacggcugga

SEQ ID NO: 777222 - RNA, 19 nt, Artificial Sequence
  Description of Artificial Sequence: Synthetic oligonucleotide
accccugaauuuggcauca

SEQ ID NO: 777223 - RNA, 19 nt, Artificial Sequence
  Description of Artificial Sequence: Synthetic oligonucleotide
aacgcauggcugggaggug

SEQ ID NO: 777224 - RNA, 19 nt, Artificial Sequence
  Description of Artificial Sequence: Synthetic oligonucleotide
gccgcucugauuaucucgc

SEQ ID NO: 777225 - RNA, 19 nt, Artificial Sequence
  Description of Artificial Sequence: Synthetic oligonucleotide
aagaaaggacuuggccaua

SEQ ID NO: 777226 - RNA, 19 nt, Artificial Sequence
  Description of Artificial Sequence: Synthetic oligonucleotide
auagccugauacaggcuaa

SEQ ID NO: 777227 - RNA, 19 nt, Artificial Sequence
  Description of Artificial Sequence: Synthetic oligonucleotide
cagauugaaucuacaacuu

SEQ ID NO: 777228 - RNA, 19 nt, Artificial Sequence
  Description of Artificial Sequence: Synthetic oligonucleotide
acauugcgagcaguagagu

SEQ ID NO: 777229 - RNA, 19 nt, Artificial Sequence
  Description of Artificial Sequence: Synthetic oligonucleotide
ggcucuagagcaggguuug

SEQ ID NO: 777230 - RNA, 19 nt, Artificial Sequence
  Description of Artificial Sequence: Synthetic oligonucleotide
acgagccgcucugauuauc

SEQ ID NO: 777231 - RNA, 19 nt, Artificial Sequence
  Description of Artificial Sequence: Synthetic oligonucleotide
cuccgucaggcccagucca

SEQ ID NO: 777232 - RNA, 19 nt, Artificial Sequence
  Description of Artificial Sequence: Synthetic oligonucleotide
acgcccguagaugucuuga

SEQ ID NO: 777233 - RNA, 19 nt, Artificial Sequence
  Description of Artificial Sequence: Synthetic oligonucleotide
caguagaguuacugaggga

SEQ ID NO: 777234 - RNA, 19 nt, Artificial Sequence
  Description of Artificial Sequence: Synthetic oligonucleotide
ugagggagcgcaggagcuc

SEQ ID NO: 777235 - RNA, 19 nt, Artificial Sequence
  Description of Artificial Sequence: Synthetic oligonucleotide
gcgcccaaugaacagcaac

SEQ ID NO: 777236 - RNA, 19 nt, Artificial Sequence
  Description of Artificial Sequence: Synthetic oligonucleotide
agcuugccgucaguggucu

SEQ ID NO: 777237 - RNA, 19 nt, Artificial Sequence
  Description of Artificial Sequence: Synthetic oligonucleotide
aggcgcccaaugaacagca

SEQ ID NO: 777238 - RNA, 19 nt, Artificial Sequence
  Description of Artificial Sequence: Synthetic oligonucleotide
gagaccuguccggugcauc

SEQ ID NO: 777239 - RNA, 19 nt, Artificial Sequence
  Description of Artificial Sequence: Synthetic oligonucleotide
ccuguccggugcaucauug

SEQ ID NO: 777240 - RNA, 19 nt, Artificial Sequence
  Description of Artificial Sequence: Synthetic oligonucleotide
cagugccccgucugugcgc

SEQ ID NO: 777241 - RNA, 19 nt, Artificial Sequence
  Description of Artificial Sequence: Synthetic oligonucleotide
ggaccaggcgcccaaugaa

SEQ ID NO: 777242 - RNA, 19 nt, Artificial Sequence
  Description of Artificial Sequence: Synthetic oligonucleotide
ugcgagcaguagaguuacu

SEQ ID NO: 777243 - RNA, 19 nt, Artificial Sequence
  Description of Artificial Sequence: Synthetic oligonucleotide
uggggcuucgcagcuccuc

SEQ ID NO: 777244 - RNA, 19 nt, Artificial Sequence
  Description of Artificial Sequence: Synthetic oligonucleotide
ucacgcccguagaugucuu

SEQ ID NO: 777245 - RNA, 19 nt, Artificial Sequence
  Description of Artificial Sequence: Synthetic oligonucleotide
auugacugugaggcagauu

SEQ ID NO: 777246 - RNA, 19 nt, Artificial Sequence
  Description of Artificial Sequence: Synthetic oligonucleotide
gccuuugccugcgaugcug

SEQ ID NO: 777247 - RNA, 19 nt, Artificial Sequence
  Description of Artificial Sequence: Synthetic oligonucleotide
ccuccgucaggcccagucc

SEQ ID NO: 777248 - RNA, 19 nt, Artificial Sequence
  Description of Artificial Sequence: Synthetic oligonucleotide
gaacccuccuaugcugucu

SEQ ID NO: 777249 - RNA, 19 nt, Artificial Sequence
  Description of Artificial Sequence: Synthetic oligonucleotide
gcuuuaccucccaaugaca

SEQ ID NO: 777250 - RNA, 19 nt, Artificial Sequence
  Description of Artificial Sequence: Synthetic oligonucleotide
gcgcuuagcacagccuuug

SEQ ID NO: 777251 - RNA, 19 nt, Artificial Sequence
  Description of Artificial Sequence: Synthetic oligonucleotide
gcccguagaugucuugauc

SEQ ID NO: 777252 - RNA, 19 nt, Artificial Sequence
  Description of Artificial Sequence: Synthetic oligonucleotide
gcuaugcacgaagucuuca

SEQ ID NO: 777253 - RNA, 19 nt, Artificial Sequence
  Description of Artificial Sequence: Synthetic oligonucleotide
ugccgucaguggucugaga

SEQ ID NO: 777254 - RNA, 19 nt, Artificial Sequence
  Description of Artificial Sequence: Synthetic oligonucleotide
uuggggcuucgcagcuccu

SEQ ID NO: 777255 - RNA, 19 nt, Artificial Sequence
  Description of Artificial Sequence: Synthetic oligonucleotide
cacucagauauacgggaau

SEQ ID NO: 777256 - RNA, 19 nt, Artificial Sequence
  Description of Artificial Sequence: Synthetic oligonucleotide
guggucgccuuggaacuca

SEQ ID NO: 777257 - RNA, 19 nt, Artificial Sequence
  Description of Artificial Sequence: Synthetic oligonucleotide
gccuccgucaggcccaguc

SEQ ID NO: 777258 - RNA, 19 nt, Artificial Sequence
  Description of Artificial Sequence: Synthetic oligonucleotide
accuaguuuuguagauaaa

SEQ ID NO: 777259 - RNA, 19 nt, Artificial Sequence
  Description of Artificial Sequence: Synthetic oligonucleotide
gcucuacaacucaucucgc

SEQ ID NO: 777260 - RNA, 19 nt, Artificial Sequence
  Description of Artificial Sequence: Synthetic oligonucleotide
ccucugguagcuugccguc

SEQ ID NO: 777261 - RNA, 19 nt, Artificial Sequence
  Description of Artificial Sequence: Synthetic oligonucleotide
cccuccuaugcugucuccc

SEQ ID NO: 777262 - RNA, 19 nt, Artificial Sequence
  Description of Artificial Sequence: Synthetic oligonucleotide
cuugucucggaaguugauu

SEQ ID NO: 777263 - RNA, 19 nt, Artificial Sequence
  Description of Artificial Sequence: Synthetic oligonucleotide
cccacucguugauggacug

SEQ ID NO: 777264 - RNA, 19 nt, Artificial Sequence
  Description of Artificial Sequence: Synthetic oligonucleotide
agagaccuguccggugcau

SEQ ID NO: 777265 - RNA, 19 nt, Artificial Sequence
  Description of Artificial Sequence: Synthetic oligonucleotide
gagaggcccacucguugau

SEQ ID NO: 777266 - RNA, 19 nt, Artificial Sequence
  Description of Artificial Sequence: Synthetic oligonucleotide
guagugcuguuuacugcua

SEQ ID NO: 777267 - RNA, 19 nt, Artificial Sequence
  Description of Artificial Sequence: Synthetic oligonucleotide
cucgacugucucacagaua

SEQ ID NO: 777268 - RNA, 19 nt, Artificial Sequence
  Description of Artificial Sequence: Synthetic oligonucleotide
cccauauccuaguacggcu

SEQ ID NO: 777269 - RNA, 19 nt, Artificial Sequence
  Description of Artificial Sequence: Synthetic oligonucleotide
ccuccuaugcugucuccca

SEQ ID NO: 777270 - RNA, 19 nt, Artificial Sequence
  Description of Artificial Sequence: Synthetic oligonucleotide
gugauaaaucugccuuguu

SEQ ID NO: 777271 - RNA, 19 nt, Artificial Sequence
  Description of Artificial Sequence: Synthetic oligonucleotide
cccugaauuuggcaucaga

SEQ ID NO: 777272 - RNA, 19 nt, Artificial Sequence
  Description of Artificial Sequence: Synthetic oligonucleotide
cauccgugucccacucaaa

SEQ ID NO: 777273 - RNA, 19 nt, Artificial Sequence
  Description of Artificial Sequence: Synthetic oligonucleotide
cccaagguaguggcucuag

SEQ ID NO: 777274 - RNA, 19 nt, Artificial Sequence
  Description of Artificial Sequence: Synthetic oligonucleotide
ccacucagauauacgggaa

SEQ ID NO: 777275 - RNA, 19 nt, Artificial Sequence
  Description of Artificial Sequence: Synthetic oligonucleotide
ccauccgugucccacucaa

SEQ ID NO: 777276 - RNA, 19 nt, Artificial Sequence
  Description of Artificial Sequence: Synthetic oligonucleotide
gaacagcaacgagccgcuc

SEQ ID NO: 777277 - RNA, 19 nt, Artificial Sequence
  Description of Artificial Sequence: Synthetic oligonucleotide
gcccauacaggcggcugcc

SEQ ID NO: 777278 - RNA, 19 nt, Artificial Sequence
  Description of Artificial Sequence: Synthetic oligonucleotide
gcgagucaccaugaagcca

SEQ ID NO: 777279 - RNA, 19 nt, Artificial Sequence
  Description of Artificial Sequence: Synthetic oligonucleotide
cuguccggugcaucauugu

SEQ ID NO: 777280 - RNA, 19 nt, Artificial Sequence
  Description of Artificial Sequence: Synthetic oligonucleotide
cuugccagacaugcgugau

SEQ ID NO: 777281 - RNA, 19 nt, Artificial Sequence
  Description of Artificial Sequence: Synthetic oligonucleotide
ccguagaugucuugaucaa

SEQ ID NO: 777282 - RNA, 19 nt, Artificial Sequence
  Description of Artificial Sequence: Synthetic oligonucleotide
ccacucguugauggacugc

SEQ ID NO: 777283 - RNA, 19 nt, Artificial Sequence
  Description of Artificial Sequence: Synthetic oligonucleotide
cuaguacggcuggaauuua

SEQ ID NO: 777284 - RNA, 19 nt, Artificial Sequence
  Description of Artificial Sequence: Synthetic oligonucleotide
ccaagguaguggcucuaga

SEQ ID NO: 777285 - RNA, 19 nt, Artificial Sequence
  Description of Artificial Sequence: Synthetic oligonucleotide
gcaccuaguuuuguagaua

SEQ ID NO: 777286 - RNA, 19 nt, Artificial Sequence
  Description of Artificial Sequence: Synthetic oligonucleotide
ccuaguacggcuggaauuu

SEQ ID NO: 777287 - RNA, 19 nt, Artificial Sequence
  Description of Artificial Sequence: Synthetic oligonucleotide
ccuaugcugucucccagcu

SEQ ID NO: 777288 - RNA, 19 nt, Artificial Sequence
  Description of Artificial Sequence: Synthetic oligonucleotide
gguggucgccuuggaacuc

SEQ ID NO: 777289 - RNA, 19 nt, Artificial Sequence
  Description of Artificial Sequence: Synthetic oligonucleotide
cgcuuagcacagccuuugc

SEQ ID NO: 777290 - RNA, 19 nt, Artificial Sequence
  Description of Artificial Sequence: Synthetic oligonucleotide
ucacggagcugggcccaua

SEQ ID NO: 777291 - RNA, 19 nt, Artificial Sequence
  Description of Artificial Sequence: Synthetic oligonucleotide
gcaacgagccgcucugauu

SEQ ID NO: 777292 - RNA, 19 nt, Artificial Sequence
  Description of Artificial Sequence: Synthetic oligonucleotide
cccauacaggcggcugccc

SEQ ID NO: 777293 - RNA, 19 nt, Artificial Sequence
  Description of Artificial Sequence: Synthetic oligonucleotide
ccggaccaggcgcccaaug

SEQ ID NO: 777294 - RNA, 19 nt, Artificial Sequence
  Description of Artificial Sequence: Synthetic oligonucleotide
cggaccaggcgcccaauga

SEQ ID NO: 777295 - RNA, 19 nt, Artificial Sequence
  Description of Artificial Sequence: Synthetic oligonucleotide
gccauccgugucccacuca

SEQ ID NO: 777296 - RNA, 19 nt, Artificial Sequence
  Description of Artificial Sequence: Synthetic oligonucleotide
cgugauaaaucugccuugu

SEQ ID NO: 777297 - RNA, 19 nt, Artificial Sequence
  Description of Artificial Sequence: Synthetic oligonucleotide
cagcaacgagccgcucuga

SEQ ID NO: 777298 - RNA, 19 nt, Artificial Sequence
  Description of Artificial Sequence: Synthetic oligonucleotide
cagaguaucugggccccau

SEQ ID NO: 777299 - RNA, 19 nt, Artificial Sequence
  Description of Artificial Sequence: Synthetic oligonucleotide
cugguagcuugccgucagu

SEQ ID NO: 777300 - RNA, 19 nt, Artificial Sequence
  Description of Artificial Sequence: Synthetic oligonucleotide
caugugucucaggaaccuu

SEQ ID NO: 777301 - RNA, 19 nt, Artificial Sequence
  Description of Artificial Sequence: Synthetic oligonucleotide
cacgguuauccaccaucuu

SEQ ID NO: 777302 - RNA, 19 nt, Artificial Sequence
  Description of Artificial Sequence: Synthetic oligonucleotide
ccggugcaucauuguaaca

SEQ ID NO: 777303 - RNA, 19 nt, Artificial Sequence
  Description of Artificial Sequence: Synthetic oligonucleotide
cugugcgcuccacauccuu

SEQ ID NO: 777304 - RNA, 19 nt, Artificial Sequence
  Description of Artificial Sequence: Synthetic oligonucleotide
ggcuaaaggccaggccugu

SEQ ID NO: 777305 - RNA, 19 nt, Artificial Sequence
  Description of Artificial Sequence: Synthetic oligonucleotide
gcccacucguugauggacu

SEQ ID NO: 777306 - RNA, 19 nt, Artificial Sequence
  Description of Artificial Sequence: Synthetic oligonucleotide
cccgucugugcgcuccaca

SEQ ID NO: 777307 - RNA, 19 nt, Artificial Sequence
  Description of Artificial Sequence: Synthetic oligonucleotide
ggccggaccaggcgcccaa

SEQ ID NO: 777308 - RNA, 19 nt, Artificial Sequence
  Description of Artificial Sequence: Synthetic oligonucleotide
ccgcucugauuaucucgca

SEQ ID NO: 777309 - RNA, 19 nt, Artificial Sequence
  Description of Artificial Sequence: Synthetic oligonucleotide
gcccacaacucgacugucu

SEQ ID NO: 777310 - RNA, 19 nt, Artificial Sequence
  Description of Artificial Sequence: Synthetic oligonucleotide
cgcucaaggggcuccacau

SEQ ID NO: 777311 - RNA, 19 nt, Artificial Sequence
  Description of Artificial Sequence: Synthetic oligonucleotide
gcuaggcaagggucauuuu

SEQ ID NO: 777312 - RNA, 19 nt, Artificial Sequence
  Description of Artificial Sequence: Synthetic oligonucleotide
cugcgaugcugugguggcu

SEQ ID NO: 777313 - RNA, 19 nt, Artificial Sequence
  Description of Artificial Sequence: Synthetic oligonucleotide
ggcgcuuagcacagccuuu

SEQ ID NO: 777314 - RNA, 19 nt, Artificial Sequence
  Description of Artificial Sequence: Synthetic oligonucleotide
ggcgcccaaugaacagcaa

SEQ ID NO: 777315 - RNA, 19 nt, Artificial Sequence
  Description of Artificial Sequence: Synthetic oligonucleotide
gcgaugcugugguggcuuu

SEQ ID NO: 777316 - RNA, 19 nt, Artificial Sequence
  Description of Artificial Sequence: Synthetic oligonucleotide
gggccggaccaggcgccca

SEQ ID NO: 777317 - RNA, 19 nt, Artificial Sequence
  Description of Artificial Sequence: Synthetic oligonucleotide
ccgccuggucuuuggccau

SEQ ID NO: 777318 - RNA, 19 nt, Artificial Sequence
  Description of Artificial Sequence: Synthetic oligonucleotide
aaaguuuaaaauuacaacc

SEQ ID NO: 777319 - RNA, 19 nt, Artificial Sequence
  Description of Artificial Sequence: Synthetic oligonucleotide
aacuucauuuccuaggucc

SEQ ID NO: 777320 - RNA, 19 nt, Artificial Sequence
  Description of Artificial Sequence: Synthetic oligonucleotide
aagagagaaauguauuuac

SEQ ID NO: 777321 - RNA, 19 nt, Artificial Sequence
  Description of Artificial Sequence: Synthetic oligonucleotide
uuuaacaagagacugcuga

SEQ ID NO: 777322 - RNA, 19 nt, Artificial Sequence
  Description of Artificial Sequence: Synthetic oligonucleotide
aauccuggcucucuaaagc

SEQ ID NO: 777323 - RNA, 19 nt, Artificial Sequence
  Description of Artificial Sequence: Synthetic oligonucleotide
aauggguuaaggaaaaggg

SEQ ID NO: 777324 - RNA, 19 nt, Artificial Sequence
  Description of Artificial Sequence: Synthetic oligonucleotide
aauuauaacacuuguuuaa

SEQ ID NO: 777325 - RNA, 19 nt, Artificial Sequence
  Description of Artificial Sequence: Synthetic oligonucleotide
aauaaaaugggcaaagggu

SEQ ID NO: 777326 - RNA, 19 nt, Artificial Sequence
  Description of Artificial Sequence: Synthetic oligonucleotide
cuugauauacuuuuggaug

SEQ ID NO: 777327 - RNA, 19 nt, Artificial Sequence
  Description of Artificial Sequence: Synthetic oligonucleotide
aaagccaccgaccucuugg

SEQ ID NO: 777328 - RNA, 19 nt, Artificial Sequence
  Description of Artificial Sequence: Synthetic oligonucleotide
uauacuuuuggauggacug

SEQ ID NO: 777329 - RNA, 19 nt, Artificial Sequence
  Description of Artificial Sequence: Synthetic oligonucleotide
uguauugucuuacagucca

SEQ ID NO: 777330 - RNA, 19 nt, Artificial Sequence
  Description of Artificial Sequence: Synthetic oligonucleotide
aucauaucugaauacuugg

SEQ ID NO: 777331 - RNA, 19 nt, Artificial Sequence
  Description of Artificial Sequence: Synthetic oligonucleotide
ucuaaagcuaccuagcaaa

SEQ ID NO: 777332 - RNA, 19 nt, Artificial Sequence
  Description of Artificial Sequence: Synthetic oligonucleotide
cucccauuuaacaagagac

SEQ ID NO: 777333 - RNA, 19 nt, Artificial Sequence
  Description of Artificial Sequence: Synthetic oligonucleotide
uuccccaauggcuagaucc

SEQ ID NO: 777334 - RNA, 19 nt, Artificial Sequence
  Description of Artificial Sequence: Synthetic oligonucleotide
uucacaguaaacaaaccuc

SEQ ID NO: 777335 - RNA, 19 nt, Artificial Sequence
  Description of Artificial Sequence: Synthetic oligonucleotide
aggaauccaaacucugucc

SEQ ID NO: 777336 - RNA, 19 nt, Artificial Sequence
  Description of Artificial Sequence: Synthetic oligonucleotide
aucauuacaaagaugaggu

SEQ ID NO: 777337 - RNA, 19 nt, Artificial Sequence
  Description of Artificial Sequence: Synthetic oligonucleotide
uugggcacgacccgaaucg

SEQ ID NO: 777338 - RNA, 19 nt, Artificial Sequence
  Description of Artificial Sequence: Synthetic oligonucleotide
ugcuugagaacaccggugg

SEQ ID NO: 777339 - RNA, 19 nt, Artificial Sequence
  Description of Artificial Sequence: Synthetic oligonucleotide
ucaacaaucguguggaaaa

SEQ ID NO: 777340 - RNA, 19 nt, Artificial Sequence
  Description of Artificial Sequence: Synthetic oligonucleotide
uuuaccaguuccauuugcc

SEQ ID NO: 777341 - RNA, 19 nt, Artificial Sequence
  Description of Artificial Sequence: Synthetic oligonucleotide
ucuagccagaacuuuacca

SEQ ID NO: 777342 - RNA, 19 nt, Artificial Sequence
  Description of Artificial Sequence: Synthetic oligonucleotide
uuuuagacaauggggaggc

SEQ ID NO: 777343 - RNA, 19 nt, Artificial Sequence
  Description of Artificial Sequence: Synthetic oligonucleotide
uagucuuagauauggauau

SEQ ID NO: 777344 - RNA, 19 nt, Artificial Sequence
  Description of Artificial Sequence: Synthetic oligonucleotide
uaaaaugggcaaaggguug

SEQ ID NO: 777345 - RNA, 19 nt, Artificial Sequence
  Description of Artificial Sequence: Synthetic oligonucleotide
cuaaccagcugucacuugg

SEQ ID NO: 777346 - RNA, 19 nt, Artificial Sequence
  Description of Artificial Sequence: Synthetic oligonucleotide
aaggguugcagaugagauc

SEQ ID NO: 777347 - RNA, 19 nt, Artificial Sequence
  Description of Artificial Sequence: Synthetic oligonucleotide
uuaaggaaaagggaaucgc

SEQ ID NO: 777348 - RNA, 19 nt, Artificial Sequence
  Description of Artificial Sequence: Synthetic oligonucleotide
aaccccauaagguuaaaua

SEQ ID NO: 777349 - RNA, 19 nt, Artificial Sequence
  Description of Artificial Sequence: Synthetic oligonucleotide
auugucuuacaguccacuc

SEQ ID NO: 777350 - RNA, 19 nt, Artificial Sequence
  Description of Artificial Sequence: Synthetic oligonucleotide
ucgacuagcaggccagacg

SEQ ID NO: 777351 - RNA, 19 nt, Artificial Sequence
  Description of Artificial Sequence: Synthetic oligonucleotide
aaacccaaguuuccacagg

SEQ ID NO: 777352 - RNA, 19 nt, Artificial Sequence
  Description of Artificial Sequence: Synthetic oligonucleotide
ugcagaugagaucaagaga

SEQ ID NO: 777353 - RNA, 19 nt, Artificial Sequence
  Description of Artificial Sequence: Synthetic oligonucleotide
cugauugugagaagcaaug

SEQ ID NO: 777354 - RNA, 19 nt, Artificial Sequence
  Description of Artificial Sequence: Synthetic oligonucleotide
gaauacuugggguggucgg

SEQ ID NO: 777355 - RNA, 19 nt, Artificial Sequence
  Description of Artificial Sequence: Synthetic oligonucleotide
guuaaggaaaagggaaucg

SEQ ID NO: 777356 - RNA, 19 nt, Artificial Sequence
  Description of Artificial Sequence: Synthetic oligonucleotide
auggaugagcaacuuacag

SEQ ID NO: 777357 - RNA, 19 nt, Artificial Sequence
  Description of Artificial Sequence: Synthetic oligonucleotide
agggguuuuacguggcagc

SEQ ID NO: 777358 - RNA, 19 nt, Artificial Sequence
  Description of Artificial Sequence: Synthetic oligonucleotide
aagaccccgaggcaccuac

SEQ ID NO: 777359 - RNA, 19 nt, Artificial Sequence
  Description of Artificial Sequence: Synthetic oligonucleotide
uucuugaaagccaccgacc

SEQ ID NO: 777360 - RNA, 19 nt, Artificial Sequence
  Description of Artificial Sequence: Synthetic oligonucleotide
ucucuaaagcuaccuagca

SEQ ID NO: 777361 - RNA, 19 nt, Artificial Sequence
  Description of Artificial Sequence: Synthetic oligonucleotide
uggucgguggacuucuugg

SEQ ID NO: 777362 - RNA, 19 nt, Artificial Sequence
  Description of Artificial Sequence: Synthetic oligonucleotide
aucaacuguauugucuuac

SEQ ID NO: 777363 - RNA, 19 nt, Artificial Sequence
  Description of Artificial Sequence: Synthetic oligonucleotide
caauggguuaaggaaaagg

SEQ ID NO: 777364 - RNA, 19 nt, Artificial Sequence
  Description of Artificial Sequence: Synthetic oligonucleotide
acuagucuuagauauggau

SEQ ID NO: 777365 - RNA, 19 nt, Artificial Sequence
  Description of Artificial Sequence: Synthetic oligonucleotide
ugauugugagaagcaaugg

SEQ ID NO: 777366 - RNA, 19 nt, Artificial Sequence
  Description of Artificial Sequence: Synthetic oligonucleotide
aacuugaucugggagucag

SEQ ID NO: 777367 - RNA, 19 nt, Artificial Sequence
  Description of Artificial Sequence: Synthetic oligonucleotide
uuacaguccacuccccgcc

SEQ ID NO: 777368 - RNA, 19 nt, Artificial Sequence
  Description of Artificial Sequence: Synthetic oligonucleotide
gaagggauggaugagcaac

SEQ ID NO: 777369 - RNA, 19 nt, Artificial Sequence
  Description of Artificial Sequence: Synthetic oligonucleotide
ucgguggacuucuuggagg

SEQ ID NO: 777370 - RNA, 19 nt, Artificial Sequence
  Description of Artificial Sequence: Synthetic oligonucleotide
cucucuaaagcuaccuagc

SEQ ID NO: 777371 - RNA, 19 nt, Artificial Sequence
  Description of Artificial Sequence: Synthetic oligonucleotide
uucucuaaccagcugucac

SEQ ID NO: 777372 - RNA, 19 nt, Artificial Sequence
  Description of Artificial Sequence: Synthetic oligonucleotide
ucccauuuaacaagagacu

SEQ ID NO: 777373 - RNA, 19 nt, Artificial Sequence
  Description of Artificial Sequence: Synthetic oligonucleotide
agggaaucgcuccacaaug

SEQ ID NO: 777374 - RNA, 19 nt, Artificial Sequence
  Description of Artificial Sequence: Synthetic oligonucleotide
aacuuuucccagcaauuau

SEQ ID NO: 777375 - RNA, 19 nt, Artificial Sequence
  Description of Artificial Sequence: Synthetic oligonucleotide
acaacuugaucugggaguc

SEQ ID NO: 777376 - RNA, 19 nt, Artificial Sequence
  Description of Artificial Sequence: Synthetic oligonucleotide
uuauaacacuuguuuaaaa

SEQ ID NO: 777377 - RNA, 19 nt, Artificial Sequence
  Description of Artificial Sequence: Synthetic oligonucleotide
aacccuaaccccauaaggu

SEQ ID NO: 777378 - RNA, 19 nt, Artificial Sequence
  Description of Artificial Sequence: Synthetic oligonucleotide
aaucgggaucugcucuccc

SEQ ID NO: 777379 - RNA, 19 nt, Artificial Sequence
  Description of Artificial Sequence: Synthetic oligonucleotide
agcguucucacccaccuug

SEQ ID NO: 777380 - RNA, 19 nt, Artificial Sequence
  Description of Artificial Sequence: Synthetic oligonucleotide
aucuagccagaacuuuacc

SEQ ID NO: 777381 - RNA, 19 nt, Artificial Sequence
  Description of Artificial Sequence: Synthetic oligonucleotide
accccauaagguuaaauau

SEQ ID NO: 777382 - RNA, 19 nt, Artificial Sequence
  Description of Artificial Sequence: Synthetic oligonucleotide
gucagaauaaaaugggcaa

SEQ ID NO: 777383 - RNA, 19 nt, Artificial Sequence
  Description of Artificial Sequence: Synthetic oligonucleotide
uagggcauaugugaaaaga

SEQ ID NO: 777384 - RNA, 19 nt, Artificial Sequence
  Description of Artificial Sequence: Synthetic oligonucleotide
cuuacaguccacuccccgc

SEQ ID NO: 777385 - RNA, 19 nt, Artificial Sequence
  Description of Artificial Sequence: Synthetic oligonucleotide
ucaacuguauugucuuaca

SEQ ID NO: 777386 - RNA, 19 nt, Artificial Sequence
  Description of Artificial Sequence: Synthetic oligonucleotide
aaguccacucccauuuaac

SEQ ID NO: 777387 - RNA, 19 nt, Artificial Sequence
  Description of Artificial Sequence: Synthetic oligonucleotide
uaaguacuagucuuagaua

SEQ ID NO: 777388 - RNA, 19 nt, Artificial Sequence
  Description of Artificial Sequence: Synthetic oligonucleotide
aagggaaucgcuccacaau

SEQ ID NO: 777389 - RNA, 19 nt, Artificial Sequence
  Description of Artificial Sequence: Synthetic oligonucleotide
ugcuuugcaccaaagguuu

SEQ ID NO: 777390 - RNA, 19 nt, Artificial Sequence
  Description of Artificial Sequence: Synthetic oligonucleotide
uuaccaguuccauuugccu

SEQ ID NO: 777391 - RNA, 19 nt, Artificial Sequence
  Description of Artificial Sequence: Synthetic oligonucleotide
gagaucaagagagaaaugu

SEQ ID NO: 777392 - RNA, 19 nt, Artificial Sequence
  Description of Artificial Sequence: Synthetic oligonucleotide
uggacuggcgcgaggagcc

SEQ ID NO: 777393 - RNA, 19 nt, Artificial Sequence
  Description of Artificial Sequence: Synthetic oligonucleotide
ucaucuagccagaacuuua

SEQ ID NO: 777394 - RNA, 19 nt, Artificial Sequence
  Description of Artificial Sequence: Synthetic oligonucleotide
agcugguaaaacugaagca

SEQ ID NO: 777395 - RNA, 19 nt, Artificial Sequence
  Description of Artificial Sequence: Synthetic oligonucleotide
ucuugggcguggcagccgg

SEQ ID NO: 777396 - RNA, 19 nt, Artificial Sequence
  Description of Artificial Sequence: Synthetic oligonucleotide
caggccagacgaaagugcg

SEQ ID NO: 777397 - RNA, 19 nt, Artificial Sequence
  Description of Artificial Sequence: Synthetic oligonucleotide
guuugguugucuugaccgg

SEQ ID NO: 777398 - RNA, 19 nt, Artificial Sequence
  Description of Artificial Sequence: Synthetic oligonucleotide
aguccacucccauuuaaca

SEQ ID NO: 777399 - RNA, 19 nt, Artificial Sequence
  Description of Artificial Sequence: Synthetic oligonucleotide
gacuaaguacuagucuuag

SEQ ID NO: 777400 - RNA, 19 nt, Artificial Sequence
  Description of Artificial Sequence: Synthetic oligonucleotide
guaaaagcaguuggagggg

SEQ ID NO: 777401 - RNA, 19 nt, Artificial Sequence
  Description of Artificial Sequence: Synthetic oligonucleotide
cuagucuuagauauggaua

SEQ ID NO: 777402 - RNA, 19 nt, Artificial Sequence
  Description of Artificial Sequence: Synthetic oligonucleotide
ucagaauaaaaugggcaaa

SEQ ID NO: 777403 - RNA, 19 nt, Artificial Sequence
  Description of Artificial Sequence: Synthetic oligonucleotide
acucccauuuaacaagaga

SEQ ID NO: 777404 - RNA, 19 nt, Artificial Sequence
  Description of Artificial Sequence: Synthetic oligonucleotide
cuuuaccaguuccauuugc

SEQ ID NO: 777405 - RNA, 19 nt, Artificial Sequence
  Description of Artificial Sequence: Synthetic oligonucleotide
auuauaacacuuguuuaaa

SEQ ID NO: 777406 - RNA, 19 nt, Artificial Sequence
  Description of Artificial Sequence: Synthetic oligonucleotide
gcucuugauauacuuuugg

SEQ ID NO: 777407 - RNA, 19 nt, Artificial Sequence
  Description of Artificial Sequence: Synthetic oligonucleotide
aagugagacuaaguacuag

SEQ ID NO: 777408 - RNA, 19 nt, Artificial Sequence
  Description of Artificial Sequence: Synthetic oligonucleotide
cacgaucauaucugaauac

SEQ ID NO: 777409 - RNA, 19 nt, Artificial Sequence
  Description of Artificial Sequence: Synthetic oligonucleotide
cuuugguuugcuugagaac

SEQ ID NO: 777410 - RNA, 19 nt, Artificial Sequence
  Description of Artificial Sequence: Synthetic oligonucleotide
cuguauugucuuacagucc

SEQ ID NO: 777411 - RNA, 19 nt, Artificial Sequence
  Description of Artificial Sequence: Synthetic oligonucleotide
caauggggaggcacuaggg

SEQ ID NO: 777412 - RNA, 19 nt, Artificial Sequence
  Description of Artificial Sequence: Synthetic oligonucleotide
acagcucucaacaaucgug

SEQ ID NO: 777413 - RNA, 19 nt, Artificial Sequence
  Description of Artificial Sequence: Synthetic oligonucleotide
gcucucuaaagcuaccuag

SEQ ID NO: 777414 - RNA, 19 nt, Artificial Sequence
  Description of Artificial Sequence: Synthetic oligonucleotide
gcuagauccugauugugag

SEQ ID NO: 777415 - RNA, 19 nt, Artificial Sequence
  Description of Artificial Sequence: Synthetic oligonucleotide
uucggaguggccacuuucu

SEQ ID NO: 777416 - RNA, 19 nt, Artificial Sequence
  Description of Artificial Sequence: Synthetic oligonucleotide
uuugguugucuugaccggc

SEQ ID NO: 777417 - RNA, 19 nt, Artificial Sequence
  Description of Artificial Sequence: Synthetic oligonucleotide
aucgggaucugcucucccg

SEQ ID NO: 777418 - RNA, 19 nt, Artificial Sequence
  Description of Artificial Sequence: Synthetic oligonucleotide
gauugugagaagcaauggu

SEQ ID NO: 777419 - RNA, 19 nt, Artificial Sequence
  Description of Artificial Sequence: Synthetic oligonucleotide
cuagcaggccagacgaaag

SEQ ID NO: 777420 - RNA, 19 nt, Artificial Sequence
  Description of Artificial Sequence: Synthetic oligonucleotide
caauccuggcucucuaaag

SEQ ID NO: 777421 - RNA, 19 nt, Artificial Sequence
  Description of Artificial Sequence: Synthetic oligonucleotide
aauccaaacucuguccuuu

SEQ ID NO: 777422 - RNA, 19 nt, Artificial Sequence
  Description of Artificial Sequence: Synthetic oligonucleotide
caucuagccagaacuuuac

SEQ ID NO: 777423 - RNA, 19 nt, Artificial Sequence
  Description of Artificial Sequence: Synthetic oligonucleotide
agcgauuuuccccucccug

SEQ ID NO: 777424 - RNA, 19 nt, Artificial Sequence
  Description of Artificial Sequence: Synthetic oligonucleotide
auggacuggcgcgaggagc

SEQ ID NO: 777425 - RNA, 19 nt, Artificial Sequence
  Description of Artificial Sequence: Synthetic oligonucleotide
ggcacuagggcauauguga

SEQ ID NO: 777426 - RNA, 19 nt, Artificial Sequence
  Description of Artificial Sequence: Synthetic oligonucleotide
acgaucauaucugaauacu

SEQ ID NO: 777427 - RNA, 19 nt, Artificial Sequence
  Description of Artificial Sequence: Synthetic oligonucleotide
ucccgcucgacuagcaggc

SEQ ID NO: 777428 - RNA, 19 nt, Artificial Sequence
  Description of Artificial Sequence: Synthetic oligonucleotide
uuugggcuucgccgcaggg

SEQ ID NO: 777429 - RNA, 19 nt, Artificial Sequence
  Description of Artificial Sequence: Synthetic oligonucleotide
gcucucaacaaucgugugg

SEQ ID NO: 777430 - RNA, 19 nt, Artificial Sequence
  Description of Artificial Sequence: Synthetic oligonucleotide
ucgggaucugcucucccgc

SEQ ID NO: 777431 - RNA, 19 nt, Artificial Sequence
  Description of Artificial Sequence: Synthetic oligonucleotide
cugaaagaccccgaggcac

SEQ ID NO: 777432 - RNA, 19 nt, Artificial Sequence
  Description of Artificial Sequence: Synthetic oligonucleotide
cauuacaaagaugaggucu

SEQ ID NO: 777433 - RNA, 19 nt, Artificial Sequence
  Description of Artificial Sequence: Synthetic oligonucleotide
auuuuccccucccuggcca

SEQ ID NO: 777434 - RNA, 19 nt, Artificial Sequence
  Description of Artificial Sequence: Synthetic oligonucleotide
uacuagucuuagauaugga

SEQ ID NO: 777435 - RNA, 19 nt, Artificial Sequence
  Description of Artificial Sequence: Synthetic oligonucleotide
gauauacuuuuggauggac

SEQ ID NO: 777436 - RNA, 19 nt, Artificial Sequence
  Description of Artificial Sequence: Synthetic oligonucleotide
auauacuuuuggauggacu

SEQ ID NO: 777437 - RNA, 19 nt, Artificial Sequence
  Description of Artificial Sequence: Synthetic oligonucleotide
ucauuacaaagaugagguc

SEQ ID NO: 777438 - RNA, 19 nt, Artificial Sequence
  Description of Artificial Sequence: Synthetic oligonucleotide
gauuuuccccucccuggcc

SEQ ID NO: 777439 - RNA, 19 nt, Artificial Sequence
  Description of Artificial Sequence: Synthetic oligonucleotide
uccccaauggcuagauccu

SEQ ID NO: 777440 - RNA, 19 nt, Artificial Sequence
  Description of Artificial Sequence: Synthetic oligonucleotide
agaugagaucaagagagaa

SEQ ID NO: 777441 - RNA, 19 nt, Artificial Sequence
  Description of Artificial Sequence: Synthetic oligonucleotide
gaaagacaacuguacaggu

SEQ ID NO: 777442 - RNA, 19 nt, Artificial Sequence
  Description of Artificial Sequence: Synthetic oligonucleotide
accaaagguuuugaagcuc

SEQ ID NO: 777443 - RNA, 19 nt, Artificial Sequence
  Description of Artificial Sequence: Synthetic oligonucleotide
acuagggcauaugugaaaa

SEQ ID NO: 777444 - RNA, 19 nt, Artificial Sequence
  Description of Artificial Sequence: Synthetic oligonucleotide
uguucuccuaggacacagc

SEQ ID NO: 777445 - RNA, 19 nt, Artificial Sequence
  Description of Artificial Sequence: Synthetic oligonucleotide
ugauauacuuuuggaugga

SEQ ID NO: 777446 - RNA, 19 nt, Artificial Sequence
  Description of Artificial Sequence: Synthetic oligonucleotide
guggcagcugguaaaacug

SEQ ID NO: 777447 - RNA, 19 nt, Artificial Sequence
  Description of Artificial Sequence: Synthetic oligonucleotide
gcuagguggagugucaucc

SEQ ID NO: 777448 - RNA, 19 nt, Artificial Sequence
  Description of Artificial Sequence: Synthetic oligonucleotide
guaguggcucuugauauac

SEQ ID NO: 777449 - RNA, 19 nt, Artificial Sequence
  Description of Artificial Sequence: Synthetic oligonucleotide
uuuccuagguccccucauc

SEQ ID NO: 777450 - RNA, 19 nt, Artificial Sequence
  Description of Artificial Sequence: Synthetic oligonucleotide
cuugagaacaccggugguc

SEQ ID NO: 777451 - RNA, 19 nt, Artificial Sequence
  Description of Artificial Sequence: Synthetic oligonucleotide
ggacaacuugaucugggag

SEQ ID NO: 777452 - RNA, 19 nt, Artificial Sequence
  Description of Artificial Sequence: Synthetic oligonucleotide
cuagguccccucaucuagc

SEQ ID NO: 777453 - RNA, 19 nt, Artificial Sequence
  Description of Artificial Sequence: Synthetic oligonucleotide
aagggauggaugagcaacu

SEQ ID NO: 777454 - RNA, 19 nt, Artificial Sequence
  Description of Artificial Sequence: Synthetic oligonucleotide
uagcaggccagacgaaagu

SEQ ID NO: 777455 - RNA, 19 nt, Artificial Sequence
  Description of Artificial Sequence: Synthetic oligonucleotide
cuccccuaaguccacuccc

SEQ ID NO: 777456 - RNA, 19 nt, Artificial Sequence
  Description of Artificial Sequence: Synthetic oligonucleotide
uaccaguuccauuugccuu

SEQ ID NO: 777457 - RNA, 19 nt, Artificial Sequence
  Description of Artificial Sequence: Synthetic oligonucleotide
agggacgcgaguuuccuau

SEQ ID NO: 777458 - RNA, 19 nt, Artificial Sequence
  Description of Artificial Sequence: Synthetic oligonucleotide
gaaaagggaaucgcuccac

SEQ ID NO: 777459 - RNA, 19 nt, Artificial Sequence
  Description of Artificial Sequence: Synthetic oligonucleotide
cagacgaaagugcggcugc

SEQ ID NO: 777460 - RNA, 19 nt, Artificial Sequence
  Description of Artificial Sequence: Synthetic oligonucleotide
gcgauuuuccccucccugg

SEQ ID NO: 777461 - RNA, 19 nt, Artificial Sequence
  Description of Artificial Sequence: Synthetic oligonucleotide
gagggguuuuacguggcag

SEQ ID NO: 777462 - RNA, 19 nt, Artificial Sequence
  Description of Artificial Sequence: Synthetic oligonucleotide
uucgccgcagggguggacg

SEQ ID NO: 777463 - RNA, 19 nt, Artificial Sequence
  Description of Artificial Sequence: Synthetic oligonucleotide
uggacguggaguucucggu

SEQ ID NO: 777464 - RNA, 19 nt, Artificial Sequence
  Description of Artificial Sequence: Synthetic oligonucleotide
uugggcuucgccgcagggg

SEQ ID NO: 777465 - RNA, 19 nt, Artificial Sequence
  Description of Artificial Sequence: Synthetic oligonucleotide
accccgaggcaccuacccc

SEQ ID NO: 777466 - RNA, 19 nt, Artificial Sequence
  Description of Artificial Sequence: Synthetic oligonucleotide
ugucacaagcaaagccuuc

SEQ ID NO: 777467 - RNA, 19 nt, Artificial Sequence
  Description of Artificial Sequence: Synthetic oligonucleotide
agucagcguucucacccac

SEQ ID NO: 777468 - RNA, 19 nt, Artificial Sequence
  Description of Artificial Sequence: Synthetic oligonucleotide
agcuagguggagugucauc

SEQ ID NO: 777469 - RNA, 19 nt, Artificial Sequence
  Description of Artificial Sequence: Synthetic oligonucleotide
gacgaaagugcggcugccg

SEQ ID NO: 777470 - RNA, 19 nt, Artificial Sequence
  Description of Artificial Sequence: Synthetic oligonucleotide
gauggacuggcgcgaggag

SEQ ID NO: 777471 - RNA, 19 nt, Artificial Sequence
  Description of Artificial Sequence: Synthetic oligonucleotide
uguaguggcucuugauaua

SEQ ID NO: 777472 - RNA, 19 nt, Artificial Sequence
  Description of Artificial Sequence: Synthetic oligonucleotide
cauuuaacaagagacugcu

SEQ ID NO: 777473 - RNA, 19 nt, Artificial Sequence
  Description of Artificial Sequence: Synthetic oligonucleotide
aguacuagucuuagauaug

SEQ ID NO: 777474 - RNA, 19 nt, Artificial Sequence
  Description of Artificial Sequence: Synthetic oligonucleotide
ugcucucccgcucgacuag

SEQ ID NO: 777475 - RNA, 19 nt, Artificial Sequence
  Description of Artificial Sequence: Synthetic oligonucleotide
gagaacaccgguggucacc

SEQ ID NO: 777476 - RNA, 19 nt, Artificial Sequence
  Description of Artificial Sequence: Synthetic oligonucleotide
cuaggcuacuuagaaaaga

SEQ ID NO: 777477 - RNA, 19 nt, Artificial Sequence
  Description of Artificial Sequence: Synthetic oligonucleotide
gaccccgaggcaccuaccc

SEQ ID NO: 777478 - RNA, 19 nt, Artificial Sequence
  Description of Artificial Sequence: Synthetic oligonucleotide
ggaucugcucucccgcucg

SEQ ID NO: 777479 - RNA, 19 nt, Artificial Sequence
  Description of Artificial Sequence: Synthetic oligonucleotide
aaggagugucacaagcaaa

SEQ ID NO: 777480 - RNA, 19 nt, Artificial Sequence
  Description of Artificial Sequence: Synthetic oligonucleotide
agacgaaagugcggcugcc

SEQ ID NO: 777481 - RNA, 19 nt, Artificial Sequence
  Description of Artificial Sequence: Synthetic oligonucleotide
cuucauuuccuaggucccc

SEQ ID NO: 777482 - RNA, 19 nt, Artificial Sequence
  Description of Artificial Sequence: Synthetic oligonucleotide
agccggcuucuucuuggcc

SEQ ID NO: 777483 - RNA, 19 nt, Artificial Sequence
  Description of Artificial Sequence: Synthetic oligonucleotide
ccgaagugagacuaaguac

SEQ ID NO: 777484 - RNA, 19 nt, Artificial Sequence
  Description of Artificial Sequence: Synthetic oligonucleotide
uggagggguuuuacguggc

SEQ ID NO: 777485 - RNA, 19 nt, Artificial Sequence
  Description of Artificial Sequence: Synthetic oligonucleotide
uccugauugugagaagcaa

SEQ ID NO: 777486 - RNA, 19 nt, Artificial Sequence
  Description of Artificial Sequence: Synthetic oligonucleotide
agccaccgaccucuugggc

SEQ ID NO: 777487 - RNA, 19 nt, Artificial Sequence
  Description of Artificial Sequence: Synthetic oligonucleotide
aggcgcuugauggacaacu

SEQ ID NO: 777488 - RNA, 19 nt, Artificial Sequence
  Description of Artificial Sequence: Synthetic oligonucleotide
gacaauggggaggcacuag

SEQ ID NO: 777489 - RNA, 19 nt, Artificial Sequence
  Description of Artificial Sequence: Synthetic oligonucleotide
cacaauggguuaaggaaaa

SEQ ID NO: 777490 - RNA, 19 nt, Artificial Sequence
  Description of Artificial Sequence: Synthetic oligonucleotide
ucucggucaugguggccgg

SEQ ID NO: 777491 - RNA, 19 nt, Artificial Sequence
  Description of Artificial Sequence: Synthetic oligonucleotide
agcucucaacaaucgugug

SEQ ID NO: 777492 - RNA, 19 nt, Artificial Sequence
  Description of Artificial Sequence: Synthetic oligonucleotide
gcccguuugggcuucgccg

SEQ ID NO: 777493 - RNA, 19 nt, Artificial Sequence
  Description of Artificial Sequence: Synthetic oligonucleotide
gaccucuugggcucaucac

SEQ ID NO: 777494 - RNA, 19 nt, Artificial Sequence
  Description of Artificial Sequence: Synthetic oligonucleotide
guccacucccauuuaacaa

SEQ ID NO: 777495 - RNA, 19 nt, Artificial Sequence
  Description of Artificial Sequence: Synthetic oligonucleotide
agggcauaugugaaaagaa

SEQ ID NO: 777496 - RNA, 19 nt, Artificial Sequence
  Description of Artificial Sequence: Synthetic oligonucleotide
agcaggccagacgaaagug

SEQ ID NO: 777497 - RNA, 19 nt, Artificial Sequence
  Description of Artificial Sequence: Synthetic oligonucleotide
agcaauuauaacacuuguu

SEQ ID NO: 777498 - RNA, 19 nt, Artificial Sequence
  Description of Artificial Sequence: Synthetic oligonucleotide
gaggcacuagggcauaugu

SEQ ID NO: 777499 - RNA, 19 nt, Artificial Sequence
  Description of Artificial Sequence: Synthetic oligonucleotide
uccucugcuuugcaccaaa

SEQ ID NO: 777500 - RNA, 19 nt, Artificial Sequence
  Description of Artificial Sequence: Synthetic oligonucleotide
cucuaaagcuaccuagcaa

SEQ ID NO: 777501 - RNA, 19 nt, Artificial Sequence
  Description of Artificial Sequence: Synthetic oligonucleotide
ccuagguccccucaucuag

SEQ ID NO: 777502 - RNA, 19 nt, Artificial Sequence
  Description of Artificial Sequence: Synthetic oligonucleotide
uccuggcucucuaaagcua

SEQ ID NO: 777503 - RNA, 19 nt, Artificial Sequence
  Description of Artificial Sequence: Synthetic oligonucleotide
gaaucgggaucugcucucc

SEQ ID NO: 777504 - RNA, 19 nt, Artificial Sequence
  Description of Artificial Sequence: Synthetic oligonucleotide
guugggcacgacccgaauc

SEQ ID NO: 777505 - RNA, 19 nt, Artificial Sequence
  Description of Artificial Sequence: Synthetic oligonucleotide
auuuaacaagagacugcug

SEQ ID NO: 777506 - RNA, 19 nt, Artificial Sequence
  Description of Artificial Sequence: Synthetic oligonucleotide
ccccauaagguuaaauauc

SEQ ID NO: 777507 - RNA, 19 nt, Artificial Sequence
  Description of Artificial Sequence: Synthetic oligonucleotide
ggaaaagggaaucgcucca

SEQ ID NO: 777508 - RNA, 19 nt, Artificial Sequence
  Description of Artificial Sequence: Synthetic oligonucleotide
ucuugaccggcuuggcuuu

SEQ ID NO: 777509 - RNA, 19 nt, Artificial Sequence
  Description of Artificial Sequence: Synthetic oligonucleotide
caucuuauacaggaaggaa

SEQ ID NO: 777510 - RNA, 19 nt, Artificial Sequence
  Description of Artificial Sequence: Synthetic oligonucleotide
ugccuggauggcagccacg

SEQ ID NO: 777511 - RNA, 19 nt, Artificial Sequence
  Description of Artificial Sequence: Synthetic oligonucleotide
agauauggauauauacaua

SEQ ID NO: 777512 - RNA, 19 nt, Artificial Sequence
  Description of Artificial Sequence: Synthetic oligonucleotide
uccuguccuccccggcgcg

SEQ ID NO: 777513 - RNA, 19 nt, Artificial Sequence
  Description of Artificial Sequence: Synthetic oligonucleotide
uucuugacagggguggcuu

SEQ ID NO: 777514 - RNA, 19 nt, Artificial Sequence
  Description of Artificial Sequence: Synthetic oligonucleotide
gggagguugggcacgaccc

SEQ ID NO: 777515 - RNA, 19 nt, Artificial Sequence
  Description of Artificial Sequence: Synthetic oligonucleotide
uacaguccacuccccgccu

SEQ ID NO: 777516 - RNA, 19 nt, Artificial Sequence
  Description of Artificial Sequence: Synthetic oligonucleotide
ugcuuggggcuuuggcggc

SEQ ID NO: 777517 - RNA, 19 nt, Artificial Sequence
  Description of Artificial Sequence: Synthetic oligonucleotide
ggagguugggcacgacccg

SEQ ID NO: 777518 - RNA, 19 nt, Artificial Sequence
  Description of Artificial Sequence: Synthetic oligonucleotide
acgcgaguuuccuauuuua

SEQ ID NO: 777519 - RNA, 19 nt, Artificial Sequence
  Description of Artificial Sequence: Synthetic oligonucleotide
ucggucaugguggccggcc

SEQ ID NO: 777520 - RNA, 19 nt, Artificial Sequence
  Description of Artificial Sequence: Synthetic oligonucleotide
ggaauccaaacucuguccu

SEQ ID NO: 777521 - RNA, 19 nt, Artificial Sequence
  Description of Artificial Sequence: Synthetic oligonucleotide
uacguggcagcugguaaaa

SEQ ID NO: 777522 - RNA, 19 nt, Artificial Sequence
  Description of Artificial Sequence: Synthetic oligonucleotide
ugagaacaccgguggucac

SEQ ID NO: 777523 - RNA, 19 nt, Artificial Sequence
  Description of Artificial Sequence: Synthetic oligonucleotide
gaagugagacuaaguacua

SEQ ID NO: 777524 - RNA, 19 nt, Artificial Sequence
  Description of Artificial Sequence: Synthetic oligonucleotide
aagaaaccccaggucccca

SEQ ID NO: 777525 - RNA, 19 nt, Artificial Sequence
  Description of Artificial Sequence: Synthetic oligonucleotide
cuuccgaagggccaguccu

SEQ ID NO: 777526 - RNA, 19 nt, Artificial Sequence
  Description of Artificial Sequence: Synthetic oligonucleotide
uucuugggcguggcagccg

SEQ ID NO: 777527 - RNA, 19 nt, Artificial Sequence
  Description of Artificial Sequence: Synthetic oligonucleotide
cucaacaaucguguggaaa

SEQ ID NO: 777528 - RNA, 19 nt, Artificial Sequence
  Description of Artificial Sequence: Synthetic oligonucleotide
gguugcagaugagaucaag

SEQ ID NO: 777529 - RNA, 19 nt, Artificial Sequence
  Description of Artificial Sequence: Synthetic oligonucleotide
gucuuagauauggauauau

SEQ ID NO: 777530 - RNA, 19 nt, Artificial Sequence
  Description of Artificial Sequence: Synthetic oligonucleotide
ugggcacgacccgaaucgg

SEQ ID NO: 777531 - RNA, 19 nt, Artificial Sequence
  Description of Artificial Sequence: Synthetic oligonucleotide
ggccagacgaaagugcggc

SEQ ID NO: 777532 - RNA, 19 nt, Artificial Sequence
  Description of Artificial Sequence: Synthetic oligonucleotide
acuggcgcgaggagccggc

SEQ ID NO: 777533 - RNA, 19 nt, Artificial Sequence
  Description of Artificial Sequence: Synthetic oligonucleotide
agacuaaguacuagucuua

SEQ ID NO: 777534 - RNA, 19 nt, Artificial Sequence
  Description of Artificial Sequence: Synthetic oligonucleotide
uccuagguccccucaucua

SEQ ID NO: 777535 - RNA, 19 nt, Artificial Sequence
  Description of Artificial Sequence: Synthetic oligonucleotide
acgacccgaaucgggaucu

SEQ ID NO: 777536 - RNA, 19 nt, Artificial Sequence
  Description of Artificial Sequence: Synthetic oligonucleotide
uuuagacaauggggaggca

SEQ ID NO: 777537 - RNA, 19 nt, Artificial Sequence
  Description of Artificial Sequence: Synthetic oligonucleotide
aagggacgcgaguuuccua

SEQ ID NO: 777538 - RNA, 19 nt, Artificial Sequence
  Description of Artificial Sequence: Synthetic oligonucleotide
cgaagugagacuaaguacu

SEQ ID NO: 777539 - RNA, 19 nt, Artificial Sequence
  Description of Artificial Sequence: Synthetic oligonucleotide
ccuaggcuacuuagaaaag

SEQ ID NO: 777540 - RNA, 19 nt, Artificial Sequence
  Description of Artificial Sequence: Synthetic oligonucleotide
cagcucucaacaaucgugu

SEQ ID NO: 777541 - RNA, 19 nt, Artificial Sequence
  Description of Artificial Sequence: Synthetic oligonucleotide
cagcaauuauaacacuugu

SEQ ID NO: 777542 - RNA, 19 nt, Artificial Sequence
  Description of Artificial Sequence: Synthetic oligonucleotide
acccaccuuguaguggcuc

SEQ ID NO: 777543 - RNA, 19 nt, Artificial Sequence
  Description of Artificial Sequence: Synthetic oligonucleotide
gacccgaaucgggaucugc

SEQ ID NO: 777544 - RNA, 19 nt, Artificial Sequence
  Description of Artificial Sequence: Synthetic oligonucleotide
aggcacuagggcauaugug

SEQ ID NO: 777545 - RNA, 19 nt, Artificial Sequence
  Description of Artificial Sequence: Synthetic oligonucleotide
acacaauccuggcucucua

SEQ ID NO: 777546 - RNA, 19 nt, Artificial Sequence
  Description of Artificial Sequence: Synthetic oligonucleotide
cugcuuugcaccaaagguu

SEQ ID NO: 777547 - RNA, 19 nt, Artificial Sequence
  Description of Artificial Sequence: Synthetic oligonucleotide
gacuggcgcgaggagccgg

SEQ ID NO: 777548 - RNA, 19 nt, Artificial Sequence
  Description of Artificial Sequence: Synthetic oligonucleotide
cacgacccgaaucgggauc

SEQ ID NO: 777549 - RNA, 19 nt, Artificial Sequence
  Description of Artificial Sequence: Synthetic oligonucleotide
cugacuccccacccucccc

SEQ ID NO: 777550 - RNA, 19 nt, Artificial Sequence
  Description of Artificial Sequence: Synthetic oligonucleotide
ccaacccuaaccccauaag

SEQ ID NO: 777551 - RNA, 19 nt, Artificial Sequence
  Description of Artificial Sequence: Synthetic oligonucleotide
aggccagacgaaagugcgg

SEQ ID NO: 777552 - RNA, 19 nt, Artificial Sequence
  Description of Artificial Sequence: Synthetic oligonucleotide
acccgaaucgggaucugcu

SEQ ID NO: 777553 - RNA, 19 nt, Artificial Sequence
  Description of Artificial Sequence: Synthetic oligonucleotide
cgaguuuccuauuuuauua

SEQ ID NO: 777554 - RNA, 19 nt, Artificial Sequence
  Description of Artificial Sequence: Synthetic oligonucleotide
ccuagcaaacuaaaaucaa

SEQ ID NO: 777555 - RNA, 19 nt, Artificial Sequence
  Description of Artificial Sequence: Synthetic oligonucleotide
cccguuugggcuucgccgc

SEQ ID NO: 777556 - RNA, 19 nt, Artificial Sequence
  Description of Artificial Sequence: Synthetic oligonucleotide
caguccucgcgggagguug

SEQ ID NO: 777557 - RNA, 19 nt, Artificial Sequence
  Description of Artificial Sequence: Synthetic oligonucleotide
gcugccuucuucggagugg

SEQ ID NO: 777558 - RNA, 19 nt, Artificial Sequence
  Description of Artificial Sequence: Synthetic oligonucleotide
ggacguggaguucucgguc

SEQ ID NO: 777559 - RNA, 19 nt, Artificial Sequence
  Description of Artificial Sequence: Synthetic oligonucleotide
acguggcagcugguaaaac

SEQ ID NO: 777560 - RNA, 19 nt, Artificial Sequence
  Description of Artificial Sequence: Synthetic oligonucleotide
caccaaagguuuugaagcu

SEQ ID NO: 777561 - RNA, 19 nt, Artificial Sequence
  Description of Artificial Sequence: Synthetic oligonucleotide
ucgcgggagguugggcacg

SEQ ID NO: 777562 - RNA, 19 nt, Artificial Sequence
  Description of Artificial Sequence: Synthetic oligonucleotide
caccuaccccuuugguuug

SEQ ID NO: 777563 - RNA, 19 nt, Artificial Sequence
  Description of Artificial Sequence: Synthetic oligonucleotide
aggcaccuaccccuuuggu

SEQ ID NO: 777564 - RNA, 19 nt, Artificial Sequence
  Description of Artificial Sequence: Synthetic oligonucleotide
cucgacuagcaggccagac

SEQ ID NO: 777565 - RNA, 19 nt, Artificial Sequence
  Description of Artificial Sequence: Synthetic oligonucleotide
gaauccaaacucuguccuu

SEQ ID NO: 777566 - RNA, 19 nt, Artificial Sequence
  Description of Artificial Sequence: Synthetic oligonucleotide
acgcguggcuccuguccuc

SEQ ID NO: 777567 - RNA, 19 nt, Artificial Sequence
  Description of Artificial Sequence: Synthetic oligonucleotide
ggcgcgguucuucucugcc

SEQ ID NO: 777568 - RNA, 19 nt, Artificial Sequence
  Description of Artificial Sequence: Synthetic oligonucleotide
gucugucugaggaauccaa

SEQ ID NO: 777569 - RNA, 19 nt, Artificial Sequence
  Description of Artificial Sequence: Synthetic oligonucleotide
cccgaagugagacuaagua

SEQ ID NO: 777570 - RNA, 19 nt, Artificial Sequence
  Description of Artificial Sequence: Synthetic oligonucleotide
aguccucgcgggagguugg

SEQ ID NO: 777571 - RNA, 19 nt, Artificial Sequence
  Description of Artificial Sequence: Synthetic oligonucleotide
agucuuagauauggauaua

SEQ ID NO: 777572 - RNA, 19 nt, Artificial Sequence
  Description of Artificial Sequence: Synthetic oligonucleotide
agaccccgaggcaccuacc

SEQ ID NO: 777573 - RNA, 19 nt, Artificial Sequence
  Description of Artificial Sequence: Synthetic oligonucleotide
gguggacguggaguucucg

SEQ ID NO: 777574 - RNA, 19 nt, Artificial Sequence
  Description of Artificial Sequence: Synthetic oligonucleotide
ggaagggacgcgaguuucc

SEQ ID NO: 777575 - RNA, 19 nt, Artificial Sequence
  Description of Artificial Sequence: Synthetic oligonucleotide
gcaccuaccccuuugguuu

SEQ ID NO: 777576 - RNA, 19 nt, Artificial Sequence
  Description of Artificial Sequence: Synthetic oligonucleotide
agacaauggggaggcacua

SEQ ID NO: 777577 - RNA, 19 nt, Artificial Sequence
  Description of Artificial Sequence: Synthetic oligonucleotide
ggcuucgccgcaggggugg

SEQ ID NO: 777578 - RNA, 19 nt, Artificial Sequence
  Description of Artificial Sequence: Synthetic oligonucleotide
acguggaguucucggucau

SEQ ID NO: 777579 - RNA, 19 nt, Artificial Sequence
  Description of Artificial Sequence: Synthetic oligonucleotide
gaagggacgcgaguuuccu

SEQ ID NO: 777580 - RNA, 19 nt, Artificial Sequence
  Description of Artificial Sequence: Synthetic oligonucleotide
cuuccccaauggcuagauc

SEQ ID NO: 777581 - RNA, 19 nt, Artificial Sequence
  Description of Artificial Sequence: Synthetic oligonucleotide
ccagacgaaagugcggcug

SEQ ID NO: 777582 - RNA, 19 nt, Artificial Sequence
  Description of Artificial Sequence: Synthetic oligonucleotide
gcuaccuagcaaacuaaaa

SEQ ID NO: 777583 - RNA, 19 nt, Artificial Sequence
  Description of Artificial Sequence: Synthetic oligonucleotide
ccaaagguuuugaagcucu

SEQ ID NO: 777584 - RNA, 19 nt, Artificial Sequence
  Description of Artificial Sequence: Synthetic oligonucleotide
ccccaacugcucaccaccg

SEQ ID NO: 777585 - RNA, 19 nt, Artificial Sequence
  Description of Artificial Sequence: Synthetic oligonucleotide
cuugggcguggcagccggc

SEQ ID NO: 777586 - RNA, 19 nt, Artificial Sequence
  Description of Artificial Sequence: Synthetic oligonucleotide
ccacgaucauaucugaaua

SEQ ID NO: 777587 - RNA, 19 nt, Artificial Sequence
  Description of Artificial Sequence: Synthetic oligonucleotide
gggagucagcguucucacc

SEQ ID NO: 777588 - RNA, 19 nt, Artificial Sequence
  Description of Artificial Sequence: Synthetic oligonucleotide
gacgcgaguuuccuauuuu

SEQ ID NO: 777589 - RNA, 19 nt, Artificial Sequence
  Description of Artificial Sequence: Synthetic oligonucleotide
ccuccuaggcuacuuagaa

SEQ ID NO: 777590 - RNA, 19 nt, Artificial Sequence
  Description of Artificial Sequence: Synthetic oligonucleotide
ccuccccuaaguccacucc

SEQ ID NO: 777591 - RNA, 19 nt, Artificial Sequence
  Description of Artificial Sequence: Synthetic oligonucleotide
gaugagcaacuuacagccu

SEQ ID NO: 777592 - RNA, 19 nt, Artificial Sequence
  Description of Artificial Sequence: Synthetic oligonucleotide
ucgccgcagggguggacgu

SEQ ID NO: 777593 - RNA, 19 nt, Artificial Sequence
  Description of Artificial Sequence: Synthetic oligonucleotide
cugcucucccgcucgacua

SEQ ID NO: 777594 - RNA, 19 nt, Artificial Sequence
  Description of Artificial Sequence: Synthetic oligonucleotide
ggcacgacccgaaucggga

SEQ ID NO: 777595 - RNA, 19 nt, Artificial Sequence
  Description of Artificial Sequence: Synthetic oligonucleotide
ggcccguuugggcuucgcc

SEQ ID NO: 777596 - RNA, 19 nt, Artificial Sequence
  Description of Artificial Sequence: Synthetic oligonucleotide
agggauggaugagcaacuu

SEQ ID NO: 777597 - RNA, 19 nt, Artificial Sequence
  Description of Artificial Sequence: Synthetic oligonucleotide
cuagguggagugucauccu

SEQ ID NO: 777598 - RNA, 19 nt, Artificial Sequence
  Description of Artificial Sequence: Synthetic oligonucleotide
ggguuuuacguggcagcug

SEQ ID NO: 777599 - RNA, 19 nt, Artificial Sequence
  Description of Artificial Sequence: Synthetic oligonucleotide
gggcacgacccgaaucggg

SEQ ID NO: 777600 - RNA, 19 nt, Artificial Sequence
  Description of Artificial Sequence: Synthetic oligonucleotide
gagcgauuuuccccucccu

SEQ ID NO: 777601 - RNA, 19 nt, Artificial Sequence
  Description of Artificial Sequence: Synthetic oligonucleotide
aaagaccccgaggcaccua

SEQ ID NO: 777602 - RNA, 19 nt, Artificial Sequence
  Description of Artificial Sequence: Synthetic oligonucleotide
agggcagccgagcgauuuu

SEQ ID NO: 777603 - RNA, 19 nt, Artificial Sequence
  Description of Artificial Sequence: Synthetic oligonucleotide
ggcucucuaaagcuaccua

SEQ ID NO: 777604 - RNA, 19 nt, Artificial Sequence
  Description of Artificial Sequence: Synthetic oligonucleotide
cccgaaucgggaucugcuc

SEQ ID NO: 777605 - RNA, 19 nt, Artificial Sequence
  Description of Artificial Sequence: Synthetic oligonucleotide
gggauggaugagcaacuua

SEQ ID NO: 777606 - RNA, 19 nt, Artificial Sequence
  Description of Artificial Sequence: Synthetic oligonucleotide
cgagcgauuuuccccuccc

SEQ ID NO: 777607 - RNA, 19 nt, Artificial Sequence
  Description of Artificial Sequence: Synthetic oligonucleotide
cgcucgacuagcaggccag

SEQ ID NO: 777608 - RNA, 19 nt, Artificial Sequence
  Description of Artificial Sequence: Synthetic oligonucleotide
uggaccccuuuccccuuuu

SEQ ID NO: 777609 - RNA, 19 nt, Artificial Sequence
  Description of Artificial Sequence: Synthetic oligonucleotide
cccaauggcuagauccuga

SEQ ID NO: 777610 - RNA, 19 nt, Artificial Sequence
  Description of Artificial Sequence: Synthetic oligonucleotide
gggaucugcucucccgcuc

SEQ ID NO: 777611 - RNA, 19 nt, Artificial Sequence
  Description of Artificial Sequence: Synthetic oligonucleotide
gaaagaccccgaggcaccu

SEQ ID NO: 777612 - RNA, 19 nt, Artificial Sequence
  Description of Artificial Sequence: Synthetic oligonucleotide
ccugaaagaccccgaggca

SEQ ID NO: 777613 - RNA, 19 nt, Artificial Sequence
  Description of Artificial Sequence: Synthetic oligonucleotide
agccacgaucauaucugaa

SEQ ID NO: 777614 - RNA, 19 nt, Artificial Sequence
  Description of Artificial Sequence: Synthetic oligonucleotide
ggagggguuuuacguggca

SEQ ID NO: 777615 - RNA, 19 nt, Artificial Sequence
  Description of Artificial Sequence: Synthetic oligonucleotide
guccucgcgggagguuggg

SEQ ID NO: 777616 - RNA, 19 nt, Artificial Sequence
  Description of Artificial Sequence: Synthetic oligonucleotide
caccgcugagggcagccga

SEQ ID NO: 777617 - RNA, 19 nt, Artificial Sequence
  Description of Artificial Sequence: Synthetic oligonucleotide
cgaaucgggaucugcucuc

SEQ ID NO: 777618 - RNA, 19 nt, Artificial Sequence
  Description of Artificial Sequence: Synthetic oligonucleotide
ccucuuggcacuggacuug

SEQ ID NO: 777619 - RNA, 19 nt, Artificial Sequence
  Description of Artificial Sequence: Synthetic oligonucleotide
cccaacugcucaccaccgc

SEQ ID NO: 777620 - RNA, 19 nt, Artificial Sequence
  Description of Artificial Sequence: Synthetic oligonucleotide
gcgaguuuccuauuuuauu

SEQ ID NO: 777621 - RNA, 19 nt, Artificial Sequence
  Description of Artificial Sequence: Synthetic oligonucleotide
ggcagccgagcgauuuucc

SEQ ID NO: 777622 - RNA, 19 nt, Artificial Sequence
  Description of Artificial Sequence: Synthetic oligonucleotide
uccccucaucuagccagaa

SEQ ID NO: 777623 - RNA, 19 nt, Artificial Sequence
  Description of Artificial Sequence: Synthetic oligonucleotide
cacacaauccuggcucucu

SEQ ID NO: 777624 - RNA, 19 nt, Artificial Sequence
  Description of Artificial Sequence: Synthetic oligonucleotide
cccuaaccccauaagguua

SEQ ID NO: 777625 - RNA, 19 nt, Artificial Sequence
  Description of Artificial Sequence: Synthetic oligonucleotide
cgacgcguggcuccugucc

SEQ ID NO: 777626 - RNA, 19 nt, Artificial Sequence
  Description of Artificial Sequence: Synthetic oligonucleotide
uuggcccguuugggcuucg

SEQ ID NO: 777627 - RNA, 19 nt, Artificial Sequence
  Description of Artificial Sequence: Synthetic oligonucleotide
ggcaccuaccccuuugguu

SEQ ID NO: 777628 - RNA, 19 nt, Artificial Sequence
  Description of Artificial Sequence: Synthetic oligonucleotide
cgggagguugggcacgacc

SEQ ID NO: 777629 - RNA, 19 nt, Artificial Sequence
  Description of Artificial Sequence: Synthetic oligonucleotide
gcgggcgacgcguggcucc

SEQ ID NO: 777630 - RNA, 19 nt, Artificial Sequence
  Description of Artificial Sequence: Synthetic oligonucleotide
caacuugaucugggaguca

SEQ ID NO: 777631 - RNA, 19 nt, Artificial Sequence
  Description of Artificial Sequence: Synthetic oligonucleotide
ccgagcgauuuuccccucc

SEQ ID NO: 777632 - RNA, 19 nt, Artificial Sequence
  Description of Artificial Sequence: Synthetic oligonucleotide
gcacuagggcauaugugaa

SEQ ID NO: 777633 - RNA, 19 nt, Artificial Sequence
  Description of Artificial Sequence: Synthetic oligonucleotide
cuggcgcgaggagccggcg

SEQ ID NO: 777634 - RNA, 19 nt, Artificial Sequence
  Description of Artificial Sequence: Synthetic oligonucleotide
gccuuggcccguuugggcu

SEQ ID NO: 777635 - RNA, 19 nt, Artificial Sequence
  Description of Artificial Sequence: Synthetic oligonucleotide
caguuccauuugccuucac

SEQ ID NO: 777636 - RNA, 19 nt, Artificial Sequence
  Description of Artificial Sequence: Synthetic oligonucleotide
ccuaggacacagcucucaa

SEQ ID NO: 777637 - RNA, 19 nt, Artificial Sequence
  Description of Artificial Sequence: Synthetic oligonucleotide
gcucaccaccgcugagggc

SEQ ID NO: 777638 - RNA, 19 nt, Artificial Sequence
  Description of Artificial Sequence: Synthetic oligonucleotide
gggaaucgcuccacaaugu

SEQ ID NO: 777639 - RNA, 19 nt, Artificial Sequence
  Description of Artificial Sequence: Synthetic oligonucleotide
caggcgcuugauggacaac

SEQ ID NO: 777640 - RNA, 19 nt, Artificial Sequence
  Description of Artificial Sequence: Synthetic oligonucleotide
ccaacugcucaccaccgcu

SEQ ID NO: 777641 - RNA, 19 nt, Artificial Sequence
  Description of Artificial Sequence: Synthetic oligonucleotide
cccaacccuaaccccauaa

SEQ ID NO: 777642 - RNA, 19 nt, Artificial Sequence
  Description of Artificial Sequence: Synthetic oligonucleotide
gcuugagaacaccgguggu

SEQ ID NO: 777643 - RNA, 19 nt, Artificial Sequence
  Description of Artificial Sequence: Synthetic oligonucleotide
ccccucaucuagccagaac

SEQ ID NO: 777644 - RNA, 19 nt, Artificial Sequence
  Description of Artificial Sequence: Synthetic oligonucleotide
uggcccguuugggcuucgc

SEQ ID NO: 777645 - RNA, 19 nt, Artificial Sequence
  Description of Artificial Sequence: Synthetic oligonucleotide
ggacuggcgcgaggagccg

SEQ ID NO: 777646 - RNA, 19 nt, Artificial Sequence
  Description of Artificial Sequence: Synthetic oligonucleotide
gggcagccgagcgauuuuc

SEQ ID NO: 777647 - RNA, 19 nt, Artificial Sequence
  Description of Artificial Sequence: Synthetic oligonucleotide
caauggcuagauccugauu

SEQ ID NO: 777648 - RNA, 19 nt, Artificial Sequence
  Description of Artificial Sequence: Synthetic oligonucleotide
uccccucccuggccagcua

SEQ ID NO: 777649 - RNA, 19 nt, Artificial Sequence
  Description of Artificial Sequence: Synthetic oligonucleotide
acccuccccuaaguccacu

SEQ ID NO: 777650 - RNA, 19 nt, Artificial Sequence
  Description of Artificial Sequence: Synthetic oligonucleotide
ccgaaucgggaucugcucu

SEQ ID NO: 777651 - RNA, 19 nt, Artificial Sequence
  Description of Artificial Sequence: Synthetic oligonucleotide
cgaccucuugggcucauca

SEQ ID NO: 777652 - RNA, 19 nt, Artificial Sequence
  Description of Artificial Sequence: Synthetic oligonucleotide
ggacgcgaguuuccuauuu

SEQ ID NO: 777653 - RNA, 19 nt, Artificial Sequence
  Description of Artificial Sequence: Synthetic oligonucleotide
ggcccucuuggcacuggac

SEQ ID NO: 777654 - RNA, 19 nt, Artificial Sequence
  Description of Artificial Sequence: Synthetic oligonucleotide
cuuggaccccuuuccccuu

SEQ ID NO: 777655 - RNA, 19 nt, Artificial Sequence
  Description of Artificial Sequence: Synthetic oligonucleotide
ccgcucgacuagcaggcca

SEQ ID NO: 777656 - RNA, 19 nt, Artificial Sequence
  Description of Artificial Sequence: Synthetic oligonucleotide
cgaggagccggcgcgguuc

SEQ ID NO: 777657 - RNA, 19 nt, Artificial Sequence
  Description of Artificial Sequence: Synthetic oligonucleotide
ggguggucgguggacuucu

SEQ ID NO: 777658 - RNA, 19 nt, Artificial Sequence
  Description of Artificial Sequence: Synthetic oligonucleotide
ccaguuccauuugccuuca

SEQ ID NO: 777659 - RNA, 19 nt, Artificial Sequence
  Description of Artificial Sequence: Synthetic oligonucleotide
cgcguggcuccuguccucc

SEQ ID NO: 777660 - RNA, 19 nt, Artificial Sequence
  Description of Artificial Sequence: Synthetic oligonucleotide
ggaccccuuuccccuuuua

SEQ ID NO: 777661 - RNA, 19 nt, Artificial Sequence
  Description of Artificial Sequence: Synthetic oligonucleotide
ggcgacgcguggcuccugu

SEQ ID NO: 777662 - RNA, 19 nt, Artificial Sequence
  Description of Artificial Sequence: Synthetic oligonucleotide
gccgagcgauuuuccccuc

SEQ ID NO: 777663 - RNA, 19 nt, Artificial Sequence
  Description of Artificial Sequence: Synthetic oligonucleotide
gcacgacccgaaucgggau

SEQ ID NO: 777664 - RNA, 19 nt, Artificial Sequence
  Description of Artificial Sequence: Synthetic oligonucleotide
cgcgaguuuccuauuuuau

SEQ ID NO: 777665 - RNA, 19 nt, Artificial Sequence
  Description of Artificial Sequence: Synthetic oligonucleotide
gcgcgguucuucucugccu

SEQ ID NO: 777666 - RNA, 19 nt, Artificial Sequence
  Description of Artificial Sequence: Synthetic oligonucleotide
gguugggcacgacccgaau

SEQ ID NO: 777667 - RNA, 19 nt, Artificial Sequence
  Description of Artificial Sequence: Synthetic oligonucleotide
gggcuucgccgcaggggug

SEQ ID NO: 777668 - RNA, 19 nt, Artificial Sequence
  Description of Artificial Sequence: Synthetic oligonucleotide
accgaccucuugggcucau

SEQ ID NO: 777669 - RNA, 19 nt, Artificial Sequence
  Description of Artificial Sequence: Synthetic oligonucleotide
gcucgacuagcaggccaga

SEQ ID NO: 777670 - RNA, 19 nt, Artificial Sequence
  Description of Artificial Sequence: Synthetic oligonucleotide
caccgaccucuugggcuca

SEQ ID NO: 777671 - RNA, 19 nt, Artificial Sequence
  Description of Artificial Sequence: Synthetic oligonucleotide
gcgacgcguggcuccuguc

SEQ ID NO: 777672 - RNA, 19 nt, Artificial Sequence
  Description of Artificial Sequence: Synthetic oligonucleotide
cccgcucgacuagcaggcc

SEQ ID NO: 777673 - RNA, 19 nt, Artificial Sequence
  Description of Artificial Sequence: Synthetic oligonucleotide
ggguugcagaugagaucaa

SEQ ID NO: 777674 - RNA, 19 nt, Artificial Sequence
  Description of Artificial Sequence: Synthetic oligonucleotide
ccguuugggcuucgccgca

SEQ ID NO: 777675 - RNA, 19 nt, Artificial Sequence
  Description of Artificial Sequence: Synthetic oligonucleotide
gcguucucacccaccuugu

SEQ ID NO: 777676 - RNA, 19 nt, Artificial Sequence
  Description of Artificial Sequence: Synthetic oligonucleotide
cccuaaguccacucccauu

SEQ ID NO: 777677 - RNA, 19 nt, Artificial Sequence
  Description of Artificial Sequence: Synthetic oligonucleotide
gggacgcgaguuuccuauu

SEQ ID NO: 777678 - RNA, 19 nt, Artificial Sequence
  Description of Artificial Sequence: Synthetic oligonucleotide
ccgaccucuugggcucauc

SEQ ID NO: 777679 - RNA, 19 nt, Artificial Sequence
  Description of Artificial Sequence: Synthetic oligonucleotide
ccccuaaguccacucccau

SEQ ID NO: 777680 - RNA, 19 nt, Artificial Sequence
  Description of Artificial Sequence: Synthetic oligonucleotide
gggcgacgcguggcuccug

SEQ ID NO: 777681 - RNA, 19 nt, Artificial Sequence
  Description of Artificial Sequence: Synthetic oligonucleotide
gcgggagguugggcacgac

SEQ ID NO: 777682 - RNA, 19 nt, Artificial Sequence
  Description of Artificial Sequence: Synthetic oligonucleotide
cgacccgaaucgggaucug

SEQ ID NO: 777683 - RNA, 19 nt, Artificial Sequence
  Description of Artificial Sequence: Synthetic oligonucleotide
gcgaggagccggcgcgguu

SEQ ID NO: 777684 - RNA, 19 nt, Artificial Sequence
  Description of Artificial Sequence: Synthetic oligonucleotide
cgcgggagguugggcacga

SEQ ID NO: 777685 - RNA, 19 nt, Artificial Sequence
  Description of Artificial Sequence: Synthetic oligonucleotide
gguggucgguggacuucuu

SEQ ID NO: 777686 - RNA, 19 nt, Artificial Sequence
  Description of Artificial Sequence: Synthetic oligonucleotide
cgcgggcgacgcguggcuc

SEQ ID NO: 777687 - RNA, 19 nt, Artificial Sequence
  Description of Artificial Sequence: Synthetic oligonucleotide
ccgcgggcgacgcguggcu

SEQ ID NO: 777688 - RNA, 19 nt, Artificial Sequence
  Description of Artificial Sequence: Synthetic oligonucleotide
ccaguccucgcgggagguu

SEQ ID NO: 777689 - RNA, 19 nt, Artificial Sequence
  Description of Artificial Sequence: Synthetic oligonucleotide
cgggcgacgcguggcuccu

SEQ ID NO: 777690 - RNA, 19 nt, Artificial Sequence
  Description of Artificial Sequence: Synthetic oligonucleotide
gcguggcagccggcuucuu

SEQ ID NO: 777691 - RNA, 19 nt, Artificial Sequence
  Description of Artificial Sequence: Synthetic oligonucleotide
ugaaaaguugcauugaaag

SEQ ID NO: 777692 - RNA, 19 nt, Artificial Sequence
  Description of Artificial Sequence: Synthetic oligonucleotide
aauuucagcauuuagaguu

SEQ ID NO: 777693 - RNA, 19 nt, Artificial Sequence
  Description of Artificial Sequence: Synthetic oligonucleotide
ugacacaaaauuaagguag

SEQ ID NO: 777694 - RNA, 19 nt, Artificial Sequence
  Description of Artificial Sequence: Synthetic oligonucleotide
agugauaaaggucauuggc

SEQ ID NO: 777695 - RNA, 19 nt, Artificial Sequence
  Description of Artificial Sequence: Synthetic oligonucleotide
ucaauaagugacaauggcg

SEQ ID NO: 777696 - RNA, 19 nt, Artificial Sequence
  Description of Artificial Sequence: Synthetic oligonucleotide
aauuacuacuuaucugacc

SEQ ID NO: 777697 - RNA, 19 nt, Artificial Sequence
  Description of Artificial Sequence: Synthetic oligonucleotide
ugagauccaaacaacaucc

SEQ ID NO: 777698 - RNA, 19 nt, Artificial Sequence
  Description of Artificial Sequence: Synthetic oligonucleotide
aauaagugacaauggcgcc

SEQ ID NO: 777699 - RNA, 19 nt, Artificial Sequence
  Description of Artificial Sequence: Synthetic oligonucleotide
uaaacugagaaccgaaugc

SEQ ID NO: 777700 - RNA, 19 nt, Artificial Sequence
  Description of Artificial Sequence: Synthetic oligonucleotide
uauuguuugacauuuagua

SEQ ID NO: 777701 - RNA, 19 nt, Artificial Sequence
  Description of Artificial Sequence: Synthetic oligonucleotide
acaucauauuuguauaccc

SEQ ID NO: 777702 - RNA, 19 nt, Artificial Sequence
  Description of Artificial Sequence: Synthetic oligonucleotide
aacugaguaacucugcaug

SEQ ID NO: 777703 - RNA, 19 nt, Artificial Sequence
  Description of Artificial Sequence: Synthetic oligonucleotide
aaagaucaauuuuggcacc

SEQ ID NO: 777704 - RNA, 19 nt, Artificial Sequence
  Description of Artificial Sequence: Synthetic oligonucleotide
aaucuaucagaucauccag

SEQ ID NO: 777705 - RNA, 19 nt, Artificial Sequence
  Description of Artificial Sequence: Synthetic oligonucleotide
ucaacaaucugucaguccu

SEQ ID NO: 777706 - RNA, 19 nt, Artificial Sequence
  Description of Artificial Sequence: Synthetic oligonucleotide
uuugauacuaugccaagug

SEQ ID NO: 777707 - RNA, 19 nt, Artificial Sequence
  Description of Artificial Sequence: Synthetic oligonucleotide
ugaggagucaauaagugac

SEQ ID NO: 777708 - RNA, 19 nt, Artificial Sequence
  Description of Artificial Sequence: Synthetic oligonucleotide
auuagaguuagugauaaag

SEQ ID NO: 777709 - RNA, 19 nt, Artificial Sequence
  Description of Artificial Sequence: Synthetic oligonucleotide
uuguuugacauuuaguaga

SEQ ID NO: 777710 - RNA, 19 nt, Artificial Sequence
  Description of Artificial Sequence: Synthetic oligonucleotide
uuaaacugagaaccgaaug

SEQ ID NO: 777711 - RNA, 19 nt, Artificial Sequence
  Description of Artificial Sequence: Synthetic oligonucleotide
cugaauaacuucaugcugc

SEQ ID NO: 777712 - RNA, 19 nt, Artificial Sequence
  Description of Artificial Sequence: Synthetic oligonucleotide
uaguaaaaggcacuguuug

SEQ ID NO: 777713 - RNA, 19 nt, Artificial Sequence
  Description of Artificial Sequence: Synthetic oligonucleotide
aaguccuuacucuaugguc

SEQ ID NO: 777714 - RNA, 19 nt, Artificial Sequence
  Description of Artificial Sequence: Synthetic oligonucleotide
aaauuugauugcuaaacau

SEQ ID NO: 777715 - RNA, 19 nt, Artificial Sequence
  Description of Artificial Sequence: Synthetic oligonucleotide
acuauuauuugauacuaug

SEQ ID NO: 777716 - RNA, 19 nt, Artificial Sequence
  Description of Artificial Sequence: Synthetic oligonucleotide
uauuaugguuugaugaccc

SEQ ID NO: 777717 - RNA, 19 nt, Artificial Sequence
  Description of Artificial Sequence: Synthetic oligonucleotide
ucagacaucauauuuguau

SEQ ID NO: 777718 - RNA, 19 nt, Artificial Sequence
  Description of Artificial Sequence: Synthetic oligonucleotide
uguuccuuauuuucaauag

SEQ ID NO: 777719 - RNA, 19 nt, Artificial Sequence
  Description of Artificial Sequence: Synthetic oligonucleotide
auuguuugacauuuaguag

SEQ ID NO: 777720 - RNA, 19 nt, Artificial Sequence
  Description of Artificial Sequence: Synthetic oligonucleotide
uaugguuugaugacccagg

SEQ ID NO: 777721 - RNA, 19 nt, Artificial Sequence
  Description of Artificial Sequence: Synthetic oligonucleotide
gauugcuaaacauugucac

SEQ ID NO: 777722 - RNA, 19 nt, Artificial Sequence
  Description of Artificial Sequence: Synthetic oligonucleotide
ucugaauaacuucaugcug

SEQ ID NO: 777723 - RNA, 19 nt, Artificial Sequence
  Description of Artificial Sequence: Synthetic oligonucleotide
cauuagaagacucccacgc

SEQ ID NO: 777724 - RNA, 19 nt, Artificial Sequence
  Description of Artificial Sequence: Synthetic oligonucleotide
ugccaagugagccacuugg

SEQ ID NO: 777725 - RNA, 19 nt, Artificial Sequence
  Description of Artificial Sequence: Synthetic oligonucleotide
acaagacuuaauuucagca

SEQ ID NO: 777726 - RNA, 19 nt, Artificial Sequence
  Description of Artificial Sequence: Synthetic oligonucleotide
ugguuuaccagacaaggac

SEQ ID NO: 777727 - RNA, 19 nt, Artificial Sequence
  Description of Artificial Sequence: Synthetic oligonucleotide
cugagaaucuaucagauca

SEQ ID NO: 777728 - RNA, 19 nt, Artificial Sequence
  Description of Artificial Sequence: Synthetic oligonucleotide
cauuuauaguaaaaggcac

SEQ ID NO: 777729 - RNA, 19 nt, Artificial Sequence
  Description of Artificial Sequence: Synthetic oligonucleotide
auuacccauauuauuaugg

SEQ ID NO: 777730 - RNA, 19 nt, Artificial Sequence
  Description of Artificial Sequence: Synthetic oligonucleotide
uagucaauuucugagaugu

SEQ ID NO: 777731 - RNA, 19 nt, Artificial Sequence
  Description of Artificial Sequence: Synthetic oligonucleotide
cucauuguccaaaacacug

SEQ ID NO: 777732 - RNA, 19 nt, Artificial Sequence
  Description of Artificial Sequence: Synthetic oligonucleotide
uagaguuagugauaaaggu

SEQ ID NO: 777733 - RNA, 19 nt, Artificial Sequence
  Description of Artificial Sequence: Synthetic oligonucleotide
auuagaagacucccacgcc

SEQ ID NO: 777734 - RNA, 19 nt, Artificial Sequence
  Description of Artificial Sequence: Synthetic oligonucleotide
ugauugcuaaacauuguca

SEQ ID NO: 777735 - RNA, 19 nt, Artificial Sequence
  Description of Artificial Sequence: Synthetic oligonucleotide
uugaaugucaaacuauuuu

SEQ ID NO: 777736 - RNA, 19 nt, Artificial Sequence
  Description of Artificial Sequence: Synthetic oligonucleotide
aggacuucugcccaacuac

SEQ ID NO: 777737 - RNA, 19 nt, Artificial Sequence
  Description of Artificial Sequence: Synthetic oligonucleotide
aaugcuugugcaaaguucu

SEQ ID NO: 777738 - RNA, 19 nt, Artificial Sequence
  Description of Artificial Sequence: Synthetic oligonucleotide
aagaguaaaaccugcguua

SEQ ID NO: 777739 - RNA, 19 nt, Artificial Sequence
  Description of Artificial Sequence: Synthetic oligonucleotide
uucugaauaacuucaugcu

SEQ ID NO: 777740 - RNA, 19 nt, Artificial Sequence
  Description of Artificial Sequence: Synthetic oligonucleotide
uucucaaucugguacguug

SEQ ID NO: 777741 - RNA, 19 nt, Artificial Sequence
  Description of Artificial Sequence: Synthetic oligonucleotide
uaaacauugucacuuugaa

SEQ ID NO: 777742 - RNA, 19 nt, Artificial Sequence
  Description of Artificial Sequence: Synthetic oligonucleotide
ucuucguagaccuuaccug

SEQ ID NO: 777743 - RNA, 19 nt, Artificial Sequence
  Description of Artificial Sequence: Synthetic oligonucleotide
ucugguacguuguucuagg

SEQ ID NO: 777744 - RNA, 19 nt, Artificial Sequence
  Description of Artificial Sequence: Synthetic oligonucleotide
uugagauccaaacaacauc

SEQ ID NO: 777745 - RNA, 19 nt, Artificial Sequence
  Description of Artificial Sequence: Synthetic oligonucleotide
uucuccauuagaguuagug

SEQ ID NO: 777746 - RNA, 19 nt, Artificial Sequence
  Description of Artificial Sequence: Synthetic oligonucleotide
gguuugaugacccagguuc

SEQ ID NO: 777747 - RNA, 19 nt, Artificial Sequence
  Description of Artificial Sequence: Synthetic oligonucleotide
uguccaagaguaaaaccug

SEQ ID NO: 777748 - RNA, 19 nt, Artificial Sequence
  Description of Artificial Sequence: Synthetic oligonucleotide
cugaaugacugacuguugg

SEQ ID NO: 777749 - RNA, 19 nt, Artificial Sequence
  Description of Artificial Sequence: Synthetic oligonucleotide
agaguuagugauaaagguc

SEQ ID NO: 777750 - RNA, 19 nt, Artificial Sequence
  Description of Artificial Sequence: Synthetic oligonucleotide
ucuccauuagaguuaguga

SEQ ID NO: 777751 - RNA, 19 nt, Artificial Sequence
  Description of Artificial Sequence: Synthetic oligonucleotide
uugaaagggcauuacauua

SEQ ID NO: 777752 - RNA, 19 nt, Artificial Sequence
  Description of Artificial Sequence: Synthetic oligonucleotide
uuauuaugguuugaugacc

SEQ ID NO: 777753 - RNA, 19 nt, Artificial Sequence
  Description of Artificial Sequence: Synthetic oligonucleotide
aauggcgccucauugucca

SEQ ID NO: 777754 - RNA, 19 nt, Artificial Sequence
  Description of Artificial Sequence: Synthetic oligonucleotide
uucgugacaagacuuaauu

SEQ ID NO: 777755 - RNA, 19 nt, Artificial Sequence
  Description of Artificial Sequence: Synthetic oligonucleotide
acuuacaucagacaucaua

SEQ ID NO: 777756 - RNA, 19 nt, Artificial Sequence
  Description of Artificial Sequence: Synthetic oligonucleotide
gacaagacuuaauuucagc

SEQ ID NO: 777757 - RNA, 19 nt, Artificial Sequence
  Description of Artificial Sequence: Synthetic oligonucleotide
ucccugacaaucuauacau

SEQ ID NO: 777758 - RNA, 19 nt, Artificial Sequence
  Description of Artificial Sequence: Synthetic oligonucleotide
acauuagaagacucccacg

SEQ ID NO: 777759 - RNA, 19 nt, Artificial Sequence
  Description of Artificial Sequence: Synthetic oligonucleotide
uucccugacaaucuauaca

SEQ ID NO: 777760 - RNA, 19 nt, Artificial Sequence
  Description of Artificial Sequence: Synthetic oligonucleotide
uguaaauuugauugcuaaa

SEQ ID NO: 777761 - RNA, 19 nt, Artificial Sequence
  Description of Artificial Sequence: Synthetic oligonucleotide
ugacaauggcgccucauug

SEQ ID NO: 777762 - RNA, 19 nt, Artificial Sequence
  Description of Artificial Sequence: Synthetic oligonucleotide
gauguguagcauccaaagc

SEQ ID NO: 777763 - RNA, 19 nt, Artificial Sequence
  Description of Artificial Sequence: Synthetic oligonucleotide
agccagauuacccauauua

SEQ ID NO: 777764 - RNA, 19 nt, Artificial Sequence
  Description of Artificial Sequence: Synthetic oligonucleotide
uguuggagguauuuggagu

SEQ ID NO: 777765 - RNA, 19 nt, Artificial Sequence
  Description of Artificial Sequence: Synthetic oligonucleotide
uuugauugcuaaacauugu

SEQ ID NO: 777766 - RNA, 19 nt, Artificial Sequence
  Description of Artificial Sequence: Synthetic oligonucleotide
uuacccauauuauuauggu

SEQ ID NO: 777767 - RNA, 19 nt, Artificial Sequence
  Description of Artificial Sequence: Synthetic oligonucleotide
acaauggcgccucauuguc

SEQ ID NO: 777768 - RNA, 19 nt, Artificial Sequence
  Description of Artificial Sequence: Synthetic oligonucleotide
uaauuacuacuuaucugac

SEQ ID NO: 777769 - RNA, 19 nt, Artificial Sequence
  Description of Artificial Sequence: Synthetic oligonucleotide
auuggcacccugcugcccg

SEQ ID NO: 777770 - RNA, 19 nt, Artificial Sequence
  Description of Artificial Sequence: Synthetic oligonucleotide
auuaugccuccacugguag

SEQ ID NO: 777771 - RNA, 19 nt, Artificial Sequence
  Description of Artificial Sequence: Synthetic oligonucleotide
uugaggagucaauaaguga

SEQ ID NO: 777772 - RNA, 19 nt, Artificial Sequence
  Description of Artificial Sequence: Synthetic oligonucleotide
cucuaugucuuucugagga

SEQ ID NO: 777773 - RNA, 19 nt, Artificial Sequence
  Description of Artificial Sequence: Synthetic oligonucleotide
ugaauaacuucaugcugca

SEQ ID NO: 777774 - RNA, 19 nt, Artificial Sequence
  Description of Artificial Sequence: Synthetic oligonucleotide
  modified_base (2)..(2): a, c, u, g, unknown or other
unugguacuucugaauaac

SEQ ID NO: 777775 - RNA, 19 nt, Artificial Sequence
  Description of Artificial Sequence: Synthetic oligonucleotide
agauuggccaaaaccacac

SEQ ID NO: 777776 - RNA, 19 nt, Artificial Sequence
  Description of Artificial Sequence: Synthetic oligonucleotide
uucuguucgugacaagacu

SEQ ID NO: 777777 - RNA, 19 nt, Artificial Sequence
  Description of Artificial Sequence: Synthetic oligonucleotide
gaaaccguguccaagagua

SEQ ID NO: 777778 - RNA, 19 nt, Artificial Sequence
  Description of Artificial Sequence: Synthetic oligonucleotide
agaaccgaaugcuugugca

SEQ ID NO: 777779 - RNA, 19 nt, Artificial Sequence
  Description of Artificial Sequence: Synthetic oligonucleotide
ucuguucgugacaagacuu

SEQ ID NO: 777780 - RNA, 19 nt, Artificial Sequence
  Description of Artificial Sequence: Synthetic oligonucleotide
acuucugcccaacuacauc

SEQ ID NO: 777781 - RNA, 19 nt, Artificial Sequence
  Description of Artificial Sequence: Synthetic oligonucleotide
aggcguguaaauccacucg

SEQ ID NO: 777782 - RNA, 19 nt, Artificial Sequence
  Description of Artificial Sequence: Synthetic oligonucleotide
uuaucugaccuuguuugcc

SEQ ID NO: 777783 - RNA, 19 nt, Artificial Sequence
  Description of Artificial Sequence: Synthetic oligonucleotide
ugguaauggugacacaaaa

SEQ ID NO: 777784 - RNA, 19 nt, Artificial Sequence
  Description of Artificial Sequence: Synthetic oligonucleotide
uguauacccugagaaaucu

SEQ ID NO: 777785 - RNA, 19 nt, Artificial Sequence
  Description of Artificial Sequence: Synthetic oligonucleotide
acuacaucugguaauggug

SEQ ID NO: 777786 - RNA, 19 nt, Artificial Sequence
  Description of Artificial Sequence: Synthetic oligonucleotide
cuagcuaacuccugagaug

SEQ ID NO: 777787 - RNA, 19 nt, Artificial Sequence
  Description of Artificial Sequence: Synthetic oligonucleotide
ucucaaucugguacguugu

SEQ ID NO: 777788 - RNA, 19 nt, Artificial Sequence
  Description of Artificial Sequence: Synthetic oligonucleotide
uugguuuaccagacaagga

SEQ ID NO: 777789 - RNA, 19 nt, Artificial Sequence
  Description of Artificial Sequence: Synthetic oligonucleotide
uuuagaguugaggagucaa

SEQ ID NO: 777790 - RNA, 19 nt, Artificial Sequence
  Description of Artificial Sequence: Synthetic oligonucleotide
gguauuuggaguauucuug

SEQ ID NO: 777791 - RNA, 19 nt, Artificial Sequence
  Description of Artificial Sequence: Synthetic oligonucleotide
uccuacauuuauaguaaaa

SEQ ID NO: 777792 - RNA, 19 nt, Artificial Sequence
  Description of Artificial Sequence: Synthetic oligonucleotide
ugugguuguggagagguga

SEQ ID NO: 777793 - RNA, 19 nt, Artificial Sequence
  Description of Artificial Sequence: Synthetic oligonucleotide
agauuacccauauuauuau

SEQ ID NO: 777794 - RNA, 19 nt, Artificial Sequence
  Description of Artificial Sequence: Synthetic oligonucleotide
acugaguaacucugcaugu

SEQ ID NO: 777795 - RNA, 19 nt, Artificial Sequence
  Description of Artificial Sequence: Synthetic oligonucleotide
uauucccugacaaucuaua

SEQ ID NO: 777796 - RNA, 19 nt, Artificial Sequence
  Description of Artificial Sequence: Synthetic oligonucleotide
uaugccuccacugguagac

SEQ ID NO: 777797 - RNA, 19 nt, Artificial Sequence
  Description of Artificial Sequence: Synthetic oligonucleotide
ugguacguuguucuaggcu

SEQ ID NO: 777798 - RNA, 19 nt, Artificial Sequence
  Description of Artificial Sequence: Synthetic oligonucleotide
uuuugggucuauucccuga

SEQ ID NO: 777799 - RNA, 19 nt, Artificial Sequence
  Description of Artificial Sequence: Synthetic oligonucleotide
guaauggugacacaaaauu

SEQ ID NO: 777800 - RNA, 19 nt, Artificial Sequence
  Description of Artificial Sequence: Synthetic oligonucleotide
ugggucuauucccugacaa

SEQ ID NO: 777801 - RNA, 19 nt, Artificial Sequence
  Description of Artificial Sequence: Synthetic oligonucleotide
uuguauacccugagaaauc

SEQ ID NO: 777802 - RNA, 19 nt, Artificial Sequence
  Description of Artificial Sequence: Synthetic oligonucleotide
ugguugagauccaaacaac

SEQ ID NO: 777803 - RNA, 19 nt, Artificial Sequence
  Description of Artificial Sequence: Synthetic oligonucleotide
uuguucuaggcucuauguc

SEQ ID NO: 777804 - RNA, 19 nt, Artificial Sequence
  Description of Artificial Sequence: Synthetic oligonucleotide
uacuaugccaagugagcca

SEQ ID NO: 777805 - RNA, 19 nt, Artificial Sequence
  Description of Artificial Sequence: Synthetic oligonucleotide
  modified_base (4)..(4): a, c, u, g, unknown or other
caunugguacuucugaaua

SEQ ID NO: 777806 - RNA, 19 nt, Artificial Sequence
  Description of Artificial Sequence: Synthetic oligonucleotide
ucuauugauuuugauuaaa

SEQ ID NO: 777807 - RNA, 19 nt, Artificial Sequence
  Description of Artificial Sequence: Synthetic oligonucleotide
gguacguuguucuaggcuc

SEQ ID NO: 777808 - RNA, 19 nt, Artificial Sequence
  Description of Artificial Sequence: Synthetic oligonucleotide
uguccaaaacacugacacc

SEQ ID NO: 777809 - RNA, 19 nt, Artificial Sequence
  Description of Artificial Sequence: Synthetic oligonucleotide
cucacuuacaucagacauc

SEQ ID NO: 777810 - RNA, 19 nt, Artificial Sequence
  Description of Artificial Sequence: Synthetic oligonucleotide
agaccuuaccuguaacucu

SEQ ID NO: 777811 - RNA, 19 nt, Artificial Sequence
  Description of Artificial Sequence: Synthetic oligonucleotide
uacuuaucugaccuuguuu

SEQ ID NO: 777812 - RNA, 19 nt, Artificial Sequence
  Description of Artificial Sequence: Synthetic oligonucleotide
  modified_base (3)..(3): a, c, u, g, unknown or other
aunugguacuucugaauaa

SEQ ID NO: 777813 - RNA, 19 nt, Artificial Sequence
  Description of Artificial Sequence: Synthetic oligonucleotide
uggaaaccguguccaagag

SEQ ID NO: 777814 - RNA, 19 nt, Artificial Sequence
  Description of Artificial Sequence: Synthetic oligonucleotide
uuuacuccuuguacuacau

SEQ ID NO: 777815 - RNA, 19 nt, Artificial Sequence
  Description of Artificial Sequence: Synthetic oligonucleotide
uagaccuuaccuguaacuc

SEQ ID NO: 777816 - RNA, 19 nt, Artificial Sequence
  Description of Artificial Sequence: Synthetic oligonucleotide
cuacaucugguaaugguga

SEQ ID NO: 777817 - RNA, 19 nt, Artificial Sequence
  Description of Artificial Sequence: Synthetic oligonucleotide
  modified_base (8)..(8): a, c, u, g, unknown or other
ucuccaunugguacuucug

SEQ ID NO: 777818 - RNA, 19 nt, Artificial Sequence
  Description of Artificial Sequence: Synthetic oligonucleotide
acccauauuauuaugguuu

SEQ ID NO: 777819 - RNA, 19 nt, Artificial Sequence
  Description of Artificial Sequence: Synthetic oligonucleotide
ggcauuucaacugaguaac

SEQ ID NO: 777820 - RNA, 19 nt, Artificial Sequence
  Description of Artificial Sequence: Synthetic oligonucleotide
uguauuucccugagacaac

SEQ ID NO: 777821 - RNA, 19 nt, Artificial Sequence
  Description of Artificial Sequence: Synthetic oligonucleotide
aaggugucaacugcugaug

SEQ ID NO: 777822 - RNA, 19 nt, Artificial Sequence
  Description of Artificial Sequence: Synthetic oligonucleotide
uuagaguugaggagucaau

SEQ ID NO: 777823 - RNA, 19 nt, Artificial Sequence
  Description of Artificial Sequence: Synthetic oligonucleotide
caagugucacacuuauaug

SEQ ID NO: 777824 - RNA, 19 nt, Artificial Sequence
  Description of Artificial Sequence: Synthetic oligonucleotide
  modified_base (6)..(6): a, c, u, g, unknown or other
uccaunugguacuucugaa

SEQ ID NO: 777825 - RNA, 19 nt, Artificial Sequence
  Description of Artificial Sequence: Synthetic oligonucleotide
uguucugaggcguguaaau

SEQ ID NO: 777826 - RNA, 19 nt, Artificial Sequence
  Description of Artificial Sequence: Synthetic oligonucleotide
ggagauguaguguauaucu

SEQ ID NO: 777827 - RNA, 19 nt, Artificial Sequence
  Description of Artificial Sequence: Synthetic oligonucleotide
cauuuagaguugaggaguc

SEQ ID NO: 777828 - RNA, 19 nt, Artificial Sequence
  Description of Artificial Sequence: Synthetic oligonucleotide
agccacuugguuuaccaga

SEQ ID NO: 777829 - RNA, 19 nt, Artificial Sequence
  Description of Artificial Sequence: Synthetic oligonucleotide
ugaggcguguaaauccacu

SEQ ID NO: 777830 - RNA, 19 nt, Artificial Sequence
  Description of Artificial Sequence: Synthetic oligonucleotide
ugaaccaauucugaguguu

SEQ ID NO: 777831 - RNA, 19 nt, Artificial Sequence
  Description of Artificial Sequence: Synthetic oligonucleotide
aucugaccuuguuugccac

SEQ ID NO: 777832 - RNA, 19 nt, Artificial Sequence
  Description of Artificial Sequence: Synthetic oligonucleotide
uuauaguaaaaggcacugu

SEQ ID NO: 777833 - RNA, 19 nt, Artificial Sequence
  Description of Artificial Sequence: Synthetic oligonucleotide
cugagguaacagauuggcc

SEQ ID NO: 777834 - RNA, 19 nt, Artificial Sequence
  Description of Artificial Sequence: Synthetic oligonucleotide
ugccaauuaugccuccacu

SEQ ID NO: 777835 - RNA, 19 nt, Artificial Sequence
  Description of Artificial Sequence: Synthetic oligonucleotide
gauaaauaaagaccugguu

SEQ ID NO: 777836 - RNA, 19 nt, Artificial Sequence
  Description of Artificial Sequence: Synthetic oligonucleotide
acaugugcgccugugcuuc

SEQ ID NO: 777837 - RNA, 19 nt, Artificial Sequence
  Description of Artificial Sequence: Synthetic oligonucleotide
gaccuuaccuguaacucug

SEQ ID NO: 777838 - RNA, 19 nt, Artificial Sequence
  Description of Artificial Sequence: Synthetic oligonucleotide
auaagugacaauggcgccu

SEQ ID NO: 777839 - RNA, 19 nt, Artificial Sequence
  Description of Artificial Sequence: Synthetic oligonucleotide
uagcuuuuaucuguauucu

SEQ ID NO: 777840 - RNA, 19 nt, Artificial Sequence
  Description of Artificial Sequence: Synthetic oligonucleotide
  modified_base (7)..(7): a, c, u, g, unknown or other
cuccaunugguacuucuga

SEQ ID NO: 777841 - RNA, 19 nt, Artificial Sequence
  Description of Artificial Sequence: Synthetic oligonucleotide
ugcguuaguggauuuucaa

SEQ ID NO: 777842 - RNA, 19 nt, Artificial Sequence
  Description of Artificial Sequence: Synthetic oligonucleotide
ucuauucccugacaaucua

SEQ ID NO: 777843 - RNA, 19 nt, Artificial Sequence
  Description of Artificial Sequence: Synthetic oligonucleotide
uuacuccuuguacuacaug

SEQ ID NO: 777844 - RNA, 19 nt, Artificial Sequence
  Description of Artificial Sequence: Synthetic oligonucleotide
ucugagaaucuaucagauc

SEQ ID NO: 777845 - RNA, 19 nt, Artificial Sequence
  Description of Artificial Sequence: Synthetic oligonucleotide
cauuuaguagaauucauuu

SEQ ID NO: 777846 - RNA, 19 nt, Artificial Sequence
  Description of Artificial Sequence: Synthetic oligonucleotide
cuagucaauuucugagaug

SEQ ID NO: 777847 - RNA, 19 nt, Artificial Sequence
  Description of Artificial Sequence: Synthetic oligonucleotide
aaaagccuguuggagguau

SEQ ID NO: 777848 - RNA, 19 nt, Artificial Sequence
  Description of Artificial Sequence: Synthetic oligonucleotide
cagcuaaaaucacacuaac

SEQ ID NO: 777849 - RNA, 19 nt, Artificial Sequence
  Description of Artificial Sequence: Synthetic oligonucleotide
aucgucauaauuacuacuu

SEQ ID NO: 777850 - RNA, 19 nt, Artificial Sequence
  Description of Artificial Sequence: Synthetic oligonucleotide
acuagcggcuccuuuugcu

SEQ ID NO: 777851 - RNA, 19 nt, Artificial Sequence
  Description of Artificial Sequence: Synthetic oligonucleotide
gugacacaaaauuaaggua

SEQ ID NO: 777852 - RNA, 19 nt, Artificial Sequence
  Description of Artificial Sequence: Synthetic oligonucleotide
auuaugguuugaugaccca

SEQ ID NO: 777853 - RNA, 19 nt, Artificial Sequence
  Description of Artificial Sequence: Synthetic oligonucleotide
uggagaggugaagacaaac

SEQ ID NO: 777854 - RNA, 19 nt, Artificial Sequence
  Description of Artificial Sequence: Synthetic oligonucleotide
cacuauguguccucuugug

SEQ ID NO: 777855 - RNA, 19 nt, Artificial Sequence
  Description of Artificial Sequence: Synthetic oligonucleotide
aaccgaaugcuugugcaaa

SEQ ID NO: 777856 - RNA, 19 nt, Artificial Sequence
  Description of Artificial Sequence: Synthetic oligonucleotide
ugacuguugggagaccaug

SEQ ID NO: 777857 - RNA, 19 nt, Artificial Sequence
  Description of Artificial Sequence: Synthetic oligonucleotide
uagaguugaggagucaaua

SEQ ID NO: 777858 - RNA, 19 nt, Artificial Sequence
  Description of Artificial Sequence: Synthetic oligonucleotide
gaggcguguaaauccacuc

SEQ ID NO: 777859 - RNA, 19 nt, Artificial Sequence
  Description of Artificial Sequence: Synthetic oligonucleotide
accgaaugcuugugcaaag

SEQ ID NO: 777860 - RNA, 19 nt, Artificial Sequence
  Description of Artificial Sequence: Synthetic oligonucleotide
aauuaugccuccacuggua

SEQ ID NO: 777861 - RNA, 19 nt, Artificial Sequence
  Description of Artificial Sequence: Synthetic oligonucleotide
uacccauauuauuaugguu

SEQ ID NO: 777862 - RNA, 19 nt, Artificial Sequence
  Description of Artificial Sequence: Synthetic oligonucleotide
uggaaggcugacgaugucu

SEQ ID NO: 777863 - RNA, 19 nt, Artificial Sequence
  Description of Artificial Sequence: Synthetic oligonucleotide
cuguaacucuggcuguggg

SEQ ID NO: 777864 - RNA, 19 nt, Artificial Sequence
  Description of Artificial Sequence: Synthetic oligonucleotide
aucugguacguuguucuag

SEQ ID NO: 777865 - RNA, 19 nt, Artificial Sequence
  Description of Artificial Sequence: Synthetic oligonucleotide
ucaaucugguacguuguuc

SEQ ID NO: 777866 - RNA, 19 nt, Artificial Sequence
  Description of Artificial Sequence: Synthetic oligonucleotide
augguuugaugacccaggu

SEQ ID NO: 777867 - RNA, 19 nt, Artificial Sequence
  Description of Artificial Sequence: Synthetic oligonucleotide
aaaaccugcguuaguggau

SEQ ID NO: 777868 - RNA, 19 nt, Artificial Sequence
  Description of Artificial Sequence: Synthetic oligonucleotide
uccacacuauuauuugaua

SEQ ID NO: 777869 - RNA, 19 nt, Artificial Sequence
  Description of Artificial Sequence: Synthetic oligonucleotide
aucuauugauuuugauuaa

SEQ ID NO: 777870 - RNA, 19 nt, Artificial Sequence
  Description of Artificial Sequence: Synthetic oligonucleotide
accaauucugaguguucug

SEQ ID NO: 777871 - RNA, 19 nt, Artificial Sequence
  Description of Artificial Sequence: Synthetic oligonucleotide
augcuuguuuuaucauuug

SEQ ID NO: 777872 - RNA, 19 nt, Artificial Sequence
  Description of Artificial Sequence: Synthetic oligonucleotide
acuugguuuaccagacaag

SEQ ID NO: 777873 - RNA, 19 nt, Artificial Sequence
  Description of Artificial Sequence: Synthetic oligonucleotide
ucguagaccuuaccuguaa

SEQ ID NO: 777874 - RNA, 19 nt, Artificial Sequence
  Description of Artificial Sequence: Synthetic oligonucleotide
uaagugacaauggcgccuc

SEQ ID NO: 777875 - RNA, 19 nt, Artificial Sequence
  Description of Artificial Sequence: Synthetic oligonucleotide
gacuuaaacugagaaccga

SEQ ID NO: 777876 - RNA, 19 nt, Artificial Sequence
  Description of Artificial Sequence: Synthetic oligonucleotide
acuuaaacugagaaccgaa

SEQ ID NO: 777877 - RNA, 19 nt, Artificial Sequence
  Description of Artificial Sequence: Synthetic oligonucleotide
aacucuggcuguggguguc

SEQ ID NO: 777878 - RNA, 19 nt, Artificial Sequence
  Description of Artificial Sequence: Synthetic oligonucleotide
guuguucuaggcucuaugu

SEQ ID NO: 777879 - RNA, 19 nt, Artificial Sequence
  Description of Artificial Sequence: Synthetic oligonucleotide
aaaccugcguuaguggauu

SEQ ID NO: 777880 - RNA, 19 nt, Artificial Sequence
  Description of Artificial Sequence: Synthetic oligonucleotide
ugcacuagcggcuccuuuu

SEQ ID NO: 777881 - RNA, 19 nt, Artificial Sequence
  Description of Artificial Sequence: Synthetic oligonucleotide
cauggcucacuuacaucag

SEQ ID NO: 777882 - RNA, 19 nt, Artificial Sequence
  Description of Artificial Sequence: Synthetic oligonucleotide
ugagaaccgaaugcuugug

SEQ ID NO: 777883 - RNA, 19 nt, Artificial Sequence
  Description of Artificial Sequence: Synthetic oligonucleotide
acauuuaguagaauucauu

SEQ ID NO: 777884 - RNA, 19 nt, Artificial Sequence
  Description of Artificial Sequence: Synthetic oligonucleotide
ucgugguucuguucgugac

SEQ ID NO: 777885 - RNA, 19 nt, Artificial Sequence
  Description of Artificial Sequence: Synthetic oligonucleotide
cacgccuggucacucuucg

SEQ ID NO: 777886 - RNA, 19 nt, Artificial Sequence
  Description of Artificial Sequence: Synthetic oligonucleotide
cuuuugggucuauucccug

SEQ ID NO: 777887 - RNA, 19 nt, Artificial Sequence
  Description of Artificial Sequence: Synthetic oligonucleotide
uuaugccuccacugguaga

SEQ ID NO: 777888 - RNA, 19 nt, Artificial Sequence
  Description of Artificial Sequence: Synthetic oligonucleotide
ggcauuacauuauucuuaa

SEQ ID NO: 777889 - RNA, 19 nt, Artificial Sequence
  Description of Artificial Sequence: Synthetic oligonucleotide
cugaaagcuuguugaggac

SEQ ID NO: 777890 - RNA, 19 nt, Artificial Sequence
  Description of Artificial Sequence: Synthetic oligonucleotide
caauggcgccucauugucc

SEQ ID NO: 777891 - RNA, 19 nt, Artificial Sequence
  Description of Artificial Sequence: Synthetic oligonucleotide
aaucugguacguuguucua

SEQ ID NO: 777892 - RNA, 19 nt, Artificial Sequence
  Description of Artificial Sequence: Synthetic oligonucleotide
uugaaccaauucugagugu

SEQ ID NO: 777893 - RNA, 19 nt, Artificial Sequence
  Description of Artificial Sequence: Synthetic oligonucleotide
caucauauuuguauacccu

SEQ ID NO: 777894 - RNA, 19 nt, Artificial Sequence
  Description of Artificial Sequence: Synthetic oligonucleotide
ugucaacugcugaugugua

SEQ ID NO: 777895 - RNA, 19 nt, Artificial Sequence
  Description of Artificial Sequence: Synthetic oligonucleotide
ggaggcuuuggcaaugaag

SEQ ID NO: 777896 - RNA, 19 nt, Artificial Sequence
  Description of Artificial Sequence: Synthetic oligonucleotide
uguucgugacaagacuuaa

SEQ ID NO: 777897 - RNA, 19 nt, Artificial Sequence
  Description of Artificial Sequence: Synthetic oligonucleotide
ggucuauucccugacaauc

SEQ ID NO: 777898 - RNA, 19 nt, Artificial Sequence
  Description of Artificial Sequence: Synthetic oligonucleotide
uguuugggugccugggcuc

SEQ ID NO: 777899 - RNA, 19 nt, Artificial Sequence
  Description of Artificial Sequence: Synthetic oligonucleotide
cacuuugaaugucaaacua

SEQ ID NO: 777900 - RNA, 19 nt, Artificial Sequence
  Description of Artificial Sequence: Synthetic oligonucleotide
ugcgccugugcuucaacaa

SEQ ID NO: 777901 - RNA, 19 nt, Artificial Sequence
  Description of Artificial Sequence: Synthetic oligonucleotide
gacaauggcgccucauugu

SEQ ID NO: 777902 - RNA, 19 nt, Artificial Sequence
  Description of Artificial Sequence: Synthetic oligonucleotide
gcuaaacauugucacuuug

SEQ ID NO: 777903 - RNA, 19 nt, Artificial Sequence
  Description of Artificial Sequence: Synthetic oligonucleotide
cugcccgacuuaaacugag

SEQ ID NO: 777904 - RNA, 19 nt, Artificial Sequence
  Description of Artificial Sequence: Synthetic oligonucleotide
aaggcugacgaugucucua

SEQ ID NO: 777905 - RNA, 19 nt, Artificial Sequence
  Description of Artificial Sequence: Synthetic oligonucleotide
gaaccgaaugcuugugcaa

SEQ ID NO: 777906 - RNA, 19 nt, Artificial Sequence
  Description of Artificial Sequence: Synthetic oligonucleotide
guguaaauccacucguggu

SEQ ID NO: 777907 - RNA, 19 nt, Artificial Sequence
  Description of Artificial Sequence: Synthetic oligonucleotide
cuuguugaggacucuaaau

SEQ ID NO: 777908 - RNA, 19 nt, Artificial Sequence
  Description of Artificial Sequence: Synthetic oligonucleotide
cuucguagaccuuaccugu

SEQ ID NO: 777909 - RNA, 19 nt, Artificial Sequence
  Description of Artificial Sequence: Synthetic oligonucleotide
uaccuguaacucuggcugu

SEQ ID NO: 777910 - RNA, 19 nt, Artificial Sequence
  Description of Artificial Sequence: Synthetic oligonucleotide
uucguagaccuuaccugua

SEQ ID NO: 777911 - RNA, 19 nt, Artificial Sequence
  Description of Artificial Sequence: Synthetic oligonucleotide
aucauaauacaaacagcua

SEQ ID NO: 777912 - RNA, 19 nt, Artificial Sequence
  Description of Artificial Sequence: Synthetic oligonucleotide
ucuaggcucuaugucuuuc

SEQ ID NO: 777913 - RNA, 19 nt, Artificial Sequence
  Description of Artificial Sequence: Synthetic oligonucleotide
cugguacguuguucuaggc

SEQ ID NO: 777914 - RNA, 19 nt, Artificial Sequence
  Description of Artificial Sequence: Synthetic oligonucleotide
cuuaccuguaacucuggcu

SEQ ID NO: 777915 - RNA, 19 nt, Artificial Sequence
  Description of Artificial Sequence: Synthetic oligonucleotide
gguugagauccaaacaaca

SEQ ID NO: 777916 - RNA, 19 nt, Artificial Sequence
  Description of Artificial Sequence: Synthetic oligonucleotide
uggcaucgucauaauuacu

SEQ ID NO: 777917 - RNA, 19 nt, Artificial Sequence
  Description of Artificial Sequence: Synthetic oligonucleotide
gagaccauguguccuacau

SEQ ID NO: 777918 - RNA, 19 nt, Artificial Sequence
  Description of Artificial Sequence: Synthetic oligonucleotide
gcaucgucauaauuacuac

SEQ ID NO: 777919 - RNA, 19 nt, Artificial Sequence
  Description of Artificial Sequence: Synthetic oligonucleotide
aggagucaauaagugacaa

SEQ ID NO: 777920 - RNA, 19 nt, Artificial Sequence
  Description of Artificial Sequence: Synthetic oligonucleotide
gaauaacuucaugcugcac

SEQ ID NO: 777921 - RNA, 19 nt, Artificial Sequence
  Description of Artificial Sequence: Synthetic oligonucleotide
caugcuuguuuuaucauuu

SEQ ID NO: 777922 - RNA, 19 nt, Artificial Sequence
  Description of Artificial Sequence: Synthetic oligonucleotide
ggcuagucaauuucugaga

SEQ ID NO: 777923 - RNA, 19 nt, Artificial Sequence
  Description of Artificial Sequence: Synthetic oligonucleotide
gugccaauuaugccuccac

SEQ ID NO: 777924 - RNA, 19 nt, Artificial Sequence
  Description of Artificial Sequence: Synthetic oligonucleotide
ugcccgacuuaaacugaga

SEQ ID NO: 777925 - RNA, 19 nt, Artificial Sequence
  Description of Artificial Sequence: Synthetic oligonucleotide
auuuagaguugaggaguca

SEQ ID NO: 777926 - RNA, 19 nt, Artificial Sequence
  Description of Artificial Sequence: Synthetic oligonucleotide
caagaguaaaaccugcguu

SEQ ID NO: 777927 - RNA, 19 nt, Artificial Sequence
  Description of Artificial Sequence: Synthetic oligonucleotide
agacuuaauuucagcauuu

SEQ ID NO: 777928 - RNA, 19 nt, Artificial Sequence
  Description of Artificial Sequence: Synthetic oligonucleotide
ggcaucgucauaauuacua

SEQ ID NO: 777929 - RNA, 19 nt, Artificial Sequence
  Description of Artificial Sequence: Synthetic oligonucleotide
cuuaaacugagaaccgaau

SEQ ID NO: 777930 - RNA, 19 nt, Artificial Sequence
  Description of Artificial Sequence: Synthetic oligonucleotide
gcauguuuauauuguuuga

SEQ ID NO: 777931 - RNA, 19 nt, Artificial Sequence
  Description of Artificial Sequence: Synthetic oligonucleotide
  modified_base (9)..(9): a, c, u, g, unknown or other
cucuccaunugguacuucu

SEQ ID NO: 777932 - RNA, 19 nt, Artificial Sequence
  Description of Artificial Sequence: Synthetic oligonucleotide
caguaggcauuucaacuga

SEQ ID NO: 777933 - RNA, 19 nt, Artificial Sequence
  Description of Artificial Sequence: Synthetic oligonucleotide
acuacuuaucugaccuugu

SEQ ID NO: 777934 - RNA, 19 nt, Artificial Sequence
  Description of Artificial Sequence: Synthetic oligonucleotide
ucgaucuggcuagcuaacu

SEQ ID NO: 777935 - RNA, 19 nt, Artificial Sequence
  Description of Artificial Sequence: Synthetic oligonucleotide
cguguccaagaguaaaacc

SEQ ID NO: 777936 - RNA, 19 nt, Artificial Sequence
  Description of Artificial Sequence: Synthetic oligonucleotide
caucgucauaauuacuacu

SEQ ID NO: 777937 - RNA, 19 nt, Artificial Sequence
  Description of Artificial Sequence: Synthetic oligonucleotide
cccgacuuaaacugagaac

SEQ ID NO: 777938 - RNA, 19 nt, Artificial Sequence
  Description of Artificial Sequence: Synthetic oligonucleotide
gacauuuaguagaauucau

SEQ ID NO: 777939 - RNA, 19 nt, Artificial Sequence
  Description of Artificial Sequence: Synthetic oligonucleotide
aggcugacgaugucucuaa

SEQ ID NO: 777940 - RNA, 19 nt, Artificial Sequence
  Description of Artificial Sequence: Synthetic oligonucleotide
cugaggcguguaaauccac

SEQ ID NO: 777941 - RNA, 19 nt, Artificial Sequence
  Description of Artificial Sequence: Synthetic oligonucleotide
guugagauccaaacaacau

SEQ ID NO: 777942 - RNA, 19 nt, Artificial Sequence
  Description of Artificial Sequence: Synthetic oligonucleotide
uguuggcaagugucacacu

SEQ ID NO: 777943 - RNA, 19 nt, Artificial Sequence
  Description of Artificial Sequence: Synthetic oligonucleotide
uagcggcuccuuuugcuau

SEQ ID NO: 777944 - RNA, 19 nt, Artificial Sequence
  Description of Artificial Sequence: Synthetic oligonucleotide
gacucccacgccuggucac

SEQ ID NO: 777945 - RNA, 19 nt, Artificial Sequence
  Description of Artificial Sequence: Synthetic oligonucleotide
gcucacuuacaucagacau

SEQ ID NO: 777946 - RNA, 19 nt, Artificial Sequence
  Description of Artificial Sequence: Synthetic oligonucleotide
gaagaccaauggucuccac

SEQ ID NO: 777947 - RNA, 19 nt, Artificial Sequence
  Description of Artificial Sequence: Synthetic oligonucleotide
cucgugguucuguucguga

SEQ ID NO: 777948 - RNA, 19 nt, Artificial Sequence
  Description of Artificial Sequence: Synthetic oligonucleotide
cacuagcggcuccuuuugc

SEQ ID NO: 777949 - RNA, 19 nt, Artificial Sequence
  Description of Artificial Sequence: Synthetic oligonucleotide
caauuaugccuccacuggu

SEQ ID NO: 777950 - RNA, 19 nt, Artificial Sequence
  Description of Artificial Sequence: Synthetic oligonucleotide
ggagguauuuggaguauuc

SEQ ID NO: 777951 - RNA, 19 nt, Artificial Sequence
  Description of Artificial Sequence: Synthetic oligonucleotide
cugcguuaguggauuuuca

SEQ ID NO: 777952 - RNA, 19 nt, Artificial Sequence
  Description of Artificial Sequence: Synthetic oligonucleotide
agucaauuucugagaugug

SEQ ID NO: 777953 - RNA, 19 nt, Artificial Sequence
  Description of Artificial Sequence: Synthetic oligonucleotide
cuguucgugacaagacuua

SEQ ID NO: 777954 - RNA, 19 nt, Artificial Sequence
  Description of Artificial Sequence: Synthetic oligonucleotide
gaucaauuuuggcacccuu

SEQ ID NO: 777955 - RNA, 19 nt, Artificial Sequence
  Description of Artificial Sequence: Synthetic oligonucleotide
gcuagcuaacuccugagau

SEQ ID NO: 777956 - RNA, 19 nt, Artificial Sequence
  Description of Artificial Sequence: Synthetic oligonucleotide
uccuucuggcuagucaauu

SEQ ID NO: 777957 - RNA, 19 nt, Artificial Sequence
  Description of Artificial Sequence: Synthetic oligonucleotide
gcguuaguggauuuucaaa

SEQ ID NO: 777958 - RNA, 19 nt, Artificial Sequence
  Description of Artificial Sequence: Synthetic oligonucleotide
acucgugguucuguucgug

SEQ ID NO: 777959 - RNA, 19 nt, Artificial Sequence
  Description of Artificial Sequence: Synthetic oligonucleotide
gcuagucaauuucugagau

SEQ ID NO: 777960 - RNA, 19 nt, Artificial Sequence
  Description of Artificial Sequence: Synthetic oligonucleotide
agguagcuuuuaucuguau

SEQ ID NO: 777961 - RNA, 19 nt, Artificial Sequence
  Description of Artificial Sequence: Synthetic oligonucleotide
cuuguacuacauggcucac

SEQ ID NO: 777962 - RNA, 19 nt, Artificial Sequence
  Description of Artificial Sequence: Synthetic oligonucleotide
cuagcggcuccuuuugcua

SEQ ID NO: 777963 - RNA, 19 nt, Artificial Sequence
  Description of Artificial Sequence: Synthetic oligonucleotide
ggcucacuuacaucagaca

SEQ ID NO: 777964 - RNA, 19 nt, Artificial Sequence
  Description of Artificial Sequence: Synthetic oligonucleotide
guugaggacucuaaauuuu

SEQ ID NO: 777965 - RNA, 19 nt, Artificial Sequence
  Description of Artificial Sequence: Synthetic oligonucleotide
caaugaagauggcaacacu

SEQ ID NO: 777966 - RNA, 19 nt, Artificial Sequence
  Description of Artificial Sequence: Synthetic oligonucleotide
aaccugcguuaguggauuu

SEQ ID NO: 777967 - RNA, 19 nt, Artificial Sequence
  Description of Artificial Sequence: Synthetic oligonucleotide
aaaccguguccaagaguaa

SEQ ID NO: 777968 - RNA, 19 nt, Artificial Sequence
  Description of Artificial Sequence: Synthetic oligonucleotide
gucuauucccugacaaucu

SEQ ID NO: 777969 - RNA, 19 nt, Artificial Sequence
  Description of Artificial Sequence: Synthetic oligonucleotide
ccuuaccuguaacucuggc

SEQ ID NO: 777970 - RNA, 19 nt, Artificial Sequence
  Description of Artificial Sequence: Synthetic oligonucleotide
gguuuaccagacaaggacu

SEQ ID NO: 777971 - RNA, 19 nt, Artificial Sequence
  Description of Artificial Sequence: Synthetic oligonucleotide
gugcgccugugcuucaaca

SEQ ID NO: 777972 - RNA, 19 nt, Artificial Sequence
  Description of Artificial Sequence: Synthetic oligonucleotide
gcacuagcggcuccuuuug

SEQ ID NO: 777973 - RNA, 19 nt, Artificial Sequence
  Description of Artificial Sequence: Synthetic oligonucleotide
ggcguguaaauccacucgu

SEQ ID NO: 777974 - RNA, 19 nt, Artificial Sequence
  Description of Artificial Sequence: Synthetic oligonucleotide
gccacuugguuuaccagac

SEQ ID NO: 777975 - RNA, 19 nt, Artificial Sequence
  Description of Artificial Sequence: Synthetic oligonucleotide
gcuuguugaggacucuaaa

SEQ ID NO: 777976 - RNA, 19 nt, Artificial Sequence
  Description of Artificial Sequence: Synthetic oligonucleotide
cauuagaguuagugauaaa

SEQ ID NO: 777977 - RNA, 19 nt, Artificial Sequence
  Description of Artificial Sequence: Synthetic oligonucleotide
ggcuagcuaacuccugaga

SEQ ID NO: 777978 - RNA, 19 nt, Artificial Sequence
  Description of Artificial Sequence: Synthetic oligonucleotide
ccacuuguacuuuggagaa

SEQ ID NO: 777979 - RNA, 19 nt, Artificial Sequence
  Description of Artificial Sequence: Synthetic oligonucleotide
ccauuagaguuagugauaa

SEQ ID NO: 777980 - RNA, 19 nt, Artificial Sequence
  Description of Artificial Sequence: Synthetic oligonucleotide
guuuaccagacaaggacuu

SEQ ID NO: 777981 - RNA, 19 nt, Artificial Sequence
  Description of Artificial Sequence: Synthetic oligonucleotide
ggagaggugaagacaaacu

SEQ ID NO: 777982 - RNA, 19 nt, Artificial Sequence
  Description of Artificial Sequence: Synthetic oligonucleotide
ugacuucgauuuucuccuu

SEQ ID NO: 777983 - RNA, 19 nt, Artificial Sequence
  Description of Artificial Sequence: Synthetic oligonucleotide
gcccgacuuaaacugagaa

SEQ ID NO: 777984 - RNA, 19 nt, Artificial Sequence
  Description of Artificial Sequence: Synthetic oligonucleotide
ggaucgaucuggcuagcua

SEQ ID NO: 777985 - RNA, 19 nt, Artificial Sequence
  Description of Artificial Sequence: Synthetic oligonucleotide
cguuguucuaggcucuaug

SEQ ID NO: 777986 - RNA, 19 nt, Artificial Sequence
  Description of Artificial Sequence: Synthetic oligonucleotide
aggaucgaucuggcuagcu

SEQ ID NO: 777987 - RNA, 19 nt, Artificial Sequence
  Description of Artificial Sequence: Synthetic oligonucleotide
gcuaacuccugagauggaa

SEQ ID NO: 777988 - RNA, 19 nt, Artificial Sequence
  Description of Artificial Sequence: Synthetic oligonucleotide
guguucugaggcguguaaa

SEQ ID NO: 777989 - RNA, 19 nt, Artificial Sequence
  Description of Artificial Sequence: Synthetic oligonucleotide
uccuuacucuaugguccac

SEQ ID NO: 777990 - RNA, 19 nt, Artificial Sequence
  Description of Artificial Sequence: Synthetic oligonucleotide
cauuggcacccugcugccc

SEQ ID NO: 777991 - RNA, 19 nt, Artificial Sequence
  Description of Artificial Sequence: Synthetic oligonucleotide
ccugcguuaguggauuuuc

SEQ ID NO: 777992 - RNA, 19 nt, Artificial Sequence
  Description of Artificial Sequence: Synthetic oligonucleotide
cuuacucuaugguccacuu

SEQ ID NO: 777993 - RNA, 19 nt, Artificial Sequence
  Description of Artificial Sequence: Synthetic oligonucleotide
uggcgccucauuguccaaa

SEQ ID NO: 777994 - RNA, 19 nt, Artificial Sequence
  Description of Artificial Sequence: Synthetic oligonucleotide
gguaauggugacacaaaau

SEQ ID NO: 777995 - RNA, 19 nt, Artificial Sequence
  Description of Artificial Sequence: Synthetic oligonucleotide
gacugacuguugggagacc

SEQ ID NO: 777996 - RNA, 19 nt, Artificial Sequence
  Description of Artificial Sequence: Synthetic oligonucleotide
gcguguaaauccacucgug

SEQ ID NO: 777997 - RNA, 19 nt, Artificial Sequence
  Description of Artificial Sequence: Synthetic oligonucleotide
gugacaauggcgccucauu

SEQ ID NO: 777998 - RNA, 19 nt, Artificial Sequence
  Description of Artificial Sequence: Synthetic oligonucleotide
ccguguccaagaguaaaac

SEQ ID NO: 777999 - RNA, 19 nt, Artificial Sequence
  Description of Artificial Sequence: Synthetic oligonucleotide
acucccacgccuggucacu

SEQ ID NO: 778000 - RNA, 19 nt, Artificial Sequence
  Description of Artificial Sequence: Synthetic oligonucleotide
accuuguuugccacuugua

SEQ ID NO: 778001 - RNA, 19 nt, Artificial Sequence
  Description of Artificial Sequence: Synthetic oligonucleotide
acgccuggucacucuucgu

SEQ ID NO: 778002 - RNA, 19 nt, Artificial Sequence
  Description of Artificial Sequence: Synthetic oligonucleotide
ggaaaccguguccaagagu

SEQ ID NO: 778003 - RNA, 19 nt, Artificial Sequence
  Description of Artificial Sequence: Synthetic oligonucleotide
gcccaacuacaucugguaa

SEQ ID NO: 778004 - RNA, 19 nt, Artificial Sequence
  Description of Artificial Sequence: Synthetic oligonucleotide
cccugacaaucuauacaug

SEQ ID NO: 778005 - RNA, 19 nt, Artificial Sequence
  Description of Artificial Sequence: Synthetic oligonucleotide
gacuucugcccaacuacau

SEQ ID NO: 778006 - RNA, 19 nt, Artificial Sequence
  Description of Artificial Sequence: Synthetic oligonucleotide
cguagaccuuaccuguaac

SEQ ID NO: 778007 - RNA, 19 nt, Artificial Sequence
  Description of Artificial Sequence: Synthetic oligonucleotide
gaagacucccacgccuggu

SEQ ID NO: 778008 - RNA, 19 nt, Artificial Sequence
  Description of Artificial Sequence: Synthetic oligonucleotide
ggucuccacacuauuauuu

SEQ ID NO: 778009 - RNA, 19 nt, Artificial Sequence
  Description of Artificial Sequence: Synthetic oligonucleotide
guacguuguucuaggcucu

SEQ ID NO: 778010 - RNA, 19 nt, Artificial Sequence
  Description of Artificial Sequence: Synthetic oligonucleotide
ggagucaauaagugacaau

SEQ ID NO: 778011 - RNA, 19 nt, Artificial Sequence
  Description of Artificial Sequence: Synthetic oligonucleotide
accugcguuaguggauuuu

SEQ ID NO: 778012 - RNA, 19 nt, Artificial Sequence
  Description of Artificial Sequence: Synthetic oligonucleotide
uuugggugccugggcucaa

SEQ ID NO: 778013 - RNA, 19 nt, Artificial Sequence
  Description of Artificial Sequence: Synthetic oligonucleotide
guucgugacaagacuuaau

SEQ ID NO: 778014 - RNA, 19 nt, Artificial Sequence
  Description of Artificial Sequence: Synthetic oligonucleotide
cgccugugcuucaacaauc

SEQ ID NO: 778015 - RNA, 19 nt, Artificial Sequence
  Description of Artificial Sequence: Synthetic oligonucleotide
  modified_base (5)..(5): a, c, u, g, unknown or other
ccaunugguacuucugaau

SEQ ID NO: 778016 - RNA, 19 nt, Artificial Sequence
  Description of Artificial Sequence: Synthetic oligonucleotide
gccagauuacccauauuau

SEQ ID NO: 778017 - RNA, 19 nt, Artificial Sequence
  Description of Artificial Sequence: Synthetic oligonucleotide
cccaacuacaucugguaau

SEQ ID NO: 778018 - RNA, 19 nt, Artificial Sequence
  Description of Artificial Sequence: Synthetic oligonucleotide
auggcgccucauuguccaa

SEQ ID NO: 778019 - RNA, 19 nt, Artificial Sequence
  Description of Artificial Sequence: Synthetic oligonucleotide
gggucuauucccugacaau

SEQ ID NO: 778020 - RNA, 19 nt, Artificial Sequence
  Description of Artificial Sequence: Synthetic oligonucleotide
cucaaucugguacguuguu

SEQ ID NO: 778021 - RNA, 19 nt, Artificial Sequence
  Description of Artificial Sequence: Synthetic oligonucleotide
cugaguaacucugcauguu

SEQ ID NO: 778022 - RNA, 19 nt, Artificial Sequence
  Description of Artificial Sequence: Synthetic oligonucleotide
augugcgccugugcuucaa

SEQ ID NO: 778023 - RNA, 19 nt, Artificial Sequence
  Description of Artificial Sequence: Synthetic oligonucleotide
cacccugcugcccgacuua

SEQ ID NO: 778024 - RNA, 19 nt, Artificial Sequence
  Description of Artificial Sequence: Synthetic oligonucleotide
gcgccugugcuucaacaau

SEQ ID NO: 778025 - RNA, 19 nt, Artificial Sequence
  Description of Artificial Sequence: Synthetic oligonucleotide
ccaagugagccacuugguu

SEQ ID NO: 778026 - RNA, 19 nt, Artificial Sequence
  Description of Artificial Sequence: Synthetic oligonucleotide
ccacuugguuuaccagaca

SEQ ID NO: 778027 - RNA, 19 nt, Artificial Sequence
  Description of Artificial Sequence: Synthetic oligonucleotide
cugcacuagcggcuccuuu

SEQ ID NO: 778028 - RNA, 19 nt, Artificial Sequence
  Description of Artificial Sequence: Synthetic oligonucleotide
ccgaaugcuugugcaaagu

SEQ ID NO: 778029 - RNA, 19 nt, Artificial Sequence
  Description of Artificial Sequence: Synthetic oligonucleotide
cacuuacaucagacaucau

SEQ ID NO: 778030 - RNA, 19 nt, Artificial Sequence
  Description of Artificial Sequence: Synthetic oligonucleotide
gcacccugcugcccgacuu

SEQ ID NO: 778031 - RNA, 19 nt, Artificial Sequence
  Description of Artificial Sequence: Synthetic oligonucleotide
cagccagauuacccauauu

SEQ ID NO: 778032 - RNA, 19 nt, Artificial Sequence
  Description of Artificial Sequence: Synthetic oligonucleotide
gauauaacucaauauaugc

SEQ ID NO: 778033 - RNA, 19 nt, Artificial Sequence
  Description of Artificial Sequence: Synthetic oligonucleotide
cuauagaucgcaaauauag

SEQ ID NO: 778034 - RNA, 19 nt, Artificial Sequence
  Description of Artificial Sequence: Synthetic oligonucleotide
ucccaauugcuauagaucg

SEQ ID NO: 778035 - RNA, 19 nt, Artificial Sequence
  Description of Artificial Sequence: Synthetic oligonucleotide
aaugaguaggccaagacag

SEQ ID NO: 778036 - RNA, 19 nt, Artificial Sequence
  Description of Artificial Sequence: Synthetic oligonucleotide
uguuaugacagucaaucgc

SEQ ID NO: 778037 - RNA, 19 nt, Artificial Sequence
  Description of Artificial Sequence: Synthetic oligonucleotide
cuacacaagccuuagaagc

SEQ ID NO: 778038 - RNA, 19 nt, Artificial Sequence
  Description of Artificial Sequence: Synthetic oligonucleotide
uauaugcuuauucuacagg

SEQ ID NO: 778039 - RNA, 19 nt, Artificial Sequence
  Description of Artificial Sequence: Synthetic oligonucleotide
aaugugggacuacuuacac

SEQ ID NO: 778040 - RNA, 19 nt, Artificial Sequence
  Description of Artificial Sequence: Synthetic oligonucleotide
ugcaauacaggacuacccg

SEQ ID NO: 778041 - RNA, 19 nt, Artificial Sequence
  Description of Artificial Sequence: Synthetic oligonucleotide
aauacugucgaucucgcaa

SEQ ID NO: 778042 - RNA, 19 nt, Artificial Sequence
  Description of Artificial Sequence: Synthetic oligonucleotide
ucuucaauggacuggacca

SEQ ID NO: 778043 - RNA, 19 nt, Artificial Sequence
  Description of Artificial Sequence: Synthetic oligonucleotide
uucacguuuaacuacacaa

SEQ ID NO: 778044 - RNA, 19 nt, Artificial Sequence
  Description of Artificial Sequence: Synthetic oligonucleotide
uucguaauuuccaauugag

SEQ ID NO: 778045 - RNA, 19 nt, Artificial Sequence
  Description of Artificial Sequence: Synthetic oligonucleotide
gauucugcuauguaagagc

SEQ ID NO: 778046 - RNA, 19 nt, Artificial Sequence
  Description of Artificial Sequence: Synthetic oligonucleotide
uauaacucaauauaugcuu

SEQ ID NO: 778047 - RNA, 19 nt, Artificial Sequence
  Description of Artificial Sequence: Synthetic oligonucleotide
uuuaacaccaugauccauc

SEQ ID NO: 778048 - RNA, 19 nt, Artificial Sequence
  Description of Artificial Sequence: Synthetic oligonucleotide
uguacauuaaacuccccga

SEQ ID NO: 778049 - RNA, 19 nt, Artificial Sequence
  Description of Artificial Sequence: Synthetic oligonucleotide
cauugaguaaguagaaccc

SEQ ID NO: 778050 - RNA, 19 nt, Artificial Sequence
  Description of Artificial Sequence: Synthetic oligonucleotide
guuaugacagucaaucgcg

SEQ ID NO: 778051 - RNA, 19 nt, Artificial Sequence
  Description of Artificial Sequence: Synthetic oligonucleotide
uaaucuagcagcgugucag

SEQ ID NO: 778052 - RNA, 19 nt, Artificial Sequence
  Description of Artificial Sequence: Synthetic oligonucleotide
aaaaugaucucgugccaag

SEQ ID NO: 778053 - RNA, 19 nt, Artificial Sequence
  Description of Artificial Sequence: Synthetic oligonucleotide
guaaucauauucuagucca

SEQ ID NO: 778054 - RNA, 19 nt, Artificial Sequence
  Description of Artificial Sequence: Synthetic oligonucleotide
uuaauuaacuguucugccu

SEQ ID NO: 778055 - RNA, 19 nt, Artificial Sequence
  Description of Artificial Sequence: Synthetic oligonucleotide
uaauuguuagcugaggcug

SEQ ID NO: 778056 - RNA, 19 nt, Artificial Sequence
  Description of Artificial Sequence: Synthetic oligonucleotide
ucaccuaaaugauauuugc

SEQ ID NO: 778057 - RNA, 19 nt, Artificial Sequence
  Description of Artificial Sequence: Synthetic oligonucleotide
uaauuauauaaagaugcca

SEQ ID NO: 778058 - RNA, 19 nt, Artificial Sequence
  Description of Artificial Sequence: Synthetic oligonucleotide
ucgguaaucauauucuagu

SEQ ID NO: 778059 - RNA, 19 nt, Artificial Sequence
  Description of Artificial Sequence: Synthetic oligonucleotide
uuucguaauuuccaauuga

SEQ ID NO: 778060 - RNA, 19 nt, Artificial Sequence
  Description of Artificial Sequence: Synthetic oligonucleotide
uaaaguuuaaugaggccuc

SEQ ID NO: 778061 - RNA, 19 nt, Artificial Sequence
  Description of Artificial Sequence: Synthetic oligonucleotide
auugcuauagaucgcaaau

SEQ ID NO: 778062 - RNA, 19 nt, Artificial Sequence
  Description of Artificial Sequence: Synthetic oligonucleotide
accuaaaugauauuugcaa

SEQ ID NO: 778063 - RNA, 19 nt, Artificial Sequence
  Description of Artificial Sequence: Synthetic oligonucleotide
uuacacacgcggcacaugc

SEQ ID NO: 778064 - RNA, 19 nt, Artificial Sequence
  Description of Artificial Sequence: Synthetic oligonucleotide
ugagcuaacuuaaauguuu

SEQ ID NO: 778065 - RNA, 19 nt, Artificial Sequence
  Description of Artificial Sequence: Synthetic oligonucleotide
auacugucgaucucgcaac

SEQ ID NO: 778066 - RNA, 19 nt, Artificial Sequence
  Description of Artificial Sequence: Synthetic oligonucleotide
aggacuacccgaaauaggg

SEQ ID NO: 778067 - RNA, 19 nt, Artificial Sequence
  Description of Artificial Sequence: Synthetic oligonucleotide
uguuguucuaaugggauga

SEQ ID NO: 778068 - RNA, 19 nt, Artificial Sequence
  Description of Artificial Sequence: Synthetic oligonucleotide
auagaucgcaaauauaguu

SEQ ID NO: 778069 - RNA, 19 nt, Artificial Sequence
  Description of Artificial Sequence: Synthetic oligonucleotide
uauagaucgcaaauauagu

SEQ ID NO: 778070 - RNA, 19 nt, Artificial Sequence
  Description of Artificial Sequence: Synthetic oligonucleotide
ugcuauagaucgcaaauau

SEQ ID NO: 778071 - RNA, 19 nt, Artificial Sequence
  Description of Artificial Sequence: Synthetic oligonucleotide
uuaucuacauugaguaagu

SEQ ID NO: 778072 - RNA, 19 nt, Artificial Sequence
  Description of Artificial Sequence: Synthetic oligonucleotide
uuuaacuacacaagccuua

SEQ ID NO: 778073 - RNA, 19 nt, Artificial Sequence
  Description of Artificial Sequence: Synthetic oligonucleotide
ugcuuauucuacaggaacu

SEQ ID NO: 778074 - RNA, 19 nt, Artificial Sequence
  Description of Artificial Sequence: Synthetic oligonucleotide
cacguuuaacuacacaagc

SEQ ID NO: 778075 - RNA, 19 nt, Artificial Sequence
  Description of Artificial Sequence: Synthetic oligonucleotide
ugggacuacuuacacacgc

SEQ ID NO: 778076 - RNA, 19 nt, Artificial Sequence
  Description of Artificial Sequence: Synthetic oligonucleotide
uaagccugccguaauuucc

SEQ ID NO: 778077 - RNA, 19 nt, Artificial Sequence
  Description of Artificial Sequence: Synthetic oligonucleotide
aacuuugacugguaagccu

SEQ ID NO: 778078 - RNA, 19 nt, Artificial Sequence
  Description of Artificial Sequence: Synthetic oligonucleotide
gccguaauuuccuucaucg

SEQ ID NO: 778079 - RNA, 19 nt, Artificial Sequence
  Description of Artificial Sequence: Synthetic oligonucleotide
uuauccauguaugucugag

SEQ ID NO: 778080 - RNA, 19 nt, Artificial Sequence
  Description of Artificial Sequence: Synthetic oligonucleotide
uauuuuggguguuuggauc

SEQ ID NO: 778081 - RNA, 19 nt, Artificial Sequence
  Description of Artificial Sequence: Synthetic oligonucleotide
gaaugaguaggccaagaca

SEQ ID NO: 778082 - RNA, 19 nt, Artificial Sequence
  Description of Artificial Sequence: Synthetic oligonucleotide
gacugucgaaugucgagcg

SEQ ID NO: 778083 - RNA, 19 nt, Artificial Sequence
  Description of Artificial Sequence: Synthetic oligonucleotide
uccaagguugccauagugu

SEQ ID NO: 778084 - RNA, 19 nt, Artificial Sequence
  Description of Artificial Sequence: Synthetic oligonucleotide
cacaacacuccacugcucg

SEQ ID NO: 778085 - RNA, 19 nt, Artificial Sequence
  Description of Artificial Sequence: Synthetic oligonucleotide
uagaucgcaaauauaguuu

SEQ ID NO: 778086 - RNA, 19 nt, Artificial Sequence
  Description of Artificial Sequence: Synthetic oligonucleotide
uggauccaaaaugaucucg

SEQ ID NO: 778087 - RNA, 19 nt, Artificial Sequence
  Description of Artificial Sequence: Synthetic oligonucleotide
cagacugacagauauuauc

SEQ ID NO: 778088 - RNA, 19 nt, Artificial Sequence
  Description of Artificial Sequence: Synthetic oligonucleotide
ugauucugcuauguaagag

SEQ ID NO: 778089 - RNA, 19 nt, Artificial Sequence
  Description of Artificial Sequence: Synthetic oligonucleotide
gacauaagcgucccuguug

SEQ ID NO: 778090 - RNA, 19 nt, Artificial Sequence
  Description of Artificial Sequence: Synthetic oligonucleotide
gguaauuguuagcugaggc

SEQ ID NO: 778091 - RNA, 19 nt, Artificial Sequence
  Description of Artificial Sequence: Synthetic oligonucleotide
uaugaauuccccggaaucu

SEQ ID NO: 778092 - RNA, 19 nt, Artificial Sequence
  Description of Artificial Sequence: Synthetic oligonucleotide
uccccgaaagcuuucuuag

SEQ ID NO: 778093 - RNA, 19 nt, Artificial Sequence
  Description of Artificial Sequence: Synthetic oligonucleotide
uugugauacucaaacacuu

SEQ ID NO: 778094 - RNA, 19 nt, Artificial Sequence
  Description of Artificial Sequence: Synthetic oligonucleotide
ucuacugaaugaguaggcc

SEQ ID NO: 778095 - RNA, 19 nt, Artificial Sequence
  Description of Artificial Sequence: Synthetic oligonucleotide
uauugauucaugucauaau

SEQ ID NO: 778096 - RNA, 19 nt, Artificial Sequence
  Description of Artificial Sequence: Synthetic oligonucleotide
cucgguaaucauauucuag

SEQ ID NO: 778097 - RNA, 19 nt, Artificial Sequence
  Description of Artificial Sequence: Synthetic oligonucleotide
acagucaaucgcgaucucc

SEQ ID NO: 778098 - RNA, 19 nt, Artificial Sequence
  Description of Artificial Sequence: Synthetic oligonucleotide
ucaacacaccauuuauaug

SEQ ID NO: 778099 - RNA, 19 nt, Artificial Sequence
  Description of Artificial Sequence: Synthetic oligonucleotide
auauaacucaauauaugcu

SEQ ID NO: 778100 - RNA, 19 nt, Artificial Sequence
  Description of Artificial Sequence: Synthetic oligonucleotide
uaugcuuauucuacaggaa

SEQ ID NO: 778101 - RNA, 19 nt, Artificial Sequence
  Description of Artificial Sequence: Synthetic oligonucleotide
uauguaagagcaccgucua

SEQ ID NO: 778102 - RNA, 19 nt, Artificial Sequence
  Description of Artificial Sequence: Synthetic oligonucleotide
uuagcuagcuggagugaag

SEQ ID NO: 778103 - RNA, 19 nt, Artificial Sequence
  Description of Artificial Sequence: Synthetic oligonucleotide
ugccauaguguuuugcagu

SEQ ID NO: 778104 - RNA, 19 nt, Artificial Sequence
  Description of Artificial Sequence: Synthetic oligonucleotide
agcucucaagacuuuagca

SEQ ID NO: 778105 - RNA, 19 nt, Artificial Sequence
  Description of Artificial Sequence: Synthetic oligonucleotide
uguaccagccugcaucgga

SEQ ID NO: 778106 - RNA, 19 nt, Artificial Sequence
  Description of Artificial Sequence: Synthetic oligonucleotide
auauugauucaugucauaa

SEQ ID NO: 778107 - RNA, 19 nt, Artificial Sequence
  Description of Artificial Sequence: Synthetic oligonucleotide
aauucacguuuaacuacac

SEQ ID NO: 778108 - RNA, 19 nt, Artificial Sequence
  Description of Artificial Sequence: Synthetic oligonucleotide
augagccguugcuacaugg

SEQ ID NO: 778109 - RNA, 19 nt, Artificial Sequence
  Description of Artificial Sequence: Synthetic oligonucleotide
uacaggacuacccgaaaua

SEQ ID NO: 778110 - RNA, 19 nt, Artificial Sequence
  Description of Artificial Sequence: Synthetic oligonucleotide
uuaugacagucaaucgcga

SEQ ID NO: 778111 - RNA, 19 nt, Artificial Sequence
  Description of Artificial Sequence: Synthetic oligonucleotide
aauacaggacuacccgaaa

SEQ ID NO: 778112 - RNA, 19 nt, Artificial Sequence
  Description of Artificial Sequence: Synthetic oligonucleotide
gaguaaguagaacccauaa

SEQ ID NO: 778113 - RNA, 19 nt, Artificial Sequence
  Description of Artificial Sequence: Synthetic oligonucleotide
uaagcgucccuguugguaa

SEQ ID NO: 778114 - RNA, 19 nt, Artificial Sequence
  Description of Artificial Sequence: Synthetic oligonucleotide
ugacugucgaaugucgagc

SEQ ID NO: 778115 - RNA, 19 nt, Artificial Sequence
  Description of Artificial Sequence: Synthetic oligonucleotide
acugucgaaugucgagcgc

SEQ ID NO: 778116 - RNA, 19 nt, Artificial Sequence
  Description of Artificial Sequence: Synthetic oligonucleotide
acaggacuacccgaaauag

SEQ ID NO: 778117 - RNA, 19 nt, Artificial Sequence
  Description of Artificial Sequence: Synthetic oligonucleotide
acugcucgaaaccagugaa

SEQ ID NO: 778118 - RNA, 19 nt, Artificial Sequence
  Description of Artificial Sequence: Synthetic oligonucleotide
cgaaauagggucuucaaug

SEQ ID NO: 778119 - RNA, 19 nt, Artificial Sequence
  Description of Artificial Sequence: Synthetic oligonucleotide
agcaaaugucuuuuaucca

SEQ ID NO: 778120 - RNA, 19 nt, Artificial Sequence
  Description of Artificial Sequence: Synthetic oligonucleotide
agcgugucagaguauuuug

SEQ ID NO: 778121 - RNA, 19 nt, Artificial Sequence
  Description of Artificial Sequence: Synthetic oligonucleotide
cugacugucgaaugucgag

SEQ ID NO: 778122 - RNA, 19 nt, Artificial Sequence
  Description of Artificial Sequence: Synthetic oligonucleotide
aguaugaauuccccggaau

SEQ ID NO: 778123 - RNA, 19 nt, Artificial Sequence
  Description of Artificial Sequence: Synthetic oligonucleotide
cuucaucgccucaacacac

SEQ ID NO: 778124 - RNA, 19 nt, Artificial Sequence
  Description of Artificial Sequence: Synthetic oligonucleotide
uuucgcacauggagcaacc

SEQ ID NO: 778125 - RNA, 19 nt, Artificial Sequence
  Description of Artificial Sequence: Synthetic oligonucleotide
aauucacugcccaguugac

SEQ ID NO: 778126 - RNA, 19 nt, Artificial Sequence
  Description of Artificial Sequence: Synthetic oligonucleotide
guugacgucuucaagggca

SEQ ID NO: 778127 - RNA, 19 nt, Artificial Sequence
  Description of Artificial Sequence: Synthetic oligonucleotide
ucgaaugucgagcgcugcc

SEQ ID NO: 778128 - RNA, 19 nt, Artificial Sequence
  Description of Artificial Sequence: Synthetic oligonucleotide
uguuuggauccaaaaugau

SEQ ID NO: 778129 - RNA, 19 nt, Artificial Sequence
  Description of Artificial Sequence: Synthetic oligonucleotide
aucgcgaucuccucuaaaa

SEQ ID NO: 778130 - RNA, 19 nt, Artificial Sequence
  Description of Artificial Sequence: Synthetic oligonucleotide
auguaagagcaccgucuac

SEQ ID NO: 778131 - RNA, 19 nt, Artificial Sequence
  Description of Artificial Sequence: Synthetic oligonucleotide
uguugacgucuucaagggc

SEQ ID NO: 778132 - RNA, 19 nt, Artificial Sequence
  Description of Artificial Sequence: Synthetic oligonucleotide
caggacuacccgaaauagg

SEQ ID NO: 778133 - RNA, 19 nt, Artificial Sequence
  Description of Artificial Sequence: Synthetic oligonucleotide
agcaccgucuacugaauga

SEQ ID NO: 778134 - RNA, 19 nt, Artificial Sequence
  Description of Artificial Sequence: Synthetic oligonucleotide
uuccaguuagacagaacau

SEQ ID NO: 778135 - RNA, 19 nt, Artificial Sequence
  Description of Artificial Sequence: Synthetic oligonucleotide
ugugauacucaaacacuuu

SEQ ID NO: 778136 - RNA, 19 nt, Artificial Sequence
  Description of Artificial Sequence: Synthetic oligonucleotide
aauuccccggaaucuggga

SEQ ID NO: 778137 - RNA, 19 nt, Artificial Sequence
  Description of Artificial Sequence: Synthetic oligonucleotide
ggacuacuuacacacgcgg

SEQ ID NO: 778138 - RNA, 19 nt, Artificial Sequence
  Description of Artificial Sequence: Synthetic oligonucleotide
acacuccacugcucgaaac

SEQ ID NO: 778139 - RNA, 19 nt, Artificial Sequence
  Description of Artificial Sequence: Synthetic oligonucleotide
uucaucgccucaacacacc

SEQ ID NO: 778140 - RNA, 19 nt, Artificial Sequence
  Description of Artificial Sequence: Synthetic oligonucleotide
ugagccguugcuacaugga

SEQ ID NO: 778141 - RNA, 19 nt, Artificial Sequence
  Description of Artificial Sequence: Synthetic oligonucleotide
cguaauuuccuucaucgcc

SEQ ID NO: 778142 - RNA, 19 nt, Artificial Sequence
  Description of Artificial Sequence: Synthetic oligonucleotide
aaaugaucucgugccaagu

SEQ ID NO: 778143 - RNA, 19 nt, Artificial Sequence
  Description of Artificial Sequence: Synthetic oligonucleotide
aucggaaagaaagccaccu

SEQ ID NO: 778144 - RNA, 19 nt, Artificial Sequence
  Description of Artificial Sequence: Synthetic oligonucleotide
aaugucgagcgcugccuga

SEQ ID NO: 778145 - RNA, 19 nt, Artificial Sequence
  Description of Artificial Sequence: Synthetic oligonucleotide
uaagagcaccgucuacuga

SEQ ID NO: 778146 - RNA, 19 nt, Artificial Sequence
  Description of Artificial Sequence: Synthetic oligonucleotide
cagaacauugugauacuca

SEQ ID NO: 778147 - RNA, 19 nt, Artificial Sequence
  Description of Artificial Sequence: Synthetic oligonucleotide
ucuagcagcgugucagagu

SEQ ID NO: 778148 - RNA, 19 nt, Artificial Sequence
  Description of Artificial Sequence: Synthetic oligonucleotide
auucacguuuaacuacaca

SEQ ID NO: 778149 - RNA, 19 nt, Artificial Sequence
  Description of Artificial Sequence: Synthetic oligonucleotide
uugauaacuuauccaugua

SEQ ID NO: 778150 - RNA, 19 nt, Artificial Sequence
  Description of Artificial Sequence: Synthetic oligonucleotide
augcugauauaacucaaua

SEQ ID NO: 778151 - RNA, 19 nt, Artificial Sequence
  Description of Artificial Sequence: Synthetic oligonucleotide
gaauuccccggaaucuggg

SEQ ID NO: 778152 - RNA, 19 nt, Artificial Sequence
  Description of Artificial Sequence: Synthetic oligonucleotide
cuguuguucuaaugggaug

SEQ ID NO: 778153 - RNA, 19 nt, Artificial Sequence
  Description of Artificial Sequence: Synthetic oligonucleotide
uaugacagucaaucgcgau

SEQ ID NO: 778154 - RNA, 19 nt, Artificial Sequence
  Description of Artificial Sequence: Synthetic oligonucleotide
ucaaucgcgaucuccucua

SEQ ID NO: 778155 - RNA, 19 nt, Artificial Sequence
  Description of Artificial Sequence: Synthetic oligonucleotide
auaaucuagcagcguguca

SEQ ID NO: 778156 - RNA, 19 nt, Artificial Sequence
  Description of Artificial Sequence: Synthetic oligonucleotide
gacuacuuacacacgcggc

SEQ ID NO: 778157 - RNA, 19 nt, Artificial Sequence
  Description of Artificial Sequence: Synthetic oligonucleotide
auacaggacuacccgaaau

SEQ ID NO: 778158 - RNA, 19 nt, Artificial Sequence
  Description of Artificial Sequence: Synthetic oligonucleotide
uuguuggccauguuuugau

SEQ ID NO: 778159 - RNA, 19 nt, Artificial Sequence
  Description of Artificial Sequence: Synthetic oligonucleotide
gaaugucgagcgcugccug

SEQ ID NO: 778160 - RNA, 19 nt, Artificial Sequence
  Description of Artificial Sequence: Synthetic oligonucleotide
ugucgaucucgcaaccggu

SEQ ID NO: 778161 - RNA, 19 nt, Artificial Sequence
  Description of Artificial Sequence: Synthetic oligonucleotide
uuagcugaggcugucccuc

SEQ ID NO: 778162 - RNA, 19 nt, Artificial Sequence
  Description of Artificial Sequence: Synthetic oligonucleotide
caucggaaagaaagccacc

SEQ ID NO: 778163 - RNA, 19 nt, Artificial Sequence
  Description of Artificial Sequence: Synthetic oligonucleotide
auagugcauugucaaauuu

SEQ ID NO: 778164 - RNA, 19 nt, Artificial Sequence
  Description of Artificial Sequence: Synthetic oligonucleotide
guacauuaaacuccccgaa

SEQ ID NO: 778165 - RNA, 19 nt, Artificial Sequence
  Description of Artificial Sequence: Synthetic oligonucleotide
uugcagucuguacauuaaa

SEQ ID NO: 778166 - RNA, 19 nt, Artificial Sequence
  Description of Artificial Sequence: Synthetic oligonucleotide
aucgccucaacacaccauu

SEQ ID NO: 778167 - RNA, 19 nt, Artificial Sequence
  Description of Artificial Sequence: Synthetic oligonucleotide
uacugucgaucucgcaacc

SEQ ID NO: 778168 - RNA, 19 nt, Artificial Sequence
  Description of Artificial Sequence: Synthetic oligonucleotide
ugagaaugugggacuacuu

SEQ ID NO: 778169 - RNA, 19 nt, Artificial Sequence
  Description of Artificial Sequence: Synthetic oligonucleotide
caccuaaaugauauuugca

SEQ ID NO: 778170 - RNA, 19 nt, Artificial Sequence
  Description of Artificial Sequence: Synthetic oligonucleotide
cuuucuuagcuagcuggag

SEQ ID NO: 778171 - RNA, 19 nt, Artificial Sequence
  Description of Artificial Sequence: Synthetic oligonucleotide
agggcuacuucauaaucuu

SEQ ID NO: 778172 - RNA, 19 nt, Artificial Sequence
  Description of Artificial Sequence: Synthetic oligonucleotide
ucgaucucgcaaccgguuc

SEQ ID NO: 778173 - RNA, 19 nt, Artificial Sequence
  Description of Artificial Sequence: Synthetic oligonucleotide
augagaaugugggacuacu

SEQ ID NO: 778174 - RNA, 19 nt, Artificial Sequence
  Description of Artificial Sequence: Synthetic oligonucleotide
gucuacugaaugaguaggc

SEQ ID NO: 778175 - RNA, 19 nt, Artificial Sequence
  Description of Artificial Sequence: Synthetic oligonucleotide
caauacaggacuacccgaa

SEQ ID NO: 778176 - RNA, 19 nt, Artificial Sequence
  Description of Artificial Sequence: Synthetic oligonucleotide
auuccccggaaucugggaa

SEQ ID NO: 778177 - RNA, 19 nt, Artificial Sequence
  Description of Artificial Sequence: Synthetic oligonucleotide
ugccguaauuuccuucauc

SEQ ID NO: 778178 - RNA, 19 nt, Artificial Sequence
  Description of Artificial Sequence: Synthetic oligonucleotide
ucgcgaucuccucuaaaau

SEQ ID NO: 778179 - RNA, 19 nt, Artificial Sequence
  Description of Artificial Sequence: Synthetic oligonucleotide
uugcuauagaucgcaaaua

SEQ ID NO: 778180 - RNA, 19 nt, Artificial Sequence
  Description of Artificial Sequence: Synthetic oligonucleotide
aaucgcgaucuccucuaaa

SEQ ID NO: 778181 - RNA, 19 nt, Artificial Sequence
  Description of Artificial Sequence: Synthetic oligonucleotide
acugucgaucucgcaaccg

SEQ ID NO: 778182 - RNA, 19 nt, Artificial Sequence
  Description of Artificial Sequence: Synthetic oligonucleotide
aucaugcagaguacacaac

SEQ ID NO: 778183 - RNA, 19 nt, Artificial Sequence
  Description of Artificial Sequence: Synthetic oligonucleotide
cuggugaacguaggaagag

SEQ ID NO: 778184 - RNA, 19 nt, Artificial Sequence
  Description of Artificial Sequence: Synthetic oligonucleotide
ugacauaagcgucccuguu

SEQ ID NO: 778185 - RNA, 19 nt, Artificial Sequence
  Description of Artificial Sequence: Synthetic oligonucleotide
guaagccugccguaauuuc

SEQ ID NO: 778186 - RNA, 19 nt, Artificial Sequence
  Description of Artificial Sequence: Synthetic oligonucleotide
cccauaaucuagcagcgug

SEQ ID NO: 778187 - RNA, 19 nt, Artificial Sequence
  Description of Artificial Sequence: Synthetic oligonucleotide
acuggugaacguaggaaga

SEQ ID NO: 778188 - RNA, 19 nt, Artificial Sequence
  Description of Artificial Sequence: Synthetic oligonucleotide
gaucucgugccaaguacac

SEQ ID NO: 778189 - RNA, 19 nt, Artificial Sequence
  Description of Artificial Sequence: Synthetic oligonucleotide
cucgugccaaguacacugc

SEQ ID NO: 778190 - RNA, 19 nt, Artificial Sequence
  Description of Artificial Sequence: Synthetic oligonucleotide
ugaccaagaagcugcucuu

SEQ ID NO: 778191 - RNA, 19 nt, Artificial Sequence
  Description of Artificial Sequence: Synthetic oligonucleotide
uggugaacguaggaagagu

SEQ ID NO: 778192 - RNA, 19 nt, Artificial Sequence
  Description of Artificial Sequence: Synthetic oligonucleotide
gaauacugucgaucucgca

SEQ ID NO: 778193 - RNA, 19 nt, Artificial Sequence
  Description of Artificial Sequence: Synthetic oligonucleotide
uuccccggaaucugggaaa

SEQ ID NO: 778194 - RNA, 19 nt, Artificial Sequence
  Description of Artificial Sequence: Synthetic oligonucleotide
acaacacuccacugcucga

SEQ ID NO: 778195 - RNA, 19 nt, Artificial Sequence
  Description of Artificial Sequence: Synthetic oligonucleotide
gagcaccgucuacugaaug

SEQ ID NO: 778196 - RNA, 19 nt, Artificial Sequence
  Description of Artificial Sequence: Synthetic oligonucleotide
acuccacugcucgaaacca

SEQ ID NO: 778197 - RNA, 19 nt, Artificial Sequence
  Description of Artificial Sequence: Synthetic oligonucleotide
aucuagcagcgugucagag

SEQ ID NO: 778198 - RNA, 19 nt, Artificial Sequence
  Description of Artificial Sequence: Synthetic oligonucleotide
auaagcgucccuguuggua

SEQ ID NO: 778199 - RNA, 19 nt, Artificial Sequence
  Description of Artificial Sequence: Synthetic oligonucleotide
uuucacccucuuugaagaa

SEQ ID NO: 778200 - RNA, 19 nt, Artificial Sequence
  Description of Artificial Sequence: Synthetic oligonucleotide
caaccgguuccaguuagac

SEQ ID NO: 778201 - RNA, 19 nt, Artificial Sequence
  Description of Artificial Sequence: Synthetic oligonucleotide
uguuggccauguuuugaua

SEQ ID NO: 778202 - RNA, 19 nt, Artificial Sequence
  Description of Artificial Sequence: Synthetic oligonucleotide
gggacuacuuacacacgcg

SEQ ID NO: 778203 - RNA, 19 nt, Artificial Sequence
  Description of Artificial Sequence: Synthetic oligonucleotide
cacccucuuugaagaagcc

SEQ ID NO: 778204 - RNA, 19 nt, Artificial Sequence
  Description of Artificial Sequence: Synthetic oligonucleotide
acugguaagccugccguaa

SEQ ID NO: 778205 - RNA, 19 nt, Artificial Sequence
  Description of Artificial Sequence: Synthetic oligonucleotide
guacuggugaacguaggaa

SEQ ID NO: 778206 - RNA, 19 nt, Artificial Sequence
  Description of Artificial Sequence: Synthetic oligonucleotide
acgcggcacaugcugauau

SEQ ID NO: 778207 - RNA, 19 nt, Artificial Sequence
  Description of Artificial Sequence: Synthetic oligonucleotide
cauguaugucugagcuaac

SEQ ID NO: 778208 - RNA, 19 nt, Artificial Sequence
  Description of Artificial Sequence: Synthetic oligonucleotide
accgucuacugaaugagua

SEQ ID NO: 778209 - RNA, 19 nt, Artificial Sequence
  Description of Artificial Sequence: Synthetic oligonucleotide
cccggaaucugggaaaagg

SEQ ID NO: 778210 - RNA, 19 nt, Artificial Sequence
  Description of Artificial Sequence: Synthetic oligonucleotide
gugucagaguauuuugggu

SEQ ID NO: 778211 - RNA, 19 nt, Artificial Sequence
  Description of Artificial Sequence: Synthetic oligonucleotide
acugacugucgaaugucga

SEQ ID NO: 778212 - RNA, 19 nt, Artificial Sequence
  Description of Artificial Sequence: Synthetic oligonucleotide
gcuuggucccucaacauuc

SEQ ID NO: 778213 - RNA, 19 nt, Artificial Sequence
  Description of Artificial Sequence: Synthetic oligonucleotide
gcacaugcugauauaacuc

SEQ ID NO: 778214 - RNA, 19 nt, Artificial Sequence
  Description of Artificial Sequence: Synthetic oligonucleotide
ccgucuacugaaugaguag

SEQ ID NO: 778215 - RNA, 19 nt, Artificial Sequence
  Description of Artificial Sequence: Synthetic oligonucleotide
acccgaaauagggucuuca

SEQ ID NO: 778216 - RNA, 19 nt, Artificial Sequence
  Description of Artificial Sequence: Synthetic oligonucleotide
cacugcucgaaaccaguga

SEQ ID NO: 778217 - RNA, 19 nt, Artificial Sequence
  Description of Artificial Sequence: Synthetic oligonucleotide
gcgaucuccucuaaaauaa

SEQ ID NO: 778218 - RNA, 19 nt, Artificial Sequence
  Description of Artificial Sequence: Synthetic oligonucleotide
gucaaucgcgaucuccucu

SEQ ID NO: 778219 - RNA, 19 nt, Artificial Sequence
  Description of Artificial Sequence: Synthetic oligonucleotide
aagcgucccuguugguaaa

SEQ ID NO: 778220 - RNA, 19 nt, Artificial Sequence
  Description of Artificial Sequence: Synthetic oligonucleotide
caauugaguuguaaaguuu

SEQ ID NO: 778221 - RNA, 19 nt, Artificial Sequence
  Description of Artificial Sequence: Synthetic oligonucleotide
gugggacuacuuacacacg

SEQ ID NO: 778222 - RNA, 19 nt, Artificial Sequence
  Description of Artificial Sequence: Synthetic oligonucleotide
ccguaauuuccuucaucgc

SEQ ID NO: 778223 - RNA, 19 nt, Artificial Sequence
  Description of Artificial Sequence: Synthetic oligonucleotide
cccaauugcuauagaucgc

SEQ ID NO: 778224 - RNA, 19 nt, Artificial Sequence
  Description of Artificial Sequence: Synthetic oligonucleotide
uucgcacauggagcaaccu

SEQ ID NO: 778225 - RNA, 19 nt, Artificial Sequence
  Description of Artificial Sequence: Synthetic oligonucleotide
caugagccguugcuacaug

SEQ ID NO: 778226 - RNA, 19 nt, Artificial Sequence
  Description of Artificial Sequence: Synthetic oligonucleotide
augaguaggccaagacaga

SEQ ID NO: 778227 - RNA, 19 nt, Artificial Sequence
  Description of Artificial Sequence: Synthetic oligonucleotide
ccauguaugucugagcuaa

SEQ ID NO: 778228 - RNA, 19 nt, Artificial Sequence
  Description of Artificial Sequence: Synthetic oligonucleotide
ccaauugcuauagaucgca

SEQ ID NO: 778229 - RNA, 19 nt, Artificial Sequence
  Description of Artificial Sequence: Synthetic oligonucleotide
cuccccgaaagcuuucuua

SEQ ID NO: 778230 - RNA, 19 nt, Artificial Sequence
  Description of Artificial Sequence: Synthetic oligonucleotide
caauugcuauagaucgcaa

SEQ ID NO: 778231 - RNA, 19 nt, Artificial Sequence
  Description of Artificial Sequence: Synthetic oligonucleotide
ggugaacguaggaagagua

SEQ ID NO: 778232 - RNA, 19 nt, Artificial Sequence
  Description of Artificial Sequence: Synthetic oligonucleotide
gugaacguaggaagaguaa

SEQ ID NO: 778233 - RNA, 19 nt, Artificial Sequence
  Description of Artificial Sequence: Synthetic oligonucleotide
accgaaagggcuacuucau

SEQ ID NO: 778234 - RNA, 19 nt, Artificial Sequence
  Description of Artificial Sequence: Synthetic oligonucleotide
gucgaaugucgagcgcugc

SEQ ID NO: 778235 - RNA, 19 nt, Artificial Sequence
  Description of Artificial Sequence: Synthetic oligonucleotide
gacugguaagccugccgua

SEQ ID NO: 778236 - RNA, 19 nt, Artificial Sequence
  Description of Artificial Sequence: Synthetic oligonucleotide
aucucgugccaaguacacu

SEQ ID NO: 778237 - RNA, 19 nt, Artificial Sequence
  Description of Artificial Sequence: Synthetic oligonucleotide
guaggauguggguaaugau

SEQ ID NO: 778238 - RNA, 19 nt, Artificial Sequence
  Description of Artificial Sequence: Synthetic oligonucleotide
acacgcggcacaugcugau

SEQ ID NO: 778239 - RNA, 19 nt, Artificial Sequence
  Description of Artificial Sequence: Synthetic oligonucleotide
ucacugcccaguugacaua

SEQ ID NO: 778240 - RNA, 19 nt, Artificial Sequence
  Description of Artificial Sequence: Synthetic oligonucleotide
ucgcaaccgguuccaguua

SEQ ID NO: 778241 - RNA, 19 nt, Artificial Sequence
  Description of Artificial Sequence: Synthetic oligonucleotide
agguaggauguggguaaug

SEQ ID NO: 778242 - RNA, 19 nt, Artificial Sequence
  Description of Artificial Sequence: Synthetic oligonucleotide
gagccguugcuacauggau

SEQ ID NO: 778243 - RNA, 19 nt, Artificial Sequence
  Description of Artificial Sequence: Synthetic oligonucleotide
cguuuaacuacacaagccu

SEQ ID NO: 778244 - RNA, 19 nt, Artificial Sequence
  Description of Artificial Sequence: Synthetic oligonucleotide
gacagucaaucgcgaucuc

SEQ ID NO: 778245 - RNA, 19 nt, Artificial Sequence
  Description of Artificial Sequence: Synthetic oligonucleotide
acccauaaucuagcagcgu

SEQ ID NO: 778246 - RNA, 19 nt, Artificial Sequence
  Description of Artificial Sequence: Synthetic oligonucleotide
agcgucccuguugguaaag

SEQ ID NO: 778247 - RNA, 19 nt, Artificial Sequence
  Description of Artificial Sequence: Synthetic oligonucleotide
ugucgagcgcugccugaua

SEQ ID NO: 778248 - RNA, 19 nt, Artificial Sequence
  Description of Artificial Sequence: Synthetic oligonucleotide
cugagcuaacuuaaauguu

SEQ ID NO: 778249 - RNA, 19 nt, Artificial Sequence
  Description of Artificial Sequence: Synthetic oligonucleotide
gccguugcuacauggauau

SEQ ID NO: 778250 - RNA, 19 nt, Artificial Sequence
  Description of Artificial Sequence: Synthetic oligonucleotide
gcaucggucacugaauacu

SEQ ID NO: 778251 - RNA, 19 nt, Artificial Sequence
  Description of Artificial Sequence: Synthetic oligonucleotide
agccguugcuacauggaua

SEQ ID NO: 778252 - RNA, 19 nt, Artificial Sequence
  Description of Artificial Sequence: Synthetic oligonucleotide
acuccccgaaagcuuucuu

SEQ ID NO: 778253 - RNA, 19 nt, Artificial Sequence
  Description of Artificial Sequence: Synthetic oligonucleotide
ccaauugaguuguaaaguu

SEQ ID NO: 778254 - RNA, 19 nt, Artificial Sequence
  Description of Artificial Sequence: Synthetic oligonucleotide
augucgagcgcugccugau

SEQ ID NO: 778255 - RNA, 19 nt, Artificial Sequence
  Description of Artificial Sequence: Synthetic oligonucleotide
ccccgaaagcuuucuuagc

SEQ ID NO: 778256 - RNA, 19 nt, Artificial Sequence
  Description of Artificial Sequence: Synthetic oligonucleotide
augauaccaauggcucuuu

SEQ ID NO: 778257 - RNA, 19 nt, Artificial Sequence
  Description of Artificial Sequence: Synthetic oligonucleotide
gcuauagaucgcaaauaua

SEQ ID NO: 778258 - RNA, 19 nt, Artificial Sequence
  Description of Artificial Sequence: Synthetic oligonucleotide
uagcagcgugucagaguau

SEQ ID NO: 778259 - RNA, 19 nt, Artificial Sequence
  Description of Artificial Sequence: Synthetic oligonucleotide
agagcaccgucuacugaau

SEQ ID NO: 778260 - RNA, 19 nt, Artificial Sequence
  Description of Artificial Sequence: Synthetic oligonucleotide
cccgaaagcuuucuuagcu

SEQ ID NO: 778261 - RNA, 19 nt, Artificial Sequence
  Description of Artificial Sequence: Synthetic oligonucleotide
uacccgaaauagggucuuc

SEQ ID NO: 778262 - RNA, 19 nt, Artificial Sequence
  Description of Artificial Sequence: Synthetic oligonucleotide
gucccaccgaaagggcuac

SEQ ID NO: 778263 - RNA, 19 nt, Artificial Sequence
  Description of Artificial Sequence: Synthetic oligonucleotide
ccauaaucuagcagcgugu

SEQ ID NO: 778264 - RNA, 19 nt, Artificial Sequence
  Description of Artificial Sequence: Synthetic oligonucleotide
cuuuaacaccaugauccau

SEQ ID NO: 778265 - RNA, 19 nt, Artificial Sequence
  Description of Artificial Sequence: Synthetic oligonucleotide
cccgaaauagggucuucaa

SEQ ID NO: 778266 - RNA, 19 nt, Artificial Sequence
  Description of Artificial Sequence: Synthetic oligonucleotide
caccgucuacugaaugagu

SEQ ID NO: 778267 - RNA, 19 nt, Artificial Sequence
  Description of Artificial Sequence: Synthetic oligonucleotide
caaucgcgaucuccucuaa

SEQ ID NO: 778268 - RNA, 19 nt, Artificial Sequence
  Description of Artificial Sequence: Synthetic oligonucleotide
cgcgaucuccucuaaaaua

SEQ ID NO: 778269 - RNA, 19 nt, Artificial Sequence
  Description of Artificial Sequence: Synthetic oligonucleotide
ccgaaagcuuucuuagcua

SEQ ID NO: 778270 - RNA, 19 nt, Artificial Sequence
  Description of Artificial Sequence: Synthetic oligonucleotide
gcgucccuguugguaaagc

SEQ ID NO: 778271 - RNA, 19 nt, Artificial Sequence
  Description of Artificial Sequence: Synthetic oligonucleotide
caucgccucaacacaccau

SEQ ID NO: 778272 - RNA, 19 nt, Artificial Sequence
  Description of Artificial Sequence: Synthetic oligonucleotide
ccgaaauagggucuucaau

SEQ ID NO: 778273 - RNA, 19 nt, Artificial Sequence
  Description of Artificial Sequence: Synthetic oligonucleotide
cagcuuggucccucaacau

SEQ ID NO: 778274 - RNA, 19 nt, Artificial Sequence
  Description of Artificial Sequence: Synthetic oligonucleotide
ucccaccgaaagggcuacu

SEQ ID NO: 778275 - RNA, 19 nt, Artificial Sequence
  Description of Artificial Sequence: Synthetic oligonucleotide
ggacuacccgaaauagggu

SEQ ID NO: 778276 - RNA, 19 nt, Artificial Sequence
  Description of Artificial Sequence: Synthetic oligonucleotide
gucgaucucgcaaccgguu

SEQ ID NO: 778277 - RNA, 19 nt, Artificial Sequence
  Description of Artificial Sequence: Synthetic oligonucleotide
gcaaccgguuccaguuaga

SEQ ID NO: 778278 - RNA, 19 nt, Artificial Sequence
  Description of Artificial Sequence: Synthetic oligonucleotide
gccaaguacacugcauguu

SEQ ID NO: 778279 - RNA, 19 nt, Artificial Sequence
  Description of Artificial Sequence: Synthetic oligonucleotide
ccgaaagggcuacuucaua

SEQ ID NO: 778280 - RNA, 19 nt, Artificial Sequence
  Description of Artificial Sequence: Synthetic oligonucleotide
cacgcggcacaugcugaua

SEQ ID NO: 778281 - RNA, 19 nt, Artificial Sequence
  Description of Artificial Sequence: Synthetic oligonucleotide
ccccggaaucugggaaaag

SEQ ID NO: 778282 - RNA, 19 nt, Artificial Sequence
  Description of Artificial Sequence: Synthetic oligonucleotide
cgaaugucgagcgcugccu

SEQ ID NO: 778283 - RNA, 19 nt, Artificial Sequence
  Description of Artificial Sequence: Synthetic oligonucleotide
ccguugcuacauggauauu

SEQ ID NO: 778284 - RNA, 19 nt, Artificial Sequence
  Description of Artificial Sequence: Synthetic oligonucleotide
ucaaauauugucaugcaag

SEQ ID NO: 778285 - RNA, 19 nt, Artificial Sequence
  Description of Artificial Sequence: Synthetic oligonucleotide
aagauuagagcucugauga

SEQ ID NO: 778286 - RNA, 19 nt, Artificial Sequence
  Description of Artificial Sequence: Synthetic oligonucleotide
cauuaugaaacacaaagcg

SEQ ID NO: 778287 - RNA, 19 nt, Artificial Sequence
  Description of Artificial Sequence: Synthetic oligonucleotide
caaucuuuaugccagaugg

SEQ ID NO: 778288 - RNA, 19 nt, Artificial Sequence
  Description of Artificial Sequence: Synthetic oligonucleotide
aggauuguccuucauaggc

SEQ ID NO: 778289 - RNA, 19 nt, Artificial Sequence
  Description of Artificial Sequence: Synthetic oligonucleotide
uacagcuaaguucacaacg

SEQ ID NO: 778290 - RNA, 19 nt, Artificial Sequence
  Description of Artificial Sequence: Synthetic oligonucleotide
uguaaggauacacugaaac

SEQ ID NO: 778291 - RNA, 19 nt, Artificial Sequence
  Description of Artificial Sequence: Synthetic oligonucleotide
gauaguuacagcuaaguuc

SEQ ID NO: 778292 - RNA, 19 nt, Artificial Sequence
  Description of Artificial Sequence: Synthetic oligonucleotide
gaaguaaucacugugacga

SEQ ID NO: 778293 - RNA, 19 nt, Artificial Sequence
  Description of Artificial Sequence: Synthetic oligonucleotide
ucuuguuuacaucaugaag

SEQ ID NO: 778294 - RNA, 19 nt, Artificial Sequence
  Description of Artificial Sequence: Synthetic oligonucleotide
uuaauaugaucacugcgug

SEQ ID NO: 778295 - RNA, 19 nt, Artificial Sequence
  Description of Artificial Sequence: Synthetic oligonucleotide
uuuguaaggauacacugaa

SEQ ID NO: 778296 - RNA, 19 nt, Artificial Sequence
  Description of Artificial Sequence: Synthetic oligonucleotide
aaacguuagauggaaacag

SEQ ID NO: 778297 - RNA, 19 nt, Artificial Sequence
  Description of Artificial Sequence: Synthetic oligonucleotide
uuagggaagaagcuuccgg

SEQ ID NO: 778298 - RNA, 19 nt, Artificial Sequence
  Description of Artificial Sequence: Synthetic oligonucleotide
guaaggauacacugaaacg

SEQ ID NO: 778299 - RNA, 19 nt, Artificial Sequence
  Description of Artificial Sequence: Synthetic oligonucleotide
ugaaacguuagauggaaac

SEQ ID NO: 778300 - RNA, 19 nt, Artificial Sequence
  Description of Artificial Sequence: Synthetic oligonucleotide
gaagauuagagcucugaug

SEQ ID NO: 778301 - RNA, 19 nt, Artificial Sequence
  Description of Artificial Sequence: Synthetic oligonucleotide
ucaguggauaguuacagcu

SEQ ID NO: 778302 - RNA, 19 nt, Artificial Sequence
  Description of Artificial Sequence: Synthetic oligonucleotide
agacaacuauguuacaagg

SEQ ID NO: 778303 - RNA, 19 nt, Artificial Sequence
  Description of Artificial Sequence: Synthetic oligonucleotide
ucagaugagcccugaaugg

SEQ ID NO: 778304 - RNA, 19 nt, Artificial Sequence
  Description of Artificial Sequence: Synthetic oligonucleotide
uuaauacuguaaaauggga

SEQ ID NO: 778305 - RNA, 19 nt, Artificial Sequence
  Description of Artificial Sequence: Synthetic oligonucleotide
auugucucguuauauaugu

SEQ ID NO: 778306 - RNA, 19 nt, Artificial Sequence
  Description of Artificial Sequence: Synthetic oligonucleotide
aguaauacugguccuccac

SEQ ID NO: 778307 - RNA, 19 nt, Artificial Sequence
  Description of Artificial Sequence: Synthetic oligonucleotide
ugaaaacccacucuucccc

SEQ ID NO: 778308 - RNA, 19 nt, Artificial Sequence
  Description of Artificial Sequence: Synthetic oligonucleotide
uuuuguuaagcuuccagaa

SEQ ID NO: 778309 - RNA, 19 nt, Artificial Sequence
  Description of Artificial Sequence: Synthetic oligonucleotide
ugaaacgcugcccagccag

SEQ ID NO: 778310 - RNA, 19 nt, Artificial Sequence
  Description of Artificial Sequence: Synthetic oligonucleotide
acaucagucacgugacugc

SEQ ID NO: 778311 - RNA, 19 nt, Artificial Sequence
  Description of Artificial Sequence: Synthetic oligonucleotide
aguuacacagguauccugc

SEQ ID NO: 778312 - RNA, 19 nt, Artificial Sequence
  Description of Artificial Sequence: Synthetic oligonucleotide
cacgcaguaauacuggucc

SEQ ID NO: 778313 - RNA, 19 nt, Artificial Sequence
  Description of Artificial Sequence: Synthetic oligonucleotide
cuuuaugccagauggugcc

SEQ ID NO: 778314 - RNA, 19 nt, Artificial Sequence
  Description of Artificial Sequence: Synthetic oligonucleotide
ucuuuaugccagauggugc

SEQ ID NO: 778315 - RNA, 19 nt, Artificial Sequence
  Description of Artificial Sequence: Synthetic oligonucleotide
ucuugagggaaauucuaag

SEQ ID NO: 778316 - RNA, 19 nt, Artificial Sequence
  Description of Artificial Sequence: Synthetic oligonucleotide
uucauaggccaccacacug

SEQ ID NO: 778317 - RNA, 19 nt, Artificial Sequence
  Description of Artificial Sequence: Synthetic oligonucleotide
uauugucucguuauauaug

SEQ ID NO: 778318 - RNA, 19 nt, Artificial Sequence
  Description of Artificial Sequence: Synthetic oligonucleotide
uacaguuacacagguaucc

SEQ ID NO: 778319 - RNA, 19 nt, Artificial Sequence
  Description of Artificial Sequence: Synthetic oligonucleotide
ucgugugaaagcacaaaag

SEQ ID NO: 778320 - RNA, 19 nt, Artificial Sequence
  Description of Artificial Sequence: Synthetic oligonucleotide
uuguuuacaucaugaagug

SEQ ID NO: 778321 - RNA, 19 nt, Artificial Sequence
  Description of Artificial Sequence: Synthetic oligonucleotide
ucuuguagcaauccacgca

SEQ ID NO: 778322 - RNA, 19 nt, Artificial Sequence
  Description of Artificial Sequence: Synthetic oligonucleotide
ucuuugcuaaaucuuaaua

SEQ ID NO: 778323 - RNA, 19 nt, Artificial Sequence
  Description of Artificial Sequence: Synthetic oligonucleotide
cagcuaaugacaaaaugug

SEQ ID NO: 778324 - RNA, 19 nt, Artificial Sequence
  Description of Artificial Sequence: Synthetic oligonucleotide
gacaaaauguggaaaugag

SEQ ID NO: 778325 - RNA, 19 nt, Artificial Sequence
  Description of Artificial Sequence: Synthetic oligonucleotide
gagaacaugccaugugggg

SEQ ID NO: 778326 - RNA, 19 nt, Artificial Sequence
  Description of Artificial Sequence: Synthetic oligonucleotide
aaauuuguguuagucgugu

SEQ ID NO: 778327 - RNA, 19 nt, Artificial Sequence
  Description of Artificial Sequence: Synthetic oligonucleotide
ugucucguuauauauguaa

SEQ ID NO: 778328 - RNA, 19 nt, Artificial Sequence
  Description of Artificial Sequence: Synthetic oligonucleotide
uguuacaagggauuccacu

SEQ ID NO: 778329 - RNA, 19 nt, Artificial Sequence
  Description of Artificial Sequence: Synthetic oligonucleotide
gauuagagcucugaugaag

SEQ ID NO: 778330 - RNA, 19 nt, Artificial Sequence
  Description of Artificial Sequence: Synthetic oligonucleotide
agagcagacaacuauguua

SEQ ID NO: 778331 - RNA, 19 nt, Artificial Sequence
  Description of Artificial Sequence: Synthetic oligonucleotide
guuagauggaaacagcuaa

SEQ ID NO: 778332 - RNA, 19 nt, Artificial Sequence
  Description of Artificial Sequence: Synthetic oligonucleotide
ugcagaagagucaaucuaa

SEQ ID NO: 778333 - RNA, 19 nt, Artificial Sequence
  Description of Artificial Sequence: Synthetic oligonucleotide
aggguuaguuuuguuaagc

SEQ ID NO: 778334 - RNA, 19 nt, Artificial Sequence
  Description of Artificial Sequence: Synthetic oligonucleotide
aauccacgcaguaauacug

SEQ ID NO: 778335 - RNA, 19 nt, Artificial Sequence
  Description of Artificial Sequence: Synthetic oligonucleotide
uuagaggugaaaacccacu

SEQ ID NO: 778336 - RNA, 19 nt, Artificial Sequence
  Description of Artificial Sequence: Synthetic oligonucleotide
gaaacagcuaaugacaaaa

SEQ ID NO: 778337 - RNA, 19 nt, Artificial Sequence
  Description of Artificial Sequence: Synthetic oligonucleotide
acugugacgaugcugcucu

SEQ ID NO: 778338 - RNA, 19 nt, Artificial Sequence
  Description of Artificial Sequence: Synthetic oligonucleotide
aacguuaauucuugggaaa

SEQ ID NO: 778339 - RNA, 19 nt, Artificial Sequence
  Description of Artificial Sequence: Synthetic oligonucleotide
cagacaacuauguuacaag

SEQ ID NO: 778340 - RNA, 19 nt, Artificial Sequence
  Description of Artificial Sequence: Synthetic oligonucleotide
guuuuguuaagcuuccaga

SEQ ID NO: 778341 - RNA, 19 nt, Artificial Sequence
  Description of Artificial Sequence: Synthetic oligonucleotide
aguauguauuuucauuaca

SEQ ID NO: 778342 - RNA, 19 nt, Artificial Sequence
  Description of Artificial Sequence: Synthetic oligonucleotide
uuaaaccaugcauucuggc

SEQ ID NO: 778343 - RNA, 19 nt, Artificial Sequence
  Description of Artificial Sequence: Synthetic oligonucleotide
aggaggcucaaauauuguc

SEQ ID NO: 778344 - RNA, 19 nt, Artificial Sequence
  Description of Artificial Sequence: Synthetic oligonucleotide
uguugcauuucacgcaaug

SEQ ID NO: 778345 - RNA, 19 nt, Artificial Sequence
  Description of Artificial Sequence: Synthetic oligonucleotide
uguuagucgugugaaagca

SEQ ID NO: 778346 - RNA, 19 nt, Artificial Sequence
  Description of Artificial Sequence: Synthetic oligonucleotide
ugguugauuaauacuguaa

SEQ ID NO: 778347 - RNA, 19 nt, Artificial Sequence
  Description of Artificial Sequence: Synthetic oligonucleotide
acagcggugaaacgcugcc

SEQ ID NO: 778348 - RNA, 19 nt, Artificial Sequence
  Description of Artificial Sequence: Synthetic oligonucleotide
gaagcaguagucgugccag

SEQ ID NO: 778349 - RNA, 19 nt, Artificial Sequence
  Description of Artificial Sequence: Synthetic oligonucleotide
auuuguguuagucguguga

SEQ ID NO: 778350 - RNA, 19 nt, Artificial Sequence
  Description of Artificial Sequence: Synthetic oligonucleotide
uaauaugaucacugcgugc

SEQ ID NO: 778351 - RNA, 19 nt, Artificial Sequence
  Description of Artificial Sequence: Synthetic oligonucleotide
ucaguugccucucuagagu

SEQ ID NO: 778352 - RNA, 19 nt, Artificial Sequence
  Description of Artificial Sequence: Synthetic oligonucleotide
guaaucacugugacgaugc

SEQ ID NO: 778353 - RNA, 19 nt, Artificial Sequence
  Description of Artificial Sequence: Synthetic oligonucleotide
ucagucacgugacugcaca

SEQ ID NO: 778354 - RNA, 19 nt, Artificial Sequence
  Description of Artificial Sequence: Synthetic oligonucleotide
acaauggccuugaagcacc

SEQ ID NO: 778355 - RNA, 19 nt, Artificial Sequence
  Description of Artificial Sequence: Synthetic oligonucleotide
acaugguuagcacuuuucu

SEQ ID NO: 778356 - RNA, 19 nt, Artificial Sequence
  Description of Artificial Sequence: Synthetic oligonucleotide
agucgugccaggauugucc

SEQ ID NO: 778357 - RNA, 19 nt, Artificial Sequence
  Description of Artificial Sequence: Synthetic oligonucleotide
aauuuguguuagucgugug

SEQ ID NO: 778358 - RNA, 19 nt, Artificial Sequence
  Description of Artificial Sequence: Synthetic oligonucleotide
uuuuacaggacaggagccc

SEQ ID NO: 778359 - RNA, 19 nt, Artificial Sequence
  Description of Artificial Sequence: Synthetic oligonucleotide
augaguauguauuuucauu

SEQ ID NO: 778360 - RNA, 19 nt, Artificial Sequence
  Description of Artificial Sequence: Synthetic oligonucleotide
gaacgcucagagaacaugc

SEQ ID NO: 778361 - RNA, 19 nt, Artificial Sequence
  Description of Artificial Sequence: Synthetic oligonucleotide
auaugaucacugcgugccc

SEQ ID NO: 778362 - RNA, 19 nt, Artificial Sequence
  Description of Artificial Sequence: Synthetic oligonucleotide
ucguuauauauguaauauc

SEQ ID NO: 778363 - RNA, 19 nt, Artificial Sequence
  Description of Artificial Sequence: Synthetic oligonucleotide
uaugaguauguauuuucau

SEQ ID NO: 778364 - RNA, 19 nt, Artificial Sequence
  Description of Artificial Sequence: Synthetic oligonucleotide
ugcacaucagucacgugac

SEQ ID NO: 778365 - RNA, 19 nt, Artificial Sequence
  Description of Artificial Sequence: Synthetic oligonucleotide
agcuaaugacaaaaugugg

SEQ ID NO: 778366 - RNA, 19 nt, Artificial Sequence
  Description of Artificial Sequence: Synthetic oligonucleotide
gucccaaugacuugcuugc

SEQ ID NO: 778367 - RNA, 19 nt, Artificial Sequence
  Description of Artificial Sequence: Synthetic oligonucleotide
cauuucacgcaaugcuugg

SEQ ID NO: 778368 - RNA, 19 nt, Artificial Sequence
  Description of Artificial Sequence: Synthetic oligonucleotide
caugguuagcacuuuucug

SEQ ID NO: 778369 - RNA, 19 nt, Artificial Sequence
  Description of Artificial Sequence: Synthetic oligonucleotide
guuaaaccaugcauucugg

SEQ ID NO: 778370 - RNA, 19 nt, Artificial Sequence
  Description of Artificial Sequence: Synthetic oligonucleotide
acaacucuugcacaucagu

SEQ ID NO: 778371 - RNA, 19 nt, Artificial Sequence
  Description of Artificial Sequence: Synthetic oligonucleotide
aaucucaaaacugcaggaa

SEQ ID NO: 778372 - RNA, 19 nt, Artificial Sequence
  Description of Artificial Sequence: Synthetic oligonucleotide
gaaacguuagauggaaaca

SEQ ID NO: 778373 - RNA, 19 nt, Artificial Sequence
  Description of Artificial Sequence: Synthetic oligonucleotide
agaggugaaaacccacucu

SEQ ID NO: 778374 - RNA, 19 nt, Artificial Sequence
  Description of Artificial Sequence: Synthetic oligonucleotide
uuuagggaagaagcuuccg

SEQ ID NO: 778375 - RNA, 19 nt, Artificial Sequence
  Description of Artificial Sequence: Synthetic oligonucleotide
ucuauaggaugaaucucaa

SEQ ID NO: 778376 - RNA, 19 nt, Artificial Sequence
  Description of Artificial Sequence: Synthetic oligonucleotide
ggagucaaacguuaguaug

SEQ ID NO: 778377 - RNA, 19 nt, Artificial Sequence
  Description of Artificial Sequence: Synthetic oligonucleotide
agucaaacguuaguauggg

SEQ ID NO: 778378 - RNA, 19 nt, Artificial Sequence
  Description of Artificial Sequence: Synthetic oligonucleotide
agccuuaucgccuaugcuu

SEQ ID NO: 778379 - RNA, 19 nt, Artificial Sequence
  Description of Artificial Sequence: Synthetic oligonucleotide
ucucguuauauauguaaua

SEQ ID NO: 778380 - RNA, 19 nt, Artificial Sequence
  Description of Artificial Sequence: Synthetic oligonucleotide
uggauaguuacagcuaagu

SEQ ID NO: 778381 - RNA, 19 nt, Artificial Sequence
  Description of Artificial Sequence: Synthetic oligonucleotide
aguucacaacguuaauucu

SEQ ID NO: 778382 - RNA, 19 nt, Artificial Sequence
  Description of Artificial Sequence: Synthetic oligonucleotide
cacaguagaaguccucccc

SEQ ID NO: 778383 - RNA, 19 nt, Artificial Sequence
  Description of Artificial Sequence: Synthetic oligonucleotide
ucagugggagccuuaucgc

SEQ ID NO: 778384 - RNA, 19 nt, Artificial Sequence
  Description of Artificial Sequence: Synthetic oligonucleotide
ugcauuucacgcaaugcuu

SEQ ID NO: 778385 - RNA, 19 nt, Artificial Sequence
  Description of Artificial Sequence: Synthetic oligonucleotide
ggaugaaucucaaaacugc

SEQ ID NO: 778386 - RNA, 19 nt, Artificial Sequence
  Description of Artificial Sequence: Synthetic oligonucleotide
aggaugaaucucaaaacug

SEQ ID NO: 778387 - RNA, 19 nt, Artificial Sequence
  Description of Artificial Sequence: Synthetic oligonucleotide
uuaucgccuaugcuucuug

SEQ ID NO: 778388 - RNA, 19 nt, Artificial Sequence
  Description of Artificial Sequence: Synthetic oligonucleotide
gaaauuuguguuagucgug

SEQ ID NO: 778389 - RNA, 19 nt, Artificial Sequence
  Description of Artificial Sequence: Synthetic oligonucleotide
ucacaacguuaauucuugg

SEQ ID NO: 778390 - RNA, 19 nt, Artificial Sequence
  Description of Artificial Sequence: Synthetic oligonucleotide
auuucacgcaaugcuuggc

SEQ ID NO: 778391 - RNA, 19 nt, Artificial Sequence
  Description of Artificial Sequence: Synthetic oligonucleotide
agagaacaugccauguggg

SEQ ID NO: 778392 - RNA, 19 nt, Artificial Sequence
  Description of Artificial Sequence: Synthetic oligonucleotide
uugucaugcaaguuuccaa

SEQ ID NO: 778393 - RNA, 19 nt, Artificial Sequence
  Description of Artificial Sequence: Synthetic oligonucleotide
gauccugguaagugauucc

SEQ ID NO: 778394 - RNA, 19 nt, Artificial Sequence
  Description of Artificial Sequence: Synthetic oligonucleotide
uguuaagcuuccagaagua

SEQ ID NO: 778395 - RNA, 19 nt, Artificial Sequence
  Description of Artificial Sequence: Synthetic oligonucleotide
guguuagucgugugaaagc

SEQ ID NO: 778396 - RNA, 19 nt, Artificial Sequence
  Description of Artificial Sequence: Synthetic oligonucleotide
ggaaauuuguguuagucgu

SEQ ID NO: 778397 - RNA, 19 nt, Artificial Sequence
  Description of Artificial Sequence: Synthetic oligonucleotide
cuaugagaaacaugcagaa

SEQ ID NO: 778398 - RNA, 19 nt, Artificial Sequence
  Description of Artificial Sequence: Synthetic oligonucleotide
auaugaguauguauuuuca

SEQ ID NO: 778399 - RNA, 19 nt, Artificial Sequence
  Description of Artificial Sequence: Synthetic oligonucleotide
ucuugggaaauuuguguua

SEQ ID NO: 778400 - RNA, 19 nt, Artificial Sequence
  Description of Artificial Sequence: Synthetic oligonucleotide
aguaaucacugugacgaug

SEQ ID NO: 778401 - RNA, 19 nt, Artificial Sequence
  Description of Artificial Sequence: Synthetic oligonucleotide
gucaaacguuaguaugggg

SEQ ID NO: 778402 - RNA, 19 nt, Artificial Sequence
  Description of Artificial Sequence: Synthetic oligonucleotide
gcuaaugacaaaaugugga

SEQ ID NO: 778403 - RNA, 19 nt, Artificial Sequence
  Description of Artificial Sequence: Synthetic oligonucleotide
auacacugaaacguuagau

SEQ ID NO: 778404 - RNA, 19 nt, Artificial Sequence
  Description of Artificial Sequence: Synthetic oligonucleotide
ucucauggcaagucacaca

SEQ ID NO: 778405 - RNA, 19 nt, Artificial Sequence
  Description of Artificial Sequence: Synthetic oligonucleotide
cuauguuacaagggauucc

SEQ ID NO: 778406 - RNA, 19 nt, Artificial Sequence
  Description of Artificial Sequence: Synthetic oligonucleotide
agcggugaaacgcugccca

SEQ ID NO: 778407 - RNA, 19 nt, Artificial Sequence
  Description of Artificial Sequence: Synthetic oligonucleotide
ucccgaguggcacacuugu

SEQ ID NO: 778408 - RNA, 19 nt, Artificial Sequence
  Description of Artificial Sequence: Synthetic oligonucleotide
guaauacugguccuccaca

SEQ ID NO: 778409 - RNA, 19 nt, Artificial Sequence
  Description of Artificial Sequence: Synthetic oligonucleotide
uaggaacgcucagagaaca

SEQ ID NO: 778410 - RNA, 19 nt, Artificial Sequence
  Description of Artificial Sequence: Synthetic oligonucleotide
ucgccuaugcuucuuguuu

SEQ ID NO: 778411 - RNA, 19 nt, Artificial Sequence
  Description of Artificial Sequence: Synthetic oligonucleotide
gucacgugacugcacaaug

SEQ ID NO: 778412 - RNA, 19 nt, Artificial Sequence
  Description of Artificial Sequence: Synthetic oligonucleotide
agcaagagagaaauuauuu

SEQ ID NO: 778413 - RNA, 19 nt, Artificial Sequence
  Description of Artificial Sequence: Synthetic oligonucleotide
aaucuuuaugccagauggu

SEQ ID NO: 778414 - RNA, 19 nt, Artificial Sequence
  Description of Artificial Sequence: Synthetic oligonucleotide
acugaaacguuagauggaa

SEQ ID NO: 778415 - RNA, 19 nt, Artificial Sequence
  Description of Artificial Sequence: Synthetic oligonucleotide
aagguuguucuuugcuaaa

SEQ ID NO: 778416 - RNA, 19 nt, Artificial Sequence
  Description of Artificial Sequence: Synthetic oligonucleotide
cuucuauaggaugaaucuc

SEQ ID NO: 778417 - RNA, 19 nt, Artificial Sequence
  Description of Artificial Sequence: Synthetic oligonucleotide
cacaucagucacgugacug

SEQ ID NO: 778418 - RNA, 19 nt, Artificial Sequence
  Description of Artificial Sequence: Synthetic oligonucleotide
ccugguaagugauuccucc

SEQ ID NO: 778419 - RNA, 19 nt, Artificial Sequence
  Description of Artificial Sequence: Synthetic oligonucleotide
cagugggagccuuaucgcc

SEQ ID NO: 778420 - RNA, 19 nt, Artificial Sequence
  Description of Artificial Sequence: Synthetic oligonucleotide
cccagcuaaacucuugagg

SEQ ID NO: 778421 - RNA, 19 nt, Artificial Sequence
  Description of Artificial Sequence: Synthetic oligonucleotide
cacaaagcgcuuguuggcc

SEQ ID NO: 778422 - RNA, 19 nt, Artificial Sequence
  Description of Artificial Sequence: Synthetic oligonucleotide
uaugaucacugcgugcccu

SEQ ID NO: 778423 - RNA, 19 nt, Artificial Sequence
  Description of Artificial Sequence: Synthetic oligonucleotide
aagucaguggauaguuaca

SEQ ID NO: 778424 - RNA, 19 nt, Artificial Sequence
  Description of Artificial Sequence: Synthetic oligonucleotide
auaauggagaauacaguua

SEQ ID NO: 778425 - RNA, 19 nt, Artificial Sequence
  Description of Artificial Sequence: Synthetic oligonucleotide
acguuagauggaaacagcu

SEQ ID NO: 778426 - RNA, 19 nt, Artificial Sequence
  Description of Artificial Sequence: Synthetic oligonucleotide
cuuguugcauuucacgcaa

SEQ ID NO: 778427 - RNA, 19 nt, Artificial Sequence
  Description of Artificial Sequence: Synthetic oligonucleotide
gccgcuacaacucuugcac

SEQ ID NO: 778428 - RNA, 19 nt, Artificial Sequence
  Description of Artificial Sequence: Synthetic oligonucleotide
uucacgcaaugcuuggcaa

SEQ ID NO: 778429 - RNA, 19 nt, Artificial Sequence
  Description of Artificial Sequence: Synthetic oligonucleotide
guggcuacaugguuagcac

SEQ ID NO: 778430 - RNA, 19 nt, Artificial Sequence
  Description of Artificial Sequence: Synthetic oligonucleotide
aaacagcuaaugacaaaau

SEQ ID NO: 778431 - RNA, 19 nt, Artificial Sequence
  Description of Artificial Sequence: Synthetic oligonucleotide
caguuacacagguauccug

SEQ ID NO: 778432 - RNA, 19 nt, Artificial Sequence
  Description of Artificial Sequence: Synthetic oligonucleotide
gacccagcuaaacucuuga

SEQ ID NO: 778433 - RNA, 19 nt, Artificial Sequence
  Description of Artificial Sequence: Synthetic oligonucleotide
auauaugaguauguauuuu

SEQ ID NO: 778434 - RNA, 19 nt, Artificial Sequence
  Description of Artificial Sequence: Synthetic oligonucleotide
gggaagaagcuuccggucc

SEQ ID NO: 778435 - RNA, 19 nt, Artificial Sequence
  Description of Artificial Sequence: Synthetic oligonucleotide
cagaugagcccugaauggc

SEQ ID NO: 778436 - RNA, 19 nt, Artificial Sequence
  Description of Artificial Sequence: Synthetic oligonucleotide
aguagucgugccaggauug

SEQ ID NO: 778437 - RNA, 19 nt, Artificial Sequence
  Description of Artificial Sequence: Synthetic oligonucleotide
aaguaaucacugugacgau

SEQ ID NO: 778438 - RNA, 19 nt, Artificial Sequence
  Description of Artificial Sequence: Synthetic oligonucleotide
ggugaaacgcugcccagcc

SEQ ID NO: 778439 - RNA, 19 nt, Artificial Sequence
  Description of Artificial Sequence: Synthetic oligonucleotide
ggauacacugaaacguuag

SEQ ID NO: 778440 - RNA, 19 nt, Artificial Sequence
  Description of Artificial Sequence: Synthetic oligonucleotide
cccaaaagccccgagaccc

SEQ ID NO: 778441 - RNA, 19 nt, Artificial Sequence
  Description of Artificial Sequence: Synthetic oligonucleotide
acgcucagagaacaugcca

SEQ ID NO: 778442 - RNA, 19 nt, Artificial Sequence
  Description of Artificial Sequence: Synthetic oligonucleotide
auccacgcaguaauacugg

SEQ ID NO: 778443 - RNA, 19 nt, Artificial Sequence
  Description of Artificial Sequence: Synthetic oligonucleotide
ugauuccuccagaugugau

SEQ ID NO: 778444 - RNA, 19 nt, Artificial Sequence
  Description of Artificial Sequence: Synthetic oligonucleotide
uuuaugccagauggugccc

SEQ ID NO: 778445 - RNA, 19 nt, Artificial Sequence
  Description of Artificial Sequence: Synthetic oligonucleotide
uggcuacaugguuagcacu

SEQ ID NO: 778446 - RNA, 19 nt, Artificial Sequence
  Description of Artificial Sequence: Synthetic oligonucleotide
guauguauuuucauuacau

SEQ ID NO: 778447 - RNA, 19 nt, Artificial Sequence
  Description of Artificial Sequence: Synthetic oligonucleotide
uggccagauucacggagca

SEQ ID NO: 778448 - RNA, 19 nt, Artificial Sequence
  Description of Artificial Sequence: Synthetic oligonucleotide
uaucgccuaugcuucuugu

SEQ ID NO: 778449 - RNA, 19 nt, Artificial Sequence
  Description of Artificial Sequence: Synthetic oligonucleotide
uacuguaaaaugggagaaa

SEQ ID NO: 778450 - RNA, 19 nt, Artificial Sequence
  Description of Artificial Sequence: Synthetic oligonucleotide
ggagccuuaucgccuaugc

SEQ ID NO: 778451 - RNA, 19 nt, Artificial Sequence
  Description of Artificial Sequence: Synthetic oligonucleotide
acccagcuaaacucuugag

SEQ ID NO: 778452 - RNA, 19 nt, Artificial Sequence
  Description of Artificial Sequence: Synthetic oligonucleotide
uagucgugugaaagcacaa

SEQ ID NO: 778453 - RNA, 19 nt, Artificial Sequence
  Description of Artificial Sequence: Synthetic oligonucleotide
ggaggcucaaauauuguca

SEQ ID NO: 778454 - RNA, 19 nt, Artificial Sequence
  Description of Artificial Sequence: Synthetic oligonucleotide
acaguuacacagguauccu

SEQ ID NO: 778455 - RNA, 19 nt, Artificial Sequence
  Description of Artificial Sequence: Synthetic oligonucleotide
cauuucagaggagcaggag

SEQ ID NO: 778456 - RNA, 19 nt, Artificial Sequence
  Description of Artificial Sequence: Synthetic oligonucleotide
cacagcggugaaacgcugc

SEQ ID NO: 778457 - RNA, 19 nt, Artificial Sequence
  Description of Artificial Sequence: Synthetic oligonucleotide
accuguguguuccaugcuu

SEQ ID NO: 778458 - RNA, 19 nt, Artificial Sequence
  Description of Artificial Sequence: Synthetic oligonucleotide
uuaugccagauggugcccu

SEQ ID NO: 778459 - RNA, 19 nt, Artificial Sequence
  Description of Artificial Sequence: Synthetic oligonucleotide
cacgcaaugcuuggcaaac

SEQ ID NO: 778460 - RNA, 19 nt, Artificial Sequence
  Description of Artificial Sequence: Synthetic oligonucleotide
agauuagagcucugaugaa

SEQ ID NO: 778461 - RNA, 19 nt, Artificial Sequence
  Description of Artificial Sequence: Synthetic oligonucleotide
gaggcucaaauauugucau

SEQ ID NO: 778462 - RNA, 19 nt, Artificial Sequence
  Description of Artificial Sequence: Synthetic oligonucleotide
aggcucaaauauugucaug

SEQ ID NO: 778463 - RNA, 19 nt, Artificial Sequence
  Description of Artificial Sequence: Synthetic oligonucleotide
uugggaaauuuguguuagu

SEQ ID NO: 778464 - RNA, 19 nt, Artificial Sequence
  Description of Artificial Sequence: Synthetic oligonucleotide
ccuauggaugguacagagg

SEQ ID NO: 778465 - RNA, 19 nt, Artificial Sequence
  Description of Artificial Sequence: Synthetic oligonucleotide
cacugaaacguuagaugga

SEQ ID NO: 778466 - RNA, 19 nt, Artificial Sequence
  Description of Artificial Sequence: Synthetic oligonucleotide
ggcucguuuucucagaugu

SEQ ID NO: 778467 - RNA, 19 nt, Artificial Sequence
  Description of Artificial Sequence: Synthetic oligonucleotide
acaaagcacucggcaugcc

SEQ ID NO: 778468 - RNA, 19 nt, Artificial Sequence
  Description of Artificial Sequence: Synthetic oligonucleotide
guaagugauuccuccagau

SEQ ID NO: 778469 - RNA, 19 nt, Artificial Sequence
  Description of Artificial Sequence: Synthetic oligonucleotide
agugggagccuuaucgccu

SEQ ID NO: 778470 - RNA, 19 nt, Artificial Sequence
  Description of Artificial Sequence: Synthetic oligonucleotide
cccuauggaugguacagag

SEQ ID NO: 778471 - RNA, 19 nt, Artificial Sequence
  Description of Artificial Sequence: Synthetic oligonucleotide
uugucucguuauauaugua

SEQ ID NO: 778472 - RNA, 19 nt, Artificial Sequence
  Description of Artificial Sequence: Synthetic oligonucleotide
cuaugcuucuuguuuacau

SEQ ID NO: 778473 - RNA, 19 nt, Artificial Sequence
  Description of Artificial Sequence: Synthetic oligonucleotide
ggcaaguucuuuuacugcu

SEQ ID NO: 778474 - RNA, 19 nt, Artificial Sequence
  Description of Artificial Sequence: Synthetic oligonucleotide
ggaacgcucagagaacaug

SEQ ID NO: 778475 - RNA, 19 nt, Artificial Sequence
  Description of Artificial Sequence: Synthetic oligonucleotide
guagcaauccacgcaguaa

SEQ ID NO: 778476 - RNA, 19 nt, Artificial Sequence
  Description of Artificial Sequence: Synthetic oligonucleotide
guggauaguuacagcuaag

SEQ ID NO: 778477 - RNA, 19 nt, Artificial Sequence
  Description of Artificial Sequence: Synthetic oligonucleotide
guaggaacgcucagagaac

SEQ ID NO: 778478 - RNA, 19 nt, Artificial Sequence
  Description of Artificial Sequence: Synthetic oligonucleotide
cacagucggggcaguacac

SEQ ID NO: 778479 - RNA, 19 nt, Artificial Sequence
  Description of Artificial Sequence: Synthetic oligonucleotide
ggcaucuacaaccacugcu

SEQ ID NO: 778480 - RNA, 19 nt, Artificial Sequence
  Description of Artificial Sequence: Synthetic oligonucleotide
cuuugaugacagcccugug

SEQ ID NO: 778481 - RNA, 19 nt, Artificial Sequence
  Description of Artificial Sequence: Synthetic oligonucleotide
acgcaguaauacugguccu

SEQ ID NO: 778482 - RNA, 19 nt, Artificial Sequence
  Description of Artificial Sequence: Synthetic oligonucleotide
ccagauggugcccuuguac

SEQ ID NO: 778483 - RNA, 19 nt, Artificial Sequence
  Description of Artificial Sequence: Synthetic oligonucleotide
uuccggucccaaugacuug

SEQ ID NO: 778484 - RNA, 19 nt, Artificial Sequence
  Description of Artificial Sequence: Synthetic oligonucleotide
cuauaggaugaaucucaaa

SEQ ID NO: 778485 - RNA, 19 nt, Artificial Sequence
  Description of Artificial Sequence: Synthetic oligonucleotide
agguuguucuuugcuaaau

SEQ ID NO: 778486 - RNA, 19 nt, Artificial Sequence
  Description of Artificial Sequence: Synthetic oligonucleotide
cagcuaaacucuugaggga

SEQ ID NO: 778487 - RNA, 19 nt, Artificial Sequence
  Description of Artificial Sequence: Synthetic oligonucleotide
aggcucguuuucucagaug

SEQ ID NO: 778488 - RNA, 19 nt, Artificial Sequence
  Description of Artificial Sequence: Synthetic oligonucleotide
gugacugcacaaugggucu

SEQ ID NO: 778489 - RNA, 19 nt, Artificial Sequence
  Description of Artificial Sequence: Synthetic oligonucleotide
gaacgucugaggaggcuca

SEQ ID NO: 778490 - RNA, 19 nt, Artificial Sequence
  Description of Artificial Sequence: Synthetic oligonucleotide
guacuccacguucuggucu

SEQ ID NO: 778491 - RNA, 19 nt, Artificial Sequence
  Description of Artificial Sequence: Synthetic oligonucleotide
cuuccggucccaaugacuu

SEQ ID NO: 778492 - RNA, 19 nt, Artificial Sequence
  Description of Artificial Sequence: Synthetic oligonucleotide
cuuucuaugcagcuuuauu

SEQ ID NO: 778493 - RNA, 19 nt, Artificial Sequence
  Description of Artificial Sequence: Synthetic oligonucleotide
augaucacugcgugcccuu

SEQ ID NO: 778494 - RNA, 19 nt, Artificial Sequence
  Description of Artificial Sequence: Synthetic oligonucleotide
gcccuugguugauuaauac

SEQ ID NO: 778495 - RNA, 19 nt, Artificial Sequence
  Description of Artificial Sequence: Synthetic oligonucleotide
cagccgcuacaacucuugc

SEQ ID NO: 778496 - RNA, 19 nt, Artificial Sequence
  Description of Artificial Sequence: Synthetic oligonucleotide
gguuaguuuuguuaagcuu

SEQ ID NO: 778497 - RNA, 19 nt, Artificial Sequence
  Description of Artificial Sequence: Synthetic oligonucleotide
aggauacacugaaacguua

SEQ ID NO: 778498 - RNA, 19 nt, Artificial Sequence
  Description of Artificial Sequence: Synthetic oligonucleotide
uaugccagauggugcccuu

SEQ ID NO: 778499 - RNA, 19 nt, Artificial Sequence
  Description of Artificial Sequence: Synthetic oligonucleotide
ggaagauuagagcucugau

SEQ ID NO: 778500 - RNA, 19 nt, Artificial Sequence
  Description of Artificial Sequence: Synthetic oligonucleotide
gcccuuguacuccacguuc

SEQ ID NO: 778501 - RNA, 19 nt, Artificial Sequence
  Description of Artificial Sequence: Synthetic oligonucleotide
acgugacugcacaaugggu

SEQ ID NO: 778502 - RNA, 19 nt, Artificial Sequence
  Description of Artificial Sequence: Synthetic oligonucleotide
gcaucuacaaccacugcua

SEQ ID NO: 778503 - RNA, 19 nt, Artificial Sequence
  Description of Artificial Sequence: Synthetic oligonucleotide
aggagccccugucacguua

SEQ ID NO: 778504 - RNA, 19 nt, Artificial Sequence
  Description of Artificial Sequence: Synthetic oligonucleotide
gucucguuauauauguaau

SEQ ID NO: 778505 - RNA, 19 nt, Artificial Sequence
  Description of Artificial Sequence: Synthetic oligonucleotide
gaugggguucuugcaucca

SEQ ID NO: 778506 - RNA, 19 nt, Artificial Sequence
  Description of Artificial Sequence: Synthetic oligonucleotide
gccuuaucgccuaugcuuc

SEQ ID NO: 778507 - RNA, 19 nt, Artificial Sequence
  Description of Artificial Sequence: Synthetic oligonucleotide
gagccuuaucgccuaugcu

SEQ ID NO: 778508 - RNA, 19 nt, Artificial Sequence
  Description of Artificial Sequence: Synthetic oligonucleotide
uagucgugccaggauuguc

SEQ ID NO: 778509 - RNA, 19 nt, Artificial Sequence
  Description of Artificial Sequence: Synthetic oligonucleotide
gguuagcacuuuucugcuc

SEQ ID NO: 778510 - RNA, 19 nt, Artificial Sequence
  Description of Artificial Sequence: Synthetic oligonucleotide
cagcggugaaacgcugccc

SEQ ID NO: 778511 - RNA, 19 nt, Artificial Sequence
  Description of Artificial Sequence: Synthetic oligonucleotide
agucggggcaguacaccug

SEQ ID NO: 778512 - RNA, 19 nt, Artificial Sequence
  Description of Artificial Sequence: Synthetic oligonucleotide
cacagguauccugcauuuc

SEQ ID NO: 778513 - RNA, 19 nt, Artificial Sequence
  Description of Artificial Sequence: Synthetic oligonucleotide
acgcaaugcuuggcaaacu

SEQ ID NO: 778514 - RNA, 19 nt, Artificial Sequence
  Description of Artificial Sequence: Synthetic oligonucleotide
gucgugccaggauuguccu

SEQ ID NO: 778515 - RNA, 19 nt, Artificial Sequence
  Description of Artificial Sequence: Synthetic oligonucleotide
ucggggcaguacaccugcu

SEQ ID NO: 778516 - RNA, 19 nt, Artificial Sequence
  Description of Artificial Sequence: Synthetic oligonucleotide
cacucggcaugccagggcu

SEQ ID NO: 778517 - RNA, 19 nt, Artificial Sequence
  Description of Artificial Sequence: Synthetic oligonucleotide
ccacuugucuuugaugaca

SEQ ID NO: 778518 - RNA, 19 nt, Artificial Sequence
  Description of Artificial Sequence: Synthetic oligonucleotide
gcuacaacucuugcacauc

SEQ ID NO: 778519 - RNA, 19 nt, Artificial Sequence
  Description of Artificial Sequence: Synthetic oligonucleotide
cucuuucuaugcagcuuua

SEQ ID NO: 778520 - RNA, 19 nt, Artificial Sequence
  Description of Artificial Sequence: Synthetic oligonucleotide
guugccucucuagaguuuu

SEQ ID NO: 778521 - RNA, 19 nt, Artificial Sequence
  Description of Artificial Sequence: Synthetic oligonucleotide
gcggugaaacgcugcccag

SEQ ID NO: 778522 - RNA, 19 nt, Artificial Sequence
  Description of Artificial Sequence: Synthetic oligonucleotide
cucggcaugccagggcuga

SEQ ID NO: 778523 - RNA, 19 nt, Artificial Sequence
  Description of Artificial Sequence: Synthetic oligonucleotide
cugugacgaugcugcucug

SEQ ID NO: 778524 - RNA, 19 nt, Artificial Sequence
  Description of Artificial Sequence: Synthetic oligonucleotide
aguugccucucuagaguuu

SEQ ID NO: 778525 - RNA, 19 nt, Artificial Sequence
  Description of Artificial Sequence: Synthetic oligonucleotide
caguagucgugccaggauu

SEQ ID NO: 778526 - RNA, 19 nt, Artificial Sequence
  Description of Artificial Sequence: Synthetic oligonucleotide
ggcacagucggggcaguac

SEQ ID NO: 778527 - RNA, 19 nt, Artificial Sequence
  Description of Artificial Sequence: Synthetic oligonucleotide
ugggagccuuaucgccuau

SEQ ID NO: 778528 - RNA, 19 nt, Artificial Sequence
  Description of Artificial Sequence: Synthetic oligonucleotide
gcucguuuucucagaugug

SEQ ID NO: 778529 - RNA, 19 nt, Artificial Sequence
  Description of Artificial Sequence: Synthetic oligonucleotide
aggaacgcucagagaacau

SEQ ID NO: 778530 - RNA, 19 nt, Artificial Sequence
  Description of Artificial Sequence: Synthetic oligonucleotide
caguugccucucuagaguu

SEQ ID NO: 778531 - RNA, 19 nt, Artificial Sequence
  Description of Artificial Sequence: Synthetic oligonucleotide
cguuagauggaaacagcua

SEQ ID NO: 778532 - RNA, 19 nt, Artificial Sequence
  Description of Artificial Sequence: Synthetic oligonucleotide
acucggcaugccagggcug

SEQ ID NO: 778533 - RNA, 19 nt, Artificial Sequence
  Description of Artificial Sequence: Synthetic oligonucleotide
ucgugccaggauuguccuu

SEQ ID NO: 778534 - RNA, 19 nt, Artificial Sequence
  Description of Artificial Sequence: Synthetic oligonucleotide
gcucauuaugaaacacaaa

SEQ ID NO: 778535 - RNA, 19 nt, Artificial Sequence
  Description of Artificial Sequence: Synthetic oligonucleotide
gccagauucacggagcauu

SEQ ID NO: 778536 - RNA, 19 nt, Artificial Sequence
  Description of Artificial Sequence: Synthetic oligonucleotide
ggcuacaugguuagcacuu

SEQ ID NO: 778537 - RNA, 19 nt, Artificial Sequence
  Description of Artificial Sequence: Synthetic oligonucleotide
guagucgugccaggauugu

SEQ ID NO: 778538 - RNA, 19 nt, Artificial Sequence
  Description of Artificial Sequence: Synthetic oligonucleotide
gggagccuuaucgccuaug

SEQ ID NO: 778539 - RNA, 19 nt, Artificial Sequence
  Description of Artificial Sequence: Synthetic oligonucleotide
ccacagcggugaaacgcug

SEQ ID NO: 778540 - RNA, 19 nt, Artificial Sequence
  Description of Artificial Sequence: Synthetic oligonucleotide
cgcaguaauacugguccuc

SEQ ID NO: 778541 - RNA, 19 nt, Artificial Sequence
  Description of Artificial Sequence: Synthetic oligonucleotide
caguagaaguccuccccuu

SEQ ID NO: 778542 - RNA, 19 nt, Artificial Sequence
  Description of Artificial Sequence: Synthetic oligonucleotide
ccaaaagccccgagaccca

SEQ ID NO: 778543 - RNA, 19 nt, Artificial Sequence
  Description of Artificial Sequence: Synthetic oligonucleotide
ccacucuuccccuauggau

SEQ ID NO: 778544 - RNA, 19 nt, Artificial Sequence
  Description of Artificial Sequence: Synthetic oligonucleotide
cugcucaguugccucucua

SEQ ID NO: 778545 - RNA, 19 nt, Artificial Sequence
  Description of Artificial Sequence: Synthetic oligonucleotide
gagcucugaugaaguuaaa

SEQ ID NO: 778546 - RNA, 19 nt, Artificial Sequence
  Description of Artificial Sequence: Synthetic oligonucleotide
cggugaaacgcugcccagc

SEQ ID NO: 778547 - RNA, 19 nt, Artificial Sequence
  Description of Artificial Sequence: Synthetic oligonucleotide
ugcgugcccuugguugauu

SEQ ID NO: 778548 - RNA, 19 nt, Artificial Sequence
  Description of Artificial Sequence: Synthetic oligonucleotide
uggcacagucggggcagua

SEQ ID NO: 778549 - RNA, 19 nt, Artificial Sequence
  Description of Artificial Sequence: Synthetic oligonucleotide
ucggcaugccagggcugau

SEQ ID NO: 778550 - RNA, 19 nt, Artificial Sequence
  Description of Artificial Sequence: Synthetic oligonucleotide
ccgcuacaacucuugcaca

SEQ ID NO: 778551 - RNA, 19 nt, Artificial Sequence
  Description of Artificial Sequence: Synthetic oligonucleotide
uccucccgaguggcacacu

SEQ ID NO: 778552 - RNA, 19 nt, Artificial Sequence
  Description of Artificial Sequence: Synthetic oligonucleotide
gcuuccggucccaaugacu

SEQ ID NO: 778553 - RNA, 19 nt, Artificial Sequence
  Description of Artificial Sequence: Synthetic oligonucleotide
cuuaucgccuaugcuucuu

SEQ ID NO: 778554 - RNA, 19 nt, Artificial Sequence
  Description of Artificial Sequence: Synthetic oligonucleotide
gcgugcccuugguugauua

SEQ ID NO: 778555 - RNA, 19 nt, Artificial Sequence
  Description of Artificial Sequence: Synthetic oligonucleotide
cgccuaugcuucuuguuua

SEQ ID NO: 778556 - RNA, 19 nt, Artificial Sequence
  Description of Artificial Sequence: Synthetic oligonucleotide
ccagauucacggagcauuu

SEQ ID NO: 778557 - RNA, 19 nt, Artificial Sequence
  Description of Artificial Sequence: Synthetic oligonucleotide
ccccgagacccagcuaaac

SEQ ID NO: 778558 - RNA, 19 nt, Artificial Sequence
  Description of Artificial Sequence: Synthetic oligonucleotide
caggaggguuaguuuuguu

SEQ ID NO: 778559 - RNA, 19 nt, Artificial Sequence
  Description of Artificial Sequence: Synthetic oligonucleotide
ccuuaucgccuaugcuucu

SEQ ID NO: 778560 - RNA, 19 nt, Artificial Sequence
  Description of Artificial Sequence: Synthetic oligonucleotide
gcuacaugguuagcacuuu

SEQ ID NO: 778561 - RNA, 19 nt, Artificial Sequence
  Description of Artificial Sequence: Synthetic oligonucleotide
ccucccgaguggcacacuu

SEQ ID NO: 778562 - RNA, 19 nt, Artificial Sequence
  Description of Artificial Sequence: Synthetic oligonucleotide
ccaugcauucuggcaaguu

SEQ ID NO: 778563 - RNA, 19 nt, Artificial Sequence
  Description of Artificial Sequence: Synthetic oligonucleotide
cccugucacguuacagcuu

SEQ ID NO: 778564 - RNA, 19 nt, Artificial Sequence
  Description of Artificial Sequence: Synthetic oligonucleotide
uuuauuacaagccuucugu

SEQ ID NO: 778565 - RNA, 19 nt, Artificial Sequence
  Description of Artificial Sequence: Synthetic oligonucleotide
auaaguguggagcacagag

SEQ ID NO: 778566 - RNA, 19 nt, Artificial Sequence
  Description of Artificial Sequence: Synthetic oligonucleotide
uuugacucgacucuucaag

SEQ ID NO: 778567 - RNA, 19 nt, Artificial Sequence
  Description of Artificial Sequence: Synthetic oligonucleotide
cagguaucaacucagaggc

SEQ ID NO: 778568 - RNA, 19 nt, Artificial Sequence
  Description of Artificial Sequence: Synthetic oligonucleotide
auacucuucaagcaauagc

SEQ ID NO: 778569 - RNA, 19 nt, Artificial Sequence
  Description of Artificial Sequence: Synthetic oligonucleotide
aaaacgaggguguggcagc

SEQ ID NO: 778570 - RNA, 19 nt, Artificial Sequence
  Description of Artificial Sequence: Synthetic oligonucleotide
uuggacuugacccgaaagg

SEQ ID NO: 778571 - RNA, 19 nt, Artificial Sequence
  Description of Artificial Sequence: Synthetic oligonucleotide
ucaaugaugauccugcgua

SEQ ID NO: 778572 - RNA, 19 nt, Artificial Sequence
  Description of Artificial Sequence: Synthetic oligonucleotide
uagucaaugaugauccugc

SEQ ID NO: 778573 - RNA, 19 nt, Artificial Sequence
  Description of Artificial Sequence: Synthetic oligonucleotide
aaugcuuuccacuccuuug

SEQ ID NO: 778574 - RNA, 19 nt, Artificial Sequence
  Description of Artificial Sequence: Synthetic oligonucleotide
uuuuauaucuggaggguga

SEQ ID NO: 778575 - RNA, 19 nt, Artificial Sequence
  Description of Artificial Sequence: Synthetic oligonucleotide
uacuagugagcaaagggag

SEQ ID NO: 778576 - RNA, 19 nt, Artificial Sequence
  Description of Artificial Sequence: Synthetic oligonucleotide
uuugugagcauacaacuuc

SEQ ID NO: 778577 - RNA, 19 nt, Artificial Sequence
  Description of Artificial Sequence: Synthetic oligonucleotide
agagggauuuuauaucugg

SEQ ID NO: 778578 - RNA, 19 nt, Artificial Sequence
  Description of Artificial Sequence: Synthetic oligonucleotide
uuaucaaguaccagaggcc

SEQ ID NO: 778579 - RNA, 19 nt, Artificial Sequence
  Description of Artificial Sequence: Synthetic oligonucleotide
auuacaagccuucugugca

SEQ ID NO: 778580 - RNA, 19 nt, Artificial Sequence
  Description of Artificial Sequence: Synthetic oligonucleotide
uauuacaagccuucugugc

SEQ ID NO: 778581 - RNA, 19 nt, Artificial Sequence
  Description of Artificial Sequence: Synthetic oligonucleotide
cuugcuguaccucaggcag

SEQ ID NO: 778582 - RNA, 19 nt, Artificial Sequence
  Description of Artificial Sequence: Synthetic oligonucleotide
uguagacugucuuuggccc

SEQ ID NO: 778583 - RNA, 19 nt, Artificial Sequence
  Description of Artificial Sequence: Synthetic oligonucleotide
aauuggacagaguuuuccu

SEQ ID NO: 778584 - RNA, 19 nt, Artificial Sequence
  Description of Artificial Sequence: Synthetic oligonucleotide
uccuugcagacuaaggucc

SEQ ID NO: 778585 - RNA, 19 nt, Artificial Sequence
  Description of Artificial Sequence: Synthetic oligonucleotide
ugaugaaccuuccuguucu

SEQ ID NO: 778586 - RNA, 19 nt, Artificial Sequence
  Description of Artificial Sequence: Synthetic oligonucleotide
aacgucacuugguaggcag

SEQ ID NO: 778587 - RNA, 19 nt, Artificial Sequence
  Description of Artificial Sequence: Synthetic oligonucleotide
agaaccuggguucccaugg

SEQ ID NO: 778588 - RNA, 19 nt, Artificial Sequence
  Description of Artificial Sequence: Synthetic oligonucleotide
gaggccauguuguaaaggc

SEQ ID NO: 778589 - RNA, 19 nt, Artificial Sequence
  Description of Artificial Sequence: Synthetic oligonucleotide
gaugcagucacauaagaua

SEQ ID NO: 778590 - RNA, 19 nt, Artificial Sequence
  Description of Artificial Sequence: Synthetic oligonucleotide
uauagcuugacuucuuuau

SEQ ID NO: 778591 - RNA, 19 nt, Artificial Sequence
  Description of Artificial Sequence: Synthetic oligonucleotide
gacccgaaaggccuuagcg

SEQ ID NO: 778592 - RNA, 19 nt, Artificial Sequence
  Description of Artificial Sequence: Synthetic oligonucleotide
gagucugucacuucuugcc

SEQ ID NO: 778593 - RNA, 19 nt, Artificial Sequence
  Description of Artificial Sequence: Synthetic oligonucleotide
gggauuuuauaucuggagg

SEQ ID NO: 778594 - RNA, 19 nt, Artificial Sequence
  Description of Artificial Sequence: Synthetic oligonucleotide
uugacucgacucuucaagg

SEQ ID NO: 778595 - RNA, 19 nt, Artificial Sequence
  Description of Artificial Sequence: Synthetic oligonucleotide
acugcauaaaaugagucug

SEQ ID NO: 778596 - RNA, 19 nt, Artificial Sequence
  Description of Artificial Sequence: Synthetic oligonucleotide
aggaacagucagcaaaacg

SEQ ID NO: 778597 - RNA, 19 nt, Artificial Sequence
  Description of Artificial Sequence: Synthetic oligonucleotide
acguuuagcucuuccuucc

SEQ ID NO: 778598 - RNA, 19 nt, Artificial Sequence
  Description of Artificial Sequence: Synthetic oligonucleotide
uuuuccagggagccgauac

SEQ ID NO: 778599 - RNA, 19 nt, Artificial Sequence
  Description of Artificial Sequence: Synthetic oligonucleotide
aaggagaguacuagugagc

SEQ ID NO: 778600 - RNA, 19 nt, Artificial Sequence
  Description of Artificial Sequence: Synthetic oligonucleotide
ggaaacgucacuugguagg

SEQ ID NO: 778601 - RNA, 19 nt, Artificial Sequence
  Description of Artificial Sequence: Synthetic oligonucleotide
aguugaaaauacucauauc

SEQ ID NO: 778602 - RNA, 19 nt, Artificial Sequence
  Description of Artificial Sequence: Synthetic oligonucleotide
cuguccgaccccuugaugg

SEQ ID NO: 778603 - RNA, 19 nt, Artificial Sequence
  Description of Artificial Sequence: Synthetic oligonucleotide
cauguacacagucacugcg

SEQ ID NO: 778604 - RNA, 19 nt, Artificial Sequence
  Description of Artificial Sequence: Synthetic oligonucleotide
ugucuuuggccccaggggc

SEQ ID NO: 778605 - RNA, 19 nt, Artificial Sequence
  Description of Artificial Sequence: Synthetic oligonucleotide
cuaagaugcagucacauaa

SEQ ID NO: 778606 - RNA, 19 nt, Artificial Sequence
  Description of Artificial Sequence: Synthetic oligonucleotide
agaugugauccucgggugc

SEQ ID NO: 778607 - RNA, 19 nt, Artificial Sequence
  Description of Artificial Sequence: Synthetic oligonucleotide
uuuagcucuuccuucccag

SEQ ID NO: 778608 - RNA, 19 nt, Artificial Sequence
  Description of Artificial Sequence: Synthetic oligonucleotide
ucagaauggguuccugucc

SEQ ID NO: 778609 - RNA, 19 nt, Artificial Sequence
  Description of Artificial Sequence: Synthetic oligonucleotide
uuauuacaagccuucugug

SEQ ID NO: 778610 - RNA, 19 nt, Artificial Sequence
  Description of Artificial Sequence: Synthetic oligonucleotide
gagccgauacucuucaagc

SEQ ID NO: 778611 - RNA, 19 nt, Artificial Sequence
  Description of Artificial Sequence: Synthetic oligonucleotide
aagaugugauccucgggug

SEQ ID NO: 778612 - RNA, 19 nt, Artificial Sequence
  Description of Artificial Sequence: Synthetic oligonucleotide
auaagauaggauccaauuu

SEQ ID NO: 778613 - RNA, 19 nt, Artificial Sequence
  Description of Artificial Sequence: Synthetic oligonucleotide
ugauaaguguggagcacag

SEQ ID NO: 778614 - RNA, 19 nt, Artificial Sequence
  Description of Artificial Sequence: Synthetic oligonucleotide
uagcgaacaugucugcuag

SEQ ID NO: 778615 - RNA, 19 nt, Artificial Sequence
  Description of Artificial Sequence: Synthetic oligonucleotide
aauggguuccuguccagga

SEQ ID NO: 778616 - RNA, 19 nt, Artificial Sequence
  Description of Artificial Sequence: Synthetic oligonucleotide
aaggccuuagcgaacaugu

SEQ ID NO: 778617 - RNA, 19 nt, Artificial Sequence
  Description of Artificial Sequence: Synthetic oligonucleotide
uccuugaucugaacaaucu

SEQ ID NO: 778618 - RNA, 19 nt, Artificial Sequence
  Description of Artificial Sequence: Synthetic oligonucleotide
ggauccacugcauaaaaug

SEQ ID NO: 778619 - RNA, 19 nt, Artificial Sequence
  Description of Artificial Sequence: Synthetic oligonucleotide
acugcguccccuuugugag

SEQ ID NO: 778620 - RNA, 19 nt, Artificial Sequence
  Description of Artificial Sequence: Synthetic oligonucleotide
uuuauguccaguugcuguc

SEQ ID NO: 778621 - RNA, 19 nt, Artificial Sequence
  Description of Artificial Sequence: Synthetic oligonucleotide
uacacagucacugcguccc

SEQ ID NO: 778622 - RNA, 19 nt, Artificial Sequence
  Description of Artificial Sequence: Synthetic oligonucleotide
gaugccagcaucugagcug

SEQ ID NO: 778623 - RNA, 19 nt, Artificial Sequence
  Description of Artificial Sequence: Synthetic oligonucleotide
aaguuuucuccuguccgac

SEQ ID NO: 778624 - RNA, 19 nt, Artificial Sequence
  Description of Artificial Sequence: Synthetic oligonucleotide
acaugugacugccaaggag

SEQ ID NO: 778625 - RNA, 19 nt, Artificial Sequence
  Description of Artificial Sequence: Synthetic oligonucleotide
auaaaaugagucugucacu

SEQ ID NO: 778626 - RNA, 19 nt, Artificial Sequence
  Description of Artificial Sequence: Synthetic oligonucleotide
gauccugcguaccucacug

SEQ ID NO: 778627 - RNA, 19 nt, Artificial Sequence
  Description of Artificial Sequence: Synthetic oligonucleotide
aggauaugaccacagugug

SEQ ID NO: 778628 - RNA, 19 nt, Artificial Sequence
  Description of Artificial Sequence: Synthetic oligonucleotide
auagcuugacuucuuuaug

SEQ ID NO: 778629 - RNA, 19 nt, Artificial Sequence
  Description of Artificial Sequence: Synthetic oligonucleotide
acgaggguguggcagcucc

SEQ ID NO: 778630 - RNA, 19 nt, Artificial Sequence
  Description of Artificial Sequence: Synthetic oligonucleotide
aacaugucugcuaggguag

SEQ ID NO: 778631 - RNA, 19 nt, Artificial Sequence
  Description of Artificial Sequence: Synthetic oligonucleotide
ugugcaagggugaugucaa

SEQ ID NO: 778632 - RNA, 19 nt, Artificial Sequence
  Description of Artificial Sequence: Synthetic oligonucleotide
uggacuugacccgaaaggc

SEQ ID NO: 778633 - RNA, 19 nt, Artificial Sequence
  Description of Artificial Sequence: Synthetic oligonucleotide
aagauaggauccaauuuca

SEQ ID NO: 778634 - RNA, 19 nt, Artificial Sequence
  Description of Artificial Sequence: Synthetic oligonucleotide
ugguguaacagcucaucca

SEQ ID NO: 778635 - RNA, 19 nt, Artificial Sequence
  Description of Artificial Sequence: Synthetic oligonucleotide
auacucauaucaauuacca

SEQ ID NO: 778636 - RNA, 19 nt, Artificial Sequence
  Description of Artificial Sequence: Synthetic oligonucleotide
gauaugaccacagugugua

SEQ ID NO: 778637 - RNA, 19 nt, Artificial Sequence
  Description of Artificial Sequence: Synthetic oligonucleotide
uccgauugcuacaggagcu

SEQ ID NO: 778638 - RNA, 19 nt, Artificial Sequence
  Description of Artificial Sequence: Synthetic oligonucleotide
uguguacacuguuggauac

SEQ ID NO: 778639 - RNA, 19 nt, Artificial Sequence
  Description of Artificial Sequence: Synthetic oligonucleotide
uccaaguuccggaccacag

SEQ ID NO: 778640 - RNA, 19 nt, Artificial Sequence
  Description of Artificial Sequence: Synthetic oligonucleotide
uucagaauggguuccuguc

SEQ ID NO: 778641 - RNA, 19 nt, Artificial Sequence
  Description of Artificial Sequence: Synthetic oligonucleotide
ggaacagucagcaaaacga

SEQ ID NO: 778642 - RNA, 19 nt, Artificial Sequence
  Description of Artificial Sequence: Synthetic oligonucleotide
ccagguaucaacucagagg

SEQ ID NO: 778643 - RNA, 19 nt, Artificial Sequence
  Description of Artificial Sequence: Synthetic oligonucleotide
cagcucucaacccuggagg

SEQ ID NO: 778644 - RNA, 19 nt, Artificial Sequence
  Description of Artificial Sequence: Synthetic oligonucleotide
uuagcucuuccuucccagg

SEQ ID NO: 778645 - RNA, 19 nt, Artificial Sequence
  Description of Artificial Sequence: Synthetic oligonucleotide
uccugauaaguguggagca

SEQ ID NO: 778646 - RNA, 19 nt, Artificial Sequence
  Description of Artificial Sequence: Synthetic oligonucleotide
aaagcagcggucacaucgg

SEQ ID NO: 778647 - RNA, 19 nt, Artificial Sequence
  Description of Artificial Sequence: Synthetic oligonucleotide
aggacuugucuccagauuu

SEQ ID NO: 778648 - RNA, 19 nt, Artificial Sequence
  Description of Artificial Sequence: Synthetic oligonucleotide
ugacaaaagaugugauccu

SEQ ID NO: 778649 - RNA, 19 nt, Artificial Sequence
  Description of Artificial Sequence: Synthetic oligonucleotide
guuggacuugacccgaaag

SEQ ID NO: 778650 - RNA, 19 nt, Artificial Sequence
  Description of Artificial Sequence: Synthetic oligonucleotide
ugaugccagcaucugagcu

SEQ ID NO: 778651 - RNA, 19 nt, Artificial Sequence
  Description of Artificial Sequence: Synthetic oligonucleotide
uuuauagcuugacuucuuu

SEQ ID NO: 778652 - RNA, 19 nt, Artificial Sequence
  Description of Artificial Sequence: Synthetic oligonucleotide
ugacucgacucuucaaggc

SEQ ID NO: 778653 - RNA, 19 nt, Artificial Sequence
  Description of Artificial Sequence: Synthetic oligonucleotide
auagucaaugaugauccug

SEQ ID NO: 778654 - RNA, 19 nt, Artificial Sequence
  Description of Artificial Sequence: Synthetic oligonucleotide
uaugaccacaguguguaca

SEQ ID NO: 778655 - RNA, 19 nt, Artificial Sequence
  Description of Artificial Sequence: Synthetic oligonucleotide
caauuggacagaguuuucc

SEQ ID NO: 778656 - RNA, 19 nt, Artificial Sequence
  Description of Artificial Sequence: Synthetic oligonucleotide
agaccauaggucuccaagu

SEQ ID NO: 778657 - RNA, 19 nt, Artificial Sequence
  Description of Artificial Sequence: Synthetic oligonucleotide
aggaaacgucacuugguag

SEQ ID NO: 778658 - RNA, 19 nt, Artificial Sequence
  Description of Artificial Sequence: Synthetic oligonucleotide
cagauuuccacaagugguc

SEQ ID NO: 778659 - RNA, 19 nt, Artificial Sequence
  Description of Artificial Sequence: Synthetic oligonucleotide
uguacacagucacugcguc

SEQ ID NO: 778660 - RNA, 19 nt, Artificial Sequence
  Description of Artificial Sequence: Synthetic oligonucleotide
cuccgauugcuacaggagc

SEQ ID NO: 778661 - RNA, 19 nt, Artificial Sequence
  Description of Artificial Sequence: Synthetic oligonucleotide
uccugcguaccucacugcc

SEQ ID NO: 778662 - RNA, 19 nt, Artificial Sequence
  Description of Artificial Sequence: Synthetic oligonucleotide
aacaugugacugccaagga

SEQ ID NO: 778663 - RNA, 19 nt, Artificial Sequence
  Description of Artificial Sequence: Synthetic oligonucleotide
uuagcgaacaugucugcua

SEQ ID NO: 778664 - RNA, 19 nt, Artificial Sequence
  Description of Artificial Sequence: Synthetic oligonucleotide
ccauaggucuccaaguucc

SEQ ID NO: 778665 - RNA, 19 nt, Artificial Sequence
  Description of Artificial Sequence: Synthetic oligonucleotide
gccguguuggacuugaccc

SEQ ID NO: 778666 - RNA, 19 nt, Artificial Sequence
  Description of Artificial Sequence: Synthetic oligonucleotide
auuaccagcucagaaccug

SEQ ID NO: 778667 - RNA, 19 nt, Artificial Sequence
  Description of Artificial Sequence: Synthetic oligonucleotide
aauggcacagaggucgccu

SEQ ID NO: 778668 - RNA, 19 nt, Artificial Sequence
  Description of Artificial Sequence: Synthetic oligonucleotide
caugggucaagaccauagg

SEQ ID NO: 778669 - RNA, 19 nt, Artificial Sequence
  Description of Artificial Sequence: Synthetic oligonucleotide
gaaacgucacuugguaggc

SEQ ID NO: 778670 - RNA, 19 nt, Artificial Sequence
  Description of Artificial Sequence: Synthetic oligonucleotide
ucugcuaggguagcccagg

SEQ ID NO: 778671 - RNA, 19 nt, Artificial Sequence
  Description of Artificial Sequence: Synthetic oligonucleotide
uuauagcuugacuucuuua

SEQ ID NO: 778672 - RNA, 19 nt, Artificial Sequence
  Description of Artificial Sequence: Synthetic oligonucleotide
gaccagcuuaucaaguacc

SEQ ID NO: 778673 - RNA, 19 nt, Artificial Sequence
  Description of Artificial Sequence: Synthetic oligonucleotide
guagagggauuuuauaucu

SEQ ID NO: 778674 - RNA, 19 nt, Artificial Sequence
  Description of Artificial Sequence: Synthetic oligonucleotide
caggagaacaugugacugc

SEQ ID NO: 778675 - RNA, 19 nt, Artificial Sequence
  Description of Artificial Sequence: Synthetic oligonucleotide
aggagaguacuagugagca

SEQ ID NO: 778676 - RNA, 19 nt, Artificial Sequence
  Description of Artificial Sequence: Synthetic oligonucleotide
cucauaucaauuaccagcu

SEQ ID NO: 778677 - RNA, 19 nt, Artificial Sequence
  Description of Artificial Sequence: Synthetic oligonucleotide
gaugugauccucgggugcc

SEQ ID NO: 778678 - RNA, 19 nt, Artificial Sequence
  Description of Artificial Sequence: Synthetic oligonucleotide
cagcaggagaacaugugac

SEQ ID NO: 778679 - RNA, 19 nt, Artificial Sequence
  Description of Artificial Sequence: Synthetic oligonucleotide
acuagugagcaaagggagg

SEQ ID NO: 778680 - RNA, 19 nt, Artificial Sequence
  Description of Artificial Sequence: Synthetic oligonucleotide
aguguguacacuguuggau

SEQ ID NO: 778681 - RNA, 19 nt, Artificial Sequence
  Description of Artificial Sequence: Synthetic oligonucleotide
gugggauucacugccaaug

SEQ ID NO: 778682 - RNA, 19 nt, Artificial Sequence
  Description of Artificial Sequence: Synthetic oligonucleotide
uguugucugcauccaccag

SEQ ID NO: 778683 - RNA, 19 nt, Artificial Sequence
  Description of Artificial Sequence: Synthetic oligonucleotide
ugggaagucagggaaggcu

SEQ ID NO: 778684 - RNA, 19 nt, Artificial Sequence
  Description of Artificial Sequence: Synthetic oligonucleotide
aagcacugguguaacagcu

SEQ ID NO: 778685 - RNA, 19 nt, Artificial Sequence
  Description of Artificial Sequence: Synthetic oligonucleotide
gaauggguuccuguccagg

SEQ ID NO: 778686 - RNA, 19 nt, Artificial Sequence
  Description of Artificial Sequence: Synthetic oligonucleotide
ucuaagaugcagucacaua

SEQ ID NO: 778687 - RNA, 19 nt, Artificial Sequence
  Description of Artificial Sequence: Synthetic oligonucleotide
cuucaagcaauagcuggcc

SEQ ID NO: 778688 - RNA, 19 nt, Artificial Sequence
  Description of Artificial Sequence: Synthetic oligonucleotide
auccacugcauaaaaugag

SEQ ID NO: 778689 - RNA, 19 nt, Artificial Sequence
  Description of Artificial Sequence: Synthetic oligonucleotide
accacguuuagcucuuccu

SEQ ID NO: 778690 - RNA, 19 nt, Artificial Sequence
  Description of Artificial Sequence: Synthetic oligonucleotide
cacguuuagcucuuccuuc

SEQ ID NO: 778691 - RNA, 19 nt, Artificial Sequence
  Description of Artificial Sequence: Synthetic oligonucleotide
ugaucugaacaaucugcuc

SEQ ID NO: 778692 - RNA, 19 nt, Artificial Sequence
  Description of Artificial Sequence: Synthetic oligonucleotide
uccgaccccuugauggccg

SEQ ID NO: 778693 - RNA, 19 nt, Artificial Sequence
  Description of Artificial Sequence: Synthetic oligonucleotide
ugugagcauacaacuucac

SEQ ID NO: 778694 - RNA, 19 nt, Artificial Sequence
  Description of Artificial Sequence: Synthetic oligonucleotide
uuuugacucgacucuucaa

SEQ ID NO: 778695 - RNA, 19 nt, Artificial Sequence
  Description of Artificial Sequence: Synthetic oligonucleotide
agagacgauggugcuggcc

SEQ ID NO: 778696 - RNA, 19 nt, Artificial Sequence
  Description of Artificial Sequence: Synthetic oligonucleotide
ugucuccagauuuccacaa

SEQ ID NO: 778697 - RNA, 19 nt, Artificial Sequence
  Description of Artificial Sequence: Synthetic oligonucleotide
uuauguccaguugcugucc

SEQ ID NO: 778698 - RNA, 19 nt, Artificial Sequence
  Description of Artificial Sequence: Synthetic oligonucleotide
caaugaugauccugcguac

SEQ ID NO: 778699 - RNA, 19 nt, Artificial Sequence
  Description of Artificial Sequence: Synthetic oligonucleotide
guaacagcucauccauuug

SEQ ID NO: 778700 - RNA, 19 nt, Artificial Sequence
  Description of Artificial Sequence: Synthetic oligonucleotide
agucugucacuucuugcca

SEQ ID NO: 778701 - RNA, 19 nt, Artificial Sequence
  Description of Artificial Sequence: Synthetic oligonucleotide
ccugaugccagcaucugag

SEQ ID NO: 778702 - RNA, 19 nt, Artificial Sequence
  Description of Artificial Sequence: Synthetic oligonucleotide
gaucuguuccaaggguggg

SEQ ID NO: 778703 - RNA, 19 nt, Artificial Sequence
  Description of Artificial Sequence: Synthetic oligonucleotide
ugauagggcuguucccugc

SEQ ID NO: 778704 - RNA, 19 nt, Artificial Sequence
  Description of Artificial Sequence: Synthetic oligonucleotide
agccgauacucuucaagca

SEQ ID NO: 778705 - RNA, 19 nt, Artificial Sequence
  Description of Artificial Sequence: Synthetic oligonucleotide
ugcauaaaaugagucuguc

SEQ ID NO: 778706 - RNA, 19 nt, Artificial Sequence
  Description of Artificial Sequence: Synthetic oligonucleotide
agcgcguuccccuucuugu

SEQ ID NO: 778707 - RNA, 19 nt, Artificial Sequence
  Description of Artificial Sequence: Synthetic oligonucleotide
cuguaccucaggcagacca

SEQ ID NO: 778708 - RNA, 19 nt, Artificial Sequence
  Description of Artificial Sequence: Synthetic oligonucleotide
aagcgcguuccccuucuug

SEQ ID NO: 778709 - RNA, 19 nt, Artificial Sequence
  Description of Artificial Sequence: Synthetic oligonucleotide
acaguagagggauuuuaua

SEQ ID NO: 778710 - RNA, 19 nt, Artificial Sequence
  Description of Artificial Sequence: Synthetic oligonucleotide
caggauaugaccacagugu

SEQ ID NO: 778711 - RNA, 19 nt, Artificial Sequence
  Description of Artificial Sequence: Synthetic oligonucleotide
acaucgcagcuggagagcg

SEQ ID NO: 778712 - RNA, 19 nt, Artificial Sequence
  Description of Artificial Sequence: Synthetic oligonucleotide
ucggcccgaaguuuucucc

SEQ ID NO: 778713 - RNA, 19 nt, Artificial Sequence
  Description of Artificial Sequence: Synthetic oligonucleotide
uuuauaucuggagggugau

SEQ ID NO: 778714 - RNA, 19 nt, Artificial Sequence
  Description of Artificial Sequence: Synthetic oligonucleotide
uauguccaguugcuguccu

SEQ ID NO: 778715 - RNA, 19 nt, Artificial Sequence
  Description of Artificial Sequence: Synthetic oligonucleotide
uaucaauuaccagcucaga

SEQ ID NO: 778716 - RNA, 19 nt, Artificial Sequence
  Description of Artificial Sequence: Synthetic oligonucleotide
ggccugaucuguuccaagg

SEQ ID NO: 778717 - RNA, 19 nt, Artificial Sequence
  Description of Artificial Sequence: Synthetic oligonucleotide
cucucaacccuggaggcag

SEQ ID NO: 778718 - RNA, 19 nt, Artificial Sequence
  Description of Artificial Sequence: Synthetic oligonucleotide
uguccgaccccuugauggc

SEQ ID NO: 778719 - RNA, 19 nt, Artificial Sequence
  Description of Artificial Sequence: Synthetic oligonucleotide
agugguccugauaagugug

SEQ ID NO: 778720 - RNA, 19 nt, Artificial Sequence
  Description of Artificial Sequence: Synthetic oligonucleotide
ucaauuggacagaguuuuc

SEQ ID NO: 778721 - RNA, 19 nt, Artificial Sequence
  Description of Artificial Sequence: Synthetic oligonucleotide
aaggcuggcagaagaucag

SEQ ID NO: 778722 - RNA, 19 nt, Artificial Sequence
  Description of Artificial Sequence: Synthetic oligonucleotide
auccugcguaccucacugc

SEQ ID NO: 778723 - RNA, 19 nt, Artificial Sequence
  Description of Artificial Sequence: Synthetic oligonucleotide
ucauaucaauuaccagcuc

SEQ ID NO: 778724 - RNA, 19 nt, Artificial Sequence
  Description of Artificial Sequence: Synthetic oligonucleotide
aucaggauaugaccacagu

SEQ ID NO: 778725 - RNA, 19 nt, Artificial Sequence
  Description of Artificial Sequence: Synthetic oligonucleotide
ugauccugcguaccucacu

SEQ ID NO: 778726 - RNA, 19 nt, Artificial Sequence
  Description of Artificial Sequence: Synthetic oligonucleotide
uacccuccuggacagucug

SEQ ID NO: 778727 - RNA, 19 nt, Artificial Sequence
  Description of Artificial Sequence: Synthetic oligonucleotide
cauaagauaggauccaauu

SEQ ID NO: 778728 - RNA, 19 nt, Artificial Sequence
  Description of Artificial Sequence: Synthetic oligonucleotide
gaggucgccuugcuguacc

SEQ ID NO: 778729 - RNA, 19 nt, Artificial Sequence
  Description of Artificial Sequence: Synthetic oligonucleotide
aucggcccgaaguuuucuc

SEQ ID NO: 778730 - RNA, 19 nt, Artificial Sequence
  Description of Artificial Sequence: Synthetic oligonucleotide
uuacaagccuucugugcaa

SEQ ID NO: 778731 - RNA, 19 nt, Artificial Sequence
  Description of Artificial Sequence: Synthetic oligonucleotide
ucaagcgcguuccccuucu

SEQ ID NO: 778732 - RNA, 19 nt, Artificial Sequence
  Description of Artificial Sequence: Synthetic oligonucleotide
guuccaaggguggggaaag

SEQ ID NO: 778733 - RNA, 19 nt, Artificial Sequence
  Description of Artificial Sequence: Synthetic oligonucleotide
agaauggguuccuguccag

SEQ ID NO: 778734 - RNA, 19 nt, Artificial Sequence
  Description of Artificial Sequence: Synthetic oligonucleotide
uacaagccuucugugcaag

SEQ ID NO: 778735 - RNA, 19 nt, Artificial Sequence
  Description of Artificial Sequence: Synthetic oligonucleotide
gaaggcucggggaugacaa

SEQ ID NO: 778736 - RNA, 19 nt, Artificial Sequence
  Description of Artificial Sequence: Synthetic oligonucleotide
cugccaaggagaguacuag

SEQ ID NO: 778737 - RNA, 19 nt, Artificial Sequence
  Description of Artificial Sequence: Synthetic oligonucleotide
gcgaacaugucugcuaggg

SEQ ID NO: 778738 - RNA, 19 nt, Artificial Sequence
  Description of Artificial Sequence: Synthetic oligonucleotide
acaugucugcuaggguagc

SEQ ID NO: 778739 - RNA, 19 nt, Artificial Sequence
  Description of Artificial Sequence: Synthetic oligonucleotide
agcgaacaugucugcuagg

SEQ ID NO: 778740 - RNA, 19 nt, Artificial Sequence
  Description of Artificial Sequence: Synthetic oligonucleotide
agaucaggauaugaccaca

SEQ ID NO: 778741 - RNA, 19 nt, Artificial Sequence
  Description of Artificial Sequence: Synthetic oligonucleotide
gaaggggcuugccauccac

SEQ ID NO: 778742 - RNA, 19 nt, Artificial Sequence
  Description of Artificial Sequence: Synthetic oligonucleotide
ugcuguaccucaggcagac

SEQ ID NO: 778743 - RNA, 19 nt, Artificial Sequence
  Description of Artificial Sequence: Synthetic oligonucleotide
cagcaucaaaucugcuccc

SEQ ID NO: 778744 - RNA, 19 nt, Artificial Sequence
  Description of Artificial Sequence: Synthetic oligonucleotide
guuggcugggacacaguag

SEQ ID NO: 778745 - RNA, 19 nt, Artificial Sequence
  Description of Artificial Sequence: Synthetic oligonucleotide
caaggcaugcaggaagcac

SEQ ID NO: 778746 - RNA, 19 nt, Artificial Sequence
  Description of Artificial Sequence: Synthetic oligonucleotide
cagaauggguuccugucca

SEQ ID NO: 778747 - RNA, 19 nt, Artificial Sequence
  Description of Artificial Sequence: Synthetic oligonucleotide
gugguccugauaagugugg

SEQ ID NO: 778748 - RNA, 19 nt, Artificial Sequence
  Description of Artificial Sequence: Synthetic oligonucleotide
caccuguagacugucuuug

SEQ ID NO: 778749 - RNA, 19 nt, Artificial Sequence
  Description of Artificial Sequence: Synthetic oligonucleotide
cacuccgauugcuacagga

SEQ ID NO: 778750 - RNA, 19 nt, Artificial Sequence
  Description of Artificial Sequence: Synthetic oligonucleotide
ugcguccccuuugugagca

SEQ ID NO: 778751 - RNA, 19 nt, Artificial Sequence
  Description of Artificial Sequence: Synthetic oligonucleotide
uucaccacguuuagcucuu

SEQ ID NO: 778752 - RNA, 19 nt, Artificial Sequence
  Description of Artificial Sequence: Synthetic oligonucleotide
agguaucaacucagaggcc

SEQ ID NO: 778753 - RNA, 19 nt, Artificial Sequence
  Description of Artificial Sequence: Synthetic oligonucleotide
ucgccuugcuguaccucag

SEQ ID NO: 778754 - RNA, 19 nt, Artificial Sequence
  Description of Artificial Sequence: Synthetic oligonucleotide
gucgccuugcuguaccuca

SEQ ID NO: 778755 - RNA, 19 nt, Artificial Sequence
  Description of Artificial Sequence: Synthetic oligonucleotide
gacaucgcagcuggagagc

SEQ ID NO: 778756 - RNA, 19 nt, Artificial Sequence
  Description of Artificial Sequence: Synthetic oligonucleotide
augggguucccuccacuca

SEQ ID NO: 778757 - RNA, 19 nt, Artificial Sequence
  Description of Artificial Sequence: Synthetic oligonucleotide
cugauaaguguggagcaca

SEQ ID NO: 778758 - RNA, 19 nt, Artificial Sequence
  Description of Artificial Sequence: Synthetic oligonucleotide
acuguuggauacaaauuuu

SEQ ID NO: 778759 - RNA, 19 nt, Artificial Sequence
  Description of Artificial Sequence: Synthetic oligonucleotide
uaggcaggcugcauauuuu

SEQ ID NO: 778760 - RNA, 19 nt, Artificial Sequence
  Description of Artificial Sequence: Synthetic oligonucleotide
cagcaucugagcuguggac

SEQ ID NO: 778761 - RNA, 19 nt, Artificial Sequence
  Description of Artificial Sequence: Synthetic oligonucleotide
ugcaagggugaugucaauu

SEQ ID NO: 778762 - RNA, 19 nt, Artificial Sequence
  Description of Artificial Sequence: Synthetic oligonucleotide
cugcuacccuccuggacag

SEQ ID NO: 778763 - RNA, 19 nt, Artificial Sequence
  Description of Artificial Sequence: Synthetic oligonucleotide
cacugcauaaaaugagucu

SEQ ID NO: 778764 - RNA, 19 nt, Artificial Sequence
  Description of Artificial Sequence: Synthetic oligonucleotide
cacuguuggauacaaauuu

SEQ ID NO: 778765 - RNA, 19 nt, Artificial Sequence
  Description of Artificial Sequence: Synthetic oligonucleotide
cugacaucgcagcuggaga

SEQ ID NO: 778766 - RNA, 19 nt, Artificial Sequence
  Description of Artificial Sequence: Synthetic oligonucleotide
augugacugccaaggagag

SEQ ID NO: 778767 - RNA, 19 nt, Artificial Sequence
  Description of Artificial Sequence: Synthetic oligonucleotide
aaacgaggguguggcagcu

SEQ ID NO: 778768 - RNA, 19 nt, Artificial Sequence
  Description of Artificial Sequence: Synthetic oligonucleotide
ugcuaggguagcccaggaa

SEQ ID NO: 778769 - RNA, 19 nt, Artificial Sequence
  Description of Artificial Sequence: Synthetic oligonucleotide
aaacgucacuugguaggca

SEQ ID NO: 778770 - RNA, 19 nt, Artificial Sequence
  Description of Artificial Sequence: Synthetic oligonucleotide
cucgacucuucaaggcaug

SEQ ID NO: 778771 - RNA, 19 nt, Artificial Sequence
  Description of Artificial Sequence: Synthetic oligonucleotide
gacuucuuuauguccaguu

SEQ ID NO: 778772 - RNA, 19 nt, Artificial Sequence
  Description of Artificial Sequence: Synthetic oligonucleotide
gacuugacccgaaaggccu

SEQ ID NO: 778773 - RNA, 19 nt, Artificial Sequence
  Description of Artificial Sequence: Synthetic oligonucleotide
caccacuaccccuggcagc

SEQ ID NO: 778774 - RNA, 19 nt, Artificial Sequence
  Description of Artificial Sequence: Synthetic oligonucleotide
cacugcguccccuuuguga

SEQ ID NO: 778775 - RNA, 19 nt, Artificial Sequence
  Description of Artificial Sequence: Synthetic oligonucleotide
uccucucccuccaggguaa

SEQ ID NO: 778776 - RNA, 19 nt, Artificial Sequence
  Description of Artificial Sequence: Synthetic oligonucleotide
caccacguuuagcucuucc

SEQ ID NO: 778777 - RNA, 19 nt, Artificial Sequence
  Description of Artificial Sequence: Synthetic oligonucleotide
cagccacuccgauugcuac

SEQ ID NO: 778778 - RNA, 19 nt, Artificial Sequence
  Description of Artificial Sequence: Synthetic oligonucleotide
gccuuagcgaacaugucug

SEQ ID NO: 778779 - RNA, 19 nt, Artificial Sequence
  Description of Artificial Sequence: Synthetic oligonucleotide
guaucaacucagaggccug

SEQ ID NO: 778780 - RNA, 19 nt, Artificial Sequence
  Description of Artificial Sequence: Synthetic oligonucleotide
ugacugccaaggagaguac

SEQ ID NO: 778781 - RNA, 19 nt, Artificial Sequence
  Description of Artificial Sequence: Synthetic oligonucleotide
cagaaccuggguucccaug

SEQ ID NO: 778782 - RNA, 19 nt, Artificial Sequence
  Description of Artificial Sequence: Synthetic oligonucleotide
gcagucacauaagauagga

SEQ ID NO: 778783 - RNA, 19 nt, Artificial Sequence
  Description of Artificial Sequence: Synthetic oligonucleotide
gauuuccacaagugguccu

SEQ ID NO: 778784 - RNA, 19 nt, Artificial Sequence
  Description of Artificial Sequence: Synthetic oligonucleotide
gauaaguguggagcacaga

SEQ ID NO: 778785 - RNA, 19 nt, Artificial Sequence
  Description of Artificial Sequence: Synthetic oligonucleotide
ccacaagugguccugauaa

SEQ ID NO: 778786 - RNA, 19 nt, Artificial Sequence
  Description of Artificial Sequence: Synthetic oligonucleotide
gucacuucuugccagguuu

SEQ ID NO: 778787 - RNA, 19 nt, Artificial Sequence
  Description of Artificial Sequence: Synthetic oligonucleotide
gguaucaacucagaggccu

SEQ ID NO: 778788 - RNA, 19 nt, Artificial Sequence
  Description of Artificial Sequence: Synthetic oligonucleotide
ccacugcauaaaaugaguc

SEQ ID NO: 778789 - RNA, 19 nt, Artificial Sequence
  Description of Artificial Sequence: Synthetic oligonucleotide
cagggagccgauacucuuc

SEQ ID NO: 778790 - RNA, 19 nt, Artificial Sequence
  Description of Artificial Sequence: Synthetic oligonucleotide
gccauguuguaaaggcugg

SEQ ID NO: 778791 - RNA, 19 nt, Artificial Sequence
  Description of Artificial Sequence: Synthetic oligonucleotide
ugauccucgggugccucca

SEQ ID NO: 778792 - RNA, 19 nt, Artificial Sequence
  Description of Artificial Sequence: Synthetic oligonucleotide
agaggucgccuugcuguac

SEQ ID NO: 778793 - RNA, 19 nt, Artificial Sequence
  Description of Artificial Sequence: Synthetic oligonucleotide
aacgaggguguggcagcuc

SEQ ID NO: 778794 - RNA, 19 nt, Artificial Sequence
  Description of Artificial Sequence: Synthetic oligonucleotide
agacuaagguccaccuucu

SEQ ID NO: 778795 - RNA, 19 nt, Artificial Sequence
  Description of Artificial Sequence: Synthetic oligonucleotide
acacaguagagggauuuua

SEQ ID NO: 778796 - RNA, 19 nt, Artificial Sequence
  Description of Artificial Sequence: Synthetic oligonucleotide
cuggccaaggugguggauc

SEQ ID NO: 778797 - RNA, 19 nt, Artificial Sequence
  Description of Artificial Sequence: Synthetic oligonucleotide
uccuguccgaccccuugau

SEQ ID NO: 778798 - RNA, 19 nt, Artificial Sequence
  Description of Artificial Sequence: Synthetic oligonucleotide
ugcuaucugugggauucac

SEQ ID NO: 778799 - RNA, 19 nt, Artificial Sequence
  Description of Artificial Sequence: Synthetic oligonucleotide
gucaaugaugauccugcgu

SEQ ID NO: 778800 - RNA, 19 nt, Artificial Sequence
  Description of Artificial Sequence: Synthetic oligonucleotide
uugacccgaaaggccuuag

SEQ ID NO: 778801 - RNA, 19 nt, Artificial Sequence
  Description of Artificial Sequence: Synthetic oligonucleotide
ccguguuggacuugacccg

SEQ ID NO: 778802 - RNA, 19 nt, Artificial Sequence
  Description of Artificial Sequence: Synthetic oligonucleotide
uuauaucuggagggugaua

SEQ ID NO: 778803 - RNA, 19 nt, Artificial Sequence
  Description of Artificial Sequence: Synthetic oligonucleotide
guaccagaggccauguugu

SEQ ID NO: 778804 - RNA, 19 nt, Artificial Sequence
  Description of Artificial Sequence: Synthetic oligonucleotide
aaguaccagaggccauguu

SEQ ID NO: 778805 - RNA, 19 nt, Artificial Sequence
  Description of Artificial Sequence: Synthetic oligonucleotide
ucuaggccuuggauguauu

SEQ ID NO: 778806 - RNA, 19 nt, Artificial Sequence
  Description of Artificial Sequence: Synthetic oligonucleotide
gagcggcagccacugagca

SEQ ID NO: 778807 - RNA, 19 nt, Artificial Sequence
  Description of Artificial Sequence: Synthetic oligonucleotide
acucgacucuucaaggcau

SEQ ID NO: 778808 - RNA, 19 nt, Artificial Sequence
  Description of Artificial Sequence: Synthetic oligonucleotide
ccugcuacccuccuggaca

SEQ ID NO: 778809 - RNA, 19 nt, Artificial Sequence
  Description of Artificial Sequence: Synthetic oligonucleotide
augauccugcguaccucac

SEQ ID NO: 778810 - RNA, 19 nt, Artificial Sequence
  Description of Artificial Sequence: Synthetic oligonucleotide
ugaggacccgacgccaaaa

SEQ ID NO: 778811 - RNA, 19 nt, Artificial Sequence
  Description of Artificial Sequence: Synthetic oligonucleotide
aaggcucggggaugacaaa

SEQ ID NO: 778812 - RNA, 19 nt, Artificial Sequence
  Description of Artificial Sequence: Synthetic oligonucleotide
guucuugaaggggcuugcc

SEQ ID NO: 778813 - RNA, 19 nt, Artificial Sequence
  Description of Artificial Sequence: Synthetic oligonucleotide
gauccaauuucaccagauu

SEQ ID NO: 778814 - RNA, 19 nt, Artificial Sequence
  Description of Artificial Sequence: Synthetic oligonucleotide
cuucagaauggguuccugu

SEQ ID NO: 778815 - RNA, 19 nt, Artificial Sequence
  Description of Artificial Sequence: Synthetic oligonucleotide
ggggaugacaaaagaugug

SEQ ID NO: 778816 - RNA, 19 nt, Artificial Sequence
  Description of Artificial Sequence: Synthetic oligonucleotide
gacuaagguccaccuucuc

SEQ ID NO: 778817 - RNA, 19 nt, Artificial Sequence
  Description of Artificial Sequence: Synthetic oligonucleotide
cugcauaaaaugagucugu

SEQ ID NO: 778818 - RNA, 19 nt, Artificial Sequence
  Description of Artificial Sequence: Synthetic oligonucleotide
acgucacuugguaggcagg

SEQ ID NO: 778819 - RNA, 19 nt, Artificial Sequence
  Description of Artificial Sequence: Synthetic oligonucleotide
gagcaaagggaggucagcu

SEQ ID NO: 778820 - RNA, 19 nt, Artificial Sequence
  Description of Artificial Sequence: Synthetic oligonucleotide
cuugcagacuaagguccac

SEQ ID NO: 778821 - RNA, 19 nt, Artificial Sequence
  Description of Artificial Sequence: Synthetic oligonucleotide
ccuuugugagcauacaacu

SEQ ID NO: 778822 - RNA, 19 nt, Artificial Sequence
  Description of Artificial Sequence: Synthetic oligonucleotide
ccugacaucgcagcuggag

SEQ ID NO: 778823 - RNA, 19 nt, Artificial Sequence
  Description of Artificial Sequence: Synthetic oligonucleotide
uccccuuugugagcauaca

SEQ ID NO: 778824 - RNA, 19 nt, Artificial Sequence
  Description of Artificial Sequence: Synthetic oligonucleotide
guaggcaggcugcauauuu

SEQ ID NO: 778825 - RNA, 19 nt, Artificial Sequence
  Description of Artificial Sequence: Synthetic oligonucleotide
gccgauacucuucaagcaa

SEQ ID NO: 778826 - RNA, 19 nt, Artificial Sequence
  Description of Artificial Sequence: Synthetic oligonucleotide
gccacuccgauugcuacag

SEQ ID NO: 778827 - RNA, 19 nt, Artificial Sequence
  Description of Artificial Sequence: Synthetic oligonucleotide
cuuugugagcauacaacuu

SEQ ID NO: 778828 - RNA, 19 nt, Artificial Sequence
  Description of Artificial Sequence: Synthetic oligonucleotide
acaucggcccgaaguuuuc

SEQ ID NO: 778829 - RNA, 19 nt, Artificial Sequence
  Description of Artificial Sequence: Synthetic oligonucleotide
ccuuagcgaacaugucugc

SEQ ID NO: 778830 - RNA, 19 nt, Artificial Sequence
  Description of Artificial Sequence: Synthetic oligonucleotide
cacaguagagggauuuuau

SEQ ID NO: 778831 - RNA, 19 nt, Artificial Sequence
  Description of Artificial Sequence: Synthetic oligonucleotide
cucggggaugacaaaagau

SEQ ID NO: 778832 - RNA, 19 nt, Artificial Sequence
  Description of Artificial Sequence: Synthetic oligonucleotide
gccagcaucugagcugugg

SEQ ID NO: 778833 - RNA, 19 nt, Artificial Sequence
  Description of Artificial Sequence: Synthetic oligonucleotide
gagggugauagggcuguuc

SEQ ID NO: 778834 - RNA, 19 nt, Artificial Sequence
  Description of Artificial Sequence: Synthetic oligonucleotide
caaacaggaugggguuccc

SEQ ID NO: 778835 - RNA, 19 nt, Artificial Sequence
  Description of Artificial Sequence: Synthetic oligonucleotide
caggaacagucagcaaaac

SEQ ID NO: 778836 - RNA, 19 nt, Artificial Sequence
  Description of Artificial Sequence: Synthetic oligonucleotide
ccugcguaccucacugccc

SEQ ID NO: 778837 - RNA, 19 nt, Artificial Sequence
  Description of Artificial Sequence: Synthetic oligonucleotide
guccccuuugugagcauac

SEQ ID NO: 778838 - RNA, 19 nt, Artificial Sequence
  Description of Artificial Sequence: Synthetic oligonucleotide
aggccuuagcgaacauguc

SEQ ID NO: 778839 - RNA, 19 nt, Artificial Sequence
  Description of Artificial Sequence: Synthetic oligonucleotide
auggcacagaggucgccuu

SEQ ID NO: 778840 - RNA, 19 nt, Artificial Sequence
  Description of Artificial Sequence: Synthetic oligonucleotide
ugugauccucgggugccuc

SEQ ID NO: 778841 - RNA, 19 nt, Artificial Sequence
  Description of Artificial Sequence: Synthetic oligonucleotide
cucaagcgcguuccccuuc

SEQ ID NO: 778842 - RNA, 19 nt, Artificial Sequence
  Description of Artificial Sequence: Synthetic oligonucleotide
cugcguccccuuugugagc

SEQ ID NO: 778843 - RNA, 19 nt, Artificial Sequence
  Description of Artificial Sequence: Synthetic oligonucleotide
cacuaccccuggcagcauc

SEQ ID NO: 778844 - RNA, 19 nt, Artificial Sequence
  Description of Artificial Sequence: Synthetic oligonucleotide
guuccggaccacagucacc

SEQ ID NO: 778845 - RNA, 19 nt, Artificial Sequence
  Description of Artificial Sequence: Synthetic oligonucleotide
guguacacuguuggauaca

SEQ ID NO: 778846 - RNA, 19 nt, Artificial Sequence
  Description of Artificial Sequence: Synthetic oligonucleotide
agcggcagccacugagcau

SEQ ID NO: 778847 - RNA, 19 nt, Artificial Sequence
  Description of Artificial Sequence: Synthetic oligonucleotide
aucaaguaccagaggccau

SEQ ID NO: 778848 - RNA, 19 nt, Artificial Sequence
  Description of Artificial Sequence: Synthetic oligonucleotide
aggucgccuugcuguaccu

SEQ ID NO: 778849 - RNA, 19 nt, Artificial Sequence
  Description of Artificial Sequence: Synthetic oligonucleotide
cugcguaccucacugcccu

SEQ ID NO: 778850 - RNA, 19 nt, Artificial Sequence
  Description of Artificial Sequence: Synthetic oligonucleotide
ccagcuuaucaaguaccag

SEQ ID NO: 778851 - RNA, 19 nt, Artificial Sequence
  Description of Artificial Sequence: Synthetic oligonucleotide
guaaaggcuggcagaagau

SEQ ID NO: 778852 - RNA, 19 nt, Artificial Sequence
  Description of Artificial Sequence: Synthetic oligonucleotide
ccugauaaguguggagcac

SEQ ID NO: 778853 - RNA, 19 nt, Artificial Sequence
  Description of Artificial Sequence: Synthetic oligonucleotide
gccuuggauguauuuucca

SEQ ID NO: 778854 - RNA, 19 nt, Artificial Sequence
  Description of Artificial Sequence: Synthetic oligonucleotide
cuuagcgaacaugucugcu

SEQ ID NO: 778855 - RNA, 19 nt, Artificial Sequence
  Description of Artificial Sequence: Synthetic oligonucleotide
cacugagcaugggucaaga

SEQ ID NO: 778856 - RNA, 19 nt, Artificial Sequence
  Description of Artificial Sequence: Synthetic oligonucleotide
cgaccagcuuaucaaguac

SEQ ID NO: 778857 - RNA, 19 nt, Artificial Sequence
  Description of Artificial Sequence: Synthetic oligonucleotide
cuccuguccgaccccuuga

SEQ ID NO: 778858 - RNA, 19 nt, Artificial Sequence
  Description of Artificial Sequence: Synthetic oligonucleotide
ccccgaccagcuuaucaag

SEQ ID NO: 778859 - RNA, 19 nt, Artificial Sequence
  Description of Artificial Sequence: Synthetic oligonucleotide
caagaccauaggucuccaa

SEQ ID NO: 778860 - RNA, 19 nt, Artificial Sequence
  Description of Artificial Sequence: Synthetic oligonucleotide
gacugccaaggagaguacu

SEQ ID NO: 778861 - RNA, 19 nt, Artificial Sequence
  Description of Artificial Sequence: Synthetic oligonucleotide
gcuacccuccuggacaguc

SEQ ID NO: 778862 - RNA, 19 nt, Artificial Sequence
  Description of Artificial Sequence: Synthetic oligonucleotide
ggagaguacuagugagcaa

SEQ ID NO: 778863 - RNA, 19 nt, Artificial Sequence
  Description of Artificial Sequence: Synthetic oligonucleotide
ccgaaaggccuuagcgaac

SEQ ID NO: 778864 - RNA, 19 nt, Artificial Sequence
  Description of Artificial Sequence: Synthetic oligonucleotide
ccucgggugccuccagucc

SEQ ID NO: 778865 - RNA, 19 nt, Artificial Sequence
  Description of Artificial Sequence: Synthetic oligonucleotide
agacugucuuuggccccag

SEQ ID NO: 778866 - RNA, 19 nt, Artificial Sequence
  Description of Artificial Sequence: Synthetic oligonucleotide
ugcguaccucacugcccuc

SEQ ID NO: 778867 - RNA, 19 nt, Artificial Sequence
  Description of Artificial Sequence: Synthetic oligonucleotide
cguuuagcucuuccuuccc

SEQ ID NO: 778868 - RNA, 19 nt, Artificial Sequence
  Description of Artificial Sequence: Synthetic oligonucleotide
caacccuggaggcagccau

SEQ ID NO: 778869 - RNA, 19 nt, Artificial Sequence
  Description of Artificial Sequence: Synthetic oligonucleotide
cacaucggcccgaaguuuu

SEQ ID NO: 778870 - RNA, 19 nt, Artificial Sequence
  Description of Artificial Sequence: Synthetic oligonucleotide
uggccguguuggacuugac

SEQ ID NO: 778871 - RNA, 19 nt, Artificial Sequence
  Description of Artificial Sequence: Synthetic oligonucleotide
ggauaugaccacagugugu

SEQ ID NO: 778872 - RNA, 19 nt, Artificial Sequence
  Description of Artificial Sequence: Synthetic oligonucleotide
cccgaaguuuucuccuguc

SEQ ID NO: 778873 - RNA, 19 nt, Artificial Sequence
  Description of Artificial Sequence: Synthetic oligonucleotide
gcuucugggugaugaaccu

SEQ ID NO: 778874 - RNA, 19 nt, Artificial Sequence
  Description of Artificial Sequence: Synthetic oligonucleotide
cugcuaggguagcccagga

SEQ ID NO: 778875 - RNA, 19 nt, Artificial Sequence
  Description of Artificial Sequence: Synthetic oligonucleotide
agcggucacaucggcccga

SEQ ID NO: 778876 - RNA, 19 nt, Artificial Sequence
  Description of Artificial Sequence: Synthetic oligonucleotide
acaaugcuuuccacuccuu

SEQ ID NO: 778877 - RNA, 19 nt, Artificial Sequence
  Description of Artificial Sequence: Synthetic oligonucleotide
ggaugacaaaagaugugau

SEQ ID NO: 778878 - RNA, 19 nt, Artificial Sequence
  Description of Artificial Sequence: Synthetic oligonucleotide
cuaggccuuggauguauuu

SEQ ID NO: 778879 - RNA, 19 nt, Artificial Sequence
  Description of Artificial Sequence: Synthetic oligonucleotide
cagaggucgccuugcugua

SEQ ID NO: 778880 - RNA, 19 nt, Artificial Sequence
  Description of Artificial Sequence: Synthetic oligonucleotide
cuacccuccuggacagucu

SEQ ID NO: 778881 - RNA, 19 nt, Artificial Sequence
  Description of Artificial Sequence: Synthetic oligonucleotide
cugaggacccgacgccaaa

SEQ ID NO: 778882 - RNA, 19 nt, Artificial Sequence
  Description of Artificial Sequence: Synthetic oligonucleotide
ccuguccgaccccuugaug

SEQ ID NO: 778883 - RNA, 19 nt, Artificial Sequence
  Description of Artificial Sequence: Synthetic oligonucleotide
ggacagaguuuuccuuucu

SEQ ID NO: 778884 - RNA, 19 nt, Artificial Sequence
  Description of Artificial Sequence: Synthetic oligonucleotide
ccaccaaggcaauggcaca

SEQ ID NO: 778885 - RNA, 19 nt, Artificial Sequence
  Description of Artificial Sequence: Synthetic oligonucleotide
cauggcagccacuccgauu

SEQ ID NO: 778886 - RNA, 19 nt, Artificial Sequence
  Description of Artificial Sequence: Synthetic oligonucleotide
ucaccacguuuagcucuuc

SEQ ID NO: 778887 - RNA, 19 nt, Artificial Sequence
  Description of Artificial Sequence: Synthetic oligonucleotide
ccgauugcuacaggagcuc

SEQ ID NO: 778888 - RNA, 19 nt, Artificial Sequence
  Description of Artificial Sequence: Synthetic oligonucleotide
ccccuuugugagcauacaa

SEQ ID NO: 778889 - RNA, 19 nt, Artificial Sequence
  Description of Artificial Sequence: Synthetic oligonucleotide
caaggugguggaucugguu

SEQ ID NO: 778890 - RNA, 19 nt, Artificial Sequence
  Description of Artificial Sequence: Synthetic oligonucleotide
ggacacaguagagggauuu

SEQ ID NO: 778891 - RNA, 19 nt, Artificial Sequence
  Description of Artificial Sequence: Synthetic oligonucleotide
cgaaaggccuuagcgaaca

SEQ ID NO: 778892 - RNA, 19 nt, Artificial Sequence
  Description of Artificial Sequence: Synthetic oligonucleotide
cccugcuacccuccuggac

SEQ ID NO: 778893 - RNA, 19 nt, Artificial Sequence
  Description of Artificial Sequence: Synthetic oligonucleotide
ugcuacccuccuggacagu

SEQ ID NO: 778894 - RNA, 19 nt, Artificial Sequence
  Description of Artificial Sequence: Synthetic oligonucleotide
uccggaccacagucaccuu

SEQ ID NO: 778895 - RNA, 19 nt, Artificial Sequence
  Description of Artificial Sequence: Synthetic oligonucleotide
ccgauacucuucaagcaau

SEQ ID NO: 778896 - RNA, 19 nt, Artificial Sequence
  Description of Artificial Sequence: Synthetic oligonucleotide
gcuaucugugggauucacu

SEQ ID NO: 778897 - RNA, 19 nt, Artificial Sequence
  Description of Artificial Sequence: Synthetic oligonucleotide
ggcuguucccugcuacccu

SEQ ID NO: 778898 - RNA, 19 nt, Artificial Sequence
  Description of Artificial Sequence: Synthetic oligonucleotide
gggguucccuccacucaug

SEQ ID NO: 778899 - RNA, 19 nt, Artificial Sequence
  Description of Artificial Sequence: Synthetic oligonucleotide
ccacuccgauugcuacagg

SEQ ID NO: 778900 - RNA, 19 nt, Artificial Sequence
  Description of Artificial Sequence: Synthetic oligonucleotide
guguuggacuugacccgaa

SEQ ID NO: 778901 - RNA, 19 nt, Artificial Sequence
  Description of Artificial Sequence: Synthetic oligonucleotide
ggucgccuugcuguaccuc

SEQ ID NO: 778902 - RNA, 19 nt, Artificial Sequence
  Description of Artificial Sequence: Synthetic oligonucleotide
ccaaguuccggaccacagu

SEQ ID NO: 778903 - RNA, 19 nt, Artificial Sequence
  Description of Artificial Sequence: Synthetic oligonucleotide
gcagccacuccgauugcua

SEQ ID NO: 778904 - RNA, 19 nt, Artificial Sequence
  Description of Artificial Sequence: Synthetic oligonucleotide
ccacguuuagcucuuccuu

SEQ ID NO: 778905 - RNA, 19 nt, Artificial Sequence
  Description of Artificial Sequence: Synthetic oligonucleotide
cugcaccuguagacugucu

SEQ ID NO: 778906 - RNA, 19 nt, Artificial Sequence
  Description of Artificial Sequence: Synthetic oligonucleotide
cguguuggacuugacccga

SEQ ID NO: 778907 - RNA, 19 nt, Artificial Sequence
  Description of Artificial Sequence: Synthetic oligonucleotide
caucggcccgaaguuuucu

SEQ ID NO: 778908 - RNA, 19 nt, Artificial Sequence
  Description of Artificial Sequence: Synthetic oligonucleotide
ccaugggauccacugcaua

SEQ ID NO: 778909 - RNA, 19 nt, Artificial Sequence
  Description of Artificial Sequence: Synthetic oligonucleotide
ccacuccuuugcucagcuc

SEQ ID NO: 778910 - RNA, 19 nt, Artificial Sequence
  Description of Artificial Sequence: Synthetic oligonucleotide
cccgaccagcuuaucaagu

SEQ ID NO: 778911 - RNA, 19 nt, Artificial Sequence
  Description of Artificial Sequence: Synthetic oligonucleotide
ccggaccacagucaccuuu

SEQ ID NO: 778912 - RNA, 19 nt, Artificial Sequence
  Description of Artificial Sequence: Synthetic oligonucleotide
gcggucacaucggcccgaa

SEQ ID NO: 778913 - RNA, 19 nt, Artificial Sequence
  Description of Artificial Sequence: Synthetic oligonucleotide
cggucacaucggcccgaag

SEQ ID NO: 778914 - RNA, 19 nt, Artificial Sequence
  Description of Artificial Sequence: Synthetic oligonucleotide
caagcgcguuccccuucuu

SEQ ID NO: 778915 - RNA, 19 nt, Artificial Sequence
  Description of Artificial Sequence: Synthetic oligonucleotide
caggggcaggagagacgau

SEQ ID NO: 778916 - RNA, 19 nt, Artificial Sequence
  Description of Artificial Sequence: Synthetic oligonucleotide
gggacacaguagagggauu

SEQ ID NO: 778917 - RNA, 19 nt, Artificial Sequence
  Description of Artificial Sequence: Synthetic oligonucleotide
cgaccccuugauggccgug

SEQ ID NO: 778918 - RNA, 19 nt, Artificial Sequence
  Description of Artificial Sequence: Synthetic oligonucleotide
cguccccuuugugagcaua

SEQ ID NO: 778919 - RNA, 19 nt, Artificial Sequence
  Description of Artificial Sequence: Synthetic oligonucleotide
ccgaccccuugauggccgu

SEQ ID NO: 778920 - RNA, 19 nt, Artificial Sequence
  Description of Artificial Sequence: Synthetic oligonucleotide
gcguccccuuugugagcau

SEQ ID NO: 778921 - RNA, 19 nt, Artificial Sequence
  Description of Artificial Sequence: Synthetic oligonucleotide
uuuauuaccagcaagauuu

SEQ ID NO: 778922 - RNA, 19 nt, Artificial Sequence
  Description of Artificial Sequence: Synthetic oligonucleotide
aaugccaccaacaugaggc

SEQ ID NO: 778923 - RNA, 19 nt, Artificial Sequence
  Description of Artificial Sequence: Synthetic oligonucleotide
uuggguaucaacuacagug

SEQ ID NO: 778924 - RNA, 19 nt, Artificial Sequence
  Description of Artificial Sequence: Synthetic oligonucleotide
ucuuacuacacacaaagga

SEQ ID NO: 778925 - RNA, 19 nt, Artificial Sequence
  Description of Artificial Sequence: Synthetic oligonucleotide
auuacacuaauguagcaac

SEQ ID NO: 778926 - RNA, 19 nt, Artificial Sequence
  Description of Artificial Sequence: Synthetic oligonucleotide
acaacuaauauuugggagg

SEQ ID NO: 778927 - RNA, 19 nt, Artificial Sequence
  Description of Artificial Sequence: Synthetic oligonucleotide
aaaagauaacgccaaacca

SEQ ID NO: 778928 - RNA, 19 nt, Artificial Sequence
  Description of Artificial Sequence: Synthetic oligonucleotide
uuuucagaaaauucggucc

SEQ ID NO: 778929 - RNA, 19 nt, Artificial Sequence
  Description of Artificial Sequence: Synthetic oligonucleotide
acaguggaggcuuugacgc

SEQ ID NO: 778930 - RNA, 19 nt, Artificial Sequence
  Description of Artificial Sequence: Synthetic oligonucleotide
acuaauguagcaacaaugc

SEQ ID NO: 778931 - RNA, 19 nt, Artificial Sequence
  Description of Artificial Sequence: Synthetic oligonucleotide
uuuaucauccaauggagca

SEQ ID NO: 778932 - RNA, 19 nt, Artificial Sequence
  Description of Artificial Sequence: Synthetic oligonucleotide
acucuuaaggaauauagug

SEQ ID NO: 778933 - RNA, 19 nt, Artificial Sequence
  Description of Artificial Sequence: Synthetic oligonucleotide
ugauccaacaggaauacca

SEQ ID NO: 778934 - RNA, 19 nt, Artificial Sequence
  Description of Artificial Sequence: Synthetic oligonucleotide
acuaaaagcagccagacuu

SEQ ID NO: 778935 - RNA, 19 nt, Artificial Sequence
  Description of Artificial Sequence: Synthetic oligonucleotide
cucauuugagacuugauac

SEQ ID NO: 778936 - RNA, 19 nt, Artificial Sequence
  Description of Artificial Sequence: Synthetic oligonucleotide
guaguugcaaaauaaauca

SEQ ID NO: 778937 - RNA, 19 nt, Artificial Sequence
  Description of Artificial Sequence: Synthetic oligonucleotide
uugauacuguccaagaagc

SEQ ID NO: 778938 - RNA, 19 nt, Artificial Sequence
  Description of Artificial Sequence: Synthetic oligonucleotide
uuuaaaacugcguaucacu

SEQ ID NO: 778939 - RNA, 19 nt, Artificial Sequence
  Description of Artificial Sequence: Synthetic oligonucleotide
aaaacugcguaucacucug

SEQ ID NO: 778940 - RNA, 19 nt, Artificial Sequence
  Description of Artificial Sequence: Synthetic oligonucleotide
uacaacuagagcuucagac

SEQ ID NO: 778941 - RNA, 19 nt, Artificial Sequence
  Description of Artificial Sequence: Synthetic oligonucleotide
aaaaugaguuguuacgaga

SEQ ID NO: 778942 - RNA, 19 nt, Artificial Sequence
  Description of Artificial Sequence: Synthetic oligonucleotide
uaauguagcaacaaugcau

SEQ ID NO: 778943 - RNA, 19 nt, Artificial Sequence
  Description of Artificial Sequence: Synthetic oligonucleotide
acuaguaagaacuacuaaa

SEQ ID NO: 778944 - RNA, 19 nt, Artificial Sequence
  Description of Artificial Sequence: Synthetic oligonucleotide
uguagcuaaaaucucauuu

SEQ ID NO: 778945 - RNA, 19 nt, Artificial Sequence
  Description of Artificial Sequence: Synthetic oligonucleotide
uuaguagucaauuugcaua

SEQ ID NO: 778946 - RNA, 19 nt, Artificial Sequence
  Description of Artificial Sequence: Synthetic oligonucleotide
aagaacuaccuuuucauau

SEQ ID NO: 778947 - RNA, 19 nt, Artificial Sequence
  Description of Artificial Sequence: Synthetic oligonucleotide
uuuucgugaacauuuacaa

SEQ ID NO: 778948 - RNA, 19 nt, Artificial Sequence
  Description of Artificial Sequence: Synthetic oligonucleotide
auuugcauaaaacaccaga

SEQ ID NO: 778949 - RNA, 19 nt, Artificial Sequence
  Description of Artificial Sequence: Synthetic oligonucleotide
guaagaacuacuaaaagca

SEQ ID NO: 778950 - RNA, 19 nt, Artificial Sequence
  Description of Artificial Sequence: Synthetic oligonucleotide
uggguaucaacuacagugg

SEQ ID NO: 778951 - RNA, 19 nt, Artificial Sequence
  Description of Artificial Sequence: Synthetic oligonucleotide
uaacgccaaaccaagaagc

SEQ ID NO: 778952 - RNA, 19 nt, Artificial Sequence
  Description of Artificial Sequence: Synthetic oligonucleotide
uaugcauauaacagaagcu

SEQ ID NO: 778953 - RNA, 19 nt, Artificial Sequence
  Description of Artificial Sequence: Synthetic oligonucleotide
uguuacgagaagaacuacc

SEQ ID NO: 778954 - RNA, 19 nt, Artificial Sequence
  Description of Artificial Sequence: Synthetic oligonucleotide
cugcguaucacucugacug

SEQ ID NO: 778955 - RNA, 19 nt, Artificial Sequence
  Description of Artificial Sequence: Synthetic oligonucleotide
guaucaacuacaguggagg

SEQ ID NO: 778956 - RNA, 19 nt, Artificial Sequence
  Description of Artificial Sequence: Synthetic oligonucleotide
aauucgguccuucuacaag

SEQ ID NO: 778957 - RNA, 19 nt, Artificial Sequence
  Description of Artificial Sequence: Synthetic oligonucleotide
aacaacuaguaagaacuac

SEQ ID NO: 778958 - RNA, 19 nt, Artificial Sequence
  Description of Artificial Sequence: Synthetic oligonucleotide
cauauuguucucauuaguc

SEQ ID NO: 778959 - RNA, 19 nt, Artificial Sequence
  Description of Artificial Sequence: Synthetic oligonucleotide
aaugugauggaaauagaca

SEQ ID NO: 778960 - RNA, 19 nt, Artificial Sequence
  Description of Artificial Sequence: Synthetic oligonucleotide
cacauuacacuaauguagc

SEQ ID NO: 778961 - RNA, 19 nt, Artificial Sequence
  Description of Artificial Sequence: Synthetic oligonucleotide
ucauaaauuggguaucaac

SEQ ID NO: 778962 - RNA, 19 nt, Artificial Sequence
  Description of Artificial Sequence: Synthetic oligonucleotide
aaagauaacgccaaaccaa

SEQ ID NO: 778963 - RNA, 19 nt, Artificial Sequence
  Description of Artificial Sequence: Synthetic oligonucleotide
auauuguucucauuaguca

SEQ ID NO: 778964 - RNA, 19 nt, Artificial Sequence
  Description of Artificial Sequence: Synthetic oligonucleotide
aaugaguuguuacgagaag

SEQ ID NO: 778965 - RNA, 19 nt, Artificial Sequence
  Description of Artificial Sequence: Synthetic oligonucleotide
uucauauuguucucauuag

SEQ ID NO: 778966 - RNA, 19 nt, Artificial Sequence
  Description of Artificial Sequence: Synthetic oligonucleotide
uugagaaugggccucuuac

SEQ ID NO: 778967 - RNA, 19 nt, Artificial Sequence
  Description of Artificial Sequence: Synthetic oligonucleotide
auaacgccaaaccaagaag

SEQ ID NO: 778968 - RNA, 19 nt, Artificial Sequence
  Description of Artificial Sequence: Synthetic oligonucleotide
ucuuacuaggcgcugcugc

SEQ ID NO: 778969 - RNA, 19 nt, Artificial Sequence
  Description of Artificial Sequence: Synthetic oligonucleotide
cacuaauguagcaacaaug

SEQ ID NO: 778970 - RNA, 19 nt, Artificial Sequence
  Description of Artificial Sequence: Synthetic oligonucleotide
cacaacuaauauuugggag

SEQ ID NO: 778971 - RNA, 19 nt, Artificial Sequence
  Description of Artificial Sequence: Synthetic oligonucleotide
uuucagaaaauucgguccu

SEQ ID NO: 778972 - RNA, 19 nt, Artificial Sequence
  Description of Artificial Sequence: Synthetic oligonucleotide
acuaauauuugggaggcag

SEQ ID NO: 778973 - RNA, 19 nt, Artificial Sequence
  Description of Artificial Sequence: Synthetic oligonucleotide
aacugcguaucacucugac

SEQ ID NO: 778974 - RNA, 19 nt, Artificial Sequence
  Description of Artificial Sequence: Synthetic oligonucleotide
caaugugauggaaauagac

SEQ ID NO: 778975 - RNA, 19 nt, Artificial Sequence
  Description of Artificial Sequence: Synthetic oligonucleotide
gaucaugccggcaagcagg

SEQ ID NO: 778976 - RNA, 19 nt, Artificial Sequence
  Description of Artificial Sequence: Synthetic oligonucleotide
aagauaacgccaaaccaag

SEQ ID NO: 778977 - RNA, 19 nt, Artificial Sequence
  Description of Artificial Sequence: Synthetic oligonucleotide
uaaaggagcgcuguaagca

SEQ ID NO: 778978 - RNA, 19 nt, Artificial Sequence
  Description of Artificial Sequence: Synthetic oligonucleotide
aacgccaaaccaagaagcc

SEQ ID NO: 778979 - RNA, 19 nt, Artificial Sequence
  Description of Artificial Sequence: Synthetic oligonucleotide
agaauaagccccaucauug

SEQ ID NO: 778980 - RNA, 19 nt, Artificial Sequence
  Description of Artificial Sequence: Synthetic oligonucleotide
ugcauauaacagaagcugu

SEQ ID NO: 778981 - RNA, 19 nt, Artificial Sequence
  Description of Artificial Sequence: Synthetic oligonucleotide
aauggagcaucacaguuua

SEQ ID NO: 778982 - RNA, 19 nt, Artificial Sequence
  Description of Artificial Sequence: Synthetic oligonucleotide
uuggaaucaugacauaauc

SEQ ID NO: 778983 - RNA, 19 nt, Artificial Sequence
  Description of Artificial Sequence: Synthetic oligonucleotide
aaaauucgguccuucuaca

SEQ ID NO: 778984 - RNA, 19 nt, Artificial Sequence
  Description of Artificial Sequence: Synthetic oligonucleotide
ucauauuguucucauuagu

SEQ ID NO: 778985 - RNA, 19 nt, Artificial Sequence
  Description of Artificial Sequence: Synthetic oligonucleotide
ucugauaaucucaucuguc

SEQ ID NO: 778986 - RNA, 19 nt, Artificial Sequence
  Description of Artificial Sequence: Synthetic oligonucleotide
uuaaaggagcgcuguaagc

SEQ ID NO: 778987 - RNA, 19 nt, Artificial Sequence
  Description of Artificial Sequence: Synthetic oligonucleotide
uacgagaagaacuaccuuu

SEQ ID NO: 778988 - RNA, 19 nt, Artificial Sequence
  Description of Artificial Sequence: Synthetic oligonucleotide
ugcaaucgcagacacaguc

SEQ ID NO: 778989 - RNA, 19 nt, Artificial Sequence
  Description of Artificial Sequence: Synthetic oligonucleotide
aacuaguaagaacuacuaa

SEQ ID NO: 778990 - RNA, 19 nt, Artificial Sequence
  Description of Artificial Sequence: Synthetic oligonucleotide
aauguagcaacaaugcauu

SEQ ID NO: 778991 - RNA, 19 nt, Artificial Sequence
  Description of Artificial Sequence: Synthetic oligonucleotide
gacgcaagcacuucauccc

SEQ ID NO: 778992 - RNA, 19 nt, Artificial Sequence
  Description of Artificial Sequence: Synthetic oligonucleotide
aauuggguaucaacuacag

SEQ ID NO: 778993 - RNA, 19 nt, Artificial Sequence
  Description of Artificial Sequence: Synthetic oligonucleotide
cuggauacugcaaucgcag

SEQ ID NO: 778994 - RNA, 19 nt, Artificial Sequence
  Description of Artificial Sequence: Synthetic oligonucleotide
ccacauuacacuaauguag

SEQ ID NO: 778995 - RNA, 19 nt, Artificial Sequence
  Description of Artificial Sequence: Synthetic oligonucleotide
auacugcaaucgcagacac

SEQ ID NO: 778996 - RNA, 19 nt, Artificial Sequence
  Description of Artificial Sequence: Synthetic oligonucleotide
gauaacgccaaaccaagaa

SEQ ID NO: 778997 - RNA, 19 nt, Artificial Sequence
  Description of Artificial Sequence: Synthetic oligonucleotide
ucugaucagccgauggugc

SEQ ID NO: 778998 - RNA, 19 nt, Artificial Sequence
  Description of Artificial Sequence: Synthetic oligonucleotide
aaaugaguuguuacgagaa

SEQ ID NO: 778999 - RNA, 19 nt, Artificial Sequence
  Description of Artificial Sequence: Synthetic oligonucleotide
uaaggaauauagugaauau

SEQ ID NO: 779000 - RNA, 19 nt, Artificial Sequence
  Description of Artificial Sequence: Synthetic oligonucleotide
aauggagaucacaaaugag

SEQ ID NO: 779001 - RNA, 19 nt, Artificial Sequence
  Description of Artificial Sequence: Synthetic oligonucleotide
ucauaucuaaaagacaguu

SEQ ID NO: 779002 - RNA, 19 nt, Artificial Sequence
  Description of Artificial Sequence: Synthetic oligonucleotide
caacuagagcuucagacac

SEQ ID NO: 779003 - RNA, 19 nt, Artificial Sequence
  Description of Artificial Sequence: Synthetic oligonucleotide
aaucauaaauuggguauca

SEQ ID NO: 779004 - RNA, 19 nt, Artificial Sequence
  Description of Artificial Sequence: Synthetic oligonucleotide
auuaguagucaauuugcau

SEQ ID NO: 779005 - RNA, 19 nt, Artificial Sequence
  Description of Artificial Sequence: Synthetic oligonucleotide
acgugaacucaucaccucg

SEQ ID NO: 779006 - RNA, 19 nt, Artificial Sequence
  Description of Artificial Sequence: Synthetic oligonucleotide
gagaucacaaaugaguuaa

SEQ ID NO: 779007 - RNA, 19 nt, Artificial Sequence
  Description of Artificial Sequence: Synthetic oligonucleotide
uuugacgcuucauucauua

SEQ ID NO: 779008 - RNA, 19 nt, Artificial Sequence
  Description of Artificial Sequence: Synthetic oligonucleotide
acuaccuuuucauaucuaa

SEQ ID NO: 779009 - RNA, 19 nt, Artificial Sequence
  Description of Artificial Sequence: Synthetic oligonucleotide
uaaaacugcguaucacucu

SEQ ID NO: 779010 - RNA, 19 nt, Artificial Sequence
  Description of Artificial Sequence: Synthetic oligonucleotide
aaaaucucauuuaacuaau

SEQ ID NO: 779011 - RNA, 19 nt, Artificial Sequence
  Description of Artificial Sequence: Synthetic oligonucleotide
uucauaucuaaaagacagu

SEQ ID NO: 779012 - RNA, 19 nt, Artificial Sequence
  Description of Artificial Sequence: Synthetic oligonucleotide
ucugaucauaaaauauuua

SEQ ID NO: 779013 - RNA, 19 nt, Artificial Sequence
  Description of Artificial Sequence: Synthetic oligonucleotide
uuacacuaauguagcaaca

SEQ ID NO: 779014 - RNA, 19 nt, Artificial Sequence
  Description of Artificial Sequence: Synthetic oligonucleotide
caacuaauauuugggaggc

SEQ ID NO: 779015 - RNA, 19 nt, Artificial Sequence
  Description of Artificial Sequence: Synthetic oligonucleotide
uggguaaccugcuggauac

SEQ ID NO: 779016 - RNA, 19 nt, Artificial Sequence
  Description of Artificial Sequence: Synthetic oligonucleotide
ugugacaggcugauacacc

SEQ ID NO: 779017 - RNA, 19 nt, Artificial Sequence
  Description of Artificial Sequence: Synthetic oligonucleotide
ugagagucuucucuuacua

SEQ ID NO: 779018 - RNA, 19 nt, Artificial Sequence
  Description of Artificial Sequence: Synthetic oligonucleotide
uuucgugaacauuuacaac

SEQ ID NO: 779019 - RNA, 19 nt, Artificial Sequence
  Description of Artificial Sequence: Synthetic oligonucleotide
caaacacagaucaccgccc

SEQ ID NO: 779020 - RNA, 19 nt, Artificial Sequence
  Description of Artificial Sequence: Synthetic oligonucleotide
uugugaaagcacucuguug

SEQ ID NO: 779021 - RNA, 19 nt, Artificial Sequence
  Description of Artificial Sequence: Synthetic oligonucleotide
auagcuuccgguucugaga

SEQ ID NO: 779022 - RNA, 19 nt, Artificial Sequence
  Description of Artificial Sequence: Synthetic oligonucleotide
ccucauaaucugcagaugg

SEQ ID NO: 779023 - RNA, 19 nt, Artificial Sequence
  Description of Artificial Sequence: Synthetic oligonucleotide
acaacuaguaagaacuacu

SEQ ID NO: 779024 - RNA, 19 nt, Artificial Sequence
  Description of Artificial Sequence: Synthetic oligonucleotide
aacuagagcuucagacacc

SEQ ID NO: 779025 - RNA, 19 nt, Artificial Sequence
  Description of Artificial Sequence: Synthetic oligonucleotide
aaacacagaucaccgcccu

SEQ ID NO: 779026 - RNA, 19 nt, Artificial Sequence
  Description of Artificial Sequence: Synthetic oligonucleotide
ccuaugaacaccugcuucg

SEQ ID NO: 779027 - RNA, 19 nt, Artificial Sequence
  Description of Artificial Sequence: Synthetic oligonucleotide
ucaacuacaguggaggcuu

SEQ ID NO: 779028 - RNA, 19 nt, Artificial Sequence
  Description of Artificial Sequence: Synthetic oligonucleotide
ugaucguucuauuccuucu

SEQ ID NO: 779029 - RNA, 19 nt, Artificial Sequence
  Description of Artificial Sequence: Synthetic oligonucleotide
ugauaaucucaucugucuu

SEQ ID NO: 779030 - RNA, 19 nt, Artificial Sequence
  Description of Artificial Sequence: Synthetic oligonucleotide
aaauucgguccuucuacaa

SEQ ID NO: 779031 - RNA, 19 nt, Artificial Sequence
  Description of Artificial Sequence: Synthetic oligonucleotide
gguaguugcaaaauaaauc

SEQ ID NO: 779032 - RNA, 19 nt, Artificial Sequence
  Description of Artificial Sequence: Synthetic oligonucleotide
guaagcaauccuugcagac

SEQ ID NO: 779033 - RNA, 19 nt, Artificial Sequence
  Description of Artificial Sequence: Synthetic oligonucleotide
auccaauggagcaucacag

SEQ ID NO: 779034 - RNA, 19 nt, Artificial Sequence
  Description of Artificial Sequence: Synthetic oligonucleotide
ugucugaucagccgauggu

SEQ ID NO: 779035 - RNA, 19 nt, Artificial Sequence
  Description of Artificial Sequence: Synthetic oligonucleotide
auugugaaagcacucuguu

SEQ ID NO: 779036 - RNA, 19 nt, Artificial Sequence
  Description of Artificial Sequence: Synthetic oligonucleotide
cauugcuuuaacccucccc

SEQ ID NO: 779037 - RNA, 19 nt, Artificial Sequence
  Description of Artificial Sequence: Synthetic oligonucleotide
ugauggguaaccugcugga

SEQ ID NO: 779038 - RNA, 19 nt, Artificial Sequence
  Description of Artificial Sequence: Synthetic oligonucleotide
uuuacugggaaagcaaauu

SEQ ID NO: 779039 - RNA, 19 nt, Artificial Sequence
  Description of Artificial Sequence: Synthetic oligonucleotide
caauggagaucacaaauga

SEQ ID NO: 779040 - RNA, 19 nt, Artificial Sequence
  Description of Artificial Sequence: Synthetic oligonucleotide
ugcuucgcucaccugaacu

SEQ ID NO: 779041 - RNA, 19 nt, Artificial Sequence
  Description of Artificial Sequence: Synthetic oligonucleotide
ugcguaucacucugacugg

SEQ ID NO: 779042 - RNA, 19 nt, Artificial Sequence
  Description of Artificial Sequence: Synthetic oligonucleotide
gacuccgaugucuucaaca

SEQ ID NO: 779043 - RNA, 19 nt, Artificial Sequence
  Description of Artificial Sequence: Synthetic oligonucleotide
augaguuguuacgagaaga

SEQ ID NO: 779044 - RNA, 19 nt, Artificial Sequence
  Description of Artificial Sequence: Synthetic oligonucleotide
uugucagugucugaucagc

SEQ ID NO: 779045 - RNA, 19 nt, Artificial Sequence
  Description of Artificial Sequence: Synthetic oligonucleotide
agaucaugccggcaagcag

SEQ ID NO: 779046 - RNA, 19 nt, Artificial Sequence
  Description of Artificial Sequence: Synthetic oligonucleotide
aucccauagcuuccgguuc

SEQ ID NO: 779047 - RNA, 19 nt, Artificial Sequence
  Description of Artificial Sequence: Synthetic oligonucleotide
caguguguagcuaaaaucu

SEQ ID NO: 779048 - RNA, 19 nt, Artificial Sequence
  Description of Artificial Sequence: Synthetic oligonucleotide
agacuugauacuguccaag

SEQ ID NO: 779049 - RNA, 19 nt, Artificial Sequence
  Description of Artificial Sequence: Synthetic oligonucleotide
aucacucugacuggcuuac

SEQ ID NO: 779050 - RNA, 19 nt, Artificial Sequence
  Description of Artificial Sequence: Synthetic oligonucleotide
ugcuuuaacccuccccacu

SEQ ID NO: 779051 - RNA, 19 nt, Artificial Sequence
  Description of Artificial Sequence: Synthetic oligonucleotide
uccaguguacgugaacuca

SEQ ID NO: 779052 - RNA, 19 nt, Artificial Sequence
  Description of Artificial Sequence: Synthetic oligonucleotide
uagucauuaguagucaauu

SEQ ID NO: 779053 - RNA, 19 nt, Artificial Sequence
  Description of Artificial Sequence: Synthetic oligonucleotide
gacuugauacuguccaaga

SEQ ID NO: 779054 - RNA, 19 nt, Artificial Sequence
  Description of Artificial Sequence: Synthetic oligonucleotide
augacauaauccuggccga

SEQ ID NO: 779055 - RNA, 19 nt, Artificial Sequence
  Description of Artificial Sequence: Synthetic oligonucleotide
acuagagcuucagacaccu

SEQ ID NO: 779056 - RNA, 19 nt, Artificial Sequence
  Description of Artificial Sequence: Synthetic oligonucleotide
cuaauguagcaacaaugca

SEQ ID NO: 779057 - RNA, 19 nt, Artificial Sequence
  Description of Artificial Sequence: Synthetic oligonucleotide
ucgugaacauuuacaacua

SEQ ID NO: 779058 - RNA, 19 nt, Artificial Sequence
  Description of Artificial Sequence: Synthetic oligonucleotide
cauuaguagucaauuugca

SEQ ID NO: 779059 - RNA, 19 nt, Artificial Sequence
  Description of Artificial Sequence: Synthetic oligonucleotide
guagucaauuugcauaaaa

SEQ ID NO: 779060 - RNA, 19 nt, Artificial Sequence
  Description of Artificial Sequence: Synthetic oligonucleotide
uucuauuccuucugagguc

SEQ ID NO: 779061 - RNA, 19 nt, Artificial Sequence
  Description of Artificial Sequence: Synthetic oligonucleotide
ugggccuuaaaggagcgcu

SEQ ID NO: 779062 - RNA, 19 nt, Artificial Sequence
  Description of Artificial Sequence: Synthetic oligonucleotide
uccaauggagcaucacagu

SEQ ID NO: 779063 - RNA, 19 nt, Artificial Sequence
  Description of Artificial Sequence: Synthetic oligonucleotide
agucauuaguagucaauuu

SEQ ID NO: 779064 - RNA, 19 nt, Artificial Sequence
  Description of Artificial Sequence: Synthetic oligonucleotide
caaucgcagacacagucuc

SEQ ID NO: 779065 - RNA, 19 nt, Artificial Sequence
  Description of Artificial Sequence: Synthetic oligonucleotide
gagaaugggccucuuacua

SEQ ID NO: 779066 - RNA, 19 nt, Artificial Sequence
  Description of Artificial Sequence: Synthetic oligonucleotide
gagacaugguccagcauug

SEQ ID NO: 779067 - RNA, 19 nt, Artificial Sequence
  Description of Artificial Sequence: Synthetic oligonucleotide
uuuagggccaaugcccugu

SEQ ID NO: 779068 - RNA, 19 nt, Artificial Sequence
  Description of Artificial Sequence: Synthetic oligonucleotide
acauuacacuaauguagca

SEQ ID NO: 779069 - RNA, 19 nt, Artificial Sequence
  Description of Artificial Sequence: Synthetic oligonucleotide
agcauugcuuuaacccucc

SEQ ID NO: 779070 - RNA, 19 nt, Artificial Sequence
  Description of Artificial Sequence: Synthetic oligonucleotide
cuaccuuauaaaugccauc

SEQ ID NO: 779071 - RNA, 19 nt, Artificial Sequence
  Description of Artificial Sequence: Synthetic oligonucleotide
aagugaaccuguucuugua

SEQ ID NO: 779072 - RNA, 19 nt, Artificial Sequence
  Description of Artificial Sequence: Synthetic oligonucleotide
accgauucuuuuauuacca

SEQ ID NO: 779073 - RNA, 19 nt, Artificial Sequence
  Description of Artificial Sequence: Synthetic oligonucleotide
acuaccuuauaaaugccau

SEQ ID NO: 779074 - RNA, 19 nt, Artificial Sequence
  Description of Artificial Sequence: Synthetic oligonucleotide
gcaguguguagcuaaaauc

SEQ ID NO: 779075 - RNA, 19 nt, Artificial Sequence
  Description of Artificial Sequence: Synthetic oligonucleotide
uacuaggcgcugcugcuga

SEQ ID NO: 779076 - RNA, 19 nt, Artificial Sequence
  Description of Artificial Sequence: Synthetic oligonucleotide
agaucaccgcccuuugcug

SEQ ID NO: 779077 - RNA, 19 nt, Artificial Sequence
  Description of Artificial Sequence: Synthetic oligonucleotide
guuguuacgagaagaacua

SEQ ID NO: 779078 - RNA, 19 nt, Artificial Sequence
  Description of Artificial Sequence: Synthetic oligonucleotide
auuggguaucaacuacagu

SEQ ID NO: 779079 - RNA, 19 nt, Artificial Sequence
  Description of Artificial Sequence: Synthetic oligonucleotide
cucauuagucauuaguagu

SEQ ID NO: 779080 - RNA, 19 nt, Artificial Sequence
  Description of Artificial Sequence: Synthetic oligonucleotide
cugcuggauacugcaaucg

SEQ ID NO: 779081 - RNA, 19 nt, Artificial Sequence
  Description of Artificial Sequence: Synthetic oligonucleotide
acauuuacaacuagagcuu

SEQ ID NO: 779082 - RNA, 19 nt, Artificial Sequence
  Description of Artificial Sequence: Synthetic oligonucleotide
uggcuuaccagcucuccaa

SEQ ID NO: 779083 - RNA, 19 nt, Artificial Sequence
  Description of Artificial Sequence: Synthetic oligonucleotide
gaguuguuacgagaagaac

SEQ ID NO: 779084 - RNA, 19 nt, Artificial Sequence
  Description of Artificial Sequence: Synthetic oligonucleotide
uucgcucaccugaacucug

SEQ ID NO: 779085 - RNA, 19 nt, Artificial Sequence
  Description of Artificial Sequence: Synthetic oligonucleotide
caacuaguaagaacuacua

SEQ ID NO: 779086 - RNA, 19 nt, Artificial Sequence
  Description of Artificial Sequence: Synthetic oligonucleotide
ucugaaucuccaaguugau

SEQ ID NO: 779087 - RNA, 19 nt, Artificial Sequence
  Description of Artificial Sequence: Synthetic oligonucleotide
ugacauaauccuggccgag

SEQ ID NO: 779088 - RNA, 19 nt, Artificial Sequence
  Description of Artificial Sequence: Synthetic oligonucleotide
guuacgagaagaacuaccu

SEQ ID NO: 779089 - RNA, 19 nt, Artificial Sequence
  Description of Artificial Sequence: Synthetic oligonucleotide
cuaugaacaccugcuucgc

SEQ ID NO: 779090 - RNA, 19 nt, Artificial Sequence
  Description of Artificial Sequence: Synthetic oligonucleotide
ucaucugaagcuggccucu

SEQ ID NO: 779091 - RNA, 19 nt, Artificial Sequence
  Description of Artificial Sequence: Synthetic oligonucleotide
uuauuaccagcaagauuuu

SEQ ID NO: 779092 - RNA, 19 nt, Artificial Sequence
  Description of Artificial Sequence: Synthetic oligonucleotide
cguucuauuccuucugagg

SEQ ID NO: 779093 - RNA, 19 nt, Artificial Sequence
  Description of Artificial Sequence: Synthetic oligonucleotide
acugcguaucacucugacu

SEQ ID NO: 779094 - RNA, 19 nt, Artificial Sequence
  Description of Artificial Sequence: Synthetic oligonucleotide
uacgugaacucaucaccuc

SEQ ID NO: 779095 - RNA, 19 nt, Artificial Sequence
  Description of Artificial Sequence: Synthetic oligonucleotide
aacccuccccacucauuug

SEQ ID NO: 779096 - RNA, 19 nt, Artificial Sequence
  Description of Artificial Sequence: Synthetic oligonucleotide
gguaucaacuacaguggag

SEQ ID NO: 779097 - RNA, 19 nt, Artificial Sequence
  Description of Artificial Sequence: Synthetic oligonucleotide
cggaugagagacauggucc

SEQ ID NO: 779098 - RNA, 19 nt, Artificial Sequence
  Description of Artificial Sequence: Synthetic oligonucleotide
cauuagucauuaguaguca

SEQ ID NO: 779099 - RNA, 19 nt, Artificial Sequence
  Description of Artificial Sequence: Synthetic oligonucleotide
uuguuacgagaagaacuac

SEQ ID NO: 779100 - RNA, 19 nt, Artificial Sequence
  Description of Artificial Sequence: Synthetic oligonucleotide
agucucauuuggaaucaug

SEQ ID NO: 779101 - RNA, 19 nt, Artificial Sequence
  Description of Artificial Sequence: Synthetic oligonucleotide
auuuacaacuagagcuuca

SEQ ID NO: 779102 - RNA, 19 nt, Artificial Sequence
  Description of Artificial Sequence: Synthetic oligonucleotide
uggugcaccgauucuuuua

SEQ ID NO: 779103 - RNA, 19 nt, Artificial Sequence
  Description of Artificial Sequence: Synthetic oligonucleotide
aaaucucauuuaacuaauu

SEQ ID NO: 779104 - RNA, 19 nt, Artificial Sequence
  Description of Artificial Sequence: Synthetic oligonucleotide
uuacuaggcgcugcugcug

SEQ ID NO: 779105 - RNA, 19 nt, Artificial Sequence
  Description of Artificial Sequence: Synthetic oligonucleotide
guccagcauugcuuuaacc

SEQ ID NO: 779106 - RNA, 19 nt, Artificial Sequence
  Description of Artificial Sequence: Synthetic oligonucleotide
auuccgagauucugcucca

SEQ ID NO: 779107 - RNA, 19 nt, Artificial Sequence
  Description of Artificial Sequence: Synthetic oligonucleotide
acgcaagcacuucauccca

SEQ ID NO: 779108 - RNA, 19 nt, Artificial Sequence
  Description of Artificial Sequence: Synthetic oligonucleotide
aacuaauauuugggaggca

SEQ ID NO: 779109 - RNA, 19 nt, Artificial Sequence
  Description of Artificial Sequence: Synthetic oligonucleotide
gcacaacuaauauuuggga

SEQ ID NO: 779110 - RNA, 19 nt, Artificial Sequence
  Description of Artificial Sequence: Synthetic oligonucleotide
acuacaguggaggcuuuga

SEQ ID NO: 779111 - RNA, 19 nt, Artificial Sequence
  Description of Artificial Sequence: Synthetic oligonucleotide
aucaugccggcaagcaggg

SEQ ID NO: 779112 - RNA, 19 nt, Artificial Sequence
  Description of Artificial Sequence: Synthetic oligonucleotide
gacauaauccuggccgaga

SEQ ID NO: 779113 - RNA, 19 nt, Artificial Sequence
  Description of Artificial Sequence: Synthetic oligonucleotide
cuccaauuccgagauucug

SEQ ID NO: 779114 - RNA, 19 nt, Artificial Sequence
  Description of Artificial Sequence: Synthetic oligonucleotide
uggagcauauuugcugauc

SEQ ID NO: 779115 - RNA, 19 nt, Artificial Sequence
  Description of Artificial Sequence: Synthetic oligonucleotide
uuaacccuccccacucauu

SEQ ID NO: 779116 - RNA, 19 nt, Artificial Sequence
  Description of Artificial Sequence: Synthetic oligonucleotide
cauugugaaagcacucugu

SEQ ID NO: 779117 - RNA, 19 nt, Artificial Sequence
  Description of Artificial Sequence: Synthetic oligonucleotide
gacaccucugucauugcaa

SEQ ID NO: 779118 - RNA, 19 nt, Artificial Sequence
  Description of Artificial Sequence: Synthetic oligonucleotide
gcaccgauucuuuuauuac

SEQ ID NO: 779119 - RNA, 19 nt, Artificial Sequence
  Description of Artificial Sequence: Synthetic oligonucleotide
ucacaaugugaagcaauuu

SEQ ID NO: 779120 - RNA, 19 nt, Artificial Sequence
  Description of Artificial Sequence: Synthetic oligonucleotide
cauaauccuggccgagauc

SEQ ID NO: 779121 - RNA, 19 nt, Artificial Sequence
  Description of Artificial Sequence: Synthetic oligonucleotide
ggagcauauuugcugaucu

SEQ ID NO: 779122 - RNA, 19 nt, Artificial Sequence
  Description of Artificial Sequence: Synthetic oligonucleotide
uugacgcuucauucauuaa

SEQ ID NO: 779123 - RNA, 19 nt, Artificial Sequence
  Description of Artificial Sequence: Synthetic oligonucleotide
cuaauauuugggaggcagu

SEQ ID NO: 779124 - RNA, 19 nt, Artificial Sequence
  Description of Artificial Sequence: Synthetic oligonucleotide
cccauaaaucuuuucuguc

SEQ ID NO: 779125 - RNA, 19 nt, Artificial Sequence
  Description of Artificial Sequence: Synthetic oligonucleotide
gugauggaaauagacacau

SEQ ID NO: 779126 - RNA, 19 nt, Artificial Sequence
  Description of Artificial Sequence: Synthetic oligonucleotide
guuuagggccaaugcccug

SEQ ID NO: 779127 - RNA, 19 nt, Artificial Sequence
  Description of Artificial Sequence: Synthetic oligonucleotide
acgagaagaacuaccuuuu

SEQ ID NO: 779128 - RNA, 19 nt, Artificial Sequence
  Description of Artificial Sequence: Synthetic oligonucleotide
aggagcgcuguaagcaauc

SEQ ID NO: 779129 - RNA, 19 nt, Artificial Sequence
  Description of Artificial Sequence: Synthetic oligonucleotide
aucauaaauuggguaucaa

SEQ ID NO: 779130 - RNA, 19 nt, Artificial Sequence
  Description of Artificial Sequence: Synthetic oligonucleotide
acaagagacgcaagcacuu

SEQ ID NO: 779131 - RNA, 19 nt, Artificial Sequence
  Description of Artificial Sequence: Synthetic oligonucleotide
cuuccaguguacgugaacu

SEQ ID NO: 779132 - RNA, 19 nt, Artificial Sequence
  Description of Artificial Sequence: Synthetic oligonucleotide
ugcugaucuuccuccuuua

SEQ ID NO: 779133 - RNA, 19 nt, Artificial Sequence
  Description of Artificial Sequence: Synthetic oligonucleotide
ccggaugagagacaugguc

SEQ ID NO: 779134 - RNA, 19 nt, Artificial Sequence
  Description of Artificial Sequence: Synthetic oligonucleotide
cugaucagccgauggugca

SEQ ID NO: 779135 - RNA, 19 nt, Artificial Sequence
  Description of Artificial Sequence: Synthetic oligonucleotide
gcccuguucauguuuguca

SEQ ID NO: 779136 - RNA, 19 nt, Artificial Sequence
  Description of Artificial Sequence: Synthetic oligonucleotide
caaguugauccaacaggaa

SEQ ID NO: 779137 - RNA, 19 nt, Artificial Sequence
  Description of Artificial Sequence: Synthetic oligonucleotide
aaggagcgcuguaagcaau

SEQ ID NO: 779138 - RNA, 19 nt, Artificial Sequence
  Description of Artificial Sequence: Synthetic oligonucleotide
ccuuaucugauggguaacc

SEQ ID NO: 779139 - RNA, 19 nt, Artificial Sequence
  Description of Artificial Sequence: Synthetic oligonucleotide
ugcgaccaugaaugccacc

SEQ ID NO: 779140 - RNA, 19 nt, Artificial Sequence
  Description of Artificial Sequence: Synthetic oligonucleotide
caccugaacucugaaucuc

SEQ ID NO: 779141 - RNA, 19 nt, Artificial Sequence
  Description of Artificial Sequence: Synthetic oligonucleotide
agauaacgccaaaccaaga

SEQ ID NO: 779142 - RNA, 19 nt, Artificial Sequence
  Description of Artificial Sequence: Synthetic oligonucleotide
cuuuacugggaaagcaaau

SEQ ID NO: 779143 - RNA, 19 nt, Artificial Sequence
  Description of Artificial Sequence: Synthetic oligonucleotide
caagagacgcaagcacuuc

SEQ ID NO: 779144 - RNA, 19 nt, Artificial Sequence
  Description of Artificial Sequence: Synthetic oligonucleotide
aggucaaguagagccugca

SEQ ID NO: 779145 - RNA, 19 nt, Artificial Sequence
  Description of Artificial Sequence: Synthetic oligonucleotide
agagacgcaagcacuucau

SEQ ID NO: 779146 - RNA, 19 nt, Artificial Sequence
  Description of Artificial Sequence: Synthetic oligonucleotide
ggagaucacaaaugaguua

SEQ ID NO: 779147 - RNA, 19 nt, Artificial Sequence
  Description of Artificial Sequence: Synthetic oligonucleotide
aacuaccuuuucauaucua

SEQ ID NO: 779148 - RNA, 19 nt, Artificial Sequence
  Description of Artificial Sequence: Synthetic oligonucleotide
ggguaucaacuacagugga

SEQ ID NO: 779149 - RNA, 19 nt, Artificial Sequence
  Description of Artificial Sequence: Synthetic oligonucleotide
ccgauucuuuuauuaccag

SEQ ID NO: 779150 - RNA, 19 nt, Artificial Sequence
  Description of Artificial Sequence: Synthetic oligonucleotide
cuuaaggaauauagugaau

SEQ ID NO: 779151 - RNA, 19 nt, Artificial Sequence
  Description of Artificial Sequence: Synthetic oligonucleotide
ugcccuguucauguuuguc

SEQ ID NO: 779152 - RNA, 19 nt, Artificial Sequence
  Description of Artificial Sequence: Synthetic oligonucleotide
cacacaaaggaggauggcu

SEQ ID NO: 779153 - RNA, 19 nt, Artificial Sequence
  Description of Artificial Sequence: Synthetic oligonucleotide
cuggcuuaccagcucucca

SEQ ID NO: 779154 - RNA, 19 nt, Artificial Sequence
  Description of Artificial Sequence: Synthetic oligonucleotide
ggccucuuacuacacacaa

SEQ ID NO: 779155 - RNA, 19 nt, Artificial Sequence
  Description of Artificial Sequence: Synthetic oligonucleotide
gccgauggugcaccgauuc

SEQ ID NO: 779156 - RNA, 19 nt, Artificial Sequence
  Description of Artificial Sequence: Synthetic oligonucleotide
ccuuauaaaugccaucaua

SEQ ID NO: 779157 - RNA, 19 nt, Artificial Sequence
  Description of Artificial Sequence: Synthetic oligonucleotide
uuagggccaaugcccuguu

SEQ ID NO: 779158 - RNA, 19 nt, Artificial Sequence
  Description of Artificial Sequence: Synthetic oligonucleotide
caauggagcaucacaguuu

SEQ ID NO: 779159 - RNA, 19 nt, Artificial Sequence
  Description of Artificial Sequence: Synthetic oligonucleotide
aguagucaauuugcauaaa

SEQ ID NO: 779160 - RNA, 19 nt, Artificial Sequence
  Description of Artificial Sequence: Synthetic oligonucleotide
cuuaucugauggguaaccu

SEQ ID NO: 779161 - RNA, 19 nt, Artificial Sequence
  Description of Artificial Sequence: Synthetic oligonucleotide
gcuggauacugcaaucgca

SEQ ID NO: 779162 - RNA, 19 nt, Artificial Sequence
  Description of Artificial Sequence: Synthetic oligonucleotide
augaaaucucuggccagua

SEQ ID NO: 779163 - RNA, 19 nt, Artificial Sequence
  Description of Artificial Sequence: Synthetic oligonucleotide
cugagagucuucucuuacu

SEQ ID NO: 779164 - RNA, 19 nt, Artificial Sequence
  Description of Artificial Sequence: Synthetic oligonucleotide
auggugcaccgauucuuuu

SEQ ID NO: 779165 - RNA, 19 nt, Artificial Sequence
  Description of Artificial Sequence: Synthetic oligonucleotide
augcccuguucauguuugu

SEQ ID NO: 779166 - RNA, 19 nt, Artificial Sequence
  Description of Artificial Sequence: Synthetic oligonucleotide
uggugacuccgaugucuuc

SEQ ID NO: 779167 - RNA, 19 nt, Artificial Sequence
  Description of Artificial Sequence: Synthetic oligonucleotide
guaucacucugacuggcuu

SEQ ID NO: 779168 - RNA, 19 nt, Artificial Sequence
  Description of Artificial Sequence: Synthetic oligonucleotide
ggagcgcuguaagcaaucc

SEQ ID NO: 779169 - RNA, 19 nt, Artificial Sequence
  Description of Artificial Sequence: Synthetic oligonucleotide
aaccugcuggauacugcaa

SEQ ID NO: 779170 - RNA, 19 nt, Artificial Sequence
  Description of Artificial Sequence: Synthetic oligonucleotide
caucccauagcuuccgguu

SEQ ID NO: 779171 - RNA, 19 nt, Artificial Sequence
  Description of Artificial Sequence: Synthetic oligonucleotide
agaucacaaaugaguuaaa

SEQ ID NO: 779172 - RNA, 19 nt, Artificial Sequence
  Description of Artificial Sequence: Synthetic oligonucleotide
ggugcaccgauucuuuuau

SEQ ID NO: 779173 - RNA, 19 nt, Artificial Sequence
  Description of Artificial Sequence: Synthetic oligonucleotide
gcguaucacucugacuggc

SEQ ID NO: 779174 - RNA, 19 nt, Artificial Sequence
  Description of Artificial Sequence: Synthetic oligonucleotide
cugaguuggaaagccucua

SEQ ID NO: 779175 - RNA, 19 nt, Artificial Sequence
  Description of Artificial Sequence: Synthetic oligonucleotide
ccgagaucaugccggcaag

SEQ ID NO: 779176 - RNA, 19 nt, Artificial Sequence
  Description of Artificial Sequence: Synthetic oligonucleotide
cuucgcucaccugaacucu

SEQ ID NO: 779177 - RNA, 19 nt, Artificial Sequence
  Description of Artificial Sequence: Synthetic oligonucleotide
gauggguaaccugcuggau

SEQ ID NO: 779178 - RNA, 19 nt, Artificial Sequence
  Description of Artificial Sequence: Synthetic oligonucleotide
gcauugcuuuaacccuccc

SEQ ID NO: 779179 - RNA, 19 nt, Artificial Sequence
  Description of Artificial Sequence: Synthetic oligonucleotide
uuccgagauucugcuccaa

SEQ ID NO: 779180 - RNA, 19 nt, Artificial Sequence
  Description of Artificial Sequence: Synthetic oligonucleotide
gccccaucauugcugcgac

SEQ ID NO: 779181 - RNA, 19 nt, Artificial Sequence
  Description of Artificial Sequence: Synthetic oligonucleotide
cuugaucguucuauuccuu

SEQ ID NO: 779182 - RNA, 19 nt, Artificial Sequence
  Description of Artificial Sequence: Synthetic oligonucleotide
guguagcuaaaaucucauu

SEQ ID NO: 779183 - RNA, 19 nt, Artificial Sequence
  Description of Artificial Sequence: Synthetic oligonucleotide
caccucggucaacuucauc

SEQ ID NO: 779184 - RNA, 19 nt, Artificial Sequence
  Description of Artificial Sequence: Synthetic oligonucleotide
cuucaacacuuuggaggca

SEQ ID NO: 779185 - RNA, 19 nt, Artificial Sequence
  Description of Artificial Sequence: Synthetic oligonucleotide
caccgcccuuugcuguagc

SEQ ID NO: 779186 - RNA, 19 nt, Artificial Sequence
  Description of Artificial Sequence: Synthetic oligonucleotide
gcaagcacuucaucccaua

SEQ ID NO: 779187 - RNA, 19 nt, Artificial Sequence
  Description of Artificial Sequence: Synthetic oligonucleotide
cccucauaaucugcagaug

SEQ ID NO: 779188 - RNA, 19 nt, Artificial Sequence
  Description of Artificial Sequence: Synthetic oligonucleotide
cagccgauggugcaccgau

SEQ ID NO: 779189 - RNA, 19 nt, Artificial Sequence
  Description of Artificial Sequence: Synthetic oligonucleotide
ggcagcacacacacauaaa

SEQ ID NO: 779190 - RNA, 19 nt, Artificial Sequence
  Description of Artificial Sequence: Synthetic oligonucleotide
ggcuuuucgugaacauuua

SEQ ID NO: 779191 - RNA, 19 nt, Artificial Sequence
  Description of Artificial Sequence: Synthetic oligonucleotide
gcucaccugaacucugaau

SEQ ID NO: 779192 - RNA, 19 nt, Artificial Sequence
  Description of Artificial Sequence: Synthetic oligonucleotide
cuggagcauauuugcugau

SEQ ID NO: 779193 - RNA, 19 nt, Artificial Sequence
  Description of Artificial Sequence: Synthetic oligonucleotide
ggcuuaccagcucuccaau

SEQ ID NO: 779194 - RNA, 19 nt, Artificial Sequence
  Description of Artificial Sequence: Synthetic oligonucleotide
cgagauucugcuccaauuu

SEQ ID NO: 779195 - RNA, 19 nt, Artificial Sequence
  Description of Artificial Sequence: Synthetic oligonucleotide
caacacuuuggaggcacuu

SEQ ID NO: 779196 - RNA, 19 nt, Artificial Sequence
  Description of Artificial Sequence: Synthetic oligonucleotide
ccgagauucugcuccaauu

SEQ ID NO: 779197 - RNA, 19 nt, Artificial Sequence
  Description of Artificial Sequence: Synthetic oligonucleotide
agccgauggugcaccgauu

SEQ ID NO: 779198 - RNA, 19 nt, Artificial Sequence
  Description of Artificial Sequence: Synthetic oligonucleotide
cguaucacucugacuggcu

SEQ ID NO: 779199 - RNA, 19 nt, Artificial Sequence
  Description of Artificial Sequence: Synthetic oligonucleotide
cgaccaugaaugccaccaa

SEQ ID NO: 779200 - RNA, 19 nt, Artificial Sequence
  Description of Artificial Sequence: Synthetic oligonucleotide
ccgauggugcaccgauucu

SEQ ID NO: 779201 - RNA, 19 nt, Artificial Sequence
  Description of Artificial Sequence: Synthetic oligonucleotide
ggguaaccugcuggauacu

SEQ ID NO: 779202 - RNA, 19 nt, Artificial Sequence
  Description of Artificial Sequence: Synthetic oligonucleotide
cgcucaccugaacucugaa

SEQ ID NO: 779203 - RNA, 19 nt, Artificial Sequence
  Description of Artificial Sequence: Synthetic oligonucleotide
cgauggugcaccgauucuu

SEQ ID NO: 779204 - RNA, 19 nt, Artificial Sequence
  Description of Artificial Sequence: Synthetic oligonucleotide
gcucuccaauuccgagauu

SEQ ID NO: 779205 - RNA, 19 nt, Artificial Sequence
  Description of Artificial Sequence: Synthetic oligonucleotide
aauuaauucccauauuucc

SEQ ID NO: 779206 - RNA, 19 nt, Artificial Sequence
  Description of Artificial Sequence: Synthetic oligonucleotide
aacaauucuacuugagugc

SEQ ID NO: 779207 - RNA, 19 nt, Artificial Sequence
  Description of Artificial Sequence: Synthetic oligonucleotide
cauaauaguuucuuaaccg

SEQ ID NO: 779208 - RNA, 19 nt, Artificial Sequence
  Description of Artificial Sequence: Synthetic oligonucleotide
aaggauaugcuuuugagaa

SEQ ID NO: 779209 - RNA, 19 nt, Artificial Sequence
  Description of Artificial Sequence: Synthetic oligonucleotide
caugucuuaaguuaggccc

SEQ ID NO: 779210 - RNA, 19 nt, Artificial Sequence
  Description of Artificial Sequence: Synthetic oligonucleotide
ucuuccauacacaauauga

SEQ ID NO: 779211 - RNA, 19 nt, Artificial Sequence
  Description of Artificial Sequence: Synthetic oligonucleotide
uaaccguauaaucucagcg

SEQ ID NO: 779212 - RNA, 19 nt, Artificial Sequence
  Description of Artificial Sequence: Synthetic oligonucleotide
uguaacucauugcacaggg

SEQ ID NO: 779213 - RNA, 19 nt, Artificial Sequence
  Description of Artificial Sequence: Synthetic oligonucleotide
ucauaauaguuucuuaacc

SEQ ID NO: 779214 - RNA, 19 nt, Artificial Sequence
  Description of Artificial Sequence: Synthetic oligonucleotide
accgacuuggaucugaagc

SEQ ID NO: 779215 - RNA, 19 nt, Artificial Sequence
  Description of Artificial Sequence: Synthetic oligonucleotide
aacgauacaugguuccacc

SEQ ID NO: 779216 - RNA, 19 nt, Artificial Sequence
  Description of Artificial Sequence: Synthetic oligonucleotide
auaguaaggggcaaaagcc

SEQ ID NO: 779217 - RNA, 19 nt, Artificial Sequence
  Description of Artificial Sequence: Synthetic oligonucleotide
cuggcaauagacuuaaugc

SEQ ID NO: 779218 - RNA, 19 nt, Artificial Sequence
  Description of Artificial Sequence: Synthetic oligonucleotide
ucuuuuagaagauuucccc

SEQ ID NO: 779219 - RNA, 19 nt, Artificial Sequence
  Description of Artificial Sequence: Synthetic oligonucleotide
cauacguaggcauacaaag

SEQ ID NO: 779220 - RNA, 19 nt, Artificial Sequence
  Description of Artificial Sequence: Synthetic oligonucleotide
uuuguaaccuaucccagag

SEQ ID NO: 779221 - RNA, 19 nt, Artificial Sequence
  Description of Artificial Sequence: Synthetic oligonucleotide
ucacuuguaacucauugca

SEQ ID NO: 779222 - RNA, 19 nt, Artificial Sequence
  Description of Artificial Sequence: Synthetic oligonucleotide
agcgucaugaagaugaagc

SEQ ID NO: 779223 - RNA, 19 nt, Artificial Sequence
  Description of Artificial Sequence: Synthetic oligonucleotide
uguaaccuaucccagagcu

SEQ ID NO: 779224 - RNA, 19 nt, Artificial Sequence
  Description of Artificial Sequence: Synthetic oligonucleotide
aauuucugcccauucacca

SEQ ID NO: 779225 - RNA, 19 nt, Artificial Sequence
  Description of Artificial Sequence: Synthetic oligonucleotide
uguaguaacuucuguagug

SEQ ID NO: 779226 - RNA, 19 nt, Artificial Sequence
  Description of Artificial Sequence: Synthetic oligonucleotide
ugaggauucgagaaguagc

SEQ ID NO: 779227 - RNA, 19 nt, Artificial Sequence
  Description of Artificial Sequence: Synthetic oligonucleotide
uggaaucccaauuaauucc

SEQ ID NO: 779228 - RNA, 19 nt, Artificial Sequence
  Description of Artificial Sequence: Synthetic oligonucleotide
uucuguaacauacuccaug

SEQ ID NO: 779229 - RNA, 19 nt, Artificial Sequence
  Description of Artificial Sequence: Synthetic oligonucleotide
gaagugauuacugacuugc

SEQ ID NO: 779230 - RNA, 19 nt, Artificial Sequence
  Description of Artificial Sequence: Synthetic oligonucleotide
ugaauugaggauucgagaa

SEQ ID NO: 779231 - RNA, 19 nt, Artificial Sequence
  Description of Artificial Sequence: Synthetic oligonucleotide
uguaacauacuccaugaau

SEQ ID NO: 779232 - RNA, 19 nt, Artificial Sequence
  Description of Artificial Sequence: Synthetic oligonucleotide
ucuuaaguuaggcccgugg

SEQ ID NO: 779233 - RNA, 19 nt, Artificial Sequence
  Description of Artificial Sequence: Synthetic oligonucleotide
ugaauuucugcccauucac

SEQ ID NO: 779234 - RNA, 19 nt, Artificial Sequence
  Description of Artificial Sequence: Synthetic oligonucleotide
uuugacccagucauaauug

SEQ ID NO: 779235 - RNA, 19 nt, Artificial Sequence
  Description of Artificial Sequence: Synthetic oligonucleotide
gugauuacugacuugcugc

SEQ ID NO: 779236 - RNA, 19 nt, Artificial Sequence
  Description of Artificial Sequence: Synthetic oligonucleotide
ucgagaaguagcaucagcu

SEQ ID NO: 779237 - RNA, 19 nt, Artificial Sequence
  Description of Artificial Sequence: Synthetic oligonucleotide
auaauaguuucuuaaccgu

SEQ ID NO: 779238 - RNA, 19 nt, Artificial Sequence
  Description of Artificial Sequence: Synthetic oligonucleotide
uucuaagcgauccacuucu

SEQ ID NO: 779239 - RNA, 19 nt, Artificial Sequence
  Description of Artificial Sequence: Synthetic oligonucleotide
uauaagucaguccagucua

SEQ ID NO: 779240 - RNA, 19 nt, Artificial Sequence
  Description of Artificial Sequence: Synthetic oligonucleotide
uauuuguaaccuaucccag

SEQ ID NO: 779241 - RNA, 19 nt, Artificial Sequence
  Description of Artificial Sequence: Synthetic oligonucleotide
agaaggauaugcuuuugag

SEQ ID NO: 779242 - RNA, 19 nt, Artificial Sequence
  Description of Artificial Sequence: Synthetic oligonucleotide
agguagucgggauacaggg

SEQ ID NO: 779243 - RNA, 19 nt, Artificial Sequence
  Description of Artificial Sequence: Synthetic oligonucleotide
aaccguauaaucucagcgu

SEQ ID NO: 779244 - RNA, 19 nt, Artificial Sequence
  Description of Artificial Sequence: Synthetic oligonucleotide
aaaaucaccccuguauaag

SEQ ID NO: 779245 - RNA, 19 nt, Artificial Sequence
  Description of Artificial Sequence: Synthetic oligonucleotide
auguugucggaacagguuc

SEQ ID NO: 779246 - RNA, 19 nt, Artificial Sequence
  Description of Artificial Sequence: Synthetic oligonucleotide
accgauguaauucccauug

SEQ ID NO: 779247 - RNA, 19 nt, Artificial Sequence
  Description of Artificial Sequence: Synthetic oligonucleotide
auagacuuaaugcugcagu

SEQ ID NO: 779248 - RNA, 19 nt, Artificial Sequence
  Description of Artificial Sequence: Synthetic oligonucleotide
uacguaggcauacaaagaa

SEQ ID NO: 779249 - RNA, 19 nt, Artificial Sequence
  Description of Artificial Sequence: Synthetic oligonucleotide
uucaucuucacacacuaua

SEQ ID NO: 779250 - RNA, 19 nt, Artificial Sequence
  Description of Artificial Sequence: Synthetic oligonucleotide
aaggagguagucgggauac

SEQ ID NO: 779251 - RNA, 19 nt, Artificial Sequence
  Description of Artificial Sequence: Synthetic oligonucleotide
ucaaauaguucuuuaugaa

SEQ ID NO: 779252 - RNA, 19 nt, Artificial Sequence
  Description of Artificial Sequence: Synthetic oligonucleotide
uccucuagauccuugauau

SEQ ID NO: 779253 - RNA, 19 nt, Artificial Sequence
  Description of Artificial Sequence: Synthetic oligonucleotide
uguaucaggagugugcucu

SEQ ID NO: 779254 - RNA, 19 nt, Artificial Sequence
  Description of Artificial Sequence: Synthetic oligonucleotide
cucuagauccuugauaugc

SEQ ID NO: 779255 - RNA, 19 nt, Artificial Sequence
  Description of Artificial Sequence: Synthetic oligonucleotide
accguauaaucucagcguc

SEQ ID NO: 779256 - RNA, 19 nt, Artificial Sequence
  Description of Artificial Sequence: Synthetic oligonucleotide
gaauugaggauucgagaag

SEQ ID NO: 779257 - RNA, 19 nt, Artificial Sequence
  Description of Artificial Sequence: Synthetic oligonucleotide
uggcaauagacuuaaugcu

SEQ ID NO: 779258 - RNA, 19 nt, Artificial Sequence
  Description of Artificial Sequence: Synthetic oligonucleotide
aaagaauuucacagaguuc

SEQ ID NO: 779259 - RNA, 19 nt, Artificial Sequence
  Description of Artificial Sequence: Synthetic oligonucleotide
uaacucauugcacagggua

SEQ ID NO: 779260 - RNA, 19 nt, Artificial Sequence
  Description of Artificial Sequence: Synthetic oligonucleotide
ucagguauuuguaaccuau

SEQ ID NO: 779261 - RNA, 19 nt, Artificial Sequence
  Description of Artificial Sequence: Synthetic oligonucleotide
uucuuaaccguauaaucuc

SEQ ID NO: 779262 - RNA, 19 nt, Artificial Sequence
  Description of Artificial Sequence: Synthetic oligonucleotide
cuuagggaguguuuucugg

SEQ ID NO: 779263 - RNA, 19 nt, Artificial Sequence
  Description of Artificial Sequence: Synthetic oligonucleotide
acaauucuacuugagugcg

SEQ ID NO: 779264 - RNA, 19 nt, Artificial Sequence
  Description of Artificial Sequence: Synthetic oligonucleotide
uagauuaaguuccugcuuu

SEQ ID NO: 779265 - RNA, 19 nt, Artificial Sequence
  Description of Artificial Sequence: Synthetic oligonucleotide
ucaugucuuaaguuaggcc

SEQ ID NO: 779266 - RNA, 19 nt, Artificial Sequence
  Description of Artificial Sequence: Synthetic oligonucleotide
ucccaauuaauucccauau

SEQ ID NO: 779267 - RNA, 19 nt, Artificial Sequence
  Description of Artificial Sequence: Synthetic oligonucleotide
acucgaauugucucaauca

SEQ ID NO: 779268 - RNA, 19 nt, Artificial Sequence
  Description of Artificial Sequence: Synthetic oligonucleotide
ucuuaaccguauaaucuca

SEQ ID NO: 779269 - RNA, 19 nt, Artificial Sequence
  Description of Artificial Sequence: Synthetic oligonucleotide
guugaauugaggauucgag

SEQ ID NO: 779270 - RNA, 19 nt, Artificial Sequence
  Description of Artificial Sequence: Synthetic oligonucleotide
aauucuacuugagugcgca

SEQ ID NO: 779271 - RNA, 19 nt, Artificial Sequence
  Description of Artificial Sequence: Synthetic oligonucleotide
uaaccuaucccagagcucu

SEQ ID NO: 779272 - RNA, 19 nt, Artificial Sequence
  Description of Artificial Sequence: Synthetic oligonucleotide
ucauaauugcagccacagg

SEQ ID NO: 779273 - RNA, 19 nt, Artificial Sequence
  Description of Artificial Sequence: Synthetic oligonucleotide
ucagaauaggugcuggcaa

SEQ ID NO: 779274 - RNA, 19 nt, Artificial Sequence
  Description of Artificial Sequence: Synthetic oligonucleotide
ucuucuaagguggggacag

SEQ ID NO: 779275 - RNA, 19 nt, Artificial Sequence
  Description of Artificial Sequence: Synthetic oligonucleotide
ucuguucuuugcuauaaaa

SEQ ID NO: 779276 - RNA, 19 nt, Artificial Sequence
  Description of Artificial Sequence: Synthetic oligonucleotide
aguagcaucagcucuggaa

SEQ ID NO: 779277 - RNA, 19 nt, Artificial Sequence
  Description of Artificial Sequence: Synthetic oligonucleotide
aguguugcaauguucucca

SEQ ID NO: 779278 - RNA, 19 nt, Artificial Sequence
  Description of Artificial Sequence: Synthetic oligonucleotide
cacauagaagugauuacug

SEQ ID NO: 779279 - RNA, 19 nt, Artificial Sequence
  Description of Artificial Sequence: Synthetic oligonucleotide
ugauuacugacuugcugcc

SEQ ID NO: 779280 - RNA, 19 nt, Artificial Sequence
  Description of Artificial Sequence: Synthetic oligonucleotide
cauugacugcucuuguucc

SEQ ID NO: 779281 - RNA, 19 nt, Artificial Sequence
  Description of Artificial Sequence: Synthetic oligonucleotide
aguugccacauguugucgg

SEQ ID NO: 779282 - RNA, 19 nt, Artificial Sequence
  Description of Artificial Sequence: Synthetic oligonucleotide
aaaacucagaauaggugcu

SEQ ID NO: 779283 - RNA, 19 nt, Artificial Sequence
  Description of Artificial Sequence: Synthetic oligonucleotide
cuggaaucccaauuaauuc

SEQ ID NO: 779284 - RNA, 19 nt, Artificial Sequence
  Description of Artificial Sequence: Synthetic oligonucleotide
uaguaaggggcaaaagccu

SEQ ID NO: 779285 - RNA, 19 nt, Artificial Sequence
  Description of Artificial Sequence: Synthetic oligonucleotide
cauaauugcagccacaggu

SEQ ID NO: 779286 - RNA, 19 nt, Artificial Sequence
  Description of Artificial Sequence: Synthetic oligonucleotide
aauaguuucuuaaccguau

SEQ ID NO: 779287 - RNA, 19 nt, Artificial Sequence
  Description of Artificial Sequence: Synthetic oligonucleotide
uucgagaaguagcaucagc

SEQ ID NO: 779288 - RNA, 19 nt, Artificial Sequence
  Description of Artificial Sequence: Synthetic oligonucleotide
aauaggugcuggcaauaga

SEQ ID NO: 779289 - RNA, 19 nt, Artificial Sequence
  Description of Artificial Sequence: Synthetic oligonucleotide
auggugguaguguucaucu

SEQ ID NO: 779290 - RNA, 19 nt, Artificial Sequence
  Description of Artificial Sequence: Synthetic oligonucleotide
uuagggaguguuuucugga

SEQ ID NO: 779291 - RNA, 19 nt, Artificial Sequence
  Description of Artificial Sequence: Synthetic oligonucleotide
uguucuuggaguagauuaa

SEQ ID NO: 779292 - RNA, 19 nt, Artificial Sequence
  Description of Artificial Sequence: Synthetic oligonucleotide
aagcgauccacuucuaauu

SEQ ID NO: 779293 - RNA, 19 nt, Artificial Sequence
  Description of Artificial Sequence: Synthetic oligonucleotide
ucauacguaggcauacaaa

SEQ ID NO: 779294 - RNA, 19 nt, Artificial Sequence
  Description of Artificial Sequence: Synthetic oligonucleotide
ucgaauugucucaaucacu

SEQ ID NO: 779295 - RNA, 19 nt, Artificial Sequence
  Description of Artificial Sequence: Synthetic oligonucleotide
uugaggauucgagaaguag

SEQ ID NO: 779296 - RNA, 19 nt, Artificial Sequence
  Description of Artificial Sequence: Synthetic oligonucleotide
acuucuguaguguugcaau

SEQ ID NO: 779297 - RNA, 19 nt, Artificial Sequence
  Description of Artificial Sequence: Synthetic oligonucleotide
aguugcaagacaguugucu

SEQ ID NO: 779298 - RNA, 19 nt, Artificial Sequence
  Description of Artificial Sequence: Synthetic oligonucleotide
cucgcgaaaacucagaaua

SEQ ID NO: 779299 - RNA, 19 nt, Artificial Sequence
  Description of Artificial Sequence: Synthetic oligonucleotide
uaagcgauccacuucuaau

SEQ ID NO: 779300 - RNA, 19 nt, Artificial Sequence
  Description of Artificial Sequence: Synthetic oligonucleotide
cuuaaccguauaaucucag

SEQ ID NO: 779301 - RNA, 19 nt, Artificial Sequence
  Description of Artificial Sequence: Synthetic oligonucleotide
uaaguuaggcccgugguaa

SEQ ID NO: 779302 - RNA, 19 nt, Artificial Sequence
  Description of Artificial Sequence: Synthetic oligonucleotide
cuuguuggcccugaggcgg

SEQ ID NO: 779303 - RNA, 19 nt, Artificial Sequence
  Description of Artificial Sequence: Synthetic oligonucleotide
aaguuaggcccgugguaac

SEQ ID NO: 779304 - RNA, 19 nt, Artificial Sequence
  Description of Artificial Sequence: Synthetic oligonucleotide
aguacucaugucuuaaguu

SEQ ID NO: 779305 - RNA, 19 nt, Artificial Sequence
  Description of Artificial Sequence: Synthetic oligonucleotide
gucauaauugcagccacag

SEQ ID NO: 779306 - RNA, 19 nt, Artificial Sequence
  Description of Artificial Sequence: Synthetic oligonucleotide
ucgcgaaaacucagaauag

SEQ ID NO: 779307 - RNA, 19 nt, Artificial Sequence
  Description of Artificial Sequence: Synthetic oligonucleotide
uaguuucuuaaccguauaa

SEQ ID NO: 779308 - RNA, 19 nt, Artificial Sequence
  Description of Artificial Sequence: Synthetic oligonucleotide
auaugcuuuugagaagccg

SEQ ID NO: 779309 - RNA, 19 nt, Artificial Sequence
  Description of Artificial Sequence: Synthetic oligonucleotide
uuuucucaacaauucuacu

SEQ ID NO: 779310 - RNA, 19 nt, Artificial Sequence
  Description of Artificial Sequence: Synthetic oligonucleotide
uuaaguuaggcccguggua

SEQ ID NO: 779311 - RNA, 19 nt, Artificial Sequence
  Description of Artificial Sequence: Synthetic oligonucleotide
accaaaggcaggccgaaug

SEQ ID NO: 779312 - RNA, 19 nt, Artificial Sequence
  Description of Artificial Sequence: Synthetic oligonucleotide
auuuguaaccuaucccaga

SEQ ID NO: 779313 - RNA, 19 nt, Artificial Sequence
  Description of Artificial Sequence: Synthetic oligonucleotide
acacauagaagugauuacu

SEQ ID NO: 779314 - RNA, 19 nt, Artificial Sequence
  Description of Artificial Sequence: Synthetic oligonucleotide
ugugucuguaguacucaug

SEQ ID NO: 779315 - RNA, 19 nt, Artificial Sequence
  Description of Artificial Sequence: Synthetic oligonucleotide
uguugucggaacagguuca

SEQ ID NO: 779316 - RNA, 19 nt, Artificial Sequence
  Description of Artificial Sequence: Synthetic oligonucleotide
ucuugcuagguguccgggg

SEQ ID NO: 779317 - RNA, 19 nt, Artificial Sequence
  Description of Artificial Sequence: Synthetic oligonucleotide
cuuuugagaagccguuccc

SEQ ID NO: 779318 - RNA, 19 nt, Artificial Sequence
  Description of Artificial Sequence: Synthetic oligonucleotide
uauuggguguagcacugga

SEQ ID NO: 779319 - RNA, 19 nt, Artificial Sequence
  Description of Artificial Sequence: Synthetic oligonucleotide
ucuacuugagugcgcaaau

SEQ ID NO: 779320 - RNA, 19 nt, Artificial Sequence
  Description of Artificial Sequence: Synthetic oligonucleotide
cuuggaucugagcacggag

SEQ ID NO: 779321 - RNA, 19 nt, Artificial Sequence
  Description of Artificial Sequence: Synthetic oligonucleotide
agcgauccacuucuaauug

SEQ ID NO: 779322 - RNA, 19 nt, Artificial Sequence
  Description of Artificial Sequence: Synthetic oligonucleotide
ucccauauuucccgaaggu

SEQ ID NO: 779323 - RNA, 19 nt, Artificial Sequence
  Description of Artificial Sequence: Synthetic oligonucleotide
uucuaauugcagcgcauuc

SEQ ID NO: 779324 - RNA, 19 nt, Artificial Sequence
  Description of Artificial Sequence: Synthetic oligonucleotide
ucuugcguacuuugccagg

SEQ ID NO: 779325 - RNA, 19 nt, Artificial Sequence
  Description of Artificial Sequence: Synthetic oligonucleotide
guagucgggauacagggga

SEQ ID NO: 779326 - RNA, 19 nt, Artificial Sequence
  Description of Artificial Sequence: Synthetic oligonucleotide
ugacccagucauaauugca

SEQ ID NO: 779327 - RNA, 19 nt, Artificial Sequence
  Description of Artificial Sequence: Synthetic oligonucleotide
gaauaguaaggggcaaaag

SEQ ID NO: 779328 - RNA, 19 nt, Artificial Sequence
  Description of Artificial Sequence: Synthetic oligonucleotide
gauacaugguuccaccaaa

SEQ ID NO: 779329 - RNA, 19 nt, Artificial Sequence
  Description of Artificial Sequence: Synthetic oligonucleotide
uguaguacucaugucuuaa

SEQ ID NO: 779330 - RNA, 19 nt, Artificial Sequence
  Description of Artificial Sequence: Synthetic oligonucleotide
uccucuggaaucccaauua

SEQ ID NO: 779331 - RNA, 19 nt, Artificial Sequence
  Description of Artificial Sequence: Synthetic oligonucleotide
cauagagcaucucugccuc

SEQ ID NO: 779332 - RNA, 19 nt, Artificial Sequence
  Description of Artificial Sequence: Synthetic oligonucleotide
ugacaaacugcucgugccu

SEQ ID NO: 779333 - RNA, 19 nt, Artificial Sequence
  Description of Artificial Sequence: Synthetic oligonucleotide
aguuucuuaaccguauaau

SEQ ID NO: 779334 - RNA, 19 nt, Artificial Sequence
  Description of Artificial Sequence: Synthetic oligonucleotide
cucuagguguuuucuuucc

SEQ ID NO: 779335 - RNA, 19 nt, Artificial Sequence
  Description of Artificial Sequence: Synthetic oligonucleotide
guacucaugucuuaaguua

SEQ ID NO: 779336 - RNA, 19 nt, Artificial Sequence
  Description of Artificial Sequence: Synthetic oligonucleotide
cuccaaccgauguaauucc

SEQ ID NO: 779337 - RNA, 19 nt, Artificial Sequence
  Description of Artificial Sequence: Synthetic oligonucleotide
agaagugauuacugacuug

SEQ ID NO: 779338 - RNA, 19 nt, Artificial Sequence
  Description of Artificial Sequence: Synthetic oligonucleotide
uaauuuccagcugcuguag

SEQ ID NO: 779339 - RNA, 19 nt, Artificial Sequence
  Description of Artificial Sequence: Synthetic oligonucleotide
uuguaaccuaucccagagc

SEQ ID NO: 779340 - RNA, 19 nt, Artificial Sequence
  Description of Artificial Sequence: Synthetic oligonucleotide
aggggaacgauacaugguu

SEQ ID NO: 779341 - RNA, 19 nt, Artificial Sequence
  Description of Artificial Sequence: Synthetic oligonucleotide
gagguagucgggauacagg

SEQ ID NO: 779342 - RNA, 19 nt, Artificial Sequence
  Description of Artificial Sequence: Synthetic oligonucleotide
gaggauucgagaaguagca

SEQ ID NO: 779343 - RNA, 19 nt, Artificial Sequence
  Description of Artificial Sequence: Synthetic oligonucleotide
caugaauuucugcccauuc

SEQ ID NO: 779344 - RNA, 19 nt, Artificial Sequence
  Description of Artificial Sequence: Synthetic oligonucleotide
cucaugucuuaaguuaggc

SEQ ID NO: 779345 - RNA, 19 nt, Artificial Sequence
  Description of Artificial Sequence: Synthetic oligonucleotide
cuaguugcaagacaguugu

SEQ ID NO: 779346 - RNA, 19 nt, Artificial Sequence
  Description of Artificial Sequence: Synthetic oligonucleotide
ucgguucuuuguaaucucu

SEQ ID NO: 779347 - RNA, 19 nt, Artificial Sequence
  Description of Artificial Sequence: Synthetic oligonucleotide
aguaacuucuguaguguug

SEQ ID NO: 779348 - RNA, 19 nt, Artificial Sequence
  Description of Artificial Sequence: Synthetic oligonucleotide
uagacuuaaugcugcaguu

SEQ ID NO: 779349 - RNA, 19 nt, Artificial Sequence
  Description of Artificial Sequence: Synthetic oligonucleotide
uccaaccgauguaauuccc

SEQ ID NO: 779350 - RNA, 19 nt, Artificial Sequence
  Description of Artificial Sequence: Synthetic oligonucleotide
gugguaacagaaccugccc

SEQ ID NO: 779351 - RNA, 19 nt, Artificial Sequence
  Description of Artificial Sequence: Synthetic oligonucleotide
accucgguucuuuguaauc

SEQ ID NO: 779352 - RNA, 19 nt, Artificial Sequence
  Description of Artificial Sequence: Synthetic oligonucleotide
aucauacguaggcauacaa

SEQ ID NO: 779353 - RNA, 19 nt, Artificial Sequence
  Description of Artificial Sequence: Synthetic oligonucleotide
uucuaguugcaagacaguu

SEQ ID NO: 779354 - RNA, 19 nt, Artificial Sequence
  Description of Artificial Sequence: Synthetic oligonucleotide
cacuuguaacucauugcac

SEQ ID NO: 779355 - RNA, 19 nt, Artificial Sequence
  Description of Artificial Sequence: Synthetic oligonucleotide
uucuacuugagugcgcaaa

SEQ ID NO: 779356 - RNA, 19 nt, Artificial Sequence
  Description of Artificial Sequence: Synthetic oligonucleotide
aaguucucgcgaaaacuca

SEQ ID NO: 779357 - RNA, 19 nt, Artificial Sequence
  Description of Artificial Sequence: Synthetic oligonucleotide
uugagugcgcaaaucuuuu

SEQ ID NO: 779358 - RNA, 19 nt, Artificial Sequence
  Description of Artificial Sequence: Synthetic oligonucleotide
cuggucaaggagucucagg

SEQ ID NO: 779359 - RNA, 19 nt, Artificial Sequence
  Description of Artificial Sequence: Synthetic oligonucleotide
acaaccucgguucuuugua

SEQ ID NO: 779360 - RNA, 19 nt, Artificial Sequence
  Description of Artificial Sequence: Synthetic oligonucleotide
cuugcguacuuugccaggc

SEQ ID NO: 779361 - RNA, 19 nt, Artificial Sequence
  Description of Artificial Sequence: Synthetic oligonucleotide
uggacaccuucaaauaguu

SEQ ID NO: 779362 - RNA, 19 nt, Artificial Sequence
  Description of Artificial Sequence: Synthetic oligonucleotide
cuucuaagcgauccacuuc

SEQ ID NO: 779363 - RNA, 19 nt, Artificial Sequence
  Description of Artificial Sequence: Synthetic oligonucleotide
aucccaauuaauucccaua

SEQ ID NO: 779364 - RNA, 19 nt, Artificial Sequence
  Description of Artificial Sequence: Synthetic oligonucleotide
gcaauagacuuaaugcugc

SEQ ID NO: 779365 - RNA, 19 nt, Artificial Sequence
  Description of Artificial Sequence: Synthetic oligonucleotide
gggaacgauacaugguucc

SEQ ID NO: 779366 - RNA, 19 nt, Artificial Sequence
  Description of Artificial Sequence: Synthetic oligonucleotide
ggaaucccaauuaauuccc

SEQ ID NO: 779367 - RNA, 19 nt, Artificial Sequence
  Description of Artificial Sequence: Synthetic oligonucleotide
aaccucgguucuuuguaau

SEQ ID NO: 779368 - RNA, 19 nt, Artificial Sequence
  Description of Artificial Sequence: Synthetic oligonucleotide
guaacauacuccaugaauu

SEQ ID NO: 779369 - RNA, 19 nt, Artificial Sequence
  Description of Artificial Sequence: Synthetic oligonucleotide
caauucuacuugagugcgc

SEQ ID NO: 779370 - RNA, 19 nt, Artificial Sequence
  Description of Artificial Sequence: Synthetic oligonucleotide
agcucuagguguuuucuuu

SEQ ID NO: 779371 - RNA, 19 nt, Artificial Sequence
  Description of Artificial Sequence: Synthetic oligonucleotide
auaguuucuuaaccguaua

SEQ ID NO: 779372 - RNA, 19 nt, Artificial Sequence
  Description of Artificial Sequence: Synthetic oligonucleotide
aguucucgcgaaaacucag

SEQ ID NO: 779373 - RNA, 19 nt, Artificial Sequence
  Description of Artificial Sequence: Synthetic oligonucleotide
uugcuagguguccggggag

SEQ ID NO: 779374 - RNA, 19 nt, Artificial Sequence
  Description of Artificial Sequence: Synthetic oligonucleotide
aggugcuggcaauagacuu

SEQ ID NO: 779375 - RNA, 19 nt, Artificial Sequence
  Description of Artificial Sequence: Synthetic oligonucleotide
acgauacaugguuccacca

SEQ ID NO: 779376 - RNA, 19 nt, Artificial Sequence
  Description of Artificial Sequence: Synthetic oligonucleotide
ucucgcgaaaacucagaau

SEQ ID NO: 779377 - RNA, 19 nt, Artificial Sequence
  Description of Artificial Sequence: Synthetic oligonucleotide
aaccgauguaauucccauu

SEQ ID NO: 779378 - RNA, 19 nt, Artificial Sequence
  Description of Artificial Sequence: Synthetic oligonucleotide
ugagcacggagcccuucgc

SEQ ID NO: 779379 - RNA, 19 nt, Artificial Sequence
  Description of Artificial Sequence: Synthetic oligonucleotide
gccgaaugcugcuauuggg

SEQ ID NO: 779380 - RNA, 19 nt, Artificial Sequence
  Description of Artificial Sequence: Synthetic oligonucleotide
gucgggauacaggggaacg

SEQ ID NO: 779381 - RNA, 19 nt, Artificial Sequence
  Description of Artificial Sequence: Synthetic oligonucleotide
uguccggggagcacugcca

SEQ ID NO: 779382 - RNA, 19 nt, Artificial Sequence
  Description of Artificial Sequence: Synthetic oligonucleotide
auacguaggcauacaaaga

SEQ ID NO: 779383 - RNA, 19 nt, Artificial Sequence
  Description of Artificial Sequence: Synthetic oligonucleotide
acucauugcacaggguacu

SEQ ID NO: 779384 - RNA, 19 nt, Artificial Sequence
  Description of Artificial Sequence: Synthetic oligonucleotide
gcuuguaucaggagugugc

SEQ ID NO: 779385 - RNA, 19 nt, Artificial Sequence
  Description of Artificial Sequence: Synthetic oligonucleotide
uaggcccgugguaacagaa

SEQ ID NO: 779386 - RNA, 19 nt, Artificial Sequence
  Description of Artificial Sequence: Synthetic oligonucleotide
cuugcuagguguccgggga

SEQ ID NO: 779387 - RNA, 19 nt, Artificial Sequence
  Description of Artificial Sequence: Synthetic oligonucleotide
ugguugaauugaggauucg

SEQ ID NO: 779388 - RNA, 19 nt, Artificial Sequence
  Description of Artificial Sequence: Synthetic oligonucleotide
ugcaagacaguugucucuu

SEQ ID NO: 779389 - RNA, 19 nt, Artificial Sequence
  Description of Artificial Sequence: Synthetic oligonucleotide
cucgguucuuuguaaucuc

SEQ ID NO: 779390 - RNA, 19 nt, Artificial Sequence
  Description of Artificial Sequence: Synthetic oligonucleotide
guuaggcccgugguaacag

SEQ ID NO: 779391 - RNA, 19 nt, Artificial Sequence
  Description of Artificial Sequence: Synthetic oligonucleotide
uuguugggagucaguccug

SEQ ID NO: 779392 - RNA, 19 nt, Artificial Sequence
  Description of Artificial Sequence: Synthetic oligonucleotide
ugucuguaguacucauguc

SEQ ID NO: 779393 - RNA, 19 nt, Artificial Sequence
  Description of Artificial Sequence: Synthetic oligonucleotide
cacuggucccagaacugag

SEQ ID NO: 779394 - RNA, 19 nt, Artificial Sequence
  Description of Artificial Sequence: Synthetic oligonucleotide
uucacaaccucgguucuuu

SEQ ID NO: 779395 - RNA, 19 nt, Artificial Sequence
  Description of Artificial Sequence: Synthetic oligonucleotide
aagugauuacugacuugcu

SEQ ID NO: 779396 - RNA, 19 nt, Artificial Sequence
  Description of Artificial Sequence: Synthetic oligonucleotide
cuuaaguuaggcccguggu

SEQ ID NO: 779397 - RNA, 19 nt, Artificial Sequence
  Description of Artificial Sequence: Synthetic oligonucleotide
ugcguacuuugccaggcuu

SEQ ID NO: 779398 - RNA, 19 nt, Artificial Sequence
  Description of Artificial Sequence: Synthetic oligonucleotide
ucgugccuagauuccuuug

SEQ ID NO: 779399 - RNA, 19 nt, Artificial Sequence
  Description of Artificial Sequence: Synthetic oligonucleotide
ucuuggaucugagcacgga

SEQ ID NO: 779400 - RNA, 19 nt, Artificial Sequence
  Description of Artificial Sequence: Synthetic oligonucleotide
guaguguugcaauguucuc

SEQ ID NO: 779401 - RNA, 19 nt, Artificial Sequence
  Description of Artificial Sequence: Synthetic oligonucleotide
ugccuagauuccuuuguuu

SEQ ID NO: 779402 - RNA, 19 nt, Artificial Sequence
  Description of Artificial Sequence: Synthetic oligonucleotide
cgugguaacagaaccugcc

SEQ ID NO: 779403 - RNA, 19 nt, Artificial Sequence
  Description of Artificial Sequence: Synthetic oligonucleotide
ggcccgugguaacagaacc

SEQ ID NO: 779404 - RNA, 19 nt, Artificial Sequence
  Description of Artificial Sequence: Synthetic oligonucleotide
ggccgaaugcugcuauugg

SEQ ID NO: 779405 - RNA, 19 nt, Artificial Sequence
  Description of Artificial Sequence: Synthetic oligonucleotide
uacccaccgcucagcaugc

SEQ ID NO: 779406 - RNA, 19 nt, Artificial Sequence
  Description of Artificial Sequence: Synthetic oligonucleotide
gaaggagguagucgggaua

SEQ ID NO: 779407 - RNA, 19 nt, Artificial Sequence
  Description of Artificial Sequence: Synthetic oligonucleotide
agcgcauuccugacuuugg

SEQ ID NO: 779408 - RNA, 19 nt, Artificial Sequence
  Description of Artificial Sequence: Synthetic oligonucleotide
uuaggcccgugguaacaga

SEQ ID NO: 779409 - RNA, 19 nt, Artificial Sequence
  Description of Artificial Sequence: Synthetic oligonucleotide
caauagacuuaaugcugca

SEQ ID NO: 779410 - RNA, 19 nt, Artificial Sequence
  Description of Artificial Sequence: Synthetic oligonucleotide
guaauucccauuguucugu

SEQ ID NO: 779411 - RNA, 19 nt, Artificial Sequence
  Description of Artificial Sequence: Synthetic oligonucleotide
caauaugauuuguuucuua

SEQ ID NO: 779412 - RNA, 19 nt, Artificial Sequence
  Description of Artificial Sequence: Synthetic oligonucleotide
uagguguccggggagcacu

SEQ ID NO: 779413 - RNA, 19 nt, Artificial Sequence
  Description of Artificial Sequence: Synthetic oligonucleotide
ucacaaccucgguucuuug

SEQ ID NO: 779414 - RNA, 19 nt, Artificial Sequence
  Description of Artificial Sequence: Synthetic oligonucleotide
ucgggauacaggggaacga

SEQ ID NO: 779415 - RNA, 19 nt, Artificial Sequence
  Description of Artificial Sequence: Synthetic oligonucleotide
cuuguucccacuuuucaau

SEQ ID NO: 779416 - RNA, 19 nt, Artificial Sequence
  Description of Artificial Sequence: Synthetic oligonucleotide
cugcucgugccuagauucc

SEQ ID NO: 779417 - RNA, 19 nt, Artificial Sequence
  Description of Artificial Sequence: Synthetic oligonucleotide
cacuucuaauugcagcgca

SEQ ID NO: 779418 - RNA, 19 nt, Artificial Sequence
  Description of Artificial Sequence: Synthetic oligonucleotide
ggagguagucgggauacag

SEQ ID NO: 779419 - RNA, 19 nt, Artificial Sequence
  Description of Artificial Sequence: Synthetic oligonucleotide
uugcguacuuugccaggcu

SEQ ID NO: 779420 - RNA, 19 nt, Artificial Sequence
  Description of Artificial Sequence: Synthetic oligonucleotide
cuccacucgaauugucuca

SEQ ID NO: 779421 - RNA, 19 nt, Artificial Sequence
  Description of Artificial Sequence: Synthetic oligonucleotide
uccagcuuagggaguguuu

SEQ ID NO: 779422 - RNA, 19 nt, Artificial Sequence
  Description of Artificial Sequence: Synthetic oligonucleotide
uccugacuuuggcuuuuga

SEQ ID NO: 779423 - RNA, 19 nt, Artificial Sequence
  Description of Artificial Sequence: Synthetic oligonucleotide
ccauugacugcucuuguuc

SEQ ID NO: 779424 - RNA, 19 nt, Artificial Sequence
  Description of Artificial Sequence: Synthetic oligonucleotide
aggccgaaugcugcuauug

SEQ ID NO: 779425 - RNA, 19 nt, Artificial Sequence
  Description of Artificial Sequence: Synthetic oligonucleotide
ugucuuaaguuaggcccgu

SEQ ID NO: 779426 - RNA, 19 nt, Artificial Sequence
  Description of Artificial Sequence: Synthetic oligonucleotide
uaauucccauuguucugua

SEQ ID NO: 779427 - RNA, 19 nt, Artificial Sequence
  Description of Artificial Sequence: Synthetic oligonucleotide
uuguaucaggagugugcuc

SEQ ID NO: 779428 - RNA, 19 nt, Artificial Sequence
  Description of Artificial Sequence: Synthetic oligonucleotide
aguuaggcccgugguaaca

SEQ ID NO: 779429 - RNA, 19 nt, Artificial Sequence
  Description of Artificial Sequence: Synthetic oligonucleotide
ucuaagcgauccacuucua

SEQ ID NO: 779430 - RNA, 19 nt, Artificial Sequence
  Description of Artificial Sequence: Synthetic oligonucleotide
ugcugacaaacugcucgug

SEQ ID NO: 779431 - RNA, 19 nt, Artificial Sequence
  Description of Artificial Sequence: Synthetic oligonucleotide
gaaucccaauuaauuccca

SEQ ID NO: 779432 - RNA, 19 nt, Artificial Sequence
  Description of Artificial Sequence: Synthetic oligonucleotide
agaauaggugcuggcaaua

SEQ ID NO: 779433 - RNA, 19 nt, Artificial Sequence
  Description of Artificial Sequence: Synthetic oligonucleotide
gguugaauugaggauucga

SEQ ID NO: 779434 - RNA, 19 nt, Artificial Sequence
  Description of Artificial Sequence: Synthetic oligonucleotide
gguagucgggauacagggg

SEQ ID NO: 779435 - RNA, 19 nt, Artificial Sequence
  Description of Artificial Sequence: Synthetic oligonucleotide
guagauuaaguuccugcuu

SEQ ID NO: 779436 - RNA, 19 nt, Artificial Sequence
  Description of Artificial Sequence: Synthetic oligonucleotide
auagagcaucucugccucu

SEQ ID NO: 779437 - RNA, 19 nt, Artificial Sequence
  Description of Artificial Sequence: Synthetic oligonucleotide
aaaccgacuuggaucugaa

SEQ ID NO: 779438 - RNA, 19 nt, Artificial Sequence
  Description of Artificial Sequence: Synthetic oligonucleotide
cuugagugcgcaaaucuuu

SEQ ID NO: 779439 - RNA, 19 nt, Artificial Sequence
  Description of Artificial Sequence: Synthetic oligonucleotide
guguccggggagcacugcc

SEQ ID NO: 779440 - RNA, 19 nt, Artificial Sequence
  Description of Artificial Sequence: Synthetic oligonucleotide
agcuccacucgaauugucu

SEQ ID NO: 779441 - RNA, 19 nt, Artificial Sequence
  Description of Artificial Sequence: Synthetic oligonucleotide
ggcaccaugucucauuaua

SEQ ID NO: 779442 - RNA, 19 nt, Artificial Sequence
  Description of Artificial Sequence: Synthetic oligonucleotide
cuuguaucaggagugugcu

SEQ ID NO: 779443 - RNA, 19 nt, Artificial Sequence
  Description of Artificial Sequence: Synthetic oligonucleotide
agucauaauugcagccaca

SEQ ID NO: 779444 - RNA, 19 nt, Artificial Sequence
  Description of Artificial Sequence: Synthetic oligonucleotide
cuaagcgauccacuucuaa

SEQ ID NO: 779445 - RNA, 19 nt, Artificial Sequence
  Description of Artificial Sequence: Synthetic oligonucleotide
ugcugcuauuggguguagc

SEQ ID NO: 779446 - RNA, 19 nt, Artificial Sequence
  Description of Artificial Sequence: Synthetic oligonucleotide
gcgucaugaagaugaagca

SEQ ID NO: 779447 - RNA, 19 nt, Artificial Sequence
  Description of Artificial Sequence: Synthetic oligonucleotide
cagcgcauuccugacuuug

SEQ ID NO: 779448 - RNA, 19 nt, Artificial Sequence
  Description of Artificial Sequence: Synthetic oligonucleotide
ccaauuaauucccauauuu

SEQ ID NO: 779449 - RNA, 19 nt, Artificial Sequence
  Description of Artificial Sequence: Synthetic oligonucleotide
gucgagccagaguacccac

SEQ ID NO: 779450 - RNA, 19 nt, Artificial Sequence
  Description of Artificial Sequence: Synthetic oligonucleotide
auucuacuugagugcgcaa

SEQ ID NO: 779451 - RNA, 19 nt, Artificial Sequence
  Description of Artificial Sequence: Synthetic oligonucleotide
gcaauguucuccaaugaua

SEQ ID NO: 779452 - RNA, 19 nt, Artificial Sequence
  Description of Artificial Sequence: Synthetic oligonucleotide
gcuaacuggucaaggaguc

SEQ ID NO: 779453 - RNA, 19 nt, Artificial Sequence
  Description of Artificial Sequence: Synthetic oligonucleotide
cuguaguaacuucuguagu

SEQ ID NO: 779454 - RNA, 19 nt, Artificial Sequence
  Description of Artificial Sequence: Synthetic oligonucleotide
gcuccacucgaauugucuc

SEQ ID NO: 779455 - RNA, 19 nt, Artificial Sequence
  Description of Artificial Sequence: Synthetic oligonucleotide
guaaccuaucccagagcuc

SEQ ID NO: 779456 - RNA, 19 nt, Artificial Sequence
  Description of Artificial Sequence: Synthetic oligonucleotide
acguaggcauacaaagaau

SEQ ID NO: 779457 - RNA, 19 nt, Artificial Sequence
  Description of Artificial Sequence: Synthetic oligonucleotide
ucgcacucugcuucauuuu

SEQ ID NO: 779458 - RNA, 19 nt, Artificial Sequence
  Description of Artificial Sequence: Synthetic oligonucleotide
ccacgguuuguaaaccgac

SEQ ID NO: 779459 - RNA, 19 nt, Artificial Sequence
  Description of Artificial Sequence: Synthetic oligonucleotide
cgcgaaaacucagaauagg

SEQ ID NO: 779460 - RNA, 19 nt, Artificial Sequence
  Description of Artificial Sequence: Synthetic oligonucleotide
cagcgucaugaagaugaag

SEQ ID NO: 779461 - RNA, 19 nt, Artificial Sequence
  Description of Artificial Sequence: Synthetic oligonucleotide
caaccucgguucuuuguaa

SEQ ID NO: 779462 - RNA, 19 nt, Artificial Sequence
  Description of Artificial Sequence: Synthetic oligonucleotide
ccccacgguuuguaaaccg

SEQ ID NO: 779463 - RNA, 19 nt, Artificial Sequence
  Description of Artificial Sequence: Synthetic oligonucleotide
gcgcauuccugacuuuggc

SEQ ID NO: 779464 - RNA, 19 nt, Artificial Sequence
  Description of Artificial Sequence: Synthetic oligonucleotide
uuccugacuuuggcuuuug

SEQ ID NO: 779465 - RNA, 19 nt, Artificial Sequence
  Description of Artificial Sequence: Synthetic oligonucleotide
cucuucuaagguggggaca

SEQ ID NO: 779466 - RNA, 19 nt, Artificial Sequence
  Description of Artificial Sequence: Synthetic oligonucleotide
caaccgauguaauucccau

SEQ ID NO: 779467 - RNA, 19 nt, Artificial Sequence
  Description of Artificial Sequence: Synthetic oligonucleotide
ggaacgauacaugguucca

SEQ ID NO: 779468 - RNA, 19 nt, Artificial Sequence
  Description of Artificial Sequence: Synthetic oligonucleotide
ccgugguaacagaaccugc

SEQ ID NO: 779469 - RNA, 19 nt, Artificial Sequence
  Description of Artificial Sequence: Synthetic oligonucleotide
cacgguuuguaaaccgacu

SEQ ID NO: 779470 - RNA, 19 nt, Artificial Sequence
  Description of Artificial Sequence: Synthetic oligonucleotide
agcccuucgcacucugcuu

SEQ ID NO: 779471 - RNA, 19 nt, Artificial Sequence
  Description of Artificial Sequence: Synthetic oligonucleotide
caucauacguaggcauaca

SEQ ID NO: 779472 - RNA, 19 nt, Artificial Sequence
  Description of Artificial Sequence: Synthetic oligonucleotide
ggggucgagccagaguacc

SEQ ID NO: 779473 - RNA, 19 nt, Artificial Sequence
  Description of Artificial Sequence: Synthetic oligonucleotide
ccaaccgauguaauuccca

SEQ ID NO: 779474 - RNA, 19 nt, Artificial Sequence
  Description of Artificial Sequence: Synthetic oligonucleotide
gcgaaaacucagaauaggu

SEQ ID NO: 779475 - RNA, 19 nt, Artificial Sequence
  Description of Artificial Sequence: Synthetic oligonucleotide
gcguacuuugccaggcuug

SEQ ID NO: 779476 - RNA, 19 nt, Artificial Sequence
  Description of Artificial Sequence: Synthetic oligonucleotide
cccgugguaacagaaccug

SEQ ID NO: 779477 - RNA, 19 nt, Artificial Sequence
  Description of Artificial Sequence: Synthetic oligonucleotide
auuccugacuuuggcuuuu

SEQ ID NO: 779478 - RNA, 19 nt, Artificial Sequence
  Description of Artificial Sequence: Synthetic oligonucleotide
cagaggugcuguccacauc

SEQ ID NO: 779479 - RNA, 19 nt, Artificial Sequence
  Description of Artificial Sequence: Synthetic oligonucleotide
guaucaggagugugcucua

SEQ ID NO: 779480 - RNA, 19 nt, Artificial Sequence
  Description of Artificial Sequence: Synthetic oligonucleotide
ggcuaacuggucaaggagu

SEQ ID NO: 779481 - RNA, 19 nt, Artificial Sequence
  Description of Artificial Sequence: Synthetic oligonucleotide
cagcuccacucgaauuguc

SEQ ID NO: 779482 - RNA, 19 nt, Artificial Sequence
  Description of Artificial Sequence: Synthetic oligonucleotide
cuuuugacccagucauaau

SEQ ID NO: 779483 - RNA, 19 nt, Artificial Sequence
  Description of Artificial Sequence: Synthetic oligonucleotide
ggucgagccagaguaccca

SEQ ID NO: 779484 - RNA, 19 nt, Artificial Sequence
  Description of Artificial Sequence: Synthetic oligonucleotide
ccgacuuggaucugaagcu

SEQ ID NO: 779485 - RNA, 19 nt, Artificial Sequence
  Description of Artificial Sequence: Synthetic oligonucleotide
ccguauaaucucagcguca

SEQ ID NO: 779486 - RNA, 19 nt, Artificial Sequence
  Description of Artificial Sequence: Synthetic oligonucleotide
ccauagagcaucucugccu

SEQ ID NO: 779487 - RNA, 19 nt, Artificial Sequence
  Description of Artificial Sequence: Synthetic oligonucleotide
cgaauugucucaaucacuu

SEQ ID NO: 779488 - RNA, 19 nt, Artificial Sequence
  Description of Artificial Sequence: Synthetic oligonucleotide
cccacgguuuguaaaccga

SEQ ID NO: 779489 - RNA, 19 nt, Artificial Sequence
  Description of Artificial Sequence: Synthetic oligonucleotide
gggucgagccagaguaccc

SEQ ID NO: 779490 - RNA, 19 nt, Artificial Sequence
  Description of Artificial Sequence: Synthetic oligonucleotide
guaacucauugcacagggu

SEQ ID NO: 779491 - RNA, 19 nt, Artificial Sequence
  Description of Artificial Sequence: Synthetic oligonucleotide
aaccuaucccagagcucuu

SEQ ID NO: 779492 - RNA, 19 nt, Artificial Sequence
  Description of Artificial Sequence: Synthetic oligonucleotide
aggagguagucgggauaca

SEQ ID NO: 779493 - RNA, 19 nt, Artificial Sequence
  Description of Artificial Sequence: Synthetic oligonucleotide
agguguccggggagcacug

SEQ ID NO: 779494 - RNA, 19 nt, Artificial Sequence
  Description of Artificial Sequence: Synthetic oligonucleotide
cuaacuggucaaggagucu

SEQ ID NO: 779495 - RNA, 19 nt, Artificial Sequence
  Description of Artificial Sequence: Synthetic oligonucleotide
gcuguccacaucauacgua

SEQ ID NO: 779496 - RNA, 19 nt, Artificial Sequence
  Description of Artificial Sequence: Synthetic oligonucleotide
cgauacaugguuccaccaa

SEQ ID NO: 779497 - RNA, 19 nt, Artificial Sequence
  Description of Artificial Sequence: Synthetic oligonucleotide
cucgugccuagauuccuuu

SEQ ID NO: 779498 - RNA, 19 nt, Artificial Sequence
  Description of Artificial Sequence: Synthetic oligonucleotide
ccucgguucuuuguaaucu

SEQ ID NO: 779499 - RNA, 19 nt, Artificial Sequence
  Description of Artificial Sequence: Synthetic oligonucleotide
gggauacaggggaacgaua

SEQ ID NO: 779500 - RNA, 19 nt, Artificial Sequence
  Description of Artificial Sequence: Synthetic oligonucleotide
gaaccugcccaaaguuguu

SEQ ID NO: 779501 - RNA, 19 nt, Artificial Sequence
  Description of Artificial Sequence: Synthetic oligonucleotide
acggagcccuucgcacucu

SEQ ID NO: 779502 - RNA, 19 nt, Artificial Sequence
  Description of Artificial Sequence: Synthetic oligonucleotide
gguguccggggagcacugc

SEQ ID NO: 779503 - RNA, 19 nt, Artificial Sequence
  Description of Artificial Sequence: Synthetic oligonucleotide
gccauugacugcucuuguu

SEQ ID NO: 779504 - RNA, 19 nt, Artificial Sequence
  Description of Artificial Sequence: Synthetic oligonucleotide
cguauaaucucagcgucau

SEQ ID NO: 779505 - RNA, 19 nt, Artificial Sequence
  Description of Artificial Sequence: Synthetic oligonucleotide
cccuucgcacucugcuuca

SEQ ID NO: 779506 - RNA, 19 nt, Artificial Sequence
  Description of Artificial Sequence: Synthetic oligonucleotide
acccaccgcucagcaugcu

SEQ ID NO: 779507 - RNA, 19 nt, Artificial Sequence
  Description of Artificial Sequence: Synthetic oligonucleotide
ccgauguaauucccauugu

SEQ ID NO: 779508 - RNA, 19 nt, Artificial Sequence
  Description of Artificial Sequence: Synthetic oligonucleotide
gcccgugguaacagaaccu

SEQ ID NO: 779509 - RNA, 19 nt, Artificial Sequence
  Description of Artificial Sequence: Synthetic oligonucleotide
ggcaggccgaaugcugcua

SEQ ID NO: 779510 - RNA, 19 nt, Artificial Sequence
  Description of Artificial Sequence: Synthetic oligonucleotide
gcucgugccuagauuccuu

SEQ ID NO: 779511 - RNA, 19 nt, Artificial Sequence
  Description of Artificial Sequence: Synthetic oligonucleotide
cgggauacaggggaacgau

SEQ ID NO: 779512 - RNA, 19 nt, Artificial Sequence
  Description of Artificial Sequence: Synthetic oligonucleotide
gcagcgcauuccugacuuu

SEQ ID NO: 779513 - RNA, 19 nt, Artificial Sequence
  Description of Artificial Sequence: Synthetic oligonucleotide
ccguucccucaggcucucc

SEQ ID NO: 779514 - RNA, 19 nt, Artificial Sequence
  Description of Artificial Sequence: Synthetic oligonucleotide
aauaucagcacugauacuc

SEQ ID NO: 779515 - RNA, 19 nt, Artificial Sequence
  Description of Artificial Sequence: Synthetic oligonucleotide
aauuuaagcauuccacagc

SEQ ID NO: 779516 - RNA, 19 nt, Artificial Sequence
  Description of Artificial Sequence: Synthetic oligonucleotide
aauggauacaccaaucugc

SEQ ID NO: 779517 - RNA, 19 nt, Artificial Sequence
  Description of Artificial Sequence: Synthetic oligonucleotide
auaaaauucacucacucug

SEQ ID NO: 779518 - RNA, 19 nt, Artificial Sequence
  Description of Artificial Sequence: Synthetic oligonucleotide
aauagguccaccaagauca

SEQ ID NO: 779519 - RNA, 19 nt, Artificial Sequence
  Description of Artificial Sequence: Synthetic oligonucleotide
auaaucauagguuucauca

SEQ ID NO: 779520 - RNA, 19 nt, Artificial Sequence
  Description of Artificial Sequence: Synthetic oligonucleotide
guucacaauaauuacacgg

SEQ ID NO: 779521 - RNA, 19 nt, Artificial Sequence
  Description of Artificial Sequence: Synthetic oligonucleotide
ucaauaucagcacugauac

SEQ ID NO: 779522 - RNA, 19 nt, Artificial Sequence
  Description of Artificial Sequence: Synthetic oligonucleotide
auuucuagaucuuuuaaag

SEQ ID NO: 779523 - RNA, 19 nt, Artificial Sequence
  Description of Artificial Sequence: Synthetic oligonucleotide
uggacuauuacuuuccucc

SEQ ID NO: 779524 - RNA, 19 nt, Artificial Sequence
  Description of Artificial Sequence: Synthetic oligonucleotide
uuguguaguaauaauaggu

SEQ ID NO: 779525 - RNA, 19 nt, Artificial Sequence
  Description of Artificial Sequence: Synthetic oligonucleotide
aaucguuucaauaucagca

SEQ ID NO: 779526 - RNA, 19 nt, Artificial Sequence
  Description of Artificial Sequence: Synthetic oligonucleotide
gauaauggcgucugcagcg

SEQ ID NO: 779527 - RNA, 19 nt, Artificial Sequence
  Description of Artificial Sequence: Synthetic oligonucleotide
uaauaauagguccaccaag

SEQ ID NO: 779528 - RNA, 19 nt, Artificial Sequence
  Description of Artificial Sequence: Synthetic oligonucleotide
aaacguuucuuacaaaaga

SEQ ID NO: 779529 - RNA, 19 nt, Artificial Sequence
  Description of Artificial Sequence: Synthetic oligonucleotide
cuugaugcacucuacaacc

SEQ ID NO: 779530 - RNA, 19 nt, Artificial Sequence
  Description of Artificial Sequence: Synthetic oligonucleotide
uguaguaauaauaggucca

SEQ ID NO: 779531 - RNA, 19 nt, Artificial Sequence
  Description of Artificial Sequence: Synthetic oligonucleotide
ucuaucguaagccauuaga

SEQ ID NO: 779532 - RNA, 19 nt, Artificial Sequence
  Description of Artificial Sequence: Synthetic oligonucleotide
ugaugggagacucagauau

SEQ ID NO: 779533 - RNA, 19 nt, Artificial Sequence
  Description of Artificial Sequence: Synthetic oligonucleotide
aaauggauacaccaaucug

SEQ ID NO: 779534 - RNA, 19 nt, Artificial Sequence
  Description of Artificial Sequence: Synthetic oligonucleotide
aagaggaagauuccuagcu

SEQ ID NO: 779535 - RNA, 19 nt, Artificial Sequence
  Description of Artificial Sequence: Synthetic oligonucleotide
aguaauaauagguccacca

SEQ ID NO: 779536 - RNA, 19 nt, Artificial Sequence
  Description of Artificial Sequence: Synthetic oligonucleotide
ucacaauaauuacacgggg

SEQ ID NO: 779537 - RNA, 19 nt, Artificial Sequence
  Description of Artificial Sequence: Synthetic oligonucleotide
aguguugguaauuuaagca

SEQ ID NO: 779538 - RNA, 19 nt, Artificial Sequence
  Description of Artificial Sequence: Synthetic oligonucleotide
uguguaguaauaauagguc

SEQ ID NO: 779539 - RNA, 19 nt, Artificial Sequence
  Description of Artificial Sequence: Synthetic oligonucleotide
aucauaaucucuucuagca

SEQ ID NO: 779540 - RNA, 19 nt, Artificial Sequence
  Description of Artificial Sequence: Synthetic oligonucleotide
ccuguaaugguaaugaucc

SEQ ID NO: 779541 - RNA, 19 nt, Artificial Sequence
  Description of Artificial Sequence: Synthetic oligonucleotide
auuuaagcauuccacagca

SEQ ID NO: 779542 - RNA, 19 nt, Artificial Sequence
  Description of Artificial Sequence: Synthetic oligonucleotide
ucgacgagggcucauauca

SEQ ID NO: 779543 - RNA, 19 nt, Artificial Sequence
  Description of Artificial Sequence: Synthetic oligonucleotide
aagauuucacuacaccuca

SEQ ID NO: 779544 - RNA, 19 nt, Artificial Sequence
  Description of Artificial Sequence: Synthetic oligonucleotide
aaaagagcguuacauucug

SEQ ID NO: 779545 - RNA, 19 nt, Artificial Sequence
  Description of Artificial Sequence: Synthetic oligonucleotide
agcacugauacucaguaug

SEQ ID NO: 779546 - RNA, 19 nt, Artificial Sequence
  Description of Artificial Sequence: Synthetic oligonucleotide
caaaaugcgcaguucaacc

SEQ ID NO: 779547 - RNA, 19 nt, Artificial Sequence
  Description of Artificial Sequence: Synthetic oligonucleotide
ugugcacguccuuugaugg

SEQ ID NO: 779548 - RNA, 19 nt, Artificial Sequence
  Description of Artificial Sequence: Synthetic oligonucleotide
ucuagaucuuuuaaaggcu

SEQ ID NO: 779549 - RNA, 19 nt, Artificial Sequence
  Description of Artificial Sequence: Synthetic oligonucleotide
gauacaccaaucugcaggc

SEQ ID NO: 779550 - RNA, 19 nt, Artificial Sequence
  Description of Artificial Sequence: Synthetic oligonucleotide
aucagcacugaacccaacc

SEQ ID NO: 779551 - RNA, 19 nt, Artificial Sequence
  Description of Artificial Sequence: Synthetic oligonucleotide
ucaacucgcagucaaaguc

SEQ ID NO: 779552 - RNA, 19 nt, Artificial Sequence
  Description of Artificial Sequence: Synthetic oligonucleotide
aagagcguuacauucugca

SEQ ID NO: 779553 - RNA, 19 nt, Artificial Sequence
  Description of Artificial Sequence: Synthetic oligonucleotide
acuuguguaguaauaauag

SEQ ID NO: 779554 - RNA, 19 nt, Artificial Sequence
  Description of Artificial Sequence: Synthetic oligonucleotide
uaggaauaaucauauccag

SEQ ID NO: 779555 - RNA, 19 nt, Artificial Sequence
  Description of Artificial Sequence: Synthetic oligonucleotide
caagaucaccguaugagcc

SEQ ID NO: 779556 - RNA, 19 nt, Artificial Sequence
  Description of Artificial Sequence: Synthetic oligonucleotide
ugcuccugacucaugacgg

SEQ ID NO: 779557 - RNA, 19 nt, Artificial Sequence
  Description of Artificial Sequence: Synthetic oligonucleotide
gaaucaacagucucaacuc

SEQ ID NO: 779558 - RNA, 19 nt, Artificial Sequence
  Description of Artificial Sequence: Synthetic oligonucleotide
ugguaauuuaagcauucca

SEQ ID NO: 779559 - RNA, 19 nt, Artificial Sequence
  Description of Artificial Sequence: Synthetic oligonucleotide
aaugauccgaucuuccgau

SEQ ID NO: 779560 - RNA, 19 nt, Artificial Sequence
  Description of Artificial Sequence: Synthetic oligonucleotide
guguaguaauaauaggucc

SEQ ID NO: 779561 - RNA, 19 nt, Artificial Sequence
  Description of Artificial Sequence: Synthetic oligonucleotide
cuugauuguugucugagug

SEQ ID NO: 779562 - RNA, 19 nt, Artificial Sequence
  Description of Artificial Sequence: Synthetic oligonucleotide
aucagauucgagcgggagc

SEQ ID NO: 779563 - RNA, 19 nt, Artificial Sequence
  Description of Artificial Sequence: Synthetic oligonucleotide
agguguucacaauaauuac

SEQ ID NO: 779564 - RNA, 19 nt, Artificial Sequence
  Description of Artificial Sequence: Synthetic oligonucleotide
uuacagugaccacaaagca

SEQ ID NO: 779565 - RNA, 19 nt, Artificial Sequence
  Description of Artificial Sequence: Synthetic oligonucleotide
uccuucuaaaggcucauca

SEQ ID NO: 779566 - RNA, 19 nt, Artificial Sequence
  Description of Artificial Sequence: Synthetic oligonucleotide
uguacggagagccuuaaua

SEQ ID NO: 779567 - RNA, 19 nt, Artificial Sequence
  Description of Artificial Sequence: Synthetic oligonucleotide
uuugaugaaucaacagucu

SEQ ID NO: 779568 - RNA, 19 nt, Artificial Sequence
  Description of Artificial Sequence: Synthetic oligonucleotide
guagggaugauuuucuuca

SEQ ID NO: 779569 - RNA, 19 nt, Artificial Sequence
  Description of Artificial Sequence: Synthetic oligonucleotide
uaagccauuagaucucccc

SEQ ID NO: 779570 - RNA, 19 nt, Artificial Sequence
  Description of Artificial Sequence: Synthetic oligonucleotide
agcguuacauucugcacac

SEQ ID NO: 779571 - RNA, 19 nt, Artificial Sequence
  Description of Artificial Sequence: Synthetic oligonucleotide
uaaugauccgaucuuccga

SEQ ID NO: 779572 - RNA, 19 nt, Artificial Sequence
  Description of Artificial Sequence: Synthetic oligonucleotide
aaacagaggauaauggcgu

SEQ ID NO: 779573 - RNA, 19 nt, Artificial Sequence
  Description of Artificial Sequence: Synthetic oligonucleotide
uguaaugguaaugauccga

SEQ ID NO: 779574 - RNA, 19 nt, Artificial Sequence
  Description of Artificial Sequence: Synthetic oligonucleotide
caaccaugccaucauagcg

SEQ ID NO: 779575 - RNA, 19 nt, Artificial Sequence
  Description of Artificial Sequence: Synthetic oligonucleotide
uccaaucguuucaauauca

SEQ ID NO: 779576 - RNA, 19 nt, Artificial Sequence
  Description of Artificial Sequence: Synthetic oligonucleotide
uccucuucuaucguaagcc

SEQ ID NO: 779577 - RNA, 19 nt, Artificial Sequence
  Description of Artificial Sequence: Synthetic oligonucleotide
acuauuacuuuccucccug

SEQ ID NO: 779578 - RNA, 19 nt, Artificial Sequence
  Description of Artificial Sequence: Synthetic oligonucleotide
ucauuguaaaaccaccaua

SEQ ID NO: 779579 - RNA, 19 nt, Artificial Sequence
  Description of Artificial Sequence: Synthetic oligonucleotide
caucauaaucucuucuagc

SEQ ID NO: 779580 - RNA, 19 nt, Artificial Sequence
  Description of Artificial Sequence: Synthetic oligonucleotide
caccguaugagccacgacc

SEQ ID NO: 779581 - RNA, 19 nt, Artificial Sequence
  Description of Artificial Sequence: Synthetic oligonucleotide
aacagaggauaauggcguc

SEQ ID NO: 779582 - RNA, 19 nt, Artificial Sequence
  Description of Artificial Sequence: Synthetic oligonucleotide
aagaucaccguaugagcca

SEQ ID NO: 779583 - RNA, 19 nt, Artificial Sequence
  Description of Artificial Sequence: Synthetic oligonucleotide
agagcguuacauucugcac

SEQ ID NO: 779584 - RNA, 19 nt, Artificial Sequence
  Description of Artificial Sequence: Synthetic oligonucleotide
uucugucaaaaccaccucu

SEQ ID NO: 779585 - RNA, 19 nt, Artificial Sequence
  Description of Artificial Sequence: Synthetic oligonucleotide
uugguuucgguguugggga

SEQ ID NO: 779586 - RNA, 19 nt, Artificial Sequence
  Description of Artificial Sequence: Synthetic oligonucleotide
ucaguaugcgcucggggcc

SEQ ID NO: 779587 - RNA, 19 nt, Artificial Sequence
  Description of Artificial Sequence: Synthetic oligonucleotide
cucaguaugcgcucggggc

SEQ ID NO: 779588 - RNA, 19 nt, Artificial Sequence
  Description of Artificial Sequence: Synthetic oligonucleotide
ucgaaguucuuuaauuuua

SEQ ID NO: 779589 - RNA, 19 nt, Artificial Sequence
  Description of Artificial Sequence: Synthetic oligonucleotide
agccuuaauauucuugccu

SEQ ID NO: 779590 - RNA, 19 nt, Artificial Sequence
  Description of Artificial Sequence: Synthetic oligonucleotide
ucagauucgagcgggagcu

SEQ ID NO: 779591 - RNA, 19 nt, Artificial Sequence
  Description of Artificial Sequence: Synthetic oligonucleotide
cuccaugugucaauugccg

SEQ ID NO: 779592 - RNA, 19 nt, Artificial Sequence
  Description of Artificial Sequence: Synthetic oligonucleotide
uaucguaagccauuagauc

SEQ ID NO: 779593 - RNA, 19 nt, Artificial Sequence
  Description of Artificial Sequence: Synthetic oligonucleotide
ucaacagucucaacucgca

SEQ ID NO: 779594 - RNA, 19 nt, Artificial Sequence
  Description of Artificial Sequence: Synthetic oligonucleotide
uugccaauaauggauccag

SEQ ID NO: 779595 - RNA, 19 nt, Artificial Sequence
  Description of Artificial Sequence: Synthetic oligonucleotide
acugaacccaaccaugcca

SEQ ID NO: 779596 - RNA, 19 nt, Artificial Sequence
  Description of Artificial Sequence: Synthetic oligonucleotide
aauguuacagugaccacaa

SEQ ID NO: 779597 - RNA, 19 nt, Artificial Sequence
  Description of Artificial Sequence: Synthetic oligonucleotide
ggcauuguagucuguacgg

SEQ ID NO: 779598 - RNA, 19 nt, Artificial Sequence
  Description of Artificial Sequence: Synthetic oligonucleotide
uugauuguugucugagugu

SEQ ID NO: 779599 - RNA, 19 nt, Artificial Sequence
  Description of Artificial Sequence: Synthetic oligonucleotide
gauaucaggucaaggauga

SEQ ID NO: 779600 - RNA, 19 nt, Artificial Sequence
  Description of Artificial Sequence: Synthetic oligonucleotide
ucaauugccgagucccaag

SEQ ID NO: 779601 - RNA, 19 nt, Artificial Sequence
  Description of Artificial Sequence: Synthetic oligonucleotide
auaaucauauccagaacca

SEQ ID NO: 779602 - RNA, 19 nt, Artificial Sequence
  Description of Artificial Sequence: Synthetic oligonucleotide
accguaugagccacgaccc

SEQ ID NO: 779603 - RNA, 19 nt, Artificial Sequence
  Description of Artificial Sequence: Synthetic oligonucleotide
gacucugucaguggagugg

SEQ ID NO: 779604 - RNA, 19 nt, Artificial Sequence
  Description of Artificial Sequence: Synthetic oligonucleotide
uccacggcggucaucaaac

SEQ ID NO: 779605 - RNA, 19 nt, Artificial Sequence
  Description of Artificial Sequence: Synthetic oligonucleotide
auaguguugguaauuuaag

SEQ ID NO: 779606 - RNA, 19 nt, Artificial Sequence
  Description of Artificial Sequence: Synthetic oligonucleotide
gauacucaguaugcgcucg

SEQ ID NO: 779607 - RNA, 19 nt, Artificial Sequence
  Description of Artificial Sequence: Synthetic oligonucleotide
aaaccaccauaaucauagg

SEQ ID NO: 779608 - RNA, 19 nt, Artificial Sequence
  Description of Artificial Sequence: Synthetic oligonucleotide
uucuugaauuaaauggaua

SEQ ID NO: 779609 - RNA, 19 nt, Artificial Sequence
  Description of Artificial Sequence: Synthetic oligonucleotide
gagcguuacauucugcaca

SEQ ID NO: 779610 - RNA, 19 nt, Artificial Sequence
  Description of Artificial Sequence: Synthetic oligonucleotide
uugugcacguccuuugaug

SEQ ID NO: 779611 - RNA, 19 nt, Artificial Sequence
  Description of Artificial Sequence: Synthetic oligonucleotide
ucucgaaguucuuuaauuu

SEQ ID NO: 779612 - RNA, 19 nt, Artificial Sequence
  Description of Artificial Sequence: Synthetic oligonucleotide
ugacucaugacggauuugu

SEQ ID NO: 779613 - RNA, 19 nt, Artificial Sequence
  Description of Artificial Sequence: Synthetic oligonucleotide
uuugauugaugcuccugac

SEQ ID NO: 779614 - RNA, 19 nt, Artificial Sequence
  Description of Artificial Sequence: Synthetic oligonucleotide
acgacggucggcgacgucc

SEQ ID NO: 779615 - RNA, 19 nt, Artificial Sequence
  Description of Artificial Sequence: Synthetic oligonucleotide
cucaugggaaaucccacag

SEQ ID NO: 779616 - RNA, 19 nt, Artificial Sequence
  Description of Artificial Sequence: Synthetic oligonucleotide
ucacuaaauuuauuuuaaa

SEQ ID NO: 779617 - RNA, 19 nt, Artificial Sequence
  Description of Artificial Sequence: Synthetic oligonucleotide
cauauccagaaccacccug

SEQ ID NO: 779618 - RNA, 19 nt, Artificial Sequence
  Description of Artificial Sequence: Synthetic oligonucleotide
gggauaguuacuuguguag

SEQ ID NO: 779619 - RNA, 19 nt, Artificial Sequence
  Description of Artificial Sequence: Synthetic oligonucleotide
acucaguaugcgcucgggg

SEQ ID NO: 779620 - RNA, 19 nt, Artificial Sequence
  Description of Artificial Sequence: Synthetic oligonucleotide
cauagguuucaucauaaaa

SEQ ID NO: 779621 - RNA, 19 nt, Artificial Sequence
  Description of Artificial Sequence: Synthetic oligonucleotide
gggagacucagauaucagg

SEQ ID NO: 779622 - RNA, 19 nt, Artificial Sequence
  Description of Artificial Sequence: Synthetic oligonucleotide
auaauuccuccugccaaac

SEQ ID NO: 779623 - RNA, 19 nt, Artificial Sequence
  Description of Artificial Sequence: Synthetic oligonucleotide
auaauggcgucugcagcgc

SEQ ID NO: 779624 - RNA, 19 nt, Artificial Sequence
  Description of Artificial Sequence: Synthetic oligonucleotide
uacugugcguucuguaucu

SEQ ID NO: 779625 - RNA, 19 nt, Artificial Sequence
  Description of Artificial Sequence: Synthetic oligonucleotide
gauaguuacuuguguagua

SEQ ID NO: 779626 - RNA, 19 nt, Artificial Sequence
  Description of Artificial Sequence: Synthetic oligonucleotide
ucgagcgggagcuggcugg

SEQ ID NO: 779627 - RNA, 19 nt, Artificial Sequence
  Description of Artificial Sequence: Synthetic oligonucleotide
auuguaaaaccaccauaau

SEQ ID NO: 779628 - RNA, 19 nt, Artificial Sequence
  Description of Artificial Sequence: Synthetic oligonucleotide
guuacuuguguaguaauaa

SEQ ID NO: 779629 - RNA, 19 nt, Artificial Sequence
  Description of Artificial Sequence: Synthetic oligonucleotide
aaguugggaucauaagguu

SEQ ID NO: 779630 - RNA, 19 nt, Artificial Sequence
  Description of Artificial Sequence: Synthetic oligonucleotide
acucaugacggauuuguuu

SEQ ID NO: 779631 - RNA, 19 nt, Artificial Sequence
  Description of Artificial Sequence: Synthetic oligonucleotide
uguggacuauuacuuuccu

SEQ ID NO: 779632 - RNA, 19 nt, Artificial Sequence
  Description of Artificial Sequence: Synthetic oligonucleotide
uugguaauuuaagcauucc

SEQ ID NO: 779633 - RNA, 19 nt, Artificial Sequence
  Description of Artificial Sequence: Synthetic oligonucleotide
gggaucauaagguugugca

SEQ ID NO: 779634 - RNA, 19 nt, Artificial Sequence
  Description of Artificial Sequence: Synthetic oligonucleotide
gauuucacuacaccucaaa

SEQ ID NO: 779635 - RNA, 19 nt, Artificial Sequence
  Description of Artificial Sequence: Synthetic oligonucleotide
uucuaucguaagccauuag

SEQ ID NO: 779636 - RNA, 19 nt, Artificial Sequence
  Description of Artificial Sequence: Synthetic oligonucleotide
gcguuuuccaaauucacca

SEQ ID NO: 779637 - RNA, 19 nt, Artificial Sequence
  Description of Artificial Sequence: Synthetic oligonucleotide
uucugaugggcuccaugug

SEQ ID NO: 779638 - RNA, 19 nt, Artificial Sequence
  Description of Artificial Sequence: Synthetic oligonucleotide
agaucaccguaugagccac

SEQ ID NO: 779639 - RNA, 19 nt, Artificial Sequence
  Description of Artificial Sequence: Synthetic oligonucleotide
ugggagacucagauaucag

SEQ ID NO: 779640 - RNA, 19 nt, Artificial Sequence
  Description of Artificial Sequence: Synthetic oligonucleotide
ugauuguugucugaguguu

SEQ ID NO: 779641 - RNA, 19 nt, Artificial Sequence
  Description of Artificial Sequence: Synthetic oligonucleotide
uccaugugucaauugccga

SEQ ID NO: 779642 - RNA, 19 nt, Artificial Sequence
  Description of Artificial Sequence: Synthetic oligonucleotide
gagacucagauaucagguc

SEQ ID NO: 779643 - RNA, 19 nt, Artificial Sequence
  Description of Artificial Sequence: Synthetic oligonucleotide
guucauaagccaucugcca

SEQ ID NO: 779644 - RNA, 19 nt, Artificial Sequence
  Description of Artificial Sequence: Synthetic oligonucleotide
auaguuacuuguguaguaa

SEQ ID NO: 779645 - RNA, 19 nt, Artificial Sequence
  Description of Artificial Sequence: Synthetic oligonucleotide
agcuugauuguugucugag

SEQ ID NO: 779646 - RNA, 19 nt, Artificial Sequence
  Description of Artificial Sequence: Synthetic oligonucleotide
cuguaaugguaaugauccg

SEQ ID NO: 779647 - RNA, 19 nt, Artificial Sequence
  Description of Artificial Sequence: Synthetic oligonucleotide
uaauggcgucugcagcgcg

SEQ ID NO: 779648 - RNA, 19 nt, Artificial Sequence
  Description of Artificial Sequence: Synthetic oligonucleotide
uuauaguguugguaauuua

SEQ ID NO: 779649 - RNA, 19 nt, Artificial Sequence
  Description of Artificial Sequence: Synthetic oligonucleotide
caauguuacagugaccaca

SEQ ID NO: 779650 - RNA, 19 nt, Artificial Sequence
  Description of Artificial Sequence: Synthetic oligonucleotide
accaucucaucuguauuuc

SEQ ID NO: 779651 - RNA, 19 nt, Artificial Sequence
  Description of Artificial Sequence: Synthetic oligonucleotide
acggcggucaucaaacauc

SEQ ID NO: 779652 - RNA, 19 nt, Artificial Sequence
  Description of Artificial Sequence: Synthetic oligonucleotide
auacucaguaugcgcucgg

SEQ ID NO: 779653 - RNA, 19 nt, Artificial Sequence
  Description of Artificial Sequence: Synthetic oligonucleotide
augggagacucagauauca

SEQ ID NO: 779654 - RNA, 19 nt, Artificial Sequence
  Description of Artificial Sequence: Synthetic oligonucleotide
ggaagguuucuucuggcug

SEQ ID NO: 779655 - RNA, 19 nt, Artificial Sequence
  Description of Artificial Sequence: Synthetic oligonucleotide
ucguaagccauuagaucuc

SEQ ID NO: 779656 - RNA, 19 nt, Artificial Sequence
  Description of Artificial Sequence: Synthetic oligonucleotide
cugugcguucuguaucugg

SEQ ID NO: 779657 - RNA, 19 nt, Artificial Sequence
  Description of Artificial Sequence: Synthetic oligonucleotide
auugccgagucccaaguuu

SEQ ID NO: 779658 - RNA, 19 nt, Artificial Sequence
  Description of Artificial Sequence: Synthetic oligonucleotide
acgagcacgacggucggcg

SEQ ID NO: 779659 - RNA, 19 nt, Artificial Sequence
  Description of Artificial Sequence: Synthetic oligonucleotide
ugauacucaguaugcgcuc

SEQ ID NO: 779660 - RNA, 19 nt, Artificial Sequence
  Description of Artificial Sequence: Synthetic oligonucleotide
aggaauaaucauauccaga

SEQ ID NO: 779661 - RNA, 19 nt, Artificial Sequence
  Description of Artificial Sequence: Synthetic oligonucleotide
aggcauucugucaaaacca

SEQ ID NO: 779662 - RNA, 19 nt, Artificial Sequence
  Description of Artificial Sequence: Synthetic oligonucleotide
uugccgagucccaaguuuc

SEQ ID NO: 779663 - RNA, 19 nt, Artificial Sequence
  Description of Artificial Sequence: Synthetic oligonucleotide
uaauuccuccugccaaacu

SEQ ID NO: 779664 - RNA, 19 nt, Artificial Sequence
  Description of Artificial Sequence: Synthetic oligonucleotide
ugucaauugccgaguccca

SEQ ID NO: 779665 - RNA, 19 nt, Artificial Sequence
  Description of Artificial Sequence: Synthetic oligonucleotide
ugcacguccuuugauggga

SEQ ID NO: 779666 - RNA, 19 nt, Artificial Sequence
  Description of Artificial Sequence: Synthetic oligonucleotide
accuaugaagcagaggaau

SEQ ID NO: 779667 - RNA, 19 nt, Artificial Sequence
  Description of Artificial Sequence: Synthetic oligonucleotide
caacucgcagucaaaguca

SEQ ID NO: 779668 - RNA, 19 nt, Artificial Sequence
  Description of Artificial Sequence: Synthetic oligonucleotide
uccucucaugggaaauccc

SEQ ID NO: 779669 - RNA, 19 nt, Artificial Sequence
  Description of Artificial Sequence: Synthetic oligonucleotide
gaacgacucugucagugga

SEQ ID NO: 779670 - RNA, 19 nt, Artificial Sequence
  Description of Artificial Sequence: Synthetic oligonucleotide
aagcuugauuguugucuga

SEQ ID NO: 779671 - RNA, 19 nt, Artificial Sequence
  Description of Artificial Sequence: Synthetic oligonucleotide
cacugauacucaguaugcg

SEQ ID NO: 779672 - RNA, 19 nt, Artificial Sequence
  Description of Artificial Sequence: Synthetic oligonucleotide
agaacaccuaugaagcaga

SEQ ID NO: 779673 - RNA, 19 nt, Artificial Sequence
  Description of Artificial Sequence: Synthetic oligonucleotide
ucauagguuucaucauaaa

SEQ ID NO: 779674 - RNA, 19 nt, Artificial Sequence
  Description of Artificial Sequence: Synthetic oligonucleotide
agggaugauuuucuucaga

SEQ ID NO: 779675 - RNA, 19 nt, Artificial Sequence
  Description of Artificial Sequence: Synthetic oligonucleotide
aacgacucugucaguggag

SEQ ID NO: 779676 - RNA, 19 nt, Artificial Sequence
  Description of Artificial Sequence: Synthetic oligonucleotide
cagggcguuuuccaaauuc

SEQ ID NO: 779677 - RNA, 19 nt, Artificial Sequence
  Description of Artificial Sequence: Synthetic oligonucleotide
ugggaucauaagguugugc

SEQ ID NO: 779678 - RNA, 19 nt, Artificial Sequence
  Description of Artificial Sequence: Synthetic oligonucleotide
cuaucguaagccauuagau

SEQ ID NO: 779679 - RNA, 19 nt, Artificial Sequence
  Description of Artificial Sequence: Synthetic oligonucleotide
gcaugggacgcccagcccg

SEQ ID NO: 779680 - RNA, 19 nt, Artificial Sequence
  Description of Artificial Sequence: Synthetic oligonucleotide
caccauaaucauagguuuc

SEQ ID NO: 779681 - RNA, 19 nt, Artificial Sequence
  Description of Artificial Sequence: Synthetic oligonucleotide
uacucaguaugcgcucggg

SEQ ID NO: 779682 - RNA, 19 nt, Artificial Sequence
  Description of Artificial Sequence: Synthetic oligonucleotide
aauugccgagucccaaguu

SEQ ID NO: 779683 - RNA, 19 nt, Artificial Sequence
  Description of Artificial Sequence: Synthetic oligonucleotide
gccuuaauauucuugccuc

SEQ ID NO: 779684 - RNA, 19 nt, Artificial Sequence
  Description of Artificial Sequence: Synthetic oligonucleotide
gguaaugauccgaucuucc

SEQ ID NO: 779685 - RNA, 19 nt, Artificial Sequence
  Description of Artificial Sequence: Synthetic oligonucleotide
cugauacucaguaugcgcu

SEQ ID NO: 779686 - RNA, 19 nt, Artificial Sequence
  Description of Artificial Sequence: Synthetic oligonucleotide
ugcaggacuccuucaguuc

SEQ ID NO: 779687 - RNA, 19 nt, Artificial Sequence
  Description of Artificial Sequence: Synthetic oligonucleotide
ggcucauaucaucauaauc

SEQ ID NO: 779688 - RNA, 19 nt, Artificial Sequence
  Description of Artificial Sequence: Synthetic oligonucleotide
augauccgaucuuccgauc

SEQ ID NO: 779689 - RNA, 19 nt, Artificial Sequence
  Description of Artificial Sequence: Synthetic oligonucleotide
gaacccaaccaugccauca

SEQ ID NO: 779690 - RNA, 19 nt, Artificial Sequence
  Description of Artificial Sequence: Synthetic oligonucleotide
gguagggaugauuuucuuc

SEQ ID NO: 779691 - RNA, 19 nt, Artificial Sequence
  Description of Artificial Sequence: Synthetic oligonucleotide
acauguggacuauuacuuu

SEQ ID NO: 779692 - RNA, 19 nt, Artificial Sequence
  Description of Artificial Sequence: Synthetic oligonucleotide
ugucugggacugaaacacu

SEQ ID NO: 779693 - RNA, 19 nt, Artificial Sequence
  Description of Artificial Sequence: Synthetic oligonucleotide
uucuuacaaaagagcguua

SEQ ID NO: 779694 - RNA, 19 nt, Artificial Sequence
  Description of Artificial Sequence: Synthetic oligonucleotide
ccaugugucaauugccgag

SEQ ID NO: 779695 - RNA, 19 nt, Artificial Sequence
  Description of Artificial Sequence: Synthetic oligonucleotide
ggacuauuacuuuccuccc

SEQ ID NO: 779696 - RNA, 19 nt, Artificial Sequence
  Description of Artificial Sequence: Synthetic oligonucleotide
auacaccaaucugcaggcc

SEQ ID NO: 779697 - RNA, 19 nt, Artificial Sequence
  Description of Artificial Sequence: Synthetic oligonucleotide
gagucccaaguuucaucag

SEQ ID NO: 779698 - RNA, 19 nt, Artificial Sequence
  Description of Artificial Sequence: Synthetic oligonucleotide
acucuacaacccugucagg

SEQ ID NO: 779699 - RNA, 19 nt, Artificial Sequence
  Description of Artificial Sequence: Synthetic oligonucleotide
gaacaccuaugaagcagag

SEQ ID NO: 779700 - RNA, 19 nt, Artificial Sequence
  Description of Artificial Sequence: Synthetic oligonucleotide
ggaucauaagguugugcac

SEQ ID NO: 779701 - RNA, 19 nt, Artificial Sequence
  Description of Artificial Sequence: Synthetic oligonucleotide
cagaggauaauggcgucug

SEQ ID NO: 779702 - RNA, 19 nt, Artificial Sequence
  Description of Artificial Sequence: Synthetic oligonucleotide
caaaagagcguuacauucu

SEQ ID NO: 779703 - RNA, 19 nt, Artificial Sequence
  Description of Artificial Sequence: Synthetic oligonucleotide
guacggagagccuuaauau

SEQ ID NO: 779704 - RNA, 19 nt, Artificial Sequence
  Description of Artificial Sequence: Synthetic oligonucleotide
ccuaugaagcagaggaaug

SEQ ID NO: 779705 - RNA, 19 nt, Artificial Sequence
  Description of Artificial Sequence: Synthetic oligonucleotide
ccaaucguuucaauaucag

SEQ ID NO: 779706 - RNA, 19 nt, Artificial Sequence
  Description of Artificial Sequence: Synthetic oligonucleotide
ugcaggccgcacccgggcg

SEQ ID NO: 779707 - RNA, 19 nt, Artificial Sequence
  Description of Artificial Sequence: Synthetic oligonucleotide
agcacgacggucggcgacg

SEQ ID NO: 779708 - RNA, 19 nt, Artificial Sequence
  Description of Artificial Sequence: Synthetic oligonucleotide
caucagauucgagcgggag

SEQ ID NO: 779709 - RNA, 19 nt, Artificial Sequence
  Description of Artificial Sequence: Synthetic oligonucleotide
aacaaaugccagggacaug

SEQ ID NO: 779710 - RNA, 19 nt, Artificial Sequence
  Description of Artificial Sequence: Synthetic oligonucleotide
gugcacguccuuugauggg

SEQ ID NO: 779711 - RNA, 19 nt, Artificial Sequence
  Description of Artificial Sequence: Synthetic oligonucleotide
cgcgagacgagcacgacgg

SEQ ID NO: 779712 - RNA, 19 nt, Artificial Sequence
  Description of Artificial Sequence: Synthetic oligonucleotide
ucuaggugguggcggugga

SEQ ID NO: 779713 - RNA, 19 nt, Artificial Sequence
  Description of Artificial Sequence: Synthetic oligonucleotide
agcauuccacagcaucaga

SEQ ID NO: 779714 - RNA, 19 nt, Artificial Sequence
  Description of Artificial Sequence: Synthetic oligonucleotide
ggcguuuuccaaauucacc

SEQ ID NO: 779715 - RNA, 19 nt, Artificial Sequence
  Description of Artificial Sequence: Synthetic oligonucleotide
acguccacggcggucauca

SEQ ID NO: 779716 - RNA, 19 nt, Artificial Sequence
  Description of Artificial Sequence: Synthetic oligonucleotide
cuacaccucaaaugcagaa

SEQ ID NO: 779717 - RNA, 19 nt, Artificial Sequence
  Description of Artificial Sequence: Synthetic oligonucleotide
aguuacuuguguaguaaua

SEQ ID NO: 779718 - RNA, 19 nt, Artificial Sequence
  Description of Artificial Sequence: Synthetic oligonucleotide
agggcguuuuccaaauuca

SEQ ID NO: 779719 - RNA, 19 nt, Artificial Sequence
  Description of Artificial Sequence: Synthetic oligonucleotide
uucaaccaucucaucugua

SEQ ID NO: 779720 - RNA, 19 nt, Artificial Sequence
  Description of Artificial Sequence: Synthetic oligonucleotide
ucgcagucaaagucacuuc

SEQ ID NO: 779721 - RNA, 19 nt, Artificial Sequence
  Description of Artificial Sequence: Synthetic oligonucleotide
uaagaacgacucugucagu

SEQ ID NO: 779722 - RNA, 19 nt, Artificial Sequence
  Description of Artificial Sequence: Synthetic oligonucleotide
gucacuuccuuuauagugu

SEQ ID NO: 779723 - RNA, 19 nt, Artificial Sequence
  Description of Artificial Sequence: Synthetic oligonucleotide
uccaugucuucugcagggc

SEQ ID NO: 779724 - RNA, 19 nt, Artificial Sequence
  Description of Artificial Sequence: Synthetic oligonucleotide
gacuauuacuuuccucccu

SEQ ID NO: 779725 - RNA, 19 nt, Artificial Sequence
  Description of Artificial Sequence: Synthetic oligonucleotide
acgagggcucauaucauca

SEQ ID NO: 779726 - RNA, 19 nt, Artificial Sequence
  Description of Artificial Sequence: Synthetic oligonucleotide
acgacucugucaguggagu

SEQ ID NO: 779727 - RNA, 19 nt, Artificial Sequence
  Description of Artificial Sequence: Synthetic oligonucleotide
auaauggauccagccaaau

SEQ ID NO: 779728 - RNA, 19 nt, Artificial Sequence
  Description of Artificial Sequence: Synthetic oligonucleotide
gaacaaaugccagggacau

SEQ ID NO: 779729 - RNA, 19 nt, Artificial Sequence
  Description of Artificial Sequence: Synthetic oligonucleotide
augcgcucggggccacugc

SEQ ID NO: 779730 - RNA, 19 nt, Artificial Sequence
  Description of Artificial Sequence: Synthetic oligonucleotide
caaggaugaucuugaugca

SEQ ID NO: 779731 - RNA, 19 nt, Artificial Sequence
  Description of Artificial Sequence: Synthetic oligonucleotide
agcggggaaacagaggaua

SEQ ID NO: 779732 - RNA, 19 nt, Artificial Sequence
  Description of Artificial Sequence: Synthetic oligonucleotide
aucaccguaugagccacga

SEQ ID NO: 779733 - RNA, 19 nt, Artificial Sequence
  Description of Artificial Sequence: Synthetic oligonucleotide
gcacugauacucaguaugc

SEQ ID NO: 779734 - RNA, 19 nt, Artificial Sequence
  Description of Artificial Sequence: Synthetic oligonucleotide
gcaaaaugcgcaguucaac

SEQ ID NO: 779735 - RNA, 19 nt, Artificial Sequence
  Description of Artificial Sequence: Synthetic oligonucleotide
guaaugguaaugauccgau

SEQ ID NO: 779736 - RNA, 19 nt, Artificial Sequence
  Description of Artificial Sequence: Synthetic oligonucleotide
ucauaaaaguugggaucau

SEQ ID NO: 779737 - RNA, 19 nt, Artificial Sequence
  Description of Artificial Sequence: Synthetic oligonucleotide
ucaccguaugagccacgac

SEQ ID NO: 779738 - RNA, 19 nt, Artificial Sequence
  Description of Artificial Sequence: Synthetic oligonucleotide
cuaugaagcagaggaaugu

SEQ ID NO: 779739 - RNA, 19 nt, Artificial Sequence
  Description of Artificial Sequence: Synthetic oligonucleotide
ugcgcaguucaaccaucuc

SEQ ID NO: 779740 - RNA, 19 nt, Artificial Sequence
  Description of Artificial Sequence: Synthetic oligonucleotide
cuguucggucuccauuuuc

SEQ ID NO: 779741 - RNA, 19 nt, Artificial Sequence
  Description of Artificial Sequence: Synthetic oligonucleotide
agcaccuuugacaccaaua

SEQ ID NO: 779742 - RNA, 19 nt, Artificial Sequence
  Description of Artificial Sequence: Synthetic oligonucleotide
ugaccaccuuugccaauaa

SEQ ID NO: 779743 - RNA, 19 nt, Artificial Sequence
  Description of Artificial Sequence: Synthetic oligonucleotide
agucuguacggagagccuu

SEQ ID NO: 779744 - RNA, 19 nt, Artificial Sequence
  Description of Artificial Sequence: Synthetic oligonucleotide
gaucaccguaugagccacg

SEQ ID NO: 779745 - RNA, 19 nt, Artificial Sequence
  Description of Artificial Sequence: Synthetic oligonucleotide
cagaaccacccugugguuc

SEQ ID NO: 779746 - RNA, 19 nt, Artificial Sequence
  Description of Artificial Sequence: Synthetic oligonucleotide
auucaccauugguuucggu

SEQ ID NO: 779747 - RNA, 19 nt, Artificial Sequence
  Description of Artificial Sequence: Synthetic oligonucleotide
gcuccaugugucaauugcc

SEQ ID NO: 779748 - RNA, 19 nt, Artificial Sequence
  Description of Artificial Sequence: Synthetic oligonucleotide
gaugggagacucagauauc

SEQ ID NO: 779749 - RNA, 19 nt, Artificial Sequence
  Description of Artificial Sequence: Synthetic oligonucleotide
gagcacgacggucggcgac

SEQ ID NO: 779750 - RNA, 19 nt, Artificial Sequence
  Description of Artificial Sequence: Synthetic oligonucleotide
ggggaagguuucuucuggc

SEQ ID NO: 779751 - RNA, 19 nt, Artificial Sequence
  Description of Artificial Sequence: Synthetic oligonucleotide
cauagcgguccccaggucu

SEQ ID NO: 779752 - RNA, 19 nt, Artificial Sequence
  Description of Artificial Sequence: Synthetic oligonucleotide
gauccgaucuuccgauccu

SEQ ID NO: 779753 - RNA, 19 nt, Artificial Sequence
  Description of Artificial Sequence: Synthetic oligonucleotide
ggggauaguuacuugugua

SEQ ID NO: 779754 - RNA, 19 nt, Artificial Sequence
  Description of Artificial Sequence: Synthetic oligonucleotide
ucuguacggagagccuuaa

SEQ ID NO: 779755 - RNA, 19 nt, Artificial Sequence
  Description of Artificial Sequence: Synthetic oligonucleotide
ggcauucugucaaaaccac

SEQ ID NO: 779756 - RNA, 19 nt, Artificial Sequence
  Description of Artificial Sequence: Synthetic oligonucleotide
ggcgucugcagcgcggugg

SEQ ID NO: 779757 - RNA, 19 nt, Artificial Sequence
  Description of Artificial Sequence: Synthetic oligonucleotide
ugguuucgguguuggggaa

SEQ ID NO: 779758 - RNA, 19 nt, Artificial Sequence
  Description of Artificial Sequence: Synthetic oligonucleotide
ucucuccaaucguuucaau

SEQ ID NO: 779759 - RNA, 19 nt, Artificial Sequence
  Description of Artificial Sequence: Synthetic oligonucleotide
cucgaaguucuuuaauuuu

SEQ ID NO: 779760 - RNA, 19 nt, Artificial Sequence
  Description of Artificial Sequence: Synthetic oligonucleotide
uuccaagguagggaugauu

SEQ ID NO: 779761 - RNA, 19 nt, Artificial Sequence
  Description of Artificial Sequence: Synthetic oligonucleotide
gucggcgacguccgugcag

SEQ ID NO: 779762 - RNA, 19 nt, Artificial Sequence
  Description of Artificial Sequence: Synthetic oligonucleotide
gaggcaugggacgcccagc

SEQ ID NO: 779763 - RNA, 19 nt, Artificial Sequence
  Description of Artificial Sequence: Synthetic oligonucleotide
gcgcgagacgagcacgacg

SEQ ID NO: 779764 - RNA, 19 nt, Artificial Sequence
  Description of Artificial Sequence: Synthetic oligonucleotide
ucauaagguugugcacguc

SEQ ID NO: 779765 - RNA, 19 nt, Artificial Sequence
  Description of Artificial Sequence: Synthetic oligonucleotide
gccaaacuuugaugaauca

SEQ ID NO: 779766 - RNA, 19 nt, Artificial Sequence
  Description of Artificial Sequence: Synthetic oligonucleotide
cucaacucgcagucaaagu

SEQ ID NO: 779767 - RNA, 19 nt, Artificial Sequence
  Description of Artificial Sequence: Synthetic oligonucleotide
caccaagaucaccguauga

SEQ ID NO: 779768 - RNA, 19 nt, Artificial Sequence
  Description of Artificial Sequence: Synthetic oligonucleotide
aguaugcgcucggggccac

SEQ ID NO: 779769 - RNA, 19 nt, Artificial Sequence
  Description of Artificial Sequence: Synthetic oligonucleotide
augcgcaguucaaccaucu

SEQ ID NO: 779770 - RNA, 19 nt, Artificial Sequence
  Description of Artificial Sequence: Synthetic oligonucleotide
cuucuaucguaagccauua

SEQ ID NO: 779771 - RNA, 19 nt, Artificial Sequence
  Description of Artificial Sequence: Synthetic oligonucleotide
cuuuauaguguugguaauu

SEQ ID NO: 779772 - RNA, 19 nt, Artificial Sequence
  Description of Artificial Sequence: Synthetic oligonucleotide
caacccuguuuguaaggaa

SEQ ID NO: 779773 - RNA, 19 nt, Artificial Sequence
  Description of Artificial Sequence: Synthetic oligonucleotide
cucgcagucaaagucacuu

SEQ ID NO: 779774 - RNA, 19 nt, Artificial Sequence
  Description of Artificial Sequence: Synthetic oligonucleotide
ccgaccaggaggcauucug

SEQ ID NO: 779775 - RNA, 19 nt, Artificial Sequence
  Description of Artificial Sequence: Synthetic oligonucleotide
gcauaggaauaaucauauc

SEQ ID NO: 779776 - RNA, 19 nt, Artificial Sequence
  Description of Artificial Sequence: Synthetic oligonucleotide
cucuucuaucguaagccau

SEQ ID NO: 779777 - RNA, 19 nt, Artificial Sequence
  Description of Artificial Sequence: Synthetic oligonucleotide
ccaauguuacagugaccac

SEQ ID NO: 779778 - RNA, 19 nt, Artificial Sequence
  Description of Artificial Sequence: Synthetic oligonucleotide
gucaauugccgagucccaa

SEQ ID NO: 779779 - RNA, 19 nt, Artificial Sequence
  Description of Artificial Sequence: Synthetic oligonucleotide
gguuucgguguuggggaag

SEQ ID NO: 779780 - RNA, 19 nt, Artificial Sequence
  Description of Artificial Sequence: Synthetic oligonucleotide
cugacucaugacggauuug

SEQ ID NO: 779781 - RNA, 19 nt, Artificial Sequence
  Description of Artificial Sequence: Synthetic oligonucleotide
ccacaaagcaagguguuca

SEQ ID NO: 779782 - RNA, 19 nt, Artificial Sequence
  Description of Artificial Sequence: Synthetic oligonucleotide
caauugccgagucccaagu

SEQ ID NO: 779783 - RNA, 19 nt, Artificial Sequence
  Description of Artificial Sequence: Synthetic oligonucleotide
acugugcguucuguaucug

SEQ ID NO: 779784 - RNA, 19 nt, Artificial Sequence
  Description of Artificial Sequence: Synthetic oligonucleotide
gggcguuuuccaaauucac

SEQ ID NO: 779785 - RNA, 19 nt, Artificial Sequence
  Description of Artificial Sequence: Synthetic oligonucleotide
auguuacagugaccacaaa

SEQ ID NO: 779786 - RNA, 19 nt, Artificial Sequence
  Description of Artificial Sequence: Synthetic oligonucleotide
agauuucacuacaccucaa

SEQ ID NO: 779787 - RNA, 19 nt, Artificial Sequence
  Description of Artificial Sequence: Synthetic oligonucleotide
auggcgucugcagcgcggu

SEQ ID NO: 779788 - RNA, 19 nt, Artificial Sequence
  Description of Artificial Sequence: Synthetic oligonucleotide
gcaggacuccuucaguucu

SEQ ID NO: 779789 - RNA, 19 nt, Artificial Sequence
  Description of Artificial Sequence: Synthetic oligonucleotide
guugugcacguccuuugau

SEQ ID NO: 779790 - RNA, 19 nt, Artificial Sequence
  Description of Artificial Sequence: Synthetic oligonucleotide
caauaucagcacugauacu

SEQ ID NO: 779791 - RNA, 19 nt, Artificial Sequence
  Description of Artificial Sequence: Synthetic oligonucleotide
ccccaacccuguuuguaag

SEQ ID NO: 779792 - RNA, 19 nt, Artificial Sequence
  Description of Artificial Sequence: Synthetic oligonucleotide
ccucuucuaucguaagcca

SEQ ID NO: 779793 - RNA, 19 nt, Artificial Sequence
  Description of Artificial Sequence: Synthetic oligonucleotide
gcauuguagucuguacgga

SEQ ID NO: 779794 - RNA, 19 nt, Artificial Sequence
  Description of Artificial Sequence: Synthetic oligonucleotide
cguaagccauuagaucucc

SEQ ID NO: 779795 - RNA, 19 nt, Artificial Sequence
  Description of Artificial Sequence: Synthetic oligonucleotide
gcucaucaauuuugauuga

SEQ ID NO: 779796 - RNA, 19 nt, Artificial Sequence
  Description of Artificial Sequence: Synthetic oligonucleotide
gggaaaucccacaggacgu

SEQ ID NO: 779797 - RNA, 19 nt, Artificial Sequence
  Description of Artificial Sequence: Synthetic oligonucleotide
uggcgucugcagcgcggug

SEQ ID NO: 779798 - RNA, 19 nt, Artificial Sequence
  Description of Artificial Sequence: Synthetic oligonucleotide
auaucaggucaaggaugau

SEQ ID NO: 779799 - RNA, 19 nt, Artificial Sequence
  Description of Artificial Sequence: Synthetic oligonucleotide
gugguccucgacgagggcu

SEQ ID NO: 779800 - RNA, 19 nt, Artificial Sequence
  Description of Artificial Sequence: Synthetic oligonucleotide
cacguccuuugaugggaga

SEQ ID NO: 779801 - RNA, 19 nt, Artificial Sequence
  Description of Artificial Sequence: Synthetic oligonucleotide
caggccgcacccgggcgcg

SEQ ID NO: 779802 - RNA, 19 nt, Artificial Sequence
  Description of Artificial Sequence: Synthetic oligonucleotide
ccgugcagcggggaaacag

SEQ ID NO: 779803 - RNA, 19 nt, Artificial Sequence
  Description of Artificial Sequence: Synthetic oligonucleotide
caguaugcgcucggggcca

SEQ ID NO: 779804 - RNA, 19 nt, Artificial Sequence
  Description of Artificial Sequence: Synthetic oligonucleotide
ccccaauguuacagugacc

SEQ ID NO: 779805 - RNA, 19 nt, Artificial Sequence
  Description of Artificial Sequence: Synthetic oligonucleotide
gucuguacggagagccuua

SEQ ID NO: 779806 - RNA, 19 nt, Artificial Sequence
  Description of Artificial Sequence: Synthetic oligonucleotide
gcuccugacucaugacgga

SEQ ID NO: 779807 - RNA, 19 nt, Artificial Sequence
  Description of Artificial Sequence: Synthetic oligonucleotide
ccaacccuguuuguaagga

SEQ ID NO: 779808 - RNA, 19 nt, Artificial Sequence
  Description of Artificial Sequence: Synthetic oligonucleotide
augggacgcccagcccgac

SEQ ID NO: 779809 - RNA, 19 nt, Artificial Sequence
  Description of Artificial Sequence: Synthetic oligonucleotide
cugaagcaaaaugcgcagu

SEQ ID NO: 779810 - RNA, 19 nt, Artificial Sequence
  Description of Artificial Sequence: Synthetic oligonucleotide
cagauucgagcgggagcug

SEQ ID NO: 779811 - RNA, 19 nt, Artificial Sequence
  Description of Artificial Sequence: Synthetic oligonucleotide
acucgcagucaaagucacu

SEQ ID NO: 779812 - RNA, 19 nt, Artificial Sequence
  Description of Artificial Sequence: Synthetic oligonucleotide
ccguaugagccacgacccc

SEQ ID NO: 779813 - RNA, 19 nt, Artificial Sequence
  Description of Artificial Sequence: Synthetic oligonucleotide
cagcgcgguggccgggagc

SEQ ID NO: 779814 - RNA, 19 nt, Artificial Sequence
  Description of Artificial Sequence: Synthetic oligonucleotide
aaccacccugugguucaua

SEQ ID NO: 779815 - RNA, 19 nt, Artificial Sequence
  Description of Artificial Sequence: Synthetic oligonucleotide
cggcggucaucaaacauca

SEQ ID NO: 779816 - RNA, 19 nt, Artificial Sequence
  Description of Artificial Sequence: Synthetic oligonucleotide
gccccagcauucuugcucu

SEQ ID NO: 779817 - RNA, 19 nt, Artificial Sequence
  Description of Artificial Sequence: Synthetic oligonucleotide
gacguccgugcagcgggga

SEQ ID NO: 779818 - RNA, 19 nt, Artificial Sequence
  Description of Artificial Sequence: Synthetic oligonucleotide
cgacggucggcgacguccg

SEQ ID NO: 779819 - RNA, 19 nt, Artificial Sequence
  Description of Artificial Sequence: Synthetic oligonucleotide
cggucggcgacguccgugc

SEQ ID NO: 779820 - RNA, 19 nt, Artificial Sequence
  Description of Artificial Sequence: Synthetic oligonucleotide
cgugcagcggggaaacaga

SEQ ID NO: 779821 - RNA, 19 nt, Artificial Sequence
  Description of Artificial Sequence: Synthetic oligonucleotide
gcguucuguaucugguccu

SEQ ID NO: 779822 - RNA, 19 nt, Artificial Sequence
  Description of Artificial Sequence: Synthetic oligonucleotide
caccaaucugcaggccgca

SEQ ID NO: 779823 - RNA, 19 nt, Artificial Sequence
  Description of Artificial Sequence: Synthetic oligonucleotide
cguucuguaucugguccug

SEQ ID NO: 779824 - RNA, 19 nt, Artificial Sequence
  Description of Artificial Sequence: Synthetic oligonucleotide
cgacucugucaguggagug

SEQ ID NO: 779825 - RNA, 19 nt, Artificial Sequence
  Description of Artificial Sequence: Synthetic oligonucleotide
ggacugaaacacuggcauu

SEQ ID NO: 779826 - RNA, 19 nt, Artificial Sequence
  Description of Artificial Sequence: Synthetic oligonucleotide
cuccugacucaugacggau

SEQ ID NO: 779827 - RNA, 19 nt, Artificial Sequence
  Description of Artificial Sequence: Synthetic oligonucleotide
cacgacggucggcgacguc

SEQ ID NO: 779828 - RNA, 19 nt, Artificial Sequence
  Description of Artificial Sequence: Synthetic oligonucleotide
ccgggcgcgagacgagcac

SEQ ID NO: 779829 - RNA, 19 nt, Artificial Sequence
  Description of Artificial Sequence: Synthetic oligonucleotide
cagcggggaaacagaggau

SEQ ID NO: 779830 - RNA, 19 nt, Artificial Sequence
  Description of Artificial Sequence: Synthetic oligonucleotide
cuguacggagagccuuaau

SEQ ID NO: 779831 - RNA, 19 nt, Artificial Sequence
  Description of Artificial Sequence: Synthetic oligonucleotide
cgacguccgugcagcgggg

SEQ ID NO: 779832 - RNA, 19 nt, Artificial Sequence
  Description of Artificial Sequence: Synthetic oligonucleotide
ggucggcgacguccgugca

SEQ ID NO: 779833 - RNA, 19 nt, Artificial Sequence
  Description of Artificial Sequence: Synthetic oligonucleotide
gacggucggcgacguccgu

SEQ ID NO: 779834 - RNA, 19 nt, Artificial Sequence
  Description of Artificial Sequence: Synthetic oligonucleotide
gguccucgacgagggcuca

SEQ ID NO: 779835 - RNA, 19 nt, Artificial Sequence
  Description of Artificial Sequence: Synthetic oligonucleotide
cacuggcauuguagucugu

SEQ ID NO: 779836 - RNA, 19 nt, Artificial Sequence
  Description of Artificial Sequence: Synthetic oligonucleotide
gcgcucggggccacugcug

SEQ ID NO: 779837 - RNA, 19 nt, Artificial Sequence
  Description of Artificial Sequence: Synthetic oligonucleotide
ccccagcauucuugcucug

SEQ ID NO: 779838 - RNA, 19 nt, Artificial Sequence
  Description of Artificial Sequence: Synthetic oligonucleotide
cccgggcgcgagacgagca

SEQ ID NO: 779839 - RNA, 19 nt, Artificial Sequence
  Description of Artificial Sequence: Synthetic oligonucleotide
ccgcacccgggcgcgagac

SEQ ID NO: 779840 - RNA, 19 nt, Artificial Sequence
  Description of Artificial Sequence: Synthetic oligonucleotide
cgcacccgggcgcgagacg

SEQ ID NO: 779841 - RNA, 19 nt, Artificial Sequence
  Description of Artificial Sequence: Synthetic oligonucleotide
gcccgaccaggaggcauuc

SEQ ID NO: 779842 - RNA, 19 nt, Artificial Sequence
  Description of Artificial Sequence: Synthetic oligonucleotide
ccucgacgagggcucauau

SEQ ID NO: 779843 - RNA, 19 nt, Artificial Sequence
  Description of Artificial Sequence: Synthetic oligonucleotide
gcgagacgagcacgacggu

SEQ ID NO: 779844 - RNA, 19 nt, Artificial Sequence
  Description of Artificial Sequence: Synthetic oligonucleotide
guaugcgcucggggccacu

SEQ ID NO: 779845 - RNA, 19 nt, Artificial Sequence
  Description of Artificial Sequence: Synthetic oligonucleotide
cgagcacgacggucggcga

SEQ ID NO: 779846 - RNA, 19 nt, Artificial Sequence
  Description of Artificial Sequence: Synthetic oligonucleotide
guccucgacgagggcucau

SEQ ID NO: 779847 - RNA, 19 nt, Artificial Sequence
  Description of Artificial Sequence: Synthetic oligonucleotide
gcguuacauucugcacacu

SEQ ID NO: 779848 - RNA, 19 nt, Artificial Sequence
  Description of Artificial Sequence: Synthetic oligonucleotide
cgacgagggcucauaucau

SEQ ID NO: 779849 - RNA, 19 nt, Artificial Sequence
  Description of Artificial Sequence: Synthetic oligonucleotide
ggcggucaucaaacaucau

SEQ ID NO: 779850 - RNA, 19 nt, Artificial Sequence
  Description of Artificial Sequence: Synthetic oligonucleotide
cguccacggcggucaucaa

SEQ ID NO: 779851 - RNA, 19 nt, Artificial Sequence
  Description of Artificial Sequence: Synthetic oligonucleotide
cccgaccaggaggcauucu

SEQ ID NO: 779852 - RNA, 19 nt, Artificial Sequence
  Description of Artificial Sequence: Synthetic oligonucleotide
uuuauacugagaaagaucg

SEQ ID NO: 779853 - RNA, 19 nt, Artificial Sequence
  Description of Artificial Sequence: Synthetic oligonucleotide
aaaccgaucugacaggucc

SEQ ID NO: 779854 - RNA, 19 nt, Artificial Sequence
  Description of Artificial Sequence: Synthetic oligonucleotide
aauucuguauguuacuuuc

SEQ ID NO: 779855 - RNA, 19 nt, Artificial Sequence
  Description of Artificial Sequence: Synthetic oligonucleotide
uuguuuaucaccauguaug

SEQ ID NO: 779856 - RNA, 19 nt, Artificial Sequence
  Description of Artificial Sequence: Synthetic oligonucleotide
uguauucaaacccaaauga

SEQ ID NO: 779857 - RNA, 19 nt, Artificial Sequence
  Description of Artificial Sequence: Synthetic oligonucleotide
uuuuacuccaacaucuagg

SEQ ID NO: 779858 - RNA, 19 nt, Artificial Sequence
  Description of Artificial Sequence: Synthetic oligonucleotide
uggaauauagcgaaaucgg

SEQ ID NO: 779859 - RNA, 19 nt, Artificial Sequence
  Description of Artificial Sequence: Synthetic oligonucleotide
aauauagcgaaaucggugu

SEQ ID NO: 779860 - RNA, 19 nt, Artificial Sequence
  Description of Artificial Sequence: Synthetic oligonucleotide
acaaguuucauuuccgugg

SEQ ID NO: 779861 - RNA, 19 nt, Artificial Sequence
  Description of Artificial Sequence: Synthetic oligonucleotide
uaaaauauggcuccacaag

SEQ ID NO: 779862 - RNA, 19 nt, Artificial Sequence
  Description of Artificial Sequence: Synthetic oligonucleotide
aagagaauuuuccuuauca

SEQ ID NO: 779863 - RNA, 19 nt, Artificial Sequence
  Description of Artificial Sequence: Synthetic oligonucleotide
acaaccuugguguucagac

SEQ ID NO: 779864 - RNA, 19 nt, Artificial Sequence
  Description of Artificial Sequence: Synthetic oligonucleotide
aaucuuaaacuaucuucac

SEQ ID NO: 779865 - RNA, 19 nt, Artificial Sequence
  Description of Artificial Sequence: Synthetic oligonucleotide
caugucacuaaagagaucc

SEQ ID NO: 779866 - RNA, 19 nt, Artificial Sequence
  Description of Artificial Sequence: Synthetic oligonucleotide
uuggcuaauaagcaggccc

SEQ ID NO: 779867 - RNA, 19 nt, Artificial Sequence
  Description of Artificial Sequence: Synthetic oligonucleotide
uuuuagcaacucuacaggg

SEQ ID NO: 779868 - RNA, 19 nt, Artificial Sequence
  Description of Artificial Sequence: Synthetic oligonucleotide
uuuauucauaaguaucugc

SEQ ID NO: 779869 - RNA, 19 nt, Artificial Sequence
  Description of Artificial Sequence: Synthetic oligonucleotide
uauucaaacccaaaugacu

SEQ ID NO: 779870 - RNA, 19 nt, Artificial Sequence
  Description of Artificial Sequence: Synthetic oligonucleotide
ucuacagggauuuaacuga

SEQ ID NO: 779871 - RNA, 19 nt, Artificial Sequence
  Description of Artificial Sequence: Synthetic oligonucleotide
uuguauucaaacccaaaug

SEQ ID NO: 779872 - RNA, 19 nt, Artificial Sequence
  Description of Artificial Sequence: Synthetic oligonucleotide
ucgugaaugacuguuaucc

SEQ ID NO: 779873 - RNA, 19 nt, Artificial Sequence
  Description of Artificial Sequence: Synthetic oligonucleotide
uaaacuugucuuuacaagu

SEQ ID NO: 779874 - RNA, 19 nt, Artificial Sequence
  Description of Artificial Sequence: Synthetic oligonucleotide
ugcauaguaaauuucacau

SEQ ID NO: 779875 - RNA, 19 nt, Artificial Sequence
  Description of Artificial Sequence: Synthetic oligonucleotide
aaaccaacuucccagaaau

SEQ ID NO: 779876 - RNA, 19 nt, Artificial Sequence
  Description of Artificial Sequence: Synthetic oligonucleotide
uacggauucacuuacauuu

SEQ ID NO: 779877 - RNA, 19 nt, Artificial Sequence
  Description of Artificial Sequence: Synthetic oligonucleotide
agggauuuaacugaagaac

SEQ ID NO: 779878 - RNA, 19 nt, Artificial Sequence
  Description of Artificial Sequence: Synthetic oligonucleotide
uuuuauacugagaaagauc

SEQ ID NO: 779879 - RNA, 19 nt, Artificial Sequence
  Description of Artificial Sequence: Synthetic oligonucleotide
caaugucuaaaagagaagg

SEQ ID NO: 779880 - RNA, 19 nt, Artificial Sequence
  Description of Artificial Sequence: Synthetic oligonucleotide
ugguuuuacuccaacaucu

SEQ ID NO: 779881 - RNA, 19 nt, Artificial Sequence
  Description of Artificial Sequence: Synthetic oligonucleotide
uguccucugauuuugaccu

SEQ ID NO: 779882 - RNA, 19 nt, Artificial Sequence
  Description of Artificial Sequence: Synthetic oligonucleotide
agaaucuuuggcuaauaag

SEQ ID NO: 779883 - RNA, 19 nt, Artificial Sequence
  Description of Artificial Sequence: Synthetic oligonucleotide
uaucaaaacagguuuggga

SEQ ID NO: 779884 - RNA, 19 nt, Artificial Sequence
  Description of Artificial Sequence: Synthetic oligonucleotide
aauaugaggaaaauucugu

SEQ ID NO: 779885 - RNA, 19 nt, Artificial Sequence
  Description of Artificial Sequence: Synthetic oligonucleotide
uauacugagaaagaucggc

SEQ ID NO: 779886 - RNA, 19 nt, Artificial Sequence
  Description of Artificial Sequence: Synthetic oligonucleotide
uguauguuugguuucuuug

SEQ ID NO: 779887 - RNA, 19 nt, Artificial Sequence
  Description of Artificial Sequence: Synthetic oligonucleotide
ucuuccuugauguaacccc

SEQ ID NO: 779888 - RNA, 19 nt, Artificial Sequence
  Description of Artificial Sequence: Synthetic oligonucleotide
augaggaaaauucuguaug

SEQ ID NO: 779889 - RNA, 19 nt, Artificial Sequence
  Description of Artificial Sequence: Synthetic oligonucleotide
auuccuuacaugugugccc

SEQ ID NO: 779890 - RNA, 19 nt, Artificial Sequence
  Description of Artificial Sequence: Synthetic oligonucleotide
uaauaugaucacuacugcc

SEQ ID NO: 779891 - RNA, 19 nt, Artificial Sequence
  Description of Artificial Sequence: Synthetic oligonucleotide
ucuauuacaguaacaucca
